United States Patent Application Publication US 2014/0004565 A1 - sequence listing, part 46

SEQ ID NO: 1071130 - RNA, 19 nt, Artificial Sequence
  Description of Artificial Sequence: Synthetic oligonucleotide
aaagcggaacauuuuaaga

SEQ ID NO: 1071131 - RNA, 19 nt, Artificial Sequence
  Description of Artificial Sequence: Synthetic oligonucleotide
acuuacuauucucuugagc

SEQ ID NO: 1071132 - RNA, 19 nt, Artificial Sequence
  Description of Artificial Sequence: Synthetic oligonucleotide
aagugaaucaguugagaca

SEQ ID NO: 1071133 - RNA, 19 nt, Artificial Sequence
  Description of Artificial Sequence: Synthetic oligonucleotide
agcauaaaugcccaugaag

SEQ ID NO: 1071134 - RNA, 19 nt, Artificial Sequence
  Description of Artificial Sequence: Synthetic oligonucleotide
auucgaaccagcugccucc

SEQ ID NO: 1071135 - RNA, 19 nt, Artificial Sequence
  Description of Artificial Sequence: Synthetic oligonucleotide
agagauuacuacuugauuu

SEQ ID NO: 1071136 - RNA, 19 nt, Artificial Sequence
  Description of Artificial Sequence: Synthetic oligonucleotide
agugaggugcauaacaccc

SEQ ID NO: 1071137 - RNA, 19 nt, Artificial Sequence
  Description of Artificial Sequence: Synthetic oligonucleotide
uuccgcaugacaaauucag

SEQ ID NO: 1071138 - RNA, 19 nt, Artificial Sequence
  Description of Artificial Sequence: Synthetic oligonucleotide
aaaaucauaugaugcuuga

SEQ ID NO: 1071139 - RNA, 19 nt, Artificial Sequence
  Description of Artificial Sequence: Synthetic oligonucleotide
uaugcuagcuucucuaagc

SEQ ID NO: 1071140 - RNA, 19 nt, Artificial Sequence
  Description of Artificial Sequence: Synthetic oligonucleotide
uucaaacuuacuauucucu

SEQ ID NO: 1071141 - RNA, 19 nt, Artificial Sequence
  Description of Artificial Sequence: Synthetic oligonucleotide
uaucagaucaaaauacuua

SEQ ID NO: 1071142 - RNA, 19 nt, Artificial Sequence
  Description of Artificial Sequence: Synthetic oligonucleotide
gaauacuuucucauggagg

SEQ ID NO: 1071143 - RNA, 19 nt, Artificial Sequence
  Description of Artificial Sequence: Synthetic oligonucleotide
aaacagauuguaccaaccu

SEQ ID NO: 1071144 - RNA, 19 nt, Artificial Sequence
  Description of Artificial Sequence: Synthetic oligonucleotide
gauguuaauuggcaguggc

SEQ ID NO: 1071145 - RNA, 19 nt, Artificial Sequence
  Description of Artificial Sequence: Synthetic oligonucleotide
uuugccuuuagcaaccggu

SEQ ID NO: 1071146 - RNA, 19 nt, Artificial Sequence
  Description of Artificial Sequence: Synthetic oligonucleotide
agcaauuucuccaaaccgc

SEQ ID NO: 1071147 - RNA, 19 nt, Artificial Sequence
  Description of Artificial Sequence: Synthetic oligonucleotide
ugguuuauaguucaggguu

SEQ ID NO: 1071148 - RNA, 19 nt, Artificial Sequence
  Description of Artificial Sequence: Synthetic oligonucleotide
aauagcuagcuucacuagu

SEQ ID NO: 1071149 - RNA, 19 nt, Artificial Sequence
  Description of Artificial Sequence: Synthetic oligonucleotide
ugaacuaaggugugguugc

SEQ ID NO: 1071150 - RNA, 19 nt, Artificial Sequence
  Description of Artificial Sequence: Synthetic oligonucleotide
uggacuaccacuugaauau

SEQ ID NO: 1071151 - RNA, 19 nt, Artificial Sequence
  Description of Artificial Sequence: Synthetic oligonucleotide
aaagaagggauucgcugag

SEQ ID NO: 1071152 - RNA, 19 nt, Artificial Sequence
  Description of Artificial Sequence: Synthetic oligonucleotide
ucuaagucagaagaucggg

SEQ ID NO: 1071153 - RNA, 19 nt, Artificial Sequence
  Description of Artificial Sequence: Synthetic oligonucleotide
guaggauaauucuaccacg

SEQ ID NO: 1071154 - RNA, 19 nt, Artificial Sequence
  Description of Artificial Sequence: Synthetic oligonucleotide
auuaagacgauugcccucg

SEQ ID NO: 1071155 - RNA, 19 nt, Artificial Sequence
  Description of Artificial Sequence: Synthetic oligonucleotide
uaagugaaucaguugagac

SEQ ID NO: 1071156 - RNA, 19 nt, Artificial Sequence
  Description of Artificial Sequence: Synthetic oligonucleotide
uaggauaauucuaccacgc

SEQ ID NO: 1071157 - RNA, 19 nt, Artificial Sequence
  Description of Artificial Sequence: Synthetic oligonucleotide
uaagucagaagaucgggug

SEQ ID NO: 1071158 - RNA, 19 nt, Artificial Sequence
  Description of Artificial Sequence: Synthetic oligonucleotide
uaaggaucagugauucuag

SEQ ID NO: 1071159 - RNA, 19 nt, Artificial Sequence
  Description of Artificial Sequence: Synthetic oligonucleotide
aaugaccacagaauuuugg

SEQ ID NO: 1071160 - RNA, 19 nt, Artificial Sequence
  Description of Artificial Sequence: Synthetic oligonucleotide
aaggauagcucuuuccagu

SEQ ID NO: 1071161 - RNA, 19 nt, Artificial Sequence
  Description of Artificial Sequence: Synthetic oligonucleotide
agguguuucagauuucaag

SEQ ID NO: 1071162 - RNA, 19 nt, Artificial Sequence
  Description of Artificial Sequence: Synthetic oligonucleotide
agugaguucaaacuuacua

SEQ ID NO: 1071163 - RNA, 19 nt, Artificial Sequence
  Description of Artificial Sequence: Synthetic oligonucleotide
auacuuaaggaucagugau

SEQ ID NO: 1071164 - RNA, 19 nt, Artificial Sequence
  Description of Artificial Sequence: Synthetic oligonucleotide
ucaguacucaguaucagau

SEQ ID NO: 1071165 - RNA, 19 nt, Artificial Sequence
  Description of Artificial Sequence: Synthetic oligonucleotide
agaaugugaacuaaggugu

SEQ ID NO: 1071166 - RNA, 19 nt, Artificial Sequence
  Description of Artificial Sequence: Synthetic oligonucleotide
uaccugacgauuuucaccu

SEQ ID NO: 1071167 - RNA, 19 nt, Artificial Sequence
  Description of Artificial Sequence: Synthetic oligonucleotide
aucagaucaaaauacuuaa

SEQ ID NO: 1071168 - RNA, 19 nt, Artificial Sequence
  Description of Artificial Sequence: Synthetic oligonucleotide
aagacgauugcccucguaa

SEQ ID NO: 1071169 - RNA, 19 nt, Artificial Sequence
  Description of Artificial Sequence: Synthetic oligonucleotide
gcauaaaugcccaugaagg

SEQ ID NO: 1071170 - RNA, 19 nt, Artificial Sequence
  Description of Artificial Sequence: Synthetic oligonucleotide
caauauugguucuuguuug

SEQ ID NO: 1071171 - RNA, 19 nt, Artificial Sequence
  Description of Artificial Sequence: Synthetic oligonucleotide
auggagguaugcuagcuuc

SEQ ID NO: 1071172 - RNA, 19 nt, Artificial Sequence
  Description of Artificial Sequence: Synthetic oligonucleotide
uaaccugacaaauucugga

SEQ ID NO: 1071173 - RNA, 19 nt, Artificial Sequence
  Description of Artificial Sequence: Synthetic oligonucleotide
gagaauuaagacgauugcc

SEQ ID NO: 1071174 - RNA, 19 nt, Artificial Sequence
  Description of Artificial Sequence: Synthetic oligonucleotide
uuuuccgcaugacaaauuc

SEQ ID NO: 1071175 - RNA, 19 nt, Artificial Sequence
  Description of Artificial Sequence: Synthetic oligonucleotide
aauauugguucuuguuugu

SEQ ID NO: 1071176 - RNA, 19 nt, Artificial Sequence
  Description of Artificial Sequence: Synthetic oligonucleotide
uuaucagacuggaauaaaa

SEQ ID NO: 1071177 - RNA, 19 nt, Artificial Sequence
  Description of Artificial Sequence: Synthetic oligonucleotide
ugguaccauagcaauauug

SEQ ID NO: 1071178 - RNA, 19 nt, Artificial Sequence
  Description of Artificial Sequence: Synthetic oligonucleotide
ugcauaacacccugaaccc

SEQ ID NO: 1071179 - RNA, 19 nt, Artificial Sequence
  Description of Artificial Sequence: Synthetic oligonucleotide
ggugguuuauaguucaggg

SEQ ID NO: 1071180 - RNA, 19 nt, Artificial Sequence
  Description of Artificial Sequence: Synthetic oligonucleotide
acaaggauagcucuuucca

SEQ ID NO: 1071181 - RNA, 19 nt, Artificial Sequence
  Description of Artificial Sequence: Synthetic oligonucleotide
aguucaaacuuacuauucu

SEQ ID NO: 1071182 - RNA, 19 nt, Artificial Sequence
  Description of Artificial Sequence: Synthetic oligonucleotide
cuaaccugacaaauucugg

SEQ ID NO: 1071183 - RNA, 19 nt, Artificial Sequence
  Description of Artificial Sequence: Synthetic oligonucleotide
ugcuaaauuccacagguuu

SEQ ID NO: 1071184 - RNA, 19 nt, Artificial Sequence
  Description of Artificial Sequence: Synthetic oligonucleotide
uuuacuucgacaguguguu

SEQ ID NO: 1071185 - RNA, 19 nt, Artificial Sequence
  Description of Artificial Sequence: Synthetic oligonucleotide
ugaguaaagcggaacauuu

SEQ ID NO: 1071186 - RNA, 19 nt, Artificial Sequence
  Description of Artificial Sequence: Synthetic oligonucleotide
uuaaggaucagugauucua

SEQ ID NO: 1071187 - RNA, 19 nt, Artificial Sequence
  Description of Artificial Sequence: Synthetic oligonucleotide
uucauuacucuuucgucca

SEQ ID NO: 1071188 - RNA, 19 nt, Artificial Sequence
  Description of Artificial Sequence: Synthetic oligonucleotide
acaagcagaguccaccaag

SEQ ID NO: 1071189 - RNA, 19 nt, Artificial Sequence
  Description of Artificial Sequence: Synthetic oligonucleotide
uacgugcuaaauuccacag

SEQ ID NO: 1071190 - RNA, 19 nt, Artificial Sequence
  Description of Artificial Sequence: Synthetic oligonucleotide
cugcuuaaaccguaauugg

SEQ ID NO: 1071191 - RNA, 19 nt, Artificial Sequence
  Description of Artificial Sequence: Synthetic oligonucleotide
aggagcaauuucuccaaac

SEQ ID NO: 1071192 - RNA, 19 nt, Artificial Sequence
  Description of Artificial Sequence: Synthetic oligonucleotide
uacuucgauguuaauuggc

SEQ ID NO: 1071193 - RNA, 19 nt, Artificial Sequence
  Description of Artificial Sequence: Synthetic oligonucleotide
agaccucuuggcuuuugcc

SEQ ID NO: 1071194 - RNA, 19 nt, Artificial Sequence
  Description of Artificial Sequence: Synthetic oligonucleotide
gauuguaccaaccuccucu

SEQ ID NO: 1071195 - RNA, 19 nt, Artificial Sequence
  Description of Artificial Sequence: Synthetic oligonucleotide
acuucgacaguguguuacc

SEQ ID NO: 1071196 - RNA, 19 nt, Artificial Sequence
  Description of Artificial Sequence: Synthetic oligonucleotide
ugcuuuuaugagcauaaau

SEQ ID NO: 1071197 - RNA, 19 nt, Artificial Sequence
  Description of Artificial Sequence: Synthetic oligonucleotide
aagcguaaggcggagcagg

SEQ ID NO: 1071198 - RNA, 19 nt, Artificial Sequence
  Description of Artificial Sequence: Synthetic oligonucleotide
gaauagcuagcuucacuag

SEQ ID NO: 1071199 - RNA, 19 nt, Artificial Sequence
  Description of Artificial Sequence: Synthetic oligonucleotide
gacaaggauagcucuuucc

SEQ ID NO: 1071200 - RNA, 19 nt, Artificial Sequence
  Description of Artificial Sequence: Synthetic oligonucleotide
uugaccucauauccuuacg

SEQ ID NO: 1071201 - RNA, 19 nt, Artificial Sequence
  Description of Artificial Sequence: Synthetic oligonucleotide
ucuuuacuucgacagugug

SEQ ID NO: 1071202 - RNA, 19 nt, Artificial Sequence
  Description of Artificial Sequence: Synthetic oligonucleotide
accuauuauauaaauuaag

SEQ ID NO: 1071203 - RNA, 19 nt, Artificial Sequence
  Description of Artificial Sequence: Synthetic oligonucleotide
ucgggugugaggcaaaauc

SEQ ID NO: 1071204 - RNA, 19 nt, Artificial Sequence
  Description of Artificial Sequence: Synthetic oligonucleotide
aggauaauucuaccacgcg

SEQ ID NO: 1071205 - RNA, 19 nt, Artificial Sequence
  Description of Artificial Sequence: Synthetic oligonucleotide
acucuuucguccaggaagc

SEQ ID NO: 1071206 - RNA, 19 nt, Artificial Sequence
  Description of Artificial Sequence: Synthetic oligonucleotide
ucguccaggaagcguaagg

SEQ ID NO: 1071207 - RNA, 19 nt, Artificial Sequence
  Description of Artificial Sequence: Synthetic oligonucleotide
acuaccacuugaauauccc

SEQ ID NO: 1071208 - RNA, 19 nt, Artificial Sequence
  Description of Artificial Sequence: Synthetic oligonucleotide
acuuagagcaacauugaug

SEQ ID NO: 1071209 - RNA, 19 nt, Artificial Sequence
  Description of Artificial Sequence: Synthetic oligonucleotide
aguugagacaaggauagcu

SEQ ID NO: 1071210 - RNA, 19 nt, Artificial Sequence
  Description of Artificial Sequence: Synthetic oligonucleotide
gagcuaaccugacaaauuc

SEQ ID NO: 1071211 - RNA, 19 nt, Artificial Sequence
  Description of Artificial Sequence: Synthetic oligonucleotide
uucccaguaggauaauucu

SEQ ID NO: 1071212 - RNA, 19 nt, Artificial Sequence
  Description of Artificial Sequence: Synthetic oligonucleotide
uaaaccguaauugggcuac

SEQ ID NO: 1071213 - RNA, 19 nt, Artificial Sequence
  Description of Artificial Sequence: Synthetic oligonucleotide
uauccuuacgugcuaaauu

SEQ ID NO: 1071214 - RNA, 19 nt, Artificial Sequence
  Description of Artificial Sequence: Synthetic oligonucleotide
auucccaguaggauaauuc

SEQ ID NO: 1071215 - RNA, 19 nt, Artificial Sequence
  Description of Artificial Sequence: Synthetic oligonucleotide
uguuacuucgauguuaauu

SEQ ID NO: 1071216 - RNA, 19 nt, Artificial Sequence
  Description of Artificial Sequence: Synthetic oligonucleotide
agaaucucuauaucaaaua

SEQ ID NO: 1071217 - RNA, 19 nt, Artificial Sequence
  Description of Artificial Sequence: Synthetic oligonucleotide
uuucaccuauuauauaaau

SEQ ID NO: 1071218 - RNA, 19 nt, Artificial Sequence
  Description of Artificial Sequence: Synthetic oligonucleotide
agucggaaaguauucagaa

SEQ ID NO: 1071219 - RNA, 19 nt, Artificial Sequence
  Description of Artificial Sequence: Synthetic oligonucleotide
ucgauguuaauuggcagug

SEQ ID NO: 1071220 - RNA, 19 nt, Artificial Sequence
  Description of Artificial Sequence: Synthetic oligonucleotide
acuaaggugugguugcuga

SEQ ID NO: 1071221 - RNA, 19 nt, Artificial Sequence
  Description of Artificial Sequence: Synthetic oligonucleotide
uucaccuauuauauaaauu

SEQ ID NO: 1071222 - RNA, 19 nt, Artificial Sequence
  Description of Artificial Sequence: Synthetic oligonucleotide
uguaauugguuggaagaca

SEQ ID NO: 1071223 - RNA, 19 nt, Artificial Sequence
  Description of Artificial Sequence: Synthetic oligonucleotide
uaacucacuuucccucugg

SEQ ID NO: 1071224 - RNA, 19 nt, Artificial Sequence
  Description of Artificial Sequence: Synthetic oligonucleotide
ucuuaacuccauagguggc

SEQ ID NO: 1071225 - RNA, 19 nt, Artificial Sequence
  Description of Artificial Sequence: Synthetic oligonucleotide
cacucaauggcaacuguac

SEQ ID NO: 1071226 - RNA, 19 nt, Artificial Sequence
  Description of Artificial Sequence: Synthetic oligonucleotide
uuacaagcagaguccacca

SEQ ID NO: 1071227 - RNA, 19 nt, Artificial Sequence
  Description of Artificial Sequence: Synthetic oligonucleotide
cccaauucgaaccagcugc

SEQ ID NO: 1071228 - RNA, 19 nt, Artificial Sequence
  Description of Artificial Sequence: Synthetic oligonucleotide
ugcauggacuaccacuuga

SEQ ID NO: 1071229 - RNA, 19 nt, Artificial Sequence
  Description of Artificial Sequence: Synthetic oligonucleotide
acuaguggaggcugcaugu

SEQ ID NO: 1071230 - RNA, 19 nt, Artificial Sequence
  Description of Artificial Sequence: Synthetic oligonucleotide
gagaucuaucaguacucag

SEQ ID NO: 1071231 - RNA, 19 nt, Artificial Sequence
  Description of Artificial Sequence: Synthetic oligonucleotide
ucaaacuuacuauucucuu

SEQ ID NO: 1071232 - RNA, 19 nt, Artificial Sequence
  Description of Artificial Sequence: Synthetic oligonucleotide
uagguguagagugugcacc

SEQ ID NO: 1071233 - RNA, 19 nt, Artificial Sequence
  Description of Artificial Sequence: Synthetic oligonucleotide
aaauucagagagauuacua

SEQ ID NO: 1071234 - RNA, 19 nt, Artificial Sequence
  Description of Artificial Sequence: Synthetic oligonucleotide
ucgcugaggagcaauuucu

SEQ ID NO: 1071235 - RNA, 19 nt, Artificial Sequence
  Description of Artificial Sequence: Synthetic oligonucleotide
cacaugaucuacaugagua

SEQ ID NO: 1071236 - RNA, 19 nt, Artificial Sequence
  Description of Artificial Sequence: Synthetic oligonucleotide
augaaauucacaugaucua

SEQ ID NO: 1071237 - RNA, 19 nt, Artificial Sequence
  Description of Artificial Sequence: Synthetic oligonucleotide
gaucuaucaguacucagua

SEQ ID NO: 1071238 - RNA, 19 nt, Artificial Sequence
  Description of Artificial Sequence: Synthetic oligonucleotide
uccuuacgugcuaaauucc

SEQ ID NO: 1071239 - RNA, 19 nt, Artificial Sequence
  Description of Artificial Sequence: Synthetic oligonucleotide
accguaauugggcuacauc

SEQ ID NO: 1071240 - RNA, 19 nt, Artificial Sequence
  Description of Artificial Sequence: Synthetic oligonucleotide
gagauuacuacuugauuua

SEQ ID NO: 1071241 - RNA, 19 nt, Artificial Sequence
  Description of Artificial Sequence: Synthetic oligonucleotide
caaggauagcucuuuccag

SEQ ID NO: 1071242 - RNA, 19 nt, Artificial Sequence
  Description of Artificial Sequence: Synthetic oligonucleotide
agaucuaucaguacucagu

SEQ ID NO: 1071243 - RNA, 19 nt, Artificial Sequence
  Description of Artificial Sequence: Synthetic oligonucleotide
accuaagauggucucaagu

SEQ ID NO: 1071244 - RNA, 19 nt, Artificial Sequence
  Description of Artificial Sequence: Synthetic oligonucleotide
cagaagaucgggugugagg

SEQ ID NO: 1071245 - RNA, 19 nt, Artificial Sequence
  Description of Artificial Sequence: Synthetic oligonucleotide
accucuaagucagaagauc

SEQ ID NO: 1071246 - RNA, 19 nt, Artificial Sequence
  Description of Artificial Sequence: Synthetic oligonucleotide
aucaguacucaguaucaga

SEQ ID NO: 1071247 - RNA, 19 nt, Artificial Sequence
  Description of Artificial Sequence: Synthetic oligonucleotide
ucaagaguauacaguuccu

SEQ ID NO: 1071248 - RNA, 19 nt, Artificial Sequence
  Description of Artificial Sequence: Synthetic oligonucleotide
auggacuaccacuugaaua

SEQ ID NO: 1071249 - RNA, 19 nt, Artificial Sequence
  Description of Artificial Sequence: Synthetic oligonucleotide
gagugaggugcauaacacc

SEQ ID NO: 1071250 - RNA, 19 nt, Artificial Sequence
  Description of Artificial Sequence: Synthetic oligonucleotide
cuuacgugcuaaauuccac

SEQ ID NO: 1071251 - RNA, 19 nt, Artificial Sequence
  Description of Artificial Sequence: Synthetic oligonucleotide
aaaccgccucaugaaauuc

SEQ ID NO: 1071252 - RNA, 19 nt, Artificial Sequence
  Description of Artificial Sequence: Synthetic oligonucleotide
ccucuaagucagaagaucg

SEQ ID NO: 1071253 - RNA, 19 nt, Artificial Sequence
  Description of Artificial Sequence: Synthetic oligonucleotide
agcugaaccucuaagucag

SEQ ID NO: 1071254 - RNA, 19 nt, Artificial Sequence
  Description of Artificial Sequence: Synthetic oligonucleotide
aucugagaucuaucaguac

SEQ ID NO: 1071255 - RNA, 19 nt, Artificial Sequence
  Description of Artificial Sequence: Synthetic oligonucleotide
uacuucgacaguguguuac

SEQ ID NO: 1071256 - RNA, 19 nt, Artificial Sequence
  Description of Artificial Sequence: Synthetic oligonucleotide
agcggaacauuuuaagaau

SEQ ID NO: 1071257 - RNA, 19 nt, Artificial Sequence
  Description of Artificial Sequence: Synthetic oligonucleotide
ugguaccugacgauuuuca

SEQ ID NO: 1071258 - RNA, 19 nt, Artificial Sequence
  Description of Artificial Sequence: Synthetic oligonucleotide
agcgaguccguuucaguag

SEQ ID NO: 1071259 - RNA, 19 nt, Artificial Sequence
  Description of Artificial Sequence: Synthetic oligonucleotide
uucgcugaggagcaauuuc

SEQ ID NO: 1071260 - RNA, 19 nt, Artificial Sequence
  Description of Artificial Sequence: Synthetic oligonucleotide
uguugguguuacuucgaug

SEQ ID NO: 1071261 - RNA, 19 nt, Artificial Sequence
  Description of Artificial Sequence: Synthetic oligonucleotide
caccuauugcuuuuaugag

SEQ ID NO: 1071262 - RNA, 19 nt, Artificial Sequence
  Description of Artificial Sequence: Synthetic oligonucleotide
ucgggcuuugaccucauau

SEQ ID NO: 1071263 - RNA, 19 nt, Artificial Sequence
  Description of Artificial Sequence: Synthetic oligonucleotide
auagcuagcuucacuagug

SEQ ID NO: 1071264 - RNA, 19 nt, Artificial Sequence
  Description of Artificial Sequence: Synthetic oligonucleotide
gauaauucuaccacgcggu

SEQ ID NO: 1071265 - RNA, 19 nt, Artificial Sequence
  Description of Artificial Sequence: Synthetic oligonucleotide
acgugcuaaauuccacagg

SEQ ID NO: 1071266 - RNA, 19 nt, Artificial Sequence
  Description of Artificial Sequence: Synthetic oligonucleotide
uuauaguucaggguuccaa

SEQ ID NO: 1071267 - RNA, 19 nt, Artificial Sequence
  Description of Artificial Sequence: Synthetic oligonucleotide
ugagcuaaccugacaaauu

SEQ ID NO: 1071268 - RNA, 19 nt, Artificial Sequence
  Description of Artificial Sequence: Synthetic oligonucleotide
agcaauauugguucuuguu

SEQ ID NO: 1071269 - RNA, 19 nt, Artificial Sequence
  Description of Artificial Sequence: Synthetic oligonucleotide
cugaucugagaucuaucag

SEQ ID NO: 1071270 - RNA, 19 nt, Artificial Sequence
  Description of Artificial Sequence: Synthetic oligonucleotide
uacuauucucuugagcuaa

SEQ ID NO: 1071271 - RNA, 19 nt, Artificial Sequence
  Description of Artificial Sequence: Synthetic oligonucleotide
uuucaguaguggaagccau

SEQ ID NO: 1071272 - RNA, 19 nt, Artificial Sequence
  Description of Artificial Sequence: Synthetic oligonucleotide
caagcagaacccugguacc

SEQ ID NO: 1071273 - RNA, 19 nt, Artificial Sequence
  Description of Artificial Sequence: Synthetic oligonucleotide
ugcaccuauugcuuuuaug

SEQ ID NO: 1071274 - RNA, 19 nt, Artificial Sequence
  Description of Artificial Sequence: Synthetic oligonucleotide
guaugcuagcuucucuaag

SEQ ID NO: 1071275 - RNA, 19 nt, Artificial Sequence
  Description of Artificial Sequence: Synthetic oligonucleotide
uaucaguacucaguaucag

SEQ ID NO: 1071276 - RNA, 19 nt, Artificial Sequence
  Description of Artificial Sequence: Synthetic oligonucleotide
cauuuaucagacuggaaua

SEQ ID NO: 1071277 - RNA, 19 nt, Artificial Sequence
  Description of Artificial Sequence: Synthetic oligonucleotide
cuauagguguagagugugc

SEQ ID NO: 1071278 - RNA, 19 nt, Artificial Sequence
  Description of Artificial Sequence: Synthetic oligonucleotide
gacuaccacuugaauaucc

SEQ ID NO: 1071279 - RNA, 19 nt, Artificial Sequence
  Description of Artificial Sequence: Synthetic oligonucleotide
ucuggacacucaauggcaa

SEQ ID NO: 1071280 - RNA, 19 nt, Artificial Sequence
  Description of Artificial Sequence: Synthetic oligonucleotide
uggcuuuugccuuuagcaa

SEQ ID NO: 1071281 - RNA, 19 nt, Artificial Sequence
  Description of Artificial Sequence: Synthetic oligonucleotide
ugagaucuaucaguacuca

SEQ ID NO: 1071282 - RNA, 19 nt, Artificial Sequence
  Description of Artificial Sequence: Synthetic oligonucleotide
cauuagguccugugguacc

SEQ ID NO: 1071283 - RNA, 19 nt, Artificial Sequence
  Description of Artificial Sequence: Synthetic oligonucleotide
aacucacuuucccucugga

SEQ ID NO: 1071284 - RNA, 19 nt, Artificial Sequence
  Description of Artificial Sequence: Synthetic oligonucleotide
auuucuccaaaccgccuca

SEQ ID NO: 1071285 - RNA, 19 nt, Artificial Sequence
  Description of Artificial Sequence: Synthetic oligonucleotide
aguccaagcagaacccugg

SEQ ID NO: 1071286 - RNA, 19 nt, Artificial Sequence
  Description of Artificial Sequence: Synthetic oligonucleotide
ucuaccacgcgguacccaa

SEQ ID NO: 1071287 - RNA, 19 nt, Artificial Sequence
  Description of Artificial Sequence: Synthetic oligonucleotide
gaugcucacccuauaggug

SEQ ID NO: 1071288 - RNA, 19 nt, Artificial Sequence
  Description of Artificial Sequence: Synthetic oligonucleotide
gcuagcuucucuaagcgag

SEQ ID NO: 1071289 - RNA, 19 nt, Artificial Sequence
  Description of Artificial Sequence: Synthetic oligonucleotide
gcuucucuaagcgaguccg

SEQ ID NO: 1071290 - RNA, 19 nt, Artificial Sequence
  Description of Artificial Sequence: Synthetic oligonucleotide
guugagacaaggauagcuc

SEQ ID NO: 1071291 - RNA, 19 nt, Artificial Sequence
  Description of Artificial Sequence: Synthetic oligonucleotide
uuaaaccguaauugggcua

SEQ ID NO: 1071292 - RNA, 19 nt, Artificial Sequence
  Description of Artificial Sequence: Synthetic oligonucleotide
auaaaugcccaugaaggua

SEQ ID NO: 1071293 - RNA, 19 nt, Artificial Sequence
  Description of Artificial Sequence: Synthetic oligonucleotide
auugggcuacaucaucugu

SEQ ID NO: 1071294 - RNA, 19 nt, Artificial Sequence
  Description of Artificial Sequence: Synthetic oligonucleotide
ugcccucguaaucuggaca

SEQ ID NO: 1071295 - RNA, 19 nt, Artificial Sequence
  Description of Artificial Sequence: Synthetic oligonucleotide
ccaugaagguacuucagag

SEQ ID NO: 1071296 - RNA, 19 nt, Artificial Sequence
  Description of Artificial Sequence: Synthetic oligonucleotide
uccaaaccgccucaugaaa

SEQ ID NO: 1071297 - RNA, 19 nt, Artificial Sequence
  Description of Artificial Sequence: Synthetic oligonucleotide
cucuaagcgaguccguuuc

SEQ ID NO: 1071298 - RNA, 19 nt, Artificial Sequence
  Description of Artificial Sequence: Synthetic oligonucleotide
uccgcaugacaaauucaga

SEQ ID NO: 1071299 - RNA, 19 nt, Artificial Sequence
  Description of Artificial Sequence: Synthetic oligonucleotide
uaauucuaccacgcgguac

SEQ ID NO: 1071300 - RNA, 19 nt, Artificial Sequence
  Description of Artificial Sequence: Synthetic oligonucleotide
caugaagguacuucagaga

SEQ ID NO: 1071301 - RNA, 19 nt, Artificial Sequence
  Description of Artificial Sequence: Synthetic oligonucleotide
aggaccaaagguguuucag

SEQ ID NO: 1071302 - RNA, 19 nt, Artificial Sequence
  Description of Artificial Sequence: Synthetic oligonucleotide
acucagucggaaaguauuc

SEQ ID NO: 1071303 - RNA, 19 nt, Artificial Sequence
  Description of Artificial Sequence: Synthetic oligonucleotide
uucgacaguguguuacccu

SEQ ID NO: 1071304 - RNA, 19 nt, Artificial Sequence
  Description of Artificial Sequence: Synthetic oligonucleotide
ccgcaugacaaauucagag

SEQ ID NO: 1071305 - RNA, 19 nt, Artificial Sequence
  Description of Artificial Sequence: Synthetic oligonucleotide
aucuccaauuuuccgcaug

SEQ ID NO: 1071306 - RNA, 19 nt, Artificial Sequence
  Description of Artificial Sequence: Synthetic oligonucleotide
gacgauugcccucguaauc

SEQ ID NO: 1071307 - RNA, 19 nt, Artificial Sequence
  Description of Artificial Sequence: Synthetic oligonucleotide
acgauugcccucguaaucu

SEQ ID NO: 1071308 - RNA, 19 nt, Artificial Sequence
  Description of Artificial Sequence: Synthetic oligonucleotide
cuuguuugucaacugaaua

SEQ ID NO: 1071309 - RNA, 19 nt, Artificial Sequence
  Description of Artificial Sequence: Synthetic oligonucleotide
aucaguugagacaaggaua

SEQ ID NO: 1071310 - RNA, 19 nt, Artificial Sequence
  Description of Artificial Sequence: Synthetic oligonucleotide
gauugcccucguaaucugg

SEQ ID NO: 1071311 - RNA, 19 nt, Artificial Sequence
  Description of Artificial Sequence: Synthetic oligonucleotide
uccauagguggcuggccag

SEQ ID NO: 1071312 - RNA, 19 nt, Artificial Sequence
  Description of Artificial Sequence: Synthetic oligonucleotide
caguaggauaauucuacca

SEQ ID NO: 1071313 - RNA, 19 nt, Artificial Sequence
  Description of Artificial Sequence: Synthetic oligonucleotide
ugcuccggguacuuguuga

SEQ ID NO: 1071314 - RNA, 19 nt, Artificial Sequence
  Description of Artificial Sequence: Synthetic oligonucleotide
agagagauuacuacuugau

SEQ ID NO: 1071315 - RNA, 19 nt, Artificial Sequence
  Description of Artificial Sequence: Synthetic oligonucleotide
ucgacaguguguuacccuu

SEQ ID NO: 1071316 - RNA, 19 nt, Artificial Sequence
  Description of Artificial Sequence: Synthetic oligonucleotide
aggaucagugauucuaguu

SEQ ID NO: 1071317 - RNA, 19 nt, Artificial Sequence
  Description of Artificial Sequence: Synthetic oligonucleotide
ucuaagaacucgggcuuug

SEQ ID NO: 1071318 - RNA, 19 nt, Artificial Sequence
  Description of Artificial Sequence: Synthetic oligonucleotide
cccaguaggauaauucuac

SEQ ID NO: 1071319 - RNA, 19 nt, Artificial Sequence
  Description of Artificial Sequence: Synthetic oligonucleotide
uuaggaccaaagguguuuc

SEQ ID NO: 1071320 - RNA, 19 nt, Artificial Sequence
  Description of Artificial Sequence: Synthetic oligonucleotide
aacuaaggugugguugcug

SEQ ID NO: 1071321 - RNA, 19 nt, Artificial Sequence
  Description of Artificial Sequence: Synthetic oligonucleotide
acccaauucgaaccagcug

SEQ ID NO: 1071322 - RNA, 19 nt, Artificial Sequence
  Description of Artificial Sequence: Synthetic oligonucleotide
cuuucguccaggaagcgua

SEQ ID NO: 1071323 - RNA, 19 nt, Artificial Sequence
  Description of Artificial Sequence: Synthetic oligonucleotide
cuaaggugugguugcugag

SEQ ID NO: 1071324 - RNA, 19 nt, Artificial Sequence
  Description of Artificial Sequence: Synthetic oligonucleotide
agguaugcuagcuucucua

SEQ ID NO: 1071325 - RNA, 19 nt, Artificial Sequence
  Description of Artificial Sequence: Synthetic oligonucleotide
ccguaauugggcuacauca

SEQ ID NO: 1071326 - RNA, 19 nt, Artificial Sequence
  Description of Artificial Sequence: Synthetic oligonucleotide
accgguucaucaaaccauc

SEQ ID NO: 1071327 - RNA, 19 nt, Artificial Sequence
  Description of Artificial Sequence: Synthetic oligonucleotide
cacuugaauaucccugauc

SEQ ID NO: 1071328 - RNA, 19 nt, Artificial Sequence
  Description of Artificial Sequence: Synthetic oligonucleotide
aagaucgggugugaggcaa

SEQ ID NO: 1071329 - RNA, 19 nt, Artificial Sequence
  Description of Artificial Sequence: Synthetic oligonucleotide
uugccuuuagcaaccgguu

SEQ ID NO: 1071330 - RNA, 19 nt, Artificial Sequence
  Description of Artificial Sequence: Synthetic oligonucleotide
uccggguacuuguugaauu

SEQ ID NO: 1071331 - RNA, 19 nt, Artificial Sequence
  Description of Artificial Sequence: Synthetic oligonucleotide
aggugcauaacacccugaa

SEQ ID NO: 1071332 - RNA, 19 nt, Artificial Sequence
  Description of Artificial Sequence: Synthetic oligonucleotide
uuacucuuucguccaggaa

SEQ ID NO: 1071333 - RNA, 19 nt, Artificial Sequence
  Description of Artificial Sequence: Synthetic oligonucleotide
cuuaaaccguaauugggcu

SEQ ID NO: 1071334 - RNA, 19 nt, Artificial Sequence
  Description of Artificial Sequence: Synthetic oligonucleotide
gcuaaccugacaaauucug

SEQ ID NO: 1071335 - RNA, 19 nt, Artificial Sequence
  Description of Artificial Sequence: Synthetic oligonucleotide
gguaucugcauggacuacc

SEQ ID NO: 1071336 - RNA, 19 nt, Artificial Sequence
  Description of Artificial Sequence: Synthetic oligonucleotide
cuuucucauggagguaugc

SEQ ID NO: 1071337 - RNA, 19 nt, Artificial Sequence
  Description of Artificial Sequence: Synthetic oligonucleotide
auuguaccaaccuccucua

SEQ ID NO: 1071338 - RNA, 19 nt, Artificial Sequence
  Description of Artificial Sequence: Synthetic oligonucleotide
gaguauacaguuccuuagu

SEQ ID NO: 1071339 - RNA, 19 nt, Artificial Sequence
  Description of Artificial Sequence: Synthetic oligonucleotide
cuggcuaaggaugcucacc

SEQ ID NO: 1071340 - RNA, 19 nt, Artificial Sequence
  Description of Artificial Sequence: Synthetic oligonucleotide
caguaguggaagccauucc

SEQ ID NO: 1071341 - RNA, 19 nt, Artificial Sequence
  Description of Artificial Sequence: Synthetic oligonucleotide
acccuuggaggcaaagagg

SEQ ID NO: 1071342 - RNA, 19 nt, Artificial Sequence
  Description of Artificial Sequence: Synthetic oligonucleotide
cauuacaagcagaguccac

SEQ ID NO: 1071343 - RNA, 19 nt, Artificial Sequence
  Description of Artificial Sequence: Synthetic oligonucleotide
agacgauugcccucguaau

SEQ ID NO: 1071344 - RNA, 19 nt, Artificial Sequence
  Description of Artificial Sequence: Synthetic oligonucleotide
uuuauaguucaggguucca

SEQ ID NO: 1071345 - RNA, 19 nt, Artificial Sequence
  Description of Artificial Sequence: Synthetic oligonucleotide
caaccgguucaucaaacca

SEQ ID NO: 1071346 - RNA, 19 nt, Artificial Sequence
  Description of Artificial Sequence: Synthetic oligonucleotide
auucuaccacgcgguaccc

SEQ ID NO: 1071347 - RNA, 19 nt, Artificial Sequence
  Description of Artificial Sequence: Synthetic oligonucleotide
ugguguuacuucgauguua

SEQ ID NO: 1071348 - RNA, 19 nt, Artificial Sequence
  Description of Artificial Sequence: Synthetic oligonucleotide
gcgguacccaauucgaacc

SEQ ID NO: 1071349 - RNA, 19 nt, Artificial Sequence
  Description of Artificial Sequence: Synthetic oligonucleotide
auuagguccugugguaccu

SEQ ID NO: 1071350 - RNA, 19 nt, Artificial Sequence
  Description of Artificial Sequence: Synthetic oligonucleotide
ucauauccuuacgugcuaa

SEQ ID NO: 1071351 - RNA, 19 nt, Artificial Sequence
  Description of Artificial Sequence: Synthetic oligonucleotide
gauuacuacuugauuuaaa

SEQ ID NO: 1071352 - RNA, 19 nt, Artificial Sequence
  Description of Artificial Sequence: Synthetic oligonucleotide
aaccgccucaugaaauuca

SEQ ID NO: 1071353 - RNA, 19 nt, Artificial Sequence
  Description of Artificial Sequence: Synthetic oligonucleotide
cuaacucacuuucccucug

SEQ ID NO: 1071354 - RNA, 19 nt, Artificial Sequence
  Description of Artificial Sequence: Synthetic oligonucleotide
ggaagcguaaggcggagca

SEQ ID NO: 1071355 - RNA, 19 nt, Artificial Sequence
  Description of Artificial Sequence: Synthetic oligonucleotide
accgccucaugaaauucac

SEQ ID NO: 1071356 - RNA, 19 nt, Artificial Sequence
  Description of Artificial Sequence: Synthetic oligonucleotide
gaagcguaaggcggagcag

SEQ ID NO: 1071357 - RNA, 19 nt, Artificial Sequence
  Description of Artificial Sequence: Synthetic oligonucleotide
auauccuuacgugcuaaau

SEQ ID NO: 1071358 - RNA, 19 nt, Artificial Sequence
  Description of Artificial Sequence: Synthetic oligonucleotide
augaguaaagcggaacauu

SEQ ID NO: 1071359 - RNA, 19 nt, Artificial Sequence
  Description of Artificial Sequence: Synthetic oligonucleotide
auguuaauuggcaguggcu

SEQ ID NO: 1071360 - RNA, 19 nt, Artificial Sequence
  Description of Artificial Sequence: Synthetic oligonucleotide
agcguaaggcggagcaggc

SEQ ID NO: 1071361 - RNA, 19 nt, Artificial Sequence
  Description of Artificial Sequence: Synthetic oligonucleotide
cagucggaaaguauucaga

SEQ ID NO: 1071362 - RNA, 19 nt, Artificial Sequence
  Description of Artificial Sequence: Synthetic oligonucleotide
cuucgacaguguguuaccc

SEQ ID NO: 1071363 - RNA, 19 nt, Artificial Sequence
  Description of Artificial Sequence: Synthetic oligonucleotide
cuuuacuucgacagugugu

SEQ ID NO: 1071364 - RNA, 19 nt, Artificial Sequence
  Description of Artificial Sequence: Synthetic oligonucleotide
auaauucuaccacgcggua

SEQ ID NO: 1071365 - RNA, 19 nt, Artificial Sequence
  Description of Artificial Sequence: Synthetic oligonucleotide
gcauguuagcacaagcuac

SEQ ID NO: 1071366 - RNA, 19 nt, Artificial Sequence
  Description of Artificial Sequence: Synthetic oligonucleotide
gaguccaccaaggguccgg

SEQ ID NO: 1071367 - RNA, 19 nt, Artificial Sequence
  Description of Artificial Sequence: Synthetic oligonucleotide
uaaggaugcucacccuaua

SEQ ID NO: 1071368 - RNA, 19 nt, Artificial Sequence
  Description of Artificial Sequence: Synthetic oligonucleotide
uucaguaguggaagccauu

SEQ ID NO: 1071369 - RNA, 19 nt, Artificial Sequence
  Description of Artificial Sequence: Synthetic oligonucleotide
aucuaucaguacucaguau

SEQ ID NO: 1071370 - RNA, 19 nt, Artificial Sequence
  Description of Artificial Sequence: Synthetic oligonucleotide
cuggacacucaauggcaac

SEQ ID NO: 1071371 - RNA, 19 nt, Artificial Sequence
  Description of Artificial Sequence: Synthetic oligonucleotide
caugugggcuacagggcac

SEQ ID NO: 1071372 - RNA, 19 nt, Artificial Sequence
  Description of Artificial Sequence: Synthetic oligonucleotide
guacccaauucgaaccagc

SEQ ID NO: 1071373 - RNA, 19 nt, Artificial Sequence
  Description of Artificial Sequence: Synthetic oligonucleotide
aaagaccucuuggcuuuug

SEQ ID NO: 1071374 - RNA, 19 nt, Artificial Sequence
  Description of Artificial Sequence: Synthetic oligonucleotide
ccugaucugagaucuauca

SEQ ID NO: 1071375 - RNA, 19 nt, Artificial Sequence
  Description of Artificial Sequence: Synthetic oligonucleotide
uuucguccaggaagcguaa

SEQ ID NO: 1071376 - RNA, 19 nt, Artificial Sequence
  Description of Artificial Sequence: Synthetic oligonucleotide
cucguaaucuggacacuca

SEQ ID NO: 1071377 - RNA, 19 nt, Artificial Sequence
  Description of Artificial Sequence: Synthetic oligonucleotide
cuaagucagaagaucgggu

SEQ ID NO: 1071378 - RNA, 19 nt, Artificial Sequence
  Description of Artificial Sequence: Synthetic oligonucleotide
uaccaaccuccucuaaauu

SEQ ID NO: 1071379 - RNA, 19 nt, Artificial Sequence
  Description of Artificial Sequence: Synthetic oligonucleotide
gugguuuauaguucagggu

SEQ ID NO: 1071380 - RNA, 19 nt, Artificial Sequence
  Description of Artificial Sequence: Synthetic oligonucleotide
ccaguaggauaauucuacc

SEQ ID NO: 1071381 - RNA, 19 nt, Artificial Sequence
  Description of Artificial Sequence: Synthetic oligonucleotide
uaaggcggagcaggcaaga

SEQ ID NO: 1071382 - RNA, 19 nt, Artificial Sequence
  Description of Artificial Sequence: Synthetic oligonucleotide
accaaagguguuucagauu

SEQ ID NO: 1071383 - RNA, 19 nt, Artificial Sequence
  Description of Artificial Sequence: Synthetic oligonucleotide
gcaagagugaggugcauaa

SEQ ID NO: 1071384 - RNA, 19 nt, Artificial Sequence
  Description of Artificial Sequence: Synthetic oligonucleotide
ccuaagauggucucaagua

SEQ ID NO: 1071385 - RNA, 19 nt, Artificial Sequence
  Description of Artificial Sequence: Synthetic oligonucleotide
auugcccucguaaucugga

SEQ ID NO: 1071386 - RNA, 19 nt, Artificial Sequence
  Description of Artificial Sequence: Synthetic oligonucleotide
gcaaccgguucaucaaacc

SEQ ID NO: 1071387 - RNA, 19 nt, Artificial Sequence
  Description of Artificial Sequence: Synthetic oligonucleotide
gaagaucgggugugaggca

SEQ ID NO: 1071388 - RNA, 19 nt, Artificial Sequence
  Description of Artificial Sequence: Synthetic oligonucleotide
agcuaaccugacaaauucu

SEQ ID NO: 1071389 - RNA, 19 nt, Artificial Sequence
  Description of Artificial Sequence: Synthetic oligonucleotide
aucuuuacuucgacagugu

SEQ ID NO: 1071390 - RNA, 19 nt, Artificial Sequence
  Description of Artificial Sequence: Synthetic oligonucleotide
uugguguuacuucgauguu

SEQ ID NO: 1071391 - RNA, 19 nt, Artificial Sequence
  Description of Artificial Sequence: Synthetic oligonucleotide
uuaagacgauugcccucgu

SEQ ID NO: 1071392 - RNA, 19 nt, Artificial Sequence
  Description of Artificial Sequence: Synthetic oligonucleotide
guaccaaccuccucuaaau

SEQ ID NO: 1071393 - RNA, 19 nt, Artificial Sequence
  Description of Artificial Sequence: Synthetic oligonucleotide
ggaucagugauucuaguuu

SEQ ID NO: 1071394 - RNA, 19 nt, Artificial Sequence
  Description of Artificial Sequence: Synthetic oligonucleotide
ggaugcucacccuauaggu

SEQ ID NO: 1071395 - RNA, 19 nt, Artificial Sequence
  Description of Artificial Sequence: Synthetic oligonucleotide
ggugcauaacacccugaac

SEQ ID NO: 1071396 - RNA, 19 nt, Artificial Sequence
  Description of Artificial Sequence: Synthetic oligonucleotide
gcccucguaaucuggacac

SEQ ID NO: 1071397 - RNA, 19 nt, Artificial Sequence
  Description of Artificial Sequence: Synthetic oligonucleotide
cacgcgguacccaauucga

SEQ ID NO: 1071398 - RNA, 19 nt, Artificial Sequence
  Description of Artificial Sequence: Synthetic oligonucleotide
gcaauauugguucuuguuu

SEQ ID NO: 1071399 - RNA, 19 nt, Artificial Sequence
  Description of Artificial Sequence: Synthetic oligonucleotide
uaccacgcgguacccaauu

SEQ ID NO: 1071400 - RNA, 19 nt, Artificial Sequence
  Description of Artificial Sequence: Synthetic oligonucleotide
agggauucgcugaggagca

SEQ ID NO: 1071401 - RNA, 19 nt, Artificial Sequence
  Description of Artificial Sequence: Synthetic oligonucleotide
gguguuacuucgauguuaa

SEQ ID NO: 1071402 - RNA, 19 nt, Artificial Sequence
  Description of Artificial Sequence: Synthetic oligonucleotide
guaaggcggagcaggcaag

SEQ ID NO: 1071403 - RNA, 19 nt, Artificial Sequence
  Description of Artificial Sequence: Synthetic oligonucleotide
aaccguaauugggcuacau

SEQ ID NO: 1071404 - RNA, 19 nt, Artificial Sequence
  Description of Artificial Sequence: Synthetic oligonucleotide
ccacgcgguacccaauucg

SEQ ID NO: 1071405 - RNA, 19 nt, Artificial Sequence
  Description of Artificial Sequence: Synthetic oligonucleotide
ccuauagguguagagugug

SEQ ID NO: 1071406 - RNA, 19 nt, Artificial Sequence
  Description of Artificial Sequence: Synthetic oligonucleotide
caagagugaggugcauaac

SEQ ID NO: 1071407 - RNA, 19 nt, Artificial Sequence
  Description of Artificial Sequence: Synthetic oligonucleotide
ugugcaccuauugcuuuua

SEQ ID NO: 1071408 - RNA, 19 nt, Artificial Sequence
  Description of Artificial Sequence: Synthetic oligonucleotide
gguaugcuagcuucucuaa

SEQ ID NO: 1071409 - RNA, 19 nt, Artificial Sequence
  Description of Artificial Sequence: Synthetic oligonucleotide
gagguaugcuagcuucucu

SEQ ID NO: 1071410 - RNA, 19 nt, Artificial Sequence
  Description of Artificial Sequence: Synthetic oligonucleotide
cacagguuuacagaugccu

SEQ ID NO: 1071411 - RNA, 19 nt, Artificial Sequence
  Description of Artificial Sequence: Synthetic oligonucleotide
gcugagaugcugcauguua

SEQ ID NO: 1071412 - RNA, 19 nt, Artificial Sequence
  Description of Artificial Sequence: Synthetic oligonucleotide
aaaccguaauugggcuaca

SEQ ID NO: 1071413 - RNA, 19 nt, Artificial Sequence
  Description of Artificial Sequence: Synthetic oligonucleotide
agaaggugcuccggguacu

SEQ ID NO: 1071414 - RNA, 19 nt, Artificial Sequence
  Description of Artificial Sequence: Synthetic oligonucleotide
cucuuucguccaggaagcg

SEQ ID NO: 1071415 - RNA, 19 nt, Artificial Sequence
  Description of Artificial Sequence: Synthetic oligonucleotide
uucuaccacgcgguaccca

SEQ ID NO: 1071416 - RNA, 19 nt, Artificial Sequence
  Description of Artificial Sequence: Synthetic oligonucleotide
gguacccaauucgaaccag

SEQ ID NO: 1071417 - RNA, 19 nt, Artificial Sequence
  Description of Artificial Sequence: Synthetic oligonucleotide
ccuuacgugcuaaauucca

SEQ ID NO: 1071418 - RNA, 19 nt, Artificial Sequence
  Description of Artificial Sequence: Synthetic oligonucleotide
cuaaggaugcucacccuau

SEQ ID NO: 1071419 - RNA, 19 nt, Artificial Sequence
  Description of Artificial Sequence: Synthetic oligonucleotide
ugcucacccuauaggugua

SEQ ID NO: 1071420 - RNA, 19 nt, Artificial Sequence
  Description of Artificial Sequence: Synthetic oligonucleotide
cuaccacuugaauaucccu

SEQ ID NO: 1071421 - RNA, 19 nt, Artificial Sequence
  Description of Artificial Sequence: Synthetic oligonucleotide
uucgaaccagcugccuccu

SEQ ID NO: 1071422 - RNA, 19 nt, Artificial Sequence
  Description of Artificial Sequence: Synthetic oligonucleotide
gcauuagguccugugguac

SEQ ID NO: 1071423 - RNA, 19 nt, Artificial Sequence
  Description of Artificial Sequence: Synthetic oligonucleotide
ucacuaguggaggcugcau

SEQ ID NO: 1071424 - RNA, 19 nt, Artificial Sequence
  Description of Artificial Sequence: Synthetic oligonucleotide
uuacuucgacaguguguua

SEQ ID NO: 1071425 - RNA, 19 nt, Artificial Sequence
  Description of Artificial Sequence: Synthetic oligonucleotide
cguuucaguaguggaagcc

SEQ ID NO: 1071426 - RNA, 19 nt, Artificial Sequence
  Description of Artificial Sequence: Synthetic oligonucleotide
gugaaucaguugagacaag

SEQ ID NO: 1071427 - RNA, 19 nt, Artificial Sequence
  Description of Artificial Sequence: Synthetic oligonucleotide
gguccggcugucuucuuuc

SEQ ID NO: 1071428 - RNA, 19 nt, Artificial Sequence
  Description of Artificial Sequence: Synthetic oligonucleotide
auucgcugaggagcaauuu

SEQ ID NO: 1071429 - RNA, 19 nt, Artificial Sequence
  Description of Artificial Sequence: Synthetic oligonucleotide
gugcuccggguacuuguug

SEQ ID NO: 1071430 - RNA, 19 nt, Artificial Sequence
  Description of Artificial Sequence: Synthetic oligonucleotide
caucaagcugaaccucuaa

SEQ ID NO: 1071431 - RNA, 19 nt, Artificial Sequence
  Description of Artificial Sequence: Synthetic oligonucleotide
ccccaaacagauuguacca

SEQ ID NO: 1071432 - RNA, 19 nt, Artificial Sequence
  Description of Artificial Sequence: Synthetic oligonucleotide
ccggguacuuguugaauuc

SEQ ID NO: 1071433 - RNA, 19 nt, Artificial Sequence
  Description of Artificial Sequence: Synthetic oligonucleotide
gugguaccugacgauuuuc

SEQ ID NO: 1071434 - RNA, 19 nt, Artificial Sequence
  Description of Artificial Sequence: Synthetic oligonucleotide
cucauauccuuacgugcua

SEQ ID NO: 1071435 - RNA, 19 nt, Artificial Sequence
  Description of Artificial Sequence: Synthetic oligonucleotide
caauuucuccaaaccgccu

SEQ ID NO: 1071436 - RNA, 19 nt, Artificial Sequence
  Description of Artificial Sequence: Synthetic oligonucleotide
cuaagaacucgggcuuuga

SEQ ID NO: 1071437 - RNA, 19 nt, Artificial Sequence
  Description of Artificial Sequence: Synthetic oligonucleotide
cacccuauagguguagagu

SEQ ID NO: 1071438 - RNA, 19 nt, Artificial Sequence
  Description of Artificial Sequence: Synthetic oligonucleotide
ccguuucaguaguggaagc

SEQ ID NO: 1071439 - RNA, 19 nt, Artificial Sequence
  Description of Artificial Sequence: Synthetic oligonucleotide
cgcgguacccaauucgaac

SEQ ID NO: 1071440 - RNA, 19 nt, Artificial Sequence
  Description of Artificial Sequence: Synthetic oligonucleotide
acuuaggaccaaagguguu

SEQ ID NO: 1071441 - RNA, 19 nt, Artificial Sequence
  Description of Artificial Sequence: Synthetic oligonucleotide
cuuaggaccaaagguguuu

SEQ ID NO: 1071442 - RNA, 19 nt, Artificial Sequence
  Description of Artificial Sequence: Synthetic oligonucleotide
gucacauuacaagcagagu

SEQ ID NO: 1071443 - RNA, 19 nt, Artificial Sequence
  Description of Artificial Sequence: Synthetic oligonucleotide
caaaccgccucaugaaauu

SEQ ID NO: 1071444 - RNA, 19 nt, Artificial Sequence
  Description of Artificial Sequence: Synthetic oligonucleotide
gaguaaagcggaacauuuu

SEQ ID NO: 1071445 - RNA, 19 nt, Artificial Sequence
  Description of Artificial Sequence: Synthetic oligonucleotide
ccucguaaucuggacacuc

SEQ ID NO: 1071446 - RNA, 19 nt, Artificial Sequence
  Description of Artificial Sequence: Synthetic oligonucleotide
ggugugaggcaaaaucaua

SEQ ID NO: 1071447 - RNA, 19 nt, Artificial Sequence
  Description of Artificial Sequence: Synthetic oligonucleotide
cucacccuauagguguaga

SEQ ID NO: 1071448 - RNA, 19 nt, Artificial Sequence
  Description of Artificial Sequence: Synthetic oligonucleotide
caagaguauacaguuccuu

SEQ ID NO: 1071449 - RNA, 19 nt, Artificial Sequence
  Description of Artificial Sequence: Synthetic oligonucleotide
cuauccccacauccccuga

SEQ ID NO: 1071450 - RNA, 19 nt, Artificial Sequence
  Description of Artificial Sequence: Synthetic oligonucleotide
guaucagauuuuggaacau

SEQ ID NO: 1071451 - RNA, 19 nt, Artificial Sequence
  Description of Artificial Sequence: Synthetic oligonucleotide
cgauguuaauuggcagugg

SEQ ID NO: 1071452 - RNA, 19 nt, Artificial Sequence
  Description of Artificial Sequence: Synthetic oligonucleotide
cccugaucugagaucuauc

SEQ ID NO: 1071453 - RNA, 19 nt, Artificial Sequence
  Description of Artificial Sequence: Synthetic oligonucleotide
aucgggugugaggcaaaau

SEQ ID NO: 1071454 - RNA, 19 nt, Artificial Sequence
  Description of Artificial Sequence: Synthetic oligonucleotide
cagaugccucuugcugaag

SEQ ID NO: 1071455 - RNA, 19 nt, Artificial Sequence
  Description of Artificial Sequence: Synthetic oligonucleotide
guguuacccuuggaggcaa

SEQ ID NO: 1071456 - RNA, 19 nt, Artificial Sequence
  Description of Artificial Sequence: Synthetic oligonucleotide
cauggagguaugcuagcuu

SEQ ID NO: 1071457 - RNA, 19 nt, Artificial Sequence
  Description of Artificial Sequence: Synthetic oligonucleotide
ggauagcucuuuccagugu

SEQ ID NO: 1071458 - RNA, 19 nt, Artificial Sequence
  Description of Artificial Sequence: Synthetic oligonucleotide
ccugguaccauagcaauau

SEQ ID NO: 1071459 - RNA, 19 nt, Artificial Sequence
  Description of Artificial Sequence: Synthetic oligonucleotide
accugacgauuuucaccua

SEQ ID NO: 1071460 - RNA, 19 nt, Artificial Sequence
  Description of Artificial Sequence: Synthetic oligonucleotide
ggacuaccacuugaauauc

SEQ ID NO: 1071461 - RNA, 19 nt, Artificial Sequence
  Description of Artificial Sequence: Synthetic oligonucleotide
ugacucccaccugcuuaaa

SEQ ID NO: 1071462 - RNA, 19 nt, Artificial Sequence
  Description of Artificial Sequence: Synthetic oligonucleotide
agaucgggugugaggcaaa

SEQ ID NO: 1071463 - RNA, 19 nt, Artificial Sequence
  Description of Artificial Sequence: Synthetic oligonucleotide
gcucacccuauagguguag

SEQ ID NO: 1071464 - RNA, 19 nt, Artificial Sequence
  Description of Artificial Sequence: Synthetic oligonucleotide
acgcgguacccaauucgaa

SEQ ID NO: 1071465 - RNA, 19 nt, Artificial Sequence
  Description of Artificial Sequence: Synthetic oligonucleotide
cuguguugggugguuuaua

SEQ ID NO: 1071466 - RNA, 19 nt, Artificial Sequence
  Description of Artificial Sequence: Synthetic oligonucleotide
gcgaguccguuucaguagu

SEQ ID NO: 1071467 - RNA, 19 nt, Artificial Sequence
  Description of Artificial Sequence: Synthetic oligonucleotide
gccaccuaagauggucuca

SEQ ID NO: 1071468 - RNA, 19 nt, Artificial Sequence
  Description of Artificial Sequence: Synthetic oligonucleotide
ccaaaccgccucaugaaau

SEQ ID NO: 1071469 - RNA, 19 nt, Artificial Sequence
  Description of Artificial Sequence: Synthetic oligonucleotide
cuguaccaucaagaguaua

SEQ ID NO: 1071470 - RNA, 19 nt, Artificial Sequence
  Description of Artificial Sequence: Synthetic oligonucleotide
cccaaagaagggauucgcu

SEQ ID NO: 1071471 - RNA, 19 nt, Artificial Sequence
  Description of Artificial Sequence: Synthetic oligonucleotide
gggugugaggcaaaaucau

SEQ ID NO: 1071472 - RNA, 19 nt, Artificial Sequence
  Description of Artificial Sequence: Synthetic oligonucleotide
guccggcugucuucuuucu

SEQ ID NO: 1071473 - RNA, 19 nt, Artificial Sequence
  Description of Artificial Sequence: Synthetic oligonucleotide
cccugaucugucugucaca

SEQ ID NO: 1071474 - RNA, 19 nt, Artificial Sequence
  Description of Artificial Sequence: Synthetic oligonucleotide
gugcaccuauugcuuuuau

SEQ ID NO: 1071475 - RNA, 19 nt, Artificial Sequence
  Description of Artificial Sequence: Synthetic oligonucleotide
guguuacuucgauguuaau

SEQ ID NO: 1071476 - RNA, 19 nt, Artificial Sequence
  Description of Artificial Sequence: Synthetic oligonucleotide
ccugacgauuuucaccuau

SEQ ID NO: 1071477 - RNA, 19 nt, Artificial Sequence
  Description of Artificial Sequence: Synthetic oligonucleotide
gggccaccuaagauggucu

SEQ ID NO: 1071478 - RNA, 19 nt, Artificial Sequence
  Description of Artificial Sequence: Synthetic oligonucleotide
cugguaccauagcaauauu

SEQ ID NO: 1071479 - RNA, 19 nt, Artificial Sequence
  Description of Artificial Sequence: Synthetic oligonucleotide
cgguacccaauucgaacca

SEQ ID NO: 1071480 - RNA, 19 nt, Artificial Sequence
  Description of Artificial Sequence: Synthetic oligonucleotide
gcguaaggcggagcaggca

SEQ ID NO: 1071481 - RNA, 19 nt, Artificial Sequence
  Description of Artificial Sequence: Synthetic oligonucleotide
cuaccacgcgguacccaau

SEQ ID NO: 1071482 - RNA, 19 nt, Artificial Sequence
  Description of Artificial Sequence: Synthetic oligonucleotide
gguggcuggccagucucua

SEQ ID NO: 1071483 - RNA, 19 nt, Artificial Sequence
  Description of Artificial Sequence: Synthetic oligonucleotide
cuccggguacuuguugaau

SEQ ID NO: 1071484 - RNA, 19 nt, Artificial Sequence
  Description of Artificial Sequence: Synthetic oligonucleotide
aggcugcaugugggcuaca

SEQ ID NO: 1071485 - RNA, 19 nt, Artificial Sequence
  Description of Artificial Sequence: Synthetic oligonucleotide
ggugcuccggguacuuguu

SEQ ID NO: 1071486 - RNA, 19 nt, Artificial Sequence
  Description of Artificial Sequence: Synthetic oligonucleotide
uuaucuauuacauuugagg

SEQ ID NO: 1071487 - RNA, 19 nt, Artificial Sequence
  Description of Artificial Sequence: Synthetic oligonucleotide
ucagauuauaauaacgucg

SEQ ID NO: 1071488 - RNA, 19 nt, Artificial Sequence
  Description of Artificial Sequence: Synthetic oligonucleotide
uaucuauuacauuugaggg

SEQ ID NO: 1071489 - RNA, 19 nt, Artificial Sequence
  Description of Artificial Sequence: Synthetic oligonucleotide
ugcuaauuaagucauaggc

SEQ ID NO: 1071490 - RNA, 19 nt, Artificial Sequence
  Description of Artificial Sequence: Synthetic oligonucleotide
aguagauuccuuuaggcac

SEQ ID NO: 1071491 - RNA, 19 nt, Artificial Sequence
  Description of Artificial Sequence: Synthetic oligonucleotide
ucuauuauggcauuaagaa

SEQ ID NO: 1071492 - RNA, 19 nt, Artificial Sequence
  Description of Artificial Sequence: Synthetic oligonucleotide
gauacaaccgaguagauuc

SEQ ID NO: 1071493 - RNA, 19 nt, Artificial Sequence
  Description of Artificial Sequence: Synthetic oligonucleotide
ucgacuauuaauaaagaug

SEQ ID NO: 1071494 - RNA, 19 nt, Artificial Sequence
  Description of Artificial Sequence: Synthetic oligonucleotide
aauaaugagacccauuaaa

SEQ ID NO: 1071495 - RNA, 19 nt, Artificial Sequence
  Description of Artificial Sequence: Synthetic oligonucleotide
gucaguuugaucuugaagc

SEQ ID NO: 1071496 - RNA, 19 nt, Artificial Sequence
  Description of Artificial Sequence: Synthetic oligonucleotide
acagauaagaucuuggaug

SEQ ID NO: 1071497 - RNA, 19 nt, Artificial Sequence
  Description of Artificial Sequence: Synthetic oligonucleotide
uuaauaaagaugaaacuuc

SEQ ID NO: 1071498 - RNA, 19 nt, Artificial Sequence
  Description of Artificial Sequence: Synthetic oligonucleotide
gaucaagcaaaucucaucc

SEQ ID NO: 1071499 - RNA, 19 nt, Artificial Sequence
  Description of Artificial Sequence: Synthetic oligonucleotide
uaacaggucaccauuacag

SEQ ID NO: 1071500 - RNA, 19 nt, Artificial Sequence
  Description of Artificial Sequence: Synthetic oligonucleotide
cuaauuaagucauaggcug

SEQ ID NO: 1071501 - RNA, 19 nt, Artificial Sequence
  Description of Artificial Sequence: Synthetic oligonucleotide
uuuaugauucucaaggagu

SEQ ID NO: 1071502 - RNA, 19 nt, Artificial Sequence
  Description of Artificial Sequence: Synthetic oligonucleotide
aacaccucuaaauaaugag

SEQ ID NO: 1071503 - RNA, 19 nt, Artificial Sequence
  Description of Artificial Sequence: Synthetic oligonucleotide
uccauuacuccauagaaug

SEQ ID NO: 1071504 - RNA, 19 nt, Artificial Sequence
  Description of Artificial Sequence: Synthetic oligonucleotide
aucuauuacauuugagggc

SEQ ID NO: 1071505 - RNA, 19 nt, Artificial Sequence
  Description of Artificial Sequence: Synthetic oligonucleotide
uggucgacuauuaauaaag

SEQ ID NO: 1071506 - RNA, 19 nt, Artificial Sequence
  Description of Artificial Sequence: Synthetic oligonucleotide
aaauagcagggcuuccucc

SEQ ID NO: 1071507 - RNA, 19 nt, Artificial Sequence
  Description of Artificial Sequence: Synthetic oligonucleotide
uugauuauuguaucguucc

SEQ ID NO: 1071508 - RNA, 19 nt, Artificial Sequence
  Description of Artificial Sequence: Synthetic oligonucleotide
acauuugagggcuugcuac

SEQ ID NO: 1071509 - RNA, 19 nt, Artificial Sequence
  Description of Artificial Sequence: Synthetic oligonucleotide
aacagauuccauguugccc

SEQ ID NO: 1071510 - RNA, 19 nt, Artificial Sequence
  Description of Artificial Sequence: Synthetic oligonucleotide
aauccacuuagguaaaucu

SEQ ID NO: 1071511 - RNA, 19 nt, Artificial Sequence
  Description of Artificial Sequence: Synthetic oligonucleotide
uuagguaaaucugagauuc

SEQ ID NO: 1071512 - RNA, 19 nt, Artificial Sequence
  Description of Artificial Sequence: Synthetic oligonucleotide
uccuuauucuguaauaaca

SEQ ID NO: 1071513 - RNA, 19 nt, Artificial Sequence
  Description of Artificial Sequence: Synthetic oligonucleotide
ucaacaguaacuaauuauu

SEQ ID NO: 1071514 - RNA, 19 nt, Artificial Sequence
  Description of Artificial Sequence: Synthetic oligonucleotide
ucuauuacauuugagggcu

SEQ ID NO: 1071515 - RNA, 19 nt, Artificial Sequence
  Description of Artificial Sequence: Synthetic oligonucleotide
auuauaauaacgucggauu

SEQ ID NO: 1071516 - RNA, 19 nt, Artificial Sequence
  Description of Artificial Sequence: Synthetic oligonucleotide
ucgacugcuaauuaaguca

SEQ ID NO: 1071517 - RNA, 19 nt, Artificial Sequence
  Description of Artificial Sequence: Synthetic oligonucleotide
auacaauuggcuuuuccag

SEQ ID NO: 1071518 - RNA, 19 nt, Artificial Sequence
  Description of Artificial Sequence: Synthetic oligonucleotide
agaucuguuaucuauuaca

SEQ ID NO: 1071519 - RNA, 19 nt, Artificial Sequence
  Description of Artificial Sequence: Synthetic oligonucleotide
uaagucauaggcuguaagc

SEQ ID NO: 1071520 - RNA, 19 nt, Artificial Sequence
  Description of Artificial Sequence: Synthetic oligonucleotide
uaauugucgugacagccgg

SEQ ID NO: 1071521 - RNA, 19 nt, Artificial Sequence
  Description of Artificial Sequence: Synthetic oligonucleotide
agauaaugaggcuuucaac

SEQ ID NO: 1071522 - RNA, 19 nt, Artificial Sequence
  Description of Artificial Sequence: Synthetic oligonucleotide
gauaacucgccacuuugcg

SEQ ID NO: 1071523 - RNA, 19 nt, Artificial Sequence
  Description of Artificial Sequence: Synthetic oligonucleotide
gauaaugaggcuuucaacu

SEQ ID NO: 1071524 - RNA, 19 nt, Artificial Sequence
  Description of Artificial Sequence: Synthetic oligonucleotide
aaguacauggguaauuguc

SEQ ID NO: 1071525 - RNA, 19 nt, Artificial Sequence
  Description of Artificial Sequence: Synthetic oligonucleotide
auaauaacgucggauuagc

SEQ ID NO: 1071526 - RNA, 19 nt, Artificial Sequence
  Description of Artificial Sequence: Synthetic oligonucleotide
gauaagaucuuggaugucc

SEQ ID NO: 1071527 - RNA, 19 nt, Artificial Sequence
  Description of Artificial Sequence: Synthetic oligonucleotide
uuuaaauccauuacuccau

SEQ ID NO: 1071528 - RNA, 19 nt, Artificial Sequence
  Description of Artificial Sequence: Synthetic oligonucleotide
aauaacgucggauuagcuu

SEQ ID NO: 1071529 - RNA, 19 nt, Artificial Sequence
  Description of Artificial Sequence: Synthetic oligonucleotide
aaauaaccgccuuauuaug

SEQ ID NO: 1071530 - RNA, 19 nt, Artificial Sequence
  Description of Artificial Sequence: Synthetic oligonucleotide
uccacuuagguaaaucuga

SEQ ID NO: 1071531 - RNA, 19 nt, Artificial Sequence
  Description of Artificial Sequence: Synthetic oligonucleotide
ucuguauggguucaguaac

SEQ ID NO: 1071532 - RNA, 19 nt, Artificial Sequence
  Description of Artificial Sequence: Synthetic oligonucleotide
uuugauuauuguaucguuc

SEQ ID NO: 1071533 - RNA, 19 nt, Artificial Sequence
  Description of Artificial Sequence: Synthetic oligonucleotide
uggguagugguccauaaca

SEQ ID NO: 1071534 - RNA, 19 nt, Artificial Sequence
  Description of Artificial Sequence: Synthetic oligonucleotide
uccuuuaaauccauuacuc

SEQ ID NO: 1071535 - RNA, 19 nt, Artificial Sequence
  Description of Artificial Sequence: Synthetic oligonucleotide
uuaagucauaggcuguaag

SEQ ID NO: 1071536 - RNA, 19 nt, Artificial Sequence
  Description of Artificial Sequence: Synthetic oligonucleotide
uggguaauugucgugacag

SEQ ID NO: 1071537 - RNA, 19 nt, Artificial Sequence
  Description of Artificial Sequence: Synthetic oligonucleotide
uuaugauucucaaggaguc

SEQ ID NO: 1071538 - RNA, 19 nt, Artificial Sequence
  Description of Artificial Sequence: Synthetic oligonucleotide
uuaaugauacuugugguuc

SEQ ID NO: 1071539 - RNA, 19 nt, Artificial Sequence
  Description of Artificial Sequence: Synthetic oligonucleotide
cuuuaaauccauuacucca

SEQ ID NO: 1071540 - RNA, 19 nt, Artificial Sequence
  Description of Artificial Sequence: Synthetic oligonucleotide
uguuaucuauuacauuuga

SEQ ID NO: 1071541 - RNA, 19 nt, Artificial Sequence
  Description of Artificial Sequence: Synthetic oligonucleotide
caucuuuuaaugauacuug

SEQ ID NO: 1071542 - RNA, 19 nt, Artificial Sequence
  Description of Artificial Sequence: Synthetic oligonucleotide
aagacuuguggaauugugg

SEQ ID NO: 1071543 - RNA, 19 nt, Artificial Sequence
  Description of Artificial Sequence: Synthetic oligonucleotide
cuaaagacucuguacuggg

SEQ ID NO: 1071544 - RNA, 19 nt, Artificial Sequence
  Description of Artificial Sequence: Synthetic oligonucleotide
uaagacgagggucacucag

SEQ ID NO: 1071545 - RNA, 19 nt, Artificial Sequence
  Description of Artificial Sequence: Synthetic oligonucleotide
uagauaaugaggcuuucaa

SEQ ID NO: 1071546 - RNA, 19 nt, Artificial Sequence
  Description of Artificial Sequence: Synthetic oligonucleotide
aguacauggguaauugucg

SEQ ID NO: 1071547 - RNA, 19 nt, Artificial Sequence
  Description of Artificial Sequence: Synthetic oligonucleotide
uuuccauagaaaaggggac

SEQ ID NO: 1071548 - RNA, 19 nt, Artificial Sequence
  Description of Artificial Sequence: Synthetic oligonucleotide
uaacucgccacuuugcgug

SEQ ID NO: 1071549 - RNA, 19 nt, Artificial Sequence
  Description of Artificial Sequence: Synthetic oligonucleotide
ugggauacaaccgaguaga

SEQ ID NO: 1071550 - RNA, 19 nt, Artificial Sequence
  Description of Artificial Sequence: Synthetic oligonucleotide
aaugggauacaaccgagua

SEQ ID NO: 1071551 - RNA, 19 nt, Artificial Sequence
  Description of Artificial Sequence: Synthetic oligonucleotide
uggcugauuagauaaugag

SEQ ID NO: 1071552 - RNA, 19 nt, Artificial Sequence
  Description of Artificial Sequence: Synthetic oligonucleotide
gcugauuagauaaugaggc

SEQ ID NO: 1071553 - RNA, 19 nt, Artificial Sequence
  Description of Artificial Sequence: Synthetic oligonucleotide
aauagcagggcuuccucca

SEQ ID NO: 1071554 - RNA, 19 nt, Artificial Sequence
  Description of Artificial Sequence: Synthetic oligonucleotide
gagauucuuugguucaagg

SEQ ID NO: 1071555 - RNA, 19 nt, Artificial Sequence
  Description of Artificial Sequence: Synthetic oligonucleotide
uuuaaugauacuugugguu

SEQ ID NO: 1071556 - RNA, 19 nt, Artificial Sequence
  Description of Artificial Sequence: Synthetic oligonucleotide
uuucugucuauuauggcau

SEQ ID NO: 1071557 - RNA, 19 nt, Artificial Sequence
  Description of Artificial Sequence: Synthetic oligonucleotide
ugcucgacugcuaauuaag

SEQ ID NO: 1071558 - RNA, 19 nt, Artificial Sequence
  Description of Artificial Sequence: Synthetic oligonucleotide
auaacgucggauuagcuuu

SEQ ID NO: 1071559 - RNA, 19 nt, Artificial Sequence
  Description of Artificial Sequence: Synthetic oligonucleotide
ugucuauuauggcauuaag

SEQ ID NO: 1071560 - RNA, 19 nt, Artificial Sequence
  Description of Artificial Sequence: Synthetic oligonucleotide
aagucauaggcuguaagcu

SEQ ID NO: 1071561 - RNA, 19 nt, Artificial Sequence
  Description of Artificial Sequence: Synthetic oligonucleotide
cauuacuccauagaauggg

SEQ ID NO: 1071562 - RNA, 19 nt, Artificial Sequence
  Description of Artificial Sequence: Synthetic oligonucleotide
uuuaaaacccacguuaauu

SEQ ID NO: 1071563 - RNA, 19 nt, Artificial Sequence
  Description of Artificial Sequence: Synthetic oligonucleotide
uuucugccaaauaaccgcc

SEQ ID NO: 1071564 - RNA, 19 nt, Artificial Sequence
  Description of Artificial Sequence: Synthetic oligonucleotide
agccauuugcuguaagacg

SEQ ID NO: 1071565 - RNA, 19 nt, Artificial Sequence
  Description of Artificial Sequence: Synthetic oligonucleotide
ugcuguaagacgaggguca

SEQ ID NO: 1071566 - RNA, 19 nt, Artificial Sequence
  Description of Artificial Sequence: Synthetic oligonucleotide
aagcaaaucucauccuucu

SEQ ID NO: 1071567 - RNA, 19 nt, Artificial Sequence
  Description of Artificial Sequence: Synthetic oligonucleotide
aaagacucuguacugggua

SEQ ID NO: 1071568 - RNA, 19 nt, Artificial Sequence
  Description of Artificial Sequence: Synthetic oligonucleotide
aaguaguuuucaguacugg

SEQ ID NO: 1071569 - RNA, 19 nt, Artificial Sequence
  Description of Artificial Sequence: Synthetic oligonucleotide
aacuugagacuguggauca

SEQ ID NO: 1071570 - RNA, 19 nt, Artificial Sequence
  Description of Artificial Sequence: Synthetic oligonucleotide
cacucagguaagcugaucc

SEQ ID NO: 1071571 - RNA, 19 nt, Artificial Sequence
  Description of Artificial Sequence: Synthetic oligonucleotide
ucuagaugugaccagccau

SEQ ID NO: 1071572 - RNA, 19 nt, Artificial Sequence
  Description of Artificial Sequence: Synthetic oligonucleotide
acgagggucacucagguaa

SEQ ID NO: 1071573 - RNA, 19 nt, Artificial Sequence
  Description of Artificial Sequence: Synthetic oligonucleotide
uuagccaugccuucuauuu

SEQ ID NO: 1071574 - RNA, 19 nt, Artificial Sequence
  Description of Artificial Sequence: Synthetic oligonucleotide
uguaagacgagggucacuc

SEQ ID NO: 1071575 - RNA, 19 nt, Artificial Sequence
  Description of Artificial Sequence: Synthetic oligonucleotide
auuacauuugagggcuugc

SEQ ID NO: 1071576 - RNA, 19 nt, Artificial Sequence
  Description of Artificial Sequence: Synthetic oligonucleotide
aagaucuuggauguccucu

SEQ ID NO: 1071577 - RNA, 19 nt, Artificial Sequence
  Description of Artificial Sequence: Synthetic oligonucleotide
uaauuaagucauaggcugu

SEQ ID NO: 1071578 - RNA, 19 nt, Artificial Sequence
  Description of Artificial Sequence: Synthetic oligonucleotide
cuagaugugaccagccaug

SEQ ID NO: 1071579 - RNA, 19 nt, Artificial Sequence
  Description of Artificial Sequence: Synthetic oligonucleotide
acccacguuaauuucaaca

SEQ ID NO: 1071580 - RNA, 19 nt, Artificial Sequence
  Description of Artificial Sequence: Synthetic oligonucleotide
aauaaccgccuuauuaugu

SEQ ID NO: 1071581 - RNA, 19 nt, Artificial Sequence
  Description of Artificial Sequence: Synthetic oligonucleotide
ugcccauuacagcaguucc

SEQ ID NO: 1071582 - RNA, 19 nt, Artificial Sequence
  Description of Artificial Sequence: Synthetic oligonucleotide
aaaacccacguuaauuuca

SEQ ID NO: 1071583 - RNA, 19 nt, Artificial Sequence
  Description of Artificial Sequence: Synthetic oligonucleotide
ucaagcuuuggcugauuag

SEQ ID NO: 1071584 - RNA, 19 nt, Artificial Sequence
  Description of Artificial Sequence: Synthetic oligonucleotide
cucaacagauuccauguug

SEQ ID NO: 1071585 - RNA, 19 nt, Artificial Sequence
  Description of Artificial Sequence: Synthetic oligonucleotide
auaaccgccuuauuaugug

SEQ ID NO: 1071586 - RNA, 19 nt, Artificial Sequence
  Description of Artificial Sequence: Synthetic oligonucleotide
ugauuauuguaucguucca

SEQ ID NO: 1071587 - RNA, 19 nt, Artificial Sequence
  Description of Artificial Sequence: Synthetic oligonucleotide
ucaaggagucuuuuaaaua

SEQ ID NO: 1071588 - RNA, 19 nt, Artificial Sequence
  Description of Artificial Sequence: Synthetic oligonucleotide
acugagauucuuugguuca

SEQ ID NO: 1071589 - RNA, 19 nt, Artificial Sequence
  Description of Artificial Sequence: Synthetic oligonucleotide
augggauacaaccgaguag

SEQ ID NO: 1071590 - RNA, 19 nt, Artificial Sequence
  Description of Artificial Sequence: Synthetic oligonucleotide
gagacuguggaucaagcaa

SEQ ID NO: 1071591 - RNA, 19 nt, Artificial Sequence
  Description of Artificial Sequence: Synthetic oligonucleotide
cugcuaauuaagucauagg

SEQ ID NO: 1071592 - RNA, 19 nt, Artificial Sequence
  Description of Artificial Sequence: Synthetic oligonucleotide
uggaauuguggucugcauc

SEQ ID NO: 1071593 - RNA, 19 nt, Artificial Sequence
  Description of Artificial Sequence: Synthetic oligonucleotide
ucggauuagcuuuaguaua

SEQ ID NO: 1071594 - RNA, 19 nt, Artificial Sequence
  Description of Artificial Sequence: Synthetic oligonucleotide
cuucuugacugcucgacug

SEQ ID NO: 1071595 - RNA, 19 nt, Artificial Sequence
  Description of Artificial Sequence: Synthetic oligonucleotide
uaagcugauccacugcauc

SEQ ID NO: 1071596 - RNA, 19 nt, Artificial Sequence
  Description of Artificial Sequence: Synthetic oligonucleotide
agauaacucgccacuuugc

SEQ ID NO: 1071597 - RNA, 19 nt, Artificial Sequence
  Description of Artificial Sequence: Synthetic oligonucleotide
gggguugaaagacuugugg

SEQ ID NO: 1071598 - RNA, 19 nt, Artificial Sequence
  Description of Artificial Sequence: Synthetic oligonucleotide
caucacugagauucuuugg

SEQ ID NO: 1071599 - RNA, 19 nt, Artificial Sequence
  Description of Artificial Sequence: Synthetic oligonucleotide
ucagguaagcugauccacu

SEQ ID NO: 1071600 - RNA, 19 nt, Artificial Sequence
  Description of Artificial Sequence: Synthetic oligonucleotide
agugguccauaacagguca

SEQ ID NO: 1071601 - RNA, 19 nt, Artificial Sequence
  Description of Artificial Sequence: Synthetic oligonucleotide
uaaauagcagggcuuccuc

SEQ ID NO: 1071602 - RNA, 19 nt, Artificial Sequence
  Description of Artificial Sequence: Synthetic oligonucleotide
ugagacuguggaucaagca

SEQ ID NO: 1071603 - RNA, 19 nt, Artificial Sequence
  Description of Artificial Sequence: Synthetic oligonucleotide
ggaaacuugagacugugga

SEQ ID NO: 1071604 - RNA, 19 nt, Artificial Sequence
  Description of Artificial Sequence: Synthetic oligonucleotide
auuugauuauuguaucguu

SEQ ID NO: 1071605 - RNA, 19 nt, Artificial Sequence
  Description of Artificial Sequence: Synthetic oligonucleotide
caugagagccauccugugg

SEQ ID NO: 1071606 - RNA, 19 nt, Artificial Sequence
  Description of Artificial Sequence: Synthetic oligonucleotide
ugguucaaggguuggguga

SEQ ID NO: 1071607 - RNA, 19 nt, Artificial Sequence
  Description of Artificial Sequence: Synthetic oligonucleotide
caagcaaaucucauccuuc

SEQ ID NO: 1071608 - RNA, 19 nt, Artificial Sequence
  Description of Artificial Sequence: Synthetic oligonucleotide
ggcugauuagauaaugagg

SEQ ID NO: 1071609 - RNA, 19 nt, Artificial Sequence
  Description of Artificial Sequence: Synthetic oligonucleotide
auaaugagacccauuaaaa

SEQ ID NO: 1071610 - RNA, 19 nt, Artificial Sequence
  Description of Artificial Sequence: Synthetic oligonucleotide
uuagauaaugaggcuuuca

SEQ ID NO: 1071611 - RNA, 19 nt, Artificial Sequence
  Description of Artificial Sequence: Synthetic oligonucleotide
ggaauuguggucugcauca

SEQ ID NO: 1071612 - RNA, 19 nt, Artificial Sequence
  Description of Artificial Sequence: Synthetic oligonucleotide
uucuugacugcucgacugc

SEQ ID NO: 1071613 - RNA, 19 nt, Artificial Sequence
  Description of Artificial Sequence: Synthetic oligonucleotide
uccaaguaguuuucaguac

SEQ ID NO: 1071614 - RNA, 19 nt, Artificial Sequence
  Description of Artificial Sequence: Synthetic oligonucleotide
uuaaauccauuacuccaua

SEQ ID NO: 1071615 - RNA, 19 nt, Artificial Sequence
  Description of Artificial Sequence: Synthetic oligonucleotide
ucuaaauaaugagacccau

SEQ ID NO: 1071616 - RNA, 19 nt, Artificial Sequence
  Description of Artificial Sequence: Synthetic oligonucleotide
aagacgagggucacucagg

SEQ ID NO: 1071617 - RNA, 19 nt, Artificial Sequence
  Description of Artificial Sequence: Synthetic oligonucleotide
aauuaagucauaggcugua

SEQ ID NO: 1071618 - RNA, 19 nt, Artificial Sequence
  Description of Artificial Sequence: Synthetic oligonucleotide
uuuaaauagcagggcuucc

SEQ ID NO: 1071619 - RNA, 19 nt, Artificial Sequence
  Description of Artificial Sequence: Synthetic oligonucleotide
ugacaugggcuucuugacu

SEQ ID NO: 1071620 - RNA, 19 nt, Artificial Sequence
  Description of Artificial Sequence: Synthetic oligonucleotide
gauuauaauaacgucggau

SEQ ID NO: 1071621 - RNA, 19 nt, Artificial Sequence
  Description of Artificial Sequence: Synthetic oligonucleotide
cuugguaaguacaugggua

SEQ ID NO: 1071622 - RNA, 19 nt, Artificial Sequence
  Description of Artificial Sequence: Synthetic oligonucleotide
auaggcuguaagcugucca

SEQ ID NO: 1071623 - RNA, 19 nt, Artificial Sequence
  Description of Artificial Sequence: Synthetic oligonucleotide
cagauaacucgccacuuug

SEQ ID NO: 1071624 - RNA, 19 nt, Artificial Sequence
  Description of Artificial Sequence: Synthetic oligonucleotide
uaauaacgucggauuagcu

SEQ ID NO: 1071625 - RNA, 19 nt, Artificial Sequence
  Description of Artificial Sequence: Synthetic oligonucleotide
cgacuauuaauaaagauga

SEQ ID NO: 1071626 - RNA, 19 nt, Artificial Sequence
  Description of Artificial Sequence: Synthetic oligonucleotide
aaugauacuugugguuccu

SEQ ID NO: 1071627 - RNA, 19 nt, Artificial Sequence
  Description of Artificial Sequence: Synthetic oligonucleotide
cucgacugcuaauuaaguc

SEQ ID NO: 1071628 - RNA, 19 nt, Artificial Sequence
  Description of Artificial Sequence: Synthetic oligonucleotide
aacccacguuaauuucaac

SEQ ID NO: 1071629 - RNA, 19 nt, Artificial Sequence
  Description of Artificial Sequence: Synthetic oligonucleotide
acaugggcuucuugacugc

SEQ ID NO: 1071630 - RNA, 19 nt, Artificial Sequence
  Description of Artificial Sequence: Synthetic oligonucleotide
gaugugaccagccaugcau

SEQ ID NO: 1071631 - RNA, 19 nt, Artificial Sequence
  Description of Artificial Sequence: Synthetic oligonucleotide
auaacucgccacuuugcgu

SEQ ID NO: 1071632 - RNA, 19 nt, Artificial Sequence
  Description of Artificial Sequence: Synthetic oligonucleotide
uguggaauuguggucugca

SEQ ID NO: 1071633 - RNA, 19 nt, Artificial Sequence
  Description of Artificial Sequence: Synthetic oligonucleotide
gguacucuacuuuucugcc

SEQ ID NO: 1071634 - RNA, 19 nt, Artificial Sequence
  Description of Artificial Sequence: Synthetic oligonucleotide
cauaacaggucaccauuac

SEQ ID NO: 1071635 - RNA, 19 nt, Artificial Sequence
  Description of Artificial Sequence: Synthetic oligonucleotide
cugcgaggaacugagcucg

SEQ ID NO: 1071636 - RNA, 19 nt, Artificial Sequence
  Description of Artificial Sequence: Synthetic oligonucleotide
auacaaccgaguagauucc

SEQ ID NO: 1071637 - RNA, 19 nt, Artificial Sequence
  Description of Artificial Sequence: Synthetic oligonucleotide
acauggguaauugucguga

SEQ ID NO: 1071638 - RNA, 19 nt, Artificial Sequence
  Description of Artificial Sequence: Synthetic oligonucleotide
uaaccgccuuauuaugugc

SEQ ID NO: 1071639 - RNA, 19 nt, Artificial Sequence
  Description of Artificial Sequence: Synthetic oligonucleotide
aacucgccacuuugcgugg

SEQ ID NO: 1071640 - RNA, 19 nt, Artificial Sequence
  Description of Artificial Sequence: Synthetic oligonucleotide
cccacguuaauuucaacag

SEQ ID NO: 1071641 - RNA, 19 nt, Artificial Sequence
  Description of Artificial Sequence: Synthetic oligonucleotide
uguggucagguacucuacu

SEQ ID NO: 1071642 - RNA, 19 nt, Artificial Sequence
  Description of Artificial Sequence: Synthetic oligonucleotide
ucuuaucugguguuagauu

SEQ ID NO: 1071643 - RNA, 19 nt, Artificial Sequence
  Description of Artificial Sequence: Synthetic oligonucleotide
uggaucaagcaaaucucau

SEQ ID NO: 1071644 - RNA, 19 nt, Artificial Sequence
  Description of Artificial Sequence: Synthetic oligonucleotide
ugagauucuuugguucaag

SEQ ID NO: 1071645 - RNA, 19 nt, Artificial Sequence
  Description of Artificial Sequence: Synthetic oligonucleotide
ugggugacuaaagacucug

SEQ ID NO: 1071646 - RNA, 19 nt, Artificial Sequence
  Description of Artificial Sequence: Synthetic oligonucleotide
ucugcgaggaacugagcuc

SEQ ID NO: 1071647 - RNA, 19 nt, Artificial Sequence
  Description of Artificial Sequence: Synthetic oligonucleotide
cacguuaauuucaacagua

SEQ ID NO: 1071648 - RNA, 19 nt, Artificial Sequence
  Description of Artificial Sequence: Synthetic oligonucleotide
caacagauuccauguugcc

SEQ ID NO: 1071649 - RNA, 19 nt, Artificial Sequence
  Description of Artificial Sequence: Synthetic oligonucleotide
aaaugggauacaaccgagu

SEQ ID NO: 1071650 - RNA, 19 nt, Artificial Sequence
  Description of Artificial Sequence: Synthetic oligonucleotide
uuacauuugagggcuugcu

SEQ ID NO: 1071651 - RNA, 19 nt, Artificial Sequence
  Description of Artificial Sequence: Synthetic oligonucleotide
aauuuucuaagaagacaau

SEQ ID NO: 1071652 - RNA, 19 nt, Artificial Sequence
  Description of Artificial Sequence: Synthetic oligonucleotide
cucuaaauaaugagaccca

SEQ ID NO: 1071653 - RNA, 19 nt, Artificial Sequence
  Description of Artificial Sequence: Synthetic oligonucleotide
uaagcuguccagaucuguu

SEQ ID NO: 1071654 - RNA, 19 nt, Artificial Sequence
  Description of Artificial Sequence: Synthetic oligonucleotide
ugggguugaaagacuugug

SEQ ID NO: 1071655 - RNA, 19 nt, Artificial Sequence
  Description of Artificial Sequence: Synthetic oligonucleotide
uaucugguguuagauuuac

SEQ ID NO: 1071656 - RNA, 19 nt, Artificial Sequence
  Description of Artificial Sequence: Synthetic oligonucleotide
agauggguuaaauggugaa

SEQ ID NO: 1071657 - RNA, 19 nt, Artificial Sequence
  Description of Artificial Sequence: Synthetic oligonucleotide
caauuggcuuuuccagugg

SEQ ID NO: 1071658 - RNA, 19 nt, Artificial Sequence
  Description of Artificial Sequence: Synthetic oligonucleotide
gaaaaggggaccucagcua

SEQ ID NO: 1071659 - RNA, 19 nt, Artificial Sequence
  Description of Artificial Sequence: Synthetic oligonucleotide
agauuauaauaacgucgga

SEQ ID NO: 1071660 - RNA, 19 nt, Artificial Sequence
  Description of Artificial Sequence: Synthetic oligonucleotide
uuaucugguguuagauuua

SEQ ID NO: 1071661 - RNA, 19 nt, Artificial Sequence
  Description of Artificial Sequence: Synthetic oligonucleotide
ugugccguugcauccucca

SEQ ID NO: 1071662 - RNA, 19 nt, Artificial Sequence
  Description of Artificial Sequence: Synthetic oligonucleotide
acucagguaagcugaucca

SEQ ID NO: 1071663 - RNA, 19 nt, Artificial Sequence
  Description of Artificial Sequence: Synthetic oligonucleotide
uguggucugcaucaagcuu

SEQ ID NO: 1071664 - RNA, 19 nt, Artificial Sequence
  Description of Artificial Sequence: Synthetic oligonucleotide
gacacuuagccaugccuuc

SEQ ID NO: 1071665 - RNA, 19 nt, Artificial Sequence
  Description of Artificial Sequence: Synthetic oligonucleotide
uugacucuuaucugguguu

SEQ ID NO: 1071666 - RNA, 19 nt, Artificial Sequence
  Description of Artificial Sequence: Synthetic oligonucleotide
guauggguucaguaacaug

SEQ ID NO: 1071667 - RNA, 19 nt, Artificial Sequence
  Description of Artificial Sequence: Synthetic oligonucleotide
uaugauucucaaggagucu

SEQ ID NO: 1071668 - RNA, 19 nt, Artificial Sequence
  Description of Artificial Sequence: Synthetic oligonucleotide
ccugcauucguagagcucc

SEQ ID NO: 1071669 - RNA, 19 nt, Artificial Sequence
  Description of Artificial Sequence: Synthetic oligonucleotide
auccacuuagguaaaucug

SEQ ID NO: 1071670 - RNA, 19 nt, Artificial Sequence
  Description of Artificial Sequence: Synthetic oligonucleotide
ugcugacauuuuauguaac

SEQ ID NO: 1071671 - RNA, 19 nt, Artificial Sequence
  Description of Artificial Sequence: Synthetic oligonucleotide
uggcauuaagaauuuccuu

SEQ ID NO: 1071672 - RNA, 19 nt, Artificial Sequence
  Description of Artificial Sequence: Synthetic oligonucleotide
uggucgacugcugacauuu

SEQ ID NO: 1071673 - RNA, 19 nt, Artificial Sequence
  Description of Artificial Sequence: Synthetic oligonucleotide
gaaacagggcacgugcuga

SEQ ID NO: 1071674 - RNA, 19 nt, Artificial Sequence
  Description of Artificial Sequence: Synthetic oligonucleotide
ccuggugucaguuugaucu

SEQ ID NO: 1071675 - RNA, 19 nt, Artificial Sequence
  Description of Artificial Sequence: Synthetic oligonucleotide
acucuuaucugguguuaga

SEQ ID NO: 1071676 - RNA, 19 nt, Artificial Sequence
  Description of Artificial Sequence: Synthetic oligonucleotide
aggagucuuuuaaauagca

SEQ ID NO: 1071677 - RNA, 19 nt, Artificial Sequence
  Description of Artificial Sequence: Synthetic oligonucleotide
ucugccaaauaaccgccuu

SEQ ID NO: 1071678 - RNA, 19 nt, Artificial Sequence
  Description of Artificial Sequence: Synthetic oligonucleotide
ucuggucgacugcugacau

SEQ ID NO: 1071679 - RNA, 19 nt, Artificial Sequence
  Description of Artificial Sequence: Synthetic oligonucleotide
auuacuccauagaauggga

SEQ ID NO: 1071680 - RNA, 19 nt, Artificial Sequence
  Description of Artificial Sequence: Synthetic oligonucleotide
auaagaucuuggauguccu

SEQ ID NO: 1071681 - RNA, 19 nt, Artificial Sequence
  Description of Artificial Sequence: Synthetic oligonucleotide
aaccgccuuauuaugugca

SEQ ID NO: 1071682 - RNA, 19 nt, Artificial Sequence
  Description of Artificial Sequence: Synthetic oligonucleotide
acaugagagccauccugug

SEQ ID NO: 1071683 - RNA, 19 nt, Artificial Sequence
  Description of Artificial Sequence: Synthetic oligonucleotide
acaguggugcucaacagau

SEQ ID NO: 1071684 - RNA, 19 nt, Artificial Sequence
  Description of Artificial Sequence: Synthetic oligonucleotide
aaacccacguuaauuucaa

SEQ ID NO: 1071685 - RNA, 19 nt, Artificial Sequence
  Description of Artificial Sequence: Synthetic oligonucleotide
cauggguaauugucgugac

SEQ ID NO: 1071686 - RNA, 19 nt, Artificial Sequence
  Description of Artificial Sequence: Synthetic oligonucleotide
uucugccaaauaaccgccu

SEQ ID NO: 1071687 - RNA, 19 nt, Artificial Sequence
  Description of Artificial Sequence: Synthetic oligonucleotide
ucugguguacuggucgacu

SEQ ID NO: 1071688 - RNA, 19 nt, Artificial Sequence
  Description of Artificial Sequence: Synthetic oligonucleotide
uaagaucuuggauguccuc

SEQ ID NO: 1071689 - RNA, 19 nt, Artificial Sequence
  Description of Artificial Sequence: Synthetic oligonucleotide
gaucuguuaucuauuacau

SEQ ID NO: 1071690 - RNA, 19 nt, Artificial Sequence
  Description of Artificial Sequence: Synthetic oligonucleotide
ccauuacuccauagaaugg

SEQ ID NO: 1071691 - RNA, 19 nt, Artificial Sequence
  Description of Artificial Sequence: Synthetic oligonucleotide
gaacugagcucgaugaucu

SEQ ID NO: 1071692 - RNA, 19 nt, Artificial Sequence
  Description of Artificial Sequence: Synthetic oligonucleotide
ucucuggucgacugcugac

SEQ ID NO: 1071693 - RNA, 19 nt, Artificial Sequence
  Description of Artificial Sequence: Synthetic oligonucleotide
gucggauuagcuuuaguau

SEQ ID NO: 1071694 - RNA, 19 nt, Artificial Sequence
  Description of Artificial Sequence: Synthetic oligonucleotide
auggguaauugucgugaca

SEQ ID NO: 1071695 - RNA, 19 nt, Artificial Sequence
  Description of Artificial Sequence: Synthetic oligonucleotide
uuaggcacuucagauuaua

SEQ ID NO: 1071696 - RNA, 19 nt, Artificial Sequence
  Description of Artificial Sequence: Synthetic oligonucleotide
gauuagauaaugaggcuuu

SEQ ID NO: 1071697 - RNA, 19 nt, Artificial Sequence
  Description of Artificial Sequence: Synthetic oligonucleotide
cauuugagggcuugcuaca

SEQ ID NO: 1071698 - RNA, 19 nt, Artificial Sequence
  Description of Artificial Sequence: Synthetic oligonucleotide
caccauuacagaauuuucu

SEQ ID NO: 1071699 - RNA, 19 nt, Artificial Sequence
  Description of Artificial Sequence: Synthetic oligonucleotide
agauaagaucuuggauguc

SEQ ID NO: 1071700 - RNA, 19 nt, Artificial Sequence
  Description of Artificial Sequence: Synthetic oligonucleotide
ggacacacccuuuaauauc

SEQ ID NO: 1071701 - RNA, 19 nt, Artificial Sequence
  Description of Artificial Sequence: Synthetic oligonucleotide
cguuaauuucaacaguaac

SEQ ID NO: 1071702 - RNA, 19 nt, Artificial Sequence
  Description of Artificial Sequence: Synthetic oligonucleotide
gccauuugcuguaagacga

SEQ ID NO: 1071703 - RNA, 19 nt, Artificial Sequence
  Description of Artificial Sequence: Synthetic oligonucleotide
ccaucacugagauucuuug

SEQ ID NO: 1071704 - RNA, 19 nt, Artificial Sequence
  Description of Artificial Sequence: Synthetic oligonucleotide
guugcauccuccagaccag

SEQ ID NO: 1071705 - RNA, 19 nt, Artificial Sequence
  Description of Artificial Sequence: Synthetic oligonucleotide
gguaaaucugagauucuuc

SEQ ID NO: 1071706 - RNA, 19 nt, Artificial Sequence
  Description of Artificial Sequence: Synthetic oligonucleotide
cuauuauggcauuaagaau

SEQ ID NO: 1071707 - RNA, 19 nt, Artificial Sequence
  Description of Artificial Sequence: Synthetic oligonucleotide
gucgacuauuaauaaagau

SEQ ID NO: 1071708 - RNA, 19 nt, Artificial Sequence
  Description of Artificial Sequence: Synthetic oligonucleotide
ccaaauaaccgccuuauua

SEQ ID NO: 1071709 - RNA, 19 nt, Artificial Sequence
  Description of Artificial Sequence: Synthetic oligonucleotide
aacgucggauuagcuuuag

SEQ ID NO: 1071710 - RNA, 19 nt, Artificial Sequence
  Description of Artificial Sequence: Synthetic oligonucleotide
guacucuacuuuucugcca

SEQ ID NO: 1071711 - RNA, 19 nt, Artificial Sequence
  Description of Artificial Sequence: Synthetic oligonucleotide
cauuugauuauuguaucgu

SEQ ID NO: 1071712 - RNA, 19 nt, Artificial Sequence
  Description of Artificial Sequence: Synthetic oligonucleotide
ucugucuauuauggcauua

SEQ ID NO: 1071713 - RNA, 19 nt, Artificial Sequence
  Description of Artificial Sequence: Synthetic oligonucleotide
cuguauggguucaguaaca

SEQ ID NO: 1071714 - RNA, 19 nt, Artificial Sequence
  Description of Artificial Sequence: Synthetic oligonucleotide
gggucacucagguaagcug

SEQ ID NO: 1071715 - RNA, 19 nt, Artificial Sequence
  Description of Artificial Sequence: Synthetic oligonucleotide
aaggggaccucagcuauuu

SEQ ID NO: 1071716 - RNA, 19 nt, Artificial Sequence
  Description of Artificial Sequence: Synthetic oligonucleotide
cacuuagguaaaucugaga

SEQ ID NO: 1071717 - RNA, 19 nt, Artificial Sequence
  Description of Artificial Sequence: Synthetic oligonucleotide
uaacgucggauuagcuuua

SEQ ID NO: 1071718 - RNA, 19 nt, Artificial Sequence
  Description of Artificial Sequence: Synthetic oligonucleotide
agaugugaccagccaugca

SEQ ID NO: 1071719 - RNA, 19 nt, Artificial Sequence
  Description of Artificial Sequence: Synthetic oligonucleotide
auuaagucauaggcuguaa

SEQ ID NO: 1071720 - RNA, 19 nt, Artificial Sequence
  Description of Artificial Sequence: Synthetic oligonucleotide
guacauggguaauugucgu

SEQ ID NO: 1071721 - RNA, 19 nt, Artificial Sequence
  Description of Artificial Sequence: Synthetic oligonucleotide
uggccugcauucguagagc

SEQ ID NO: 1071722 - RNA, 19 nt, Artificial Sequence
  Description of Artificial Sequence: Synthetic oligonucleotide
guugaaagacuuguggaau

SEQ ID NO: 1071723 - RNA, 19 nt, Artificial Sequence
  Description of Artificial Sequence: Synthetic oligonucleotide
cuggucgacuauuaauaaa

SEQ ID NO: 1071724 - RNA, 19 nt, Artificial Sequence
  Description of Artificial Sequence: Synthetic oligonucleotide
guauaucuuucugguguac

SEQ ID NO: 1071725 - RNA, 19 nt, Artificial Sequence
  Description of Artificial Sequence: Synthetic oligonucleotide
uguccagaucuguuaucua

SEQ ID NO: 1071726 - RNA, 19 nt, Artificial Sequence
  Description of Artificial Sequence: Synthetic oligonucleotide
acguuaauuucaacaguaa

SEQ ID NO: 1071727 - RNA, 19 nt, Artificial Sequence
  Description of Artificial Sequence: Synthetic oligonucleotide
ggcacgugcugacaugggc

SEQ ID NO: 1071728 - RNA, 19 nt, Artificial Sequence
  Description of Artificial Sequence: Synthetic oligonucleotide
gauuuacauccagcucagc

SEQ ID NO: 1071729 - RNA, 19 nt, Artificial Sequence
  Description of Artificial Sequence: Synthetic oligonucleotide
uucugucuauuauggcauu

SEQ ID NO: 1071730 - RNA, 19 nt, Artificial Sequence
  Description of Artificial Sequence: Synthetic oligonucleotide
cguugcauccuccagacca

SEQ ID NO: 1071731 - RNA, 19 nt, Artificial Sequence
  Description of Artificial Sequence: Synthetic oligonucleotide
aacagggcacgugcugaca

SEQ ID NO: 1071732 - RNA, 19 nt, Artificial Sequence
  Description of Artificial Sequence: Synthetic oligonucleotide
gggaguuuaugauucucaa

SEQ ID NO: 1071733 - RNA, 19 nt, Artificial Sequence
  Description of Artificial Sequence: Synthetic oligonucleotide
cugauuagauaaugaggcu

SEQ ID NO: 1071734 - RNA, 19 nt, Artificial Sequence
  Description of Artificial Sequence: Synthetic oligonucleotide
acacuuagccaugccuucu

SEQ ID NO: 1071735 - RNA, 19 nt, Artificial Sequence
  Description of Artificial Sequence: Synthetic oligonucleotide
cucugcgaggaacugagcu

SEQ ID NO: 1071736 - RNA, 19 nt, Artificial Sequence
  Description of Artificial Sequence: Synthetic oligonucleotide
ugcguggccugcauucgua

SEQ ID NO: 1071737 - RNA, 19 nt, Artificial Sequence
  Description of Artificial Sequence: Synthetic oligonucleotide
accgccuuauuaugugcaa

SEQ ID NO: 1071738 - RNA, 19 nt, Artificial Sequence
  Description of Artificial Sequence: Synthetic oligonucleotide
aauugucgugacagccgga

SEQ ID NO: 1071739 - RNA, 19 nt, Artificial Sequence
  Description of Artificial Sequence: Synthetic oligonucleotide
ugacucuuaucugguguua

SEQ ID NO: 1071740 - RNA, 19 nt, Artificial Sequence
  Description of Artificial Sequence: Synthetic oligonucleotide
ugacagccggacugcuucu

SEQ ID NO: 1071741 - RNA, 19 nt, Artificial Sequence
  Description of Artificial Sequence: Synthetic oligonucleotide
ggguaauugucgugacagc

SEQ ID NO: 1071742 - RNA, 19 nt, Artificial Sequence
  Description of Artificial Sequence: Synthetic oligonucleotide
aacugagcucgaugaucuu

SEQ ID NO: 1071743 - RNA, 19 nt, Artificial Sequence
  Description of Artificial Sequence: Synthetic oligonucleotide
cucaagcuuuggcugauua

SEQ ID NO: 1071744 - RNA, 19 nt, Artificial Sequence
  Description of Artificial Sequence: Synthetic oligonucleotide
guaagacgagggucacuca

SEQ ID NO: 1071745 - RNA, 19 nt, Artificial Sequence
  Description of Artificial Sequence: Synthetic oligonucleotide
caaggguugggugacuaaa

SEQ ID NO: 1071746 - RNA, 19 nt, Artificial Sequence
  Description of Artificial Sequence: Synthetic oligonucleotide
gucgacugcugacauuuua

SEQ ID NO: 1071747 - RNA, 19 nt, Artificial Sequence
  Description of Artificial Sequence: Synthetic oligonucleotide
auagaaugggagacacuua

SEQ ID NO: 1071748 - RNA, 19 nt, Artificial Sequence
  Description of Artificial Sequence: Synthetic oligonucleotide
ugcgaggaacugagcucga

SEQ ID NO: 1071749 - RNA, 19 nt, Artificial Sequence
  Description of Artificial Sequence: Synthetic oligonucleotide
ccauuugcuguaagacgag

SEQ ID NO: 1071750 - RNA, 19 nt, Artificial Sequence
  Description of Artificial Sequence: Synthetic oligonucleotide
ugacugcucgacugcuaau

SEQ ID NO: 1071751 - RNA, 19 nt, Artificial Sequence
  Description of Artificial Sequence: Synthetic oligonucleotide
accaucacugagauucuuu

SEQ ID NO: 1071752 - RNA, 19 nt, Artificial Sequence
  Description of Artificial Sequence: Synthetic oligonucleotide
acgucggauuagcuuuagu

SEQ ID NO: 1071753 - RNA, 19 nt, Artificial Sequence
  Description of Artificial Sequence: Synthetic oligonucleotide
acuuugcguggccugcauu

SEQ ID NO: 1071754 - RNA, 19 nt, Artificial Sequence
  Description of Artificial Sequence: Synthetic oligonucleotide
ggucgacuauuaauaaaga

SEQ ID NO: 1071755 - RNA, 19 nt, Artificial Sequence
  Description of Artificial Sequence: Synthetic oligonucleotide
gaacugacaugagagccau

SEQ ID NO: 1071756 - RNA, 19 nt, Artificial Sequence
  Description of Artificial Sequence: Synthetic oligonucleotide
ugggaugcucugcgaggaa

SEQ ID NO: 1071757 - RNA, 19 nt, Artificial Sequence
  Description of Artificial Sequence: Synthetic oligonucleotide
cacugcaucucuggucgac

SEQ ID NO: 1071758 - RNA, 19 nt, Artificial Sequence
  Description of Artificial Sequence: Synthetic oligonucleotide
auguccucucuugguaagu

SEQ ID NO: 1071759 - RNA, 19 nt, Artificial Sequence
  Description of Artificial Sequence: Synthetic oligonucleotide
ucacucagguaagcugauc

SEQ ID NO: 1071760 - RNA, 19 nt, Artificial Sequence
  Description of Artificial Sequence: Synthetic oligonucleotide
cagggcacgugcugacaug

SEQ ID NO: 1071761 - RNA, 19 nt, Artificial Sequence
  Description of Artificial Sequence: Synthetic oligonucleotide
gaauuguggucugcaucaa

SEQ ID NO: 1071762 - RNA, 19 nt, Artificial Sequence
  Description of Artificial Sequence: Synthetic oligonucleotide
guccauaacaggucaccau

SEQ ID NO: 1071763 - RNA, 19 nt, Artificial Sequence
  Description of Artificial Sequence: Synthetic oligonucleotide
cuccauagaaugggagaca

SEQ ID NO: 1071764 - RNA, 19 nt, Artificial Sequence
  Description of Artificial Sequence: Synthetic oligonucleotide
gcuugcuacaaggaccauc

SEQ ID NO: 1071765 - RNA, 19 nt, Artificial Sequence
  Description of Artificial Sequence: Synthetic oligonucleotide
cucuuaucugguguuagau

SEQ ID NO: 1071766 - RNA, 19 nt, Artificial Sequence
  Description of Artificial Sequence: Synthetic oligonucleotide
cgucggauuagcuuuagua

SEQ ID NO: 1071767 - RNA, 19 nt, Artificial Sequence
  Description of Artificial Sequence: Synthetic oligonucleotide
ucgccacuuugcguggccu

SEQ ID NO: 1071768 - RNA, 19 nt, Artificial Sequence
  Description of Artificial Sequence: Synthetic oligonucleotide
gacugcucgacugcuaauu

SEQ ID NO: 1071769 - RNA, 19 nt, Artificial Sequence
  Description of Artificial Sequence: Synthetic oligonucleotide
ggauuagcuuuaguauauc

SEQ ID NO: 1071770 - RNA, 19 nt, Artificial Sequence
  Description of Artificial Sequence: Synthetic oligonucleotide
aucugguguuagauuuaca

SEQ ID NO: 1071771 - RNA, 19 nt, Artificial Sequence
  Description of Artificial Sequence: Synthetic oligonucleotide
cuugacugcucgacugcua

SEQ ID NO: 1071772 - RNA, 19 nt, Artificial Sequence
  Description of Artificial Sequence: Synthetic oligonucleotide
cgacugcugacauuuuaug

SEQ ID NO: 1071773 - RNA, 19 nt, Artificial Sequence
  Description of Artificial Sequence: Synthetic oligonucleotide
gcguggccugcauucguag

SEQ ID NO: 1071774 - RNA, 19 nt, Artificial Sequence
  Description of Artificial Sequence: Synthetic oligonucleotide
gacgagggucacucaggua

SEQ ID NO: 1071775 - RNA, 19 nt, Artificial Sequence
  Description of Artificial Sequence: Synthetic oligonucleotide
ucgugacagccggacugcu

SEQ ID NO: 1071776 - RNA, 19 nt, Artificial Sequence
  Description of Artificial Sequence: Synthetic oligonucleotide
gacucucuguuaauacaau

SEQ ID NO: 1071777 - RNA, 19 nt, Artificial Sequence
  Description of Artificial Sequence: Synthetic oligonucleotide
guaucguuccaagucuuuu

SEQ ID NO: 1071778 - RNA, 19 nt, Artificial Sequence
  Description of Artificial Sequence: Synthetic oligonucleotide
guggaauuguggucugcau

SEQ ID NO: 1071779 - RNA, 19 nt, Artificial Sequence
  Description of Artificial Sequence: Synthetic oligonucleotide
guguacuggucgacuauua

SEQ ID NO: 1071780 - RNA, 19 nt, Artificial Sequence
  Description of Artificial Sequence: Synthetic oligonucleotide
ccauaacaggucaccauua

SEQ ID NO: 1071781 - RNA, 19 nt, Artificial Sequence
  Description of Artificial Sequence: Synthetic oligonucleotide
gacugcuaauuaagucaua

SEQ ID NO: 1071782 - RNA, 19 nt, Artificial Sequence
  Description of Artificial Sequence: Synthetic oligonucleotide
guaagcugauccacugcau

SEQ ID NO: 1071783 - RNA, 19 nt, Artificial Sequence
  Description of Artificial Sequence: Synthetic oligonucleotide
cgagggucacucagguaag

SEQ ID NO: 1071784 - RNA, 19 nt, Artificial Sequence
  Description of Artificial Sequence: Synthetic oligonucleotide
cgccuuauuaugugcaaaa

SEQ ID NO: 1071785 - RNA, 19 nt, Artificial Sequence
  Description of Artificial Sequence: Synthetic oligonucleotide
aggggaccucagcuauuuu

SEQ ID NO: 1071786 - RNA, 19 nt, Artificial Sequence
  Description of Artificial Sequence: Synthetic oligonucleotide
cacgugcugacaugggcuu

SEQ ID NO: 1071787 - RNA, 19 nt, Artificial Sequence
  Description of Artificial Sequence: Synthetic oligonucleotide
ggccugcauucguagagcu

SEQ ID NO: 1071788 - RNA, 19 nt, Artificial Sequence
  Description of Artificial Sequence: Synthetic oligonucleotide
gcacgugcugacaugggcu

SEQ ID NO: 1071789 - RNA, 19 nt, Artificial Sequence
  Description of Artificial Sequence: Synthetic oligonucleotide
ccacguuaauuucaacagu

SEQ ID NO: 1071790 - RNA, 19 nt, Artificial Sequence
  Description of Artificial Sequence: Synthetic oligonucleotide
gggcacgugcugacauggg

SEQ ID NO: 1071791 - RNA, 19 nt, Artificial Sequence
  Description of Artificial Sequence: Synthetic oligonucleotide
ccuuuaggcacuucagauu

SEQ ID NO: 1071792 - RNA, 19 nt, Artificial Sequence
  Description of Artificial Sequence: Synthetic oligonucleotide
ggauacaaccgaguagauu

SEQ ID NO: 1071793 - RNA, 19 nt, Artificial Sequence
  Description of Artificial Sequence: Synthetic oligonucleotide
gugcuucaauuugugccgu

SEQ ID NO: 1071794 - RNA, 19 nt, Artificial Sequence
  Description of Artificial Sequence: Synthetic oligonucleotide
cacucuguauggguucagu

SEQ ID NO: 1071795 - RNA, 19 nt, Artificial Sequence
  Description of Artificial Sequence: Synthetic oligonucleotide
gcucgacugcuaauuaagu

SEQ ID NO: 1071796 - RNA, 19 nt, Artificial Sequence
  Description of Artificial Sequence: Synthetic oligonucleotide
cggauuagcuuuaguauau

SEQ ID NO: 1071797 - RNA, 19 nt, Artificial Sequence
  Description of Artificial Sequence: Synthetic oligonucleotide
cgacugcuaauuaagucau

SEQ ID NO: 1071798 - RNA, 19 nt, Artificial Sequence
  Description of Artificial Sequence: Synthetic oligonucleotide
gucacucagguaagcugau

SEQ ID NO: 1071799 - RNA, 19 nt, Artificial Sequence
  Description of Artificial Sequence: Synthetic oligonucleotide
gcucugcgaggaacugagc

SEQ ID NO: 1071800 - RNA, 19 nt, Artificial Sequence
  Description of Artificial Sequence: Synthetic oligonucleotide
cuguaagacgagggucacu

SEQ ID NO: 1071801 - RNA, 19 nt, Artificial Sequence
  Description of Artificial Sequence: Synthetic oligonucleotide
cacuuugcguggccugcau

SEQ ID NO: 1071802 - RNA, 19 nt, Artificial Sequence
  Description of Artificial Sequence: Synthetic oligonucleotide
ccucagcuauuuuaauauu

SEQ ID NO: 1071803 - RNA, 19 nt, Artificial Sequence
  Description of Artificial Sequence: Synthetic oligonucleotide
ccgccuuauuaugugcaaa

SEQ ID NO: 1071804 - RNA, 19 nt, Artificial Sequence
  Description of Artificial Sequence: Synthetic oligonucleotide
cuggucgacugcugacauu

SEQ ID NO: 1071805 - RNA, 19 nt, Artificial Sequence
  Description of Artificial Sequence: Synthetic oligonucleotide
guacuggguagugguccau

SEQ ID NO: 1071806 - RNA, 19 nt, Artificial Sequence
  Description of Artificial Sequence: Synthetic oligonucleotide
cacgcacugguggccuuua

SEQ ID NO: 1071807 - RNA, 19 nt, Artificial Sequence
  Description of Artificial Sequence: Synthetic oligonucleotide
gggauacaaccgaguagau

SEQ ID NO: 1071808 - RNA, 19 nt, Artificial Sequence
  Description of Artificial Sequence: Synthetic oligonucleotide
ggucgacugcugacauuuu

SEQ ID NO: 1071809 - RNA, 19 nt, Artificial Sequence
  Description of Artificial Sequence: Synthetic oligonucleotide
ccccacgcacugguggccu

SEQ ID NO: 1071810 - RNA, 19 nt, Artificial Sequence
  Description of Artificial Sequence: Synthetic oligonucleotide
ccacgcacugguggccuuu

SEQ ID NO: 1071811 - RNA, 19 nt, Artificial Sequence
  Description of Artificial Sequence: Synthetic oligonucleotide
cccacgcacugguggccuu

SEQ ID NO: 1071812 - RNA, 19 nt, Artificial Sequence
  Description of Artificial Sequence: Synthetic oligonucleotide
aauaauuuauaacaugggg

SEQ ID NO: 1071813 - RNA, 19 nt, Artificial Sequence
  Description of Artificial Sequence: Synthetic oligonucleotide
acagcaauaaauuaggugg

SEQ ID NO: 1071814 - RNA, 19 nt, Artificial Sequence
  Description of Artificial Sequence: Synthetic oligonucleotide
uuauugauauccaauaugg

SEQ ID NO: 1071815 - RNA, 19 nt, Artificial Sequence
  Description of Artificial Sequence: Synthetic oligonucleotide
aauuacuucaguaagaaag

SEQ ID NO: 1071816 - RNA, 19 nt, Artificial Sequence
  Description of Artificial Sequence: Synthetic oligonucleotide
uauauaauuauauauauau

SEQ ID NO: 1071817 - RNA, 19 nt, Artificial Sequence
  Description of Artificial Sequence: Synthetic oligonucleotide
uauauauauauauauaucu

SEQ ID NO: 1071818 - RNA, 19 nt, Artificial Sequence
  Description of Artificial Sequence: Synthetic oligonucleotide
uauaauuauauauauauau

SEQ ID NO: 1071819 - RNA, 19 nt, Artificial Sequence
  Description of Artificial Sequence: Synthetic oligonucleotide
uaaauugugacaaugaaau

SEQ ID NO: 1071820 - RNA, 19 nt, Artificial Sequence
  Description of Artificial Sequence: Synthetic oligonucleotide
aaugaaacugccaaguagc

SEQ ID NO: 1071821 - RNA, 19 nt, Artificial Sequence
  Description of Artificial Sequence: Synthetic oligonucleotide
uauauauauauauauauau

SEQ ID NO: 1071822 - RNA, 19 nt, Artificial Sequence
  Description of Artificial Sequence: Synthetic oligonucleotide
acaucuauauauuaaauug

SEQ ID NO: 1071823 - RNA, 19 nt, Artificial Sequence
  Description of Artificial Sequence: Synthetic oligonucleotide
aaaucuguacgauaaaaug

SEQ ID NO: 1071824 - RNA, 19 nt, Artificial Sequence
  Description of Artificial Sequence: Synthetic oligonucleotide
auuauauauauauauauau

SEQ ID NO: 1071825 - RNA, 19 nt, Artificial Sequence
  Description of Artificial Sequence: Synthetic oligonucleotide
aacaguauggagucuuugc

SEQ ID NO: 1071826 - RNA, 19 nt, Artificial Sequence
  Description of Artificial Sequence: Synthetic oligonucleotide
aaaugaaacugccaaguag

SEQ ID NO: 1071827 - RNA, 19 nt, Artificial Sequence
  Description of Artificial Sequence: Synthetic oligonucleotide
guaagaaagcacaagaugg

SEQ ID NO: 1071828 - RNA, 19 nt, Artificial Sequence
  Description of Artificial Sequence: Synthetic oligonucleotide
uaauuauauauauauauau

SEQ ID NO: 1071829 - RNA, 19 nt, Artificial Sequence
  Description of Artificial Sequence: Synthetic oligonucleotide
uggccaaugacccagagcc

SEQ ID NO: 1071830 - RNA, 19 nt, Artificial Sequence
  Description of Artificial Sequence: Synthetic oligonucleotide
ucuacaguaucaaacuggg

SEQ ID NO: 1071831 - RNA, 19 nt, Artificial Sequence
  Description of Artificial Sequence: Synthetic oligonucleotide
uauauauauauauaucuuc

SEQ ID NO: 1071832 - RNA, 19 nt, Artificial Sequence
  Description of Artificial Sequence: Synthetic oligonucleotide
uauggauuaccuaccaagg

SEQ ID NO: 1071833 - RNA, 19 nt, Artificial Sequence
  Description of Artificial Sequence: Synthetic oligonucleotide
auauggauuaccuaccaag

SEQ ID NO: 1071834 - RNA, 19 nt, Artificial Sequence
  Description of Artificial Sequence: Synthetic oligonucleotide
uauuaaauugugacaauga

SEQ ID NO: 1071835 - RNA, 19 nt, Artificial Sequence
  Description of Artificial Sequence: Synthetic oligonucleotide
ucugcauuaauaaaagauc

SEQ ID NO: 1071836 - RNA, 19 nt, Artificial Sequence
  Description of Artificial Sequence: Synthetic oligonucleotide
auauauauauaucuucucu

SEQ ID NO: 1071837 - RNA, 19 nt, Artificial Sequence
  Description of Artificial Sequence: Synthetic oligonucleotide
aucaauugggcaccaaagc

SEQ ID NO: 1071838 - RNA, 19 nt, Artificial Sequence
  Description of Artificial Sequence: Synthetic oligonucleotide
aaugaaauuucagugacau

SEQ ID NO: 1071839 - RNA, 19 nt, Artificial Sequence
  Description of Artificial Sequence: Synthetic oligonucleotide
aagaaagcacaagauggcc

SEQ ID NO: 1071840 - RNA, 19 nt, Artificial Sequence
  Description of Artificial Sequence: Synthetic oligonucleotide
uuauauauauauauauaua

SEQ ID NO: 1071841 - RNA, 19 nt, Artificial Sequence
  Description of Artificial Sequence: Synthetic oligonucleotide
uaucaauugggcaccaaag

SEQ ID NO: 1071842 - RNA, 19 nt, Artificial Sequence
  Description of Artificial Sequence: Synthetic oligonucleotide
auuacuucaguaagaaagc

SEQ ID NO: 1071843 - RNA, 19 nt, Artificial Sequence
  Description of Artificial Sequence: Synthetic oligonucleotide
aaagcgacaguaugguauc

SEQ ID NO: 1071844 - RNA, 19 nt, Artificial Sequence
  Description of Artificial Sequence: Synthetic oligonucleotide
cacaagauggccaaugacc

SEQ ID NO: 1071845 - RNA, 19 nt, Artificial Sequence
  Description of Artificial Sequence: Synthetic oligonucleotide
ucuauauauuaaauuguga

SEQ ID NO: 1071846 - RNA, 19 nt, Artificial Sequence
  Description of Artificial Sequence: Synthetic oligonucleotide
auauauauauauauauauc

SEQ ID NO: 1071847 - RNA, 19 nt, Artificial Sequence
  Description of Artificial Sequence: Synthetic oligonucleotide
ugugacaaugaaauuucag

SEQ ID NO: 1071848 - RNA, 19 nt, Artificial Sequence
  Description of Artificial Sequence: Synthetic oligonucleotide
cuuauugauauccaauaug

SEQ ID NO: 1071849 - RNA, 19 nt, Artificial Sequence
  Description of Artificial Sequence: Synthetic oligonucleotide
auauccaauauggauuacc

SEQ ID NO: 1071850 - RNA, 19 nt, Artificial Sequence
  Description of Artificial Sequence: Synthetic oligonucleotide
auggauuaccuaccaaggc

SEQ ID NO: 1071851 - RNA, 19 nt, Artificial Sequence
  Description of Artificial Sequence: Synthetic oligonucleotide
gugacauagagccacgggg

SEQ ID NO: 1071852 - RNA, 19 nt, Artificial Sequence
  Description of Artificial Sequence: Synthetic oligonucleotide
uuaccuaccaaggcuaugg

SEQ ID NO: 1071853 - RNA, 19 nt, Artificial Sequence
  Description of Artificial Sequence: Synthetic oligonucleotide
gacauguggaaucugugcc

SEQ ID NO: 1071854 - RNA, 19 nt, Artificial Sequence
  Description of Artificial Sequence: Synthetic oligonucleotide
uaugguauccaccccagcu

SEQ ID NO: 1071855 - RNA, 19 nt, Artificial Sequence
  Description of Artificial Sequence: Synthetic oligonucleotide
uggauuaccuaccaaggcu

SEQ ID NO: 1071856 - RNA, 19 nt, Artificial Sequence
  Description of Artificial Sequence: Synthetic oligonucleotide
aauuauauauauauauaua

SEQ ID NO: 1071857 - RNA, 19 nt, Artificial Sequence
  Description of Artificial Sequence: Synthetic oligonucleotide
auauauauauauaucuucu

SEQ ID NO: 1071858 - RNA, 19 nt, Artificial Sequence
  Description of Artificial Sequence: Synthetic oligonucleotide
uauauauauauaucuucuc

SEQ ID NO: 1071859 - RNA, 19 nt, Artificial Sequence
  Description of Artificial Sequence: Synthetic oligonucleotide
uacgauaaaauguguauau

SEQ ID NO: 1071860 - RNA, 19 nt, Artificial Sequence
  Description of Artificial Sequence: Synthetic oligonucleotide
auauuaaauugugacaaug

SEQ ID NO: 1071861 - RNA, 19 nt, Artificial Sequence
  Description of Artificial Sequence: Synthetic oligonucleotide
uggaaucugugccagggag

SEQ ID NO: 1071862 - RNA, 19 nt, Artificial Sequence
  Description of Artificial Sequence: Synthetic oligonucleotide
ugacauagagccacggggc

SEQ ID NO: 1071863 - RNA, 19 nt, Artificial Sequence
  Description of Artificial Sequence: Synthetic oligonucleotide
aaguaaagcuugcuuugag

SEQ ID NO: 1071864 - RNA, 19 nt, Artificial Sequence
  Description of Artificial Sequence: Synthetic oligonucleotide
aaagcagucacagcgacau

SEQ ID NO: 1071865 - RNA, 19 nt, Artificial Sequence
  Description of Artificial Sequence: Synthetic oligonucleotide
auguaccuggcucuaaagg

SEQ ID NO: 1071866 - RNA, 19 nt, Artificial Sequence
  Description of Artificial Sequence: Synthetic oligonucleotide
uguaguguccuuucauaag

SEQ ID NO: 1071867 - RNA, 19 nt, Artificial Sequence
  Description of Artificial Sequence: Synthetic oligonucleotide
uguggaaucugugccaggg

SEQ ID NO: 1071868 - RNA, 19 nt, Artificial Sequence
  Description of Artificial Sequence: Synthetic oligonucleotide
guuggcagcaacucaaggc

SEQ ID NO: 1071869 - RNA, 19 nt, Artificial Sequence
  Description of Artificial Sequence: Synthetic oligonucleotide
cuuuuauccugcaucugcc

SEQ ID NO: 1071870 - RNA, 19 nt, Artificial Sequence
  Description of Artificial Sequence: Synthetic oligonucleotide
accacuguaguuccccgcc

SEQ ID NO: 1071871 - RNA, 19 nt, Artificial Sequence
  Description of Artificial Sequence: Synthetic oligonucleotide
agcucagcagauuugacga

SEQ ID NO: 1071872 - RNA, 19 nt, Artificial Sequence
  Description of Artificial Sequence: Synthetic oligonucleotide
cauaaggacaagaaggcca

SEQ ID NO: 1071873 - RNA, 19 nt, Artificial Sequence
  Description of Artificial Sequence: Synthetic oligonucleotide
uaccaugccucuuaggucu

SEQ ID NO: 1071874 - RNA, 19 nt, Artificial Sequence
  Description of Artificial Sequence: Synthetic oligonucleotide
cacaaggcccuccagaugc

SEQ ID NO: 1071875 - RNA, 19 nt, Artificial Sequence
  Description of Artificial Sequence: Synthetic oligonucleotide
uuuauccugcaucugccug

SEQ ID NO: 1071876 - RNA, 19 nt, Artificial Sequence
  Description of Artificial Sequence: Synthetic oligonucleotide
aucuacaguaucaaacugg

SEQ ID NO: 1071877 - RNA, 19 nt, Artificial Sequence
  Description of Artificial Sequence: Synthetic oligonucleotide
auguacagcaauaaauuag

SEQ ID NO: 1071878 - RNA, 19 nt, Artificial Sequence
  Description of Artificial Sequence: Synthetic oligonucleotide
aguguccuuucauaaggac

SEQ ID NO: 1071879 - RNA, 19 nt, Artificial Sequence
  Description of Artificial Sequence: Synthetic oligonucleotide
gagagccucccuuuuaucc

SEQ ID NO: 1071880 - RNA, 19 nt, Artificial Sequence
  Description of Artificial Sequence: Synthetic oligonucleotide
gaucuacaguaucaaacug

SEQ ID NO: 1071881 - RNA, 19 nt, Artificial Sequence
  Description of Artificial Sequence: Synthetic oligonucleotide
agugacauagagccacggg

SEQ ID NO: 1071882 - RNA, 19 nt, Artificial Sequence
  Description of Artificial Sequence: Synthetic oligonucleotide
auaaauuaggugguggcca

SEQ ID NO: 1071883 - RNA, 19 nt, Artificial Sequence
  Description of Artificial Sequence: Synthetic oligonucleotide
gaggacauaauuacuucag

SEQ ID NO: 1071884 - RNA, 19 nt, Artificial Sequence
  Description of Artificial Sequence: Synthetic oligonucleotide
aggccaacaguauggaguc

SEQ ID NO: 1071885 - RNA, 19 nt, Artificial Sequence
  Description of Artificial Sequence: Synthetic oligonucleotide
guaaagcuugcuuugagaa

SEQ ID NO: 1071886 - RNA, 19 nt, Artificial Sequence
  Description of Artificial Sequence: Synthetic oligonucleotide
auaccaugccucuuagguc

SEQ ID NO: 1071887 - RNA, 19 nt, Artificial Sequence
  Description of Artificial Sequence: Synthetic oligonucleotide
aauauggauuaccuaccaa

SEQ ID NO: 1071888 - RNA, 19 nt, Artificial Sequence
  Description of Artificial Sequence: Synthetic oligonucleotide
aucuguacgauaaaaugug

SEQ ID NO: 1071889 - RNA, 19 nt, Artificial Sequence
  Description of Artificial Sequence: Synthetic oligonucleotide
uuugagaagucggaggaac

SEQ ID NO: 1071890 - RNA, 19 nt, Artificial Sequence
  Description of Artificial Sequence: Synthetic oligonucleotide
aguaugugucccugucacc

SEQ ID NO: 1071891 - RNA, 19 nt, Artificial Sequence
  Description of Artificial Sequence: Synthetic oligonucleotide
ugguauccaccccagcuag

SEQ ID NO: 1071892 - RNA, 19 nt, Artificial Sequence
  Description of Artificial Sequence: Synthetic oligonucleotide
acaguaucaaacugggaaa

SEQ ID NO: 1071893 - RNA, 19 nt, Artificial Sequence
  Description of Artificial Sequence: Synthetic oligonucleotide
auaauuauauauauauaua

SEQ ID NO: 1071894 - RNA, 19 nt, Artificial Sequence
  Description of Artificial Sequence: Synthetic oligonucleotide
caguauggagucuuugccc

SEQ ID NO: 1071895 - RNA, 19 nt, Artificial Sequence
  Description of Artificial Sequence: Synthetic oligonucleotide
ucccaauaauuuauaacau

SEQ ID NO: 1071896 - RNA, 19 nt, Artificial Sequence
  Description of Artificial Sequence: Synthetic oligonucleotide
cuuuggcuuagccugcucc

SEQ ID NO: 1071897 - RNA, 19 nt, Artificial Sequence
  Description of Artificial Sequence: Synthetic oligonucleotide
ucuggaggacauaauuacu

SEQ ID NO: 1071898 - RNA, 19 nt, Artificial Sequence
  Description of Artificial Sequence: Synthetic oligonucleotide
aacucaaggccagugguca

SEQ ID NO: 1071899 - RNA, 19 nt, Artificial Sequence
  Description of Artificial Sequence: Synthetic oligonucleotide
aauuaggugguggccauga

SEQ ID NO: 1071900 - RNA, 19 nt, Artificial Sequence
  Description of Artificial Sequence: Synthetic oligonucleotide
ucuguacgauaaaaugugu

SEQ ID NO: 1071901 - RNA, 19 nt, Artificial Sequence
  Description of Artificial Sequence: Synthetic oligonucleotide
ucuuaggucucuuccacau

SEQ ID NO: 1071902 - RNA, 19 nt, Artificial Sequence
  Description of Artificial Sequence: Synthetic oligonucleotide
ucccuuuuauccugcaucu

SEQ ID NO: 1071903 - RNA, 19 nt, Artificial Sequence
  Description of Artificial Sequence: Synthetic oligonucleotide
gaugaguccucacucccug

SEQ ID NO: 1071904 - RNA, 19 nt, Artificial Sequence
  Description of Artificial Sequence: Synthetic oligonucleotide
ucaguaugugucccuguca

SEQ ID NO: 1071905 - RNA, 19 nt, Artificial Sequence
  Description of Artificial Sequence: Synthetic oligonucleotide
ucauaaggacaagaaggcc

SEQ ID NO: 1071906 - RNA, 19 nt, Artificial Sequence
  Description of Artificial Sequence: Synthetic oligonucleotide
auauauauauauauaucuu

SEQ ID NO: 1071907 - RNA, 19 nt, Artificial Sequence
  Description of Artificial Sequence: Synthetic oligonucleotide
ucagugacauagagccacg

SEQ ID NO: 1071908 - RNA, 19 nt, Artificial Sequence
  Description of Artificial Sequence: Synthetic oligonucleotide
uaugguuccaacagugcuu

SEQ ID NO: 1071909 - RNA, 19 nt, Artificial Sequence
  Description of Artificial Sequence: Synthetic oligonucleotide
uuauccugcaucugccugu

SEQ ID NO: 1071910 - RNA, 19 nt, Artificial Sequence
  Description of Artificial Sequence: Synthetic oligonucleotide
uggacauguggaaucugug

SEQ ID NO: 1071911 - RNA, 19 nt, Artificial Sequence
  Description of Artificial Sequence: Synthetic oligonucleotide
cuaucgucugcccuugggc

SEQ ID NO: 1071912 - RNA, 19 nt, Artificial Sequence
  Description of Artificial Sequence: Synthetic oligonucleotide
ugcacagguacuccaggug

SEQ ID NO: 1071913 - RNA, 19 nt, Artificial Sequence
  Description of Artificial Sequence: Synthetic oligonucleotide
aagucggaggaacaaguuu

SEQ ID NO: 1071914 - RNA, 19 nt, Artificial Sequence
  Description of Artificial Sequence: Synthetic oligonucleotide
gcagguaucaauugggcac

SEQ ID NO: 1071915 - RNA, 19 nt, Artificial Sequence
  Description of Artificial Sequence: Synthetic oligonucleotide
cucccuuuuauccugcauc

SEQ ID NO: 1071916 - RNA, 19 nt, Artificial Sequence
  Description of Artificial Sequence: Synthetic oligonucleotide
uccauaccaugccucuuag

SEQ ID NO: 1071917 - RNA, 19 nt, Artificial Sequence
  Description of Artificial Sequence: Synthetic oligonucleotide
cuaccaaggcuaugguucc

SEQ ID NO: 1071918 - RNA, 19 nt, Artificial Sequence
  Description of Artificial Sequence: Synthetic oligonucleotide
aagcacaagauggccaaug

SEQ ID NO: 1071919 - RNA, 19 nt, Artificial Sequence
  Description of Artificial Sequence: Synthetic oligonucleotide
agcagauuugacgauggug

SEQ ID NO: 1071920 - RNA, 19 nt, Artificial Sequence
  Description of Artificial Sequence: Synthetic oligonucleotide
caacagugcuuucuaagug

SEQ ID NO: 1071921 - RNA, 19 nt, Artificial Sequence
  Description of Artificial Sequence: Synthetic oligonucleotide
uaguguccuuucauaagga

SEQ ID NO: 1071922 - RNA, 19 nt, Artificial Sequence
  Description of Artificial Sequence: Synthetic oligonucleotide
auaggcgugagggcugugc

SEQ ID NO: 1071923 - RNA, 19 nt, Artificial Sequence
  Description of Artificial Sequence: Synthetic oligonucleotide
acauguggaaucugugcca

SEQ ID NO: 1071924 - RNA, 19 nt, Artificial Sequence
  Description of Artificial Sequence: Synthetic oligonucleotide
gacauguacagcaauaaau

SEQ ID NO: 1071925 - RNA, 19 nt, Artificial Sequence
  Description of Artificial Sequence: Synthetic oligonucleotide
uauccaccccagcuagagg

SEQ ID NO: 1071926 - RNA, 19 nt, Artificial Sequence
  Description of Artificial Sequence: Synthetic oligonucleotide
cuaagugccuggcuuuggc

SEQ ID NO: 1071927 - RNA, 19 nt, Artificial Sequence
  Description of Artificial Sequence: Synthetic oligonucleotide
auauaauuauauauauaua

SEQ ID NO: 1071928 - RNA, 19 nt, Artificial Sequence
  Description of Artificial Sequence: Synthetic oligonucleotide
caucuauauauuaaauugu

SEQ ID NO: 1071929 - RNA, 19 nt, Artificial Sequence
  Description of Artificial Sequence: Synthetic oligonucleotide
gaaggccaacaguauggag

SEQ ID NO: 1071930 - RNA, 19 nt, Artificial Sequence
  Description of Artificial Sequence: Synthetic oligonucleotide
aaacacaccccugggagaa

SEQ ID NO: 1071931 - RNA, 19 nt, Artificial Sequence
  Description of Artificial Sequence: Synthetic oligonucleotide
aagcgacaguaugguaucc

SEQ ID NO: 1071932 - RNA, 19 nt, Artificial Sequence
  Description of Artificial Sequence: Synthetic oligonucleotide
ccuuuuauccugcaucugc

SEQ ID NO: 1071933 - RNA, 19 nt, Artificial Sequence
  Description of Artificial Sequence: Synthetic oligonucleotide
ugguccuuauugauaucca

SEQ ID NO: 1071934 - RNA, 19 nt, Artificial Sequence
  Description of Artificial Sequence: Synthetic oligonucleotide
uuccugucagcaacuaaaa

SEQ ID NO: 1071935 - RNA, 19 nt, Artificial Sequence
  Description of Artificial Sequence: Synthetic oligonucleotide
cucucucuuuaaauauccc

SEQ ID NO: 1071936 - RNA, 19 nt, Artificial Sequence
  Description of Artificial Sequence: Synthetic oligonucleotide
gagaagucggaggaacaag

SEQ ID NO: 1071937 - RNA, 19 nt, Artificial Sequence
  Description of Artificial Sequence: Synthetic oligonucleotide
gcagauuugacgaugguga

SEQ ID NO: 1071938 - RNA, 19 nt, Artificial Sequence
  Description of Artificial Sequence: Synthetic oligonucleotide
augaguccucacucccugc

SEQ ID NO: 1071939 - RNA, 19 nt, Artificial Sequence
  Description of Artificial Sequence: Synthetic oligonucleotide
uuucuaagugccuggcuuu

SEQ ID NO: 1071940 - RNA, 19 nt, Artificial Sequence
  Description of Artificial Sequence: Synthetic oligonucleotide
agcacaagauggccaauga

SEQ ID NO: 1071941 - RNA, 19 nt, Artificial Sequence
  Description of Artificial Sequence: Synthetic oligonucleotide
gaaagcgacaguaugguau

SEQ ID NO: 1071942 - RNA, 19 nt, Artificial Sequence
  Description of Artificial Sequence: Synthetic oligonucleotide
ggacauguggaaucugugc

SEQ ID NO: 1071943 - RNA, 19 nt, Artificial Sequence
  Description of Artificial Sequence: Synthetic oligonucleotide
aggcagguaucaauugggc

SEQ ID NO: 1071944 - RNA, 19 nt, Artificial Sequence
  Description of Artificial Sequence: Synthetic oligonucleotide
agcccuaugaaggaggaau

SEQ ID NO: 1071945 - RNA, 19 nt, Artificial Sequence
  Description of Artificial Sequence: Synthetic oligonucleotide
agaagucggaggaacaagu

SEQ ID NO: 1071946 - RNA, 19 nt, Artificial Sequence
  Description of Artificial Sequence: Synthetic oligonucleotide
ucuaagugccuggcuuugg

SEQ ID NO: 1071947 - RNA, 19 nt, Artificial Sequence
  Description of Artificial Sequence: Synthetic oligonucleotide
aaugacccagagcccuaug

SEQ ID NO: 1071948 - RNA, 19 nt, Artificial Sequence
  Description of Artificial Sequence: Synthetic oligonucleotide
cccaauaauuuauaacaug

SEQ ID NO: 1071949 - RNA, 19 nt, Artificial Sequence
  Description of Artificial Sequence: Synthetic oligonucleotide
agcaauaaauuagguggug

SEQ ID NO: 1071950 - RNA, 19 nt, Artificial Sequence
  Description of Artificial Sequence: Synthetic oligonucleotide
cugccaaguagcagguggc

SEQ ID NO: 1071951 - RNA, 19 nt, Artificial Sequence
  Description of Artificial Sequence: Synthetic oligonucleotide
agcgcaggcuagcuccagc

SEQ ID NO: 1071952 - RNA, 19 nt, Artificial Sequence
  Description of Artificial Sequence: Synthetic oligonucleotide
cuaccacuguaguuccccg

SEQ ID NO: 1071953 - RNA, 19 nt, Artificial Sequence
  Description of Artificial Sequence: Synthetic oligonucleotide
guuccugucagcaacuaaa

SEQ ID NO: 1071954 - RNA, 19 nt, Artificial Sequence
  Description of Artificial Sequence: Synthetic oligonucleotide
cacccuacuccucaggguc

SEQ ID NO: 1071955 - RNA, 19 nt, Artificial Sequence
  Description of Artificial Sequence: Synthetic oligonucleotide
gaggcguguccacaaggcc

SEQ ID NO: 1071956 - RNA, 19 nt, Artificial Sequence
  Description of Artificial Sequence: Synthetic oligonucleotide
guuguaguguccuuucaua

SEQ ID NO: 1071957 - RNA, 19 nt, Artificial Sequence
  Description of Artificial Sequence: Synthetic oligonucleotide
augagagccucccuuuuau

SEQ ID NO: 1071958 - RNA, 19 nt, Artificial Sequence
  Description of Artificial Sequence: Synthetic oligonucleotide
ugccuaccacuguaguucc

SEQ ID NO: 1071959 - RNA, 19 nt, Artificial Sequence
  Description of Artificial Sequence: Synthetic oligonucleotide
ucaccugccuaccacugua

SEQ ID NO: 1071960 - RNA, 19 nt, Artificial Sequence
  Description of Artificial Sequence: Synthetic oligonucleotide
ggagaugaguccucacucc

SEQ ID NO: 1071961 - RNA, 19 nt, Artificial Sequence
  Description of Artificial Sequence: Synthetic oligonucleotide
aguaugguauccaccccag

SEQ ID NO: 1071962 - RNA, 19 nt, Artificial Sequence
  Description of Artificial Sequence: Synthetic oligonucleotide
uauccugcacagguacucc

SEQ ID NO: 1071963 - RNA, 19 nt, Artificial Sequence
  Description of Artificial Sequence: Synthetic oligonucleotide
agucggaggaacaaguuuu

SEQ ID NO: 1071964 - RNA, 19 nt, Artificial Sequence
  Description of Artificial Sequence: Synthetic oligonucleotide
acauguaccuggcucuaaa

SEQ ID NO: 1071965 - RNA, 19 nt, Artificial Sequence
  Description of Artificial Sequence: Synthetic oligonucleotide
gucaguaugugucccuguc

SEQ ID NO: 1071966 - RNA, 19 nt, Artificial Sequence
  Description of Artificial Sequence: Synthetic oligonucleotide
aaauuaggugguggccaug

SEQ ID NO: 1071967 - RNA, 19 nt, Artificial Sequence
  Description of Artificial Sequence: Synthetic oligonucleotide
uucuaagugccuggcuuug

SEQ ID NO: 1071968 - RNA, 19 nt, Artificial Sequence
  Description of Artificial Sequence: Synthetic oligonucleotide
augguauccaccccagcua

SEQ ID NO: 1071969 - RNA, 19 nt, Artificial Sequence
  Description of Artificial Sequence: Synthetic oligonucleotide
auuaggugguggccaugag

SEQ ID NO: 1071970 - RNA, 19 nt, Artificial Sequence
  Description of Artificial Sequence: Synthetic oligonucleotide
ugcuuucuaagugccuggc

SEQ ID NO: 1071971 - RNA, 19 nt, Artificial Sequence
  Description of Artificial Sequence: Synthetic oligonucleotide
cacggggcaagcucacucc

SEQ ID NO: 1071972 - RNA, 19 nt, Artificial Sequence
  Description of Artificial Sequence: Synthetic oligonucleotide
caacucaaggccagugguc

SEQ ID NO: 1071973 - RNA, 19 nt, Artificial Sequence
  Description of Artificial Sequence: Synthetic oligonucleotide
uggucaccugccuaccacu

SEQ ID NO: 1071974 - RNA, 19 nt, Artificial Sequence
  Description of Artificial Sequence: Synthetic oligonucleotide
ucacccuacuccucagggu

SEQ ID NO: 1071975 - RNA, 19 nt, Artificial Sequence
  Description of Artificial Sequence: Synthetic oligonucleotide
cuguacgauaaaaugugua

SEQ ID NO: 1071976 - RNA, 19 nt, Artificial Sequence
  Description of Artificial Sequence: Synthetic oligonucleotide
guacgauaaaauguguaua

SEQ ID NO: 1071977 - RNA, 19 nt, Artificial Sequence
  Description of Artificial Sequence: Synthetic oligonucleotide
ggaucaacagucugugauc

SEQ ID NO: 1071978 - RNA, 19 nt, Artificial Sequence
  Description of Artificial Sequence: Synthetic oligonucleotide
guauggagucuuugcccag

SEQ ID NO: 1071979 - RNA, 19 nt, Artificial Sequence
  Description of Artificial Sequence: Synthetic oligonucleotide
uaccuaccaaggcuauggu

SEQ ID NO: 1071980 - RNA, 19 nt, Artificial Sequence
  Description of Artificial Sequence: Synthetic oligonucleotide
acugcccgugcccugccag

SEQ ID NO: 1071981 - RNA, 19 nt, Artificial Sequence
  Description of Artificial Sequence: Synthetic oligonucleotide
aggacucguuucccaggac

SEQ ID NO: 1071982 - RNA, 19 nt, Artificial Sequence
  Description of Artificial Sequence: Synthetic oligonucleotide
uagaggcccuuagaggaug

SEQ ID NO: 1071983 - RNA, 19 nt, Artificial Sequence
  Description of Artificial Sequence: Synthetic oligonucleotide
ggcuaugguuccaacagug

SEQ ID NO: 1071984 - RNA, 19 nt, Artificial Sequence
  Description of Artificial Sequence: Synthetic oligonucleotide
uaccuggcucuaaaggcua

SEQ ID NO: 1071985 - RNA, 19 nt, Artificial Sequence
  Description of Artificial Sequence: Synthetic oligonucleotide
cuaugguuccaacagugcu

SEQ ID NO: 1071986 - RNA, 19 nt, Artificial Sequence
  Description of Artificial Sequence: Synthetic oligonucleotide
aggcuaugguuccaacagu

SEQ ID NO: 1071987 - RNA, 19 nt, Artificial Sequence
  Description of Artificial Sequence: Synthetic oligonucleotide
ggaguuguucauccuggug

SEQ ID NO: 1071988 - RNA, 19 nt, Artificial Sequence
  Description of Artificial Sequence: Synthetic oligonucleotide
guaugugucccugucaccu

SEQ ID NO: 1071989 - RNA, 19 nt, Artificial Sequence
  Description of Artificial Sequence: Synthetic oligonucleotide
auuaccuaccaaggcuaug

SEQ ID NO: 1071990 - RNA, 19 nt, Artificial Sequence
  Description of Artificial Sequence: Synthetic oligonucleotide
augaaacugccaaguagca

SEQ ID NO: 1071991 - RNA, 19 nt, Artificial Sequence
  Description of Artificial Sequence: Synthetic oligonucleotide
aaccuacucugcauuaaua

SEQ ID NO: 1071992 - RNA, 19 nt, Artificial Sequence
  Description of Artificial Sequence: Synthetic oligonucleotide
accccugggagaaggagag

SEQ ID NO: 1071993 - RNA, 19 nt, Artificial Sequence
  Description of Artificial Sequence: Synthetic oligonucleotide
gaauaggcagguaucaauu

SEQ ID NO: 1071994 - RNA, 19 nt, Artificial Sequence
  Description of Artificial Sequence: Synthetic oligonucleotide
agccugaaggccaacagua

SEQ ID NO: 1071995 - RNA, 19 nt, Artificial Sequence
  Description of Artificial Sequence: Synthetic oligonucleotide
agguuguaguguccuuuca

SEQ ID NO: 1071996 - RNA, 19 nt, Artificial Sequence
  Description of Artificial Sequence: Synthetic oligonucleotide
ugagagccucccuuuuauc

SEQ ID NO: 1071997 - RNA, 19 nt, Artificial Sequence
  Description of Artificial Sequence: Synthetic oligonucleotide
auccugcacagguacucca

SEQ ID NO: 1071998 - RNA, 19 nt, Artificial Sequence
  Description of Artificial Sequence: Synthetic oligonucleotide
cgugcgaaggucugcaggg

SEQ ID NO: 1071999 - RNA, 19 nt, Artificial Sequence
  Description of Artificial Sequence: Synthetic oligonucleotide
cccgggauaggcgugaggg

SEQ ID NO: 1072000 - RNA, 19 nt, Artificial Sequence
  Description of Artificial Sequence: Synthetic oligonucleotide
gauauccaauauggauuac

SEQ ID NO: 1072001 - RNA, 19 nt, Artificial Sequence
  Description of Artificial Sequence: Synthetic oligonucleotide
acgauaaaauguguauaua

SEQ ID NO: 1072002 - RNA, 19 nt, Artificial Sequence
  Description of Artificial Sequence: Synthetic oligonucleotide
cagucacagcgacauguac

SEQ ID NO: 1072003 - RNA, 19 nt, Artificial Sequence
  Description of Artificial Sequence: Synthetic oligonucleotide
agggcacagacaagggauc

SEQ ID NO: 1072004 - RNA, 19 nt, Artificial Sequence
  Description of Artificial Sequence: Synthetic oligonucleotide
guaugguauccaccccagc

SEQ ID NO: 1072005 - RNA, 19 nt, Artificial Sequence
  Description of Artificial Sequence: Synthetic oligonucleotide
aaagccucaucgagccuga

SEQ ID NO: 1072006 - RNA, 19 nt, Artificial Sequence
  Description of Artificial Sequence: Synthetic oligonucleotide
uaaauaucccaugguccuu

SEQ ID NO: 1072007 - RNA, 19 nt, Artificial Sequence
  Description of Artificial Sequence: Synthetic oligonucleotide
auagagccacggggcaagc

SEQ ID NO: 1072008 - RNA, 19 nt, Artificial Sequence
  Description of Artificial Sequence: Synthetic oligonucleotide
accuaccaaggcuaugguu

SEQ ID NO: 1072009 - RNA, 19 nt, Artificial Sequence
  Description of Artificial Sequence: Synthetic oligonucleotide
gguggaggagagcucagca

SEQ ID NO: 1072010 - RNA, 19 nt, Artificial Sequence
  Description of Artificial Sequence: Synthetic oligonucleotide
caguaagaaagcacaagau

SEQ ID NO: 1072011 - RNA, 19 nt, Artificial Sequence
  Description of Artificial Sequence: Synthetic oligonucleotide
agcgacaguaugguaucca

SEQ ID NO: 1072012 - RNA, 19 nt, Artificial Sequence
  Description of Artificial Sequence: Synthetic oligonucleotide
cuggaggacauaauuacuu

SEQ ID NO: 1072013 - RNA, 19 nt, Artificial Sequence
  Description of Artificial Sequence: Synthetic oligonucleotide
ugcgugcgaaggucugcag

SEQ ID NO: 1072014 - RNA, 19 nt, Artificial Sequence
  Description of Artificial Sequence: Synthetic oligonucleotide
gcgugcgaaggucugcagg

SEQ ID NO: 1072015 - RNA, 19 nt, Artificial Sequence
  Description of Artificial Sequence: Synthetic oligonucleotide
gggaucaacagucugugau

SEQ ID NO: 1072016 - RNA, 19 nt, Artificial Sequence
  Description of Artificial Sequence: Synthetic oligonucleotide
ucccugcuauccuugccuc

SEQ ID NO: 1072017 - RNA, 19 nt, Artificial Sequence
  Description of Artificial Sequence: Synthetic oligonucleotide
ggaaucugugccagggagc

SEQ ID NO: 1072018 - RNA, 19 nt, Artificial Sequence
  Description of Artificial Sequence: Synthetic oligonucleotide
gcauugaaagccucaucga

SEQ ID NO: 1072019 - RNA, 19 nt, Artificial Sequence
  Description of Artificial Sequence: Synthetic oligonucleotide
caccugccuaccacuguag

SEQ ID NO: 1072020 - RNA, 19 nt, Artificial Sequence
  Description of Artificial Sequence: Synthetic oligonucleotide
augcacccuuugucccucc

SEQ ID NO: 1072021 - RNA, 19 nt, Artificial Sequence
  Description of Artificial Sequence: Synthetic oligonucleotide
acaccccugggagaaggag

SEQ ID NO: 1072022 - RNA, 19 nt, Artificial Sequence
  Description of Artificial Sequence: Synthetic oligonucleotide
uaguuccccgccccacugu

SEQ ID NO: 1072023 - RNA, 19 nt, Artificial Sequence
  Description of Artificial Sequence: Synthetic oligonucleotide
gguacuccagguggcauug

SEQ ID NO: 1072024 - RNA, 19 nt, Artificial Sequence
  Description of Artificial Sequence: Synthetic oligonucleotide
cuacaguaucaaacuggga

SEQ ID NO: 1072025 - RNA, 19 nt, Artificial Sequence
  Description of Artificial Sequence: Synthetic oligonucleotide
agaugaguccucacucccu

SEQ ID NO: 1072026 - RNA, 19 nt, Artificial Sequence
  Description of Artificial Sequence: Synthetic oligonucleotide
agaggcccuuagaggaugg

SEQ ID NO: 1072027 - RNA, 19 nt, Artificial Sequence
  Description of Artificial Sequence: Synthetic oligonucleotide
caagcucacucccuuccca

SEQ ID NO: 1072028 - RNA, 19 nt, Artificial Sequence
  Description of Artificial Sequence: Synthetic oligonucleotide
ccuaucgucugcccuuggg

SEQ ID NO: 1072029 - RNA, 19 nt, Artificial Sequence
  Description of Artificial Sequence: Synthetic oligonucleotide
gaguaucugcaccuaucgu

SEQ ID NO: 1072030 - RNA, 19 nt, Artificial Sequence
  Description of Artificial Sequence: Synthetic oligonucleotide
aguggacauguggaaucug

SEQ ID NO: 1072031 - RNA, 19 nt, Artificial Sequence
  Description of Artificial Sequence: Synthetic oligonucleotide
agcgacauguacagcaaua

SEQ ID NO: 1072032 - RNA, 19 nt, Artificial Sequence
  Description of Artificial Sequence: Synthetic oligonucleotide
gaugcacccuuugucccuc

SEQ ID NO: 1072033 - RNA, 19 nt, Artificial Sequence
  Description of Artificial Sequence: Synthetic oligonucleotide
ucgucugcccuugggcccc

SEQ ID NO: 1072034 - RNA, 19 nt, Artificial Sequence
  Description of Artificial Sequence: Synthetic oligonucleotide
ucggaggaacaaguuuuau

SEQ ID NO: 1072035 - RNA, 19 nt, Artificial Sequence
  Description of Artificial Sequence: Synthetic oligonucleotide
ggauuaccuaccaaggcua

SEQ ID NO: 1072036 - RNA, 19 nt, Artificial Sequence
  Description of Artificial Sequence: Synthetic oligonucleotide
accuaucgucugcccuugg

SEQ ID NO: 1072037 - RNA, 19 nt, Artificial Sequence
  Description of Artificial Sequence: Synthetic oligonucleotide
guaccuggcucuaaaggcu

SEQ ID NO: 1072038 - RNA, 19 nt, Artificial Sequence
  Description of Artificial Sequence: Synthetic oligonucleotide
cugcaccuaucgucugccc

SEQ ID NO: 1072039 - RNA, 19 nt, Artificial Sequence
  Description of Artificial Sequence: Synthetic oligonucleotide
ccuacucugcauuaauaaa

SEQ ID NO: 1072040 - RNA, 19 nt, Artificial Sequence
  Description of Artificial Sequence: Synthetic oligonucleotide
ggucuggaggacauaauua

SEQ ID NO: 1072041 - RNA, 19 nt, Artificial Sequence
  Description of Artificial Sequence: Synthetic oligonucleotide
cacccacagaggcgugucc

SEQ ID NO: 1072042 - RNA, 19 nt, Artificial Sequence
  Description of Artificial Sequence: Synthetic oligonucleotide
ccauaccaugccucuuagg

SEQ ID NO: 1072043 - RNA, 19 nt, Artificial Sequence
  Description of Artificial Sequence: Synthetic oligonucleotide
gcgcaggcuagcuccagcc

SEQ ID NO: 1072044 - RNA, 19 nt, Artificial Sequence
  Description of Artificial Sequence: Synthetic oligonucleotide
gcucacccuacuccucagg

SEQ ID NO: 1072045 - RNA, 19 nt, Artificial Sequence
  Description of Artificial Sequence: Synthetic oligonucleotide
cccuaugaaggaggaauag

SEQ ID NO: 1072046 - RNA, 19 nt, Artificial Sequence
  Description of Artificial Sequence: Synthetic oligonucleotide
cugacacccacagaggcgu

SEQ ID NO: 1072047 - RNA, 19 nt, Artificial Sequence
  Description of Artificial Sequence: Synthetic oligonucleotide
gacaagggaucaacagucu

SEQ ID NO: 1072048 - RNA, 19 nt, Artificial Sequence
  Description of Artificial Sequence: Synthetic oligonucleotide
ggccccggcaggcacuagg

SEQ ID NO: 1072049 - RNA, 19 nt, Artificial Sequence
  Description of Artificial Sequence: Synthetic oligonucleotide
caugagagccucccuuuua

SEQ ID NO: 1072050 - RNA, 19 nt, Artificial Sequence
  Description of Artificial Sequence: Synthetic oligonucleotide
cuguaguuccccgccccac

SEQ ID NO: 1072051 - RNA, 19 nt, Artificial Sequence
  Description of Artificial Sequence: Synthetic oligonucleotide
gacucguuucccaggacau

SEQ ID NO: 1072052 - RNA, 19 nt, Artificial Sequence
  Description of Artificial Sequence: Synthetic oligonucleotide
gguuguaguguccuuucau

SEQ ID NO: 1072053 - RNA, 19 nt, Artificial Sequence
  Description of Artificial Sequence: Synthetic oligonucleotide
cacccuuugucccuccaua

SEQ ID NO: 1072054 - RNA, 19 nt, Artificial Sequence
  Description of Artificial Sequence: Synthetic oligonucleotide
ggcgugagggcugugccac

SEQ ID NO: 1072055 - RNA, 19 nt, Artificial Sequence
  Description of Artificial Sequence: Synthetic oligonucleotide
caccuaucgucugcccuug

SEQ ID NO: 1072056 - RNA, 19 nt, Artificial Sequence
  Description of Artificial Sequence: Synthetic oligonucleotide
gauuaccuaccaaggcuau

SEQ ID NO: 1072057 - RNA, 19 nt, Artificial Sequence
  Description of Artificial Sequence: Synthetic oligonucleotide
agguaucaauugggcacca

SEQ ID NO: 1072058 - RNA, 19 nt, Artificial Sequence
  Description of Artificial Sequence: Synthetic oligonucleotide
uaaggacaagaaggccaua

SEQ ID NO: 1072059 - RNA, 19 nt, Artificial Sequence
  Description of Artificial Sequence: Synthetic oligonucleotide
gaagucggaggaacaaguu

SEQ ID NO: 1072060 - RNA, 19 nt, Artificial Sequence
  Description of Artificial Sequence: Synthetic oligonucleotide
ccaugguccuuauugauau

SEQ ID NO: 1072061 - RNA, 19 nt, Artificial Sequence
  Description of Artificial Sequence: Synthetic oligonucleotide
gacauguaccuggcucuaa

SEQ ID NO: 1072062 - RNA, 19 nt, Artificial Sequence
  Description of Artificial Sequence: Synthetic oligonucleotide
acggugcgugcgaaggucu

SEQ ID NO: 1072063 - RNA, 19 nt, Artificial Sequence
  Description of Artificial Sequence: Synthetic oligonucleotide
cucaugagagccucccuuu

SEQ ID NO: 1072064 - RNA, 19 nt, Artificial Sequence
  Description of Artificial Sequence: Synthetic oligonucleotide
gguuccugucagcaacuaa

SEQ ID NO: 1072065 - RNA, 19 nt, Artificial Sequence
  Description of Artificial Sequence: Synthetic oligonucleotide
ggcugugccacugcccgug

SEQ ID NO: 1072066 - RNA, 19 nt, Artificial Sequence
  Description of Artificial Sequence: Synthetic oligonucleotide
gugggcaaguggacaugug

SEQ ID NO: 1072067 - RNA, 19 nt, Artificial Sequence
  Description of Artificial Sequence: Synthetic oligonucleotide
caaccuacucugcauuaau

SEQ ID NO: 1072068 - RNA, 19 nt, Artificial Sequence
  Description of Artificial Sequence: Synthetic oligonucleotide
gucggaggaacaaguuuua

SEQ ID NO: 1072069 - RNA, 19 nt, Artificial Sequence
  Description of Artificial Sequence: Synthetic oligonucleotide
acccuacuccucagggucu

SEQ ID NO: 1072070 - RNA, 19 nt, Artificial Sequence
  Description of Artificial Sequence: Synthetic oligonucleotide
gcaccggagaagugggaga

SEQ ID NO: 1072071 - RNA, 19 nt, Artificial Sequence
  Description of Artificial Sequence: Synthetic oligonucleotide
ggugcgugcgaaggucugc

SEQ ID NO: 1072072 - RNA, 19 nt, Artificial Sequence
  Description of Artificial Sequence: Synthetic oligonucleotide
gauaggcgugagggcugug

SEQ ID NO: 1072073 - RNA, 19 nt, Artificial Sequence
  Description of Artificial Sequence: Synthetic oligonucleotide
ccacuguaguuccccgccc

SEQ ID NO: 1072074 - RNA, 19 nt, Artificial Sequence
  Description of Artificial Sequence: Synthetic oligonucleotide
ccgggauaggcgugagggc

SEQ ID NO: 1072075 - RNA, 19 nt, Artificial Sequence
  Description of Artificial Sequence: Synthetic oligonucleotide
ccacggggcaagcucacuc

SEQ ID NO: 1072076 - RNA, 19 nt, Artificial Sequence
  Description of Artificial Sequence: Synthetic oligonucleotide
cccugcuauccuugccucc

SEQ ID NO: 1072077 - RNA, 19 nt, Artificial Sequence
  Description of Artificial Sequence: Synthetic oligonucleotide
cuggccacggugcgugcga

SEQ ID NO: 1072078 - RNA, 19 nt, Artificial Sequence
  Description of Artificial Sequence: Synthetic oligonucleotide
gucaccugccuaccacugu

SEQ ID NO: 1072079 - RNA, 19 nt, Artificial Sequence
  Description of Artificial Sequence: Synthetic oligonucleotide
ugggugugacaggcccucu

SEQ ID NO: 1072080 - RNA, 19 nt, Artificial Sequence
  Description of Artificial Sequence: Synthetic oligonucleotide
cccuuagaggauggcacug

SEQ ID NO: 1072081 - RNA, 19 nt, Artificial Sequence
  Description of Artificial Sequence: Synthetic oligonucleotide
gggcacagacaagggauca

SEQ ID NO: 1072082 - RNA, 19 nt, Artificial Sequence
  Description of Artificial Sequence: Synthetic oligonucleotide
cccaugguccuuauugaua

SEQ ID NO: 1072083 - RNA, 19 nt, Artificial Sequence
  Description of Artificial Sequence: Synthetic oligonucleotide
ccucuggccacggugcgug

SEQ ID NO: 1072084 - RNA, 19 nt, Artificial Sequence
  Description of Artificial Sequence: Synthetic oligonucleotide
ccugcuauccuugccucca

SEQ ID NO: 1072085 - RNA, 19 nt, Artificial Sequence
  Description of Artificial Sequence: Synthetic oligonucleotide
gcccucuggccacggugcg

SEQ ID NO: 1072086 - RNA, 19 nt, Artificial Sequence
  Description of Artificial Sequence: Synthetic oligonucleotide
gagcccuaugaaggaggaa

SEQ ID NO: 1072087 - RNA, 19 nt, Artificial Sequence
  Description of Artificial Sequence: Synthetic oligonucleotide
ggucaguaugugucccugu

SEQ ID NO: 1072088 - RNA, 19 nt, Artificial Sequence
  Description of Artificial Sequence: Synthetic oligonucleotide
gugccagggagcccgggau

SEQ ID NO: 1072089 - RNA, 19 nt, Artificial Sequence
  Description of Artificial Sequence: Synthetic oligonucleotide
gccccacuguccaaccuac

SEQ ID NO: 1072090 - RNA, 19 nt, Artificial Sequence
  Description of Artificial Sequence: Synthetic oligonucleotide
ccuuagaggauggcacuga

SEQ ID NO: 1072091 - RNA, 19 nt, Artificial Sequence
  Description of Artificial Sequence: Synthetic oligonucleotide
uggccacggugcgugcgaa

SEQ ID NO: 1072092 - RNA, 19 nt, Artificial Sequence
  Description of Artificial Sequence: Synthetic oligonucleotide
agcccgggauaggcgugag

SEQ ID NO: 1072093 - RNA, 19 nt, Artificial Sequence
  Description of Artificial Sequence: Synthetic oligonucleotide
ccgugugguuccugucagc

SEQ ID NO: 1072094 - RNA, 19 nt, Artificial Sequence
  Description of Artificial Sequence: Synthetic oligonucleotide
cgcgcggguccacaguggg

SEQ ID NO: 1072095 - RNA, 19 nt, Artificial Sequence
  Description of Artificial Sequence: Synthetic oligonucleotide
accuggcucuaaaggcuaa

SEQ ID NO: 1072096 - RNA, 19 nt, Artificial Sequence
  Description of Artificial Sequence: Synthetic oligonucleotide
cugacucccugcucacccu

SEQ ID NO: 1072097 - RNA, 19 nt, Artificial Sequence
  Description of Artificial Sequence: Synthetic oligonucleotide
gcccgggauaggcgugagg

SEQ ID NO: 1072098 - RNA, 19 nt, Artificial Sequence
  Description of Artificial Sequence: Synthetic oligonucleotide
gguaucaauugggcaccaa

SEQ ID NO: 1072099 - RNA, 19 nt, Artificial Sequence
  Description of Artificial Sequence: Synthetic oligonucleotide
cccuuuuauccugcaucug

SEQ ID NO: 1072100 - RNA, 19 nt, Artificial Sequence
  Description of Artificial Sequence: Synthetic oligonucleotide
caccggagaagugggagau

SEQ ID NO: 1072101 - RNA, 19 nt, Artificial Sequence
  Description of Artificial Sequence: Synthetic oligonucleotide
cgacauguacagcaauaaa

SEQ ID NO: 1072102 - RNA, 19 nt, Artificial Sequence
  Description of Artificial Sequence: Synthetic oligonucleotide
gcccuaugaaggaggaaua

SEQ ID NO: 1072103 - RNA, 19 nt, Artificial Sequence
  Description of Artificial Sequence: Synthetic oligonucleotide
gguauccugcacagguacu

SEQ ID NO: 1072104 - RNA, 19 nt, Artificial Sequence
  Description of Artificial Sequence: Synthetic oligonucleotide
gccugggcggccaggacuc

SEQ ID NO: 1072105 - RNA, 19 nt, Artificial Sequence
  Description of Artificial Sequence: Synthetic oligonucleotide
gccgcaugcugcuguucuc

SEQ ID NO: 1072106 - RNA, 19 nt, Artificial Sequence
  Description of Artificial Sequence: Synthetic oligonucleotide
cccgccccacuguccaacc

SEQ ID NO: 1072107 - RNA, 19 nt, Artificial Sequence
  Description of Artificial Sequence: Synthetic oligonucleotide
ccuacuccucagggucugg

SEQ ID NO: 1072108 - RNA, 19 nt, Artificial Sequence
  Description of Artificial Sequence: Synthetic oligonucleotide
ccaaccuacucugcauuaa

SEQ ID NO: 1072109 - RNA, 19 nt, Artificial Sequence
  Description of Artificial Sequence: Synthetic oligonucleotide
cagcgacauguacagcaau

SEQ ID NO: 1072110 - RNA, 19 nt, Artificial Sequence
  Description of Artificial Sequence: Synthetic oligonucleotide
ggacauguaccuggcucua

SEQ ID NO: 1072111 - RNA, 19 nt, Artificial Sequence
  Description of Artificial Sequence: Synthetic oligonucleotide
cgcgcgcggguccacagug

SEQ ID NO: 1072112 - RNA, 19 nt, Artificial Sequence
  Description of Artificial Sequence: Synthetic oligonucleotide
cgcggguccacagugggca

SEQ ID NO: 1072113 - RNA, 19 nt, Artificial Sequence
  Description of Artificial Sequence: Synthetic oligonucleotide
ggcucaugagagccucccu

SEQ ID NO: 1072114 - RNA, 19 nt, Artificial Sequence
  Description of Artificial Sequence: Synthetic oligonucleotide
gcccgugcccugccaggcc

SEQ ID NO: 1072115 - RNA, 19 nt, Artificial Sequence
  Description of Artificial Sequence: Synthetic oligonucleotide
gccuaccacuguaguuccc

SEQ ID NO: 1072116 - RNA, 19 nt, Artificial Sequence
  Description of Artificial Sequence: Synthetic oligonucleotide
gcgcgcggguccacagugg

SEQ ID NO: 1072117 - RNA, 19 nt, Artificial Sequence
  Description of Artificial Sequence: Synthetic oligonucleotide
cacugcccgugcccugcca

SEQ ID NO: 1072118 - RNA, 19 nt, Artificial Sequence
  Description of Artificial Sequence: Synthetic oligonucleotide
gcucagcagauuugacgau

SEQ ID NO: 1072119 - RNA, 19 nt, Artificial Sequence
  Description of Artificial Sequence: Synthetic oligonucleotide
ggauaggcgugagggcugu

SEQ ID NO: 1072120 - RNA, 19 nt, Artificial Sequence
  Description of Artificial Sequence: Synthetic oligonucleotide
cccgcgcgcggguccacag

SEQ ID NO: 1072121 - RNA, 19 nt, Artificial Sequence
  Description of Artificial Sequence: Synthetic oligonucleotide
cggugcgugcgaaggucug

SEQ ID NO: 1072122 - RNA, 19 nt, Artificial Sequence
  Description of Artificial Sequence: Synthetic oligonucleotide
gcgcggguccacagugggc

SEQ ID NO: 1072123 - RNA, 19 nt, Artificial Sequence
  Description of Artificial Sequence: Synthetic oligonucleotide
cgggauaggcgugagggcu

SEQ ID NO: 1072124 - RNA, 19 nt, Artificial Sequence
  Description of Artificial Sequence: Synthetic oligonucleotide
ccaacaguauggagucuuu

SEQ ID NO: 1072125 - RNA, 19 nt, Artificial Sequence
  Description of Artificial Sequence: Synthetic oligonucleotide
ccccggcaggcacuaggaa

SEQ ID NO: 1072126 - RNA, 19 nt, Artificial Sequence
  Description of Artificial Sequence: Synthetic oligonucleotide
gccacggggcaagcucacu

SEQ ID NO: 1072127 - RNA, 19 nt, Artificial Sequence
  Description of Artificial Sequence: Synthetic oligonucleotide
ccgcgcgcggguccacagu

SEQ ID NO: 1072128 - RNA, 19 nt, Artificial Sequence
  Description of Artificial Sequence: Synthetic oligonucleotide
ccccagcuagaggcccuua

SEQ ID NO: 1072129 - RNA, 19 nt, Artificial Sequence
  Description of Artificial Sequence: Synthetic oligonucleotide
aguacauuaauauaauaac

SEQ ID NO: 1072130 - RNA, 19 nt, Artificial Sequence
  Description of Artificial Sequence: Synthetic oligonucleotide
uauaagucaccaauuaugg

SEQ ID NO: 1072131 - RNA, 19 nt, Artificial Sequence
  Description of Artificial Sequence: Synthetic oligonucleotide
uuuguauuaccaaauagcc

SEQ ID NO: 1072132 - RNA, 19 nt, Artificial Sequence
  Description of Artificial Sequence: Synthetic oligonucleotide
uaaugcaucagaauuaaag

SEQ ID NO: 1072133 - RNA, 19 nt, Artificial Sequence
  Description of Artificial Sequence: Synthetic oligonucleotide
uguauuaccaaauagccac

SEQ ID NO: 1072134 - RNA, 19 nt, Artificial Sequence
  Description of Artificial Sequence: Synthetic oligonucleotide
aauaacuucuauaagucac

SEQ ID NO: 1072135 - RNA, 19 nt, Artificial Sequence
  Description of Artificial Sequence: Synthetic oligonucleotide
aaauccaaguuacaucagc

SEQ ID NO: 1072136 - RNA, 19 nt, Artificial Sequence
  Description of Artificial Sequence: Synthetic oligonucleotide
uauauaaugcaucagaauu

SEQ ID NO: 1072137 - RNA, 19 nt, Artificial Sequence
  Description of Artificial Sequence: Synthetic oligonucleotide
uauaccauacuacagaaaa

SEQ ID NO: 1072138 - RNA, 19 nt, Artificial Sequence
  Description of Artificial Sequence: Synthetic oligonucleotide
cuuagcaugugcaagaccc

SEQ ID NO: 1072139 - RNA, 19 nt, Artificial Sequence
  Description of Artificial Sequence: Synthetic oligonucleotide
aauucugaagccuacccag

SEQ ID NO: 1072140 - RNA, 19 nt, Artificial Sequence
  Description of Artificial Sequence: Synthetic oligonucleotide
uuuuauaccauacuacaga

SEQ ID NO: 1072141 - RNA, 19 nt, Artificial Sequence
  Description of Artificial Sequence: Synthetic oligonucleotide
aguuguaugcaacagcuac

SEQ ID NO: 1072142 - RNA, 19 nt, Artificial Sequence
  Description of Artificial Sequence: Synthetic oligonucleotide
cauaauuuaauccucuggc

SEQ ID NO: 1072143 - RNA, 19 nt, Artificial Sequence
  Description of Artificial Sequence: Synthetic oligonucleotide
aaagacauagaaauagcac

SEQ ID NO: 1072144 - RNA, 19 nt, Artificial Sequence
  Description of Artificial Sequence: Synthetic oligonucleotide
agauauauggccuauuuca

SEQ ID NO: 1072145 - RNA, 19 nt, Artificial Sequence
  Description of Artificial Sequence: Synthetic oligonucleotide
gaggguaucacacacagug

SEQ ID NO: 1072146 - RNA, 19 nt, Artificial Sequence
  Description of Artificial Sequence: Synthetic oligonucleotide
uuugacaucaucucuaccu

SEQ ID NO: 1072147 - RNA, 19 nt, Artificial Sequence
  Description of Artificial Sequence: Synthetic oligonucleotide
uggguuaucucuuaugagg

SEQ ID NO: 1072148 - RNA, 19 nt, Artificial Sequence
  Description of Artificial Sequence: Synthetic oligonucleotide
aauggguuaucucuuauga

SEQ ID NO: 1072149 - RNA, 19 nt, Artificial Sequence
  Description of Artificial Sequence: Synthetic oligonucleotide
ucucuauuuauccaagaag

SEQ ID NO: 1072150 - RNA, 19 nt, Artificial Sequence
  Description of Artificial Sequence: Synthetic oligonucleotide
ucaagaaguaaacagcucu

SEQ ID NO: 1072151 - RNA, 19 nt, Artificial Sequence
  Description of Artificial Sequence: Synthetic oligonucleotide
agaagcaugaagcccauac

SEQ ID NO: 1072152 - RNA, 19 nt, Artificial Sequence
  Description of Artificial Sequence: Synthetic oligonucleotide
uguuaugcuaagcauaugu

SEQ ID NO: 1072153 - RNA, 19 nt, Artificial Sequence
  Description of Artificial Sequence: Synthetic oligonucleotide
gaauuaaagacauagaaau

SEQ ID NO: 1072154 - RNA, 19 nt, Artificial Sequence
  Description of Artificial Sequence: Synthetic oligonucleotide
aacacuucaaggccucacc

SEQ ID NO: 1072155 - RNA, 19 nt, Artificial Sequence
  Description of Artificial Sequence: Synthetic oligonucleotide
cuauaagucaccaauuaug

SEQ ID NO: 1072156 - RNA, 19 nt, Artificial Sequence
  Description of Artificial Sequence: Synthetic oligonucleotide
  modified_base (4)..(4): a, c, u, g, unknown or other
aacncaaaggugaccaacc

SEQ ID NO: 1072157 - RNA, 19 nt, Artificial Sequence
  Description of Artificial Sequence: Synthetic oligonucleotide
uccuaguacauuaauauaa

SEQ ID NO: 1072158 - RNA, 19 nt, Artificial Sequence
  Description of Artificial Sequence: Synthetic oligonucleotide
cauagcaccuauaagggcc

SEQ ID NO: 1072159 - RNA, 19 nt, Artificial Sequence
  Description of Artificial Sequence: Synthetic oligonucleotide
acccacuucagucauagac

SEQ ID NO: 1072160 - RNA, 19 nt, Artificial Sequence
  Description of Artificial Sequence: Synthetic oligonucleotide
uaauuuaauccucuggccu

SEQ ID NO: 1072161 - RNA, 19 nt, Artificial Sequence
  Description of Artificial Sequence: Synthetic oligonucleotide
uccuauauaaugcaucaga

SEQ ID NO: 1072162 - RNA, 19 nt, Artificial Sequence
  Description of Artificial Sequence: Synthetic oligonucleotide
agcuccauaccuaaaaucc

SEQ ID NO: 1072163 - RNA, 19 nt, Artificial Sequence
  Description of Artificial Sequence: Synthetic oligonucleotide
gaacaaauggcaaugauga

SEQ ID NO: 1072164 - RNA, 19 nt, Artificial Sequence
  Description of Artificial Sequence: Synthetic oligonucleotide
gaaaccucaaaguuguaug

SEQ ID NO: 1072165 - RNA, 19 nt, Artificial Sequence
  Description of Artificial Sequence: Synthetic oligonucleotide
caacaugucuagcagaugg

SEQ ID NO: 1072166 - RNA, 19 nt, Artificial Sequence
  Description of Artificial Sequence: Synthetic oligonucleotide
auaaagagggcugagaaug

SEQ ID NO: 1072167 - RNA, 19 nt, Artificial Sequence
  Description of Artificial Sequence: Synthetic oligonucleotide
uuauuucauauuuugugca

SEQ ID NO: 1072168 - RNA, 19 nt, Artificial Sequence
  Description of Artificial Sequence: Synthetic oligonucleotide
uuaugaggaacccacuuca

SEQ ID NO: 1072169 - RNA, 19 nt, Artificial Sequence
  Description of Artificial Sequence: Synthetic oligonucleotide
guaugcaacagcuacuucc

SEQ ID NO: 1072170 - RNA, 19 nt, Artificial Sequence
  Description of Artificial Sequence: Synthetic oligonucleotide
  modified_base (5)..(5): a, c, u, g, unknown or other
aaacncaaaggugaccaac

SEQ ID NO: 1072171 - RNA, 19 nt, Artificial Sequence
  Description of Artificial Sequence: Synthetic oligonucleotide
ucuaugacuaucucugcag

SEQ ID NO: 1072172 - RNA, 19 nt, Artificial Sequence
  Description of Artificial Sequence: Synthetic oligonucleotide
ucuguuacuggcaauucug

SEQ ID NO: 1072173 - RNA, 19 nt, Artificial Sequence
  Description of Artificial Sequence: Synthetic oligonucleotide
aacacaguaucccugugcu

SEQ ID NO: 1072174 - RNA, 19 nt, Artificial Sequence
  Description of Artificial Sequence: Synthetic oligonucleotide
ucaccaauuauggugacag

SEQ ID NO: 1072175 - RNA, 19 nt, Artificial Sequence
  Description of Artificial Sequence: Synthetic oligonucleotide
augaauuagucacugugag

SEQ ID NO: 1072176 - RNA, 19 nt, Artificial Sequence
  Description of Artificial Sequence: Synthetic oligonucleotide
aaauguuccaugcaacaaa

SEQ ID NO: 1072177 - RNA, 19 nt, Artificial Sequence
  Description of Artificial Sequence: Synthetic oligonucleotide
gaugucaugucagacaagc

SEQ ID NO: 1072178 - RNA, 19 nt, Artificial Sequence
  Description of Artificial Sequence: Synthetic oligonucleotide
augaagcccauacagcuac

SEQ ID NO: 1072179 - RNA, 19 nt, Artificial Sequence
  Description of Artificial Sequence: Synthetic oligonucleotide
caauucugcccauacaucc

SEQ ID NO: 1072180 - RNA, 19 nt, Artificial Sequence
  Description of Artificial Sequence: Synthetic oligonucleotide
cuaagcauaugucuuaaug

SEQ ID NO: 1072181 - RNA, 19 nt, Artificial Sequence
  Description of Artificial Sequence: Synthetic oligonucleotide
acaccuuauccuuuguuac

SEQ ID NO: 1072182 - RNA, 19 nt, Artificial Sequence
  Description of Artificial Sequence: Synthetic oligonucleotide
  modified_base (7)..(7): a, c, u, g, unknown or other
agaaacncaaaggugacca

SEQ ID NO: 1072183 - RNA, 19 nt, Artificial Sequence
  Description of Artificial Sequence: Synthetic oligonucleotide
  modified_base (12)..(12): a, c, u, g, unknown or other
auggcagaaacncaaaggu

SEQ ID NO: 1072184 - RNA, 19 nt, Artificial Sequence
  Description of Artificial Sequence: Synthetic oligonucleotide
acauagaucagugacaagu

SEQ ID NO: 1072185 - RNA, 19 nt, Artificial Sequence
  Description of Artificial Sequence: Synthetic oligonucleotide
aauguaccuauguaucucu

SEQ ID NO: 1072186 - RNA, 19 nt, Artificial Sequence
  Description of Artificial Sequence: Synthetic oligonucleotide
gaccaugugacaaaaguag

SEQ ID NO: 1072187 - RNA, 19 nt, Artificial Sequence
  Description of Artificial Sequence: Synthetic oligonucleotide
uguaucucuauuuauccaa

SEQ ID NO: 1072188 - RNA, 19 nt, Artificial Sequence
  Description of Artificial Sequence: Synthetic oligonucleotide
accuauaagggccugaccu

SEQ ID NO: 1072189 - RNA, 19 nt, Artificial Sequence
  Description of Artificial Sequence: Synthetic oligonucleotide
caaugaauuagucacugug

SEQ ID NO: 1072190 - RNA, 19 nt, Artificial Sequence
  Description of Artificial Sequence: Synthetic oligonucleotide
auagaucagugacaaguac

SEQ ID NO: 1072191 - RNA, 19 nt, Artificial Sequence
  Description of Artificial Sequence: Synthetic oligonucleotide
ucuagcagauggcagaaac

SEQ ID NO: 1072192 - RNA, 19 nt, Artificial Sequence
  Description of Artificial Sequence: Synthetic oligonucleotide
acagcuacuuccuauauaa

SEQ ID NO: 1072193 - RNA, 19 nt, Artificial Sequence
  Description of Artificial Sequence: Synthetic oligonucleotide
ucaugggucaacaggaaga

SEQ ID NO: 1072194 - RNA, 19 nt, Artificial Sequence
  Description of Artificial Sequence: Synthetic oligonucleotide
ugaauuagucacugugagg

SEQ ID NO: 1072195 - RNA, 19 nt, Artificial Sequence
  Description of Artificial Sequence: Synthetic oligonucleotide
gucaacaccagcuuucugc

SEQ ID NO: 1072196 - RNA, 19 nt, Artificial Sequence
  Description of Artificial Sequence: Synthetic oligonucleotide
uugaaaaggggaaacacuu

SEQ ID NO: 1072197 - RNA, 19 nt, Artificial Sequence
  Description of Artificial Sequence: Synthetic oligonucleotide
uccaaguuacaucagcaga

SEQ ID NO: 1072198 - RNA, 19 nt, Artificial Sequence
  Description of Artificial Sequence: Synthetic oligonucleotide
agcuacuuccuauauaaug

SEQ ID NO: 1072199 - RNA, 19 nt, Artificial Sequence
  Description of Artificial Sequence: Synthetic oligonucleotide
ugacuaucucugcagauug

SEQ ID NO: 1072200 - RNA, 19 nt, Artificial Sequence
  Description of Artificial Sequence: Synthetic oligonucleotide
auugcugggaccuacuaca

SEQ ID NO: 1072201 - RNA, 19 nt, Artificial Sequence
  Description of Artificial Sequence: Synthetic oligonucleotide
auaacuucuauaagucacc

SEQ ID NO: 1072202 - RNA, 19 nt, Artificial Sequence
  Description of Artificial Sequence: Synthetic oligonucleotide
auuauggugacagaugaug

SEQ ID NO: 1072203 - RNA, 19 nt, Artificial Sequence
  Description of Artificial Sequence: Synthetic oligonucleotide
aaugaauuagucacuguga

SEQ ID NO: 1072204 - RNA, 19 nt, Artificial Sequence
  Description of Artificial Sequence: Synthetic oligonucleotide
uagaucagugacaaguacu

SEQ ID NO: 1072205 - RNA, 19 nt, Artificial Sequence
  Description of Artificial Sequence: Synthetic oligonucleotide
guacacauagaucagugac

SEQ ID NO: 1072206 - RNA, 19 nt, Artificial Sequence
  Description of Artificial Sequence: Synthetic oligonucleotide
aaagaacaacaugucuagc

SEQ ID NO: 1072207 - RNA, 19 nt, Artificial Sequence
  Description of Artificial Sequence: Synthetic oligonucleotide
aaaagggcccacauacacc

SEQ ID NO: 1072208 - RNA, 19 nt, Artificial Sequence
  Description of Artificial Sequence: Synthetic oligonucleotide
gaaaaggggaaacacuuca

SEQ ID NO: 1072209 - RNA, 19 nt, Artificial Sequence
  Description of Artificial Sequence: Synthetic oligonucleotide
ugaccaaccuccuccacgg

SEQ ID NO: 1072210 - RNA, 19 nt, Artificial Sequence
  Description of Artificial Sequence: Synthetic oligonucleotide
cacaaggugaccaugugac

SEQ ID NO: 1072211 - RNA, 19 nt, Artificial Sequence
  Description of Artificial Sequence: Synthetic oligonucleotide
ugacaaaugauggugggca

SEQ ID NO: 1072212 - RNA, 19 nt, Artificial Sequence
  Description of Artificial Sequence: Synthetic oligonucleotide
aaauauuggcagaggaauc

SEQ ID NO: 1072213 - RNA, 19 nt, Artificial Sequence
  Description of Artificial Sequence: Synthetic oligonucleotide
uuaaugguacacauagauc

SEQ ID NO: 1072214 - RNA, 19 nt, Artificial Sequence
  Description of Artificial Sequence: Synthetic oligonucleotide
uuacuggcaauucugccca

SEQ ID NO: 1072215 - RNA, 19 nt, Artificial Sequence
  Description of Artificial Sequence: Synthetic oligonucleotide
ucaucacagccuuugguag

SEQ ID NO: 1072216 - RNA, 19 nt, Artificial Sequence
  Description of Artificial Sequence: Synthetic oligonucleotide
ucuauaagucaccaauuau

SEQ ID NO: 1072217 - RNA, 19 nt, Artificial Sequence
  Description of Artificial Sequence: Synthetic oligonucleotide
ugcagauuggcucuuucca

SEQ ID NO: 1072218 - RNA, 19 nt, Artificial Sequence
  Description of Artificial Sequence: Synthetic oligonucleotide
uggucaugggucaacagga

SEQ ID NO: 1072219 - RNA, 19 nt, Artificial Sequence
  Description of Artificial Sequence: Synthetic oligonucleotide
cuacccaggaacaaauggc

SEQ ID NO: 1072220 - RNA, 19 nt, Artificial Sequence
  Description of Artificial Sequence: Synthetic oligonucleotide
ugagaugcagguccaacca

SEQ ID NO: 1072221 - RNA, 19 nt, Artificial Sequence
  Description of Artificial Sequence: Synthetic oligonucleotide
auaguucuaaaauaagauu

SEQ ID NO: 1072222 - RNA, 19 nt, Artificial Sequence
  Description of Artificial Sequence: Synthetic oligonucleotide
acuaucucugcagauuggc

SEQ ID NO: 1072223 - RNA, 19 nt, Artificial Sequence
  Description of Artificial Sequence: Synthetic oligonucleotide
aagaauugcugggaccuac

SEQ ID NO: 1072224 - RNA, 19 nt, Artificial Sequence
  Description of Artificial Sequence: Synthetic oligonucleotide
ugugcauaauuuaauccuc

SEQ ID NO: 1072225 - RNA, 19 nt, Artificial Sequence
  Description of Artificial Sequence: Synthetic oligonucleotide
uucacuacaccauuaguua

SEQ ID NO: 1072226 - RNA, 19 nt, Artificial Sequence
  Description of Artificial Sequence: Synthetic oligonucleotide
aucucuaccuacaaucuac

SEQ ID NO: 1072227 - RNA, 19 nt, Artificial Sequence
  Description of Artificial Sequence: Synthetic oligonucleotide
uucuauaagucaccaauua

SEQ ID NO: 1072228 - RNA, 19 nt, Artificial Sequence
  Description of Artificial Sequence: Synthetic oligonucleotide
uaccaaauagccaccuuug

SEQ ID NO: 1072229 - RNA, 19 nt, Artificial Sequence
  Description of Artificial Sequence: Synthetic oligonucleotide
caucacuaaauacugaaca

SEQ ID NO: 1072230 - RNA, 19 nt, Artificial Sequence
  Description of Artificial Sequence: Synthetic oligonucleotide
aauccugaugucaugucag

SEQ ID NO: 1072231 - RNA, 19 nt, Artificial Sequence
  Description of Artificial Sequence: Synthetic oligonucleotide
uuaccaaauagccaccuuu

SEQ ID NO: 1072232 - RNA, 19 nt, Artificial Sequence
  Description of Artificial Sequence: Synthetic oligonucleotide
ugguacacauagaucagug

SEQ ID NO: 1072233 - RNA, 19 nt, Artificial Sequence
  Description of Artificial Sequence: Synthetic oligonucleotide
uucuaugacuaucucugca

SEQ ID NO: 1072234 - RNA, 19 nt, Artificial Sequence
  Description of Artificial Sequence: Synthetic oligonucleotide
guagugacaaaugauggug

SEQ ID NO: 1072235 - RNA, 19 nt, Artificial Sequence
  Description of Artificial Sequence: Synthetic oligonucleotide
uuagucacugugaggacga

SEQ ID NO: 1072236 - RNA, 19 nt, Artificial Sequence
  Description of Artificial Sequence: Synthetic oligonucleotide
cuacacaaugggaaagggg

SEQ ID NO: 1072237 - RNA, 19 nt, Artificial Sequence
  Description of Artificial Sequence: Synthetic oligonucleotide
cacuacaccauuaguuacg

SEQ ID NO: 1072238 - RNA, 19 nt, Artificial Sequence
  Description of Artificial Sequence: Synthetic oligonucleotide
ggaccuacuacacaauggg

SEQ ID NO: 1072239 - RNA, 19 nt, Artificial Sequence
  Description of Artificial Sequence: Synthetic oligonucleotide
aauccaaguuacaucagca

SEQ ID NO: 1072240 - RNA, 19 nt, Artificial Sequence
  Description of Artificial Sequence: Synthetic oligonucleotide
aaaaguggguagaaaauau

SEQ ID NO: 1072241 - RNA, 19 nt, Artificial Sequence
  Description of Artificial Sequence: Synthetic oligonucleotide
uacuacacaaugggaaagg

SEQ ID NO: 1072242 - RNA, 19 nt, Artificial Sequence
  Description of Artificial Sequence: Synthetic oligonucleotide
aaaggugaccaaccuccuc

SEQ ID NO: 1072243 - RNA, 19 nt, Artificial Sequence
  Description of Artificial Sequence: Synthetic oligonucleotide
agcauagcaccuauaaggg

SEQ ID NO: 1072244 - RNA, 19 nt, Artificial Sequence
  Description of Artificial Sequence: Synthetic oligonucleotide
uucaucacagccuuuggua

SEQ ID NO: 1072245 - RNA, 19 nt, Artificial Sequence
  Description of Artificial Sequence: Synthetic oligonucleotide
ucagauauauggccuauuu

SEQ ID NO: 1072246 - RNA, 19 nt, Artificial Sequence
  Description of Artificial Sequence: Synthetic oligonucleotide
acuuccuauauaaugcauc

SEQ ID NO: 1072247 - RNA, 19 nt, Artificial Sequence
  Description of Artificial Sequence: Synthetic oligonucleotide
aaacacuucaaggccucac

SEQ ID NO: 1072248 - RNA, 19 nt, Artificial Sequence
  Description of Artificial Sequence: Synthetic oligonucleotide
aggauaaaguacuggucag

SEQ ID NO: 1072249 - RNA, 19 nt, Artificial Sequence
  Description of Artificial Sequence: Synthetic oligonucleotide
auucugcccauacauccac

SEQ ID NO: 1072250 - RNA, 19 nt, Artificial Sequence
  Description of Artificial Sequence: Synthetic oligonucleotide
uaugucuuaaugguacaca

SEQ ID NO: 1072251 - RNA, 19 nt, Artificial Sequence
  Description of Artificial Sequence: Synthetic oligonucleotide
uccaaugaauuagucacug

SEQ ID NO: 1072252 - RNA, 19 nt, Artificial Sequence
  Description of Artificial Sequence: Synthetic oligonucleotide
aagcacacucuuuaaguaa

SEQ ID NO: 1072253 - RNA, 19 nt, Artificial Sequence
  Description of Artificial Sequence: Synthetic oligonucleotide
ugcaugcuuagcaugugca

SEQ ID NO: 1072254 - RNA, 19 nt, Artificial Sequence
  Description of Artificial Sequence: Synthetic oligonucleotide
caauuauggugacagauga

SEQ ID NO: 1072255 - RNA, 19 nt, Artificial Sequence
  Description of Artificial Sequence: Synthetic oligonucleotide
uccauaccuaaaauccuca

SEQ ID NO: 1072256 - RNA, 19 nt, Artificial Sequence
  Description of Artificial Sequence: Synthetic oligonucleotide
aaugguacacauagaucag

SEQ ID NO: 1072257 - RNA, 19 nt, Artificial Sequence
  Description of Artificial Sequence: Synthetic oligonucleotide
cuuuguuugacacuggugu

SEQ ID NO: 1072258 - RNA, 19 nt, Artificial Sequence
  Description of Artificial Sequence: Synthetic oligonucleotide
uacaccuuauccuuuguua

SEQ ID NO: 1072259 - RNA, 19 nt, Artificial Sequence
  Description of Artificial Sequence: Synthetic oligonucleotide
uauuucauauuuugugcau

SEQ ID NO: 1072260 - RNA, 19 nt, Artificial Sequence
  Description of Artificial Sequence: Synthetic oligonucleotide
aaggcuccaauguuaugcu

SEQ ID NO: 1072261 - RNA, 19 nt, Artificial Sequence
  Description of Artificial Sequence: Synthetic oligonucleotide
gcuacuuccuauauaaugc

SEQ ID NO: 1072262 - RNA, 19 nt, Artificial Sequence
  Description of Artificial Sequence: Synthetic oligonucleotide
aucucuauuuauccaagaa

SEQ ID NO: 1072263 - RNA, 19 nt, Artificial Sequence
  Description of Artificial Sequence: Synthetic oligonucleotide
ucuuaugaggaacccacuu

SEQ ID NO: 1072264 - RNA, 19 nt, Artificial Sequence
  Description of Artificial Sequence: Synthetic oligonucleotide
agccaccuuuguuugacac

SEQ ID NO: 1072265 - RNA, 19 nt, Artificial Sequence
  Description of Artificial Sequence: Synthetic oligonucleotide
cuuaugaggaacccacuuc

SEQ ID NO: 1072266 - RNA, 19 nt, Artificial Sequence
  Description of Artificial Sequence: Synthetic oligonucleotide
uaagcacacucuuuaagua

SEQ ID NO: 1072267 - RNA, 19 nt, Artificial Sequence
  Description of Artificial Sequence: Synthetic oligonucleotide
gaauccugaugucauguca

SEQ ID NO: 1072268 - RNA, 19 nt, Artificial Sequence
  Description of Artificial Sequence: Synthetic oligonucleotide
  modified_base (10)..(10): a, c, u, g, unknown or other
ggcagaaacncaaagguga

SEQ ID NO: 1072269 - RNA, 19 nt, Artificial Sequence
  Description of Artificial Sequence: Synthetic oligonucleotide
caugucuagcagauggcag

SEQ ID NO: 1072270 - RNA, 19 nt, Artificial Sequence
  Description of Artificial Sequence: Synthetic oligonucleotide
uauggccuauuucaucaca

SEQ ID NO: 1072271 - RNA, 19 nt, Artificial Sequence
  Description of Artificial Sequence: Synthetic oligonucleotide
ucuuaaugguacacauaga

SEQ ID NO: 1072272 - RNA, 19 nt, Artificial Sequence
  Description of Artificial Sequence: Synthetic oligonucleotide
acuacaccauuaguuacgg

SEQ ID NO: 1072273 - RNA, 19 nt, Artificial Sequence
  Description of Artificial Sequence: Synthetic oligonucleotide
auacagcuacuucaagaag

SEQ ID NO: 1072274 - RNA, 19 nt, Artificial Sequence
  Description of Artificial Sequence: Synthetic oligonucleotide
ugaaaaggggaaacacuuc

SEQ ID NO: 1072275 - RNA, 19 nt, Artificial Sequence
  Description of Artificial Sequence: Synthetic oligonucleotide
gugaccaaccuccuccacg

SEQ ID NO: 1072276 - RNA, 19 nt, Artificial Sequence
  Description of Artificial Sequence: Synthetic oligonucleotide
uuguuugacacuggugugc

SEQ ID NO: 1072277 - RNA, 19 nt, Artificial Sequence
  Description of Artificial Sequence: Synthetic oligonucleotide
augucuagcagauggcaga

SEQ ID NO: 1072278 - RNA, 19 nt, Artificial Sequence
  Description of Artificial Sequence: Synthetic oligonucleotide
uaucucuauuuauccaaga

SEQ ID NO: 1072279 - RNA, 19 nt, Artificial Sequence
  Description of Artificial Sequence: Synthetic oligonucleotide
cuuaaugguacacauagau

SEQ ID NO: 1072280 - RNA, 19 nt, Artificial Sequence
  Description of Artificial Sequence: Synthetic oligonucleotide
acuacacaaugggaaaggg

SEQ ID NO: 1072281 - RNA, 19 nt, Artificial Sequence
  Description of Artificial Sequence: Synthetic oligonucleotide
ucucuaccuacaaucuaca

SEQ ID NO: 1072282 - RNA, 19 nt, Artificial Sequence
  Description of Artificial Sequence: Synthetic oligonucleotide
cuguuacuggcaauucugc

SEQ ID NO: 1072283 - RNA, 19 nt, Artificial Sequence
  Description of Artificial Sequence: Synthetic oligonucleotide
guggguagaaaauaugcaa

SEQ ID NO: 1072284 - RNA, 19 nt, Artificial Sequence
  Description of Artificial Sequence: Synthetic oligonucleotide
uggucagaaauguaccuau

SEQ ID NO: 1072285 - RNA, 19 nt, Artificial Sequence
  Description of Artificial Sequence: Synthetic oligonucleotide
aguuacaucagcagaauua

SEQ ID NO: 1072286 - RNA, 19 nt, Artificial Sequence
  Description of Artificial Sequence: Synthetic oligonucleotide
ugugcaaccugggucaaca

SEQ ID NO: 1072287 - RNA, 19 nt, Artificial Sequence
  Description of Artificial Sequence: Synthetic oligonucleotide
aguacuuucacuacaccau

SEQ ID NO: 1072288 - RNA, 19 nt, Artificial Sequence
  Description of Artificial Sequence: Synthetic oligonucleotide
acuggucagaaauguaccu

SEQ ID NO: 1072289 - RNA, 19 nt, Artificial Sequence
  Description of Artificial Sequence: Synthetic oligonucleotide
guacuggucagaaauguac

SEQ ID NO: 1072290 - RNA, 19 nt, Artificial Sequence
  Description of Artificial Sequence: Synthetic oligonucleotide
gaacaacaugucuagcaga

SEQ ID NO: 1072291 - RNA, 19 nt, Artificial Sequence
  Description of Artificial Sequence: Synthetic oligonucleotide
ucaccaaacagccucccuu

SEQ ID NO: 1072292 - RNA, 19 nt, Artificial Sequence
  Description of Artificial Sequence: Synthetic oligonucleotide
uaaagagggcugagaaugu

SEQ ID NO: 1072293 - RNA, 19 nt, Artificial Sequence
  Description of Artificial Sequence: Synthetic oligonucleotide
accaauuauggugacagau

SEQ ID NO: 1072294 - RNA, 19 nt, Artificial Sequence
  Description of Artificial Sequence: Synthetic oligonucleotide
agaaaauaugcaaauccaa

SEQ ID NO: 1072295 - RNA, 19 nt, Artificial Sequence
  Description of Artificial Sequence: Synthetic oligonucleotide
acuauuauuccuaguacau

SEQ ID NO: 1072296 - RNA, 19 nt, Artificial Sequence
  Description of Artificial Sequence: Synthetic oligonucleotide
gcucuuuccugcuacagcc

SEQ ID NO: 1072297 - RNA, 19 nt, Artificial Sequence
  Description of Artificial Sequence: Synthetic oligonucleotide
uaacuucuauaagucacca

SEQ ID NO: 1072298 - RNA, 19 nt, Artificial Sequence
  Description of Artificial Sequence: Synthetic oligonucleotide
cuucaagaaguaaacagcu

SEQ ID NO: 1072299 - RNA, 19 nt, Artificial Sequence
  Description of Artificial Sequence: Synthetic oligonucleotide
cuccauaccuaaaauccuc

SEQ ID NO: 1072300 - RNA, 19 nt, Artificial Sequence
  Description of Artificial Sequence: Synthetic oligonucleotide
auauaaugcaucagaauua

SEQ ID NO: 1072301 - RNA, 19 nt, Artificial Sequence
  Description of Artificial Sequence: Synthetic oligonucleotide
gagcauauccugcugugca

SEQ ID NO: 1072302 - RNA, 19 nt, Artificial Sequence
  Description of Artificial Sequence: Synthetic oligonucleotide
cuauaagggccugaccucc

SEQ ID NO: 1072303 - RNA, 19 nt, Artificial Sequence
  Description of Artificial Sequence: Synthetic oligonucleotide
uaugacuaucucugcagau

SEQ ID NO: 1072304 - RNA, 19 nt, Artificial Sequence
  Description of Artificial Sequence: Synthetic oligonucleotide
acacaaggugaccauguga

SEQ ID NO: 1072305 - RNA, 19 nt, Artificial Sequence
  Description of Artificial Sequence: Synthetic oligonucleotide
uguaccuauguaucucuau

SEQ ID NO: 1072306 - RNA, 19 nt, Artificial Sequence
  Description of Artificial Sequence: Synthetic oligonucleotide
uauuaccaaauagccaccu

SEQ ID NO: 1072307 - RNA, 19 nt, Artificial Sequence
  Description of Artificial Sequence: Synthetic oligonucleotide
agccacuccaaugaauuag

SEQ ID NO: 1072308 - RNA, 19 nt, Artificial Sequence
  Description of Artificial Sequence: Synthetic oligonucleotide
gagaugcagguccaaccag

SEQ ID NO: 1072309 - RNA, 19 nt, Artificial Sequence
  Description of Artificial Sequence: Synthetic oligonucleotide
acaaaugauggugggcauc

SEQ ID NO: 1072310 - RNA, 19 nt, Artificial Sequence
  Description of Artificial Sequence: Synthetic oligonucleotide
acacauagaucagugacaa

SEQ ID NO: 1072311 - RNA, 19 nt, Artificial Sequence
  Description of Artificial Sequence: Synthetic oligonucleotide
guuacaucagcagaauuaa

SEQ ID NO: 1072312 - RNA, 19 nt, Artificial Sequence
  Description of Artificial Sequence: Synthetic oligonucleotide
uaccuauguaucucuauuu

SEQ ID NO: 1072313 - RNA, 19 nt, Artificial Sequence
  Description of Artificial Sequence: Synthetic oligonucleotide
  modified_base (3)..(3): a, c, u, g, unknown or other
acncaaaggugaccaaccu

SEQ ID NO: 1072314 - RNA, 19 nt, Artificial Sequence
  Description of Artificial Sequence: Synthetic oligonucleotide
cagauauauggccuauuuc

SEQ ID NO: 1072315 - RNA, 19 nt, Artificial Sequence
  Description of Artificial Sequence: Synthetic oligonucleotide
uaccuaaaauccucaugcu

SEQ ID NO: 1072316 - RNA, 19 nt, Artificial Sequence
  Description of Artificial Sequence: Synthetic oligonucleotide
uuagcaugugcaagacccu

SEQ ID NO: 1072317 - RNA, 19 nt, Artificial Sequence
  Description of Artificial Sequence: Synthetic oligonucleotide
cuacuacacaaugggaaag

SEQ ID NO: 1072318 - RNA, 19 nt, Artificial Sequence
  Description of Artificial Sequence: Synthetic oligonucleotide
acacuucaaggccucacca

SEQ ID NO: 1072319 - RNA, 19 nt, Artificial Sequence
  Description of Artificial Sequence: Synthetic oligonucleotide
cugcagauuggcucuuucc

SEQ ID NO: 1072320 - RNA, 19 nt, Artificial Sequence
  Description of Artificial Sequence: Synthetic oligonucleotide
aauucugcccauacaucca

SEQ ID NO: 1072321 - RNA, 19 nt, Artificial Sequence
  Description of Artificial Sequence: Synthetic oligonucleotide
agagcacuaagaauugcug

SEQ ID NO: 1072322 - RNA, 19 nt, Artificial Sequence
  Description of Artificial Sequence: Synthetic oligonucleotide
ggccuauuucaucacagcc

SEQ ID NO: 1072323 - RNA, 19 nt, Artificial Sequence
  Description of Artificial Sequence: Synthetic oligonucleotide
augaggaacccacuucagu

SEQ ID NO: 1072324 - RNA, 19 nt, Artificial Sequence
  Description of Artificial Sequence: Synthetic oligonucleotide
gaugcagguccaaccagag

SEQ ID NO: 1072325 - RNA, 19 nt, Artificial Sequence
  Description of Artificial Sequence: Synthetic oligonucleotide
aguaucccugugcugagau

SEQ ID NO: 1072326 - RNA, 19 nt, Artificial Sequence
  Description of Artificial Sequence: Synthetic oligonucleotide
uuggcucuuuccaucacua

SEQ ID NO: 1072327 - RNA, 19 nt, Artificial Sequence
  Description of Artificial Sequence: Synthetic oligonucleotide
uggccuauuucaucacagc

SEQ ID NO: 1072328 - RNA, 19 nt, Artificial Sequence
  Description of Artificial Sequence: Synthetic oligonucleotide
cacuaagaauugcugggac

SEQ ID NO: 1072329 - RNA, 19 nt, Artificial Sequence
  Description of Artificial Sequence: Synthetic oligonucleotide
cagugggugaaguacucug

SEQ ID NO: 1072330 - RNA, 19 nt, Artificial Sequence
  Description of Artificial Sequence: Synthetic oligonucleotide
uguagcucaguggugguau

SEQ ID NO: 1072331 - RNA, 19 nt, Artificial Sequence
  Description of Artificial Sequence: Synthetic oligonucleotide
ggugaaguacucugcacug

SEQ ID NO: 1072332 - RNA, 19 nt, Artificial Sequence
  Description of Artificial Sequence: Synthetic oligonucleotide
guuaugcuaagcauauguc

SEQ ID NO: 1072333 - RNA, 19 nt, Artificial Sequence
  Description of Artificial Sequence: Synthetic oligonucleotide
uggcuaugcaggccuaugu

SEQ ID NO: 1072334 - RNA, 19 nt, Artificial Sequence
  Description of Artificial Sequence: Synthetic oligonucleotide
accagagagcacuaagaau

SEQ ID NO: 1072335 - RNA, 19 nt, Artificial Sequence
  Description of Artificial Sequence: Synthetic oligonucleotide
accuuuguuugacacuggu

SEQ ID NO: 1072336 - RNA, 19 nt, Artificial Sequence
  Description of Artificial Sequence: Synthetic oligonucleotide
cagagagcacuaagaauug

SEQ ID NO: 1072337 - RNA, 19 nt, Artificial Sequence
  Description of Artificial Sequence: Synthetic oligonucleotide
accuacuacacaaugggaa

SEQ ID NO: 1072338 - RNA, 19 nt, Artificial Sequence
  Description of Artificial Sequence: Synthetic oligonucleotide
gcauaugucuuaaugguac

SEQ ID NO: 1072339 - RNA, 19 nt, Artificial Sequence
  Description of Artificial Sequence: Synthetic oligonucleotide
ugguaugcaugcuuagcau

SEQ ID NO: 1072340 - RNA, 19 nt, Artificial Sequence
  Description of Artificial Sequence: Synthetic oligonucleotide
agucaccaauuauggugac

SEQ ID NO: 1072341 - RNA, 19 nt, Artificial Sequence
  Description of Artificial Sequence: Synthetic oligonucleotide
uuacaucagcagaauuaaa

SEQ ID NO: 1072342 - RNA, 19 nt, Artificial Sequence
  Description of Artificial Sequence: Synthetic oligonucleotide
uuguaugcaacagcuacuu

SEQ ID NO: 1072343 - RNA, 19 nt, Artificial Sequence
  Description of Artificial Sequence: Synthetic oligonucleotide
cuacaaucuacaccuuauc

SEQ ID NO: 1072344 - RNA, 19 nt, Artificial Sequence
  Description of Artificial Sequence: Synthetic oligonucleotide
accaaauagccaccuuugu

SEQ ID NO: 1072345 - RNA, 19 nt, Artificial Sequence
  Description of Artificial Sequence: Synthetic oligonucleotide
aucucaccaaacagccucc

SEQ ID NO: 1072346 - RNA, 19 nt, Artificial Sequence
  Description of Artificial Sequence: Synthetic oligonucleotide
aggaacaaauggcaaugau

SEQ ID NO: 1072347 - RNA, 19 nt, Artificial Sequence
  Description of Artificial Sequence: Synthetic oligonucleotide
caccaaacagccucccuug

SEQ ID NO: 1072348 - RNA, 19 nt, Artificial Sequence
  Description of Artificial Sequence: Synthetic oligonucleotide
gcuacuucaagaaguaaac

SEQ ID NO: 1072349 - RNA, 19 nt, Artificial Sequence
  Description of Artificial Sequence: Synthetic oligonucleotide
  modified_base (2)..(2): a, c, u, g, unknown or other
cncaaaggugaccaaccuc

SEQ ID NO: 1072350 - RNA, 19 nt, Artificial Sequence
  Description of Artificial Sequence: Synthetic oligonucleotide
cacaguaucccugugcuga

SEQ ID NO: 1072351 - RNA, 19 nt, Artificial Sequence
  Description of Artificial Sequence: Synthetic oligonucleotide
aaaaggggaaacacuucaa

SEQ ID NO: 1072352 - RNA, 19 nt, Artificial Sequence
  Description of Artificial Sequence: Synthetic oligonucleotide
gacuaucucugcagauugg

SEQ ID NO: 1072353 - RNA, 19 nt, Artificial Sequence
  Description of Artificial Sequence: Synthetic oligonucleotide
  modified_base (19)..(19): a, c, u, g, unknown or other
cuagcagauggcagaaacn

SEQ ID NO: 1072354 - RNA, 19 nt, Artificial Sequence
  Description of Artificial Sequence: Synthetic oligonucleotide
acaugucuagcagauggca

SEQ ID NO: 1072355 - RNA, 19 nt, Artificial Sequence
  Description of Artificial Sequence: Synthetic oligonucleotide
uuguacuauuauuccuagu

SEQ ID NO: 1072356 - RNA, 19 nt, Artificial Sequence
  Description of Artificial Sequence: Synthetic oligonucleotide
uggugguaugcaugcuuag

SEQ ID NO: 1072357 - RNA, 19 nt, Artificial Sequence
  Description of Artificial Sequence: Synthetic oligonucleotide
uguaugcaacagcuacuuc

SEQ ID NO: 1072358 - RNA, 19 nt, Artificial Sequence
  Description of Artificial Sequence: Synthetic oligonucleotide
ucaaggccucaccaugccu

SEQ ID NO: 1072359 - RNA, 19 nt, Artificial Sequence
  Description of Artificial Sequence: Synthetic oligonucleotide
uggcaauucugcccauaca

SEQ ID NO: 1072360 - RNA, 19 nt, Artificial Sequence
  Description of Artificial Sequence: Synthetic oligonucleotide
guauuaccaaauagccacc

SEQ ID NO: 1072361 - RNA, 19 nt, Artificial Sequence
  Description of Artificial Sequence: Synthetic oligonucleotide
gucagaaauguaccuaugu

SEQ ID NO: 1072362 - RNA, 19 nt, Artificial Sequence
  Description of Artificial Sequence: Synthetic oligonucleotide
ccauacauccacuaaguga

SEQ ID NO: 1072363 - RNA, 19 nt, Artificial Sequence
  Description of Artificial Sequence: Synthetic oligonucleotide
cauaugucuuaaugguaca

SEQ ID NO: 1072364 - RNA, 19 nt, Artificial Sequence
  Description of Artificial Sequence: Synthetic oligonucleotide
cuaugacuaucucugcaga

SEQ ID NO: 1072365 - RNA, 19 nt, Artificial Sequence
  Description of Artificial Sequence: Synthetic oligonucleotide
aauccucaugcuguucuau

SEQ ID NO: 1072366 - RNA, 19 nt, Artificial Sequence
  Description of Artificial Sequence: Synthetic oligonucleotide
gggaccuacuacacaaugg

SEQ ID NO: 1072367 - RNA, 19 nt, Artificial Sequence
  Description of Artificial Sequence: Synthetic oligonucleotide
cacuuaagcacacucuuua

SEQ ID NO: 1072368 - RNA, 19 nt, Artificial Sequence
  Description of Artificial Sequence: Synthetic oligonucleotide
cucagccaucaguaaacac

SEQ ID NO: 1072369 - RNA, 19 nt, Artificial Sequence
  Description of Artificial Sequence: Synthetic oligonucleotide
cacuggugugcuuauaaaa

SEQ ID NO: 1072370 - RNA, 19 nt, Artificial Sequence
  Description of Artificial Sequence: Synthetic oligonucleotide
  modified_base (8)..(8): a, c, u, g, unknown or other
cagaaacncaaaggugacc

SEQ ID NO: 1072371 - RNA, 19 nt, Artificial Sequence
  Description of Artificial Sequence: Synthetic oligonucleotide
ugcagugggugaaguacuc

SEQ ID NO: 1072372 - RNA, 19 nt, Artificial Sequence
  Description of Artificial Sequence: Synthetic oligonucleotide
agaggaauccugaugucau

SEQ ID NO: 1072373 - RNA, 19 nt, Artificial Sequence
  Description of Artificial Sequence: Synthetic oligonucleotide
gacgaaguugucauauaaa

SEQ ID NO: 1072374 - RNA, 19 nt, Artificial Sequence
  Description of Artificial Sequence: Synthetic oligonucleotide
auuauuccuaguacauuaa

SEQ ID NO: 1072375 - RNA, 19 nt, Artificial Sequence
  Description of Artificial Sequence: Synthetic oligonucleotide
ggaagagagcauauccugc

SEQ ID NO: 1072376 - RNA, 19 nt, Artificial Sequence
  Description of Artificial Sequence: Synthetic oligonucleotide
auauuggcagaggaauccu

SEQ ID NO: 1072377 - RNA, 19 nt, Artificial Sequence
  Description of Artificial Sequence: Synthetic oligonucleotide
  modified_base (6)..(6): a, c, u, g, unknown or other
gaaacncaaaggugaccaa

SEQ ID NO: 1072378 - RNA, 19 nt, Artificial Sequence
  Description of Artificial Sequence: Synthetic oligonucleotide
auuaccaaauagccaccuu

SEQ ID NO: 1072379 - RNA, 19 nt, Artificial Sequence
  Description of Artificial Sequence: Synthetic oligonucleotide
uugcugggaccuacuacac

SEQ ID NO: 1072380 - RNA, 19 nt, Artificial Sequence
  Description of Artificial Sequence: Synthetic oligonucleotide
ugaggguaucacacacagu

SEQ ID NO: 1072381 - RNA, 19 nt, Artificial Sequence
  Description of Artificial Sequence: Synthetic oligonucleotide
ggaaaggggucuggaaugg

SEQ ID NO: 1072382 - RNA, 19 nt, Artificial Sequence
  Description of Artificial Sequence: Synthetic oligonucleotide
gcuaugcaggccuauguca

SEQ ID NO: 1072383 - RNA, 19 nt, Artificial Sequence
  Description of Artificial Sequence: Synthetic oligonucleotide
augacuaucucugcagauu

SEQ ID NO: 1072384 - RNA, 19 nt, Artificial Sequence
  Description of Artificial Sequence: Synthetic oligonucleotide
agucacugugaggacgaag

SEQ ID NO: 1072385 - RNA, 19 nt, Artificial Sequence
  Description of Artificial Sequence: Synthetic oligonucleotide
gugggugaaguacucugca

SEQ ID NO: 1072386 - RNA, 19 nt, Artificial Sequence
  Description of Artificial Sequence: Synthetic oligonucleotide
agcauauccugcugugcaa

SEQ ID NO: 1072387 - RNA, 19 nt, Artificial Sequence
  Description of Artificial Sequence: Synthetic oligonucleotide
agcacacucuuuaaguaaa

SEQ ID NO: 1072388 - RNA, 19 nt, Artificial Sequence
  Description of Artificial Sequence: Synthetic oligonucleotide
gauauauggccuauuucau

SEQ ID NO: 1072389 - RNA, 19 nt, Artificial Sequence
  Description of Artificial Sequence: Synthetic oligonucleotide
gucacugugaggacgaagu

SEQ ID NO: 1072390 - RNA, 19 nt, Artificial Sequence
  Description of Artificial Sequence: Synthetic oligonucleotide
acacaguaucccugugcug

SEQ ID NO: 1072391 - RNA, 19 nt, Artificial Sequence
  Description of Artificial Sequence: Synthetic oligonucleotide
gcugggaccuacuacacaa

SEQ ID NO: 1072392 - RNA, 19 nt, Artificial Sequence
  Description of Artificial Sequence: Synthetic oligonucleotide
ccuugaaaaggggaaacac

SEQ ID NO: 1072393 - RNA, 19 nt, Artificial Sequence
  Description of Artificial Sequence: Synthetic oligonucleotide
caaucuacaccuuauccuu

SEQ ID NO: 1072394 - RNA, 19 nt, Artificial Sequence
  Description of Artificial Sequence: Synthetic oligonucleotide
augcaggccuaugucauca

SEQ ID NO: 1072395 - RNA, 19 nt, Artificial Sequence
  Description of Artificial Sequence: Synthetic oligonucleotide
agccaaccugccuuucuca

SEQ ID NO: 1072396 - RNA, 19 nt, Artificial Sequence
  Description of Artificial Sequence: Synthetic oligonucleotide
ggacgaaguugucauauaa

SEQ ID NO: 1072397 - RNA, 19 nt, Artificial Sequence
  Description of Artificial Sequence: Synthetic oligonucleotide
gugcuuguuccaucucacc

SEQ ID NO: 1072398 - RNA, 19 nt, Artificial Sequence
  Description of Artificial Sequence: Synthetic oligonucleotide
ccaucacuaaauacugaac

SEQ ID NO: 1072399 - RNA, 19 nt, Artificial Sequence
  Description of Artificial Sequence: Synthetic oligonucleotide
aagccuacccaggaacaaa

SEQ ID NO: 1072400 - RNA, 19 nt, Artificial Sequence
  Description of Artificial Sequence: Synthetic oligonucleotide
cacauagaucagugacaag

SEQ ID NO: 1072401 - RNA, 19 nt, Artificial Sequence
  Description of Artificial Sequence: Synthetic oligonucleotide
ccaaguuacaucagcagaa

SEQ ID NO: 1072402 - RNA, 19 nt, Artificial Sequence
  Description of Artificial Sequence: Synthetic oligonucleotide
ccauacagcuacuucaaga

SEQ ID NO: 1072403 - RNA, 19 nt, Artificial Sequence
  Description of Artificial Sequence: Synthetic oligonucleotide
auaccauacuacagaaaau

SEQ ID NO: 1072404 - RNA, 19 nt, Artificial Sequence
  Description of Artificial Sequence: Synthetic oligonucleotide
gcauagcaccuauaagggc

SEQ ID NO: 1072405 - RNA, 19 nt, Artificial Sequence
  Description of Artificial Sequence: Synthetic oligonucleotide
caccuuuguuugacacugg

SEQ ID NO: 1072406 - RNA, 19 nt, Artificial Sequence
  Description of Artificial Sequence: Synthetic oligonucleotide
auagcaccuauaagggccu

SEQ ID NO: 1072407 - RNA, 19 nt, Artificial Sequence
  Description of Artificial Sequence: Synthetic oligonucleotide
caccuauaagggccugacc

SEQ ID NO: 1072408 - RNA, 19 nt, Artificial Sequence
  Description of Artificial Sequence: Synthetic oligonucleotide
ugcaggccuaugucaucag

SEQ ID NO: 1072409 - RNA, 19 nt, Artificial Sequence
  Description of Artificial Sequence: Synthetic oligonucleotide
ucaccaugccugaggguau

SEQ ID NO: 1072410 - RNA, 19 nt, Artificial Sequence
  Description of Artificial Sequence: Synthetic oligonucleotide
ccuuugguagugacaaaug

SEQ ID NO: 1072411 - RNA, 19 nt, Artificial Sequence
  Description of Artificial Sequence: Synthetic oligonucleotide
cagaggaauccugauguca

SEQ ID NO: 1072412 - RNA, 19 nt, Artificial Sequence
  Description of Artificial Sequence: Synthetic oligonucleotide
gucuggaauggguuaucuc

SEQ ID NO: 1072413 - RNA, 19 nt, Artificial Sequence
  Description of Artificial Sequence: Synthetic oligonucleotide
ggugguaugcaugcuuagc

SEQ ID NO: 1072414 - RNA, 19 nt, Artificial Sequence
  Description of Artificial Sequence: Synthetic oligonucleotide
ccacuaagugaggacaggg

SEQ ID NO: 1072415 - RNA, 19 nt, Artificial Sequence
  Description of Artificial Sequence: Synthetic oligonucleotide
acggcaaggcuccaauguu

SEQ ID NO: 1072416 - RNA, 19 nt, Artificial Sequence
  Description of Artificial Sequence: Synthetic oligonucleotide
gaccuacuacacaauggga

SEQ ID NO: 1072417 - RNA, 19 nt, Artificial Sequence
  Description of Artificial Sequence: Synthetic oligonucleotide
acagcuacuucaagaagua

SEQ ID NO: 1072418 - RNA, 19 nt, Artificial Sequence
  Description of Artificial Sequence: Synthetic oligonucleotide
agcauaugucuuaauggua

SEQ ID NO: 1072419 - RNA, 19 nt, Artificial Sequence
  Description of Artificial Sequence: Synthetic oligonucleotide
agacaagcucagccaucag

SEQ ID NO: 1072420 - RNA, 19 nt, Artificial Sequence
  Description of Artificial Sequence: Synthetic oligonucleotide
guaugcaugcuuagcaugu

SEQ ID NO: 1072421 - RNA, 19 nt, Artificial Sequence
  Description of Artificial Sequence: Synthetic oligonucleotide
guaccuauguaucucuauu

SEQ ID NO: 1072422 - RNA, 19 nt, Artificial Sequence
  Description of Artificial Sequence: Synthetic oligonucleotide
gguaucacacacagugcug

SEQ ID NO: 1072423 - RNA, 19 nt, Artificial Sequence
  Description of Artificial Sequence: Synthetic oligonucleotide
uacugcagugggugaagua

SEQ ID NO: 1072424 - RNA, 19 nt, Artificial Sequence
  Description of Artificial Sequence: Synthetic oligonucleotide
gguagugacaaaugauggu

SEQ ID NO: 1072425 - RNA, 19 nt, Artificial Sequence
  Description of Artificial Sequence: Synthetic oligonucleotide
ucccugugcugagauaaaa

SEQ ID NO: 1072426 - RNA, 19 nt, Artificial Sequence
  Description of Artificial Sequence: Synthetic oligonucleotide
ccugaccuccuccaaauuc

SEQ ID NO: 1072427 - RNA, 19 nt, Artificial Sequence
  Description of Artificial Sequence: Synthetic oligonucleotide
aaguuguaugcaacagcua

SEQ ID NO: 1072428 - RNA, 19 nt, Artificial Sequence
  Description of Artificial Sequence: Synthetic oligonucleotide
cuucuauaagucaccaauu

SEQ ID NO: 1072429 - RNA, 19 nt, Artificial Sequence
  Description of Artificial Sequence: Synthetic oligonucleotide
agaauugcugggaccuacu

SEQ ID NO: 1072430 - RNA, 19 nt, Artificial Sequence
  Description of Artificial Sequence: Synthetic oligonucleotide
uuccugcuacagccaaccu

SEQ ID NO: 1072431 - RNA, 19 nt, Artificial Sequence
  Description of Artificial Sequence: Synthetic oligonucleotide
ccuauaagggccugaccuc

SEQ ID NO: 1072432 - RNA, 19 nt, Artificial Sequence
  Description of Artificial Sequence: Synthetic oligonucleotide
uggcucuuuccaucacuaa

SEQ ID NO: 1072433 - RNA, 19 nt, Artificial Sequence
  Description of Artificial Sequence: Synthetic oligonucleotide
ggguaucacacacagugcu

SEQ ID NO: 1072434 - RNA, 19 nt, Artificial Sequence
  Description of Artificial Sequence: Synthetic oligonucleotide
ggcuaugcaggccuauguc

SEQ ID NO: 1072435 - RNA, 19 nt, Artificial Sequence
  Description of Artificial Sequence: Synthetic oligonucleotide
gccaaccugccuuucucag

SEQ ID NO: 1072436 - RNA, 19 nt, Artificial Sequence
  Description of Artificial Sequence: Synthetic oligonucleotide
  modified_base (9)..(9): a, c, u, g, unknown or other
gcagaaacncaaaggugac

SEQ ID NO: 1072437 - RNA, 19 nt, Artificial Sequence
  Description of Artificial Sequence: Synthetic oligonucleotide
gaagccuacccaggaacaa

SEQ ID NO: 1072438 - RNA, 19 nt, Artificial Sequence
  Description of Artificial Sequence: Synthetic oligonucleotide
aggacgaaguugucauaua

SEQ ID NO: 1072439 - RNA, 19 nt, Artificial Sequence
  Description of Artificial Sequence: Synthetic oligonucleotide
ggguagaaaauaugcaaau

SEQ ID NO: 1072440 - RNA, 19 nt, Artificial Sequence
  Description of Artificial Sequence: Synthetic oligonucleotide
caagaaguaaacagcucuu

SEQ ID NO: 1072441 - RNA, 19 nt, Artificial Sequence
  Description of Artificial Sequence: Synthetic oligonucleotide
ccuacuacacaaugggaaa

SEQ ID NO: 1072442 - RNA, 19 nt, Artificial Sequence
  Description of Artificial Sequence: Synthetic oligonucleotide
aaaugauggugggcaucau

SEQ ID NO: 1072443 - RNA, 19 nt, Artificial Sequence
  Description of Artificial Sequence: Synthetic oligonucleotide
caagacccuggguuccauc

SEQ ID NO: 1072444 - RNA, 19 nt, Artificial Sequence
  Description of Artificial Sequence: Synthetic oligonucleotide
cuaucucugcagauuggcu

SEQ ID NO: 1072445 - RNA, 19 nt, Artificial Sequence
  Description of Artificial Sequence: Synthetic oligonucleotide
uccaaccagagagcacuaa

SEQ ID NO: 1072446 - RNA, 19 nt, Artificial Sequence
  Description of Artificial Sequence: Synthetic oligonucleotide
cacuaagugaggacagggu

SEQ ID NO: 1072447 - RNA, 19 nt, Artificial Sequence
  Description of Artificial Sequence: Synthetic oligonucleotide
auaaugcaucagaauuaaa

SEQ ID NO: 1072448 - RNA, 19 nt, Artificial Sequence
  Description of Artificial Sequence: Synthetic oligonucleotide
cacggcaaggcuccaaugu

SEQ ID NO: 1072449 - RNA, 19 nt, Artificial Sequence
  Description of Artificial Sequence: Synthetic oligonucleotide
gagccacuccaaugaauua

SEQ ID NO: 1072450 - RNA, 19 nt, Artificial Sequence
  Description of Artificial Sequence: Synthetic oligonucleotide
gugcauaauuuaauccucu

SEQ ID NO: 1072451 - RNA, 19 nt, Artificial Sequence
  Description of Artificial Sequence: Synthetic oligonucleotide
ggucagaaauguaccuaug

SEQ ID NO: 1072452 - RNA, 19 nt, Artificial Sequence
  Description of Artificial Sequence: Synthetic oligonucleotide
ggaaacacuucaaggccuc

SEQ ID NO: 1072453 - RNA, 19 nt, Artificial Sequence
  Description of Artificial Sequence: Synthetic oligonucleotide
gguuaucucuuaugaggaa

SEQ ID NO: 1072454 - RNA, 19 nt, Artificial Sequence
  Description of Artificial Sequence: Synthetic oligonucleotide
agcaccuauaagggccuga

SEQ ID NO: 1072455 - RNA, 19 nt, Artificial Sequence
  Description of Artificial Sequence: Synthetic oligonucleotide
gucaccaauuauggugaca

SEQ ID NO: 1072456 - RNA, 19 nt, Artificial Sequence
  Description of Artificial Sequence: Synthetic oligonucleotide
guacuuucacuacaccauu

SEQ ID NO: 1072457 - RNA, 19 nt, Artificial Sequence
  Description of Artificial Sequence: Synthetic oligonucleotide
caggaacaaauggcaauga

SEQ ID NO: 1072458 - RNA, 19 nt, Artificial Sequence
  Description of Artificial Sequence: Synthetic oligonucleotide
gacagggugcaugcuuaca

SEQ ID NO: 1072459 - RNA, 19 nt, Artificial Sequence
  Description of Artificial Sequence: Synthetic oligonucleotide
gcuguucuaugacuaucuc

SEQ ID NO: 1072460 - RNA, 19 nt, Artificial Sequence
  Description of Artificial Sequence: Synthetic oligonucleotide
aucagauauauggccuauu

SEQ ID NO: 1072461 - RNA, 19 nt, Artificial Sequence
  Description of Artificial Sequence: Synthetic oligonucleotide
gaccaaccuccuccacggc

SEQ ID NO: 1072462 - RNA, 19 nt, Artificial Sequence
  Description of Artificial Sequence: Synthetic oligonucleotide
cuccaaugaauuagucacu

SEQ ID NO: 1072463 - RNA, 19 nt, Artificial Sequence
  Description of Artificial Sequence: Synthetic oligonucleotide
gcuacagccaaccugccuu

SEQ ID NO: 1072464 - RNA, 19 nt, Artificial Sequence
  Description of Artificial Sequence: Synthetic oligonucleotide
cccauacauccacuaagug

SEQ ID NO: 1072465 - RNA, 19 nt, Artificial Sequence
  Description of Artificial Sequence: Synthetic oligonucleotide
cuggucagaaauguaccua

SEQ ID NO: 1072466 - RNA, 19 nt, Artificial Sequence
  Description of Artificial Sequence: Synthetic oligonucleotide
caccuuauccuuuguuacu

SEQ ID NO: 1072467 - RNA, 19 nt, Artificial Sequence
  Description of Artificial Sequence: Synthetic oligonucleotide
guggugguaugcaugcuua

SEQ ID NO: 1072468 - RNA, 19 nt, Artificial Sequence
  Description of Artificial Sequence: Synthetic oligonucleotide
uuuaauccucuggccuuuu

SEQ ID NO: 1072469 - RNA, 19 nt, Artificial Sequence
  Description of Artificial Sequence: Synthetic oligonucleotide
gcacacucuuuaaguaaag

SEQ ID NO: 1072470 - RNA, 19 nt, Artificial Sequence
  Description of Artificial Sequence: Synthetic oligonucleotide
gugcaaccugggucaacac

SEQ ID NO: 1072471 - RNA, 19 nt, Artificial Sequence
  Description of Artificial Sequence: Synthetic oligonucleotide
ggccuaugucaucagauau

SEQ ID NO: 1072472 - RNA, 19 nt, Artificial Sequence
  Description of Artificial Sequence: Synthetic oligonucleotide
caccaauuauggugacaga

SEQ ID NO: 1072473 - RNA, 19 nt, Artificial Sequence
  Description of Artificial Sequence: Synthetic oligonucleotide
caucacagccuuugguagu

SEQ ID NO: 1072474 - RNA, 19 nt, Artificial Sequence
  Description of Artificial Sequence: Synthetic oligonucleotide
gcaccuauaagggccugac

SEQ ID NO: 1072475 - RNA, 19 nt, Artificial Sequence
  Description of Artificial Sequence: Synthetic oligonucleotide
cugugaggacgaaguuguc

SEQ ID NO: 1072476 - RNA, 19 nt, Artificial Sequence
  Description of Artificial Sequence: Synthetic oligonucleotide
aagaagcaugaagcccaua

SEQ ID NO: 1072477 - RNA, 19 nt, Artificial Sequence
  Description of Artificial Sequence: Synthetic oligonucleotide
cuggaauggguuaucucuu

SEQ ID NO: 1072478 - RNA, 19 nt, Artificial Sequence
  Description of Artificial Sequence: Synthetic oligonucleotide
uagcaccuauaagggccug

SEQ ID NO: 1072479 - RNA, 19 nt, Artificial Sequence
  Description of Artificial Sequence: Synthetic oligonucleotide
cuuacaggucuucuuuauu

SEQ ID NO: 1072480 - RNA, 19 nt, Artificial Sequence
  Description of Artificial Sequence: Synthetic oligonucleotide
gcaaggcuccaauguuaug

SEQ ID NO: 1072481 - RNA, 19 nt, Artificial Sequence
  Description of Artificial Sequence: Synthetic oligonucleotide
auguaccuauguaucucua

SEQ ID NO: 1072482 - RNA, 19 nt, Artificial Sequence
  Description of Artificial Sequence: Synthetic oligonucleotide
caaaggugaccaaccuccu

SEQ ID NO: 1072483 - RNA, 19 nt, Artificial Sequence
  Description of Artificial Sequence: Synthetic oligonucleotide
cugcaccacuuucaggaua

SEQ ID NO: 1072484 - RNA, 19 nt, Artificial Sequence
  Description of Artificial Sequence: Synthetic oligonucleotide
uacuggcaauucugcccau

SEQ ID NO: 1072485 - RNA, 19 nt, Artificial Sequence
  Description of Artificial Sequence: Synthetic oligonucleotide
gugaaguacucugcacugu

SEQ ID NO: 1072486 - RNA, 19 nt, Artificial Sequence
  Description of Artificial Sequence: Synthetic oligonucleotide
gcaggccuaugucaucaga

SEQ ID NO: 1072487 - RNA, 19 nt, Artificial Sequence
  Description of Artificial Sequence: Synthetic oligonucleotide
gagagccacuccaaugaau

SEQ ID NO: 1072488 - RNA, 19 nt, Artificial Sequence
  Description of Artificial Sequence: Synthetic oligonucleotide
ccuaugucaucagauauau

SEQ ID NO: 1072489 - RNA, 19 nt, Artificial Sequence
  Description of Artificial Sequence: Synthetic oligonucleotide
gcagauuggcucuuuccau

SEQ ID NO: 1072490 - RNA, 19 nt, Artificial Sequence
  Description of Artificial Sequence: Synthetic oligonucleotide
gcuuacaggucuucuuuau

SEQ ID NO: 1072491 - RNA, 19 nt, Artificial Sequence
  Description of Artificial Sequence: Synthetic oligonucleotide
cuacaccuuauccuuuguu

SEQ ID NO: 1072492 - RNA, 19 nt, Artificial Sequence
  Description of Artificial Sequence: Synthetic oligonucleotide
uagucacugugaggacgaa

SEQ ID NO: 1072493 - RNA, 19 nt, Artificial Sequence
  Description of Artificial Sequence: Synthetic oligonucleotide
gccuaugucaucagauaua

SEQ ID NO: 1072494 - RNA, 19 nt, Artificial Sequence
  Description of Artificial Sequence: Synthetic oligonucleotide
gccucccuugaaaagggga

SEQ ID NO: 1072495 - RNA, 19 nt, Artificial Sequence
  Description of Artificial Sequence: Synthetic oligonucleotide
cugugcaaccugggucaac

SEQ ID NO: 1072496 - RNA, 19 nt, Artificial Sequence
  Description of Artificial Sequence: Synthetic oligonucleotide
caagaagcaugaagcccau

SEQ ID NO: 1072497 - RNA, 19 nt, Artificial Sequence
  Description of Artificial Sequence: Synthetic oligonucleotide
aggccucaccaugccugag

SEQ ID NO: 1072498 - RNA, 19 nt, Artificial Sequence
  Description of Artificial Sequence: Synthetic oligonucleotide
gccuacccaggaacaaaug

SEQ ID NO: 1072499 - RNA, 19 nt, Artificial Sequence
  Description of Artificial Sequence: Synthetic oligonucleotide
caucagauauauggccuau

SEQ ID NO: 1072500 - RNA, 19 nt, Artificial Sequence
  Description of Artificial Sequence: Synthetic oligonucleotide
ccaaauagccaccuuuguu

SEQ ID NO: 1072501 - RNA, 19 nt, Artificial Sequence
  Description of Artificial Sequence: Synthetic oligonucleotide
cugggucaacaccagcuuu

SEQ ID NO: 1072502 - RNA, 19 nt, Artificial Sequence
  Description of Artificial Sequence: Synthetic oligonucleotide
aucccugugcugagauaaa

SEQ ID NO: 1072503 - RNA, 19 nt, Artificial Sequence
  Description of Artificial Sequence: Synthetic oligonucleotide
ggucuggaauggguuaucu

SEQ ID NO: 1072504 - RNA, 19 nt, Artificial Sequence
  Description of Artificial Sequence: Synthetic oligonucleotide
gccacuccaaugaauuagu

SEQ ID NO: 1072505 - RNA, 19 nt, Artificial Sequence
  Description of Artificial Sequence: Synthetic oligonucleotide
ccaaacagccucccuugaa

SEQ ID NO: 1072506 - RNA, 19 nt, Artificial Sequence
  Description of Artificial Sequence: Synthetic oligonucleotide
gucuagcagauggcagaaa

SEQ ID NO: 1072507 - RNA, 19 nt, Artificial Sequence
  Description of Artificial Sequence: Synthetic oligonucleotide
cuacagccaaccugccuuu

SEQ ID NO: 1072508 - RNA, 19 nt, Artificial Sequence
  Description of Artificial Sequence: Synthetic oligonucleotide
gcuaagcauaugucuuaau

SEQ ID NO: 1072509 - RNA, 19 nt, Artificial Sequence
  Description of Artificial Sequence: Synthetic oligonucleotide
ggcccacauacaccagaaa

SEQ ID NO: 1072510 - RNA, 19 nt, Artificial Sequence
  Description of Artificial Sequence: Synthetic oligonucleotide
gggucuggaauggguuauc

SEQ ID NO: 1072511 - RNA, 19 nt, Artificial Sequence
  Description of Artificial Sequence: Synthetic oligonucleotide
ccaaccugccuuucucagu

SEQ ID NO: 1072512 - RNA, 19 nt, Artificial Sequence
  Description of Artificial Sequence: Synthetic oligonucleotide
gcagugggugaaguacucu

SEQ ID NO: 1072513 - RNA, 19 nt, Artificial Sequence
  Description of Artificial Sequence: Synthetic oligonucleotide
cuccacggcaaggcuccaa

SEQ ID NO: 1072514 - RNA, 19 nt, Artificial Sequence
  Description of Artificial Sequence: Synthetic oligonucleotide
ggaacccacuucagucaua

SEQ ID NO: 1072515 - RNA, 19 nt, Artificial Sequence
  Description of Artificial Sequence: Synthetic oligonucleotide
gcccugcuaggagcauagc

SEQ ID NO: 1072516 - RNA, 19 nt, Artificial Sequence
  Description of Artificial Sequence: Synthetic oligonucleotide
gcuggcuaugcaggccuau

SEQ ID NO: 1072517 - RNA, 19 nt, Artificial Sequence
  Description of Artificial Sequence: Synthetic oligonucleotide
gcaagacccuggguuccau

SEQ ID NO: 1072518 - RNA, 19 nt, Artificial Sequence
  Description of Artificial Sequence: Synthetic oligonucleotide
  modified_base (1)..(1): a, c, u, g, unknown or other
ncaaaggugaccaaccucc

SEQ ID NO: 1072519 - RNA, 19 nt, Artificial Sequence
  Description of Artificial Sequence: Synthetic oligonucleotide
agaaauacgaauuucgggc

SEQ ID NO: 1072520 - RNA, 19 nt, Artificial Sequence
  Description of Artificial Sequence: Synthetic oligonucleotide
aauauaguccuucucaagg

SEQ ID NO: 1072521 - RNA, 19 nt, Artificial Sequence
  Description of Artificial Sequence: Synthetic oligonucleotide
aguauuaaaagucacauga

SEQ ID NO: 1072522 - RNA, 19 nt, Artificial Sequence
  Description of Artificial Sequence: Synthetic oligonucleotide
ucaagcauuauucuuauag

SEQ ID NO: 1072523 - RNA, 19 nt, Artificial Sequence
  Description of Artificial Sequence: Synthetic oligonucleotide
aagcauuauucuuauaggc

SEQ ID NO: 1072524 - RNA, 19 nt, Artificial Sequence
  Description of Artificial Sequence: Synthetic oligonucleotide
aaaacucuacacgagaagc

SEQ ID NO: 1072525 - RNA, 19 nt, Artificial Sequence
  Description of Artificial Sequence: Synthetic oligonucleotide
agauacaccauuuguaucg

SEQ ID NO: 1072526 - RNA, 19 nt, Artificial Sequence
  Description of Artificial Sequence: Synthetic oligonucleotide
ugaaaagauagauacacca

SEQ ID NO: 1072527 - RNA, 19 nt, Artificial Sequence
  Description of Artificial Sequence: Synthetic oligonucleotide
aagugauuaauauaguccu

SEQ ID NO: 1072528 - RNA, 19 nt, Artificial Sequence
  Description of Artificial Sequence: Synthetic oligonucleotide
ugaaaaugagguauacugg

SEQ ID NO: 1072529 - RNA, 19 nt, Artificial Sequence
  Description of Artificial Sequence: Synthetic oligonucleotide
aaauacgaauuucgggccc

SEQ ID NO: 1072530 - RNA, 19 nt, Artificial Sequence
  Description of Artificial Sequence: Synthetic oligonucleotide
ucauuagagauggacaucg

SEQ ID NO: 1072531 - RNA, 19 nt, Artificial Sequence
  Description of Artificial Sequence: Synthetic oligonucleotide
uagaaauacgaauuucggg

SEQ ID NO: 1072532 - RNA, 19 nt, Artificial Sequence
  Description of Artificial Sequence: Synthetic oligonucleotide
aguaguggggaauuauugc

SEQ ID NO: 1072533 - RNA, 19 nt, Artificial Sequence
  Description of Artificial Sequence: Synthetic oligonucleotide
ucuuauaggcaacuaaucu

SEQ ID NO: 1072534 - RNA, 19 nt, Artificial Sequence
  Description of Artificial Sequence: Synthetic oligonucleotide
uaugaucagaguagggugg

SEQ ID NO: 1072535 - RNA, 19 nt, Artificial Sequence
  Description of Artificial Sequence: Synthetic oligonucleotide
cauuguguaacauacauga

SEQ ID NO: 1072536 - RNA, 19 nt, Artificial Sequence
  Description of Artificial Sequence: Synthetic oligonucleotide
gauuaagcccaacacagag

SEQ ID NO: 1072537 - RNA, 19 nt, Artificial Sequence
  Description of Artificial Sequence: Synthetic oligonucleotide
uguagugacugauuaagcc

SEQ ID NO: 1072538 - RNA, 19 nt, Artificial Sequence
  Description of Artificial Sequence: Synthetic oligonucleotide
auuaagaguaacuucauua

SEQ ID NO: 1072539 - RNA, 19 nt, Artificial Sequence
  Description of Artificial Sequence: Synthetic oligonucleotide
uaauucuuaucuuuggugu

SEQ ID NO: 1072540 - RNA, 19 nt, Artificial Sequence
  Description of Artificial Sequence: Synthetic oligonucleotide
aguagaaagaccauggcag

SEQ ID NO: 1072541 - RNA, 19 nt, Artificial Sequence
  Description of Artificial Sequence: Synthetic oligonucleotide
aaaagauagauacaccauu

SEQ ID NO: 1072542 - RNA, 19 nt, Artificial Sequence
  Description of Artificial Sequence: Synthetic oligonucleotide
gguaguauugaguaguggg

SEQ ID NO: 1072543 - RNA, 19 nt, Artificial Sequence
  Description of Artificial Sequence: Synthetic oligonucleotide
gauguagugacugauuaag

SEQ ID NO: 1072544 - RNA, 19 nt, Artificial Sequence
  Description of Artificial Sequence: Synthetic oligonucleotide
ucuuauacgaaugcccugg

SEQ ID NO: 1072545 - RNA, 19 nt, Artificial Sequence
  Description of Artificial Sequence: Synthetic oligonucleotide
aaagaaagugauuaauaua

SEQ ID NO: 1072546 - RNA, 19 nt, Artificial Sequence
  Description of Artificial Sequence: Synthetic oligonucleotide
agugucuacaagauuauac

SEQ ID NO: 1072547 - RNA, 19 nt, Artificial Sequence
  Description of Artificial Sequence: Synthetic oligonucleotide
ugugaagggauuacaaaga

SEQ ID NO: 1072548 - RNA, 19 nt, Artificial Sequence
  Description of Artificial Sequence: Synthetic oligonucleotide
ugcauuaggcacaagcuga

SEQ ID NO: 1072549 - RNA, 19 nt, Artificial Sequence
  Description of Artificial Sequence: Synthetic oligonucleotide
uuauaggcaacuaaucuua

SEQ ID NO: 1072550 - RNA, 19 nt, Artificial Sequence
  Description of Artificial Sequence: Synthetic oligonucleotide
gaaauacgaauuucgggcc

SEQ ID NO: 1072551 - RNA, 19 nt, Artificial Sequence
  Description of Artificial Sequence: Synthetic oligonucleotide
uucuaaaaggcccauccga

SEQ ID NO: 1072552 - RNA, 19 nt, Artificial Sequence
  Description of Artificial Sequence: Synthetic oligonucleotide
caagcauuauucuuauagg

SEQ ID NO: 1072553 - RNA, 19 nt, Artificial Sequence
  Description of Artificial Sequence: Synthetic oligonucleotide
cugugaagggauuacaaag

SEQ ID NO: 1072554 - RNA, 19 nt, Artificial Sequence
  Description of Artificial Sequence: Synthetic oligonucleotide
aauuucgggcccucuaauc

SEQ ID NO: 1072555 - RNA, 19 nt, Artificial Sequence
  Description of Artificial Sequence: Synthetic oligonucleotide
ugagguagaaauacgaauu

SEQ ID NO: 1072556 - RNA, 19 nt, Artificial Sequence
  Description of Artificial Sequence: Synthetic oligonucleotide
ucugauugcauuaggcaca

SEQ ID NO: 1072557 - RNA, 19 nt, Artificial Sequence
  Description of Artificial Sequence: Synthetic oligonucleotide
uuucugauugcauuaggca

SEQ ID NO: 1072558 - RNA, 19 nt, Artificial Sequence
  Description of Artificial Sequence: Synthetic oligonucleotide
aagcgcucagaauaaaucu

SEQ ID NO: 1072559 - RNA, 19 nt, Artificial Sequence
  Description of Artificial Sequence: Synthetic oligonucleotide
aguaguaucuaauucuuau

SEQ ID NO: 1072560 - RNA, 19 nt, Artificial Sequence
  Description of Artificial Sequence: Synthetic oligonucleotide
cuuaaguauuaaaagucac

SEQ ID NO: 1072561 - RNA, 19 nt, Artificial Sequence
  Description of Artificial Sequence: Synthetic oligonucleotide
uucugauugcauuaggcac

SEQ ID NO: 1072562 - RNA, 19 nt, Artificial Sequence
  Description of Artificial Sequence: Synthetic oligonucleotide
aagucaacgcccucgcuag

SEQ ID NO: 1072563 - RNA, 19 nt, Artificial Sequence
  Description of Artificial Sequence: Synthetic oligonucleotide
uuaagcccaacacagaguu

SEQ ID NO: 1072564 - RNA, 19 nt, Artificial Sequence
  Description of Artificial Sequence: Synthetic oligonucleotide
guagugacugauuaagccc

SEQ ID NO: 1072565 - RNA, 19 nt, Artificial Sequence
  Description of Artificial Sequence: Synthetic oligonucleotide
uuacagaacucacauugug

SEQ ID NO: 1072566 - RNA, 19 nt, Artificial Sequence
  Description of Artificial Sequence: Synthetic oligonucleotide
uuugcaaaagucucuugca

SEQ ID NO: 1072567 - RNA, 19 nt, Artificial Sequence
  Description of Artificial Sequence: Synthetic oligonucleotide
agguuaugugauuucuccc

SEQ ID NO: 1072568 - RNA, 19 nt, Artificial Sequence
  Description of Artificial Sequence: Synthetic oligonucleotide
uuaauauaguccuucucaa

SEQ ID NO: 1072569 - RNA, 19 nt, Artificial Sequence
  Description of Artificial Sequence: Synthetic oligonucleotide
agaaaagucaacgcccucg

SEQ ID NO: 1072570 - RNA, 19 nt, Artificial Sequence
  Description of Artificial Sequence: Synthetic oligonucleotide
uuagcagcguguuaacaag

SEQ ID NO: 1072571 - RNA, 19 nt, Artificial Sequence
  Description of Artificial Sequence: Synthetic oligonucleotide
agggauuacaaagaaagug

SEQ ID NO: 1072572 - RNA, 19 nt, Artificial Sequence
  Description of Artificial Sequence: Synthetic oligonucleotide
aaacucuacacgagaagcg

SEQ ID NO: 1072573 - RNA, 19 nt, Artificial Sequence
  Description of Artificial Sequence: Synthetic oligonucleotide
uuaucuuugguguccuaag

SEQ ID NO: 1072574 - RNA, 19 nt, Artificial Sequence
  Description of Artificial Sequence: Synthetic oligonucleotide
guagaaauacgaauuucgg

SEQ ID NO: 1072575 - RNA, 19 nt, Artificial Sequence
  Description of Artificial Sequence: Synthetic oligonucleotide
cucgcuaggaaagaaaggc

SEQ ID NO: 1072576 - RNA, 19 nt, Artificial Sequence
  Description of Artificial Sequence: Synthetic oligonucleotide
accaucuuaugucaaaaca

SEQ ID NO: 1072577 - RNA, 19 nt, Artificial Sequence
  Description of Artificial Sequence: Synthetic oligonucleotide
uaaaaggcccauccgaagu

SEQ ID NO: 1072578 - RNA, 19 nt, Artificial Sequence
  Description of Artificial Sequence: Synthetic oligonucleotide
ugucuacaagauuauacac

SEQ ID NO: 1072579 - RNA, 19 nt, Artificial Sequence
  Description of Artificial Sequence: Synthetic oligonucleotide
auuaggcacaagcugagcu

SEQ ID NO: 1072580 - RNA, 19 nt, Artificial Sequence
  Description of Artificial Sequence: Synthetic oligonucleotide
gauaacaccgugagaaaag

SEQ ID NO: 1072581 - RNA, 19 nt, Artificial Sequence
  Description of Artificial Sequence: Synthetic oligonucleotide
acaagauuauacacaaagg

SEQ ID NO: 1072582 - RNA, 19 nt, Artificial Sequence
  Description of Artificial Sequence: Synthetic oligonucleotide
ucuaaaaggcccauccgaa

SEQ ID NO: 1072583 - RNA, 19 nt, Artificial Sequence
  Description of Artificial Sequence: Synthetic oligonucleotide
auucacuaugaucagagua

SEQ ID NO: 1072584 - RNA, 19 nt, Artificial Sequence
  Description of Artificial Sequence: Synthetic oligonucleotide
aaagucaacgcccucgcua

SEQ ID NO: 1072585 - RNA, 19 nt, Artificial Sequence
  Description of Artificial Sequence: Synthetic oligonucleotide
auacgaaugcccuggucac

SEQ ID NO: 1072586 - RNA, 19 nt, Artificial Sequence
  Description of Artificial Sequence: Synthetic oligonucleotide
guaguauugaguagugggg

SEQ ID NO: 1072587 - RNA, 19 nt, Artificial Sequence
  Description of Artificial Sequence: Synthetic oligonucleotide
uguuaacaagugcaggacu

SEQ ID NO: 1072588 - RNA, 19 nt, Artificial Sequence
  Description of Artificial Sequence: Synthetic oligonucleotide
uacagaacucacauugugu

SEQ ID NO: 1072589 - RNA, 19 nt, Artificial Sequence
  Description of Artificial Sequence: Synthetic oligonucleotide
uguuugauuguacaacaua

SEQ ID NO: 1072590 - RNA, 19 nt, Artificial Sequence
  Description of Artificial Sequence: Synthetic oligonucleotide
aggacuguaaauucacugu

SEQ ID NO: 1072591 - RNA, 19 nt, Artificial Sequence
  Description of Artificial Sequence: Synthetic oligonucleotide
aaguugcauuguuaaacug

SEQ ID NO: 1072592 - RNA, 19 nt, Artificial Sequence
  Description of Artificial Sequence: Synthetic oligonucleotide
uuuguaucguuuagaauua

SEQ ID NO: 1072593 - RNA, 19 nt, Artificial Sequence
  Description of Artificial Sequence: Synthetic oligonucleotide
acuaugaucagaguagggu

SEQ ID NO: 1072594 - RNA, 19 nt, Artificial Sequence
  Description of Artificial Sequence: Synthetic oligonucleotide
accgugagaaaagucaacg

SEQ ID NO: 1072595 - RNA, 19 nt, Artificial Sequence
  Description of Artificial Sequence: Synthetic oligonucleotide
acgagaagcgcucagaaua

SEQ ID NO: 1072596 - RNA, 19 nt, Artificial Sequence
  Description of Artificial Sequence: Synthetic oligonucleotide
ugauuaauauaguccuucu

SEQ ID NO: 1072597 - RNA, 19 nt, Artificial Sequence
  Description of Artificial Sequence: Synthetic oligonucleotide
auaucugucaagcauuauu

SEQ ID NO: 1072598 - RNA, 19 nt, Artificial Sequence
  Description of Artificial Sequence: Synthetic oligonucleotide
gagaguaguaucuaauucu

SEQ ID NO: 1072599 - RNA, 19 nt, Artificial Sequence
  Description of Artificial Sequence: Synthetic oligonucleotide
ucacuaugaucagaguagg

SEQ ID NO: 1072600 - RNA, 19 nt, Artificial Sequence
  Description of Artificial Sequence: Synthetic oligonucleotide
auucagagguaguauugag

SEQ ID NO: 1072601 - RNA, 19 nt, Artificial Sequence
  Description of Artificial Sequence: Synthetic oligonucleotide
agaguaaguggucacugca

SEQ ID NO: 1072602 - RNA, 19 nt, Artificial Sequence
  Description of Artificial Sequence: Synthetic oligonucleotide
agaauaaaucugcuugaga

SEQ ID NO: 1072603 - RNA, 19 nt, Artificial Sequence
  Description of Artificial Sequence: Synthetic oligonucleotide
agagguaguauugaguagu

SEQ ID NO: 1072604 - RNA, 19 nt, Artificial Sequence
  Description of Artificial Sequence: Synthetic oligonucleotide
aggaugucucuucagucuc

SEQ ID NO: 1072605 - RNA, 19 nt, Artificial Sequence
  Description of Artificial Sequence: Synthetic oligonucleotide
guggauaacaccgugagaa

SEQ ID NO: 1072606 - RNA, 19 nt, Artificial Sequence
  Description of Artificial Sequence: Synthetic oligonucleotide
cuauuaguagguuaaggaa

SEQ ID NO: 1072607 - RNA, 19 nt, Artificial Sequence
  Description of Artificial Sequence: Synthetic oligonucleotide
guuaacaagugcaggacug

SEQ ID NO: 1072608 - RNA, 19 nt, Artificial Sequence
  Description of Artificial Sequence: Synthetic oligonucleotide
acagaacucacauugugua

SEQ ID NO: 1072609 - RNA, 19 nt, Artificial Sequence
  Description of Artificial Sequence: Synthetic oligonucleotide
ugcaggacuguaaauucac

SEQ ID NO: 1072610 - RNA, 19 nt, Artificial Sequence
  Description of Artificial Sequence: Synthetic oligonucleotide
uguaucguuuagaauuaaa

SEQ ID NO: 1072611 - RNA, 19 nt, Artificial Sequence
  Description of Artificial Sequence: Synthetic oligonucleotide
cauacaugaaaauaucugu

SEQ ID NO: 1072612 - RNA, 19 nt, Artificial Sequence
  Description of Artificial Sequence: Synthetic oligonucleotide
uuacaaagaaagugauuaa

SEQ ID NO: 1072613 - RNA, 19 nt, Artificial Sequence
  Description of Artificial Sequence: Synthetic oligonucleotide
ugaagggauuacaaagaaa

SEQ ID NO: 1072614 - RNA, 19 nt, Artificial Sequence
  Description of Artificial Sequence: Synthetic oligonucleotide
guugcauuguuaaacugug

SEQ ID NO: 1072615 - RNA, 19 nt, Artificial Sequence
  Description of Artificial Sequence: Synthetic oligonucleotide
uaguauugaguagugggga

SEQ ID NO: 1072616 - RNA, 19 nt, Artificial Sequence
  Description of Artificial Sequence: Synthetic oligonucleotide
guaguggggaauuauugca

SEQ ID NO: 1072617 - RNA, 19 nt, Artificial Sequence
  Description of Artificial Sequence: Synthetic oligonucleotide
agguaagugguacugcagu

SEQ ID NO: 1072618 - RNA, 19 nt, Artificial Sequence
  Description of Artificial Sequence: Synthetic oligonucleotide
cuaaaaggcccauccgaag

SEQ ID NO: 1072619 - RNA, 19 nt, Artificial Sequence
  Description of Artificial Sequence: Synthetic oligonucleotide
ugcucaguuuagcagcgug

SEQ ID NO: 1072620 - RNA, 19 nt, Artificial Sequence
  Description of Artificial Sequence: Synthetic oligonucleotide
acaaaggagaguaguaucu

SEQ ID NO: 1072621 - RNA, 19 nt, Artificial Sequence
  Description of Artificial Sequence: Synthetic oligonucleotide
ucagauuuaugagcuggcc

SEQ ID NO: 1072622 - RNA, 19 nt, Artificial Sequence
  Description of Artificial Sequence: Synthetic oligonucleotide
aucagaguaggguggcauc

SEQ ID NO: 1072623 - RNA, 19 nt, Artificial Sequence
  Description of Artificial Sequence: Synthetic oligonucleotide
aaucuaauucugguuugcu

SEQ ID NO: 1072624 - RNA, 19 nt, Artificial Sequence
  Description of Artificial Sequence: Synthetic oligonucleotide
ucgcuaggaaagaaaggca

SEQ ID NO: 1072625 - RNA, 19 nt, Artificial Sequence
  Description of Artificial Sequence: Synthetic oligonucleotide
uucuuauacgaaugcccug

SEQ ID NO: 1072626 - RNA, 19 nt, Artificial Sequence
  Description of Artificial Sequence: Synthetic oligonucleotide
gauguggacggcugccccg

SEQ ID NO: 1072627 - RNA, 19 nt, Artificial Sequence
  Description of Artificial Sequence: Synthetic oligonucleotide
aguaucuaauucuuaucuu

SEQ ID NO: 1072628 - RNA, 19 nt, Artificial Sequence
  Description of Artificial Sequence: Synthetic oligonucleotide
aguuucuuugaagguuggc

SEQ ID NO: 1072629 - RNA, 19 nt, Artificial Sequence
  Description of Artificial Sequence: Synthetic oligonucleotide
gcauuguuaaacugugucc

SEQ ID NO: 1072630 - RNA, 19 nt, Artificial Sequence
  Description of Artificial Sequence: Synthetic oligonucleotide
guaucguuuagaauuaaaa

SEQ ID NO: 1072631 - RNA, 19 nt, Artificial Sequence
  Description of Artificial Sequence: Synthetic oligonucleotide
gugauuaauauaguccuuc

SEQ ID NO: 1072632 - RNA, 19 nt, Artificial Sequence
  Description of Artificial Sequence: Synthetic oligonucleotide
ugaguaguggggaauuauu

SEQ ID NO: 1072633 - RNA, 19 nt, Artificial Sequence
  Description of Artificial Sequence: Synthetic oligonucleotide
aaguaagugucuacaagau

SEQ ID NO: 1072634 - RNA, 19 nt, Artificial Sequence
  Description of Artificial Sequence: Synthetic oligonucleotide
aauacgaauuucgggcccu

SEQ ID NO: 1072635 - RNA, 19 nt, Artificial Sequence
  Description of Artificial Sequence: Synthetic oligonucleotide
uagauacaccauuuguauc

SEQ ID NO: 1072636 - RNA, 19 nt, Artificial Sequence
  Description of Artificial Sequence: Synthetic oligonucleotide
ucggccgaccaucuuaugu

SEQ ID NO: 1072637 - RNA, 19 nt, Artificial Sequence
  Description of Artificial Sequence: Synthetic oligonucleotide
aucgcucgugugccgagcc

SEQ ID NO: 1072638 - RNA, 19 nt, Artificial Sequence
  Description of Artificial Sequence: Synthetic oligonucleotide
ugucaagcauuauucuuau

SEQ ID NO: 1072639 - RNA, 19 nt, Artificial Sequence
  Description of Artificial Sequence: Synthetic oligonucleotide
caaagaaagugauuaauau

SEQ ID NO: 1072640 - RNA, 19 nt, Artificial Sequence
  Description of Artificial Sequence: Synthetic oligonucleotide
agagaguaaguggucacug

SEQ ID NO: 1072641 - RNA, 19 nt, Artificial Sequence
  Description of Artificial Sequence: Synthetic oligonucleotide
ugggacuuaagagguagca

SEQ ID NO: 1072642 - RNA, 19 nt, Artificial Sequence
  Description of Artificial Sequence: Synthetic oligonucleotide
cacuaugaucagaguaggg

SEQ ID NO: 1072643 - RNA, 19 nt, Artificial Sequence
  Description of Artificial Sequence: Synthetic oligonucleotide
aguauugaguaguggggaa

SEQ ID NO: 1072644 - RNA, 19 nt, Artificial Sequence
  Description of Artificial Sequence: Synthetic oligonucleotide
acucuugcgaggaugucuc

SEQ ID NO: 1072645 - RNA, 19 nt, Artificial Sequence
  Description of Artificial Sequence: Synthetic oligonucleotide
ggagaguaguaucuaauuc

SEQ ID NO: 1072646 - RNA, 19 nt, Artificial Sequence
  Description of Artificial Sequence: Synthetic oligonucleotide
agaccgaaccaagacaaug

SEQ ID NO: 1072647 - RNA, 19 nt, Artificial Sequence
  Description of Artificial Sequence: Synthetic oligonucleotide
aggagaguaguaucuaauu

SEQ ID NO: 1072648 - RNA, 19 nt, Artificial Sequence
  Description of Artificial Sequence: Synthetic oligonucleotide
uggcagaccgaaccaagac

SEQ ID NO: 1072649 - RNA, 19 nt, Artificial Sequence
  Description of Artificial Sequence: Synthetic oligonucleotide
gggauuacaaagaaaguga

SEQ ID NO: 1072650 - RNA, 19 nt, Artificial Sequence
  Description of Artificial Sequence: Synthetic oligonucleotide
uguuuguagcuccccuaca

SEQ ID NO: 1072651 - RNA, 19 nt, Artificial Sequence
  Description of Artificial Sequence: Synthetic oligonucleotide
uggacaucgcucgugugcc

SEQ ID NO: 1072652 - RNA, 19 nt, Artificial Sequence
  Description of Artificial Sequence: Synthetic oligonucleotide
agcauucagagguaguauu

SEQ ID NO: 1072653 - RNA, 19 nt, Artificial Sequence
  Description of Artificial Sequence: Synthetic oligonucleotide
uuaacaagugcaggacugu

SEQ ID NO: 1072654 - RNA, 19 nt, Artificial Sequence
  Description of Artificial Sequence: Synthetic oligonucleotide
ggcccaguggauaacaccg

SEQ ID NO: 1072655 - RNA, 19 nt, Artificial Sequence
  Description of Artificial Sequence: Synthetic oligonucleotide
uuauacgaaugcccugguc

SEQ ID NO: 1072656 - RNA, 19 nt, Artificial Sequence
  Description of Artificial Sequence: Synthetic oligonucleotide
auaacaccgugagaaaagu

SEQ ID NO: 1072657 - RNA, 19 nt, Artificial Sequence
  Description of Artificial Sequence: Synthetic oligonucleotide
gaguaacuucauuagagau

SEQ ID NO: 1072658 - RNA, 19 nt, Artificial Sequence
  Description of Artificial Sequence: Synthetic oligonucleotide
uguuaggguuuggauguag

SEQ ID NO: 1072659 - RNA, 19 nt, Artificial Sequence
  Description of Artificial Sequence: Synthetic oligonucleotide
cuugcgaggaugucucuuc

SEQ ID NO: 1072660 - RNA, 19 nt, Artificial Sequence
  Description of Artificial Sequence: Synthetic oligonucleotide
aaugcaccucggccgacca

SEQ ID NO: 1072661 - RNA, 19 nt, Artificial Sequence
  Description of Artificial Sequence: Synthetic oligonucleotide
accgaaccaagacaaugca

SEQ ID NO: 1072662 - RNA, 19 nt, Artificial Sequence
  Description of Artificial Sequence: Synthetic oligonucleotide
uggccaacgaggcuucuaa

SEQ ID NO: 1072663 - RNA, 19 nt, Artificial Sequence
  Description of Artificial Sequence: Synthetic oligonucleotide
aucagauccacaaacuauu

SEQ ID NO: 1072664 - RNA, 19 nt, Artificial Sequence
  Description of Artificial Sequence: Synthetic oligonucleotide
agugcucaguuuagcagcg

SEQ ID NO: 1072665 - RNA, 19 nt, Artificial Sequence
  Description of Artificial Sequence: Synthetic oligonucleotide
guaucuaauucuuaucuuu

SEQ ID NO: 1072666 - RNA, 19 nt, Artificial Sequence
  Description of Artificial Sequence: Synthetic oligonucleotide
ccaacugaugcugagguag

SEQ ID NO: 1072667 - RNA, 19 nt, Artificial Sequence
  Description of Artificial Sequence: Synthetic oligonucleotide
cauuagagauggacaucgc

SEQ ID NO: 1072668 - RNA, 19 nt, Artificial Sequence
  Description of Artificial Sequence: Synthetic oligonucleotide
guuuguagcuccccuacaa

SEQ ID NO: 1072669 - RNA, 19 nt, Artificial Sequence
  Description of Artificial Sequence: Synthetic oligonucleotide
ucucaagguuaugugauuu

SEQ ID NO: 1072670 - RNA, 19 nt, Artificial Sequence
  Description of Artificial Sequence: Synthetic oligonucleotide
agcuccccuacaaaguuuc

SEQ ID NO: 1072671 - RNA, 19 nt, Artificial Sequence
  Description of Artificial Sequence: Synthetic oligonucleotide
gagguaagugguacugcag

SEQ ID NO: 1072672 - RNA, 19 nt, Artificial Sequence
  Description of Artificial Sequence: Synthetic oligonucleotide
acaccauuuguaucguuua

SEQ ID NO: 1072673 - RNA, 19 nt, Artificial Sequence
  Description of Artificial Sequence: Synthetic oligonucleotide
cuuugguguccuaagcaga

SEQ ID NO: 1072674 - RNA, 19 nt, Artificial Sequence
  Description of Artificial Sequence: Synthetic oligonucleotide
caccauuuguaucguuuag

SEQ ID NO: 1072675 - RNA, 19 nt, Artificial Sequence
  Description of Artificial Sequence: Synthetic oligonucleotide
uagagaguaaguggucacu

SEQ ID NO: 1072676 - RNA, 19 nt, Artificial Sequence
  Description of Artificial Sequence: Synthetic oligonucleotide
cuuauaggcaacuaaucuu

SEQ ID NO: 1072677 - RNA, 19 nt, Artificial Sequence
  Description of Artificial Sequence: Synthetic oligonucleotide
cucuacacgagaagcgcuc

SEQ ID NO: 1072678 - RNA, 19 nt, Artificial Sequence
  Description of Artificial Sequence: Synthetic oligonucleotide
ugaccuguuaggguuugga

SEQ ID NO: 1072679 - RNA, 19 nt, Artificial Sequence
  Description of Artificial Sequence: Synthetic oligonucleotide
ccaacgaggcuucuaaaag

SEQ ID NO: 1072680 - RNA, 19 nt, Artificial Sequence
  Description of Artificial Sequence: Synthetic oligonucleotide
gugaagggauuacaaagaa

SEQ ID NO: 1072681 - RNA, 19 nt, Artificial Sequence
  Description of Artificial Sequence: Synthetic oligonucleotide
guaaauucacuguagcauu

SEQ ID NO: 1072682 - RNA, 19 nt, Artificial Sequence
  Description of Artificial Sequence: Synthetic oligonucleotide
uauugaguaguggggaauu

SEQ ID NO: 1072683 - RNA, 19 nt, Artificial Sequence
  Description of Artificial Sequence: Synthetic oligonucleotide
acacgagaagcgcucagaa

SEQ ID NO: 1072684 - RNA, 19 nt, Artificial Sequence
  Description of Artificial Sequence: Synthetic oligonucleotide
aguggauaacaccgugaga

SEQ ID NO: 1072685 - RNA, 19 nt, Artificial Sequence
  Description of Artificial Sequence: Synthetic oligonucleotide
gacaaugcaccucggccga

SEQ ID NO: 1072686 - RNA, 19 nt, Artificial Sequence
  Description of Artificial Sequence: Synthetic oligonucleotide
uggcuugauuuuaauucau

SEQ ID NO: 1072687 - RNA, 19 nt, Artificial Sequence
  Description of Artificial Sequence: Synthetic oligonucleotide
agcaccuuucgggagucgg

SEQ ID NO: 1072688 - RNA, 19 nt, Artificial Sequence
  Description of Artificial Sequence: Synthetic oligonucleotide
gauuuaugagcuggccaac

SEQ ID NO: 1072689 - RNA, 19 nt, Artificial Sequence
  Description of Artificial Sequence: Synthetic oligonucleotide
acgaggcuucuaaaaggcc

SEQ ID NO: 1072690 - RNA, 19 nt, Artificial Sequence
  Description of Artificial Sequence: Synthetic oligonucleotide
gaaaagauagauacaccau

SEQ ID NO: 1072691 - RNA, 19 nt, Artificial Sequence
  Description of Artificial Sequence: Synthetic oligonucleotide
aguaugaaaaugagguaua

SEQ ID NO: 1072692 - RNA, 19 nt, Artificial Sequence
  Description of Artificial Sequence: Synthetic oligonucleotide
uacacgagaagcgcucaga

SEQ ID NO: 1072693 - RNA, 19 nt, Artificial Sequence
  Description of Artificial Sequence: Synthetic oligonucleotide
accgcgugcgcucauccug

SEQ ID NO: 1072694 - RNA, 19 nt, Artificial Sequence
  Description of Artificial Sequence: Synthetic oligonucleotide
uugagacauuuuacagaac

SEQ ID NO: 1072695 - RNA, 19 nt, Artificial Sequence
  Description of Artificial Sequence: Synthetic oligonucleotide
cuaguaugaaaaugaggua

SEQ ID NO: 1072696 - RNA, 19 nt, Artificial Sequence
  Description of Artificial Sequence: Synthetic oligonucleotide
ucaccgcgugcgcucaucc

SEQ ID NO: 1072697 - RNA, 19 nt, Artificial Sequence
  Description of Artificial Sequence: Synthetic oligonucleotide
gauggacaucgcucgugug

SEQ ID NO: 1072698 - RNA, 19 nt, Artificial Sequence
  Description of Artificial Sequence: Synthetic oligonucleotide
ggacuuaagagguagcagu

SEQ ID NO: 1072699 - RNA, 19 nt, Artificial Sequence
  Description of Artificial Sequence: Synthetic oligonucleotide
gagauggacaucgcucgug

SEQ ID NO: 1072700 - RNA, 19 nt, Artificial Sequence
  Description of Artificial Sequence: Synthetic oligonucleotide
agucacauacaaugcuuuu

SEQ ID NO: 1072701 - RNA, 19 nt, Artificial Sequence
  Description of Artificial Sequence: Synthetic oligonucleotide
agugguacugcagucuaaa

SEQ ID NO: 1072702 - RNA, 19 nt, Artificial Sequence
  Description of Artificial Sequence: Synthetic oligonucleotide
auguggacggcugccccgc

SEQ ID NO: 1072703 - RNA, 19 nt, Artificial Sequence
  Description of Artificial Sequence: Synthetic oligonucleotide
ucgugugccgagccuggcc

SEQ ID NO: 1072704 - RNA, 19 nt, Artificial Sequence
  Description of Artificial Sequence: Synthetic oligonucleotide
cugagguaagugguacugc

SEQ ID NO: 1072705 - RNA, 19 nt, Artificial Sequence
  Description of Artificial Sequence: Synthetic oligonucleotide
guuuggauguagugacuga

SEQ ID NO: 1072706 - RNA, 19 nt, Artificial Sequence
  Description of Artificial Sequence: Synthetic oligonucleotide
uccgcccagcaccuuucgg

SEQ ID NO: 1072707 - RNA, 19 nt, Artificial Sequence
  Description of Artificial Sequence: Synthetic oligonucleotide
guagcauucagagguagua

SEQ ID NO: 1072708 - RNA, 19 nt, Artificial Sequence
  Description of Artificial Sequence: Synthetic oligonucleotide
cugccccgcgccuucaccg

SEQ ID NO: 1072709 - RNA, 19 nt, Artificial Sequence
  Description of Artificial Sequence: Synthetic oligonucleotide
agucucuugcagugcucag

SEQ ID NO: 1072710 - RNA, 19 nt, Artificial Sequence
  Description of Artificial Sequence: Synthetic oligonucleotide
cccucgcuaggaaagaaag

SEQ ID NO: 1072711 - RNA, 19 nt, Artificial Sequence
  Description of Artificial Sequence: Synthetic oligonucleotide
cugagguagaaauacgaau

SEQ ID NO: 1072712 - RNA, 19 nt, Artificial Sequence
  Description of Artificial Sequence: Synthetic oligonucleotide
agagauggacaucgcucgu

SEQ ID NO: 1072713 - RNA, 19 nt, Artificial Sequence
  Description of Artificial Sequence: Synthetic oligonucleotide
uagcauucagagguaguau

SEQ ID NO: 1072714 - RNA, 19 nt, Artificial Sequence
  Description of Artificial Sequence: Synthetic oligonucleotide
uuauugcaucucuggcuaa

SEQ ID NO: 1072715 - RNA, 19 nt, Artificial Sequence
  Description of Artificial Sequence: Synthetic oligonucleotide
gagaaaagucaacgcccuc

SEQ ID NO: 1072716 - RNA, 19 nt, Artificial Sequence
  Description of Artificial Sequence: Synthetic oligonucleotide
cacuaaaccugggacugug

SEQ ID NO: 1072717 - RNA, 19 nt, Artificial Sequence
  Description of Artificial Sequence: Synthetic oligonucleotide
caccgugagaaaagucaac

SEQ ID NO: 1072718 - RNA, 19 nt, Artificial Sequence
  Description of Artificial Sequence: Synthetic oligonucleotide
aagguuggcuugauuuuaa

SEQ ID NO: 1072719 - RNA, 19 nt, Artificial Sequence
  Description of Artificial Sequence: Synthetic oligonucleotide
cuacacgagaagcgcucag

SEQ ID NO: 1072720 - RNA, 19 nt, Artificial Sequence
  Description of Artificial Sequence: Synthetic oligonucleotide
ugcaccucggccgaccauc

SEQ ID NO: 1072721 - RNA, 19 nt, Artificial Sequence
  Description of Artificial Sequence: Synthetic oligonucleotide
uaacaagugcaggacugua

SEQ ID NO: 1072722 - RNA, 19 nt, Artificial Sequence
  Description of Artificial Sequence: Synthetic oligonucleotide
cauuaggcacaagcugagc

SEQ ID NO: 1072723 - RNA, 19 nt, Artificial Sequence
  Description of Artificial Sequence: Synthetic oligonucleotide
aagugucuacaagauuaua

SEQ ID NO: 1072724 - RNA, 19 nt, Artificial Sequence
  Description of Artificial Sequence: Synthetic oligonucleotide
uugcagugcucaguuuagc

SEQ ID NO: 1072725 - RNA, 19 nt, Artificial Sequence
  Description of Artificial Sequence: Synthetic oligonucleotide
agucaacgcccucgcuagg

SEQ ID NO: 1072726 - RNA, 19 nt, Artificial Sequence
  Description of Artificial Sequence: Synthetic oligonucleotide
guuuagcagcguguuaaca

SEQ ID NO: 1072727 - RNA, 19 nt, Artificial Sequence
  Description of Artificial Sequence: Synthetic oligonucleotide
ccgugagaaaagucaacgc

SEQ ID NO: 1072728 - RNA, 19 nt, Artificial Sequence
  Description of Artificial Sequence: Synthetic oligonucleotide
cgcuaggaaagaaaggcac

SEQ ID NO: 1072729 - RNA, 19 nt, Artificial Sequence
  Description of Artificial Sequence: Synthetic oligonucleotide
ggacuguaaauucacugua

SEQ ID NO: 1072730 - RNA, 19 nt, Artificial Sequence
  Description of Artificial Sequence: Synthetic oligonucleotide
acgaauuucgggcccucua

SEQ ID NO: 1072731 - RNA, 19 nt, Artificial Sequence
  Description of Artificial Sequence: Synthetic oligonucleotide
ccauuuguaucguuuagaa

SEQ ID NO: 1072732 - RNA, 19 nt, Artificial Sequence
  Description of Artificial Sequence: Synthetic oligonucleotide
ccucgcuaggaaagaaagg

SEQ ID NO: 1072733 - RNA, 19 nt, Artificial Sequence
  Description of Artificial Sequence: Synthetic oligonucleotide
ggcagaccgaaccaagaca

SEQ ID NO: 1072734 - RNA, 19 nt, Artificial Sequence
  Description of Artificial Sequence: Synthetic oligonucleotide
acaucgcucgugugccgag

SEQ ID NO: 1072735 - RNA, 19 nt, Artificial Sequence
  Description of Artificial Sequence: Synthetic oligonucleotide
acucuacacgagaagcgcu

SEQ ID NO: 1072736 - RNA, 19 nt, Artificial Sequence
  Description of Artificial Sequence: Synthetic oligonucleotide
uuguaucguuuagaauuaa

SEQ ID NO: 1072737 - RNA, 19 nt, Artificial Sequence
  Description of Artificial Sequence: Synthetic oligonucleotide
auuguguaacauacaugaa

SEQ ID NO: 1072738 - RNA, 19 nt, Artificial Sequence
  Description of Artificial Sequence: Synthetic oligonucleotide
auacgaauuucgggcccuc

SEQ ID NO: 1072739 - RNA, 19 nt, Artificial Sequence
  Description of Artificial Sequence: Synthetic oligonucleotide
cguguuaacaagugcagga

SEQ ID NO: 1072740 - RNA, 19 nt, Artificial Sequence
  Description of Artificial Sequence: Synthetic oligonucleotide
agugauuaauauaguccuu

SEQ ID NO: 1072741 - RNA, 19 nt, Artificial Sequence
  Description of Artificial Sequence: Synthetic oligonucleotide
gcugaaugaaaagauagau

SEQ ID NO: 1072742 - RNA, 19 nt, Artificial Sequence
  Description of Artificial Sequence: Synthetic oligonucleotide
ucuugcgaggaugucucuu

SEQ ID NO: 1072743 - RNA, 19 nt, Artificial Sequence
  Description of Artificial Sequence: Synthetic oligonucleotide
cuggcccaguggauaacac

SEQ ID NO: 1072744 - RNA, 19 nt, Artificial Sequence
  Description of Artificial Sequence: Synthetic oligonucleotide
gcccauccgaaguuguuug

SEQ ID NO: 1072745 - RNA, 19 nt, Artificial Sequence
  Description of Artificial Sequence: Synthetic oligonucleotide
caaugcaccucggccgacc

SEQ ID NO: 1072746 - RNA, 19 nt, Artificial Sequence
  Description of Artificial Sequence: Synthetic oligonucleotide
cacccuugcuuaucagauc

SEQ ID NO: 1072747 - RNA, 19 nt, Artificial Sequence
  Description of Artificial Sequence: Synthetic oligonucleotide
caccccgcaggaaaguaga

SEQ ID NO: 1072748 - RNA, 19 nt, Artificial Sequence
  Description of Artificial Sequence: Synthetic oligonucleotide
gcaguagagaguaaguggu

SEQ ID NO: 1072749 - RNA, 19 nt, Artificial Sequence
  Description of Artificial Sequence: Synthetic oligonucleotide
gaauuucgggcccucuaau

SEQ ID NO: 1072750 - RNA, 19 nt, Artificial Sequence
  Description of Artificial Sequence: Synthetic oligonucleotide
uacgaauuucgggcccucu

SEQ ID NO: 1072751 - RNA, 19 nt, Artificial Sequence
  Description of Artificial Sequence: Synthetic oligonucleotide
auugaguaguggggaauua

SEQ ID NO: 1072752 - RNA, 19 nt, Artificial Sequence
  Description of Artificial Sequence: Synthetic oligonucleotide
gacaucgcucgugugccga

SEQ ID NO: 1072753 - RNA, 19 nt, Artificial Sequence
  Description of Artificial Sequence: Synthetic oligonucleotide
ucggccgcguccucgcuuc

SEQ ID NO: 1072754 - RNA, 19 nt, Artificial Sequence
  Description of Artificial Sequence: Synthetic oligonucleotide
ccgaaccaagacaaugcac

SEQ ID NO: 1072755 - RNA, 19 nt, Artificial Sequence
  Description of Artificial Sequence: Synthetic oligonucleotide
gccaacgaggcuucuaaaa

SEQ ID NO: 1072756 - RNA, 19 nt, Artificial Sequence
  Description of Artificial Sequence: Synthetic oligonucleotide
acuaaaccugggacuguga

SEQ ID NO: 1072757 - RNA, 19 nt, Artificial Sequence
  Description of Artificial Sequence: Synthetic oligonucleotide
uguggcgcuggggcggcag

SEQ ID NO: 1072758 - RNA, 19 nt, Artificial Sequence
  Description of Artificial Sequence: Synthetic oligonucleotide
guagcuccccuacaaaguu

SEQ ID NO: 1072759 - RNA, 19 nt, Artificial Sequence
  Description of Artificial Sequence: Synthetic oligonucleotide
acaaugcaccucggccgac

SEQ ID NO: 1072760 - RNA, 19 nt, Artificial Sequence
  Description of Artificial Sequence: Synthetic oligonucleotide
aagugguacugcagucuaa

SEQ ID NO: 1072761 - RNA, 19 nt, Artificial Sequence
  Description of Artificial Sequence: Synthetic oligonucleotide
uuguuucauuuggcuuaag

SEQ ID NO: 1072762 - RNA, 19 nt, Artificial Sequence
  Description of Artificial Sequence: Synthetic oligonucleotide
ccgagccuggccaauauga

SEQ ID NO: 1072763 - RNA, 19 nt, Artificial Sequence
  Description of Artificial Sequence: Synthetic oligonucleotide
ccucuaauccuccucugca

SEQ ID NO: 1072764 - RNA, 19 nt, Artificial Sequence
  Description of Artificial Sequence: Synthetic oligonucleotide
guuaggguuuggauguagu

SEQ ID NO: 1072765 - RNA, 19 nt, Artificial Sequence
  Description of Artificial Sequence: Synthetic oligonucleotide
ucgcucgugugccgagccu

SEQ ID NO: 1072766 - RNA, 19 nt, Artificial Sequence
  Description of Artificial Sequence: Synthetic oligonucleotide
gauccgcccagcaccuuuc

SEQ ID NO: 1072767 - RNA, 19 nt, Artificial Sequence
  Description of Artificial Sequence: Synthetic oligonucleotide
ggauuacaaagaaagugau

SEQ ID NO: 1072768 - RNA, 19 nt, Artificial Sequence
  Description of Artificial Sequence: Synthetic oligonucleotide
ccacaaacuauuaguaggu

SEQ ID NO: 1072769 - RNA, 19 nt, Artificial Sequence
  Description of Artificial Sequence: Synthetic oligonucleotide
gugacugauuaagcccaac

SEQ ID NO: 1072770 - RNA, 19 nt, Artificial Sequence
  Description of Artificial Sequence: Synthetic oligonucleotide
ccaagacaaugcaccucgg

SEQ ID NO: 1072771 - RNA, 19 nt, Artificial Sequence
  Description of Artificial Sequence: Synthetic oligonucleotide
cgaggaugucucuucaguc

SEQ ID NO: 1072772 - RNA, 19 nt, Artificial Sequence
  Description of Artificial Sequence: Synthetic oligonucleotide
agccacccacccuugcuua

SEQ ID NO: 1072773 - RNA, 19 nt, Artificial Sequence
  Description of Artificial Sequence: Synthetic oligonucleotide
cugauugcauuaggcacaa

SEQ ID NO: 1072774 - RNA, 19 nt, Artificial Sequence
  Description of Artificial Sequence: Synthetic oligonucleotide
ggacaucgcucgugugccg

SEQ ID NO: 1072775 - RNA, 19 nt, Artificial Sequence
  Description of Artificial Sequence: Synthetic oligonucleotide
caucgcucgugugccgagc

SEQ ID NO: 1072776 - RNA, 19 nt, Artificial Sequence
  Description of Artificial Sequence: Synthetic oligonucleotide
cacaagcugagcuguuugu

SEQ ID NO: 1072777 - RNA, 19 nt, Artificial Sequence
  Description of Artificial Sequence: Synthetic oligonucleotide
cacccacccuugcuuauca

SEQ ID NO: 1072778 - RNA, 19 nt, Artificial Sequence
  Description of Artificial Sequence: Synthetic oligonucleotide
cuuauacgaaugcccuggu

SEQ ID NO: 1072779 - RNA, 19 nt, Artificial Sequence
  Description of Artificial Sequence: Synthetic oligonucleotide
ccaccccgcaggaaaguag

SEQ ID NO: 1072780 - RNA, 19 nt, Artificial Sequence
  Description of Artificial Sequence: Synthetic oligonucleotide
cauccgaaguuguuuguuu

SEQ ID NO: 1072781 - RNA, 19 nt, Artificial Sequence
  Description of Artificial Sequence: Synthetic oligonucleotide
uucaccgcgugcgcucauc

SEQ ID NO: 1072782 - RNA, 19 nt, Artificial Sequence
  Description of Artificial Sequence: Synthetic oligonucleotide
ccaucccgccccuugcccc

SEQ ID NO: 1072783 - RNA, 19 nt, Artificial Sequence
  Description of Artificial Sequence: Synthetic oligonucleotide
gucaagcauuauucuuaua

SEQ ID NO: 1072784 - RNA, 19 nt, Artificial Sequence
  Description of Artificial Sequence: Synthetic oligonucleotide
gcgaggaugucucuucagu

SEQ ID NO: 1072785 - RNA, 19 nt, Artificial Sequence
  Description of Artificial Sequence: Synthetic oligonucleotide
cagggugaccuguuagggu

SEQ ID NO: 1072786 - RNA, 19 nt, Artificial Sequence
  Description of Artificial Sequence: Synthetic oligonucleotide
ggcccucuaauccuccucu

SEQ ID NO: 1072787 - RNA, 19 nt, Artificial Sequence
  Description of Artificial Sequence: Synthetic oligonucleotide
guguuugauuguacaacau

SEQ ID NO: 1072788 - RNA, 19 nt, Artificial Sequence
  Description of Artificial Sequence: Synthetic oligonucleotide
cucggccgaccaucuuaug

SEQ ID NO: 1072789 - RNA, 19 nt, Artificial Sequence
  Description of Artificial Sequence: Synthetic oligonucleotide
cucgugugccgagccuggc

SEQ ID NO: 1072790 - RNA, 19 nt, Artificial Sequence
  Description of Artificial Sequence: Synthetic oligonucleotide
guguccuaagcagaagauu

SEQ ID NO: 1072791 - RNA, 19 nt, Artificial Sequence
  Description of Artificial Sequence: Synthetic oligonucleotide
cuggcuaaaagugcagcuu

SEQ ID NO: 1072792 - RNA, 19 nt, Artificial Sequence
  Description of Artificial Sequence: Synthetic oligonucleotide
aggcuucuaaaaggcccau

SEQ ID NO: 1072793 - RNA, 19 nt, Artificial Sequence
  Description of Artificial Sequence: Synthetic oligonucleotide
gcccucuaauccuccucug

SEQ ID NO: 1072794 - RNA, 19 nt, Artificial Sequence
  Description of Artificial Sequence: Synthetic oligonucleotide
gccgagccuggccaauaug

SEQ ID NO: 1072795 - RNA, 19 nt, Artificial Sequence
  Description of Artificial Sequence: Synthetic oligonucleotide
cacgagaagcgcucagaau

SEQ ID NO: 1072796 - RNA, 19 nt, Artificial Sequence
  Description of Artificial Sequence: Synthetic oligonucleotide
gcugagcuguuuguagcuc

SEQ ID NO: 1072797 - RNA, 19 nt, Artificial Sequence
  Description of Artificial Sequence: Synthetic oligonucleotide
ccaucauggggaacuaccu

SEQ ID NO: 1072798 - RNA, 19 nt, Artificial Sequence
  Description of Artificial Sequence: Synthetic oligonucleotide
gcugccccgcgccuucacc

SEQ ID NO: 1072799 - RNA, 19 nt, Artificial Sequence
  Description of Artificial Sequence: Synthetic oligonucleotide
acgcccucgcuaggaaaga

SEQ ID NO: 1072800 - RNA, 19 nt, Artificial Sequence
  Description of Artificial Sequence: Synthetic oligonucleotide
gcggcagguugucccuggg

SEQ ID NO: 1072801 - RNA, 19 nt, Artificial Sequence
  Description of Artificial Sequence: Synthetic oligonucleotide
cccaucccgccccuugccc

SEQ ID NO: 1072802 - RNA, 19 nt, Artificial Sequence
  Description of Artificial Sequence: Synthetic oligonucleotide
gccuucaccgcgugcgcuc

SEQ ID NO: 1072803 - RNA, 19 nt, Artificial Sequence
  Description of Artificial Sequence: Synthetic oligonucleotide
ccccuacaaaguuucaagu

SEQ ID NO: 1072804 - RNA, 19 nt, Artificial Sequence
  Description of Artificial Sequence: Synthetic oligonucleotide
ggcuucuaaaaggcccauc

SEQ ID NO: 1072805 - RNA, 19 nt, Artificial Sequence
  Description of Artificial Sequence: Synthetic oligonucleotide
ccuccgccgccccggaucc

SEQ ID NO: 1072806 - RNA, 19 nt, Artificial Sequence
  Description of Artificial Sequence: Synthetic oligonucleotide
cgaauuucgggcccucuaa

SEQ ID NO: 1072807 - RNA, 19 nt, Artificial Sequence
  Description of Artificial Sequence: Synthetic oligonucleotide
cacaaacuauuaguagguu

SEQ ID NO: 1072808 - RNA, 19 nt, Artificial Sequence
  Description of Artificial Sequence: Synthetic oligonucleotide
gcucaguuuagcagcgugu

SEQ ID NO: 1072809 - RNA, 19 nt, Artificial Sequence
  Description of Artificial Sequence: Synthetic oligonucleotide
gcccaucccgccccuugcc

SEQ ID NO: 1072810 - RNA, 19 nt, Artificial Sequence
  Description of Artificial Sequence: Synthetic oligonucleotide
ccgaccaucuuaugucaaa

SEQ ID NO: 1072811 - RNA, 19 nt, Artificial Sequence
  Description of Artificial Sequence: Synthetic oligonucleotide
ggccaacgaggcuucuaaa

SEQ ID NO: 1072812 - RNA, 19 nt, Artificial Sequence
  Description of Artificial Sequence: Synthetic oligonucleotide
cguccucgcuucuguggcg

SEQ ID NO: 1072813 - RNA, 19 nt, Artificial Sequence
  Description of Artificial Sequence: Synthetic oligonucleotide
aggcccauccgaaguuguu

SEQ ID NO: 1072814 - RNA, 19 nt, Artificial Sequence
  Description of Artificial Sequence: Synthetic oligonucleotide
ccuggcccaguggauaaca

SEQ ID NO: 1072815 - RNA, 19 nt, Artificial Sequence
  Description of Artificial Sequence: Synthetic oligonucleotide
cucuugcgaggaugucucu

SEQ ID NO: 1072816 - RNA, 19 nt, Artificial Sequence
  Description of Artificial Sequence: Synthetic oligonucleotide
ggauccgcccagcaccuuu

SEQ ID NO: 1072817 - RNA, 19 nt, Artificial Sequence
  Description of Artificial Sequence: Synthetic oligonucleotide
ccguguuuacagcaguuuu

SEQ ID NO: 1072818 - RNA, 19 nt, Artificial Sequence
  Description of Artificial Sequence: Synthetic oligonucleotide
cgcucgugugccgagccug

SEQ ID NO: 1072819 - RNA, 19 nt, Artificial Sequence
  Description of Artificial Sequence: Synthetic oligonucleotide
ccucgcuucuguggcgcug

SEQ ID NO: 1072820 - RNA, 19 nt, Artificial Sequence
  Description of Artificial Sequence: Synthetic oligonucleotide
ccacccacccuugcuuauc

SEQ ID NO: 1072821 - RNA, 19 nt, Artificial Sequence
  Description of Artificial Sequence: Synthetic oligonucleotide
gccgaccaucuuaugucaa

SEQ ID NO: 1072822 - RNA, 19 nt, Artificial Sequence
  Description of Artificial Sequence: Synthetic oligonucleotide
ggcccauccgaaguuguuu

SEQ ID NO: 1072823 - RNA, 19 nt, Artificial Sequence
  Description of Artificial Sequence: Synthetic oligonucleotide
caccgcgugcgcucauccu

SEQ ID NO: 1072824 - RNA, 19 nt, Artificial Sequence
  Description of Artificial Sequence: Synthetic oligonucleotide
ccccgcaggaaaguagaaa

SEQ ID NO: 1072825 - RNA, 19 nt, Artificial Sequence
  Description of Artificial Sequence: Synthetic oligonucleotide
ggccgcguccucgcuucug

SEQ ID NO: 1072826 - RNA, 19 nt, Artificial Sequence
  Description of Artificial Sequence: Synthetic oligonucleotide
gucggccgcguccucgcuu

SEQ ID NO: 1072827 - RNA, 19 nt, Artificial Sequence
  Description of Artificial Sequence: Synthetic oligonucleotide
cccauccgaaguuguuugu

SEQ ID NO: 1072828 - RNA, 19 nt, Artificial Sequence
  Description of Artificial Sequence: Synthetic oligonucleotide
ccuucaccgcgugcgcuca

SEQ ID NO: 1072829 - RNA, 19 nt, Artificial Sequence
  Description of Artificial Sequence: Synthetic oligonucleotide
gacggcugccccgcgccuu

SEQ ID NO: 1072830 - RNA, 19 nt, Artificial Sequence
  Description of Artificial Sequence: Synthetic oligonucleotide
gccacccacccuugcuuau

SEQ ID NO: 1072831 - RNA, 19 nt, Artificial Sequence
  Description of Artificial Sequence: Synthetic oligonucleotide
cuucaccgcgugcgcucau

SEQ ID NO: 1072832 - RNA, 19 nt, Artificial Sequence
  Description of Artificial Sequence: Synthetic oligonucleotide
ccccguguuuacagcaguu

SEQ ID NO: 1072833 - RNA, 19 nt, Artificial Sequence
  Description of Artificial Sequence: Synthetic oligonucleotide
ccgcuaccgcugccuccgc

SEQ ID NO: 1072834 - RNA, 19 nt, Artificial Sequence
  Description of Artificial Sequence: Synthetic oligonucleotide
ggacggcugccccgcgccu

SEQ ID NO: 1072835 - RNA, 19 nt, Artificial Sequence
  Description of Artificial Sequence: Synthetic oligonucleotide
caccucggccgaccaucuu

SEQ ID NO: 1072836 - RNA, 19 nt, Artificial Sequence
  Description of Artificial Sequence: Synthetic oligonucleotide
cgcccucgcuaggaaagaa

SEQ ID NO: 1072837 - RNA, 19 nt, Artificial Sequence
  Description of Artificial Sequence: Synthetic oligonucleotide
cggauccgcccagcaccuu

SEQ ID NO: 1072838 - RNA, 19 nt, Artificial Sequence
  Description of Artificial Sequence: Synthetic oligonucleotide
aauggggaaccuuaggacc

SEQ ID NO: 1072839 - RNA, 19 nt, Artificial Sequence
  Description of Artificial Sequence: Synthetic oligonucleotide
aaucauuaaagucuuccuc

SEQ ID NO: 1072840 - RNA, 19 nt, Artificial Sequence
  Description of Artificial Sequence: Synthetic oligonucleotide
aaugaggccaugcuguggc

SEQ ID NO: 1072841 - RNA, 19 nt, Artificial Sequence
  Description of Artificial Sequence: Synthetic oligonucleotide
auuaaagucuuccucaguc

SEQ ID NO: 1072842 - RNA, 19 nt, Artificial Sequence
  Description of Artificial Sequence: Synthetic oligonucleotide
uaugugaacagccaaagaa

SEQ ID NO: 1072843 - RNA, 19 nt, Artificial Sequence
  Description of Artificial Sequence: Synthetic oligonucleotide
uaaaauucuguuacccugg

SEQ ID NO: 1072844 - RNA, 19 nt, Artificial Sequence
  Description of Artificial Sequence: Synthetic oligonucleotide
uccgauaacacccagggac

SEQ ID NO: 1072845 - RNA, 19 nt, Artificial Sequence
  Description of Artificial Sequence: Synthetic oligonucleotide
uggaaaaugcaucagcccc

SEQ ID NO: 1072846 - RNA, 19 nt, Artificial Sequence
  Description of Artificial Sequence: Synthetic oligonucleotide
aaccccaggacuuucagag

SEQ ID NO: 1072847 - RNA, 19 nt, Artificial Sequence
  Description of Artificial Sequence: Synthetic oligonucleotide
augucuguaagucccaggc

SEQ ID NO: 1072848 - RNA, 19 nt, Artificial Sequence
  Description of Artificial Sequence: Synthetic oligonucleotide
uacaucagaagaaucuagg

SEQ ID NO: 1072849 - RNA, 19 nt, Artificial Sequence
  Description of Artificial Sequence: Synthetic oligonucleotide
acauguuaggcucaaguag

SEQ ID NO: 1072850 - RNA, 19 nt, Artificial Sequence
  Description of Artificial Sequence: Synthetic oligonucleotide
agauagaugagcuccucac

SEQ ID NO: 1072851 - RNA, 19 nt, Artificial Sequence
  Description of Artificial Sequence: Synthetic oligonucleotide
ucuguacgaacucuggaag

SEQ ID NO: 1072852 - RNA, 19 nt, Artificial Sequence
  Description of Artificial Sequence: Synthetic oligonucleotide
cauguuaggcucaaguagc

SEQ ID NO: 1072853 - RNA, 19 nt, Artificial Sequence
  Description of Artificial Sequence: Synthetic oligonucleotide
aacuccacgugucgaauac

SEQ ID NO: 1072854 - RNA, 19 nt, Artificial Sequence
  Description of Artificial Sequence: Synthetic oligonucleotide
gaaugaggagcacaagagg

SEQ ID NO: 1072855 - RNA, 19 nt, Artificial Sequence
  Description of Artificial Sequence: Synthetic oligonucleotide
uauguucucccacugaggu

SEQ ID NO: 1072856 - RNA, 19 nt, Artificial Sequence
  Description of Artificial Sequence: Synthetic oligonucleotide
auucuguuacccuggaggg

SEQ ID NO: 1072857 - RNA, 19 nt, Artificial Sequence
  Description of Artificial Sequence: Synthetic oligonucleotide
ugcgcuaucugguggaugg

SEQ ID NO: 1072858 - RNA, 19 nt, Artificial Sequence
  Description of Artificial Sequence: Synthetic oligonucleotide
ugaacagccaaagaacucc

SEQ ID NO: 1072859 - RNA, 19 nt, Artificial Sequence
  Description of Artificial Sequence: Synthetic oligonucleotide
aggguuaagauuucaaagu

SEQ ID NO: 1072860 - RNA, 19 nt, Artificial Sequence
  Description of Artificial Sequence: Synthetic oligonucleotide
ucuagggacagguuuagga

SEQ ID NO: 1072861 - RNA, 19 nt, Artificial Sequence
  Description of Artificial Sequence: Synthetic oligonucleotide
ucaaagcaccccaaugagg

SEQ ID NO: 1072862 - RNA, 19 nt, Artificial Sequence
  Description of Artificial Sequence: Synthetic oligonucleotide
augaaacagugcuucagcg

SEQ ID NO: 1072863 - RNA, 19 nt, Artificial Sequence
  Description of Artificial Sequence: Synthetic oligonucleotide
caaaccaucuaaaauucug

SEQ ID NO: 1072864 - RNA, 19 nt, Artificial Sequence
  Description of Artificial Sequence: Synthetic oligonucleotide
ucuaaaauucuguuacccu

SEQ ID NO: 1072865 - RNA, 19 nt, Artificial Sequence
  Description of Artificial Sequence: Synthetic oligonucleotide
uucuuauguggacaggccc

SEQ ID NO: 1072866 - RNA, 19 nt, Artificial Sequence
  Description of Artificial Sequence: Synthetic oligonucleotide
aauaaaguagugggcacug

SEQ ID NO: 1072867 - RNA, 19 nt, Artificial Sequence
  Description of Artificial Sequence: Synthetic oligonucleotide
uuugggguuaggcagucug

SEQ ID NO: 1072868 - RNA, 19 nt, Artificial Sequence
  Description of Artificial Sequence: Synthetic oligonucleotide
cauugcuaugugaacagcc

SEQ ID NO: 1072869 - RNA, 19 nt, Artificial Sequence
  Description of Artificial Sequence: Synthetic oligonucleotide
gauaaagcagcugucaguc

SEQ ID NO: 1072870 - RNA, 19 nt, Artificial Sequence
  Description of Artificial Sequence: Synthetic oligonucleotide
uucgccaacucccauuugc

SEQ ID NO: 1072871 - RNA, 19 nt, Artificial Sequence
  Description of Artificial Sequence: Synthetic oligonucleotide
aacauguuaggcucaagua

SEQ ID NO: 1072872 - RNA, 19 nt, Artificial Sequence
  Description of Artificial Sequence: Synthetic oligonucleotide
uggaaagcuaacagcagca

SEQ ID NO: 1072873 - RNA, 19 nt, Artificial Sequence
  Description of Artificial Sequence: Synthetic oligonucleotide
aaagcaccccaaugagggc

SEQ ID NO: 1072874 - RNA, 19 nt, Artificial Sequence
  Description of Artificial Sequence: Synthetic oligonucleotide
aaccuuaggaccacggcuc

SEQ ID NO: 1072875 - RNA, 19 nt, Artificial Sequence
  Description of Artificial Sequence: Synthetic oligonucleotide
ucucuccaaagcaaguagc

SEQ ID NO: 1072876 - RNA, 19 nt, Artificial Sequence
  Description of Artificial Sequence: Synthetic oligonucleotide
aggaaugaggagcacaaga

SEQ ID NO: 1072877 - RNA, 19 nt, Artificial Sequence
  Description of Artificial Sequence: Synthetic oligonucleotide
uaauggggaaccuuaggac

SEQ ID NO: 1072878 - RNA, 19 nt, Artificial Sequence
  Description of Artificial Sequence: Synthetic oligonucleotide
caugaaacagugcuucagc

SEQ ID NO: 1072879 - RNA, 19 nt, Artificial Sequence
  Description of Artificial Sequence: Synthetic oligonucleotide
acuaggccuucuuaugugg

SEQ ID NO: 1072880 - RNA, 19 nt, Artificial Sequence
  Description of Artificial Sequence: Synthetic oligonucleotide
ugucuguaagucccaggcg

SEQ ID NO: 1072881 - RNA, 19 nt, Artificial Sequence
  Description of Artificial Sequence: Synthetic oligonucleotide
uuguugacaccaaucauua

SEQ ID NO: 1072882 - RNA, 19 nt, Artificial Sequence
  Description of Artificial Sequence: Synthetic oligonucleotide
uuuaggacauccuggcaga

SEQ ID NO: 1072883 - RNA, 19 nt, Artificial Sequence
  Description of Artificial Sequence: Synthetic oligonucleotide
aaauucuguuacccuggag

SEQ ID NO: 1072884 - RNA, 19 nt, Artificial Sequence
  Description of Artificial Sequence: Synthetic oligonucleotide
agggcaagaacauguuagg

SEQ ID NO: 1072885 - RNA, 19 nt, Artificial Sequence
  Description of Artificial Sequence: Synthetic oligonucleotide
ccaucuaaaauucuguuac

SEQ ID NO: 1072886 - RNA, 19 nt, Artificial Sequence
  Description of Artificial Sequence: Synthetic oligonucleotide
gaacccauuacagugccgc

SEQ ID NO: 1072887 - RNA, 19 nt, Artificial Sequence
  Description of Artificial Sequence: Synthetic oligonucleotide
aaaauucuguuacccugga

SEQ ID NO: 1072888 - RNA, 19 nt, Artificial Sequence
  Description of Artificial Sequence: Synthetic oligonucleotide
ugacuaggccuucuuaugu

SEQ ID NO: 1072889 - RNA, 19 nt, Artificial Sequence
  Description of Artificial Sequence: Synthetic oligonucleotide
cagugugacuggaaaaugc

SEQ ID NO: 1072890 - RNA, 19 nt, Artificial Sequence
  Description of Artificial Sequence: Synthetic oligonucleotide
gacuccaagcaguaaggcc

SEQ ID NO: 1072891 - RNA, 19 nt, Artificial Sequence
  Description of Artificial Sequence: Synthetic oligonucleotide
uucagcgucuccacauagg

SEQ ID NO: 1072892 - RNA, 19 nt, Artificial Sequence
  Description of Artificial Sequence: Synthetic oligonucleotide
ugaaacagugcuucagcgu

SEQ ID NO: 1072893 - RNA, 19 nt, Artificial Sequence
  Description of Artificial Sequence: Synthetic oligonucleotide
cacccuaccaccagcaggc

SEQ ID NO: 1072894 - RNA, 19 nt, Artificial Sequence
  Description of Artificial Sequence: Synthetic oligonucleotide
cuaauggggaaccuuagga

SEQ ID NO: 1072895 - RNA, 19 nt, Artificial Sequence
  Description of Artificial Sequence: Synthetic oligonucleotide
ucacaagcgaagaguagcu

SEQ ID NO: 1072896 - RNA, 19 nt, Artificial Sequence
  Description of Artificial Sequence: Synthetic oligonucleotide
ucgccaacucccauuugcg

SEQ ID NO: 1072897 - RNA, 19 nt, Artificial Sequence
  Description of Artificial Sequence: Synthetic oligonucleotide
gucgaauacagcaagcuuc

SEQ ID NO: 1072898 - RNA, 19 nt, Artificial Sequence
  Description of Artificial Sequence: Synthetic oligonucleotide
uccauauguucucccacug

SEQ ID NO: 1072899 - RNA, 19 nt, Artificial Sequence
  Description of Artificial Sequence: Synthetic oligonucleotide
acuccaagcaguaaggccu

SEQ ID NO: 1072900 - RNA, 19 nt, Artificial Sequence
  Description of Artificial Sequence: Synthetic oligonucleotide
cucaaagcaccccaaugag

SEQ ID NO: 1072901 - RNA, 19 nt, Artificial Sequence
  Description of Artificial Sequence: Synthetic oligonucleotide
aaagcaaguagcagccuug

SEQ ID NO: 1072902 - RNA, 19 nt, Artificial Sequence
  Description of Artificial Sequence: Synthetic oligonucleotide
acaaccuucugaucuccuc

SEQ ID NO: 1072903 - RNA, 19 nt, Artificial Sequence
  Description of Artificial Sequence: Synthetic oligonucleotide
cuauagacuugccuucgcc

SEQ ID NO: 1072904 - RNA, 19 nt, Artificial Sequence
  Description of Artificial Sequence: Synthetic oligonucleotide
cugcccagcggaaugaggc

SEQ ID NO: 1072905 - RNA, 19 nt, Artificial Sequence
  Description of Artificial Sequence: Synthetic oligonucleotide
gucacaagcgaagaguagc

SEQ ID NO: 1072906 - RNA, 19 nt, Artificial Sequence
  Description of Artificial Sequence: Synthetic oligonucleotide
uaggcagucugacuccaag

SEQ ID NO: 1072907 - RNA, 19 nt, Artificial Sequence
  Description of Artificial Sequence: Synthetic oligonucleotide
acaugggcagggcaccacc

SEQ ID NO: 1072908 - RNA, 19 nt, Artificial Sequence
  Description of Artificial Sequence: Synthetic oligonucleotide
guaagucccaggcggagag

SEQ ID NO: 1072909 - RNA, 19 nt, Artificial Sequence
  Description of Artificial Sequence: Synthetic oligonucleotide
uccuaagguggaaagcuaa

SEQ ID NO: 1072910 - RNA, 19 nt, Artificial Sequence
  Description of Artificial Sequence: Synthetic oligonucleotide
ccaaugagggccauggagg

SEQ ID NO: 1072911 - RNA, 19 nt, Artificial Sequence
  Description of Artificial Sequence: Synthetic oligonucleotide
uccuaauggggaaccuuag

SEQ ID NO: 1072912 - RNA, 19 nt, Artificial Sequence
  Description of Artificial Sequence: Synthetic oligonucleotide
agcaccgcaguccuugguc

SEQ ID NO: 1072913 - RNA, 19 nt, Artificial Sequence
  Description of Artificial Sequence: Synthetic oligonucleotide
aagcgaagaguagcucugc

SEQ ID NO: 1072914 - RNA, 19 nt, Artificial Sequence
  Description of Artificial Sequence: Synthetic oligonucleotide
aguguuguccauugcuaug

SEQ ID NO: 1072915 - RNA, 19 nt, Artificial Sequence
  Description of Artificial Sequence: Synthetic oligonucleotide
aagaacuccacgugucgaa

SEQ ID NO: 1072916 - RNA, 19 nt, Artificial Sequence
  Description of Artificial Sequence: Synthetic oligonucleotide
uguuggcgacuucagcucc

SEQ ID NO: 1072917 - RNA, 19 nt, Artificial Sequence
  Description of Artificial Sequence: Synthetic oligonucleotide
aguagugggcacuguuggg

SEQ ID NO: 1072918 - RNA, 19 nt, Artificial Sequence
  Description of Artificial Sequence: Synthetic oligonucleotide
ugcuaugugaacagccaaa

SEQ ID NO: 1072919 - RNA, 19 nt, Artificial Sequence
  Description of Artificial Sequence: Synthetic oligonucleotide
cauuugcgcuaucuggugg

SEQ ID NO: 1072920 - RNA, 19 nt, Artificial Sequence
  Description of Artificial Sequence: Synthetic oligonucleotide
auaacacccagggacuggg

SEQ ID NO: 1072921 - RNA, 19 nt, Artificial Sequence
  Description of Artificial Sequence: Synthetic oligonucleotide
agccaauaaaguagugggc

SEQ ID NO: 1072922 - RNA, 19 nt, Artificial Sequence
  Description of Artificial Sequence: Synthetic oligonucleotide
uuccauauguucucccacu

SEQ ID NO: 1072923 - RNA, 19 nt, Artificial Sequence
  Description of Artificial Sequence: Synthetic oligonucleotide
gaacauguuaggcucaagu

SEQ ID NO: 1072924 - RNA, 19 nt, Artificial Sequence
  Description of Artificial Sequence: Synthetic oligonucleotide
cuccacgugucgaauacag

SEQ ID NO: 1072925 - RNA, 19 nt, Artificial Sequence
  Description of Artificial Sequence: Synthetic oligonucleotide
cacuggaauacuuucucuc

SEQ ID NO: 1072926 - RNA, 19 nt, Artificial Sequence
  Description of Artificial Sequence: Synthetic oligonucleotide
uggccuauagacuugccuu

SEQ ID NO: 1072927 - RNA, 19 nt, Artificial Sequence
  Description of Artificial Sequence: Synthetic oligonucleotide
caggcggagaggaaugagg

SEQ ID NO: 1072928 - RNA, 19 nt, Artificial Sequence
  Description of Artificial Sequence: Synthetic oligonucleotide
ugacaccaaucauuaaagu

SEQ ID NO: 1072929 - RNA, 19 nt, Artificial Sequence
  Description of Artificial Sequence: Synthetic oligonucleotide
gacuaggccuucuuaugug

SEQ ID NO: 1072930 - RNA, 19 nt, Artificial Sequence
  Description of Artificial Sequence: Synthetic oligonucleotide
gauaaucacacugggugga

SEQ ID NO: 1072931 - RNA, 19 nt, Artificial Sequence
  Description of Artificial Sequence: Synthetic oligonucleotide
gauaacacccagggacugg

SEQ ID NO: 1072932 - RNA, 19 nt, Artificial Sequence
  Description of Artificial Sequence: Synthetic oligonucleotide
auagacuugccuucgccaa

SEQ ID NO: 1072933 - RNA, 19 nt, Artificial Sequence
  Description of Artificial Sequence: Synthetic oligonucleotide
gaguccaucuccagucucg

SEQ ID NO: 1072934 - RNA, 19 nt, Artificial Sequence
  Description of Artificial Sequence: Synthetic oligonucleotide
gaagaguagcucugcuccc

SEQ ID NO: 1072935 - RNA, 19 nt, Artificial Sequence
  Description of Artificial Sequence: Synthetic oligonucleotide
caagcgaagaguagcucug

SEQ ID NO: 1072936 - RNA, 19 nt, Artificial Sequence
  Description of Artificial Sequence: Synthetic oligonucleotide
uugcuaugugaacagccaa

SEQ ID NO: 1072937 - RNA, 19 nt, Artificial Sequence
  Description of Artificial Sequence: Synthetic oligonucleotide
agggaacccauuacagugc

SEQ ID NO: 1072938 - RNA, 19 nt, Artificial Sequence
  Description of Artificial Sequence: Synthetic oligonucleotide
cugagguagcccuugauaa

SEQ ID NO: 1072939 - RNA, 19 nt, Artificial Sequence
  Description of Artificial Sequence: Synthetic oligonucleotide
ccaaucauuaaagucuucc

SEQ ID NO: 1072940 - RNA, 19 nt, Artificial Sequence
  Description of Artificial Sequence: Synthetic oligonucleotide
ucuuccgcugaguccaucu

SEQ ID NO: 1072941 - RNA, 19 nt, Artificial Sequence
  Description of Artificial Sequence: Synthetic oligonucleotide
uugacuuguugacaccaau

SEQ ID NO: 1072942 - RNA, 19 nt, Artificial Sequence
  Description of Artificial Sequence: Synthetic oligonucleotide
agaagaaucuagggacagg

SEQ ID NO: 1072943 - RNA, 19 nt, Artificial Sequence
  Description of Artificial Sequence: Synthetic oligonucleotide
cugacuaggccuucuuaug

SEQ ID NO: 1072944 - RNA, 19 nt, Artificial Sequence
  Description of Artificial Sequence: Synthetic oligonucleotide
gaaccuuaggaccacggcu

SEQ ID NO: 1072945 - RNA, 19 nt, Artificial Sequence
  Description of Artificial Sequence: Synthetic oligonucleotide
uguccauugcuaugugaac

SEQ ID NO: 1072946 - RNA, 19 nt, Artificial Sequence
  Description of Artificial Sequence: Synthetic oligonucleotide
gcucucaucagggauaaag

SEQ ID NO: 1072947 - RNA, 19 nt, Artificial Sequence
  Description of Artificial Sequence: Synthetic oligonucleotide
agcaauggaugggucgagc

SEQ ID NO: 1072948 - RNA, 19 nt, Artificial Sequence
  Description of Artificial Sequence: Synthetic oligonucleotide
ccuccgauaacacccaggg

SEQ ID NO: 1072949 - RNA, 19 nt, Artificial Sequence
  Description of Artificial Sequence: Synthetic oligonucleotide
guagugggcacuguugggc

SEQ ID NO: 1072950 - RNA, 19 nt, Artificial Sequence
  Description of Artificial Sequence: Synthetic oligonucleotide
ucuguuacccuggaggguu

SEQ ID NO: 1072951 - RNA, 19 nt, Artificial Sequence
  Description of Artificial Sequence: Synthetic oligonucleotide
gaaugaggccaugcugugg

SEQ ID NO: 1072952 - RNA, 19 nt, Artificial Sequence
  Description of Artificial Sequence: Synthetic oligonucleotide
cacaagaggucuccaggcc

SEQ ID NO: 1072953 - RNA, 19 nt, Artificial Sequence
  Description of Artificial Sequence: Synthetic oligonucleotide
agugugacuggaaaaugca

SEQ ID NO: 1072954 - RNA, 19 nt, Artificial Sequence
  Description of Artificial Sequence: Synthetic oligonucleotide
uggaaugcggggacacuga

SEQ ID NO: 1072955 - RNA, 19 nt, Artificial Sequence
  Description of Artificial Sequence: Synthetic oligonucleotide
cgaagaguagcucugcucc

SEQ ID NO: 1072956 - RNA, 19 nt, Artificial Sequence
  Description of Artificial Sequence: Synthetic oligonucleotide
gagguagcccuugauaauc

SEQ ID NO: 1072957 - RNA, 19 nt, Artificial Sequence
  Description of Artificial Sequence: Synthetic oligonucleotide
cuggguggauggaaugcgg

SEQ ID NO: 1072958 - RNA, 19 nt, Artificial Sequence
  Description of Artificial Sequence: Synthetic oligonucleotide
gaugggucgagcucuccga

SEQ ID NO: 1072959 - RNA, 19 nt, Artificial Sequence
  Description of Artificial Sequence: Synthetic oligonucleotide
ugacuggaaaaugcaucag

SEQ ID NO: 1072960 - RNA, 19 nt, Artificial Sequence
  Description of Artificial Sequence: Synthetic oligonucleotide
cugggcaacaguguucggc

SEQ ID NO: 1072961 - RNA, 19 nt, Artificial Sequence
  Description of Artificial Sequence: Synthetic oligonucleotide
ccuugauaaucacacuggg

SEQ ID NO: 1072962 - RNA, 19 nt, Artificial Sequence
  Description of Artificial Sequence: Synthetic oligonucleotide
cauagccaauaaaguagug

SEQ ID NO: 1072963 - RNA, 19 nt, Artificial Sequence
  Description of Artificial Sequence: Synthetic oligonucleotide
auggaaugcggggacacug

SEQ ID NO: 1072964 - RNA, 19 nt, Artificial Sequence
  Description of Artificial Sequence: Synthetic oligonucleotide
aggcucaaguagcagugug

SEQ ID NO: 1072965 - RNA, 19 nt, Artificial Sequence
  Description of Artificial Sequence: Synthetic oligonucleotide
ggguuaggcagucugacuc

SEQ ID NO: 1072966 - RNA, 19 nt, Artificial Sequence
  Description of Artificial Sequence: Synthetic oligonucleotide
guuaggcucaaguagcagu

SEQ ID NO: 1072967 - RNA, 19 nt, Artificial Sequence
  Description of Artificial Sequence: Synthetic oligonucleotide
acaggcgcacagcacucgg

SEQ ID NO: 1072968 - RNA, 19 nt, Artificial Sequence
  Description of Artificial Sequence: Synthetic oligonucleotide
gaagcuccugacccgcggc

SEQ ID NO: 1072969 - RNA, 19 nt, Artificial Sequence
  Description of Artificial Sequence: Synthetic oligonucleotide
cuuguugacaccaaucauu

SEQ ID NO: 1072970 - RNA, 19 nt, Artificial Sequence
  Description of Artificial Sequence: Synthetic oligonucleotide
cucuguacgaacucuggaa

SEQ ID NO: 1072971 - RNA, 19 nt, Artificial Sequence
  Description of Artificial Sequence: Synthetic oligonucleotide
aacaaaccucuucccuagu

SEQ ID NO: 1072972 - RNA, 19 nt, Artificial Sequence
  Description of Artificial Sequence: Synthetic oligonucleotide
uccgcauuccccacuggaa

SEQ ID NO: 1072973 - RNA, 19 nt, Artificial Sequence
  Description of Artificial Sequence: Synthetic oligonucleotide
aacccauuacagugccgcu

SEQ ID NO: 1072974 - RNA, 19 nt, Artificial Sequence
  Description of Artificial Sequence: Synthetic oligonucleotide
ugagguagcccuugauaau

SEQ ID NO: 1072975 - RNA, 19 nt, Artificial Sequence
  Description of Artificial Sequence: Synthetic oligonucleotide
agagguggcacaggcgcac

SEQ ID NO: 1072976 - RNA, 19 nt, Artificial Sequence
  Description of Artificial Sequence: Synthetic oligonucleotide
uagacuugccuucgccaac

SEQ ID NO: 1072977 - RNA, 19 nt, Artificial Sequence
  Description of Artificial Sequence: Synthetic oligonucleotide
uuuccgcauuccccacugg

SEQ ID NO: 1072978 - RNA, 19 nt, Artificial Sequence
  Description of Artificial Sequence: Synthetic oligonucleotide
ucagaggguuaagauuuca

SEQ ID NO: 1072979 - RNA, 19 nt, Artificial Sequence
  Description of Artificial Sequence: Synthetic oligonucleotide
gcuaugugaacagccaaag

SEQ ID NO: 1072980 - RNA, 19 nt, Artificial Sequence
  Description of Artificial Sequence: Synthetic oligonucleotide
gccgcucugagucuguggg

SEQ ID NO: 1072981 - RNA, 19 nt, Artificial Sequence
  Description of Artificial Sequence: Synthetic oligonucleotide
gaaucuagggacagguuua

SEQ ID NO: 1072982 - RNA, 19 nt, Artificial Sequence
  Description of Artificial Sequence: Synthetic oligonucleotide
ucgagcucuccgaugccca

SEQ ID NO: 1072983 - RNA, 19 nt, Artificial Sequence
  Description of Artificial Sequence: Synthetic oligonucleotide
guccauugcuaugugaaca

SEQ ID NO: 1072984 - RNA, 19 nt, Artificial Sequence
  Description of Artificial Sequence: Synthetic oligonucleotide
ugaguccaucuccagucuc

SEQ ID NO: 1072985 - RNA, 19 nt, Artificial Sequence
  Description of Artificial Sequence: Synthetic oligonucleotide
auaaucacacuggguggag

SEQ ID NO: 1072986 - RNA, 19 nt, Artificial Sequence
  Description of Artificial Sequence: Synthetic oligonucleotide
cuaagguggaaagcuaaca

SEQ ID NO: 1072987 - RNA, 19 nt, Artificial Sequence
  Description of Artificial Sequence: Synthetic oligonucleotide
agccccugcacagggaagg

SEQ ID NO: 1072988 - RNA, 19 nt, Artificial Sequence
  Description of Artificial Sequence: Synthetic oligonucleotide
aagaacauguuaggcucaa

SEQ ID NO: 1072989 - RNA, 19 nt, Artificial Sequence
  Description of Artificial Sequence: Synthetic oligonucleotide
uggaagcuccugacccgcg

SEQ ID NO: 1072990 - RNA, 19 nt, Artificial Sequence
  Description of Artificial Sequence: Synthetic oligonucleotide
guuguccauugcuauguga

SEQ ID NO: 1072991 - RNA, 19 nt, Artificial Sequence
  Description of Artificial Sequence: Synthetic oligonucleotide
ggaugggucgagcucuccg

SEQ ID NO: 1072992 - RNA, 19 nt, Artificial Sequence
  Description of Artificial Sequence: Synthetic oligonucleotide
ucuucccuagugagguccu

SEQ ID NO: 1072993 - RNA, 19 nt, Artificial Sequence
  Description of Artificial Sequence: Synthetic oligonucleotide
guuucugagaagggcaaga

SEQ ID NO: 1072994 - RNA, 19 nt, Artificial Sequence
  Description of Artificial Sequence: Synthetic oligonucleotide
ggaaccuuaggaccacggc

SEQ ID NO: 1072995 - RNA, 19 nt, Artificial Sequence
  Description of Artificial Sequence: Synthetic oligonucleotide
caaucauuaaagucuuccu

SEQ ID NO: 1072996 - RNA, 19 nt, Artificial Sequence
  Description of Artificial Sequence: Synthetic oligonucleotide
gcacaagaggucuccaggc

SEQ ID NO: 1072997 - RNA, 19 nt, Artificial Sequence
  Description of Artificial Sequence: Synthetic oligonucleotide
aaacagugcuucagcgucu

SEQ ID NO: 1072998 - RNA, 19 nt, Artificial Sequence
  Description of Artificial Sequence: Synthetic oligonucleotide
gguuaggcagucugacucc

SEQ ID NO: 1072999 - RNA, 19 nt, Artificial Sequence
  Description of Artificial Sequence: Synthetic oligonucleotide
acagugucacaagcgaaga

SEQ ID NO: 1073000 - RNA, 19 nt, Artificial Sequence
  Description of Artificial Sequence: Synthetic oligonucleotide
ugggguuaggcagucugac

SEQ ID NO: 1073001 - RNA, 19 nt, Artificial Sequence
  Description of Artificial Sequence: Synthetic oligonucleotide
agcgaagaguagcucugcu

SEQ ID NO: 1073002 - RNA, 19 nt, Artificial Sequence
  Description of Artificial Sequence: Synthetic oligonucleotide
augcggggacacugagugc

SEQ ID NO: 1073003 - RNA, 19 nt, Artificial Sequence
  Description of Artificial Sequence: Synthetic oligonucleotide
cuugauaaucacacugggu

SEQ ID NO: 1073004 - RNA, 19 nt, Artificial Sequence
  Description of Artificial Sequence: Synthetic oligonucleotide
gguguguuugggguuaggc

SEQ ID NO: 1073005 - RNA, 19 nt, Artificial Sequence
  Description of Artificial Sequence: Synthetic oligonucleotide
ggcaagaacauguuaggcu

SEQ ID NO: 1073006 - RNA, 19 nt, Artificial Sequence
  Description of Artificial Sequence: Synthetic oligonucleotide
uccugacuaggccuucuua

SEQ ID NO: 1073007 - RNA, 19 nt, Artificial Sequence
  Description of Artificial Sequence: Synthetic oligonucleotide
ccacgugucgaauacagca

SEQ ID NO: 1073008 - RNA, 19 nt, Artificial Sequence
  Description of Artificial Sequence: Synthetic oligonucleotide
ugagguccuaauggggaac

SEQ ID NO: 1073009 - RNA, 19 nt, Artificial Sequence
  Description of Artificial Sequence: Synthetic oligonucleotide
acucccauuugcgcuaucu

SEQ ID NO: 1073010 - RNA, 19 nt, Artificial Sequence
  Description of Artificial Sequence: Synthetic oligonucleotide
cucccauuugcgcuaucug

SEQ ID NO: 1073011 - RNA, 19 nt, Artificial Sequence
  Description of Artificial Sequence: Synthetic oligonucleotide
ccuaauggggaaccuuagg

SEQ ID NO: 1073012 - RNA, 19 nt, Artificial Sequence
  Description of Artificial Sequence: Synthetic oligonucleotide
aguguucggcccguaccac

SEQ ID NO: 1073013 - RNA, 19 nt, Artificial Sequence
  Description of Artificial Sequence: Synthetic oligonucleotide
ugggcuucccuccgauaac

SEQ ID NO: 1073014 - RNA, 19 nt, Artificial Sequence
  Description of Artificial Sequence: Synthetic oligonucleotide
caagcaccgcaguccuugg

SEQ ID NO: 1073015 - RNA, 19 nt, Artificial Sequence
  Description of Artificial Sequence: Synthetic oligonucleotide
ggacagguuuaggacaucc

SEQ ID NO: 1073016 - RNA, 19 nt, Artificial Sequence
  Description of Artificial Sequence: Synthetic oligonucleotide
gggaacccauuacagugcc

SEQ ID NO: 1073017 - RNA, 19 nt, Artificial Sequence
  Description of Artificial Sequence: Synthetic oligonucleotide
uucuguuacccuggagggu

SEQ ID NO: 1073018 - RNA, 19 nt, Artificial Sequence
  Description of Artificial Sequence: Synthetic oligonucleotide
aggcagugugacuggaaaa

SEQ ID NO: 1073019 - RNA, 19 nt, Artificial Sequence
  Description of Artificial Sequence: Synthetic oligonucleotide
ugggucgagcucuccgaug

SEQ ID NO: 1073020 - RNA, 19 nt, Artificial Sequence
  Description of Artificial Sequence: Synthetic oligonucleotide
aagcaccgcaguccuuggu

SEQ ID NO: 1073021 - RNA, 19 nt, Artificial Sequence
  Description of Artificial Sequence: Synthetic oligonucleotide
ccuuacaggaaacaaaccu

SEQ ID NO: 1073022 - RNA, 19 nt, Artificial Sequence
  Description of Artificial Sequence: Synthetic oligonucleotide
cuaggccuucuuaugugga

SEQ ID NO: 1073023 - RNA, 19 nt, Artificial Sequence
  Description of Artificial Sequence: Synthetic oligonucleotide
ggacguugaaguaacuguc

SEQ ID NO: 1073024 - RNA, 19 nt, Artificial Sequence
  Description of Artificial Sequence: Synthetic oligonucleotide
ggaaugaggccaugcugug

SEQ ID NO: 1073025 - RNA, 19 nt, Artificial Sequence
  Description of Artificial Sequence: Synthetic oligonucleotide
guagcagugugcacccuac

SEQ ID NO: 1073026 - RNA, 19 nt, Artificial Sequence
  Description of Artificial Sequence: Synthetic oligonucleotide
gugaacagccaaagaacuc

SEQ ID NO: 1073027 - RNA, 19 nt, Artificial Sequence
  Description of Artificial Sequence: Synthetic oligonucleotide
ucccuagugagguccuaau

SEQ ID NO: 1073028 - RNA, 19 nt, Artificial Sequence
  Description of Artificial Sequence: Synthetic oligonucleotide
uggcugucucucuguacga

SEQ ID NO: 1073029 - RNA, 19 nt, Artificial Sequence
  Description of Artificial Sequence: Synthetic oligonucleotide
uuaggcagucugacuccaa

SEQ ID NO: 1073030 - RNA, 19 nt, Artificial Sequence
  Description of Artificial Sequence: Synthetic oligonucleotide
aacucccauuugcgcuauc

SEQ ID NO: 1073031 - RNA, 19 nt, Artificial Sequence
  Description of Artificial Sequence: Synthetic oligonucleotide
gaugcccauccugcagggg

SEQ ID NO: 1073032 - RNA, 19 nt, Artificial Sequence
  Description of Artificial Sequence: Synthetic oligonucleotide
acuggccuauagacuugcc

SEQ ID NO: 1073033 - RNA, 19 nt, Artificial Sequence
  Description of Artificial Sequence: Synthetic oligonucleotide
cacgugucgaauacagcaa

SEQ ID NO: 1073034 - RNA, 19 nt, Artificial Sequence
  Description of Artificial Sequence: Synthetic oligonucleotide
ccuaagguggaaagcuaac

SEQ ID NO: 1073035 - RNA, 19 nt, Artificial Sequence
  Description of Artificial Sequence: Synthetic oligonucleotide
gugugcacccuaccaccag

SEQ ID NO: 1073036 - RNA, 19 nt, Artificial Sequence
  Description of Artificial Sequence: Synthetic oligonucleotide
ggcagaccagaugggaagg

SEQ ID NO: 1073037 - RNA, 19 nt, Artificial Sequence
  Description of Artificial Sequence: Synthetic oligonucleotide
gggcaagaacauguuaggc

SEQ ID NO: 1073038 - RNA, 19 nt, Artificial Sequence
  Description of Artificial Sequence: Synthetic oligonucleotide
gugucacaagcgaagagua

SEQ ID NO: 1073039 - RNA, 19 nt, Artificial Sequence
  Description of Artificial Sequence: Synthetic oligonucleotide
guucggcccguaccacugg

SEQ ID NO: 1073040 - RNA, 19 nt, Artificial Sequence
  Description of Artificial Sequence: Synthetic oligonucleotide
ggauaaagcagcugucagu

SEQ ID NO: 1073041 - RNA, 19 nt, Artificial Sequence
  Description of Artificial Sequence: Synthetic oligonucleotide
ggccuauagacuugccuuc

SEQ ID NO: 1073042 - RNA, 19 nt, Artificial Sequence
  Description of Artificial Sequence: Synthetic oligonucleotide
gccuauagacuugccuucg

SEQ ID NO: 1073043 - RNA, 19 nt, Artificial Sequence
  Description of Artificial Sequence: Synthetic oligonucleotide
ugagugcccaaggcagucu

SEQ ID NO: 1073044 - RNA, 19 nt, Artificial Sequence
  Description of Artificial Sequence: Synthetic oligonucleotide
cccuuacaggaaacaaacc

SEQ ID NO: 1073045 - RNA, 19 nt, Artificial Sequence
  Description of Artificial Sequence: Synthetic oligonucleotide
gcugucucucuguacgaac

SEQ ID NO: 1073046 - RNA, 19 nt, Artificial Sequence
  Description of Artificial Sequence: Synthetic oligonucleotide
cuggggcaucaugaaacag

SEQ ID NO: 1073047 - RNA, 19 nt, Artificial Sequence
  Description of Artificial Sequence: Synthetic oligonucleotide
gcucaaguagcagugugca

SEQ ID NO: 1073048 - RNA, 19 nt, Artificial Sequence
  Description of Artificial Sequence: Synthetic oligonucleotide
augggucgagcucuccgau

SEQ ID NO: 1073049 - RNA, 19 nt, Artificial Sequence
  Description of Artificial Sequence: Synthetic oligonucleotide
cuuccgcugaguccaucuc

SEQ ID NO: 1073050 - RNA, 19 nt, Artificial Sequence
  Description of Artificial Sequence: Synthetic oligonucleotide
ggcaccaccaagcagggau

SEQ ID NO: 1073051 - RNA, 19 nt, Artificial Sequence
  Description of Artificial Sequence: Synthetic oligonucleotide
uugcgcuaucugguggaug

SEQ ID NO: 1073052 - RNA, 19 nt, Artificial Sequence
  Description of Artificial Sequence: Synthetic oligonucleotide
uugguguguuugggguuag

SEQ ID NO: 1073053 - RNA, 19 nt, Artificial Sequence
  Description of Artificial Sequence: Synthetic oligonucleotide
uucucccacugagguagcc

SEQ ID NO: 1073054 - RNA, 19 nt, Artificial Sequence
  Description of Artificial Sequence: Synthetic oligonucleotide
gcaccgcaguccuuggucc

SEQ ID NO: 1073055 - RNA, 19 nt, Artificial Sequence
  Description of Artificial Sequence: Synthetic oligonucleotide
cacaagcgaagaguagcuc

SEQ ID NO: 1073056 - RNA, 19 nt, Artificial Sequence
  Description of Artificial Sequence: Synthetic oligonucleotide
caauaaaguagugggcacu

SEQ ID NO: 1073057 - RNA, 19 nt, Artificial Sequence
  Description of Artificial Sequence: Synthetic oligonucleotide
gcccuugguguguuugggg

SEQ ID NO: 1073058 - RNA, 19 nt, Artificial Sequence
  Description of Artificial Sequence: Synthetic oligonucleotide
agccccuuacaggaaacaa

SEQ ID NO: 1073059 - RNA, 19 nt, Artificial Sequence
  Description of Artificial Sequence: Synthetic oligonucleotide
gcgaagaguagcucugcuc

SEQ ID NO: 1073060 - RNA, 19 nt, Artificial Sequence
  Description of Artificial Sequence: Synthetic oligonucleotide
cuggccccaaaccaucuaa

SEQ ID NO: 1073061 - RNA, 19 nt, Artificial Sequence
  Description of Artificial Sequence: Synthetic oligonucleotide
gccaauggccuguuggcga

SEQ ID NO: 1073062 - RNA, 19 nt, Artificial Sequence
  Description of Artificial Sequence: Synthetic oligonucleotide
uuugcgcuaucugguggau

SEQ ID NO: 1073063 - RNA, 19 nt, Artificial Sequence
  Description of Artificial Sequence: Synthetic oligonucleotide
ccaagcaccgcaguccuug

SEQ ID NO: 1073064 - RNA, 19 nt, Artificial Sequence
  Description of Artificial Sequence: Synthetic oligonucleotide
ccuauagacuugccuucgc

SEQ ID NO: 1073065 - RNA, 19 nt, Artificial Sequence
  Description of Artificial Sequence: Synthetic oligonucleotide
gcccuccuaagguggaaag

SEQ ID NO: 1073066 - RNA, 19 nt, Artificial Sequence
  Description of Artificial Sequence: Synthetic oligonucleotide
caggcccuugguguguuug

SEQ ID NO: 1073067 - RNA, 19 nt, Artificial Sequence
  Description of Artificial Sequence: Synthetic oligonucleotide
cuggccuauagacuugccu

SEQ ID NO: 1073068 - RNA, 19 nt, Artificial Sequence
  Description of Artificial Sequence: Synthetic oligonucleotide
cugucgaggaaagcauuga

SEQ ID NO: 1073069 - RNA, 19 nt, Artificial Sequence
  Description of Artificial Sequence: Synthetic oligonucleotide
uggggaaccuuaggaccac

SEQ ID NO: 1073070 - RNA, 19 nt, Artificial Sequence
  Description of Artificial Sequence: Synthetic oligonucleotide
uguuacccuggaggguuuc

SEQ ID NO: 1073071 - RNA, 19 nt, Artificial Sequence
  Description of Artificial Sequence: Synthetic oligonucleotide
cuccuaagguggaaagcua

SEQ ID NO: 1073072 - RNA, 19 nt, Artificial Sequence
  Description of Artificial Sequence: Synthetic oligonucleotide
gguuuuccgcauuccccac

SEQ ID NO: 1073073 - RNA, 19 nt, Artificial Sequence
  Description of Artificial Sequence: Synthetic oligonucleotide
acuccacgugucgaauaca

SEQ ID NO: 1073074 - RNA, 19 nt, Artificial Sequence
  Description of Artificial Sequence: Synthetic oligonucleotide
auggaugggucgagcucuc

SEQ ID NO: 1073075 - RNA, 19 nt, Artificial Sequence
  Description of Artificial Sequence: Synthetic oligonucleotide
cucccacugagguagcccu

SEQ ID NO: 1073076 - RNA, 19 nt, Artificial Sequence
  Description of Artificial Sequence: Synthetic oligonucleotide
ccucucuacaucagaagaa

SEQ ID NO: 1073077 - RNA, 19 nt, Artificial Sequence
  Description of Artificial Sequence: Synthetic oligonucleotide
gccaacucccauuugcgcu

SEQ ID NO: 1073078 - RNA, 19 nt, Artificial Sequence
  Description of Artificial Sequence: Synthetic oligonucleotide
uggaugggucgagcucucc

SEQ ID NO: 1073079 - RNA, 19 nt, Artificial Sequence
  Description of Artificial Sequence: Synthetic oligonucleotide
ggaacccauuacagugccg

SEQ ID NO: 1073080 - RNA, 19 nt, Artificial Sequence
  Description of Artificial Sequence: Synthetic oligonucleotide
agucugacuccaagcagua

SEQ ID NO: 1073081 - RNA, 19 nt, Artificial Sequence
  Description of Artificial Sequence: Synthetic oligonucleotide
ggaaaaugcaucagccccu

SEQ ID NO: 1073082 - RNA, 19 nt, Artificial Sequence
  Description of Artificial Sequence: Synthetic oligonucleotide
cgggcugcguaguaugggg

SEQ ID NO: 1073083 - RNA, 19 nt, Artificial Sequence
  Description of Artificial Sequence: Synthetic oligonucleotide
ggcccuugguguguuuggg

SEQ ID NO: 1073084 - RNA, 19 nt, Artificial Sequence
  Description of Artificial Sequence: Synthetic oligonucleotide
gcaauggaugggucgagcu

SEQ ID NO: 1073085 - RNA, 19 nt, Artificial Sequence
  Description of Artificial Sequence: Synthetic oligonucleotide
caguguuguccauugcuau

SEQ ID NO: 1073086 - RNA, 19 nt, Artificial Sequence
  Description of Artificial Sequence: Synthetic oligonucleotide
guuuuccgcauuccccacu

SEQ ID NO: 1073087 - RNA, 19 nt, Artificial Sequence
  Description of Artificial Sequence: Synthetic oligonucleotide
cuugaggaccugggcaaca

SEQ ID NO: 1073088 - RNA, 19 nt, Artificial Sequence
  Description of Artificial Sequence: Synthetic oligonucleotide
cuccgauaacacccaggga

SEQ ID NO: 1073089 - RNA, 19 nt, Artificial Sequence
  Description of Artificial Sequence: Synthetic oligonucleotide
ucacccugcccagcggaau

SEQ ID NO: 1073090 - RNA, 19 nt, Artificial Sequence
  Description of Artificial Sequence: Synthetic oligonucleotide
gcggcucuuccugacuagg

SEQ ID NO: 1073091 - RNA, 19 nt, Artificial Sequence
  Description of Artificial Sequence: Synthetic oligonucleotide
gugcacccuaccaccagca

SEQ ID NO: 1073092 - RNA, 19 nt, Artificial Sequence
  Description of Artificial Sequence: Synthetic oligonucleotide
gaaugcggggacacugagu

SEQ ID NO: 1073093 - RNA, 19 nt, Artificial Sequence
  Description of Artificial Sequence: Synthetic oligonucleotide
ucucuuccgcugaguccau

SEQ ID NO: 1073094 - RNA, 19 nt, Artificial Sequence
  Description of Artificial Sequence: Synthetic oligonucleotide
gauggaaugcggggacacu

SEQ ID NO: 1073095 - RNA, 19 nt, Artificial Sequence
  Description of Artificial Sequence: Synthetic oligonucleotide
cagugccgcucugagucug

SEQ ID NO: 1073096 - RNA, 19 nt, Artificial Sequence
  Description of Artificial Sequence: Synthetic oligonucleotide
ggcugucucuuccgcugag

SEQ ID NO: 1073097 - RNA, 19 nt, Artificial Sequence
  Description of Artificial Sequence: Synthetic oligonucleotide
gacccgcggcucuuccuga

SEQ ID NO: 1073098 - RNA, 19 nt, Artificial Sequence
  Description of Artificial Sequence: Synthetic oligonucleotide
gcagaccagaugggaaggc

SEQ ID NO: 1073099 - RNA, 19 nt, Artificial Sequence
  Description of Artificial Sequence: Synthetic oligonucleotide
cccuccuaagguggaaagc

SEQ ID NO: 1073100 - RNA, 19 nt, Artificial Sequence
  Description of Artificial Sequence: Synthetic oligonucleotide
acccugcccagcggaauga

SEQ ID NO: 1073101 - RNA, 19 nt, Artificial Sequence
  Description of Artificial Sequence: Synthetic oligonucleotide
cguaccacuggccuauaga

SEQ ID NO: 1073102 - RNA, 19 nt, Artificial Sequence
  Description of Artificial Sequence: Synthetic oligonucleotide
ggucgagcucuccgaugcc

SEQ ID NO: 1073103 - RNA, 19 nt, Artificial Sequence
  Description of Artificial Sequence: Synthetic oligonucleotide
ggggaaccuuaggaccacg

SEQ ID NO: 1073104 - RNA, 19 nt, Artificial Sequence
  Description of Artificial Sequence: Synthetic oligonucleotide
guguucggcccguaccacu

SEQ ID NO: 1073105 - RNA, 19 nt, Artificial Sequence
  Description of Artificial Sequence: Synthetic oligonucleotide
ccugacuaggccuucuuau

SEQ ID NO: 1073106 - RNA, 19 nt, Artificial Sequence
  Description of Artificial Sequence: Synthetic oligonucleotide
guucucccacugagguagc

SEQ ID NO: 1073107 - RNA, 19 nt, Artificial Sequence
  Description of Artificial Sequence: Synthetic oligonucleotide
cgccaacucccauuugcgc

SEQ ID NO: 1073108 - RNA, 19 nt, Artificial Sequence
  Description of Artificial Sequence: Synthetic oligonucleotide
gccccuuacaggaaacaaa

SEQ ID NO: 1073109 - RNA, 19 nt, Artificial Sequence
  Description of Artificial Sequence: Synthetic oligonucleotide
ccaacucccauuugcgcua

SEQ ID NO: 1073110 - RNA, 19 nt, Artificial Sequence
  Description of Artificial Sequence: Synthetic oligonucleotide
ccacuggccuauagacuug

SEQ ID NO: 1073111 - RNA, 19 nt, Artificial Sequence
  Description of Artificial Sequence: Synthetic oligonucleotide
gcuaucugguggauggagu

SEQ ID NO: 1073112 - RNA, 19 nt, Artificial Sequence
  Description of Artificial Sequence: Synthetic oligonucleotide
cgcuaucugguggauggag

SEQ ID NO: 1073113 - RNA, 19 nt, Artificial Sequence
  Description of Artificial Sequence: Synthetic oligonucleotide
cccacugagguagcccuug

SEQ ID NO: 1073114 - RNA, 19 nt, Artificial Sequence
  Description of Artificial Sequence: Synthetic oligonucleotide
guuacccuggaggguuucu

SEQ ID NO: 1073115 - RNA, 19 nt, Artificial Sequence
  Description of Artificial Sequence: Synthetic oligonucleotide
cuuauguggacaggcccuu

SEQ ID NO: 1073116 - RNA, 19 nt, Artificial Sequence
  Description of Artificial Sequence: Synthetic oligonucleotide
gggguuaggcagucugacu

SEQ ID NO: 1073117 - RNA, 19 nt, Artificial Sequence
  Description of Artificial Sequence: Synthetic oligonucleotide
uccugacccgcggcucuuc

SEQ ID NO: 1073118 - RNA, 19 nt, Artificial Sequence
  Description of Artificial Sequence: Synthetic oligonucleotide
cucuuccgcugaguccauc

SEQ ID NO: 1073119 - RNA, 19 nt, Artificial Sequence
  Description of Artificial Sequence: Synthetic oligonucleotide
gucccaggcggagaggaau

SEQ ID NO: 1073120 - RNA, 19 nt, Artificial Sequence
  Description of Artificial Sequence: Synthetic oligonucleotide
cgauaacacccagggacug

SEQ ID NO: 1073121 - RNA, 19 nt, Artificial Sequence
  Description of Artificial Sequence: Synthetic oligonucleotide
gcccagcggaaugaggcca

SEQ ID NO: 1073122 - RNA, 19 nt, Artificial Sequence
  Description of Artificial Sequence: Synthetic oligonucleotide
ggcugucucucuguacgaa

SEQ ID NO: 1073123 - RNA, 19 nt, Artificial Sequence
  Description of Artificial Sequence: Synthetic oligonucleotide
cuuccugacuaggccuucu

SEQ ID NO: 1073124 - RNA, 19 nt, Artificial Sequence
  Description of Artificial Sequence: Synthetic oligonucleotide
ccgcugaguccaucuccag

SEQ ID NO: 1073125 - RNA, 19 nt, Artificial Sequence
  Description of Artificial Sequence: Synthetic oligonucleotide
gguccuaauggggaaccuu

SEQ ID NO: 1073126 - RNA, 19 nt, Artificial Sequence
  Description of Artificial Sequence: Synthetic oligonucleotide
cgcggcucuuccugacuag

SEQ ID NO: 1073127 - RNA, 19 nt, Artificial Sequence
  Description of Artificial Sequence: Synthetic oligonucleotide
gcggggacacugagugccc

SEQ ID NO: 1073128 - RNA, 19 nt, Artificial Sequence
  Description of Artificial Sequence: Synthetic oligonucleotide
gcuccugacccgcggcucu

SEQ ID NO: 1073129 - RNA, 19 nt, Artificial Sequence
  Description of Artificial Sequence: Synthetic oligonucleotide
cuucccuagugagguccua

SEQ ID NO: 1073130 - RNA, 19 nt, Artificial Sequence
  Description of Artificial Sequence: Synthetic oligonucleotide
agcucucaucagggauaaa

SEQ ID NO: 1073131 - RNA, 19 nt, Artificial Sequence
  Description of Artificial Sequence: Synthetic oligonucleotide
gcaacaguguucggcccgu

SEQ ID NO: 1073132 - RNA, 19 nt, Artificial Sequence
  Description of Artificial Sequence: Synthetic oligonucleotide
cuguuacccuggaggguuu

SEQ ID NO: 1073133 - RNA, 19 nt, Artificial Sequence
  Description of Artificial Sequence: Synthetic oligonucleotide
ccgcauuccccacuggaau

SEQ ID NO: 1073134 - RNA, 19 nt, Artificial Sequence
  Description of Artificial Sequence: Synthetic oligonucleotide
gcccguaccacuggccuau

SEQ ID NO: 1073135 - RNA, 19 nt, Artificial Sequence
  Description of Artificial Sequence: Synthetic oligonucleotide
gcgcuaucugguggaugga

SEQ ID NO: 1073136 - RNA, 19 nt, Artificial Sequence
  Description of Artificial Sequence: Synthetic oligonucleotide
caacucccauuugcgcuau

SEQ ID NO: 1073137 - RNA, 19 nt, Artificial Sequence
  Description of Artificial Sequence: Synthetic oligonucleotide
ccgcggcucuuccugacua

SEQ ID NO: 1073138 - RNA, 19 nt, Artificial Sequence
  Description of Artificial Sequence: Synthetic oligonucleotide
caacaguguucggcccgua

SEQ ID NO: 1073139 - RNA, 19 nt, Artificial Sequence
  Description of Artificial Sequence: Synthetic oligonucleotide
ccaggacuuucagaggguu

SEQ ID NO: 1073140 - RNA, 19 nt, Artificial Sequence
  Description of Artificial Sequence: Synthetic oligonucleotide
ccacggcuccagaugcccu

SEQ ID NO: 1073141 - RNA, 19 nt, Artificial Sequence
  Description of Artificial Sequence: Synthetic oligonucleotide
ggaaagcauugaggacguu

SEQ ID NO: 1073142 - RNA, 19 nt, Artificial Sequence
  Description of Artificial Sequence: Synthetic oligonucleotide
cuccugacccgcggcucuu

SEQ ID NO: 1073143 - RNA, 19 nt, Artificial Sequence
  Description of Artificial Sequence: Synthetic oligonucleotide
gcuccacugcgggcugcgu

SEQ ID NO: 1073144 - RNA, 19 nt, Artificial Sequence
  Description of Artificial Sequence: Synthetic oligonucleotide
ccacugcgggcugcguagu

SEQ ID NO: 1073145 - RNA, 19 nt, Artificial Sequence
  Description of Artificial Sequence: Synthetic oligonucleotide
gcaccccaaugagggccau

SEQ ID NO: 1073146 - RNA, 19 nt, Artificial Sequence
  Description of Artificial Sequence: Synthetic oligonucleotide
cccguaccacuggccuaua

SEQ ID NO: 1073147 - RNA, 19 nt, Artificial Sequence
  Description of Artificial Sequence: Synthetic oligonucleotide
aaugcaaccucauacuuac

SEQ ID NO: 1073148 - RNA, 19 nt, Artificial Sequence
  Description of Artificial Sequence: Synthetic oligonucleotide
uaacuaaguacaaauaaag

SEQ ID NO: 1073149 - RNA, 19 nt, Artificial Sequence
  Description of Artificial Sequence: Synthetic oligonucleotide
uuuaucggcacuuaagagg

SEQ ID NO: 1073150 - RNA, 19 nt, Artificial Sequence
  Description of Artificial Sequence: Synthetic oligonucleotide
aauaucauaacuggcaaag

SEQ ID NO: 1073151 - RNA, 19 nt, Artificial Sequence
  Description of Artificial Sequence: Synthetic oligonucleotide
agacguugcacccaaaacc

SEQ ID NO: 1073152 - RNA, 19 nt, Artificial Sequence
  Description of Artificial Sequence: Synthetic oligonucleotide
ugugaguaaagucugagga

SEQ ID NO: 1073153 - RNA, 19 nt, Artificial Sequence
  Description of Artificial Sequence: Synthetic oligonucleotide
uguuauuuuauacgcaacc

SEQ ID NO: 1073154 - RNA, 19 nt, Artificial Sequence
  Description of Artificial Sequence: Synthetic oligonucleotide
uguaguaaagugcauacac

SEQ ID NO: 1073155 - RNA, 19 nt, Artificial Sequence
  Description of Artificial Sequence: Synthetic oligonucleotide
ucagaaacggacaaggucu

SEQ ID NO: 1073156 - RNA, 19 nt, Artificial Sequence
  Description of Artificial Sequence: Synthetic oligonucleotide
acugguacagaccaagcgc

SEQ ID NO: 1073157 - RNA, 19 nt, Artificial Sequence
  Description of Artificial Sequence: Synthetic oligonucleotide
uauuuaucggcacuuaaga

SEQ ID NO: 1073158 - RNA, 19 nt, Artificial Sequence
  Description of Artificial Sequence: Synthetic oligonucleotide
uuuauacgcaaccacuuag

SEQ ID NO: 1073159 - RNA, 19 nt, Artificial Sequence
  Description of Artificial Sequence: Synthetic oligonucleotide
acugguguaccucaguagc

SEQ ID NO: 1073160 - RNA, 19 nt, Artificial Sequence
  Description of Artificial Sequence: Synthetic oligonucleotide
caucagacuaaucaggugg

SEQ ID NO: 1073161 - RNA, 19 nt, Artificial Sequence
  Description of Artificial Sequence: Synthetic oligonucleotide
aaugauugugcacugcgug

SEQ ID NO: 1073162 - RNA, 19 nt, Artificial Sequence
  Description of Artificial Sequence: Synthetic oligonucleotide
uauuuuauacgcaaccacu

SEQ ID NO: 1073163 - RNA, 19 nt, Artificial Sequence
  Description of Artificial Sequence: Synthetic oligonucleotide
uccauguuauuuuauacgc

SEQ ID NO: 1073164 - RNA, 19 nt, Artificial Sequence
  Description of Artificial Sequence: Synthetic oligonucleotide
cugagaauaucauaacugg

SEQ ID NO: 1073165 - RNA, 19 nt, Artificial Sequence
  Description of Artificial Sequence: Synthetic oligonucleotide
ucaaaaugaagucuuggcu

SEQ ID NO: 1073166 - RNA, 19 nt, Artificial Sequence
  Description of Artificial Sequence: Synthetic oligonucleotide
uacgcaaccacuuagcaga

SEQ ID NO: 1073167 - RNA, 19 nt, Artificial Sequence
  Description of Artificial Sequence: Synthetic oligonucleotide
aaaauucaaacaaagacua

SEQ ID NO: 1073168 - RNA, 19 nt, Artificial Sequence
  Description of Artificial Sequence: Synthetic oligonucleotide
ucaucuaucugccagccca

SEQ ID NO: 1073169 - RNA, 19 nt, Artificial Sequence
  Description of Artificial Sequence: Synthetic oligonucleotide
uuaucggcacuuaagagga

SEQ ID NO: 1073170 - RNA, 19 nt, Artificial Sequence
  Description of Artificial Sequence: Synthetic oligonucleotide
acggacaaggucuuuaaac

SEQ ID NO: 1073171 - RNA, 19 nt, Artificial Sequence
  Description of Artificial Sequence: Synthetic oligonucleotide
uucaaacaaagacuauggg

SEQ ID NO: 1073172 - RNA, 19 nt, Artificial Sequence
  Description of Artificial Sequence: Synthetic oligonucleotide
  modified_base (6)..(6): a, c, u, g, unknown or other
uuuucngcaaguccgucag

SEQ ID NO: 1073173 - RNA, 19 nt, Artificial Sequence
  Description of Artificial Sequence: Synthetic oligonucleotide
uuuacaggcagucugccac

SEQ ID NO: 1073174 - RNA, 19 nt, Artificial Sequence
  Description of Artificial Sequence: Synthetic oligonucleotide
acuauguccaauuagugau

SEQ ID NO: 1073175 - RNA, 19 nt, Artificial Sequence
  Description of Artificial Sequence: Synthetic oligonucleotide
cuuaagaggauguagucuc

SEQ ID NO: 1073176 - RNA, 19 nt, Artificial Sequence
  Description of Artificial Sequence: Synthetic oligonucleotide
aaguaagucacugguguac

SEQ ID NO: 1073177 - RNA, 19 nt, Artificial Sequence
  Description of Artificial Sequence: Synthetic oligonucleotide
agauaaaugauugugcacu

SEQ ID NO: 1073178 - RNA, 19 nt, Artificial Sequence
  Description of Artificial Sequence: Synthetic oligonucleotide
ugagaauaucauaacuggc

SEQ ID NO: 1073179 - RNA, 19 nt, Artificial Sequence
  Description of Artificial Sequence: Synthetic oligonucleotide
aaugaaucauuuaacuucu

SEQ ID NO: 1073180 - RNA, 19 nt, Artificial Sequence
  Description of Artificial Sequence: Synthetic oligonucleotide
aaagacuaagccuguguca

SEQ ID NO: 1073181 - RNA, 19 nt, Artificial Sequence
  Description of Artificial Sequence: Synthetic oligonucleotide
ucuguaguaaagugcauac

SEQ ID NO: 1073182 - RNA, 19 nt, Artificial Sequence
  Description of Artificial Sequence: Synthetic oligonucleotide
augccguaaacacacugcc

SEQ ID NO: 1073183 - RNA, 19 nt, Artificial Sequence
  Description of Artificial Sequence: Synthetic oligonucleotide
ugaucucauauuuaucggc

SEQ ID NO: 1073184 - RNA, 19 nt, Artificial Sequence
  Description of Artificial Sequence: Synthetic oligonucleotide
uacuucuauccucagaaac

SEQ ID NO: 1073185 - RNA, 19 nt, Artificial Sequence
  Description of Artificial Sequence: Synthetic oligonucleotide
cauacuuaccugaccaacg

SEQ ID NO: 1073186 - RNA, 19 nt, Artificial Sequence
  Description of Artificial Sequence: Synthetic oligonucleotide
aagcccauacuuucacagc

SEQ ID NO: 1073187 - RNA, 19 nt, Artificial Sequence
  Description of Artificial Sequence: Synthetic oligonucleotide
uucaucgaacuucacagcu

SEQ ID NO: 1073188 - RNA, 19 nt, Artificial Sequence
  Description of Artificial Sequence: Synthetic oligonucleotide
auuuaucggcacuuaagag

SEQ ID NO: 1073189 - RNA, 19 nt, Artificial Sequence
  Description of Artificial Sequence: Synthetic oligonucleotide
ugugcuuacaucccacagc

SEQ ID NO: 1073190 - RNA, 19 nt, Artificial Sequence
  Description of Artificial Sequence: Synthetic oligonucleotide
uuauacgcaaccacuuagc

SEQ ID NO: 1073191 - RNA, 19 nt, Artificial Sequence
  Description of Artificial Sequence: Synthetic oligonucleotide
agcccauacuuucacagcg

SEQ ID NO: 1073192 - RNA, 19 nt, Artificial Sequence
  Description of Artificial Sequence: Synthetic oligonucleotide
uuugcacuucugcaaaacc

SEQ ID NO: 1073193 - RNA, 19 nt, Artificial Sequence
  Description of Artificial Sequence: Synthetic oligonucleotide
ugcgugaugauaccuuuag

SEQ ID NO: 1073194 - RNA, 19 nt, Artificial Sequence
  Description of Artificial Sequence: Synthetic oligonucleotide
gauaaaugauugugcacug

SEQ ID NO: 1073195 - RNA, 19 nt, Artificial Sequence
  Description of Artificial Sequence: Synthetic oligonucleotide
auaacuggcaaagucccac

SEQ ID NO: 1073196 - RNA, 19 nt, Artificial Sequence
  Description of Artificial Sequence: Synthetic oligonucleotide
gagaauaucauaacuggca

SEQ ID NO: 1073197 - RNA, 19 nt, Artificial Sequence
  Description of Artificial Sequence: Synthetic oligonucleotide
augauguacagguaguggu

SEQ ID NO: 1073198 - RNA, 19 nt, Artificial Sequence
  Description of Artificial Sequence: Synthetic oligonucleotide
ugugcagagaaguccaucu

SEQ ID NO: 1073199 - RNA, 19 nt, Artificial Sequence
  Description of Artificial Sequence: Synthetic oligonucleotide
ugcaagagagacuugacuu

SEQ ID NO: 1073200 - RNA, 19 nt, Artificial Sequence
  Description of Artificial Sequence: Synthetic oligonucleotide
uauacgcaaccacuuagca

SEQ ID NO: 1073201 - RNA, 19 nt, Artificial Sequence
  Description of Artificial Sequence: Synthetic oligonucleotide
cuaaucacgcucucugucc

SEQ ID NO: 1073202 - RNA, 19 nt, Artificial Sequence
  Description of Artificial Sequence: Synthetic oligonucleotide
  modified_base (4)..(4): a, c, u, g, unknown or other
uucngcaaguccgucagag

SEQ ID NO: 1073203 - RNA, 19 nt, Artificial Sequence
  Description of Artificial Sequence: Synthetic oligonucleotide
augugaguaaagucugagg

SEQ ID NO: 1073204 - RNA, 19 nt, Artificial Sequence
  Description of Artificial Sequence: Synthetic oligonucleotide
aguaagucacugguguacc

SEQ ID NO: 1073205 - RNA, 19 nt, Artificial Sequence
  Description of Artificial Sequence: Synthetic oligonucleotide
agacuaaucagguggccag

SEQ ID NO: 1073206 - RNA, 19 nt, Artificial Sequence
  Description of Artificial Sequence: Synthetic oligonucleotide
agaauaucauaacuggcaa

SEQ ID NO: 1073207 - RNA, 19 nt, Artificial Sequence
  Description of Artificial Sequence: Synthetic oligonucleotide
gaaucaucuaucugccagc

SEQ ID NO: 1073208 - RNA, 19 nt, Artificial Sequence
  Description of Artificial Sequence: Synthetic oligonucleotide
cagacaagucgucugaccc

SEQ ID NO: 1073209 - RNA, 19 nt, Artificial Sequence
  Description of Artificial Sequence: Synthetic oligonucleotide
aucucauauuuaucggcac

SEQ ID NO: 1073210 - RNA, 19 nt, Artificial Sequence
  Description of Artificial Sequence: Synthetic oligonucleotide
cuucuauccucagaaacgg

SEQ ID NO: 1073211 - RNA, 19 nt, Artificial Sequence
  Description of Artificial Sequence: Synthetic oligonucleotide
cagcuuugcagacaagucg

SEQ ID NO: 1073212 - RNA, 19 nt, Artificial Sequence
  Description of Artificial Sequence: Synthetic oligonucleotide
ugaguaaagucugaggauc

SEQ ID NO: 1073213 - RNA, 19 nt, Artificial Sequence
  Description of Artificial Sequence: Synthetic oligonucleotide
ucucauauuuaucggcacu

SEQ ID NO: 1073214 - RNA, 19 nt, Artificial Sequence
  Description of Artificial Sequence: Synthetic oligonucleotide
auauuuaucggcacuuaag

SEQ ID NO: 1073215 - RNA, 19 nt, Artificial Sequence
  Description of Artificial Sequence: Synthetic oligonucleotide
ugcuuagagaccaggcagc

SEQ ID NO: 1073216 - RNA, 19 nt, Artificial Sequence
  Description of Artificial Sequence: Synthetic oligonucleotide
agaccaagcgcugaacuac

SEQ ID NO: 1073217 - RNA, 19 nt, Artificial Sequence
  Description of Artificial Sequence: Synthetic oligonucleotide
uucaguaugcccagugagu

SEQ ID NO: 1073218 - RNA, 19 nt, Artificial Sequence
  Description of Artificial Sequence: Synthetic oligonucleotide
cuuauuccacugcuuagag

SEQ ID NO: 1073219 - RNA, 19 nt, Artificial Sequence
  Description of Artificial Sequence: Synthetic oligonucleotide
aguuugcuaccucaggugu

SEQ ID NO: 1073220 - RNA, 19 nt, Artificial Sequence
  Description of Artificial Sequence: Synthetic oligonucleotide
gaguaaagucugaggaucg

SEQ ID NO: 1073221 - RNA, 19 nt, Artificial Sequence
  Description of Artificial Sequence: Synthetic oligonucleotide
uuuuauacgcaaccacuua

SEQ ID NO: 1073222 - RNA, 19 nt, Artificial Sequence
  Description of Artificial Sequence: Synthetic oligonucleotide
ugaccaacguaacuaagua

SEQ ID NO: 1073223 - RNA, 19 nt, Artificial Sequence
  Description of Artificial Sequence: Synthetic oligonucleotide
auugugcccauccagucca

SEQ ID NO: 1073224 - RNA, 19 nt, Artificial Sequence
  Description of Artificial Sequence: Synthetic oligonucleotide
uuuacuccauauuccacuc

SEQ ID NO: 1073225 - RNA, 19 nt, Artificial Sequence
  Description of Artificial Sequence: Synthetic oligonucleotide
aagacuaagccugugucau

SEQ ID NO: 1073226 - RNA, 19 nt, Artificial Sequence
  Description of Artificial Sequence: Synthetic oligonucleotide
cacgguguugucaaaggag

SEQ ID NO: 1073227 - RNA, 19 nt, Artificial Sequence
  Description of Artificial Sequence: Synthetic oligonucleotide
cauguuauuuuauacgcaa

SEQ ID NO: 1073228 - RNA, 19 nt, Artificial Sequence
  Description of Artificial Sequence: Synthetic oligonucleotide
gaugccguaaacacacugc

SEQ ID NO: 1073229 - RNA, 19 nt, Artificial Sequence
  Description of Artificial Sequence: Synthetic oligonucleotide
ugacccauucaguaugccc

SEQ ID NO: 1073230 - RNA, 19 nt, Artificial Sequence
  Description of Artificial Sequence: Synthetic oligonucleotide
ucaucgaacuucacagcug

SEQ ID NO: 1073231 - RNA, 19 nt, Artificial Sequence
  Description of Artificial Sequence: Synthetic oligonucleotide
cacugguacagaccaagcg

SEQ ID NO: 1073232 - RNA, 19 nt, Artificial Sequence
  Description of Artificial Sequence: Synthetic oligonucleotide
ugcgguguaugucaguaaa

SEQ ID NO: 1073233 - RNA, 19 nt, Artificial Sequence
  Description of Artificial Sequence: Synthetic oligonucleotide
ucgcccgccaggaagcugg

SEQ ID NO: 1073234 - RNA, 19 nt, Artificial Sequence
  Description of Artificial Sequence: Synthetic oligonucleotide
gugaauacuguggucaggc

SEQ ID NO: 1073235 - RNA, 19 nt, Artificial Sequence
  Description of Artificial Sequence: Synthetic oligonucleotide
auacuuaccugaccaacgu

SEQ ID NO: 1073236 - RNA, 19 nt, Artificial Sequence
  Description of Artificial Sequence: Synthetic oligonucleotide
ugacuuugcacuucugcaa

SEQ ID NO: 1073237 - RNA, 19 nt, Artificial Sequence
  Description of Artificial Sequence: Synthetic oligonucleotide
uauaacaucacagcaccuu

SEQ ID NO: 1073238 - RNA, 19 nt, Artificial Sequence
  Description of Artificial Sequence: Synthetic oligonucleotide
cagauaaaugauugugcac

SEQ ID NO: 1073239 - RNA, 19 nt, Artificial Sequence
  Description of Artificial Sequence: Synthetic oligonucleotide
aagauagccuucaaguaaa

SEQ ID NO: 1073240 - RNA, 19 nt, Artificial Sequence
  Description of Artificial Sequence: Synthetic oligonucleotide
gaucucauauuuaucggca

SEQ ID NO: 1073241 - RNA, 19 nt, Artificial Sequence
  Description of Artificial Sequence: Synthetic oligonucleotide
agcgcugaacuacagacaa

SEQ ID NO: 1073242 - RNA, 19 nt, Artificial Sequence
  Description of Artificial Sequence: Synthetic oligonucleotide
cacucaccaaaauauccag

SEQ ID NO: 1073243 - RNA, 19 nt, Artificial Sequence
  Description of Artificial Sequence: Synthetic oligonucleotide
acuuaagaggauguagucu

SEQ ID NO: 1073244 - RNA, 19 nt, Artificial Sequence
  Description of Artificial Sequence: Synthetic oligonucleotide
aguuggcugccacagacgu

SEQ ID NO: 1073245 - RNA, 19 nt, Artificial Sequence
  Description of Artificial Sequence: Synthetic oligonucleotide
aaacggacaaggucuuuaa

SEQ ID NO: 1073246 - RNA, 19 nt, Artificial Sequence
  Description of Artificial Sequence: Synthetic oligonucleotide
acccugagaauaucauaac

SEQ ID NO: 1073247 - RNA, 19 nt, Artificial Sequence
  Description of Artificial Sequence: Synthetic oligonucleotide
gaccaacguaacuaaguac

SEQ ID NO: 1073248 - RNA, 19 nt, Artificial Sequence
  Description of Artificial Sequence: Synthetic oligonucleotide
auguuauuuuauacgcaac

SEQ ID NO: 1073249 - RNA, 19 nt, Artificial Sequence
  Description of Artificial Sequence: Synthetic oligonucleotide
auaaaguaagucacuggug

SEQ ID NO: 1073250 - RNA, 19 nt, Artificial Sequence
  Description of Artificial Sequence: Synthetic oligonucleotide
caagaccaggugaauacug

SEQ ID NO: 1073251 - RNA, 19 nt, Artificial Sequence
  Description of Artificial Sequence: Synthetic oligonucleotide
gacccugagaauaucauaa

SEQ ID NO: 1073252 - RNA, 19 nt, Artificial Sequence
  Description of Artificial Sequence: Synthetic oligonucleotide
aguaugcccagugagugug

SEQ ID NO: 1073253 - RNA, 19 nt, Artificial Sequence
  Description of Artificial Sequence: Synthetic oligonucleotide
uuuuacaggcagucugcca

SEQ ID NO: 1073254 - RNA, 19 nt, Artificial Sequence
  Description of Artificial Sequence: Synthetic oligonucleotide
acaaauaaaguaagucacu

SEQ ID NO: 1073255 - RNA, 19 nt, Artificial Sequence
  Description of Artificial Sequence: Synthetic oligonucleotide
accuuauuccacugcuuag

SEQ ID NO: 1073256 - RNA, 19 nt, Artificial Sequence
  Description of Artificial Sequence: Synthetic oligonucleotide
uuauuccacugcuuagaga

SEQ ID NO: 1073257 - RNA, 19 nt, Artificial Sequence
  Description of Artificial Sequence: Synthetic oligonucleotide
agcagauaaagcccauacu

SEQ ID NO: 1073258 - RNA, 19 nt, Artificial Sequence
  Description of Artificial Sequence: Synthetic oligonucleotide
ucccaauuggccaaaucuu

SEQ ID NO: 1073259 - RNA, 19 nt, Artificial Sequence
  Description of Artificial Sequence: Synthetic oligonucleotide
cuuaccugaccaacguaac

SEQ ID NO: 1073260 - RNA, 19 nt, Artificial Sequence
  Description of Artificial Sequence: Synthetic oligonucleotide
uuauuggagaggugccuga

SEQ ID NO: 1073261 - RNA, 19 nt, Artificial Sequence
  Description of Artificial Sequence: Synthetic oligonucleotide
aaaugauugugcacugcgu

SEQ ID NO: 1073262 - RNA, 19 nt, Artificial Sequence
  Description of Artificial Sequence: Synthetic oligonucleotide
uuugcuaccucaggugucu

SEQ ID NO: 1073263 - RNA, 19 nt, Artificial Sequence
  Description of Artificial Sequence: Synthetic oligonucleotide
cacuauguccaauuaguga

SEQ ID NO: 1073264 - RNA, 19 nt, Artificial Sequence
  Description of Artificial Sequence: Synthetic oligonucleotide
cuauguccaauuagugaug

SEQ ID NO: 1073265 - RNA, 19 nt, Artificial Sequence
  Description of Artificial Sequence: Synthetic oligonucleotide
cauugugcccauccagucc

SEQ ID NO: 1073266 - RNA, 19 nt, Artificial Sequence
  Description of Artificial Sequence: Synthetic oligonucleotide
gaauaucauaacuggcaaa

SEQ ID NO: 1073267 - RNA, 19 nt, Artificial Sequence
  Description of Artificial Sequence: Synthetic oligonucleotide
uugaugacccugagaauau

SEQ ID NO: 1073268 - RNA, 19 nt, Artificial Sequence
  Description of Artificial Sequence: Synthetic oligonucleotide
cacuuaagaggauguaguc

SEQ ID NO: 1073269 - RNA, 19 nt, Artificial Sequence
  Description of Artificial Sequence: Synthetic oligonucleotide
gaggccagcggcuaaucac

SEQ ID NO: 1073270 - RNA, 19 nt, Artificial Sequence
  Description of Artificial Sequence: Synthetic oligonucleotide
guaaagucugaggaucgag

SEQ ID NO: 1073271 - RNA, 19 nt, Artificial Sequence
  Description of Artificial Sequence: Synthetic oligonucleotide
cacccaaaacccucagucc

SEQ ID NO: 1073272 - RNA, 19 nt, Artificial Sequence
  Description of Artificial Sequence: Synthetic oligonucleotide
aggugaauacuguggucag

SEQ ID NO: 1073273 - RNA, 19 nt, Artificial Sequence
  Description of Artificial Sequence: Synthetic oligonucleotide
ugccguaaacacacugccc

SEQ ID NO: 1073274 - RNA, 19 nt, Artificial Sequence
  Description of Artificial Sequence: Synthetic oligonucleotide
ucgaacuucacagcugcac

SEQ ID NO: 1073275 - RNA, 19 nt, Artificial Sequence
  Description of Artificial Sequence: Synthetic oligonucleotide
auacuguggucaggcaugc

SEQ ID NO: 1073276 - RNA, 19 nt, Artificial Sequence
  Description of Artificial Sequence: Synthetic oligonucleotide
guuauuggagaggugccug

SEQ ID NO: 1073277 - RNA, 19 nt, Artificial Sequence
  Description of Artificial Sequence: Synthetic oligonucleotide
aaccacuuagcagauuaau

SEQ ID NO: 1073278 - RNA, 19 nt, Artificial Sequence
  Description of Artificial Sequence: Synthetic oligonucleotide
caugucccagcagauaaag

SEQ ID NO: 1073279 - RNA, 19 nt, Artificial Sequence
  Description of Artificial Sequence: Synthetic oligonucleotide
aucagguggccagaguuuc

SEQ ID NO: 1073280 - RNA, 19 nt, Artificial Sequence
  Description of Artificial Sequence: Synthetic oligonucleotide
agcaugugaguaaagucug

SEQ ID NO: 1073281 - RNA, 19 nt, Artificial Sequence
  Description of Artificial Sequence: Synthetic oligonucleotide
uccaauuagugaugagguc

SEQ ID NO: 1073282 - RNA, 19 nt, Artificial Sequence
  Description of Artificial Sequence: Synthetic oligonucleotide
ucauugugcccauccaguc

SEQ ID NO: 1073283 - RNA, 19 nt, Artificial Sequence
  Description of Artificial Sequence: Synthetic oligonucleotide
aagaccaggugaauacugu

SEQ ID NO: 1073284 - RNA, 19 nt, Artificial Sequence
  Description of Artificial Sequence: Synthetic oligonucleotide
acuuaccugaccaacguaa

SEQ ID NO: 1073285 - RNA, 19 nt, Artificial Sequence
  Description of Artificial Sequence: Synthetic oligonucleotide
gacaagucgucugacccug

SEQ ID NO: 1073286 - RNA, 19 nt, Artificial Sequence
  Description of Artificial Sequence: Synthetic oligonucleotide
auuuuauacgcaaccacuu

SEQ ID NO: 1073287 - RNA, 19 nt, Artificial Sequence
  Description of Artificial Sequence: Synthetic oligonucleotide
uuacaucccacagcuuugc

SEQ ID NO: 1073288 - RNA, 19 nt, Artificial Sequence
  Description of Artificial Sequence: Synthetic oligonucleotide
ucggugucagccgugcucc

SEQ ID NO: 1073289 - RNA, 19 nt, Artificial Sequence
  Description of Artificial Sequence: Synthetic oligonucleotide
cugugcuuacaucccacag

SEQ ID NO: 1073290 - RNA, 19 nt, Artificial Sequence
  Description of Artificial Sequence: Synthetic oligonucleotide
acagacguugcacccaaaa

SEQ ID NO: 1073291 - RNA, 19 nt, Artificial Sequence
  Description of Artificial Sequence: Synthetic oligonucleotide
agcuuugcagacaagucgu

SEQ ID NO: 1073292 - RNA, 19 nt, Artificial Sequence
  Description of Artificial Sequence: Synthetic oligonucleotide
cuuggugacccauucagua

SEQ ID NO: 1073293 - RNA, 19 nt, Artificial Sequence
  Description of Artificial Sequence: Synthetic oligonucleotide
agacaagucgucugacccu

SEQ ID NO: 1073294 - RNA, 19 nt, Artificial Sequence
  Description of Artificial Sequence: Synthetic oligonucleotide
gacuuugcacuucugcaaa

SEQ ID NO: 1073295 - RNA, 19 nt, Artificial Sequence
  Description of Artificial Sequence: Synthetic oligonucleotide
uaagaggauguagucucca

SEQ ID NO: 1073296 - RNA, 19 nt, Artificial Sequence
  Description of Artificial Sequence: Synthetic oligonucleotide
uccaguccauuuagccagg

SEQ ID NO: 1073297 - RNA, 19 nt, Artificial Sequence
  Description of Artificial Sequence: Synthetic oligonucleotide
  modified_base (6)..(6): a, c, u, g, unknown or other
ucccgnuugaggagagucu

SEQ ID NO: 1073298 - RNA, 19 nt, Artificial Sequence
  Description of Artificial Sequence: Synthetic oligonucleotide
ggcacuuaucaccuuauuc

SEQ ID NO: 1073299 - RNA, 19 nt, Artificial Sequence
  Description of Artificial Sequence: Synthetic oligonucleotide
aacggacaaggucuuuaaa

SEQ ID NO: 1073300 - RNA, 19 nt, Artificial Sequence
  Description of Artificial Sequence: Synthetic oligonucleotide
acuaaucagguggccagag

SEQ ID NO: 1073301 - RNA, 19 nt, Artificial Sequence
  Description of Artificial Sequence: Synthetic oligonucleotide
cagacguugcacccaaaac

SEQ ID NO: 1073302 - RNA, 19 nt, Artificial Sequence
  Description of Artificial Sequence: Synthetic oligonucleotide
uucuauccucagaaacgga

SEQ ID NO: 1073303 - RNA, 19 nt, Artificial Sequence
  Description of Artificial Sequence: Synthetic oligonucleotide
  modified_base (3)..(3): a, c, u, g, unknown or other
ucngcaaguccgucagaga

SEQ ID NO: 1073304 - RNA, 19 nt, Artificial Sequence
  Description of Artificial Sequence: Synthetic oligonucleotide
cauacacucuggcacuaug

SEQ ID NO: 1073305 - RNA, 19 nt, Artificial Sequence
  Description of Artificial Sequence: Synthetic oligonucleotide
caggugaauacugugguca

SEQ ID NO: 1073306 - RNA, 19 nt, Artificial Sequence
  Description of Artificial Sequence: Synthetic oligonucleotide
ugcacugcgugaugauacc

SEQ ID NO: 1073307 - RNA, 19 nt, Artificial Sequence
  Description of Artificial Sequence: Synthetic oligonucleotide
aggugccugagcuggacug

SEQ ID NO: 1073308 - RNA, 19 nt, Artificial Sequence
  Description of Artificial Sequence: Synthetic oligonucleotide
ggcacuuaagaggauguag

SEQ ID NO: 1073309 - RNA, 19 nt, Artificial Sequence
  Description of Artificial Sequence: Synthetic oligonucleotide
ugacccugagaauaucaua

SEQ ID NO: 1073310 - RNA, 19 nt, Artificial Sequence
  Description of Artificial Sequence: Synthetic oligonucleotide
cuuugcacuucugcaaaac

SEQ ID NO: 1073311 - RNA, 19 nt, Artificial Sequence
  Description of Artificial Sequence: Synthetic oligonucleotide
uagcugucggugucagccg

SEQ ID NO: 1073312 - RNA, 19 nt, Artificial Sequence
  Description of Artificial Sequence: Synthetic oligonucleotide
uuacaggcagucugccaca

SEQ ID NO: 1073313 - RNA, 19 nt, Artificial Sequence
  Description of Artificial Sequence: Synthetic oligonucleotide
aauuagugaugaggucuca

SEQ ID NO: 1073314 - RNA, 19 nt, Artificial Sequence
  Description of Artificial Sequence: Synthetic oligonucleotide
aagucagcggugguagcug

SEQ ID NO: 1073315 - RNA, 19 nt, Artificial Sequence
  Description of Artificial Sequence: Synthetic oligonucleotide
guguaccucaguagcaugc

SEQ ID NO: 1073316 - RNA, 19 nt, Artificial Sequence
  Description of Artificial Sequence: Synthetic oligonucleotide
ucagacuaaucagguggcc

SEQ ID NO: 1073317 - RNA, 19 nt, Artificial Sequence
  Description of Artificial Sequence: Synthetic oligonucleotide
  modified_base (2)..(2): a, c, u, g, unknown or other
cngcaaguccgucagagaa

SEQ ID NO: 1073318 - RNA, 19 nt, Artificial Sequence
  Description of Artificial Sequence: Synthetic oligonucleotide
cauauuuaucggcacuuaa

SEQ ID NO: 1073319 - RNA, 19 nt, Artificial Sequence
  Description of Artificial Sequence: Synthetic oligonucleotide
ugguacagaccaagcgcug

SEQ ID NO: 1073320 - RNA, 19 nt, Artificial Sequence
  Description of Artificial Sequence: Synthetic oligonucleotide
uggccaaaucuugaucuca

SEQ ID NO: 1073321 - RNA, 19 nt, Artificial Sequence
  Description of Artificial Sequence: Synthetic oligonucleotide
auaucauaacuggcaaagu

SEQ ID NO: 1073322 - RNA, 19 nt, Artificial Sequence
  Description of Artificial Sequence: Synthetic oligonucleotide
aggccagcggcuaaucacg

SEQ ID NO: 1073323 - RNA, 19 nt, Artificial Sequence
  Description of Artificial Sequence: Synthetic oligonucleotide
ucgucugacccugugcaga

SEQ ID NO: 1073324 - RNA, 19 nt, Artificial Sequence
  Description of Artificial Sequence: Synthetic oligonucleotide
uucaggcaugucccagcag

SEQ ID NO: 1073325 - RNA, 19 nt, Artificial Sequence
  Description of Artificial Sequence: Synthetic oligonucleotide
auguacagguagugguugu

SEQ ID NO: 1073326 - RNA, 19 nt, Artificial Sequence
  Description of Artificial Sequence: Synthetic oligonucleotide
uuccuguacucuggcagag

SEQ ID NO: 1073327 - RNA, 19 nt, Artificial Sequence
  Description of Artificial Sequence: Synthetic oligonucleotide
gcaaguccgucagagaaag

SEQ ID NO: 1073328 - RNA, 19 nt, Artificial Sequence
  Description of Artificial Sequence: Synthetic oligonucleotide
  modified_base (7)..(7): a, c, u, g, unknown or other
gucccgnuugaggagaguc

SEQ ID NO: 1073329 - RNA, 19 nt, Artificial Sequence
  Description of Artificial Sequence: Synthetic oligonucleotide
uacuuaccugaccaacgua

SEQ ID NO: 1073330 - RNA, 19 nt, Artificial Sequence
  Description of Artificial Sequence: Synthetic oligonucleotide
uaccuuuaggugagaacuu

SEQ ID NO: 1073331 - RNA, 19 nt, Artificial Sequence
  Description of Artificial Sequence: Synthetic oligonucleotide
uugcacccaaaacccucag

SEQ ID NO: 1073332 - RNA, 19 nt, Artificial Sequence
  Description of Artificial Sequence: Synthetic oligonucleotide
gcaaccucauacuuaccug

SEQ ID NO: 1073333 - RNA, 19 nt, Artificial Sequence
  Description of Artificial Sequence: Synthetic oligonucleotide
cagauuaaugaaucauuua

SEQ ID NO: 1073334 - RNA, 19 nt, Artificial Sequence
  Description of Artificial Sequence: Synthetic oligonucleotide
ucauauuuaucggcacuua

SEQ ID NO: 1073335 - RNA, 19 nt, Artificial Sequence
  Description of Artificial Sequence: Synthetic oligonucleotide
auacacucuggcacuaugu

SEQ ID NO: 1073336 - RNA, 19 nt, Artificial Sequence
  Description of Artificial Sequence: Synthetic oligonucleotide
  modified_base (5)..(5): a, c, u, g, unknown or other
uuucngcaaguccgucaga

SEQ ID NO: 1073337 - RNA, 19 nt, Artificial Sequence
  Description of Artificial Sequence: Synthetic oligonucleotide
ggaugccguaaacacacug

SEQ ID NO: 1073338 - RNA, 19 nt, Artificial Sequence
  Description of Artificial Sequence: Synthetic oligonucleotide
gaaacggacaaggucuuua

SEQ ID NO: 1073339 - RNA, 19 nt, Artificial Sequence
  Description of Artificial Sequence: Synthetic oligonucleotide
agauagccuucaaguaaac

SEQ ID NO: 1073340 - RNA, 19 nt, Artificial Sequence
  Description of Artificial Sequence: Synthetic oligonucleotide
aaucagguggccagaguuu

SEQ ID NO: 1073341 - RNA, 19 nt, Artificial Sequence
  Description of Artificial Sequence: Synthetic oligonucleotide
acaagaccaggugaauacu

SEQ ID NO: 1073342 - RNA, 19 nt, Artificial Sequence
  Description of Artificial Sequence: Synthetic oligonucleotide
agcuggacugccccaucag

SEQ ID NO: 1073343 - RNA, 19 nt, Artificial Sequence
  Description of Artificial Sequence: Synthetic oligonucleotide
guccaauuagugaugaggu

SEQ ID NO: 1073344 - RNA, 19 nt, Artificial Sequence
  Description of Artificial Sequence: Synthetic oligonucleotide
ggcagauacuucuauccuc

SEQ ID NO: 1073345 - RNA, 19 nt, Artificial Sequence
  Description of Artificial Sequence: Synthetic oligonucleotide
gccacucaccaaaauaucc

SEQ ID NO: 1073346 - RNA, 19 nt, Artificial Sequence
  Description of Artificial Sequence: Synthetic oligonucleotide
cccaauuggccaaaucuug

SEQ ID NO: 1073347 - RNA, 19 nt, Artificial Sequence
  Description of Artificial Sequence: Synthetic oligonucleotide
ccuggcaaacagauaaaug

SEQ ID NO: 1073348 - RNA, 19 nt, Artificial Sequence
  Description of Artificial Sequence: Synthetic oligonucleotide
gcaaccacuuagcagauua

SEQ ID NO: 1073349 - RNA, 19 nt, Artificial Sequence
  Description of Artificial Sequence: Synthetic oligonucleotide
aucgagccauuuuaacaaa

SEQ ID NO: 1073350 - RNA, 19 nt, Artificial Sequence
  Description of Artificial Sequence: Synthetic oligonucleotide
cagauacuucuauccucag

SEQ ID NO: 1073351 - RNA, 19 nt, Artificial Sequence
  Description of Artificial Sequence: Synthetic oligonucleotide
gcuaaucacgcucucuguc

SEQ ID NO: 1073352 - RNA, 19 nt, Artificial Sequence
  Description of Artificial Sequence: Synthetic oligonucleotide
cguaacuaaguacaaauaa

SEQ ID NO: 1073353 - RNA, 19 nt, Artificial Sequence
  Description of Artificial Sequence: Synthetic oligonucleotide
agccaagcaaagccaaguu

SEQ ID NO: 1073354 - RNA, 19 nt, Artificial Sequence
  Description of Artificial Sequence: Synthetic oligonucleotide
uuuagccaggacgcuucgc

SEQ ID NO: 1073355 - RNA, 19 nt, Artificial Sequence
  Description of Artificial Sequence: Synthetic oligonucleotide
gcagauacuucuauccuca

SEQ ID NO: 1073356 - RNA, 19 nt, Artificial Sequence
  Description of Artificial Sequence: Synthetic oligonucleotide
  modified_base (9)..(9): a, c, u, g, unknown or other
aagucccgnuugaggagag

SEQ ID NO: 1073357 - RNA, 19 nt, Artificial Sequence
  Description of Artificial Sequence: Synthetic oligonucleotide
uccauuuagccaggacgcu

SEQ ID NO: 1073358 - RNA, 19 nt, Artificial Sequence
  Description of Artificial Sequence: Synthetic oligonucleotide
gcagacaagucgucugacc

SEQ ID NO: 1073359 - RNA, 19 nt, Artificial Sequence
  Description of Artificial Sequence: Synthetic oligonucleotide
uccucaagauagccuucaa

SEQ ID NO: 1073360 - RNA, 19 nt, Artificial Sequence
  Description of Artificial Sequence: Synthetic oligonucleotide
caagucgucugacccugug

SEQ ID NO: 1073361 - RNA, 19 nt, Artificial Sequence
  Description of Artificial Sequence: Synthetic oligonucleotide
agcggcuaaucacgcucuc

SEQ ID NO: 1073362 - RNA, 19 nt, Artificial Sequence
  Description of Artificial Sequence: Synthetic oligonucleotide
uacagaccaagcgcugaac

SEQ ID NO: 1073363 - RNA, 19 nt, Artificial Sequence
  Description of Artificial Sequence: Synthetic oligonucleotide
agucagcggugguagcugu

SEQ ID NO: 1073364 - RNA, 19 nt, Artificial Sequence
  Description of Artificial Sequence: Synthetic oligonucleotide
cugguguaccucaguagca

SEQ ID NO: 1073365 - RNA, 19 nt, Artificial Sequence
  Description of Artificial Sequence: Synthetic oligonucleotide
ggugaauacuguggucagg

SEQ ID NO: 1073366 - RNA, 19 nt, Artificial Sequence
  Description of Artificial Sequence: Synthetic oligonucleotide
cauaacuggcaaaguccca

SEQ ID NO: 1073367 - RNA, 19 nt, Artificial Sequence
  Description of Artificial Sequence: Synthetic oligonucleotide
gcgugaugauaccuuuagg

SEQ ID NO: 1073368 - RNA, 19 nt, Artificial Sequence
  Description of Artificial Sequence: Synthetic oligonucleotide
gguguaccucaguagcaug

SEQ ID NO: 1073369 - RNA, 19 nt, Artificial Sequence
  Description of Artificial Sequence: Synthetic oligonucleotide
cagacuaaucagguggcca

SEQ ID NO: 1073370 - RNA, 19 nt, Artificial Sequence
  Description of Artificial Sequence: Synthetic oligonucleotide
gugcaagagagacuugacu

SEQ ID NO: 1073371 - RNA, 19 nt, Artificial Sequence
  Description of Artificial Sequence: Synthetic oligonucleotide
gccguaaacacacugcccu

SEQ ID NO: 1073372 - RNA, 19 nt, Artificial Sequence
  Description of Artificial Sequence: Synthetic oligonucleotide
caguccauuuagccaggac

SEQ ID NO: 1073373 - RNA, 19 nt, Artificial Sequence
  Description of Artificial Sequence: Synthetic oligonucleotide
cagugcguccugaacagaa

SEQ ID NO: 1073374 - RNA, 19 nt, Artificial Sequence
  Description of Artificial Sequence: Synthetic oligonucleotide
augacccugagaauaucau

SEQ ID NO: 1073375 - RNA, 19 nt, Artificial Sequence
  Description of Artificial Sequence: Synthetic oligonucleotide
caguugauuucucucccaa

SEQ ID NO: 1073376 - RNA, 19 nt, Artificial Sequence
  Description of Artificial Sequence: Synthetic oligonucleotide
caucuccaaagccaagcaa

SEQ ID NO: 1073377 - RNA, 19 nt, Artificial Sequence
  Description of Artificial Sequence: Synthetic oligonucleotide
gacgcuucgcccgccagga

SEQ ID NO: 1073378 - RNA, 19 nt, Artificial Sequence
  Description of Artificial Sequence: Synthetic oligonucleotide
uggaugccguaaacacacu

SEQ ID NO: 1073379 - RNA, 19 nt, Artificial Sequence
  Description of Artificial Sequence: Synthetic oligonucleotide
gaaguccgcagagccacuc

SEQ ID NO: 1073380 - RNA, 19 nt, Artificial Sequence
  Description of Artificial Sequence: Synthetic oligonucleotide
guacagaccaagcgcugaa

SEQ ID NO: 1073381 - RNA, 19 nt, Artificial Sequence
  Description of Artificial Sequence: Synthetic oligonucleotide
cgugaugauaccuuuaggu

SEQ ID NO: 1073382 - RNA, 19 nt, Artificial Sequence
  Description of Artificial Sequence: Synthetic oligonucleotide
cuguaguaaagugcauaca

SEQ ID NO: 1073383 - RNA, 19 nt, Artificial Sequence
  Description of Artificial Sequence: Synthetic oligonucleotide
gaagcuggagccucucuuu

SEQ ID NO: 1073384 - RNA, 19 nt, Artificial Sequence
  Description of Artificial Sequence: Synthetic oligonucleotide
ccauacuuucacagcgaag

SEQ ID NO: 1073385 - RNA, 19 nt, Artificial Sequence
  Description of Artificial Sequence: Synthetic oligonucleotide
guuugcuaccucagguguc

SEQ ID NO: 1073386 - RNA, 19 nt, Artificial Sequence
  Description of Artificial Sequence: Synthetic oligonucleotide
gaacuacagacaauguauu

SEQ ID NO: 1073387 - RNA, 19 nt, Artificial Sequence
  Description of Artificial Sequence: Synthetic oligonucleotide
cacuguaguccacacugaa

SEQ ID NO: 1073388 - RNA, 19 nt, Artificial Sequence
  Description of Artificial Sequence: Synthetic oligonucleotide
ggacgcuucgcccgccagg

SEQ ID NO: 1073389 - RNA, 19 nt, Artificial Sequence
  Description of Artificial Sequence: Synthetic oligonucleotide
ccaauuggccaaaucuuga

SEQ ID NO: 1073390 - RNA, 19 nt, Artificial Sequence
  Description of Artificial Sequence: Synthetic oligonucleotide
  modified_base (4)..(4): a, c, u, g, unknown or other
ccgnuugaggagagucucc

SEQ ID NO: 1073391 - RNA, 19 nt, Artificial Sequence
  Description of Artificial Sequence: Synthetic oligonucleotide
ccaauuagugaugaggucu

SEQ ID NO: 1073392 - RNA, 19 nt, Artificial Sequence
  Description of Artificial Sequence: Synthetic oligonucleotide
cagaccaagcgcugaacua

SEQ ID NO: 1073393 - RNA, 19 nt, Artificial Sequence
  Description of Artificial Sequence: Synthetic oligonucleotide
guaagucacugguguaccu

SEQ ID NO: 1073394 - RNA, 19 nt, Artificial Sequence
  Description of Artificial Sequence: Synthetic oligonucleotide
cauucccagcaggccacgg

SEQ ID NO: 1073395 - RNA, 19 nt, Artificial Sequence
  Description of Artificial Sequence: Synthetic oligonucleotide
caauuggccaaaucuugau

SEQ ID NO: 1073396 - RNA, 19 nt, Artificial Sequence
  Description of Artificial Sequence: Synthetic oligonucleotide
accaagcgcugaacuacag

SEQ ID NO: 1073397 - RNA, 19 nt, Artificial Sequence
  Description of Artificial Sequence: Synthetic oligonucleotide
ggucuggaugccguaaaca

SEQ ID NO: 1073398 - RNA, 19 nt, Artificial Sequence
  Description of Artificial Sequence: Synthetic oligonucleotide
cgguguaugucaguaaaac

SEQ ID NO: 1073399 - RNA, 19 nt, Artificial Sequence
  Description of Artificial Sequence: Synthetic oligonucleotide
cuauaacaucacagcaccu

SEQ ID NO: 1073400 - RNA, 19 nt, Artificial Sequence
  Description of Artificial Sequence: Synthetic oligonucleotide
aggcacuuaucaccuuauu

SEQ ID NO: 1073401 - RNA, 19 nt, Artificial Sequence
  Description of Artificial Sequence: Synthetic oligonucleotide
gguacagaccaagcgcuga

SEQ ID NO: 1073402 - RNA, 19 nt, Artificial Sequence
  Description of Artificial Sequence: Synthetic oligonucleotide
agcgaaguccgcagagcca

SEQ ID NO: 1073403 - RNA, 19 nt, Artificial Sequence
  Description of Artificial Sequence: Synthetic oligonucleotide
cucauauuuaucggcacuu

SEQ ID NO: 1073404 - RNA, 19 nt, Artificial Sequence
  Description of Artificial Sequence: Synthetic oligonucleotide
ccugaccccuggcaaacag

SEQ ID NO: 1073405 - RNA, 19 nt, Artificial Sequence
  Description of Artificial Sequence: Synthetic oligonucleotide
ccuuauuccacugcuuaga

SEQ ID NO: 1073406 - RNA, 19 nt, Artificial Sequence
  Description of Artificial Sequence: Synthetic oligonucleotide
cuuugcagacaagucgucu

SEQ ID NO: 1073407 - RNA, 19 nt, Artificial Sequence
  Description of Artificial Sequence: Synthetic oligonucleotide
acucuggcacuauguccaa

SEQ ID NO: 1073408 - RNA, 19 nt, Artificial Sequence
  Description of Artificial Sequence: Synthetic oligonucleotide
agugcguccugaacagaau

SEQ ID NO: 1073409 - RNA, 19 nt, Artificial Sequence
  Description of Artificial Sequence: Synthetic oligonucleotide
cggcuaaucacgcucucug

SEQ ID NO: 1073410 - RNA, 19 nt, Artificial Sequence
  Description of Artificial Sequence: Synthetic oligonucleotide
cguugcacccaaaacccuc

SEQ ID NO: 1073411 - RNA, 19 nt, Artificial Sequence
  Description of Artificial Sequence: Synthetic oligonucleotide
gcuucgcccgccaggaagc

SEQ ID NO: 1073412 - RNA, 19 nt, Artificial Sequence
  Description of Artificial Sequence: Synthetic oligonucleotide
  modified_base (5)..(5): a, c, u, g, unknown or other
cccgnuugaggagagucuc

SEQ ID NO: 1073413 - RNA, 19 nt, Artificial Sequence
  Description of Artificial Sequence: Synthetic oligonucleotide
ucucucccaauuggccaaa

SEQ ID NO: 1073414 - RNA, 19 nt, Artificial Sequence
  Description of Artificial Sequence: Synthetic oligonucleotide
ggugccugagcuggacugc

SEQ ID NO: 1073415 - RNA, 19 nt, Artificial Sequence
  Description of Artificial Sequence: Synthetic oligonucleotide
ccguaaacacacugcccug

SEQ ID NO: 1073416 - RNA, 19 nt, Artificial Sequence
  Description of Artificial Sequence: Synthetic oligonucleotide
ggacugccccaucagacua

SEQ ID NO: 1073417 - RNA, 19 nt, Artificial Sequence
  Description of Artificial Sequence: Synthetic oligonucleotide
gcggugguagcugucggug

SEQ ID NO: 1073418 - RNA, 19 nt, Artificial Sequence
  Description of Artificial Sequence: Synthetic oligonucleotide
ccaacguaacuaaguacaa

SEQ ID NO: 1073419 - RNA, 19 nt, Artificial Sequence
  Description of Artificial Sequence: Synthetic oligonucleotide
uucgcccgccaggaagcug

SEQ ID NO: 1073420 - RNA, 19 nt, Artificial Sequence
  Description of Artificial Sequence: Synthetic oligonucleotide
agaaacggacaaggucuuu

SEQ ID NO: 1073421 - RNA, 19 nt, Artificial Sequence
  Description of Artificial Sequence: Synthetic oligonucleotide
ccggaaaugcuguguccug

SEQ ID NO: 1073422 - RNA, 19 nt, Artificial Sequence
  Description of Artificial Sequence: Synthetic oligonucleotide
ccccggaaaugcugugucc

SEQ ID NO: 1073423 - RNA, 19 nt, Artificial Sequence
  Description of Artificial Sequence: Synthetic oligonucleotide
cccugagaauaucauaacu

SEQ ID NO: 1073424 - RNA, 19 nt, Artificial Sequence
  Description of Artificial Sequence: Synthetic oligonucleotide
cacugcgugaugauaccuu

SEQ ID NO: 1073425 - RNA, 19 nt, Artificial Sequence
  Description of Artificial Sequence: Synthetic oligonucleotide
ggcuaaucacgcucucugu

SEQ ID NO: 1073426 - RNA, 19 nt, Artificial Sequence
  Description of Artificial Sequence: Synthetic oligonucleotide
  modified_base (8)..(8): a, c, u, g, unknown or other
agucccgnuugaggagagu

SEQ ID NO: 1073427 - RNA, 19 nt, Artificial Sequence
  Description of Artificial Sequence: Synthetic oligonucleotide
cugccccaucagacuaauc

SEQ ID NO: 1073428 - RNA, 19 nt, Artificial Sequence
  Description of Artificial Sequence: Synthetic oligonucleotide
gcaugugaguaaagucuga

SEQ ID NO: 1073429 - RNA, 19 nt, Artificial Sequence
  Description of Artificial Sequence: Synthetic oligonucleotide
ccacgguguugucaaagga

SEQ ID NO: 1073430 - RNA, 19 nt, Artificial Sequence
  Description of Artificial Sequence: Synthetic oligonucleotide
gugggucuggaugccguaa

SEQ ID NO: 1073431 - RNA, 19 nt, Artificial Sequence
  Description of Artificial Sequence: Synthetic oligonucleotide
accucuguacaggcacuua

SEQ ID NO: 1073432 - RNA, 19 nt, Artificial Sequence
  Description of Artificial Sequence: Synthetic oligonucleotide
cagcggcuaaucacgcucu

SEQ ID NO: 1073433 - RNA, 19 nt, Artificial Sequence
  Description of Artificial Sequence: Synthetic oligonucleotide
cugaggaucgagccauuuu

SEQ ID NO: 1073434 - RNA, 19 nt, Artificial Sequence
  Description of Artificial Sequence: Synthetic oligonucleotide
gcccagugaguguguucag

SEQ ID NO: 1073435 - RNA, 19 nt, Artificial Sequence
  Description of Artificial Sequence: Synthetic oligonucleotide
acgcaaccacuuagcagau

SEQ ID NO: 1073436 - RNA, 19 nt, Artificial Sequence
  Description of Artificial Sequence: Synthetic oligonucleotide
  modified_base (3)..(3): a, c, u, g, unknown or other
cgnuugaggagagucucca

SEQ ID NO: 1073437 - RNA, 19 nt, Artificial Sequence
  Description of Artificial Sequence: Synthetic oligonucleotide
gugugggucuggaugccgu

SEQ ID NO: 1073438 - RNA, 19 nt, Artificial Sequence
  Description of Artificial Sequence: Synthetic oligonucleotide
guagcaugcugcgguguau

SEQ ID NO: 1073439 - RNA, 19 nt, Artificial Sequence
  Description of Artificial Sequence: Synthetic oligonucleotide
gcgguguaugucaguaaaa

SEQ ID NO: 1073440 - RNA, 19 nt, Artificial Sequence
  Description of Artificial Sequence: Synthetic oligonucleotide
caggacgcuucgcccgcca

SEQ ID NO: 1073441 - RNA, 19 nt, Artificial Sequence
  Description of Artificial Sequence: Synthetic oligonucleotide
cacagacguugcacccaaa

SEQ ID NO: 1073442 - RNA, 19 nt, Artificial Sequence
  Description of Artificial Sequence: Synthetic oligonucleotide
ccucagaaacggacaaggu

SEQ ID NO: 1073443 - RNA, 19 nt, Artificial Sequence
  Description of Artificial Sequence: Synthetic oligonucleotide
ggugagaacuuugguucau

SEQ ID NO: 1073444 - RNA, 19 nt, Artificial Sequence
  Description of Artificial Sequence: Synthetic oligonucleotide
acgcuucgcccgccaggaa

SEQ ID NO: 1073445 - RNA, 19 nt, Artificial Sequence
  Description of Artificial Sequence: Synthetic oligonucleotide
guaugcccagugagugugu

SEQ ID NO: 1073446 - RNA, 19 nt, Artificial Sequence
  Description of Artificial Sequence: Synthetic oligonucleotide
cccggaaaugcuguguccu

SEQ ID NO: 1073447 - RNA, 19 nt, Artificial Sequence
  Description of Artificial Sequence: Synthetic oligonucleotide
gcguccugaacagaaucau

SEQ ID NO: 1073448 - RNA, 19 nt, Artificial Sequence
  Description of Artificial Sequence: Synthetic oligonucleotide
cacugcccugugcuuacau

SEQ ID NO: 1073449 - RNA, 19 nt, Artificial Sequence
  Description of Artificial Sequence: Synthetic oligonucleotide
gcacugcgugaugauaccu

SEQ ID NO: 1073450 - RNA, 19 nt, Artificial Sequence
  Description of Artificial Sequence: Synthetic oligonucleotide
gccagcggcuaaucacgcu

SEQ ID NO: 1073451 - RNA, 19 nt, Artificial Sequence
  Description of Artificial Sequence: Synthetic oligonucleotide
ccauuuagccaggacgcuu

SEQ ID NO: 1073452 - RNA, 19 nt, Artificial Sequence
  Description of Artificial Sequence: Synthetic oligonucleotide
cuucgcccgccaggaagcu

SEQ ID NO: 1073453 - RNA, 19 nt, Artificial Sequence
  Description of Artificial Sequence: Synthetic oligonucleotide
ccgcagagccacucaccaa

SEQ ID NO: 1073454 - RNA, 19 nt, Artificial Sequence
  Description of Artificial Sequence: Synthetic oligonucleotide
cggugguagcugucggugu

SEQ ID NO: 1073455 - RNA, 19 nt, Artificial Sequence
  Description of Artificial Sequence: Synthetic oligonucleotide
cggcacuuaagaggaugua

SEQ ID NO: 1073456 - RNA, 19 nt, Artificial Sequence
  Description of Artificial Sequence: Synthetic oligonucleotide
cgaaguccgcagagccacu

SEQ ID NO: 1073457 - RNA, 19 nt, Artificial Sequence
  Description of Artificial Sequence: Synthetic oligonucleotide
cgccccagcccugaccccu

SEQ ID NO: 1073458 - RNA, 19 nt, Artificial Sequence
  Description of Artificial Sequence: Synthetic oligonucleotide
cgcaaccacuuagcagauu

SEQ ID NO: 1073459 - RNA, 19 nt, Artificial Sequence
  Description of Artificial Sequence: Synthetic oligonucleotide
aguauguguauucugaguc

SEQ ID NO: 1073460 - RNA, 19 nt, Artificial Sequence
  Description of Artificial Sequence: Synthetic oligonucleotide
uccaaaauuuccauguggg

SEQ ID NO: 1073461 - RNA, 19 nt, Artificial Sequence
  Description of Artificial Sequence: Synthetic oligonucleotide
ugaccaaauguccugaagg

SEQ ID NO: 1073462 - RNA, 19 nt, Artificial Sequence
  Description of Artificial Sequence: Synthetic oligonucleotide
uuguuuaucagccagcugu

SEQ ID NO: 1073463 - RNA, 19 nt, Artificial Sequence
  Description of Artificial Sequence: Synthetic oligonucleotide
uucagaugagucaaaaucc

SEQ ID NO: 1073464 - RNA, 19 nt, Artificial Sequence
  Description of Artificial Sequence: Synthetic oligonucleotide
uuugaaauguccaauucca

SEQ ID NO: 1073465 - RNA, 19 nt, Artificial Sequence
  Description of Artificial Sequence: Synthetic oligonucleotide
auuacuuucccuccauugc

SEQ ID NO: 1073466 - RNA, 19 nt, Artificial Sequence
  Description of Artificial Sequence: Synthetic oligonucleotide
  modified_base (16)..(16): a, c, u, g, unknown or other
guuagcuucauugugnucc

SEQ ID NO: 1073467 - RNA, 19 nt, Artificial Sequence
  Description of Artificial Sequence: Synthetic oligonucleotide
uuaauucucacgaugacau

SEQ ID NO: 1073468 - RNA, 19 nt, Artificial Sequence
  Description of Artificial Sequence: Synthetic oligonucleotide
auucuaugauguuaaacac

SEQ ID NO: 1073469 - RNA, 19 nt, Artificial Sequence
  Description of Artificial Sequence: Synthetic oligonucleotide
uuuguagucagcugaacag

SEQ ID NO: 1073470 - RNA, 19 nt, Artificial Sequence
  Description of Artificial Sequence: Synthetic oligonucleotide
ucuaugauguuaaacacaa

SEQ ID NO: 1073471 - RNA, 19 nt, Artificial Sequence
  Description of Artificial Sequence: Synthetic oligonucleotide
aauguggccaaccagccug

SEQ ID NO: 1073472 - RNA, 19 nt, Artificial Sequence
  Description of Artificial Sequence: Synthetic oligonucleotide
ucguuuaucaauuacuuuc

SEQ ID NO: 1073473 - RNA, 19 nt, Artificial Sequence
  Description of Artificial Sequence: Synthetic oligonucleotide
ucuacaacgagcucuaaac

SEQ ID NO: 1073474 - RNA, 19 nt, Artificial Sequence
  Description of Artificial Sequence: Synthetic oligonucleotide
aagaauguguugcucgagg

SEQ ID NO: 1073475 - RNA, 19 nt, Artificial Sequence
  Description of Artificial Sequence: Synthetic oligonucleotide
uuaaaguguuuugugaggg

SEQ ID NO: 1073476 - RNA, 19 nt, Artificial Sequence
  Description of Artificial Sequence: Synthetic oligonucleotide
acuuaaaguguuuugugag

SEQ ID NO: 1073477 - RNA, 19 nt, Artificial Sequence
  Description of Artificial Sequence: Synthetic oligonucleotide
gagcucuaaaccuacacag

SEQ ID NO: 1073478 - RNA, 19 nt, Artificial Sequence
  Description of Artificial Sequence: Synthetic oligonucleotide
cuucagaugagucaaaauc

SEQ ID NO: 1073479 - RNA, 19 nt, Artificial Sequence
  Description of Artificial Sequence: Synthetic oligonucleotide
uuguuuacugcauagcucu

SEQ ID NO: 1073480 - RNA, 19 nt, Artificial Sequence
  Description of Artificial Sequence: Synthetic oligonucleotide
guuguaaucagcucgcccc

SEQ ID NO: 1073481 - RNA, 19 nt, Artificial Sequence
  Description of Artificial Sequence: Synthetic oligonucleotide
agugggaauacuuaguaga

SEQ ID NO: 1073482 - RNA, 19 nt, Artificial Sequence
  Description of Artificial Sequence: Synthetic oligonucleotide
aauccacggcucuacaacg

SEQ ID NO: 1073483 - RNA, 19 nt, Artificial Sequence
  Description of Artificial Sequence: Synthetic oligonucleotide
agcgguuguaaucagcucg

SEQ ID NO: 1073484 - RNA, 19 nt, Artificial Sequence
  Description of Artificial Sequence: Synthetic oligonucleotide
uccgucuuaauucucacga

SEQ ID NO: 1073485 - RNA, 19 nt, Artificial Sequence
  Description of Artificial Sequence: Synthetic oligonucleotide
guuuucauggcuucuagug

SEQ ID NO: 1073486 - RNA, 19 nt, Artificial Sequence
  Description of Artificial Sequence: Synthetic oligonucleotide
uguguuuggcugaagaaac

SEQ ID NO: 1073487 - RNA, 19 nt, Artificial Sequence
  Description of Artificial Sequence: Synthetic oligonucleotide
aaaccuacacagucguccg

SEQ ID NO: 1073488 - RNA, 19 nt, Artificial Sequence
  Description of Artificial Sequence: Synthetic oligonucleotide
uaaaccuacacagucgucc

SEQ ID NO: 1073489 - RNA, 19 nt, Artificial Sequence
  Description of Artificial Sequence: Synthetic oligonucleotide
aguuuaugaccaaaugucc

SEQ ID NO: 1073490 - RNA, 19 nt, Artificial Sequence
  Description of Artificial Sequence: Synthetic oligonucleotide
acaugaguauggucgaggc

SEQ ID NO: 1073491 - RNA, 19 nt, Artificial Sequence
  Description of Artificial Sequence: Synthetic oligonucleotide
aaucaaaucucuccucuga

SEQ ID NO: 1073492 - RNA, 19 nt, Artificial Sequence
  Description of Artificial Sequence: Synthetic oligonucleotide
ucagaugagucaaaauccc

SEQ ID NO: 1073493 - RNA, 19 nt, Artificial Sequence
  Description of Artificial Sequence: Synthetic oligonucleotide
uuaguguccgucuuaauuc

SEQ ID NO: 1073494 - RNA, 19 nt, Artificial Sequence
  Description of Artificial Sequence: Synthetic oligonucleotide
ucuaaaccuacacagucgu

SEQ ID NO: 1073495 - RNA, 19 nt, Artificial Sequence
  Description of Artificial Sequence: Synthetic oligonucleotide
ugaaggaaucuccaggcug

SEQ ID NO: 1073496 - RNA, 19 nt, Artificial Sequence
  Description of Artificial Sequence: Synthetic oligonucleotide
gaagguaucgucucucuug

SEQ ID NO: 1073497 - RNA, 19 nt, Artificial Sequence
  Description of Artificial Sequence: Synthetic oligonucleotide
uuugaagcagguuuucuac

SEQ ID NO: 1073498 - RNA, 19 nt, Artificial Sequence
  Description of Artificial Sequence: Synthetic oligonucleotide
uucuaugauguuaaacaca

SEQ ID NO: 1073499 - RNA, 19 nt, Artificial Sequence
  Description of Artificial Sequence: Synthetic oligonucleotide
uguauucugagucacccaa

SEQ ID NO: 1073500 - RNA, 19 nt, Artificial Sequence
  Description of Artificial Sequence: Synthetic oligonucleotide
agcuuuugaaauuggaacu

SEQ ID NO: 1073501 - RNA, 19 nt, Artificial Sequence
  Description of Artificial Sequence: Synthetic oligonucleotide
uuagauggacauucuauga

SEQ ID NO: 1073502 - RNA, 19 nt, Artificial Sequence
  Description of Artificial Sequence: Synthetic oligonucleotide
uuuugaaauuggaacuuga

SEQ ID NO: 1073503 - RNA, 19 nt, Artificial Sequence
  Description of Artificial Sequence: Synthetic oligonucleotide
aacggggcaaccaaugugg

SEQ ID NO: 1073504 - RNA, 19 nt, Artificial Sequence
  Description of Artificial Sequence: Synthetic oligonucleotide
uuagccauauucuuggcau

SEQ ID NO: 1073505 - RNA, 19 nt, Artificial Sequence
  Description of Artificial Sequence: Synthetic oligonucleotide
gaaguauguguauucugag

SEQ ID NO: 1073506 - RNA, 19 nt, Artificial Sequence
  Description of Artificial Sequence: Synthetic oligonucleotide
cuucuaguguguuaacucc

SEQ ID NO: 1073507 - RNA, 19 nt, Artificial Sequence
  Description of Artificial Sequence: Synthetic oligonucleotide
agcaacuccggcuucacag

SEQ ID NO: 1073508 - RNA, 19 nt, Artificial Sequence
  Description of Artificial Sequence: Synthetic oligonucleotide
ucagaauccuuucucuccc

SEQ ID NO: 1073509 - RNA, 19 nt, Artificial Sequence
  Description of Artificial Sequence: Synthetic oligonucleotide
uggaccuccaaauauucug

SEQ ID NO: 1073510 - RNA, 19 nt, Artificial Sequence
  Description of Artificial Sequence: Synthetic oligonucleotide
uacaacgagcucuaaaccu

SEQ ID NO: 1073511 - RNA, 19 nt, Artificial Sequence
  Description of Artificial Sequence: Synthetic oligonucleotide
ggacccaccauuaugaugg

SEQ ID NO: 1073512 - RNA, 19 nt, Artificial Sequence
  Description of Artificial Sequence: Synthetic oligonucleotide
caaaauuuccaugugggug

SEQ ID NO: 1073513 - RNA, 19 nt, Artificial Sequence
  Description of Artificial Sequence: Synthetic oligonucleotide
aaauauucuggcggcaaag

SEQ ID NO: 1073514 - RNA, 19 nt, Artificial Sequence
  Description of Artificial Sequence: Synthetic oligonucleotide
aucaaaucucuccucugac

SEQ ID NO: 1073515 - RNA, 19 nt, Artificial Sequence
  Description of Artificial Sequence: Synthetic oligonucleotide
acauucuaugauguuaaac

SEQ ID NO: 1073516 - RNA, 19 nt, Artificial Sequence
  Description of Artificial Sequence: Synthetic oligonucleotide
uuugaaauuggaacuugaa

SEQ ID NO: 1073517 - RNA, 19 nt, Artificial Sequence
  Description of Artificial Sequence: Synthetic oligonucleotide
aauguguugcucgaggaga

SEQ ID NO: 1073518 - RNA, 19 nt, Artificial Sequence
  Description of Artificial Sequence: Synthetic oligonucleotide
uccacacacguauauguag

SEQ ID NO: 1073519 - RNA, 19 nt, Artificial Sequence
  Description of Artificial Sequence: Synthetic oligonucleotide
augaguauggucgaggcug

SEQ ID NO: 1073520 - RNA, 19 nt, Artificial Sequence
  Description of Artificial Sequence: Synthetic oligonucleotide
cucuaaaccuacacagucg

SEQ ID NO: 1073521 - RNA, 19 nt, Artificial Sequence
  Description of Artificial Sequence: Synthetic oligonucleotide
guuaacuccagccucucug

SEQ ID NO: 1073522 - RNA, 19 nt, Artificial Sequence
  Description of Artificial Sequence: Synthetic oligonucleotide
aaacggggcaaccaaugug

SEQ ID NO: 1073523 - RNA, 19 nt, Artificial Sequence
  Description of Artificial Sequence: Synthetic oligonucleotide
guaagcucgagcuagcaca

SEQ ID NO: 1073524 - RNA, 19 nt, Artificial Sequence
  Description of Artificial Sequence: Synthetic oligonucleotide
cuccaaaauuuccaugugg

SEQ ID NO: 1073525 - RNA, 19 nt, Artificial Sequence
  Description of Artificial Sequence: Synthetic oligonucleotide
ugugguguuagauggacau

SEQ ID NO: 1073526 - RNA, 19 nt, Artificial Sequence
  Description of Artificial Sequence: Synthetic oligonucleotide
uggaguaagcucgagcuag

SEQ ID NO: 1073527 - RNA, 19 nt, Artificial Sequence
  Description of Artificial Sequence: Synthetic oligonucleotide
aguaagcucgagcuagcac

SEQ ID NO: 1073528 - RNA, 19 nt, Artificial Sequence
  Description of Artificial Sequence: Synthetic oligonucleotide
uguccugaagguaucgucu

SEQ ID NO: 1073529 - RNA, 19 nt, Artificial Sequence
  Description of Artificial Sequence: Synthetic oligonucleotide
aagguaucgucucucuugu

SEQ ID NO: 1073530 - RNA, 19 nt, Artificial Sequence
  Description of Artificial Sequence: Synthetic oligonucleotide
gauggaguaagcucgagcu

SEQ ID NO: 1073531 - RNA, 19 nt, Artificial Sequence
  Description of Artificial Sequence: Synthetic oligonucleotide
aguguguuaacuccagccu

SEQ ID NO: 1073532 - RNA, 19 nt, Artificial Sequence
  Description of Artificial Sequence: Synthetic oligonucleotide
guauauguagccguucucc

SEQ ID NO: 1073533 - RNA, 19 nt, Artificial Sequence
  Description of Artificial Sequence: Synthetic oligonucleotide
ugucacucauuccaucuug

SEQ ID NO: 1073534 - RNA, 19 nt, Artificial Sequence
  Description of Artificial Sequence: Synthetic oligonucleotide
uaaucgcagaaguucaacu

SEQ ID NO: 1073535 - RNA, 19 nt, Artificial Sequence
  Description of Artificial Sequence: Synthetic oligonucleotide
acgagcucuaaaccuacac

SEQ ID NO: 1073536 - RNA, 19 nt, Artificial Sequence
  Description of Artificial Sequence: Synthetic oligonucleotide
aaccaauguggccaaccag

SEQ ID NO: 1073537 - RNA, 19 nt, Artificial Sequence
  Description of Artificial Sequence: Synthetic oligonucleotide
guugcucgaggagagaugg

SEQ ID NO: 1073538 - RNA, 19 nt, Artificial Sequence
  Description of Artificial Sequence: Synthetic oligonucleotide
gaauguguugcucgaggag

SEQ ID NO: 1073539 - RNA, 19 nt, Artificial Sequence
  Description of Artificial Sequence: Synthetic oligonucleotide
aucgcagaaguucaacuug

SEQ ID NO: 1073540 - RNA, 19 nt, Artificial Sequence
  Description of Artificial Sequence: Synthetic oligonucleotide
aagucacagauguuuggcu

SEQ ID NO: 1073541 - RNA, 19 nt, Artificial Sequence
  Description of Artificial Sequence: Synthetic oligonucleotide
gaggaaacgccugagcucc

SEQ ID NO: 1073542 - RNA, 19 nt, Artificial Sequence
  Description of Artificial Sequence: Synthetic oligonucleotide
ucuuaauucucacgaugac

SEQ ID NO: 1073543 - RNA, 19 nt, Artificial Sequence
  Description of Artificial Sequence: Synthetic oligonucleotide
uccuguuagcuucauugug

SEQ ID NO: 1073544 - RNA, 19 nt, Artificial Sequence
  Description of Artificial Sequence: Synthetic oligonucleotide
uagauggacauucuaugau

SEQ ID NO: 1073545 - RNA, 19 nt, Artificial Sequence
  Description of Artificial Sequence: Synthetic oligonucleotide
aaccuacacagucguccgc

SEQ ID NO: 1073546 - RNA, 19 nt, Artificial Sequence
  Description of Artificial Sequence: Synthetic oligonucleotide
ucugguaaguggaaagaau

SEQ ID NO: 1073547 - RNA, 19 nt, Artificial Sequence
  Description of Artificial Sequence: Synthetic oligonucleotide
ucucuuguuucaacguggc

SEQ ID NO: 1073548 - RNA, 19 nt, Artificial Sequence
  Description of Artificial Sequence: Synthetic oligonucleotide
aagcagguuuucuaccuca

SEQ ID NO: 1073549 - RNA, 19 nt, Artificial Sequence
  Description of Artificial Sequence: Synthetic oligonucleotide
aacugagcggacgagcgag

SEQ ID NO: 1073550 - RNA, 19 nt, Artificial Sequence
  Description of Artificial Sequence: Synthetic oligonucleotide
uuuggacagaucacauuga

SEQ ID NO: 1073551 - RNA, 19 nt, Artificial Sequence
  Description of Artificial Sequence: Synthetic oligonucleotide
accuccaaauauucuggcg

SEQ ID NO: 1073552 - RNA, 19 nt, Artificial Sequence
  Description of Artificial Sequence: Synthetic oligonucleotide
cuacaacgagcucuaaacc

SEQ ID NO: 1073553 - RNA, 19 nt, Artificial Sequence
  Description of Artificial Sequence: Synthetic oligonucleotide
ugcuuaugaugucuacaag

SEQ ID NO: 1073554 - RNA, 19 nt, Artificial Sequence
  Description of Artificial Sequence: Synthetic oligonucleotide
uaaaguguuuugugagggc

SEQ ID NO: 1073555 - RNA, 19 nt, Artificial Sequence
  Description of Artificial Sequence: Synthetic oligonucleotide
gauguguagcaacuccggc

SEQ ID NO: 1073556 - RNA, 19 nt, Artificial Sequence
  Description of Artificial Sequence: Synthetic oligonucleotide
gaaagaauguguugcucga

SEQ ID NO: 1073557 - RNA, 19 nt, Artificial Sequence
  Description of Artificial Sequence: Synthetic oligonucleotide
ugggaauacuuaguagagg

SEQ ID NO: 1073558 - RNA, 19 nt, Artificial Sequence
  Description of Artificial Sequence: Synthetic oligonucleotide
uacuuucccuccauugcag

SEQ ID NO: 1073559 - RNA, 19 nt, Artificial Sequence
  Description of Artificial Sequence: Synthetic oligonucleotide
aaagaauguguugcucgag

SEQ ID NO: 1073560 - RNA, 19 nt, Artificial Sequence
  Description of Artificial Sequence: Synthetic oligonucleotide
cagguugucuugcacauac

SEQ ID NO: 1073561 - RNA, 19 nt, Artificial Sequence
  Description of Artificial Sequence: Synthetic oligonucleotide
ugguaugcuuguuuaucag

SEQ ID NO: 1073562 - RNA, 19 nt, Artificial Sequence
  Description of Artificial Sequence: Synthetic oligonucleotide
ugaagcgguuguaaucagc

SEQ ID NO: 1073563 - RNA, 19 nt, Artificial Sequence
  Description of Artificial Sequence: Synthetic oligonucleotide
ucgagcuagcacaugagua

SEQ ID NO: 1073564 - RNA, 19 nt, Artificial Sequence
  Description of Artificial Sequence: Synthetic oligonucleotide
uauguguauucugagucac

SEQ ID NO: 1073565 - RNA, 19 nt, Artificial Sequence
  Description of Artificial Sequence: Synthetic oligonucleotide
aucuuguccucugagcgac

SEQ ID NO: 1073566 - RNA, 19 nt, Artificial Sequence
  Description of Artificial Sequence: Synthetic oligonucleotide
cugcauagcucuugcagcc

SEQ ID NO: 1073567 - RNA, 19 nt, Artificial Sequence
  Description of Artificial Sequence: Synthetic oligonucleotide
cuggauguguagcaacucc

SEQ ID NO: 1073568 - RNA, 19 nt, Artificial Sequence
  Description of Artificial Sequence: Synthetic oligonucleotide
  modified_base (15)..(15): a, c, u, g, unknown or other
uuagcuucauugugnuccc

SEQ ID NO: 1073569 - RNA, 19 nt, Artificial Sequence
  Description of Artificial Sequence: Synthetic oligonucleotide
ucugcuuaugaugucuaca

SEQ ID NO: 1073570 - RNA, 19 nt, Artificial Sequence
  Description of Artificial Sequence: Synthetic oligonucleotide
ucccaccauccucuaaucg

SEQ ID NO: 1073571 - RNA, 19 nt, Artificial Sequence
  Description of Artificial Sequence: Synthetic oligonucleotide
ugcuuguuuaucagccagc

SEQ ID NO: 1073572 - RNA, 19 nt, Artificial Sequence
  Description of Artificial Sequence: Synthetic oligonucleotide
uuguagucagcugaacagc

SEQ ID NO: 1073573 - RNA, 19 nt, Artificial Sequence
  Description of Artificial Sequence: Synthetic oligonucleotide
aagcgguuguaaucagcuc

SEQ ID NO: 1073574 - RNA, 19 nt, Artificial Sequence
  Description of Artificial Sequence: Synthetic oligonucleotide
ugaagaaacggggcaacca

SEQ ID NO: 1073575 - RNA, 19 nt, Artificial Sequence
  Description of Artificial Sequence: Synthetic oligonucleotide
caauccacggcucuacaac

SEQ ID NO: 1073576 - RNA, 19 nt, Artificial Sequence
  Description of Artificial Sequence: Synthetic oligonucleotide
ucucggaugaagcgguugu

SEQ ID NO: 1073577 - RNA, 19 nt, Artificial Sequence
  Description of Artificial Sequence: Synthetic oligonucleotide
uacgccaguuccuggaccc

SEQ ID NO: 1073578 - RNA, 19 nt, Artificial Sequence
  Description of Artificial Sequence: Synthetic oligonucleotide
uuaugaccaaauguccuga

SEQ ID NO: 1073579 - RNA, 19 nt, Artificial Sequence
  Description of Artificial Sequence: Synthetic oligonucleotide
ucugauggcggugggagug

SEQ ID NO: 1073580 - RNA, 19 nt, Artificial Sequence
  Description of Artificial Sequence: Synthetic oligonucleotide
agcgacuuaaaguguuuug

SEQ ID NO: 1073581 - RNA, 19 nt, Artificial Sequence
  Description of Artificial Sequence: Synthetic oligonucleotide
acuuaguagagguguguga

SEQ ID NO: 1073582 - RNA, 19 nt, Artificial Sequence
  Description of Artificial Sequence: Synthetic oligonucleotide
auauguagccguucuccug

SEQ ID NO: 1073583 - RNA, 19 nt, Artificial Sequence
  Description of Artificial Sequence: Synthetic oligonucleotide
ucugagcgacuuaaagugu

SEQ ID NO: 1073584 - RNA, 19 nt, Artificial Sequence
  Description of Artificial Sequence: Synthetic oligonucleotide
uguuucaacguggccagug

SEQ ID NO: 1073585 - RNA, 19 nt, Artificial Sequence
  Description of Artificial Sequence: Synthetic oligonucleotide
acguauauguagccguucu

SEQ ID NO: 1073586 - RNA, 19 nt, Artificial Sequence
  Description of Artificial Sequence: Synthetic oligonucleotide
uuaguagaggugugugaga

SEQ ID NO: 1073587 - RNA, 19 nt, Artificial Sequence
  Description of Artificial Sequence: Synthetic oligonucleotide
uggacauucuaugauguua

SEQ ID NO: 1073588 - RNA, 19 nt, Artificial Sequence
  Description of Artificial Sequence: Synthetic oligonucleotide
acauggcuccaaaauuucc

SEQ ID NO: 1073589 - RNA, 19 nt, Artificial Sequence
  Description of Artificial Sequence: Synthetic oligonucleotide
uugaaggaaucuccaggcu

SEQ ID NO: 1073590 - RNA, 19 nt, Artificial Sequence
  Description of Artificial Sequence: Synthetic oligonucleotide
gaguccagcaauccacggc

SEQ ID NO: 1073591 - RNA, 19 nt, Artificial Sequence
  Description of Artificial Sequence: Synthetic oligonucleotide
cacacacguauauguagcc

SEQ ID NO: 1073592 - RNA, 19 nt, Artificial Sequence
  Description of Artificial Sequence: Synthetic oligonucleotide
agcucgagcuagcacauga

SEQ ID NO: 1073593 - RNA, 19 nt, Artificial Sequence
  Description of Artificial Sequence: Synthetic oligonucleotide
uguugcucgaggagagaug

SEQ ID NO: 1073594 - RNA, 19 nt, Artificial Sequence
  Description of Artificial Sequence: Synthetic oligonucleotide
uggauaucuuaggagccag

SEQ ID NO: 1073595 - RNA, 19 nt, Artificial Sequence
  Description of Artificial Sequence: Synthetic oligonucleotide
gugggaauacuuaguagag

SEQ ID NO: 1073596 - RNA, 19 nt, Artificial Sequence
  Description of Artificial Sequence: Synthetic oligonucleotide
gacaugguaugcuuguuua

SEQ ID NO: 1073597 - RNA, 19 nt, Artificial Sequence
  Description of Artificial Sequence: Synthetic oligonucleotide
gguaugcuuguuuaucagc

SEQ ID NO: 1073598 - RNA, 19 nt, Artificial Sequence
  Description of Artificial Sequence: Synthetic oligonucleotide
gucuuaauucucacgauga

SEQ ID NO: 1073599 - RNA, 19 nt, Artificial Sequence
  Description of Artificial Sequence: Synthetic oligonucleotide
ucuaaucgcagaaguucaa

SEQ ID NO: 1073600 - RNA, 19 nt, Artificial Sequence
  Description of Artificial Sequence: Synthetic oligonucleotide
uguuuaucagccagcugua

SEQ ID NO: 1073601 - RNA, 19 nt, Artificial Sequence
  Description of Artificial Sequence: Synthetic oligonucleotide
uaguguccgucuuaauucu

SEQ ID NO: 1073602 - RNA, 19 nt, Artificial Sequence
  Description of Artificial Sequence: Synthetic oligonucleotide
uccgcugggacaucucuug

SEQ ID NO: 1073603 - RNA, 19 nt, Artificial Sequence
  Description of Artificial Sequence: Synthetic oligonucleotide
uccacggcucuacaacgag

SEQ ID NO: 1073604 - RNA, 19 nt, Artificial Sequence
  Description of Artificial Sequence: Synthetic oligonucleotide
acacacguauauguagccg

SEQ ID NO: 1073605 - RNA, 19 nt, Artificial Sequence
  Description of Artificial Sequence: Synthetic oligonucleotide
aacaggacgggaaggcgag

SEQ ID NO: 1073606 - RNA, 19 nt, Artificial Sequence
  Description of Artificial Sequence: Synthetic oligonucleotide
cucuaaucgcagaaguuca

SEQ ID NO: 1073607 - RNA, 19 nt, Artificial Sequence
  Description of Artificial Sequence: Synthetic oligonucleotide
uggaggacaacaggacggg

SEQ ID NO: 1073608 - RNA, 19 nt, Artificial Sequence
  Description of Artificial Sequence: Synthetic oligonucleotide
cauugcagaaguaugugua

SEQ ID NO: 1073609 - RNA, 19 nt, Artificial Sequence
  Description of Artificial Sequence: Synthetic oligonucleotide
uggacccaccauuaugaug

SEQ ID NO: 1073610 - RNA, 19 nt, Artificial Sequence
  Description of Artificial Sequence: Synthetic oligonucleotide
guauguguauucugaguca

SEQ ID NO: 1073611 - RNA, 19 nt, Artificial Sequence
  Description of Artificial Sequence: Synthetic oligonucleotide
aaauagucucuguccuuau

SEQ ID NO: 1073612 - RNA, 19 nt, Artificial Sequence
  Description of Artificial Sequence: Synthetic oligonucleotide
gacgagcgaggacucaaag

SEQ ID NO: 1073613 - RNA, 19 nt, Artificial Sequence
  Description of Artificial Sequence: Synthetic oligonucleotide
cacaugaguauggucgagg

SEQ ID NO: 1073614 - RNA, 19 nt, Artificial Sequence
  Description of Artificial Sequence: Synthetic oligonucleotide
uaguagaggugugugagau

SEQ ID NO: 1073615 - RNA, 19 nt, Artificial Sequence
  Description of Artificial Sequence: Synthetic oligonucleotide
uuauggcaucauuuguagu

SEQ ID NO: 1073616 - RNA, 19 nt, Artificial Sequence
  Description of Artificial Sequence: Synthetic oligonucleotide
agucacagauguuuggcuu

SEQ ID NO: 1073617 - RNA, 19 nt, Artificial Sequence
  Description of Artificial Sequence: Synthetic oligonucleotide
caugguaugcuuguuuauc

SEQ ID NO: 1073618 - RNA, 19 nt, Artificial Sequence
  Description of Artificial Sequence: Synthetic oligonucleotide
gggacaucucuugagaaag

SEQ ID NO: 1073619 - RNA, 19 nt, Artificial Sequence
  Description of Artificial Sequence: Synthetic oligonucleotide
agcacaugaguauggucga

SEQ ID NO: 1073620 - RNA, 19 nt, Artificial Sequence
  Description of Artificial Sequence: Synthetic oligonucleotide
uaagcucgagcuagcacau

SEQ ID NO: 1073621 - RNA, 19 nt, Artificial Sequence
  Description of Artificial Sequence: Synthetic oligonucleotide
guccgucuuaauucucacg

SEQ ID NO: 1073622 - RNA, 19 nt, Artificial Sequence
  Description of Artificial Sequence: Synthetic oligonucleotide
cuuuagccauauucuuggc

SEQ ID NO: 1073623 - RNA, 19 nt, Artificial Sequence
  Description of Artificial Sequence: Synthetic oligonucleotide
cguuuaucaauuacuuucc

SEQ ID NO: 1073624 - RNA, 19 nt, Artificial Sequence
  Description of Artificial Sequence: Synthetic oligonucleotide
cuaaucgcagaaguucaac

SEQ ID NO: 1073625 - RNA, 19 nt, Artificial Sequence
  Description of Artificial Sequence: Synthetic oligonucleotide
auggcuucuaguguguuaa

SEQ ID NO: 1073626 - RNA, 19 nt, Artificial Sequence
  Description of Artificial Sequence: Synthetic oligonucleotide
agaaacggggcaaccaaug

SEQ ID NO: 1073627 - RNA, 19 nt, Artificial Sequence
  Description of Artificial Sequence: Synthetic oligonucleotide
cuagcacaugaguaugguc

SEQ ID NO: 1073628 - RNA, 19 nt, Artificial Sequence
  Description of Artificial Sequence: Synthetic oligonucleotide
acaagggcgucguucacau

SEQ ID NO: 1073629 - RNA, 19 nt, Artificial Sequence
  Description of Artificial Sequence: Synthetic oligonucleotide
uggcuccaaaauuuccaug

SEQ ID NO: 1073630 - RNA, 19 nt, Artificial Sequence
  Description of Artificial Sequence: Synthetic oligonucleotide
cacuguuuggacagaucac

SEQ ID NO: 1073631 - RNA, 19 nt, Artificial Sequence
  Description of Artificial Sequence: Synthetic oligonucleotide
acgagcgaggacucaaagu

SEQ ID NO: 1073632 - RNA, 19 nt, Artificial Sequence
  Description of Artificial Sequence: Synthetic oligonucleotide
agucguuuaucaauuacuu

SEQ ID NO: 1073633 - RNA, 19 nt, Artificial Sequence
  Description of Artificial Sequence: Synthetic oligonucleotide
gcucuaaaccuacacaguc

SEQ ID NO: 1073634 - RNA, 19 nt, Artificial Sequence
  Description of Artificial Sequence: Synthetic oligonucleotide
gcuucuaguguguuaacuc

SEQ ID NO: 1073635 - RNA, 19 nt, Artificial Sequence
  Description of Artificial Sequence: Synthetic oligonucleotide
gaccaaauguccugaaggu

SEQ ID NO: 1073636 - RNA, 19 nt, Artificial Sequence
  Description of Artificial Sequence: Synthetic oligonucleotide
uguuaacuccagccucucu

SEQ ID NO: 1073637 - RNA, 19 nt, Artificial Sequence
  Description of Artificial Sequence: Synthetic oligonucleotide
guaaguggaaagaaugugu

SEQ ID NO: 1073638 - RNA, 19 nt, Artificial Sequence
  Description of Artificial Sequence: Synthetic oligonucleotide
uguccgucuuaauucucac

SEQ ID NO: 1073639 - RNA, 19 nt, Artificial Sequence
  Description of Artificial Sequence: Synthetic oligonucleotide
gggagugugucacucauuc

SEQ ID NO: 1073640 - RNA, 19 nt, Artificial Sequence
  Description of Artificial Sequence: Synthetic oligonucleotide
gguuguaaucagcucgccc

SEQ ID NO: 1073641 - RNA, 19 nt, Artificial Sequence
  Description of Artificial Sequence: Synthetic oligonucleotide
caacgagcucuaaaccuac

SEQ ID NO: 1073642 - RNA, 19 nt, Artificial Sequence
  Description of Artificial Sequence: Synthetic oligonucleotide
aguauggucgaggcuggag

SEQ ID NO: 1073643 - RNA, 19 nt, Artificial Sequence
  Description of Artificial Sequence: Synthetic oligonucleotide
uaaucagcucgccccuugu

SEQ ID NO: 1073644 - RNA, 19 nt, Artificial Sequence
  Description of Artificial Sequence: Synthetic oligonucleotide
guaaucagcucgccccuug

SEQ ID NO: 1073645 - RNA, 19 nt, Artificial Sequence
  Description of Artificial Sequence: Synthetic oligonucleotide
augaagcgguuguaaucag

SEQ ID NO: 1073646 - RNA, 19 nt, Artificial Sequence
  Description of Artificial Sequence: Synthetic oligonucleotide
uccuuaugucugcagccaa

SEQ ID NO: 1073647 - RNA, 19 nt, Artificial Sequence
  Description of Artificial Sequence: Synthetic oligonucleotide
ggagucguuuaucaauuac

SEQ ID NO: 1073648 - RNA, 19 nt, Artificial Sequence
  Description of Artificial Sequence: Synthetic oligonucleotide
acuccggcuucacaggagu

SEQ ID NO: 1073649 - RNA, 19 nt, Artificial Sequence
  Description of Artificial Sequence: Synthetic oligonucleotide
uauggucgaggcuggaguu

SEQ ID NO: 1073650 - RNA, 19 nt, Artificial Sequence
  Description of Artificial Sequence: Synthetic oligonucleotide
gagcuagcacaugaguaug

SEQ ID NO: 1073651 - RNA, 19 nt, Artificial Sequence
  Description of Artificial Sequence: Synthetic oligonucleotide
ugagucacccaaacccaau

SEQ ID NO: 1073652 - RNA, 19 nt, Artificial Sequence
  Description of Artificial Sequence: Synthetic oligonucleotide
auacuuaguagaggugugu

SEQ ID NO: 1073653 - RNA, 19 nt, Artificial Sequence
  Description of Artificial Sequence: Synthetic oligonucleotide
ucagcucgccccuuguuua

SEQ ID NO: 1073654 - RNA, 19 nt, Artificial Sequence
  Description of Artificial Sequence: Synthetic oligonucleotide
gaugagucaaaaucccaau

SEQ ID NO: 1073655 - RNA, 19 nt, Artificial Sequence
  Description of Artificial Sequence: Synthetic oligonucleotide
ugaagguaucgucucucuu

SEQ ID NO: 1073656 - RNA, 19 nt, Artificial Sequence
  Description of Artificial Sequence: Synthetic oligonucleotide
gagucguuuaucaauuacu

SEQ ID NO: 1073657 - RNA, 19 nt, Artificial Sequence
  Description of Artificial Sequence: Synthetic oligonucleotide
cccaccauccucuaaucgc

SEQ ID NO: 1073658 - RNA, 19 nt, Artificial Sequence
  Description of Artificial Sequence: Synthetic oligonucleotide
cuuguuuaucagccagcug

SEQ ID NO: 1073659 - RNA, 19 nt, Artificial Sequence
  Description of Artificial Sequence: Synthetic oligonucleotide
auggcggugggaguguguc

SEQ ID NO: 1073660 - RNA, 19 nt, Artificial Sequence
  Description of Artificial Sequence: Synthetic oligonucleotide
acauacuuugcuggggccu

SEQ ID NO: 1073661 - RNA, 19 nt, Artificial Sequence
  Description of Artificial Sequence: Synthetic oligonucleotide
ggauggaguaagcucgagc

SEQ ID NO: 1073662 - RNA, 19 nt, Artificial Sequence
  Description of Artificial Sequence: Synthetic oligonucleotide
cuccucugacuccuguuag

SEQ ID NO: 1073663 - RNA, 19 nt, Artificial Sequence
  Description of Artificial Sequence: Synthetic oligonucleotide
ucguagaagugcugggcuc

SEQ ID NO: 1073664 - RNA, 19 nt, Artificial Sequence
  Description of Artificial Sequence: Synthetic oligonucleotide
gcgucguucacaucuuuag

SEQ ID NO: 1073665 - RNA, 19 nt, Artificial Sequence
  Description of Artificial Sequence: Synthetic oligonucleotide
uccaaauauucuggcggca

SEQ ID NO: 1073666 - RNA, 19 nt, Artificial Sequence
  Description of Artificial Sequence: Synthetic oligonucleotide
agaucacauugaaggaauc

SEQ ID NO: 1073667 - RNA, 19 nt, Artificial Sequence
  Description of Artificial Sequence: Synthetic oligonucleotide
ugaagcuugucuggaugga

SEQ ID NO: 1073668 - RNA, 19 nt, Artificial Sequence
  Description of Artificial Sequence: Synthetic oligonucleotide
ggauguguagcaacuccgg

SEQ ID NO: 1073669 - RNA, 19 nt, Artificial Sequence
  Description of Artificial Sequence: Synthetic oligonucleotide
uugugagggcggcccagag

SEQ ID NO: 1073670 - RNA, 19 nt, Artificial Sequence
  Description of Artificial Sequence: Synthetic oligonucleotide
acaugguaugcuuguuuau

SEQ ID NO: 1073671 - RNA, 19 nt, Artificial Sequence
  Description of Artificial Sequence: Synthetic oligonucleotide
cucuuguuucaacguggcc

SEQ ID NO: 1073672 - RNA, 19 nt, Artificial Sequence
  Description of Artificial Sequence: Synthetic oligonucleotide
gcacauacuuugcuggggc

SEQ ID NO: 1073673 - RNA, 19 nt, Artificial Sequence
  Description of Artificial Sequence: Synthetic oligonucleotide
cauccucuaaucgcagaag

SEQ ID NO: 1073674 - RNA, 19 nt, Artificial Sequence
  Description of Artificial Sequence: Synthetic oligonucleotide
ugagcgacuuaaaguguuu

SEQ ID NO: 1073675 - RNA, 19 nt, Artificial Sequence
  Description of Artificial Sequence: Synthetic oligonucleotide
cagagucacuguuuggaca

SEQ ID NO: 1073676 - RNA, 19 nt, Artificial Sequence
  Description of Artificial Sequence: Synthetic oligonucleotide
ucgucucucuuguuucaac

SEQ ID NO: 1073677 - RNA, 19 nt, Artificial Sequence
  Description of Artificial Sequence: Synthetic oligonucleotide
aaucagcucgccccuuguu

SEQ ID NO: 1073678 - RNA, 19 nt, Artificial Sequence
  Description of Artificial Sequence: Synthetic oligonucleotide
aucagcucgccccuuguuu

SEQ ID NO: 1073679 - RNA, 19 nt, Artificial Sequence
  Description of Artificial Sequence: Synthetic oligonucleotide
guuuaucagccagcuguag

SEQ ID NO: 1073680 - RNA, 19 nt, Artificial Sequence
  Description of Artificial Sequence: Synthetic oligonucleotide
auacuuugcuggggccucc

SEQ ID NO: 1073681 - RNA, 19 nt, Artificial Sequence
  Description of Artificial Sequence: Synthetic oligonucleotide
cuacgccaguuccuggacc

SEQ ID NO: 1073682 - RNA, 19 nt, Artificial Sequence
  Description of Artificial Sequence: Synthetic oligonucleotide
cgagcgaggacucaaaguc

SEQ ID NO: 1073683 - RNA, 19 nt, Artificial Sequence
  Description of Artificial Sequence: Synthetic oligonucleotide
uguggguguuguucuugga

SEQ ID NO: 1073684 - RNA, 19 nt, Artificial Sequence
  Description of Artificial Sequence: Synthetic oligonucleotide
agcuugucuggauggagua

SEQ ID NO: 1073685 - RNA, 19 nt, Artificial Sequence
  Description of Artificial Sequence: Synthetic oligonucleotide
ucgccccuuguuuacugca

SEQ ID NO: 1073686 - RNA, 19 nt, Artificial Sequence
  Description of Artificial Sequence: Synthetic oligonucleotide
cacacguauauguagccgu

SEQ ID NO: 1073687 - RNA, 19 nt, Artificial Sequence
  Description of Artificial Sequence: Synthetic oligonucleotide
  modified_base (19)..(19): a, c, u, g, unknown or other
ccuguuagcuucauugugn

SEQ ID NO: 1073688 - RNA, 19 nt, Artificial Sequence
  Description of Artificial Sequence: Synthetic oligonucleotide
uccggcuucacaggagugu

SEQ ID NO: 1073689 - RNA, 19 nt, Artificial Sequence
  Description of Artificial Sequence: Synthetic oligonucleotide
acaacgagcucuaaaccua

SEQ ID NO: 1073690 - RNA, 19 nt, Artificial Sequence
  Description of Artificial Sequence: Synthetic oligonucleotide
gaaacggggcaaccaaugu

SEQ ID NO: 1073691 - RNA, 19 nt, Artificial Sequence
  Description of Artificial Sequence: Synthetic oligonucleotide
aacuccggcuucacaggag

SEQ ID NO: 1073692 - RNA, 19 nt, Artificial Sequence
  Description of Artificial Sequence: Synthetic oligonucleotide
accuacacagucguccgca

SEQ ID NO: 1073693 - RNA, 19 nt, Artificial Sequence
  Description of Artificial Sequence: Synthetic oligonucleotide
ugagcggacgagcgaggac

SEQ ID NO: 1073694 - RNA, 19 nt, Artificial Sequence
  Description of Artificial Sequence: Synthetic oligonucleotide
auucucacgaugacauggu

SEQ ID NO: 1073695 - RNA, 19 nt, Artificial Sequence
  Description of Artificial Sequence: Synthetic oligonucleotide
ccucuaaucgcagaaguuc

SEQ ID NO: 1073696 - RNA, 19 nt, Artificial Sequence
  Description of Artificial Sequence: Synthetic oligonucleotide
guauggucgaggcuggagu

SEQ ID NO: 1073697 - RNA, 19 nt, Artificial Sequence
  Description of Artificial Sequence: Synthetic oligonucleotide
gacccaccauuaugauggg

SEQ ID NO: 1073698 - RNA, 19 nt, Artificial Sequence
  Description of Artificial Sequence: Synthetic oligonucleotide
aggacgggaaggcgaggag

SEQ ID NO: 1073699 - RNA, 19 nt, Artificial Sequence
  Description of Artificial Sequence: Synthetic oligonucleotide
cgucucucuuguuucaacg

SEQ ID NO: 1073700 - RNA, 19 nt, Artificial Sequence
  Description of Artificial Sequence: Synthetic oligonucleotide
cagucguccgcauguccag

SEQ ID NO: 1073701 - RNA, 19 nt, Artificial Sequence
  Description of Artificial Sequence: Synthetic oligonucleotide
guagaagugcugggcuccg

SEQ ID NO: 1073702 - RNA, 19 nt, Artificial Sequence
  Description of Artificial Sequence: Synthetic oligonucleotide
agcucuaaaccuacacagu

SEQ ID NO: 1073703 - RNA, 19 nt, Artificial Sequence
  Description of Artificial Sequence: Synthetic oligonucleotide
gagucacccaaacccaaua

SEQ ID NO: 1073704 - RNA, 19 nt, Artificial Sequence
  Description of Artificial Sequence: Synthetic oligonucleotide
gcuuuucagggagagaaca

SEQ ID NO: 1073705 - RNA, 19 nt, Artificial Sequence
  Description of Artificial Sequence: Synthetic oligonucleotide
uagcaacuccggcuucaca

SEQ ID NO: 1073706 - RNA, 19 nt, Artificial Sequence
  Description of Artificial Sequence: Synthetic oligonucleotide
ccuggacccaccauuauga

SEQ ID NO: 1073707 - RNA, 19 nt, Artificial Sequence
  Description of Artificial Sequence: Synthetic oligonucleotide
agcaauccacggcucuaca

SEQ ID NO: 1073708 - RNA, 19 nt, Artificial Sequence
  Description of Artificial Sequence: Synthetic oligonucleotide
uggagucguuuaucaauua

SEQ ID NO: 1073709 - RNA, 19 nt, Artificial Sequence
  Description of Artificial Sequence: Synthetic oligonucleotide
ucguccgcauguccagugu

SEQ ID NO: 1073710 - RNA, 19 nt, Artificial Sequence
  Description of Artificial Sequence: Synthetic oligonucleotide
guguauucugagucaccca

SEQ ID NO: 1073711 - RNA, 19 nt, Artificial Sequence
  Description of Artificial Sequence: Synthetic oligonucleotide
gaacugagcggacgagcga

SEQ ID NO: 1073712 - RNA, 19 nt, Artificial Sequence
  Description of Artificial Sequence: Synthetic oligonucleotide
cucgccccuuguuuacugc

SEQ ID NO: 1073713 - RNA, 19 nt, Artificial Sequence
  Description of Artificial Sequence: Synthetic oligonucleotide
acggcucuacaacgagcuc

SEQ ID NO: 1073714 - RNA, 19 nt, Artificial Sequence
  Description of Artificial Sequence: Synthetic oligonucleotide
cuuaugucugcagccaaaa

SEQ ID NO: 1073715 - RNA, 19 nt, Artificial Sequence
  Description of Artificial Sequence: Synthetic oligonucleotide
ggacauucuaugauguuaa

SEQ ID NO: 1073716 - RNA, 19 nt, Artificial Sequence
  Description of Artificial Sequence: Synthetic oligonucleotide
aguguccgucuuaauucuc

SEQ ID NO: 1073717 - RNA, 19 nt, Artificial Sequence
  Description of Artificial Sequence: Synthetic oligonucleotide
gucguccgcauguccagug

SEQ ID NO: 1073718 - RNA, 19 nt, Artificial Sequence
  Description of Artificial Sequence: Synthetic oligonucleotide
guuugggaaggugcucaag

SEQ ID NO: 1073719 - RNA, 19 nt, Artificial Sequence
  Description of Artificial Sequence: Synthetic oligonucleotide
acggggcaaccaauguggc

SEQ ID NO: 1073720 - RNA, 19 nt, Artificial Sequence
  Description of Artificial Sequence: Synthetic oligonucleotide
aguuugggaaggugcucaa

SEQ ID NO: 1073721 - RNA, 19 nt, Artificial Sequence
  Description of Artificial Sequence: Synthetic oligonucleotide
caagauggaccuccaaaua

SEQ ID NO: 1073722 - RNA, 19 nt, Artificial Sequence
  Description of Artificial Sequence: Synthetic oligonucleotide
ugccugcgugcaaagcuuc

SEQ ID NO: 1073723 - RNA, 19 nt, Artificial Sequence
  Description of Artificial Sequence: Synthetic oligonucleotide
guggccaaccagccugugc

SEQ ID NO: 1073724 - RNA, 19 nt, Artificial Sequence
  Description of Artificial Sequence: Synthetic oligonucleotide
aaauuuccauguggguguu

SEQ ID NO: 1073725 - RNA, 19 nt, Artificial Sequence
  Description of Artificial Sequence: Synthetic oligonucleotide
cucuacaacgagcucuaaa

SEQ ID NO: 1073726 - RNA, 19 nt, Artificial Sequence
  Description of Artificial Sequence: Synthetic oligonucleotide
accaaauguccugaaggua

SEQ ID NO: 1073727 - RNA, 19 nt, Artificial Sequence
  Description of Artificial Sequence: Synthetic oligonucleotide
ucuuaguguccgucuuaau

SEQ ID NO: 1073728 - RNA, 19 nt, Artificial Sequence
  Description of Artificial Sequence: Synthetic oligonucleotide
ucuugcagccuccgcuuuu

SEQ ID NO: 1073729 - RNA, 19 nt, Artificial Sequence
  Description of Artificial Sequence: Synthetic oligonucleotide
acgccugagcuccucucug

SEQ ID NO: 1073730 - RNA, 19 nt, Artificial Sequence
  Description of Artificial Sequence: Synthetic oligonucleotide
gcugaguggaggacaacag

SEQ ID NO: 1073731 - RNA, 19 nt, Artificial Sequence
  Description of Artificial Sequence: Synthetic oligonucleotide
cacggcucuacaacgagcu

SEQ ID NO: 1073732 - RNA, 19 nt, Artificial Sequence
  Description of Artificial Sequence: Synthetic oligonucleotide
ggauaucuuaggagccagg

SEQ ID NO: 1073733 - RNA, 19 nt, Artificial Sequence
  Description of Artificial Sequence: Synthetic oligonucleotide
ggagugugucacucauucc

SEQ ID NO: 1073734 - RNA, 19 nt, Artificial Sequence
  Description of Artificial Sequence: Synthetic oligonucleotide
uccgcauguccagugucgu

SEQ ID NO: 1073735 - RNA, 19 nt, Artificial Sequence
  Description of Artificial Sequence: Synthetic oligonucleotide
uguguugcucgaggagaga

SEQ ID NO: 1073736 - RNA, 19 nt, Artificial Sequence
  Description of Artificial Sequence: Synthetic oligonucleotide
aacgagcucuaaaccuaca

SEQ ID NO: 1073737 - RNA, 19 nt, Artificial Sequence
  Description of Artificial Sequence: Synthetic oligonucleotide
ugagggcggcccagagucc

SEQ ID NO: 1073738 - RNA, 19 nt, Artificial Sequence
  Description of Artificial Sequence: Synthetic oligonucleotide
cuccgcuuuucagggagag

SEQ ID NO: 1073739 - RNA, 19 nt, Artificial Sequence
  Description of Artificial Sequence: Synthetic oligonucleotide
cccaaucuugaggaaacgc

SEQ ID NO: 1073740 - RNA, 19 nt, Artificial Sequence
  Description of Artificial Sequence: Synthetic oligonucleotide
gaguaagcucgagcuagca

SEQ ID NO: 1073741 - RNA, 19 nt, Artificial Sequence
  Description of Artificial Sequence: Synthetic oligonucleotide
gagcggacgagcgaggacu

SEQ ID NO: 1073742 - RNA, 19 nt, Artificial Sequence
  Description of Artificial Sequence: Synthetic oligonucleotide
aggacugccugcgugcaaa

SEQ ID NO: 1073743 - RNA, 19 nt, Artificial Sequence
  Description of Artificial Sequence: Synthetic oligonucleotide
cacguauauguagccguuc

SEQ ID NO: 1073744 - RNA, 19 nt, Artificial Sequence
  Description of Artificial Sequence: Synthetic oligonucleotide
guuucaacguggccagugu

SEQ ID NO: 1073745 - RNA, 19 nt, Artificial Sequence
  Description of Artificial Sequence: Synthetic oligonucleotide
cugugguguuagauggaca

SEQ ID NO: 1073746 - RNA, 19 nt, Artificial Sequence
  Description of Artificial Sequence: Synthetic oligonucleotide
uuccuggacccaccauuau

SEQ ID NO: 1073747 - RNA, 19 nt, Artificial Sequence
  Description of Artificial Sequence: Synthetic oligonucleotide
agcgaggacucaaagucuu

SEQ ID NO: 1073748 - RNA, 19 nt, Artificial Sequence
  Description of Artificial Sequence: Synthetic oligonucleotide
cuaugauguuaaacacaaa

SEQ ID NO: 1073749 - RNA, 19 nt, Artificial Sequence
  Description of Artificial Sequence: Synthetic oligonucleotide
uuccgcagcguggccacug

SEQ ID NO: 1073750 - RNA, 19 nt, Artificial Sequence
  Description of Artificial Sequence: Synthetic oligonucleotide
ggcagacgcuggcaucucg

SEQ ID NO: 1073751 - RNA, 19 nt, Artificial Sequence
  Description of Artificial Sequence: Synthetic oligonucleotide
gggaacugagcggacgagc

SEQ ID NO: 1073752 - RNA, 19 nt, Artificial Sequence
  Description of Artificial Sequence: Synthetic oligonucleotide
gguaucgucucucuuguuu

SEQ ID NO: 1073753 - RNA, 19 nt, Artificial Sequence
  Description of Artificial Sequence: Synthetic oligonucleotide
aucuuaggagccagggcau

SEQ ID NO: 1073754 - RNA, 19 nt, Artificial Sequence
  Description of Artificial Sequence: Synthetic oligonucleotide
cuacaagggcgucguucac

SEQ ID NO: 1073755 - RNA, 19 nt, Artificial Sequence
  Description of Artificial Sequence: Synthetic oligonucleotide
ucgaggagagauggauauc

SEQ ID NO: 1073756 - RNA, 19 nt, Artificial Sequence
  Description of Artificial Sequence: Synthetic oligonucleotide
uuguccucugagcgacuua

SEQ ID NO: 1073757 - RNA, 19 nt, Artificial Sequence
  Description of Artificial Sequence: Synthetic oligonucleotide
cuggauggaguaagcucga

SEQ ID NO: 1073758 - RNA, 19 nt, Artificial Sequence
  Description of Artificial Sequence: Synthetic oligonucleotide
gcgguuguaaucagcucgc

SEQ ID NO: 1073759 - RNA, 19 nt, Artificial Sequence
  Description of Artificial Sequence: Synthetic oligonucleotide
cugaacagcuuuugaaauu

SEQ ID NO: 1073760 - RNA, 19 nt, Artificial Sequence
  Description of Artificial Sequence: Synthetic oligonucleotide
aagcucgagcuagcacaug

SEQ ID NO: 1073761 - RNA, 19 nt, Artificial Sequence
  Description of Artificial Sequence: Synthetic oligonucleotide
uggcggugggaguguguca

SEQ ID NO: 1073762 - RNA, 19 nt, Artificial Sequence
  Description of Artificial Sequence: Synthetic oligonucleotide
agcggacgagcgaggacuc

SEQ ID NO: 1073763 - RNA, 19 nt, Artificial Sequence
  Description of Artificial Sequence: Synthetic oligonucleotide
guguggucuuuauggcauc

SEQ ID NO: 1073764 - RNA, 19 nt, Artificial Sequence
  Description of Artificial Sequence: Synthetic oligonucleotide
guauucugagucacccaaa

SEQ ID NO: 1073765 - RNA, 19 nt, Artificial Sequence
  Description of Artificial Sequence: Synthetic oligonucleotide
ccaccauccucuaaucgca

SEQ ID NO: 1073766 - RNA, 19 nt, Artificial Sequence
  Description of Artificial Sequence: Synthetic oligonucleotide
cagcucgccccuuguuuac

SEQ ID NO: 1073767 - RNA, 19 nt, Artificial Sequence
  Description of Artificial Sequence: Synthetic oligonucleotide
uguaaucagcucgccccuu

SEQ ID NO: 1073768 - RNA, 19 nt, Artificial Sequence
  Description of Artificial Sequence: Synthetic oligonucleotide
gcugaagaaacggggcaac

SEQ ID NO: 1073769 - RNA, 19 nt, Artificial Sequence
  Description of Artificial Sequence: Synthetic oligonucleotide
auccacggcucuacaacga

SEQ ID NO: 1073770 - RNA, 19 nt, Artificial Sequence
  Description of Artificial Sequence: Synthetic oligonucleotide
ggcuacgccaguuccugga

SEQ ID NO: 1073771 - RNA, 19 nt, Artificial Sequence
  Description of Artificial Sequence: Synthetic oligonucleotide
guuccuggacccaccauua

SEQ ID NO: 1073772 - RNA, 19 nt, Artificial Sequence
  Description of Artificial Sequence: Synthetic oligonucleotide
ggcggugggagugugucac

SEQ ID NO: 1073773 - RNA, 19 nt, Artificial Sequence
  Description of Artificial Sequence: Synthetic oligonucleotide
gcgacuuaaaguguuuugu

SEQ ID NO: 1073774 - RNA, 19 nt, Artificial Sequence
  Description of Artificial Sequence: Synthetic oligonucleotide
cgcagcguggccacugugg

SEQ ID NO: 1073775 - RNA, 19 nt, Artificial Sequence
  Description of Artificial Sequence: Synthetic oligonucleotide
ggaguaagcucgagcuagc

SEQ ID NO: 1073776 - RNA, 19 nt, Artificial Sequence
  Description of Artificial Sequence: Synthetic oligonucleotide
cugaagguaucgucucucu

SEQ ID NO: 1073777 - RNA, 19 nt, Artificial Sequence
  Description of Artificial Sequence: Synthetic oligonucleotide
cgaugacaugguaugcuug

SEQ ID NO: 1073778 - RNA, 19 nt, Artificial Sequence
  Description of Artificial Sequence: Synthetic oligonucleotide
cguagaagugcugggcucc

SEQ ID NO: 1073779 - RNA, 19 nt, Artificial Sequence
  Description of Artificial Sequence: Synthetic oligonucleotide
acacguauauguagccguu

SEQ ID NO: 1073780 - RNA, 19 nt, Artificial Sequence
  Description of Artificial Sequence: Synthetic oligonucleotide
uagaagugcugggcuccga

SEQ ID NO: 1073781 - RNA, 19 nt, Artificial Sequence
  Description of Artificial Sequence: Synthetic oligonucleotide
guccagugucguagaagug

SEQ ID NO: 1073782 - RNA, 19 nt, Artificial Sequence
  Description of Artificial Sequence: Synthetic oligonucleotide
ccacggcucuacaacgagc

SEQ ID NO: 1073783 - RNA, 19 nt, Artificial Sequence
  Description of Artificial Sequence: Synthetic oligonucleotide
gaagggucuucugguaagu

SEQ ID NO: 1073784 - RNA, 19 nt, Artificial Sequence
  Description of Artificial Sequence: Synthetic oligonucleotide
cugagcgacuuaaaguguu

SEQ ID NO: 1073785 - RNA, 19 nt, Artificial Sequence
  Description of Artificial Sequence: Synthetic oligonucleotide
caugaguauggucgaggcu

SEQ ID NO: 1073786 - RNA, 19 nt, Artificial Sequence
  Description of Artificial Sequence: Synthetic oligonucleotide
augacaugguaugcuuguu

SEQ ID NO: 1073787 - RNA, 19 nt, Artificial Sequence
  Description of Artificial Sequence: Synthetic oligonucleotide
ggugggagugugucacuca

SEQ ID NO: 1073788 - RNA, 19 nt, Artificial Sequence
  Description of Artificial Sequence: Synthetic oligonucleotide
gagcgaggacucaaagucu

SEQ ID NO: 1073789 - RNA, 19 nt, Artificial Sequence
  Description of Artificial Sequence: Synthetic oligonucleotide
ggggcuacgccaguuccug

SEQ ID NO: 1073790 - RNA, 19 nt, Artificial Sequence
  Description of Artificial Sequence: Synthetic oligonucleotide
gcuacgccaguuccuggac

SEQ ID NO: 1073791 - RNA, 19 nt, Artificial Sequence
  Description of Artificial Sequence: Synthetic oligonucleotide
ccugaagguaucgucucuc

SEQ ID NO: 1073792 - RNA, 19 nt, Artificial Sequence
  Description of Artificial Sequence: Synthetic oligonucleotide
agucguccgcauguccagu

SEQ ID NO: 1073793 - RNA, 19 nt, Artificial Sequence
  Description of Artificial Sequence: Synthetic oligonucleotide
ggacugccugcgugcaaag

SEQ ID NO: 1073794 - RNA, 19 nt, Artificial Sequence
  Description of Artificial Sequence: Synthetic oligonucleotide
uggcggcaaagugggaaua

SEQ ID NO: 1073795 - RNA, 19 nt, Artificial Sequence
  Description of Artificial Sequence: Synthetic oligonucleotide
cguauauguagccguucuc

SEQ ID NO: 1073796 - RNA, 19 nt, Artificial Sequence
  Description of Artificial Sequence: Synthetic oligonucleotide
guguugcucgaggagagau

SEQ ID NO: 1073797 - RNA, 19 nt, Artificial Sequence
  Description of Artificial Sequence: Synthetic oligonucleotide
gggcuacgccaguuccugg

SEQ ID NO: 1073798 - RNA, 19 nt, Artificial Sequence
  Description of Artificial Sequence: Synthetic oligonucleotide
auggucgaggcuggaguuu

SEQ ID NO: 1073799 - RNA, 19 nt, Artificial Sequence
  Description of Artificial Sequence: Synthetic oligonucleotide
gcacaugaguauggucgag

SEQ ID NO: 1073800 - RNA, 19 nt, Artificial Sequence
  Description of Artificial Sequence: Synthetic oligonucleotide
agguaucgucucucuuguu

SEQ ID NO: 1073801 - RNA, 19 nt, Artificial Sequence
  Description of Artificial Sequence: Synthetic oligonucleotide
ccaaaauuuccaugugggu

SEQ ID NO: 1073802 - RNA, 19 nt, Artificial Sequence
  Description of Artificial Sequence: Synthetic oligonucleotide
cugagcggacgagcgagga

SEQ ID NO: 1073803 - RNA, 19 nt, Artificial Sequence
  Description of Artificial Sequence: Synthetic oligonucleotide
agcucgccccuuguuuacu

SEQ ID NO: 1073804 - RNA, 19 nt, Artificial Sequence
  Description of Artificial Sequence: Synthetic oligonucleotide
gagcgacuuaaaguguuuu

SEQ ID NO: 1073805 - RNA, 19 nt, Artificial Sequence
  Description of Artificial Sequence: Synthetic oligonucleotide
ggcuucuaguguguuaacu

SEQ ID NO: 1073806 - RNA, 19 nt, Artificial Sequence
  Description of Artificial Sequence: Synthetic oligonucleotide
caggcagacgcuggcaucu

SEQ ID NO: 1073807 - RNA, 19 nt, Artificial Sequence
  Description of Artificial Sequence: Synthetic oligonucleotide
caauuacuuucccuccauu

SEQ ID NO: 1073808 - RNA, 19 nt, Artificial Sequence
  Description of Artificial Sequence: Synthetic oligonucleotide
ggcgaggaggagguccagc

SEQ ID NO: 1073809 - RNA, 19 nt, Artificial Sequence
  Description of Artificial Sequence: Synthetic oligonucleotide
ggucgaggcuggaguuugg

SEQ ID NO: 1073810 - RNA, 19 nt, Artificial Sequence
  Description of Artificial Sequence: Synthetic oligonucleotide
ggccgaagggucuucuggu

SEQ ID NO: 1073811 - RNA, 19 nt, Artificial Sequence
  Description of Artificial Sequence: Synthetic oligonucleotide
ccugcgugcaaagcuucug

SEQ ID NO: 1073812 - RNA, 19 nt, Artificial Sequence
  Description of Artificial Sequence: Synthetic oligonucleotide
ggcucuacaacgagcucua

SEQ ID NO: 1073813 - RNA, 19 nt, Artificial Sequence
  Description of Artificial Sequence: Synthetic oligonucleotide
gcuagcacaugaguauggu

SEQ ID NO: 1073814 - RNA, 19 nt, Artificial Sequence
  Description of Artificial Sequence: Synthetic oligonucleotide
cgagcuagcacaugaguau

SEQ ID NO: 1073815 - RNA, 19 nt, Artificial Sequence
  Description of Artificial Sequence: Synthetic oligonucleotide
guagucagcugaacagcuu

SEQ ID NO: 1073816 - RNA, 19 nt, Artificial Sequence
  Description of Artificial Sequence: Synthetic oligonucleotide
ggcgucguucacaucuuua

SEQ ID NO: 1073817 - RNA, 19 nt, Artificial Sequence
  Description of Artificial Sequence: Synthetic oligonucleotide
aggaaacgccugagcuccu

SEQ ID NO: 1073818 - RNA, 19 nt, Artificial Sequence
  Description of Artificial Sequence: Synthetic oligonucleotide
gccgaagggucuucuggua

SEQ ID NO: 1073819 - RNA, 19 nt, Artificial Sequence
  Description of Artificial Sequence: Synthetic oligonucleotide
gcucgaggagagauggaua

SEQ ID NO: 1073820 - RNA, 19 nt, Artificial Sequence
  Description of Artificial Sequence: Synthetic oligonucleotide
agggcgucguucacaucuu

SEQ ID NO: 1073821 - RNA, 19 nt, Artificial Sequence
  Description of Artificial Sequence: Synthetic oligonucleotide
cguccgcauguccaguguc

SEQ ID NO: 1073822 - RNA, 19 nt, Artificial Sequence
  Description of Artificial Sequence: Synthetic oligonucleotide
cugugacgcugcagguugu

SEQ ID NO: 1073823 - RNA, 19 nt, Artificial Sequence
  Description of Artificial Sequence: Synthetic oligonucleotide
cgguuguaaucagcucgcc

SEQ ID NO: 1073824 - RNA, 19 nt, Artificial Sequence
  Description of Artificial Sequence: Synthetic oligonucleotide
ccagggcaucaggacugcc

SEQ ID NO: 1073825 - RNA, 19 nt, Artificial Sequence
  Description of Artificial Sequence: Synthetic oligonucleotide
ccuccgcuuuucagggaga

SEQ ID NO: 1073826 - RNA, 19 nt, Artificial Sequence
  Description of Artificial Sequence: Synthetic oligonucleotide
ccgucuuaauucucacgau

SEQ ID NO: 1073827 - RNA, 19 nt, Artificial Sequence
  Description of Artificial Sequence: Synthetic oligonucleotide
cggcucuacaacgagcucu

SEQ ID NO: 1073828 - RNA, 19 nt, Artificial Sequence
  Description of Artificial Sequence: Synthetic oligonucleotide
ccgcagcguggccacugug

SEQ ID NO: 1073829 - RNA, 19 nt, Artificial Sequence
  Description of Artificial Sequence: Synthetic oligonucleotide
ccccuuccgcagcguggcc

SEQ ID NO: 1073830 - RNA, 19 nt, Artificial Sequence
  Description of Artificial Sequence: Synthetic oligonucleotide
ccuacacagucguccgcau

SEQ ID NO: 1073831 - RNA, 19 nt, Artificial Sequence
  Description of Artificial Sequence: Synthetic oligonucleotide
gcggacgagcgaggacuca

SEQ ID NO: 1073832 - RNA, 19 nt, Artificial Sequence
  Description of Artificial Sequence: Synthetic oligonucleotide
cggacgagcgaggacucaa

SEQ ID NO: 1073833 - RNA, 19 nt, Artificial Sequence
  Description of Artificial Sequence: Synthetic oligonucleotide
ccgcauguccagugucgua

SEQ ID NO: 1073834 - RNA, 19 nt, Artificial Sequence
  Description of Artificial Sequence: Synthetic oligonucleotide
gggcgucguucacaucuuu

SEQ ID NO: 1073835 - RNA, 19 nt, Artificial Sequence
  Description of Artificial Sequence: Synthetic oligonucleotide
cuuccgcagcguggccacu

SEQ ID NO: 1073836 - RNA, 19 nt, Artificial Sequence
  Description of Artificial Sequence: Synthetic oligonucleotide
cgccccuuguuuacugcau

SEQ ID NO: 1073837 - RNA, 19 nt, Artificial Sequence
  Description of Artificial Sequence: Synthetic oligonucleotide
uuauauuuaaccaagucag

SEQ ID NO: 1073838 - RNA, 19 nt, Artificial Sequence
  Description of Artificial Sequence: Synthetic oligonucleotide
aauugaauuagucuaaaag

SEQ ID NO: 1073839 - RNA, 19 nt, Artificial Sequence
  Description of Artificial Sequence: Synthetic oligonucleotide
auuguuaugaaaccauacc

SEQ ID NO: 1073840 - RNA, 19 nt, Artificial Sequence
  Description of Artificial Sequence: Synthetic oligonucleotide
uuugccuugguguaaaugg

SEQ ID NO: 1073841 - RNA, 19 nt, Artificial Sequence
  Description of Artificial Sequence: Synthetic oligonucleotide
aaaccaacugcccggaugc

SEQ ID NO: 1073842 - RNA, 19 nt, Artificial Sequence
  Description of Artificial Sequence: Synthetic oligonucleotide
caaagugaaaauaagcccg

SEQ ID NO: 1073843 - RNA, 19 nt, Artificial Sequence
  Description of Artificial Sequence: Synthetic oligonucleotide
ugaaauaaaauucuuacuu

SEQ ID NO: 1073844 - RNA, 19 nt, Artificial Sequence
  Description of Artificial Sequence: Synthetic oligonucleotide
aagucuugcauuuagccag

SEQ ID NO: 1073845 - RNA, 19 nt, Artificial Sequence
  Description of Artificial Sequence: Synthetic oligonucleotide
uauaugauaauacuauugu

SEQ ID NO: 1073846 - RNA, 19 nt, Artificial Sequence
  Description of Artificial Sequence: Synthetic oligonucleotide
aggcuauuuauauuuaacc

SEQ ID NO: 1073847 - RNA, 19 nt, Artificial Sequence
  Description of Artificial Sequence: Synthetic oligonucleotide
cuuaguaacuuuaaggaac

SEQ ID NO: 1073848 - RNA, 19 nt, Artificial Sequence
  Description of Artificial Sequence: Synthetic oligonucleotide
ggaaauauugcuuuuaggc

SEQ ID NO: 1073849 - RNA, 19 nt, Artificial Sequence
  Description of Artificial Sequence: Synthetic oligonucleotide
gauaagaugagguguaagc

SEQ ID NO: 1073850 - RNA, 19 nt, Artificial Sequence
  Description of Artificial Sequence: Synthetic oligonucleotide
auaccggccagauaggucc

SEQ ID NO: 1073851 - RNA, 19 nt, Artificial Sequence
  Description of Artificial Sequence: Synthetic oligonucleotide
aaaccauaccucuucagag

SEQ ID NO: 1073852 - RNA, 19 nt, Artificial Sequence
  Description of Artificial Sequence: Synthetic oligonucleotide
ugcuuaguaacuuuaagga

SEQ ID NO: 1073853 - RNA, 19 nt, Artificial Sequence
  Description of Artificial Sequence: Synthetic oligonucleotide
auuguggauugcuucaucc

SEQ ID NO: 1073854 - RNA, 19 nt, Artificial Sequence
  Description of Artificial Sequence: Synthetic oligonucleotide
ucagccagcgaaauuaggg

SEQ ID NO: 1073855 - RNA, 19 nt, Artificial Sequence
  Description of Artificial Sequence: Synthetic oligonucleotide
gauugcuucauccaagcag

SEQ ID NO: 1073856 - RNA, 19 nt, Artificial Sequence
  Description of Artificial Sequence: Synthetic oligonucleotide
gugaaaauaagcccgaggc

SEQ ID NO: 1073857 - RNA, 19 nt, Artificial Sequence
  Description of Artificial Sequence: Synthetic oligonucleotide
uuuaugacauuacagugcu

SEQ ID NO: 1073858 - RNA, 19 nt, Artificial Sequence
  Description of Artificial Sequence: Synthetic oligonucleotide
uugcauauguuacagauaa

SEQ ID NO: 1073859 - RNA, 19 nt, Artificial Sequence
  Description of Artificial Sequence: Synthetic oligonucleotide
uuugacuguaucaauaguc

SEQ ID NO: 1073860 - RNA, 19 nt, Artificial Sequence
  Description of Artificial Sequence: Synthetic oligonucleotide
auacuauuguuaugaaacc

SEQ ID NO: 1073861 - RNA, 19 nt, Artificial Sequence
  Description of Artificial Sequence: Synthetic oligonucleotide
cuccgaauuaccuagaaac

SEQ ID NO: 1073862 - RNA, 19 nt, Artificial Sequence
  Description of Artificial Sequence: Synthetic oligonucleotide
auuuaugacauuacagugc

SEQ ID NO: 1073863 - RNA, 19 nt, Artificial Sequence
  Description of Artificial Sequence: Synthetic oligonucleotide
ugaauuagucuaaaagccc

SEQ ID NO: 1073864 - RNA, 19 nt, Artificial Sequence
  Description of Artificial Sequence: Synthetic oligonucleotide
ucgucuuuaaucauguuac

SEQ ID NO: 1073865 - RNA, 19 nt, Artificial Sequence
  Description of Artificial Sequence: Synthetic oligonucleotide
caaaauaccugccaggggc

SEQ ID NO: 1073866 - RNA, 19 nt, Artificial Sequence
  Description of Artificial Sequence: Synthetic oligonucleotide
ucaauagucgucuuuaauc

SEQ ID NO: 1073867 - RNA, 19 nt, Artificial Sequence
  Description of Artificial Sequence: Synthetic oligonucleotide
uguucuauuaaugugucug

SEQ ID NO: 1073868 - RNA, 19 nt, Artificial Sequence
  Description of Artificial Sequence: Synthetic oligonucleotide
uaucauauccaucuagcug

SEQ ID NO: 1073869 - RNA, 19 nt, Artificial Sequence
  Description of Artificial Sequence: Synthetic oligonucleotide
ugcuuuuaggcuuuugagg

SEQ ID NO: 1073870 - RNA, 19 nt, Artificial Sequence
  Description of Artificial Sequence: Synthetic oligonucleotide
aaucauguuacccucuccu

SEQ ID NO: 1073871 - RNA, 19 nt, Artificial Sequence
  Description of Artificial Sequence: Synthetic oligonucleotide
ugcacaaaccaacugcccg

SEQ ID NO: 1073872 - RNA, 19 nt, Artificial Sequence
  Description of Artificial Sequence: Synthetic oligonucleotide
ucgguuugggcccagauug

SEQ ID NO: 1073873 - RNA, 19 nt, Artificial Sequence
  Description of Artificial Sequence: Synthetic oligonucleotide
uauuaaugugucugggacg

SEQ ID NO: 1073874 - RNA, 19 nt, Artificial Sequence
  Description of Artificial Sequence: Synthetic oligonucleotide
ucuuugacuguaucaauag

SEQ ID NO: 1073875 - RNA, 19 nt, Artificial Sequence
  Description of Artificial Sequence: Synthetic oligonucleotide
ucugaggaauauaugauaa

SEQ ID NO: 1073876 - RNA, 19 nt, Artificial Sequence
  Description of Artificial Sequence: Synthetic oligonucleotide
agacauuaucuucucuucc

SEQ ID NO: 1073877 - RNA, 19 nt, Artificial Sequence
  Description of Artificial Sequence: Synthetic oligonucleotide
uguuaugaaaccauaccuc

SEQ ID NO: 1073878 - RNA, 19 nt, Artificial Sequence
  Description of Artificial Sequence: Synthetic oligonucleotide
uuaagcacgauaagaugag

SEQ ID NO: 1073879 - RNA, 19 nt, Artificial Sequence
  Description of Artificial Sequence: Synthetic oligonucleotide
ucucguauggaucagccgu

SEQ ID NO: 1073880 - RNA, 19 nt, Artificial Sequence
  Description of Artificial Sequence: Synthetic oligonucleotide
uauaccaugggccccagac

SEQ ID NO: 1073881 - RNA, 19 nt, Artificial Sequence
  Description of Artificial Sequence: Synthetic oligonucleotide
cuauuaaugugucugggac

SEQ ID NO: 1073882 - RNA, 19 nt, Artificial Sequence
  Description of Artificial Sequence: Synthetic oligonucleotide
gauaucauauccaucuagc

SEQ ID NO: 1073883 - RNA, 19 nt, Artificial Sequence
  Description of Artificial Sequence: Synthetic oligonucleotide
agugaaaauaagcccgagg

SEQ ID NO: 1073884 - RNA, 19 nt, Artificial Sequence
  Description of Artificial Sequence: Synthetic oligonucleotide
ugaguauacaucuguguug

SEQ ID NO: 1073885 - RNA, 19 nt, Artificial Sequence
  Description of Artificial Sequence: Synthetic oligonucleotide
agauaucauauccaucuag

SEQ ID NO: 1073886 - RNA, 19 nt, Artificial Sequence
  Description of Artificial Sequence: Synthetic oligonucleotide
ucgguaguguucaaaauac

SEQ ID NO: 1073887 - RNA, 19 nt, Artificial Sequence
  Description of Artificial Sequence: Synthetic oligonucleotide
uucugaggcaaauucuccg

SEQ ID NO: 1073888 - RNA, 19 nt, Artificial Sequence
  Description of Artificial Sequence: Synthetic oligonucleotide
uggaaauauugcuuuuagg

SEQ ID NO: 1073889 - RNA, 19 nt, Artificial Sequence
  Description of Artificial Sequence: Synthetic oligonucleotide
uauggaucagccgugaugu

SEQ ID NO: 1073890 - RNA, 19 nt, Artificial Sequence
  Description of Artificial Sequence: Synthetic oligonucleotide
uucacuuauggucucccag

SEQ ID NO: 1073891 - RNA, 19 nt, Artificial Sequence
  Description of Artificial Sequence: Synthetic oligonucleotide
auauaugauaauacuauug

SEQ ID NO: 1073892 - RNA, 19 nt, Artificial Sequence
  Description of Artificial Sequence: Synthetic oligonucleotide
ugaaaauaagcccgaggca

SEQ ID NO: 1073893 - RNA, 19 nt, Artificial Sequence
  Description of Artificial Sequence: Synthetic oligonucleotide
ucaaaauaccugccagggg

SEQ ID NO: 1073894 - RNA, 19 nt, Artificial Sequence
  Description of Artificial Sequence: Synthetic oligonucleotide
ugagcgaagaccuucacuu

SEQ ID NO: 1073895 - RNA, 19 nt, Artificial Sequence
  Description of Artificial Sequence: Synthetic oligonucleotide
uccgaauuaccuagaaacc

SEQ ID NO: 1073896 - RNA, 19 nt, Artificial Sequence
  Description of Artificial Sequence: Synthetic oligonucleotide
gauguugacaauagaucgg

SEQ ID NO: 1073897 - RNA, 19 nt, Artificial Sequence
  Description of Artificial Sequence: Synthetic oligonucleotide
uuagucuaaaagcccaagu

SEQ ID NO: 1073898 - RNA, 19 nt, Artificial Sequence
  Description of Artificial Sequence: Synthetic oligonucleotide
acaaguuccuugcacacug

SEQ ID NO: 1073899 - RNA, 19 nt, Artificial Sequence
  Description of Artificial Sequence: Synthetic oligonucleotide
ucuauuaaugugucuggga

SEQ ID NO: 1073900 - RNA, 19 nt, Artificial Sequence
  Description of Artificial Sequence: Synthetic oligonucleotide
uaaauggggucaauguugu

SEQ ID NO: 1073901 - RNA, 19 nt, Artificial Sequence
  Description of Artificial Sequence: Synthetic oligonucleotide
agugcuuaguaacuuuaag

SEQ ID NO: 1073902 - RNA, 19 nt, Artificial Sequence
  Description of Artificial Sequence: Synthetic oligonucleotide
gaaaccauaccucuucaga

SEQ ID NO: 1073903 - RNA, 19 nt, Artificial Sequence
  Description of Artificial Sequence: Synthetic oligonucleotide
guaaauggggucaauguug

SEQ ID NO: 1073904 - RNA, 19 nt, Artificial Sequence
  Description of Artificial Sequence: Synthetic oligonucleotide
uguugugcagaauauccac

SEQ ID NO: 1073905 - RNA, 19 nt, Artificial Sequence
  Description of Artificial Sequence: Synthetic oligonucleotide
ugggguaccaaucugugau

SEQ ID NO: 1073906 - RNA, 19 nt, Artificial Sequence
  Description of Artificial Sequence: Synthetic oligonucleotide
aagcuguccaccuaugaaa

SEQ ID NO: 1073907 - RNA, 19 nt, Artificial Sequence
  Description of Artificial Sequence: Synthetic oligonucleotide
uauccaucuagcugaaugu

SEQ ID NO: 1073908 - RNA, 19 nt, Artificial Sequence
  Description of Artificial Sequence: Synthetic oligonucleotide
ugaacugugacagucuccu

SEQ ID NO: 1073909 - RNA, 19 nt, Artificial Sequence
  Description of Artificial Sequence: Synthetic oligonucleotide
uaaugugucugggacgugg

SEQ ID NO: 1073910 - RNA, 19 nt, Artificial Sequence
  Description of Artificial Sequence: Synthetic oligonucleotide
aggauuucccgugagcagc

SEQ ID NO: 1073911 - RNA, 19 nt, Artificial Sequence
  Description of Artificial Sequence: Synthetic oligonucleotide
uaaauuaggcauguucuac

SEQ ID NO: 1073912 - RNA, 19 nt, Artificial Sequence
  Description of Artificial Sequence: Synthetic oligonucleotide
uuuaaccaagucagaaagu

SEQ ID NO: 1073913 - RNA, 19 nt, Artificial Sequence
  Description of Artificial Sequence: Synthetic oligonucleotide
uccuuuaagcacgauaaga

SEQ ID NO: 1073914 - RNA, 19 nt, Artificial Sequence
  Description of Artificial Sequence: Synthetic oligonucleotide
caauagucgucuuuaauca

SEQ ID NO: 1073915 - RNA, 19 nt, Artificial Sequence
  Description of Artificial Sequence: Synthetic oligonucleotide
auuaaugugucugggacgu

SEQ ID NO: 1073916 - RNA, 19 nt, Artificial Sequence
  Description of Artificial Sequence: Synthetic oligonucleotide
cuuuugagguaacacaguc

SEQ ID NO: 1073917 - RNA, 19 nt, Artificial Sequence
  Description of Artificial Sequence: Synthetic oligonucleotide
guaauccucucauugugcc

SEQ ID NO: 1073918 - RNA, 19 nt, Artificial Sequence
  Description of Artificial Sequence: Synthetic oligonucleotide
agcacgauaagaugaggug

SEQ ID NO: 1073919 - RNA, 19 nt, Artificial Sequence
  Description of Artificial Sequence: Synthetic oligonucleotide
cuugguaggcaauauauaa

SEQ ID NO: 1073920 - RNA, 19 nt, Artificial Sequence
  Description of Artificial Sequence: Synthetic oligonucleotide
auaagaugagguguaagcu

SEQ ID NO: 1073921 - RNA, 19 nt, Artificial Sequence
  Description of Artificial Sequence: Synthetic oligonucleotide
uauccacucggggugagcg

SEQ ID NO: 1073922 - RNA, 19 nt, Artificial Sequence
  Description of Artificial Sequence: Synthetic oligonucleotide
ucacuuauggucucccaga

SEQ ID NO: 1073923 - RNA, 19 nt, Artificial Sequence
  Description of Artificial Sequence: Synthetic oligonucleotide
guaguguucaaaauaccug

SEQ ID NO: 1073924 - RNA, 19 nt, Artificial Sequence
  Description of Artificial Sequence: Synthetic oligonucleotide
ugaaaccauaccucuucag

SEQ ID NO: 1073925 - RNA, 19 nt, Artificial Sequence
  Description of Artificial Sequence: Synthetic oligonucleotide
uuugggcccagauugcuga

SEQ ID NO: 1073926 - RNA, 19 nt, Artificial Sequence
  Description of Artificial Sequence: Synthetic oligonucleotide
cagagcuagggucacauug

SEQ ID NO: 1073927 - RNA, 19 nt, Artificial Sequence
  Description of Artificial Sequence: Synthetic oligonucleotide
aauagucgucuuuaaucau

SEQ ID NO: 1073928 - RNA, 19 nt, Artificial Sequence
  Description of Artificial Sequence: Synthetic oligonucleotide
acuguaucaauagucgucu

SEQ ID NO: 1073929 - RNA, 19 nt, Artificial Sequence
  Description of Artificial Sequence: Synthetic oligonucleotide
caauagaucgguaguguuc

SEQ ID NO: 1073930 - RNA, 19 nt, Artificial Sequence
  Description of Artificial Sequence: Synthetic oligonucleotide
uguaucaauagucgucuuu

SEQ ID NO: 1073931 - RNA, 19 nt, Artificial Sequence
  Description of Artificial Sequence: Synthetic oligonucleotide
ccucuuuauaccaugggcc

SEQ ID NO: 1073932 - RNA, 19 nt, Artificial Sequence
  Description of Artificial Sequence: Synthetic oligonucleotide
aucgguaguguucaaaaua

SEQ ID NO: 1073933 - RNA, 19 nt, Artificial Sequence
  Description of Artificial Sequence: Synthetic oligonucleotide
agaucgguaguguucaaaa

SEQ ID NO: 1073934 - RNA, 19 nt, Artificial Sequence
  Description of Artificial Sequence: Synthetic oligonucleotide
cacgaugccaggauaccgg

SEQ ID NO: 1073935 - RNA, 19 nt, Artificial Sequence
  Description of Artificial Sequence: Synthetic oligonucleotide
guaacuuuaaggaacugaa

SEQ ID NO: 1073936 - RNA, 19 nt, Artificial Sequence
  Description of Artificial Sequence: Synthetic oligonucleotide
auaaauuaggcauguucua

SEQ ID NO: 1073937 - RNA, 19 nt, Artificial Sequence
  Description of Artificial Sequence: Synthetic oligonucleotide
uuuuaggcuuuugagguaa

SEQ ID NO: 1073938 - RNA, 19 nt, Artificial Sequence
  Description of Artificial Sequence: Synthetic oligonucleotide
aagcacgauaagaugaggu

SEQ ID NO: 1073939 - RNA, 19 nt, Artificial Sequence
  Description of Artificial Sequence: Synthetic oligonucleotide
ucggggugagcgaagaccu

SEQ ID NO: 1073940 - RNA, 19 nt, Artificial Sequence
  Description of Artificial Sequence: Synthetic oligonucleotide
gaaaccaggcuauuuauau

SEQ ID NO: 1073941 - RNA, 19 nt, Artificial Sequence
  Description of Artificial Sequence: Synthetic oligonucleotide
aggguugcuucugggaucc

SEQ ID NO: 1073942 - RNA, 19 nt, Artificial Sequence
  Description of Artificial Sequence: Synthetic oligonucleotide
ugacuguaucaauagucgu

SEQ ID NO: 1073943 - RNA, 19 nt, Artificial Sequence
  Description of Artificial Sequence: Synthetic oligonucleotide
ucacgaugccaggauaccg

SEQ ID NO: 1073944 - RNA, 19 nt, Artificial Sequence
  Description of Artificial Sequence: Synthetic oligonucleotide
uaagcacgauaagaugagg

SEQ ID NO: 1073945 - RNA, 19 nt, Artificial Sequence
  Description of Artificial Sequence: Synthetic oligonucleotide
acuauuguuaugaaaccau

SEQ ID NO: 1073946 - RNA, 19 nt, Artificial Sequence
  Description of Artificial Sequence: Synthetic oligonucleotide
gacuguaucaauagucguc

SEQ ID NO: 1073947 - RNA, 19 nt, Artificial Sequence
  Description of Artificial Sequence: Synthetic oligonucleotide
auuucccgugagcagcuuc

SEQ ID NO: 1073948 - RNA, 19 nt, Artificial Sequence
  Description of Artificial Sequence: Synthetic oligonucleotide
aagcuaagauuugcugcac

SEQ ID NO: 1073949 - RNA, 19 nt, Artificial Sequence
  Description of Artificial Sequence: Synthetic oligonucleotide
uggauugccguguuccaga

SEQ ID NO: 1073950 - RNA, 19 nt, Artificial Sequence
  Description of Artificial Sequence: Synthetic oligonucleotide
uaggcuuuugagguaacac

SEQ ID NO: 1073951 - RNA, 19 nt, Artificial Sequence
  Description of Artificial Sequence: Synthetic oligonucleotide
agccagcgaaauuagggug

SEQ ID NO: 1073952 - RNA, 19 nt, Artificial Sequence
  Description of Artificial Sequence: Synthetic oligonucleotide
aaaccaggcuauuuauauu

SEQ ID NO: 1073953 - RNA, 19 nt, Artificial Sequence
  Description of Artificial Sequence: Synthetic oligonucleotide
uauagguuuugugggguca

SEQ ID NO: 1073954 - RNA, 19 nt, Artificial Sequence
  Description of Artificial Sequence: Synthetic oligonucleotide
agcgaaauuaggguggggu

SEQ ID NO: 1073955 - RNA, 19 nt, Artificial Sequence
  Description of Artificial Sequence: Synthetic oligonucleotide
aucaauagucgucuuuaau

SEQ ID NO: 1073956 - RNA, 19 nt, Artificial Sequence
  Description of Artificial Sequence: Synthetic oligonucleotide
ucccaauauguuccuuugc

SEQ ID NO: 1073957 - RNA, 19 nt, Artificial Sequence
  Description of Artificial Sequence: Synthetic oligonucleotide
cuugcauuuagccaguggu

SEQ ID NO: 1073958 - RNA, 19 nt, Artificial Sequence
  Description of Artificial Sequence: Synthetic oligonucleotide
auguugacaauagaucggu

SEQ ID NO: 1073959 - RNA, 19 nt, Artificial Sequence
  Description of Artificial Sequence: Synthetic oligonucleotide
uuaugaaaccauaccucuu

SEQ ID NO: 1073960 - RNA, 19 nt, Artificial Sequence
  Description of Artificial Sequence: Synthetic oligonucleotide
ugggacgugguuacauuca

SEQ ID NO: 1073961 - RNA, 19 nt, Artificial Sequence
  Description of Artificial Sequence: Synthetic oligonucleotide
ucucauugugccaucgguu

SEQ ID NO: 1073962 - RNA, 19 nt, Artificial Sequence
  Description of Artificial Sequence: Synthetic oligonucleotide
ucuccgaauuaccuagaaa

SEQ ID NO: 1073963 - RNA, 19 nt, Artificial Sequence
  Description of Artificial Sequence: Synthetic oligonucleotide
ucccagauaucauauccau

SEQ ID NO: 1073964 - RNA, 19 nt, Artificial Sequence
  Description of Artificial Sequence: Synthetic oligonucleotide
aaaauaccugccaggggcu

SEQ ID NO: 1073965 - RNA, 19 nt, Artificial Sequence
  Description of Artificial Sequence: Synthetic oligonucleotide
agaccuucacuuauggucu

SEQ ID NO: 1073966 - RNA, 19 nt, Artificial Sequence
  Description of Artificial Sequence: Synthetic oligonucleotide
guggugaguggacagcuug

SEQ ID NO: 1073967 - RNA, 19 nt, Artificial Sequence
  Description of Artificial Sequence: Synthetic oligonucleotide
uugcauuuagccaguggua

SEQ ID NO: 1073968 - RNA, 19 nt, Artificial Sequence
  Description of Artificial Sequence: Synthetic oligonucleotide
ugacauuacagugcuuagu

SEQ ID NO: 1073969 - RNA, 19 nt, Artificial Sequence
  Description of Artificial Sequence: Synthetic oligonucleotide
ccacguggcagccagaugc

SEQ ID NO: 1073970 - RNA, 19 nt, Artificial Sequence
  Description of Artificial Sequence: Synthetic oligonucleotide
uagccagugguaacacuug

SEQ ID NO: 1073971 - RNA, 19 nt, Artificial Sequence
  Description of Artificial Sequence: Synthetic oligonucleotide
acaauagaucgguaguguu

SEQ ID NO: 1073972 - RNA, 19 nt, Artificial Sequence
  Description of Artificial Sequence: Synthetic oligonucleotide
uaauccucucauugugcca

SEQ ID NO: 1073973 - RNA, 19 nt, Artificial Sequence
  Description of Artificial Sequence: Synthetic oligonucleotide
aguugacaagguaauccuc

SEQ ID NO: 1073974 - RNA, 19 nt, Artificial Sequence
  Description of Artificial Sequence: Synthetic oligonucleotide
ggcagugguacuucugagg

SEQ ID NO: 1073975 - RNA, 19 nt, Artificial Sequence
  Description of Artificial Sequence: Synthetic oligonucleotide
gcagaauauccacucgggg

SEQ ID NO: 1073976 - RNA, 19 nt, Artificial Sequence
  Description of Artificial Sequence: Synthetic oligonucleotide
aauuagucuaaaagcccaa

SEQ ID NO: 1073977 - RNA, 19 nt, Artificial Sequence
  Description of Artificial Sequence: Synthetic oligonucleotide
ugccaguugacaagguaau

SEQ ID NO: 1073978 - RNA, 19 nt, Artificial Sequence
  Description of Artificial Sequence: Synthetic oligonucleotide
cucucguauggaucagccg

SEQ ID NO: 1073979 - RNA, 19 nt, Artificial Sequence
  Description of Artificial Sequence: Synthetic oligonucleotide
agagugcacugucagcugu

SEQ ID NO: 1073980 - RNA, 19 nt, Artificial Sequence
  Description of Artificial Sequence: Synthetic oligonucleotide
uucuccgaauuaccuagaa

SEQ ID NO: 1073981 - RNA, 19 nt, Artificial Sequence
  Description of Artificial Sequence: Synthetic oligonucleotide
agcgaagaccuucacuuau

SEQ ID NO: 1073982 - RNA, 19 nt, Artificial Sequence
  Description of Artificial Sequence: Synthetic oligonucleotide
gcauauguuacagauaaaa

SEQ ID NO: 1073983 - RNA, 19 nt, Artificial Sequence
  Description of Artificial Sequence: Synthetic oligonucleotide
guaucaauagucgucuuua

SEQ ID NO: 1073984 - RNA, 19 nt, Artificial Sequence
  Description of Artificial Sequence: Synthetic oligonucleotide
accauuaucugaggaauau

SEQ ID NO: 1073985 - RNA, 19 nt, Artificial Sequence
  Description of Artificial Sequence: Synthetic oligonucleotide
auaccugccaggggcuugc

SEQ ID NO: 1073986 - RNA, 19 nt, Artificial Sequence
  Description of Artificial Sequence: Synthetic oligonucleotide
ugugucugggacgugguua

SEQ ID NO: 1073987 - RNA, 19 nt, Artificial Sequence
  Description of Artificial Sequence: Synthetic oligonucleotide
uuaggcuuuugagguaaca

SEQ ID NO: 1073988 - RNA, 19 nt, Artificial Sequence
  Description of Artificial Sequence: Synthetic oligonucleotide
gggaagcuaagauuugcug

SEQ ID NO: 1073989 - RNA, 19 nt, Artificial Sequence
  Description of Artificial Sequence: Synthetic oligonucleotide
uucacgaugccaggauacc

SEQ ID NO: 1073990 - RNA, 19 nt, Artificial Sequence
  Description of Artificial Sequence: Synthetic oligonucleotide
cucguauggaucagccgug

SEQ ID NO: 1073991 - RNA, 19 nt, Artificial Sequence
  Description of Artificial Sequence: Synthetic oligonucleotide
cccaaguugcauauguuac

SEQ ID NO: 1073992 - RNA, 19 nt, Artificial Sequence
  Description of Artificial Sequence: Synthetic oligonucleotide
cugggacgugguuacauuc

SEQ ID NO: 1073993 - RNA, 19 nt, Artificial Sequence
  Description of Artificial Sequence: Synthetic oligonucleotide
uggcugacuggauugccgu

SEQ ID NO: 1073994 - RNA, 19 nt, Artificial Sequence
  Description of Artificial Sequence: Synthetic oligonucleotide
aguguugcacgcggauggc

SEQ ID NO: 1073995 - RNA, 19 nt, Artificial Sequence
  Description of Artificial Sequence: Synthetic oligonucleotide
gguguaaauggggucaaug

SEQ ID NO: 1073996 - RNA, 19 nt, Artificial Sequence
  Description of Artificial Sequence: Synthetic oligonucleotide
acacuuggguggcauuuug

SEQ ID NO: 1073997 - RNA, 19 nt, Artificial Sequence
  Description of Artificial Sequence: Synthetic oligonucleotide
agguccacccucucguaug

SEQ ID NO: 1073998 - RNA, 19 nt, Artificial Sequence
  Description of Artificial Sequence: Synthetic oligonucleotide
uccucucauugugccaucg

SEQ ID NO: 1073999 - RNA, 19 nt, Artificial Sequence
  Description of Artificial Sequence: Synthetic oligonucleotide
cauuuagccagugguaaca

SEQ ID NO: 1074000 - RNA, 19 nt, Artificial Sequence
  Description of Artificial Sequence: Synthetic oligonucleotide
ggcacugcggucuuguuga

SEQ ID NO: 1074001 - RNA, 19 nt, Artificial Sequence
  Description of Artificial Sequence: Synthetic oligonucleotide
cgaauuaccuagaaaccag

SEQ ID NO: 1074002 - RNA, 19 nt, Artificial Sequence
  Description of Artificial Sequence: Synthetic oligonucleotide
aaugugucugggacguggu

SEQ ID NO: 1074003 - RNA, 19 nt, Artificial Sequence
  Description of Artificial Sequence: Synthetic oligonucleotide
ucucuuccuuuaagcacga

SEQ ID NO: 1074004 - RNA, 19 nt, Artificial Sequence
  Description of Artificial Sequence: Synthetic oligonucleotide
gugccaucgguuugggccc

SEQ ID NO: 1074005 - RNA, 19 nt, Artificial Sequence
  Description of Artificial Sequence: Synthetic oligonucleotide
uguuacccucuccucccug

SEQ ID NO: 1074006 - RNA, 19 nt, Artificial Sequence
  Description of Artificial Sequence: Synthetic oligonucleotide
guaagcuguccaccuauga

SEQ ID NO: 1074007 - RNA, 19 nt, Artificial Sequence
  Description of Artificial Sequence: Synthetic oligonucleotide
auggcugacuggauugccg

SEQ ID NO: 1074008 - RNA, 19 nt, Artificial Sequence
  Description of Artificial Sequence: Synthetic oligonucleotide
acgugguuacauucauucu

SEQ ID NO: 1074009 - RNA, 19 nt, Artificial Sequence
  Description of Artificial Sequence: Synthetic oligonucleotide
gugucugggacgugguuac

SEQ ID NO: 1074010 - RNA, 19 nt, Artificial Sequence
  Description of Artificial Sequence: Synthetic oligonucleotide
uuacccucuccucccugug

SEQ ID NO: 1074011 - RNA, 19 nt, Artificial Sequence
  Description of Artificial Sequence: Synthetic oligonucleotide
uguugacaauagaucggua

SEQ ID NO: 1074012 - RNA, 19 nt, Artificial Sequence
  Description of Artificial Sequence: Synthetic oligonucleotide
agccuuaguuuuguuuguc

SEQ ID NO: 1074013 - RNA, 19 nt, Artificial Sequence
  Description of Artificial Sequence: Synthetic oligonucleotide
uaggguugcuucugggauc

SEQ ID NO: 1074014 - RNA, 19 nt, Artificial Sequence
  Description of Artificial Sequence: Synthetic oligonucleotide
acuggauugccguguucca

SEQ ID NO: 1074015 - RNA, 19 nt, Artificial Sequence
  Description of Artificial Sequence: Synthetic oligonucleotide
auguugugcagaauaucca

SEQ ID NO: 1074016 - RNA, 19 nt, Artificial Sequence
  Description of Artificial Sequence: Synthetic oligonucleotide
aggcaaauucuccgaauua

SEQ ID NO: 1074017 - RNA, 19 nt, Artificial Sequence
  Description of Artificial Sequence: Synthetic oligonucleotide
uuugguccacguggcagcc

SEQ ID NO: 1074018 - RNA, 19 nt, Artificial Sequence
  Description of Artificial Sequence: Synthetic oligonucleotide
agcuagggucacauugugg

SEQ ID NO: 1074019 - RNA, 19 nt, Artificial Sequence
  Description of Artificial Sequence: Synthetic oligonucleotide
gguuugguccacguggcag

SEQ ID NO: 1074020 - RNA, 19 nt, Artificial Sequence
  Description of Artificial Sequence: Synthetic oligonucleotide
uagaucgguaguguucaaa

SEQ ID NO: 1074021 - RNA, 19 nt, Artificial Sequence
  Description of Artificial Sequence: Synthetic oligonucleotide
gccagcgaaauuagggugg

SEQ ID NO: 1074022 - RNA, 19 nt, Artificial Sequence
  Description of Artificial Sequence: Synthetic oligonucleotide
cacgauaagaugaggugua

SEQ ID NO: 1074023 - RNA, 19 nt, Artificial Sequence
  Description of Artificial Sequence: Synthetic oligonucleotide
cuuuauaccaugggcccca

SEQ ID NO: 1074024 - RNA, 19 nt, Artificial Sequence
  Description of Artificial Sequence: Synthetic oligonucleotide
ugcggucuuguugaacugu

SEQ ID NO: 1074025 - RNA, 19 nt, Artificial Sequence
  Description of Artificial Sequence: Synthetic oligonucleotide
gauaccggccagauagguc

SEQ ID NO: 1074026 - RNA, 19 nt, Artificial Sequence
  Description of Artificial Sequence: Synthetic oligonucleotide
cacccucucguauggauca

SEQ ID NO: 1074027 - RNA, 19 nt, Artificial Sequence
  Description of Artificial Sequence: Synthetic oligonucleotide
aucgguuugggcccagauu

SEQ ID NO: 1074028 - RNA, 19 nt, Artificial Sequence
  Description of Artificial Sequence: Synthetic oligonucleotide
uugagguaacacagucuuu

SEQ ID NO: 1074029 - RNA, 19 nt, Artificial Sequence
  Description of Artificial Sequence: Synthetic oligonucleotide
cacguggcagccagaugcc

SEQ ID NO: 1074030 - RNA, 19 nt, Artificial Sequence
  Description of Artificial Sequence: Synthetic oligonucleotide
gaggcaaauucuccgaauu

SEQ ID NO: 1074031 - RNA, 19 nt, Artificial Sequence
  Description of Artificial Sequence: Synthetic oligonucleotide
cucagcgaagagacaaaga

SEQ ID NO: 1074032 - RNA, 19 nt, Artificial Sequence
  Description of Artificial Sequence: Synthetic oligonucleotide
ugguuugguccacguggca

SEQ ID NO: 1074033 - RNA, 19 nt, Artificial Sequence
  Description of Artificial Sequence: Synthetic oligonucleotide
uugcaguggugaguggaca

SEQ ID NO: 1074034 - RNA, 19 nt, Artificial Sequence
  Description of Artificial Sequence: Synthetic oligonucleotide
caguugacaagguaauccu

SEQ ID NO: 1074035 - RNA, 19 nt, Artificial Sequence
  Description of Artificial Sequence: Synthetic oligonucleotide
uuuauaccaugggccccag

SEQ ID NO: 1074036 - RNA, 19 nt, Artificial Sequence
  Description of Artificial Sequence: Synthetic oligonucleotide
ccucucguauggaucagcc

SEQ ID NO: 1074037 - RNA, 19 nt, Artificial Sequence
  Description of Artificial Sequence: Synthetic oligonucleotide
cugaguauacaucuguguu

SEQ ID NO: 1074038 - RNA, 19 nt, Artificial Sequence
  Description of Artificial Sequence: Synthetic oligonucleotide
cacgcggauggcugacugg

SEQ ID NO: 1074039 - RNA, 19 nt, Artificial Sequence
  Description of Artificial Sequence: Synthetic oligonucleotide
ucagaaagucuugcauuua

SEQ ID NO: 1074040 - RNA, 19 nt, Artificial Sequence
  Description of Artificial Sequence: Synthetic oligonucleotide
acagugcuuaguaacuuua

SEQ ID NO: 1074041 - RNA, 19 nt, Artificial Sequence
  Description of Artificial Sequence: Synthetic oligonucleotide
uccacucggggugagcgaa

SEQ ID NO: 1074042 - RNA, 19 nt, Artificial Sequence
  Description of Artificial Sequence: Synthetic oligonucleotide
agccaggauuucccgugag

SEQ ID NO: 1074043 - RNA, 19 nt, Artificial Sequence
  Description of Artificial Sequence: Synthetic oligonucleotide
ucguauggaucagccguga

SEQ ID NO: 1074044 - RNA, 19 nt, Artificial Sequence
  Description of Artificial Sequence: Synthetic oligonucleotide
cgaagaccuucacuuaugg

SEQ ID NO: 1074045 - RNA, 19 nt, Artificial Sequence
  Description of Artificial Sequence: Synthetic oligonucleotide
acuuauggucucccagaua

SEQ ID NO: 1074046 - RNA, 19 nt, Artificial Sequence
  Description of Artificial Sequence: Synthetic oligonucleotide
uuaugacauuacagugcuu

SEQ ID NO: 1074047 - RNA, 19 nt, Artificial Sequence
  Description of Artificial Sequence: Synthetic oligonucleotide
gaucgguaguguucaaaau

SEQ ID NO: 1074048 - RNA, 19 nt, Artificial Sequence
  Description of Artificial Sequence: Synthetic oligonucleotide
agggugguuugguccacgu

SEQ ID NO: 1074049 - RNA, 19 nt, Artificial Sequence
  Description of Artificial Sequence: Synthetic oligonucleotide
gugcacaaaccaacugccc

SEQ ID NO: 1074050 - RNA, 19 nt, Artificial Sequence
  Description of Artificial Sequence: Synthetic oligonucleotide
auagguuuuguggggucau

SEQ ID NO: 1074051 - RNA, 19 nt, Artificial Sequence
  Description of Artificial Sequence: Synthetic oligonucleotide
cuccauugagccuaggguu

SEQ ID NO: 1074052 - RNA, 19 nt, Artificial Sequence
  Description of Artificial Sequence: Synthetic oligonucleotide
acgcggauggcugacugga

SEQ ID NO: 1074053 - RNA, 19 nt, Artificial Sequence
  Description of Artificial Sequence: Synthetic oligonucleotide
aggauaccggccagauagg

SEQ ID NO: 1074054 - RNA, 19 nt, Artificial Sequence
  Description of Artificial Sequence: Synthetic oligonucleotide
ggaucagccgugauguuga

SEQ ID NO: 1074055 - RNA, 19 nt, Artificial Sequence
  Description of Artificial Sequence: Synthetic oligonucleotide
uuuccucgucccagguuua

SEQ ID NO: 1074056 - RNA, 19 nt, Artificial Sequence
  Description of Artificial Sequence: Synthetic oligonucleotide
aguauacaucuguguugaa

SEQ ID NO: 1074057 - RNA, 19 nt, Artificial Sequence
  Description of Artificial Sequence: Synthetic oligonucleotide
auguuacccucuccucccu

SEQ ID NO: 1074058 - RNA, 19 nt, Artificial Sequence
  Description of Artificial Sequence: Synthetic oligonucleotide
cucauugugccaucgguuu

SEQ ID NO: 1074059 - RNA, 19 nt, Artificial Sequence
  Description of Artificial Sequence: Synthetic oligonucleotide
gugggguaccaaucuguga

SEQ ID NO: 1074060 - RNA, 19 nt, Artificial Sequence
  Description of Artificial Sequence: Synthetic oligonucleotide
gucucccagauaucauauc

SEQ ID NO: 1074061 - RNA, 19 nt, Artificial Sequence
  Description of Artificial Sequence: Synthetic oligonucleotide
uaccggccagauaggucca

SEQ ID NO: 1074062 - RNA, 19 nt, Artificial Sequence
  Description of Artificial Sequence: Synthetic oligonucleotide
ggugggguaccaaucugug

SEQ ID NO: 1074063 - RNA, 19 nt, Artificial Sequence
  Description of Artificial Sequence: Synthetic oligonucleotide
gaacugugacagucuccuc

SEQ ID NO: 1074064 - RNA, 19 nt, Artificial Sequence
  Description of Artificial Sequence: Synthetic oligonucleotide
ccgaauuaccuagaaacca

SEQ ID NO: 1074065 - RNA, 19 nt, Artificial Sequence
  Description of Artificial Sequence: Synthetic oligonucleotide
gagcgaagaccuucacuua

SEQ ID NO: 1074066 - RNA, 19 nt, Artificial Sequence
  Description of Artificial Sequence: Synthetic oligonucleotide
cgaaauuagggugggguac

SEQ ID NO: 1074067 - RNA, 19 nt, Artificial Sequence
  Description of Artificial Sequence: Synthetic oligonucleotide
auagguccacccucucgua

SEQ ID NO: 1074068 - RNA, 19 nt, Artificial Sequence
  Description of Artificial Sequence: Synthetic oligonucleotide
gugagcgaagaccuucacu

SEQ ID NO: 1074069 - RNA, 19 nt, Artificial Sequence
  Description of Artificial Sequence: Synthetic oligonucleotide
cagccagcgaaauuagggu

SEQ ID NO: 1074070 - RNA, 19 nt, Artificial Sequence
  Description of Artificial Sequence: Synthetic oligonucleotide
gggacccagucacuguagc

SEQ ID NO: 1074071 - RNA, 19 nt, Artificial Sequence
  Description of Artificial Sequence: Synthetic oligonucleotide
acgauaagaugagguguaa

SEQ ID NO: 1074072 - RNA, 19 nt, Artificial Sequence
  Description of Artificial Sequence: Synthetic oligonucleotide
agucuugcauuuagccagu

SEQ ID NO: 1074073 - RNA, 19 nt, Artificial Sequence
  Description of Artificial Sequence: Synthetic oligonucleotide
auccacucggggugagcga

SEQ ID NO: 1074074 - RNA, 19 nt, Artificial Sequence
  Description of Artificial Sequence: Synthetic oligonucleotide
gcuuccaguguugcacgcg

SEQ ID NO: 1074075 - RNA, 19 nt, Artificial Sequence
  Description of Artificial Sequence: Synthetic oligonucleotide
gcccaaguugcauauguua

SEQ ID NO: 1074076 - RNA, 19 nt, Artificial Sequence
  Description of Artificial Sequence: Synthetic oligonucleotide
uccucgucccagguuuacu

SEQ ID NO: 1074077 - RNA, 19 nt, Artificial Sequence
  Description of Artificial Sequence: Synthetic oligonucleotide
auucuccgaauuaccuaga

SEQ ID NO: 1074078 - RNA, 19 nt, Artificial Sequence
  Description of Artificial Sequence: Synthetic oligonucleotide
agucgucuuuaaucauguu

SEQ ID NO: 1074079 - RNA, 19 nt, Artificial Sequence
  Description of Artificial Sequence: Synthetic oligonucleotide
auaccucuucagagcuagg

SEQ ID NO: 1074080 - RNA, 19 nt, Artificial Sequence
  Description of Artificial Sequence: Synthetic oligonucleotide
cagauaucauauccaucua

SEQ ID NO: 1074081 - RNA, 19 nt, Artificial Sequence
  Description of Artificial Sequence: Synthetic oligonucleotide
ccuugcacacuguucccug

SEQ ID NO: 1074082 - RNA, 19 nt, Artificial Sequence
  Description of Artificial Sequence: Synthetic oligonucleotide
caccauuaucugaggaaua

SEQ ID NO: 1074083 - RNA, 19 nt, Artificial Sequence
  Description of Artificial Sequence: Synthetic oligonucleotide
cugaggaauauaugauaau

SEQ ID NO: 1074084 - RNA, 19 nt, Artificial Sequence
  Description of Artificial Sequence: Synthetic oligonucleotide
ccucucauugugccaucgg

SEQ ID NO: 1074085 - RNA, 19 nt, Artificial Sequence
  Description of Artificial Sequence: Synthetic oligonucleotide
cacaaaccaacugcccgga

SEQ ID NO: 1074086 - RNA, 19 nt, Artificial Sequence
  Description of Artificial Sequence: Synthetic oligonucleotide
cgguaguguucaaaauacc

SEQ ID NO: 1074087 - RNA, 19 nt, Artificial Sequence
  Description of Artificial Sequence: Synthetic oligonucleotide
auugagccuaggguugcuu

SEQ ID NO: 1074088 - RNA, 19 nt, Artificial Sequence
  Description of Artificial Sequence: Synthetic oligonucleotide
gcgaaauuaggguggggua

SEQ ID NO: 1074089 - RNA, 19 nt, Artificial Sequence
  Description of Artificial Sequence: Synthetic oligonucleotide
gcacgauaagaugaggugu

SEQ ID NO: 1074090 - RNA, 19 nt, Artificial Sequence
  Description of Artificial Sequence: Synthetic oligonucleotide
cagcgaaauuagggugggg

SEQ ID NO: 1074091 - RNA, 19 nt, Artificial Sequence
  Description of Artificial Sequence: Synthetic oligonucleotide
gcgaagaccuucacuuaug

SEQ ID NO: 1074092 - RNA, 19 nt, Artificial Sequence
  Description of Artificial Sequence: Synthetic oligonucleotide
ugacaggcacugcggucuu

SEQ ID NO: 1074093 - RNA, 19 nt, Artificial Sequence
  Description of Artificial Sequence: Synthetic oligonucleotide
cgauaagaugagguguaag

SEQ ID NO: 1074094 - RNA, 19 nt, Artificial Sequence
  Description of Artificial Sequence: Synthetic oligonucleotide
ggugagcgaagaccuucac

SEQ ID NO: 1074095 - RNA, 19 nt, Artificial Sequence
  Description of Artificial Sequence: Synthetic oligonucleotide
accaggcuauuuauauuua

SEQ ID NO: 1074096 - RNA, 19 nt, Artificial Sequence
  Description of Artificial Sequence: Synthetic oligonucleotide
gggugguuugguccacgug

SEQ ID NO: 1074097 - RNA, 19 nt, Artificial Sequence
  Description of Artificial Sequence: Synthetic oligonucleotide
augggcuguccaccauuau

SEQ ID NO: 1074098 - RNA, 19 nt, Artificial Sequence
  Description of Artificial Sequence: Synthetic oligonucleotide
gcacgcggauggcugacug

SEQ ID NO: 1074099 - RNA, 19 nt, Artificial Sequence
  Description of Artificial Sequence: Synthetic oligonucleotide
ccacccucucguauggauc

SEQ ID NO: 1074100 - RNA, 19 nt, Artificial Sequence
  Description of Artificial Sequence: Synthetic oligonucleotide
uugcacgcggauggcugac

SEQ ID NO: 1074101 - RNA, 19 nt, Artificial Sequence
  Description of Artificial Sequence: Synthetic oligonucleotide
ugucugggacgugguuaca

SEQ ID NO: 1074102 - RNA, 19 nt, Artificial Sequence
  Description of Artificial Sequence: Synthetic oligonucleotide
cacugcggucuuguugaac

SEQ ID NO: 1074103 - RNA, 19 nt, Artificial Sequence
  Description of Artificial Sequence: Synthetic oligonucleotide
ugguaacacuuggguggca

SEQ ID NO: 1074104 - RNA, 19 nt, Artificial Sequence
  Description of Artificial Sequence: Synthetic oligonucleotide
cugcccggaugccccuucc

SEQ ID NO: 1074105 - RNA, 19 nt, Artificial Sequence
  Description of Artificial Sequence: Synthetic oligonucleotide
ugcacgcggauggcugacu

SEQ ID NO: 1074106 - RNA, 19 nt, Artificial Sequence
  Description of Artificial Sequence: Synthetic oligonucleotide
gccuuaguuuuguuugucu

SEQ ID NO: 1074107 - RNA, 19 nt, Artificial Sequence
  Description of Artificial Sequence: Synthetic oligonucleotide
ccauugagccuaggguugc

SEQ ID NO: 1074108 - RNA, 19 nt, Artificial Sequence
  Description of Artificial Sequence: Synthetic oligonucleotide
ccuccauugagccuagggu

SEQ ID NO: 1074109 - RNA, 19 nt, Artificial Sequence
  Description of Artificial Sequence: Synthetic oligonucleotide
auggaucagccgugauguu

SEQ ID NO: 1074110 - RNA, 19 nt, Artificial Sequence
  Description of Artificial Sequence: Synthetic oligonucleotide
acccucucguauggaucag

SEQ ID NO: 1074111 - RNA, 19 nt, Artificial Sequence
  Description of Artificial Sequence: Synthetic oligonucleotide
ccaguguugcacgcggaug

SEQ ID NO: 1074112 - RNA, 19 nt, Artificial Sequence
  Description of Artificial Sequence: Synthetic oligonucleotide
agcccaaguugcauauguu

SEQ ID NO: 1074113 - RNA, 19 nt, Artificial Sequence
  Description of Artificial Sequence: Synthetic oligonucleotide
guaacacuuggguggcauu

SEQ ID NO: 1074114 - RNA, 19 nt, Artificial Sequence
  Description of Artificial Sequence: Synthetic oligonucleotide
cggccagauagguccaccc

SEQ ID NO: 1074115 - RNA, 19 nt, Artificial Sequence
  Description of Artificial Sequence: Synthetic oligonucleotide
caguggugaguggacagcu

SEQ ID NO: 1074116 - RNA, 19 nt, Artificial Sequence
  Description of Artificial Sequence: Synthetic oligonucleotide
cacucggggugagcgaaga

SEQ ID NO: 1074117 - RNA, 19 nt, Artificial Sequence
  Description of Artificial Sequence: Synthetic oligonucleotide
ccuuaguuuuguuugucuu

SEQ ID NO: 1074118 - RNA, 19 nt, Artificial Sequence
  Description of Artificial Sequence: Synthetic oligonucleotide
caugggccccagacuccuc

SEQ ID NO: 1074119 - RNA, 19 nt, Artificial Sequence
  Description of Artificial Sequence: Synthetic oligonucleotide
cccagauugcugaaagccu

SEQ ID NO: 1074120 - RNA, 19 nt, Artificial Sequence
  Description of Artificial Sequence: Synthetic oligonucleotide
ggccagauagguccacccu

SEQ ID NO: 1074121 - RNA, 19 nt, Artificial Sequence
  Description of Artificial Sequence: Synthetic oligonucleotide
cccucucguauggaucagc

SEQ ID NO: 1074122 - RNA, 19 nt, Artificial Sequence
  Description of Artificial Sequence: Synthetic oligonucleotide
caucgguuugggcccagau

SEQ ID NO: 1074123 - RNA, 19 nt, Artificial Sequence
  Description of Artificial Sequence: Synthetic oligonucleotide
gauugccguguuccagauu

SEQ ID NO: 1074124 - RNA, 19 nt, Artificial Sequence
  Description of Artificial Sequence: Synthetic oligonucleotide
ggauaccggccagauaggu

SEQ ID NO: 1074125 - RNA, 19 nt, Artificial Sequence
  Description of Artificial Sequence: Synthetic oligonucleotide
gggugggguaccaaucugu

SEQ ID NO: 1074126 - RNA, 19 nt, Artificial Sequence
  Description of Artificial Sequence: Synthetic oligonucleotide
gguuugggcccagauugcu

SEQ ID NO: 1074127 - RNA, 19 nt, Artificial Sequence
  Description of Artificial Sequence: Synthetic oligonucleotide
ggauuucccgugagcagcu

SEQ ID NO: 1074128 - RNA, 19 nt, Artificial Sequence
  Description of Artificial Sequence: Synthetic oligonucleotide
cuguaucaauagucgucuu

SEQ ID NO: 1074129 - RNA, 19 nt, Artificial Sequence
  Description of Artificial Sequence: Synthetic oligonucleotide
ccacucggggugagcgaag

SEQ ID NO: 1074130 - RNA, 19 nt, Artificial Sequence
  Description of Artificial Sequence: Synthetic oligonucleotide
ccggccagauagguccacc

SEQ ID NO: 1074131 - RNA, 19 nt, Artificial Sequence
  Description of Artificial Sequence: Synthetic oligonucleotide
gcggauggcugacuggauu

SEQ ID NO: 1074132 - RNA, 19 nt, Artificial Sequence
  Description of Artificial Sequence: Synthetic oligonucleotide
ggggcuugcaguggugagu

SEQ ID NO: 1074133 - RNA, 19 nt, Artificial Sequence
  Description of Artificial Sequence: Synthetic oligonucleotide
ccauaccucuucagagcua

SEQ ID NO: 1074134 - RNA, 19 nt, Artificial Sequence
  Description of Artificial Sequence: Synthetic oligonucleotide
caacugcccggaugccccu

SEQ ID NO: 1074135 - RNA, 19 nt, Artificial Sequence
  Description of Artificial Sequence: Synthetic oligonucleotide
cuuuggcacucaggagggu

SEQ ID NO: 1074136 - RNA, 19 nt, Artificial Sequence
  Description of Artificial Sequence: Synthetic oligonucleotide
gcacugcggucuuguugaa

SEQ ID NO: 1074137 - RNA, 19 nt, Artificial Sequence
  Description of Artificial Sequence: Synthetic oligonucleotide
cguauggaucagccgugau

SEQ ID NO: 1074138 - RNA, 19 nt, Artificial Sequence
  Description of Artificial Sequence: Synthetic oligonucleotide
cggggugagcgaagaccuu

SEQ ID NO: 1074139 - RNA, 19 nt, Artificial Sequence
  Description of Artificial Sequence: Synthetic oligonucleotide
aaauggaucaucuaaaauc

SEQ ID NO: 1074140 - RNA, 19 nt, Artificial Sequence
  Description of Artificial Sequence: Synthetic oligonucleotide
aauauggcuagauaguacc

SEQ ID NO: 1074141 - RNA, 19 nt, Artificial Sequence
  Description of Artificial Sequence: Synthetic oligonucleotide
uguaugaacaccaucaagg

SEQ ID NO: 1074142 - RNA, 19 nt, Artificial Sequence
  Description of Artificial Sequence: Synthetic oligonucleotide
gaauuaguaaaucaggagg

SEQ ID NO: 1074143 - RNA, 19 nt, Artificial Sequence
  Description of Artificial Sequence: Synthetic oligonucleotide
uaucauaucauuuauauaa

SEQ ID NO: 1074144 - RNA, 19 nt, Artificial Sequence
  Description of Artificial Sequence: Synthetic oligonucleotide
aaugauaauuccuggaggg

SEQ ID NO: 1074145 - RNA, 19 nt, Artificial Sequence
  Description of Artificial Sequence: Synthetic oligonucleotide
ugaaagauguuaaauauag

SEQ ID NO: 1074146 - RNA, 19 nt, Artificial Sequence
  Description of Artificial Sequence: Synthetic oligonucleotide
uucauaauggccaaaaccc

SEQ ID NO: 1074147 - RNA, 19 nt, Artificial Sequence
  Description of Artificial Sequence: Synthetic oligonucleotide
uauaaaauuaacagcaggc

SEQ ID NO: 1074148 - RNA, 19 nt, Artificial Sequence
  Description of Artificial Sequence: Synthetic oligonucleotide
uucaauaaaagcauaacac

SEQ ID NO: 1074149 - RNA, 19 nt, Artificial Sequence
  Description of Artificial Sequence: Synthetic oligonucleotide
aaaacuauauaaaauuaac

SEQ ID NO: 1074150 - RNA, 19 nt, Artificial Sequence
  Description of Artificial Sequence: Synthetic oligonucleotide
accacuaucuaauuguucc

SEQ ID NO: 1074151 - RNA, 19 nt, Artificial Sequence
  Description of Artificial Sequence: Synthetic oligonucleotide
aauuggaugguuuaucuug

SEQ ID NO: 1074152 - RNA, 19 nt, Artificial Sequence
  Description of Artificial Sequence: Synthetic oligonucleotide
aauuaguaaaucaggaggg

SEQ ID NO: 1074153 - RNA, 19 nt, Artificial Sequence
  Description of Artificial Sequence: Synthetic oligonucleotide
uaagcaaccauaauuauaa

SEQ ID NO: 1074154 - RNA, 19 nt, Artificial Sequence
  Description of Artificial Sequence: Synthetic oligonucleotide
ucaggaauuaguaaaucag

SEQ ID NO: 1074155 - RNA, 19 nt, Artificial Sequence
  Description of Artificial Sequence: Synthetic oligonucleotide
uuuaauuaucugcaucggg

SEQ ID NO: 1074156 - RNA, 19 nt, Artificial Sequence
  Description of Artificial Sequence: Synthetic oligonucleotide
aaugcuaccauguaugcau

SEQ ID NO: 1074157 - RNA, 19 nt, Artificial Sequence
  Description of Artificial Sequence: Synthetic oligonucleotide
aauauagaaugcuaccaug

SEQ ID NO: 1074158 - RNA, 19 nt, Artificial Sequence
  Description of Artificial Sequence: Synthetic oligonucleotide
uuaauuaucugcaucgggu

SEQ ID NO: 1074159 - RNA, 19 nt, Artificial Sequence
  Description of Artificial Sequence: Synthetic oligonucleotide
gaauauuaucuccaggucc

SEQ ID NO: 1074160 - RNA, 19 nt, Artificial Sequence
  Description of Artificial Sequence: Synthetic oligonucleotide
uuucuuauauacaauuuac

SEQ ID NO: 1074161 - RNA, 19 nt, Artificial Sequence
  Description of Artificial Sequence: Synthetic oligonucleotide
aaacuaagcaaccauaauu

SEQ ID NO: 1074162 - RNA, 19 nt, Artificial Sequence
  Description of Artificial Sequence: Synthetic oligonucleotide
acaauuuacagauaucugu

SEQ ID NO: 1074163 - RNA, 19 nt, Artificial Sequence
  Description of Artificial Sequence: Synthetic oligonucleotide
acauauggaacuuccauag

SEQ ID NO: 1074164 - RNA, 19 nt, Artificial Sequence
  Description of Artificial Sequence: Synthetic oligonucleotide
acaacuuacuauuuauuuc

SEQ ID NO: 1074165 - RNA, 19 nt, Artificial Sequence
  Description of Artificial Sequence: Synthetic oligonucleotide
agaaugauaauuccuggag

SEQ ID NO: 1074166 - RNA, 19 nt, Artificial Sequence
  Description of Artificial Sequence: Synthetic oligonucleotide
gaaugauaauuccuggagg

SEQ ID NO: 1074167 - RNA, 19 nt, Artificial Sequence
  Description of Artificial Sequence: Synthetic oligonucleotide
ucuaauuguucccuuguag

SEQ ID NO: 1074168 - RNA, 19 nt, Artificial Sequence
  Description of Artificial Sequence: Synthetic oligonucleotide
aauggaucaucuaaaauca

SEQ ID NO: 1074169 - RNA, 19 nt, Artificial Sequence
  Description of Artificial Sequence: Synthetic oligonucleotide
ucuuacuacagccagguau

SEQ ID NO: 1074170 - RNA, 19 nt, Artificial Sequence
  Description of Artificial Sequence: Synthetic oligonucleotide
aaacauauaucauaucauu

SEQ ID NO: 1074171 - RNA, 19 nt, Artificial Sequence
  Description of Artificial Sequence: Synthetic oligonucleotide
aauucaaacaauauggcua

SEQ ID NO: 1074172 - RNA, 19 nt, Artificial Sequence
  Description of Artificial Sequence: Synthetic oligonucleotide
ucauuuauauaaaauucaa

SEQ ID NO: 1074173 - RNA, 19 nt, Artificial Sequence
  Description of Artificial Sequence: Synthetic oligonucleotide
uuaacuauguccaugccuu

SEQ ID NO: 1074174 - RNA, 19 nt, Artificial Sequence
  Description of Artificial Sequence: Synthetic oligonucleotide
ugcauaacaauaaaauuua

SEQ ID NO: 1074175 - RNA, 19 nt, Artificial Sequence
  Description of Artificial Sequence: Synthetic oligonucleotide
aaacuauauaaaauuaaca

SEQ ID NO: 1074176 - RNA, 19 nt, Artificial Sequence
  Description of Artificial Sequence: Synthetic oligonucleotide
aaauccuugucuacaaacg

SEQ ID NO: 1074177 - RNA, 19 nt, Artificial Sequence
  Description of Artificial Sequence: Synthetic oligonucleotide
aucuaugaguacauuaucc

SEQ ID NO: 1074178 - RNA, 19 nt, Artificial Sequence
  Description of Artificial Sequence: Synthetic oligonucleotide
ugagaauauuaucuccagg

SEQ ID NO: 1074179 - RNA, 19 nt, Artificial Sequence
  Description of Artificial Sequence: Synthetic oligonucleotide
ucagaaugauaauuccugg

SEQ ID NO: 1074180 - RNA, 19 nt, Artificial Sequence
  Description of Artificial Sequence: Synthetic oligonucleotide
cauacuagauaaacuaagc

SEQ ID NO: 1074181 - RNA, 19 nt, Artificial Sequence
  Description of Artificial Sequence: Synthetic oligonucleotide
gauaguaccacgcccagac

SEQ ID NO: 1074182 - RNA, 19 nt, Artificial Sequence
  Description of Artificial Sequence: Synthetic oligonucleotide
auucauuacaacuaccuaa

SEQ ID NO: 1074183 - RNA, 19 nt, Artificial Sequence
  Description of Artificial Sequence: Synthetic oligonucleotide
uucacaacuucuuauuggc

SEQ ID NO: 1074184 - RNA, 19 nt, Artificial Sequence
  Description of Artificial Sequence: Synthetic oligonucleotide
ucuaugaguacauuaucca

SEQ ID NO: 1074185 - RNA, 19 nt, Artificial Sequence
  Description of Artificial Sequence: Synthetic oligonucleotide
auauggaacuuccauagug

SEQ ID NO: 1074186 - RNA, 19 nt, Artificial Sequence
  Description of Artificial Sequence: Synthetic oligonucleotide
uucuuaacuauguccaugc

SEQ ID NO: 1074187 - RNA, 19 nt, Artificial Sequence
  Description of Artificial Sequence: Synthetic oligonucleotide
gauuuauccugauaucuug

SEQ ID NO: 1074188 - RNA, 19 nt, Artificial Sequence
  Description of Artificial Sequence: Synthetic oligonucleotide
cuagauaaacuaagcaacc

SEQ ID NO: 1074189 - RNA, 19 nt, Artificial Sequence
  Description of Artificial Sequence: Synthetic oligonucleotide
uucuuauauacaauuuaca

SEQ ID NO: 1074190 - RNA, 19 nt, Artificial Sequence
  Description of Artificial Sequence: Synthetic oligonucleotide
acuggauucaauuuacaca

SEQ ID NO: 1074191 - RNA, 19 nt, Artificial Sequence
  Description of Artificial Sequence: Synthetic oligonucleotide
uguaugcauaacaauaaaa

SEQ ID NO: 1074192 - RNA, 19 nt, Artificial Sequence
  Description of Artificial Sequence: Synthetic oligonucleotide
ucuaauauaagaucauauu

SEQ ID NO: 1074193 - RNA, 19 nt, Artificial Sequence
  Description of Artificial Sequence: Synthetic oligonucleotide
caggaauuaguaaaucagg

SEQ ID NO: 1074194 - RNA, 19 nt, Artificial Sequence
  Description of Artificial Sequence: Synthetic oligonucleotide
uuuaaccuuugcaacagac

SEQ ID NO: 1074195 - RNA, 19 nt, Artificial Sequence
  Description of Artificial Sequence: Synthetic oligonucleotide
ugaucgaucaggaauuagu

SEQ ID NO: 1074196 - RNA, 19 nt, Artificial Sequence
  Description of Artificial Sequence: Synthetic oligonucleotide
agaaugcuaccauguaugc

SEQ ID NO: 1074197 - RNA, 19 nt, Artificial Sequence
  Description of Artificial Sequence: Synthetic oligonucleotide
ucuacaaacgucucauuga

SEQ ID NO: 1074198 - RNA, 19 nt, Artificial Sequence
  Description of Artificial Sequence: Synthetic oligonucleotide
agggucaucaaauggauca

SEQ ID NO: 1074199 - RNA, 19 nt, Artificial Sequence
  Description of Artificial Sequence: Synthetic oligonucleotide
uuuugauuggcauguauuc

SEQ ID NO: 1074200 - RNA, 19 nt, Artificial Sequence
  Description of Artificial Sequence: Synthetic oligonucleotide
aucuugagaauauuaucuc

SEQ ID NO: 1074201 - RNA, 19 nt, Artificial Sequence
  Description of Artificial Sequence: Synthetic oligonucleotide
uguuaaauauagaaugcua

SEQ ID NO: 1074202 - RNA, 19 nt, Artificial Sequence
  Description of Artificial Sequence: Synthetic oligonucleotide
aauccuugucuacaaacgu

SEQ ID NO: 1074203 - RNA, 19 nt, Artificial Sequence
  Description of Artificial Sequence: Synthetic oligonucleotide
auacuagauaaacuaagca

SEQ ID NO: 1074204 - RNA, 19 nt, Artificial Sequence
  Description of Artificial Sequence: Synthetic oligonucleotide
ucgaucaggaauuaguaaa

SEQ ID NO: 1074205 - RNA, 19 nt, Artificial Sequence
  Description of Artificial Sequence: Synthetic oligonucleotide
cauaacacagggauucucc

SEQ ID NO: 1074206 - RNA, 19 nt, Artificial Sequence
  Description of Artificial Sequence: Synthetic oligonucleotide
acaaaacguucacaguggc

SEQ ID NO: 1074207 - RNA, 19 nt, Artificial Sequence
  Description of Artificial Sequence: Synthetic oligonucleotide
acaaacgucucauugauuu

SEQ ID NO: 1074208 - RNA, 19 nt, Artificial Sequence
  Description of Artificial Sequence: Synthetic oligonucleotide
auuguucccuuguagguuc

SEQ ID NO: 1074209 - RNA, 19 nt, Artificial Sequence
  Description of Artificial Sequence: Synthetic oligonucleotide
ugcucaucuaauauaagau

SEQ ID NO: 1074210 - RNA, 19 nt, Artificial Sequence
  Description of Artificial Sequence: Synthetic oligonucleotide
auauaagaucauauuuugc

SEQ ID NO: 1074211 - RNA, 19 nt, Artificial Sequence
  Description of Artificial Sequence: Synthetic oligonucleotide
agguuuaauuaucugcauc

SEQ ID NO: 1074212 - RNA, 19 nt, Artificial Sequence
  Description of Artificial Sequence: Synthetic oligonucleotide
uguagauauccugauuagg

SEQ ID NO: 1074213 - RNA, 19 nt, Artificial Sequence
  Description of Artificial Sequence: Synthetic oligonucleotide
uggaucaucuaaaaucacu

SEQ ID NO: 1074214 - RNA, 19 nt, Artificial Sequence
  Description of Artificial Sequence: Synthetic oligonucleotide
aucaggaauuaguaaauca

SEQ ID NO: 1074215 - RNA, 19 nt, Artificial Sequence
  Description of Artificial Sequence: Synthetic oligonucleotide
agguauacaacuuacuauu

SEQ ID NO: 1074216 - RNA, 19 nt, Artificial Sequence
  Description of Artificial Sequence: Synthetic oligonucleotide
aacuaagcaaccauaauua

SEQ ID NO: 1074217 - RNA, 19 nt, Artificial Sequence
  Description of Artificial Sequence: Synthetic oligonucleotide
auaaaauuaacagcaggca

SEQ ID NO: 1074218 - RNA, 19 nt, Artificial Sequence
  Description of Artificial Sequence: Synthetic oligonucleotide
uuugcauccuguuuuggcu

SEQ ID NO: 1074219 - RNA, 19 nt, Artificial Sequence
  Description of Artificial Sequence: Synthetic oligonucleotide
uaugaguacauuauccauu

SEQ ID NO: 1074220 - RNA, 19 nt, Artificial Sequence
  Description of Artificial Sequence: Synthetic oligonucleotide
uccuugucuacaaacgucu

SEQ ID NO: 1074221 - RNA, 19 nt, Artificial Sequence
  Description of Artificial Sequence: Synthetic oligonucleotide
uggcauguauuccucauca

SEQ ID NO: 1074222 - RNA, 19 nt, Artificial Sequence
  Description of Artificial Sequence: Synthetic oligonucleotide
uuaaccuuugcaacagacu

SEQ ID NO: 1074223 - RNA, 19 nt, Artificial Sequence
  Description of Artificial Sequence: Synthetic oligonucleotide
uugauuggcauguauuccu

SEQ ID NO: 1074224 - RNA, 19 nt, Artificial Sequence
  Description of Artificial Sequence: Synthetic oligonucleotide
gacaaaacguucacagugg

SEQ ID NO: 1074225 - RNA, 19 nt, Artificial Sequence
  Description of Artificial Sequence: Synthetic oligonucleotide
gcugcuacuauagugaccg

SEQ ID NO: 1074226 - RNA, 19 nt, Artificial Sequence
  Description of Artificial Sequence: Synthetic oligonucleotide
auggcuagauaguaccacg

SEQ ID NO: 1074227 - RNA, 19 nt, Artificial Sequence
  Description of Artificial Sequence: Synthetic oligonucleotide
aucugcaucggguaggucu

SEQ ID NO: 1074228 - RNA, 19 nt, Artificial Sequence
  Description of Artificial Sequence: Synthetic oligonucleotide
uccauagugagugacacuc

SEQ ID NO: 1074229 - RNA, 19 nt, Artificial Sequence
  Description of Artificial Sequence: Synthetic oligonucleotide
ucgagaucggcuccgacug

SEQ ID NO: 1074230 - RNA, 19 nt, Artificial Sequence
  Description of Artificial Sequence: Synthetic oligonucleotide
ggaugguuuaucuuguucc

SEQ ID NO: 1074231 - RNA, 19 nt, Artificial Sequence
  Description of Artificial Sequence: Synthetic oligonucleotide
cauauucauuacaacuacc

SEQ ID NO: 1074232 - RNA, 19 nt, Artificial Sequence
  Description of Artificial Sequence: Synthetic oligonucleotide
augaacaccaucaagguaa

SEQ ID NO: 1074233 - RNA, 19 nt, Artificial Sequence
  Description of Artificial Sequence: Synthetic oligonucleotide
auaagaucauauuuugcau

SEQ ID NO: 1074234 - RNA, 19 nt, Artificial Sequence
  Description of Artificial Sequence: Synthetic oligonucleotide
uauccgaccacuaucuaau

SEQ ID NO: 1074235 - RNA, 19 nt, Artificial Sequence
  Description of Artificial Sequence: Synthetic oligonucleotide
ggaauuaguaaaucaggag

SEQ ID NO: 1074236 - RNA, 19 nt, Artificial Sequence
  Description of Artificial Sequence: Synthetic oligonucleotide
uuugauuggcauguauucc

SEQ ID NO: 1074237 - RNA, 19 nt, Artificial Sequence
  Description of Artificial Sequence: Synthetic oligonucleotide
uguuuuccaaucucgaaua

SEQ ID NO: 1074238 - RNA, 19 nt, Artificial Sequence
  Description of Artificial Sequence: Synthetic oligonucleotide
augauuuauccugauaucu

SEQ ID NO: 1074239 - RNA, 19 nt, Artificial Sequence
  Description of Artificial Sequence: Synthetic oligonucleotide
acauacuagauaaacuaag

SEQ ID NO: 1074240 - RNA, 19 nt, Artificial Sequence
  Description of Artificial Sequence: Synthetic oligonucleotide
uuguagguucuggugaucg

SEQ ID NO: 1074241 - RNA, 19 nt, Artificial Sequence
  Description of Artificial Sequence: Synthetic oligonucleotide
gucuacaaacgucucauug

SEQ ID NO: 1074242 - RNA, 19 nt, Artificial Sequence
  Description of Artificial Sequence: Synthetic oligonucleotide
aaacacuguaugaacacca

SEQ ID NO: 1074243 - RNA, 19 nt, Artificial Sequence
  Description of Artificial Sequence: Synthetic oligonucleotide
ugagugacuugauuuugag

SEQ ID NO: 1074244 - RNA, 19 nt, Artificial Sequence
  Description of Artificial Sequence: Synthetic oligonucleotide
auagaaugcuaccauguau

SEQ ID NO: 1074245 - RNA, 19 nt, Artificial Sequence
  Description of Artificial Sequence: Synthetic oligonucleotide
uaugauuuauccugauauc

SEQ ID NO: 1074246 - RNA, 19 nt, Artificial Sequence
  Description of Artificial Sequence: Synthetic oligonucleotide
uaccauguaugcauaacaa

SEQ ID NO: 1074247 - RNA, 19 nt, Artificial Sequence
  Description of Artificial Sequence: Synthetic oligonucleotide
ucucccaacagcuuucuuc

SEQ ID NO: 1074248 - RNA, 19 nt, Artificial Sequence
  Description of Artificial Sequence: Synthetic oligonucleotide
uccuauccgaccacuaucu

SEQ ID NO: 1074249 - RNA, 19 nt, Artificial Sequence
  Description of Artificial Sequence: Synthetic oligonucleotide
uauucauuacaacuaccua

SEQ ID NO: 1074250 - RNA, 19 nt, Artificial Sequence
  Description of Artificial Sequence: Synthetic oligonucleotide
cugcuagccauucauuucc

SEQ ID NO: 1074251 - RNA, 19 nt, Artificial Sequence
  Description of Artificial Sequence: Synthetic oligonucleotide
uuauuggcccaaaucuuga

SEQ ID NO: 1074252 - RNA, 19 nt, Artificial Sequence
  Description of Artificial Sequence: Synthetic oligonucleotide
ucaucuaauauaagaucau

SEQ ID NO: 1074253 - RNA, 19 nt, Artificial Sequence
  Description of Artificial Sequence: Synthetic oligonucleotide
guagauauccugauuagga

SEQ ID NO: 1074254 - RNA, 19 nt, Artificial Sequence
  Description of Artificial Sequence: Synthetic oligonucleotide
aaucucgaauaacuucaca

SEQ ID NO: 1074255 - RNA, 19 nt, Artificial Sequence
  Description of Artificial Sequence: Synthetic oligonucleotide
agggacauauggaacuucc

SEQ ID NO: 1074256 - RNA, 19 nt, Artificial Sequence
  Description of Artificial Sequence: Synthetic oligonucleotide
ugauuuauccugauaucuu

SEQ ID NO: 1074257 - RNA, 19 nt, Artificial Sequence
  Description of Artificial Sequence: Synthetic oligonucleotide
ccagacaaaacguucacag

SEQ ID NO: 1074258 - RNA, 19 nt, Artificial Sequence
  Description of Artificial Sequence: Synthetic oligonucleotide
guuuaauuaucugcaucgg

SEQ ID NO: 1074259 - RNA, 19 nt, Artificial Sequence
  Description of Artificial Sequence: Synthetic oligonucleotide
uagauaaacuaagcaacca

SEQ ID NO: 1074260 - RNA, 19 nt, Artificial Sequence
  Description of Artificial Sequence: Synthetic oligonucleotide
uguaugauuuauccugaua

SEQ ID NO: 1074261 - RNA, 19 nt, Artificial Sequence
  Description of Artificial Sequence: Synthetic oligonucleotide
uaauuaucugcaucgggua

SEQ ID NO: 1074262 - RNA, 19 nt, Artificial Sequence
  Description of Artificial Sequence: Synthetic oligonucleotide
cuagauaguaccacgccca

SEQ ID NO: 1074263 - RNA, 19 nt, Artificial Sequence
  Description of Artificial Sequence: Synthetic oligonucleotide
aaccaaauuggaugguuua

SEQ ID NO: 1074264 - RNA, 19 nt, Artificial Sequence
  Description of Artificial Sequence: Synthetic oligonucleotide
uguuucucccaacagcuuu

SEQ ID NO: 1074265 - RNA, 19 nt, Artificial Sequence
  Description of Artificial Sequence: Synthetic oligonucleotide
uggcuagauaguaccacgc

SEQ ID NO: 1074266 - RNA, 19 nt, Artificial Sequence
  Description of Artificial Sequence: Synthetic oligonucleotide
cuaauauaagaucauauuu

SEQ ID NO: 1074267 - RNA, 19 nt, Artificial Sequence
  Description of Artificial Sequence: Synthetic oligonucleotide
auacacauccacauacuag

SEQ ID NO: 1074268 - RNA, 19 nt, Artificial Sequence
  Description of Artificial Sequence: Synthetic oligonucleotide
acacuguaugaacaccauc

SEQ ID NO: 1074269 - RNA, 19 nt, Artificial Sequence
  Description of Artificial Sequence: Synthetic oligonucleotide
agugagugacacuccaucu

SEQ ID NO: 1074270 - RNA, 19 nt, Artificial Sequence
  Description of Artificial Sequence: Synthetic oligonucleotide
aggaauuaguaaaucagga

SEQ ID NO: 1074271 - RNA, 19 nt, Artificial Sequence
  Description of Artificial Sequence: Synthetic oligonucleotide
uccgaccacuaucuaauug

SEQ ID NO: 1074272 - RNA, 19 nt, Artificial Sequence
  Description of Artificial Sequence: Synthetic oligonucleotide
ucuugguguauuucccacc

SEQ ID NO: 1074273 - RNA, 19 nt, Artificial Sequence
  Description of Artificial Sequence: Synthetic oligonucleotide
uuuauccugauaucuugau

SEQ ID NO: 1074274 - RNA, 19 nt, Artificial Sequence
  Description of Artificial Sequence: Synthetic oligonucleotide
uagauauccugauuaggau

SEQ ID NO: 1074275 - RNA, 19 nt, Artificial Sequence
  Description of Artificial Sequence: Synthetic oligonucleotide
cuguagauauccugauuag

SEQ ID NO: 1074276 - RNA, 19 nt, Artificial Sequence
  Description of Artificial Sequence: Synthetic oligonucleotide
aacagugacguguuuucuu

SEQ ID NO: 1074277 - RNA, 19 nt, Artificial Sequence
  Description of Artificial Sequence: Synthetic oligonucleotide
acucaaaaccucaucaaca

SEQ ID NO: 1074278 - RNA, 19 nt, Artificial Sequence
  Description of Artificial Sequence: Synthetic oligonucleotide
caacuuacuauuuauuucu

SEQ ID NO: 1074279 - RNA, 19 nt, Artificial Sequence
  Description of Artificial Sequence: Synthetic oligonucleotide
aucggguaggucucccacc

SEQ ID NO: 1074280 - RNA, 19 nt, Artificial Sequence
  Description of Artificial Sequence: Synthetic oligonucleotide
acaaaauccuugucuacaa

SEQ ID NO: 1074281 - RNA, 19 nt, Artificial Sequence
  Description of Artificial Sequence: Synthetic oligonucleotide
aucuaauauaagaucauau

SEQ ID NO: 1074282 - RNA, 19 nt, Artificial Sequence
  Description of Artificial Sequence: Synthetic oligonucleotide
auaacacagggauucuccu

SEQ ID NO: 1074283 - RNA, 19 nt, Artificial Sequence
  Description of Artificial Sequence: Synthetic oligonucleotide
auggaacaaaauccuuguc

SEQ ID NO: 1074284 - RNA, 19 nt, Artificial Sequence
  Description of Artificial Sequence: Synthetic oligonucleotide
gacauauggaacuuccaua

SEQ ID NO: 1074285 - RNA, 19 nt, Artificial Sequence
  Description of Artificial Sequence: Synthetic oligonucleotide
cugcucaucuaauauaaga

SEQ ID NO: 1074286 - RNA, 19 nt, Artificial Sequence
  Description of Artificial Sequence: Synthetic oligonucleotide
uauuggcccaaaucuugag

SEQ ID NO: 1074287 - RNA, 19 nt, Artificial Sequence
  Description of Artificial Sequence: Synthetic oligonucleotide
uagauaguaccacgcccag

SEQ ID NO: 1074288 - RNA, 19 nt, Artificial Sequence
  Description of Artificial Sequence: Synthetic oligonucleotide
uggugaucgaucaggaauu

SEQ ID NO: 1074289 - RNA, 19 nt, Artificial Sequence
  Description of Artificial Sequence: Synthetic oligonucleotide
acaacucagaaugauaauu

SEQ ID NO: 1074290 - RNA, 19 nt, Artificial Sequence
  Description of Artificial Sequence: Synthetic oligonucleotide
uuauccugauaucuugaua

SEQ ID NO: 1074291 - RNA, 19 nt, Artificial Sequence
  Description of Artificial Sequence: Synthetic oligonucleotide
uuuuccaaucucgaauaac

SEQ ID NO: 1074292 - RNA, 19 nt, Artificial Sequence
  Description of Artificial Sequence: Synthetic oligonucleotide
uccgacugcgguucugacg

SEQ ID NO: 1074293 - RNA, 19 nt, Artificial Sequence
  Description of Artificial Sequence: Synthetic oligonucleotide
ugacacuccaucucuuacu

SEQ ID NO: 1074294 - RNA, 19 nt, Artificial Sequence
  Description of Artificial Sequence: Synthetic oligonucleotide
ugguguauuucccaccuuu

SEQ ID NO: 1074295 - RNA, 19 nt, Artificial Sequence
  Description of Artificial Sequence: Synthetic oligonucleotide
uauggcuagauaguaccac

SEQ ID NO: 1074296 - RNA, 19 nt, Artificial Sequence
  Description of Artificial Sequence: Synthetic oligonucleotide
aaacguucacaguggcacu

SEQ ID NO: 1074297 - RNA, 19 nt, Artificial Sequence
  Description of Artificial Sequence: Synthetic oligonucleotide
cuaccauguaugcauaaca

SEQ ID NO: 1074298 - RNA, 19 nt, Artificial Sequence
  Description of Artificial Sequence: Synthetic oligonucleotide
uggaacuuccauagugagu

SEQ ID NO: 1074299 - RNA, 19 nt, Artificial Sequence
  Description of Artificial Sequence: Synthetic oligonucleotide
cuuccauagugagugacac

SEQ ID NO: 1074300 - RNA, 19 nt, Artificial Sequence
  Description of Artificial Sequence: Synthetic oligonucleotide
ucggguaggucucccacca

SEQ ID NO: 1074301 - RNA, 19 nt, Artificial Sequence
  Description of Artificial Sequence: Synthetic oligonucleotide
agugaccgucccuuucucg

SEQ ID NO: 1074302 - RNA, 19 nt, Artificial Sequence
  Description of Artificial Sequence: Synthetic oligonucleotide
uuguggcuaccccugcucc

SEQ ID NO: 1074303 - RNA, 19 nt, Artificial Sequence
  Description of Artificial Sequence: Synthetic oligonucleotide
caccaaacacuguaugaac

SEQ ID NO: 1074304 - RNA, 19 nt, Artificial Sequence
  Description of Artificial Sequence: Synthetic oligonucleotide
acugcuuagauuagcaaaa

SEQ ID NO: 1074305 - RNA, 19 nt, Artificial Sequence
  Description of Artificial Sequence: Synthetic oligonucleotide
aacguucacaguggcacug

SEQ ID NO: 1074306 - RNA, 19 nt, Artificial Sequence
  Description of Artificial Sequence: Synthetic oligonucleotide
ucugcaucggguaggucuc

SEQ ID NO: 1074307 - RNA, 19 nt, Artificial Sequence
  Description of Artificial Sequence: Synthetic oligonucleotide
caucuaugaguacauuauc

SEQ ID NO: 1074308 - RNA, 19 nt, Artificial Sequence
  Description of Artificial Sequence: Synthetic oligonucleotide
gcuagauaguaccacgccc

SEQ ID NO: 1074309 - RNA, 19 nt, Artificial Sequence
  Description of Artificial Sequence: Synthetic oligonucleotide
cauguauucuccugucauc

SEQ ID NO: 1074310 - RNA, 19 nt, Artificial Sequence
  Description of Artificial Sequence: Synthetic oligonucleotide
auuaguaaaucaggagggu

SEQ ID NO: 1074311 - RNA, 19 nt, Artificial Sequence
  Description of Artificial Sequence: Synthetic oligonucleotide
agauaucugugguaugaaa

SEQ ID NO: 1074312 - RNA, 19 nt, Artificial Sequence
  Description of Artificial Sequence: Synthetic oligonucleotide
ucugacgucggucucucuu

SEQ ID NO: 1074313 - RNA, 19 nt, Artificial Sequence
  Description of Artificial Sequence: Synthetic oligonucleotide
cuuugcaacagacuggcua

SEQ ID NO: 1074314 - RNA, 19 nt, Artificial Sequence
  Description of Artificial Sequence: Synthetic oligonucleotide
ugauuggcauguauuccuc

SEQ ID NO: 1074315 - RNA, 19 nt, Artificial Sequence
  Description of Artificial Sequence: Synthetic oligonucleotide
auuggcauguauuccucau

SEQ ID NO: 1074316 - RNA, 19 nt, Artificial Sequence
  Description of Artificial Sequence: Synthetic oligonucleotide
acuguaugaacaccaucaa

SEQ ID NO: 1074317 - RNA, 19 nt, Artificial Sequence
  Description of Artificial Sequence: Synthetic oligonucleotide
cuuucucgagaucggcucc

SEQ ID NO: 1074318 - RNA, 19 nt, Artificial Sequence
  Description of Artificial Sequence: Synthetic oligonucleotide
cuaagcaaccauaauuaua

SEQ ID NO: 1074319 - RNA, 19 nt, Artificial Sequence
  Description of Artificial Sequence: Synthetic oligonucleotide
ggagguuuaauuaucugca

SEQ ID NO: 1074320 - RNA, 19 nt, Artificial Sequence
  Description of Artificial Sequence: Synthetic oligonucleotide
agguucuggugaucgauca

SEQ ID NO: 1074321 - RNA, 19 nt, Artificial Sequence
  Description of Artificial Sequence: Synthetic oligonucleotide
uaauggccaaaacccauuu

SEQ ID NO: 1074322 - RNA, 19 nt, Artificial Sequence
  Description of Artificial Sequence: Synthetic oligonucleotide
cuacuauagugaccguccc

SEQ ID NO: 1074323 - RNA, 19 nt, Artificial Sequence
  Description of Artificial Sequence: Synthetic oligonucleotide
caucucuagaagaauagcu

SEQ ID NO: 1074324 - RNA, 19 nt, Artificial Sequence
  Description of Artificial Sequence: Synthetic oligonucleotide
cucuugguguauuucccac

SEQ ID NO: 1074325 - RNA, 19 nt, Artificial Sequence
  Description of Artificial Sequence: Synthetic oligonucleotide
cagaaugauaauuccugga

SEQ ID NO: 1074326 - RNA, 19 nt, Artificial Sequence
  Description of Artificial Sequence: Synthetic oligonucleotide
gaaagauguuaaauauaga

SEQ ID NO: 1074327 - RNA, 19 nt, Artificial Sequence
  Description of Artificial Sequence: Synthetic oligonucleotide
cugucacuucaccaaacac

SEQ ID NO: 1074328 - RNA, 19 nt, Artificial Sequence
  Description of Artificial Sequence: Synthetic oligonucleotide
uggauucaauuuacacaca

SEQ ID NO: 1074329 - RNA, 19 nt, Artificial Sequence
  Description of Artificial Sequence: Synthetic oligonucleotide
uuggcauguauuccucauc

SEQ ID NO: 1074330 - RNA, 19 nt, Artificial Sequence
  Description of Artificial Sequence: Synthetic oligonucleotide
gcucaucuaauauaagauc

SEQ ID NO: 1074331 - RNA, 19 nt, Artificial Sequence
  Description of Artificial Sequence: Synthetic oligonucleotide
cuuaacuauguccaugccu

SEQ ID NO: 1074332 - RNA, 19 nt, Artificial Sequence
  Description of Artificial Sequence: Synthetic oligonucleotide
gaugguuuaucuuguuccu

SEQ ID NO: 1074333 - RNA, 19 nt, Artificial Sequence
  Description of Artificial Sequence: Synthetic oligonucleotide
acacuccaucucuuacuac

SEQ ID NO: 1074334 - RNA, 19 nt, Artificial Sequence
  Description of Artificial Sequence: Synthetic oligonucleotide
cauagugagugacacucca

SEQ ID NO: 1074335 - RNA, 19 nt, Artificial Sequence
  Description of Artificial Sequence: Synthetic oligonucleotide
gauuggcauguauuccuca

SEQ ID NO: 1074336 - RNA, 19 nt, Artificial Sequence
  Description of Artificial Sequence: Synthetic oligonucleotide
auuggaugguuuaucuugu

SEQ ID NO: 1074337 - RNA, 19 nt, Artificial Sequence
  Description of Artificial Sequence: Synthetic oligonucleotide
acuaucuaauuguucccuu

SEQ ID NO: 1074338 - RNA, 19 nt, Artificial Sequence
  Description of Artificial Sequence: Synthetic oligonucleotide
acgucggucucucuuuuca

SEQ ID NO: 1074339 - RNA, 19 nt, Artificial Sequence
  Description of Artificial Sequence: Synthetic oligonucleotide
acuugugugugagugacuu

SEQ ID NO: 1074340 - RNA, 19 nt, Artificial Sequence
  Description of Artificial Sequence: Synthetic oligonucleotide
gacacuccaucucuuacua

SEQ ID NO: 1074341 - RNA, 19 nt, Artificial Sequence
  Description of Artificial Sequence: Synthetic oligonucleotide
guacauuauccauuuugaa

SEQ ID NO: 1074342 - RNA, 19 nt, Artificial Sequence
  Description of Artificial Sequence: Synthetic oligonucleotide
aagcaaccauaauuauaaa

SEQ ID NO: 1074343 - RNA, 19 nt, Artificial Sequence
  Description of Artificial Sequence: Synthetic oligonucleotide
aucucuagaagaauagcuu

SEQ ID NO: 1074344 - RNA, 19 nt, Artificial Sequence
  Description of Artificial Sequence: Synthetic oligonucleotide
ugaccgucccuuucucgag

SEQ ID NO: 1074345 - RNA, 19 nt, Artificial Sequence
  Description of Artificial Sequence: Synthetic oligonucleotide
guggcugcuacuauaguga

SEQ ID NO: 1074346 - RNA, 19 nt, Artificial Sequence
  Description of Artificial Sequence: Synthetic oligonucleotide
uguggcuaccccugcuccc

SEQ ID NO: 1074347 - RNA, 19 nt, Artificial Sequence
  Description of Artificial Sequence: Synthetic oligonucleotide
ggauucaauuuacacacaa

SEQ ID NO: 1074348 - RNA, 19 nt, Artificial Sequence
  Description of Artificial Sequence: Synthetic oligonucleotide
cuucggucucucuuucuac

SEQ ID NO: 1074349 - RNA, 19 nt, Artificial Sequence
  Description of Artificial Sequence: Synthetic oligonucleotide
accugcuagccauucauuu

SEQ ID NO: 1074350 - RNA, 19 nt, Artificial Sequence
  Description of Artificial Sequence: Synthetic oligonucleotide
uuaucugcaucggguaggu

SEQ ID NO: 1074351 - RNA, 19 nt, Artificial Sequence
  Description of Artificial Sequence: Synthetic oligonucleotide
cuccuauccgaccacuauc

SEQ ID NO: 1074352 - RNA, 19 nt, Artificial Sequence
  Description of Artificial Sequence: Synthetic oligonucleotide
augaaagauguuaaauaua

SEQ ID NO: 1074353 - RNA, 19 nt, Artificial Sequence
  Description of Artificial Sequence: Synthetic oligonucleotide
cuauccgaccacuaucuaa

SEQ ID NO: 1074354 - RNA, 19 nt, Artificial Sequence
  Description of Artificial Sequence: Synthetic oligonucleotide
ugcuagccauucauuucca

SEQ ID NO: 1074355 - RNA, 19 nt, Artificial Sequence
  Description of Artificial Sequence: Synthetic oligonucleotide
acaguggcacugcuuagau

SEQ ID NO: 1074356 - RNA, 19 nt, Artificial Sequence
  Description of Artificial Sequence: Synthetic oligonucleotide
aacacuguaugaacaccau

SEQ ID NO: 1074357 - RNA, 19 nt, Artificial Sequence
  Description of Artificial Sequence: Synthetic oligonucleotide
gaaugcuaccauguaugca

SEQ ID NO: 1074358 - RNA, 19 nt, Artificial Sequence
  Description of Artificial Sequence: Synthetic oligonucleotide
uggcugcuacuauagugac

SEQ ID NO: 1074359 - RNA, 19 nt, Artificial Sequence
  Description of Artificial Sequence: Synthetic oligonucleotide
acguucacaguggcacugc

SEQ ID NO: 1074360 - RNA, 19 nt, Artificial Sequence
  Description of Artificial Sequence: Synthetic oligonucleotide
aaaucacucuugguguauu

SEQ ID NO: 1074361 - RNA, 19 nt, Artificial Sequence
  Description of Artificial Sequence: Synthetic oligonucleotide
gugaccgucccuuucucga

SEQ ID NO: 1074362 - RNA, 19 nt, Artificial Sequence
  Description of Artificial Sequence: Synthetic oligonucleotide
agugacacuccaucucuua

SEQ ID NO: 1074363 - RNA, 19 nt, Artificial Sequence
  Description of Artificial Sequence: Synthetic oligonucleotide
uugcauccuguuuuggcuu

SEQ ID NO: 1074364 - RNA, 19 nt, Artificial Sequence
  Description of Artificial Sequence: Synthetic oligonucleotide
ggcuagauaguaccacgcc

SEQ ID NO: 1074365 - RNA, 19 nt, Artificial Sequence
  Description of Artificial Sequence: Synthetic oligonucleotide
agguccucaucugugguca

SEQ ID NO: 1074366 - RNA, 19 nt, Artificial Sequence
  Description of Artificial Sequence: Synthetic oligonucleotide
cauuauccauuuugaagaa

SEQ ID NO: 1074367 - RNA, 19 nt, Artificial Sequence
  Description of Artificial Sequence: Synthetic oligonucleotide
gccauucauuuccaccucg

SEQ ID NO: 1074368 - RNA, 19 nt, Artificial Sequence
  Description of Artificial Sequence: Synthetic oligonucleotide
cuucagaacagugacgugu

SEQ ID NO: 1074369 - RNA, 19 nt, Artificial Sequence
  Description of Artificial Sequence: Synthetic oligonucleotide
ucggucucucuuucuacuc

SEQ ID NO: 1074370 - RNA, 19 nt, Artificial Sequence
  Description of Artificial Sequence: Synthetic oligonucleotide
caucggguaggucucccac

SEQ ID NO: 1074371 - RNA, 19 nt, Artificial Sequence
  Description of Artificial Sequence: Synthetic oligonucleotide
cuggugaucgaucaggaau

SEQ ID NO: 1074372 - RNA, 19 nt, Artificial Sequence
  Description of Artificial Sequence: Synthetic oligonucleotide
guaaggcaggagcagaccu

SEQ ID NO: 1074373 - RNA, 19 nt, Artificial Sequence
  Description of Artificial Sequence: Synthetic oligonucleotide
acuuccauagugagugaca

SEQ ID NO: 1074374 - RNA, 19 nt, Artificial Sequence
  Description of Artificial Sequence: Synthetic oligonucleotide
auauggcuagauaguacca

SEQ ID NO: 1074375 - RNA, 19 nt, Artificial Sequence
  Description of Artificial Sequence: Synthetic oligonucleotide
cagguauacaacuuacuau

SEQ ID NO: 1074376 - RNA, 19 nt, Artificial Sequence
  Description of Artificial Sequence: Synthetic oligonucleotide
ugcuaccauguaugcauaa

SEQ ID NO: 1074377 - RNA, 19 nt, Artificial Sequence
  Description of Artificial Sequence: Synthetic oligonucleotide
guuuguggcugcuacuaua

SEQ ID NO: 1074378 - RNA, 19 nt, Artificial Sequence
  Description of Artificial Sequence: Synthetic oligonucleotide
uaacuauguccaugccuuc

SEQ ID NO: 1074379 - RNA, 19 nt, Artificial Sequence
  Description of Artificial Sequence: Synthetic oligonucleotide
uaccacgcccagacaaaac

SEQ ID NO: 1074380 - RNA, 19 nt, Artificial Sequence
  Description of Artificial Sequence: Synthetic oligonucleotide
cuaugaguacauuauccau

SEQ ID NO: 1074381 - RNA, 19 nt, Artificial Sequence
  Description of Artificial Sequence: Synthetic oligonucleotide
cuguuuuccaaucucgaau

SEQ ID NO: 1074382 - RNA, 19 nt, Artificial Sequence
  Description of Artificial Sequence: Synthetic oligonucleotide
cuugguguauuucccaccu

SEQ ID NO: 1074383 - RNA, 19 nt, Artificial Sequence
  Description of Artificial Sequence: Synthetic oligonucleotide
auaguaccacgcccagaca

SEQ ID NO: 1074384 - RNA, 19 nt, Artificial Sequence
  Description of Artificial Sequence: Synthetic oligonucleotide
agacuggcuaaaauccaca

SEQ ID NO: 1074385 - RNA, 19 nt, Artificial Sequence
  Description of Artificial Sequence: Synthetic oligonucleotide
gaccacuaucuaauuguuc

SEQ ID NO: 1074386 - RNA, 19 nt, Artificial Sequence
  Description of Artificial Sequence: Synthetic oligonucleotide
gugaucgaucaggaauuag

SEQ ID NO: 1074387 - RNA, 19 nt, Artificial Sequence
  Description of Artificial Sequence: Synthetic oligonucleotide
auaauggccaaaacccauu

SEQ ID NO: 1074388 - RNA, 19 nt, Artificial Sequence
  Description of Artificial Sequence: Synthetic oligonucleotide
aaggaucugucugguacuu

SEQ ID NO: 1074389 - RNA, 19 nt, Artificial Sequence
  Description of Artificial Sequence: Synthetic oligonucleotide
caucuaauauaagaucaua

SEQ ID NO: 1074390 - RNA, 19 nt, Artificial Sequence
  Description of Artificial Sequence: Synthetic oligonucleotide
ugcaacagacuggcuaaaa

SEQ ID NO: 1074391 - RNA, 19 nt, Artificial Sequence
  Description of Artificial Sequence: Synthetic oligonucleotide
uggcacugcuuagauuagc

SEQ ID NO: 1074392 - RNA, 19 nt, Artificial Sequence
  Description of Artificial Sequence: Synthetic oligonucleotide
cuacaaacgucucauugau

SEQ ID NO: 1074393 - RNA, 19 nt, Artificial Sequence
  Description of Artificial Sequence: Synthetic oligonucleotide
ccaaaucuugagaauauua

SEQ ID NO: 1074394 - RNA, 19 nt, Artificial Sequence
  Description of Artificial Sequence: Synthetic oligonucleotide
uuguucccuuguagguucu

SEQ ID NO: 1074395 - RNA, 19 nt, Artificial Sequence
  Description of Artificial Sequence: Synthetic oligonucleotide
ucucgagaucggcuccgac

SEQ ID NO: 1074396 - RNA, 19 nt, Artificial Sequence
  Description of Artificial Sequence: Synthetic oligonucleotide
ugucuacaaacgucucauu

SEQ ID NO: 1074397 - RNA, 19 nt, Artificial Sequence
  Description of Artificial Sequence: Synthetic oligonucleotide
gguucuggugaucgaucag

SEQ ID NO: 1074398 - RNA, 19 nt, Artificial Sequence
  Description of Artificial Sequence: Synthetic oligonucleotide
uggcccaaaucuugagaau

SEQ ID NO: 1074399 - RNA, 19 nt, Artificial Sequence
  Description of Artificial Sequence: Synthetic oligonucleotide
ucagaacagugacguguuu

SEQ ID NO: 1074400 - RNA, 19 nt, Artificial Sequence
  Description of Artificial Sequence: Synthetic oligonucleotide
gagcagaccugcuagccau

SEQ ID NO: 1074401 - RNA, 19 nt, Artificial Sequence
  Description of Artificial Sequence: Synthetic oligonucleotide
ugcuccuauccgaccacua

SEQ ID NO: 1074402 - RNA, 19 nt, Artificial Sequence
  Description of Artificial Sequence: Synthetic oligonucleotide
ccaucucuagaagaauagc

SEQ ID NO: 1074403 - RNA, 19 nt, Artificial Sequence
  Description of Artificial Sequence: Synthetic oligonucleotide
ugacgucggucucucuuuu

SEQ ID NO: 1074404 - RNA, 19 nt, Artificial Sequence
  Description of Artificial Sequence: Synthetic oligonucleotide
ggacauauggaacuuccau

SEQ ID NO: 1074405 - RNA, 19 nt, Artificial Sequence
  Description of Artificial Sequence: Synthetic oligonucleotide
ccagguauacaacuuacua

SEQ ID NO: 1074406 - RNA, 19 nt, Artificial Sequence
  Description of Artificial Sequence: Synthetic oligonucleotide
gguaaggcaggagcagacc

SEQ ID NO: 1074407 - RNA, 19 nt, Artificial Sequence
  Description of Artificial Sequence: Synthetic oligonucleotide
agauaguaccacgcccaga

SEQ ID NO: 1074408 - RNA, 19 nt, Artificial Sequence
  Description of Artificial Sequence: Synthetic oligonucleotide
gcuaaaauccacauguauu

SEQ ID NO: 1074409 - RNA, 19 nt, Artificial Sequence
  Description of Artificial Sequence: Synthetic oligonucleotide
cucgagaucggcuccgacu

SEQ ID NO: 1074410 - RNA, 19 nt, Artificial Sequence
  Description of Artificial Sequence: Synthetic oligonucleotide
ccauagugagugacacucc

SEQ ID NO: 1074411 - RNA, 19 nt, Artificial Sequence
  Description of Artificial Sequence: Synthetic oligonucleotide
cacauccacauacuagaua

SEQ ID NO: 1074412 - RNA, 19 nt, Artificial Sequence
  Description of Artificial Sequence: Synthetic oligonucleotide
uugguguauuucccaccuu

SEQ ID NO: 1074413 - RNA, 19 nt, Artificial Sequence
  Description of Artificial Sequence: Synthetic oligonucleotide
gaccgucccuuucucgaga

SEQ ID NO: 1074414 - RNA, 19 nt, Artificial Sequence
  Description of Artificial Sequence: Synthetic oligonucleotide
gacgucggucucucuuuuc

SEQ ID NO: 1074415 - RNA, 19 nt, Artificial Sequence
  Description of Artificial Sequence: Synthetic oligonucleotide
aguaccacgcccagacaaa

SEQ ID NO: 1074416 - RNA, 19 nt, Artificial Sequence
  Description of Artificial Sequence: Synthetic oligonucleotide
uguucccuuguagguucug

SEQ ID NO: 1074417 - RNA, 19 nt, Artificial Sequence
  Description of Artificial Sequence: Synthetic oligonucleotide
gcuaccauguaugcauaac

SEQ ID NO: 1074418 - RNA, 19 nt, Artificial Sequence
  Description of Artificial Sequence: Synthetic oligonucleotide
ggguaggucucccaccauc

SEQ ID NO: 1074419 - RNA, 19 nt, Artificial Sequence
  Description of Artificial Sequence: Synthetic oligonucleotide
guaggucucccaccaucuc

SEQ ID NO: 1074420 - RNA, 19 nt, Artificial Sequence
  Description of Artificial Sequence: Synthetic oligonucleotide
accgucccuuucucgagau

SEQ ID NO: 1074421 - RNA, 19 nt, Artificial Sequence
  Description of Artificial Sequence: Synthetic oligonucleotide
gcuaccccugcucccauac

SEQ ID NO: 1074422 - RNA, 19 nt, Artificial Sequence
  Description of Artificial Sequence: Synthetic oligonucleotide
ccugcucaucuaauauaag

SEQ ID NO: 1074423 - RNA, 19 nt, Artificial Sequence
  Description of Artificial Sequence: Synthetic oligonucleotide
gucggucucucuuuucacu

SEQ ID NO: 1074424 - RNA, 19 nt, Artificial Sequence
  Description of Artificial Sequence: Synthetic oligonucleotide
cuuguagguucuggugauc

SEQ ID NO: 1074425 - RNA, 19 nt, Artificial Sequence
  Description of Artificial Sequence: Synthetic oligonucleotide
agaucggcuccgacugcgg

SEQ ID NO: 1074426 - RNA, 19 nt, Artificial Sequence
  Description of Artificial Sequence: Synthetic oligonucleotide
guggcacugcuuagauuag

SEQ ID NO: 1074427 - RNA, 19 nt, Artificial Sequence
  Description of Artificial Sequence: Synthetic oligonucleotide
gaaaucacucuugguguau

SEQ ID NO: 1074428 - RNA, 19 nt, Artificial Sequence
  Description of Artificial Sequence: Synthetic oligonucleotide
ggagcagaccugcuagcca

SEQ ID NO: 1074429 - RNA, 19 nt, Artificial Sequence
  Description of Artificial Sequence: Synthetic oligonucleotide
cacuaucuaauuguucccu

SEQ ID NO: 1074430 - RNA, 19 nt, Artificial Sequence
  Description of Artificial Sequence: Synthetic oligonucleotide
gccugcucaucuaauauaa

SEQ ID NO: 1074431 - RNA, 19 nt, Artificial Sequence
  Description of Artificial Sequence: Synthetic oligonucleotide
ccgaccacuaucuaauugu

SEQ ID NO: 1074432 - RNA, 19 nt, Artificial Sequence
  Description of Artificial Sequence: Synthetic oligonucleotide
ggcccaaaucuugagaaua

SEQ ID NO: 1074433 - RNA, 19 nt, Artificial Sequence
  Description of Artificial Sequence: Synthetic oligonucleotide
guucugacgucggucucuc

SEQ ID NO: 1074434 - RNA, 19 nt, Artificial Sequence
  Description of Artificial Sequence: Synthetic oligonucleotide
cuccgacugcgguucugac

SEQ ID NO: 1074435 - RNA, 19 nt, Artificial Sequence
  Description of Artificial Sequence: Synthetic oligonucleotide
gcccagacaaaacguucac

SEQ ID NO: 1074436 - RNA, 19 nt, Artificial Sequence
  Description of Artificial Sequence: Synthetic oligonucleotide
gaacaccaucaagguaauc

SEQ ID NO: 1074437 - RNA, 19 nt, Artificial Sequence
  Description of Artificial Sequence: Synthetic oligonucleotide
guaccacgcccagacaaaa

SEQ ID NO: 1074438 - RNA, 19 nt, Artificial Sequence
  Description of Artificial Sequence: Synthetic oligonucleotide
gcaacagacuggcuaaaau

SEQ ID NO: 1074439 - RNA, 19 nt, Artificial Sequence
  Description of Artificial Sequence: Synthetic oligonucleotide
uucugacgucggucucucu

SEQ ID NO: 1074440 - RNA, 19 nt, Artificial Sequence
  Description of Artificial Sequence: Synthetic oligonucleotide
ccgacugcgguucugacgu

SEQ ID NO: 1074441 - RNA, 19 nt, Artificial Sequence
  Description of Artificial Sequence: Synthetic oligonucleotide
cagaccugcuagccauuca

SEQ ID NO: 1074442 - RNA, 19 nt, Artificial Sequence
  Description of Artificial Sequence: Synthetic oligonucleotide
gggacauauggaacuucca

SEQ ID NO: 1074443 - RNA, 19 nt, Artificial Sequence
  Description of Artificial Sequence: Synthetic oligonucleotide
cagaacagugacguguuuu

SEQ ID NO: 1074444 - RNA, 19 nt, Artificial Sequence
  Description of Artificial Sequence: Synthetic oligonucleotide
caaacgucucauugauuuu

SEQ ID NO: 1074445 - RNA, 19 nt, Artificial Sequence
  Description of Artificial Sequence: Synthetic oligonucleotide
augcuaccauguaugcaua

SEQ ID NO: 1074446 - RNA, 19 nt, Artificial Sequence
  Description of Artificial Sequence: Synthetic oligonucleotide
gcgguucugacgucggucu

SEQ ID NO: 1074447 - RNA, 19 nt, Artificial Sequence
  Description of Artificial Sequence: Synthetic oligonucleotide
gugguaugaaaugcuucau

SEQ ID NO: 1074448 - RNA, 19 nt, Artificial Sequence
  Description of Artificial Sequence: Synthetic oligonucleotide
cugacgucggucucucuuu

SEQ ID NO: 1074449 - RNA, 19 nt, Artificial Sequence
  Description of Artificial Sequence: Synthetic oligonucleotide
cacgcccagacaaaacguu

SEQ ID NO: 1074450 - RNA, 19 nt, Artificial Sequence
  Description of Artificial Sequence: Synthetic oligonucleotide
cuaccccugcucccauaca

SEQ ID NO: 1074451 - RNA, 19 nt, Artificial Sequence
  Description of Artificial Sequence: Synthetic oligonucleotide
ggagggucaucaaauggau

SEQ ID NO: 1074452 - RNA, 19 nt, Artificial Sequence
  Description of Artificial Sequence: Synthetic oligonucleotide
gcaucggguaggucuccca

SEQ ID NO: 1074453 - RNA, 19 nt, Artificial Sequence
  Description of Artificial Sequence: Synthetic oligonucleotide
gcagaccugcuagccauuc

SEQ ID NO: 1074454 - RNA, 19 nt, Artificial Sequence
  Description of Artificial Sequence: Synthetic oligonucleotide
cgucggucucucuuuucac

SEQ ID NO: 1074455 - RNA, 19 nt, Artificial Sequence
  Description of Artificial Sequence: Synthetic oligonucleotide
ggugaucgaucaggaauua

SEQ ID NO: 1074456 - RNA, 19 nt, Artificial Sequence
  Description of Artificial Sequence: Synthetic oligonucleotide
cuguggucacuggauucaa

SEQ ID NO: 1074457 - RNA, 19 nt, Artificial Sequence
  Description of Artificial Sequence: Synthetic oligonucleotide
gcuccuauccgaccacuau

SEQ ID NO: 1074458 - RNA, 19 nt, Artificial Sequence
  Description of Artificial Sequence: Synthetic oligonucleotide
ccucaucaacagaucaacu

SEQ ID NO: 1074459 - RNA, 19 nt, Artificial Sequence
  Description of Artificial Sequence: Synthetic oligonucleotide
gaccugcuagccauucauu

SEQ ID NO: 1074460 - RNA, 19 nt, Artificial Sequence
  Description of Artificial Sequence: Synthetic oligonucleotide
cagugacguguuuucuuuu

SEQ ID NO: 1074461 - RNA, 19 nt, Artificial Sequence
  Description of Artificial Sequence: Synthetic oligonucleotide
aggcaggagcagaccugcu

SEQ ID NO: 1074462 - RNA, 19 nt, Artificial Sequence
  Description of Artificial Sequence: Synthetic oligonucleotide
gcccaaaucuugagaauau

SEQ ID NO: 1074463 - RNA, 19 nt, Artificial Sequence
  Description of Artificial Sequence: Synthetic oligonucleotide
cgagaucggcuccgacugc

SEQ ID NO: 1074464 - RNA, 19 nt, Artificial Sequence
  Description of Artificial Sequence: Synthetic oligonucleotide
gggucaucaaauggaucau

SEQ ID NO: 1074465 - RNA, 19 nt, Artificial Sequence
  Description of Artificial Sequence: Synthetic oligonucleotide
caguggcacugcuuagauu

SEQ ID NO: 1074466 - RNA, 19 nt, Artificial Sequence
  Description of Artificial Sequence: Synthetic oligonucleotide
ggcuccgacugcgguucug

SEQ ID NO: 1074467 - RNA, 19 nt, Artificial Sequence
  Description of Artificial Sequence: Synthetic oligonucleotide
cugcuacuauagugaccgu

SEQ ID NO: 1074468 - RNA, 19 nt, Artificial Sequence
  Description of Artificial Sequence: Synthetic oligonucleotide
ccuauccgaccacuaucua

SEQ ID NO: 1074469 - RNA, 19 nt, Artificial Sequence
  Description of Artificial Sequence: Synthetic oligonucleotide
ccgucccuuucucgagauc

SEQ ID NO: 1074470 - RNA, 19 nt, Artificial Sequence
  Description of Artificial Sequence: Synthetic oligonucleotide
ggcuaccccugcucccaua

SEQ ID NO: 1074471 - RNA, 19 nt, Artificial Sequence
  Description of Artificial Sequence: Synthetic oligonucleotide
cgguucugacgucggucuc

SEQ ID NO: 1074472 - RNA, 19 nt, Artificial Sequence
  Description of Artificial Sequence: Synthetic oligonucleotide
cgaccacuaucuaauuguu

SEQ ID NO: 1074473 - RNA, 19 nt, Artificial Sequence
  Description of Artificial Sequence: Synthetic oligonucleotide
ccuuugcaacagacuggcu

SEQ ID NO: 1074474 - RNA, 19 nt, Artificial Sequence
  Description of Artificial Sequence: Synthetic oligonucleotide
cgacugcgguucugacguc

SEQ ID NO: 1074475 - RNA, 19 nt, Artificial Sequence
  Description of Artificial Sequence: Synthetic oligonucleotide
cggguaggucucccaccau

SEQ ID NO: 1074476 - RNA, 19 nt, Artificial Sequence
  Description of Artificial Sequence: Synthetic oligonucleotide
aauacaugaucacagaaug

SEQ ID NO: 1074477 - RNA, 19 nt, Artificial Sequence
  Description of Artificial Sequence: Synthetic oligonucleotide
guagcuacggguuagaagg

SEQ ID NO: 1074478 - RNA, 19 nt, Artificial Sequence
  Description of Artificial Sequence: Synthetic oligonucleotide
uuuacuuugagacaucaug

SEQ ID NO: 1074479 - RNA, 19 nt, Artificial Sequence
  Description of Artificial Sequence: Synthetic oligonucleotide
aauagauuaguauucuucu

SEQ ID NO: 1074480 - RNA, 19 nt, Artificial Sequence
  Description of Artificial Sequence: Synthetic oligonucleotide
uuacuuugagacaucaugg

SEQ ID NO: 1074481 - RNA, 19 nt, Artificial Sequence
  Description of Artificial Sequence: Synthetic oligonucleotide
gacaaaagcagacagcggg

SEQ ID NO: 1074482 - RNA, 19 nt, Artificial Sequence
  Description of Artificial Sequence: Synthetic oligonucleotide
aaagaauagauuaguauuc

SEQ ID NO: 1074483 - RNA, 19 nt, Artificial Sequence
  Description of Artificial Sequence: Synthetic oligonucleotide
aauguugaagcugaaguuc

SEQ ID NO: 1074484 - RNA, 19 nt, Artificial Sequence
  Description of Artificial Sequence: Synthetic oligonucleotide
uaggaguuugacaugaucc

SEQ ID NO: 1074485 - RNA, 19 nt, Artificial Sequence
  Description of Artificial Sequence: Synthetic oligonucleotide
aacaaauacaugaucacag

SEQ ID NO: 1074486 - RNA, 19 nt, Artificial Sequence
  Description of Artificial Sequence: Synthetic oligonucleotide
uagauuaguauucuucucc

SEQ ID NO: 1074487 - RNA, 19 nt, Artificial Sequence
  Description of Artificial Sequence: Synthetic oligonucleotide
augaucacagaaugaaugc

SEQ ID NO: 1074488 - RNA, 19 nt, Artificial Sequence
  Description of Artificial Sequence: Synthetic oligonucleotide
aguucuaggaguuugacau

SEQ ID NO: 1074489 - RNA, 19 nt, Artificial Sequence
  Description of Artificial Sequence: Synthetic oligonucleotide
uuugagacaucauggaaag

SEQ ID NO: 1074490 - RNA, 19 nt, Artificial Sequence
  Description of Artificial Sequence: Synthetic oligonucleotide
agaacaaauacaugaucac

SEQ ID NO: 1074491 - RNA, 19 nt, Artificial Sequence
  Description of Artificial Sequence: Synthetic oligonucleotide
uggaaagaccauacgaggg

SEQ ID NO: 1074492 - RNA, 19 nt, Artificial Sequence
  Description of Artificial Sequence: Synthetic oligonucleotide
ucauggaaagaccauacga

SEQ ID NO: 1074493 - RNA, 19 nt, Artificial Sequence
  Description of Artificial Sequence: Synthetic oligonucleotide
agggccacagaacaaauac

SEQ ID NO: 1074494 - RNA, 19 nt, Artificial Sequence
  Description of Artificial Sequence: Synthetic oligonucleotide
caugaucacagaaugaaug

SEQ ID NO: 1074495 - RNA, 19 nt, Artificial Sequence
  Description of Artificial Sequence: Synthetic oligonucleotide
uaucagcuaauguugaagc

SEQ ID NO: 1074496 - RNA, 19 nt, Artificial Sequence
  Description of Artificial Sequence: Synthetic oligonucleotide
cauggaaagaccauacgag

SEQ ID NO: 1074497 - RNA, 19 nt, Artificial Sequence
  Description of Artificial Sequence: Synthetic oligonucleotide
ugaggauggaguuguaggg

SEQ ID NO: 1074498 - RNA, 19 nt, Artificial Sequence
  Description of Artificial Sequence: Synthetic oligonucleotide
gugacaaaagcagacagcg

SEQ ID NO: 1074499 - RNA, 19 nt, Artificial Sequence
  Description of Artificial Sequence: Synthetic oligonucleotide
ugagacaucauggaaagac

SEQ ID NO: 1074500 - RNA, 19 nt, Artificial Sequence
  Description of Artificial Sequence: Synthetic oligonucleotide
agaaagaauagauuaguau

SEQ ID NO: 1074501 - RNA, 19 nt, Artificial Sequence
  Description of Artificial Sequence: Synthetic oligonucleotide
gaagcugaaguucuaggag

SEQ ID NO: 1074502 - RNA, 19 nt, Artificial Sequence
  Description of Artificial Sequence: Synthetic oligonucleotide
auggaaagaccauacgagg

SEQ ID NO: 1074503 - RNA, 19 nt, Artificial Sequence
  Description of Artificial Sequence: Synthetic oligonucleotide
acagaacaaauacaugauc

SEQ ID NO: 1074504 - RNA, 19 nt, Artificial Sequence
  Description of Artificial Sequence: Synthetic oligonucleotide
auagauuaguauucuucuc

SEQ ID NO: 1074505 - RNA, 19 nt, Artificial Sequence
  Description of Artificial Sequence: Synthetic oligonucleotide
aaugccuaucagcuaaugu

SEQ ID NO: 1074506 - RNA, 19 nt, Artificial Sequence
  Description of Artificial Sequence: Synthetic oligonucleotide
ugaagcugaaguucuagga

SEQ ID NO: 1074507 - RNA, 19 nt, Artificial Sequence
  Description of Artificial Sequence: Synthetic oligonucleotide
gaauagauuaguauucuuc

SEQ ID NO: 1074508 - RNA, 19 nt, Artificial Sequence
  Description of Artificial Sequence: Synthetic oligonucleotide
aagcugaaguucuaggagu

SEQ ID NO: 1074509 - RNA, 19 nt, Artificial Sequence
  Description of Artificial Sequence: Synthetic oligonucleotide
cagaacaaauacaugauca

SEQ ID NO: 1074510 - RNA, 19 nt, Artificial Sequence
  Description of Artificial Sequence: Synthetic oligonucleotide
gaaagaauagauuaguauu

SEQ ID NO: 1074511 - RNA, 19 nt, Artificial Sequence
  Description of Artificial Sequence: Synthetic oligonucleotide
uugaagcugaaguucuagg

SEQ ID NO: 1074512 - RNA, 19 nt, Artificial Sequence
  Description of Artificial Sequence: Synthetic oligonucleotide
ugccuaucagcuaauguug

SEQ ID NO: 1074513 - RNA, 19 nt, Artificial Sequence
  Description of Artificial Sequence: Synthetic oligonucleotide
aggcgaaggugacaaaagc

SEQ ID NO: 1074514 - RNA, 19 nt, Artificial Sequence
  Description of Artificial Sequence: Synthetic oligonucleotide
ucagcuaauguugaagcug

SEQ ID NO: 1074515 - RNA, 19 nt, Artificial Sequence
  Description of Artificial Sequence: Synthetic oligonucleotide
uacaugaucacagaaugaa

SEQ ID NO: 1074516 - RNA, 19 nt, Artificial Sequence
  Description of Artificial Sequence: Synthetic oligonucleotide
aagaauagauuaguauucu

SEQ ID NO: 1074517 - RNA, 19 nt, Artificial Sequence
  Description of Artificial Sequence: Synthetic oligonucleotide
aggugacaaaagcagacag

SEQ ID NO: 1074518 - RNA, 19 nt, Artificial Sequence
  Description of Artificial Sequence: Synthetic oligonucleotide
acagaaugaaugccuauca

SEQ ID NO: 1074519 - RNA, 19 nt, Artificial Sequence
  Description of Artificial Sequence: Synthetic oligonucleotide
aaguucuaggaguuugaca

SEQ ID NO: 1074520 - RNA, 19 nt, Artificial Sequence
  Description of Artificial Sequence: Synthetic oligonucleotide
augaaugccuaucagcuaa

SEQ ID NO: 1074521 - RNA, 19 nt, Artificial Sequence
  Description of Artificial Sequence: Synthetic oligonucleotide
aucauggaaagaccauacg

SEQ ID NO: 1074522 - RNA, 19 nt, Artificial Sequence
  Description of Artificial Sequence: Synthetic oligonucleotide
agauuaguauucuucuccu

SEQ ID NO: 1074523 - RNA, 19 nt, Artificial Sequence
  Description of Artificial Sequence: Synthetic oligonucleotide
gaguuugacaugauccagg

SEQ ID NO: 1074524 - RNA, 19 nt, Artificial Sequence
  Description of Artificial Sequence: Synthetic oligonucleotide
ugacaaaagcagacagcgg

SEQ ID NO: 1074525 - RNA, 19 nt, Artificial Sequence
  Description of Artificial Sequence: Synthetic oligonucleotide
uacuuugagacaucaugga

SEQ ID NO: 1074526 - RNA, 19 nt, Artificial Sequence
  Description of Artificial Sequence: Synthetic oligonucleotide
acaaauacaugaucacaga

SEQ ID NO: 1074527 - RNA, 19 nt, Artificial Sequence
  Description of Artificial Sequence: Synthetic oligonucleotide
acucacgcaugguagcuac

SEQ ID NO: 1074528 - RNA, 19 nt, Artificial Sequence
  Description of Artificial Sequence: Synthetic oligonucleotide
uaauguugaagcugaaguu

SEQ ID NO: 1074529 - RNA, 19 nt, Artificial Sequence
  Description of Artificial Sequence: Synthetic oligonucleotide
caucauggaaagaccauac

SEQ ID NO: 1074530 - RNA, 19 nt, Artificial Sequence
  Description of Artificial Sequence: Synthetic oligonucleotide
augccuaucagcuaauguu

SEQ ID NO: 1074531 - RNA, 19 nt, Artificial Sequence
  Description of Artificial Sequence: Synthetic oligonucleotide
ugaaguucuaggaguuuga

SEQ ID NO: 1074532 - RNA, 19 nt, Artificial Sequence
  Description of Artificial Sequence: Synthetic oligonucleotide
ugaucacagaaugaaugcc

SEQ ID NO: 1074533 - RNA, 19 nt, Artificial Sequence
  Description of Artificial Sequence: Synthetic oligonucleotide
cuuugagacaucauggaaa

SEQ ID NO: 1074534 - RNA, 19 nt, Artificial Sequence
  Description of Artificial Sequence: Synthetic oligonucleotide
cuaauguugaagcugaagu

SEQ ID NO: 1074535 - RNA, 19 nt, Artificial Sequence
  Description of Artificial Sequence: Synthetic oligonucleotide
auacgagggccacagaaca

SEQ ID NO: 1074536 - RNA, 19 nt, Artificial Sequence
  Description of Artificial Sequence: Synthetic oligonucleotide
uucuaggaguuugacauga

SEQ ID NO: 1074537 - RNA, 19 nt, Artificial Sequence
  Description of Artificial Sequence: Synthetic oligonucleotide
aggaguuugacaugaucca

SEQ ID NO: 1074538 - RNA, 19 nt, Artificial Sequence
  Description of Artificial Sequence: Synthetic oligonucleotide
cuaucagcuaauguugaag

SEQ ID NO: 1074539 - RNA, 19 nt, Artificial Sequence
  Description of Artificial Sequence: Synthetic oligonucleotide
gaacaaauacaugaucaca

SEQ ID NO: 1074540 - RNA, 19 nt, Artificial Sequence
  Description of Artificial Sequence: Synthetic oligonucleotide
gaaugaaugccuaucagcu

SEQ ID NO: 1074541 - RNA, 19 nt, Artificial Sequence
  Description of Artificial Sequence: Synthetic oligonucleotide
aagaccauacgagggccac

SEQ ID NO: 1074542 - RNA, 19 nt, Artificial Sequence
  Description of Artificial Sequence: Synthetic oligonucleotide
gaaagaccauacgagggcc

SEQ ID NO: 1074543 - RNA, 19 nt, Artificial Sequence
  Description of Artificial Sequence: Synthetic oligonucleotide
ucacgcaugguagcuacgg

SEQ ID NO: 1074544 - RNA, 19 nt, Artificial Sequence
  Description of Artificial Sequence: Synthetic oligonucleotide
aaugaaugccuaucagcua

SEQ ID NO: 1074545 - RNA, 19 nt, Artificial Sequence
  Description of Artificial Sequence: Synthetic oligonucleotide
acuuugagacaucauggaa

SEQ ID NO: 1074546 - RNA, 19 nt, Artificial Sequence
  Description of Artificial Sequence: Synthetic oligonucleotide
gagacaucauggaaagacc

SEQ ID NO: 1074547 - RNA, 19 nt, Artificial Sequence
  Description of Artificial Sequence: Synthetic oligonucleotide
uagaaggcgaaggugacaa

SEQ ID NO: 1074548 - RNA, 19 nt, Artificial Sequence
  Description of Artificial Sequence: Synthetic oligonucleotide
cauacgagggccacagaac

SEQ ID NO: 1074549 - RNA, 19 nt, Artificial Sequence
  Description of Artificial Sequence: Synthetic oligonucleotide
aaggcgaaggugacaaaag

SEQ ID NO: 1074550 - RNA, 19 nt, Artificial Sequence
  Description of Artificial Sequence: Synthetic oligonucleotide
cagaaugaaugccuaucag

SEQ ID NO: 1074551 - RNA, 19 nt, Artificial Sequence
  Description of Artificial Sequence: Synthetic oligonucleotide
acggguuagaaggcgaagg

SEQ ID NO: 1074552 - RNA, 19 nt, Artificial Sequence
  Description of Artificial Sequence: Synthetic oligonucleotide
aucagcuaauguugaagcu

SEQ ID NO: 1074553 - RNA, 19 nt, Artificial Sequence
  Description of Artificial Sequence: Synthetic oligonucleotide
ggaaagaccauacgagggc

SEQ ID NO: 1074554 - RNA, 19 nt, Artificial Sequence
  Description of Artificial Sequence: Synthetic oligonucleotide
uuuuacuuugagacaucau

SEQ ID NO: 1074555 - RNA, 19 nt, Artificial Sequence
  Description of Artificial Sequence: Synthetic oligonucleotide
guugaagcugaaguucuag

SEQ ID NO: 1074556 - RNA, 19 nt, Artificial Sequence
  Description of Artificial Sequence: Synthetic oligonucleotide
ccacagaacaaauacauga

SEQ ID NO: 1074557 - RNA, 19 nt, Artificial Sequence
  Description of Artificial Sequence: Synthetic oligonucleotide
caaauacaugaucacagaa

SEQ ID NO: 1074558 - RNA, 19 nt, Artificial Sequence
  Description of Artificial Sequence: Synthetic oligonucleotide
gaccauacgagggccacag

SEQ ID NO: 1074559 - RNA, 19 nt, Artificial Sequence
  Description of Artificial Sequence: Synthetic oligonucleotide
cuaggaguuugacaugauc

SEQ ID NO: 1074560 - RNA, 19 nt, Artificial Sequence
  Description of Artificial Sequence: Synthetic oligonucleotide
gguagcuacggguuagaag

SEQ ID NO: 1074561 - RNA, 19 nt, Artificial Sequence
  Description of Artificial Sequence: Synthetic oligonucleotide
agaauagauuaguauucuu

SEQ ID NO: 1074562 - RNA, 19 nt, Artificial Sequence
  Description of Artificial Sequence: Synthetic oligonucleotide
guuugacaugauccagggg

SEQ ID NO: 1074563 - RNA, 19 nt, Artificial Sequence
  Description of Artificial Sequence: Synthetic oligonucleotide
agacaucauggaaagacca

SEQ ID NO: 1074564 - RNA, 19 nt, Artificial Sequence
  Description of Artificial Sequence: Synthetic oligonucleotide
gaugguggcaauggcagca

SEQ ID NO: 1074565 - RNA, 19 nt, Artificial Sequence
  Description of Artificial Sequence: Synthetic oligonucleotide
acgcaugguagcuacgggu

SEQ ID NO: 1074566 - RNA, 19 nt, Artificial Sequence
  Description of Artificial Sequence: Synthetic oligonucleotide
gaaguucuaggaguuugac

SEQ ID NO: 1074567 - RNA, 19 nt, Artificial Sequence
  Description of Artificial Sequence: Synthetic oligonucleotide
cagcuaauguugaagcuga

SEQ ID NO: 1074568 - RNA, 19 nt, Artificial Sequence
  Description of Artificial Sequence: Synthetic oligonucleotide
ggcagaaagaauagauuag

SEQ ID NO: 1074569 - RNA, 19 nt, Artificial Sequence
  Description of Artificial Sequence: Synthetic oligonucleotide
gguuagaaggcgaagguga

SEQ ID NO: 1074570 - RNA, 19 nt, Artificial Sequence
  Description of Artificial Sequence: Synthetic oligonucleotide
cacagaaugaaugccuauc

SEQ ID NO: 1074571 - RNA, 19 nt, Artificial Sequence
  Description of Artificial Sequence: Synthetic oligonucleotide
gggcagaaagaauagauua

SEQ ID NO: 1074572 - RNA, 19 nt, Artificial Sequence
  Description of Artificial Sequence: Synthetic oligonucleotide
gaaggcgaaggugacaaaa

SEQ ID NO: 1074573 - RNA, 19 nt, Artificial Sequence
  Description of Artificial Sequence: Synthetic oligonucleotide
auguugaagcugaaguucu

SEQ ID NO: 1074574 - RNA, 19 nt, Artificial Sequence
  Description of Artificial Sequence: Synthetic oligonucleotide
gaucacagaaugaaugccu

SEQ ID NO: 1074575 - RNA, 19 nt, Artificial Sequence
  Description of Artificial Sequence: Synthetic oligonucleotide
ugaugguggcaauggcagc

SEQ ID NO: 1074576 - RNA, 19 nt, Artificial Sequence
  Description of Artificial Sequence: Synthetic oligonucleotide
uuagaaggcgaaggugaca

SEQ ID NO: 1074577 - RNA, 19 nt, Artificial Sequence
  Description of Artificial Sequence: Synthetic oligonucleotide
caugguagcuacggguuag

SEQ ID NO: 1074578 - RNA, 19 nt, Artificial Sequence
  Description of Artificial Sequence: Synthetic oligonucleotide
uagcuacggguuagaaggc

SEQ ID NO: 1074579 - RNA, 19 nt, Artificial Sequence
  Description of Artificial Sequence: Synthetic oligonucleotide
aaagaccauacgagggcca

SEQ ID NO: 1074580 - RNA, 19 nt, Artificial Sequence
  Description of Artificial Sequence: Synthetic oligonucleotide
guucuaggaguuugacaug

SEQ ID NO: 1074581 - RNA, 19 nt, Artificial Sequence
  Description of Artificial Sequence: Synthetic oligonucleotide
agcuacggguuagaaggcg

SEQ ID NO: 1074582 - RNA, 19 nt, Artificial Sequence
  Description of Artificial Sequence: Synthetic oligonucleotide
cagaaagaauagauuagua

SEQ ID NO: 1074583 - RNA, 19 nt, Artificial Sequence
  Description of Artificial Sequence: Synthetic oligonucleotide
auacaugaucacagaauga

SEQ ID NO: 1074584 - RNA, 19 nt, Artificial Sequence
  Description of Artificial Sequence: Synthetic oligonucleotide
acaucauggaaagaccaua

SEQ ID NO: 1074585 - RNA, 19 nt, Artificial Sequence
  Description of Artificial Sequence: Synthetic oligonucleotide
uguugaagcugaaguucua

SEQ ID NO: 1074586 - RNA, 19 nt, Artificial Sequence
  Description of Artificial Sequence: Synthetic oligonucleotide
ggugacaaaagcagacagc

SEQ ID NO: 1074587 - RNA, 19 nt, Artificial Sequence
  Description of Artificial Sequence: Synthetic oligonucleotide
ugaaugccuaucagcuaau

SEQ ID NO: 1074588 - RNA, 19 nt, Artificial Sequence
  Description of Artificial Sequence: Synthetic oligonucleotide
acaaaagcagacagcgggu

SEQ ID NO: 1074589 - RNA, 19 nt, Artificial Sequence
  Description of Artificial Sequence: Synthetic oligonucleotide
gaaugccuaucagcuaaug

SEQ ID NO: 1074590 - RNA, 19 nt, Artificial Sequence
  Description of Artificial Sequence: Synthetic oligonucleotide
guuagaaggcgaaggugac

SEQ ID NO: 1074591 - RNA, 19 nt, Artificial Sequence
  Description of Artificial Sequence: Synthetic oligonucleotide
uacggguuagaaggcgaag

SEQ ID NO: 1074592 - RNA, 19 nt, Artificial Sequence
  Description of Artificial Sequence: Synthetic oligonucleotide
gcuaauguugaagcugaag

SEQ ID NO: 1074593 - RNA, 19 nt, Artificial Sequence
  Description of Artificial Sequence: Synthetic oligonucleotide
ggaguuugacaugauccag

SEQ ID NO: 1074594 - RNA, 19 nt, Artificial Sequence
  Description of Artificial Sequence: Synthetic oligonucleotide
cacgcaugguagcuacggg

SEQ ID NO: 1074595 - RNA, 19 nt, Artificial Sequence
  Description of Artificial Sequence: Synthetic oligonucleotide
caaaagcagacagcggguc

SEQ ID NO: 1074596 - RNA, 19 nt, Artificial Sequence
  Description of Artificial Sequence: Synthetic oligonucleotide
ucuaggaguuugacaugau

SEQ ID NO: 1074597 - RNA, 19 nt, Artificial Sequence
  Description of Artificial Sequence: Synthetic oligonucleotide
uacgagggccacagaacaa

SEQ ID NO: 1074598 - RNA, 19 nt, Artificial Sequence
  Description of Artificial Sequence: Synthetic oligonucleotide
cucacgcaugguagcuacg

SEQ ID NO: 1074599 - RNA, 19 nt, Artificial Sequence
  Description of Artificial Sequence: Synthetic oligonucleotide
acaugaucacagaaugaau

SEQ ID NO: 1074600 - RNA, 19 nt, Artificial Sequence
  Description of Artificial Sequence: Synthetic oligonucleotide
ggugaggauggaguuguag

SEQ ID NO: 1074601 - RNA, 19 nt, Artificial Sequence
  Description of Artificial Sequence: Synthetic oligonucleotide
cacagaacaaauacaugau

SEQ ID NO: 1074602 - RNA, 19 nt, Artificial Sequence
  Description of Artificial Sequence: Synthetic oligonucleotide
gguggcaauggcagcauug

SEQ ID NO: 1074603 - RNA, 19 nt, Artificial Sequence
  Description of Artificial Sequence: Synthetic oligonucleotide
aucacagaaugaaugccua

SEQ ID NO: 1074604 - RNA, 19 nt, Artificial Sequence
  Description of Artificial Sequence: Synthetic oligonucleotide
ggcgaaggugacaaaagca

SEQ ID NO: 1074605 - RNA, 19 nt, Artificial Sequence
  Description of Artificial Sequence: Synthetic oligonucleotide
uugagacaucauggaaaga

SEQ ID NO: 1074606 - RNA, 19 nt, Artificial Sequence
  Description of Artificial Sequence: Synthetic oligonucleotide
guggcaauggcagcauuga

SEQ ID NO: 1074607 - RNA, 19 nt, Artificial Sequence
  Description of Artificial Sequence: Synthetic oligonucleotide
acgagggccacagaacaaa

SEQ ID NO: 1074608 - RNA, 19 nt, Artificial Sequence
  Description of Artificial Sequence: Synthetic oligonucleotide
gauuaguauucuucuccuu

SEQ ID NO: 1074609 - RNA, 19 nt, Artificial Sequence
  Description of Artificial Sequence: Synthetic oligonucleotide
agcugaaguucuaggaguu

SEQ ID NO: 1074610 - RNA, 19 nt, Artificial Sequence
  Description of Artificial Sequence: Synthetic oligonucleotide
guggugaggauggaguugu

SEQ ID NO: 1074611 - RNA, 19 nt, Artificial Sequence
  Description of Artificial Sequence: Synthetic oligonucleotide
ugguagcuacggguuagaa

SEQ ID NO: 1074612 - RNA, 19 nt, Artificial Sequence
  Description of Artificial Sequence: Synthetic oligonucleotide
gacaucauggaaagaccau

SEQ ID NO: 1074613 - RNA, 19 nt, Artificial Sequence
  Description of Artificial Sequence: Synthetic oligonucleotide
gccacagaacaaauacaug

SEQ ID NO: 1074614 - RNA, 19 nt, Artificial Sequence
  Description of Artificial Sequence: Synthetic oligonucleotide
agaaggcgaaggugacaaa

SEQ ID NO: 1074615 - RNA, 19 nt, Artificial Sequence
  Description of Artificial Sequence: Synthetic oligonucleotide
ccauacgagggccacagaa

SEQ ID NO: 1074616 - RNA, 19 nt, Artificial Sequence
  Description of Artificial Sequence: Synthetic oligonucleotide
ggccacagaacaaauacau

SEQ ID NO: 1074617 - RNA, 19 nt, Artificial Sequence
  Description of Artificial Sequence: Synthetic oligonucleotide
augguagcuacggguuaga

SEQ ID NO: 1074618 - RNA, 19 nt, Artificial Sequence
  Description of Artificial Sequence: Synthetic oligonucleotide
ugguggcaauggcagcauu

SEQ ID NO: 1074619 - RNA, 19 nt, Artificial Sequence
  Description of Artificial Sequence: Synthetic oligonucleotide
agaccauacgagggccaca

SEQ ID NO: 1074620 - RNA, 19 nt, Artificial Sequence
  Description of Artificial Sequence: Synthetic oligonucleotide
accauacgagggccacaga

SEQ ID NO: 1074621 - RNA, 19 nt, Artificial Sequence
  Description of Artificial Sequence: Synthetic oligonucleotide
gagggccacagaacaaaua

SEQ ID NO: 1074622 - RNA, 19 nt, Artificial Sequence
  Description of Artificial Sequence: Synthetic oligonucleotide
gcuacggguuagaaggcga

SEQ ID NO: 1074623 - RNA, 19 nt, Artificial Sequence
  Description of Artificial Sequence: Synthetic oligonucleotide
gggccacagaacaaauaca

SEQ ID NO: 1074624 - RNA, 19 nt, Artificial Sequence
  Description of Artificial Sequence: Synthetic oligonucleotide
uggugaggauggaguugua

SEQ ID NO: 1074625 - RNA, 19 nt, Artificial Sequence
  Description of Artificial Sequence: Synthetic oligonucleotide
gccuaucagcuaauguuga

SEQ ID NO: 1074626 - RNA, 19 nt, Artificial Sequence
  Description of Artificial Sequence: Synthetic oligonucleotide
ccuaucagcuaauguugaa

SEQ ID NO: 1074627 - RNA, 19 nt, Artificial Sequence
  Description of Artificial Sequence: Synthetic oligonucleotide
agcuaauguugaagcugaa

SEQ ID NO: 1074628 - RNA, 19 nt, Artificial Sequence
  Description of Artificial Sequence: Synthetic oligonucleotide
gcaugguagcuacggguua

SEQ ID NO: 1074629 - RNA, 19 nt, Artificial Sequence
  Description of Artificial Sequence: Synthetic oligonucleotide
ggggcagaaagaauagauu

SEQ ID NO: 1074630 - RNA, 19 nt, Artificial Sequence
  Description of Artificial Sequence: Synthetic oligonucleotide
cggguuagaaggcgaaggu

SEQ ID NO: 1074631 - RNA, 19 nt, Artificial Sequence
  Description of Artificial Sequence: Synthetic oligonucleotide
cgcaugguagcuacggguu

SEQ ID NO: 1074632 - RNA, 19 nt, Artificial Sequence
  Description of Artificial Sequence: Synthetic oligonucleotide
cgagggccacagaacaaau

SEQ ID NO: 1074633 - RNA, 19 nt, Artificial Sequence
  Description of Artificial Sequence: Synthetic oligonucleotide
aaaauuuggaguuagcuca

SEQ ID NO: 1074634 - RNA, 19 nt, Artificial Sequence
  Description of Artificial Sequence: Synthetic oligonucleotide
uuugacaucaagauuaagc

SEQ ID NO: 1074635 - RNA, 19 nt, Artificial Sequence
  Description of Artificial Sequence: Synthetic oligonucleotide
aagagguguauacucaucc

SEQ ID NO: 1074636 - RNA, 19 nt, Artificial Sequence
  Description of Artificial Sequence: Synthetic oligonucleotide
aguuuuaaucucuuggacc

SEQ ID NO: 1074637 - RNA, 19 nt, Artificial Sequence
  Description of Artificial Sequence: Synthetic oligonucleotide
aaucauuccucacuguuac

SEQ ID NO: 1074638 - RNA, 19 nt, Artificial Sequence
  Description of Artificial Sequence: Synthetic oligonucleotide
aauuacuagagccauuaag

SEQ ID NO: 1074639 - RNA, 19 nt, Artificial Sequence
  Description of Artificial Sequence: Synthetic oligonucleotide
aguguaaaacauucaaggc

SEQ ID NO: 1074640 - RNA, 19 nt, Artificial Sequence
  Description of Artificial Sequence: Synthetic oligonucleotide
ucuagcacgacccaaaaga

SEQ ID NO: 1074641 - RNA, 19 nt, Artificial Sequence
  Description of Artificial Sequence: Synthetic oligonucleotide
caguguaaaacauucaagg

SEQ ID NO: 1074642 - RNA, 19 nt, Artificial Sequence
  Description of Artificial Sequence: Synthetic oligonucleotide
acuagagccauuaagacgg

SEQ ID NO: 1074643 - RNA, 19 nt, Artificial Sequence
  Description of Artificial Sequence: Synthetic oligonucleotide
ucuccaacaauucaaguug

SEQ ID NO: 1074644 - RNA, 19 nt, Artificial Sequence
  Description of Artificial Sequence: Synthetic oligonucleotide
auuaugaggaauguggugg

SEQ ID NO: 1074645 - RNA, 19 nt, Artificial Sequence
  Description of Artificial Sequence: Synthetic oligonucleotide
guuaguacagccuuccacg

SEQ ID NO: 1074646 - RNA, 19 nt, Artificial Sequence
  Description of Artificial Sequence: Synthetic oligonucleotide
uuaccaaacauccaaacau

SEQ ID NO: 1074647 - RNA, 19 nt, Artificial Sequence
  Description of Artificial Sequence: Synthetic oligonucleotide
uuagaacaaaagcaacugg

SEQ ID NO: 1074648 - RNA, 19 nt, Artificial Sequence
  Description of Artificial Sequence: Synthetic oligonucleotide
ugaaguaagaaagaggcca

SEQ ID NO: 1074649 - RNA, 19 nt, Artificial Sequence
  Description of Artificial Sequence: Synthetic oligonucleotide
auagaaagcauuucaagca

SEQ ID NO: 1074650 - RNA, 19 nt, Artificial Sequence
  Description of Artificial Sequence: Synthetic oligonucleotide
ucccauaugauaaucauuc

SEQ ID NO: 1074651 - RNA, 19 nt, Artificial Sequence
  Description of Artificial Sequence: Synthetic oligonucleotide
aaaauacacaucacuacac

SEQ ID NO: 1074652 - RNA, 19 nt, Artificial Sequence
  Description of Artificial Sequence: Synthetic oligonucleotide
aucaagauuaagcagguca

SEQ ID NO: 1074653 - RNA, 19 nt, Artificial Sequence
  Description of Artificial Sequence: Synthetic oligonucleotide
acaucucauacauaggagg

SEQ ID NO: 1074654 - RNA, 19 nt, Artificial Sequence
  Description of Artificial Sequence: Synthetic oligonucleotide
ucgugcugaaguaagaaag

SEQ ID NO: 1074655 - RNA, 19 nt, Artificial Sequence
  Description of Artificial Sequence: Synthetic oligonucleotide
aucagaaucgccuacccag

SEQ ID NO: 1074656 - RNA, 19 nt, Artificial Sequence
  Description of Artificial Sequence: Synthetic oligonucleotide
uugacgaugaaaauuugga

SEQ ID NO: 1074657 - RNA, 19 nt, Artificial Sequence
  Description of Artificial Sequence: Synthetic oligonucleotide
uccacgauuucaaagaggu

SEQ ID NO: 1074658 - RNA, 19 nt, Artificial Sequence
  Description of Artificial Sequence: Synthetic oligonucleotide
ugugauucauacuacaguc

SEQ ID NO: 1074659 - RNA, 19 nt, Artificial Sequence
  Description of Artificial Sequence: Synthetic oligonucleotide
aguuaguacagccuuccac

SEQ ID NO: 1074660 - RNA, 19 nt, Artificial Sequence
  Description of Artificial Sequence: Synthetic oligonucleotide
uacuagagccauuaagacg

SEQ ID NO: 1074661 - RNA, 19 nt, Artificial Sequence
  Description of Artificial Sequence: Synthetic oligonucleotide
aguguuucuuguuuagaac

SEQ ID NO: 1074662 - RNA, 19 nt, Artificial Sequence
  Description of Artificial Sequence: Synthetic oligonucleotide
uuggaguuagcucauaaaa

SEQ ID NO: 1074663 - RNA, 19 nt, Artificial Sequence
  Description of Artificial Sequence: Synthetic oligonucleotide
acaaauuaagucugcacug

SEQ ID NO: 1074664 - RNA, 19 nt, Artificial Sequence
  Description of Artificial Sequence: Synthetic oligonucleotide
acauaggaggcacugguac

SEQ ID NO: 1074665 - RNA, 19 nt, Artificial Sequence
  Description of Artificial Sequence: Synthetic oligonucleotide
gaaaaugagggcugugggg

SEQ ID NO: 1074666 - RNA, 19 nt, Artificial Sequence
  Description of Artificial Sequence: Synthetic oligonucleotide
uuuacaucucauacauagg

SEQ ID NO: 1074667 - RNA, 19 nt, Artificial Sequence
  Description of Artificial Sequence: Synthetic oligonucleotide
uggcuuguagaaaaugagg

SEQ ID NO: 1074668 - RNA, 19 nt, Artificial Sequence
  Description of Artificial Sequence: Synthetic oligonucleotide
ugauucauacuacaguccu

SEQ ID NO: 1074669 - RNA, 19 nt, Artificial Sequence
  Description of Artificial Sequence: Synthetic oligonucleotide
ucuaaguguccacuguagg

SEQ ID NO: 1074670 - RNA, 19 nt, Artificial Sequence
  Description of Artificial Sequence: Synthetic oligonucleotide
agacaaauuaagucugcac

SEQ ID NO: 1074671 - RNA, 19 nt, Artificial Sequence
  Description of Artificial Sequence: Synthetic oligonucleotide
agcacgacccaaaagaagc

SEQ ID NO: 1074672 - RNA, 19 nt, Artificial Sequence
  Description of Artificial Sequence: Synthetic oligonucleotide
cacgauuucaaagagguag

SEQ ID NO: 1074673 - RNA, 19 nt, Artificial Sequence
  Description of Artificial Sequence: Synthetic oligonucleotide
aaugucuaaguguccacug

SEQ ID NO: 1074674 - RNA, 19 nt, Artificial Sequence
  Description of Artificial Sequence: Synthetic oligonucleotide
uagagacaaauuaagucug

SEQ ID NO: 1074675 - RNA, 19 nt, Artificial Sequence
  Description of Artificial Sequence: Synthetic oligonucleotide
uaagaaagaggccacccug

SEQ ID NO: 1074676 - RNA, 19 nt, Artificial Sequence
  Description of Artificial Sequence: Synthetic oligonucleotide
uacgucacugauuuguuag

SEQ ID NO: 1074677 - RNA, 19 nt, Artificial Sequence
  Description of Artificial Sequence: Synthetic oligonucleotide
ugaaaauuuggaguuagcu

SEQ ID NO: 1074678 - RNA, 19 nt, Artificial Sequence
  Description of Artificial Sequence: Synthetic oligonucleotide
gauuuguuaguguuucuug

SEQ ID NO: 1074679 - RNA, 19 nt, Artificial Sequence
  Description of Artificial Sequence: Synthetic oligonucleotide
ucaaguugauuaaaacucu

SEQ ID NO: 1074680 - RNA, 19 nt, Artificial Sequence
  Description of Artificial Sequence: Synthetic oligonucleotide
uuguuccuauucuaaauag

SEQ ID NO: 1074681 - RNA, 19 nt, Artificial Sequence
  Description of Artificial Sequence: Synthetic oligonucleotide
ugaguagugcccaauccag

SEQ ID NO: 1074682 - RNA, 19 nt, Artificial Sequence
  Description of Artificial Sequence: Synthetic oligonucleotide
uacaguuuugugcaugucu

SEQ ID NO: 1074683 - RNA, 19 nt, Artificial Sequence
  Description of Artificial Sequence: Synthetic oligonucleotide
gacucugaguaccaguggg

SEQ ID NO: 1074684 - RNA, 19 nt, Artificial Sequence
  Description of Artificial Sequence: Synthetic oligonucleotide
gaugaaaauuuggaguuag

SEQ ID NO: 1074685 - RNA, 19 nt, Artificial Sequence
  Description of Artificial Sequence: Synthetic oligonucleotide
agcuugagaaaauuacuag

SEQ ID NO: 1074686 - RNA, 19 nt, Artificial Sequence
  Description of Artificial Sequence: Synthetic oligonucleotide
ucugcucuguauauggggc

SEQ ID NO: 1074687 - RNA, 19 nt, Artificial Sequence
  Description of Artificial Sequence: Synthetic oligonucleotide
cuaaguguccacuguaggc

SEQ ID NO: 1074688 - RNA, 19 nt, Artificial Sequence
  Description of Artificial Sequence: Synthetic oligonucleotide
uguaagaaagccugagcca

SEQ ID NO: 1074689 - RNA, 19 nt, Artificial Sequence
  Description of Artificial Sequence: Synthetic oligonucleotide
agugauagaugcuuguccu

SEQ ID NO: 1074690 - RNA, 19 nt, Artificial Sequence
  Description of Artificial Sequence: Synthetic oligonucleotide
uuuguuccuauucuaaaua

SEQ ID NO: 1074691 - RNA, 19 nt, Artificial Sequence
  Description of Artificial Sequence: Synthetic oligonucleotide
acuacaguccuguaaugag

SEQ ID NO: 1074692 - RNA, 19 nt, Artificial Sequence
  Description of Artificial Sequence: Synthetic oligonucleotide
acugauuuguuaguguuuc

SEQ ID NO: 1074693 - RNA, 19 nt, Artificial Sequence
  Description of Artificial Sequence: Synthetic oligonucleotide
aaucagguguccauggguc

SEQ ID NO: 1074694 - RNA, 19 nt, Artificial Sequence
  Description of Artificial Sequence: Synthetic oligonucleotide
gaaucgccuacccagagac

SEQ ID NO: 1074695 - RNA, 19 nt, Artificial Sequence
  Description of Artificial Sequence: Synthetic oligonucleotide
uucuagagacaaauuaagu

SEQ ID NO: 1074696 - RNA, 19 nt, Artificial Sequence
  Description of Artificial Sequence: Synthetic oligonucleotide
agauguacgucacugauuu

SEQ ID NO: 1074697 - RNA, 19 nt, Artificial Sequence
  Description of Artificial Sequence: Synthetic oligonucleotide
gacaaauuaagucugcacu

SEQ ID NO: 1074698 - RNA, 19 nt, Artificial Sequence
  Description of Artificial Sequence: Synthetic oligonucleotide
ugaagaguuaguacagccu

SEQ ID NO: 1074699 - RNA, 19 nt, Artificial Sequence
  Description of Artificial Sequence: Synthetic oligonucleotide
agaguuaguacagccuucc

SEQ ID NO: 1074700 - RNA, 19 nt, Artificial Sequence
  Description of Artificial Sequence: Synthetic oligonucleotide
uguauauggggcuauuuua

SEQ ID NO: 1074701 - RNA, 19 nt, Artificial Sequence
  Description of Artificial Sequence: Synthetic oligonucleotide
uuaagcaggucacuuggga

SEQ ID NO: 1074702 - RNA, 19 nt, Artificial Sequence
  Description of Artificial Sequence: Synthetic oligonucleotide
gcuauuuuacaucucauac

SEQ ID NO: 1074703 - RNA, 19 nt, Artificial Sequence
  Description of Artificial Sequence: Synthetic oligonucleotide
uuuuguuugggcguugaug

SEQ ID NO: 1074704 - RNA, 19 nt, Artificial Sequence
  Description of Artificial Sequence: Synthetic oligonucleotide
agucugcacuguuugauuc

SEQ ID NO: 1074705 - RNA, 19 nt, Artificial Sequence
  Description of Artificial Sequence: Synthetic oligonucleotide
guagcgauucaugaggagg

SEQ ID NO: 1074706 - RNA, 19 nt, Artificial Sequence
  Description of Artificial Sequence: Synthetic oligonucleotide
acgucugcucuguauaugg

SEQ ID NO: 1074707 - RNA, 19 nt, Artificial Sequence
  Description of Artificial Sequence: Synthetic oligonucleotide
ucauacuacaguccuguaa

SEQ ID NO: 1074708 - RNA, 19 nt, Artificial Sequence
  Description of Artificial Sequence: Synthetic oligonucleotide
gugaagaguuaguacagcc

SEQ ID NO: 1074709 - RNA, 19 nt, Artificial Sequence
  Description of Artificial Sequence: Synthetic oligonucleotide
acgaugaaaauuuggaguu

SEQ ID NO: 1074710 - RNA, 19 nt, Artificial Sequence
  Description of Artificial Sequence: Synthetic oligonucleotide
guugacgaugaaaauuugg

SEQ ID NO: 1074711 - RNA, 19 nt, Artificial Sequence
  Description of Artificial Sequence: Synthetic oligonucleotide
uuccacgauuucaaagagg

SEQ ID NO: 1074712 - RNA, 19 nt, Artificial Sequence
  Description of Artificial Sequence: Synthetic oligonucleotide
aauacccuuagcuucugua

SEQ ID NO: 1074713 - RNA, 19 nt, Artificial Sequence
  Description of Artificial Sequence: Synthetic oligonucleotide
ucuuaccaaacauccaaac

SEQ ID NO: 1074714 - RNA, 19 nt, Artificial Sequence
  Description of Artificial Sequence: Synthetic oligonucleotide
uuuucuagcacgacccaaa

SEQ ID NO: 1074715 - RNA, 19 nt, Artificial Sequence
  Description of Artificial Sequence: Synthetic oligonucleotide
ucacgaacaaugucuaagu

SEQ ID NO: 1074716 - RNA, 19 nt, Artificial Sequence
  Description of Artificial Sequence: Synthetic oligonucleotide
auacauaggaggcacuggu

SEQ ID NO: 1074717 - RNA, 19 nt, Artificial Sequence
  Description of Artificial Sequence: Synthetic oligonucleotide
uagcgauucaugaggagga

SEQ ID NO: 1074718 - RNA, 19 nt, Artificial Sequence
  Description of Artificial Sequence: Synthetic oligonucleotide
auaaucauuccucacuguu

SEQ ID NO: 1074719 - RNA, 19 nt, Artificial Sequence
  Description of Artificial Sequence: Synthetic oligonucleotide
uaaguguccacuguaggcu

SEQ ID NO: 1074720 - RNA, 19 nt, Artificial Sequence
  Description of Artificial Sequence: Synthetic oligonucleotide
agcaauuugcuugguauuc

SEQ ID NO: 1074721 - RNA, 19 nt, Artificial Sequence
  Description of Artificial Sequence: Synthetic oligonucleotide
uugcaauugauaccacucu

SEQ ID NO: 1074722 - RNA, 19 nt, Artificial Sequence
  Description of Artificial Sequence: Synthetic oligonucleotide
acaaugucuaaguguccac

SEQ ID NO: 1074723 - RNA, 19 nt, Artificial Sequence
  Description of Artificial Sequence: Synthetic oligonucleotide
uuaagacggaggugaagag

SEQ ID NO: 1074724 - RNA, 19 nt, Artificial Sequence
  Description of Artificial Sequence: Synthetic oligonucleotide
ucuguauuacccgugucca

SEQ ID NO: 1074725 - RNA, 19 nt, Artificial Sequence
  Description of Artificial Sequence: Synthetic oligonucleotide
ucaucagaaucgccuaccc

SEQ ID NO: 1074726 - RNA, 19 nt, Artificial Sequence
  Description of Artificial Sequence: Synthetic oligonucleotide
uauauggggcuauuuuaca

SEQ ID NO: 1074727 - RNA, 19 nt, Artificial Sequence
  Description of Artificial Sequence: Synthetic oligonucleotide
aguagugcccaauccagca

SEQ ID NO: 1074728 - RNA, 19 nt, Artificial Sequence
  Description of Artificial Sequence: Synthetic oligonucleotide
uguuguucuggucccauau

SEQ ID NO: 1074729 - RNA, 19 nt, Artificial Sequence
  Description of Artificial Sequence: Synthetic oligonucleotide
auucauacuacaguccugu

SEQ ID NO: 1074730 - RNA, 19 nt, Artificial Sequence
  Description of Artificial Sequence: Synthetic oligonucleotide
caugaguagugcccaaucc

SEQ ID NO: 1074731 - RNA, 19 nt, Artificial Sequence
  Description of Artificial Sequence: Synthetic oligonucleotide
agagccauuaagacggagg

SEQ ID NO: 1074732 - RNA, 19 nt, Artificial Sequence
  Description of Artificial Sequence: Synthetic oligonucleotide
ucccuaacugcuuucuuca

SEQ ID NO: 1074733 - RNA, 19 nt, Artificial Sequence
  Description of Artificial Sequence: Synthetic oligonucleotide
gagugugggauauuuaaaa

SEQ ID NO: 1074734 - RNA, 19 nt, Artificial Sequence
  Description of Artificial Sequence: Synthetic oligonucleotide
gaacucaugaguagugccc

SEQ ID NO: 1074735 - RNA, 19 nt, Artificial Sequence
  Description of Artificial Sequence: Synthetic oligonucleotide
ucauacauaggaggcacug

SEQ ID NO: 1074736 - RNA, 19 nt, Artificial Sequence
  Description of Artificial Sequence: Synthetic oligonucleotide
uuccuauucuaaauagaaa

SEQ ID NO: 1074737 - RNA, 19 nt, Artificial Sequence
  Description of Artificial Sequence: Synthetic oligonucleotide
ugcauucaaacaccucuca

SEQ ID NO: 1074738 - RNA, 19 nt, Artificial Sequence
  Description of Artificial Sequence: Synthetic oligonucleotide
ugggucuccaacaauucaa

SEQ ID NO: 1074739 - RNA, 19 nt, Artificial Sequence
  Description of Artificial Sequence: Synthetic oligonucleotide
acuuacaagcacugugcag

SEQ ID NO: 1074740 - RNA, 19 nt, Artificial Sequence
  Description of Artificial Sequence: Synthetic oligonucleotide
uaaucucuuggaccaaggu

SEQ ID NO: 1074741 - RNA, 19 nt, Artificial Sequence
  Description of Artificial Sequence: Synthetic oligonucleotide
caauaucgaaagcaguuuc

SEQ ID NO: 1074742 - RNA, 19 nt, Artificial Sequence
  Description of Artificial Sequence: Synthetic oligonucleotide
uguauuacccguguccagu

SEQ ID NO: 1074743 - RNA, 19 nt, Artificial Sequence
  Description of Artificial Sequence: Synthetic oligonucleotide
cugaaguaagaaagaggcc

SEQ ID NO: 1074744 - RNA, 19 nt, Artificial Sequence
  Description of Artificial Sequence: Synthetic oligonucleotide
uaucgaaagcaguuuccug

SEQ ID NO: 1074745 - RNA, 19 nt, Artificial Sequence
  Description of Artificial Sequence: Synthetic oligonucleotide
aucgccuacccagagacuc

SEQ ID NO: 1074746 - RNA, 19 nt, Artificial Sequence
  Description of Artificial Sequence: Synthetic oligonucleotide
agaauggccuacaucuuac

SEQ ID NO: 1074747 - RNA, 19 nt, Artificial Sequence
  Description of Artificial Sequence: Synthetic oligonucleotide
gaggcaguguaaaacauuc

SEQ ID NO: 1074748 - RNA, 19 nt, Artificial Sequence
  Description of Artificial Sequence: Synthetic oligonucleotide
auggggcuauuuuacaucu

SEQ ID NO: 1074749 - RNA, 19 nt, Artificial Sequence
  Description of Artificial Sequence: Synthetic oligonucleotide
ucggugaagagguguauac

SEQ ID NO: 1074750 - RNA, 19 nt, Artificial Sequence
  Description of Artificial Sequence: Synthetic oligonucleotide
auguacgucacugauuugu

SEQ ID NO: 1074751 - RNA, 19 nt, Artificial Sequence
  Description of Artificial Sequence: Synthetic oligonucleotide
caguuuuaaucucuuggac

SEQ ID NO: 1074752 - RNA, 19 nt, Artificial Sequence
  Description of Artificial Sequence: Synthetic oligonucleotide
cuuaccaaacauccaaaca

SEQ ID NO: 1074753 - RNA, 19 nt, Artificial Sequence
  Description of Artificial Sequence: Synthetic oligonucleotide
uuaguacagccuuccacga

SEQ ID NO: 1074754 - RNA, 19 nt, Artificial Sequence
  Description of Artificial Sequence: Synthetic oligonucleotide
uguugacgaugaaaauuug

SEQ ID NO: 1074755 - RNA, 19 nt, Artificial Sequence
  Description of Artificial Sequence: Synthetic oligonucleotide
guccaguuaaaauuacuuc

SEQ ID NO: 1074756 - RNA, 19 nt, Artificial Sequence
  Description of Artificial Sequence: Synthetic oligonucleotide
ucgaaagcaguuuccugug

SEQ ID NO: 1074757 - RNA, 19 nt, Artificial Sequence
  Description of Artificial Sequence: Synthetic oligonucleotide
uacuacaguccuguaauga

SEQ ID NO: 1074758 - RNA, 19 nt, Artificial Sequence
  Description of Artificial Sequence: Synthetic oligonucleotide
aucccuaguguucacuuca

SEQ ID NO: 1074759 - RNA, 19 nt, Artificial Sequence
  Description of Artificial Sequence: Synthetic oligonucleotide
auaggaggcacugguacuc

SEQ ID NO: 1074760 - RNA, 19 nt, Artificial Sequence
  Description of Artificial Sequence: Synthetic oligonucleotide
ucugcacgguagcaagccg

SEQ ID NO: 1074761 - RNA, 19 nt, Artificial Sequence
  Description of Artificial Sequence: Synthetic oligonucleotide
auucuaaauagaaagcauu

SEQ ID NO: 1074762 - RNA, 19 nt, Artificial Sequence
  Description of Artificial Sequence: Synthetic oligonucleotide
acugugauucauacuacag

SEQ ID NO: 1074763 - RNA, 19 nt, Artificial Sequence
  Description of Artificial Sequence: Synthetic oligonucleotide
caaagacccagaguguggg

SEQ ID NO: 1074764 - RNA, 19 nt, Artificial Sequence
  Description of Artificial Sequence: Synthetic oligonucleotide
aacucaugaguagugccca

SEQ ID NO: 1074765 - RNA, 19 nt, Artificial Sequence
  Description of Artificial Sequence: Synthetic oligonucleotide
cugaguaccagugggaauc

SEQ ID NO: 1074766 - RNA, 19 nt, Artificial Sequence
  Description of Artificial Sequence: Synthetic oligonucleotide
ugaagagguguauacucau

SEQ ID NO: 1074767 - RNA, 19 nt, Artificial Sequence
  Description of Artificial Sequence: Synthetic oligonucleotide
ugucuaaguguccacugua

SEQ ID NO: 1074768 - RNA, 19 nt, Artificial Sequence
  Description of Artificial Sequence: Synthetic oligonucleotide
ucagaaucgccuacccaga

SEQ ID NO: 1074769 - RNA, 19 nt, Artificial Sequence
  Description of Artificial Sequence: Synthetic oligonucleotide
cuuccacgauuucaaagag

SEQ ID NO: 1074770 - RNA, 19 nt, Artificial Sequence
  Description of Artificial Sequence: Synthetic oligonucleotide
auauggggcuauuuuacau

SEQ ID NO: 1074771 - RNA, 19 nt, Artificial Sequence
  Description of Artificial Sequence: Synthetic oligonucleotide
aaauuacuagagccauuaa

SEQ ID NO: 1074772 - RNA, 19 nt, Artificial Sequence
  Description of Artificial Sequence: Synthetic oligonucleotide
ugcaauugauaccacucuu

SEQ ID NO: 1074773 - RNA, 19 nt, Artificial Sequence
  Description of Artificial Sequence: Synthetic oligonucleotide
aaugagacgucugcucugu

SEQ ID NO: 1074774 - RNA, 19 nt, Artificial Sequence
  Description of Artificial Sequence: Synthetic oligonucleotide
aguaccagugggaaucagg

SEQ ID NO: 1074775 - RNA, 19 nt, Artificial Sequence
  Description of Artificial Sequence: Synthetic oligonucleotide
guggagggcaguuuuaauc

SEQ ID NO: 1074776 - RNA, 19 nt, Artificial Sequence
  Description of Artificial Sequence: Synthetic oligonucleotide
caucuuaccaaacauccaa

SEQ ID NO: 1074777 - RNA, 19 nt, Artificial Sequence
  Description of Artificial Sequence: Synthetic oligonucleotide
cauggguugaccuggguga

SEQ ID NO: 1074778 - RNA, 19 nt, Artificial Sequence
  Description of Artificial Sequence: Synthetic oligonucleotide
cauucaaacaccucucaaa

SEQ ID NO: 1074779 - RNA, 19 nt, Artificial Sequence
  Description of Artificial Sequence: Synthetic oligonucleotide
uguagcgauucaugaggag

SEQ ID NO: 1074780 - RNA, 19 nt, Artificial Sequence
  Description of Artificial Sequence: Synthetic oligonucleotide
aagacggaggugaagaguu

SEQ ID NO: 1074781 - RNA, 19 nt, Artificial Sequence
  Description of Artificial Sequence: Synthetic oligonucleotide
uuccaggguguccuuacug

SEQ ID NO: 1074782 - RNA, 19 nt, Artificial Sequence
  Description of Artificial Sequence: Synthetic oligonucleotide
guauacucauccucauccc

SEQ ID NO: 1074783 - RNA, 19 nt, Artificial Sequence
  Description of Artificial Sequence: Synthetic oligonucleotide
uguuguuguuuuguaagaa

SEQ ID NO: 1074784 - RNA, 19 nt, Artificial Sequence
  Description of Artificial Sequence: Synthetic oligonucleotide
auuuggaguuagcucauaa

SEQ ID NO: 1074785 - RNA, 19 nt, Artificial Sequence
  Description of Artificial Sequence: Synthetic oligonucleotide
uucaugaggaggaguucca

SEQ ID NO: 1074786 - RNA, 19 nt, Artificial Sequence
  Description of Artificial Sequence: Synthetic oligonucleotide
auacccuuagcuucuguau

SEQ ID NO: 1074787 - RNA, 19 nt, Artificial Sequence
  Description of Artificial Sequence: Synthetic oligonucleotide
uggccuacaucuuaccaaa

SEQ ID NO: 1074788 - RNA, 19 nt, Artificial Sequence
  Description of Artificial Sequence: Synthetic oligonucleotide
uggcaauaucgaaagcagu

SEQ ID NO: 1074789 - RNA, 19 nt, Artificial Sequence
  Description of Artificial Sequence: Synthetic oligonucleotide
aauuaagucugcacuguuu

SEQ ID NO: 1074790 - RNA, 19 nt, Artificial Sequence
  Description of Artificial Sequence: Synthetic oligonucleotide
auggccuacaucuuaccaa

SEQ ID NO: 1074791 - RNA, 19 nt, Artificial Sequence
  Description of Artificial Sequence: Synthetic oligonucleotide
accaguauguugacgauga

SEQ ID NO: 1074792 - RNA, 19 nt, Artificial Sequence
  Description of Artificial Sequence: Synthetic oligonucleotide
agagguguauacucauccu

SEQ ID NO: 1074793 - RNA, 19 nt, Artificial Sequence
  Description of Artificial Sequence: Synthetic oligonucleotide
accaagguacaguuuugug

SEQ ID NO: 1074794 - RNA, 19 nt, Artificial Sequence
  Description of Artificial Sequence: Synthetic oligonucleotide
ggcguugaugucugcaucg

SEQ ID NO: 1074795 - RNA, 19 nt, Artificial Sequence
  Description of Artificial Sequence: Synthetic oligonucleotide
cgaacaaugucuaaguguc

SEQ ID NO: 1074796 - RNA, 19 nt, Artificial Sequence
  Description of Artificial Sequence: Synthetic oligonucleotide
auuacccguguccaguuaa

SEQ ID NO: 1074797 - RNA, 19 nt, Artificial Sequence
  Description of Artificial Sequence: Synthetic oligonucleotide
aaauacccuuagcuucugu

SEQ ID NO: 1074798 - RNA, 19 nt, Artificial Sequence
  Description of Artificial Sequence: Synthetic oligonucleotide
gaauggccuacaucuuacc

SEQ ID NO: 1074799 - RNA, 19 nt, Artificial Sequence
  Description of Artificial Sequence: Synthetic oligonucleotide
ccaguuaaaauuacuucug

SEQ ID NO: 1074800 - RNA, 19 nt, Artificial Sequence
  Description of Artificial Sequence: Synthetic oligonucleotide
gacggaggugaagaguuag

SEQ ID NO: 1074801 - RNA, 19 nt, Artificial Sequence
  Description of Artificial Sequence: Synthetic oligonucleotide
uguucuggucccauaugau

SEQ ID NO: 1074802 - RNA, 19 nt, Artificial Sequence
  Description of Artificial Sequence: Synthetic oligonucleotide
gugauucauacuacagucc

SEQ ID NO: 1074803 - RNA, 19 nt, Artificial Sequence
  Description of Artificial Sequence: Synthetic oligonucleotide
ucuuggaccaagguacagu

SEQ ID NO: 1074804 - RNA, 19 nt, Artificial Sequence
  Description of Artificial Sequence: Synthetic oligonucleotide
augucuaaguguccacugu

SEQ ID NO: 1074805 - RNA, 19 nt, Artificial Sequence
  Description of Artificial Sequence: Synthetic oligonucleotide
auacuacaguccuguaaug

SEQ ID NO: 1074806 - RNA, 19 nt, Artificial Sequence
  Description of Artificial Sequence: Synthetic oligonucleotide
gauucauacuacaguccug

SEQ ID NO: 1074807 - RNA, 19 nt, Artificial Sequence
  Description of Artificial Sequence: Synthetic oligonucleotide
ucucuuggaccaagguaca

SEQ ID NO: 1074808 - RNA, 19 nt, Artificial Sequence
  Description of Artificial Sequence: Synthetic oligonucleotide
cagagugugggauauuuaa

SEQ ID NO: 1074809 - RNA, 19 nt, Artificial Sequence
  Description of Artificial Sequence: Synthetic oligonucleotide
cauacuacaguccuguaau

SEQ ID NO: 1074810 - RNA, 19 nt, Artificial Sequence
  Description of Artificial Sequence: Synthetic oligonucleotide
augcauucaaacaccucuc

SEQ ID NO: 1074811 - RNA, 19 nt, Artificial Sequence
  Description of Artificial Sequence: Synthetic oligonucleotide
auuaagcaggucacuuggg

SEQ ID NO: 1074812 - RNA, 19 nt, Artificial Sequence
  Description of Artificial Sequence: Synthetic oligonucleotide
uguccuuacugucucuguu

SEQ ID NO: 1074813 - RNA, 19 nt, Artificial Sequence
  Description of Artificial Sequence: Synthetic oligonucleotide
uagcaagaagguucacaug

SEQ ID NO: 1074814 - RNA, 19 nt, Artificial Sequence
  Description of Artificial Sequence: Synthetic oligonucleotide
cacgaacaaugucuaagug

SEQ ID NO: 1074815 - RNA, 19 nt, Artificial Sequence
  Description of Artificial Sequence: Synthetic oligonucleotide
aucgugcugaaguaagaaa

SEQ ID NO: 1074816 - RNA, 19 nt, Artificial Sequence
  Description of Artificial Sequence: Synthetic oligonucleotide
gucuaaguguccacuguag

SEQ ID NO: 1074817 - RNA, 19 nt, Artificial Sequence
  Description of Artificial Sequence: Synthetic oligonucleotide
agguguauacucauccuca

SEQ ID NO: 1074818 - RNA, 19 nt, Artificial Sequence
  Description of Artificial Sequence: Synthetic oligonucleotide
uacccuuagcuucuguauu

SEQ ID NO: 1074819 - RNA, 19 nt, Artificial Sequence
  Description of Artificial Sequence: Synthetic oligonucleotide
uagcuucuguauuacccgu

SEQ ID NO: 1074820 - RNA, 19 nt, Artificial Sequence
  Description of Artificial Sequence: Synthetic oligonucleotide
cuacaguccuguaaugaga

SEQ ID NO: 1074821 - RNA, 19 nt, Artificial Sequence
  Description of Artificial Sequence: Synthetic oligonucleotide
ucaugaggaggaguuccag

SEQ ID NO: 1074822 - RNA, 19 nt, Artificial Sequence
  Description of Artificial Sequence: Synthetic oligonucleotide
ucaucccuaguguucacuu

SEQ ID NO: 1074823 - RNA, 19 nt, Artificial Sequence
  Description of Artificial Sequence: Synthetic oligonucleotide
gagccauuaagacggaggu

SEQ ID NO: 1074824 - RNA, 19 nt, Artificial Sequence
  Description of Artificial Sequence: Synthetic oligonucleotide
caguuaaaauuacuucuga

SEQ ID NO: 1074825 - RNA, 19 nt, Artificial Sequence
  Description of Artificial Sequence: Synthetic oligonucleotide
gagacaaauuaagucugca

SEQ ID NO: 1074826 - RNA, 19 nt, Artificial Sequence
  Description of Artificial Sequence: Synthetic oligonucleotide
gccauuaagacggagguga

SEQ ID NO: 1074827 - RNA, 19 nt, Artificial Sequence
  Description of Artificial Sequence: Synthetic oligonucleotide
acacugugauucauacuac

SEQ ID NO: 1074828 - RNA, 19 nt, Artificial Sequence
  Description of Artificial Sequence: Synthetic oligonucleotide
aggccuuuuguuugggcgu

SEQ ID NO: 1074829 - RNA, 19 nt, Artificial Sequence
  Description of Artificial Sequence: Synthetic oligonucleotide
aguuuccugugaguuguuc

SEQ ID NO: 1074830 - RNA, 19 nt, Artificial Sequence
  Description of Artificial Sequence: Synthetic oligonucleotide
uacauaggaggcacuggua

SEQ ID NO: 1074831 - RNA, 19 nt, Artificial Sequence
  Description of Artificial Sequence: Synthetic oligonucleotide
caaagauguacgucacuga

SEQ ID NO: 1074832 - RNA, 19 nt, Artificial Sequence
  Description of Artificial Sequence: Synthetic oligonucleotide
aaauuuggaguuagcucau

SEQ ID NO: 1074833 - RNA, 19 nt, Artificial Sequence
  Description of Artificial Sequence: Synthetic oligonucleotide
agaaucgccuacccagaga

SEQ ID NO: 1074834 - RNA, 19 nt, Artificial Sequence
  Description of Artificial Sequence: Synthetic oligonucleotide
ggaaucagguguccauggg

SEQ ID NO: 1074835 - RNA, 19 nt, Artificial Sequence
  Description of Artificial Sequence: Synthetic oligonucleotide
gauaccacucuucuuguuu

SEQ ID NO: 1074836 - RNA, 19 nt, Artificial Sequence
  Description of Artificial Sequence: Synthetic oligonucleotide
ucugaguaccagugggaau

SEQ ID NO: 1074837 - RNA, 19 nt, Artificial Sequence
  Description of Artificial Sequence: Synthetic oligonucleotide
cauuaagacggaggugaag

SEQ ID NO: 1074838 - RNA, 19 nt, Artificial Sequence
  Description of Artificial Sequence: Synthetic oligonucleotide
cuguauuacccguguccag

SEQ ID NO: 1074839 - RNA, 19 nt, Artificial Sequence
  Description of Artificial Sequence: Synthetic oligonucleotide
cucugcacgguagcaagcc

SEQ ID NO: 1074840 - RNA, 19 nt, Artificial Sequence
  Description of Artificial Sequence: Synthetic oligonucleotide
ugguguuguuccacuuaca

SEQ ID NO: 1074841 - RNA, 19 nt, Artificial Sequence
  Description of Artificial Sequence: Synthetic oligonucleotide
acgguagcaagccguauuu

SEQ ID NO: 1074842 - RNA, 19 nt, Artificial Sequence
  Description of Artificial Sequence: Synthetic oligonucleotide
acgauuucaaagagguagu

SEQ ID NO: 1074843 - RNA, 19 nt, Artificial Sequence
  Description of Artificial Sequence: Synthetic oligonucleotide
ggggcuauuuuacaucuca

SEQ ID NO: 1074844 - RNA, 19 nt, Artificial Sequence
  Description of Artificial Sequence: Synthetic oligonucleotide
acuaaacacugaacaaaga

SEQ ID NO: 1074845 - RNA, 19 nt, Artificial Sequence
  Description of Artificial Sequence: Synthetic oligonucleotide
uuguccuccuggcaauauc

SEQ ID NO: 1074846 - RNA, 19 nt, Artificial Sequence
  Description of Artificial Sequence: Synthetic oligonucleotide
ggccauagcaagaagguuc

SEQ ID NO: 1074847 - RNA, 19 nt, Artificial Sequence
  Description of Artificial Sequence: Synthetic oligonucleotide
cuagcacgacccaaaagaa

SEQ ID NO: 1074848 - RNA, 19 nt, Artificial Sequence
  Description of Artificial Sequence: Synthetic oligonucleotide
gaguagugcccaauccagc

SEQ ID NO: 1074849 - RNA, 19 nt, Artificial Sequence
  Description of Artificial Sequence: Synthetic oligonucleotide
ggugagguaggacugucca

SEQ ID NO: 1074850 - RNA, 19 nt, Artificial Sequence
  Description of Artificial Sequence: Synthetic oligonucleotide
guagugauagaugcuuguc

SEQ ID NO: 1074851 - RNA, 19 nt, Artificial Sequence
  Description of Artificial Sequence: Synthetic oligonucleotide
gauguacgucacugauuug

SEQ ID NO: 1074852 - RNA, 19 nt, Artificial Sequence
  Description of Artificial Sequence: Synthetic oligonucleotide
aggagacacugacuggcca

SEQ ID NO: 1074853 - RNA, 19 nt, Artificial Sequence
  Description of Artificial Sequence: Synthetic oligonucleotide
acgucacugauuuguuagu

SEQ ID NO: 1074854 - RNA, 19 nt, Artificial Sequence
  Description of Artificial Sequence: Synthetic oligonucleotide
cacugugauucauacuaca

SEQ ID NO: 1074855 - RNA, 19 nt, Artificial Sequence
  Description of Artificial Sequence: Synthetic oligonucleotide
gaagagguguauacucauc

SEQ ID NO: 1074856 - RNA, 19 nt, Artificial Sequence
  Description of Artificial Sequence: Synthetic oligonucleotide
ugggcguugaugucugcau

SEQ ID NO: 1074857 - RNA, 19 nt, Artificial Sequence
  Description of Artificial Sequence: Synthetic oligonucleotide
gauucaugaggaggaguuc

SEQ ID NO: 1074858 - RNA, 19 nt, Artificial Sequence
  Description of Artificial Sequence: Synthetic oligonucleotide
cagaaucgccuacccagag

SEQ ID NO: 1074859 - RNA, 19 nt, Artificial Sequence
  Description of Artificial Sequence: Synthetic oligonucleotide
ugguggacauuuccuggaa

SEQ ID NO: 1074860 - RNA, 19 nt, Artificial Sequence
  Description of Artificial Sequence: Synthetic oligonucleotide
gugaagagguguauacuca

SEQ ID NO: 1074861 - RNA, 19 nt, Artificial Sequence
  Description of Artificial Sequence: Synthetic oligonucleotide
uuacccguguccaguuaaa

SEQ ID NO: 1074862 - RNA, 19 nt, Artificial Sequence
  Description of Artificial Sequence: Synthetic oligonucleotide
acccuuagcuucuguauua

SEQ ID NO: 1074863 - RNA, 19 nt, Artificial Sequence
  Description of Artificial Sequence: Synthetic oligonucleotide
ugcucggugaagaggugua

SEQ ID NO: 1074864 - RNA, 19 nt, Artificial Sequence
  Description of Artificial Sequence: Synthetic oligonucleotide
ucuguauauggggcuauuu

SEQ ID NO: 1074865 - RNA, 19 nt, Artificial Sequence
  Description of Artificial Sequence: Synthetic oligonucleotide
uugggcguugaugucugca

SEQ ID NO: 1074866 - RNA, 19 nt, Artificial Sequence
  Description of Artificial Sequence: Synthetic oligonucleotide
ggcuuaaacaucucccuaa

SEQ ID NO: 1074867 - RNA, 19 nt, Artificial Sequence
  Description of Artificial Sequence: Synthetic oligonucleotide
guaagaaagaggccacccu

SEQ ID NO: 1074868 - RNA, 19 nt, Artificial Sequence
  Description of Artificial Sequence: Synthetic oligonucleotide
agacgucugcucuguauau

SEQ ID NO: 1074869 - RNA, 19 nt, Artificial Sequence
  Description of Artificial Sequence: Synthetic oligonucleotide
ccaaagaguuuucuggguc

SEQ ID NO: 1074870 - RNA, 19 nt, Artificial Sequence
  Description of Artificial Sequence: Synthetic oligonucleotide
uauuacccguguccaguua

SEQ ID NO: 1074871 - RNA, 19 nt, Artificial Sequence
  Description of Artificial Sequence: Synthetic oligonucleotide
ugcacgguagcaagccgua

SEQ ID NO: 1074872 - RNA, 19 nt, Artificial Sequence
  Description of Artificial Sequence: Synthetic oligonucleotide
acaucuuaccaaacaucca

SEQ ID NO: 1074873 - RNA, 19 nt, Artificial Sequence
  Description of Artificial Sequence: Synthetic oligonucleotide
auguagcgauucaugagga

SEQ ID NO: 1074874 - RNA, 19 nt, Artificial Sequence
  Description of Artificial Sequence: Synthetic oligonucleotide
agagguagugauagaugcu

SEQ ID NO: 1074875 - RNA, 19 nt, Artificial Sequence
  Description of Artificial Sequence: Synthetic oligonucleotide
caucccuaguguucacuuc

SEQ ID NO: 1074876 - RNA, 19 nt, Artificial Sequence
  Description of Artificial Sequence: Synthetic oligonucleotide
agaaagccugagccacuug

SEQ ID NO: 1074877 - RNA, 19 nt, Artificial Sequence
  Description of Artificial Sequence: Synthetic oligonucleotide
cuucuguauuacccguguc

SEQ ID NO: 1074878 - RNA, 19 nt, Artificial Sequence
  Description of Artificial Sequence: Synthetic oligonucleotide
agagugugggauauuuaaa

SEQ ID NO: 1074879 - RNA, 19 nt, Artificial Sequence
  Description of Artificial Sequence: Synthetic oligonucleotide
guuugggcguugaugucug

SEQ ID NO: 1074880 - RNA, 19 nt, Artificial Sequence
  Description of Artificial Sequence: Synthetic oligonucleotide
aucauuccucacuguuaca

SEQ ID NO: 1074881 - RNA, 19 nt, Artificial Sequence
  Description of Artificial Sequence: Synthetic oligonucleotide
ugcuuguccuccuggcaau

SEQ ID NO: 1074882 - RNA, 19 nt, Artificial Sequence
  Description of Artificial Sequence: Synthetic oligonucleotide
gaguuaguacagccuucca

SEQ ID NO: 1074883 - RNA, 19 nt, Artificial Sequence
  Description of Artificial Sequence: Synthetic oligonucleotide
guaccagugggaaucaggu

SEQ ID NO: 1074884 - RNA, 19 nt, Artificial Sequence
  Description of Artificial Sequence: Synthetic oligonucleotide
gcaauugauaccacucuuc

SEQ ID NO: 1074885 - RNA, 19 nt, Artificial Sequence
  Description of Artificial Sequence: Synthetic oligonucleotide
gauagaugcuuguccuccu

SEQ ID NO: 1074886 - RNA, 19 nt, Artificial Sequence
  Description of Artificial Sequence: Synthetic oligonucleotide
aucuuaccaaacauccaaa

SEQ ID NO: 1074887 - RNA, 19 nt, Artificial Sequence
  Description of Artificial Sequence: Synthetic oligonucleotide
agcgauucaugaggaggag

SEQ ID NO: 1074888 - RNA, 19 nt, Artificial Sequence
  Description of Artificial Sequence: Synthetic oligonucleotide
aagaagcaauuugcuuggu

SEQ ID NO: 1074889 - RNA, 19 nt, Artificial Sequence
  Description of Artificial Sequence: Synthetic oligonucleotide
caguauguugacgaugaaa

SEQ ID NO: 1074890 - RNA, 19 nt, Artificial Sequence
  Description of Artificial Sequence: Synthetic oligonucleotide
ggcuauuuuacaucucaua

SEQ ID NO: 1074891 - RNA, 19 nt, Artificial Sequence
  Description of Artificial Sequence: Synthetic oligonucleotide
cuggccauagcaagaaggu

SEQ ID NO: 1074892 - RNA, 19 nt, Artificial Sequence
  Description of Artificial Sequence: Synthetic oligonucleotide
ucgccuacccagagacucu

SEQ ID NO: 1074893 - RNA, 19 nt, Artificial Sequence
  Description of Artificial Sequence: Synthetic oligonucleotide
uucauacuacaguccugua

SEQ ID NO: 1074894 - RNA, 19 nt, Artificial Sequence
  Description of Artificial Sequence: Synthetic oligonucleotide
gccuacaucuuaccaaaca

SEQ ID NO: 1074895 - RNA, 19 nt, Artificial Sequence
  Description of Artificial Sequence: Synthetic oligonucleotide
agccauuaagacggaggug

SEQ ID NO: 1074896 - RNA, 19 nt, Artificial Sequence
  Description of Artificial Sequence: Synthetic oligonucleotide
ugauaccacucuucuuguu

SEQ ID NO: 1074897 - RNA, 19 nt, Artificial Sequence
  Description of Artificial Sequence: Synthetic oligonucleotide
uggguugaccugggugagg

SEQ ID NO: 1074898 - RNA, 19 nt, Artificial Sequence
  Description of Artificial Sequence: Synthetic oligonucleotide
auggguugaccugggugag

SEQ ID NO: 1074899 - RNA, 19 nt, Artificial Sequence
  Description of Artificial Sequence: Synthetic oligonucleotide
ugcucuguauauggggcua

SEQ ID NO: 1074900 - RNA, 19 nt, Artificial Sequence
  Description of Artificial Sequence: Synthetic oligonucleotide
gaacacugugauucauacu

SEQ ID NO: 1074901 - RNA, 19 nt, Artificial Sequence
  Description of Artificial Sequence: Synthetic oligonucleotide
cagucccuugguuugaugu

SEQ ID NO: 1074902 - RNA, 19 nt, Artificial Sequence
  Description of Artificial Sequence: Synthetic oligonucleotide
cuuggaccaagguacaguu

SEQ ID NO: 1074903 - RNA, 19 nt, Artificial Sequence
  Description of Artificial Sequence: Synthetic oligonucleotide
aggucacuugggagaacac

SEQ ID NO: 1074904 - RNA, 19 nt, Artificial Sequence
  Description of Artificial Sequence: Synthetic oligonucleotide
uggggcuauuuuacaucuc

SEQ ID NO: 1074905 - RNA, 19 nt, Artificial Sequence
  Description of Artificial Sequence: Synthetic oligonucleotide
cuuaaacaucucccuaacu

SEQ ID NO: 1074906 - RNA, 19 nt, Artificial Sequence
  Description of Artificial Sequence: Synthetic oligonucleotide
ugaccugggugagguagga

SEQ ID NO: 1074907 - RNA, 19 nt, Artificial Sequence
  Description of Artificial Sequence: Synthetic oligonucleotide
caucucccuaacugcuuuc

SEQ ID NO: 1074908 - RNA, 19 nt, Artificial Sequence
  Description of Artificial Sequence: Synthetic oligonucleotide
acccugguguuguuccacu

SEQ ID NO: 1074909 - RNA, 19 nt, Artificial Sequence
  Description of Artificial Sequence: Synthetic oligonucleotide
cccagagacucugaguacc

SEQ ID NO: 1074910 - RNA, 19 nt, Artificial Sequence
  Description of Artificial Sequence: Synthetic oligonucleotide
acgacccaaaagaagcaau

SEQ ID NO: 1074911 - RNA, 19 nt, Artificial Sequence
  Description of Artificial Sequence: Synthetic oligonucleotide
guauguugacgaugaaaau

SEQ ID NO: 1074912 - RNA, 19 nt, Artificial Sequence
  Description of Artificial Sequence: Synthetic oligonucleotide
caagaagguucacaugggu

SEQ ID NO: 1074913 - RNA, 19 nt, Artificial Sequence
  Description of Artificial Sequence: Synthetic oligonucleotide
caucgugcugaaguaagaa

SEQ ID NO: 1074914 - RNA, 19 nt, Artificial Sequence
  Description of Artificial Sequence: Synthetic oligonucleotide
gguagugauagaugcuugu

SEQ ID NO: 1074915 - RNA, 19 nt, Artificial Sequence
  Description of Artificial Sequence: Synthetic oligonucleotide
cugcaccaguauguugacg

SEQ ID NO: 1074916 - RNA, 19 nt, Artificial Sequence
  Description of Artificial Sequence: Synthetic oligonucleotide
uacccguguccaguuaaaa

SEQ ID NO: 1074917 - RNA, 19 nt, Artificial Sequence
  Description of Artificial Sequence: Synthetic oligonucleotide
aaucgccuacccagagacu

SEQ ID NO: 1074918 - RNA, 19 nt, Artificial Sequence
  Description of Artificial Sequence: Synthetic oligonucleotide
guacgucacugauuuguua

SEQ ID NO: 1074919 - RNA, 19 nt, Artificial Sequence
  Description of Artificial Sequence: Synthetic oligonucleotide
cuguauauggggcuauuuu

SEQ ID NO: 1074920 - RNA, 19 nt, Artificial Sequence
  Description of Artificial Sequence: Synthetic oligonucleotide
gaguaccagugggaaucag

SEQ ID NO: 1074921 - RNA, 19 nt, Artificial Sequence
  Description of Artificial Sequence: Synthetic oligonucleotide
cauaggaggcacugguacu

SEQ ID NO: 1074922 - RNA, 19 nt, Artificial Sequence
  Description of Artificial Sequence: Synthetic oligonucleotide
caucaagauuaagcagguc

SEQ ID NO: 1074923 - RNA, 19 nt, Artificial Sequence
  Description of Artificial Sequence: Synthetic oligonucleotide
gaccaagguacaguuuugu

SEQ ID NO: 1074924 - RNA, 19 nt, Artificial Sequence
  Description of Artificial Sequence: Synthetic oligonucleotide
ggauuaugaggaauguggu

SEQ ID NO: 1074925 - RNA, 19 nt, Artificial Sequence
  Description of Artificial Sequence: Synthetic oligonucleotide
cagucacugcaugaacauc

SEQ ID NO: 1074926 - RNA, 19 nt, Artificial Sequence
  Description of Artificial Sequence: Synthetic oligonucleotide
agccuuccacgauuucaaa

SEQ ID NO: 1074927 - RNA, 19 nt, Artificial Sequence
  Description of Artificial Sequence: Synthetic oligonucleotide
ggagggcaguuuuaaucuc

SEQ ID NO: 1074928 - RNA, 19 nt, Artificial Sequence
  Description of Artificial Sequence: Synthetic oligonucleotide
uucagucccuugguuugau

SEQ ID NO: 1074929 - RNA, 19 nt, Artificial Sequence
  Description of Artificial Sequence: Synthetic oligonucleotide
ccuaacugcuuucuucaga

SEQ ID NO: 1074930 - RNA, 19 nt, Artificial Sequence
  Description of Artificial Sequence: Synthetic oligonucleotide
acggaggugaagaguuagu

SEQ ID NO: 1074931 - RNA, 19 nt, Artificial Sequence
  Description of Artificial Sequence: Synthetic oligonucleotide
ccuuacugucucuguuccc

SEQ ID NO: 1074932 - RNA, 19 nt, Artificial Sequence
  Description of Artificial Sequence: Synthetic oligonucleotide
guacaguuuugugcauguc

SEQ ID NO: 1074933 - RNA, 19 nt, Artificial Sequence
  Description of Artificial Sequence: Synthetic oligonucleotide
caucugccccgugagccac

SEQ ID NO: 1074934 - RNA, 19 nt, Artificial Sequence
  Description of Artificial Sequence: Synthetic oligonucleotide
cugcacgguagcaagccgu

SEQ ID NO: 1074935 - RNA, 19 nt, Artificial Sequence
  Description of Artificial Sequence: Synthetic oligonucleotide
agcauucaccacagaugca

SEQ ID NO: 1074936 - RNA, 19 nt, Artificial Sequence
  Description of Artificial Sequence: Synthetic oligonucleotide
caagauuaagcaggucacu

SEQ ID NO: 1074937 - RNA, 19 nt, Artificial Sequence
  Description of Artificial Sequence: Synthetic oligonucleotide
cuagagccauuaagacgga

SEQ ID NO: 1074938 - RNA, 19 nt, Artificial Sequence
  Description of Artificial Sequence: Synthetic oligonucleotide
gcauucaccacagaugcau

SEQ ID NO: 1074939 - RNA, 19 nt, Artificial Sequence
  Description of Artificial Sequence: Synthetic oligonucleotide
guguccaguuaaaauuacu

SEQ ID NO: 1074940 - RNA, 19 nt, Artificial Sequence
  Description of Artificial Sequence: Synthetic oligonucleotide
cagcaaggugcacaggggu

SEQ ID NO: 1074941 - RNA, 19 nt, Artificial Sequence
  Description of Artificial Sequence: Synthetic oligonucleotide
agggcaguuuuaaucucuu

SEQ ID NO: 1074942 - RNA, 19 nt, Artificial Sequence
  Description of Artificial Sequence: Synthetic oligonucleotide
cguguccaguuaaaauuac

SEQ ID NO: 1074943 - RNA, 19 nt, Artificial Sequence
  Description of Artificial Sequence: Synthetic oligonucleotide
guauuacccguguccaguu

SEQ ID NO: 1074944 - RNA, 19 nt, Artificial Sequence
  Description of Artificial Sequence: Synthetic oligonucleotide
cuguaggcugcucggugaa

SEQ ID NO: 1074945 - RNA, 19 nt, Artificial Sequence
  Description of Artificial Sequence: Synthetic oligonucleotide
ccguguccaguuaaaauua

SEQ ID NO: 1074946 - RNA, 19 nt, Artificial Sequence
  Description of Artificial Sequence: Synthetic oligonucleotide
ggucuccaacaauucaagu

SEQ ID NO: 1074947 - RNA, 19 nt, Artificial Sequence
  Description of Artificial Sequence: Synthetic oligonucleotide
gguguauacucauccucau

SEQ ID NO: 1074948 - RNA, 19 nt, Artificial Sequence
  Description of Artificial Sequence: Synthetic oligonucleotide
cucggugaagagguguaua

SEQ ID NO: 1074949 - RNA, 19 nt, Artificial Sequence
  Description of Artificial Sequence: Synthetic oligonucleotide
cgucacugauuuguuagug

SEQ ID NO: 1074950 - RNA, 19 nt, Artificial Sequence
  Description of Artificial Sequence: Synthetic oligonucleotide
cccguguccaguuaaaauu

SEQ ID NO: 1074951 - RNA, 19 nt, Artificial Sequence
  Description of Artificial Sequence: Synthetic oligonucleotide
ccgugagccaccagcucac

SEQ ID NO: 1074952 - RNA, 19 nt, Artificial Sequence
  Description of Artificial Sequence: Synthetic oligonucleotide
augagacgucugcucugua

SEQ ID NO: 1074953 - RNA, 19 nt, Artificial Sequence
  Description of Artificial Sequence: Synthetic oligonucleotide
ccuugguuugauguagcga

SEQ ID NO: 1074954 - RNA, 19 nt, Artificial Sequence
  Description of Artificial Sequence: Synthetic oligonucleotide
gucccauaugauaaucauu

SEQ ID NO: 1074955 - RNA, 19 nt, Artificial Sequence
  Description of Artificial Sequence: Synthetic oligonucleotide
ccagagacucugaguacca

SEQ ID NO: 1074956 - RNA, 19 nt, Artificial Sequence
  Description of Artificial Sequence: Synthetic oligonucleotide
gacccagagugugggauau

SEQ ID NO: 1074957 - RNA, 19 nt, Artificial Sequence
  Description of Artificial Sequence: Synthetic oligonucleotide
cacgguagcaagccguauu

SEQ ID NO: 1074958 - RNA, 19 nt, Artificial Sequence
  Description of Artificial Sequence: Synthetic oligonucleotide
cauucaccacagaugcauu

SEQ ID NO: 1074959 - RNA, 19 nt, Artificial Sequence
  Description of Artificial Sequence: Synthetic oligonucleotide
gcacugguacucugaagcu

SEQ ID NO: 1074960 - RNA, 19 nt, Artificial Sequence
  Description of Artificial Sequence: Synthetic oligonucleotide
gcaucgugcugaaguaaga

SEQ ID NO: 1074961 - RNA, 19 nt, Artificial Sequence
  Description of Artificial Sequence: Synthetic oligonucleotide
gucuuucuagagacaaauu

SEQ ID NO: 1074962 - RNA, 19 nt, Artificial Sequence
  Description of Artificial Sequence: Synthetic oligonucleotide
cucaucccuaguguucacu

SEQ ID NO: 1074963 - RNA, 19 nt, Artificial Sequence
  Description of Artificial Sequence: Synthetic oligonucleotide
agacggaggugaagaguua

SEQ ID NO: 1074964 - RNA, 19 nt, Artificial Sequence
  Description of Artificial Sequence: Synthetic oligonucleotide
gcucacgaacaaugucuaa

SEQ ID NO: 1074965 - RNA, 19 nt, Artificial Sequence
  Description of Artificial Sequence: Synthetic oligonucleotide
ccauuaagacggaggugaa

SEQ ID NO: 1074966 - RNA, 19 nt, Artificial Sequence
  Description of Artificial Sequence: Synthetic oligonucleotide
cucaugaguagugcccaau

SEQ ID NO: 1074967 - RNA, 19 nt, Artificial Sequence
  Description of Artificial Sequence: Synthetic oligonucleotide
ggccuacaucuuaccaaac

SEQ ID NO: 1074968 - RNA, 19 nt, Artificial Sequence
  Description of Artificial Sequence: Synthetic oligonucleotide
ccagagugugggauauuua

SEQ ID NO: 1074969 - RNA, 19 nt, Artificial Sequence
  Description of Artificial Sequence: Synthetic oligonucleotide
ggaggcaguguaaaacauu

SEQ ID NO: 1074970 - RNA, 19 nt, Artificial Sequence
  Description of Artificial Sequence: Synthetic oligonucleotide
ccuugucccuuugccuuug

SEQ ID NO: 1074971 - RNA, 19 nt, Artificial Sequence
  Description of Artificial Sequence: Synthetic oligonucleotide
gccuuuuguuugggcguug

SEQ ID NO: 1074972 - RNA, 19 nt, Artificial Sequence
  Description of Artificial Sequence: Synthetic oligonucleotide
ggagaacacugugauucau

SEQ ID NO: 1074973 - RNA, 19 nt, Artificial Sequence
  Description of Artificial Sequence: Synthetic oligonucleotide
gcgauucaugaggaggagu

SEQ ID NO: 1074974 - RNA, 19 nt, Artificial Sequence
  Description of Artificial Sequence: Synthetic oligonucleotide
aggggucaagaggccuuuu

SEQ ID NO: 1074975 - RNA, 19 nt, Artificial Sequence
  Description of Artificial Sequence: Synthetic oligonucleotide
ccauagcaagaagguucac

SEQ ID NO: 1074976 - RNA, 19 nt, Artificial Sequence
  Description of Artificial Sequence: Synthetic oligonucleotide
gguguccaugggucuccaa

SEQ ID NO: 1074977 - RNA, 19 nt, Artificial Sequence
  Description of Artificial Sequence: Synthetic oligonucleotide
cuugucccuuugccuuugu

SEQ ID NO: 1074978 - RNA, 19 nt, Artificial Sequence
  Description of Artificial Sequence: Synthetic oligonucleotide
ggacuguccacaggauuau

SEQ ID NO: 1074979 - RNA, 19 nt, Artificial Sequence
  Description of Artificial Sequence: Synthetic oligonucleotide
ccacgauuucaaagaggua

SEQ ID NO: 1074980 - RNA, 19 nt, Artificial Sequence
  Description of Artificial Sequence: Synthetic oligonucleotide
cggaggugaagaguuagua

SEQ ID NO: 1074981 - RNA, 19 nt, Artificial Sequence
  Description of Artificial Sequence: Synthetic oligonucleotide
ccaguauguugacgaugaa

SEQ ID NO: 1074982 - RNA, 19 nt, Artificial Sequence
  Description of Artificial Sequence: Synthetic oligonucleotide
gcguugaugucugcaucgu

SEQ ID NO: 1074983 - RNA, 19 nt, Artificial Sequence
  Description of Artificial Sequence: Synthetic oligonucleotide
cucuguauauggggcuauu

SEQ ID NO: 1074984 - RNA, 19 nt, Artificial Sequence
  Description of Artificial Sequence: Synthetic oligonucleotide
gcucuguauauggggcuau

SEQ ID NO: 1074985 - RNA, 19 nt, Artificial Sequence
  Description of Artificial Sequence: Synthetic oligonucleotide
gccuacccagagacucuga

SEQ ID NO: 1074986 - RNA, 19 nt, Artificial Sequence
  Description of Artificial Sequence: Synthetic oligonucleotide
ggccuuuuguuugggcguu

SEQ ID NO: 1074987 - RNA, 19 nt, Artificial Sequence
  Description of Artificial Sequence: Synthetic oligonucleotide
gcucggugaagagguguau

SEQ ID NO: 1074988 - RNA, 19 nt, Artificial Sequence
  Description of Artificial Sequence: Synthetic oligonucleotide
cggugaagagguguauacu

SEQ ID NO: 1074989 - RNA, 19 nt, Artificial Sequence
  Description of Artificial Sequence: Synthetic oligonucleotide
gcacgguagcaagccguau

SEQ ID NO: 1074990 - RNA, 19 nt, Artificial Sequence
  Description of Artificial Sequence: Synthetic oligonucleotide
ucugauaaggauuugacgu

SEQ ID NO: 1074991 - RNA, 19 nt, Artificial Sequence
  Description of Artificial Sequence: Synthetic oligonucleotide
aauacagaaucccaacagg

SEQ ID NO: 1074992 - RNA, 19 nt, Artificial Sequence
  Description of Artificial Sequence: Synthetic oligonucleotide
aauaaagggauugcagagc

SEQ ID NO: 1074993 - RNA, 19 nt, Artificial Sequence
  Description of Artificial Sequence: Synthetic oligonucleotide
auuaugacguaguaaacag

SEQ ID NO: 1074994 - RNA, 19 nt, Artificial Sequence
  Description of Artificial Sequence: Synthetic oligonucleotide
aagcuauucaucaagugac

SEQ ID NO: 1074995 - RNA, 19 nt, Artificial Sequence
  Description of Artificial Sequence: Synthetic oligonucleotide
ucuucaacaauucucaauu

SEQ ID NO: 1074996 - RNA, 19 nt, Artificial Sequence
  Description of Artificial Sequence: Synthetic oligonucleotide
aaaaguccgacagagacca

SEQ ID NO: 1074997 - RNA, 19 nt, Artificial Sequence
  Description of Artificial Sequence: Synthetic oligonucleotide
agcauuaugacguaguaaa

SEQ ID NO: 1074998 - RNA, 19 nt, Artificial Sequence
  Description of Artificial Sequence: Synthetic oligonucleotide
auuagaacaagcuaacuuu

SEQ ID NO: 1074999 - RNA, 19 nt, Artificial Sequence
  Description of Artificial Sequence: Synthetic oligonucleotide
ugaauuuaagacuucacuu

SEQ ID NO: 1075000 - RNA, 19 nt, Artificial Sequence
  Description of Artificial Sequence: Synthetic oligonucleotide
gauugcagagcauagcccc

SEQ ID NO: 1075001 - RNA, 19 nt, Artificial Sequence
  Description of Artificial Sequence: Synthetic oligonucleotide
uauuagaacaagcuaacuu

SEQ ID NO: 1075002 - RNA, 19 nt, Artificial Sequence
  Description of Artificial Sequence: Synthetic oligonucleotide
ugcaaugcaauuaccaacu

SEQ ID NO: 1075003 - RNA, 19 nt, Artificial Sequence
  Description of Artificial Sequence: Synthetic oligonucleotide
agagucugccauucaaucc

SEQ ID NO: 1075004 - RNA, 19 nt, Artificial Sequence
  Description of Artificial Sequence: Synthetic oligonucleotide
guaaacagaguauaacccc

SEQ ID NO: 1075005 - RNA, 19 nt, Artificial Sequence
  Description of Artificial Sequence: Synthetic oligonucleotide
gagaaggacaguuuuggcc

SEQ ID NO: 1075006 - RNA, 19 nt, Artificial Sequence
  Description of Artificial Sequence: Synthetic oligonucleotide
uauucaucaagugaccugc

SEQ ID NO: 1075007 - RNA, 19 nt, Artificial Sequence
  Description of Artificial Sequence: Synthetic oligonucleotide
gaagaugucgaugcggucg

SEQ ID NO: 1075008 - RNA, 19 nt, Artificial Sequence
  Description of Artificial Sequence: Synthetic oligonucleotide
uucucaauuguucuucggc

SEQ ID NO: 1075009 - RNA, 19 nt, Artificial Sequence
  Description of Artificial Sequence: Synthetic oligonucleotide
gauuugacguaaugggagg

SEQ ID NO: 1075010 - RNA, 19 nt, Artificial Sequence
  Description of Artificial Sequence: Synthetic oligonucleotide
aucacaaggacacugcugu

SEQ ID NO: 1075011 - RNA, 19 nt, Artificial Sequence
  Description of Artificial Sequence: Synthetic oligonucleotide
uaauauccgcuccaguucc

SEQ ID NO: 1075012 - RNA, 19 nt, Artificial Sequence
  Description of Artificial Sequence: Synthetic oligonucleotide
uucaacaauucucaauugu

SEQ ID NO: 1075013 - RNA, 19 nt, Artificial Sequence
  Description of Artificial Sequence: Synthetic oligonucleotide
acaagcuaacuuuccagac

SEQ ID NO: 1075014 - RNA, 19 nt, Artificial Sequence
  Description of Artificial Sequence: Synthetic oligonucleotide
ugcuguaacaacaccacac

SEQ ID NO: 1075015 - RNA, 19 nt, Artificial Sequence
  Description of Artificial Sequence: Synthetic oligonucleotide
ucaaccaauacagaauccc

SEQ ID NO: 1075016 - RNA, 19 nt, Artificial Sequence
  Description of Artificial Sequence: Synthetic oligonucleotide
uccgacagagaccauacug

SEQ ID NO: 1075017 - RNA, 19 nt, Artificial Sequence
  Description of Artificial Sequence: Synthetic oligonucleotide
aguauaaccccaaagucag

SEQ ID NO: 1075018 - RNA, 19 nt, Artificial Sequence
  Description of Artificial Sequence: Synthetic oligonucleotide
aacuguuauccuuaccugu

SEQ ID NO: 1075019 - RNA, 19 nt, Artificial Sequence
  Description of Artificial Sequence: Synthetic oligonucleotide
ugaacaccuuaccagacca

SEQ ID NO: 1075020 - RNA, 19 nt, Artificial Sequence
  Description of Artificial Sequence: Synthetic oligonucleotide
uuauccuuaccuguuauca

SEQ ID NO: 1075021 - RNA, 19 nt, Artificial Sequence
  Description of Artificial Sequence: Synthetic oligonucleotide
gaugcguuuggcuucuucc

SEQ ID NO: 1075022 - RNA, 19 nt, Artificial Sequence
  Description of Artificial Sequence: Synthetic oligonucleotide
ucaucaagugaccugcucu

SEQ ID NO: 1075023 - RNA, 19 nt, Artificial Sequence
  Description of Artificial Sequence: Synthetic oligonucleotide
auccuuaccuguuaucagg

SEQ ID NO: 1075024 - RNA, 19 nt, Artificial Sequence
  Description of Artificial Sequence: Synthetic oligonucleotide
auaaagggauugcagagca

SEQ ID NO: 1075025 - RNA, 19 nt, Artificial Sequence
  Description of Artificial Sequence: Synthetic oligonucleotide
aagaugucgaugcggucgg

SEQ ID NO: 1075026 - RNA, 19 nt, Artificial Sequence
  Description of Artificial Sequence: Synthetic oligonucleotide
cauccuuuccucaugaauc

SEQ ID NO: 1075027 - RNA, 19 nt, Artificial Sequence
  Description of Artificial Sequence: Synthetic oligonucleotide
acagaguauaaccccaaag

SEQ ID NO: 1075028 - RNA, 19 nt, Artificial Sequence
  Description of Artificial Sequence: Synthetic oligonucleotide
aaaauacaccacuucuaga

SEQ ID NO: 1075029 - RNA, 19 nt, Artificial Sequence
  Description of Artificial Sequence: Synthetic oligonucleotide
uucaacaugaagcuacaau

SEQ ID NO: 1075030 - RNA, 19 nt, Artificial Sequence
  Description of Artificial Sequence: Synthetic oligonucleotide
agucccuaaagauggcagc

SEQ ID NO: 1075031 - RNA, 19 nt, Artificial Sequence
  Description of Artificial Sequence: Synthetic oligonucleotide
aggugacaaacuguuaucc

SEQ ID NO: 1075032 - RNA, 19 nt, Artificial Sequence
  Description of Artificial Sequence: Synthetic oligonucleotide
uauaaccccaaagucagug

SEQ ID NO: 1075033 - RNA, 19 nt, Artificial Sequence
  Description of Artificial Sequence: Synthetic oligonucleotide
guuccucacgcuuugcucg

SEQ ID NO: 1075034 - RNA, 19 nt, Artificial Sequence
  Description of Artificial Sequence: Synthetic oligonucleotide
ucaauuguucuucggccag

SEQ ID NO: 1075035 - RNA, 19 nt, Artificial Sequence
  Description of Artificial Sequence: Synthetic oligonucleotide
ucuuguuguguuuggagcu

SEQ ID NO: 1075036 - RNA, 19 nt, Artificial Sequence
  Description of Artificial Sequence: Synthetic oligonucleotide
aagcuaacuuuccagacuu

SEQ ID NO: 1075037 - RNA, 19 nt, Artificial Sequence
  Description of Artificial Sequence: Synthetic oligonucleotide
uacagaaucccaacaggug

SEQ ID NO: 1075038 - RNA, 19 nt, Artificial Sequence
  Description of Artificial Sequence: Synthetic oligonucleotide
uucuagaagacagcaauga

SEQ ID NO: 1075039 - RNA, 19 nt, Artificial Sequence
  Description of Artificial Sequence: Synthetic oligonucleotide
gaccaagcuauucaucaag

SEQ ID NO: 1075040 - RNA, 19 nt, Artificial Sequence
  Description of Artificial Sequence: Synthetic oligonucleotide
uaaugagaaggacaguuuu

SEQ ID NO: 1075041 - RNA, 19 nt, Artificial Sequence
  Description of Artificial Sequence: Synthetic oligonucleotide
auaaccccaaagucagugg

SEQ ID NO: 1075042 - RNA, 19 nt, Artificial Sequence
  Description of Artificial Sequence: Synthetic oligonucleotide
aacaccuuaccagaccaag

SEQ ID NO: 1075043 - RNA, 19 nt, Artificial Sequence
  Description of Artificial Sequence: Synthetic oligonucleotide
cuuaccuguuaucaggaac

SEQ ID NO: 1075044 - RNA, 19 nt, Artificial Sequence
  Description of Artificial Sequence: Synthetic oligonucleotide
uucgccgccgggaagcucg

SEQ ID NO: 1075045 - RNA, 19 nt, Artificial Sequence
  Description of Artificial Sequence: Synthetic oligonucleotide
gaguauaaccccaaaguca

SEQ ID NO: 1075046 - RNA, 19 nt, Artificial Sequence
  Description of Artificial Sequence: Synthetic oligonucleotide
uauccuuaccuguuaucag

SEQ ID NO: 1075047 - RNA, 19 nt, Artificial Sequence
  Description of Artificial Sequence: Synthetic oligonucleotide
agaacaagcuaacuuucca

SEQ ID NO: 1075048 - RNA, 19 nt, Artificial Sequence
  Description of Artificial Sequence: Synthetic oligonucleotide
aaacccugggaauuuugca

SEQ ID NO: 1075049 - RNA, 19 nt, Artificial Sequence
  Description of Artificial Sequence: Synthetic oligonucleotide
uuaugacguaguaaacaga

SEQ ID NO: 1075050 - RNA, 19 nt, Artificial Sequence
  Description of Artificial Sequence: Synthetic oligonucleotide
augaagcuacaauacgaag

SEQ ID NO: 1075051 - RNA, 19 nt, Artificial Sequence
  Description of Artificial Sequence: Synthetic oligonucleotide
guaaaggccuagcaggccc

SEQ ID NO: 1075052 - RNA, 19 nt, Artificial Sequence
  Description of Artificial Sequence: Synthetic oligonucleotide
caagcuauucaucaaguga

SEQ ID NO: 1075053 - RNA, 19 nt, Artificial Sequence
  Description of Artificial Sequence: Synthetic oligonucleotide
ugacaaacuguuauccuua

SEQ ID NO: 1075054 - RNA, 19 nt, Artificial Sequence
  Description of Artificial Sequence: Synthetic oligonucleotide
ugaucugauaaggauuuga

SEQ ID NO: 1075055 - RNA, 19 nt, Artificial Sequence
  Description of Artificial Sequence: Synthetic oligonucleotide
ugccauucaauccuggguu

SEQ ID NO: 1075056 - RNA, 19 nt, Artificial Sequence
  Description of Artificial Sequence: Synthetic oligonucleotide
cuaguuucauccuuuccuc

SEQ ID NO: 1075057 - RNA, 19 nt, Artificial Sequence
  Description of Artificial Sequence: Synthetic oligonucleotide
ucauccuuuccucaugaau

SEQ ID NO: 1075058 - RNA, 19 nt, Artificial Sequence
  Description of Artificial Sequence: Synthetic oligonucleotide
cagaccaucaaccaauaca

SEQ ID NO: 1075059 - RNA, 19 nt, Artificial Sequence
  Description of Artificial Sequence: Synthetic oligonucleotide
gagaccauacugcacugug

SEQ ID NO: 1075060 - RNA, 19 nt, Artificial Sequence
  Description of Artificial Sequence: Synthetic oligonucleotide
uaaccccaaagucaguggu

SEQ ID NO: 1075061 - RNA, 19 nt, Artificial Sequence
  Description of Artificial Sequence: Synthetic oligonucleotide
auucucaauuguucuucgg

SEQ ID NO: 1075062 - RNA, 19 nt, Artificial Sequence
  Description of Artificial Sequence: Synthetic oligonucleotide
aguuuuggccuggacuucc

SEQ ID NO: 1075063 - RNA, 19 nt, Artificial Sequence
  Description of Artificial Sequence: Synthetic oligonucleotide
caaacuguuauccuuaccu

SEQ ID NO: 1075064 - RNA, 19 nt, Artificial Sequence
  Description of Artificial Sequence: Synthetic oligonucleotide
cuuugcucgcucuuccucc

SEQ ID NO: 1075065 - RNA, 19 nt, Artificial Sequence
  Description of Artificial Sequence: Synthetic oligonucleotide
gacguaaugggaggaaaag

SEQ ID NO: 1075066 - RNA, 19 nt, Artificial Sequence
  Description of Artificial Sequence: Synthetic oligonucleotide
uuccucaugaaucuuucuu

SEQ ID NO: 1075067 - RNA, 19 nt, Artificial Sequence
  Description of Artificial Sequence: Synthetic oligonucleotide
agagccacaguaucacaag

SEQ ID NO: 1075068 - RNA, 19 nt, Artificial Sequence
  Description of Artificial Sequence: Synthetic oligonucleotide
uccuuaccuguuaucagga

SEQ ID NO: 1075069 - RNA, 19 nt, Artificial Sequence
  Description of Artificial Sequence: Synthetic oligonucleotide
agugaccugcucuucagca

SEQ ID NO: 1075070 - RNA, 19 nt, Artificial Sequence
  Description of Artificial Sequence: Synthetic oligonucleotide
cauagccccuauuagaaca

SEQ ID NO: 1075071 - RNA, 19 nt, Artificial Sequence
  Description of Artificial Sequence: Synthetic oligonucleotide
aaggacacugcuguaacaa

SEQ ID NO: 1075072 - RNA, 19 nt, Artificial Sequence
  Description of Artificial Sequence: Synthetic oligonucleotide
ugcgcuugcucaccgugcg

SEQ ID NO: 1075073 - RNA, 19 nt, Artificial Sequence
  Description of Artificial Sequence: Synthetic oligonucleotide
ugcaagcucagcuugucuc

SEQ ID NO: 1075074 - RNA, 19 nt, Artificial Sequence
  Description of Artificial Sequence: Synthetic oligonucleotide
acaugaagcuacaauacga

SEQ ID NO: 1075075 - RNA, 19 nt, Artificial Sequence
  Description of Artificial Sequence: Synthetic oligonucleotide
cagaccaagcuauucauca

SEQ ID NO: 1075076 - RNA, 19 nt, Artificial Sequence
  Description of Artificial Sequence: Synthetic oligonucleotide
ucagcagaccaucaaccaa

SEQ ID NO: 1075077 - RNA, 19 nt, Artificial Sequence
  Description of Artificial Sequence: Synthetic oligonucleotide
uguuauccuuaccuguuau

SEQ ID NO: 1075078 - RNA, 19 nt, Artificial Sequence
  Description of Artificial Sequence: Synthetic oligonucleotide
aucaaccaauacagaaucc

SEQ ID NO: 1075079 - RNA, 19 nt, Artificial Sequence
  Description of Artificial Sequence: Synthetic oligonucleotide
uggguacuucuguagcagg

SEQ ID NO: 1075080 - RNA, 19 nt, Artificial Sequence
  Description of Artificial Sequence: Synthetic oligonucleotide
cuguaacaacaccacacag

SEQ ID NO: 1075081 - RNA, 19 nt, Artificial Sequence
  Description of Artificial Sequence: Synthetic oligonucleotide
ggauuugacguaaugggag

SEQ ID NO: 1075082 - RNA, 19 nt, Artificial Sequence
  Description of Artificial Sequence: Synthetic oligonucleotide
cauuaugacguaguaaaca

SEQ ID NO: 1075083 - RNA, 19 nt, Artificial Sequence
  Description of Artificial Sequence: Synthetic oligonucleotide
ugucccgcgagcgcgagcg

SEQ ID NO: 1075084 - RNA, 19 nt, Artificial Sequence
  Description of Artificial Sequence: Synthetic oligonucleotide
ugacguaaugggaggaaaa

SEQ ID NO: 1075085 - RNA, 19 nt, Artificial Sequence
  Description of Artificial Sequence: Synthetic oligonucleotide
auacagaaucccaacaggu

SEQ ID NO: 1075086 - RNA, 19 nt, Artificial Sequence
  Description of Artificial Sequence: Synthetic oligonucleotide
ucgagcaacugcuuuucca

SEQ ID NO: 1075087 - RNA, 19 nt, Artificial Sequence
  Description of Artificial Sequence: Synthetic oligonucleotide
agcuauucaucaagugacc

SEQ ID NO: 1075088 - RNA, 19 nt, Artificial Sequence
  Description of Artificial Sequence: Synthetic oligonucleotide
acgcuuugcucgcucuucc

SEQ ID NO: 1075089 - RNA, 19 nt, Artificial Sequence
  Description of Artificial Sequence: Synthetic oligonucleotide
ugauaaggauuugacguaa

SEQ ID NO: 1075090 - RNA, 19 nt, Artificial Sequence
  Description of Artificial Sequence: Synthetic oligonucleotide
aagggauugcagagcauag

SEQ ID NO: 1075091 - RNA, 19 nt, Artificial Sequence
  Description of Artificial Sequence: Synthetic oligonucleotide
aguccgacagagaccauac

SEQ ID NO: 1075092 - RNA, 19 nt, Artificial Sequence
  Description of Artificial Sequence: Synthetic oligonucleotide
aacagaguauaaccccaaa

SEQ ID NO: 1075093 - RNA, 19 nt, Artificial Sequence
  Description of Artificial Sequence: Synthetic oligonucleotide
gcugguuugauuuugucaa

SEQ ID NO: 1075094 - RNA, 19 nt, Artificial Sequence
  Description of Artificial Sequence: Synthetic oligonucleotide
aggccuagcaggcccggcc

SEQ ID NO: 1075095 - RNA, 19 nt, Artificial Sequence
  Description of Artificial Sequence: Synthetic oligonucleotide
ccggagucccuaaagaugg

SEQ ID NO: 1075096 - RNA, 19 nt, Artificial Sequence
  Description of Artificial Sequence: Synthetic oligonucleotide
aaccaauacagaaucccaa

SEQ ID NO: 1075097 - RNA, 19 nt, Artificial Sequence
  Description of Artificial Sequence: Synthetic oligonucleotide
caugaagcuacaauacgaa

SEQ ID NO: 1075098 - RNA, 19 nt, Artificial Sequence
  Description of Artificial Sequence: Synthetic oligonucleotide
acaccuuaccagaccaagc

SEQ ID NO: 1075099 - RNA, 19 nt, Artificial Sequence
  Description of Artificial Sequence: Synthetic oligonucleotide
uucgcugccgcucgaacuc

SEQ ID NO: 1075100 - RNA, 19 nt, Artificial Sequence
  Description of Artificial Sequence: Synthetic oligonucleotide
uacuucuguagcaggugac

SEQ ID NO: 1075101 - RNA, 19 nt, Artificial Sequence
  Description of Artificial Sequence: Synthetic oligonucleotide
uuucgcugccgcucgaacu

SEQ ID NO: 1075102 - RNA, 19 nt, Artificial Sequence
  Description of Artificial Sequence: Synthetic oligonucleotide
gacacugcuguaacaacac

SEQ ID NO: 1075103 - RNA, 19 nt, Artificial Sequence
  Description of Artificial Sequence: Synthetic oligonucleotide
cuguggguacuucuguagc

SEQ ID NO: 1075104 - RNA, 19 nt, Artificial Sequence
  Description of Artificial Sequence: Synthetic oligonucleotide
uccuugucccgcgagcgcg

SEQ ID NO: 1075105 - RNA, 19 nt, Artificial Sequence
  Description of Artificial Sequence: Synthetic oligonucleotide
caagugaccugcucuucag

SEQ ID NO: 1075106 - RNA, 19 nt, Artificial Sequence
  Description of Artificial Sequence: Synthetic oligonucleotide
aaugcugguuugauuuugu

SEQ ID NO: 1075107 - RNA, 19 nt, Artificial Sequence
  Description of Artificial Sequence: Synthetic oligonucleotide
agccccuauuagaacaagc

SEQ ID NO: 1075108 - RNA, 19 nt, Artificial Sequence
  Description of Artificial Sequence: Synthetic oligonucleotide
caaccaauacagaauccca

SEQ ID NO: 1075109 - RNA, 19 nt, Artificial Sequence
  Description of Artificial Sequence: Synthetic oligonucleotide
cucaauuguucuucggcca

SEQ ID NO: 1075110 - RNA, 19 nt, Artificial Sequence
  Description of Artificial Sequence: Synthetic oligonucleotide
cugucgcucgaguucuucg

SEQ ID NO: 1075111 - RNA, 19 nt, Artificial Sequence
  Description of Artificial Sequence: Synthetic oligonucleotide
ugucgcucgaguucuucga

SEQ ID NO: 1075112 - RNA, 19 nt, Artificial Sequence
  Description of Artificial Sequence: Synthetic oligonucleotide
guuauccuuaccuguuauc

SEQ ID NO: 1075113 - RNA, 19 nt, Artificial Sequence
  Description of Artificial Sequence: Synthetic oligonucleotide
agcuacaauacgaaguuuu

SEQ ID NO: 1075114 - RNA, 19 nt, Artificial Sequence
  Description of Artificial Sequence: Synthetic oligonucleotide
uuuucgcugccgcucgaac

SEQ ID NO: 1075115 - RNA, 19 nt, Artificial Sequence
  Description of Artificial Sequence: Synthetic oligonucleotide
aggauuugacguaauggga

SEQ ID NO: 1075116 - RNA, 19 nt, Artificial Sequence
  Description of Artificial Sequence: Synthetic oligonucleotide
aguggggaaugcugguuug

SEQ ID NO: 1075117 - RNA, 19 nt, Artificial Sequence
  Description of Artificial Sequence: Synthetic oligonucleotide
ucuacccucuuugcuacca

SEQ ID NO: 1075118 - RNA, 19 nt, Artificial Sequence
  Description of Artificial Sequence: Synthetic oligonucleotide
agcaaugaucugauaagga

SEQ ID NO: 1075119 - RNA, 19 nt, Artificial Sequence
  Description of Artificial Sequence: Synthetic oligonucleotide
gaaggacaguuuuggccug

SEQ ID NO: 1075120 - RNA, 19 nt, Artificial Sequence
  Description of Artificial Sequence: Synthetic oligonucleotide
ucggaggacuucucgcuca

SEQ ID NO: 1075121 - RNA, 19 nt, Artificial Sequence
  Description of Artificial Sequence: Synthetic oligonucleotide
agcauagccccuauuagaa

SEQ ID NO: 1075122 - RNA, 19 nt, Artificial Sequence
  Description of Artificial Sequence: Synthetic oligonucleotide
acguaaugggaggaaaaga

SEQ ID NO: 1075123 - RNA, 19 nt, Artificial Sequence
  Description of Artificial Sequence: Synthetic oligonucleotide
aggacuucucgcucaauuu

SEQ ID NO: 1075124 - RNA, 19 nt, Artificial Sequence
  Description of Artificial Sequence: Synthetic oligonucleotide
uugacguaaugggaggaaa

SEQ ID NO: 1075125 - RNA, 19 nt, Artificial Sequence
  Description of Artificial Sequence: Synthetic oligonucleotide
ugcgauuuuccgguuauuu

SEQ ID NO: 1075126 - RNA, 19 nt, Artificial Sequence
  Description of Artificial Sequence: Synthetic oligonucleotide
auuugacguaaugggagga

SEQ ID NO: 1075127 - RNA, 19 nt, Artificial Sequence
  Description of Artificial Sequence: Synthetic oligonucleotide
gaugucgaugcggucgggc

SEQ ID NO: 1075128 - RNA, 19 nt, Artificial Sequence
  Description of Artificial Sequence: Synthetic oligonucleotide
uggccugugcuucugcgau

SEQ ID NO: 1075129 - RNA, 19 nt, Artificial Sequence
  Description of Artificial Sequence: Synthetic oligonucleotide
aaacagaguauaaccccaa

SEQ ID NO: 1075130 - RNA, 19 nt, Artificial Sequence
  Description of Artificial Sequence: Synthetic oligonucleotide
ucucguccaggcugcugcg

SEQ ID NO: 1075131 - RNA, 19 nt, Artificial Sequence
  Description of Artificial Sequence: Synthetic oligonucleotide
ucgcucgaguucuucgagc

SEQ ID NO: 1075132 - RNA, 19 nt, Artificial Sequence
  Description of Artificial Sequence: Synthetic oligonucleotide
uuugcucgcucuuccuccu

SEQ ID NO: 1075133 - RNA, 19 nt, Artificial Sequence
  Description of Artificial Sequence: Synthetic oligonucleotide
cccuauuagaacaagcuaa

SEQ ID NO: 1075134 - RNA, 19 nt, Artificial Sequence
  Description of Artificial Sequence: Synthetic oligonucleotide
uuaccagaccaagcuauuc

SEQ ID NO: 1075135 - RNA, 19 nt, Artificial Sequence
  Description of Artificial Sequence: Synthetic oligonucleotide
ugaugcguuuggcuucuuc

SEQ ID NO: 1075136 - RNA, 19 nt, Artificial Sequence
  Description of Artificial Sequence: Synthetic oligonucleotide
gaugcggucgggcggggac

SEQ ID NO: 1075137 - RNA, 19 nt, Artificial Sequence
  Description of Artificial Sequence: Synthetic oligonucleotide
gcuaccaauucuuccacuc

SEQ ID NO: 1075138 - RNA, 19 nt, Artificial Sequence
  Description of Artificial Sequence: Synthetic oligonucleotide
aaaggccuagcaggcccgg

SEQ ID NO: 1075139 - RNA, 19 nt, Artificial Sequence
  Description of Artificial Sequence: Synthetic oligonucleotide
aaguccgacagagaccaua

SEQ ID NO: 1075140 - RNA, 19 nt, Artificial Sequence
  Description of Artificial Sequence: Synthetic oligonucleotide
uuggccugugcuucugcga

SEQ ID NO: 1075141 - RNA, 19 nt, Artificial Sequence
  Description of Artificial Sequence: Synthetic oligonucleotide
accccaaagucagugguca

SEQ ID NO: 1075142 - RNA, 19 nt, Artificial Sequence
  Description of Artificial Sequence: Synthetic oligonucleotide
uuggagcgggacgagcucc

SEQ ID NO: 1075143 - RNA, 19 nt, Artificial Sequence
  Description of Artificial Sequence: Synthetic oligonucleotide
cugauaaggauuugacgua

SEQ ID NO: 1075144 - RNA, 19 nt, Artificial Sequence
  Description of Artificial Sequence: Synthetic oligonucleotide
accaagcuauucaucaagu

SEQ ID NO: 1075145 - RNA, 19 nt, Artificial Sequence
  Description of Artificial Sequence: Synthetic oligonucleotide
gucgcucgaguucuucgag

SEQ ID NO: 1075146 - RNA, 19 nt, Artificial Sequence
  Description of Artificial Sequence: Synthetic oligonucleotide
cagagcauagccccuauua

SEQ ID NO: 1075147 - RNA, 19 nt, Artificial Sequence
  Description of Artificial Sequence: Synthetic oligonucleotide
uuguuggcguugucguucu

SEQ ID NO: 1075148 - RNA, 19 nt, Artificial Sequence
  Description of Artificial Sequence: Synthetic oligonucleotide
auuuaagacuucacuuuau

SEQ ID NO: 1075149 - RNA, 19 nt, Artificial Sequence
  Description of Artificial Sequence: Synthetic oligonucleotide
uuccucacgcuuugcucgc

SEQ ID NO: 1075150 - RNA, 19 nt, Artificial Sequence
  Description of Artificial Sequence: Synthetic oligonucleotide
agaccaagcuauucaucaa

SEQ ID NO: 1075151 - RNA, 19 nt, Artificial Sequence
  Description of Artificial Sequence: Synthetic oligonucleotide
uaaagggauugcagagcau

SEQ ID NO: 1075152 - RNA, 19 nt, Artificial Sequence
  Description of Artificial Sequence: Synthetic oligonucleotide
cacggaacccuccgccucg

SEQ ID NO: 1075153 - RNA, 19 nt, Artificial Sequence
  Description of Artificial Sequence: Synthetic oligonucleotide
aaggccuagcaggcccggc

SEQ ID NO: 1075154 - RNA, 19 nt, Artificial Sequence
  Description of Artificial Sequence: Synthetic oligonucleotide
ucaccgugcgcccgaagau

SEQ ID NO: 1075155 - RNA, 19 nt, Artificial Sequence
  Description of Artificial Sequence: Synthetic oligonucleotide
ggacuucucgcucaauuuc

SEQ ID NO: 1075156 - RNA, 19 nt, Artificial Sequence
  Description of Artificial Sequence: Synthetic oligonucleotide
uuguuguguuuggagcucu

SEQ ID NO: 1075157 - RNA, 19 nt, Artificial Sequence
  Description of Artificial Sequence: Synthetic oligonucleotide
gacuuggagcgcuuccgca

SEQ ID NO: 1075158 - RNA, 19 nt, Artificial Sequence
  Description of Artificial Sequence: Synthetic oligonucleotide
gacgagcuccggcuccgcg

SEQ ID NO: 1075159 - RNA, 19 nt, Artificial Sequence
  Description of Artificial Sequence: Synthetic oligonucleotide
cuuguuguguuuggagcuc

SEQ ID NO: 1075160 - RNA, 19 nt, Artificial Sequence
  Description of Artificial Sequence: Synthetic oligonucleotide
gguuccguuugcucucccg

SEQ ID NO: 1075161 - RNA, 19 nt, Artificial Sequence
  Description of Artificial Sequence: Synthetic oligonucleotide
cuucgagcaacugcuuuuc

SEQ ID NO: 1075162 - RNA, 19 nt, Artificial Sequence
  Description of Artificial Sequence: Synthetic oligonucleotide
uuggagcgcuuccgcaccc

SEQ ID NO: 1075163 - RNA, 19 nt, Artificial Sequence
  Description of Artificial Sequence: Synthetic oligonucleotide
accauacugcacugugggu

SEQ ID NO: 1075164 - RNA, 19 nt, Artificial Sequence
  Description of Artificial Sequence: Synthetic oligonucleotide
uccgcgaccggcccauccu

SEQ ID NO: 1075165 - RNA, 19 nt, Artificial Sequence
  Description of Artificial Sequence: Synthetic oligonucleotide
gucgaugcggucgggcggg

SEQ ID NO: 1075166 - RNA, 19 nt, Artificial Sequence
  Description of Artificial Sequence: Synthetic oligonucleotide
guugguggagcgcgagcgc

SEQ ID NO: 1075167 - RNA, 19 nt, Artificial Sequence
  Description of Artificial Sequence: Synthetic oligonucleotide
ccaagcuauucaucaagug

SEQ ID NO: 1075168 - RNA, 19 nt, Artificial Sequence
  Description of Artificial Sequence: Synthetic oligonucleotide
gaccggcccauccucgcgc

SEQ ID NO: 1075169 - RNA, 19 nt, Artificial Sequence
  Description of Artificial Sequence: Synthetic oligonucleotide
aauauccgcuccaguuccu

SEQ ID NO: 1075170 - RNA, 19 nt, Artificial Sequence
  Description of Artificial Sequence: Synthetic oligonucleotide
accuuaccagaccaagcua

SEQ ID NO: 1075171 - RNA, 19 nt, Artificial Sequence
  Description of Artificial Sequence: Synthetic oligonucleotide
ucccgcucgcgccgggacg

SEQ ID NO: 1075172 - RNA, 19 nt, Artificial Sequence
  Description of Artificial Sequence: Synthetic oligonucleotide
caagcuaacuuuccagacu

SEQ ID NO: 1075173 - RNA, 19 nt, Artificial Sequence
  Description of Artificial Sequence: Synthetic oligonucleotide
uucuacccucuuugcuacc

SEQ ID NO: 1075174 - RNA, 19 nt, Artificial Sequence
  Description of Artificial Sequence: Synthetic oligonucleotide
gacguaguaaacagaguau

SEQ ID NO: 1075175 - RNA, 19 nt, Artificial Sequence
  Description of Artificial Sequence: Synthetic oligonucleotide
ccguaaaggccuagcaggc

SEQ ID NO: 1075176 - RNA, 19 nt, Artificial Sequence
  Description of Artificial Sequence: Synthetic oligonucleotide
caccuuaccagaccaagcu

SEQ ID NO: 1075177 - RNA, 19 nt, Artificial Sequence
  Description of Artificial Sequence: Synthetic oligonucleotide
acgagcuccggcuccgcga

SEQ ID NO: 1075178 - RNA, 19 nt, Artificial Sequence
  Description of Artificial Sequence: Synthetic oligonucleotide
guaucacaaggacacugcu

SEQ ID NO: 1075179 - RNA, 19 nt, Artificial Sequence
  Description of Artificial Sequence: Synthetic oligonucleotide
uccgccguaaaggccuagc

SEQ ID NO: 1075180 - RNA, 19 nt, Artificial Sequence
  Description of Artificial Sequence: Synthetic oligonucleotide
ucccgcgagcgcgagcgcg

SEQ ID NO: 1075181 - RNA, 19 nt, Artificial Sequence
  Description of Artificial Sequence: Synthetic oligonucleotide
agcaaaacccugggaauuu

SEQ ID NO: 1075182 - RNA, 19 nt, Artificial Sequence
  Description of Artificial Sequence: Synthetic oligonucleotide
augacguaguaaacagagu

SEQ ID NO: 1075183 - RNA, 19 nt, Artificial Sequence
  Description of Artificial Sequence: Synthetic oligonucleotide
gccgccuccgccguaaagg

SEQ ID NO: 1075184 - RNA, 19 nt, Artificial Sequence
  Description of Artificial Sequence: Synthetic oligonucleotide
ugcagagcauagccccuau

SEQ ID NO: 1075185 - RNA, 19 nt, Artificial Sequence
  Description of Artificial Sequence: Synthetic oligonucleotide
cuuggagcgggacgagcuc

SEQ ID NO: 1075186 - RNA, 19 nt, Artificial Sequence
  Description of Artificial Sequence: Synthetic oligonucleotide
uguuguguuuggagcucuu

SEQ ID NO: 1075187 - RNA, 19 nt, Artificial Sequence
  Description of Artificial Sequence: Synthetic oligonucleotide
cccggagucccuaaagaug

SEQ ID NO: 1075188 - RNA, 19 nt, Artificial Sequence
  Description of Artificial Sequence: Synthetic oligonucleotide
agagaccauacugcacugu

SEQ ID NO: 1075189 - RNA, 19 nt, Artificial Sequence
  Description of Artificial Sequence: Synthetic oligonucleotide
ugcuuggagcgggacgagc

SEQ ID NO: 1075190 - RNA, 19 nt, Artificial Sequence
  Description of Artificial Sequence: Synthetic oligonucleotide
auugcagagcauagccccu

SEQ ID NO: 1075191 - RNA, 19 nt, Artificial Sequence
  Description of Artificial Sequence: Synthetic oligonucleotide
cgcccgaagaugucgaugc

SEQ ID NO: 1075192 - RNA, 19 nt, Artificial Sequence
  Description of Artificial Sequence: Synthetic oligonucleotide
gcgagcgcgacucccgccg

SEQ ID NO: 1075193 - RNA, 19 nt, Artificial Sequence
  Description of Artificial Sequence: Synthetic oligonucleotide
acaguaucacaaggacacu

SEQ ID NO: 1075194 - RNA, 19 nt, Artificial Sequence
  Description of Artificial Sequence: Synthetic oligonucleotide
ucacaaggacacugcugua

SEQ ID NO: 1075195 - RNA, 19 nt, Artificial Sequence
  Description of Artificial Sequence: Synthetic oligonucleotide
cagcagaccaucaaccaau

SEQ ID NO: 1075196 - RNA, 19 nt, Artificial Sequence
  Description of Artificial Sequence: Synthetic oligonucleotide
ccugggaauuuugcaaugc

SEQ ID NO: 1075197 - RNA, 19 nt, Artificial Sequence
  Description of Artificial Sequence: Synthetic oligonucleotide
gccgcguugguggagcgcg

SEQ ID NO: 1075198 - RNA, 19 nt, Artificial Sequence
  Description of Artificial Sequence: Synthetic oligonucleotide
ggugacaaacuguuauccu

SEQ ID NO: 1075199 - RNA, 19 nt, Artificial Sequence
  Description of Artificial Sequence: Synthetic oligonucleotide
cugccauucaauccugggu

SEQ ID NO: 1075200 - RNA, 19 nt, Artificial Sequence
  Description of Artificial Sequence: Synthetic oligonucleotide
cuaccaauucuuccacucu

SEQ ID NO: 1075201 - RNA, 19 nt, Artificial Sequence
  Description of Artificial Sequence: Synthetic oligonucleotide
acgaggcgcgcucccgcuc

SEQ ID NO: 1075202 - RNA, 19 nt, Artificial Sequence
  Description of Artificial Sequence: Synthetic oligonucleotide
gcauagccccuauuagaac

SEQ ID NO: 1075203 - RNA, 19 nt, Artificial Sequence
  Description of Artificial Sequence: Synthetic oligonucleotide
accgugcgcccgaagaugu

SEQ ID NO: 1075204 - RNA, 19 nt, Artificial Sequence
  Description of Artificial Sequence: Synthetic oligonucleotide
cguugguggagcgcgagcg

SEQ ID NO: 1075205 - RNA, 19 nt, Artificial Sequence
  Description of Artificial Sequence: Synthetic oligonucleotide
cuguuauccuuaccuguua

SEQ ID NO: 1075206 - RNA, 19 nt, Artificial Sequence
  Description of Artificial Sequence: Synthetic oligonucleotide
uccacccuucggaggacuu

SEQ ID NO: 1075207 - RNA, 19 nt, Artificial Sequence
  Description of Artificial Sequence: Synthetic oligonucleotide
caccgugcgcccgaagaug

SEQ ID NO: 1075208 - RNA, 19 nt, Artificial Sequence
  Description of Artificial Sequence: Synthetic oligonucleotide
ccagaccaagcuauucauc

SEQ ID NO: 1075209 - RNA, 19 nt, Artificial Sequence
  Description of Artificial Sequence: Synthetic oligonucleotide
cuccgcgaccggcccaucc

SEQ ID NO: 1075210 - RNA, 19 nt, Artificial Sequence
  Description of Artificial Sequence: Synthetic oligonucleotide
accggcugcccuucccaca

SEQ ID NO: 1075211 - RNA, 19 nt, Artificial Sequence
  Description of Artificial Sequence: Synthetic oligonucleotide
gauaaggauuugacguaau

SEQ ID NO: 1075212 - RNA, 19 nt, Artificial Sequence
  Description of Artificial Sequence: Synthetic oligonucleotide
gacucccgccgccgguucc

SEQ ID NO: 1075213 - RNA, 19 nt, Artificial Sequence
  Description of Artificial Sequence: Synthetic oligonucleotide
caucaagugaccugcucuu

SEQ ID NO: 1075214 - RNA, 19 nt, Artificial Sequence
  Description of Artificial Sequence: Synthetic oligonucleotide
gaacaccuuaccagaccaa

SEQ ID NO: 1075215 - RNA, 19 nt, Artificial Sequence
  Description of Artificial Sequence: Synthetic oligonucleotide
uuccacccuucggaggacu

SEQ ID NO: 1075216 - RNA, 19 nt, Artificial Sequence
  Description of Artificial Sequence: Synthetic oligonucleotide
agaugucgaugcggucggg

SEQ ID NO: 1075217 - RNA, 19 nt, Artificial Sequence
  Description of Artificial Sequence: Synthetic oligonucleotide
uugucccgcgagcgcgagc

SEQ ID NO: 1075218 - RNA, 19 nt, Artificial Sequence
  Description of Artificial Sequence: Synthetic oligonucleotide
gcccacggaacccuccgcc

SEQ ID NO: 1075219 - RNA, 19 nt, Artificial Sequence
  Description of Artificial Sequence: Synthetic oligonucleotide
acccucuuugcuaccaauu

SEQ ID NO: 1075220 - RNA, 19 nt, Artificial Sequence
  Description of Artificial Sequence: Synthetic oligonucleotide
gagcgcgagcgcgacuccc

SEQ ID NO: 1075221 - RNA, 19 nt, Artificial Sequence
  Description of Artificial Sequence: Synthetic oligonucleotide
ucgccgccgggaagcucgg

SEQ ID NO: 1075222 - RNA, 19 nt, Artificial Sequence
  Description of Artificial Sequence: Synthetic oligonucleotide
agcgcgagcggcugcgcuu

SEQ ID NO: 1075223 - RNA, 19 nt, Artificial Sequence
  Description of Artificial Sequence: Synthetic oligonucleotide
ccuuaccagaccaagcuau

SEQ ID NO: 1075224 - RNA, 19 nt, Artificial Sequence
  Description of Artificial Sequence: Synthetic oligonucleotide
gccgccgggaagcucggcc

SEQ ID NO: 1075225 - RNA, 19 nt, Artificial Sequence
  Description of Artificial Sequence: Synthetic oligonucleotide
gcuugcucaccgugcgccc

SEQ ID NO: 1075226 - RNA, 19 nt, Artificial Sequence
  Description of Artificial Sequence: Synthetic oligonucleotide
cuugucccgcgagcgcgag

SEQ ID NO: 1075227 - RNA, 19 nt, Artificial Sequence
  Description of Artificial Sequence: Synthetic oligonucleotide
gcguugucguucuuguucu

SEQ ID NO: 1075228 - RNA, 19 nt, Artificial Sequence
  Description of Artificial Sequence: Synthetic oligonucleotide
ggacaguuuuggccuggac

SEQ ID NO: 1075229 - RNA, 19 nt, Artificial Sequence
  Description of Artificial Sequence: Synthetic oligonucleotide
agcagaccaucaaccaaua

SEQ ID NO: 1075230 - RNA, 19 nt, Artificial Sequence
  Description of Artificial Sequence: Synthetic oligonucleotide
ggagcgcuuccgcacccgc

SEQ ID NO: 1075231 - RNA, 19 nt, Artificial Sequence
  Description of Artificial Sequence: Synthetic oligonucleotide
cuuaccagaccaagcuauu

SEQ ID NO: 1075232 - RNA, 19 nt, Artificial Sequence
  Description of Artificial Sequence: Synthetic oligonucleotide
gucgggcggggacgaggcg

SEQ ID NO: 1075233 - RNA, 19 nt, Artificial Sequence
  Description of Artificial Sequence: Synthetic oligonucleotide
ccgccuccgccguaaaggc

SEQ ID NO: 1075234 - RNA, 19 nt, Artificial Sequence
  Description of Artificial Sequence: Synthetic oligonucleotide
ggucgggcggggacgaggc

SEQ ID NO: 1075235 - RNA, 19 nt, Artificial Sequence
  Description of Artificial Sequence: Synthetic oligonucleotide
cucccgcucgcgccgggac

SEQ ID NO: 1075236 - RNA, 19 nt, Artificial Sequence
  Description of Artificial Sequence: Synthetic oligonucleotide
gcacccgcuccuugucccg

SEQ ID NO: 1075237 - RNA, 19 nt, Artificial Sequence
  Description of Artificial Sequence: Synthetic oligonucleotide
agcaggugacaaacuguua

SEQ ID NO: 1075238 - RNA, 19 nt, Artificial Sequence
  Description of Artificial Sequence: Synthetic oligonucleotide
gccuggacuuccccuugcc

SEQ ID NO: 1075239 - RNA, 19 nt, Artificial Sequence
  Description of Artificial Sequence: Synthetic oligonucleotide
cauccucgcgcggcgcggc

SEQ ID NO: 1075240 - RNA, 19 nt, Artificial Sequence
  Description of Artificial Sequence: Synthetic oligonucleotide
cuuccacccuucggaggac

SEQ ID NO: 1075241 - RNA, 19 nt, Artificial Sequence
  Description of Artificial Sequence: Synthetic oligonucleotide
caugaugcguuuggcuucu

SEQ ID NO: 1075242 - RNA, 19 nt, Artificial Sequence
  Description of Artificial Sequence: Synthetic oligonucleotide
ccccuauuagaacaagcua

SEQ ID NO: 1075243 - RNA, 19 nt, Artificial Sequence
  Description of Artificial Sequence: Synthetic oligonucleotide
gcgauuuuccgguuauuuu

SEQ ID NO: 1075244 - RNA, 19 nt, Artificial Sequence
  Description of Artificial Sequence: Synthetic oligonucleotide
cccuucgccgccgggaagc

SEQ ID NO: 1075245 - RNA, 19 nt, Artificial Sequence
  Description of Artificial Sequence: Synthetic oligonucleotide
aaaguccgacagagaccau

SEQ ID NO: 1075246 - RNA, 19 nt, Artificial Sequence
  Description of Artificial Sequence: Synthetic oligonucleotide
gugcuuggagcgggacgag

SEQ ID NO: 1075247 - RNA, 19 nt, Artificial Sequence
  Description of Artificial Sequence: Synthetic oligonucleotide
uccucgcgcggcgcggcgc

SEQ ID NO: 1075248 - RNA, 19 nt, Artificial Sequence
  Description of Artificial Sequence: Synthetic oligonucleotide
ggugugcuuggagcgggac

SEQ ID NO: 1075249 - RNA, 19 nt, Artificial Sequence
  Description of Artificial Sequence: Synthetic oligonucleotide
ccguuugcucucccgggac

SEQ ID NO: 1075250 - RNA, 19 nt, Artificial Sequence
  Description of Artificial Sequence: Synthetic oligonucleotide
gggacgaggcgcgcucccg

SEQ ID NO: 1075251 - RNA, 19 nt, Artificial Sequence
  Description of Artificial Sequence: Synthetic oligonucleotide
cgcucgaguucuucgagca

SEQ ID NO: 1075252 - RNA, 19 nt, Artificial Sequence
  Description of Artificial Sequence: Synthetic oligonucleotide
cucgcgccgggacgccgcc

SEQ ID NO: 1075253 - RNA, 19 nt, Artificial Sequence
  Description of Artificial Sequence: Synthetic oligonucleotide
cccauccucgcgcggcgcg

SEQ ID NO: 1075254 - RNA, 19 nt, Artificial Sequence
  Description of Artificial Sequence: Synthetic oligonucleotide
cacccuucggaggacuucu

SEQ ID NO: 1075255 - RNA, 19 nt, Artificial Sequence
  Description of Artificial Sequence: Synthetic oligonucleotide
gcaccggcugcccuuccca

SEQ ID NO: 1075256 - RNA, 19 nt, Artificial Sequence
  Description of Artificial Sequence: Synthetic oligonucleotide
ggggacgaggcgcgcuccc

SEQ ID NO: 1075257 - RNA, 19 nt, Artificial Sequence
  Description of Artificial Sequence: Synthetic oligonucleotide
gcgaccggcccauccucgc

SEQ ID NO: 1075258 - RNA, 19 nt, Artificial Sequence
  Description of Artificial Sequence: Synthetic oligonucleotide
ccacggaacccuccgccuc

SEQ ID NO: 1075259 - RNA, 19 nt, Artificial Sequence
  Description of Artificial Sequence: Synthetic oligonucleotide
guauaaccccaaagucagu

SEQ ID NO: 1075260 - RNA, 19 nt, Artificial Sequence
  Description of Artificial Sequence: Synthetic oligonucleotide
cgaggcgcgcucccgcucg

SEQ ID NO: 1075261 - RNA, 19 nt, Artificial Sequence
  Description of Artificial Sequence: Synthetic oligonucleotide
ggccgccuccgccguaaag

SEQ ID NO: 1075262 - RNA, 19 nt, Artificial Sequence
  Description of Artificial Sequence: Synthetic oligonucleotide
guccgacagagaccauacu

SEQ ID NO: 1075263 - RNA, 19 nt, Artificial Sequence
  Description of Artificial Sequence: Synthetic oligonucleotide
cgaagaugucgaugcgguc

SEQ ID NO: 1075264 - RNA, 19 nt, Artificial Sequence
  Description of Artificial Sequence: Synthetic oligonucleotide
gccuccgccguaaaggccu

SEQ ID NO: 1075265 - RNA, 19 nt, Artificial Sequence
  Description of Artificial Sequence: Synthetic oligonucleotide
ccuuaccuguuaucaggaa

SEQ ID NO: 1075266 - RNA, 19 nt, Artificial Sequence
  Description of Artificial Sequence: Synthetic oligonucleotide
acgccgccgcguuggugga

SEQ ID NO: 1075267 - RNA, 19 nt, Artificial Sequence
  Description of Artificial Sequence: Synthetic oligonucleotide
cuccgccguaaaggccuag

SEQ ID NO: 1075268 - RNA, 19 nt, Artificial Sequence
  Description of Artificial Sequence: Synthetic oligonucleotide
gcccggagucccuaaagau

SEQ ID NO: 1075269 - RNA, 19 nt, Artificial Sequence
  Description of Artificial Sequence: Synthetic oligonucleotide
aggccgcccuucgccgccg

SEQ ID NO: 1075270 - RNA, 19 nt, Artificial Sequence
  Description of Artificial Sequence: Synthetic oligonucleotide
ccgcacccgcuccuugucc

SEQ ID NO: 1075271 - RNA, 19 nt, Artificial Sequence
  Description of Artificial Sequence: Synthetic oligonucleotide
ccgccguaaaggccuagca

SEQ ID NO: 1075272 - RNA, 19 nt, Artificial Sequence
  Description of Artificial Sequence: Synthetic oligonucleotide
cccgagcgcacccgccgcg

SEQ ID NO: 1075273 - RNA, 19 nt, Artificial Sequence
  Description of Artificial Sequence: Synthetic oligonucleotide
gccauucaauccuggguuu

SEQ ID NO: 1075274 - RNA, 19 nt, Artificial Sequence
  Description of Artificial Sequence: Synthetic oligonucleotide
cggagucccuaaagauggc

SEQ ID NO: 1075275 - RNA, 19 nt, Artificial Sequence
  Description of Artificial Sequence: Synthetic oligonucleotide
cuucgccgccgggaagcuc

SEQ ID NO: 1075276 - RNA, 19 nt, Artificial Sequence
  Description of Artificial Sequence: Synthetic oligonucleotide
gcgcgagcgcgacucccgc

SEQ ID NO: 1075277 - RNA, 19 nt, Artificial Sequence
  Description of Artificial Sequence: Synthetic oligonucleotide
gucccgcgagcgcgagcgc

SEQ ID NO: 1075278 - RNA, 19 nt, Artificial Sequence
  Description of Artificial Sequence: Synthetic oligonucleotide
ccauccucgcgcggcgcgg

SEQ ID NO: 1075279 - RNA, 19 nt, Artificial Sequence
  Description of Artificial Sequence: Synthetic oligonucleotide
cgggacgagcuccggcucc

SEQ ID NO: 1075280 - RNA, 19 nt, Artificial Sequence
  Description of Artificial Sequence: Synthetic oligonucleotide
cgggacgccgccgcguugg

SEQ ID NO: 1075281 - RNA, 19 nt, Artificial Sequence
  Description of Artificial Sequence: Synthetic oligonucleotide
cgaccggcccauccucgcg

SEQ ID NO: 1075282 - RNA, 19 nt, Artificial Sequence
  Description of Artificial Sequence: Synthetic oligonucleotide
gcccuucgccgccgggaag

SEQ ID NO: 1075283 - RNA, 19 nt, Artificial Sequence
  Description of Artificial Sequence: Synthetic oligonucleotide
ccgccgguuccguuugcuc

SEQ ID NO: 1075284 - RNA, 19 nt, Artificial Sequence
  Description of Artificial Sequence: Synthetic oligonucleotide
cggcccggagucccuaaag

SEQ ID NO: 1075285 - RNA, 19 nt, Artificial Sequence
  Description of Artificial Sequence: Synthetic oligonucleotide
ccucgcgcggcgcggcgcc

SEQ ID NO: 1075286 - RNA, 19 nt, Artificial Sequence
  Description of Artificial Sequence: Synthetic oligonucleotide
cgccuccgccguaaaggcc

SEQ ID NO: 1075287 - RNA, 19 nt, Artificial Sequence
  Description of Artificial Sequence: Synthetic oligonucleotide
ccacccuucggaggacuuc

SEQ ID NO: 1075288 - RNA, 19 nt, Artificial Sequence
  Description of Artificial Sequence: Synthetic oligonucleotide
gcagcaccggcugcccuuc

SEQ ID NO: 1075289 - RNA, 19 nt, Artificial Sequence
  Description of Artificial Sequence: Synthetic oligonucleotide
gcucgcgccgggacgccgc

SEQ ID NO: 1075290 - RNA, 19 nt, Artificial Sequence
  Description of Artificial Sequence: Synthetic oligonucleotide
ccuugucccgcgagcgcga

SEQ ID NO: 1075291 - RNA, 19 nt, Artificial Sequence
  Description of Artificial Sequence: Synthetic oligonucleotide
gccgcccuucgccgccggg

SEQ ID NO: 1075292 - RNA, 19 nt, Artificial Sequence
  Description of Artificial Sequence: Synthetic oligonucleotide
ccgcgaccggcccauccuc

SEQ ID NO: 1075293 - RNA, 19 nt, Artificial Sequence
  Description of Artificial Sequence: Synthetic oligonucleotide
ggacgccgccgcguuggug

SEQ ID NO: 1075294 - RNA, 19 nt, Artificial Sequence
  Description of Artificial Sequence: Synthetic oligonucleotide
cgcgagcgcgacucccgcc

SEQ ID NO: 1075295 - RNA, 19 nt, Artificial Sequence
  Description of Artificial Sequence: Synthetic oligonucleotide
cgcgccgggacgccgccgc

SEQ ID NO: 1075296 - RNA, 19 nt, Artificial Sequence
  Description of Artificial Sequence: Synthetic oligonucleotide
gccugugcuucugcgauuu

SEQ ID NO: 1075297 - RNA, 19 nt, Artificial Sequence
  Description of Artificial Sequence: Synthetic oligonucleotide
ggccgcccuucgccgccgg

SEQ ID NO: 1075298 - RNA, 19 nt, Artificial Sequence
  Description of Artificial Sequence: Synthetic oligonucleotide
ccgagcgcacccgccgcgc

SEQ ID NO: 1075299 - RNA, 19 nt, Artificial Sequence
  Description of Artificial Sequence: Synthetic oligonucleotide
cggcccauccucgcgcggc

SEQ ID NO: 1075300 - RNA, 19 nt, Artificial Sequence
  Description of Artificial Sequence: Synthetic oligonucleotide
augaugcguuuggcuucuu

SEQ ID NO: 1075301 - RNA, 19 nt, Artificial Sequence
  Description of Artificial Sequence: Synthetic oligonucleotide
ccgugcgcccgaagauguc

SEQ ID NO: 1075302 - RNA, 19 nt, Artificial Sequence
  Description of Artificial Sequence: Synthetic oligonucleotide
cgcccacggaacccuccgc

SEQ ID NO: 1075303 - RNA, 19 nt, Artificial Sequence
  Description of Artificial Sequence: Synthetic oligonucleotide
cgagcgcgagcgcgacucc

SEQ ID NO: 1075304 - RNA, 19 nt, Artificial Sequence
  Description of Artificial Sequence: Synthetic oligonucleotide
cccacggaacccuccgccu

SEQ ID NO: 1075305 - RNA, 19 nt, Artificial Sequence
  Description of Artificial Sequence: Synthetic oligonucleotide
gcagagcauagccccuauu

SEQ ID NO: 1075306 - RNA, 19 nt, Artificial Sequence
  Description of Artificial Sequence: Synthetic oligonucleotide
cgcccgccgccugucaccc

SEQ ID NO: 1075307 - RNA, 19 nt, Artificial Sequence
  Description of Artificial Sequence: Synthetic oligonucleotide
cugcgauuuuccgguuauu

SEQ ID NO: 1075308 - RNA, 19 nt, Artificial Sequence
  Description of Artificial Sequence: Synthetic oligonucleotide
ggccugugcuucugcgauu

SEQ ID NO: 1075309 - RNA, 19 nt, Artificial Sequence
  Description of Artificial Sequence: Synthetic oligonucleotide
ccgcccuucgccgccggga

SEQ ID NO: 1075310 - RNA, 19 nt, Artificial Sequence
  Description of Artificial Sequence: Synthetic oligonucleotide
gcucccgcucgcgccggga

SEQ ID NO: 1075311 - RNA, 19 nt, Artificial Sequence
  Description of Artificial Sequence: Synthetic oligonucleotide
cgccgcguugguggagcgc

SEQ ID NO: 1075312 - RNA, 19 nt, Artificial Sequence
  Description of Artificial Sequence: Synthetic oligonucleotide
gccgccgguuccguuugcu

SEQ ID NO: 1075313 - RNA, 19 nt, Artificial Sequence
  Description of Artificial Sequence: Synthetic oligonucleotide
ggcuccgcgaccggcccau

SEQ ID NO: 1075314 - RNA, 19 nt, Artificial Sequence
  Description of Artificial Sequence: Synthetic oligonucleotide
gggcggggacgaggcgcgc

SEQ ID NO: 1075315 - RNA, 19 nt, Artificial Sequence
  Description of Artificial Sequence: Synthetic oligonucleotide
ccccuugcccaggauaauu

SEQ ID NO: 1075316 - RNA, 19 nt, Artificial Sequence
  Description of Artificial Sequence: Synthetic oligonucleotide
ccuccgccguaaaggccua

SEQ ID NO: 1075317 - RNA, 19 nt, Artificial Sequence
  Description of Artificial Sequence: Synthetic oligonucleotide
ccggcccggagucccuaaa

SEQ ID NO: 1075318 - RNA, 19 nt, Artificial Sequence
  Description of Artificial Sequence: Synthetic oligonucleotide
cgcccuucgccgccgggaa

SEQ ID NO: 1075319 - RNA, 19 nt, Artificial Sequence
  Description of Artificial Sequence: Synthetic oligonucleotide
cgagcgcacccgccgcgca

SEQ ID NO: 1075320 - RNA, 19 nt, Artificial Sequence
  Description of Artificial Sequence: Synthetic oligonucleotide
gcgacucccgccgccgguu

SEQ ID NO: 1075321 - RNA, 19 nt, Artificial Sequence
  Description of Artificial Sequence: Synthetic oligonucleotide
cgccgccgguuccguuugc

SEQ ID NO: 1075322 - RNA, 19 nt, Artificial Sequence
  Description of Artificial Sequence: Synthetic oligonucleotide
gcuccgcgaccggcccauc

SEQ ID NO: 1075323 - RNA, 19 nt, Artificial Sequence
  Description of Artificial Sequence: Synthetic oligonucleotide
cgaugcggucgggcgggga

SEQ ID NO: 1075324 - RNA, 19 nt, Artificial Sequence
  Description of Artificial Sequence: Synthetic oligonucleotide
gcccggcccggagucccua

SEQ ID NO: 1075325 - RNA, 19 nt, Artificial Sequence
  Description of Artificial Sequence: Synthetic oligonucleotide
cgcgacucccgccgccggu

SEQ ID NO: 1075326 - RNA, 19 nt, Artificial Sequence
  Description of Artificial Sequence: Synthetic oligonucleotide
gcgagcggcugcgcuucuu

SEQ ID NO: 1075327 - RNA, 19 nt, Artificial Sequence
  Description of Artificial Sequence: Synthetic oligonucleotide
cgcgagcggcugcgcuucu

SEQ ID NO: 1075328 - RNA, 19 nt, Artificial Sequence
  Description of Artificial Sequence: Synthetic oligonucleotide
auuaaguugaaccuuuggc

SEQ ID NO: 1075329 - RNA, 19 nt, Artificial Sequence
  Description of Artificial Sequence: Synthetic oligonucleotide
aauguugucaacuaggcaa

SEQ ID NO: 1075330 - RNA, 19 nt, Artificial Sequence
  Description of Artificial Sequence: Synthetic oligonucleotide
agaucugcgacauuggcgc

SEQ ID NO: 1075331 - RNA, 19 nt, Artificial Sequence
  Description of Artificial Sequence: Synthetic oligonucleotide
aagggauagaaccaccagc

SEQ ID NO: 1075332 - RNA, 19 nt, Artificial Sequence
  Description of Artificial Sequence: Synthetic oligonucleotide
aauagcccaacaauaaugc

SEQ ID NO: 1075333 - RNA, 19 nt, Artificial Sequence
  Description of Artificial Sequence: Synthetic oligonucleotide
aaaugcaugggauuucagg

SEQ ID NO: 1075334 - RNA, 19 nt, Artificial Sequence
  Description of Artificial Sequence: Synthetic oligonucleotide
ugaaauacaauuccuaaaa

SEQ ID NO: 1075335 - RNA, 19 nt, Artificial Sequence
  Description of Artificial Sequence: Synthetic oligonucleotide
uauuguguagcaaacuuag

SEQ ID NO: 1075336 - RNA, 19 nt, Artificial Sequence
  Description of Artificial Sequence: Synthetic oligonucleotide
uccuucaacaauuugagca

SEQ ID NO: 1075337 - RNA, 19 nt, Artificial Sequence
  Description of Artificial Sequence: Synthetic oligonucleotide
uguggcuacacaauaaugc

SEQ ID NO: 1075338 - RNA, 19 nt, Artificial Sequence
  Description of Artificial Sequence: Synthetic oligonucleotide
auugaaauacucuuuuauc

SEQ ID NO: 1075339 - RNA, 19 nt, Artificial Sequence
  Description of Artificial Sequence: Synthetic oligonucleotide
uuugagcaaagauagaaug

SEQ ID NO: 1075340 - RNA, 19 nt, Artificial Sequence
  Description of Artificial Sequence: Synthetic oligonucleotide
aauacucuuuuaucccucc

SEQ ID NO: 1075341 - RNA, 19 nt, Artificial Sequence
  Description of Artificial Sequence: Synthetic oligonucleotide
aucaauuauacaaugaaag

SEQ ID NO: 1075342 - RNA, 19 nt, Artificial Sequence
  Description of Artificial Sequence: Synthetic oligonucleotide
aauacaacccuguauucug

SEQ ID NO: 1075343 - RNA, 19 nt, Artificial Sequence
  Description of Artificial Sequence: Synthetic oligonucleotide
aagaaacaaaucaccaucc

SEQ ID NO: 1075344 - RNA, 19 nt, Artificial Sequence
  Description of Artificial Sequence: Synthetic oligonucleotide
cuuacaauuggcauacucc

SEQ ID NO: 1075345 - RNA, 19 nt, Artificial Sequence
  Description of Artificial Sequence: Synthetic oligonucleotide
cuuauuaucaacguuuccc

SEQ ID NO: 1075346 - RNA, 19 nt, Artificial Sequence
  Description of Artificial Sequence: Synthetic oligonucleotide
uugaaaugaggaaaggagc

SEQ ID NO: 1075347 - RNA, 19 nt, Artificial Sequence
  Description of Artificial Sequence: Synthetic oligonucleotide
ucgacaguuguaaagaaca

SEQ ID NO: 1075348 - RNA, 19 nt, Artificial Sequence
  Description of Artificial Sequence: Synthetic oligonucleotide
uaagcccuguuuuacaucg

SEQ ID NO: 1075349 - RNA, 19 nt, Artificial Sequence
  Description of Artificial Sequence: Synthetic oligonucleotide
ugaagugggaauacaaccc

SEQ ID NO: 1075350 - RNA, 19 nt, Artificial Sequence
  Description of Artificial Sequence: Synthetic oligonucleotide
uuuguaaucacuggcagug

SEQ ID NO: 1075351 - RNA, 19 nt, Artificial Sequence
  Description of Artificial Sequence: Synthetic oligonucleotide
gauaccagacgauagugag

SEQ ID NO: 1075352 - RNA, 19 nt, Artificial Sequence
  Description of Artificial Sequence: Synthetic oligonucleotide
aggauuucggcauauuggg

SEQ ID NO: 1075353 - RNA, 19 nt, Artificial Sequence
  Description of Artificial Sequence: Synthetic oligonucleotide
gauuucggcauauuggggc

SEQ ID NO: 1075354 - RNA, 19 nt, Artificial Sequence
  Description of Artificial Sequence: Synthetic oligonucleotide
aacuuagcuuuucugauga

SEQ ID NO: 1075355 - RNA, 19 nt, Artificial Sequence
  Description of Artificial Sequence: Synthetic oligonucleotide
aaaagcacaaaugcauggg

SEQ ID NO: 1075356 - RNA, 19 nt, Artificial Sequence
  Description of Artificial Sequence: Synthetic oligonucleotide
aaggauuucggcauauugg

SEQ ID NO: 1075357 - RNA, 19 nt, Artificial Sequence
  Description of Artificial Sequence: Synthetic oligonucleotide
ucacguagcauuaacacau

SEQ ID NO: 1075358 - RNA, 19 nt, Artificial Sequence
  Description of Artificial Sequence: Synthetic oligonucleotide
gaugguagucagcagaagc

SEQ ID NO: 1075359 - RNA, 19 nt, Artificial Sequence
  Description of Artificial Sequence: Synthetic oligonucleotide
uggucuuccgcgcagaacc

SEQ ID NO: 1075360 - RNA, 19 nt, Artificial Sequence
  Description of Artificial Sequence: Synthetic oligonucleotide
aaauagcccaacaauaaug

SEQ ID NO: 1075361 - RNA, 19 nt, Artificial Sequence
  Description of Artificial Sequence: Synthetic oligonucleotide
uagaucugcgacauuggcg

SEQ ID NO: 1075362 - RNA, 19 nt, Artificial Sequence
  Description of Artificial Sequence: Synthetic oligonucleotide
uuacaauuggcauacuccu

SEQ ID NO: 1075363 - RNA, 19 nt, Artificial Sequence
  Description of Artificial Sequence: Synthetic oligonucleotide
uuauuaucaacguuucccu

SEQ ID NO: 1075364 - RNA, 19 nt, Artificial Sequence
  Description of Artificial Sequence: Synthetic oligonucleotide
uccgcgcagaaccagaagg

SEQ ID NO: 1075365 - RNA, 19 nt, Artificial Sequence
  Description of Artificial Sequence: Synthetic oligonucleotide
auagaucugcgacauuggc

SEQ ID NO: 1075366 - RNA, 19 nt, Artificial Sequence
  Description of Artificial Sequence: Synthetic oligonucleotide
uaucacguagcauuaacac

SEQ ID NO: 1075367 - RNA, 19 nt, Artificial Sequence
  Description of Artificial Sequence: Synthetic oligonucleotide
auuccaaccaacaaucuuc

SEQ ID NO: 1075368 - RNA, 19 nt, Artificial Sequence
  Description of Artificial Sequence: Synthetic oligonucleotide
ugugccagaaggauuucgg

SEQ ID NO: 1075369 - RNA, 19 nt, Artificial Sequence
  Description of Artificial Sequence: Synthetic oligonucleotide
aaugguucugcaaccaggg

SEQ ID NO: 1075370 - RNA, 19 nt, Artificial Sequence
  Description of Artificial Sequence: Synthetic oligonucleotide
aaggacuccuaguaauuuc

SEQ ID NO: 1075371 - RNA, 19 nt, Artificial Sequence
  Description of Artificial Sequence: Synthetic oligonucleotide
uacaucgacaguuguaaag

SEQ ID NO: 1075372 - RNA, 19 nt, Artificial Sequence
  Description of Artificial Sequence: Synthetic oligonucleotide
uacagauaccagacgauag

SEQ ID NO: 1075373 - RNA, 19 nt, Artificial Sequence
  Description of Artificial Sequence: Synthetic oligonucleotide
uguaaagaacaucaauuau

SEQ ID NO: 1075374 - RNA, 19 nt, Artificial Sequence
  Description of Artificial Sequence: Synthetic oligonucleotide
gaaaucaugcaaauagccc

SEQ ID NO: 1075375 - RNA, 19 nt, Artificial Sequence
  Description of Artificial Sequence: Synthetic oligonucleotide
uugagcaaagauagaauga

SEQ ID NO: 1075376 - RNA, 19 nt, Artificial Sequence
  Description of Artificial Sequence: Synthetic oligonucleotide
aaacuuagcuuuucugaug

SEQ ID NO: 1075377 - RNA, 19 nt, Artificial Sequence
  Description of Artificial Sequence: Synthetic oligonucleotide
uagaaaaccguguaguguc

SEQ ID NO: 1075378 - RNA, 19 nt, Artificial Sequence
  Description of Artificial Sequence: Synthetic oligonucleotide
auuucggcauauuggggcc

SEQ ID NO: 1075379 - RNA, 19 nt, Artificial Sequence
  Description of Artificial Sequence: Synthetic oligonucleotide
uuuacaucgacaguuguaa

SEQ ID NO: 1075380 - RNA, 19 nt, Artificial Sequence
  Description of Artificial Sequence: Synthetic oligonucleotide
uuaucacguagcauuaaca

SEQ ID NO: 1075381 - RNA, 19 nt, Artificial Sequence
  Description of Artificial Sequence: Synthetic oligonucleotide
aaagcacaaaugcauggga

SEQ ID NO: 1075382 - RNA, 19 nt, Artificial Sequence
  Description of Artificial Sequence: Synthetic oligonucleotide
ugaaacauaagcccuguuu

SEQ ID NO: 1075383 - RNA, 19 nt, Artificial Sequence
  Description of Artificial Sequence: Synthetic oligonucleotide
uuagcagggagcuggaaca

SEQ ID NO: 1075384 - RNA, 19 nt, Artificial Sequence
  Description of Artificial Sequence: Synthetic oligonucleotide
aaucucaguagguguggcg

SEQ ID NO: 1075385 - RNA, 19 nt, Artificial Sequence
  Description of Artificial Sequence: Synthetic oligonucleotide
uuucuuacaauuggcauac

SEQ ID NO: 1075386 - RNA, 19 nt, Artificial Sequence
  Description of Artificial Sequence: Synthetic oligonucleotide
acuccuaguaauuucccag

SEQ ID NO: 1075387 - RNA, 19 nt, Artificial Sequence
  Description of Artificial Sequence: Synthetic oligonucleotide
aaacagaaguguuuacaga

SEQ ID NO: 1075388 - RNA, 19 nt, Artificial Sequence
  Description of Artificial Sequence: Synthetic oligonucleotide
ugcaaauagcccaacaaua

SEQ ID NO: 1075389 - RNA, 19 nt, Artificial Sequence
  Description of Artificial Sequence: Synthetic oligonucleotide
uuacugcauacacugguag

SEQ ID NO: 1075390 - RNA, 19 nt, Artificial Sequence
  Description of Artificial Sequence: Synthetic oligonucleotide
uucuuugccagauauuuaa

SEQ ID NO: 1075391 - RNA, 19 nt, Artificial Sequence
  Description of Artificial Sequence: Synthetic oligonucleotide
agaaugaaugccuaaggaa

SEQ ID NO: 1075392 - RNA, 19 nt, Artificial Sequence
  Description of Artificial Sequence: Synthetic oligonucleotide
caugguuuuagcucuucgg

SEQ ID NO: 1075393 - RNA, 19 nt, Artificial Sequence
  Description of Artificial Sequence: Synthetic oligonucleotide
auuaucaacguuucccugu

SEQ ID NO: 1075394 - RNA, 19 nt, Artificial Sequence
  Description of Artificial Sequence: Synthetic oligonucleotide
uguggcgccccauagaucu

SEQ ID NO: 1075395 - RNA, 19 nt, Artificial Sequence
  Description of Artificial Sequence: Synthetic oligonucleotide
uuauacaaugaaaggacua

SEQ ID NO: 1075396 - RNA, 19 nt, Artificial Sequence
  Description of Artificial Sequence: Synthetic oligonucleotide
uguuuuacaucgacaguug

SEQ ID NO: 1075397 - RNA, 19 nt, Artificial Sequence
  Description of Artificial Sequence: Synthetic oligonucleotide
aaggacuaaacagaagugu

SEQ ID NO: 1075398 - RNA, 19 nt, Artificial Sequence
  Description of Artificial Sequence: Synthetic oligonucleotide
acuuuguaaucacuggcag

SEQ ID NO: 1075399 - RNA, 19 nt, Artificial Sequence
  Description of Artificial Sequence: Synthetic oligonucleotide
agcaaagauagaaugaaug

SEQ ID NO: 1075400 - RNA, 19 nt, Artificial Sequence
  Description of Artificial Sequence: Synthetic oligonucleotide
cuaaggaacaaagauggac

SEQ ID NO: 1075401 - RNA, 19 nt, Artificial Sequence
  Description of Artificial Sequence: Synthetic oligonucleotide
acuaaacagaaguguuuac

SEQ ID NO: 1075402 - RNA, 19 nt, Artificial Sequence
  Description of Artificial Sequence: Synthetic oligonucleotide
uaccagacgauagugagug

SEQ ID NO: 1075403 - RNA, 19 nt, Artificial Sequence
  Description of Artificial Sequence: Synthetic oligonucleotide
aaaccguguagugucaaag

SEQ ID NO: 1075404 - RNA, 19 nt, Artificial Sequence
  Description of Artificial Sequence: Synthetic oligonucleotide
ucuuacaauuggcauacuc

SEQ ID NO: 1075405 - RNA, 19 nt, Artificial Sequence
  Description of Artificial Sequence: Synthetic oligonucleotide
caucaaggggcguauaggc

SEQ ID NO: 1075406 - RNA, 19 nt, Artificial Sequence
  Description of Artificial Sequence: Synthetic oligonucleotide
uacgucaagcaccauaaaa

SEQ ID NO: 1075407 - RNA, 19 nt, Artificial Sequence
  Description of Artificial Sequence: Synthetic oligonucleotide
cagcauucaagcaauguug

SEQ ID NO: 1075408 - RNA, 19 nt, Artificial Sequence
  Description of Artificial Sequence: Synthetic oligonucleotide
ucaaggggcguauaggcca

SEQ ID NO: 1075409 - RNA, 19 nt, Artificial Sequence
  Description of Artificial Sequence: Synthetic oligonucleotide
uauacaaugaaaggacuaa

SEQ ID NO: 1075410 - RNA, 19 nt, Artificial Sequence
  Description of Artificial Sequence: Synthetic oligonucleotide
ugaaaggacuaaacagaag

SEQ ID NO: 1075411 - RNA, 19 nt, Artificial Sequence
  Description of Artificial Sequence: Synthetic oligonucleotide
auugccucuaucauguuag

SEQ ID NO: 1075412 - RNA, 19 nt, Artificial Sequence
  Description of Artificial Sequence: Synthetic oligonucleotide
uuaagaucugaaauacaau

SEQ ID NO: 1075413 - RNA, 19 nt, Artificial Sequence
  Description of Artificial Sequence: Synthetic oligonucleotide
uuauuguguagcaaacuua

SEQ ID NO: 1075414 - RNA, 19 nt, Artificial Sequence
  Description of Artificial Sequence: Synthetic oligonucleotide
ggucaguagaccuucacag

SEQ ID NO: 1075415 - RNA, 19 nt, Artificial Sequence
  Description of Artificial Sequence: Synthetic oligonucleotide
agcaauguugucaacuagg

SEQ ID NO: 1075416 - RNA, 19 nt, Artificial Sequence
  Description of Artificial Sequence: Synthetic oligonucleotide
auuucuuacaauuggcaua

SEQ ID NO: 1075417 - RNA, 19 nt, Artificial Sequence
  Description of Artificial Sequence: Synthetic oligonucleotide
uuaucaacguuucccugug

SEQ ID NO: 1075418 - RNA, 19 nt, Artificial Sequence
  Description of Artificial Sequence: Synthetic oligonucleotide
aaaggacuaaacagaagug

SEQ ID NO: 1075419 - RNA, 19 nt, Artificial Sequence
  Description of Artificial Sequence: Synthetic oligonucleotide
uuagaaaaccguguagugu

SEQ ID NO: 1075420 - RNA, 19 nt, Artificial Sequence
  Description of Artificial Sequence: Synthetic oligonucleotide
uuccaaccaacaaucuucc

SEQ ID NO: 1075421 - RNA, 19 nt, Artificial Sequence
  Description of Artificial Sequence: Synthetic oligonucleotide
ccucuaucauguuagaacg

SEQ ID NO: 1075422 - RNA, 19 nt, Artificial Sequence
  Description of Artificial Sequence: Synthetic oligonucleotide
aggacuccuaguaauuucc

SEQ ID NO: 1075423 - RNA, 19 nt, Artificial Sequence
  Description of Artificial Sequence: Synthetic oligonucleotide
uuuuacaucgacaguugua

SEQ ID NO: 1075424 - RNA, 19 nt, Artificial Sequence
  Description of Artificial Sequence: Synthetic oligonucleotide
uacauuaaguugaaccuuu

SEQ ID NO: 1075425 - RNA, 19 nt, Artificial Sequence
  Description of Artificial Sequence: Synthetic oligonucleotide
cuuacuucucugcauguug

SEQ ID NO: 1075426 - RNA, 19 nt, Artificial Sequence
  Description of Artificial Sequence: Synthetic oligonucleotide
ucaucaaggggcguauagg

SEQ ID NO: 1075427 - RNA, 19 nt, Artificial Sequence
  Description of Artificial Sequence: Synthetic oligonucleotide
uggcagugaacagagaggc

SEQ ID NO: 1075428 - RNA, 19 nt, Artificial Sequence
  Description of Artificial Sequence: Synthetic oligonucleotide
aauuggcauacuccucaag

SEQ ID NO: 1075429 - RNA, 19 nt, Artificial Sequence
  Description of Artificial Sequence: Synthetic oligonucleotide
auaaugccaggcuuuucuc

SEQ ID NO: 1075430 - RNA, 19 nt, Artificial Sequence
  Description of Artificial Sequence: Synthetic oligonucleotide
aacagagaggcagaauucu

SEQ ID NO: 1075431 - RNA, 19 nt, Artificial Sequence
  Description of Artificial Sequence: Synthetic oligonucleotide
aaguugaaccuuuggcacu

SEQ ID NO: 1075432 - RNA, 19 nt, Artificial Sequence
  Description of Artificial Sequence: Synthetic oligonucleotide
auccuucaacaauuugagc

SEQ ID NO: 1075433 - RNA, 19 nt, Artificial Sequence
  Description of Artificial Sequence: Synthetic oligonucleotide
ucaacaauuugagcaaaga

SEQ ID NO: 1075434 - RNA, 19 nt, Artificial Sequence
  Description of Artificial Sequence: Synthetic oligonucleotide
cauagaucugcgacauugg

SEQ ID NO: 1075435 - RNA, 19 nt, Artificial Sequence
  Description of Artificial Sequence: Synthetic oligonucleotide
cuuaucacguagcauuaac

SEQ ID NO: 1075436 - RNA, 19 nt, Artificial Sequence
  Description of Artificial Sequence: Synthetic oligonucleotide
uagaacgugcaugagacuc

SEQ ID NO: 1075437 - RNA, 19 nt, Artificial Sequence
  Description of Artificial Sequence: Synthetic oligonucleotide
gaugaagugggaauacaac

SEQ ID NO: 1075438 - RNA, 19 nt, Artificial Sequence
  Description of Artificial Sequence: Synthetic oligonucleotide
ucuucgggaaucuucacuu

SEQ ID NO: 1075439 - RNA, 19 nt, Artificial Sequence
  Description of Artificial Sequence: Synthetic oligonucleotide
aaacauaagcccuguuuua

SEQ ID NO: 1075440 - RNA, 19 nt, Artificial Sequence
  Description of Artificial Sequence: Synthetic oligonucleotide
uggucaguagaccuucaca

SEQ ID NO: 1075441 - RNA, 19 nt, Artificial Sequence
  Description of Artificial Sequence: Synthetic oligonucleotide
uccuuauuguguagcaaac

SEQ ID NO: 1075442 - RNA, 19 nt, Artificial Sequence
  Description of Artificial Sequence: Synthetic oligonucleotide
aaugccuaaggaacaaaga

SEQ ID NO: 1075443 - RNA, 19 nt, Artificial Sequence
  Description of Artificial Sequence: Synthetic oligonucleotide
aucacguagcauuaacaca

SEQ ID NO: 1075444 - RNA, 19 nt, Artificial Sequence
  Description of Artificial Sequence: Synthetic oligonucleotide
guucucagcagagcgaccg

SEQ ID NO: 1075445 - RNA, 19 nt, Artificial Sequence
  Description of Artificial Sequence: Synthetic oligonucleotide
acagauaccagacgauagu

SEQ ID NO: 1075446 - RNA, 19 nt, Artificial Sequence
  Description of Artificial Sequence: Synthetic oligonucleotide
caucuuacuucucugcaug

SEQ ID NO: 1075447 - RNA, 19 nt, Artificial Sequence
  Description of Artificial Sequence: Synthetic oligonucleotide
agggcaucuuaucacguag

SEQ ID NO: 1075448 - RNA, 19 nt, Artificial Sequence
  Description of Artificial Sequence: Synthetic oligonucleotide
ugauccuuauuguguagca

SEQ ID NO: 1075449 - RNA, 19 nt, Artificial Sequence
  Description of Artificial Sequence: Synthetic oligonucleotide
agugaguggucaguagacc

SEQ ID NO: 1075450 - RNA, 19 nt, Artificial Sequence
  Description of Artificial Sequence: Synthetic oligonucleotide
guaaagaacaucaauuaua

SEQ ID NO: 1075451 - RNA, 19 nt, Artificial Sequence
  Description of Artificial Sequence: Synthetic oligonucleotide
auaagcccuguuuuacauc

SEQ ID NO: 1075452 - RNA, 19 nt, Artificial Sequence
  Description of Artificial Sequence: Synthetic oligonucleotide
uauuccaaccaacaaucuu

SEQ ID NO: 1075453 - RNA, 19 nt, Artificial Sequence
  Description of Artificial Sequence: Synthetic oligonucleotide
agauauuuaaggaaaucau

SEQ ID NO: 1075454 - RNA, 19 nt, Artificial Sequence
  Description of Artificial Sequence: Synthetic oligonucleotide
gucaguagaccuucacagg

SEQ ID NO: 1075455 - RNA, 19 nt, Artificial Sequence
  Description of Artificial Sequence: Synthetic oligonucleotide
uuauuccaaccaacaaucu

SEQ ID NO: 1075456 - RNA, 19 nt, Artificial Sequence
  Description of Artificial Sequence: Synthetic oligonucleotide
ucuuuggcugugaaccagc

SEQ ID NO: 1075457 - RNA, 19 nt, Artificial Sequence
  Description of Artificial Sequence: Synthetic oligonucleotide
aucaccauccuucaacaau

SEQ ID NO: 1075458 - RNA, 19 nt, Artificial Sequence
  Description of Artificial Sequence: Synthetic oligonucleotide
agaaacaaaucaccauccu

SEQ ID NO: 1075459 - RNA, 19 nt, Artificial Sequence
  Description of Artificial Sequence: Synthetic oligonucleotide
uacuccuuauuaucaacgu

SEQ ID NO: 1075460 - RNA, 19 nt, Artificial Sequence
  Description of Artificial Sequence: Synthetic oligonucleotide
ggaacaaagauggacuugc

SEQ ID NO: 1075461 - RNA, 19 nt, Artificial Sequence
  Description of Artificial Sequence: Synthetic oligonucleotide
auugccccaauucucacaa

SEQ ID NO: 1075462 - RNA, 19 nt, Artificial Sequence
  Description of Artificial Sequence: Synthetic oligonucleotide
uccguugccaggaaucuuc

SEQ ID NO: 1075463 - RNA, 19 nt, Artificial Sequence
  Description of Artificial Sequence: Synthetic oligonucleotide
agcccuguuuuacaucgac

SEQ ID NO: 1075464 - RNA, 19 nt, Artificial Sequence
  Description of Artificial Sequence: Synthetic oligonucleotide
gacgauagugaguggucag

SEQ ID NO: 1075465 - RNA, 19 nt, Artificial Sequence
  Description of Artificial Sequence: Synthetic oligonucleotide
cuuagcuuuucugaugaug

SEQ ID NO: 1075466 - RNA, 19 nt, Artificial Sequence
  Description of Artificial Sequence: Synthetic oligonucleotide
ucgggaaucuucacuuuca

SEQ ID NO: 1075467 - RNA, 19 nt, Artificial Sequence
  Description of Artificial Sequence: Synthetic oligonucleotide
ccuucuuucccuuccaagg

SEQ ID NO: 1075468 - RNA, 19 nt, Artificial Sequence
  Description of Artificial Sequence: Synthetic oligonucleotide
gaaacauaagcccuguuuu

SEQ ID NO: 1075469 - RNA, 19 nt, Artificial Sequence
  Description of Artificial Sequence: Synthetic oligonucleotide
acugcauacacugguagca

SEQ ID NO: 1075470 - RNA, 19 nt, Artificial Sequence
  Description of Artificial Sequence: Synthetic oligonucleotide
cugccugguaaccaagucc

SEQ ID NO: 1075471 - RNA, 19 nt, Artificial Sequence
  Description of Artificial Sequence: Synthetic oligonucleotide
gaaccagggcaucuuauca

SEQ ID NO: 1075472 - RNA, 19 nt, Artificial Sequence
  Description of Artificial Sequence: Synthetic oligonucleotide
uuggcauacuccucaagaa

SEQ ID NO: 1075473 - RNA, 19 nt, Artificial Sequence
  Description of Artificial Sequence: Synthetic oligonucleotide
uguugcuucgaguuggcuu

SEQ ID NO: 1075474 - RNA, 19 nt, Artificial Sequence
  Description of Artificial Sequence: Synthetic oligonucleotide
accuucacagggcuuugcg

SEQ ID NO: 1075475 - RNA, 19 nt, Artificial Sequence
  Description of Artificial Sequence: Synthetic oligonucleotide
caucaauuauacaaugaaa

SEQ ID NO: 1075476 - RNA, 19 nt, Artificial Sequence
  Description of Artificial Sequence: Synthetic oligonucleotide
acauuggcgcaucugggug

SEQ ID NO: 1075477 - RNA, 19 nt, Artificial Sequence
  Description of Artificial Sequence: Synthetic oligonucleotide
aucgacaguuguaaagaac

SEQ ID NO: 1075478 - RNA, 19 nt, Artificial Sequence
  Description of Artificial Sequence: Synthetic oligonucleotide
gaaccagccgacuucuuuc

SEQ ID NO: 1075479 - RNA, 19 nt, Artificial Sequence
  Description of Artificial Sequence: Synthetic oligonucleotide
guguuuacagauaccagac

SEQ ID NO: 1075480 - RNA, 19 nt, Artificial Sequence
  Description of Artificial Sequence: Synthetic oligonucleotide
cauauuagaaaaccgugua

SEQ ID NO: 1075481 - RNA, 19 nt, Artificial Sequence
  Description of Artificial Sequence: Synthetic oligonucleotide
agggauagaaccaccagca

SEQ ID NO: 1075482 - RNA, 19 nt, Artificial Sequence
  Description of Artificial Sequence: Synthetic oligonucleotide
auuguguagcaaacuuagc

SEQ ID NO: 1075483 - RNA, 19 nt, Artificial Sequence
  Description of Artificial Sequence: Synthetic oligonucleotide
cacgaguuugagaagccug

SEQ ID NO: 1075484 - RNA, 19 nt, Artificial Sequence
  Description of Artificial Sequence: Synthetic oligonucleotide
gcuguuuacgucaagcacc

SEQ ID NO: 1075485 - RNA, 19 nt, Artificial Sequence
  Description of Artificial Sequence: Synthetic oligonucleotide
auaaugcauugccucuauc

SEQ ID NO: 1075486 - RNA, 19 nt, Artificial Sequence
  Description of Artificial Sequence: Synthetic oligonucleotide
guggcuacacaauaaugca

SEQ ID NO: 1075487 - RNA, 19 nt, Artificial Sequence
  Description of Artificial Sequence: Synthetic oligonucleotide
uggcauacuccucaagaau

SEQ ID NO: 1075488 - RNA, 19 nt, Artificial Sequence
  Description of Artificial Sequence: Synthetic oligonucleotide
cccuguuuuacaucgacag

SEQ ID NO: 1075489 - RNA, 19 nt, Artificial Sequence
  Description of Artificial Sequence: Synthetic oligonucleotide
auucugcaaacaggaaugg

SEQ ID NO: 1075490 - RNA, 19 nt, Artificial Sequence
  Description of Artificial Sequence: Synthetic oligonucleotide
auacaacccuguauucugc

SEQ ID NO: 1075491 - RNA, 19 nt, Artificial Sequence
  Description of Artificial Sequence: Synthetic oligonucleotide
gacaguuguaaagaacauc

SEQ ID NO: 1075492 - RNA, 19 nt, Artificial Sequence
  Description of Artificial Sequence: Synthetic oligonucleotide
ggcguauaggccaacauug

SEQ ID NO: 1075493 - RNA, 19 nt, Artificial Sequence
  Description of Artificial Sequence: Synthetic oligonucleotide
acauaagcccuguuuuaca

SEQ ID NO: 1075494 - RNA, 19 nt, Artificial Sequence
  Description of Artificial Sequence: Synthetic oligonucleotide
aaaaccguguagugucaaa

SEQ ID NO: 1075495 - RNA, 19 nt, Artificial Sequence
  Description of Artificial Sequence: Synthetic oligonucleotide
cugaaauacaauuccuaaa

SEQ ID NO: 1075496 - RNA, 19 nt, Artificial Sequence
  Description of Artificial Sequence: Synthetic oligonucleotide
aggaugggcuguuuacguc

SEQ ID NO: 1075497 - RNA, 19 nt, Artificial Sequence
  Description of Artificial Sequence: Synthetic oligonucleotide
acauugccccaauucucac

SEQ ID NO: 1075498 - RNA, 19 nt, Artificial Sequence
  Description of Artificial Sequence: Synthetic oligonucleotide
guaaccaagucccaguccu

SEQ ID NO: 1075499 - RNA, 19 nt, Artificial Sequence
  Description of Artificial Sequence: Synthetic oligonucleotide
acuaggcaauaaaauguuc

SEQ ID NO: 1075500 - RNA, 19 nt, Artificial Sequence
  Description of Artificial Sequence: Synthetic oligonucleotide
uuacagauaccagacgaua

SEQ ID NO: 1075501 - RNA, 19 nt, Artificial Sequence
  Description of Artificial Sequence: Synthetic oligonucleotide
uacaauuggcauacuccuc

SEQ ID NO: 1075502 - RNA, 19 nt, Artificial Sequence
  Description of Artificial Sequence: Synthetic oligonucleotide
uccacgaguuugagaagcc

SEQ ID NO: 1075503 - RNA, 19 nt, Artificial Sequence
  Description of Artificial Sequence: Synthetic oligonucleotide
gcagugaacagagaggcag

SEQ ID NO: 1075504 - RNA, 19 nt, Artificial Sequence
  Description of Artificial Sequence: Synthetic oligonucleotide
gcgacauuggcgcaucugg

SEQ ID NO: 1075505 - RNA, 19 nt, Artificial Sequence
  Description of Artificial Sequence: Synthetic oligonucleotide
cugauccuuauuguguagc

SEQ ID NO: 1075506 - RNA, 19 nt, Artificial Sequence
  Description of Artificial Sequence: Synthetic oligonucleotide
uccuaguaauuucccagau

SEQ ID NO: 1075507 - RNA, 19 nt, Artificial Sequence
  Description of Artificial Sequence: Synthetic oligonucleotide
aaucaugcaaauagcccaa

SEQ ID NO: 1075508 - RNA, 19 nt, Artificial Sequence
  Description of Artificial Sequence: Synthetic oligonucleotide
cuguggcuacacaauaaug

SEQ ID NO: 1075509 - RNA, 19 nt, Artificial Sequence
  Description of Artificial Sequence: Synthetic oligonucleotide
ugugaaccagccgacuucu

SEQ ID NO: 1075510 - RNA, 19 nt, Artificial Sequence
  Description of Artificial Sequence: Synthetic oligonucleotide
ucaagauucuuuggcugug

SEQ ID NO: 1075511 - RNA, 19 nt, Artificial Sequence
  Description of Artificial Sequence: Synthetic oligonucleotide
gaccgccccaucuuccugg

SEQ ID NO: 1075512 - RNA, 19 nt, Artificial Sequence
  Description of Artificial Sequence: Synthetic oligonucleotide
ugaaccagccgacuucuuu

SEQ ID NO: 1075513 - RNA, 19 nt, Artificial Sequence
  Description of Artificial Sequence: Synthetic oligonucleotide
guuuacgucaagcaccaua

SEQ ID NO: 1075514 - RNA, 19 nt, Artificial Sequence
  Description of Artificial Sequence: Synthetic oligonucleotide
gggucagaucuccugaucc

SEQ ID NO: 1075515 - RNA, 19 nt, Artificial Sequence
  Description of Artificial Sequence: Synthetic oligonucleotide
aagcacaaaugcaugggau

SEQ ID NO: 1075516 - RNA, 19 nt, Artificial Sequence
  Description of Artificial Sequence: Synthetic oligonucleotide
aagauagaaugaaugccua

SEQ ID NO: 1075517 - RNA, 19 nt, Artificial Sequence
  Description of Artificial Sequence: Synthetic oligonucleotide
cagaggaugggcuguuuac

SEQ ID NO: 1075518 - RNA, 19 nt, Artificial Sequence
  Description of Artificial Sequence: Synthetic oligonucleotide
auuugagcaaagauagaau

SEQ ID NO: 1075519 - RNA, 19 nt, Artificial Sequence
  Description of Artificial Sequence: Synthetic oligonucleotide
agcauucaagcaauguugu

SEQ ID NO: 1075520 - RNA, 19 nt, Artificial Sequence
  Description of Artificial Sequence: Synthetic oligonucleotide
auacauuaaguugaaccuu

SEQ ID NO: 1075521 - RNA, 19 nt, Artificial Sequence
  Description of Artificial Sequence: Synthetic oligonucleotide
uggggcacuucgcugguac

SEQ ID NO: 1075522 - RNA, 19 nt, Artificial Sequence
  Description of Artificial Sequence: Synthetic oligonucleotide
uucugccugguaaccaagu

SEQ ID NO: 1075523 - RNA, 19 nt, Artificial Sequence
  Description of Artificial Sequence: Synthetic oligonucleotide
ugaguggucaguagaccuu

SEQ ID NO: 1075524 - RNA, 19 nt, Artificial Sequence
  Description of Artificial Sequence: Synthetic oligonucleotide
ggcaauaaaauguucuacu

SEQ ID NO: 1075525 - RNA, 19 nt, Artificial Sequence
  Description of Artificial Sequence: Synthetic oligonucleotide
agaugaagugggaauacaa

SEQ ID NO: 1075526 - RNA, 19 nt, Artificial Sequence
  Description of Artificial Sequence: Synthetic oligonucleotide
uuagaacgugcaugagacu

SEQ ID NO: 1075527 - RNA, 19 nt, Artificial Sequence
  Description of Artificial Sequence: Synthetic oligonucleotide
uuuuagcucuucgggaauc

SEQ ID NO: 1075528 - RNA, 19 nt, Artificial Sequence
  Description of Artificial Sequence: Synthetic oligonucleotide
ccauagaucugcgacauug

SEQ ID NO: 1075529 - RNA, 19 nt, Artificial Sequence
  Description of Artificial Sequence: Synthetic oligonucleotide
cuuugcgaugguagucagc

SEQ ID NO: 1075530 - RNA, 19 nt, Artificial Sequence
  Description of Artificial Sequence: Synthetic oligonucleotide
uuacaucgacaguuguaaa

SEQ ID NO: 1075531 - RNA, 19 nt, Artificial Sequence
  Description of Artificial Sequence: Synthetic oligonucleotide
gugccagaaggauuucggc

SEQ ID NO: 1075532 - RNA, 19 nt, Artificial Sequence
  Description of Artificial Sequence: Synthetic oligonucleotide
cuuauuguguagcaaacuu

SEQ ID NO: 1075533 - RNA, 19 nt, Artificial Sequence
  Description of Artificial Sequence: Synthetic oligonucleotide
agauuguuguccacgaguu

SEQ ID NO: 1075534 - RNA, 19 nt, Artificial Sequence
  Description of Artificial Sequence: Synthetic oligonucleotide
agacgauagugagugguca

SEQ ID NO: 1075535 - RNA, 19 nt, Artificial Sequence
  Description of Artificial Sequence: Synthetic oligonucleotide
cagacgauagugagugguc

SEQ ID NO: 1075536 - RNA, 19 nt, Artificial Sequence
  Description of Artificial Sequence: Synthetic oligonucleotide
ucaacguuucccugugauu

SEQ ID NO: 1075537 - RNA, 19 nt, Artificial Sequence
  Description of Artificial Sequence: Synthetic oligonucleotide
gguuuuagcucuucgggaa

SEQ ID NO: 1075538 - RNA, 19 nt, Artificial Sequence
  Description of Artificial Sequence: Synthetic oligonucleotide
agggcuuugcgaugguagu

SEQ ID NO: 1075539 - RNA, 19 nt, Artificial Sequence
  Description of Artificial Sequence: Synthetic oligonucleotide
agauaccagacgauaguga

SEQ ID NO: 1075540 - RNA, 19 nt, Artificial Sequence
  Description of Artificial Sequence: Synthetic oligonucleotide
cugugaaccagccgacuuc

SEQ ID NO: 1075541 - RNA, 19 nt, Artificial Sequence
  Description of Artificial Sequence: Synthetic oligonucleotide
aggacuaaacagaaguguu

SEQ ID NO: 1075542 - RNA, 19 nt, Artificial Sequence
  Description of Artificial Sequence: Synthetic oligonucleotide
uucucagcagagcgaccgc

SEQ ID NO: 1075543 - RNA, 19 nt, Artificial Sequence
  Description of Artificial Sequence: Synthetic oligonucleotide
cuccuaguaauuucccaga

SEQ ID NO: 1075544 - RNA, 19 nt, Artificial Sequence
  Description of Artificial Sequence: Synthetic oligonucleotide
uuccgcgcagaaccagaag

SEQ ID NO: 1075545 - RNA, 19 nt, Artificial Sequence
  Description of Artificial Sequence: Synthetic oligonucleotide
gcuacacaauaaugcauug

SEQ ID NO: 1075546 - RNA, 19 nt, Artificial Sequence
  Description of Artificial Sequence: Synthetic oligonucleotide
agcucuucgggaaucuuca

SEQ ID NO: 1075547 - RNA, 19 nt, Artificial Sequence
  Description of Artificial Sequence: Synthetic oligonucleotide
ucuccguugccaggaaucu

SEQ ID NO: 1075548 - RNA, 19 nt, Artificial Sequence
  Description of Artificial Sequence: Synthetic oligonucleotide
caaccagggucagaucucc

SEQ ID NO: 1075549 - RNA, 19 nt, Artificial Sequence
  Description of Artificial Sequence: Synthetic oligonucleotide
ggaugggcuguuuacguca

SEQ ID NO: 1075550 - RNA, 19 nt, Artificial Sequence
  Description of Artificial Sequence: Synthetic oligonucleotide
acuaggaaccagggcaucu

SEQ ID NO: 1075551 - RNA, 19 nt, Artificial Sequence
  Description of Artificial Sequence: Synthetic oligonucleotide
cuucgaguuggcuucuuaa

SEQ ID NO: 1075552 - RNA, 19 nt, Artificial Sequence
  Description of Artificial Sequence: Synthetic oligonucleotide
ggaauacaacccuguauuc

SEQ ID NO: 1075553 - RNA, 19 nt, Artificial Sequence
  Description of Artificial Sequence: Synthetic oligonucleotide
ugaaugccuaaggaacaaa

SEQ ID NO: 1075554 - RNA, 19 nt, Artificial Sequence
  Description of Artificial Sequence: Synthetic oligonucleotide
ucuuaucacguagcauuaa

SEQ ID NO: 1075555 - RNA, 19 nt, Artificial Sequence
  Description of Artificial Sequence: Synthetic oligonucleotide
guagcaaacuuagcuuuuc

SEQ ID NO: 1075556 - RNA, 19 nt, Artificial Sequence
  Description of Artificial Sequence: Synthetic oligonucleotide
cuggaacaacugcuucugc

SEQ ID NO: 1075557 - RNA, 19 nt, Artificial Sequence
  Description of Artificial Sequence: Synthetic oligonucleotide
cagauuguuguccacgagu

SEQ ID NO: 1075558 - RNA, 19 nt, Artificial Sequence
  Description of Artificial Sequence: Synthetic oligonucleotide
ggauuucggcauauugggg

SEQ ID NO: 1075559 - RNA, 19 nt, Artificial Sequence
  Description of Artificial Sequence: Synthetic oligonucleotide
gaguggucaguagaccuuc

SEQ ID NO: 1075560 - RNA, 19 nt, Artificial Sequence
  Description of Artificial Sequence: Synthetic oligonucleotide
auuacugcauacacuggua

SEQ ID NO: 1075561 - RNA, 19 nt, Artificial Sequence
  Description of Artificial Sequence: Synthetic oligonucleotide
gccaggaaucuucugcuug

SEQ ID NO: 1075562 - RNA, 19 nt, Artificial Sequence
  Description of Artificial Sequence: Synthetic oligonucleotide
ugcgacauuggcgcaucug

SEQ ID NO: 1075563 - RNA, 19 nt, Artificial Sequence
  Description of Artificial Sequence: Synthetic oligonucleotide
gugcccguuucuuccgggg

SEQ ID NO: 1075564 - RNA, 19 nt, Artificial Sequence
  Description of Artificial Sequence: Synthetic oligonucleotide
accagacgauagugagugg

SEQ ID NO: 1075565 - RNA, 19 nt, Artificial Sequence
  Description of Artificial Sequence: Synthetic oligonucleotide
ugggcacuccuuuuauuuu

SEQ ID NO: 1075566 - RNA, 19 nt, Artificial Sequence
  Description of Artificial Sequence: Synthetic oligonucleotide
caauuugagcaaagauaga

SEQ ID NO: 1075567 - RNA, 19 nt, Artificial Sequence
  Description of Artificial Sequence: Synthetic oligonucleotide
agcccgugcccguuucuuc

SEQ ID NO: 1075568 - RNA, 19 nt, Artificial Sequence
  Description of Artificial Sequence: Synthetic oligonucleotide
gauccuuauuguguagcaa

SEQ ID NO: 1075569 - RNA, 19 nt, Artificial Sequence
  Description of Artificial Sequence: Synthetic oligonucleotide
agaacgugcaugagacuca

SEQ ID NO: 1075570 - RNA, 19 nt, Artificial Sequence
  Description of Artificial Sequence: Synthetic oligonucleotide
augaaugccuaaggaacaa

SEQ ID NO: 1075571 - RNA, 19 nt, Artificial Sequence
  Description of Artificial Sequence: Synthetic oligonucleotide
uggggucagcccgugcccg

SEQ ID NO: 1075572 - RNA, 19 nt, Artificial Sequence
  Description of Artificial Sequence: Synthetic oligonucleotide
gcaaauagcccaacaauaa

SEQ ID NO: 1075573 - RNA, 19 nt, Artificial Sequence
  Description of Artificial Sequence: Synthetic oligonucleotide
cuguuuuacaucgacaguu

SEQ ID NO: 1075574 - RNA, 19 nt, Artificial Sequence
  Description of Artificial Sequence: Synthetic oligonucleotide
auguugucaacuaggcaau

SEQ ID NO: 1075575 - RNA, 19 nt, Artificial Sequence
  Description of Artificial Sequence: Synthetic oligonucleotide
gggauuucagguauauaca

SEQ ID NO: 1075576 - RNA, 19 nt, Artificial Sequence
  Description of Artificial Sequence: Synthetic oligonucleotide
ggaacaacugcuucugccu

SEQ ID NO: 1075577 - RNA, 19 nt, Artificial Sequence
  Description of Artificial Sequence: Synthetic oligonucleotide
cucaguagguguggcgccc

SEQ ID NO: 1075578 - RNA, 19 nt, Artificial Sequence
  Description of Artificial Sequence: Synthetic oligonucleotide
ccuaguaauuucccagaug

SEQ ID NO: 1075579 - RNA, 19 nt, Artificial Sequence
  Description of Artificial Sequence: Synthetic oligonucleotide
auaccagacgauagugagu

SEQ ID NO: 1075580 - RNA, 19 nt, Artificial Sequence
  Description of Artificial Sequence: Synthetic oligonucleotide
agcgaccgccccaucuucc

SEQ ID NO: 1075581 - RNA, 19 nt, Artificial Sequence
  Description of Artificial Sequence: Synthetic oligonucleotide
agagcgaccgccccaucuu

SEQ ID NO: 1075582 - RNA, 19 nt, Artificial Sequence
  Description of Artificial Sequence: Synthetic oligonucleotide
cacaaaugcaugggauuuc

SEQ ID NO: 1075583 - RNA, 19 nt, Artificial Sequence
  Description of Artificial Sequence: Synthetic oligonucleotide
uggcgcaucugggugugcc

SEQ ID NO: 1075584 - RNA, 19 nt, Artificial Sequence
  Description of Artificial Sequence: Synthetic oligonucleotide
cauugccccaauucucaca

SEQ ID NO: 1075585 - RNA, 19 nt, Artificial Sequence
  Description of Artificial Sequence: Synthetic oligonucleotide
cuccugauccuuauugugu

SEQ ID NO: 1075586 - RNA, 19 nt, Artificial Sequence
  Description of Artificial Sequence: Synthetic oligonucleotide
cuuugucuaauuacugcau

SEQ ID NO: 1075587 - RNA, 19 nt, Artificial Sequence
  Description of Artificial Sequence: Synthetic oligonucleotide
caucgacaguuguaaagaa

SEQ ID NO: 1075588 - RNA, 19 nt, Artificial Sequence
  Description of Artificial Sequence: Synthetic oligonucleotide
cauaagcccuguuuuacau

SEQ ID NO: 1075589 - RNA, 19 nt, Artificial Sequence
  Description of Artificial Sequence: Synthetic oligonucleotide
aucuuaucacguagcauua

SEQ ID NO: 1075590 - RNA, 19 nt, Artificial Sequence
  Description of Artificial Sequence: Synthetic oligonucleotide
gaaaaccguguagugucaa

SEQ ID NO: 1075591 - RNA, 19 nt, Artificial Sequence
  Description of Artificial Sequence: Synthetic oligonucleotide
auuggcgcaucugggugug

SEQ ID NO: 1075592 - RNA, 19 nt, Artificial Sequence
  Description of Artificial Sequence: Synthetic oligonucleotide
uggggccgcucaaacuugu

SEQ ID NO: 1075593 - RNA, 19 nt, Artificial Sequence
  Description of Artificial Sequence: Synthetic oligonucleotide
cagugaacagagaggcaga

SEQ ID NO: 1075594 - RNA, 19 nt, Artificial Sequence
  Description of Artificial Sequence: Synthetic oligonucleotide
ucugcgacauuggcgcauc

SEQ ID NO: 1075595 - RNA, 19 nt, Artificial Sequence
  Description of Artificial Sequence: Synthetic oligonucleotide
ccgcgcagaaccagaaggg

SEQ ID NO: 1075596 - RNA, 19 nt, Artificial Sequence
  Description of Artificial Sequence: Synthetic oligonucleotide
gcagauuguuguccacgag

SEQ ID NO: 1075597 - RNA, 19 nt, Artificial Sequence
  Description of Artificial Sequence: Synthetic oligonucleotide
acguuucccugugauuucu

SEQ ID NO: 1075598 - RNA, 19 nt, Artificial Sequence
  Description of Artificial Sequence: Synthetic oligonucleotide
aaggggcguauaggccaac

SEQ ID NO: 1075599 - RNA, 19 nt, Artificial Sequence
  Description of Artificial Sequence: Synthetic oligonucleotide
gauggucuggaaagaugaa

SEQ ID NO: 1075600 - RNA, 19 nt, Artificial Sequence
  Description of Artificial Sequence: Synthetic oligonucleotide
cugcauguugcuucgaguu

SEQ ID NO: 1075601 - RNA, 19 nt, Artificial Sequence
  Description of Artificial Sequence: Synthetic oligonucleotide
ggguucucagcagagcgac

SEQ ID NO: 1075602 - RNA, 19 nt, Artificial Sequence
  Description of Artificial Sequence: Synthetic oligonucleotide
cugguaaccaagucccagu

SEQ ID NO: 1075603 - RNA, 19 nt, Artificial Sequence
  Description of Artificial Sequence: Synthetic oligonucleotide
gaucugcgacauuggcgca

SEQ ID NO: 1075604 - RNA, 19 nt, Artificial Sequence
  Description of Artificial Sequence: Synthetic oligonucleotide
ucagcccgugcccguuucu

SEQ ID NO: 1075605 - RNA, 19 nt, Artificial Sequence
  Description of Artificial Sequence: Synthetic oligonucleotide
gaccuucacagggcuuugc

SEQ ID NO: 1075606 - RNA, 19 nt, Artificial Sequence
  Description of Artificial Sequence: Synthetic oligonucleotide
ccugauccuuauuguguag

SEQ ID NO: 1075607 - RNA, 19 nt, Artificial Sequence
  Description of Artificial Sequence: Synthetic oligonucleotide
ccugguaaccaagucccag

SEQ ID NO: 1075608 - RNA, 19 nt, Artificial Sequence
  Description of Artificial Sequence: Synthetic oligonucleotide
cgacauuggcgcaucuggg

SEQ ID NO: 1075609 - RNA, 19 nt, Artificial Sequence
  Description of Artificial Sequence: Synthetic oligonucleotide
gagcgaccgccccaucuuc

SEQ ID NO: 1075610 - RNA, 19 nt, Artificial Sequence
  Description of Artificial Sequence: Synthetic oligonucleotide
agcuccccucaucuuacuu

SEQ ID NO: 1075611 - RNA, 19 nt, Artificial Sequence
  Description of Artificial Sequence: Synthetic oligonucleotide
ggcacuucgcugguacugc

SEQ ID NO: 1075612 - RNA, 19 nt, Artificial Sequence
  Description of Artificial Sequence: Synthetic oligonucleotide
gggcaucuuaucacguagc

SEQ ID NO: 1075613 - RNA, 19 nt, Artificial Sequence
  Description of Artificial Sequence: Synthetic oligonucleotide
gaugggcuguuuacgucaa

SEQ ID NO: 1075614 - RNA, 19 nt, Artificial Sequence
  Description of Artificial Sequence: Synthetic oligonucleotide
gagcaaagauagaaugaau

SEQ ID NO: 1075615 - RNA, 19 nt, Artificial Sequence
  Description of Artificial Sequence: Synthetic oligonucleotide
ccaacaauaaugccaggcu

SEQ ID NO: 1075616 - RNA, 19 nt, Artificial Sequence
  Description of Artificial Sequence: Synthetic oligonucleotide
ccguguagugucaaaggga

SEQ ID NO: 1075617 - RNA, 19 nt, Artificial Sequence
  Description of Artificial Sequence: Synthetic oligonucleotide
guuuuagcucuucgggaau

SEQ ID NO: 1075618 - RNA, 19 nt, Artificial Sequence
  Description of Artificial Sequence: Synthetic oligonucleotide
cuuccgcgcagaaccagaa

SEQ ID NO: 1075619 - RNA, 19 nt, Artificial Sequence
  Description of Artificial Sequence: Synthetic oligonucleotide
cacuucgcugguacugcca

SEQ ID NO: 1075620 - RNA, 19 nt, Artificial Sequence
  Description of Artificial Sequence: Synthetic oligonucleotide
agaccuucacagggcuuug

SEQ ID NO: 1075621 - RNA, 19 nt, Artificial Sequence
  Description of Artificial Sequence: Synthetic oligonucleotide
gauuguuguccacgaguuu

SEQ ID NO: 1075622 - RNA, 19 nt, Artificial Sequence
  Description of Artificial Sequence: Synthetic oligonucleotide
agaaggauuucggcauauu

SEQ ID NO: 1075623 - RNA, 19 nt, Artificial Sequence
  Description of Artificial Sequence: Synthetic oligonucleotide
aucugcgacauuggcgcau

SEQ ID NO: 1075624 - RNA, 19 nt, Artificial Sequence
  Description of Artificial Sequence: Synthetic oligonucleotide
agcagagcgaccgccccau

SEQ ID NO: 1075625 - RNA, 19 nt, Artificial Sequence
  Description of Artificial Sequence: Synthetic oligonucleotide
aaccagggucagaucuccu

SEQ ID NO: 1075626 - RNA, 19 nt, Artificial Sequence
  Description of Artificial Sequence: Synthetic oligonucleotide
gcccgugcccguuucuucc

SEQ ID NO: 1075627 - RNA, 19 nt, Artificial Sequence
  Description of Artificial Sequence: Synthetic oligonucleotide
uucuuacaauuggcauacu

SEQ ID NO: 1075628 - RNA, 19 nt, Artificial Sequence
  Description of Artificial Sequence: Synthetic oligonucleotide
aagcccuguuuuacaucga

SEQ ID NO: 1075629 - RNA, 19 nt, Artificial Sequence
  Description of Artificial Sequence: Synthetic oligonucleotide
cauuggcgcaucugggugu

SEQ ID NO: 1075630 - RNA, 19 nt, Artificial Sequence
  Description of Artificial Sequence: Synthetic oligonucleotide
gguguggcgccccauagau

SEQ ID NO: 1075631 - RNA, 19 nt, Artificial Sequence
  Description of Artificial Sequence: Synthetic oligonucleotide
gccccauagaucugcgaca

SEQ ID NO: 1075632 - RNA, 19 nt, Artificial Sequence
  Description of Artificial Sequence: Synthetic oligonucleotide
aggggcguauaggccaaca

SEQ ID NO: 1075633 - RNA, 19 nt, Artificial Sequence
  Description of Artificial Sequence: Synthetic oligonucleotide
ggcuacacaauaaugcauu

SEQ ID NO: 1075634 - RNA, 19 nt, Artificial Sequence
  Description of Artificial Sequence: Synthetic oligonucleotide
gcacuucgcugguacugcc

SEQ ID NO: 1075635 - RNA, 19 nt, Artificial Sequence
  Description of Artificial Sequence: Synthetic oligonucleotide
caaggggcguauaggccaa

SEQ ID NO: 1075636 - RNA, 19 nt, Artificial Sequence
  Description of Artificial Sequence: Synthetic oligonucleotide
caugggauuucagguauau

SEQ ID NO: 1075637 - RNA, 19 nt, Artificial Sequence
  Description of Artificial Sequence: Synthetic oligonucleotide
cacguagcauuaacacaua

SEQ ID NO: 1075638 - RNA, 19 nt, Artificial Sequence
  Description of Artificial Sequence: Synthetic oligonucleotide
gucagcccgugcccguuuc

SEQ ID NO: 1075639 - RNA, 19 nt, Artificial Sequence
  Description of Artificial Sequence: Synthetic oligonucleotide
gcagcuccccucaucuuac

SEQ ID NO: 1075640 - RNA, 19 nt, Artificial Sequence
  Description of Artificial Sequence: Synthetic oligonucleotide
ccgcucaaacuuguagagc

SEQ ID NO: 1075641 - RNA, 19 nt, Artificial Sequence
  Description of Artificial Sequence: Synthetic oligonucleotide
gcaaccagggucagaucuc

SEQ ID NO: 1075642 - RNA, 19 nt, Artificial Sequence
  Description of Artificial Sequence: Synthetic oligonucleotide
cguguagugucaaagggau

SEQ ID NO: 1075643 - RNA, 19 nt, Artificial Sequence
  Description of Artificial Sequence: Synthetic oligonucleotide
uguuuacgucaagcaccau

SEQ ID NO: 1075644 - RNA, 19 nt, Artificial Sequence
  Description of Artificial Sequence: Synthetic oligonucleotide
ggacuaaacagaaguguuu

SEQ ID NO: 1075645 - RNA, 19 nt, Artificial Sequence
  Description of Artificial Sequence: Synthetic oligonucleotide
cagagcgaccgccccaucu

SEQ ID NO: 1075646 - RNA, 19 nt, Artificial Sequence
  Description of Artificial Sequence: Synthetic oligonucleotide
caaggacuccuaguaauuu

SEQ ID NO: 1075647 - RNA, 19 nt, Artificial Sequence
  Description of Artificial Sequence: Synthetic oligonucleotide
cccgugcccguuucuuccg

SEQ ID NO: 1075648 - RNA, 19 nt, Artificial Sequence
  Description of Artificial Sequence: Synthetic oligonucleotide
ucggcauauuggggccgcu

SEQ ID NO: 1075649 - RNA, 19 nt, Artificial Sequence
  Description of Artificial Sequence: Synthetic oligonucleotide
ggcgccccauagaucugcg

SEQ ID NO: 1075650 - RNA, 19 nt, Artificial Sequence
  Description of Artificial Sequence: Synthetic oligonucleotide
gcccuguuuuacaucgaca

SEQ ID NO: 1075651 - RNA, 19 nt, Artificial Sequence
  Description of Artificial Sequence: Synthetic oligonucleotide
ccagacgauagugaguggu

SEQ ID NO: 1075652 - RNA, 19 nt, Artificial Sequence
  Description of Artificial Sequence: Synthetic oligonucleotide
gcuucgaguuggcuucuua

SEQ ID NO: 1075653 - RNA, 19 nt, Artificial Sequence
  Description of Artificial Sequence: Synthetic oligonucleotide
cgugcccguuucuuccggg

SEQ ID NO: 1075654 - RNA, 19 nt, Artificial Sequence
  Description of Artificial Sequence: Synthetic oligonucleotide
ggcagugaacagagaggca

SEQ ID NO: 1075655 - RNA, 19 nt, Artificial Sequence
  Description of Artificial Sequence: Synthetic oligonucleotide
guguggcgccccauagauc

SEQ ID NO: 1075656 - RNA, 19 nt, Artificial Sequence
  Description of Artificial Sequence: Synthetic oligonucleotide
ggucuuccgcgcagaacca

SEQ ID NO: 1075657 - RNA, 19 nt, Artificial Sequence
  Description of Artificial Sequence: Synthetic oligonucleotide
ggcugguucaagauucuuu

SEQ ID NO: 1075658 - RNA, 19 nt, Artificial Sequence
  Description of Artificial Sequence: Synthetic oligonucleotide
ccgugcccguuucuuccgg

SEQ ID NO: 1075659 - RNA, 19 nt, Artificial Sequence
  Description of Artificial Sequence: Synthetic oligonucleotide
guggcgccccauagaucug

SEQ ID NO: 1075660 - RNA, 19 nt, Artificial Sequence
  Description of Artificial Sequence: Synthetic oligonucleotide
cagaaggauuucggcauau

SEQ ID NO: 1075661 - RNA, 19 nt, Artificial Sequence
  Description of Artificial Sequence: Synthetic oligonucleotide
ggggcguauaggccaacau

SEQ ID NO: 1075662 - RNA, 19 nt, Artificial Sequence
  Description of Artificial Sequence: Synthetic oligonucleotide
ccaaggacuccuaguaauu

SEQ ID NO: 1075663 - RNA, 19 nt, Artificial Sequence
  Description of Artificial Sequence: Synthetic oligonucleotide
ccagaaggauuucggcaua

SEQ ID NO: 1075664 - RNA, 19 nt, Artificial Sequence
  Description of Artificial Sequence: Synthetic oligonucleotide
cgauagugaguggucagua

SEQ ID NO: 1075665 - RNA, 19 nt, Artificial Sequence
  Description of Artificial Sequence: Synthetic oligonucleotide
gcgccccauagaucugcga

SEQ ID NO: 1075666 - RNA, 19 nt, Artificial Sequence
  Description of Artificial Sequence: Synthetic oligonucleotide
gcugggcacuccuuuuauu

SEQ ID NO: 1075667 - RNA, 19 nt, Artificial Sequence
  Description of Artificial Sequence: Synthetic oligonucleotide
gcgaccgccccaucuuccu

SEQ ID NO: 1075668 - RNA, 19 nt, Artificial Sequence
  Description of Artificial Sequence: Synthetic oligonucleotide
ccccauagaucugcgacau

SEQ ID NO: 1075669 - RNA, 19 nt, Artificial Sequence
  Description of Artificial Sequence: Synthetic oligonucleotide
cgaccgccccaucuuccug

SEQ ID NO: 1075670 - RNA, 19 nt, Artificial Sequence
  Description of Artificial Sequence: Synthetic oligonucleotide
cugcgacauuggcgcaucu

SEQ ID NO: 1075671 - RNA, 19 nt, Artificial Sequence
  Description of Artificial Sequence: Synthetic oligonucleotide
ccguugccaggaaucuucu

SEQ ID NO: 1075672 - RNA, 19 nt, Artificial Sequence
  Description of Artificial Sequence: Synthetic oligonucleotide
ccacgaguuugagaagccu

SEQ ID NO: 1075673 - RNA, 19 nt, Artificial Sequence
  Description of Artificial Sequence: Synthetic oligonucleotide
gcagagcgaccgccccauc

SEQ ID NO: 1075674 - RNA, 19 nt, Artificial Sequence
  Description of Artificial Sequence: Synthetic oligonucleotide
cggcauauuggggccgcuc

SEQ ID NO: 1075675 - RNA, 19 nt, Artificial Sequence
  Description of Artificial Sequence: Synthetic oligonucleotide
ccaucuccguugccaggaa

SEQ ID NO: 1075676 - RNA, 19 nt, Artificial Sequence
  Description of Artificial Sequence: Synthetic oligonucleotide
cuccguugccaggaaucuu

SEQ ID NO: 1075677 - RNA, 19 nt, Artificial Sequence
  Description of Artificial Sequence: Synthetic oligonucleotide
cuggggcacuucgcuggua

SEQ ID NO: 1075678 - RNA, 19 nt, Artificial Sequence
  Description of Artificial Sequence: Synthetic oligonucleotide
cagcccgugcccguuucuu

SEQ ID NO: 1075679 - RNA, 19 nt, Artificial Sequence
  Description of Artificial Sequence: Synthetic oligonucleotide
ggggccgcucaaacuugua

SEQ ID NO: 1075680 - RNA, 19 nt, Artificial Sequence
  Description of Artificial Sequence: Synthetic oligonucleotide
ggucagcccgugcccguuu

SEQ ID NO: 1075681 - RNA, 19 nt, Artificial Sequence
  Description of Artificial Sequence: Synthetic oligonucleotide
auuaacauaaacuagcacg

SEQ ID NO: 1075682 - RNA, 19 nt, Artificial Sequence
  Description of Artificial Sequence: Synthetic oligonucleotide
uuaaaauugccuuaaaagg

SEQ ID NO: 1075683 - RNA, 19 nt, Artificial Sequence
  Description of Artificial Sequence: Synthetic oligonucleotide
aauuacaaaagggauacgc

SEQ ID NO: 1075684 - RNA, 19 nt, Artificial Sequence
  Description of Artificial Sequence: Synthetic oligonucleotide
aacaagaacuagcugauac

SEQ ID NO: 1075685 - RNA, 19 nt, Artificial Sequence
  Description of Artificial Sequence: Synthetic oligonucleotide
aacauaaacuagcacgugc

SEQ ID NO: 1075686 - RNA, 19 nt, Artificial Sequence
  Description of Artificial Sequence: Synthetic oligonucleotide
uauuucuagacauuaauug

SEQ ID NO: 1075687 - RNA, 19 nt, Artificial Sequence
  Description of Artificial Sequence: Synthetic oligonucleotide
uuaaauuugguccacagau

SEQ ID NO: 1075688 - RNA, 19 nt, Artificial Sequence
  Description of Artificial Sequence: Synthetic oligonucleotide
uauuucucgacaaugcgcg

SEQ ID NO: 1075689 - RNA, 19 nt, Artificial Sequence
  Description of Artificial Sequence: Synthetic oligonucleotide
aaaucuucguaacuucacc

SEQ ID NO: 1075690 - RNA, 19 nt, Artificial Sequence
  Description of Artificial Sequence: Synthetic oligonucleotide
ucaauaaucgguuuuguug

SEQ ID NO: 1075691 - RNA, 19 nt, Artificial Sequence
  Description of Artificial Sequence: Synthetic oligonucleotide
aggaagaauucccaaaucc

SEQ ID NO: 1075692 - RNA, 19 nt, Artificial Sequence
  Description of Artificial Sequence: Synthetic oligonucleotide
aaauccaucaaucaagaau

SEQ ID NO: 1075693 - RNA, 19 nt, Artificial Sequence
  Description of Artificial Sequence: Synthetic oligonucleotide
ucuaauuuauuuuaacucu

SEQ ID NO: 1075694 - RNA, 19 nt, Artificial Sequence
  Description of Artificial Sequence: Synthetic oligonucleotide
acaaacaagaacuagcuga

SEQ ID NO: 1075695 - RNA, 19 nt, Artificial Sequence
  Description of Artificial Sequence: Synthetic oligonucleotide
uagacauuaauugagaugu

SEQ ID NO: 1075696 - RNA, 19 nt, Artificial Sequence
  Description of Artificial Sequence: Synthetic oligonucleotide
ugucauacaacuuugcaca

SEQ ID NO: 1075697 - RNA, 19 nt, Artificial Sequence
  Description of Artificial Sequence: Synthetic oligonucleotide
aaaagauacauccgccuuc

SEQ ID NO: 1075698 - RNA, 19 nt, Artificial Sequence
  Description of Artificial Sequence: Synthetic oligonucleotide
uuaacauaaacuagcacgu

SEQ ID NO: 1075699 - RNA, 19 nt, Artificial Sequence
  Description of Artificial Sequence: Synthetic oligonucleotide
aaaacgaacacgaccaacg

SEQ ID NO: 1075700 - RNA, 19 nt, Artificial Sequence
  Description of Artificial Sequence: Synthetic oligonucleotide
uuuaaugaugacuagcccu

SEQ ID NO: 1075701 - RNA, 19 nt, Artificial Sequence
  Description of Artificial Sequence: Synthetic oligonucleotide
ugacuagacauaaaguucc

SEQ ID NO: 1075702 - RNA, 19 nt, Artificial Sequence
  Description of Artificial Sequence: Synthetic oligonucleotide
uuaacuuucaacagaaaau

SEQ ID NO: 1075703 - RNA, 19 nt, Artificial Sequence
  Description of Artificial Sequence: Synthetic oligonucleotide
aguuuaaugaugacuagcc

SEQ ID NO: 1075704 - RNA, 19 nt, Artificial Sequence
  Description of Artificial Sequence: Synthetic oligonucleotide
uuacuuaacaggcugaaaa

SEQ ID NO: 1075705 - RNA, 19 nt, Artificial Sequence
  Description of Artificial Sequence: Synthetic oligonucleotide
caucaacagacuuagaagc

SEQ ID NO: 1075706 - RNA, 19 nt, Artificial Sequence
  Description of Artificial Sequence: Synthetic oligonucleotide
ugaugguuaucucaacugg

SEQ ID NO: 1075707 - RNA, 19 nt, Artificial Sequence
  Description of Artificial Sequence: Synthetic oligonucleotide
aaagauacauccgccuucc

SEQ ID NO: 1075708 - RNA, 19 nt, Artificial Sequence
  Description of Artificial Sequence: Synthetic oligonucleotide
uacuauauauuucuagaca

SEQ ID NO: 1075709 - RNA, 19 nt, Artificial Sequence
  Description of Artificial Sequence: Synthetic oligonucleotide
ugucuuacuauauauuucu

SEQ ID NO: 1075710 - RNA, 19 nt, Artificial Sequence
  Description of Artificial Sequence: Synthetic oligonucleotide
gaguugacuagacauaaag

SEQ ID NO: 1075711 - RNA, 19 nt, Artificial Sequence
  Description of Artificial Sequence: Synthetic oligonucleotide
acaagaacuagcugauacc

SEQ ID NO: 1075712 - RNA, 19 nt, Artificial Sequence
  Description of Artificial Sequence: Synthetic oligonucleotide
uaggaauccauuuuaugag

SEQ ID NO: 1075713 - RNA, 19 nt, Artificial Sequence
  Description of Artificial Sequence: Synthetic oligonucleotide
cauauaagucaauaaucgg

SEQ ID NO: 1075714 - RNA, 19 nt, Artificial Sequence
  Description of Artificial Sequence: Synthetic oligonucleotide
auacagaucucauuaucac

SEQ ID NO: 1075715 - RNA, 19 nt, Artificial Sequence
  Description of Artificial Sequence: Synthetic oligonucleotide
aacaaaucgaugccuaagu

SEQ ID NO: 1075716 - RNA, 19 nt, Artificial Sequence
  Description of Artificial Sequence: Synthetic oligonucleotide
aaagggauaaaagggguag

SEQ ID NO: 1075717 - RNA, 19 nt, Artificial Sequence
  Description of Artificial Sequence: Synthetic oligonucleotide
acccaaaacgaacacgacc

SEQ ID NO: 1075718 - RNA, 19 nt, Artificial Sequence
  Description of Artificial Sequence: Synthetic oligonucleotide
auaccaaagaugauuaaac

SEQ ID NO: 1075719 - RNA, 19 nt, Artificial Sequence
  Description of Artificial Sequence: Synthetic oligonucleotide
uuaacaucaguuuaaugau

SEQ ID NO: 1075720 - RNA, 19 nt, Artificial Sequence
  Description of Artificial Sequence: Synthetic oligonucleotide
aacacauaauuugucuuac

SEQ ID NO: 1075721 - RNA, 19 nt, Artificial Sequence
  Description of Artificial Sequence: Synthetic oligonucleotide
aagacaucguucaauacag

SEQ ID NO: 1075722 - RNA, 19 nt, Artificial Sequence
  Description of Artificial Sequence: Synthetic oligonucleotide
gaauaugucagaagaaagc

SEQ ID NO: 1075723 - RNA, 19 nt, Artificial Sequence
  Description of Artificial Sequence: Synthetic oligonucleotide
agaacuagcugauacccuc

SEQ ID NO: 1075724 - RNA, 19 nt, Artificial Sequence
  Description of Artificial Sequence: Synthetic oligonucleotide
uuacuauauauuucuagac

SEQ ID NO: 1075725 - RNA, 19 nt, Artificial Sequence
  Description of Artificial Sequence: Synthetic oligonucleotide
agauuuacuuaacaggcug

SEQ ID NO: 1075726 - RNA, 19 nt, Artificial Sequence
  Description of Artificial Sequence: Synthetic oligonucleotide
aaucuucguaacuucacca

SEQ ID NO: 1075727 - RNA, 19 nt, Artificial Sequence
  Description of Artificial Sequence: Synthetic oligonucleotide
aaacgaacacgaccaacgg

SEQ ID NO: 1075728 - RNA, 19 nt, Artificial Sequence
  Description of Artificial Sequence: Synthetic oligonucleotide
uucaacagaaaauggucag

SEQ ID NO: 1075729 - RNA, 19 nt, Artificial Sequence
  Description of Artificial Sequence: Synthetic oligonucleotide
uauaagucaauaaucgguu

SEQ ID NO: 1075730 - RNA, 19 nt, Artificial Sequence
  Description of Artificial Sequence: Synthetic oligonucleotide
agcaaaaggaagaauuccc

SEQ ID NO: 1075731 - RNA, 19 nt, Artificial Sequence
  Description of Artificial Sequence: Synthetic oligonucleotide
aaaauuuugcucacagaag

SEQ ID NO: 1075732 - RNA, 19 nt, Artificial Sequence
  Description of Artificial Sequence: Synthetic oligonucleotide
uugacuagacauaaaguuc

SEQ ID NO: 1075733 - RNA, 19 nt, Artificial Sequence
  Description of Artificial Sequence: Synthetic oligonucleotide
uagaacauugcuaggaauc

SEQ ID NO: 1075734 - RNA, 19 nt, Artificial Sequence
  Description of Artificial Sequence: Synthetic oligonucleotide
auugcaauuacaaaaggga

SEQ ID NO: 1075735 - RNA, 19 nt, Artificial Sequence
  Description of Artificial Sequence: Synthetic oligonucleotide
agaacauugcuaggaaucc

SEQ ID NO: 1075736 - RNA, 19 nt, Artificial Sequence
  Description of Artificial Sequence: Synthetic oligonucleotide
uuaaccacuagauugcuuu

SEQ ID NO: 1075737 - RNA, 19 nt, Artificial Sequence
  Description of Artificial Sequence: Synthetic oligonucleotide
cuaggaauccauuuuauga

SEQ ID NO: 1075738 - RNA, 19 nt, Artificial Sequence
  Description of Artificial Sequence: Synthetic oligonucleotide
agagcauaggaacacaagu

SEQ ID NO: 1075739 - RNA, 19 nt, Artificial Sequence
  Description of Artificial Sequence: Synthetic oligonucleotide
ucaacuggcacaaucuuuc

SEQ ID NO: 1075740 - RNA, 19 nt, Artificial Sequence
  Description of Artificial Sequence: Synthetic oligonucleotide
ugaagauaaguuugaauuc

SEQ ID NO: 1075741 - RNA, 19 nt, Artificial Sequence
  Description of Artificial Sequence: Synthetic oligonucleotide
cugacccaaaccuugagag

SEQ ID NO: 1075742 - RNA, 19 nt, Artificial Sequence
  Description of Artificial Sequence: Synthetic oligonucleotide
auauaagucaauaaucggu

SEQ ID NO: 1075743 - RNA, 19 nt, Artificial Sequence
  Description of Artificial Sequence: Synthetic oligonucleotide
uaaacuagcacgugcgugu

SEQ ID NO: 1075744 - RNA, 19 nt, Artificial Sequence
  Description of Artificial Sequence: Synthetic oligonucleotide
agaauucccaaauccuaac

SEQ ID NO: 1075745 - RNA, 19 nt, Artificial Sequence
  Description of Artificial Sequence: Synthetic oligonucleotide
agcccuaugucacagagca

SEQ ID NO: 1075746 - RNA, 19 nt, Artificial Sequence
  Description of Artificial Sequence: Synthetic oligonucleotide
uaaucgguuuuguugacug

SEQ ID NO: 1075747 - RNA, 19 nt, Artificial Sequence
  Description of Artificial Sequence: Synthetic oligonucleotide
ucuuggaaauccaucaauc

SEQ ID NO: 1075748 - RNA, 19 nt, Artificial Sequence
  Description of Artificial Sequence: Synthetic oligonucleotide
aacaucaguuuaaugauga

SEQ ID NO: 1075749 - RNA, 19 nt, Artificial Sequence
  Description of Artificial Sequence: Synthetic oligonucleotide
cuagacauuaauugagaug

SEQ ID NO: 1075750 - RNA, 19 nt, Artificial Sequence
  Description of Artificial Sequence: Synthetic oligonucleotide
acagaucucauuaucacag

SEQ ID NO: 1075751 - RNA, 19 nt, Artificial Sequence
  Description of Artificial Sequence: Synthetic oligonucleotide
uuaaugaugacuagcccua

SEQ ID NO: 1075752 - RNA, 19 nt, Artificial Sequence
  Description of Artificial Sequence: Synthetic oligonucleotide
ucuccuacuaggaacugug

SEQ ID NO: 1075753 - RNA, 19 nt, Artificial Sequence
  Description of Artificial Sequence: Synthetic oligonucleotide
uuaguuacccuucuuuguc

SEQ ID NO: 1075754 - RNA, 19 nt, Artificial Sequence
  Description of Artificial Sequence: Synthetic oligonucleotide
uuagucuaagaaagaaaac

SEQ ID NO: 1075755 - RNA, 19 nt, Artificial Sequence
  Description of Artificial Sequence: Synthetic oligonucleotide
aaaagggauacgcaugcau

SEQ ID NO: 1075756 - RNA, 19 nt, Artificial Sequence
  Description of Artificial Sequence: Synthetic oligonucleotide
ucaggggucuccuacuagg

SEQ ID NO: 1075757 - RNA, 19 nt, Artificial Sequence
  Description of Artificial Sequence: Synthetic oligonucleotide
auuguuugguccauuuccc

SEQ ID NO: 1075758 - RNA, 19 nt, Artificial Sequence
  Description of Artificial Sequence: Synthetic oligonucleotide
cugucauacaacuuugcac

SEQ ID NO: 1075759 - RNA, 19 nt, Artificial Sequence
  Description of Artificial Sequence: Synthetic oligonucleotide
ugcaauuacaaaagggaua

SEQ ID NO: 1075760 - RNA, 19 nt, Artificial Sequence
  Description of Artificial Sequence: Synthetic oligonucleotide
acugcgaccucugacagcg

SEQ ID NO: 1075761 - RNA, 19 nt, Artificial Sequence
  Description of Artificial Sequence: Synthetic oligonucleotide
ucagcauacacugcgaccu

SEQ ID NO: 1075762 - RNA, 19 nt, Artificial Sequence
  Description of Artificial Sequence: Synthetic oligonucleotide
aaaucgaugccuaaguuuu

SEQ ID NO: 1075763 - RNA, 19 nt, Artificial Sequence
  Description of Artificial Sequence: Synthetic oligonucleotide
aaugcgcgcgcacuggguc

SEQ ID NO: 1075764 - RNA, 19 nt, Artificial Sequence
  Description of Artificial Sequence: Synthetic oligonucleotide
agaauaugucagaagaaag

SEQ ID NO: 1075765 - RNA, 19 nt, Artificial Sequence
  Description of Artificial Sequence: Synthetic oligonucleotide
acgaccaacggcuucauga

SEQ ID NO: 1075766 - RNA, 19 nt, Artificial Sequence
  Description of Artificial Sequence: Synthetic oligonucleotide
caagaacuagcugauaccc

SEQ ID NO: 1075767 - RNA, 19 nt, Artificial Sequence
  Description of Artificial Sequence: Synthetic oligonucleotide
caauaaucgguuuuguuga

SEQ ID NO: 1075768 - RNA, 19 nt, Artificial Sequence
  Description of Artificial Sequence: Synthetic oligonucleotide
aagauuaaaauugccuuaa

SEQ ID NO: 1075769 - RNA, 19 nt, Artificial Sequence
  Description of Artificial Sequence: Synthetic oligonucleotide
aacagaaaauggucaguca

SEQ ID NO: 1075770 - RNA, 19 nt, Artificial Sequence
  Description of Artificial Sequence: Synthetic oligonucleotide
acauaauuugucuuacuau

SEQ ID NO: 1075771 - RNA, 19 nt, Artificial Sequence
  Description of Artificial Sequence: Synthetic oligonucleotide
uaacaucaguuuaaugaug

SEQ ID NO: 1075772 - RNA, 19 nt, Artificial Sequence
  Description of Artificial Sequence: Synthetic oligonucleotide
uguaacaaaucgaugccua

SEQ ID NO: 1075773 - RNA, 19 nt, Artificial Sequence
  Description of Artificial Sequence: Synthetic oligonucleotide
augacuagcccuaugucac

SEQ ID NO: 1075774 - RNA, 19 nt, Artificial Sequence
  Description of Artificial Sequence: Synthetic oligonucleotide
aaagggauacgcaugcaug

SEQ ID NO: 1075775 - RNA, 19 nt, Artificial Sequence
  Description of Artificial Sequence: Synthetic oligonucleotide
augaugacuagcccuaugu

SEQ ID NO: 1075776 - RNA, 19 nt, Artificial Sequence
  Description of Artificial Sequence: Synthetic oligonucleotide
uacacugcgaccucugaca

SEQ ID NO: 1075777 - RNA, 19 nt, Artificial Sequence
  Description of Artificial Sequence: Synthetic oligonucleotide
uacaaacaagaacuagcug

SEQ ID NO: 1075778 - RNA, 19 nt, Artificial Sequence
  Description of Artificial Sequence: Synthetic oligonucleotide
uugucuuacuauauauuuc

SEQ ID NO: 1075779 - RNA, 19 nt, Artificial Sequence
  Description of Artificial Sequence: Synthetic oligonucleotide
aaguguuauuaaaacaaga

SEQ ID NO: 1075780 - RNA, 19 nt, Artificial Sequence
  Description of Artificial Sequence: Synthetic oligonucleotide
uacuagaacauugcuagga

SEQ ID NO: 1075781 - RNA, 19 nt, Artificial Sequence
  Description of Artificial Sequence: Synthetic oligonucleotide
uccgccuucccauccaugg

SEQ ID NO: 1075782 - RNA, 19 nt, Artificial Sequence
  Description of Artificial Sequence: Synthetic oligonucleotide
aguguuauuaaaacaagaa

SEQ ID NO: 1075783 - RNA, 19 nt, Artificial Sequence
  Description of Artificial Sequence: Synthetic oligonucleotide
acaacuuugcacaagcugu

SEQ ID NO: 1075784 - RNA, 19 nt, Artificial Sequence
  Description of Artificial Sequence: Synthetic oligonucleotide
aaauacuagaacauugcua

SEQ ID NO: 1075785 - RNA, 19 nt, Artificial Sequence
  Description of Artificial Sequence: Synthetic oligonucleotide
aacggcuucaugagguggc

SEQ ID NO: 1075786 - RNA, 19 nt, Artificial Sequence
  Description of Artificial Sequence: Synthetic oligonucleotide
uucaagacaucguucaaua

SEQ ID NO: 1075787 - RNA, 19 nt, Artificial Sequence
  Description of Artificial Sequence: Synthetic oligonucleotide
cauaauuugucuuacuaua

SEQ ID NO: 1075788 - RNA, 19 nt, Artificial Sequence
  Description of Artificial Sequence: Synthetic oligonucleotide
uucaccauacugugaaucu

SEQ ID NO: 1075789 - RNA, 19 nt, Artificial Sequence
  Description of Artificial Sequence: Synthetic oligonucleotide
uaucucaacuggcacaauc

SEQ ID NO: 1075790 - RNA, 19 nt, Artificial Sequence
  Description of Artificial Sequence: Synthetic oligonucleotide
aaugaugacuagcccuaug

SEQ ID NO: 1075791 - RNA, 19 nt, Artificial Sequence
  Description of Artificial Sequence: Synthetic oligonucleotide
ugacaauccugucaggcuc

SEQ ID NO: 1075792 - RNA, 19 nt, Artificial Sequence
  Description of Artificial Sequence: Synthetic oligonucleotide
guuuaaugaugacuagccc

SEQ ID NO: 1075793 - RNA, 19 nt, Artificial Sequence
  Description of Artificial Sequence: Synthetic oligonucleotide
ucaugagguggccaggaca

SEQ ID NO: 1075794 - RNA, 19 nt, Artificial Sequence
  Description of Artificial Sequence: Synthetic oligonucleotide
uaacaaaucgaugccuaag

SEQ ID NO: 1075795 - RNA, 19 nt, Artificial Sequence
  Description of Artificial Sequence: Synthetic oligonucleotide
uguugacugaagauaaguu

SEQ ID NO: 1075796 - RNA, 19 nt, Artificial Sequence
  Description of Artificial Sequence: Synthetic oligonucleotide
cauuuugugagcaccauaa

SEQ ID NO: 1075797 - RNA, 19 nt, Artificial Sequence
  Description of Artificial Sequence: Synthetic oligonucleotide
aauugagauguaauuuuga

SEQ ID NO: 1075798 - RNA, 19 nt, Artificial Sequence
  Description of Artificial Sequence: Synthetic oligonucleotide
aaccuugagagcaaagacu

SEQ ID NO: 1075799 - RNA, 19 nt, Artificial Sequence
  Description of Artificial Sequence: Synthetic oligonucleotide
cugaagauaaguuugaauu

SEQ ID NO: 1075800 - RNA, 19 nt, Artificial Sequence
  Description of Artificial Sequence: Synthetic oligonucleotide
gaugguuaucucaacuggc

SEQ ID NO: 1075801 - RNA, 19 nt, Artificial Sequence
  Description of Artificial Sequence: Synthetic oligonucleotide
caucguucaauacagaucu

SEQ ID NO: 1075802 - RNA, 19 nt, Artificial Sequence
  Description of Artificial Sequence: Synthetic oligonucleotide
accgggcccacccaaaacg

SEQ ID NO: 1075803 - RNA, 19 nt, Artificial Sequence
  Description of Artificial Sequence: Synthetic oligonucleotide
uuguugacugaagauaagu

SEQ ID NO: 1075804 - RNA, 19 nt, Artificial Sequence
  Description of Artificial Sequence: Synthetic oligonucleotide
ucguucaauacagaucuca

SEQ ID NO: 1075805 - RNA, 19 nt, Artificial Sequence
  Description of Artificial Sequence: Synthetic oligonucleotide
cauuaacauaaacuagcac

SEQ ID NO: 1075806 - RNA, 19 nt, Artificial Sequence
  Description of Artificial Sequence: Synthetic oligonucleotide
uacuuaacaggcugaaaau

SEQ ID NO: 1075807 - RNA, 19 nt, Artificial Sequence
  Description of Artificial Sequence: Synthetic oligonucleotide
ucaauaaguucaccauacu

SEQ ID NO: 1075808 - RNA, 19 nt, Artificial Sequence
  Description of Artificial Sequence: Synthetic oligonucleotide
uggucuuguuccaaccuug

SEQ ID NO: 1075809 - RNA, 19 nt, Artificial Sequence
  Description of Artificial Sequence: Synthetic oligonucleotide
guugacuagacauaaaguu

SEQ ID NO: 1075810 - RNA, 19 nt, Artificial Sequence
  Description of Artificial Sequence: Synthetic oligonucleotide
auuacaaaagggauacgca

SEQ ID NO: 1075811 - RNA, 19 nt, Artificial Sequence
  Description of Artificial Sequence: Synthetic oligonucleotide
ucuucguaacuucaccaaa

SEQ ID NO: 1075812 - RNA, 19 nt, Artificial Sequence
  Description of Artificial Sequence: Synthetic oligonucleotide
cuagcccuaugucacagag

SEQ ID NO: 1075813 - RNA, 19 nt, Artificial Sequence
  Description of Artificial Sequence: Synthetic oligonucleotide
gcaauuacaaaagggauac

SEQ ID NO: 1075814 - RNA, 19 nt, Artificial Sequence
  Description of Artificial Sequence: Synthetic oligonucleotide
caguuuaaugaugacuagc

SEQ ID NO: 1075815 - RNA, 19 nt, Artificial Sequence
  Description of Artificial Sequence: Synthetic oligonucleotide
caagaacugaaacacauua

SEQ ID NO: 1075816 - RNA, 19 nt, Artificial Sequence
  Description of Artificial Sequence: Synthetic oligonucleotide
auuucucgacaaugcgcgc

SEQ ID NO: 1075817 - RNA, 19 nt, Artificial Sequence
  Description of Artificial Sequence: Synthetic oligonucleotide
ucaauacagaucucauuau

SEQ ID NO: 1075818 - RNA, 19 nt, Artificial Sequence
  Description of Artificial Sequence: Synthetic oligonucleotide
auuucccucuuuaguaagc

SEQ ID NO: 1075819 - RNA, 19 nt, Artificial Sequence
  Description of Artificial Sequence: Synthetic oligonucleotide
uuaguaagcugaugguuau

SEQ ID NO: 1075820 - RNA, 19 nt, Artificial Sequence
  Description of Artificial Sequence: Synthetic oligonucleotide
gagauguaauuuugaaaga

SEQ ID NO: 1075821 - RNA, 19 nt, Artificial Sequence
  Description of Artificial Sequence: Synthetic oligonucleotide
ucgguuuuguugacugaag

SEQ ID NO: 1075822 - RNA, 19 nt, Artificial Sequence
  Description of Artificial Sequence: Synthetic oligonucleotide
ugguuaucucaacuggcac

SEQ ID NO: 1075823 - RNA, 19 nt, Artificial Sequence
  Description of Artificial Sequence: Synthetic oligonucleotide
ugauaaauacuagaacauu

SEQ ID NO: 1075824 - RNA, 19 nt, Artificial Sequence
  Description of Artificial Sequence: Synthetic oligonucleotide
ugaccaaagugcaaugauu

SEQ ID NO: 1075825 - RNA, 19 nt, Artificial Sequence
  Description of Artificial Sequence: Synthetic oligonucleotide
gguuaguuacccuucuuug

SEQ ID NO: 1075826 - RNA, 19 nt, Artificial Sequence
  Description of Artificial Sequence: Synthetic oligonucleotide
gggaauuuuaaccacuaga

SEQ ID NO: 1075827 - RNA, 19 nt, Artificial Sequence
  Description of Artificial Sequence: Synthetic oligonucleotide
cuagcugauacccucuuca

SEQ ID NO: 1075828 - RNA, 19 nt, Artificial Sequence
  Description of Artificial Sequence: Synthetic oligonucleotide
ugauacccucuucauuuug

SEQ ID NO: 1075829 - RNA, 19 nt, Artificial Sequence
  Description of Artificial Sequence: Synthetic oligonucleotide
agacugugcccugucauac

SEQ ID NO: 1075830 - RNA, 19 nt, Artificial Sequence
  Description of Artificial Sequence: Synthetic oligonucleotide
ucaagacaucguucaauac

SEQ ID NO: 1075831 - RNA, 19 nt, Artificial Sequence
  Description of Artificial Sequence: Synthetic oligonucleotide
uucucgacaaugcgcgcgc

SEQ ID NO: 1075832 - RNA, 19 nt, Artificial Sequence
  Description of Artificial Sequence: Synthetic oligonucleotide
cuucugagcauuggcagcc

SEQ ID NO: 1075833 - RNA, 19 nt, Artificial Sequence
  Description of Artificial Sequence: Synthetic oligonucleotide
aaucgguuuuguugacuga

SEQ ID NO: 1075834 - RNA, 19 nt, Artificial Sequence
  Description of Artificial Sequence: Synthetic oligonucleotide
aacauugcuaggaauccau

SEQ ID NO: 1075835 - RNA, 19 nt, Artificial Sequence
  Description of Artificial Sequence: Synthetic oligonucleotide
uuucaagacaucguucaau

SEQ ID NO: 1075836 - RNA, 19 nt, Artificial Sequence
  Description of Artificial Sequence: Synthetic oligonucleotide
gagcauaggaacacaaguc

SEQ ID NO: 1075837 - RNA, 19 nt, Artificial Sequence
  Description of Artificial Sequence: Synthetic oligonucleotide
uuacccuucuuugucaaaa

SEQ ID NO: 1075838 - RNA, 19 nt, Artificial Sequence
  Description of Artificial Sequence: Synthetic oligonucleotide
acuagcugauacccucuuc

SEQ ID NO: 1075839 - RNA, 19 nt, Artificial Sequence
  Description of Artificial Sequence: Synthetic oligonucleotide
aguugacuagacauaaagu

SEQ ID NO: 1075840 - RNA, 19 nt, Artificial Sequence
  Description of Artificial Sequence: Synthetic oligonucleotide
agacccuugccccacagaa

SEQ ID NO: 1075841 - RNA, 19 nt, Artificial Sequence
  Description of Artificial Sequence: Synthetic oligonucleotide
uccccugacccaaaccuug

SEQ ID NO: 1075842 - RNA, 19 nt, Artificial Sequence
  Description of Artificial Sequence: Synthetic oligonucleotide
augccuaaguuuuaacuuu

SEQ ID NO: 1075843 - RNA, 19 nt, Artificial Sequence
  Description of Artificial Sequence: Synthetic oligonucleotide
aaacuagcacgugcguguc

SEQ ID NO: 1075844 - RNA, 19 nt, Artificial Sequence
  Description of Artificial Sequence: Synthetic oligonucleotide
cagaaagguguguguagcc

SEQ ID NO: 1075845 - RNA, 19 nt, Artificial Sequence
  Description of Artificial Sequence: Synthetic oligonucleotide
auaugucagaagaaagcug

SEQ ID NO: 1075846 - RNA, 19 nt, Artificial Sequence
  Description of Artificial Sequence: Synthetic oligonucleotide
cauacugugaaucuggauu

SEQ ID NO: 1075847 - RNA, 19 nt, Artificial Sequence
  Description of Artificial Sequence: Synthetic oligonucleotide
acuagcacgugcgugucag

SEQ ID NO: 1075848 - RNA, 19 nt, Artificial Sequence
  Description of Artificial Sequence: Synthetic oligonucleotide
aucuucguaacuucaccaa

SEQ ID NO: 1075849 - RNA, 19 nt, Artificial Sequence
  Description of Artificial Sequence: Synthetic oligonucleotide
auaggaacacaagucauua

SEQ ID NO: 1075850 - RNA, 19 nt, Artificial Sequence
  Description of Artificial Sequence: Synthetic oligonucleotide
acaaugcgcgcgcacuggg

SEQ ID NO: 1075851 - RNA, 19 nt, Artificial Sequence
  Description of Artificial Sequence: Synthetic oligonucleotide
uaauaccaaagaugauuaa

SEQ ID NO: 1075852 - RNA, 19 nt, Artificial Sequence
  Description of Artificial Sequence: Synthetic oligonucleotide
uaacauaaacuagcacgug

SEQ ID NO: 1075853 - RNA, 19 nt, Artificial Sequence
  Description of Artificial Sequence: Synthetic oligonucleotide
ccacagauuuacuuaacag

SEQ ID NO: 1075854 - RNA, 19 nt, Artificial Sequence
  Description of Artificial Sequence: Synthetic oligonucleotide
ugcgaccucugacagcggc

SEQ ID NO: 1075855 - RNA, 19 nt, Artificial Sequence
  Description of Artificial Sequence: Synthetic oligonucleotide
aaaagggauaaaaggggua

SEQ ID NO: 1075856 - RNA, 19 nt, Artificial Sequence
  Description of Artificial Sequence: Synthetic oligonucleotide
gaccaacggcuucaugagg

SEQ ID NO: 1075857 - RNA, 19 nt, Artificial Sequence
  Description of Artificial Sequence: Synthetic oligonucleotide
aagacugugcccugucaua

SEQ ID NO: 1075858 - RNA, 19 nt, Artificial Sequence
  Description of Artificial Sequence: Synthetic oligonucleotide
ucaccauacugugaaucug

SEQ ID NO: 1075859 - RNA, 19 nt, Artificial Sequence
  Description of Artificial Sequence: Synthetic oligonucleotide
agauaaguuugaauucucu

SEQ ID NO: 1075860 - RNA, 19 nt, Artificial Sequence
  Description of Artificial Sequence: Synthetic oligonucleotide
acaagcuguaacaaaucga

SEQ ID NO: 1075861 - RNA, 19 nt, Artificial Sequence
  Description of Artificial Sequence: Synthetic oligonucleotide
uacccucuucauuuuguga

SEQ ID NO: 1075862 - RNA, 19 nt, Artificial Sequence
  Description of Artificial Sequence: Synthetic oligonucleotide
uuguuugguccauuucccu

SEQ ID NO: 1075863 - RNA, 19 nt, Artificial Sequence
  Description of Artificial Sequence: Synthetic oligonucleotide
ugguccauuucccucuuua

SEQ ID NO: 1075864 - RNA, 19 nt, Artificial Sequence
  Description of Artificial Sequence: Synthetic oligonucleotide
aucucaacuggcacaaucu

SEQ ID NO: 1075865 - RNA, 19 nt, Artificial Sequence
  Description of Artificial Sequence: Synthetic oligonucleotide
ucucaacuggcacaaucuu

SEQ ID NO: 1075866 - RNA, 19 nt, Artificial Sequence
  Description of Artificial Sequence: Synthetic oligonucleotide
cccaaaacgaacacgacca

SEQ ID NO: 1075867 - RNA, 19 nt, Artificial Sequence
  Description of Artificial Sequence: Synthetic oligonucleotide
agcacgugcgugucagggg

SEQ ID NO: 1075868 - RNA, 19 nt, Artificial Sequence
  Description of Artificial Sequence: Synthetic oligonucleotide
cauaauaccaaagaugauu

SEQ ID NO: 1075869 - RNA, 19 nt, Artificial Sequence
  Description of Artificial Sequence: Synthetic oligonucleotide
uuuacuuaacaggcugaaa

SEQ ID NO: 1075870 - RNA, 19 nt, Artificial Sequence
  Description of Artificial Sequence: Synthetic oligonucleotide
guugacugaagauaaguuu

SEQ ID NO: 1075871 - RNA, 19 nt, Artificial Sequence
  Description of Artificial Sequence: Synthetic oligonucleotide
caaaacgaacacgaccaac

SEQ ID NO: 1075872 - RNA, 19 nt, Artificial Sequence
  Description of Artificial Sequence: Synthetic oligonucleotide
aagaacuagcugauacccu

SEQ ID NO: 1075873 - RNA, 19 nt, Artificial Sequence
  Description of Artificial Sequence: Synthetic oligonucleotide
aucagcggcgggaagcucg

SEQ ID NO: 1075874 - RNA, 19 nt, Artificial Sequence
  Description of Artificial Sequence: Synthetic oligonucleotide
ucagcggcgggaagcucgg

SEQ ID NO: 1075875 - RNA, 19 nt, Artificial Sequence
  Description of Artificial Sequence: Synthetic oligonucleotide
cuucguaacuucaccaaaa

SEQ ID NO: 1075876 - RNA, 19 nt, Artificial Sequence
  Description of Artificial Sequence: Synthetic oligonucleotide
agauuaaaauugccuuaaa

SEQ ID NO: 1075877 - RNA, 19 nt, Artificial Sequence
  Description of Artificial Sequence: Synthetic oligonucleotide
augcgcgcgcacugggucc

SEQ ID NO: 1075878 - RNA, 19 nt, Artificial Sequence
  Description of Artificial Sequence: Synthetic oligonucleotide
gacaaugcgcgcgcacugg

SEQ ID NO: 1075879 - RNA, 19 nt, Artificial Sequence
  Description of Artificial Sequence: Synthetic oligonucleotide
guuaguuacccuucuuugu

SEQ ID NO: 1075880 - RNA, 19 nt, Artificial Sequence
  Description of Artificial Sequence: Synthetic oligonucleotide
gcuaggaauccauuuuaug

SEQ ID NO: 1075881 - RNA, 19 nt, Artificial Sequence
  Description of Artificial Sequence: Synthetic oligonucleotide
accaacggcuucaugaggu

SEQ ID NO: 1075882 - RNA, 19 nt, Artificial Sequence
  Description of Artificial Sequence: Synthetic oligonucleotide
gacuagcccuaugucacag

SEQ ID NO: 1075883 - RNA, 19 nt, Artificial Sequence
  Description of Artificial Sequence: Synthetic oligonucleotide
uagcccuaugucacagagc

SEQ ID NO: 1075884 - RNA, 19 nt, Artificial Sequence
  Description of Artificial Sequence: Synthetic oligonucleotide
auccuaacacauugcaauu

SEQ ID NO: 1075885 - RNA, 19 nt, Artificial Sequence
  Description of Artificial Sequence: Synthetic oligonucleotide
ucgaugccuaaguuuuaac

SEQ ID NO: 1075886 - RNA, 19 nt, Artificial Sequence
  Description of Artificial Sequence: Synthetic oligonucleotide
auaaucgguuuuguugacu

SEQ ID NO: 1075887 - RNA, 19 nt, Artificial Sequence
  Description of Artificial Sequence: Synthetic oligonucleotide
aacuagcugauacccucuu

SEQ ID NO: 1075888 - RNA, 19 nt, Artificial Sequence
  Description of Artificial Sequence: Synthetic oligonucleotide
augucagaagaaagcugac

SEQ ID NO: 1075889 - RNA, 19 nt, Artificial Sequence
  Description of Artificial Sequence: Synthetic oligonucleotide
aucgguuuuguugacugaa

SEQ ID NO: 1075890 - RNA, 19 nt, Artificial Sequence
  Description of Artificial Sequence: Synthetic oligonucleotide
guaacaaaucgaugccuaa

SEQ ID NO: 1075891 - RNA, 19 nt, Artificial Sequence
  Description of Artificial Sequence: Synthetic oligonucleotide
ucgacaaugcgcgcgcacu

SEQ ID NO: 1075892 - RNA, 19 nt, Artificial Sequence
  Description of Artificial Sequence: Synthetic oligonucleotide
auggucuuguuccaaccuu

SEQ ID NO: 1075893 - RNA, 19 nt, Artificial Sequence
  Description of Artificial Sequence: Synthetic oligonucleotide
agccggcgacaacagcugc

SEQ ID NO: 1075894 - RNA, 19 nt, Artificial Sequence
  Description of Artificial Sequence: Synthetic oligonucleotide
aacuagcacgugcguguca

SEQ ID NO: 1075895 - RNA, 19 nt, Artificial Sequence
  Description of Artificial Sequence: Synthetic oligonucleotide
caacggcuucaugaggugg

SEQ ID NO: 1075896 - RNA, 19 nt, Artificial Sequence
  Description of Artificial Sequence: Synthetic oligonucleotide
cuacuaggaacuguguuaa

SEQ ID NO: 1075897 - RNA, 19 nt, Artificial Sequence
  Description of Artificial Sequence: Synthetic oligonucleotide
ugacuagcccuaugucaca

SEQ ID NO: 1075898 - RNA, 19 nt, Artificial Sequence
  Description of Artificial Sequence: Synthetic oligonucleotide
uggcacaaucuuuccuucu

SEQ ID NO: 1075899 - RNA, 19 nt, Artificial Sequence
  Description of Artificial Sequence: Synthetic oligonucleotide
ggcgacaacagcugcucag

SEQ ID NO: 1075900 - RNA, 19 nt, Artificial Sequence
  Description of Artificial Sequence: Synthetic oligonucleotide
gaacauugcuaggaaucca

SEQ ID NO: 1075901 - RNA, 19 nt, Artificial Sequence
  Description of Artificial Sequence: Synthetic oligonucleotide
acggcuucaugagguggcc

SEQ ID NO: 1075902 - RNA, 19 nt, Artificial Sequence
  Description of Artificial Sequence: Synthetic oligonucleotide
ucaucacgaagaagcucuc

SEQ ID NO: 1075903 - RNA, 19 nt, Artificial Sequence
  Description of Artificial Sequence: Synthetic oligonucleotide
uugccccacagaauauguc

SEQ ID NO: 1075904 - RNA, 19 nt, Artificial Sequence
  Description of Artificial Sequence: Synthetic oligonucleotide
ggauaaaagggguaguuuu

SEQ ID NO: 1075905 - RNA, 19 nt, Artificial Sequence
  Description of Artificial Sequence: Synthetic oligonucleotide
uagacccuugccccacaga

SEQ ID NO: 1075906 - RNA, 19 nt, Artificial Sequence
  Description of Artificial Sequence: Synthetic oligonucleotide
gucaggggucuccuacuag

SEQ ID NO: 1075907 - RNA, 19 nt, Artificial Sequence
  Description of Artificial Sequence: Synthetic oligonucleotide
caaaucgaugccuaaguuu

SEQ ID NO: 1075908 - RNA, 19 nt, Artificial Sequence
  Description of Artificial Sequence: Synthetic oligonucleotide
ucugagcauuggcagccau

SEQ ID NO: 1075909 - RNA, 19 nt, Artificial Sequence
  Description of Artificial Sequence: Synthetic oligonucleotide
aucgaugccuaaguuuuaa

SEQ ID NO: 1075910 - RNA, 19 nt, Artificial Sequence
  Description of Artificial Sequence: Synthetic oligonucleotide
acuagcccuaugucacaga

SEQ ID NO: 1075911 - RNA, 19 nt, Artificial Sequence
  Description of Artificial Sequence: Synthetic oligonucleotide
cuagcacgugcgugucagg

SEQ ID NO: 1075912 - RNA, 19 nt, Artificial Sequence
  Description of Artificial Sequence: Synthetic oligonucleotide
gauacgcaugcaugcuaaa

SEQ ID NO: 1075913 - RNA, 19 nt, Artificial Sequence
  Description of Artificial Sequence: Synthetic oligonucleotide
ggaagaauucccaaauccu

SEQ ID NO: 1075914 - RNA, 19 nt, Artificial Sequence
  Description of Artificial Sequence: Synthetic oligonucleotide
cucgggaccaggacgugca

SEQ ID NO: 1075915 - RNA, 19 nt, Artificial Sequence
  Description of Artificial Sequence: Synthetic oligonucleotide
agggauacgcaugcaugcu

SEQ ID NO: 1075916 - RNA, 19 nt, Artificial Sequence
  Description of Artificial Sequence: Synthetic oligonucleotide
augggaauuuuaaccacua

SEQ ID NO: 1075917 - RNA, 19 nt, Artificial Sequence
  Description of Artificial Sequence: Synthetic oligonucleotide
acuagacauaaaguuccuu

SEQ ID NO: 1075918 - RNA, 19 nt, Artificial Sequence
  Description of Artificial Sequence: Synthetic oligonucleotide
cagauuuacuuaacaggcu

SEQ ID NO: 1075919 - RNA, 19 nt, Artificial Sequence
  Description of Artificial Sequence: Synthetic oligonucleotide
gugaaucuggauucuuccu

SEQ ID NO: 1075920 - RNA, 19 nt, Artificial Sequence
  Description of Artificial Sequence: Synthetic oligonucleotide
uaaugaugacuagcccuau

SEQ ID NO: 1075921 - RNA, 19 nt, Artificial Sequence
  Description of Artificial Sequence: Synthetic oligonucleotide
ccuacuaggaacuguguua

SEQ ID NO: 1075922 - RNA, 19 nt, Artificial Sequence
  Description of Artificial Sequence: Synthetic oligonucleotide
cuagaacauugcuaggaau

SEQ ID NO: 1075923 - RNA, 19 nt, Artificial Sequence
  Description of Artificial Sequence: Synthetic oligonucleotide
cucgacaaugcgcgcgcac

SEQ ID NO: 1075924 - RNA, 19 nt, Artificial Sequence
  Description of Artificial Sequence: Synthetic oligonucleotide
caacuuugcacaagcugua

SEQ ID NO: 1075925 - RNA, 19 nt, Artificial Sequence
  Description of Artificial Sequence: Synthetic oligonucleotide
gacugugcccugucauaca

SEQ ID NO: 1075926 - RNA, 19 nt, Artificial Sequence
  Description of Artificial Sequence: Synthetic oligonucleotide
gaagucccuguccccugac

SEQ ID NO: 1075927 - RNA, 19 nt, Artificial Sequence
  Description of Artificial Sequence: Synthetic oligonucleotide
aucguucaauacagaucuc

SEQ ID NO: 1075928 - RNA, 19 nt, Artificial Sequence
  Description of Artificial Sequence: Synthetic oligonucleotide
cacugcgaccucugacagc

SEQ ID NO: 1075929 - RNA, 19 nt, Artificial Sequence
  Description of Artificial Sequence: Synthetic oligonucleotide
cuugccccacagaauaugu

SEQ ID NO: 1075930 - RNA, 19 nt, Artificial Sequence
  Description of Artificial Sequence: Synthetic oligonucleotide
aaucgaugccuaaguuuua

SEQ ID NO: 1075931 - RNA, 19 nt, Artificial Sequence
  Description of Artificial Sequence: Synthetic oligonucleotide
ggaagcucgggaccaggac

SEQ ID NO: 1075932 - RNA, 19 nt, Artificial Sequence
  Description of Artificial Sequence: Synthetic oligonucleotide
ccugucauacaacuuugca

SEQ ID NO: 1075933 - RNA, 19 nt, Artificial Sequence
  Description of Artificial Sequence: Synthetic oligonucleotide
aggguuaguuacccuucuu

SEQ ID NO: 1075934 - RNA, 19 nt, Artificial Sequence
  Description of Artificial Sequence: Synthetic oligonucleotide
cauggucuuguuccaaccu

SEQ ID NO: 1075935 - RNA, 19 nt, Artificial Sequence
  Description of Artificial Sequence: Synthetic oligonucleotide
acggaucagcggcgggaag

SEQ ID NO: 1075936 - RNA, 19 nt, Artificial Sequence
  Description of Artificial Sequence: Synthetic oligonucleotide
guuacccuucuuugucaaa

SEQ ID NO: 1075937 - RNA, 19 nt, Artificial Sequence
  Description of Artificial Sequence: Synthetic oligonucleotide
ccugucaggcucugaaguc

SEQ ID NO: 1075938 - RNA, 19 nt, Artificial Sequence
  Description of Artificial Sequence: Synthetic oligonucleotide
cuguaacaaaucgaugccu

SEQ ID NO: 1075939 - RNA, 19 nt, Artificial Sequence
  Description of Artificial Sequence: Synthetic oligonucleotide
gcaccauaauaccaaagau

SEQ ID NO: 1075940 - RNA, 19 nt, Artificial Sequence
  Description of Artificial Sequence: Synthetic oligonucleotide
gaacuagcugauacccucu

SEQ ID NO: 1075941 - RNA, 19 nt, Artificial Sequence
  Description of Artificial Sequence: Synthetic oligonucleotide
agaguugacuagacauaaa

SEQ ID NO: 1075942 - RNA, 19 nt, Artificial Sequence
  Description of Artificial Sequence: Synthetic oligonucleotide
cagcagccggcgacaacag

SEQ ID NO: 1075943 - RNA, 19 nt, Artificial Sequence
  Description of Artificial Sequence: Synthetic oligonucleotide
gacaauccugucaggcucu

SEQ ID NO: 1075944 - RNA, 19 nt, Artificial Sequence
  Description of Artificial Sequence: Synthetic oligonucleotide
cccugucauacaacuuugc

SEQ ID NO: 1075945 - RNA, 19 nt, Artificial Sequence
  Description of Artificial Sequence: Synthetic oligonucleotide
ggauacgcaugcaugcuaa

SEQ ID NO: 1075946 - RNA, 19 nt, Artificial Sequence
  Description of Artificial Sequence: Synthetic oligonucleotide
agacaucguucaauacaga

SEQ ID NO: 1075947 - RNA, 19 nt, Artificial Sequence
  Description of Artificial Sequence: Synthetic oligonucleotide
acauugcuaggaauccauu

SEQ ID NO: 1075948 - RNA, 19 nt, Artificial Sequence
  Description of Artificial Sequence: Synthetic oligonucleotide
cgugucaggggucuccuac

SEQ ID NO: 1075949 - RNA, 19 nt, Artificial Sequence
  Description of Artificial Sequence: Synthetic oligonucleotide
ucucgacaaugcgcgcgca

SEQ ID NO: 1075950 - RNA, 19 nt, Artificial Sequence
  Description of Artificial Sequence: Synthetic oligonucleotide
agguguguguagccauauu

SEQ ID NO: 1075951 - RNA, 19 nt, Artificial Sequence
  Description of Artificial Sequence: Synthetic oligonucleotide
caccgggcccacccaaaac

SEQ ID NO: 1075952 - RNA, 19 nt, Artificial Sequence
  Description of Artificial Sequence: Synthetic oligonucleotide
acgugcgugucaggggucu

SEQ ID NO: 1075953 - RNA, 19 nt, Artificial Sequence
  Description of Artificial Sequence: Synthetic oligonucleotide
gcaggccacggaucagcgg

SEQ ID NO: 1075954 - RNA, 19 nt, Artificial Sequence
  Description of Artificial Sequence: Synthetic oligonucleotide
ggguuaguuacccuucuuu

SEQ ID NO: 1075955 - RNA, 19 nt, Artificial Sequence
  Description of Artificial Sequence: Synthetic oligonucleotide
cagcauacacugcgaccuc

SEQ ID NO: 1075956 - RNA, 19 nt, Artificial Sequence
  Description of Artificial Sequence: Synthetic oligonucleotide
uccaaccuugaagguuauc

SEQ ID NO: 1075957 - RNA, 19 nt, Artificial Sequence
  Description of Artificial Sequence: Synthetic oligonucleotide
ccugacccaaaccuugaga

SEQ ID NO: 1075958 - RNA, 19 nt, Artificial Sequence
  Description of Artificial Sequence: Synthetic oligonucleotide
gcccugucauacaacuuug

SEQ ID NO: 1075959 - RNA, 19 nt, Artificial Sequence
  Description of Artificial Sequence: Synthetic oligonucleotide
cacgaccaacggcuucaug

SEQ ID NO: 1075960 - RNA, 19 nt, Artificial Sequence
  Description of Artificial Sequence: Synthetic oligonucleotide
ggucagucauuugauaaau

SEQ ID NO: 1075961 - RNA, 19 nt, Artificial Sequence
  Description of Artificial Sequence: Synthetic oligonucleotide
gggauacgcaugcaugcua

SEQ ID NO: 1075962 - RNA, 19 nt, Artificial Sequence
  Description of Artificial Sequence: Synthetic oligonucleotide
gggcccacccaaaacgaac

SEQ ID NO: 1075963 - RNA, 19 nt, Artificial Sequence
  Description of Artificial Sequence: Synthetic oligonucleotide
cacgugcgugucagggguc

SEQ ID NO: 1075964 - RNA, 19 nt, Artificial Sequence
  Description of Artificial Sequence: Synthetic oligonucleotide
cagcuaucaaagcaauauu

SEQ ID NO: 1075965 - RNA, 19 nt, Artificial Sequence
  Description of Artificial Sequence: Synthetic oligonucleotide
ccuugccccacagaauaug

SEQ ID NO: 1075966 - RNA, 19 nt, Artificial Sequence
  Description of Artificial Sequence: Synthetic oligonucleotide
cugcgaccucugacagcgg

SEQ ID NO: 1075967 - RNA, 19 nt, Artificial Sequence
  Description of Artificial Sequence: Synthetic oligonucleotide
cgaugccuaaguuuuaacu

SEQ ID NO: 1075968 - RNA, 19 nt, Artificial Sequence
  Description of Artificial Sequence: Synthetic oligonucleotide
cgaccucugacagcggccg

SEQ ID NO: 1075969 - RNA, 19 nt, Artificial Sequence
  Description of Artificial Sequence: Synthetic oligonucleotide
gccuaaguuuuaacuuuca

SEQ ID NO: 1075970 - RNA, 19 nt, Artificial Sequence
  Description of Artificial Sequence: Synthetic oligonucleotide
cuccuacuaggaacugugu

SEQ ID NO: 1075971 - RNA, 19 nt, Artificial Sequence
  Description of Artificial Sequence: Synthetic oligonucleotide
gcacgugcgugucaggggu

SEQ ID NO: 1075972 - RNA, 19 nt, Artificial Sequence
  Description of Artificial Sequence: Synthetic oligonucleotide
gaucagcggcgggaagcuc

SEQ ID NO: 1075973 - RNA, 19 nt, Artificial Sequence
  Description of Artificial Sequence: Synthetic oligonucleotide
gccacggaucagcggcggg

SEQ ID NO: 1075974 - RNA, 19 nt, Artificial Sequence
  Description of Artificial Sequence: Synthetic oligonucleotide
ccuuuaaauuugguccaca

SEQ ID NO: 1075975 - RNA, 19 nt, Artificial Sequence
  Description of Artificial Sequence: Synthetic oligonucleotide
gcgaccucugacagcggcc

SEQ ID NO: 1075976 - RNA, 19 nt, Artificial Sequence
  Description of Artificial Sequence: Synthetic oligonucleotide
cuugcccgcaccgggccca

SEQ ID NO: 1075977 - RNA, 19 nt, Artificial Sequence
  Description of Artificial Sequence: Synthetic oligonucleotide
gcgcacuggguccccuugc

SEQ ID NO: 1075978 - RNA, 19 nt, Artificial Sequence
  Description of Artificial Sequence: Synthetic oligonucleotide
cugagcauuggcagccauu

SEQ ID NO: 1075979 - RNA, 19 nt, Artificial Sequence
  Description of Artificial Sequence: Synthetic oligonucleotide
cgacaaugcgcgcgcacug

SEQ ID NO: 1075980 - RNA, 19 nt, Artificial Sequence
  Description of Artificial Sequence: Synthetic oligonucleotide
caaugcgcgcgcacugggu

SEQ ID NO: 1075981 - RNA, 19 nt, Artificial Sequence
  Description of Artificial Sequence: Synthetic oligonucleotide
acacgaccaacggcuucau

SEQ ID NO: 1075982 - RNA, 19 nt, Artificial Sequence
  Description of Artificial Sequence: Synthetic oligonucleotide
cacaagucauuagacccuu

SEQ ID NO: 1075983 - RNA, 19 nt, Artificial Sequence
  Description of Artificial Sequence: Synthetic oligonucleotide
ccaaaacgaacacgaccaa

SEQ ID NO: 1075984 - RNA, 19 nt, Artificial Sequence
  Description of Artificial Sequence: Synthetic oligonucleotide
cguucaauacagaucucau

SEQ ID NO: 1075985 - RNA, 19 nt, Artificial Sequence
  Description of Artificial Sequence: Synthetic oligonucleotide
ccuugcccgcaccgggccc

SEQ ID NO: 1075986 - RNA, 19 nt, Artificial Sequence
  Description of Artificial Sequence: Synthetic oligonucleotide
ccgggcccacccaaaacga

SEQ ID NO: 1075987 - RNA, 19 nt, Artificial Sequence
  Description of Artificial Sequence: Synthetic oligonucleotide
ccccuuucaagacaucguu

SEQ ID NO: 1075988 - RNA, 19 nt, Artificial Sequence
  Description of Artificial Sequence: Synthetic oligonucleotide
cagcggcgggaagcucggg

SEQ ID NO: 1075989 - RNA, 19 nt, Artificial Sequence
  Description of Artificial Sequence: Synthetic oligonucleotide
cccaaaccuugagagcaaa

SEQ ID NO: 1075990 - RNA, 19 nt, Artificial Sequence
  Description of Artificial Sequence: Synthetic oligonucleotide
gccggcgacaacagcugcu

SEQ ID NO: 1075991 - RNA, 19 nt, Artificial Sequence
  Description of Artificial Sequence: Synthetic oligonucleotide
gcgugucaggggucuccua

SEQ ID NO: 1075992 - RNA, 19 nt, Artificial Sequence
  Description of Artificial Sequence: Synthetic oligonucleotide
cgggcccacccaaaacgaa

SEQ ID NO: 1075993 - RNA, 19 nt, Artificial Sequence
  Description of Artificial Sequence: Synthetic oligonucleotide
cccuugccccacagaauau

SEQ ID NO: 1075994 - RNA, 19 nt, Artificial Sequence
  Description of Artificial Sequence: Synthetic oligonucleotide
ccgcaccgggcccacccaa

SEQ ID NO: 1075995 - RNA, 19 nt, Artificial Sequence
  Description of Artificial Sequence: Synthetic oligonucleotide
cgugcgugucaggggucuc

SEQ ID NO: 1075996 - RNA, 19 nt, Artificial Sequence
  Description of Artificial Sequence: Synthetic oligonucleotide
cgcaccgggcccacccaaa

SEQ ID NO: 1075997 - RNA, 19 nt, Artificial Sequence
  Description of Artificial Sequence: Synthetic oligonucleotide
uaagcagugaguaauuucg

SEQ ID NO: 1075998 - RNA, 19 nt, Artificial Sequence
  Description of Artificial Sequence: Synthetic oligonucleotide
auuagaucuacauaugaac

SEQ ID NO: 1075999 - RNA, 19 nt, Artificial Sequence
  Description of Artificial Sequence: Synthetic oligonucleotide
aaaauguggaaugagggac

SEQ ID NO: 1076000 - RNA, 19 nt, Artificial Sequence
  Description of Artificial Sequence: Synthetic oligonucleotide
ucaucuaugggauagaggu

SEQ ID NO: 1076001 - RNA, 19 nt, Artificial Sequence
  Description of Artificial Sequence: Synthetic oligonucleotide
caucugauagauaauaugg

SEQ ID NO: 1076002 - RNA, 19 nt, Artificial Sequence
  Description of Artificial Sequence: Synthetic oligonucleotide
aguuauauuguacagucuc

SEQ ID NO: 1076003 - RNA, 19 nt, Artificial Sequence
  Description of Artificial Sequence: Synthetic oligonucleotide
aauaucaugcucuaguuaa

SEQ ID NO: 1076004 - RNA, 19 nt, Artificial Sequence
  Description of Artificial Sequence: Synthetic oligonucleotide
auacccaacaacuuuauuc

SEQ ID NO: 1076005 - RNA, 19 nt, Artificial Sequence
  Description of Artificial Sequence: Synthetic oligonucleotide
gauaauauggcaagaauag

SEQ ID NO: 1076006 - RNA, 19 nt, Artificial Sequence
  Description of Artificial Sequence: Synthetic oligonucleotide
uuucuuaucccgaugaggc

SEQ ID NO: 1076007 - RNA, 19 nt, Artificial Sequence
  Description of Artificial Sequence: Synthetic oligonucleotide
aaagcuucagcuaagcaac

SEQ ID NO: 1076008 - RNA, 19 nt, Artificial Sequence
  Description of Artificial Sequence: Synthetic oligonucleotide
aacacagguacuucuacac

SEQ ID NO: 1076009 - RNA, 19 nt, Artificial Sequence
  Description of Artificial Sequence: Synthetic oligonucleotide
uaagaaaauguuuuggucu

SEQ ID NO: 1076010 - RNA, 19 nt, Artificial Sequence
  Description of Artificial Sequence: Synthetic oligonucleotide
uuuaaacugacaaaccaca

SEQ ID NO: 1076011 - RNA, 19 nt, Artificial Sequence
  Description of Artificial Sequence: Synthetic oligonucleotide
acaaauuaggaacugagga

SEQ ID NO: 1076012 - RNA, 19 nt, Artificial Sequence
  Description of Artificial Sequence: Synthetic oligonucleotide
uuagaucuacauaugaaca

SEQ ID NO: 1076013 - RNA, 19 nt, Artificial Sequence
  Description of Artificial Sequence: Synthetic oligonucleotide
gaucacgucaccuauaaac

SEQ ID NO: 1076014 - RNA, 19 nt, Artificial Sequence
  Description of Artificial Sequence: Synthetic oligonucleotide
aaacugacaaaccacaaau

SEQ ID NO: 1076015 - RNA, 19 nt, Artificial Sequence
  Description of Artificial Sequence: Synthetic oligonucleotide
cuucgguugaucuauaagc

SEQ ID NO: 1076016 - RNA, 19 nt, Artificial Sequence
  Description of Artificial Sequence: Synthetic oligonucleotide
auaaaugaagacauuugcc

SEQ ID NO: 1076017 - RNA, 19 nt, Artificial Sequence
  Description of Artificial Sequence: Synthetic oligonucleotide
uucagaaugggauuguacc

SEQ ID NO: 1076018 - RNA, 19 nt, Artificial Sequence
  Description of Artificial Sequence: Synthetic oligonucleotide
ugauagauaauauggcaag

SEQ ID NO: 1076019 - RNA, 19 nt, Artificial Sequence
  Description of Artificial Sequence: Synthetic oligonucleotide
aguauagaagacuucuggg

SEQ ID NO: 1076020 - RNA, 19 nt, Artificial Sequence
  Description of Artificial Sequence: Synthetic oligonucleotide
uggaguuuuaaacugacaa

SEQ ID NO: 1076021 - RNA, 19 nt, Artificial Sequence
  Description of Artificial Sequence: Synthetic oligonucleotide
ucuacauaugaacaaauua

SEQ ID NO: 1076022 - RNA, 19 nt, Artificial Sequence
  Description of Artificial Sequence: Synthetic oligonucleotide
aaauuaggaacugaggacu

SEQ ID NO: 1076023 - RNA, 19 nt, Artificial Sequence
  Description of Artificial Sequence: Synthetic oligonucleotide
ucaguuauauuguacaguc

SEQ ID NO: 1076024 - RNA, 19 nt, Artificial Sequence
  Description of Artificial Sequence: Synthetic oligonucleotide
ucugauagauaauauggca

SEQ ID NO: 1076025 - RNA, 19 nt, Artificial Sequence
  Description of Artificial Sequence: Synthetic oligonucleotide
ggaaugagggacuuaaucg

SEQ ID NO: 1076026 - RNA, 19 nt, Artificial Sequence
  Description of Artificial Sequence: Synthetic oligonucleotide
uuggucuuugaucugaaca

SEQ ID NO: 1076027 - RNA, 19 nt, Artificial Sequence
  Description of Artificial Sequence: Synthetic oligonucleotide
gaugcuaccucaucaaggc

SEQ ID NO: 1076028 - RNA, 19 nt, Artificial Sequence
  Description of Artificial Sequence: Synthetic oligonucleotide
uauuuggagacgaauacaa

SEQ ID NO: 1076029 - RNA, 19 nt, Artificial Sequence
  Description of Artificial Sequence: Synthetic oligonucleotide
gaaugagggacuuaaucgc

SEQ ID NO: 1076030 - RNA, 19 nt, Artificial Sequence
  Description of Artificial Sequence: Synthetic oligonucleotide
uauucuucgacguccaaca

SEQ ID NO: 1076031 - RNA, 19 nt, Artificial Sequence
  Description of Artificial Sequence: Synthetic oligonucleotide
uuucucgggaacaaggccc

SEQ ID NO: 1076032 - RNA, 19 nt, Artificial Sequence
  Description of Artificial Sequence: Synthetic oligonucleotide
ucucuauaguuccacauga

SEQ ID NO: 1076033 - RNA, 19 nt, Artificial Sequence
  Description of Artificial Sequence: Synthetic oligonucleotide
aagauucccgaauugcuug

SEQ ID NO: 1076034 - RNA, 19 nt, Artificial Sequence
  Description of Artificial Sequence: Synthetic oligonucleotide
gacccggucaguuauauug

SEQ ID NO: 1076035 - RNA, 19 nt, Artificial Sequence
  Description of Artificial Sequence: Synthetic oligonucleotide
aucgccagcaguaagaagg

SEQ ID NO: 1076036 - RNA, 19 nt, Artificial Sequence
  Description of Artificial Sequence: Synthetic oligonucleotide
aaugagggacuuaaucgcc

SEQ ID NO: 1076037 - RNA, 19 nt, Artificial Sequence
  Description of Artificial Sequence: Synthetic oligonucleotide
ucuauaguuccacaugaga

SEQ ID NO: 1076038 - RNA, 19 nt, Artificial Sequence
  Description of Artificial Sequence: Synthetic oligonucleotide
ucuacacugagacagggaa

SEQ ID NO: 1076039 - RNA, 19 nt, Artificial Sequence
  Description of Artificial Sequence: Synthetic oligonucleotide
uggagacgaauacaaaucc

SEQ ID NO: 1076040 - RNA, 19 nt, Artificial Sequence
  Description of Artificial Sequence: Synthetic oligonucleotide
agaaccaaucaucugacca

SEQ ID NO: 1076041 - RNA, 19 nt, Artificial Sequence
  Description of Artificial Sequence: Synthetic oligonucleotide
aagaaagugucucuauagu

SEQ ID NO: 1076042 - RNA, 19 nt, Artificial Sequence
  Description of Artificial Sequence: Synthetic oligonucleotide
uucuuugcgcauuucuucg

SEQ ID NO: 1076043 - RNA, 19 nt, Artificial Sequence
  Description of Artificial Sequence: Synthetic oligonucleotide
ucaucaucgccuuugaaaa

SEQ ID NO: 1076044 - RNA, 19 nt, Artificial Sequence
  Description of Artificial Sequence: Synthetic oligonucleotide
uuaaucgccagcaguaaga

SEQ ID NO: 1076045 - RNA, 19 nt, Artificial Sequence
  Description of Artificial Sequence: Synthetic oligonucleotide
ucaccuauaaacaaaucuu

SEQ ID NO: 1076046 - RNA, 19 nt, Artificial Sequence
  Description of Artificial Sequence: Synthetic oligonucleotide
gguacuucuacacugagac

SEQ ID NO: 1076047 - RNA, 19 nt, Artificial Sequence
  Description of Artificial Sequence: Synthetic oligonucleotide
uuggguauuauuacucccc

SEQ ID NO: 1076048 - RNA, 19 nt, Artificial Sequence
  Description of Artificial Sequence: Synthetic oligonucleotide
aacuaggcaggauaggccu

SEQ ID NO: 1076049 - RNA, 19 nt, Artificial Sequence
  Description of Artificial Sequence: Synthetic oligonucleotide
caguauagaagacuucugg

SEQ ID NO: 1076050 - RNA, 19 nt, Artificial Sequence
  Description of Artificial Sequence: Synthetic oligonucleotide
uuccacaugagaauguccu

SEQ ID NO: 1076051 - RNA, 19 nt, Artificial Sequence
  Description of Artificial Sequence: Synthetic oligonucleotide
ucuauaagcagugaguaau

SEQ ID NO: 1076052 - RNA, 19 nt, Artificial Sequence
  Description of Artificial Sequence: Synthetic oligonucleotide
uacccaacaacuuuauucu

SEQ ID NO: 1076053 - RNA, 19 nt, Artificial Sequence
  Description of Artificial Sequence: Synthetic oligonucleotide
caaauuaggaacugaggac

SEQ ID NO: 1076054 - RNA, 19 nt, Artificial Sequence
  Description of Artificial Sequence: Synthetic oligonucleotide
ucacaaacaacacuguaua

SEQ ID NO: 1076055 - RNA, 19 nt, Artificial Sequence
  Description of Artificial Sequence: Synthetic oligonucleotide
uucgguugaucuauaagca

SEQ ID NO: 1076056 - RNA, 19 nt, Artificial Sequence
  Description of Artificial Sequence: Synthetic oligonucleotide
agcauuguggaucacguca

SEQ ID NO: 1076057 - RNA, 19 nt, Artificial Sequence
  Description of Artificial Sequence: Synthetic oligonucleotide
acaaacuccgcaucuggac

SEQ ID NO: 1076058 - RNA, 19 nt, Artificial Sequence
  Description of Artificial Sequence: Synthetic oligonucleotide
cuuggauaagcuauucaag

SEQ ID NO: 1076059 - RNA, 19 nt, Artificial Sequence
  Description of Artificial Sequence: Synthetic oligonucleotide
agcagugaguaauuucggc

SEQ ID NO: 1076060 - RNA, 19 nt, Artificial Sequence
  Description of Artificial Sequence: Synthetic oligonucleotide
ucuucgacguccaacacuc

SEQ ID NO: 1076061 - RNA, 19 nt, Artificial Sequence
  Description of Artificial Sequence: Synthetic oligonucleotide
aaugggauuguaccacuug

SEQ ID NO: 1076062 - RNA, 19 nt, Artificial Sequence
  Description of Artificial Sequence: Synthetic oligonucleotide
cacaacaugggaacuaggc

SEQ ID NO: 1076063 - RNA, 19 nt, Artificial Sequence
  Description of Artificial Sequence: Synthetic oligonucleotide
aucugauagauaauauggc

SEQ ID NO: 1076064 - RNA, 19 nt, Artificial Sequence
  Description of Artificial Sequence: Synthetic oligonucleotide
cacaaauuaggaacugagg

SEQ ID NO: 1076065 - RNA, 19 nt, Artificial Sequence
  Description of Artificial Sequence: Synthetic oligonucleotide
acugagaccaaauaucaau

SEQ ID NO: 1076066 - RNA, 19 nt, Artificial Sequence
  Description of Artificial Sequence: Synthetic oligonucleotide
uaugcacuaacauuagauc

SEQ ID NO: 1076067 - RNA, 19 nt, Artificial Sequence
  Description of Artificial Sequence: Synthetic oligonucleotide
uuggagacgaauacaaauc

SEQ ID NO: 1076068 - RNA, 19 nt, Artificial Sequence
  Description of Artificial Sequence: Synthetic oligonucleotide
aaaucuguccggcagguua

SEQ ID NO: 1076069 - RNA, 19 nt, Artificial Sequence
  Description of Artificial Sequence: Synthetic oligonucleotide
ugcucucuguuccaguacg

SEQ ID NO: 1076070 - RNA, 19 nt, Artificial Sequence
  Description of Artificial Sequence: Synthetic oligonucleotide
aauuucggcaucucaaaua

SEQ ID NO: 1076071 - RNA, 19 nt, Artificial Sequence
  Description of Artificial Sequence: Synthetic oligonucleotide
uuuggguauuauuacuccc

SEQ ID NO: 1076072 - RNA, 19 nt, Artificial Sequence
  Description of Artificial Sequence: Synthetic oligonucleotide
ucagguucacaauagccca

SEQ ID NO: 1076073 - RNA, 19 nt, Artificial Sequence
  Description of Artificial Sequence: Synthetic oligonucleotide
aaauuaggacucugcaacu

SEQ ID NO: 1076074 - RNA, 19 nt, Artificial Sequence
  Description of Artificial Sequence: Synthetic oligonucleotide
acaagaagacucucacuac

SEQ ID NO: 1076075 - RNA, 19 nt, Artificial Sequence
  Description of Artificial Sequence: Synthetic oligonucleotide
aaacuccgcaucuggacag

SEQ ID NO: 1076076 - RNA, 19 nt, Artificial Sequence
  Description of Artificial Sequence: Synthetic oligonucleotide
ugucugguuccccacauug

SEQ ID NO: 1076077 - RNA, 19 nt, Artificial Sequence
  Description of Artificial Sequence: Synthetic oligonucleotide
agguuauuaaaaucuguca

SEQ ID NO: 1076078 - RNA, 19 nt, Artificial Sequence
  Description of Artificial Sequence: Synthetic oligonucleotide
uggaaugagggacuuaauc

SEQ ID NO: 1076079 - RNA, 19 nt, Artificial Sequence
  Description of Artificial Sequence: Synthetic oligonucleotide
acauuagaucuacauauga

SEQ ID NO: 1076080 - RNA, 19 nt, Artificial Sequence
  Description of Artificial Sequence: Synthetic oligonucleotide
gucagaaccaaucaucuga

SEQ ID NO: 1076081 - RNA, 19 nt, Artificial Sequence
  Description of Artificial Sequence: Synthetic oligonucleotide
ucagaaugggauuguacca

SEQ ID NO: 1076082 - RNA, 19 nt, Artificial Sequence
  Description of Artificial Sequence: Synthetic oligonucleotide
aucgccuuugaaaacaaac

SEQ ID NO: 1076083 - RNA, 19 nt, Artificial Sequence
  Description of Artificial Sequence: Synthetic oligonucleotide
uccgcaucuggacaggaag

SEQ ID NO: 1076084 - RNA, 19 nt, Artificial Sequence
  Description of Artificial Sequence: Synthetic oligonucleotide
acguccaacacucauuucu

SEQ ID NO: 1076085 - RNA, 19 nt, Artificial Sequence
  Description of Artificial Sequence: Synthetic oligonucleotide
aaauaucaugcucuaguua

SEQ ID NO: 1076086 - RNA, 19 nt, Artificial Sequence
  Description of Artificial Sequence: Synthetic oligonucleotide
ucgccuuugaaaacaaacu

SEQ ID NO: 1076087 - RNA, 19 nt, Artificial Sequence
  Description of Artificial Sequence: Synthetic oligonucleotide
guaagaaggguuucuuugc

SEQ ID NO: 1076088 - RNA, 19 nt, Artificial Sequence
  Description of Artificial Sequence: Synthetic oligonucleotide
aaauacaagaggaagucuu

SEQ ID NO: 1076089 - RNA, 19 nt, Artificial Sequence
  Description of Artificial Sequence: Synthetic oligonucleotide
agaaaagcuucagcuaagc

SEQ ID NO: 1076090 - RNA, 19 nt, Artificial Sequence
  Description of Artificial Sequence: Synthetic oligonucleotide
acgaauacaaauccccugu

SEQ ID NO: 1076091 - RNA, 19 nt, Artificial Sequence
  Description of Artificial Sequence: Synthetic oligonucleotide
cauuguaugaaauucucaa

SEQ ID NO: 1076092 - RNA, 19 nt, Artificial Sequence
  Description of Artificial Sequence: Synthetic oligonucleotide
aucaucaggauacccaaca

SEQ ID NO: 1076093 - RNA, 19 nt, Artificial Sequence
  Description of Artificial Sequence: Synthetic oligonucleotide
ucugcuaugcacuaacauu

SEQ ID NO: 1076094 - RNA, 19 nt, Artificial Sequence
  Description of Artificial Sequence: Synthetic oligonucleotide
cuauucaaguaauucagga

SEQ ID NO: 1076095 - RNA, 19 nt, Artificial Sequence
  Description of Artificial Sequence: Synthetic oligonucleotide
agauucccgaauugcuugc

SEQ ID NO: 1076096 - RNA, 19 nt, Artificial Sequence
  Description of Artificial Sequence: Synthetic oligonucleotide
ugaccauggugaauuaucu

SEQ ID NO: 1076097 - RNA, 19 nt, Artificial Sequence
  Description of Artificial Sequence: Synthetic oligonucleotide
ucuuaucccgaugaggccc

SEQ ID NO: 1076098 - RNA, 19 nt, Artificial Sequence
  Description of Artificial Sequence: Synthetic oligonucleotide
guggugaguauucacaaac

SEQ ID NO: 1076099 - RNA, 19 nt, Artificial Sequence
  Description of Artificial Sequence: Synthetic oligonucleotide
gacgaauacaaauccccug

SEQ ID NO: 1076100 - RNA, 19 nt, Artificial Sequence
  Description of Artificial Sequence: Synthetic oligonucleotide
caaguaauucaggaugugg

SEQ ID NO: 1076101 - RNA, 19 nt, Artificial Sequence
  Description of Artificial Sequence: Synthetic oligonucleotide
ugacuuauauuuggagacg

SEQ ID NO: 1076102 - RNA, 19 nt, Artificial Sequence
  Description of Artificial Sequence: Synthetic oligonucleotide
guuucuuaucccgaugagg

SEQ ID NO: 1076103 - RNA, 19 nt, Artificial Sequence
  Description of Artificial Sequence: Synthetic oligonucleotide
uucugaaggcacauuccag

SEQ ID NO: 1076104 - RNA, 19 nt, Artificial Sequence
  Description of Artificial Sequence: Synthetic oligonucleotide
aauuaggacucugcaacug

SEQ ID NO: 1076105 - RNA, 19 nt, Artificial Sequence
  Description of Artificial Sequence: Synthetic oligonucleotide
gcaaaauguggaaugaggg

SEQ ID NO: 1076106 - RNA, 19 nt, Artificial Sequence
  Description of Artificial Sequence: Synthetic oligonucleotide
auagaagacuucugggaug

SEQ ID NO: 1076107 - RNA, 19 nt, Artificial Sequence
  Description of Artificial Sequence: Synthetic oligonucleotide
agaaggguuucuuugcgca

SEQ ID NO: 1076108 - RNA, 19 nt, Artificial Sequence
  Description of Artificial Sequence: Synthetic oligonucleotide
gaagacauuugccaucauc

SEQ ID NO: 1076109 - RNA, 19 nt, Artificial Sequence
  Description of Artificial Sequence: Synthetic oligonucleotide
cugagaccaaauaucaauc

SEQ ID NO: 1076110 - RNA, 19 nt, Artificial Sequence
  Description of Artificial Sequence: Synthetic oligonucleotide
ugcacuaacauuagaucua

SEQ ID NO: 1076111 - RNA, 19 nt, Artificial Sequence
  Description of Artificial Sequence: Synthetic oligonucleotide
ucgguugaucuauaagcag

SEQ ID NO: 1076112 - RNA, 19 nt, Artificial Sequence
  Description of Artificial Sequence: Synthetic oligonucleotide
ugggauguaguacuucagu

SEQ ID NO: 1076113 - RNA, 19 nt, Artificial Sequence
  Description of Artificial Sequence: Synthetic oligonucleotide
agaaagugucucuauaguu

SEQ ID NO: 1076114 - RNA, 19 nt, Artificial Sequence
  Description of Artificial Sequence: Synthetic oligonucleotide
gucagguucacaauagccc

SEQ ID NO: 1076115 - RNA, 19 nt, Artificial Sequence
  Description of Artificial Sequence: Synthetic oligonucleotide
auaguuccacaugagaaug

SEQ ID NO: 1076116 - RNA, 19 nt, Artificial Sequence
  Description of Artificial Sequence: Synthetic oligonucleotide
ugucaugacccuuggguca

SEQ ID NO: 1076117 - RNA, 19 nt, Artificial Sequence
  Description of Artificial Sequence: Synthetic oligonucleotide
uacugugaaagcacaacau

SEQ ID NO: 1076118 - RNA, 19 nt, Artificial Sequence
  Description of Artificial Sequence: Synthetic oligonucleotide
uccaguacgcccgggaagg

SEQ ID NO: 1076119 - RNA, 19 nt, Artificial Sequence
  Description of Artificial Sequence: Synthetic oligonucleotide
cacuacucagaaaagcuuc

SEQ ID NO: 1076120 - RNA, 19 nt, Artificial Sequence
  Description of Artificial Sequence: Synthetic oligonucleotide
uggugaguauucacaaaca

SEQ ID NO: 1076121 - RNA, 19 nt, Artificial Sequence
  Description of Artificial Sequence: Synthetic oligonucleotide
ucuuugcgcauuucuucgg

SEQ ID NO: 1076122 - RNA, 19 nt, Artificial Sequence
  Description of Artificial Sequence: Synthetic oligonucleotide
uuccaguauaaacaucauc

SEQ ID NO: 1076123 - RNA, 19 nt, Artificial Sequence
  Description of Artificial Sequence: Synthetic oligonucleotide
cgaauauggaucaaaacac

SEQ ID NO: 1076124 - RNA, 19 nt, Artificial Sequence
  Description of Artificial Sequence: Synthetic oligonucleotide
uggauaagcuauucaagua

SEQ ID NO: 1076125 - RNA, 19 nt, Artificial Sequence
  Description of Artificial Sequence: Synthetic oligonucleotide
uggaucacgucaccuauaa

SEQ ID NO: 1076126 - RNA, 19 nt, Artificial Sequence
  Description of Artificial Sequence: Synthetic oligonucleotide
acguuagcauuuuaaauua

SEQ ID NO: 1076127 - RNA, 19 nt, Artificial Sequence
  Description of Artificial Sequence: Synthetic oligonucleotide
aauuaggaacugaggacug

SEQ ID NO: 1076128 - RNA, 19 nt, Artificial Sequence
  Description of Artificial Sequence: Synthetic oligonucleotide
auuaggacucugcaacuga

SEQ ID NO: 1076129 - RNA, 19 nt, Artificial Sequence
  Description of Artificial Sequence: Synthetic oligonucleotide
cuuaaucgccagcaguaag

SEQ ID NO: 1076130 - RNA, 19 nt, Artificial Sequence
  Description of Artificial Sequence: Synthetic oligonucleotide
aaaugcagcuccagugcac

SEQ ID NO: 1076131 - RNA, 19 nt, Artificial Sequence
  Description of Artificial Sequence: Synthetic oligonucleotide
uccccuggccacaaaagug

SEQ ID NO: 1076132 - RNA, 19 nt, Artificial Sequence
  Description of Artificial Sequence: Synthetic oligonucleotide
aucacuacucagaaaagcu

SEQ ID NO: 1076133 - RNA, 19 nt, Artificial Sequence
  Description of Artificial Sequence: Synthetic oligonucleotide
uucugcuaugcacuaacau

SEQ ID NO: 1076134 - RNA, 19 nt, Artificial Sequence
  Description of Artificial Sequence: Synthetic oligonucleotide
uaauuucggcaucucaaau

SEQ ID NO: 1076135 - RNA, 19 nt, Artificial Sequence
  Description of Artificial Sequence: Synthetic oligonucleotide
augggauuguaccacuugu

SEQ ID NO: 1076136 - RNA, 19 nt, Artificial Sequence
  Description of Artificial Sequence: Synthetic oligonucleotide
gucucuauaguuccacaug

SEQ ID NO: 1076137 - RNA, 19 nt, Artificial Sequence
  Description of Artificial Sequence: Synthetic oligonucleotide
auagauaauauggcaagaa

SEQ ID NO: 1076138 - RNA, 19 nt, Artificial Sequence
  Description of Artificial Sequence: Synthetic oligonucleotide
aguuucuuaucccgaugag

SEQ ID NO: 1076139 - RNA, 19 nt, Artificial Sequence
  Description of Artificial Sequence: Synthetic oligonucleotide
uguggaucacgucaccuau

SEQ ID NO: 1076140 - RNA, 19 nt, Artificial Sequence
  Description of Artificial Sequence: Synthetic oligonucleotide
ugucucuauaguuccacau

SEQ ID NO: 1076141 - RNA, 19 nt, Artificial Sequence
  Description of Artificial Sequence: Synthetic oligonucleotide
aaucgccagcaguaagaag

SEQ ID NO: 1076142 - RNA, 19 nt, Artificial Sequence
  Description of Artificial Sequence: Synthetic oligonucleotide
aaauguggaaugagggacu

SEQ ID NO: 1076143 - RNA, 19 nt, Artificial Sequence
  Description of Artificial Sequence: Synthetic oligonucleotide
ggcaagaauagaauccugg

SEQ ID NO: 1076144 - RNA, 19 nt, Artificial Sequence
  Description of Artificial Sequence: Synthetic oligonucleotide
gaucuauaagcagugagua

SEQ ID NO: 1076145 - RNA, 19 nt, Artificial Sequence
  Description of Artificial Sequence: Synthetic oligonucleotide
aaccaaucaucugaccaug

SEQ ID NO: 1076146 - RNA, 19 nt, Artificial Sequence
  Description of Artificial Sequence: Synthetic oligonucleotide
gaagugcucacccaccgga

SEQ ID NO: 1076147 - RNA, 19 nt, Artificial Sequence
  Description of Artificial Sequence: Synthetic oligonucleotide
uugcgcauuucuucgguug

SEQ ID NO: 1076148 - RNA, 19 nt, Artificial Sequence
  Description of Artificial Sequence: Synthetic oligonucleotide
aguuccacaugagaauguc

SEQ ID NO: 1076149 - RNA, 19 nt, Artificial Sequence
  Description of Artificial Sequence: Synthetic oligonucleotide
agucacccuacugugaaag

SEQ ID NO: 1076150 - RNA, 19 nt, Artificial Sequence
  Description of Artificial Sequence: Synthetic oligonucleotide
ugagggacuuaaucgccag

SEQ ID NO: 1076151 - RNA, 19 nt, Artificial Sequence
  Description of Artificial Sequence: Synthetic oligonucleotide
uuccaguacgcccgggaag

SEQ ID NO: 1076152 - RNA, 19 nt, Artificial Sequence
  Description of Artificial Sequence: Synthetic oligonucleotide
aagcagugaguaauuucgg

SEQ ID NO: 1076153 - RNA, 19 nt, Artificial Sequence
  Description of Artificial Sequence: Synthetic oligonucleotide
agggugguuguccucgggg

SEQ ID NO: 1076154 - RNA, 19 nt, Artificial Sequence
  Description of Artificial Sequence: Synthetic oligonucleotide
gauagauaauauggcaaga

SEQ ID NO: 1076155 - RNA, 19 nt, Artificial Sequence
  Description of Artificial Sequence: Synthetic oligonucleotide
auucuucgacguccaacac

SEQ ID NO: 1076156 - RNA, 19 nt, Artificial Sequence
  Description of Artificial Sequence: Synthetic oligonucleotide
cagggaagcaucacuacuc

SEQ ID NO: 1076157 - RNA, 19 nt, Artificial Sequence
  Description of Artificial Sequence: Synthetic oligonucleotide
cauacgguggguagacccc

SEQ ID NO: 1076158 - RNA, 19 nt, Artificial Sequence
  Description of Artificial Sequence: Synthetic oligonucleotide
uuucugcuaugcacuaaca

SEQ ID NO: 1076159 - RNA, 19 nt, Artificial Sequence
  Description of Artificial Sequence: Synthetic oligonucleotide
gaacuaggcaggauaggcc

SEQ ID NO: 1076160 - RNA, 19 nt, Artificial Sequence
  Description of Artificial Sequence: Synthetic oligonucleotide
ucacccuacugugaaagca

SEQ ID NO: 1076161 - RNA, 19 nt, Artificial Sequence
  Description of Artificial Sequence: Synthetic oligonucleotide
agggcugaauaucuuccag

SEQ ID NO: 1076162 - RNA, 19 nt, Artificial Sequence
  Description of Artificial Sequence: Synthetic oligonucleotide
uguuccaguacgcccggga

SEQ ID NO: 1076163 - RNA, 19 nt, Artificial Sequence
  Description of Artificial Sequence: Synthetic oligonucleotide
auaauauggcaagaauaga

SEQ ID NO: 1076164 - RNA, 19 nt, Artificial Sequence
  Description of Artificial Sequence: Synthetic oligonucleotide
uucuuaucccgaugaggcc

SEQ ID NO: 1076165 - RNA, 19 nt, Artificial Sequence
  Description of Artificial Sequence: Synthetic oligonucleotide
ucuguuccaguacgcccgg

SEQ ID NO: 1076166 - RNA, 19 nt, Artificial Sequence
  Description of Artificial Sequence: Synthetic oligonucleotide
ucaucaaggcugauggcuu

SEQ ID NO: 1076167 - RNA, 19 nt, Artificial Sequence
  Description of Artificial Sequence: Synthetic oligonucleotide
aaagcacaacaugggaacu

SEQ ID NO: 1076168 - RNA, 19 nt, Artificial Sequence
  Description of Artificial Sequence: Synthetic oligonucleotide
gucuuuaaaucuguccggc

SEQ ID NO: 1076169 - RNA, 19 nt, Artificial Sequence
  Description of Artificial Sequence: Synthetic oligonucleotide
gacuuauauuuggagacga

SEQ ID NO: 1076170 - RNA, 19 nt, Artificial Sequence
  Description of Artificial Sequence: Synthetic oligonucleotide
ccaaauaucaaucaucucu

SEQ ID NO: 1076171 - RNA, 19 nt, Artificial Sequence
  Description of Artificial Sequence: Synthetic oligonucleotide
aauacaagaggaagucuuu

SEQ ID NO: 1076172 - RNA, 19 nt, Artificial Sequence
  Description of Artificial Sequence: Synthetic oligonucleotide
aauagcccagaugacuuau

SEQ ID NO: 1076173 - RNA, 19 nt, Artificial Sequence
  Description of Artificial Sequence: Synthetic oligonucleotide
ccacaaauuaggaacugag

SEQ ID NO: 1076174 - RNA, 19 nt, Artificial Sequence
  Description of Artificial Sequence: Synthetic oligonucleotide
cuucuacacugagacaggg

SEQ ID NO: 1076175 - RNA, 19 nt, Artificial Sequence
  Description of Artificial Sequence: Synthetic oligonucleotide
agaucuacauaugaacaaa

SEQ ID NO: 1076176 - RNA, 19 nt, Artificial Sequence
  Description of Artificial Sequence: Synthetic oligonucleotide
cugucaugacccuuggguc

SEQ ID NO: 1076177 - RNA, 19 nt, Artificial Sequence
  Description of Artificial Sequence: Synthetic oligonucleotide
ucaggauacccaacaacuu

SEQ ID NO: 1076178 - RNA, 19 nt, Artificial Sequence
  Description of Artificial Sequence: Synthetic oligonucleotide
guaauuucggcaucucaaa

SEQ ID NO: 1076179 - RNA, 19 nt, Artificial Sequence
  Description of Artificial Sequence: Synthetic oligonucleotide
auguggugaguauucacaa

SEQ ID NO: 1076180 - RNA, 19 nt, Artificial Sequence
  Description of Artificial Sequence: Synthetic oligonucleotide
caaauccccugucugguug

SEQ ID NO: 1076181 - RNA, 19 nt, Artificial Sequence
  Description of Artificial Sequence: Synthetic oligonucleotide
agcacaacaugggaacuag

SEQ ID NO: 1076182 - RNA, 19 nt, Artificial Sequence
  Description of Artificial Sequence: Synthetic oligonucleotide
agcuccagugcacguuagc

SEQ ID NO: 1076183 - RNA, 19 nt, Artificial Sequence
  Description of Artificial Sequence: Synthetic oligonucleotide
uguccggcagguuauuaaa

SEQ ID NO: 1076184 - RNA, 19 nt, Artificial Sequence
  Description of Artificial Sequence: Synthetic oligonucleotide
cuaugcacuaacauuagau

SEQ ID NO: 1076185 - RNA, 19 nt, Artificial Sequence
  Description of Artificial Sequence: Synthetic oligonucleotide
ggaacuaggcaggauaggc

SEQ ID NO: 1076186 - RNA, 19 nt, Artificial Sequence
  Description of Artificial Sequence: Synthetic oligonucleotide
uucgacguccaacacucau

SEQ ID NO: 1076187 - RNA, 19 nt, Artificial Sequence
  Description of Artificial Sequence: Synthetic oligonucleotide
uagcccagaugacuuauau

SEQ ID NO: 1076188 - RNA, 19 nt, Artificial Sequence
  Description of Artificial Sequence: Synthetic oligonucleotide
uaguuccacaugagaaugu

SEQ ID NO: 1076189 - RNA, 19 nt, Artificial Sequence
  Description of Artificial Sequence: Synthetic oligonucleotide
guuauauuguacagucuca

SEQ ID NO: 1076190 - RNA, 19 nt, Artificial Sequence
  Description of Artificial Sequence: Synthetic oligonucleotide
ucugccccaagauucccga

SEQ ID NO: 1076191 - RNA, 19 nt, Artificial Sequence
  Description of Artificial Sequence: Synthetic oligonucleotide
gacagggaagcaucacuac

SEQ ID NO: 1076192 - RNA, 19 nt, Artificial Sequence
  Description of Artificial Sequence: Synthetic oligonucleotide
agggacuuaaucgccagca

SEQ ID NO: 1076193 - RNA, 19 nt, Artificial Sequence
  Description of Artificial Sequence: Synthetic oligonucleotide
agggaagcaucacuacuca

SEQ ID NO: 1076194 - RNA, 19 nt, Artificial Sequence
  Description of Artificial Sequence: Synthetic oligonucleotide
aacaaacuccgcaucugga

SEQ ID NO: 1076195 - RNA, 19 nt, Artificial Sequence
  Description of Artificial Sequence: Synthetic oligonucleotide
cacauugguuucucugccc

SEQ ID NO: 1076196 - RNA, 19 nt, Artificial Sequence
  Description of Artificial Sequence: Synthetic oligonucleotide
uaucaugcucuaguuaaau

SEQ ID NO: 1076197 - RNA, 19 nt, Artificial Sequence
  Description of Artificial Sequence: Synthetic oligonucleotide
gacagguugaagaaagugu

SEQ ID NO: 1076198 - RNA, 19 nt, Artificial Sequence
  Description of Artificial Sequence: Synthetic oligonucleotide
uguggugaguauucacaaa

SEQ ID NO: 1076199 - RNA, 19 nt, Artificial Sequence
  Description of Artificial Sequence: Synthetic oligonucleotide
cacguuagcauuuuaaauu

SEQ ID NO: 1076200 - RNA, 19 nt, Artificial Sequence
  Description of Artificial Sequence: Synthetic oligonucleotide
acacagguacuucuacacu

SEQ ID NO: 1076201 - RNA, 19 nt, Artificial Sequence
  Description of Artificial Sequence: Synthetic oligonucleotide
caucuaugggauagaggug

SEQ ID NO: 1076202 - RNA, 19 nt, Artificial Sequence
  Description of Artificial Sequence: Synthetic oligonucleotide
ugguuccccacauugguuu

SEQ ID NO: 1076203 - RNA, 19 nt, Artificial Sequence
  Description of Artificial Sequence: Synthetic oligonucleotide
gcauacgguggguagaccc

SEQ ID NO: 1076204 - RNA, 19 nt, Artificial Sequence
  Description of Artificial Sequence: Synthetic oligonucleotide
ucuggacaggaagugcuca

SEQ ID NO: 1076205 - RNA, 19 nt, Artificial Sequence
  Description of Artificial Sequence: Synthetic oligonucleotide
acauuguaugaaauucuca

SEQ ID NO: 1076206 - RNA, 19 nt, Artificial Sequence
  Description of Artificial Sequence: Synthetic oligonucleotide
agaauccuggaguuuuaaa

SEQ ID NO: 1076207 - RNA, 19 nt, Artificial Sequence
  Description of Artificial Sequence: Synthetic oligonucleotide
uuguggaucacgucaccua

SEQ ID NO: 1076208 - RNA, 19 nt, Artificial Sequence
  Description of Artificial Sequence: Synthetic oligonucleotide
cuuuauucuucgacgucca

SEQ ID NO: 1076209 - RNA, 19 nt, Artificial Sequence
  Description of Artificial Sequence: Synthetic oligonucleotide
auuguggaucacgucaccu

SEQ ID NO: 1076210 - RNA, 19 nt, Artificial Sequence
  Description of Artificial Sequence: Synthetic oligonucleotide
ggucagguucacaauagcc

SEQ ID NO: 1076211 - RNA, 19 nt, Artificial Sequence
  Description of Artificial Sequence: Synthetic oligonucleotide
ugggauuguaccacuuguu

SEQ ID NO: 1076212 - RNA, 19 nt, Artificial Sequence
  Description of Artificial Sequence: Synthetic oligonucleotide
acucucacuacugucuggu

SEQ ID NO: 1076213 - RNA, 19 nt, Artificial Sequence
  Description of Artificial Sequence: Synthetic oligonucleotide
uaaucgccagcaguaagaa

SEQ ID NO: 1076214 - RNA, 19 nt, Artificial Sequence
  Description of Artificial Sequence: Synthetic oligonucleotide
acagcugucaugacccuug

SEQ ID NO: 1076215 - RNA, 19 nt, Artificial Sequence
  Description of Artificial Sequence: Synthetic oligonucleotide
aucaugcucuaguuaaaua

SEQ ID NO: 1076216 - RNA, 19 nt, Artificial Sequence
  Description of Artificial Sequence: Synthetic oligonucleotide
caaacuccgcaucuggaca

SEQ ID NO: 1076217 - RNA, 19 nt, Artificial Sequence
  Description of Artificial Sequence: Synthetic oligonucleotide
gguugaucuauaagcagug

SEQ ID NO: 1076218 - RNA, 19 nt, Artificial Sequence
  Description of Artificial Sequence: Synthetic oligonucleotide
aauguggaaugagggacuu

SEQ ID NO: 1076219 - RNA, 19 nt, Artificial Sequence
  Description of Artificial Sequence: Synthetic oligonucleotide
acauuccaguauaaacauc

SEQ ID NO: 1076220 - RNA, 19 nt, Artificial Sequence
  Description of Artificial Sequence: Synthetic oligonucleotide
agacgaauacaaauccccu

SEQ ID NO: 1076221 - RNA, 19 nt, Artificial Sequence
  Description of Artificial Sequence: Synthetic oligonucleotide
ucgacguccaacacucauu

SEQ ID NO: 1076222 - RNA, 19 nt, Artificial Sequence
  Description of Artificial Sequence: Synthetic oligonucleotide
cagaaccaaucaucugacc

SEQ ID NO: 1076223 - RNA, 19 nt, Artificial Sequence
  Description of Artificial Sequence: Synthetic oligonucleotide
auauggaucaaaacacauu

SEQ ID NO: 1076224 - RNA, 19 nt, Artificial Sequence
  Description of Artificial Sequence: Synthetic oligonucleotide
agcaguaagaaggguuucu

SEQ ID NO: 1076225 - RNA, 19 nt, Artificial Sequence
  Description of Artificial Sequence: Synthetic oligonucleotide
cagguucacaauagcccag

SEQ ID NO: 1076226 - RNA, 19 nt, Artificial Sequence
  Description of Artificial Sequence: Synthetic oligonucleotide
caucaucgccuuugaaaac

SEQ ID NO: 1076227 - RNA, 19 nt, Artificial Sequence
  Description of Artificial Sequence: Synthetic oligonucleotide
acuacucagaaaagcuuca

SEQ ID NO: 1076228 - RNA, 19 nt, Artificial Sequence
  Description of Artificial Sequence: Synthetic oligonucleotide
cauuguggaucacgucacc

SEQ ID NO: 1076229 - RNA, 19 nt, Artificial Sequence
  Description of Artificial Sequence: Synthetic oligonucleotide
auucccgaauugcuugccu

SEQ ID NO: 1076230 - RNA, 19 nt, Artificial Sequence
  Description of Artificial Sequence: Synthetic oligonucleotide
ucagggugguuguccucgg

SEQ ID NO: 1076231 - RNA, 19 nt, Artificial Sequence
  Description of Artificial Sequence: Synthetic oligonucleotide
ggcgaauauggaucaaaac

SEQ ID NO: 1076232 - RNA, 19 nt, Artificial Sequence
  Description of Artificial Sequence: Synthetic oligonucleotide
aacuccgcaucuggacagg

SEQ ID NO: 1076233 - RNA, 19 nt, Artificial Sequence
  Description of Artificial Sequence: Synthetic oligonucleotide
agugcucacccaccggaga

SEQ ID NO: 1076234 - RNA, 19 nt, Artificial Sequence
  Description of Artificial Sequence: Synthetic oligonucleotide
ggagacgaauacaaauccc

SEQ ID NO: 1076235 - RNA, 19 nt, Artificial Sequence
  Description of Artificial Sequence: Synthetic oligonucleotide
agccuguucagaaugggau

SEQ ID NO: 1076236 - RNA, 19 nt, Artificial Sequence
  Description of Artificial Sequence: Synthetic oligonucleotide
gauucccgaauugcuugcc

SEQ ID NO: 1076237 - RNA, 19 nt, Artificial Sequence
  Description of Artificial Sequence: Synthetic oligonucleotide
gucugguuccccacauugg

SEQ ID NO: 1076238 - RNA, 19 nt, Artificial Sequence
  Description of Artificial Sequence: Synthetic oligonucleotide
aagugcucacccaccggag

SEQ ID NO: 1076239 - RNA, 19 nt, Artificial Sequence
  Description of Artificial Sequence: Synthetic oligonucleotide
aaggguuucuuugcgcauu

SEQ ID NO: 1076240 - RNA, 19 nt, Artificial Sequence
  Description of Artificial Sequence: Synthetic oligonucleotide
cuucaauaucaaauguccu

SEQ ID NO: 1076241 - RNA, 19 nt, Artificial Sequence
  Description of Artificial Sequence: Synthetic oligonucleotide
cacgucaccuauaaacaaa

SEQ ID NO: 1076242 - RNA, 19 nt, Artificial Sequence
  Description of Artificial Sequence: Synthetic oligonucleotide
ccaccggagaaacagcacc

SEQ ID NO: 1076243 - RNA, 19 nt, Artificial Sequence
  Description of Artificial Sequence: Synthetic oligonucleotide
uuguaccacuuguucaguu

SEQ ID NO: 1076244 - RNA, 19 nt, Artificial Sequence
  Description of Artificial Sequence: Synthetic oligonucleotide
gcugucaugacccuugggu

SEQ ID NO: 1076245 - RNA, 19 nt, Artificial Sequence
  Description of Artificial Sequence: Synthetic oligonucleotide
uucccgaauugcuugccuu

SEQ ID NO: 1076246 - RNA, 19 nt, Artificial Sequence
  Description of Artificial Sequence: Synthetic oligonucleotide
ggaagggucagaaccaauc

SEQ ID NO: 1076247 - RNA, 19 nt, Artificial Sequence
  Description of Artificial Sequence: Synthetic oligonucleotide
caagaagacucucacuacu

SEQ ID NO: 1076248 - RNA, 19 nt, Artificial Sequence
  Description of Artificial Sequence: Synthetic oligonucleotide
aagucacccuacugugaaa

SEQ ID NO: 1076249 - RNA, 19 nt, Artificial Sequence
  Description of Artificial Sequence: Synthetic oligonucleotide
uuugcgcauuucuucgguu

SEQ ID NO: 1076250 - RNA, 19 nt, Artificial Sequence
  Description of Artificial Sequence: Synthetic oligonucleotide
cuacugucugguuccccac

SEQ ID NO: 1076251 - RNA, 19 nt, Artificial Sequence
  Description of Artificial Sequence: Synthetic oligonucleotide
uguucagaaugggauugua

SEQ ID NO: 1076252 - RNA, 19 nt, Artificial Sequence
  Description of Artificial Sequence: Synthetic oligonucleotide
ggccacaaaaguguggaac

SEQ ID NO: 1076253 - RNA, 19 nt, Artificial Sequence
  Description of Artificial Sequence: Synthetic oligonucleotide
acgucaccuauaaacaaau

SEQ ID NO: 1076254 - RNA, 19 nt, Artificial Sequence
  Description of Artificial Sequence: Synthetic oligonucleotide
cacaaaaguguggaacuga

SEQ ID NO: 1076255 - RNA, 19 nt, Artificial Sequence
  Description of Artificial Sequence: Synthetic oligonucleotide
ggcagguuauuaaaaucug

SEQ ID NO: 1076256 - RNA, 19 nt, Artificial Sequence
  Description of Artificial Sequence: Synthetic oligonucleotide
aguacgcccgggaagggcu

SEQ ID NO: 1076257 - RNA, 19 nt, Artificial Sequence
  Description of Artificial Sequence: Synthetic oligonucleotide
gaucuacauaugaacaaau

SEQ ID NO: 1076258 - RNA, 19 nt, Artificial Sequence
  Description of Artificial Sequence: Synthetic oligonucleotide
ggaagugcucacccaccgg

SEQ ID NO: 1076259 - RNA, 19 nt, Artificial Sequence
  Description of Artificial Sequence: Synthetic oligonucleotide
gaggcgaauauggaucaaa

SEQ ID NO: 1076260 - RNA, 19 nt, Artificial Sequence
  Description of Artificial Sequence: Synthetic oligonucleotide
acuuaaucgccagcaguaa

SEQ ID NO: 1076261 - RNA, 19 nt, Artificial Sequence
  Description of Artificial Sequence: Synthetic oligonucleotide
cuuaucccgaugaggccca

SEQ ID NO: 1076262 - RNA, 19 nt, Artificial Sequence
  Description of Artificial Sequence: Synthetic oligonucleotide
ggcuucauacagaagucac

SEQ ID NO: 1076263 - RNA, 19 nt, Artificial Sequence
  Description of Artificial Sequence: Synthetic oligonucleotide
auaagcuauucaaguaauu

SEQ ID NO: 1076264 - RNA, 19 nt, Artificial Sequence
  Description of Artificial Sequence: Synthetic oligonucleotide
agacuuccacaaucaaaua

SEQ ID NO: 1076265 - RNA, 19 nt, Artificial Sequence
  Description of Artificial Sequence: Synthetic oligonucleotide
cuccggaguacaggaaccc

SEQ ID NO: 1076266 - RNA, 19 nt, Artificial Sequence
  Description of Artificial Sequence: Synthetic oligonucleotide
augagggacuuaaucgcca

SEQ ID NO: 1076267 - RNA, 19 nt, Artificial Sequence
  Description of Artificial Sequence: Synthetic oligonucleotide
agguucacaauagcccaga

SEQ ID NO: 1076268 - RNA, 19 nt, Artificial Sequence
  Description of Artificial Sequence: Synthetic oligonucleotide
ccaguauagaagacuucug

SEQ ID NO: 1076269 - RNA, 19 nt, Artificial Sequence
  Description of Artificial Sequence: Synthetic oligonucleotide
cugcauacgguggguagac

SEQ ID NO: 1076270 - RNA, 19 nt, Artificial Sequence
  Description of Artificial Sequence: Synthetic oligonucleotide
guacuucuacacugagaca

SEQ ID NO: 1076271 - RNA, 19 nt, Artificial Sequence
  Description of Artificial Sequence: Synthetic oligonucleotide
aaucaucucuugagguuuu

SEQ ID NO: 1076272 - RNA, 19 nt, Artificial Sequence
  Description of Artificial Sequence: Synthetic oligonucleotide
gugucucuauaguuccaca

SEQ ID NO: 1076273 - RNA, 19 nt, Artificial Sequence
  Description of Artificial Sequence: Synthetic oligonucleotide
aggcgaauauggaucaaaa

SEQ ID NO: 1076274 - RNA, 19 nt, Artificial Sequence
  Description of Artificial Sequence: Synthetic oligonucleotide
agcccagaugacuuauauu

SEQ ID NO: 1076275 - RNA, 19 nt, Artificial Sequence
  Description of Artificial Sequence: Synthetic oligonucleotide
cacccaccggagaaacagc

SEQ ID NO: 1076276 - RNA, 19 nt, Artificial Sequence
  Description of Artificial Sequence: Synthetic oligonucleotide
gggcugaauaucuuccaga

SEQ ID NO: 1076277 - RNA, 19 nt, Artificial Sequence
  Description of Artificial Sequence: Synthetic oligonucleotide
aagcuucagcuaagcaaca

SEQ ID NO: 1076278 - RNA, 19 nt, Artificial Sequence
  Description of Artificial Sequence: Synthetic oligonucleotide
cccagaugacuuauauuug

SEQ ID NO: 1076279 - RNA, 19 nt, Artificial Sequence
  Description of Artificial Sequence: Synthetic oligonucleotide
caugcucuaguuaaauauu

SEQ ID NO: 1076280 - RNA, 19 nt, Artificial Sequence
  Description of Artificial Sequence: Synthetic oligonucleotide
cuaugggauagagguggac

SEQ ID NO: 1076281 - RNA, 19 nt, Artificial Sequence
  Description of Artificial Sequence: Synthetic oligonucleotide
ggggaggcgaauauggauc

SEQ ID NO: 1076282 - RNA, 19 nt, Artificial Sequence
  Description of Artificial Sequence: Synthetic oligonucleotide
gacccuugggucagguuca

SEQ ID NO: 1076283 - RNA, 19 nt, Artificial Sequence
  Description of Artificial Sequence: Synthetic oligonucleotide
guuccaguacgcccgggaa

SEQ ID NO: 1076284 - RNA, 19 nt, Artificial Sequence
  Description of Artificial Sequence: Synthetic oligonucleotide
acaaauccccugucugguu

SEQ ID NO: 1076285 - RNA, 19 nt, Artificial Sequence
  Description of Artificial Sequence: Synthetic oligonucleotide
cagggcuccggaguacagg

SEQ ID NO: 1076286 - RNA, 19 nt, Artificial Sequence
  Description of Artificial Sequence: Synthetic oligonucleotide
auacgguggguagacccca

SEQ ID NO: 1076287 - RNA, 19 nt, Artificial Sequence
  Description of Artificial Sequence: Synthetic oligonucleotide
auaucaugcucuaguuaaa

SEQ ID NO: 1076288 - RNA, 19 nt, Artificial Sequence
  Description of Artificial Sequence: Synthetic oligonucleotide
gccacaaaaguguggaacu

SEQ ID NO: 1076289 - RNA, 19 nt, Artificial Sequence
  Description of Artificial Sequence: Synthetic oligonucleotide
guaguacuucaguuucuua

SEQ ID NO: 1076290 - RNA, 19 nt, Artificial Sequence
  Description of Artificial Sequence: Synthetic oligonucleotide
acccaccggagaaacagca

SEQ ID NO: 1076291 - RNA, 19 nt, Artificial Sequence
  Description of Artificial Sequence: Synthetic oligonucleotide
ugcauacgguggguagacc

SEQ ID NO: 1076292 - RNA, 19 nt, Artificial Sequence
  Description of Artificial Sequence: Synthetic oligonucleotide
gacguccaacacucauuuc

SEQ ID NO: 1076293 - RNA, 19 nt, Artificial Sequence
  Description of Artificial Sequence: Synthetic oligonucleotide
ccggcagguuauuaaaauc

SEQ ID NO: 1076294 - RNA, 19 nt, Artificial Sequence
  Description of Artificial Sequence: Synthetic oligonucleotide
cagcauuguggaucacguc

SEQ ID NO: 1076295 - RNA, 19 nt, Artificial Sequence
  Description of Artificial Sequence: Synthetic oligonucleotide
cuguccggcagguuauuaa

SEQ ID NO: 1076296 - RNA, 19 nt, Artificial Sequence
  Description of Artificial Sequence: Synthetic oligonucleotide
agugcacguuagcauuuua

SEQ ID NO: 1076297 - RNA, 19 nt, Artificial Sequence
  Description of Artificial Sequence: Synthetic oligonucleotide
ggacuuaaucgccagcagu

SEQ ID NO: 1076298 - RNA, 19 nt, Artificial Sequence
  Description of Artificial Sequence: Synthetic oligonucleotide
uggacccggucaguuauau

SEQ ID NO: 1076299 - RNA, 19 nt, Artificial Sequence
  Description of Artificial Sequence: Synthetic oligonucleotide
cguuagcauuuuaaauuag

SEQ ID NO: 1076300 - RNA, 19 nt, Artificial Sequence
  Description of Artificial Sequence: Synthetic oligonucleotide
ccggucaguuauauuguac

SEQ ID NO: 1076301 - RNA, 19 nt, Artificial Sequence
  Description of Artificial Sequence: Synthetic oligonucleotide
ccggaguacaggaacccac

SEQ ID NO: 1076302 - RNA, 19 nt, Artificial Sequence
  Description of Artificial Sequence: Synthetic oligonucleotide
cagggugguuguccucggg

SEQ ID NO: 1076303 - RNA, 19 nt, Artificial Sequence
  Description of Artificial Sequence: Synthetic oligonucleotide
gcuaugcacuaacauuaga

SEQ ID NO: 1076304 - RNA, 19 nt, Artificial Sequence
  Description of Artificial Sequence: Synthetic oligonucleotide
acccuacugugaaagcaca

SEQ ID NO: 1076305 - RNA, 19 nt, Artificial Sequence
  Description of Artificial Sequence: Synthetic oligonucleotide
gaggaagggucagaaccaa

SEQ ID NO: 1076306 - RNA, 19 nt, Artificial Sequence
  Description of Artificial Sequence: Synthetic oligonucleotide
ucaugacccuugggucagg

SEQ ID NO: 1076307 - RNA, 19 nt, Artificial Sequence
  Description of Artificial Sequence: Synthetic oligonucleotide
caguacgcccgggaagggc

SEQ ID NO: 1076308 - RNA, 19 nt, Artificial Sequence
  Description of Artificial Sequence: Synthetic oligonucleotide
gggcgucuugcccaacaag

SEQ ID NO: 1076309 - RNA, 19 nt, Artificial Sequence
  Description of Artificial Sequence: Synthetic oligonucleotide
cggucaguuauauuguaca

SEQ ID NO: 1076310 - RNA, 19 nt, Artificial Sequence
  Description of Artificial Sequence: Synthetic oligonucleotide
caguuauauuguacagucu

SEQ ID NO: 1076311 - RNA, 19 nt, Artificial Sequence
  Description of Artificial Sequence: Synthetic oligonucleotide
gauacccaacaacuuuauu

SEQ ID NO: 1076312 - RNA, 19 nt, Artificial Sequence
  Description of Artificial Sequence: Synthetic oligonucleotide
caggauacccaacaacuuu

SEQ ID NO: 1076313 - RNA, 19 nt, Artificial Sequence
  Description of Artificial Sequence: Synthetic oligonucleotide
ucuguccggcagguuauua

SEQ ID NO: 1076314 - RNA, 19 nt, Artificial Sequence
  Description of Artificial Sequence: Synthetic oligonucleotide
aacccaccuccuccugcau

SEQ ID NO: 1076315 - RNA, 19 nt, Artificial Sequence
  Description of Artificial Sequence: Synthetic oligonucleotide
gcacguuagcauuuuaaau

SEQ ID NO: 1076316 - RNA, 19 nt, Artificial Sequence
  Description of Artificial Sequence: Synthetic oligonucleotide
caauagcccagaugacuua

SEQ ID NO: 1076317 - RNA, 19 nt, Artificial Sequence
  Description of Artificial Sequence: Synthetic oligonucleotide
caaucaucucuugagguuu

SEQ ID NO: 1076318 - RNA, 19 nt, Artificial Sequence
  Description of Artificial Sequence: Synthetic oligonucleotide
cuuugcgcauuucuucggu

SEQ ID NO: 1076319 - RNA, 19 nt, Artificial Sequence
  Description of Artificial Sequence: Synthetic oligonucleotide
acgguggguagaccccagu

SEQ ID NO: 1076320 - RNA, 19 nt, Artificial Sequence
  Description of Artificial Sequence: Synthetic oligonucleotide
gcacaacaugggaacuagg

SEQ ID NO: 1076321 - RNA, 19 nt, Artificial Sequence
  Description of Artificial Sequence: Synthetic oligonucleotide
gccagccuguucagaaugg

SEQ ID NO: 1076322 - RNA, 19 nt, Artificial Sequence
  Description of Artificial Sequence: Synthetic oligonucleotide
uaaaucuguccggcagguu

SEQ ID NO: 1076323 - RNA, 19 nt, Artificial Sequence
  Description of Artificial Sequence: Synthetic oligonucleotide
ccacaaaaguguggaacug

SEQ ID NO: 1076324 - RNA, 19 nt, Artificial Sequence
  Description of Artificial Sequence: Synthetic oligonucleotide
agguggacccggucaguua

SEQ ID NO: 1076325 - RNA, 19 nt, Artificial Sequence
  Description of Artificial Sequence: Synthetic oligonucleotide
uuaucccgaugaggcccag

SEQ ID NO: 1076326 - RNA, 19 nt, Artificial Sequence
  Description of Artificial Sequence: Synthetic oligonucleotide
cacucucaaacuucagcau

SEQ ID NO: 1076327 - RNA, 19 nt, Artificial Sequence
  Description of Artificial Sequence: Synthetic oligonucleotide
gagacagguugaagaaagu

SEQ ID NO: 1076328 - RNA, 19 nt, Artificial Sequence
  Description of Artificial Sequence: Synthetic oligonucleotide
augacccuugggucagguu

SEQ ID NO: 1076329 - RNA, 19 nt, Artificial Sequence
  Description of Artificial Sequence: Synthetic oligonucleotide
gguuccccacauugguuuc

SEQ ID NO: 1076330 - RNA, 19 nt, Artificial Sequence
  Description of Artificial Sequence: Synthetic oligonucleotide
ggcuuuguucuuggauaag

SEQ ID NO: 1076331 - RNA, 19 nt, Artificial Sequence
  Description of Artificial Sequence: Synthetic oligonucleotide
acuccgcaucuggacagga

SEQ ID NO: 1076332 - RNA, 19 nt, Artificial Sequence
  Description of Artificial Sequence: Synthetic oligonucleotide
cucacccaccggagaaaca

SEQ ID NO: 1076333 - RNA, 19 nt, Artificial Sequence
  Description of Artificial Sequence: Synthetic oligonucleotide
agagguggacccggucagu

SEQ ID NO: 1076334 - RNA, 19 nt, Artificial Sequence
  Description of Artificial Sequence: Synthetic oligonucleotide
cccaguauagaagacuucu

SEQ ID NO: 1076335 - RNA, 19 nt, Artificial Sequence
  Description of Artificial Sequence: Synthetic oligonucleotide
gguggacccggucaguuau

SEQ ID NO: 1076336 - RNA, 19 nt, Artificial Sequence
  Description of Artificial Sequence: Synthetic oligonucleotide
guccggcagguuauuaaaa

SEQ ID NO: 1076337 - RNA, 19 nt, Artificial Sequence
  Description of Artificial Sequence: Synthetic oligonucleotide
gcucucuguuccaguacgc

SEQ ID NO: 1076338 - RNA, 19 nt, Artificial Sequence
  Description of Artificial Sequence: Synthetic oligonucleotide
gaaugggauuguaccacuu

SEQ ID NO: 1076339 - RNA, 19 nt, Artificial Sequence
  Description of Artificial Sequence: Synthetic oligonucleotide
uacgcccgggaagggcuga

SEQ ID NO: 1076340 - RNA, 19 nt, Artificial Sequence
  Description of Artificial Sequence: Synthetic oligonucleotide
auagcccagaugacuuaua

SEQ ID NO: 1076341 - RNA, 19 nt, Artificial Sequence
  Description of Artificial Sequence: Synthetic oligonucleotide
cuucgacguccaacacuca

SEQ ID NO: 1076342 - RNA, 19 nt, Artificial Sequence
  Description of Artificial Sequence: Synthetic oligonucleotide
cuccgcaucuggacaggaa

SEQ ID NO: 1076343 - RNA, 19 nt, Artificial Sequence
  Description of Artificial Sequence: Synthetic oligonucleotide
cccaccggagaaacagcac

SEQ ID NO: 1076344 - RNA, 19 nt, Artificial Sequence
  Description of Artificial Sequence: Synthetic oligonucleotide
ccgggaagggcugaauauc

SEQ ID NO: 1076345 - RNA, 19 nt, Artificial Sequence
  Description of Artificial Sequence: Synthetic oligonucleotide
ccgaauugcuugccuucug

SEQ ID NO: 1076346 - RNA, 19 nt, Artificial Sequence
  Description of Artificial Sequence: Synthetic oligonucleotide
cgucaccuauaaacaaauc

SEQ ID NO: 1076347 - RNA, 19 nt, Artificial Sequence
  Description of Artificial Sequence: Synthetic oligonucleotide
guacgcccgggaagggcug

SEQ ID NO: 1076348 - RNA, 19 nt, Artificial Sequence
  Description of Artificial Sequence: Synthetic oligonucleotide
ccccaguauagaagacuuc

SEQ ID NO: 1076349 - RNA, 19 nt, Artificial Sequence
  Description of Artificial Sequence: Synthetic oligonucleotide
ggaucacgucaccuauaaa

SEQ ID NO: 1076350 - RNA, 19 nt, Artificial Sequence
  Description of Artificial Sequence: Synthetic oligonucleotide
ggucuuugaucugaacaau

SEQ ID NO: 1076351 - RNA, 19 nt, Artificial Sequence
  Description of Artificial Sequence: Synthetic oligonucleotide
guggaucacgucaccuaua

SEQ ID NO: 1076352 - RNA, 19 nt, Artificial Sequence
  Description of Artificial Sequence: Synthetic oligonucleotide
cuggugccucucacucuca

SEQ ID NO: 1076353 - RNA, 19 nt, Artificial Sequence
  Description of Artificial Sequence: Synthetic oligonucleotide
cuucugggauguaguacuu

SEQ ID NO: 1076354 - RNA, 19 nt, Artificial Sequence
  Description of Artificial Sequence: Synthetic oligonucleotide
gcgucuugcccaacaagaa

SEQ ID NO: 1076355 - RNA, 19 nt, Artificial Sequence
  Description of Artificial Sequence: Synthetic oligonucleotide
gagguggacccggucaguu

SEQ ID NO: 1076356 - RNA, 19 nt, Artificial Sequence
  Description of Artificial Sequence: Synthetic oligonucleotide
ggggcgucuugcccaacaa

SEQ ID NO: 1076357 - RNA, 19 nt, Artificial Sequence
  Description of Artificial Sequence: Synthetic oligonucleotide
cugccccaagauucccgaa

SEQ ID NO: 1076358 - RNA, 19 nt, Artificial Sequence
  Description of Artificial Sequence: Synthetic oligonucleotide
aucuguccggcagguuauu

SEQ ID NO: 1076359 - RNA, 19 nt, Artificial Sequence
  Description of Artificial Sequence: Synthetic oligonucleotide
ggauacccaacaacuuuau

SEQ ID NO: 1076360 - RNA, 19 nt, Artificial Sequence
  Description of Artificial Sequence: Synthetic oligonucleotide
cucgggaacaaggcccagu

SEQ ID NO: 1076361 - RNA, 19 nt, Artificial Sequence
  Description of Artificial Sequence: Synthetic oligonucleotide
ccaguacgcccgggaaggg

SEQ ID NO: 1076362 - RNA, 19 nt, Artificial Sequence
  Description of Artificial Sequence: Synthetic oligonucleotide
caugacccuugggucaggu

SEQ ID NO: 1076363 - RNA, 19 nt, Artificial Sequence
  Description of Artificial Sequence: Synthetic oligonucleotide
gccccaagauucccgaauu

SEQ ID NO: 1076364 - RNA, 19 nt, Artificial Sequence
  Description of Artificial Sequence: Synthetic oligonucleotide
cgggaagggcugaauaucu

SEQ ID NO: 1076365 - RNA, 19 nt, Artificial Sequence
  Description of Artificial Sequence: Synthetic oligonucleotide
cucucacuacugucugguu

SEQ ID NO: 1076366 - RNA, 19 nt, Artificial Sequence
  Description of Artificial Sequence: Synthetic oligonucleotide
cccggucaguuauauugua

SEQ ID NO: 1076367 - RNA, 19 nt, Artificial Sequence
  Description of Artificial Sequence: Synthetic oligonucleotide
ggaggcgaauauggaucaa

SEQ ID NO: 1076368 - RNA, 19 nt, Artificial Sequence
  Description of Artificial Sequence: Synthetic oligonucleotide
guggacccggucaguuaua

SEQ ID NO: 1076369 - RNA, 19 nt, Artificial Sequence
  Description of Artificial Sequence: Synthetic oligonucleotide
cgacguccaacacucauuu

SEQ ID NO: 1076370 - RNA, 19 nt, Artificial Sequence
  Description of Artificial Sequence: Synthetic oligonucleotide
acgcccgggaagggcugaa

SEQ ID NO: 1076371 - RNA, 19 nt, Artificial Sequence
  Description of Artificial Sequence: Synthetic oligonucleotide
gggaagggcugaauaucuu

SEQ ID NO: 1076372 - RNA, 19 nt, Artificial Sequence
  Description of Artificial Sequence: Synthetic oligonucleotide
cagugcacguuagcauuuu

SEQ ID NO: 1076373 - RNA, 19 nt, Artificial Sequence
  Description of Artificial Sequence: Synthetic oligonucleotide
ggacccggucaguuauauu

SEQ ID NO: 1076374 - RNA, 19 nt, Artificial Sequence
  Description of Artificial Sequence: Synthetic oligonucleotide
cgcccgggaagggcugaau

SEQ ID NO: 1076375 - RNA, 19 nt, Artificial Sequence
  Description of Artificial Sequence: Synthetic oligonucleotide
aauuuuauagacaacuauc

SEQ ID NO: 1076376 - RNA, 19 nt, Artificial Sequence
  Description of Artificial Sequence: Synthetic oligonucleotide
uuuaucuuagcacaggaga

SEQ ID NO: 1076377 - RNA, 19 nt, Artificial Sequence
  Description of Artificial Sequence: Synthetic oligonucleotide
aaauccucaauuguucucc

SEQ ID NO: 1076378 - RNA, 19 nt, Artificial Sequence
  Description of Artificial Sequence: Synthetic oligonucleotide
uaagccaagacaaaacugc

SEQ ID NO: 1076379 - RNA, 19 nt, Artificial Sequence
  Description of Artificial Sequence: Synthetic oligonucleotide
uuucuuaacaaaagucugg

SEQ ID NO: 1076380 - RNA, 19 nt, Artificial Sequence
  Description of Artificial Sequence: Synthetic oligonucleotide
uuacaucccaguuugagcc

SEQ ID NO: 1076381 - RNA, 19 nt, Artificial Sequence
  Description of Artificial Sequence: Synthetic oligonucleotide
augggucuaauucaagucc

SEQ ID NO: 1076382 - RNA, 19 nt, Artificial Sequence
  Description of Artificial Sequence: Synthetic oligonucleotide
uacacuacaauuuuauaga

SEQ ID NO: 1076383 - RNA, 19 nt, Artificial Sequence
  Description of Artificial Sequence: Synthetic oligonucleotide
acaacuaucccauuacauc

SEQ ID NO: 1076384 - RNA, 19 nt, Artificial Sequence
  Description of Artificial Sequence: Synthetic oligonucleotide
uuaucuuagcacaggagag

SEQ ID NO: 1076385 - RNA, 19 nt, Artificial Sequence
  Description of Artificial Sequence: Synthetic oligonucleotide
aaaacaaccgguguagaag

SEQ ID NO: 1076386 - RNA, 19 nt, Artificial Sequence
  Description of Artificial Sequence: Synthetic oligonucleotide
gucuaauucaaguccaugg

SEQ ID NO: 1076387 - RNA, 19 nt, Artificial Sequence
  Description of Artificial Sequence: Synthetic oligonucleotide
auuuacaacacgcuggcug

SEQ ID NO: 1076388 - RNA, 19 nt, Artificial Sequence
  Description of Artificial Sequence: Synthetic oligonucleotide
uuauuuacaacacgcuggc

SEQ ID NO: 1076389 - RNA, 19 nt, Artificial Sequence
  Description of Artificial Sequence: Synthetic oligonucleotide
aagcaaaugggagugagag

SEQ ID NO: 1076390 - RNA, 19 nt, Artificial Sequence
  Description of Artificial Sequence: Synthetic oligonucleotide
aauucaaguccauggagca

SEQ ID NO: 1076391 - RNA, 19 nt, Artificial Sequence
  Description of Artificial Sequence: Synthetic oligonucleotide
aauuccaaacaagucuccc

SEQ ID NO: 1076392 - RNA, 19 nt, Artificial Sequence
  Description of Artificial Sequence: Synthetic oligonucleotide
aaagucaaagggugguagg

SEQ ID NO: 1076393 - RNA, 19 nt, Artificial Sequence
  Description of Artificial Sequence: Synthetic oligonucleotide
caacuaucccauuacaucc

SEQ ID NO: 1076394 - RNA, 19 nt, Artificial Sequence
  Description of Artificial Sequence: Synthetic oligonucleotide
ucuaauucaaguccaugga

SEQ ID NO: 1076395 - RNA, 19 nt, Artificial Sequence
  Description of Artificial Sequence: Synthetic oligonucleotide
uuauagacaacuaucccau

SEQ ID NO: 1076396 - RNA, 19 nt, Artificial Sequence
  Description of Artificial Sequence: Synthetic oligonucleotide
ugagucaucaccugauucc

SEQ ID NO: 1076397 - RNA, 19 nt, Artificial Sequence
  Description of Artificial Sequence: Synthetic oligonucleotide
cuugucuacagauccagcc

SEQ ID NO: 1076398 - RNA, 19 nt, Artificial Sequence
  Description of Artificial Sequence: Synthetic oligonucleotide
aaacaaccgguguagaaga

SEQ ID NO: 1076399 - RNA, 19 nt, Artificial Sequence
  Description of Artificial Sequence: Synthetic oligonucleotide
ucgggaauuaggcugaaga

SEQ ID NO: 1076400 - RNA, 19 nt, Artificial Sequence
  Description of Artificial Sequence: Synthetic oligonucleotide
guaacacgugaucagaucc

SEQ ID NO: 1076401 - RNA, 19 nt, Artificial Sequence
  Description of Artificial Sequence: Synthetic oligonucleotide
aagggugguagguugacug

SEQ ID NO: 1076402 - RNA, 19 nt, Artificial Sequence
  Description of Artificial Sequence: Synthetic oligonucleotide
acacuacaauuuuauagac

SEQ ID NO: 1076403 - RNA, 19 nt, Artificial Sequence
  Description of Artificial Sequence: Synthetic oligonucleotide
agucuggauaguucgaagg

SEQ ID NO: 1076404 - RNA, 19 nt, Artificial Sequence
  Description of Artificial Sequence: Synthetic oligonucleotide
ugucuguacaagcagccag

SEQ ID NO: 1076405 - RNA, 19 nt, Artificial Sequence
  Description of Artificial Sequence: Synthetic oligonucleotide
cuuagcacaggagaggugg

SEQ ID NO: 1076406 - RNA, 19 nt, Artificial Sequence
  Description of Artificial Sequence: Synthetic oligonucleotide
uucaggguggacuguaacg

SEQ ID NO: 1076407 - RNA, 19 nt, Artificial Sequence
  Description of Artificial Sequence: Synthetic oligonucleotide
aauuguucuccgccguuuc

SEQ ID NO: 1076408 - RNA, 19 nt, Artificial Sequence
  Description of Artificial Sequence: Synthetic oligonucleotide
uuugggcccauccagguca

SEQ ID NO: 1076409 - RNA, 19 nt, Artificial Sequence
  Description of Artificial Sequence: Synthetic oligonucleotide
aaacaagucucccucggga

SEQ ID NO: 1076410 - RNA, 19 nt, Artificial Sequence
  Description of Artificial Sequence: Synthetic oligonucleotide
gagucuguaucacugggag

SEQ ID NO: 1076411 - RNA, 19 nt, Artificial Sequence
  Description of Artificial Sequence: Synthetic oligonucleotide
uccucaauuguucuccgcc

SEQ ID NO: 1076412 - RNA, 19 nt, Artificial Sequence
  Description of Artificial Sequence: Synthetic oligonucleotide
ugugcuacccaccuccuug

SEQ ID NO: 1076413 - RNA, 19 nt, Artificial Sequence
  Description of Artificial Sequence: Synthetic oligonucleotide
gcaauggcgagcuagagcc

SEQ ID NO: 1076414 - RNA, 19 nt, Artificial Sequence
  Description of Artificial Sequence: Synthetic oligonucleotide
uuuacaacacgcuggcugu

SEQ ID NO: 1076415 - RNA, 19 nt, Artificial Sequence
  Description of Artificial Sequence: Synthetic oligonucleotide
augagucaucaccugauuc

SEQ ID NO: 1076416 - RNA, 19 nt, Artificial Sequence
  Description of Artificial Sequence: Synthetic oligonucleotide
uagacaacuaucccauuac

SEQ ID NO: 1076417 - RNA, 19 nt, Artificial Sequence
  Description of Artificial Sequence: Synthetic oligonucleotide
aggacagcguacaagacac

SEQ ID NO: 1076418 - RNA, 19 nt, Artificial Sequence
  Description of Artificial Sequence: Synthetic oligonucleotide
gauaguucgaagguccgag

SEQ ID NO: 1076419 - RNA, 19 nt, Artificial Sequence
  Description of Artificial Sequence: Synthetic oligonucleotide
caaguaaagucacaaguuc

SEQ ID NO: 1076420 - RNA, 19 nt, Artificial Sequence
  Description of Artificial Sequence: Synthetic oligonucleotide
auguaaugggucuaauuca

SEQ ID NO: 1076421 - RNA, 19 nt, Artificial Sequence
  Description of Artificial Sequence: Synthetic oligonucleotide
ugcaguaacacgugaucag

SEQ ID NO: 1076422 - RNA, 19 nt, Artificial Sequence
  Description of Artificial Sequence: Synthetic oligonucleotide
ucuggcaauaaaagaaguc

SEQ ID NO: 1076423 - RNA, 19 nt, Artificial Sequence
  Description of Artificial Sequence: Synthetic oligonucleotide
aagucuggauaguucgaag

SEQ ID NO: 1076424 - RNA, 19 nt, Artificial Sequence
  Description of Artificial Sequence: Synthetic oligonucleotide
accugcauaagccaagaca

SEQ ID NO: 1076425 - RNA, 19 nt, Artificial Sequence
  Description of Artificial Sequence: Synthetic oligonucleotide
uucuuaacaaaagucugga

SEQ ID NO: 1076426 - RNA, 19 nt, Artificial Sequence
  Description of Artificial Sequence: Synthetic oligonucleotide
ucggagguggaucuucggg

SEQ ID NO: 1076427 - RNA, 19 nt, Artificial Sequence
  Description of Artificial Sequence: Synthetic oligonucleotide
cucaagagugaugucaagg

SEQ ID NO: 1076428 - RNA, 19 nt, Artificial Sequence
  Description of Artificial Sequence: Synthetic oligonucleotide
uguaaccugcauaagccaa

SEQ ID NO: 1076429 - RNA, 19 nt, Artificial Sequence
  Description of Artificial Sequence: Synthetic oligonucleotide
uuugcuaggagggauguaa

SEQ ID NO: 1076430 - RNA, 19 nt, Artificial Sequence
  Description of Artificial Sequence: Synthetic oligonucleotide
acuuucuguucuuucgguc

SEQ ID NO: 1076431 - RNA, 19 nt, Artificial Sequence
  Description of Artificial Sequence: Synthetic oligonucleotide
cugcacucgaucaugggcc

SEQ ID NO: 1076432 - RNA, 19 nt, Artificial Sequence
  Description of Artificial Sequence: Synthetic oligonucleotide
caaccgguguagaagaaag

SEQ ID NO: 1076433 - RNA, 19 nt, Artificial Sequence
  Description of Artificial Sequence: Synthetic oligonucleotide
ugguagguugacuggacag

SEQ ID NO: 1076434 - RNA, 19 nt, Artificial Sequence
  Description of Artificial Sequence: Synthetic oligonucleotide
gaaagcaaaugggagugag

SEQ ID NO: 1076435 - RNA, 19 nt, Artificial Sequence
  Description of Artificial Sequence: Synthetic oligonucleotide
ggagacgccacuuugggcc

SEQ ID NO: 1076436 - RNA, 19 nt, Artificial Sequence
  Description of Artificial Sequence: Synthetic oligonucleotide
ugggucuaauucaagucca

SEQ ID NO: 1076437 - RNA, 19 nt, Artificial Sequence
  Description of Artificial Sequence: Synthetic oligonucleotide
aguucgaagguccgagggg

SEQ ID NO: 1076438 - RNA, 19 nt, Artificial Sequence
  Description of Artificial Sequence: Synthetic oligonucleotide
ugguacuccgccuuugagc

SEQ ID NO: 1076439 - RNA, 19 nt, Artificial Sequence
  Description of Artificial Sequence: Synthetic oligonucleotide
gaugucaagguucucccga

SEQ ID NO: 1076440 - RNA, 19 nt, Artificial Sequence
  Description of Artificial Sequence: Synthetic oligonucleotide
ugaggcuagugauaauuga

SEQ ID NO: 1076441 - RNA, 19 nt, Artificial Sequence
  Description of Artificial Sequence: Synthetic oligonucleotide
guaugcgucagggaugugg

SEQ ID NO: 1076442 - RNA, 19 nt, Artificial Sequence
  Description of Artificial Sequence: Synthetic oligonucleotide
ucuuucgaggcugggaaag

SEQ ID NO: 1076443 - RNA, 19 nt, Artificial Sequence
  Description of Artificial Sequence: Synthetic oligonucleotide
cauggagcaggaaggacag

SEQ ID NO: 1076444 - RNA, 19 nt, Artificial Sequence
  Description of Artificial Sequence: Synthetic oligonucleotide
ucccucgggaauuaggcug

SEQ ID NO: 1076445 - RNA, 19 nt, Artificial Sequence
  Description of Artificial Sequence: Synthetic oligonucleotide
aaaugggagugagagagaa

SEQ ID NO: 1076446 - RNA, 19 nt, Artificial Sequence
  Description of Artificial Sequence: Synthetic oligonucleotide
auagacaacuaucccauua

SEQ ID NO: 1076447 - RNA, 19 nt, Artificial Sequence
  Description of Artificial Sequence: Synthetic oligonucleotide
auuuacacuacaauuuuau

SEQ ID NO: 1076448 - RNA, 19 nt, Artificial Sequence
  Description of Artificial Sequence: Synthetic oligonucleotide
uuucgguccuucuuucgag

SEQ ID NO: 1076449 - RNA, 19 nt, Artificial Sequence
  Description of Artificial Sequence: Synthetic oligonucleotide
agugauaauugacaccuuu

SEQ ID NO: 1076450 - RNA, 19 nt, Artificial Sequence
  Description of Artificial Sequence: Synthetic oligonucleotide
aauggcgagcuagagccag

SEQ ID NO: 1076451 - RNA, 19 nt, Artificial Sequence
  Description of Artificial Sequence: Synthetic oligonucleotide
cuggcaauaaaagaaguca

SEQ ID NO: 1076452 - RNA, 19 nt, Artificial Sequence
  Description of Artificial Sequence: Synthetic oligonucleotide
uuuacacuacaauuuuaua

SEQ ID NO: 1076453 - RNA, 19 nt, Artificial Sequence
  Description of Artificial Sequence: Synthetic oligonucleotide
agugcuguauuuacacuac

SEQ ID NO: 1076454 - RNA, 19 nt, Artificial Sequence
  Description of Artificial Sequence: Synthetic oligonucleotide
auaguucgaagguccgagg

SEQ ID NO: 1076455 - RNA, 19 nt, Artificial Sequence
  Description of Artificial Sequence: Synthetic oligonucleotide
ggauccacgucccacacag

SEQ ID NO: 1076456 - RNA, 19 nt, Artificial Sequence
  Description of Artificial Sequence: Synthetic oligonucleotide
aacaagucucccucgggaa

SEQ ID NO: 1076457 - RNA, 19 nt, Artificial Sequence
  Description of Artificial Sequence: Synthetic oligonucleotide
cauuacaucccaguuugag

SEQ ID NO: 1076458 - RNA, 19 nt, Artificial Sequence
  Description of Artificial Sequence: Synthetic oligonucleotide
aguaaagucacaaguucca

SEQ ID NO: 1076459 - RNA, 19 nt, Artificial Sequence
  Description of Artificial Sequence: Synthetic oligonucleotide
cuagugauaauugacaccu

SEQ ID NO: 1076460 - RNA, 19 nt, Artificial Sequence
  Description of Artificial Sequence: Synthetic oligonucleotide
uugagcaaccacuuugcuc

SEQ ID NO: 1076461 - RNA, 19 nt, Artificial Sequence
  Description of Artificial Sequence: Synthetic oligonucleotide
aaccgguguagaagaaagc

SEQ ID NO: 1076462 - RNA, 19 nt, Artificial Sequence
  Description of Artificial Sequence: Synthetic oligonucleotide
ugggccgcccagcaaaggg

SEQ ID NO: 1076463 - RNA, 19 nt, Artificial Sequence
  Description of Artificial Sequence: Synthetic oligonucleotide
gaucagaucccaugaguca

SEQ ID NO: 1076464 - RNA, 19 nt, Artificial Sequence
  Description of Artificial Sequence: Synthetic oligonucleotide
gcgagcuagagccagaagc

SEQ ID NO: 1076465 - RNA, 19 nt, Artificial Sequence
  Description of Artificial Sequence: Synthetic oligonucleotide
ugggagucuauccccacga

SEQ ID NO: 1076466 - RNA, 19 nt, Artificial Sequence
  Description of Artificial Sequence: Synthetic oligonucleotide
gaggcuagugauaauugac

SEQ ID NO: 1076467 - RNA, 19 nt, Artificial Sequence
  Description of Artificial Sequence: Synthetic oligonucleotide
agucuguaucacugggagg

SEQ ID NO: 1076468 - RNA, 19 nt, Artificial Sequence
  Description of Artificial Sequence: Synthetic oligonucleotide
aaagucuggauaguucgaa

SEQ ID NO: 1076469 - RNA, 19 nt, Artificial Sequence
  Description of Artificial Sequence: Synthetic oligonucleotide
gagugcuguauuuacacua

SEQ ID NO: 1076470 - RNA, 19 nt, Artificial Sequence
  Description of Artificial Sequence: Synthetic oligonucleotide
ugcgucagggaugugggag

SEQ ID NO: 1076471 - RNA, 19 nt, Artificial Sequence
  Description of Artificial Sequence: Synthetic oligonucleotide
caauaaaagaagucaggaa

SEQ ID NO: 1076472 - RNA, 19 nt, Artificial Sequence
  Description of Artificial Sequence: Synthetic oligonucleotide
caagguucucccgauuugg

SEQ ID NO: 1076473 - RNA, 19 nt, Artificial Sequence
  Description of Artificial Sequence: Synthetic oligonucleotide
uaugguacuccgccuuuga

SEQ ID NO: 1076474 - RNA, 19 nt, Artificial Sequence
  Description of Artificial Sequence: Synthetic oligonucleotide
caaacaagucucccucggg

SEQ ID NO: 1076475 - RNA, 19 nt, Artificial Sequence
  Description of Artificial Sequence: Synthetic oligonucleotide
cuggcuugagagucggagg

SEQ ID NO: 1076476 - RNA, 19 nt, Artificial Sequence
  Description of Artificial Sequence: Synthetic oligonucleotide
uucuccgccguuucuccgg

SEQ ID NO: 1076477 - RNA, 19 nt, Artificial Sequence
  Description of Artificial Sequence: Synthetic oligonucleotide
accgguguagaagaaagca

SEQ ID NO: 1076478 - RNA, 19 nt, Artificial Sequence
  Description of Artificial Sequence: Synthetic oligonucleotide
cacgugaucagaucccaug

SEQ ID NO: 1076479 - RNA, 19 nt, Artificial Sequence
  Description of Artificial Sequence: Synthetic oligonucleotide
auguaaccugcauaagcca

SEQ ID NO: 1076480 - RNA, 19 nt, Artificial Sequence
  Description of Artificial Sequence: Synthetic oligonucleotide
ugcacucgaucaugggccg

SEQ ID NO: 1076481 - RNA, 19 nt, Artificial Sequence
  Description of Artificial Sequence: Synthetic oligonucleotide
uguucuccgccguuucucc

SEQ ID NO: 1076482 - RNA, 19 nt, Artificial Sequence
  Description of Artificial Sequence: Synthetic oligonucleotide
acgugaucagaucccauga

SEQ ID NO: 1076483 - RNA, 19 nt, Artificial Sequence
  Description of Artificial Sequence: Synthetic oligonucleotide
agacaacuaucccauuaca

SEQ ID NO: 1076484 - RNA, 19 nt, Artificial Sequence
  Description of Artificial Sequence: Synthetic oligonucleotide
ucuugauucgagaccguuu

SEQ ID NO: 1076485 - RNA, 19 nt, Artificial Sequence
  Description of Artificial Sequence: Synthetic oligonucleotide
guagguugacuggacagag

SEQ ID NO: 1076486 - RNA, 19 nt, Artificial Sequence
  Description of Artificial Sequence: Synthetic oligonucleotide
ugugggagacaguggagac

SEQ ID NO: 1076487 - RNA, 19 nt, Artificial Sequence
  Description of Artificial Sequence: Synthetic oligonucleotide
uguugggagcacagaaacu

SEQ ID NO: 1076488 - RNA, 19 nt, Artificial Sequence
  Description of Artificial Sequence: Synthetic oligonucleotide
agggugguagguugacugg

SEQ ID NO: 1076489 - RNA, 19 nt, Artificial Sequence
  Description of Artificial Sequence: Synthetic oligonucleotide
ucccgauuuggggagaccc

SEQ ID NO: 1076490 - RNA, 19 nt, Artificial Sequence
  Description of Artificial Sequence: Synthetic oligonucleotide
ugcacucucaccccgcaau

SEQ ID NO: 1076491 - RNA, 19 nt, Artificial Sequence
  Description of Artificial Sequence: Synthetic oligonucleotide
ucucaccccgcaauggcga

SEQ ID NO: 1076492 - RNA, 19 nt, Artificial Sequence
  Description of Artificial Sequence: Synthetic oligonucleotide
agauguaaugggucuaauu

SEQ ID NO: 1076493 - RNA, 19 nt, Artificial Sequence
  Description of Artificial Sequence: Synthetic oligonucleotide
gguacuccgccuuugagca

SEQ ID NO: 1076494 - RNA, 19 nt, Artificial Sequence
  Description of Artificial Sequence: Synthetic oligonucleotide
agauccagccuccccugac

SEQ ID NO: 1076495 - RNA, 19 nt, Artificial Sequence
  Description of Artificial Sequence: Synthetic oligonucleotide
aagguucucccgauuuggg

SEQ ID NO: 1076496 - RNA, 19 nt, Artificial Sequence
  Description of Artificial Sequence: Synthetic oligonucleotide
ucuuaacaaaagucuggau

SEQ ID NO: 1076497 - RNA, 19 nt, Artificial Sequence
  Description of Artificial Sequence: Synthetic oligonucleotide
gagucuauccccacgaucu

SEQ ID NO: 1076498 - RNA, 19 nt, Artificial Sequence
  Description of Artificial Sequence: Synthetic oligonucleotide
ucuguacaagcagccagcc

SEQ ID NO: 1076499 - RNA, 19 nt, Artificial Sequence
  Description of Artificial Sequence: Synthetic oligonucleotide
ucccauuacaucccaguuu

SEQ ID NO: 1076500 - RNA, 19 nt, Artificial Sequence
  Description of Artificial Sequence: Synthetic oligonucleotide
aguggagacgccacuuugg

SEQ ID NO: 1076501 - RNA, 19 nt, Artificial Sequence
  Description of Artificial Sequence: Synthetic oligonucleotide
ucuggauaguucgaagguc

SEQ ID NO: 1076502 - RNA, 19 nt, Artificial Sequence
  Description of Artificial Sequence: Synthetic oligonucleotide
agccucaagagugauguca

SEQ ID NO: 1076503 - RNA, 19 nt, Artificial Sequence
  Description of Artificial Sequence: Synthetic oligonucleotide
cccauuacaucccaguuug

SEQ ID NO: 1076504 - RNA, 19 nt, Artificial Sequence
  Description of Artificial Sequence: Synthetic oligonucleotide
gcuagugauaauugacacc

SEQ ID NO: 1076505 - RNA, 19 nt, Artificial Sequence
  Description of Artificial Sequence: Synthetic oligonucleotide
cucucaccccgcaauggcg

SEQ ID NO: 1076506 - RNA, 19 nt, Artificial Sequence
  Description of Artificial Sequence: Synthetic oligonucleotide
agaaaacaugagggagugc

SEQ ID NO: 1076507 - RNA, 19 nt, Artificial Sequence
  Description of Artificial Sequence: Synthetic oligonucleotide
aaagcaaaugggagugaga

SEQ ID NO: 1076508 - RNA, 19 nt, Artificial Sequence
  Description of Artificial Sequence: Synthetic oligonucleotide
ucuuagcacaggagaggug

SEQ ID NO: 1076509 - RNA, 19 nt, Artificial Sequence
  Description of Artificial Sequence: Synthetic oligonucleotide
ggcuagugauaauugacac

SEQ ID NO: 1076510 - RNA, 19 nt, Artificial Sequence
  Description of Artificial Sequence: Synthetic oligonucleotide
guaaccugcauaagccaag

SEQ ID NO: 1076511 - RNA, 19 nt, Artificial Sequence
  Description of Artificial Sequence: Synthetic oligonucleotide
guucucccgauuuggggag

SEQ ID NO: 1076512 - RNA, 19 nt, Artificial Sequence
  Description of Artificial Sequence: Synthetic oligonucleotide
ccagcuaugguacuccgcc

SEQ ID NO: 1076513 - RNA, 19 nt, Artificial Sequence
  Description of Artificial Sequence: Synthetic oligonucleotide
gacagcguacaagacacuc

SEQ ID NO: 1076514 - RNA, 19 nt, Artificial Sequence
  Description of Artificial Sequence: Synthetic oligonucleotide
acuaucccauuacauccca

SEQ ID NO: 1076515 - RNA, 19 nt, Artificial Sequence
  Description of Artificial Sequence: Synthetic oligonucleotide
ucgguccuucuuucgaggc

SEQ ID NO: 1076516 - RNA, 19 nt, Artificial Sequence
  Description of Artificial Sequence: Synthetic oligonucleotide
ucaaacaugggagcccaaa

SEQ ID NO: 1076517 - RNA, 19 nt, Artificial Sequence
  Description of Artificial Sequence: Synthetic oligonucleotide
uacaucccaguuugagccc

SEQ ID NO: 1076518 - RNA, 19 nt, Artificial Sequence
  Description of Artificial Sequence: Synthetic oligonucleotide
aaugggagugagagagaag

SEQ ID NO: 1076519 - RNA, 19 nt, Artificial Sequence
  Description of Artificial Sequence: Synthetic oligonucleotide
gggagugcuguauuuacac

SEQ ID NO: 1076520 - RNA, 19 nt, Artificial Sequence
  Description of Artificial Sequence: Synthetic oligonucleotide
uugcuaggagggauguaac

SEQ ID NO: 1076521 - RNA, 19 nt, Artificial Sequence
  Description of Artificial Sequence: Synthetic oligonucleotide
aaccgccgggccucuggcc

SEQ ID NO: 1076522 - RNA, 19 nt, Artificial Sequence
  Description of Artificial Sequence: Synthetic oligonucleotide
ccugcauaagccaagacaa

SEQ ID NO: 1076523 - RNA, 19 nt, Artificial Sequence
  Description of Artificial Sequence: Synthetic oligonucleotide
augguacuccgccuuugag

SEQ ID NO: 1076524 - RNA, 19 nt, Artificial Sequence
  Description of Artificial Sequence: Synthetic oligonucleotide
ucuggccgaaguuccuugc

SEQ ID NO: 1076525 - RNA, 19 nt, Artificial Sequence
  Description of Artificial Sequence: Synthetic oligonucleotide
uugacuggacagagacuug

SEQ ID NO: 1076526 - RNA, 19 nt, Artificial Sequence
  Description of Artificial Sequence: Synthetic oligonucleotide
aggcuagugauaauugaca

SEQ ID NO: 1076527 - RNA, 19 nt, Artificial Sequence
  Description of Artificial Sequence: Synthetic oligonucleotide
cagccagccaauauuauua

SEQ ID NO: 1076528 - RNA, 19 nt, Artificial Sequence
  Description of Artificial Sequence: Synthetic oligonucleotide
augaggcuagugauaauug

SEQ ID NO: 1076529 - RNA, 19 nt, Artificial Sequence
  Description of Artificial Sequence: Synthetic oligonucleotide
ccugaaagucaaagggugg

SEQ ID NO: 1076530 - RNA, 19 nt, Artificial Sequence
  Description of Artificial Sequence: Synthetic oligonucleotide
ugagagucggagguggauc

SEQ ID NO: 1076531 - RNA, 19 nt, Artificial Sequence
  Description of Artificial Sequence: Synthetic oligonucleotide
gucaaacagagaguccuug

SEQ ID NO: 1076532 - RNA, 19 nt, Artificial Sequence
  Description of Artificial Sequence: Synthetic oligonucleotide
gcugcacucgaucaugggc

SEQ ID NO: 1076533 - RNA, 19 nt, Artificial Sequence
  Description of Artificial Sequence: Synthetic oligonucleotide
uggagacgccacuuugggc

SEQ ID NO: 1076534 - RNA, 19 nt, Artificial Sequence
  Description of Artificial Sequence: Synthetic oligonucleotide
gagguaugcgucagggaug

SEQ ID NO: 1076535 - RNA, 19 nt, Artificial Sequence
  Description of Artificial Sequence: Synthetic oligonucleotide
cuaaccgccgggccucugg

SEQ ID NO: 1076536 - RNA, 19 nt, Artificial Sequence
  Description of Artificial Sequence: Synthetic oligonucleotide
uagguugacuggacagaga

SEQ ID NO: 1076537 - RNA, 19 nt, Artificial Sequence
  Description of Artificial Sequence: Synthetic oligonucleotide
agguggauccacgucccac

SEQ ID NO: 1076538 - RNA, 19 nt, Artificial Sequence
  Description of Artificial Sequence: Synthetic oligonucleotide
ucaauuguucuccgccguu

SEQ ID NO: 1076539 - RNA, 19 nt, Artificial Sequence
  Description of Artificial Sequence: Synthetic oligonucleotide
cuucaggguggacuguaac

SEQ ID NO: 1076540 - RNA, 19 nt, Artificial Sequence
  Description of Artificial Sequence: Synthetic oligonucleotide
cuaucccauuacaucccag

SEQ ID NO: 1076541 - RNA, 19 nt, Artificial Sequence
  Description of Artificial Sequence: Synthetic oligonucleotide
aaagggugguagguugacu

SEQ ID NO: 1076542 - RNA, 19 nt, Artificial Sequence
  Description of Artificial Sequence: Synthetic oligonucleotide
cagcaaagggcuuucugca

SEQ ID NO: 1076543 - RNA, 19 nt, Artificial Sequence
  Description of Artificial Sequence: Synthetic oligonucleotide
uacuccgccuuugagcaac

SEQ ID NO: 1076544 - RNA, 19 nt, Artificial Sequence
  Description of Artificial Sequence: Synthetic oligonucleotide
agaucccaugagucaucac

SEQ ID NO: 1076545 - RNA, 19 nt, Artificial Sequence
  Description of Artificial Sequence: Synthetic oligonucleotide
ugggagugagagagaagaa

SEQ ID NO: 1076546 - RNA, 19 nt, Artificial Sequence
  Description of Artificial Sequence: Synthetic oligonucleotide
cuuucgguccuucuuucga

SEQ ID NO: 1076547 - RNA, 19 nt, Artificial Sequence
  Description of Artificial Sequence: Synthetic oligonucleotide
ucccaugagucaucaccug

SEQ ID NO: 1076548 - RNA, 19 nt, Artificial Sequence
  Description of Artificial Sequence: Synthetic oligonucleotide
accagcuaugguacuccgc

SEQ ID NO: 1076549 - RNA, 19 nt, Artificial Sequence
  Description of Artificial Sequence: Synthetic oligonucleotide
gagacgccacuuugggccc

SEQ ID NO: 1076550 - RNA, 19 nt, Artificial Sequence
  Description of Artificial Sequence: Synthetic oligonucleotide
gacccagauguaauggguc

SEQ ID NO: 1076551 - RNA, 19 nt, Artificial Sequence
  Description of Artificial Sequence: Synthetic oligonucleotide
agguaugcgucagggaugu

SEQ ID NO: 1076552 - RNA, 19 nt, Artificial Sequence
  Description of Artificial Sequence: Synthetic oligonucleotide
cacaaguuccagccucaag

SEQ ID NO: 1076553 - RNA, 19 nt, Artificial Sequence
  Description of Artificial Sequence: Synthetic oligonucleotide
uucuuucgaggcugggaaa

SEQ ID NO: 1076554 - RNA, 19 nt, Artificial Sequence
  Description of Artificial Sequence: Synthetic oligonucleotide
caagacacucaauuccaaa

SEQ ID NO: 1076555 - RNA, 19 nt, Artificial Sequence
  Description of Artificial Sequence: Synthetic oligonucleotide
guucuccgccguuucuccg

SEQ ID NO: 1076556 - RNA, 19 nt, Artificial Sequence
  Description of Artificial Sequence: Synthetic oligonucleotide
acaugggagcccaaaauua

SEQ ID NO: 1076557 - RNA, 19 nt, Artificial Sequence
  Description of Artificial Sequence: Synthetic oligonucleotide
ucgaggccuccgaagcacc

SEQ ID NO: 1076558 - RNA, 19 nt, Artificial Sequence
  Description of Artificial Sequence: Synthetic oligonucleotide
cuggacagagacuugucua

SEQ ID NO: 1076559 - RNA, 19 nt, Artificial Sequence
  Description of Artificial Sequence: Synthetic oligonucleotide
uaaccgccgggccucuggc

SEQ ID NO: 1076560 - RNA, 19 nt, Artificial Sequence
  Description of Artificial Sequence: Synthetic oligonucleotide
gaaggacagcguacaagac

SEQ ID NO: 1076561 - RNA, 19 nt, Artificial Sequence
  Description of Artificial Sequence: Synthetic oligonucleotide
caguggagacgccacuuug

SEQ ID NO: 1076562 - RNA, 19 nt, Artificial Sequence
  Description of Artificial Sequence: Synthetic oligonucleotide
cccaguuugagcccuggcc

SEQ ID NO: 1076563 - RNA, 19 nt, Artificial Sequence
  Description of Artificial Sequence: Synthetic oligonucleotide
uggccgaaguuccuugcau

SEQ ID NO: 1076564 - RNA, 19 nt, Artificial Sequence
  Description of Artificial Sequence: Synthetic oligonucleotide
gugaucagaucccaugagu

SEQ ID NO: 1076565 - RNA, 19 nt, Artificial Sequence
  Description of Artificial Sequence: Synthetic oligonucleotide
caccagcuaugguacuccg

SEQ ID NO: 1076566 - RNA, 19 nt, Artificial Sequence
  Description of Artificial Sequence: Synthetic oligonucleotide
cgaagcaccccaaagccag

SEQ ID NO: 1076567 - RNA, 19 nt, Artificial Sequence
  Description of Artificial Sequence: Synthetic oligonucleotide
cguacaagacacucaauuc

SEQ ID NO: 1076568 - RNA, 19 nt, Artificial Sequence
  Description of Artificial Sequence: Synthetic oligonucleotide
agucggagguggaucuucg

SEQ ID NO: 1076569 - RNA, 19 nt, Artificial Sequence
  Description of Artificial Sequence: Synthetic oligonucleotide
uauagacaacuaucccauu

SEQ ID NO: 1076570 - RNA, 19 nt, Artificial Sequence
  Description of Artificial Sequence: Synthetic oligonucleotide
gagagucggagguggaucu

SEQ ID NO: 1076571 - RNA, 19 nt, Artificial Sequence
  Description of Artificial Sequence: Synthetic oligonucleotide
uggauccacgucccacaca

SEQ ID NO: 1076572 - RNA, 19 nt, Artificial Sequence
  Description of Artificial Sequence: Synthetic oligonucleotide
acagcguacaagacacuca

SEQ ID NO: 1076573 - RNA, 19 nt, Artificial Sequence
  Description of Artificial Sequence: Synthetic oligonucleotide
cucuggccgaaguuccuug

SEQ ID NO: 1076574 - RNA, 19 nt, Artificial Sequence
  Description of Artificial Sequence: Synthetic oligonucleotide
acccgcaucucgccuucac

SEQ ID NO: 1076575 - RNA, 19 nt, Artificial Sequence
  Description of Artificial Sequence: Synthetic oligonucleotide
uucuugauucgagaccguu

SEQ ID NO: 1076576 - RNA, 19 nt, Artificial Sequence
  Description of Artificial Sequence: Synthetic oligonucleotide
cccuaggagggccaggagg

SEQ ID NO: 1076577 - RNA, 19 nt, Artificial Sequence
  Description of Artificial Sequence: Synthetic oligonucleotide
cuugauucgagaccguuuu

SEQ ID NO: 1076578 - RNA, 19 nt, Artificial Sequence
  Description of Artificial Sequence: Synthetic oligonucleotide
ggagguaugcgucagggau

SEQ ID NO: 1076579 - RNA, 19 nt, Artificial Sequence
  Description of Artificial Sequence: Synthetic oligonucleotide
cacucgaucaugggccgcc

SEQ ID NO: 1076580 - RNA, 19 nt, Artificial Sequence
  Description of Artificial Sequence: Synthetic oligonucleotide
ugcuacccaccuccuugcc

SEQ ID NO: 1076581 - RNA, 19 nt, Artificial Sequence
  Description of Artificial Sequence: Synthetic oligonucleotide
aggggaccgggagguaugc

SEQ ID NO: 1076582 - RNA, 19 nt, Artificial Sequence
  Description of Artificial Sequence: Synthetic oligonucleotide
acucgaucaugggccgccc

SEQ ID NO: 1076583 - RNA, 19 nt, Artificial Sequence
  Description of Artificial Sequence: Synthetic oligonucleotide
ggaucuucgggacugggcu

SEQ ID NO: 1076584 - RNA, 19 nt, Artificial Sequence
  Description of Artificial Sequence: Synthetic oligonucleotide
ggucuaauucaaguccaug

SEQ ID NO: 1076585 - RNA, 19 nt, Artificial Sequence
  Description of Artificial Sequence: Synthetic oligonucleotide
uccuucuuucgaggcuggg

SEQ ID NO: 1076586 - RNA, 19 nt, Artificial Sequence
  Description of Artificial Sequence: Synthetic oligonucleotide
ugucaagguucucccgauu

SEQ ID NO: 1076587 - RNA, 19 nt, Artificial Sequence
  Description of Artificial Sequence: Synthetic oligonucleotide
uugagagucggagguggau

SEQ ID NO: 1076588 - RNA, 19 nt, Artificial Sequence
  Description of Artificial Sequence: Synthetic oligonucleotide
cuaugguacuccgccuuug

SEQ ID NO: 1076589 - RNA, 19 nt, Artificial Sequence
  Description of Artificial Sequence: Synthetic oligonucleotide
cagagacuugucuacagau

SEQ ID NO: 1076590 - RNA, 19 nt, Artificial Sequence
  Description of Artificial Sequence: Synthetic oligonucleotide
acaucccaguuugagcccu

SEQ ID NO: 1076591 - RNA, 19 nt, Artificial Sequence
  Description of Artificial Sequence: Synthetic oligonucleotide
gguggauccacgucccaca

SEQ ID NO: 1076592 - RNA, 19 nt, Artificial Sequence
  Description of Artificial Sequence: Synthetic oligonucleotide
caaccacuuugcucaaaca

SEQ ID NO: 1076593 - RNA, 19 nt, Artificial Sequence
  Description of Artificial Sequence: Synthetic oligonucleotide
agucaaagggugguagguu

SEQ ID NO: 1076594 - RNA, 19 nt, Artificial Sequence
  Description of Artificial Sequence: Synthetic oligonucleotide
aaagggcuuucugcaguaa

SEQ ID NO: 1076595 - RNA, 19 nt, Artificial Sequence
  Description of Artificial Sequence: Synthetic oligonucleotide
ucuccgccguuucuccggu

SEQ ID NO: 1076596 - RNA, 19 nt, Artificial Sequence
  Description of Artificial Sequence: Synthetic oligonucleotide
agacuugucuacagaucca

SEQ ID NO: 1076597 - RNA, 19 nt, Artificial Sequence
  Description of Artificial Sequence: Synthetic oligonucleotide
guggauccacgucccacac

SEQ ID NO: 1076598 - RNA, 19 nt, Artificial Sequence
  Description of Artificial Sequence: Synthetic oligonucleotide
cauccccaggggccggucg

SEQ ID NO: 1076599 - RNA, 19 nt, Artificial Sequence
  Description of Artificial Sequence: Synthetic oligonucleotide
caaaugggagugagagaga

SEQ ID NO: 1076600 - RNA, 19 nt, Artificial Sequence
  Description of Artificial Sequence: Synthetic oligonucleotide
uggguaggaccugcuugag

SEQ ID NO: 1076601 - RNA, 19 nt, Artificial Sequence
  Description of Artificial Sequence: Synthetic oligonucleotide
aacaaccgguguagaagaa

SEQ ID NO: 1076602 - RNA, 19 nt, Artificial Sequence
  Description of Artificial Sequence: Synthetic oligonucleotide
auccuccuccuccuccucu

SEQ ID NO: 1076603 - RNA, 19 nt, Artificial Sequence
  Description of Artificial Sequence: Synthetic oligonucleotide
cccaaguaaagucacaagu

SEQ ID NO: 1076604 - RNA, 19 nt, Artificial Sequence
  Description of Artificial Sequence: Synthetic oligonucleotide
gggaauuaggcugaagacu

SEQ ID NO: 1076605 - RNA, 19 nt, Artificial Sequence
  Description of Artificial Sequence: Synthetic oligonucleotide
augacccgcaucucgccuu

SEQ ID NO: 1076606 - RNA, 19 nt, Artificial Sequence
  Description of Artificial Sequence: Synthetic oligonucleotide
ccgcaucucgccuucacug

SEQ ID NO: 1076607 - RNA, 19 nt, Artificial Sequence
  Description of Artificial Sequence: Synthetic oligonucleotide
cucaccccgcaauggcgag

SEQ ID NO: 1076608 - RNA, 19 nt, Artificial Sequence
  Description of Artificial Sequence: Synthetic oligonucleotide
aucccaguuugagcccugg

SEQ ID NO: 1076609 - RNA, 19 nt, Artificial Sequence
  Description of Artificial Sequence: Synthetic oligonucleotide
cgggaauuaggcugaagac

SEQ ID NO: 1076610 - RNA, 19 nt, Artificial Sequence
  Description of Artificial Sequence: Synthetic oligonucleotide
gauccacgucccacacagg

SEQ ID NO: 1076611 - RNA, 19 nt, Artificial Sequence
  Description of Artificial Sequence: Synthetic oligonucleotide
gguagguugacuggacaga

SEQ ID NO: 1076612 - RNA, 19 nt, Artificial Sequence
  Description of Artificial Sequence: Synthetic oligonucleotide
caggggaccgggagguaug

SEQ ID NO: 1076613 - RNA, 19 nt, Artificial Sequence
  Description of Artificial Sequence: Synthetic oligonucleotide
acaagacacucaauuccaa

SEQ ID NO: 1076614 - RNA, 19 nt, Artificial Sequence
  Description of Artificial Sequence: Synthetic oligonucleotide
cugaaagucaaaggguggu

SEQ ID NO: 1076615 - RNA, 19 nt, Artificial Sequence
  Description of Artificial Sequence: Synthetic oligonucleotide
gaccgggagguaugcguca

SEQ ID NO: 1076616 - RNA, 19 nt, Artificial Sequence
  Description of Artificial Sequence: Synthetic oligonucleotide
cuugagagucggaggugga

SEQ ID NO: 1076617 - RNA, 19 nt, Artificial Sequence
  Description of Artificial Sequence: Synthetic oligonucleotide
gaggccuccgaagcacccc

SEQ ID NO: 1076618 - RNA, 19 nt, Artificial Sequence
  Description of Artificial Sequence: Synthetic oligonucleotide
ugggcuccgucauggcuuc

SEQ ID NO: 1076619 - RNA, 19 nt, Artificial Sequence
  Description of Artificial Sequence: Synthetic oligonucleotide
uccgguggcugagucucug

SEQ ID NO: 1076620 - RNA, 19 nt, Artificial Sequence
  Description of Artificial Sequence: Synthetic oligonucleotide
gcaguaacacgugaucaga

SEQ ID NO: 1076621 - RNA, 19 nt, Artificial Sequence
  Description of Artificial Sequence: Synthetic oligonucleotide
cugagucccagccaucacu

SEQ ID NO: 1076622 - RNA, 19 nt, Artificial Sequence
  Description of Artificial Sequence: Synthetic oligonucleotide
gcguacaagacacucaauu

SEQ ID NO: 1076623 - RNA, 19 nt, Artificial Sequence
  Description of Artificial Sequence: Synthetic oligonucleotide
uggcgagcuagagccagaa

SEQ ID NO: 1076624 - RNA, 19 nt, Artificial Sequence
  Description of Artificial Sequence: Synthetic oligonucleotide
cugcauaagccaagacaaa

SEQ ID NO: 1076625 - RNA, 19 nt, Artificial Sequence
  Description of Artificial Sequence: Synthetic oligonucleotide
acuccgccuuugagcaacc

SEQ ID NO: 1076626 - RNA, 19 nt, Artificial Sequence
  Description of Artificial Sequence: Synthetic oligonucleotide
uccuccuccuccuccucuu

SEQ ID NO: 1076627 - RNA, 19 nt, Artificial Sequence
  Description of Artificial Sequence: Synthetic oligonucleotide
cucaauuguucuccgccgu

SEQ ID NO: 1076628 - RNA, 19 nt, Artificial Sequence
  Description of Artificial Sequence: Synthetic oligonucleotide
gugauaauugacaccuuuu

SEQ ID NO: 1076629 - RNA, 19 nt, Artificial Sequence
  Description of Artificial Sequence: Synthetic oligonucleotide
gcuaggagggauguaaccu

SEQ ID NO: 1076630 - RNA, 19 nt, Artificial Sequence
  Description of Artificial Sequence: Synthetic oligonucleotide
ucaccccgcaauggcgagc

SEQ ID NO: 1076631 - RNA, 19 nt, Artificial Sequence
  Description of Artificial Sequence: Synthetic oligonucleotide
uugggcccauccaggucaa

SEQ ID NO: 1076632 - RNA, 19 nt, Artificial Sequence
  Description of Artificial Sequence: Synthetic oligonucleotide
aggugggagucuaucccca

SEQ ID NO: 1076633 - RNA, 19 nt, Artificial Sequence
  Description of Artificial Sequence: Synthetic oligonucleotide
caucccaguuugagcccug

SEQ ID NO: 1076634 - RNA, 19 nt, Artificial Sequence
  Description of Artificial Sequence: Synthetic oligonucleotide
cccgauuuggggagacccc

SEQ ID NO: 1076635 - RNA, 19 nt, Artificial Sequence
  Description of Artificial Sequence: Synthetic oligonucleotide
cgcaauggcgagcuagagc

SEQ ID NO: 1076636 - RNA, 19 nt, Artificial Sequence
  Description of Artificial Sequence: Synthetic oligonucleotide
cuggccgaaguuccuugca

SEQ ID NO: 1076637 - RNA, 19 nt, Artificial Sequence
  Description of Artificial Sequence: Synthetic oligonucleotide
cucgggaauuaggcugaag

SEQ ID NO: 1076638 - RNA, 19 nt, Artificial Sequence
  Description of Artificial Sequence: Synthetic oligonucleotide
cgcaucucgccuucacugg

SEQ ID NO: 1076639 - RNA, 19 nt, Artificial Sequence
  Description of Artificial Sequence: Synthetic oligonucleotide
ggugguagguugacuggac

SEQ ID NO: 1076640 - RNA, 19 nt, Artificial Sequence
  Description of Artificial Sequence: Synthetic oligonucleotide
ccucaagagugaugucaag

SEQ ID NO: 1076641 - RNA, 19 nt, Artificial Sequence
  Description of Artificial Sequence: Synthetic oligonucleotide
caauggcgagcuagagcca

SEQ ID NO: 1076642 - RNA, 19 nt, Artificial Sequence
  Description of Artificial Sequence: Synthetic oligonucleotide
ggauaguucgaagguccga

SEQ ID NO: 1076643 - RNA, 19 nt, Artificial Sequence
  Description of Artificial Sequence: Synthetic oligonucleotide
ggcgagcuagagccagaag

SEQ ID NO: 1076644 - RNA, 19 nt, Artificial Sequence
  Description of Artificial Sequence: Synthetic oligonucleotide
ggagugcuguauuuacacu

SEQ ID NO: 1076645 - RNA, 19 nt, Artificial Sequence
  Description of Artificial Sequence: Synthetic oligonucleotide
cucccgauuuggggagacc

SEQ ID NO: 1076646 - RNA, 19 nt, Artificial Sequence
  Description of Artificial Sequence: Synthetic oligonucleotide
ccgguguagaagaaagcaa

SEQ ID NO: 1076647 - RNA, 19 nt, Artificial Sequence
  Description of Artificial Sequence: Synthetic oligonucleotide
caguuugagcccuggcccu

SEQ ID NO: 1076648 - RNA, 19 nt, Artificial Sequence
  Description of Artificial Sequence: Synthetic oligonucleotide
cgggagguaugcgucaggg

SEQ ID NO: 1076649 - RNA, 19 nt, Artificial Sequence
  Description of Artificial Sequence: Synthetic oligonucleotide
gggagguaugcgucaggga

SEQ ID NO: 1076650 - RNA, 19 nt, Artificial Sequence
  Description of Artificial Sequence: Synthetic oligonucleotide
cauccuccuccuccuccuc

SEQ ID NO: 1076651 - RNA, 19 nt, Artificial Sequence
  Description of Artificial Sequence: Synthetic oligonucleotide
ggucgaggccuccgaagca

SEQ ID NO: 1076652 - RNA, 19 nt, Artificial Sequence
  Description of Artificial Sequence: Synthetic oligonucleotide
gcgucagggaugugggaga

SEQ ID NO: 1076653 - RNA, 19 nt, Artificial Sequence
  Description of Artificial Sequence: Synthetic oligonucleotide
cagccucaagagugauguc

SEQ ID NO: 1076654 - RNA, 19 nt, Artificial Sequence
  Description of Artificial Sequence: Synthetic oligonucleotide
gggaccgggagguaugcgu

SEQ ID NO: 1076655 - RNA, 19 nt, Artificial Sequence
  Description of Artificial Sequence: Synthetic oligonucleotide
ccggucgaggccuccgaag

SEQ ID NO: 1076656 - RNA, 19 nt, Artificial Sequence
  Description of Artificial Sequence: Synthetic oligonucleotide
ggcuugagagucggaggug

SEQ ID NO: 1076657 - RNA, 19 nt, Artificial Sequence
  Description of Artificial Sequence: Synthetic oligonucleotide
ggaccgggagguaugcguc

SEQ ID NO: 1076658 - RNA, 19 nt, Artificial Sequence
  Description of Artificial Sequence: Synthetic oligonucleotide
gccguuucuccgguggcug

SEQ ID NO: 1076659 - RNA, 19 nt, Artificial Sequence
  Description of Artificial Sequence: Synthetic oligonucleotide
agcguacaagacacucaau

SEQ ID NO: 1076660 - RNA, 19 nt, Artificial Sequence
  Description of Artificial Sequence: Synthetic oligonucleotide
caugacccgcaucucgccu

SEQ ID NO: 1076661 - RNA, 19 nt, Artificial Sequence
  Description of Artificial Sequence: Synthetic oligonucleotide
cucgaucaugggccgccca

SEQ ID NO: 1076662 - RNA, 19 nt, Artificial Sequence
  Description of Artificial Sequence: Synthetic oligonucleotide
acacgugaucagaucccau

SEQ ID NO: 1076663 - RNA, 19 nt, Artificial Sequence
  Description of Artificial Sequence: Synthetic oligonucleotide
ggaggugcccuaggagggc

SEQ ID NO: 1076664 - RNA, 19 nt, Artificial Sequence
  Description of Artificial Sequence: Synthetic oligonucleotide
ccgccuuugagcaaccacu

SEQ ID NO: 1076665 - RNA, 19 nt, Artificial Sequence
  Description of Artificial Sequence: Synthetic oligonucleotide
gggccgcccagcaaagggc

SEQ ID NO: 1076666 - RNA, 19 nt, Artificial Sequence
  Description of Artificial Sequence: Synthetic oligonucleotide
caugagucaucaccugauu

SEQ ID NO: 1076667 - RNA, 19 nt, Artificial Sequence
  Description of Artificial Sequence: Synthetic oligonucleotide
gaacaccuucaggguggac

SEQ ID NO: 1076668 - RNA, 19 nt, Artificial Sequence
  Description of Artificial Sequence: Synthetic oligonucleotide
ccgguggcugagucucugg

SEQ ID NO: 1076669 - RNA, 19 nt, Artificial Sequence
  Description of Artificial Sequence: Synthetic oligonucleotide
cuccuggucccaacuuucu

SEQ ID NO: 1076670 - RNA, 19 nt, Artificial Sequence
  Description of Artificial Sequence: Synthetic oligonucleotide
ccgaagcaccccaaagcca

SEQ ID NO: 1076671 - RNA, 19 nt, Artificial Sequence
  Description of Artificial Sequence: Synthetic oligonucleotide
auggcgagcuagagccaga

SEQ ID NO: 1076672 - RNA, 19 nt, Artificial Sequence
  Description of Artificial Sequence: Synthetic oligonucleotide
caucaccugauuccaccau

SEQ ID NO: 1076673 - RNA, 19 nt, Artificial Sequence
  Description of Artificial Sequence: Synthetic oligonucleotide
ccuucuuucgaggcuggga

SEQ ID NO: 1076674 - RNA, 19 nt, Artificial Sequence
  Description of Artificial Sequence: Synthetic oligonucleotide
agagucggagguggaucuu

SEQ ID NO: 1076675 - RNA, 19 nt, Artificial Sequence
  Description of Artificial Sequence: Synthetic oligonucleotide
caauuguucuccgccguuu

SEQ ID NO: 1076676 - RNA, 19 nt, Artificial Sequence
  Description of Artificial Sequence: Synthetic oligonucleotide
guacuccgccuuugagcaa

SEQ ID NO: 1076677 - RNA, 19 nt, Artificial Sequence
  Description of Artificial Sequence: Synthetic oligonucleotide
cagcuaugguacuccgccu

SEQ ID NO: 1076678 - RNA, 19 nt, Artificial Sequence
  Description of Artificial Sequence: Synthetic oligonucleotide
ccagauguaaugggucuaa

SEQ ID NO: 1076679 - RNA, 19 nt, Artificial Sequence
  Description of Artificial Sequence: Synthetic oligonucleotide
cuauccccacgaucugccu

SEQ ID NO: 1076680 - RNA, 19 nt, Artificial Sequence
  Description of Artificial Sequence: Synthetic oligonucleotide
ggggaccgggagguaugcg

SEQ ID NO: 1076681 - RNA, 19 nt, Artificial Sequence
  Description of Artificial Sequence: Synthetic oligonucleotide
acccaccuccuugccuuca

SEQ ID NO: 1076682 - RNA, 19 nt, Artificial Sequence
  Description of Artificial Sequence: Synthetic oligonucleotide
uggcacugucaggggccug

SEQ ID NO: 1076683 - RNA, 19 nt, Artificial Sequence
  Description of Artificial Sequence: Synthetic oligonucleotide
agacgccacuuugggccca

SEQ ID NO: 1076684 - RNA, 19 nt, Artificial Sequence
  Description of Artificial Sequence: Synthetic oligonucleotide
gaagcaccccaaagccagu

SEQ ID NO: 1076685 - RNA, 19 nt, Artificial Sequence
  Description of Artificial Sequence: Synthetic oligonucleotide
cuccgccguuucuccggug

SEQ ID NO: 1076686 - RNA, 19 nt, Artificial Sequence
  Description of Artificial Sequence: Synthetic oligonucleotide
cgaggccuccgaagcaccc

SEQ ID NO: 1076687 - RNA, 19 nt, Artificial Sequence
  Description of Artificial Sequence: Synthetic oligonucleotide
gcccuaggagggccaggag

SEQ ID NO: 1076688 - RNA, 19 nt, Artificial Sequence
  Description of Artificial Sequence: Synthetic oligonucleotide
ccgggagguaugcgucagg

SEQ ID NO: 1076689 - RNA, 19 nt, Artificial Sequence
  Description of Artificial Sequence: Synthetic oligonucleotide
ggaacaccuucagggugga

SEQ ID NO: 1076690 - RNA, 19 nt, Artificial Sequence
  Description of Artificial Sequence: Synthetic oligonucleotide
guuucuccgguggcugagu

SEQ ID NO: 1076691 - RNA, 19 nt, Artificial Sequence
  Description of Artificial Sequence: Synthetic oligonucleotide
ccgcaauggcgagcuagag

SEQ ID NO: 1076692 - RNA, 19 nt, Artificial Sequence
  Description of Artificial Sequence: Synthetic oligonucleotide
ggcacugucaggggccugu

SEQ ID NO: 1076693 - RNA, 19 nt, Artificial Sequence
  Description of Artificial Sequence: Synthetic oligonucleotide
gggccggucgaggccuccg

SEQ ID NO: 1076694 - RNA, 19 nt, Artificial Sequence
  Description of Artificial Sequence: Synthetic oligonucleotide
caccugauuccaccaugau

SEQ ID NO: 1076695 - RNA, 19 nt, Artificial Sequence
  Description of Artificial Sequence: Synthetic oligonucleotide
gcuaugguacuccgccuuu

SEQ ID NO: 1076696 - RNA, 19 nt, Artificial Sequence
  Description of Artificial Sequence: Synthetic oligonucleotide
acgccacuuugggcccauc

SEQ ID NO: 1076697 - RNA, 19 nt, Artificial Sequence
  Description of Artificial Sequence: Synthetic oligonucleotide
gacccgcaucucgccuuca

SEQ ID NO: 1076698 - RNA, 19 nt, Artificial Sequence
  Description of Artificial Sequence: Synthetic oligonucleotide
ccccuaaccgccgggccuc

SEQ ID NO: 1076699 - RNA, 19 nt, Artificial Sequence
  Description of Artificial Sequence: Synthetic oligonucleotide
ggccggucgaggccuccga

SEQ ID NO: 1076700 - RNA, 19 nt, Artificial Sequence
  Description of Artificial Sequence: Synthetic oligonucleotide
ccguuucuccgguggcuga

SEQ ID NO: 1076701 - RNA, 19 nt, Artificial Sequence
  Description of Artificial Sequence: Synthetic oligonucleotide
gggucuaauucaaguccau

SEQ ID NO: 1076702 - RNA, 19 nt, Artificial Sequence
  Description of Artificial Sequence: Synthetic oligonucleotide
gguaugcgucagggaugug

SEQ ID NO: 1076703 - RNA, 19 nt, Artificial Sequence
  Description of Artificial Sequence: Synthetic oligonucleotide
gccggucgaggccuccgaa

SEQ ID NO: 1076704 - RNA, 19 nt, Artificial Sequence
  Description of Artificial Sequence: Synthetic oligonucleotide
ggccgcccagcaaagggcu

SEQ ID NO: 1076705 - RNA, 19 nt, Artificial Sequence
  Description of Artificial Sequence: Synthetic oligonucleotide
gacgccacuuugggcccau

SEQ ID NO: 1076706 - RNA, 19 nt, Artificial Sequence
  Description of Artificial Sequence: Synthetic oligonucleotide
cuccgguggcugagucucu

SEQ ID NO: 1076707 - RNA, 19 nt, Artificial Sequence
  Description of Artificial Sequence: Synthetic oligonucleotide
accccgcaauggcgagcua

SEQ ID NO: 1076708 - RNA, 19 nt, Artificial Sequence
  Description of Artificial Sequence: Synthetic oligonucleotide
ggacagcguacaagacacu

SEQ ID NO: 1076709 - RNA, 19 nt, Artificial Sequence
  Description of Artificial Sequence: Synthetic oligonucleotide
cccgcaucucgccuucacu

SEQ ID NO: 1076710 - RNA, 19 nt, Artificial Sequence
  Description of Artificial Sequence: Synthetic oligonucleotide
ggggccggucgaggccucc

SEQ ID NO: 1076711 - RNA, 19 nt, Artificial Sequence
  Description of Artificial Sequence: Synthetic oligonucleotide
ccuaaccgccgggccucug

SEQ ID NO: 1076712 - RNA, 19 nt, Artificial Sequence
  Description of Artificial Sequence: Synthetic oligonucleotide
ccuugccuucacugucagu

SEQ ID NO: 1076713 - RNA, 19 nt, Artificial Sequence
  Description of Artificial Sequence: Synthetic oligonucleotide
ccucgggaauuaggcugaa

SEQ ID NO: 1076714 - RNA, 19 nt, Artificial Sequence
  Description of Artificial Sequence: Synthetic oligonucleotide
ccucuggccgaaguuccuu

SEQ ID NO: 1076715 - RNA, 19 nt, Artificial Sequence
  Description of Artificial Sequence: Synthetic oligonucleotide
ccgggccucuggccgaagu

SEQ ID NO: 1076716 - RNA, 19 nt, Artificial Sequence
  Description of Artificial Sequence: Synthetic oligonucleotide
ccgcccagcaaagggcuuu

SEQ ID NO: 1076717 - RNA, 19 nt, Artificial Sequence
  Description of Artificial Sequence: Synthetic oligonucleotide
cgggccucuggccgaaguu

SEQ ID NO: 1076718 - RNA, 19 nt, Artificial Sequence
  Description of Artificial Sequence: Synthetic oligonucleotide
gccgcccagcaaagggcuu

SEQ ID NO: 1076719 - RNA, 19 nt, Artificial Sequence
  Description of Artificial Sequence: Synthetic oligonucleotide
cccuaaccgccgggccucu

SEQ ID NO: 1076720 - RNA, 19 nt, Artificial Sequence
  Description of Artificial Sequence: Synthetic oligonucleotide
cgccgggccucuggccgaa

SEQ ID NO: 1076721 - RNA, 19 nt, Artificial Sequence
  Description of Artificial Sequence: Synthetic oligonucleotide
auaauuagcaauuuuagac

SEQ ID NO: 1076722 - RNA, 19 nt, Artificial Sequence
  Description of Artificial Sequence: Synthetic oligonucleotide
aaucugaugacuuggauuc

SEQ ID NO: 1076723 - RNA, 19 nt, Artificial Sequence
  Description of Artificial Sequence: Synthetic oligonucleotide
uguuuaaucucacugaucc

SEQ ID NO: 1076724 - RNA, 19 nt, Artificial Sequence
  Description of Artificial Sequence: Synthetic oligonucleotide
uuugauucccauaagauac

SEQ ID NO: 1076725 - RNA, 19 nt, Artificial Sequence
  Description of Artificial Sequence: Synthetic oligonucleotide
accgucuucacuuaaaccc

SEQ ID NO: 1076726 - RNA, 19 nt, Artificial Sequence
  Description of Artificial Sequence: Synthetic oligonucleotide
ucuaagugaaccaugaaac

SEQ ID NO: 1076727 - RNA, 19 nt, Artificial Sequence
  Description of Artificial Sequence: Synthetic oligonucleotide
ugaagaaagauuuauuuga

SEQ ID NO: 1076728 - RNA, 19 nt, Artificial Sequence
  Description of Artificial Sequence: Synthetic oligonucleotide
aauguaaccagaaaauggg

SEQ ID NO: 1076729 - RNA, 19 nt, Artificial Sequence
  Description of Artificial Sequence: Synthetic oligonucleotide
aagaaauguaaccagaaaa

SEQ ID NO: 1076730 - RNA, 19 nt, Artificial Sequence
  Description of Artificial Sequence: Synthetic oligonucleotide
ugaaauuuacuacuuaaga

SEQ ID NO: 1076731 - RNA, 19 nt, Artificial Sequence
  Description of Artificial Sequence: Synthetic oligonucleotide
uugauuaccaguuucuuug

SEQ ID NO: 1076732 - RNA, 19 nt, Artificial Sequence
  Description of Artificial Sequence: Synthetic oligonucleotide
cagauauucacuuucagug

SEQ ID NO: 1076733 - RNA, 19 nt, Artificial Sequence
  Description of Artificial Sequence: Synthetic oligonucleotide
aauaauagguguaaccguc

SEQ ID NO: 1076734 - RNA, 19 nt, Artificial Sequence
  Description of Artificial Sequence: Synthetic oligonucleotide
caauuuuagacauugaaca

SEQ ID NO: 1076735 - RNA, 19 nt, Artificial Sequence
  Description of Artificial Sequence: Synthetic oligonucleotide
gauggauucuguuuugggg

SEQ ID NO: 1076736 - RNA, 19 nt, Artificial Sequence
  Description of Artificial Sequence: Synthetic oligonucleotide
uaauuagcaauuuuagaca

SEQ ID NO: 1076737 - RNA, 19 nt, Artificial Sequence
  Description of Artificial Sequence: Synthetic oligonucleotide
ucccauaagauacauuuag

SEQ ID NO: 1076738 - RNA, 19 nt, Artificial Sequence
  Description of Artificial Sequence: Synthetic oligonucleotide
uuauuugauucccauaaga

SEQ ID NO: 1076739 - RNA, 19 nt, Artificial Sequence
  Description of Artificial Sequence: Synthetic oligonucleotide
uuaaauuccgagaucuccc

SEQ ID NO: 1076740 - RNA, 19 nt, Artificial Sequence
  Description of Artificial Sequence: Synthetic oligonucleotide
aggacaaguaugcucauac

SEQ ID NO: 1076741 - RNA, 19 nt, Artificial Sequence
  Description of Artificial Sequence: Synthetic oligonucleotide
uuuacuacuuaagaaaugu

SEQ ID NO: 1076742 - RNA, 19 nt, Artificial Sequence
  Description of Artificial Sequence: Synthetic oligonucleotide
cauaaauguaaacugcagc

SEQ ID NO: 1076743 - RNA, 19 nt, Artificial Sequence
  Description of Artificial Sequence: Synthetic oligonucleotide
cuuagguugaccuuccaag

SEQ ID NO: 1076744 - RNA, 19 nt, Artificial Sequence
  Description of Artificial Sequence: Synthetic oligonucleotide
auucccauaagauacauuu

SEQ ID NO: 1076745 - RNA, 19 nt, Artificial Sequence
  Description of Artificial Sequence: Synthetic oligonucleotide
uacuacuuaagaaauguaa

SEQ ID NO: 1076746 - RNA, 19 nt, Artificial Sequence
  Description of Artificial Sequence: Synthetic oligonucleotide
acuacuuaagaaauguaac

SEQ ID NO: 1076747 - RNA, 19 nt, Artificial Sequence
  Description of Artificial Sequence: Synthetic oligonucleotide
uauuauaauaauaggugua

SEQ ID NO: 1076748 - RNA, 19 nt, Artificial Sequence
  Description of Artificial Sequence: Synthetic oligonucleotide
augaagaaagauuuauuug

SEQ ID NO: 1076749 - RNA, 19 nt, Artificial Sequence
  Description of Artificial Sequence: Synthetic oligonucleotide
cuuacuagaaggcacauca

SEQ ID NO: 1076750 - RNA, 19 nt, Artificial Sequence
  Description of Artificial Sequence: Synthetic oligonucleotide
aaugcaaugugguaggcuu

SEQ ID NO: 1076751 - RNA, 19 nt, Artificial Sequence
  Description of Artificial Sequence: Synthetic oligonucleotide
ucucaugaaauucaacacu

SEQ ID NO: 1076752 - RNA, 19 nt, Artificial Sequence
  Description of Artificial Sequence: Synthetic oligonucleotide
ucacuggugauauacucgg

SEQ ID NO: 1076753 - RNA, 19 nt, Artificial Sequence
  Description of Artificial Sequence: Synthetic oligonucleotide
uauuugauucccauaagau

SEQ ID NO: 1076754 - RNA, 19 nt, Artificial Sequence
  Description of Artificial Sequence: Synthetic oligonucleotide
caugaaauucaacacuagg

SEQ ID NO: 1076755 - RNA, 19 nt, Artificial Sequence
  Description of Artificial Sequence: Synthetic oligonucleotide
agccguuacaccuucuacc

SEQ ID NO: 1076756 - RNA, 19 nt, Artificial Sequence
  Description of Artificial Sequence: Synthetic oligonucleotide
aauagguguaaccgucuuc

SEQ ID NO: 1076757 - RNA, 19 nt, Artificial Sequence
  Description of Artificial Sequence: Synthetic oligonucleotide
ucauaguaguaacaguggc

SEQ ID NO: 1076758 - RNA, 19 nt, Artificial Sequence
  Description of Artificial Sequence: Synthetic oligonucleotide
auaaggguucgucaguuuc

SEQ ID NO: 1076759 - RNA, 19 nt, Artificial Sequence
  Description of Artificial Sequence: Synthetic oligonucleotide
aacagagcaagggucuucc

SEQ ID NO: 1076760 - RNA, 19 nt, Artificial Sequence
  Description of Artificial Sequence: Synthetic oligonucleotide
ucccuugaaauccuucugg

SEQ ID NO: 1076761 - RNA, 19 nt, Artificial Sequence
  Description of Artificial Sequence: Synthetic oligonucleotide
uuuauuugauucccauaag

SEQ ID NO: 1076762 - RNA, 19 nt, Artificial Sequence
  Description of Artificial Sequence: Synthetic oligonucleotide
uaagaacagagcaaggguc

SEQ ID NO: 1076763 - RNA, 19 nt, Artificial Sequence
  Description of Artificial Sequence: Synthetic oligonucleotide
caguagucggccaugaccg

SEQ ID NO: 1076764 - RNA, 19 nt, Artificial Sequence
  Description of Artificial Sequence: Synthetic oligonucleotide
ugagaaucugaugacuugg

SEQ ID NO: 1076765 - RNA, 19 nt, Artificial Sequence
  Description of Artificial Sequence: Synthetic oligonucleotide
uacauagcaucuuaaauua

SEQ ID NO: 1076766 - RNA, 19 nt, Artificial Sequence
  Description of Artificial Sequence: Synthetic oligonucleotide
uuuaaguucccuugaaauc

SEQ ID NO: 1076767 - RNA, 19 nt, Artificial Sequence
  Description of Artificial Sequence: Synthetic oligonucleotide
ucgucaguuucuuaagagg

SEQ ID NO: 1076768 - RNA, 19 nt, Artificial Sequence
  Description of Artificial Sequence: Synthetic oligonucleotide
aaagggagguacuuuaaau

SEQ ID NO: 1076769 - RNA, 19 nt, Artificial Sequence
  Description of Artificial Sequence: Synthetic oligonucleotide
ugaucugauguagaagugg

SEQ ID NO: 1076770 - RNA, 19 nt, Artificial Sequence
  Description of Artificial Sequence: Synthetic oligonucleotide
gaaaggacuguuaauagca

SEQ ID NO: 1076771 - RNA, 19 nt, Artificial Sequence
  Description of Artificial Sequence: Synthetic oligonucleotide
uuaaucucacugauccucc

SEQ ID NO: 1076772 - RNA, 19 nt, Artificial Sequence
  Description of Artificial Sequence: Synthetic oligonucleotide
uuugguugaucugauguag

SEQ ID NO: 1076773 - RNA, 19 nt, Artificial Sequence
  Description of Artificial Sequence: Synthetic oligonucleotide
gacaaguaugcucauacga

SEQ ID NO: 1076774 - RNA, 19 nt, Artificial Sequence
  Description of Artificial Sequence: Synthetic oligonucleotide
uugucugcuauccagcacu

SEQ ID NO: 1076775 - RNA, 19 nt, Artificial Sequence
  Description of Artificial Sequence: Synthetic oligonucleotide
caaugcaggacaaguaugc

SEQ ID NO: 1076776 - RNA, 19 nt, Artificial Sequence
  Description of Artificial Sequence: Synthetic oligonucleotide
uuugccuuauccaagcuuu

SEQ ID NO: 1076777 - RNA, 19 nt, Artificial Sequence
  Description of Artificial Sequence: Synthetic oligonucleotide
cuaagugaaccaugaaacc

SEQ ID NO: 1076778 - RNA, 19 nt, Artificial Sequence
  Description of Artificial Sequence: Synthetic oligonucleotide
aaugugguaggcuucguuu

SEQ ID NO: 1076779 - RNA, 19 nt, Artificial Sequence
  Description of Artificial Sequence: Synthetic oligonucleotide
ugauguagaagugggcugg

SEQ ID NO: 1076780 - RNA, 19 nt, Artificial Sequence
  Description of Artificial Sequence: Synthetic oligonucleotide
agugcuuggaaguuccaag

SEQ ID NO: 1076781 - RNA, 19 nt, Artificial Sequence
  Description of Artificial Sequence: Synthetic oligonucleotide
auaguaguaacaguggcca

SEQ ID NO: 1076782 - RNA, 19 nt, Artificial Sequence
  Description of Artificial Sequence: Synthetic oligonucleotide
ugacucuaagccaaggcgu

SEQ ID NO: 1076783 - RNA, 19 nt, Artificial Sequence
  Description of Artificial Sequence: Synthetic oligonucleotide
acagauauucacuuucagu

SEQ ID NO: 1076784 - RNA, 19 nt, Artificial Sequence
  Description of Artificial Sequence: Synthetic oligonucleotide
aguguguggaaugaaauca

SEQ ID NO: 1076785 - RNA, 19 nt, Artificial Sequence
  Description of Artificial Sequence: Synthetic oligonucleotide
ugcugcaacucccagagaa

SEQ ID NO: 1076786 - RNA, 19 nt, Artificial Sequence
  Description of Artificial Sequence: Synthetic oligonucleotide
cucgcugucuuaaauuccg

SEQ ID NO: 1076787 - RNA, 19 nt, Artificial Sequence
  Description of Artificial Sequence: Synthetic oligonucleotide
ucuuaagagguuuggauuu

SEQ ID NO: 1076788 - RNA, 19 nt, Artificial Sequence
  Description of Artificial Sequence: Synthetic oligonucleotide
aagggagguacuuuaaaua

SEQ ID NO: 1076789 - RNA, 19 nt, Artificial Sequence
  Description of Artificial Sequence: Synthetic oligonucleotide
ucaugaaauucaacacuag

SEQ ID NO: 1076790 - RNA, 19 nt, Artificial Sequence
  Description of Artificial Sequence: Synthetic oligonucleotide
accuucuacccaucuaccc

SEQ ID NO: 1076791 - RNA, 19 nt, Artificial Sequence
  Description of Artificial Sequence: Synthetic oligonucleotide
ggaaacaucuaagugaacc

SEQ ID NO: 1076792 - RNA, 19 nt, Artificial Sequence
  Description of Artificial Sequence: Synthetic oligonucleotide
agcaucuuaaauuaucaua

SEQ ID NO: 1076793 - RNA, 19 nt, Artificial Sequence
  Description of Artificial Sequence: Synthetic oligonucleotide
uuccuugugauucuucccu

SEQ ID NO: 1076794 - RNA, 19 nt, Artificial Sequence
  Description of Artificial Sequence: Synthetic oligonucleotide
uacauuuagcauaaaugua

SEQ ID NO: 1076795 - RNA, 19 nt, Artificial Sequence
  Description of Artificial Sequence: Synthetic oligonucleotide
auuauaauaauagguguaa

SEQ ID NO: 1076796 - RNA, 19 nt, Artificial Sequence
  Description of Artificial Sequence: Synthetic oligonucleotide
aucgcagcaaacuccuugg

SEQ ID NO: 1076797 - RNA, 19 nt, Artificial Sequence
  Description of Artificial Sequence: Synthetic oligonucleotide
auauacucggcucuggaau

SEQ ID NO: 1076798 - RNA, 19 nt, Artificial Sequence
  Description of Artificial Sequence: Synthetic oligonucleotide
uuuuguauuucugggucag

SEQ ID NO: 1076799 - RNA, 19 nt, Artificial Sequence
  Description of Artificial Sequence: Synthetic oligonucleotide
ugacuuggauucuucuagg

SEQ ID NO: 1076800 - RNA, 19 nt, Artificial Sequence
  Description of Artificial Sequence: Synthetic oligonucleotide
uuaccaguuucuuuguuuc

SEQ ID NO: 1076801 - RNA, 19 nt, Artificial Sequence
  Description of Artificial Sequence: Synthetic oligonucleotide
aagugaaccaugaaaccug

SEQ ID NO: 1076802 - RNA, 19 nt, Artificial Sequence
  Description of Artificial Sequence: Synthetic oligonucleotide
acauuuagcauaaauguaa

SEQ ID NO: 1076803 - RNA, 19 nt, Artificial Sequence
  Description of Artificial Sequence: Synthetic oligonucleotide
gacuuggauucuucuaggg

SEQ ID NO: 1076804 - RNA, 19 nt, Artificial Sequence
  Description of Artificial Sequence: Synthetic oligonucleotide
uuucccauuuggauucucc

SEQ ID NO: 1076805 - RNA, 19 nt, Artificial Sequence
  Description of Artificial Sequence: Synthetic oligonucleotide
uucccagucauucaucauc

SEQ ID NO: 1076806 - RNA, 19 nt, Artificial Sequence
  Description of Artificial Sequence: Synthetic oligonucleotide
ucuucuguucgccaucaga

SEQ ID NO: 1076807 - RNA, 19 nt, Artificial Sequence
  Description of Artificial Sequence: Synthetic oligonucleotide
aagucgaccucuuccugag

SEQ ID NO: 1076808 - RNA, 19 nt, Artificial Sequence
  Description of Artificial Sequence: Synthetic oligonucleotide
uugugauuuccaguagucg

SEQ ID NO: 1076809 - RNA, 19 nt, Artificial Sequence
  Description of Artificial Sequence: Synthetic oligonucleotide
acaaguaugcucauacgag

SEQ ID NO: 1076810 - RNA, 19 nt, Artificial Sequence
  Description of Artificial Sequence: Synthetic oligonucleotide
cuguauuauaauaauaggu

SEQ ID NO: 1076811 - RNA, 19 nt, Artificial Sequence
  Description of Artificial Sequence: Synthetic oligonucleotide
uccgagaucucccauuuuc

SEQ ID NO: 1076812 - RNA, 19 nt, Artificial Sequence
  Description of Artificial Sequence: Synthetic oligonucleotide
aguaguaacaguggccauc

SEQ ID NO: 1076813 - RNA, 19 nt, Artificial Sequence
  Description of Artificial Sequence: Synthetic oligonucleotide
uaagccaaggcguuucaga

SEQ ID NO: 1076814 - RNA, 19 nt, Artificial Sequence
  Description of Artificial Sequence: Synthetic oligonucleotide
ugacagauauucacuuuca

SEQ ID NO: 1076815 - RNA, 19 nt, Artificial Sequence
  Description of Artificial Sequence: Synthetic oligonucleotide
gacagauauucacuuucag

SEQ ID NO: 1076816 - RNA, 19 nt, Artificial Sequence
  Description of Artificial Sequence: Synthetic oligonucleotide
auagguguaaccgucuuca

SEQ ID NO: 1076817 - RNA, 19 nt, Artificial Sequence
  Description of Artificial Sequence: Synthetic oligonucleotide
uauacucggcucuggaaug

SEQ ID NO: 1076818 - RNA, 19 nt, Artificial Sequence
  Description of Artificial Sequence: Synthetic oligonucleotide
agauuuauuugauucccau

SEQ ID NO: 1076819 - RNA, 19 nt, Artificial Sequence
  Description of Artificial Sequence: Synthetic oligonucleotide
cugacagauauucacuuuc

SEQ ID NO: 1076820 - RNA, 19 nt, Artificial Sequence
  Description of Artificial Sequence: Synthetic oligonucleotide
guacuuuaaauagaauaug

SEQ ID NO: 1076821 - RNA, 19 nt, Artificial Sequence
  Description of Artificial Sequence: Synthetic oligonucleotide
uaugcucauacgaguaaga

SEQ ID NO: 1076822 - RNA, 19 nt, Artificial Sequence
  Description of Artificial Sequence: Synthetic oligonucleotide
uaaauuccgagaucuccca

SEQ ID NO: 1076823 - RNA, 19 nt, Artificial Sequence
  Description of Artificial Sequence: Synthetic oligonucleotide
ugcucauacgaguaagaac

SEQ ID NO: 1076824 - RNA, 19 nt, Artificial Sequence
  Description of Artificial Sequence: Synthetic oligonucleotide
cuucguuugaggaacaaaa

SEQ ID NO: 1076825 - RNA, 19 nt, Artificial Sequence
  Description of Artificial Sequence: Synthetic oligonucleotide
ugaggucauaguaguaaca

SEQ ID NO: 1076826 - RNA, 19 nt, Artificial Sequence
  Description of Artificial Sequence: Synthetic oligonucleotide
cuagaaggcacaucaccag

SEQ ID NO: 1076827 - RNA, 19 nt, Artificial Sequence
  Description of Artificial Sequence: Synthetic oligonucleotide
aguuucuuaagagguuugg

SEQ ID NO: 1076828 - RNA, 19 nt, Artificial Sequence
  Description of Artificial Sequence: Synthetic oligonucleotide
aagccaaggcguuucagau

SEQ ID NO: 1076829 - RNA, 19 nt, Artificial Sequence
  Description of Artificial Sequence: Synthetic oligonucleotide
gcucauacgaguaagaaca

SEQ ID NO: 1076830 - RNA, 19 nt, Artificial Sequence
  Description of Artificial Sequence: Synthetic oligonucleotide
cagcaaacuccuuggaugc

SEQ ID NO: 1076831 - RNA, 19 nt, Artificial Sequence
  Description of Artificial Sequence: Synthetic oligonucleotide
uaaccgucuucacuuaaac

SEQ ID NO: 1076832 - RNA, 19 nt, Artificial Sequence
  Description of Artificial Sequence: Synthetic oligonucleotide
ugcuauccagcacuugcag

SEQ ID NO: 1076833 - RNA, 19 nt, Artificial Sequence
  Description of Artificial Sequence: Synthetic oligonucleotide
agauacauagcaucuuaaa

SEQ ID NO: 1076834 - RNA, 19 nt, Artificial Sequence
  Description of Artificial Sequence: Synthetic oligonucleotide
ugugauucuucccucucuc

SEQ ID NO: 1076835 - RNA, 19 nt, Artificial Sequence
  Description of Artificial Sequence: Synthetic oligonucleotide
uccccauguuuaaauaaca

SEQ ID NO: 1076836 - RNA, 19 nt, Artificial Sequence
  Description of Artificial Sequence: Synthetic oligonucleotide
acugagaugcuccugugau

SEQ ID NO: 1076837 - RNA, 19 nt, Artificial Sequence
  Description of Artificial Sequence: Synthetic oligonucleotide
cuccauaaggguucgucag

SEQ ID NO: 1076838 - RNA, 19 nt, Artificial Sequence
  Description of Artificial Sequence: Synthetic oligonucleotide
uaaggguucgucaguuucu

SEQ ID NO: 1076839 - RNA, 19 nt, Artificial Sequence
  Description of Artificial Sequence: Synthetic oligonucleotide
aauuccgagaucucccauu

SEQ ID NO: 1076840 - RNA, 19 nt, Artificial Sequence
  Description of Artificial Sequence: Synthetic oligonucleotide
uggugauauacucggcucu

SEQ ID NO: 1076841 - RNA, 19 nt, Artificial Sequence
  Description of Artificial Sequence: Synthetic oligonucleotide
uuggauucuucuagggacu

SEQ ID NO: 1076842 - RNA, 19 nt, Artificial Sequence
  Description of Artificial Sequence: Synthetic oligonucleotide
uuccauuaccuuagguuga

SEQ ID NO: 1076843 - RNA, 19 nt, Artificial Sequence
  Description of Artificial Sequence: Synthetic oligonucleotide
cuuguuuaauuucuugcca

SEQ ID NO: 1076844 - RNA, 19 nt, Artificial Sequence
  Description of Artificial Sequence: Synthetic oligonucleotide
acuacggcagccgcgaggg

SEQ ID NO: 1076845 - RNA, 19 nt, Artificial Sequence
  Description of Artificial Sequence: Synthetic oligonucleotide
gcuuggaaguuccaagucg

SEQ ID NO: 1076846 - RNA, 19 nt, Artificial Sequence
  Description of Artificial Sequence: Synthetic oligonucleotide
gauauucacuuucagugcu

SEQ ID NO: 1076847 - RNA, 19 nt, Artificial Sequence
  Description of Artificial Sequence: Synthetic oligonucleotide
uuuugguugaucugaugua

SEQ ID NO: 1076848 - RNA, 19 nt, Artificial Sequence
  Description of Artificial Sequence: Synthetic oligonucleotide
ugcaacucccagagaagag

SEQ ID NO: 1076849 - RNA, 19 nt, Artificial Sequence
  Description of Artificial Sequence: Synthetic oligonucleotide
ugauucuucccucucucau

SEQ ID NO: 1076850 - RNA, 19 nt, Artificial Sequence
  Description of Artificial Sequence: Synthetic oligonucleotide
cuguucgccaucagagucg

SEQ ID NO: 1076851 - RNA, 19 nt, Artificial Sequence
  Description of Artificial Sequence: Synthetic oligonucleotide
ugguaugccuucagggcag

SEQ ID NO: 1076852 - RNA, 19 nt, Artificial Sequence
  Description of Artificial Sequence: Synthetic oligonucleotide
uggacagugcuugucacug

SEQ ID NO: 1076853 - RNA, 19 nt, Artificial Sequence
  Description of Artificial Sequence: Synthetic oligonucleotide
uuaccuuagguugaccuuc

SEQ ID NO: 1076854 - RNA, 19 nt, Artificial Sequence
  Description of Artificial Sequence: Synthetic oligonucleotide
ggaaaggacuguuaauagc

SEQ ID NO: 1076855 - RNA, 19 nt, Artificial Sequence
  Description of Artificial Sequence: Synthetic oligonucleotide
uguguggaaugaaaucauc

SEQ ID NO: 1076856 - RNA, 19 nt, Artificial Sequence
  Description of Artificial Sequence: Synthetic oligonucleotide
ggagcugacagauauucac

SEQ ID NO: 1076857 - RNA, 19 nt, Artificial Sequence
  Description of Artificial Sequence: Synthetic oligonucleotide
auuuuagacauugaacaua

SEQ ID NO: 1076858 - RNA, 19 nt, Artificial Sequence
  Description of Artificial Sequence: Synthetic oligonucleotide
ucacuuucagugcuuggaa

SEQ ID NO: 1076859 - RNA, 19 nt, Artificial Sequence
  Description of Artificial Sequence: Synthetic oligonucleotide
uuacuacuuaagaaaugua

SEQ ID NO: 1076860 - RNA, 19 nt, Artificial Sequence
  Description of Artificial Sequence: Synthetic oligonucleotide
cuucacuuaaacccuccac

SEQ ID NO: 1076861 - RNA, 19 nt, Artificial Sequence
  Description of Artificial Sequence: Synthetic oligonucleotide
cucaugaaauucaacacua

SEQ ID NO: 1076862 - RNA, 19 nt, Artificial Sequence
  Description of Artificial Sequence: Synthetic oligonucleotide
ggaaugucugacucuaagc

SEQ ID NO: 1076863 - RNA, 19 nt, Artificial Sequence
  Description of Artificial Sequence: Synthetic oligonucleotide
uaggcuucguuugaggaac

SEQ ID NO: 1076864 - RNA, 19 nt, Artificial Sequence
  Description of Artificial Sequence: Synthetic oligonucleotide
acccaucuacccuuggaag

SEQ ID NO: 1076865 - RNA, 19 nt, Artificial Sequence
  Description of Artificial Sequence: Synthetic oligonucleotide
ugugguaggcuucguuuga

SEQ ID NO: 1076866 - RNA, 19 nt, Artificial Sequence
  Description of Artificial Sequence: Synthetic oligonucleotide
ugucuuaaauuccgagauc

SEQ ID NO: 1076867 - RNA, 19 nt, Artificial Sequence
  Description of Artificial Sequence: Synthetic oligonucleotide
gauuuauuugauucccaua

SEQ ID NO: 1076868 - RNA, 19 nt, Artificial Sequence
  Description of Artificial Sequence: Synthetic oligonucleotide
gcaauuuuagacauugaac

SEQ ID NO: 1076869 - RNA, 19 nt, Artificial Sequence
  Description of Artificial Sequence: Synthetic oligonucleotide
aagauuuauuugauuccca

SEQ ID NO: 1076870 - RNA, 19 nt, Artificial Sequence
  Description of Artificial Sequence: Synthetic oligonucleotide
uucccauuuggauucuccu

SEQ ID NO: 1076871 - RNA, 19 nt, Artificial Sequence
  Description of Artificial Sequence: Synthetic oligonucleotide
ugggucaguucuuuucuca

SEQ ID NO: 1076872 - RNA, 19 nt, Artificial Sequence
  Description of Artificial Sequence: Synthetic oligonucleotide
uugugguugauggauucug

SEQ ID NO: 1076873 - RNA, 19 nt, Artificial Sequence
  Description of Artificial Sequence: Synthetic oligonucleotide
caacucccagagaagagac

SEQ ID NO: 1076874 - RNA, 19 nt, Artificial Sequence
  Description of Artificial Sequence: Synthetic oligonucleotide
guaugcucauacgaguaag

SEQ ID NO: 1076875 - RNA, 19 nt, Artificial Sequence
  Description of Artificial Sequence: Synthetic oligonucleotide
uuguuuccauuaccuuagg

SEQ ID NO: 1076876 - RNA, 19 nt, Artificial Sequence
  Description of Artificial Sequence: Synthetic oligonucleotide
acaucuaagugaaccauga

SEQ ID NO: 1076877 - RNA, 19 nt, Artificial Sequence
  Description of Artificial Sequence: Synthetic oligonucleotide
ugguugugauuuccaguag

SEQ ID NO: 1076878 - RNA, 19 nt, Artificial Sequence
  Description of Artificial Sequence: Synthetic oligonucleotide
ugauuuccaguagucggcc

SEQ ID NO: 1076879 - RNA, 19 nt, Artificial Sequence
  Description of Artificial Sequence: Synthetic oligonucleotide
ccuuguccuuacuagaagg

SEQ ID NO: 1076880 - RNA, 19 nt, Artificial Sequence
  Description of Artificial Sequence: Synthetic oligonucleotide
uuguccuuacuagaaggca

SEQ ID NO: 1076881 - RNA, 19 nt, Artificial Sequence
  Description of Artificial Sequence: Synthetic oligonucleotide
ugauuaccaguuucuuugu

SEQ ID NO: 1076882 - RNA, 19 nt, Artificial Sequence
  Description of Artificial Sequence: Synthetic oligonucleotide
gauauacucggcucuggaa

SEQ ID NO: 1076883 - RNA, 19 nt, Artificial Sequence
  Description of Artificial Sequence: Synthetic oligonucleotide
ccauaagauacauuuagca

SEQ ID NO: 1076884 - RNA, 19 nt, Artificial Sequence
  Description of Artificial Sequence: Synthetic oligonucleotide
ucuacccaucuacccuugg

SEQ ID NO: 1076885 - RNA, 19 nt, Artificial Sequence
  Description of Artificial Sequence: Synthetic oligonucleotide
auuaccuuagguugaccuu

SEQ ID NO: 1076886 - RNA, 19 nt, Artificial Sequence
  Description of Artificial Sequence: Synthetic oligonucleotide
aaauuccgagaucucccau

SEQ ID NO: 1076887 - RNA, 19 nt, Artificial Sequence
  Description of Artificial Sequence: Synthetic oligonucleotide
agguguaaccgucuucacu

SEQ ID NO: 1076888 - RNA, 19 nt, Artificial Sequence
  Description of Artificial Sequence: Synthetic oligonucleotide
cuggugauauacucggcuc

SEQ ID NO: 1076889 - RNA, 19 nt, Artificial Sequence
  Description of Artificial Sequence: Synthetic oligonucleotide
aguaugcucauacgaguaa

SEQ ID NO: 1076890 - RNA, 19 nt, Artificial Sequence
  Description of Artificial Sequence: Synthetic oligonucleotide
agaaucugaugacuuggau

SEQ ID NO: 1076891 - RNA, 19 nt, Artificial Sequence
  Description of Artificial Sequence: Synthetic oligonucleotide
gugauuuccaguagucggc

SEQ ID NO: 1076892 - RNA, 19 nt, Artificial Sequence
  Description of Artificial Sequence: Synthetic oligonucleotide
uguaaccgucuucacuuaa

SEQ ID NO: 1076893 - RNA, 19 nt, Artificial Sequence
  Description of Artificial Sequence: Synthetic oligonucleotide
ucuaagccaaggcguuuca

SEQ ID NO: 1076894 - RNA, 19 nt, Artificial Sequence
  Description of Artificial Sequence: Synthetic oligonucleotide
ugcaguagucacagaauuu

SEQ ID NO: 1076895 - RNA, 19 nt, Artificial Sequence
  Description of Artificial Sequence: Synthetic oligonucleotide
agaauuucuuugguuguga

SEQ ID NO: 1076896 - RNA, 19 nt, Artificial Sequence
  Description of Artificial Sequence: Synthetic oligonucleotide
uaauagguguaaccgucuu

SEQ ID NO: 1076897 - RNA, 19 nt, Artificial Sequence
  Description of Artificial Sequence: Synthetic oligonucleotide
ucauacgaguaagaacaga

SEQ ID NO: 1076898 - RNA, 19 nt, Artificial Sequence
  Description of Artificial Sequence: Synthetic oligonucleotide
uaccuuagguugaccuucc

SEQ ID NO: 1076899 - RNA, 19 nt, Artificial Sequence
  Description of Artificial Sequence: Synthetic oligonucleotide
cuuaaacuugauuaccagu

SEQ ID NO: 1076900 - RNA, 19 nt, Artificial Sequence
  Description of Artificial Sequence: Synthetic oligonucleotide
uucuccauaaggguucguc

SEQ ID NO: 1076901 - RNA, 19 nt, Artificial Sequence
  Description of Artificial Sequence: Synthetic oligonucleotide
uucuguucgccaucagagu

SEQ ID NO: 1076902 - RNA, 19 nt, Artificial Sequence
  Description of Artificial Sequence: Synthetic oligonucleotide
aaguaugcucauacgagua

SEQ ID NO: 1076903 - RNA, 19 nt, Artificial Sequence
  Description of Artificial Sequence: Synthetic oligonucleotide
aacagauacauagcaucuu

SEQ ID NO: 1076904 - RNA, 19 nt, Artificial Sequence
  Description of Artificial Sequence: Synthetic oligonucleotide
guugugauuuccaguaguc

SEQ ID NO: 1076905 - RNA, 19 nt, Artificial Sequence
  Description of Artificial Sequence: Synthetic oligonucleotide
ggacaaguaugcucauacg

SEQ ID NO: 1076906 - RNA, 19 nt, Artificial Sequence
  Description of Artificial Sequence: Synthetic oligonucleotide
ucucacugauccuccuggc

SEQ ID NO: 1076907 - RNA, 19 nt, Artificial Sequence
  Description of Artificial Sequence: Synthetic oligonucleotide
uccgccucuuguuuaauuu

SEQ ID NO: 1076908 - RNA, 19 nt, Artificial Sequence
  Description of Artificial Sequence: Synthetic oligonucleotide
ggaaguuccaagucgaccu

SEQ ID NO: 1076909 - RNA, 19 nt, Artificial Sequence
  Description of Artificial Sequence: Synthetic oligonucleotide
gccguuacaccuucuaccc

SEQ ID NO: 1076910 - RNA, 19 nt, Artificial Sequence
  Description of Artificial Sequence: Synthetic oligonucleotide
uccucacuacggcagccgc

SEQ ID NO: 1076911 - RNA, 19 nt, Artificial Sequence
  Description of Artificial Sequence: Synthetic oligonucleotide
cauuaccuuagguugaccu

SEQ ID NO: 1076912 - RNA, 19 nt, Artificial Sequence
  Description of Artificial Sequence: Synthetic oligonucleotide
gguucgucaguuucuuaag

SEQ ID NO: 1076913 - RNA, 19 nt, Artificial Sequence
  Description of Artificial Sequence: Synthetic oligonucleotide
auaauagguguaaccgucu

SEQ ID NO: 1076914 - RNA, 19 nt, Artificial Sequence
  Description of Artificial Sequence: Synthetic oligonucleotide
ucagccguuacaccuucua

SEQ ID NO: 1076915 - RNA, 19 nt, Artificial Sequence
  Description of Artificial Sequence: Synthetic oligonucleotide
agaaggcacaucaccagug

SEQ ID NO: 1076916 - RNA, 19 nt, Artificial Sequence
  Description of Artificial Sequence: Synthetic oligonucleotide
aaaggacuguuaauagcau

SEQ ID NO: 1076917 - RNA, 19 nt, Artificial Sequence
  Description of Artificial Sequence: Synthetic oligonucleotide
auugaacauaauacacugu

SEQ ID NO: 1076918 - RNA, 19 nt, Artificial Sequence
  Description of Artificial Sequence: Synthetic oligonucleotide
cccaucuacccuuggaagg

SEQ ID NO: 1076919 - RNA, 19 nt, Artificial Sequence
  Description of Artificial Sequence: Synthetic oligonucleotide
cccauaagauacauuuagc

SEQ ID NO: 1076920 - RNA, 19 nt, Artificial Sequence
  Description of Artificial Sequence: Synthetic oligonucleotide
ucaccucgcugucuuaaau

SEQ ID NO: 1076921 - RNA, 19 nt, Artificial Sequence
  Description of Artificial Sequence: Synthetic oligonucleotide
uaaucucacugauccuccu

SEQ ID NO: 1076922 - RNA, 19 nt, Artificial Sequence
  Description of Artificial Sequence: Synthetic oligonucleotide
cucggcucuggaaugucug

SEQ ID NO: 1076923 - RNA, 19 nt, Artificial Sequence
  Description of Artificial Sequence: Synthetic oligonucleotide
uucuacccaucuacccuug

SEQ ID NO: 1076924 - RNA, 19 nt, Artificial Sequence
  Description of Artificial Sequence: Synthetic oligonucleotide
cugucuuaaauuccgagau

SEQ ID NO: 1076925 - RNA, 19 nt, Artificial Sequence
  Description of Artificial Sequence: Synthetic oligonucleotide
ugagacuccgccucuuguu

SEQ ID NO: 1076926 - RNA, 19 nt, Artificial Sequence
  Description of Artificial Sequence: Synthetic oligonucleotide
acccuccacccaaacagcc

SEQ ID NO: 1076927 - RNA, 19 nt, Artificial Sequence
  Description of Artificial Sequence: Synthetic oligonucleotide
uucuagggacucaggugac

SEQ ID NO: 1076928 - RNA, 19 nt, Artificial Sequence
  Description of Artificial Sequence: Synthetic oligonucleotide
gugauauacucggcucugg

SEQ ID NO: 1076929 - RNA, 19 nt, Artificial Sequence
  Description of Artificial Sequence: Synthetic oligonucleotide
uccgcggccguccucacua

SEQ ID NO: 1076930 - RNA, 19 nt, Artificial Sequence
  Description of Artificial Sequence: Synthetic oligonucleotide
ggauccagggcuaugaaaa

SEQ ID NO: 1076931 - RNA, 19 nt, Artificial Sequence
  Description of Artificial Sequence: Synthetic oligonucleotide
uccauuaccuuagguugac

SEQ ID NO: 1076932 - RNA, 19 nt, Artificial Sequence
  Description of Artificial Sequence: Synthetic oligonucleotide
uuucagugcuuggaaguuc

SEQ ID NO: 1076933 - RNA, 19 nt, Artificial Sequence
  Description of Artificial Sequence: Synthetic oligonucleotide
ugauucccauaagauacau

SEQ ID NO: 1076934 - RNA, 19 nt, Artificial Sequence
  Description of Artificial Sequence: Synthetic oligonucleotide
ggagguacuuuaaauagaa

SEQ ID NO: 1076935 - RNA, 19 nt, Artificial Sequence
  Description of Artificial Sequence: Synthetic oligonucleotide
gcaucuuaaauuaucauau

SEQ ID NO: 1076936 - RNA, 19 nt, Artificial Sequence
  Description of Artificial Sequence: Synthetic oligonucleotide
cuguauuacaaugcaaugu

SEQ ID NO: 1076937 - RNA, 19 nt, Artificial Sequence
  Description of Artificial Sequence: Synthetic oligonucleotide
caaguaugcucauacgagu

SEQ ID NO: 1076938 - RNA, 19 nt, Artificial Sequence
  Description of Artificial Sequence: Synthetic oligonucleotide
uccuugugauucuucccuc

SEQ ID NO: 1076939 - RNA, 19 nt, Artificial Sequence
  Description of Artificial Sequence: Synthetic oligonucleotide
aauccgcgcgcgcgguguc

SEQ ID NO: 1076940 - RNA, 19 nt, Artificial Sequence
  Description of Artificial Sequence: Synthetic oligonucleotide
ucgcccgcgaucccgcuca

SEQ ID NO: 1076941 - RNA, 19 nt, Artificial Sequence
  Description of Artificial Sequence: Synthetic oligonucleotide
ucggcucuggaaugucuga

SEQ ID NO: 1076942 - RNA, 19 nt, Artificial Sequence
  Description of Artificial Sequence: Synthetic oligonucleotide
ucgcugucuuaaauuccga

SEQ ID NO: 1076943 - RNA, 19 nt, Artificial Sequence
  Description of Artificial Sequence: Synthetic oligonucleotide
auguagaagugggcuggac

SEQ ID NO: 1076944 - RNA, 19 nt, Artificial Sequence
  Description of Artificial Sequence: Synthetic oligonucleotide
gguguaaccgucuucacuu

SEQ ID NO: 1076945 - RNA, 19 nt, Artificial Sequence
  Description of Artificial Sequence: Synthetic oligonucleotide
cagauacauagcaucuuaa

SEQ ID NO: 1076946 - RNA, 19 nt, Artificial Sequence
  Description of Artificial Sequence: Synthetic oligonucleotide
ccagaaaaugggaaacauc

SEQ ID NO: 1076947 - RNA, 19 nt, Artificial Sequence
  Description of Artificial Sequence: Synthetic oligonucleotide
ugaccuuccaagggaucca

SEQ ID NO: 1076948 - RNA, 19 nt, Artificial Sequence
  Description of Artificial Sequence: Synthetic oligonucleotide
aguggccaucagccguuac

SEQ ID NO: 1076949 - RNA, 19 nt, Artificial Sequence
  Description of Artificial Sequence: Synthetic oligonucleotide
cagccguuacaccuucuac

SEQ ID NO: 1076950 - RNA, 19 nt, Artificial Sequence
  Description of Artificial Sequence: Synthetic oligonucleotide
cuaagccaaggcguuucag

SEQ ID NO: 1076951 - RNA, 19 nt, Artificial Sequence
  Description of Artificial Sequence: Synthetic oligonucleotide
uaguaacaguggccaucag

SEQ ID NO: 1076952 - RNA, 19 nt, Artificial Sequence
  Description of Artificial Sequence: Synthetic oligonucleotide
ucgcagcaaacuccuugga

SEQ ID NO: 1076953 - RNA, 19 nt, Artificial Sequence
  Description of Artificial Sequence: Synthetic oligonucleotide
ggguucgucaguuucuuaa

SEQ ID NO: 1076954 - RNA, 19 nt, Artificial Sequence
  Description of Artificial Sequence: Synthetic oligonucleotide
acuugauuaccaguuucuu

SEQ ID NO: 1076955 - RNA, 19 nt, Artificial Sequence
  Description of Artificial Sequence: Synthetic oligonucleotide
uagguguaaccgucuucac

SEQ ID NO: 1076956 - RNA, 19 nt, Artificial Sequence
  Description of Artificial Sequence: Synthetic oligonucleotide
gacagugcuugucacuggu

SEQ ID NO: 1076957 - RNA, 19 nt, Artificial Sequence
  Description of Artificial Sequence: Synthetic oligonucleotide
gccgcgagggcccaauccg

SEQ ID NO: 1076958 - RNA, 19 nt, Artificial Sequence
  Description of Artificial Sequence: Synthetic oligonucleotide
ugccuuauccaagcuuuuc

SEQ ID NO: 1076959 - RNA, 19 nt, Artificial Sequence
  Description of Artificial Sequence: Synthetic oligonucleotide
uaguaguaacaguggccau

SEQ ID NO: 1076960 - RNA, 19 nt, Artificial Sequence
  Description of Artificial Sequence: Synthetic oligonucleotide
ucuagggacucaggugacu

SEQ ID NO: 1076961 - RNA, 19 nt, Artificial Sequence
  Description of Artificial Sequence: Synthetic oligonucleotide
uuccaguagucggccauga

SEQ ID NO: 1076962 - RNA, 19 nt, Artificial Sequence
  Description of Artificial Sequence: Synthetic oligonucleotide
ggugauauacucggcucug

SEQ ID NO: 1076963 - RNA, 19 nt, Artificial Sequence
  Description of Artificial Sequence: Synthetic oligonucleotide
ugucugcuauccagcacuu

SEQ ID NO: 1076964 - RNA, 19 nt, Artificial Sequence
  Description of Artificial Sequence: Synthetic oligonucleotide
aucuacccuuggaaggguc

SEQ ID NO: 1076965 - RNA, 19 nt, Artificial Sequence
  Description of Artificial Sequence: Synthetic oligonucleotide
cugggucaguucuuuucuc

SEQ ID NO: 1076966 - RNA, 19 nt, Artificial Sequence
  Description of Artificial Sequence: Synthetic oligonucleotide
cugcaacucccagagaaga

SEQ ID NO: 1076967 - RNA, 19 nt, Artificial Sequence
  Description of Artificial Sequence: Synthetic oligonucleotide
cuacccaucuacccuugga

SEQ ID NO: 1076968 - RNA, 19 nt, Artificial Sequence
  Description of Artificial Sequence: Synthetic oligonucleotide
ucacuacggcagccgcgag

SEQ ID NO: 1076969 - RNA, 19 nt, Artificial Sequence
  Description of Artificial Sequence: Synthetic oligonucleotide
auacucggcucuggaaugu

SEQ ID NO: 1076970 - RNA, 19 nt, Artificial Sequence
  Description of Artificial Sequence: Synthetic oligonucleotide
ggccacauuuuccuuguga

SEQ ID NO: 1076971 - RNA, 19 nt, Artificial Sequence
  Description of Artificial Sequence: Synthetic oligonucleotide
gauguagaagugggcugga

SEQ ID NO: 1076972 - RNA, 19 nt, Artificial Sequence
  Description of Artificial Sequence: Synthetic oligonucleotide
gguugugauuuccaguagu

SEQ ID NO: 1076973 - RNA, 19 nt, Artificial Sequence
  Description of Artificial Sequence: Synthetic oligonucleotide
aucaccucgcugucuuaaa

SEQ ID NO: 1076974 - RNA, 19 nt, Artificial Sequence
  Description of Artificial Sequence: Synthetic oligonucleotide
ccucgcugucuuaaauucc

SEQ ID NO: 1076975 - RNA, 19 nt, Artificial Sequence
  Description of Artificial Sequence: Synthetic oligonucleotide
gacuccgccucuuguuuaa

SEQ ID NO: 1076976 - RNA, 19 nt, Artificial Sequence
  Description of Artificial Sequence: Synthetic oligonucleotide
cucacuacggcagccgcga

SEQ ID NO: 1076977 - RNA, 19 nt, Artificial Sequence
  Description of Artificial Sequence: Synthetic oligonucleotide
gagggcccaauccgcgcgc

SEQ ID NO: 1076978 - RNA, 19 nt, Artificial Sequence
  Description of Artificial Sequence: Synthetic oligonucleotide
guaaccgucuucacuuaaa

SEQ ID NO: 1076979 - RNA, 19 nt, Artificial Sequence
  Description of Artificial Sequence: Synthetic oligonucleotide
gcaacucccagagaagaga

SEQ ID NO: 1076980 - RNA, 19 nt, Artificial Sequence
  Description of Artificial Sequence: Synthetic oligonucleotide
agucgcugugagaaucuga

SEQ ID NO: 1076981 - RNA, 19 nt, Artificial Sequence
  Description of Artificial Sequence: Synthetic oligonucleotide
ugaccgcgccggcuccgcg

SEQ ID NO: 1076982 - RNA, 19 nt, Artificial Sequence
  Description of Artificial Sequence: Synthetic oligonucleotide
caucuaagugaaccaugaa

SEQ ID NO: 1076983 - RNA, 19 nt, Artificial Sequence
  Description of Artificial Sequence: Synthetic oligonucleotide
ggcuaugaaaaggaggccu

SEQ ID NO: 1076984 - RNA, 19 nt, Artificial Sequence
  Description of Artificial Sequence: Synthetic oligonucleotide
ggccuguugucugcuaucc

SEQ ID NO: 1076985 - RNA, 19 nt, Artificial Sequence
  Description of Artificial Sequence: Synthetic oligonucleotide
gcucacuggugcuccgccg

SEQ ID NO: 1076986 - RNA, 19 nt, Artificial Sequence
  Description of Artificial Sequence: Synthetic oligonucleotide
uggccacauuuuccuugug

SEQ ID NO: 1076987 - RNA, 19 nt, Artificial Sequence
  Description of Artificial Sequence: Synthetic oligonucleotide
gcugcaacucccagagaag

SEQ ID NO: 1076988 - RNA, 19 nt, Artificial Sequence
  Description of Artificial Sequence: Synthetic oligonucleotide
gucgcugugagaaucugau

SEQ ID NO: 1076989 - RNA, 19 nt, Artificial Sequence
  Description of Artificial Sequence: Synthetic oligonucleotide
accuuagguugaccuucca

SEQ ID NO: 1076990 - RNA, 19 nt, Artificial Sequence
  Description of Artificial Sequence: Synthetic oligonucleotide
guuacaccuucuacccauc

SEQ ID NO: 1076991 - RNA, 19 nt, Artificial Sequence
  Description of Artificial Sequence: Synthetic oligonucleotide
ccucacuacggcagccgcg

SEQ ID NO: 1076992 - RNA, 19 nt, Artificial Sequence
  Description of Artificial Sequence: Synthetic oligonucleotide
cgcugucuuaaauuccgag

SEQ ID NO: 1076993 - RNA, 19 nt, Artificial Sequence
  Description of Artificial Sequence: Synthetic oligonucleotide
guugaccuuccaagggauc

SEQ ID NO: 1076994 - RNA, 19 nt, Artificial Sequence
  Description of Artificial Sequence: Synthetic oligonucleotide
cuucuacccaucuacccuu

SEQ ID NO: 1076995 - RNA, 19 nt, Artificial Sequence
  Description of Artificial Sequence: Synthetic oligonucleotide
uuccgagaucucccauuuu

SEQ ID NO: 1076996 - RNA, 19 nt, Artificial Sequence
  Description of Artificial Sequence: Synthetic oligonucleotide
cuuugccuuauccaagcuu

SEQ ID NO: 1076997 - RNA, 19 nt, Artificial Sequence
  Description of Artificial Sequence: Synthetic oligonucleotide
agucgaccucuuccugaga

SEQ ID NO: 1076998 - RNA, 19 nt, Artificial Sequence
  Description of Artificial Sequence: Synthetic oligonucleotide
cccgcgaucccgcucacug

SEQ ID NO: 1076999 - RNA, 19 nt, Artificial Sequence
  Description of Artificial Sequence: Synthetic oligonucleotide
acucggcucuggaaugucu

SEQ ID NO: 1077000 - RNA, 19 nt, Artificial Sequence
  Description of Artificial Sequence: Synthetic oligonucleotide
ggcccaauccgcgcgcgcg

SEQ ID NO: 1077001 - RNA, 19 nt, Artificial Sequence
  Description of Artificial Sequence: Synthetic oligonucleotide
cauuugugguugauggauu

SEQ ID NO: 1077002 - RNA, 19 nt, Artificial Sequence
  Description of Artificial Sequence: Synthetic oligonucleotide
uacucggcucuggaauguc

SEQ ID NO: 1077003 - RNA, 19 nt, Artificial Sequence
  Description of Artificial Sequence: Synthetic oligonucleotide
cacuggugcuccgccgccg

SEQ ID NO: 1077004 - RNA, 19 nt, Artificial Sequence
  Description of Artificial Sequence: Synthetic oligonucleotide
aaguucccuugaaauccuu

SEQ ID NO: 1077005 - RNA, 19 nt, Artificial Sequence
  Description of Artificial Sequence: Synthetic oligonucleotide
gcggccguccucacuacgg

SEQ ID NO: 1077006 - RNA, 19 nt, Artificial Sequence
  Description of Artificial Sequence: Synthetic oligonucleotide
ggauucuguuuugggguac

SEQ ID NO: 1077007 - RNA, 19 nt, Artificial Sequence
  Description of Artificial Sequence: Synthetic oligonucleotide
gugguugauggauucuguu

SEQ ID NO: 1077008 - RNA, 19 nt, Artificial Sequence
  Description of Artificial Sequence: Synthetic oligonucleotide
agggcccaauccgcgcgcg

SEQ ID NO: 1077009 - RNA, 19 nt, Artificial Sequence
  Description of Artificial Sequence: Synthetic oligonucleotide
guguaaccgucuucacuua

SEQ ID NO: 1077010 - RNA, 19 nt, Artificial Sequence
  Description of Artificial Sequence: Synthetic oligonucleotide
ccgagaucucccauuuuca

SEQ ID NO: 1077011 - RNA, 19 nt, Artificial Sequence
  Description of Artificial Sequence: Synthetic oligonucleotide
cccauuuggauucuccugu

SEQ ID NO: 1077012 - RNA, 19 nt, Artificial Sequence
  Description of Artificial Sequence: Synthetic oligonucleotide
caaugcaaugugguaggcu

SEQ ID NO: 1077013 - RNA, 19 nt, Artificial Sequence
  Description of Artificial Sequence: Synthetic oligonucleotide
cugggaaaggacuguuaau

SEQ ID NO: 1077014 - RNA, 19 nt, Artificial Sequence
  Description of Artificial Sequence: Synthetic oligonucleotide
cucuuuugguugaucugau

SEQ ID NO: 1077015 - RNA, 19 nt, Artificial Sequence
  Description of Artificial Sequence: Synthetic oligonucleotide
gagguacuuuaaauagaau

SEQ ID NO: 1077016 - RNA, 19 nt, Artificial Sequence
  Description of Artificial Sequence: Synthetic oligonucleotide
cagugcuuggaaguuccaa

SEQ ID NO: 1077017 - RNA, 19 nt, Artificial Sequence
  Description of Artificial Sequence: Synthetic oligonucleotide
cuggaaugucugacucuaa

SEQ ID NO: 1077018 - RNA, 19 nt, Artificial Sequence
  Description of Artificial Sequence: Synthetic oligonucleotide
ccucuugguaugccuucag

SEQ ID NO: 1077019 - RNA, 19 nt, Artificial Sequence
  Description of Artificial Sequence: Synthetic oligonucleotide
gagggccgggaccuccgga

SEQ ID NO: 1077020 - RNA, 19 nt, Artificial Sequence
  Description of Artificial Sequence: Synthetic oligonucleotide
gcuauccagcacuugcagu

SEQ ID NO: 1077021 - RNA, 19 nt, Artificial Sequence
  Description of Artificial Sequence: Synthetic oligonucleotide
gcccaauccgcgcgcgcgg

SEQ ID NO: 1077022 - RNA, 19 nt, Artificial Sequence
  Description of Artificial Sequence: Synthetic oligonucleotide
ccuucuacccaucuacccu

SEQ ID NO: 1077023 - RNA, 19 nt, Artificial Sequence
  Description of Artificial Sequence: Synthetic oligonucleotide
gcuucguuugaggaacaaa

SEQ ID NO: 1077024 - RNA, 19 nt, Artificial Sequence
  Description of Artificial Sequence: Synthetic oligonucleotide
cgaucccgcucacuggugc

SEQ ID NO: 1077025 - RNA, 19 nt, Artificial Sequence
  Description of Artificial Sequence: Synthetic oligonucleotide
caccucgcugucuuaaauu

SEQ ID NO: 1077026 - RNA, 19 nt, Artificial Sequence
  Description of Artificial Sequence: Synthetic oligonucleotide
cgagggcccaauccgcgcg

SEQ ID NO: 1077027 - RNA, 19 nt, Artificial Sequence
  Description of Artificial Sequence: Synthetic oligonucleotide
caaugugguaggcuucguu

SEQ ID NO: 1077028 - RNA, 19 nt, Artificial Sequence
  Description of Artificial Sequence: Synthetic oligonucleotide
cugccuccaucgcagcaaa

SEQ ID NO: 1077029 - RNA, 19 nt, Artificial Sequence
  Description of Artificial Sequence: Synthetic oligonucleotide
cuagggacucaggugacuu

SEQ ID NO: 1077030 - RNA, 19 nt, Artificial Sequence
  Description of Artificial Sequence: Synthetic oligonucleotide
ggccugucugggaaaggac

SEQ ID NO: 1077031 - RNA, 19 nt, Artificial Sequence
  Description of Artificial Sequence: Synthetic oligonucleotide
cuacggcagccgcgagggc

SEQ ID NO: 1077032 - RNA, 19 nt, Artificial Sequence
  Description of Artificial Sequence: Synthetic oligonucleotide
ccauuaccuuagguugacc

SEQ ID NO: 1077033 - RNA, 19 nt, Artificial Sequence
  Description of Artificial Sequence: Synthetic oligonucleotide
gagcaagggucuuccccau

SEQ ID NO: 1077034 - RNA, 19 nt, Artificial Sequence
  Description of Artificial Sequence: Synthetic oligonucleotide
cgcgagggcccaauccgcg

SEQ ID NO: 1077035 - RNA, 19 nt, Artificial Sequence
  Description of Artificial Sequence: Synthetic oligonucleotide
aggcuucguuugaggaaca

SEQ ID NO: 1077036 - RNA, 19 nt, Artificial Sequence
  Description of Artificial Sequence: Synthetic oligonucleotide
ccgucuucacuuaaacccu

SEQ ID NO: 1077037 - RNA, 19 nt, Artificial Sequence
  Description of Artificial Sequence: Synthetic oligonucleotide
ccgcgagggcccaauccgc

SEQ ID NO: 1077038 - RNA, 19 nt, Artificial Sequence
  Description of Artificial Sequence: Synthetic oligonucleotide
cccagucauucaucaucac

SEQ ID NO: 1077039 - RNA, 19 nt, Artificial Sequence
  Description of Artificial Sequence: Synthetic oligonucleotide
gggaaacaucuaagugaac

SEQ ID NO: 1077040 - RNA, 19 nt, Artificial Sequence
  Description of Artificial Sequence: Synthetic oligonucleotide
gggccgggaccuccggacc

SEQ ID NO: 1077041 - RNA, 19 nt, Artificial Sequence
  Description of Artificial Sequence: Synthetic oligonucleotide
cuaggccuguugucugcua

SEQ ID NO: 1077042 - RNA, 19 nt, Artificial Sequence
  Description of Artificial Sequence: Synthetic oligonucleotide
gucgcccgcgaucccgcuc

SEQ ID NO: 1077043 - RNA, 19 nt, Artificial Sequence
  Description of Artificial Sequence: Synthetic oligonucleotide
gguugaccuuccaagggau

SEQ ID NO: 1077044 - RNA, 19 nt, Artificial Sequence
  Description of Artificial Sequence: Synthetic oligonucleotide
ggugcuccgccgccggcga

SEQ ID NO: 1077045 - RNA, 19 nt, Artificial Sequence
  Description of Artificial Sequence: Synthetic oligonucleotide
gggacucaggugacuuuuc

SEQ ID NO: 1077046 - RNA, 19 nt, Artificial Sequence
  Description of Artificial Sequence: Synthetic oligonucleotide
cguuacaccuucuacccau

SEQ ID NO: 1077047 - RNA, 19 nt, Artificial Sequence
  Description of Artificial Sequence: Synthetic oligonucleotide
cgcucacuggugcuccgcc

SEQ ID NO: 1077048 - RNA, 19 nt, Artificial Sequence
  Description of Artificial Sequence: Synthetic oligonucleotide
ggacuguuaauagcauuuu

SEQ ID NO: 1077049 - RNA, 19 nt, Artificial Sequence
  Description of Artificial Sequence: Synthetic oligonucleotide
gugcuccgccgccggcgag

SEQ ID NO: 1077050 - RNA, 19 nt, Artificial Sequence
  Description of Artificial Sequence: Synthetic oligonucleotide
uccgcgcgucgcccgcgau

SEQ ID NO: 1077051 - RNA, 19 nt, Artificial Sequence
  Description of Artificial Sequence: Synthetic oligonucleotide
cgcgcgucgcccgcgaucc

SEQ ID NO: 1077052 - RNA, 19 nt, Artificial Sequence
  Description of Artificial Sequence: Synthetic oligonucleotide
caauccgcgcgcgcggugu

SEQ ID NO: 1077053 - RNA, 19 nt, Artificial Sequence
  Description of Artificial Sequence: Synthetic oligonucleotide
gggcccaauccgcgcgcgc

SEQ ID NO: 1077054 - RNA, 19 nt, Artificial Sequence
  Description of Artificial Sequence: Synthetic oligonucleotide
ggcuucguuugaggaacaa

SEQ ID NO: 1077055 - RNA, 19 nt, Artificial Sequence
  Description of Artificial Sequence: Synthetic oligonucleotide
ccguuacaccuucuaccca

SEQ ID NO: 1077056 - RNA, 19 nt, Artificial Sequence
  Description of Artificial Sequence: Synthetic oligonucleotide
cggccguccucacuacggc

SEQ ID NO: 1077057 - RNA, 19 nt, Artificial Sequence
  Description of Artificial Sequence: Synthetic oligonucleotide
gcguccgcggccguccuca

SEQ ID NO: 1077058 - RNA, 19 nt, Artificial Sequence
  Description of Artificial Sequence: Synthetic oligonucleotide
ccaauccgcgcgcgcggug

SEQ ID NO: 1077059 - RNA, 19 nt, Artificial Sequence
  Description of Artificial Sequence: Synthetic oligonucleotide
cgcggccguccucacuacg

SEQ ID NO: 1077060 - RNA, 19 nt, Artificial Sequence
  Description of Artificial Sequence: Synthetic oligonucleotide
ccgcucacuggugcuccgc

SEQ ID NO: 1077061 - RNA, 19 nt, Artificial Sequence
  Description of Artificial Sequence: Synthetic oligonucleotide
ggccgggaccuccggaccu

SEQ ID NO: 1077062 - RNA, 19 nt, Artificial Sequence
  Description of Artificial Sequence: Synthetic oligonucleotide
gcaggacaaguaugcucau

SEQ ID NO: 1077063 - RNA, 19 nt, Artificial Sequence
  Description of Artificial Sequence: Synthetic oligonucleotide
cgggaccuccggaccuccg

SEQ ID NO: 1077064 - RNA, 19 nt, Artificial Sequence
  Description of Artificial Sequence: Synthetic oligonucleotide
ccgggaccuccggaccucc

SEQ ID NO: 1077065 - RNA, 19 nt, Artificial Sequence
  Description of Artificial Sequence: Synthetic oligonucleotide
ccgcgcgucgcccgcgauc

SEQ ID NO: 1077066 - RNA, 19 nt, Artificial Sequence
  Description of Artificial Sequence: Synthetic oligonucleotide
guccgcggccguccucacu

SEQ ID NO: 1077067 - RNA, 19 nt, Artificial Sequence
  Description of Artificial Sequence: Synthetic oligonucleotide
gcaaugugguaggcuucgu

SEQ ID NO: 1077068 - RNA, 19 nt, Artificial Sequence
  Description of Artificial Sequence: Synthetic oligonucleotide
caguggccaucagccguua

SEQ ID NO: 1077069 - RNA, 19 nt, Artificial Sequence
  Description of Artificial Sequence: Synthetic oligonucleotide
ccgcggccguccucacuac

SEQ ID NO: 1077070 - RNA, 19 nt, Artificial Sequence
  Description of Artificial Sequence: Synthetic oligonucleotide
ccgcgcgcgcggugucgcc

SEQ ID NO: 1077071 - RNA, 19 nt, Artificial Sequence
  Description of Artificial Sequence: Synthetic oligonucleotide
cguccgcggccguccucac

SEQ ID NO: 1077072 - RNA, 19 nt, Artificial Sequence
  Description of Artificial Sequence: Synthetic oligonucleotide
cccaauccgcgcgcgcggu

SEQ ID NO: 1077073 - RNA, 19 nt, Artificial Sequence
  Description of Artificial Sequence: Synthetic oligonucleotide
ggcagccgcgagggcccaa

SEQ ID NO: 1077074 - RNA, 19 nt, Artificial Sequence
  Description of Artificial Sequence: Synthetic oligonucleotide
gcccgcgaucccgcucacu

SEQ ID NO: 1077075 - RNA, 19 nt, Artificial Sequence
  Description of Artificial Sequence: Synthetic oligonucleotide
cggcguccgcggccguccu

SEQ ID NO: 1077076 - RNA, 19 nt, Artificial Sequence
  Description of Artificial Sequence: Synthetic oligonucleotide
uuaaggaaggcacuugugg

SEQ ID NO: 1077077 - RNA, 19 nt, Artificial Sequence
  Description of Artificial Sequence: Synthetic oligonucleotide
uggguuagaacucacacca

SEQ ID NO: 1077078 - RNA, 19 nt, Artificial Sequence
  Description of Artificial Sequence: Synthetic oligonucleotide
uguggauugguucagcucu

SEQ ID NO: 1077079 - RNA, 19 nt, Artificial Sequence
  Description of Artificial Sequence: Synthetic oligonucleotide
aguggguuagaacucacac

SEQ ID NO: 1077080 - RNA, 19 nt, Artificial Sequence
  Description of Artificial Sequence: Synthetic oligonucleotide
aacccaaucaaggugacag

SEQ ID NO: 1077081 - RNA, 19 nt, Artificial Sequence
  Description of Artificial Sequence: Synthetic oligonucleotide
uucuguuuaaggaaggcac

SEQ ID NO: 1077082 - RNA, 19 nt, Artificial Sequence
  Description of Artificial Sequence: Synthetic oligonucleotide
aggucuacguucuccaucc

SEQ ID NO: 1077083 - RNA, 19 nt, Artificial Sequence
  Description of Artificial Sequence: Synthetic oligonucleotide
uguuguaggucacaugacc

SEQ ID NO: 1077084 - RNA, 19 nt, Artificial Sequence
  Description of Artificial Sequence: Synthetic oligonucleotide
uuuugagacugucuccugg

SEQ ID NO: 1077085 - RNA, 19 nt, Artificial Sequence
  Description of Artificial Sequence: Synthetic oligonucleotide
cugaaugugcgguaaaugc

SEQ ID NO: 1077086 - RNA, 19 nt, Artificial Sequence
  Description of Artificial Sequence: Synthetic oligonucleotide
ugacgauucuuccagacac

SEQ ID NO: 1077087 - RNA, 19 nt, Artificial Sequence
  Description of Artificial Sequence: Synthetic oligonucleotide
gaagacauacgccccaggg

SEQ ID NO: 1077088 - RNA, 19 nt, Artificial Sequence
  Description of Artificial Sequence: Synthetic oligonucleotide
agauaguccaggcuccugc

SEQ ID NO: 1077089 - RNA, 19 nt, Artificial Sequence
  Description of Artificial Sequence: Synthetic oligonucleotide
ugaaugugcgguaaaugcc

SEQ ID NO: 1077090 - RNA, 19 nt, Artificial Sequence
  Description of Artificial Sequence: Synthetic oligonucleotide
ggaaauuucacacuuccag

SEQ ID NO: 1077091 - RNA, 19 nt, Artificial Sequence
  Description of Artificial Sequence: Synthetic oligonucleotide
ugggaaaccuuucucaccc

SEQ ID NO: 1077092 - RNA, 19 nt, Artificial Sequence
  Description of Artificial Sequence: Synthetic oligonucleotide
ggagaguugauaaagauug

SEQ ID NO: 1077093 - RNA, 19 nt, Artificial Sequence
  Description of Artificial Sequence: Synthetic oligonucleotide
uauacugaccuggagcugg

SEQ ID NO: 1077094 - RNA, 19 nt, Artificial Sequence
  Description of Artificial Sequence: Synthetic oligonucleotide
uuagcgaggccacugagga

SEQ ID NO: 1077095 - RNA, 19 nt, Artificial Sequence
  Description of Artificial Sequence: Synthetic oligonucleotide
gaaugugcgguaaaugccg

SEQ ID NO: 1077096 - RNA, 19 nt, Artificial Sequence
  Description of Artificial Sequence: Synthetic oligonucleotide
aauggccccaacucgcuuc

SEQ ID NO: 1077097 - RNA, 19 nt, Artificial Sequence
  Description of Artificial Sequence: Synthetic oligonucleotide
agugggaaaccuuucucac

SEQ ID NO: 1077098 - RNA, 19 nt, Artificial Sequence
  Description of Artificial Sequence: Synthetic oligonucleotide
aaguguuagagagaguugu

SEQ ID NO: 1077099 - RNA, 19 nt, Artificial Sequence
  Description of Artificial Sequence: Synthetic oligonucleotide
agaguugauaaagauuggg

SEQ ID NO: 1077100 - RNA, 19 nt, Artificial Sequence
  Description of Artificial Sequence: Synthetic oligonucleotide
ugggaagacacuugguucc

SEQ ID NO: 1077101 - RNA, 19 nt, Artificial Sequence
  Description of Artificial Sequence: Synthetic oligonucleotide
uggugcacccagaagaacc

SEQ ID NO: 1077102 - RNA, 19 nt, Artificial Sequence
  Description of Artificial Sequence: Synthetic oligonucleotide
guuagaacucacaccaugg

SEQ ID NO: 1077103 - RNA, 19 nt, Artificial Sequence
  Description of Artificial Sequence: Synthetic oligonucleotide
uuuaaggaaggcacuugug

SEQ ID NO: 1077104 - RNA, 19 nt, Artificial Sequence
  Description of Artificial Sequence: Synthetic oligonucleotide
guggaaauuucacacuucc

SEQ ID NO: 1077105 - RNA, 19 nt, Artificial Sequence
  Description of Artificial Sequence: Synthetic oligonucleotide
gagacugucuccuggauca

SEQ ID NO: 1077106 - RNA, 19 nt, Artificial Sequence
  Description of Artificial Sequence: Synthetic oligonucleotide
agaagaaccacauccucga

SEQ ID NO: 1077107 - RNA, 19 nt, Artificial Sequence
  Description of Artificial Sequence: Synthetic oligonucleotide
aaagauugggaagacacuu

SEQ ID NO: 1077108 - RNA, 19 nt, Artificial Sequence
  Description of Artificial Sequence: Synthetic oligonucleotide
aagacauacgccccaggga

SEQ ID NO: 1077109 - RNA, 19 nt, Artificial Sequence
  Description of Artificial Sequence: Synthetic oligonucleotide
ucuguuuaaggaaggcacu

SEQ ID NO: 1077110 - RNA, 19 nt, Artificial Sequence
  Description of Artificial Sequence: Synthetic oligonucleotide
guuagagagaguuguguac

SEQ ID NO: 1077111 - RNA, 19 nt, Artificial Sequence
  Description of Artificial Sequence: Synthetic oligonucleotide
uugguuccgcugaaguugg

SEQ ID NO: 1077112 - RNA, 19 nt, Artificial Sequence
  Description of Artificial Sequence: Synthetic oligonucleotide
uaaaugccggacccaagcc

SEQ ID NO: 1077113 - RNA, 19 nt, Artificial Sequence
  Description of Artificial Sequence: Synthetic oligonucleotide
acaccaaucacugccccgc

SEQ ID NO: 1077114 - RNA, 19 nt, Artificial Sequence
  Description of Artificial Sequence: Synthetic oligonucleotide
aagccggccaagucagggc

SEQ ID NO: 1077115 - RNA, 19 nt, Artificial Sequence
  Description of Artificial Sequence: Synthetic oligonucleotide
cagaagucuggagagauag

SEQ ID NO: 1077116 - RNA, 19 nt, Artificial Sequence
  Description of Artificial Sequence: Synthetic oligonucleotide
cacgauaccggagagcacg

SEQ ID NO: 1077117 - RNA, 19 nt, Artificial Sequence
  Description of Artificial Sequence: Synthetic oligonucleotide
cacgguguacuugagagcc

SEQ ID NO: 1077118 - RNA, 19 nt, Artificial Sequence
  Description of Artificial Sequence: Synthetic oligonucleotide
agaucaggggucccucugc

SEQ ID NO: 1077119 - RNA, 19 nt, Artificial Sequence
  Description of Artificial Sequence: Synthetic oligonucleotide
uuucuguuuaaggaaggca

SEQ ID NO: 1077120 - RNA, 19 nt, Artificial Sequence
  Description of Artificial Sequence: Synthetic oligonucleotide
agauagcguuuccacuucc

SEQ ID NO: 1077121 - RNA, 19 nt, Artificial Sequence
  Description of Artificial Sequence: Synthetic oligonucleotide
gaugacucuggcucccagg

SEQ ID NO: 1077122 - RNA, 19 nt, Artificial Sequence
  Description of Artificial Sequence: Synthetic oligonucleotide
uggugagcagccuggagag

SEQ ID NO: 1077123 - RNA, 19 nt, Artificial Sequence
  Description of Artificial Sequence: Synthetic oligonucleotide
agacauacgccccagggau

SEQ ID NO: 1077124 - RNA, 19 nt, Artificial Sequence
  Description of Artificial Sequence: Synthetic oligonucleotide
cuugccuggcacuggaagg

SEQ ID NO: 1077125 - RNA, 19 nt, Artificial Sequence
  Description of Artificial Sequence: Synthetic oligonucleotide
uuguggaaauuucacacuu

SEQ ID NO: 1077126 - RNA, 19 nt, Artificial Sequence
  Description of Artificial Sequence: Synthetic oligonucleotide
uuugagacugucuccugga

SEQ ID NO: 1077127 - RNA, 19 nt, Artificial Sequence
  Description of Artificial Sequence: Synthetic oligonucleotide
gaagucuggagagauaguc

SEQ ID NO: 1077128 - RNA, 19 nt, Artificial Sequence
  Description of Artificial Sequence: Synthetic oligonucleotide
uugggaagacacuugguuc

SEQ ID NO: 1077129 - RNA, 19 nt, Artificial Sequence
  Description of Artificial Sequence: Synthetic oligonucleotide
uguuagagagaguugugua

SEQ ID NO: 1077130 - RNA, 19 nt, Artificial Sequence
  Description of Artificial Sequence: Synthetic oligonucleotide
gauaccggagagcacggug

SEQ ID NO: 1077131 - RNA, 19 nt, Artificial Sequence
  Description of Artificial Sequence: Synthetic oligonucleotide
gaagacgugcgguacacga

SEQ ID NO: 1077132 - RNA, 19 nt, Artificial Sequence
  Description of Artificial Sequence: Synthetic oligonucleotide
uggcucucuacucuaggcc

SEQ ID NO: 1077133 - RNA, 19 nt, Artificial Sequence
  Description of Artificial Sequence: Synthetic oligonucleotide
aaugccggacccaagccag

SEQ ID NO: 1077134 - RNA, 19 nt, Artificial Sequence
  Description of Artificial Sequence: Synthetic oligonucleotide
uugacgauucuuccagaca

SEQ ID NO: 1077135 - RNA, 19 nt, Artificial Sequence
  Description of Artificial Sequence: Synthetic oligonucleotide
uggagaguugauaaagauu

SEQ ID NO: 1077136 - RNA, 19 nt, Artificial Sequence
  Description of Artificial Sequence: Synthetic oligonucleotide
ucuacucuaggcccuuucu

SEQ ID NO: 1077137 - RNA, 19 nt, Artificial Sequence
  Description of Artificial Sequence: Synthetic oligonucleotide
agacgugcgguacacgaag

SEQ ID NO: 1077138 - RNA, 19 nt, Artificial Sequence
  Description of Artificial Sequence: Synthetic oligonucleotide
aagacacuugguuccgcug

SEQ ID NO: 1077139 - RNA, 19 nt, Artificial Sequence
  Description of Artificial Sequence: Synthetic oligonucleotide
guguacagaagucuggaga

SEQ ID NO: 1077140 - RNA, 19 nt, Artificial Sequence
  Description of Artificial Sequence: Synthetic oligonucleotide
ggagagauaguccaggcuc

SEQ ID NO: 1077141 - RNA, 19 nt, Artificial Sequence
  Description of Artificial Sequence: Synthetic oligonucleotide
gucaugacugcuaugccag

SEQ ID NO: 1077142 - RNA, 19 nt, Artificial Sequence
  Description of Artificial Sequence: Synthetic oligonucleotide
gaacucacaccauggcugc

SEQ ID NO: 1077143 - RNA, 19 nt, Artificial Sequence
  Description of Artificial Sequence: Synthetic oligonucleotide
gggauugucgaugacauug

SEQ ID NO: 1077144 - RNA, 19 nt, Artificial Sequence
  Description of Artificial Sequence: Synthetic oligonucleotide
acugaggacaggucuacgu

SEQ ID NO: 1077145 - RNA, 19 nt, Artificial Sequence
  Description of Artificial Sequence: Synthetic oligonucleotide
uccggaaugguucccagua

SEQ ID NO: 1077146 - RNA, 19 nt, Artificial Sequence
  Description of Artificial Sequence: Synthetic oligonucleotide
uguuuaaggaaggcacuug

SEQ ID NO: 1077147 - RNA, 19 nt, Artificial Sequence
  Description of Artificial Sequence: Synthetic oligonucleotide
aaugugcgguaaaugccgg

SEQ ID NO: 1077148 - RNA, 19 nt, Artificial Sequence
  Description of Artificial Sequence: Synthetic oligonucleotide
uguggaaauuucacacuuc

SEQ ID NO: 1077149 - RNA, 19 nt, Artificial Sequence
  Description of Artificial Sequence: Synthetic oligonucleotide
ugaggacaggucuacguuc

SEQ ID NO: 1077150 - RNA, 19 nt, Artificial Sequence
  Description of Artificial Sequence: Synthetic oligonucleotide
ugaggaugacauccauuug

SEQ ID NO: 1077151 - RNA, 19 nt, Artificial Sequence
  Description of Artificial Sequence: Synthetic oligonucleotide
aagauugggaagacacuug

SEQ ID NO: 1077152 - RNA, 19 nt, Artificial Sequence
  Description of Artificial Sequence: Synthetic oligonucleotide
aaucaaggugacaggucuc

SEQ ID NO: 1077153 - RNA, 19 nt, Artificial Sequence
  Description of Artificial Sequence: Synthetic oligonucleotide
gcuagagccguccacgggg

SEQ ID NO: 1077154 - RNA, 19 nt, Artificial Sequence
  Description of Artificial Sequence: Synthetic oligonucleotide
gaagccggccaagucaggg

SEQ ID NO: 1077155 - RNA, 19 nt, Artificial Sequence
  Description of Artificial Sequence: Synthetic oligonucleotide
gguuagaacucacaccaug

SEQ ID NO: 1077156 - RNA, 19 nt, Artificial Sequence
  Description of Artificial Sequence: Synthetic oligonucleotide
gagaguugauaaagauugg

SEQ ID NO: 1077157 - RNA, 19 nt, Artificial Sequence
  Description of Artificial Sequence: Synthetic oligonucleotide
aacugcggcugucuggaga

SEQ ID NO: 1077158 - RNA, 19 nt, Artificial Sequence
  Description of Artificial Sequence: Synthetic oligonucleotide
uacguucuccauccuccgg

SEQ ID NO: 1077159 - RNA, 19 nt, Artificial Sequence
  Description of Artificial Sequence: Synthetic oligonucleotide
ugugccaggugcuugccaa

SEQ ID NO: 1077160 - RNA, 19 nt, Artificial Sequence
  Description of Artificial Sequence: Synthetic oligonucleotide
ggagccuauacugaccugg

SEQ ID NO: 1077161 - RNA, 19 nt, Artificial Sequence
  Description of Artificial Sequence: Synthetic oligonucleotide
ugguggaucgucucaucug

SEQ ID NO: 1077162 - RNA, 19 nt, Artificial Sequence
  Description of Artificial Sequence: Synthetic oligonucleotide
gaaacugcggcugucugga

SEQ ID NO: 1077163 - RNA, 19 nt, Artificial Sequence
  Description of Artificial Sequence: Synthetic oligonucleotide
uacagaagucuggagagau

SEQ ID NO: 1077164 - RNA, 19 nt, Artificial Sequence
  Description of Artificial Sequence: Synthetic oligonucleotide
aggagauagcguuuccacu

SEQ ID NO: 1077165 - RNA, 19 nt, Artificial Sequence
  Description of Artificial Sequence: Synthetic oligonucleotide
gagagauaguccaggcucc

SEQ ID NO: 1077166 - RNA, 19 nt, Artificial Sequence
  Description of Artificial Sequence: Synthetic oligonucleotide
gccuauacugaccuggagc

SEQ ID NO: 1077167 - RNA, 19 nt, Artificial Sequence
  Description of Artificial Sequence: Synthetic oligonucleotide
ucgaugaucccuuggcaau

SEQ ID NO: 1077168 - RNA, 19 nt, Artificial Sequence
  Description of Artificial Sequence: Synthetic oligonucleotide
agcucagaaguguuagaga

SEQ ID NO: 1077169 - RNA, 19 nt, Artificial Sequence
  Description of Artificial Sequence: Synthetic oligonucleotide
ucaggagauagcguuucca

SEQ ID NO: 1077170 - RNA, 19 nt, Artificial Sequence
  Description of Artificial Sequence: Synthetic oligonucleotide
aggugacaggucuccggcc

SEQ ID NO: 1077171 - RNA, 19 nt, Artificial Sequence
  Description of Artificial Sequence: Synthetic oligonucleotide
ugugcgguaaaugccggac

SEQ ID NO: 1077172 - RNA, 19 nt, Artificial Sequence
  Description of Artificial Sequence: Synthetic oligonucleotide
aggccuaucaggagauagc

SEQ ID NO: 1077173 - RNA, 19 nt, Artificial Sequence
  Description of Artificial Sequence: Synthetic oligonucleotide
ugucaggccagcuccggcu

SEQ ID NO: 1077174 - RNA, 19 nt, Artificial Sequence
  Description of Artificial Sequence: Synthetic oligonucleotide
caaguguuuccuccauggc

SEQ ID NO: 1077175 - RNA, 19 nt, Artificial Sequence
  Description of Artificial Sequence: Synthetic oligonucleotide
caugacugcuaugccagcc

SEQ ID NO: 1077176 - RNA, 19 nt, Artificial Sequence
  Description of Artificial Sequence: Synthetic oligonucleotide
ggcugcaccgaacagugag

SEQ ID NO: 1077177 - RNA, 19 nt, Artificial Sequence
  Description of Artificial Sequence: Synthetic oligonucleotide
ugacugcuaugccagccac

SEQ ID NO: 1077178 - RNA, 19 nt, Artificial Sequence
  Description of Artificial Sequence: Synthetic oligonucleotide
ucaaggugacaggucuccg

SEQ ID NO: 1077179 - RNA, 19 nt, Artificial Sequence
  Description of Artificial Sequence: Synthetic oligonucleotide
ucccucagggagcaagugu

SEQ ID NO: 1077180 - RNA, 19 nt, Artificial Sequence
  Description of Artificial Sequence: Synthetic oligonucleotide
ccauugacgauucuuccag

SEQ ID NO: 1077181 - RNA, 19 nt, Artificial Sequence
  Description of Artificial Sequence: Synthetic oligonucleotide
uucggaugcccacagucuu

SEQ ID NO: 1077182 - RNA, 19 nt, Artificial Sequence
  Description of Artificial Sequence: Synthetic oligonucleotide
ugaacccaaucaaggugac

SEQ ID NO: 1077183 - RNA, 19 nt, Artificial Sequence
  Description of Artificial Sequence: Synthetic oligonucleotide
caguguucccucagggagc

SEQ ID NO: 1077184 - RNA, 19 nt, Artificial Sequence
  Description of Artificial Sequence: Synthetic oligonucleotide
cauguuagcgaggccacug

SEQ ID NO: 1077185 - RNA, 19 nt, Artificial Sequence
  Description of Artificial Sequence: Synthetic oligonucleotide
ggcucucuacucuaggccc

SEQ ID NO: 1077186 - RNA, 19 nt, Artificial Sequence
  Description of Artificial Sequence: Synthetic oligonucleotide
ggccuaucaggagauagcg

SEQ ID NO: 1077187 - RNA, 19 nt, Artificial Sequence
  Description of Artificial Sequence: Synthetic oligonucleotide
augacauuggcaacacuga

SEQ ID NO: 1077188 - RNA, 19 nt, Artificial Sequence
  Description of Artificial Sequence: Synthetic oligonucleotide
cagugggaaaccuuucuca

SEQ ID NO: 1077189 - RNA, 19 nt, Artificial Sequence
  Description of Artificial Sequence: Synthetic oligonucleotide
guuccgcugaaguuggaga

SEQ ID NO: 1077190 - RNA, 19 nt, Artificial Sequence
  Description of Artificial Sequence: Synthetic oligonucleotide
gggagcaaguguuuccucc

SEQ ID NO: 1077191 - RNA, 19 nt, Artificial Sequence
  Description of Artificial Sequence: Synthetic oligonucleotide
caguacugcuccuggcugc

SEQ ID NO: 1077192 - RNA, 19 nt, Artificial Sequence
  Description of Artificial Sequence: Synthetic oligonucleotide
gguucggaugcccacaguc

SEQ ID NO: 1077193 - RNA, 19 nt, Artificial Sequence
  Description of Artificial Sequence: Synthetic oligonucleotide
gaucgucucaucuguggaa

SEQ ID NO: 1077194 - RNA, 19 nt, Artificial Sequence
  Description of Artificial Sequence: Synthetic oligonucleotide
gugagaggaggaugugugc

SEQ ID NO: 1077195 - RNA, 19 nt, Artificial Sequence
  Description of Artificial Sequence: Synthetic oligonucleotide
cuagagccguccacggggc

SEQ ID NO: 1077196 - RNA, 19 nt, Artificial Sequence
  Description of Artificial Sequence: Synthetic oligonucleotide
ugccaaccucugccgaccg

SEQ ID NO: 1077197 - RNA, 19 nt, Artificial Sequence
  Description of Artificial Sequence: Synthetic oligonucleotide
agcgcugccgaugauugug

SEQ ID NO: 1077198 - RNA, 19 nt, Artificial Sequence
  Description of Artificial Sequence: Synthetic oligonucleotide
gacgauucuuccagacacc

SEQ ID NO: 1077199 - RNA, 19 nt, Artificial Sequence
  Description of Artificial Sequence: Synthetic oligonucleotide
ggagcaagguuucugugga

SEQ ID NO: 1077200 - RNA, 19 nt, Artificial Sequence
  Description of Artificial Sequence: Synthetic oligonucleotide
caacacugaggagggaagc

SEQ ID NO: 1077201 - RNA, 19 nt, Artificial Sequence
  Description of Artificial Sequence: Synthetic oligonucleotide
auguuagcgaggccacuga

SEQ ID NO: 1077202 - RNA, 19 nt, Artificial Sequence
  Description of Artificial Sequence: Synthetic oligonucleotide
aguguuagagagaguugug

SEQ ID NO: 1077203 - RNA, 19 nt, Artificial Sequence
  Description of Artificial Sequence: Synthetic oligonucleotide
guccacggggcgcugaaug

SEQ ID NO: 1077204 - RNA, 19 nt, Artificial Sequence
  Description of Artificial Sequence: Synthetic oligonucleotide
cucgaugaucccuuggcaa

SEQ ID NO: 1077205 - RNA, 19 nt, Artificial Sequence
  Description of Artificial Sequence: Synthetic oligonucleotide
gugcccguugaccacugag

SEQ ID NO: 1077206 - RNA, 19 nt, Artificial Sequence
  Description of Artificial Sequence: Synthetic oligonucleotide
ucugccgaccggugaagac

SEQ ID NO: 1077207 - RNA, 19 nt, Artificial Sequence
  Description of Artificial Sequence: Synthetic oligonucleotide
gucacaccaaucacugccc

SEQ ID NO: 1077208 - RNA, 19 nt, Artificial Sequence
  Description of Artificial Sequence: Synthetic oligonucleotide
gacugcuaugccagccacg

SEQ ID NO: 1077209 - RNA, 19 nt, Artificial Sequence
  Description of Artificial Sequence: Synthetic oligonucleotide
uggguugauguuguagguc

SEQ ID NO: 1077210 - RNA, 19 nt, Artificial Sequence
  Description of Artificial Sequence: Synthetic oligonucleotide
ugccgaccggugaagacau

SEQ ID NO: 1077211 - RNA, 19 nt, Artificial Sequence
  Description of Artificial Sequence: Synthetic oligonucleotide
gaacaucccgaggagcuca

SEQ ID NO: 1077212 - RNA, 19 nt, Artificial Sequence
  Description of Artificial Sequence: Synthetic oligonucleotide
auaccggagagcacggugu

SEQ ID NO: 1077213 - RNA, 19 nt, Artificial Sequence
  Description of Artificial Sequence: Synthetic oligonucleotide
cuacuggugcacccagaag

SEQ ID NO: 1077214 - RNA, 19 nt, Artificial Sequence
  Description of Artificial Sequence: Synthetic oligonucleotide
uugccaaccucugccgacc

SEQ ID NO: 1077215 - RNA, 19 nt, Artificial Sequence
  Description of Artificial Sequence: Synthetic oligonucleotide
guagaugacucuggcuccc

SEQ ID NO: 1077216 - RNA, 19 nt, Artificial Sequence
  Description of Artificial Sequence: Synthetic oligonucleotide
agccggccaagucagggca

SEQ ID NO: 1077217 - RNA, 19 nt, Artificial Sequence
  Description of Artificial Sequence: Synthetic oligonucleotide
agccacgauaccggagagc

SEQ ID NO: 1077218 - RNA, 19 nt, Artificial Sequence
  Description of Artificial Sequence: Synthetic oligonucleotide
gugcgguaaaugccggacc

SEQ ID NO: 1077219 - RNA, 19 nt, Artificial Sequence
  Description of Artificial Sequence: Synthetic oligonucleotide
uucauccuuguauccuguc

SEQ ID NO: 1077220 - RNA, 19 nt, Artificial Sequence
  Description of Artificial Sequence: Synthetic oligonucleotide
aaacugcggcugucuggag

SEQ ID NO: 1077221 - RNA, 19 nt, Artificial Sequence
  Description of Artificial Sequence: Synthetic oligonucleotide
caccuuccggaaugguucc

SEQ ID NO: 1077222 - RNA, 19 nt, Artificial Sequence
  Description of Artificial Sequence: Synthetic oligonucleotide
gaagacacuugguuccgcu

SEQ ID NO: 1077223 - RNA, 19 nt, Artificial Sequence
  Description of Artificial Sequence: Synthetic oligonucleotide
cacgaagcucagcaaccag

SEQ ID NO: 1077224 - RNA, 19 nt, Artificial Sequence
  Description of Artificial Sequence: Synthetic oligonucleotide
gcaccgaacagugagguca

SEQ ID NO: 1077225 - RNA, 19 nt, Artificial Sequence
  Description of Artificial Sequence: Synthetic oligonucleotide
cacaccauggcugcagauc

SEQ ID NO: 1077226 - RNA, 19 nt, Artificial Sequence
  Description of Artificial Sequence: Synthetic oligonucleotide
gucuacguucuccauccuc

SEQ ID NO: 1077227 - RNA, 19 nt, Artificial Sequence
  Description of Artificial Sequence: Synthetic oligonucleotide
uagagccguccacggggcg

SEQ ID NO: 1077228 - RNA, 19 nt, Artificial Sequence
  Description of Artificial Sequence: Synthetic oligonucleotide
aucgucucaucuguggaaa

SEQ ID NO: 1077229 - RNA, 19 nt, Artificial Sequence
  Description of Artificial Sequence: Synthetic oligonucleotide
guccaagugcccguugacc

SEQ ID NO: 1077230 - RNA, 19 nt, Artificial Sequence
  Description of Artificial Sequence: Synthetic oligonucleotide
ccaccuuccggaaugguuc

SEQ ID NO: 1077231 - RNA, 19 nt, Artificial Sequence
  Description of Artificial Sequence: Synthetic oligonucleotide
ucgucucaucuguggaaac

SEQ ID NO: 1077232 - RNA, 19 nt, Artificial Sequence
  Description of Artificial Sequence: Synthetic oligonucleotide
acgugcgguacacgaagcu

SEQ ID NO: 1077233 - RNA, 19 nt, Artificial Sequence
  Description of Artificial Sequence: Synthetic oligonucleotide
caguagggagcaagguuuc

SEQ ID NO: 1077234 - RNA, 19 nt, Artificial Sequence
  Description of Artificial Sequence: Synthetic oligonucleotide
agcaagguuucuguggauu

SEQ ID NO: 1077235 - RNA, 19 nt, Artificial Sequence
  Description of Artificial Sequence: Synthetic oligonucleotide
acggaagacgugcgguaca

SEQ ID NO: 1077236 - RNA, 19 nt, Artificial Sequence
  Description of Artificial Sequence: Synthetic oligonucleotide
gauaguccaggcuccugcu

SEQ ID NO: 1077237 - RNA, 19 nt, Artificial Sequence
  Description of Artificial Sequence: Synthetic oligonucleotide
cagucuugaggaugacauc

SEQ ID NO: 1077238 - RNA, 19 nt, Artificial Sequence
  Description of Artificial Sequence: Synthetic oligonucleotide
gacgugcgguacacgaagc

SEQ ID NO: 1077239 - RNA, 19 nt, Artificial Sequence
  Description of Artificial Sequence: Synthetic oligonucleotide
gccacgauaccggagagca

SEQ ID NO: 1077240 - RNA, 19 nt, Artificial Sequence
  Description of Artificial Sequence: Synthetic oligonucleotide
aagacgugcgguacacgaa

SEQ ID NO: 1077241 - RNA, 19 nt, Artificial Sequence
  Description of Artificial Sequence: Synthetic oligonucleotide
cucuacucuaggcccuuuc

SEQ ID NO: 1077242 - RNA, 19 nt, Artificial Sequence
  Description of Artificial Sequence: Synthetic oligonucleotide
auacgccccagggauuguc

SEQ ID NO: 1077243 - RNA, 19 nt, Artificial Sequence
  Description of Artificial Sequence: Synthetic oligonucleotide
gagauaguccaggcuccug

SEQ ID NO: 1077244 - RNA, 19 nt, Artificial Sequence
  Description of Artificial Sequence: Synthetic oligonucleotide
ggagcaaguguuuccucca

SEQ ID NO: 1077245 - RNA, 19 nt, Artificial Sequence
  Description of Artificial Sequence: Synthetic oligonucleotide
ggcacuuguggaaauuuca

SEQ ID NO: 1077246 - RNA, 19 nt, Artificial Sequence
  Description of Artificial Sequence: Synthetic oligonucleotide
ggaucgucucaucugugga

SEQ ID NO: 1077247 - RNA, 19 nt, Artificial Sequence
  Description of Artificial Sequence: Synthetic oligonucleotide
acgauaccggagagcacgg

SEQ ID NO: 1077248 - RNA, 19 nt, Artificial Sequence
  Description of Artificial Sequence: Synthetic oligonucleotide
gucuggagagauaguccag

SEQ ID NO: 1077249 - RNA, 19 nt, Artificial Sequence
  Description of Artificial Sequence: Synthetic oligonucleotide
gagcacgguguacuugaga

SEQ ID NO: 1077250 - RNA, 19 nt, Artificial Sequence
  Description of Artificial Sequence: Synthetic oligonucleotide
augugcgguaaaugccgga

SEQ ID NO: 1077251 - RNA, 19 nt, Artificial Sequence
  Description of Artificial Sequence: Synthetic oligonucleotide
cauugacgauucuuccaga

SEQ ID NO: 1077252 - RNA, 19 nt, Artificial Sequence
  Description of Artificial Sequence: Synthetic oligonucleotide
uucccucagggagcaagug

SEQ ID NO: 1077253 - RNA, 19 nt, Artificial Sequence
  Description of Artificial Sequence: Synthetic oligonucleotide
cuauacugaccuggagcug

SEQ ID NO: 1077254 - RNA, 19 nt, Artificial Sequence
  Description of Artificial Sequence: Synthetic oligonucleotide
cuggagaguugauaaagau

SEQ ID NO: 1077255 - RNA, 19 nt, Artificial Sequence
  Description of Artificial Sequence: Synthetic oligonucleotide
accuuccggaaugguuccc

SEQ ID NO: 1077256 - RNA, 19 nt, Artificial Sequence
  Description of Artificial Sequence: Synthetic oligonucleotide
ccaucagguacuuggcuuc

SEQ ID NO: 1077257 - RNA, 19 nt, Artificial Sequence
  Description of Artificial Sequence: Synthetic oligonucleotide
ccuauacugaccuggagcu

SEQ ID NO: 1077258 - RNA, 19 nt, Artificial Sequence
  Description of Artificial Sequence: Synthetic oligonucleotide
agagauaguccaggcuccu

SEQ ID NO: 1077259 - RNA, 19 nt, Artificial Sequence
  Description of Artificial Sequence: Synthetic oligonucleotide
gcaacacugaggagggaag

SEQ ID NO: 1077260 - RNA, 19 nt, Artificial Sequence
  Description of Artificial Sequence: Synthetic oligonucleotide
gguuccgcugaaguuggag

SEQ ID NO: 1077261 - RNA, 19 nt, Artificial Sequence
  Description of Artificial Sequence: Synthetic oligonucleotide
ggagauagcguuuccacuu

SEQ ID NO: 1077262 - RNA, 19 nt, Artificial Sequence
  Description of Artificial Sequence: Synthetic oligonucleotide
cacggaagacgugcgguac

SEQ ID NO: 1077263 - RNA, 19 nt, Artificial Sequence
  Description of Artificial Sequence: Synthetic oligonucleotide
ugugugccaggugcuugcc

SEQ ID NO: 1077264 - RNA, 19 nt, Artificial Sequence
  Description of Artificial Sequence: Synthetic oligonucleotide
gccauugacgauucuucca

SEQ ID NO: 1077265 - RNA, 19 nt, Artificial Sequence
  Description of Artificial Sequence: Synthetic oligonucleotide
ugcagaucaggggucccuc

SEQ ID NO: 1077266 - RNA, 19 nt, Artificial Sequence
  Description of Artificial Sequence: Synthetic oligonucleotide
uaccggagagcacggugua

SEQ ID NO: 1077267 - RNA, 19 nt, Artificial Sequence
  Description of Artificial Sequence: Synthetic oligonucleotide
ugccggacccaagccagcc

SEQ ID NO: 1077268 - RNA, 19 nt, Artificial Sequence
  Description of Artificial Sequence: Synthetic oligonucleotide
gacuccugggccucuagau

SEQ ID NO: 1077269 - RNA, 19 nt, Artificial Sequence
  Description of Artificial Sequence: Synthetic oligonucleotide
guccccuucuacuggugca

SEQ ID NO: 1077270 - RNA, 19 nt, Artificial Sequence
  Description of Artificial Sequence: Synthetic oligonucleotide
aggagccuauacugaccug

SEQ ID NO: 1077271 - RNA, 19 nt, Artificial Sequence
  Description of Artificial Sequence: Synthetic oligonucleotide
uggauugguucagcucugu

SEQ ID NO: 1077272 - RNA, 19 nt, Artificial Sequence
  Description of Artificial Sequence: Synthetic oligonucleotide
accggagagcacgguguac

SEQ ID NO: 1077273 - RNA, 19 nt, Artificial Sequence
  Description of Artificial Sequence: Synthetic oligonucleotide
gguggaucgucucaucugu

SEQ ID NO: 1077274 - RNA, 19 nt, Artificial Sequence
  Description of Artificial Sequence: Synthetic oligonucleotide
ugcaccgaacagugagguc

SEQ ID NO: 1077275 - RNA, 19 nt, Artificial Sequence
  Description of Artificial Sequence: Synthetic oligonucleotide
acauccucgaugaucccuu

SEQ ID NO: 1077276 - RNA, 19 nt, Artificial Sequence
  Description of Artificial Sequence: Synthetic oligonucleotide
cgaacagugaggucaugac

SEQ ID NO: 1077277 - RNA, 19 nt, Artificial Sequence
  Description of Artificial Sequence: Synthetic oligonucleotide
cauccucgaugaucccuug

SEQ ID NO: 1077278 - RNA, 19 nt, Artificial Sequence
  Description of Artificial Sequence: Synthetic oligonucleotide
ggcuagagccguccacggg

SEQ ID NO: 1077279 - RNA, 19 nt, Artificial Sequence
  Description of Artificial Sequence: Synthetic oligonucleotide
cacugaggacaggucuacg

SEQ ID NO: 1077280 - RNA, 19 nt, Artificial Sequence
  Description of Artificial Sequence: Synthetic oligonucleotide
gggcuagagccguccacgg

SEQ ID NO: 1077281 - RNA, 19 nt, Artificial Sequence
  Description of Artificial Sequence: Synthetic oligonucleotide
gcugcaccgaacagugagg

SEQ ID NO: 1077282 - RNA, 19 nt, Artificial Sequence
  Description of Artificial Sequence: Synthetic oligonucleotide
gagccuauacugaccugga

SEQ ID NO: 1077283 - RNA, 19 nt, Artificial Sequence
  Description of Artificial Sequence: Synthetic oligonucleotide
gauagcguuuccacuuccu

SEQ ID NO: 1077284 - RNA, 19 nt, Artificial Sequence
  Description of Artificial Sequence: Synthetic oligonucleotide
agaagucuggagagauagu

SEQ ID NO: 1077285 - RNA, 19 nt, Artificial Sequence
  Description of Artificial Sequence: Synthetic oligonucleotide
gaucaggggucccucugcu

SEQ ID NO: 1077286 - RNA, 19 nt, Artificial Sequence
  Description of Artificial Sequence: Synthetic oligonucleotide
caccaaucacugccccgcc

SEQ ID NO: 1077287 - RNA, 19 nt, Artificial Sequence
  Description of Artificial Sequence: Synthetic oligonucleotide
ccggcugcaccgaacagug

SEQ ID NO: 1077288 - RNA, 19 nt, Artificial Sequence
  Description of Artificial Sequence: Synthetic oligonucleotide
ccguugaccacugaggaca

SEQ ID NO: 1077289 - RNA, 19 nt, Artificial Sequence
  Description of Artificial Sequence: Synthetic oligonucleotide
guggauugguucagcucug

SEQ ID NO: 1077290 - RNA, 19 nt, Artificial Sequence
  Description of Artificial Sequence: Synthetic oligonucleotide
caaccucugccgaccggug

SEQ ID NO: 1077291 - RNA, 19 nt, Artificial Sequence
  Description of Artificial Sequence: Synthetic oligonucleotide
guacagaagucuggagaga

SEQ ID NO: 1077292 - RNA, 19 nt, Artificial Sequence
  Description of Artificial Sequence: Synthetic oligonucleotide
gcacgguguacuugagagc

SEQ ID NO: 1077293 - RNA, 19 nt, Artificial Sequence
  Description of Artificial Sequence: Synthetic oligonucleotide
gauugggaagacacuuggu

SEQ ID NO: 1077294 - RNA, 19 nt, Artificial Sequence
  Description of Artificial Sequence: Synthetic oligonucleotide
gaacccaaucaaggugaca

SEQ ID NO: 1077295 - RNA, 19 nt, Artificial Sequence
  Description of Artificial Sequence: Synthetic oligonucleotide
cugccgaccggugaagaca

SEQ ID NO: 1077296 - RNA, 19 nt, Artificial Sequence
  Description of Artificial Sequence: Synthetic oligonucleotide
ccuaucaggagauagcguu

SEQ ID NO: 1077297 - RNA, 19 nt, Artificial Sequence
  Description of Artificial Sequence: Synthetic oligonucleotide
cacuugguuccgcugaagu

SEQ ID NO: 1077298 - RNA, 19 nt, Artificial Sequence
  Description of Artificial Sequence: Synthetic oligonucleotide
ggcaacacugaggagggaa

SEQ ID NO: 1077299 - RNA, 19 nt, Artificial Sequence
  Description of Artificial Sequence: Synthetic oligonucleotide
gcuaugccagccacggagc

SEQ ID NO: 1077300 - RNA, 19 nt, Artificial Sequence
  Description of Artificial Sequence: Synthetic oligonucleotide
aagugcccguugaccacug

SEQ ID NO: 1077301 - RNA, 19 nt, Artificial Sequence
  Description of Artificial Sequence: Synthetic oligonucleotide
ggaagacgugcgguacacg

SEQ ID NO: 1077302 - RNA, 19 nt, Artificial Sequence
  Description of Artificial Sequence: Synthetic oligonucleotide
augccggacccaagccagc

SEQ ID NO: 1077303 - RNA, 19 nt, Artificial Sequence
  Description of Artificial Sequence: Synthetic oligonucleotide
cugguggaucgucucaucu

SEQ ID NO: 1077304 - RNA, 19 nt, Artificial Sequence
  Description of Artificial Sequence: Synthetic oligonucleotide
ccgcugaaguuggagaaag

SEQ ID NO: 1077305 - RNA, 19 nt, Artificial Sequence
  Description of Artificial Sequence: Synthetic oligonucleotide
aggagccagugggaaaccu

SEQ ID NO: 1077306 - RNA, 19 nt, Artificial Sequence
  Description of Artificial Sequence: Synthetic oligonucleotide
ggagagcacgguguacuug

SEQ ID NO: 1077307 - RNA, 19 nt, Artificial Sequence
  Description of Artificial Sequence: Synthetic oligonucleotide
ccuggcacuggaagguaug

SEQ ID NO: 1077308 - RNA, 19 nt, Artificial Sequence
  Description of Artificial Sequence: Synthetic oligonucleotide
ggagcugcacggaagacgu

SEQ ID NO: 1077309 - RNA, 19 nt, Artificial Sequence
  Description of Artificial Sequence: Synthetic oligonucleotide
ggacccaagccagccagug

SEQ ID NO: 1077310 - RNA, 19 nt, Artificial Sequence
  Description of Artificial Sequence: Synthetic oligonucleotide
guucggaugcccacagucu

SEQ ID NO: 1077311 - RNA, 19 nt, Artificial Sequence
  Description of Artificial Sequence: Synthetic oligonucleotide
cgaccggugaagacauacg

SEQ ID NO: 1077312 - RNA, 19 nt, Artificial Sequence
  Description of Artificial Sequence: Synthetic oligonucleotide
caggccaagcaguacugcu

SEQ ID NO: 1077313 - RNA, 19 nt, Artificial Sequence
  Description of Artificial Sequence: Synthetic oligonucleotide
uguuuccuccauggcucuc

SEQ ID NO: 1077314 - RNA, 19 nt, Artificial Sequence
  Description of Artificial Sequence: Synthetic oligonucleotide
cuaucaggagauagcguuu

SEQ ID NO: 1077315 - RNA, 19 nt, Artificial Sequence
  Description of Artificial Sequence: Synthetic oligonucleotide
acggggcgcugaaugugcg

SEQ ID NO: 1077316 - RNA, 19 nt, Artificial Sequence
  Description of Artificial Sequence: Synthetic oligonucleotide
ccgaccggugaagacauac

SEQ ID NO: 1077317 - RNA, 19 nt, Artificial Sequence
  Description of Artificial Sequence: Synthetic oligonucleotide
ugguuccgcugaaguugga

SEQ ID NO: 1077318 - RNA, 19 nt, Artificial Sequence
  Description of Artificial Sequence: Synthetic oligonucleotide
acccggagcugcacggaag

SEQ ID NO: 1077319 - RNA, 19 nt, Artificial Sequence
  Description of Artificial Sequence: Synthetic oligonucleotide
gcuccggcugcaccgaaca

SEQ ID NO: 1077320 - RNA, 19 nt, Artificial Sequence
  Description of Artificial Sequence: Synthetic oligonucleotide
augaucccuuggcaaucuu

SEQ ID NO: 1077321 - RNA, 19 nt, Artificial Sequence
  Description of Artificial Sequence: Synthetic oligonucleotide
ccagggauugucgaugaca

SEQ ID NO: 1077322 - RNA, 19 nt, Artificial Sequence
  Description of Artificial Sequence: Synthetic oligonucleotide
cugcgggcuagagccgucc

SEQ ID NO: 1077323 - RNA, 19 nt, Artificial Sequence
  Description of Artificial Sequence: Synthetic oligonucleotide
cagaggggaaccuccaguu

SEQ ID NO: 1077324 - RNA, 19 nt, Artificial Sequence
  Description of Artificial Sequence: Synthetic oligonucleotide
agugcccguugaccacuga

SEQ ID NO: 1077325 - RNA, 19 nt, Artificial Sequence
  Description of Artificial Sequence: Synthetic oligonucleotide
cugaggacaggucuacguu

SEQ ID NO: 1077326 - RNA, 19 nt, Artificial Sequence
  Description of Artificial Sequence: Synthetic oligonucleotide
cccgccuccgacuguggcc

SEQ ID NO: 1077327 - RNA, 19 nt, Artificial Sequence
  Description of Artificial Sequence: Synthetic oligonucleotide
cuccgacuguggccaggcc

SEQ ID NO: 1077328 - RNA, 19 nt, Artificial Sequence
  Description of Artificial Sequence: Synthetic oligonucleotide
cccguugaccacugaggac

SEQ ID NO: 1077329 - RNA, 19 nt, Artificial Sequence
  Description of Artificial Sequence: Synthetic oligonucleotide
cgggcuagagccguccacg

SEQ ID NO: 1077330 - RNA, 19 nt, Artificial Sequence
  Description of Artificial Sequence: Synthetic oligonucleotide
gccccagggauugucgaug

SEQ ID NO: 1077331 - RNA, 19 nt, Artificial Sequence
  Description of Artificial Sequence: Synthetic oligonucleotide
cuguuuaaggaaggcacuu

SEQ ID NO: 1077332 - RNA, 19 nt, Artificial Sequence
  Description of Artificial Sequence: Synthetic oligonucleotide
cacauccucgaugaucccu

SEQ ID NO: 1077333 - RNA, 19 nt, Artificial Sequence
  Description of Artificial Sequence: Synthetic oligonucleotide
ccggaaugguucccaguac

SEQ ID NO: 1077334 - RNA, 19 nt, Artificial Sequence
  Description of Artificial Sequence: Synthetic oligonucleotide
ggacuggcagcaguaggga

SEQ ID NO: 1077335 - RNA, 19 nt, Artificial Sequence
  Description of Artificial Sequence: Synthetic oligonucleotide
cugcaccgaacagugaggu

SEQ ID NO: 1077336 - RNA, 19 nt, Artificial Sequence
  Description of Artificial Sequence: Synthetic oligonucleotide
gcaguagccauugacgauu

SEQ ID NO: 1077337 - RNA, 19 nt, Artificial Sequence
  Description of Artificial Sequence: Synthetic oligonucleotide
ccgaacagugaggucauga

SEQ ID NO: 1077338 - RNA, 19 nt, Artificial Sequence
  Description of Artificial Sequence: Synthetic oligonucleotide
acgguguacuugagagccu

SEQ ID NO: 1077339 - RNA, 19 nt, Artificial Sequence
  Description of Artificial Sequence: Synthetic oligonucleotide
ggggucaguccaguuccgc

SEQ ID NO: 1077340 - RNA, 19 nt, Artificial Sequence
  Description of Artificial Sequence: Synthetic oligonucleotide
ccaggccaagcaguacugc

SEQ ID NO: 1077341 - RNA, 19 nt, Artificial Sequence
  Description of Artificial Sequence: Synthetic oligonucleotide
caacucgcuucuucauccu

SEQ ID NO: 1077342 - RNA, 19 nt, Artificial Sequence
  Description of Artificial Sequence: Synthetic oligonucleotide
ccuccgacuguggccaggc

SEQ ID NO: 1077343 - RNA, 19 nt, Artificial Sequence
  Description of Artificial Sequence: Synthetic oligonucleotide
ggaagccggccaagucagg

SEQ ID NO: 1077344 - RNA, 19 nt, Artificial Sequence
  Description of Artificial Sequence: Synthetic oligonucleotide
cuggaucaggucccugggu

SEQ ID NO: 1077345 - RNA, 19 nt, Artificial Sequence
  Description of Artificial Sequence: Synthetic oligonucleotide
agugacuccugggccucua

SEQ ID NO: 1077346 - RNA, 19 nt, Artificial Sequence
  Description of Artificial Sequence: Synthetic oligonucleotide
ggcgcugaaugugcgguaa

SEQ ID NO: 1077347 - RNA, 19 nt, Artificial Sequence
  Description of Artificial Sequence: Synthetic oligonucleotide
gcacggaagacgugcggua

SEQ ID NO: 1077348 - RNA, 19 nt, Artificial Sequence
  Description of Artificial Sequence: Synthetic oligonucleotide
gcgggcuagagccguccac

SEQ ID NO: 1077349 - RNA, 19 nt, Artificial Sequence
  Description of Artificial Sequence: Synthetic oligonucleotide
cgugcgguacacgaagcuc

SEQ ID NO: 1077350 - RNA, 19 nt, Artificial Sequence
  Description of Artificial Sequence: Synthetic oligonucleotide
gcugcagaucagggguccc

SEQ ID NO: 1077351 - RNA, 19 nt, Artificial Sequence
  Description of Artificial Sequence: Synthetic oligonucleotide
cacccggagcugcacggaa

SEQ ID NO: 1077352 - RNA, 19 nt, Artificial Sequence
  Description of Artificial Sequence: Synthetic oligonucleotide
ccgacuguggccaggccua

SEQ ID NO: 1077353 - RNA, 19 nt, Artificial Sequence
  Description of Artificial Sequence: Synthetic oligonucleotide
ccacgauaccggagagcac

SEQ ID NO: 1077354 - RNA, 19 nt, Artificial Sequence
  Description of Artificial Sequence: Synthetic oligonucleotide
caccgaacagugaggucau

SEQ ID NO: 1077355 - RNA, 19 nt, Artificial Sequence
  Description of Artificial Sequence: Synthetic oligonucleotide
gcggcugccccagcgcugc

SEQ ID NO: 1077356 - RNA, 19 nt, Artificial Sequence
  Description of Artificial Sequence: Synthetic oligonucleotide
ggaaugguucccaguacuu

SEQ ID NO: 1077357 - RNA, 19 nt, Artificial Sequence
  Description of Artificial Sequence: Synthetic oligonucleotide
cccggagcugcacggaaga

SEQ ID NO: 1077358 - RNA, 19 nt, Artificial Sequence
  Description of Artificial Sequence: Synthetic oligonucleotide
gcccaguggguuagaacuc

SEQ ID NO: 1077359 - RNA, 19 nt, Artificial Sequence
  Description of Artificial Sequence: Synthetic oligonucleotide
gacauacgccccagggauu

SEQ ID NO: 1077360 - RNA, 19 nt, Artificial Sequence
  Description of Artificial Sequence: Synthetic oligonucleotide
cggaagacgugcgguacac

SEQ ID NO: 1077361 - RNA, 19 nt, Artificial Sequence
  Description of Artificial Sequence: Synthetic oligonucleotide
ccccuucuacuggugcacc

SEQ ID NO: 1077362 - RNA, 19 nt, Artificial Sequence
  Description of Artificial Sequence: Synthetic oligonucleotide
ccuuccggaaugguuccca

SEQ ID NO: 1077363 - RNA, 19 nt, Artificial Sequence
  Description of Artificial Sequence: Synthetic oligonucleotide
gccggccaagucagggcag

SEQ ID NO: 1077364 - RNA, 19 nt, Artificial Sequence
  Description of Artificial Sequence: Synthetic oligonucleotide
cugcagaucaggggucccu

SEQ ID NO: 1077365 - RNA, 19 nt, Artificial Sequence
  Description of Artificial Sequence: Synthetic oligonucleotide
cuccggcccugcugccgug

SEQ ID NO: 1077366 - RNA, 19 nt, Artificial Sequence
  Description of Artificial Sequence: Synthetic oligonucleotide
ggauugguucagcucuguu

SEQ ID NO: 1077367 - RNA, 19 nt, Artificial Sequence
  Description of Artificial Sequence: Synthetic oligonucleotide
gccuccgacuguggccagg

SEQ ID NO: 1077368 - RNA, 19 nt, Artificial Sequence
  Description of Artificial Sequence: Synthetic oligonucleotide
ggggaaccuccaguuccac

SEQ ID NO: 1077369 - RNA, 19 nt, Artificial Sequence
  Description of Artificial Sequence: Synthetic oligonucleotide
gcgguacacgaagcucagc

SEQ ID NO: 1077370 - RNA, 19 nt, Artificial Sequence
  Description of Artificial Sequence: Synthetic oligonucleotide
cccagggauugucgaugac

SEQ ID NO: 1077371 - RNA, 19 nt, Artificial Sequence
  Description of Artificial Sequence: Synthetic oligonucleotide
ccucugccgaccggugaag

SEQ ID NO: 1077372 - RNA, 19 nt, Artificial Sequence
  Description of Artificial Sequence: Synthetic oligonucleotide
gccggacccaagccagcca

SEQ ID NO: 1077373 - RNA, 19 nt, Artificial Sequence
  Description of Artificial Sequence: Synthetic oligonucleotide
gggccucuagaugggaccu

SEQ ID NO: 1077374 - RNA, 19 nt, Artificial Sequence
  Description of Artificial Sequence: Synthetic oligonucleotide
ggguccccuucuacuggug

SEQ ID NO: 1077375 - RNA, 19 nt, Artificial Sequence
  Description of Artificial Sequence: Synthetic oligonucleotide
cuccccugcaguagccauu

SEQ ID NO: 1077376 - RNA, 19 nt, Artificial Sequence
  Description of Artificial Sequence: Synthetic oligonucleotide
ccaaccucugccgaccggu

SEQ ID NO: 1077377 - RNA, 19 nt, Artificial Sequence
  Description of Artificial Sequence: Synthetic oligonucleotide
gccuaucaggagauagcgu

SEQ ID NO: 1077378 - RNA, 19 nt, Artificial Sequence
  Description of Artificial Sequence: Synthetic oligonucleotide
gcgcugaaugugcgguaaa

SEQ ID NO: 1077379 - RNA, 19 nt, Artificial Sequence
  Description of Artificial Sequence: Synthetic oligonucleotide
cuggaagguauggcaguuu

SEQ ID NO: 1077380 - RNA, 19 nt, Artificial Sequence
  Description of Artificial Sequence: Synthetic oligonucleotide
ggagccagugggaaaccuu

SEQ ID NO: 1077381 - RNA, 19 nt, Artificial Sequence
  Description of Artificial Sequence: Synthetic oligonucleotide
ccggagagcacgguguacu

SEQ ID NO: 1077382 - RNA, 19 nt, Artificial Sequence
  Description of Artificial Sequence: Synthetic oligonucleotide
gccgaugauuguggcagcu

SEQ ID NO: 1077383 - RNA, 19 nt, Artificial Sequence
  Description of Artificial Sequence: Synthetic oligonucleotide
ggucccuggguuugcccau

SEQ ID NO: 1077384 - RNA, 19 nt, Artificial Sequence
  Description of Artificial Sequence: Synthetic oligonucleotide
gggcgcugaaugugcggua

SEQ ID NO: 1077385 - RNA, 19 nt, Artificial Sequence
  Description of Artificial Sequence: Synthetic oligonucleotide
gggccaucucuuggagaca

SEQ ID NO: 1077386 - RNA, 19 nt, Artificial Sequence
  Description of Artificial Sequence: Synthetic oligonucleotide
ccggagcugcacggaagac

SEQ ID NO: 1077387 - RNA, 19 nt, Artificial Sequence
  Description of Artificial Sequence: Synthetic oligonucleotide
ggucuacguucuccauccu

SEQ ID NO: 1077388 - RNA, 19 nt, Artificial Sequence
  Description of Artificial Sequence: Synthetic oligonucleotide
cagcgcugccgaugauugu

SEQ ID NO: 1077389 - RNA, 19 nt, Artificial Sequence
  Description of Artificial Sequence: Synthetic oligonucleotide
ggguuagaacucacaccau

SEQ ID NO: 1077390 - RNA, 19 nt, Artificial Sequence
  Description of Artificial Sequence: Synthetic oligonucleotide
ccgugagaggaggaugugu

SEQ ID NO: 1077391 - RNA, 19 nt, Artificial Sequence
  Description of Artificial Sequence: Synthetic oligonucleotide
cauacgccccagggauugu

SEQ ID NO: 1077392 - RNA, 19 nt, Artificial Sequence
  Description of Artificial Sequence: Synthetic oligonucleotide
ggcagcccaguggguuaga

SEQ ID NO: 1077393 - RNA, 19 nt, Artificial Sequence
  Description of Artificial Sequence: Synthetic oligonucleotide
ccauguuagcgaggccacu

SEQ ID NO: 1077394 - RNA, 19 nt, Artificial Sequence
  Description of Artificial Sequence: Synthetic oligonucleotide
ccguccacggggcgcugaa

SEQ ID NO: 1077395 - RNA, 19 nt, Artificial Sequence
  Description of Artificial Sequence: Synthetic oligonucleotide
cgcugaaugugcgguaaau

SEQ ID NO: 1077396 - RNA, 19 nt, Artificial Sequence
  Description of Artificial Sequence: Synthetic oligonucleotide
caccccagccuggcuuggu

SEQ ID NO: 1077397 - RNA, 19 nt, Artificial Sequence
  Description of Artificial Sequence: Synthetic oligonucleotide
gggcauugcccagcuccau

SEQ ID NO: 1077398 - RNA, 19 nt, Artificial Sequence
  Description of Artificial Sequence: Synthetic oligonucleotide
cugccccgccuccgacugu

SEQ ID NO: 1077399 - RNA, 19 nt, Artificial Sequence
  Description of Artificial Sequence: Synthetic oligonucleotide
gccgaccggugaagacaua

SEQ ID NO: 1077400 - RNA, 19 nt, Artificial Sequence
  Description of Artificial Sequence: Synthetic oligonucleotide
cgauaccggagagcacggu

SEQ ID NO: 1077401 - RNA, 19 nt, Artificial Sequence
  Description of Artificial Sequence: Synthetic oligonucleotide
cgacuguggccaggccuau

SEQ ID NO: 1077402 - RNA, 19 nt, Artificial Sequence
  Description of Artificial Sequence: Synthetic oligonucleotide
cguccacggggcgcugaau

SEQ ID NO: 1077403 - RNA, 19 nt, Artificial Sequence
  Description of Artificial Sequence: Synthetic oligonucleotide
aauuuagagacaauggagc

SEQ ID NO: 1077404 - RNA, 19 nt, Artificial Sequence
  Description of Artificial Sequence: Synthetic oligonucleotide
aaagguaggacauggacuc

SEQ ID NO: 1077405 - RNA, 19 nt, Artificial Sequence
  Description of Artificial Sequence: Synthetic oligonucleotide
uuugcugaaaacaauacca

SEQ ID NO: 1077406 - RNA, 19 nt, Artificial Sequence
  Description of Artificial Sequence: Synthetic oligonucleotide
aagucaauuauggacaacc

SEQ ID NO: 1077407 - RNA, 19 nt, Artificial Sequence
  Description of Artificial Sequence: Synthetic oligonucleotide
aauucagucaucuaagccu

SEQ ID NO: 1077408 - RNA, 19 nt, Artificial Sequence
  Description of Artificial Sequence: Synthetic oligonucleotide
aaaauagucacguauugga

SEQ ID NO: 1077409 - RNA, 19 nt, Artificial Sequence
  Description of Artificial Sequence: Synthetic oligonucleotide
uauguuucugaaaagguag

SEQ ID NO: 1077410 - RNA, 19 nt, Artificial Sequence
  Description of Artificial Sequence: Synthetic oligonucleotide
  modified_base (4)..(4): a, c, u, g, unknown or other
uaunccauuuauuaaacca

SEQ ID NO: 1077411 - RNA, 19 nt, Artificial Sequence
  Description of Artificial Sequence: Synthetic oligonucleotide
acuuacuuuauuuaagagg

SEQ ID NO: 1077412 - RNA, 19 nt, Artificial Sequence
  Description of Artificial Sequence: Synthetic oligonucleotide
acgguuuugaucuuggggc

SEQ ID NO: 1077413 - RNA, 19 nt, Artificial Sequence
  Description of Artificial Sequence: Synthetic oligonucleotide
aauauacuguaacaggaag

SEQ ID NO: 1077414 - RNA, 19 nt, Artificial Sequence
  Description of Artificial Sequence: Synthetic oligonucleotide
acuggaauauuaaagaagc

SEQ ID NO: 1077415 - RNA, 19 nt, Artificial Sequence
  Description of Artificial Sequence: Synthetic oligonucleotide
uguaaauccauagugauga

SEQ ID NO: 1077416 - RNA, 19 nt, Artificial Sequence
  Description of Artificial Sequence: Synthetic oligonucleotide
cuugcuauaaggaaaguag

SEQ ID NO: 1077417 - RNA, 19 nt, Artificial Sequence
  Description of Artificial Sequence: Synthetic oligonucleotide
aaaugaucagguuuuaacu

SEQ ID NO: 1077418 - RNA, 19 nt, Artificial Sequence
  Description of Artificial Sequence: Synthetic oligonucleotide
auaacauagaucuuguaug

SEQ ID NO: 1077419 - RNA, 19 nt, Artificial Sequence
  Description of Artificial Sequence: Synthetic oligonucleotide
ugauaaauacaucuuuucc

SEQ ID NO: 1077420 - RNA, 19 nt, Artificial Sequence
  Description of Artificial Sequence: Synthetic oligonucleotide
auuuagagacaauggagcc

SEQ ID NO: 1077421 - RNA, 19 nt, Artificial Sequence
  Description of Artificial Sequence: Synthetic oligonucleotide
auagucacguauuggaacc

SEQ ID NO: 1077422 - RNA, 19 nt, Artificial Sequence
  Description of Artificial Sequence: Synthetic oligonucleotide
uuugaaagcuccauacacg

SEQ ID NO: 1077423 - RNA, 19 nt, Artificial Sequence
  Description of Artificial Sequence: Synthetic oligonucleotide
gaaagcuccauacacgacg

SEQ ID NO: 1077424 - RNA, 19 nt, Artificial Sequence
  Description of Artificial Sequence: Synthetic oligonucleotide
aguuagaccagcuuugcac

SEQ ID NO: 1077425 - RNA, 19 nt, Artificial Sequence
  Description of Artificial Sequence: Synthetic oligonucleotide
aaaguaggggaucacuccg

SEQ ID NO: 1077426 - RNA, 19 nt, Artificial Sequence
  Description of Artificial Sequence: Synthetic oligonucleotide
ucucugacaacaaaauucc

SEQ ID NO: 1077427 - RNA, 19 nt, Artificial Sequence
  Description of Artificial Sequence: Synthetic oligonucleotide
ugcuauaaggaaaguaggg

SEQ ID NO: 1077428 - RNA, 19 nt, Artificial Sequence
  Description of Artificial Sequence: Synthetic oligonucleotide
caugcauacaccaugauca

SEQ ID NO: 1077429 - RNA, 19 nt, Artificial Sequence
  Description of Artificial Sequence: Synthetic oligonucleotide
uggaauauuaaagaagccc

SEQ ID NO: 1077430 - RNA, 19 nt, Artificial Sequence
  Description of Artificial Sequence: Synthetic oligonucleotide
acaacaaaauuccuccugg

SEQ ID NO: 1077431 - RNA, 19 nt, Artificial Sequence
  Description of Artificial Sequence: Synthetic oligonucleotide
caauuuagagacaauggag

SEQ ID NO: 1077432 - RNA, 19 nt, Artificial Sequence
  Description of Artificial Sequence: Synthetic oligonucleotide
aacuuacuuuauuuaagag

SEQ ID NO: 1077433 - RNA, 19 nt, Artificial Sequence
  Description of Artificial Sequence: Synthetic oligonucleotide
  modified_base (5)..(5): a, c, u, g, unknown or other
auaunccauuuauuaaacc

SEQ ID NO: 1077434 - RNA, 19 nt, Artificial Sequence
  Description of Artificial Sequence: Synthetic oligonucleotide
aauggaggacuccucaauc

SEQ ID NO: 1077435 - RNA, 19 nt, Artificial Sequence
  Description of Artificial Sequence: Synthetic oligonucleotide
uccacuaugauugcaaucc

SEQ ID NO: 1077436 - RNA, 19 nt, Artificial Sequence
  Description of Artificial Sequence: Synthetic oligonucleotide
uugcuauaaggaaaguagg

SEQ ID NO: 1077437 - RNA, 19 nt, Artificial Sequence
  Description of Artificial Sequence: Synthetic oligonucleotide
uaggggaucacuccgauga

SEQ ID NO: 1077438 - RNA, 19 nt, Artificial Sequence
  Description of Artificial Sequence: Synthetic oligonucleotide
  modified_base (6)..(6): a, c, u, g, unknown or other
uauaunccauuuauuaaac

SEQ ID NO: 1077439 - RNA, 19 nt, Artificial Sequence
  Description of Artificial Sequence: Synthetic oligonucleotide
cuugaauauacuguaacag

SEQ ID NO: 1077440 - RNA, 19 nt, Artificial Sequence
  Description of Artificial Sequence: Synthetic oligonucleotide
aaaacaauaccagacuccu

SEQ ID NO: 1077441 - RNA, 19 nt, Artificial Sequence
  Description of Artificial Sequence: Synthetic oligonucleotide
cacaugaggucuuacaugc

SEQ ID NO: 1077442 - RNA, 19 nt, Artificial Sequence
  Description of Artificial Sequence: Synthetic oligonucleotide
acaauucagucaucuaagc

SEQ ID NO: 1077443 - RNA, 19 nt, Artificial Sequence
  Description of Artificial Sequence: Synthetic oligonucleotide
uaacauagaucuuguaugc

SEQ ID NO: 1077444 - RNA, 19 nt, Artificial Sequence
  Description of Artificial Sequence: Synthetic oligonucleotide
uguaacacugggaaucaag

SEQ ID NO: 1077445 - RNA, 19 nt, Artificial Sequence
  Description of Artificial Sequence: Synthetic oligonucleotide
ucaucuaagccuauguuuc

SEQ ID NO: 1077446 - RNA, 19 nt, Artificial Sequence
  Description of Artificial Sequence: Synthetic oligonucleotide
acgaauuggaauuugcuga

SEQ ID NO: 1077447 - RNA, 19 nt, Artificial Sequence
  Description of Artificial Sequence: Synthetic oligonucleotide
  modified_base (7)..(7): a, c, u, g, unknown or other
cuauaunccauuuauuaaa

SEQ ID NO: 1077448 - RNA, 19 nt, Artificial Sequence
  Description of Artificial Sequence: Synthetic oligonucleotide
aacaauucagucaucuaag

SEQ ID NO: 1077449 - RNA, 19 nt, Artificial Sequence
  Description of Artificial Sequence: Synthetic oligonucleotide
uuauuuaagaggucuuucu

SEQ ID NO: 1077450 - RNA, 19 nt, Artificial Sequence
  Description of Artificial Sequence: Synthetic oligonucleotide
aaauccauagugaugagau

SEQ ID NO: 1077451 - RNA, 19 nt, Artificial Sequence
  Description of Artificial Sequence: Synthetic oligonucleotide
gaaaagguaggacauggac

SEQ ID NO: 1077452 - RNA, 19 nt, Artificial Sequence
  Description of Artificial Sequence: Synthetic oligonucleotide
ucugacaacaaaauuccuc

SEQ ID NO: 1077453 - RNA, 19 nt, Artificial Sequence
  Description of Artificial Sequence: Synthetic oligonucleotide
  modified_base (8)..(8): a, c, u, g, unknown or other
ucuauaunccauuuauuaa

SEQ ID NO: 1077454 - RNA, 19 nt, Artificial Sequence
  Description of Artificial Sequence: Synthetic oligonucleotide
uuauuaaaccaauuucuaa

SEQ ID NO: 1077455 - RNA, 19 nt, Artificial Sequence
  Description of Artificial Sequence: Synthetic oligonucleotide
gacgaauuggaauuugcug

SEQ ID NO: 1077456 - RNA, 19 nt, Artificial Sequence
  Description of Artificial Sequence: Synthetic oligonucleotide
uuagagacaauggagcccc

SEQ ID NO: 1077457 - RNA, 19 nt, Artificial Sequence
  Description of Artificial Sequence: Synthetic oligonucleotide
accucauucaaguguauuc

SEQ ID NO: 1077458 - RNA, 19 nt, Artificial Sequence
  Description of Artificial Sequence: Synthetic oligonucleotide
uggaauuugcugaaaacaa

SEQ ID NO: 1077459 - RNA, 19 nt, Artificial Sequence
  Description of Artificial Sequence: Synthetic oligonucleotide
uuggaauuugcugaaaaca

SEQ ID NO: 1077460 - RNA, 19 nt, Artificial Sequence
  Description of Artificial Sequence: Synthetic oligonucleotide
aaaggcggagcugaagagc

SEQ ID NO: 1077461 - RNA, 19 nt, Artificial Sequence
  Description of Artificial Sequence: Synthetic oligonucleotide
uacuguuugcugcuuaaag

SEQ ID NO: 1077462 - RNA, 19 nt, Artificial Sequence
  Description of Artificial Sequence: Synthetic oligonucleotide
acaugcauacaccaugauc

SEQ ID NO: 1077463 - RNA, 19 nt, Artificial Sequence
  Description of Artificial Sequence: Synthetic oligonucleotide
acugcguuccuauaauccg

SEQ ID NO: 1077464 - RNA, 19 nt, Artificial Sequence
  Description of Artificial Sequence: Synthetic oligonucleotide
uccacaucgucaauaaugu

SEQ ID NO: 1077465 - RNA, 19 nt, Artificial Sequence
  Description of Artificial Sequence: Synthetic oligonucleotide
cuuacaugcauacaccaug

SEQ ID NO: 1077466 - RNA, 19 nt, Artificial Sequence
  Description of Artificial Sequence: Synthetic oligonucleotide
auacaccaugaucaggagc

SEQ ID NO: 1077467 - RNA, 19 nt, Artificial Sequence
  Description of Artificial Sequence: Synthetic oligonucleotide
ucuguuagguuccugguaa

SEQ ID NO: 1077468 - RNA, 19 nt, Artificial Sequence
  Description of Artificial Sequence: Synthetic oligonucleotide
uugaaagcuccauacacga

SEQ ID NO: 1077469 - RNA, 19 nt, Artificial Sequence
  Description of Artificial Sequence: Synthetic oligonucleotide
gaaaguaggggaucacucc

SEQ ID NO: 1077470 - RNA, 19 nt, Artificial Sequence
  Description of Artificial Sequence: Synthetic oligonucleotide
uucuaauucaggaggcgcc

SEQ ID NO: 1077471 - RNA, 19 nt, Artificial Sequence
  Description of Artificial Sequence: Synthetic oligonucleotide
acuccgaugaugcucuugg

SEQ ID NO: 1077472 - RNA, 19 nt, Artificial Sequence
  Description of Artificial Sequence: Synthetic oligonucleotide
cacuggaauauuaaagaag

SEQ ID NO: 1077473 - RNA, 19 nt, Artificial Sequence
  Description of Artificial Sequence: Synthetic oligonucleotide
cuuugcacaucauggaagc

SEQ ID NO: 1077474 - RNA, 19 nt, Artificial Sequence
  Description of Artificial Sequence: Synthetic oligonucleotide
uauuccuuaaaaugguuau

SEQ ID NO: 1077475 - RNA, 19 nt, Artificial Sequence
  Description of Artificial Sequence: Synthetic oligonucleotide
cugguguaaauccauagug

SEQ ID NO: 1077476 - RNA, 19 nt, Artificial Sequence
  Description of Artificial Sequence: Synthetic oligonucleotide
uauuaaagaagcccuggau

SEQ ID NO: 1077477 - RNA, 19 nt, Artificial Sequence
  Description of Artificial Sequence: Synthetic oligonucleotide
ugguguaaauccauaguga

SEQ ID NO: 1077478 - RNA, 19 nt, Artificial Sequence
  Description of Artificial Sequence: Synthetic oligonucleotide
auauacuguaacaggaagg

SEQ ID NO: 1077479 - RNA, 19 nt, Artificial Sequence
  Description of Artificial Sequence: Synthetic oligonucleotide
gacucuugaauuuggacuc

SEQ ID NO: 1077480 - RNA, 19 nt, Artificial Sequence
  Description of Artificial Sequence: Synthetic oligonucleotide
uuacaugcauacaccauga

SEQ ID NO: 1077481 - RNA, 19 nt, Artificial Sequence
  Description of Artificial Sequence: Synthetic oligonucleotide
ucuuguuucucuguuaggu

SEQ ID NO: 1077482 - RNA, 19 nt, Artificial Sequence
  Description of Artificial Sequence: Synthetic oligonucleotide
uucugguguaaauccauag

SEQ ID NO: 1077483 - RNA, 19 nt, Artificial Sequence
  Description of Artificial Sequence: Synthetic oligonucleotide
aaaguugguccuuguaccu

SEQ ID NO: 1077484 - RNA, 19 nt, Artificial Sequence
  Description of Artificial Sequence: Synthetic oligonucleotide
aacauagaucuuguaugcg

SEQ ID NO: 1077485 - RNA, 19 nt, Artificial Sequence
  Description of Artificial Sequence: Synthetic oligonucleotide
uccuugguuauguucaucu

SEQ ID NO: 1077486 - RNA, 19 nt, Artificial Sequence
  Description of Artificial Sequence: Synthetic oligonucleotide
uacacgacgaauuggaauu

SEQ ID NO: 1077487 - RNA, 19 nt, Artificial Sequence
  Description of Artificial Sequence: Synthetic oligonucleotide
cugaaaagguaggacaugg

SEQ ID NO: 1077488 - RNA, 19 nt, Artificial Sequence
  Description of Artificial Sequence: Synthetic oligonucleotide
auggacaaccuccuguuag

SEQ ID NO: 1077489 - RNA, 19 nt, Artificial Sequence
  Description of Artificial Sequence: Synthetic oligonucleotide
agaaaggcggagcugaaga

SEQ ID NO: 1077490 - RNA, 19 nt, Artificial Sequence
  Description of Artificial Sequence: Synthetic oligonucleotide
cuguuugcugcuuaaaguc

SEQ ID NO: 1077491 - RNA, 19 nt, Artificial Sequence
  Description of Artificial Sequence: Synthetic oligonucleotide
uguuugcugcuuaaaguca

SEQ ID NO: 1077492 - RNA, 19 nt, Artificial Sequence
  Description of Artificial Sequence: Synthetic oligonucleotide
ggacuccucaaucagacgg

SEQ ID NO: 1077493 - RNA, 19 nt, Artificial Sequence
  Description of Artificial Sequence: Synthetic oligonucleotide
acuaugauugcaauccguc

SEQ ID NO: 1077494 - RNA, 19 nt, Artificial Sequence
  Description of Artificial Sequence: Synthetic oligonucleotide
aggaagaaagcacugcgcu

SEQ ID NO: 1077495 - RNA, 19 nt, Artificial Sequence
  Description of Artificial Sequence: Synthetic oligonucleotide
agagcaagaaaggcggagc

SEQ ID NO: 1077496 - RNA, 19 nt, Artificial Sequence
  Description of Artificial Sequence: Synthetic oligonucleotide
  modified_base (9)..(9): a, c, u, g, unknown or other
cucuauaunccauuuauua

SEQ ID NO: 1077497 - RNA, 19 nt, Artificial Sequence
  Description of Artificial Sequence: Synthetic oligonucleotide
uuuagagacaauggagccc

SEQ ID NO: 1077498 - RNA, 19 nt, Artificial Sequence
  Description of Artificial Sequence: Synthetic oligonucleotide
uguguagccauaacauaga

SEQ ID NO: 1077499 - RNA, 19 nt, Artificial Sequence
  Description of Artificial Sequence: Synthetic oligonucleotide
guguguagccauaacauag

SEQ ID NO: 1077500 - RNA, 19 nt, Artificial Sequence
  Description of Artificial Sequence: Synthetic oligonucleotide
uagugaugagaugaguuag

SEQ ID NO: 1077501 - RNA, 19 nt, Artificial Sequence
  Description of Artificial Sequence: Synthetic oligonucleotide
uccauagugaugagaugag

SEQ ID NO: 1077502 - RNA, 19 nt, Artificial Sequence
  Description of Artificial Sequence: Synthetic oligonucleotide
aauuauggacaaccuccug

SEQ ID NO: 1077503 - RNA, 19 nt, Artificial Sequence
  Description of Artificial Sequence: Synthetic oligonucleotide
auauuaaagaagcccugga

SEQ ID NO: 1077504 - RNA, 19 nt, Artificial Sequence
  Description of Artificial Sequence: Synthetic oligonucleotide
cacgguuuugaucuugggg

SEQ ID NO: 1077505 - RNA, 19 nt, Artificial Sequence
  Description of Artificial Sequence: Synthetic oligonucleotide
ugaggucuuacaugcauac

SEQ ID NO: 1077506 - RNA, 19 nt, Artificial Sequence
  Description of Artificial Sequence: Synthetic oligonucleotide
ugcguuccuauaauccggg

SEQ ID NO: 1077507 - RNA, 19 nt, Artificial Sequence
  Description of Artificial Sequence: Synthetic oligonucleotide
guuccuauaauccgggauc

SEQ ID NO: 1077508 - RNA, 19 nt, Artificial Sequence
  Description of Artificial Sequence: Synthetic oligonucleotide
cuggauuucaugugggaug

SEQ ID NO: 1077509 - RNA, 19 nt, Artificial Sequence
  Description of Artificial Sequence: Synthetic oligonucleotide
uccgaugaugcucuuggca

SEQ ID NO: 1077510 - RNA, 19 nt, Artificial Sequence
  Description of Artificial Sequence: Synthetic oligonucleotide
gaauauuaaagaagcccug

SEQ ID NO: 1077511 - RNA, 19 nt, Artificial Sequence
  Description of Artificial Sequence: Synthetic oligonucleotide
ugaucagguuuuaacuuac

SEQ ID NO: 1077512 - RNA, 19 nt, Artificial Sequence
  Description of Artificial Sequence: Synthetic oligonucleotide
augauugcaauccguccuc

SEQ ID NO: 1077513 - RNA, 19 nt, Artificial Sequence
  Description of Artificial Sequence: Synthetic oligonucleotide
ucuuguaugcgccucucuc

SEQ ID NO: 1077514 - RNA, 19 nt, Artificial Sequence
  Description of Artificial Sequence: Synthetic oligonucleotide
aaagucaauuauggacaac

SEQ ID NO: 1077515 - RNA, 19 nt, Artificial Sequence
  Description of Artificial Sequence: Synthetic oligonucleotide
  modified_base (2)..(2): a, c, u, g, unknown or other
unccauuuauuaaaccaau

SEQ ID NO: 1077516 - RNA, 19 nt, Artificial Sequence
  Description of Artificial Sequence: Synthetic oligonucleotide
guaacacugggaaucaagc

SEQ ID NO: 1077517 - RNA, 19 nt, Artificial Sequence
  Description of Artificial Sequence: Synthetic oligonucleotide
gacuuggccacgaugacug

SEQ ID NO: 1077518 - RNA, 19 nt, Artificial Sequence
  Description of Artificial Sequence: Synthetic oligonucleotide
gcuauaaggaaaguagggg

SEQ ID NO: 1077519 - RNA, 19 nt, Artificial Sequence
  Description of Artificial Sequence: Synthetic oligonucleotide
uaacacugggaaucaagca

SEQ ID NO: 1077520 - RNA, 19 nt, Artificial Sequence
  Description of Artificial Sequence: Synthetic oligonucleotide
auacaucuuuuccucucac

SEQ ID NO: 1077521 - RNA, 19 nt, Artificial Sequence
  Description of Artificial Sequence: Synthetic oligonucleotide
aaaaccucauucaagugua

SEQ ID NO: 1077522 - RNA, 19 nt, Artificial Sequence
  Description of Artificial Sequence: Synthetic oligonucleotide
caaccacugugauuggugg

SEQ ID NO: 1077523 - RNA, 19 nt, Artificial Sequence
  Description of Artificial Sequence: Synthetic oligonucleotide
uaaagucaauuauggacaa

SEQ ID NO: 1077524 - RNA, 19 nt, Artificial Sequence
  Description of Artificial Sequence: Synthetic oligonucleotide
ucuaagccuauguuucuga

SEQ ID NO: 1077525 - RNA, 19 nt, Artificial Sequence
  Description of Artificial Sequence: Synthetic oligonucleotide
cugcuugcuauaaggaaag

SEQ ID NO: 1077526 - RNA, 19 nt, Artificial Sequence
  Description of Artificial Sequence: Synthetic oligonucleotide
gaaaggcggagcugaagag

SEQ ID NO: 1077527 - RNA, 19 nt, Artificial Sequence
  Description of Artificial Sequence: Synthetic oligonucleotide
gauuucaugugggauggug

SEQ ID NO: 1077528 - RNA, 19 nt, Artificial Sequence
  Description of Artificial Sequence: Synthetic oligonucleotide
uguagccauaacauagauc

SEQ ID NO: 1077529 - RNA, 19 nt, Artificial Sequence
  Description of Artificial Sequence: Synthetic oligonucleotide
uugaauuuggacucuuguu

SEQ ID NO: 1077530 - RNA, 19 nt, Artificial Sequence
  Description of Artificial Sequence: Synthetic oligonucleotide
gacugcguuccuauaaucc

SEQ ID NO: 1077531 - RNA, 19 nt, Artificial Sequence
  Description of Artificial Sequence: Synthetic oligonucleotide
uucaggaggcgccacacaa

SEQ ID NO: 1077532 - RNA, 19 nt, Artificial Sequence
  Description of Artificial Sequence: Synthetic oligonucleotide
cauggaucacugcaauucc

SEQ ID NO: 1077533 - RNA, 19 nt, Artificial Sequence
  Description of Artificial Sequence: Synthetic oligonucleotide
ugaaaagguaggacaugga

SEQ ID NO: 1077534 - RNA, 19 nt, Artificial Sequence
  Description of Artificial Sequence: Synthetic oligonucleotide
agucucucggcguaggacu

SEQ ID NO: 1077535 - RNA, 19 nt, Artificial Sequence
  Description of Artificial Sequence: Synthetic oligonucleotide
auacacgacgaauuggaau

SEQ ID NO: 1077536 - RNA, 19 nt, Artificial Sequence
  Description of Artificial Sequence: Synthetic oligonucleotide
gauugcaauccguccuccg

SEQ ID NO: 1077537 - RNA, 19 nt, Artificial Sequence
  Description of Artificial Sequence: Synthetic oligonucleotide
ugccgaaggaagaaagcac

SEQ ID NO: 1077538 - RNA, 19 nt, Artificial Sequence
  Description of Artificial Sequence: Synthetic oligonucleotide
gaugacugcguuccuauaa

SEQ ID NO: 1077539 - RNA, 19 nt, Artificial Sequence
  Description of Artificial Sequence: Synthetic oligonucleotide
uccuuaaaaugguuauacu

SEQ ID NO: 1077540 - RNA, 19 nt, Artificial Sequence
  Description of Artificial Sequence: Synthetic oligonucleotide
cugcguuccuauaauccgg

SEQ ID NO: 1077541 - RNA, 19 nt, Artificial Sequence
  Description of Artificial Sequence: Synthetic oligonucleotide
uacacuccugaccaugggu

SEQ ID NO: 1077542 - RNA, 19 nt, Artificial Sequence
  Description of Artificial Sequence: Synthetic oligonucleotide
uuauggacaaccuccuguu

SEQ ID NO: 1077543 - RNA, 19 nt, Artificial Sequence
  Description of Artificial Sequence: Synthetic oligonucleotide
ugcaauccguccuccgacg

SEQ ID NO: 1077544 - RNA, 19 nt, Artificial Sequence
  Description of Artificial Sequence: Synthetic oligonucleotide
  modified_base (3)..(3): a, c, u, g, unknown or other
aunccauuuauuaaaccaa

SEQ ID NO: 1077545 - RNA, 19 nt, Artificial Sequence
  Description of Artificial Sequence: Synthetic oligonucleotide
auugcaauccguccuccga

SEQ ID NO: 1077546 - RNA, 19 nt, Artificial Sequence
  Description of Artificial Sequence: Synthetic oligonucleotide
aaauagucacguauuggaa

SEQ ID NO: 1077547 - RNA, 19 nt, Artificial Sequence
  Description of Artificial Sequence: Synthetic oligonucleotide
gcaauuuagagacaaugga

SEQ ID NO: 1077548 - RNA, 19 nt, Artificial Sequence
  Description of Artificial Sequence: Synthetic oligonucleotide
auaccagacuccuugguua

SEQ ID NO: 1077549 - RNA, 19 nt, Artificial Sequence
  Description of Artificial Sequence: Synthetic oligonucleotide
aauccguccuccgacgucu

SEQ ID NO: 1077550 - RNA, 19 nt, Artificial Sequence
  Description of Artificial Sequence: Synthetic oligonucleotide
uccgacgucuccaaccacu

SEQ ID NO: 1077551 - RNA, 19 nt, Artificial Sequence
  Description of Artificial Sequence: Synthetic oligonucleotide
uauaauccgggaucucuuc

SEQ ID NO: 1077552 - RNA, 19 nt, Artificial Sequence
  Description of Artificial Sequence: Synthetic oligonucleotide
acgacgaauuggaauuugc

SEQ ID NO: 1077553 - RNA, 19 nt, Artificial Sequence
  Description of Artificial Sequence: Synthetic oligonucleotide
uugcaauccguccuccgac

SEQ ID NO: 1077554 - RNA, 19 nt, Artificial Sequence
  Description of Artificial Sequence: Synthetic oligonucleotide
cauaacauagaucuuguau

SEQ ID NO: 1077555 - RNA, 19 nt, Artificial Sequence
  Description of Artificial Sequence: Synthetic oligonucleotide
gaggcucuuaaauuaucca

SEQ ID NO: 1077556 - RNA, 19 nt, Artificial Sequence
  Description of Artificial Sequence: Synthetic oligonucleotide
caggagaacaauucaguca

SEQ ID NO: 1077557 - RNA, 19 nt, Artificial Sequence
  Description of Artificial Sequence: Synthetic oligonucleotide
aaagcuccauacacgacga

SEQ ID NO: 1077558 - RNA, 19 nt, Artificial Sequence
  Description of Artificial Sequence: Synthetic oligonucleotide
ucuaauucaggaggcgcca

SEQ ID NO: 1077559 - RNA, 19 nt, Artificial Sequence
  Description of Artificial Sequence: Synthetic oligonucleotide
accuaaaccgacauuaaaa

SEQ ID NO: 1077560 - RNA, 19 nt, Artificial Sequence
  Description of Artificial Sequence: Synthetic oligonucleotide
auggaucacugcaauuccc

SEQ ID NO: 1077561 - RNA, 19 nt, Artificial Sequence
  Description of Artificial Sequence: Synthetic oligonucleotide
auaauccgggaucucuucu

SEQ ID NO: 1077562 - RNA, 19 nt, Artificial Sequence
  Description of Artificial Sequence: Synthetic oligonucleotide
ugacaacaaaauuccuccu

SEQ ID NO: 1077563 - RNA, 19 nt, Artificial Sequence
  Description of Artificial Sequence: Synthetic oligonucleotide
aaggcggagcugaagagcu

SEQ ID NO: 1077564 - RNA, 19 nt, Artificial Sequence
  Description of Artificial Sequence: Synthetic oligonucleotide
gacuccucaaucagacggg

SEQ ID NO: 1077565 - RNA, 19 nt, Artificial Sequence
  Description of Artificial Sequence: Synthetic oligonucleotide
ugaguuagaccagcuuugc

SEQ ID NO: 1077566 - RNA, 19 nt, Artificial Sequence
  Description of Artificial Sequence: Synthetic oligonucleotide
gaaagcacugcgcuccgca

SEQ ID NO: 1077567 - RNA, 19 nt, Artificial Sequence
  Description of Artificial Sequence: Synthetic oligonucleotide
acugcuugcuauaaggaaa

SEQ ID NO: 1077568 - RNA, 19 nt, Artificial Sequence
  Description of Artificial Sequence: Synthetic oligonucleotide
cucggcguaggacugugcc

SEQ ID NO: 1077569 - RNA, 19 nt, Artificial Sequence
  Description of Artificial Sequence: Synthetic oligonucleotide
uuccuauaauccgggaucu

SEQ ID NO: 1077570 - RNA, 19 nt, Artificial Sequence
  Description of Artificial Sequence: Synthetic oligonucleotide
uuggccacgaugacugcgu

SEQ ID NO: 1077571 - RNA, 19 nt, Artificial Sequence
  Description of Artificial Sequence: Synthetic oligonucleotide
cguauuggaaccaacagca

SEQ ID NO: 1077572 - RNA, 19 nt, Artificial Sequence
  Description of Artificial Sequence: Synthetic oligonucleotide
ucacugcaauucccagucg

SEQ ID NO: 1077573 - RNA, 19 nt, Artificial Sequence
  Description of Artificial Sequence: Synthetic oligonucleotide
gaaucacucaggaaggugu

SEQ ID NO: 1077574 - RNA, 19 nt, Artificial Sequence
  Description of Artificial Sequence: Synthetic oligonucleotide
aggacauggacucuccauu

SEQ ID NO: 1077575 - RNA, 19 nt, Artificial Sequence
  Description of Artificial Sequence: Synthetic oligonucleotide
agucaucuaagccuauguu

SEQ ID NO: 1077576 - RNA, 19 nt, Artificial Sequence
  Description of Artificial Sequence: Synthetic oligonucleotide
gaucacuccgaugaugcuc

SEQ ID NO: 1077577 - RNA, 19 nt, Artificial Sequence
  Description of Artificial Sequence: Synthetic oligonucleotide
ggaggcgccacacaaaaca

SEQ ID NO: 1077578 - RNA, 19 nt, Artificial Sequence
  Description of Artificial Sequence: Synthetic oligonucleotide
gcucuuaaauuauccacug

SEQ ID NO: 1077579 - RNA, 19 nt, Artificial Sequence
  Description of Artificial Sequence: Synthetic oligonucleotide
cuccauacacgacgaauug

SEQ ID NO: 1077580 - RNA, 19 nt, Artificial Sequence
  Description of Artificial Sequence: Synthetic oligonucleotide
ggaauauuaaagaagcccu

SEQ ID NO: 1077581 - RNA, 19 nt, Artificial Sequence
  Description of Artificial Sequence: Synthetic oligonucleotide
cuguuagucucugacaaca

SEQ ID NO: 1077582 - RNA, 19 nt, Artificial Sequence
  Description of Artificial Sequence: Synthetic oligonucleotide
guguaaauccauagugaug

SEQ ID NO: 1077583 - RNA, 19 nt, Artificial Sequence
  Description of Artificial Sequence: Synthetic oligonucleotide
guaaauccauagugaugag

SEQ ID NO: 1077584 - RNA, 19 nt, Artificial Sequence
  Description of Artificial Sequence: Synthetic oligonucleotide
agaucuuguaugcgccucu

SEQ ID NO: 1077585 - RNA, 19 nt, Artificial Sequence
  Description of Artificial Sequence: Synthetic oligonucleotide
cacuccugaccaugggugg

SEQ ID NO: 1077586 - RNA, 19 nt, Artificial Sequence
  Description of Artificial Sequence: Synthetic oligonucleotide
uguuagguuccugguaaac

SEQ ID NO: 1077587 - RNA, 19 nt, Artificial Sequence
  Description of Artificial Sequence: Synthetic oligonucleotide
agccuauguuucugaaaag

SEQ ID NO: 1077588 - RNA, 19 nt, Artificial Sequence
  Description of Artificial Sequence: Synthetic oligonucleotide
uccugguaaaccugcacuu

SEQ ID NO: 1077589 - RNA, 19 nt, Artificial Sequence
  Description of Artificial Sequence: Synthetic oligonucleotide
augacugcguuccuauaau

SEQ ID NO: 1077590 - RNA, 19 nt, Artificial Sequence
  Description of Artificial Sequence: Synthetic oligonucleotide
ugaucaggagcuccaugau

SEQ ID NO: 1077591 - RNA, 19 nt, Artificial Sequence
  Description of Artificial Sequence: Synthetic oligonucleotide
uggucccgaccccagcccg

SEQ ID NO: 1077592 - RNA, 19 nt, Artificial Sequence
  Description of Artificial Sequence: Synthetic oligonucleotide
aggcauggacccucccagc

SEQ ID NO: 1077593 - RNA, 19 nt, Artificial Sequence
  Description of Artificial Sequence: Synthetic oligonucleotide
agguaggacauggacucuc

SEQ ID NO: 1077594 - RNA, 19 nt, Artificial Sequence
  Description of Artificial Sequence: Synthetic oligonucleotide
uuguaugcgccucucucuu

SEQ ID NO: 1077595 - RNA, 19 nt, Artificial Sequence
  Description of Artificial Sequence: Synthetic oligonucleotide
aucacuccgaugaugcucu

SEQ ID NO: 1077596 - RNA, 19 nt, Artificial Sequence
  Description of Artificial Sequence: Synthetic oligonucleotide
auugugaaugcggcggaug

SEQ ID NO: 1077597 - RNA, 19 nt, Artificial Sequence
  Description of Artificial Sequence: Synthetic oligonucleotide
uuugcacaucauggaagcc

SEQ ID NO: 1077598 - RNA, 19 nt, Artificial Sequence
  Description of Artificial Sequence: Synthetic oligonucleotide
acgaugacugcguuccuau

SEQ ID NO: 1077599 - RNA, 19 nt, Artificial Sequence
  Description of Artificial Sequence: Synthetic oligonucleotide
aaaccuaaaccgacauuaa

SEQ ID NO: 1077600 - RNA, 19 nt, Artificial Sequence
  Description of Artificial Sequence: Synthetic oligonucleotide
gggaucacuccgaugaugc

SEQ ID NO: 1077601 - RNA, 19 nt, Artificial Sequence
  Description of Artificial Sequence: Synthetic oligonucleotide
ggaggcucuuaaauuaucc

SEQ ID NO: 1077602 - RNA, 19 nt, Artificial Sequence
  Description of Artificial Sequence: Synthetic oligonucleotide
cuugaauuuggacucuugu

SEQ ID NO: 1077603 - RNA, 19 nt, Artificial Sequence
  Description of Artificial Sequence: Synthetic oligonucleotide
aaccaacagcagcuuuuga

SEQ ID NO: 1077604 - RNA, 19 nt, Artificial Sequence
  Description of Artificial Sequence: Synthetic oligonucleotide
ugacugcguuccuauaauc

SEQ ID NO: 1077605 - RNA, 19 nt, Artificial Sequence
  Description of Artificial Sequence: Synthetic oligonucleotide
gugccggccauccaccaag

SEQ ID NO: 1077606 - RNA, 19 nt, Artificial Sequence
  Description of Artificial Sequence: Synthetic oligonucleotide
ucggcguaggacugugccc

SEQ ID NO: 1077607 - RNA, 19 nt, Artificial Sequence
  Description of Artificial Sequence: Synthetic oligonucleotide
agucaauuauggacaaccu

SEQ ID NO: 1077608 - RNA, 19 nt, Artificial Sequence
  Description of Artificial Sequence: Synthetic oligonucleotide
gcaauuuucuuugaaagcu

SEQ ID NO: 1077609 - RNA, 19 nt, Artificial Sequence
  Description of Artificial Sequence: Synthetic oligonucleotide
ugauugcaauccguccucc

SEQ ID NO: 1077610 - RNA, 19 nt, Artificial Sequence
  Description of Artificial Sequence: Synthetic oligonucleotide
uuagaccagcuuugcacau

SEQ ID NO: 1077611 - RNA, 19 nt, Artificial Sequence
  Description of Artificial Sequence: Synthetic oligonucleotide
aaugcggcggauggcuucu

SEQ ID NO: 1077612 - RNA, 19 nt, Artificial Sequence
  Description of Artificial Sequence: Synthetic oligonucleotide
agaggucuuucuguuauaa

SEQ ID NO: 1077613 - RNA, 19 nt, Artificial Sequence
  Description of Artificial Sequence: Synthetic oligonucleotide
gucaucuaagccuauguuu

SEQ ID NO: 1077614 - RNA, 19 nt, Artificial Sequence
  Description of Artificial Sequence: Synthetic oligonucleotide
  modified_base (10)..(10): a, c, u, g, unknown or other
acucuauaunccauuuauu

SEQ ID NO: 1077615 - RNA, 19 nt, Artificial Sequence
  Description of Artificial Sequence: Synthetic oligonucleotide
ggucuuacaugcauacacc

SEQ ID NO: 1077616 - RNA, 19 nt, Artificial Sequence
  Description of Artificial Sequence: Synthetic oligonucleotide
ggacauggacucuccauug

SEQ ID NO: 1077617 - RNA, 19 nt, Artificial Sequence
  Description of Artificial Sequence: Synthetic oligonucleotide
aauuauccacuggaauauu

SEQ ID NO: 1077618 - RNA, 19 nt, Artificial Sequence
  Description of Artificial Sequence: Synthetic oligonucleotide
gaguuagaccagcuuugca

SEQ ID NO: 1077619 - RNA, 19 nt, Artificial Sequence
  Description of Artificial Sequence: Synthetic oligonucleotide
agugaugagaugaguuaga

SEQ ID NO: 1077620 - RNA, 19 nt, Artificial Sequence
  Description of Artificial Sequence: Synthetic oligonucleotide
cagagcaagaaaggcggag

SEQ ID NO: 1077621 - RNA, 19 nt, Artificial Sequence
  Description of Artificial Sequence: Synthetic oligonucleotide
guaugcgccucucucuuuc

SEQ ID NO: 1077622 - RNA, 19 nt, Artificial Sequence
  Description of Artificial Sequence: Synthetic oligonucleotide
cugcaauucccagucgcag

SEQ ID NO: 1077623 - RNA, 19 nt, Artificial Sequence
  Description of Artificial Sequence: Synthetic oligonucleotide
auuauccacuggaauauua

SEQ ID NO: 1077624 - RNA, 19 nt, Artificial Sequence
  Description of Artificial Sequence: Synthetic oligonucleotide
aaccucauucaaguguauu

SEQ ID NO: 1077625 - RNA, 19 nt, Artificial Sequence
  Description of Artificial Sequence: Synthetic oligonucleotide
uacaugcauacaccaugau

SEQ ID NO: 1077626 - RNA, 19 nt, Artificial Sequence
  Description of Artificial Sequence: Synthetic oligonucleotide
uagaucuuguaugcgccuc

SEQ ID NO: 1077627 - RNA, 19 nt, Artificial Sequence
  Description of Artificial Sequence: Synthetic oligonucleotide
agacaauggagccccuuuu

SEQ ID NO: 1077628 - RNA, 19 nt, Artificial Sequence
  Description of Artificial Sequence: Synthetic oligonucleotide
augguguuugucaccacca

SEQ ID NO: 1077629 - RNA, 19 nt, Artificial Sequence
  Description of Artificial Sequence: Synthetic oligonucleotide
agcccgcucagcaauuuuc

SEQ ID NO: 1077630 - RNA, 19 nt, Artificial Sequence
  Description of Artificial Sequence: Synthetic oligonucleotide
aaguaggggaucacuccga

SEQ ID NO: 1077631 - RNA, 19 nt, Artificial Sequence
  Description of Artificial Sequence: Synthetic oligonucleotide
uaccagacuccuugguuau

SEQ ID NO: 1077632 - RNA, 19 nt, Artificial Sequence
  Description of Artificial Sequence: Synthetic oligonucleotide
ccauggaucacugcaauuc

SEQ ID NO: 1077633 - RNA, 19 nt, Artificial Sequence
  Description of Artificial Sequence: Synthetic oligonucleotide
aucuuguaugcgccucucu

SEQ ID NO: 1077634 - RNA, 19 nt, Artificial Sequence
  Description of Artificial Sequence: Synthetic oligonucleotide
ccauacacgacgaauugga

SEQ ID NO: 1077635 - RNA, 19 nt, Artificial Sequence
  Description of Artificial Sequence: Synthetic oligonucleotide
agcuccauacacgacgaau

SEQ ID NO: 1077636 - RNA, 19 nt, Artificial Sequence
  Description of Artificial Sequence: Synthetic oligonucleotide
ggaaucaagcaacuuuaaa

SEQ ID NO: 1077637 - RNA, 19 nt, Artificial Sequence
  Description of Artificial Sequence: Synthetic oligonucleotide
cacaggagaacaauucagu

SEQ ID NO: 1077638 - RNA, 19 nt, Artificial Sequence
  Description of Artificial Sequence: Synthetic oligonucleotide
cagucgcagucucucggcg

SEQ ID NO: 1077639 - RNA, 19 nt, Artificial Sequence
  Description of Artificial Sequence: Synthetic oligonucleotide
caaguguauuccuuaaaau

SEQ ID NO: 1077640 - RNA, 19 nt, Artificial Sequence
  Description of Artificial Sequence: Synthetic oligonucleotide
gagcaagaaaggcggagcu

SEQ ID NO: 1077641 - RNA, 19 nt, Artificial Sequence
  Description of Artificial Sequence: Synthetic oligonucleotide
uaugcgccucucucuuuca

SEQ ID NO: 1077642 - RNA, 19 nt, Artificial Sequence
  Description of Artificial Sequence: Synthetic oligonucleotide
uagucacguauuggaacca

SEQ ID NO: 1077643 - RNA, 19 nt, Artificial Sequence
  Description of Artificial Sequence: Synthetic oligonucleotide
ccaaccacugugauuggug

SEQ ID NO: 1077644 - RNA, 19 nt, Artificial Sequence
  Description of Artificial Sequence: Synthetic oligonucleotide
gaggucuuucuguuauaaa

SEQ ID NO: 1077645 - RNA, 19 nt, Artificial Sequence
  Description of Artificial Sequence: Synthetic oligonucleotide
agucgcagucucucggcgu

SEQ ID NO: 1077646 - RNA, 19 nt, Artificial Sequence
  Description of Artificial Sequence: Synthetic oligonucleotide
caauuauggacaaccuccu

SEQ ID NO: 1077647 - RNA, 19 nt, Artificial Sequence
  Description of Artificial Sequence: Synthetic oligonucleotide
gagcucaggguuuuacugu

SEQ ID NO: 1077648 - RNA, 19 nt, Artificial Sequence
  Description of Artificial Sequence: Synthetic oligonucleotide
  modified_base (13)..(13): a, c, u, g, unknown or other
cauacucuauaunccauuu

SEQ ID NO: 1077649 - RNA, 19 nt, Artificial Sequence
  Description of Artificial Sequence: Synthetic oligonucleotide
cagacagcaggucauuuua

SEQ ID NO: 1077650 - RNA, 19 nt, Artificial Sequence
  Description of Artificial Sequence: Synthetic oligonucleotide
cuccuguuagucucugaca

SEQ ID NO: 1077651 - RNA, 19 nt, Artificial Sequence
  Description of Artificial Sequence: Synthetic oligonucleotide
auggacccucccagcaugc

SEQ ID NO: 1077652 - RNA, 19 nt, Artificial Sequence
  Description of Artificial Sequence: Synthetic oligonucleotide
aaguugguccuuguaccuu

SEQ ID NO: 1077653 - RNA, 19 nt, Artificial Sequence
  Description of Artificial Sequence: Synthetic oligonucleotide
acagacucuugaauuugga

SEQ ID NO: 1077654 - RNA, 19 nt, Artificial Sequence
  Description of Artificial Sequence: Synthetic oligonucleotide
cuaauucaggaggcgccac

SEQ ID NO: 1077655 - RNA, 19 nt, Artificial Sequence
  Description of Artificial Sequence: Synthetic oligonucleotide
uccaaccacugugauuggu

SEQ ID NO: 1077656 - RNA, 19 nt, Artificial Sequence
  Description of Artificial Sequence: Synthetic oligonucleotide
guaccuucacaggaaucac

SEQ ID NO: 1077657 - RNA, 19 nt, Artificial Sequence
  Description of Artificial Sequence: Synthetic oligonucleotide
cauacacgacgaauuggaa

SEQ ID NO: 1077658 - RNA, 19 nt, Artificial Sequence
  Description of Artificial Sequence: Synthetic oligonucleotide
cccacuagaccugugggag

SEQ ID NO: 1077659 - RNA, 19 nt, Artificial Sequence
  Description of Artificial Sequence: Synthetic oligonucleotide
ugaaugcggcggauggcuu

SEQ ID NO: 1077660 - RNA, 19 nt, Artificial Sequence
  Description of Artificial Sequence: Synthetic oligonucleotide
gaucuuguaugcgccucuc

SEQ ID NO: 1077661 - RNA, 19 nt, Artificial Sequence
  Description of Artificial Sequence: Synthetic oligonucleotide
uucagucaucuaagccuau

SEQ ID NO: 1077662 - RNA, 19 nt, Artificial Sequence
  Description of Artificial Sequence: Synthetic oligonucleotide
aggcgccacacaaaacauc

SEQ ID NO: 1077663 - RNA, 19 nt, Artificial Sequence
  Description of Artificial Sequence: Synthetic oligonucleotide
aggaaucacucaggaaggu

SEQ ID NO: 1077664 - RNA, 19 nt, Artificial Sequence
  Description of Artificial Sequence: Synthetic oligonucleotide
ucggcugccgaaggaagaa

SEQ ID NO: 1077665 - RNA, 19 nt, Artificial Sequence
  Description of Artificial Sequence: Synthetic oligonucleotide
cacgacgaauuggaauuug

SEQ ID NO: 1077666 - RNA, 19 nt, Artificial Sequence
  Description of Artificial Sequence: Synthetic oligonucleotide
cuggucccgaccccagccc

SEQ ID NO: 1077667 - RNA, 19 nt, Artificial Sequence
  Description of Artificial Sequence: Synthetic oligonucleotide
aaacaauaccagacuccuu

SEQ ID NO: 1077668 - RNA, 19 nt, Artificial Sequence
  Description of Artificial Sequence: Synthetic oligonucleotide
ccacuaugauugcaauccg

SEQ ID NO: 1077669 - RNA, 19 nt, Artificial Sequence
  Description of Artificial Sequence: Synthetic oligonucleotide
guaggacauggacucucca

SEQ ID NO: 1077670 - RNA, 19 nt, Artificial Sequence
  Description of Artificial Sequence: Synthetic oligonucleotide
gucacguauuggaaccaac

SEQ ID NO: 1077671 - RNA, 19 nt, Artificial Sequence
  Description of Artificial Sequence: Synthetic oligonucleotide
ugccguguguagccauaac

SEQ ID NO: 1077672 - RNA, 19 nt, Artificial Sequence
  Description of Artificial Sequence: Synthetic oligonucleotide
caggaggcgccacacaaaa

SEQ ID NO: 1077673 - RNA, 19 nt, Artificial Sequence
  Description of Artificial Sequence: Synthetic oligonucleotide
gaggucuuacaugcauaca

SEQ ID NO: 1077674 - RNA, 19 nt, Artificial Sequence
  Description of Artificial Sequence: Synthetic oligonucleotide
aaaccucauucaaguguau

SEQ ID NO: 1077675 - RNA, 19 nt, Artificial Sequence
  Description of Artificial Sequence: Synthetic oligonucleotide
aagcuccauacacgacgaa

SEQ ID NO: 1077676 - RNA, 19 nt, Artificial Sequence
  Description of Artificial Sequence: Synthetic oligonucleotide
uguaugcgccucucucuuu

SEQ ID NO: 1077677 - RNA, 19 nt, Artificial Sequence
  Description of Artificial Sequence: Synthetic oligonucleotide
ggcucuuaaauuauccacu

SEQ ID NO: 1077678 - RNA, 19 nt, Artificial Sequence
  Description of Artificial Sequence: Synthetic oligonucleotide
caauccguccuccgacguc

SEQ ID NO: 1077679 - RNA, 19 nt, Artificial Sequence
  Description of Artificial Sequence: Synthetic oligonucleotide
ccgaaggaagaaagcacug

SEQ ID NO: 1077680 - RNA, 19 nt, Artificial Sequence
  Description of Artificial Sequence: Synthetic oligonucleotide
cacuaugauugcaauccgu

SEQ ID NO: 1077681 - RNA, 19 nt, Artificial Sequence
  Description of Artificial Sequence: Synthetic oligonucleotide
ugcuugcuauaaggaaagu

SEQ ID NO: 1077682 - RNA, 19 nt, Artificial Sequence
  Description of Artificial Sequence: Synthetic oligonucleotide
aggaggcgccacacaaaac

SEQ ID NO: 1077683 - RNA, 19 nt, Artificial Sequence
  Description of Artificial Sequence: Synthetic oligonucleotide
agucacguauuggaaccaa

SEQ ID NO: 1077684 - RNA, 19 nt, Artificial Sequence
  Description of Artificial Sequence: Synthetic oligonucleotide
uuguaacacugggaaucaa

SEQ ID NO: 1077685 - RNA, 19 nt, Artificial Sequence
  Description of Artificial Sequence: Synthetic oligonucleotide
acagcagcuuuugacugua

SEQ ID NO: 1077686 - RNA, 19 nt, Artificial Sequence
  Description of Artificial Sequence: Synthetic oligonucleotide
augaggucuuacaugcaua

SEQ ID NO: 1077687 - RNA, 19 nt, Artificial Sequence
  Description of Artificial Sequence: Synthetic oligonucleotide
aaccugcacuuugcccauc

SEQ ID NO: 1077688 - RNA, 19 nt, Artificial Sequence
  Description of Artificial Sequence: Synthetic oligonucleotide
cucuguuagguuccuggua

SEQ ID NO: 1077689 - RNA, 19 nt, Artificial Sequence
  Description of Artificial Sequence: Synthetic oligonucleotide
caugcaugcugggcuuccc

SEQ ID NO: 1077690 - RNA, 19 nt, Artificial Sequence
  Description of Artificial Sequence: Synthetic oligonucleotide
uagagacaauggagccccu

SEQ ID NO: 1077691 - RNA, 19 nt, Artificial Sequence
  Description of Artificial Sequence: Synthetic oligonucleotide
gugaaugcggcggauggcu

SEQ ID NO: 1077692 - RNA, 19 nt, Artificial Sequence
  Description of Artificial Sequence: Synthetic oligonucleotide
cuauaauccgggaucucuu

SEQ ID NO: 1077693 - RNA, 19 nt, Artificial Sequence
  Description of Artificial Sequence: Synthetic oligonucleotide
ggcauggacccucccagca

SEQ ID NO: 1077694 - RNA, 19 nt, Artificial Sequence
  Description of Artificial Sequence: Synthetic oligonucleotide
gguuauguucaucuugguu

SEQ ID NO: 1077695 - RNA, 19 nt, Artificial Sequence
  Description of Artificial Sequence: Synthetic oligonucleotide
ccuguuagucucugacaac

SEQ ID NO: 1077696 - RNA, 19 nt, Artificial Sequence
  Description of Artificial Sequence: Synthetic oligonucleotide
uccuauaauccgggaucuc

SEQ ID NO: 1077697 - RNA, 19 nt, Artificial Sequence
  Description of Artificial Sequence: Synthetic oligonucleotide
caucuaagccuauguuucu

SEQ ID NO: 1077698 - RNA, 19 nt, Artificial Sequence
  Description of Artificial Sequence: Synthetic oligonucleotide
gcuugcuauaaggaaagua

SEQ ID NO: 1077699 - RNA, 19 nt, Artificial Sequence
  Description of Artificial Sequence: Synthetic oligonucleotide
ccagucgcagucucucggc

SEQ ID NO: 1077700 - RNA, 19 nt, Artificial Sequence
  Description of Artificial Sequence: Synthetic oligonucleotide
gcggacaggaugccgugug

SEQ ID NO: 1077701 - RNA, 19 nt, Artificial Sequence
  Description of Artificial Sequence: Synthetic oligonucleotide
accuccuguuagucucuga

SEQ ID NO: 1077702 - RNA, 19 nt, Artificial Sequence
  Description of Artificial Sequence: Synthetic oligonucleotide
ggggaucacuccgaugaug

SEQ ID NO: 1077703 - RNA, 19 nt, Artificial Sequence
  Description of Artificial Sequence: Synthetic oligonucleotide
gcggcggauggcuucugag

SEQ ID NO: 1077704 - RNA, 19 nt, Artificial Sequence
  Description of Artificial Sequence: Synthetic oligonucleotide
ucgcagucucucggcguag

SEQ ID NO: 1077705 - RNA, 19 nt, Artificial Sequence
  Description of Artificial Sequence: Synthetic oligonucleotide
gaucagguuuuaacuuacu

SEQ ID NO: 1077706 - RNA, 19 nt, Artificial Sequence
  Description of Artificial Sequence: Synthetic oligonucleotide
ucucucggcguaggacugu

SEQ ID NO: 1077707 - RNA, 19 nt, Artificial Sequence
  Description of Artificial Sequence: Synthetic oligonucleotide
caucuugcacugcuugcua

SEQ ID NO: 1077708 - RNA, 19 nt, Artificial Sequence
  Description of Artificial Sequence: Synthetic oligonucleotide
ccacgguuuugaucuuggg

SEQ ID NO: 1077709 - RNA, 19 nt, Artificial Sequence
  Description of Artificial Sequence: Synthetic oligonucleotide
cucugacaacaaaauuccu

SEQ ID NO: 1077710 - RNA, 19 nt, Artificial Sequence
  Description of Artificial Sequence: Synthetic oligonucleotide
gaugccguguguagccaua

SEQ ID NO: 1077711 - RNA, 19 nt, Artificial Sequence
  Description of Artificial Sequence: Synthetic oligonucleotide
gcacugcuugcuauaagga

SEQ ID NO: 1077712 - RNA, 19 nt, Artificial Sequence
  Description of Artificial Sequence: Synthetic oligonucleotide
ggcggagcugaagagcuca

SEQ ID NO: 1077713 - RNA, 19 nt, Artificial Sequence
  Description of Artificial Sequence: Synthetic oligonucleotide
ccucggcugccgaaggaag

SEQ ID NO: 1077714 - RNA, 19 nt, Artificial Sequence
  Description of Artificial Sequence: Synthetic oligonucleotide
uggccacgaugacugcguu

SEQ ID NO: 1077715 - RNA, 19 nt, Artificial Sequence
  Description of Artificial Sequence: Synthetic oligonucleotide
ccgacgucuccaaccacug

SEQ ID NO: 1077716 - RNA, 19 nt, Artificial Sequence
  Description of Artificial Sequence: Synthetic oligonucleotide
gccgaaggaagaaagcacu

SEQ ID NO: 1077717 - RNA, 19 nt, Artificial Sequence
  Description of Artificial Sequence: Synthetic oligonucleotide
cugaccauggguggggagu

SEQ ID NO: 1077718 - RNA, 19 nt, Artificial Sequence
  Description of Artificial Sequence: Synthetic oligonucleotide
augccguguguagccauaa

SEQ ID NO: 1077719 - RNA, 19 nt, Artificial Sequence
  Description of Artificial Sequence: Synthetic oligonucleotide
agcggacaggaugccgugu

SEQ ID NO: 1077720 - RNA, 19 nt, Artificial Sequence
  Description of Artificial Sequence: Synthetic oligonucleotide
cuccgacgucuccaaccac

SEQ ID NO: 1077721 - RNA, 19 nt, Artificial Sequence
  Description of Artificial Sequence: Synthetic oligonucleotide
ggccaucaucaauggcagc

SEQ ID NO: 1077722 - RNA, 19 nt, Artificial Sequence
  Description of Artificial Sequence: Synthetic oligonucleotide
ccacaucgucaauaauguc

SEQ ID NO: 1077723 - RNA, 19 nt, Artificial Sequence
  Description of Artificial Sequence: Synthetic oligonucleotide
gaggcgccacacaaaacau

SEQ ID NO: 1077724 - RNA, 19 nt, Artificial Sequence
  Description of Artificial Sequence: Synthetic oligonucleotide
aggcggagcugaagagcuc

SEQ ID NO: 1077725 - RNA, 19 nt, Artificial Sequence
  Description of Artificial Sequence: Synthetic oligonucleotide
ccguguguagccauaacau

SEQ ID NO: 1077726 - RNA, 19 nt, Artificial Sequence
  Description of Artificial Sequence: Synthetic oligonucleotide
gccauaacauagaucuugu

SEQ ID NO: 1077727 - RNA, 19 nt, Artificial Sequence
  Description of Artificial Sequence: Synthetic oligonucleotide
ccuccgacgucuccaacca

SEQ ID NO: 1077728 - RNA, 19 nt, Artificial Sequence
  Description of Artificial Sequence: Synthetic oligonucleotide
gcucagcaauuuucuuuga

SEQ ID NO: 1077729 - RNA, 19 nt, Artificial Sequence
  Description of Artificial Sequence: Synthetic oligonucleotide
cacgaugacugcguuccua

SEQ ID NO: 1077730 - RNA, 19 nt, Artificial Sequence
  Description of Artificial Sequence: Synthetic oligonucleotide
gcuccauacacgacgaauu

SEQ ID NO: 1077731 - RNA, 19 nt, Artificial Sequence
  Description of Artificial Sequence: Synthetic oligonucleotide
ccaggcauggacccuccca

SEQ ID NO: 1077732 - RNA, 19 nt, Artificial Sequence
  Description of Artificial Sequence: Synthetic oligonucleotide
ccauugugaaugcggcgga

SEQ ID NO: 1077733 - RNA, 19 nt, Artificial Sequence
  Description of Artificial Sequence: Synthetic oligonucleotide
ggagaacaauucagucauc

SEQ ID NO: 1077734 - RNA, 19 nt, Artificial Sequence
  Description of Artificial Sequence: Synthetic oligonucleotide
ggucccgaccccagcccgg

SEQ ID NO: 1077735 - RNA, 19 nt, Artificial Sequence
  Description of Artificial Sequence: Synthetic oligonucleotide
auccguccuccgacgucuc

SEQ ID NO: 1077736 - RNA, 19 nt, Artificial Sequence
  Description of Artificial Sequence: Synthetic oligonucleotide
cgguuuugaucuuggggca

SEQ ID NO: 1077737 - RNA, 19 nt, Artificial Sequence
  Description of Artificial Sequence: Synthetic oligonucleotide
ggacaggaugccgugugua

SEQ ID NO: 1077738 - RNA, 19 nt, Artificial Sequence
  Description of Artificial Sequence: Synthetic oligonucleotide
cguguguagccauaacaua

SEQ ID NO: 1077739 - RNA, 19 nt, Artificial Sequence
  Description of Artificial Sequence: Synthetic oligonucleotide
ccauaacauagaucuugua

SEQ ID NO: 1077740 - RNA, 19 nt, Artificial Sequence
  Description of Artificial Sequence: Synthetic oligonucleotide
cacuagaccugugggaguu

SEQ ID NO: 1077741 - RNA, 19 nt, Artificial Sequence
  Description of Artificial Sequence: Synthetic oligonucleotide
gcguuccuauaauccggga

SEQ ID NO: 1077742 - RNA, 19 nt, Artificial Sequence
  Description of Artificial Sequence: Synthetic oligonucleotide
ggaucacuccgaugaugcu

SEQ ID NO: 1077743 - RNA, 19 nt, Artificial Sequence
  Description of Artificial Sequence: Synthetic oligonucleotide
cgacgaauuggaauuugcu

SEQ ID NO: 1077744 - RNA, 19 nt, Artificial Sequence
  Description of Artificial Sequence: Synthetic oligonucleotide
ggagugccuggccaggcau

SEQ ID NO: 1077745 - RNA, 19 nt, Artificial Sequence
  Description of Artificial Sequence: Synthetic oligonucleotide
gcaauccguccuccgacgu

SEQ ID NO: 1077746 - RNA, 19 nt, Artificial Sequence
  Description of Artificial Sequence: Synthetic oligonucleotide
gcggagcugaagagcucag

SEQ ID NO: 1077747 - RNA, 19 nt, Artificial Sequence
  Description of Artificial Sequence: Synthetic oligonucleotide
gguuuugaucuuggggcau

SEQ ID NO: 1077748 - RNA, 19 nt, Artificial Sequence
  Description of Artificial Sequence: Synthetic oligonucleotide
cagcaugcaugcugggcuu

SEQ ID NO: 1077749 - RNA, 19 nt, Artificial Sequence
  Description of Artificial Sequence: Synthetic oligonucleotide
cguuccuauaauccgggau

SEQ ID NO: 1077750 - RNA, 19 nt, Artificial Sequence
  Description of Artificial Sequence: Synthetic oligonucleotide
ggaugccguguguagccau

SEQ ID NO: 1077751 - RNA, 19 nt, Artificial Sequence
  Description of Artificial Sequence: Synthetic oligonucleotide
gccucggcugccgaaggaa

SEQ ID NO: 1077752 - RNA, 19 nt, Artificial Sequence
  Description of Artificial Sequence: Synthetic oligonucleotide
augcggcggauggcuucug

SEQ ID NO: 1077753 - RNA, 19 nt, Artificial Sequence
  Description of Artificial Sequence: Synthetic oligonucleotide
cgcagucucucggcguagg

SEQ ID NO: 1077754 - RNA, 19 nt, Artificial Sequence
  Description of Artificial Sequence: Synthetic oligonucleotide
ccauagugaugagaugagu

SEQ ID NO: 1077755 - RNA, 19 nt, Artificial Sequence
  Description of Artificial Sequence: Synthetic oligonucleotide
gcauggacccucccagcau

SEQ ID NO: 1077756 - RNA, 19 nt, Artificial Sequence
  Description of Artificial Sequence: Synthetic oligonucleotide
gccggccauccaccaaguc

SEQ ID NO: 1077757 - RNA, 19 nt, Artificial Sequence
  Description of Artificial Sequence: Synthetic oligonucleotide
cuggagacuuggccacgau

SEQ ID NO: 1077758 - RNA, 19 nt, Artificial Sequence
  Description of Artificial Sequence: Synthetic oligonucleotide
ccacuagaccugugggagu

SEQ ID NO: 1077759 - RNA, 19 nt, Artificial Sequence
  Description of Artificial Sequence: Synthetic oligonucleotide
gcgccacacaaaacaucaa

SEQ ID NO: 1077760 - RNA, 19 nt, Artificial Sequence
  Description of Artificial Sequence: Synthetic oligonucleotide
ccggcccgccgcagccucg

SEQ ID NO: 1077761 - RNA, 19 nt, Artificial Sequence
  Description of Artificial Sequence: Synthetic oligonucleotide
cagcccgcucagcaauuuu

SEQ ID NO: 1077762 - RNA, 19 nt, Artificial Sequence
  Description of Artificial Sequence: Synthetic oligonucleotide
cggcguaggacugugcccu

SEQ ID NO: 1077763 - RNA, 19 nt, Artificial Sequence
  Description of Artificial Sequence: Synthetic oligonucleotide
cguccuccgacgucuccaa

SEQ ID NO: 1077764 - RNA, 19 nt, Artificial Sequence
  Description of Artificial Sequence: Synthetic oligonucleotide
cgaugacugcguuccuaua

SEQ ID NO: 1077765 - RNA, 19 nt, Artificial Sequence
  Description of Artificial Sequence: Synthetic oligonucleotide
ggcguaggacugugcccuu

SEQ ID NO: 1077766 - RNA, 19 nt, Artificial Sequence
  Description of Artificial Sequence: Synthetic oligonucleotide
cguaggacugugcccuuuu

SEQ ID NO: 1077767 - RNA, 19 nt, Artificial Sequence
  Description of Artificial Sequence: Synthetic oligonucleotide
cggacaggaugccgugugu

SEQ ID NO: 1077768 - RNA, 19 nt, Artificial Sequence
  Description of Artificial Sequence: Synthetic oligonucleotide
cgacgucuccaaccacugu

SEQ ID NO: 1077769 - RNA, 19 nt, Artificial Sequence
  Description of Artificial Sequence: Synthetic oligonucleotide
gcccggcccgccgcagccu

SEQ ID NO: 1077770 - RNA, 19 nt, Artificial Sequence
  Description of Artificial Sequence: Synthetic oligonucleotide
agcucaacuggucaggucc

SEQ ID NO: 1077771 - RNA, 19 nt, Artificial Sequence
  Description of Artificial Sequence: Synthetic oligonucleotide
aaugcgagauaauuuuguc

SEQ ID NO: 1077772 - RNA, 19 nt, Artificial Sequence
  Description of Artificial Sequence: Synthetic oligonucleotide
aagggcuaaggacagacag

SEQ ID NO: 1077773 - RNA, 19 nt, Artificial Sequence
  Description of Artificial Sequence: Synthetic oligonucleotide
cuugggugaagguagaggg

SEQ ID NO: 1077774 - RNA, 19 nt, Artificial Sequence
  Description of Artificial Sequence: Synthetic oligonucleotide
gagacucugagcuaagcgg

SEQ ID NO: 1077775 - RNA, 19 nt, Artificial Sequence
  Description of Artificial Sequence: Synthetic oligonucleotide
aacucccacauuuuauugg

SEQ ID NO: 1077776 - RNA, 19 nt, Artificial Sequence
  Description of Artificial Sequence: Synthetic oligonucleotide
augcgagauaauuuugucc

SEQ ID NO: 1077777 - RNA, 19 nt, Artificial Sequence
  Description of Artificial Sequence: Synthetic oligonucleotide
agagccaacacacucacug

SEQ ID NO: 1077778 - RNA, 19 nt, Artificial Sequence
  Description of Artificial Sequence: Synthetic oligonucleotide
caaacgaccaggaacugcg

SEQ ID NO: 1077779 - RNA, 19 nt, Artificial Sequence
  Description of Artificial Sequence: Synthetic oligonucleotide
auuuuguccacugaagcac

SEQ ID NO: 1077780 - RNA, 19 nt, Artificial Sequence
  Description of Artificial Sequence: Synthetic oligonucleotide
aauccuuucguacauguuu

SEQ ID NO: 1077781 - RNA, 19 nt, Artificial Sequence
  Description of Artificial Sequence: Synthetic oligonucleotide
aacacacucacuguugggg

SEQ ID NO: 1077782 - RNA, 19 nt, Artificial Sequence
  Description of Artificial Sequence: Synthetic oligonucleotide
auggcuucaguccaucagc

SEQ ID NO: 1077783 - RNA, 19 nt, Artificial Sequence
  Description of Artificial Sequence: Synthetic oligonucleotide
uccacuguggcaaugacau

SEQ ID NO: 1077784 - RNA, 19 nt, Artificial Sequence
  Description of Artificial Sequence: Synthetic oligonucleotide
ucgaaugugugcaggaacc

SEQ ID NO: 1077785 - RNA, 19 nt, Artificial Sequence
  Description of Artificial Sequence: Synthetic oligonucleotide
uucugaaccaaguuccgag

SEQ ID NO: 1077786 - RNA, 19 nt, Artificial Sequence
  Description of Artificial Sequence: Synthetic oligonucleotide
uacuauaccggcacagucc

SEQ ID NO: 1077787 - RNA, 19 nt, Artificial Sequence
  Description of Artificial Sequence: Synthetic oligonucleotide
cuaauuugcagaugagaag

SEQ ID NO: 1077788 - RNA, 19 nt, Artificial Sequence
  Description of Artificial Sequence: Synthetic oligonucleotide
aucgaaugugugcaggaac

SEQ ID NO: 1077789 - RNA, 19 nt, Artificial Sequence
  Description of Artificial Sequence: Synthetic oligonucleotide
aggcauguacuauaccggc

SEQ ID NO: 1077790 - RNA, 19 nt, Artificial Sequence
  Description of Artificial Sequence: Synthetic oligonucleotide
aaauagccgccccaaccac

SEQ ID NO: 1077791 - RNA, 19 nt, Artificial Sequence
  Description of Artificial Sequence: Synthetic oligonucleotide
gagauaauuuuguccacug

SEQ ID NO: 1077792 - RNA, 19 nt, Artificial Sequence
  Description of Artificial Sequence: Synthetic oligonucleotide
uauaggagggagaguaggc

SEQ ID NO: 1077793 - RNA, 19 nt, Artificial Sequence
  Description of Artificial Sequence: Synthetic oligonucleotide
aaccacacgcuuuugccug

SEQ ID NO: 1077794 - RNA, 19 nt, Artificial Sequence
  Description of Artificial Sequence: Synthetic oligonucleotide
gaucccaucgaaugugugc

SEQ ID NO: 1077795 - RNA, 19 nt, Artificial Sequence
  Description of Artificial Sequence: Synthetic oligonucleotide
agcgaagccagucuucauc

SEQ ID NO: 1077796 - RNA, 19 nt, Artificial Sequence
  Description of Artificial Sequence: Synthetic oligonucleotide
ucuaacucccacauuuuau

SEQ ID NO: 1077797 - RNA, 19 nt, Artificial Sequence
  Description of Artificial Sequence: Synthetic oligonucleotide
aaaugcgagauaauuuugu

SEQ ID NO: 1077798 - RNA, 19 nt, Artificial Sequence
  Description of Artificial Sequence: Synthetic oligonucleotide
aaaaugcgagauaauuuug

SEQ ID NO: 1077799 - RNA, 19 nt, Artificial Sequence
  Description of Artificial Sequence: Synthetic oligonucleotide
aggcguagacccgagaagc

SEQ ID NO: 1077800 - RNA, 19 nt, Artificial Sequence
  Description of Artificial Sequence: Synthetic oligonucleotide
agacucugagcuaagcggc

SEQ ID NO: 1077801 - RNA, 19 nt, Artificial Sequence
  Description of Artificial Sequence: Synthetic oligonucleotide
ugaaccaaguuccgagcag

SEQ ID NO: 1077802 - RNA, 19 nt, Artificial Sequence
  Description of Artificial Sequence: Synthetic oligonucleotide
agauauaggagggagagua

SEQ ID NO: 1077803 - RNA, 19 nt, Artificial Sequence
  Description of Artificial Sequence: Synthetic oligonucleotide
gaggcauguacuauaccgg

SEQ ID NO: 1077804 - RNA, 19 nt, Artificial Sequence
  Description of Artificial Sequence: Synthetic oligonucleotide
cacaccaucacgcccacag

SEQ ID NO: 1077805 - RNA, 19 nt, Artificial Sequence
  Description of Artificial Sequence: Synthetic oligonucleotide
aguacaucuuaaauacagg

SEQ ID NO: 1077806 - RNA, 19 nt, Artificial Sequence
  Description of Artificial Sequence: Synthetic oligonucleotide
uguacagggaucccaucga

SEQ ID NO: 1077807 - RNA, 19 nt, Artificial Sequence
  Description of Artificial Sequence: Synthetic oligonucleotide
ucugaaccaaguuccgagc

SEQ ID NO: 1077808 - RNA, 19 nt, Artificial Sequence
  Description of Artificial Sequence: Synthetic oligonucleotide
acuauaccggcacagucca

SEQ ID NO: 1077809 - RNA, 19 nt, Artificial Sequence
  Description of Artificial Sequence: Synthetic oligonucleotide
augaaagcguggaagcggc

SEQ ID NO: 1077810 - RNA, 19 nt, Artificial Sequence
  Description of Artificial Sequence: Synthetic oligonucleotide
acgaccaggaacugcgcac

SEQ ID NO: 1077811 - RNA, 19 nt, Artificial Sequence
  Description of Artificial Sequence: Synthetic oligonucleotide
ugcuaauuugcagaugaga

SEQ ID NO: 1077812 - RNA, 19 nt, Artificial Sequence
  Description of Artificial Sequence: Synthetic oligonucleotide
ucccacauuuuauugggac

SEQ ID NO: 1077813 - RNA, 19 nt, Artificial Sequence
  Description of Artificial Sequence: Synthetic oligonucleotide
agugaccucuccugaaguc

SEQ ID NO: 1077814 - RNA, 19 nt, Artificial Sequence
  Description of Artificial Sequence: Synthetic oligonucleotide
gaugccuccaccacacucc

SEQ ID NO: 1077815 - RNA, 19 nt, Artificial Sequence
  Description of Artificial Sequence: Synthetic oligonucleotide
agaugaaagcguggaagcg

SEQ ID NO: 1077816 - RNA, 19 nt, Artificial Sequence
  Description of Artificial Sequence: Synthetic oligonucleotide
uccagugggcagauauagg

SEQ ID NO: 1077817 - RNA, 19 nt, Artificial Sequence
  Description of Artificial Sequence: Synthetic oligonucleotide
aaaagcaaguccaggugga

SEQ ID NO: 1077818 - RNA, 19 nt, Artificial Sequence
  Description of Artificial Sequence: Synthetic oligonucleotide
acuugggugaagguagagg

SEQ ID NO: 1077819 - RNA, 19 nt, Artificial Sequence
  Description of Artificial Sequence: Synthetic oligonucleotide
guagacaggaaauccuuuc

SEQ ID NO: 1077820 - RNA, 19 nt, Artificial Sequence
  Description of Artificial Sequence: Synthetic oligonucleotide
aacgaccaggaacugcgca

SEQ ID NO: 1077821 - RNA, 19 nt, Artificial Sequence
  Description of Artificial Sequence: Synthetic oligonucleotide
acgcuggaagcucaacugg

SEQ ID NO: 1077822 - RNA, 19 nt, Artificial Sequence
  Description of Artificial Sequence: Synthetic oligonucleotide
ucccgucucaguuucugag

SEQ ID NO: 1077823 - RNA, 19 nt, Artificial Sequence
  Description of Artificial Sequence: Synthetic oligonucleotide
cagacaggagaccacaguc

SEQ ID NO: 1077824 - RNA, 19 nt, Artificial Sequence
  Description of Artificial Sequence: Synthetic oligonucleotide
aagcucaacuggucagguc

SEQ ID NO: 1077825 - RNA, 19 nt, Artificial Sequence
  Description of Artificial Sequence: Synthetic oligonucleotide
cucagugccgccagaggcg

SEQ ID NO: 1077826 - RNA, 19 nt, Artificial Sequence
  Description of Artificial Sequence: Synthetic oligonucleotide
ggagguguauccuacuggc

SEQ ID NO: 1077827 - RNA, 19 nt, Artificial Sequence
  Description of Artificial Sequence: Synthetic oligonucleotide
gacgccuggguccccagcg

SEQ ID NO: 1077828 - RNA, 19 nt, Artificial Sequence
  Description of Artificial Sequence: Synthetic oligonucleotide
gaaccaaguuccgagcagc

SEQ ID NO: 1077829 - RNA, 19 nt, Artificial Sequence
  Description of Artificial Sequence: Synthetic oligonucleotide
gcuaccacacgccagggag

SEQ ID NO: 1077830 - RNA, 19 nt, Artificial Sequence
  Description of Artificial Sequence: Synthetic oligonucleotide
gaagcacugacagcuauca

SEQ ID NO: 1077831 - RNA, 19 nt, Artificial Sequence
  Description of Artificial Sequence: Synthetic oligonucleotide
acugagcggggccagucgg

SEQ ID NO: 1077832 - RNA, 19 nt, Artificial Sequence
  Description of Artificial Sequence: Synthetic oligonucleotide
uucuaacucccacauuuua

SEQ ID NO: 1077833 - RNA, 19 nt, Artificial Sequence
  Description of Artificial Sequence: Synthetic oligonucleotide
ggcaacaagggcuaaggac

SEQ ID NO: 1077834 - RNA, 19 nt, Artificial Sequence
  Description of Artificial Sequence: Synthetic oligonucleotide
gaaauccuuucguacaugu

SEQ ID NO: 1077835 - RNA, 19 nt, Artificial Sequence
  Description of Artificial Sequence: Synthetic oligonucleotide
ugagcaccgacaguggcug

SEQ ID NO: 1077836 - RNA, 19 nt, Artificial Sequence
  Description of Artificial Sequence: Synthetic oligonucleotide
gaggcguagacccgagaag

SEQ ID NO: 1077837 - RNA, 19 nt, Artificial Sequence
  Description of Artificial Sequence: Synthetic oligonucleotide
gacaagggagcccuguaga

SEQ ID NO: 1077838 - RNA, 19 nt, Artificial Sequence
  Description of Artificial Sequence: Synthetic oligonucleotide
uacugagcggggccagucg

SEQ ID NO: 1077839 - RNA, 19 nt, Artificial Sequence
  Description of Artificial Sequence: Synthetic oligonucleotide
caaauagccgccccaacca

SEQ ID NO: 1077840 - RNA, 19 nt, Artificial Sequence
  Description of Artificial Sequence: Synthetic oligonucleotide
auguacuauaccggcacag

SEQ ID NO: 1077841 - RNA, 19 nt, Artificial Sequence
  Description of Artificial Sequence: Synthetic oligonucleotide
accaaauagccgccccaac

SEQ ID NO: 1077842 - RNA, 19 nt, Artificial Sequence
  Description of Artificial Sequence: Synthetic oligonucleotide
caggcaacaagggcuaagg

SEQ ID NO: 1077843 - RNA, 19 nt, Artificial Sequence
  Description of Artificial Sequence: Synthetic oligonucleotide
cacgcuuuugccuggugug

SEQ ID NO: 1077844 - RNA, 19 nt, Artificial Sequence
  Description of Artificial Sequence: Synthetic oligonucleotide
uguacuauaccggcacagu

SEQ ID NO: 1077845 - RNA, 19 nt, Artificial Sequence
  Description of Artificial Sequence: Synthetic oligonucleotide
caagggagguguauccuac

SEQ ID NO: 1077846 - RNA, 19 nt, Artificial Sequence
  Description of Artificial Sequence: Synthetic oligonucleotide
caaaaugcgagauaauuuu

SEQ ID NO: 1077847 - RNA, 19 nt, Artificial Sequence
  Description of Artificial Sequence: Synthetic oligonucleotide
guacuauaccggcacaguc

SEQ ID NO: 1077848 - RNA, 19 nt, Artificial Sequence
  Description of Artificial Sequence: Synthetic oligonucleotide
aaacgaccaggaacugcgc

SEQ ID NO: 1077849 - RNA, 19 nt, Artificial Sequence
  Description of Artificial Sequence: Synthetic oligonucleotide
cagggagaagaauccagug

SEQ ID NO: 1077850 - RNA, 19 nt, Artificial Sequence
  Description of Artificial Sequence: Synthetic oligonucleotide
gaaugugugcaggaaccug

SEQ ID NO: 1077851 - RNA, 19 nt, Artificial Sequence
  Description of Artificial Sequence: Synthetic oligonucleotide
ugaagucccucggagacuc

SEQ ID NO: 1077852 - RNA, 19 nt, Artificial Sequence
  Description of Artificial Sequence: Synthetic oligonucleotide
ugugcguggaggcgucucc

SEQ ID NO: 1077853 - RNA, 19 nt, Artificial Sequence
  Description of Artificial Sequence: Synthetic oligonucleotide
acacgcuuuugccuggugu

SEQ ID NO: 1077854 - RNA, 19 nt, Artificial Sequence
  Description of Artificial Sequence: Synthetic oligonucleotide
guauccuacuggcaccagc

SEQ ID NO: 1077855 - RNA, 19 nt, Artificial Sequence
  Description of Artificial Sequence: Synthetic oligonucleotide
gagaccaaugccagaggcc

SEQ ID NO: 1077856 - RNA, 19 nt, Artificial Sequence
  Description of Artificial Sequence: Synthetic oligonucleotide
gugggcagauauaggaggg

SEQ ID NO: 1077857 - RNA, 19 nt, Artificial Sequence
  Description of Artificial Sequence: Synthetic oligonucleotide
cacuguggcaaugacauga

SEQ ID NO: 1077858 - RNA, 19 nt, Artificial Sequence
  Description of Artificial Sequence: Synthetic oligonucleotide
auccuuucguacauguuug

SEQ ID NO: 1077859 - RNA, 19 nt, Artificial Sequence
  Description of Artificial Sequence: Synthetic oligonucleotide
gggagguguauccuacugg

SEQ ID NO: 1077860 - RNA, 19 nt, Artificial Sequence
  Description of Artificial Sequence: Synthetic oligonucleotide
uccuuucguacauguuugc

SEQ ID NO: 1077861 - RNA, 19 nt, Artificial Sequence
  Description of Artificial Sequence: Synthetic oligonucleotide
gcuaauuugcagaugagaa

SEQ ID NO: 1077862 - RNA, 19 nt, Artificial Sequence
  Description of Artificial Sequence: Synthetic oligonucleotide
gaagggugaugcucucuug

SEQ ID NO: 1077863 - RNA, 19 nt, Artificial Sequence
  Description of Artificial Sequence: Synthetic oligonucleotide
auagccgccccaaccacac

SEQ ID NO: 1077864 - RNA, 19 nt, Artificial Sequence
  Description of Artificial Sequence: Synthetic oligonucleotide
uccuggacuugaaggcucc

SEQ ID NO: 1077865 - RNA, 19 nt, Artificial Sequence
  Description of Artificial Sequence: Synthetic oligonucleotide
aagggagguguauccuacu

SEQ ID NO: 1077866 - RNA, 19 nt, Artificial Sequence
  Description of Artificial Sequence: Synthetic oligonucleotide
uccugcggcagugugguca

SEQ ID NO: 1077867 - RNA, 19 nt, Artificial Sequence
  Description of Artificial Sequence: Synthetic oligonucleotide
caguccacuugggugaagg

SEQ ID NO: 1077868 - RNA, 19 nt, Artificial Sequence
  Description of Artificial Sequence: Synthetic oligonucleotide
gguguauccuacuggcacc

SEQ ID NO: 1077869 - RNA, 19 nt, Artificial Sequence
  Description of Artificial Sequence: Synthetic oligonucleotide
ccgagcagccccaaaaugc

SEQ ID NO: 1077870 - RNA, 19 nt, Artificial Sequence
  Description of Artificial Sequence: Synthetic oligonucleotide
ccaaauagccgccccaacc

SEQ ID NO: 1077871 - RNA, 19 nt, Artificial Sequence
  Description of Artificial Sequence: Synthetic oligonucleotide
ugagguccuuccggaaugg

SEQ ID NO: 1077872 - RNA, 19 nt, Artificial Sequence
  Description of Artificial Sequence: Synthetic oligonucleotide
cacaccaaauagccgcccc

SEQ ID NO: 1077873 - RNA, 19 nt, Artificial Sequence
  Description of Artificial Sequence: Synthetic oligonucleotide
aguagcuccaugacgccug

SEQ ID NO: 1077874 - RNA, 19 nt, Artificial Sequence
  Description of Artificial Sequence: Synthetic oligonucleotide
acaccaaauagccgcccca

SEQ ID NO: 1077875 - RNA, 19 nt, Artificial Sequence
  Description of Artificial Sequence: Synthetic oligonucleotide
uacagggaucccaucgaau

SEQ ID NO: 1077876 - RNA, 19 nt, Artificial Sequence
  Description of Artificial Sequence: Synthetic oligonucleotide
ugguugguucugugcgugg

SEQ ID NO: 1077877 - RNA, 19 nt, Artificial Sequence
  Description of Artificial Sequence: Synthetic oligonucleotide
gggacagaugcuaauuugc

SEQ ID NO: 1077878 - RNA, 19 nt, Artificial Sequence
  Description of Artificial Sequence: Synthetic oligonucleotide
agcaggaguacaucuuaaa

SEQ ID NO: 1077879 - RNA, 19 nt, Artificial Sequence
  Description of Artificial Sequence: Synthetic oligonucleotide
ccaaccacacgcuuuugcc

SEQ ID NO: 1077880 - RNA, 19 nt, Artificial Sequence
  Description of Artificial Sequence: Synthetic oligonucleotide
cuagcacuucacacagcag

SEQ ID NO: 1077881 - RNA, 19 nt, Artificial Sequence
  Description of Artificial Sequence: Synthetic oligonucleotide
aauagccgccccaaccaca

SEQ ID NO: 1077882 - RNA, 19 nt, Artificial Sequence
  Description of Artificial Sequence: Synthetic oligonucleotide
uggcgaguccacaggcucc

SEQ ID NO: 1077883 - RNA, 19 nt, Artificial Sequence
  Description of Artificial Sequence: Synthetic oligonucleotide
uagcuggccagucccacuc

SEQ ID NO: 1077884 - RNA, 19 nt, Artificial Sequence
  Description of Artificial Sequence: Synthetic oligonucleotide
aggcucccgucucaguuuc

SEQ ID NO: 1077885 - RNA, 19 nt, Artificial Sequence
  Description of Artificial Sequence: Synthetic oligonucleotide
caccagagccaacacacuc

SEQ ID NO: 1077886 - RNA, 19 nt, Artificial Sequence
  Description of Artificial Sequence: Synthetic oligonucleotide
ugcguggaggcgucucccg

SEQ ID NO: 1077887 - RNA, 19 nt, Artificial Sequence
  Description of Artificial Sequence: Synthetic oligonucleotide
ggcucagccgacuaucccc

SEQ ID NO: 1077888 - RNA, 19 nt, Artificial Sequence
  Description of Artificial Sequence: Synthetic oligonucleotide
uccugcgcugcccagugau

SEQ ID NO: 1077889 - RNA, 19 nt, Artificial Sequence
  Description of Artificial Sequence: Synthetic oligonucleotide
aggcccacccaccaggggu

SEQ ID NO: 1077890 - RNA, 19 nt, Artificial Sequence
  Description of Artificial Sequence: Synthetic oligonucleotide
ggggacagaugcuaauuug

SEQ ID NO: 1077891 - RNA, 19 nt, Artificial Sequence
  Description of Artificial Sequence: Synthetic oligonucleotide
acaagggagguguauccua

SEQ ID NO: 1077892 - RNA, 19 nt, Artificial Sequence
  Description of Artificial Sequence: Synthetic oligonucleotide
guuugcaagagcagcuuuc

SEQ ID NO: 1077893 - RNA, 19 nt, Artificial Sequence
  Description of Artificial Sequence: Synthetic oligonucleotide
cugaaccaaguuccgagca

SEQ ID NO: 1077894 - RNA, 19 nt, Artificial Sequence
  Description of Artificial Sequence: Synthetic oligonucleotide
ggaagcucaacuggucagg

SEQ ID NO: 1077895 - RNA, 19 nt, Artificial Sequence
  Description of Artificial Sequence: Synthetic oligonucleotide
ccggcaaacgaccaggaac

SEQ ID NO: 1077896 - RNA, 19 nt, Artificial Sequence
  Description of Artificial Sequence: Synthetic oligonucleotide
ggcggaagagucuguagug

SEQ ID NO: 1077897 - RNA, 19 nt, Artificial Sequence
  Description of Artificial Sequence: Synthetic oligonucleotide
ggacaagggagcccuguag

SEQ ID NO: 1077898 - RNA, 19 nt, Artificial Sequence
  Description of Artificial Sequence: Synthetic oligonucleotide
agccaacacacucacuguu

SEQ ID NO: 1077899 - RNA, 19 nt, Artificial Sequence
  Description of Artificial Sequence: Synthetic oligonucleotide
uugccggggcggaagaguc

SEQ ID NO: 1077900 - RNA, 19 nt, Artificial Sequence
  Description of Artificial Sequence: Synthetic oligonucleotide
cuggcgaguccacaggcuc

SEQ ID NO: 1077901 - RNA, 19 nt, Artificial Sequence
  Description of Artificial Sequence: Synthetic oligonucleotide
cucugagcuaagcggcccc

SEQ ID NO: 1077902 - RNA, 19 nt, Artificial Sequence
  Description of Artificial Sequence: Synthetic oligonucleotide
guagacccgagaagccugg

SEQ ID NO: 1077903 - RNA, 19 nt, Artificial Sequence
  Description of Artificial Sequence: Synthetic oligonucleotide
ucccaucgaaugugugcag

SEQ ID NO: 1077904 - RNA, 19 nt, Artificial Sequence
  Description of Artificial Sequence: Synthetic oligonucleotide
ucggagacucugagcuaag

SEQ ID NO: 1077905 - RNA, 19 nt, Artificial Sequence
  Description of Artificial Sequence: Synthetic oligonucleotide
agugccgccagaggcguag

SEQ ID NO: 1077906 - RNA, 19 nt, Artificial Sequence
  Description of Artificial Sequence: Synthetic oligonucleotide
aggcaacaagggcuaagga

SEQ ID NO: 1077907 - RNA, 19 nt, Artificial Sequence
  Description of Artificial Sequence: Synthetic oligonucleotide
cagucggcugaccuggcug

SEQ ID NO: 1077908 - RNA, 19 nt, Artificial Sequence
  Description of Artificial Sequence: Synthetic oligonucleotide
ugaaagcguggaagcggcu

SEQ ID NO: 1077909 - RNA, 19 nt, Artificial Sequence
  Description of Artificial Sequence: Synthetic oligonucleotide
gaaccuggcuucacagaug

SEQ ID NO: 1077910 - RNA, 19 nt, Artificial Sequence
  Description of Artificial Sequence: Synthetic oligonucleotide
accagagccaacacacuca

SEQ ID NO: 1077911 - RNA, 19 nt, Artificial Sequence
  Description of Artificial Sequence: Synthetic oligonucleotide
ccgucucaguuucugaggg

SEQ ID NO: 1077912 - RNA, 19 nt, Artificial Sequence
  Description of Artificial Sequence: Synthetic oligonucleotide
agaugcuaauuugcagaug

SEQ ID NO: 1077913 - RNA, 19 nt, Artificial Sequence
  Description of Artificial Sequence: Synthetic oligonucleotide
gaugagguccuuccggaau

SEQ ID NO: 1077914 - RNA, 19 nt, Artificial Sequence
  Description of Artificial Sequence: Synthetic oligonucleotide
uggugugguugguucugug

SEQ ID NO: 1077915 - RNA, 19 nt, Artificial Sequence
  Description of Artificial Sequence: Synthetic oligonucleotide
caucacgcccacagcgaag

SEQ ID NO: 1077916 - RNA, 19 nt, Artificial Sequence
  Description of Artificial Sequence: Synthetic oligonucleotide
ucccucggagacucugagc

SEQ ID NO: 1077917 - RNA, 19 nt, Artificial Sequence
  Description of Artificial Sequence: Synthetic oligonucleotide
ugagaagggugaugcucuc

SEQ ID NO: 1077918 - RNA, 19 nt, Artificial Sequence
  Description of Artificial Sequence: Synthetic oligonucleotide
agacccgagaagccugggu

SEQ ID NO: 1077919 - RNA, 19 nt, Artificial Sequence
  Description of Artificial Sequence: Synthetic oligonucleotide
gccugcguccuccuggagg

SEQ ID NO: 1077920 - RNA, 19 nt, Artificial Sequence
  Description of Artificial Sequence: Synthetic oligonucleotide
aauccagugggcagauaua

SEQ ID NO: 1077921 - RNA, 19 nt, Artificial Sequence
  Description of Artificial Sequence: Synthetic oligonucleotide
ugggcagauauaggaggga

SEQ ID NO: 1077922 - RNA, 19 nt, Artificial Sequence
  Description of Artificial Sequence: Synthetic oligonucleotide
uaccacacgccagggagaa

SEQ ID NO: 1077923 - RNA, 19 nt, Artificial Sequence
  Description of Artificial Sequence: Synthetic oligonucleotide
gggcagauauaggagggag

SEQ ID NO: 1077924 - RNA, 19 nt, Artificial Sequence
  Description of Artificial Sequence: Synthetic oligonucleotide
cucuagcacuucacacagc

SEQ ID NO: 1077925 - RNA, 19 nt, Artificial Sequence
  Description of Artificial Sequence: Synthetic oligonucleotide
uccccacgcuggaagcuca

SEQ ID NO: 1077926 - RNA, 19 nt, Artificial Sequence
  Description of Artificial Sequence: Synthetic oligonucleotide
ucagugccgccagaggcgu

SEQ ID NO: 1077927 - RNA, 19 nt, Artificial Sequence
  Description of Artificial Sequence: Synthetic oligonucleotide
uguauccuacuggcaccag

SEQ ID NO: 1077928 - RNA, 19 nt, Artificial Sequence
  Description of Artificial Sequence: Synthetic oligonucleotide
acagcuaucaggagaccuu

SEQ ID NO: 1077929 - RNA, 19 nt, Artificial Sequence
  Description of Artificial Sequence: Synthetic oligonucleotide
ggagcaccggcaaacgacc

SEQ ID NO: 1077930 - RNA, 19 nt, Artificial Sequence
  Description of Artificial Sequence: Synthetic oligonucleotide
ugaaggcucccgucucagu

SEQ ID NO: 1077931 - RNA, 19 nt, Artificial Sequence
  Description of Artificial Sequence: Synthetic oligonucleotide
cauguacuauaccggcaca

SEQ ID NO: 1077932 - RNA, 19 nt, Artificial Sequence
  Description of Artificial Sequence: Synthetic oligonucleotide
gagucuguagugaccucuc

SEQ ID NO: 1077933 - RNA, 19 nt, Artificial Sequence
  Description of Artificial Sequence: Synthetic oligonucleotide
cugagcggggccagucggc

SEQ ID NO: 1077934 - RNA, 19 nt, Artificial Sequence
  Description of Artificial Sequence: Synthetic oligonucleotide
agcuaccacacgccaggga

SEQ ID NO: 1077935 - RNA, 19 nt, Artificial Sequence
  Description of Artificial Sequence: Synthetic oligonucleotide
gcaccggcaaacgaccagg

SEQ ID NO: 1077936 - RNA, 19 nt, Artificial Sequence
  Description of Artificial Sequence: Synthetic oligonucleotide
ugcuacugagcggggccag

SEQ ID NO: 1077937 - RNA, 19 nt, Artificial Sequence
  Description of Artificial Sequence: Synthetic oligonucleotide
ggacagaugcuaauuugca

SEQ ID NO: 1077938 - RNA, 19 nt, Artificial Sequence
  Description of Artificial Sequence: Synthetic oligonucleotide
caaguuccgagcagcccca

SEQ ID NO: 1077939 - RNA, 19 nt, Artificial Sequence
  Description of Artificial Sequence: Synthetic oligonucleotide
gccccaacggggcaggagc

SEQ ID NO: 1077940 - RNA, 19 nt, Artificial Sequence
  Description of Artificial Sequence: Synthetic oligonucleotide
gcggagaagagggaagccc

SEQ ID NO: 1077941 - RNA, 19 nt, Artificial Sequence
  Description of Artificial Sequence: Synthetic oligonucleotide
guguauccuacuggcacca

SEQ ID NO: 1077942 - RNA, 19 nt, Artificial Sequence
  Description of Artificial Sequence: Synthetic oligonucleotide
caacggggcaggagccugc

SEQ ID NO: 1077943 - RNA, 19 nt, Artificial Sequence
  Description of Artificial Sequence: Synthetic oligonucleotide
gagggagaguaggccugcg

SEQ ID NO: 1077944 - RNA, 19 nt, Artificial Sequence
  Description of Artificial Sequence: Synthetic oligonucleotide
cuaccacacgccagggaga

SEQ ID NO: 1077945 - RNA, 19 nt, Artificial Sequence
  Description of Artificial Sequence: Synthetic oligonucleotide
gaggcggccccaacggggc

SEQ ID NO: 1077946 - RNA, 19 nt, Artificial Sequence
  Description of Artificial Sequence: Synthetic oligonucleotide
caagggcuaaggacagaca

SEQ ID NO: 1077947 - RNA, 19 nt, Artificial Sequence
  Description of Artificial Sequence: Synthetic oligonucleotide
gggagcaccggcaaacgac

SEQ ID NO: 1077948 - RNA, 19 nt, Artificial Sequence
  Description of Artificial Sequence: Synthetic oligonucleotide
cuucugaaccaaguuccga

SEQ ID NO: 1077949 - RNA, 19 nt, Artificial Sequence
  Description of Artificial Sequence: Synthetic oligonucleotide
auguuugcaagagcagcuu

SEQ ID NO: 1077950 - RNA, 19 nt, Artificial Sequence
  Description of Artificial Sequence: Synthetic oligonucleotide
ucccgcgcacccucagcag

SEQ ID NO: 1077951 - RNA, 19 nt, Artificial Sequence
  Description of Artificial Sequence: Synthetic oligonucleotide
gagccaacacacucacugu

SEQ ID NO: 1077952 - RNA, 19 nt, Artificial Sequence
  Description of Artificial Sequence: Synthetic oligonucleotide
uagccgccccaaccacacg

SEQ ID NO: 1077953 - RNA, 19 nt, Artificial Sequence
  Description of Artificial Sequence: Synthetic oligonucleotide
auaccggcacaguccacuu

SEQ ID NO: 1077954 - RNA, 19 nt, Artificial Sequence
  Description of Artificial Sequence: Synthetic oligonucleotide
accaucacgcccacagcga

SEQ ID NO: 1077955 - RNA, 19 nt, Artificial Sequence
  Description of Artificial Sequence: Synthetic oligonucleotide
agccccaaaaugcgagaua

SEQ ID NO: 1077956 - RNA, 19 nt, Artificial Sequence
  Description of Artificial Sequence: Synthetic oligonucleotide
gaagcucaacuggucaggu

SEQ ID NO: 1077957 - RNA, 19 nt, Artificial Sequence
  Description of Artificial Sequence: Synthetic oligonucleotide
gccccaaaaugcgagauaa

SEQ ID NO: 1077958 - RNA, 19 nt, Artificial Sequence
  Description of Artificial Sequence: Synthetic oligonucleotide
uccgggcucagccgacuau

SEQ ID NO: 1077959 - RNA, 19 nt, Artificial Sequence
  Description of Artificial Sequence: Synthetic oligonucleotide
cuauaccggcacaguccac

SEQ ID NO: 1077960 - RNA, 19 nt, Artificial Sequence
  Description of Artificial Sequence: Synthetic oligonucleotide
uuccccacgcuggaagcuc

SEQ ID NO: 1077961 - RNA, 19 nt, Artificial Sequence
  Description of Artificial Sequence: Synthetic oligonucleotide
aacggggcaggagccugcu

SEQ ID NO: 1077962 - RNA, 19 nt, Artificial Sequence
  Description of Artificial Sequence: Synthetic oligonucleotide
accggcaaacgaccaggaa

SEQ ID NO: 1077963 - RNA, 19 nt, Artificial Sequence
  Description of Artificial Sequence: Synthetic oligonucleotide
aggagaccacaguccugug

SEQ ID NO: 1077964 - RNA, 19 nt, Artificial Sequence
  Description of Artificial Sequence: Synthetic oligonucleotide
gagguccuuccggaauggc

SEQ ID NO: 1077965 - RNA, 19 nt, Artificial Sequence
  Description of Artificial Sequence: Synthetic oligonucleotide
gcaggaguacaucuuaaau

SEQ ID NO: 1077966 - RNA, 19 nt, Artificial Sequence
  Description of Artificial Sequence: Synthetic oligonucleotide
cuacugagcggggccaguc

SEQ ID NO: 1077967 - RNA, 19 nt, Artificial Sequence
  Description of Artificial Sequence: Synthetic oligonucleotide
ggacuugaaggcucccguc

SEQ ID NO: 1077968 - RNA, 19 nt, Artificial Sequence
  Description of Artificial Sequence: Synthetic oligonucleotide
gaaggugagcaccgacagu

SEQ ID NO: 1077969 - RNA, 19 nt, Artificial Sequence
  Description of Artificial Sequence: Synthetic oligonucleotide
gaggcgucucccgcgcacc

SEQ ID NO: 1077970 - RNA, 19 nt, Artificial Sequence
  Description of Artificial Sequence: Synthetic oligonucleotide
gaugcucucuuggggcaga

SEQ ID NO: 1077971 - RNA, 19 nt, Artificial Sequence
  Description of Artificial Sequence: Synthetic oligonucleotide
cucccacauuuuauuggga

SEQ ID NO: 1077972 - RNA, 19 nt, Artificial Sequence
  Description of Artificial Sequence: Synthetic oligonucleotide
cacagucugcuggagggca

SEQ ID NO: 1077973 - RNA, 19 nt, Artificial Sequence
  Description of Artificial Sequence: Synthetic oligonucleotide
cccaucgaaugugugcagg

SEQ ID NO: 1077974 - RNA, 19 nt, Artificial Sequence
  Description of Artificial Sequence: Synthetic oligonucleotide
acauccgggcucagccgac

SEQ ID NO: 1077975 - RNA, 19 nt, Artificial Sequence
  Description of Artificial Sequence: Synthetic oligonucleotide
acaggagaccacaguccug

SEQ ID NO: 1077976 - RNA, 19 nt, Artificial Sequence
  Description of Artificial Sequence: Synthetic oligonucleotide
ccccaagaugaaagcgugg

SEQ ID NO: 1077977 - RNA, 19 nt, Artificial Sequence
  Description of Artificial Sequence: Synthetic oligonucleotide
caggagaccacaguccugu

SEQ ID NO: 1077978 - RNA, 19 nt, Artificial Sequence
  Description of Artificial Sequence: Synthetic oligonucleotide
ccaaaaugcgagauaauuu

SEQ ID NO: 1077979 - RNA, 19 nt, Artificial Sequence
  Description of Artificial Sequence: Synthetic oligonucleotide
cagcaggaguacaucuuaa

SEQ ID NO: 1077980 - RNA, 19 nt, Artificial Sequence
  Description of Artificial Sequence: Synthetic oligonucleotide
ggucacagagagcccggac

SEQ ID NO: 1077981 - RNA, 19 nt, Artificial Sequence
  Description of Artificial Sequence: Synthetic oligonucleotide
cguagacccgagaagccug

SEQ ID NO: 1077982 - RNA, 19 nt, Artificial Sequence
  Description of Artificial Sequence: Synthetic oligonucleotide
ucggcugaccuggcuguac

SEQ ID NO: 1077983 - RNA, 19 nt, Artificial Sequence
  Description of Artificial Sequence: Synthetic oligonucleotide
ggacagcuaccacacgcca

SEQ ID NO: 1077984 - RNA, 19 nt, Artificial Sequence
  Description of Artificial Sequence: Synthetic oligonucleotide
guaggccugcguccuccug

SEQ ID NO: 1077985 - RNA, 19 nt, Artificial Sequence
  Description of Artificial Sequence: Synthetic oligonucleotide
caucgaaugugugcaggaa

SEQ ID NO: 1077986 - RNA, 19 nt, Artificial Sequence
  Description of Artificial Sequence: Synthetic oligonucleotide
cucaacuggucagguccug

SEQ ID NO: 1077987 - RNA, 19 nt, Artificial Sequence
  Description of Artificial Sequence: Synthetic oligonucleotide
cccaagaugaaagcgugga

SEQ ID NO: 1077988 - RNA, 19 nt, Artificial Sequence
  Description of Artificial Sequence: Synthetic oligonucleotide
uggaggcgucucccgcgca

SEQ ID NO: 1077989 - RNA, 19 nt, Artificial Sequence
  Description of Artificial Sequence: Synthetic oligonucleotide
gagcaccgacaguggcugc

SEQ ID NO: 1077990 - RNA, 19 nt, Artificial Sequence
  Description of Artificial Sequence: Synthetic oligonucleotide
gugcguggaggcgucuccc

SEQ ID NO: 1077991 - RNA, 19 nt, Artificial Sequence
  Description of Artificial Sequence: Synthetic oligonucleotide
cuccaacuguuugguguug

SEQ ID NO: 1077992 - RNA, 19 nt, Artificial Sequence
  Description of Artificial Sequence: Synthetic oligonucleotide
ggcguagacccgagaagcc

SEQ ID NO: 1077993 - RNA, 19 nt, Artificial Sequence
  Description of Artificial Sequence: Synthetic oligonucleotide
agagcccggacugcccugu

SEQ ID NO: 1077994 - RNA, 19 nt, Artificial Sequence
  Description of Artificial Sequence: Synthetic oligonucleotide
gggcucagccgacuauccc

SEQ ID NO: 1077995 - RNA, 19 nt, Artificial Sequence
  Description of Artificial Sequence: Synthetic oligonucleotide
cacacgcuuuugccuggug

SEQ ID NO: 1077996 - RNA, 19 nt, Artificial Sequence
  Description of Artificial Sequence: Synthetic oligonucleotide
gggcggaagagucuguagu

SEQ ID NO: 1077997 - RNA, 19 nt, Artificial Sequence
  Description of Artificial Sequence: Synthetic oligonucleotide
ggaucccaucgaaugugug

SEQ ID NO: 1077998 - RNA, 19 nt, Artificial Sequence
  Description of Artificial Sequence: Synthetic oligonucleotide
gguugguucugugcgugga

SEQ ID NO: 1077999 - RNA, 19 nt, Artificial Sequence
  Description of Artificial Sequence: Synthetic oligonucleotide
caccaaauagccgccccaa

SEQ ID NO: 1078000 - RNA, 19 nt, Artificial Sequence
  Description of Artificial Sequence: Synthetic oligonucleotide
cguggaggcgucucccgcg

SEQ ID NO: 1078001 - RNA, 19 nt, Artificial Sequence
  Description of Artificial Sequence: Synthetic oligonucleotide
caccggcaaacgaccagga

SEQ ID NO: 1078002 - RNA, 19 nt, Artificial Sequence
  Description of Artificial Sequence: Synthetic oligonucleotide
ccacacgccagggagaaga

SEQ ID NO: 1078003 - RNA, 19 nt, Artificial Sequence
  Description of Artificial Sequence: Synthetic oligonucleotide
ccggaauggcuucagucca

SEQ ID NO: 1078004 - RNA, 19 nt, Artificial Sequence
  Description of Artificial Sequence: Synthetic oligonucleotide
ggaggcgucucccgcgcac

SEQ ID NO: 1078005 - RNA, 19 nt, Artificial Sequence
  Description of Artificial Sequence: Synthetic oligonucleotide
gcggaagagucuguaguga

SEQ ID NO: 1078006 - RNA, 19 nt, Artificial Sequence
  Description of Artificial Sequence: Synthetic oligonucleotide
ucugugcguggaggcgucu

SEQ ID NO: 1078007 - RNA, 19 nt, Artificial Sequence
  Description of Artificial Sequence: Synthetic oligonucleotide
cacagcaggaguacaucuu

SEQ ID NO: 1078008 - RNA, 19 nt, Artificial Sequence
  Description of Artificial Sequence: Synthetic oligonucleotide
guagcuggccagucccacu

SEQ ID NO: 1078009 - RNA, 19 nt, Artificial Sequence
  Description of Artificial Sequence: Synthetic oligonucleotide
cugugcguggaggcgucuc

SEQ ID NO: 1078010 - RNA, 19 nt, Artificial Sequence
  Description of Artificial Sequence: Synthetic oligonucleotide
acacgccagggagaagaau

SEQ ID NO: 1078011 - RNA, 19 nt, Artificial Sequence
  Description of Artificial Sequence: Synthetic oligonucleotide
ccccaacggggcaggagcc

SEQ ID NO: 1078012 - RNA, 19 nt, Artificial Sequence
  Description of Artificial Sequence: Synthetic oligonucleotide
gcguggaggcgucucccgc

SEQ ID NO: 1078013 - RNA, 19 nt, Artificial Sequence
  Description of Artificial Sequence: Synthetic oligonucleotide
ccuuucguacauguuugca

SEQ ID NO: 1078014 - RNA, 19 nt, Artificial Sequence
  Description of Artificial Sequence: Synthetic oligonucleotide
guugccggggcggaagagu

SEQ ID NO: 1078015 - RNA, 19 nt, Artificial Sequence
  Description of Artificial Sequence: Synthetic oligonucleotide
auccgggcucagccgacua

SEQ ID NO: 1078016 - RNA, 19 nt, Artificial Sequence
  Description of Artificial Sequence: Synthetic oligonucleotide
ugggccccgggagcaccgg

SEQ ID NO: 1078017 - RNA, 19 nt, Artificial Sequence
  Description of Artificial Sequence: Synthetic oligonucleotide
gcacaccaaauagccgccc

SEQ ID NO: 1078018 - RNA, 19 nt, Artificial Sequence
  Description of Artificial Sequence: Synthetic oligonucleotide
gccggggcggaagagucug

SEQ ID NO: 1078019 - RNA, 19 nt, Artificial Sequence
  Description of Artificial Sequence: Synthetic oligonucleotide
gggagcccuguagacagga

SEQ ID NO: 1078020 - RNA, 19 nt, Artificial Sequence
  Description of Artificial Sequence: Synthetic oligonucleotide
gaggggccucaggagaugu

SEQ ID NO: 1078021 - RNA, 19 nt, Artificial Sequence
  Description of Artificial Sequence: Synthetic oligonucleotide
cggcaaacgaccaggaacu

SEQ ID NO: 1078022 - RNA, 19 nt, Artificial Sequence
  Description of Artificial Sequence: Synthetic oligonucleotide
cagggguguccaggcuucc

SEQ ID NO: 1078023 - RNA, 19 nt, Artificial Sequence
  Description of Artificial Sequence: Synthetic oligonucleotide
cuacuggcaccagccccuc

SEQ ID NO: 1078024 - RNA, 19 nt, Artificial Sequence
  Description of Artificial Sequence: Synthetic oligonucleotide
gguccugcggcaguguggu

SEQ ID NO: 1078025 - RNA, 19 nt, Artificial Sequence
  Description of Artificial Sequence: Synthetic oligonucleotide
cagaggcguagacccgaga

SEQ ID NO: 1078026 - RNA, 19 nt, Artificial Sequence
  Description of Artificial Sequence: Synthetic oligonucleotide
gccagaggcguagacccga

SEQ ID NO: 1078027 - RNA, 19 nt, Artificial Sequence
  Description of Artificial Sequence: Synthetic oligonucleotide
cagucccacucugggcuuc

SEQ ID NO: 1078028 - RNA, 19 nt, Artificial Sequence
  Description of Artificial Sequence: Synthetic oligonucleotide
ccugcgcugcccagugaug

SEQ ID NO: 1078029 - RNA, 19 nt, Artificial Sequence
  Description of Artificial Sequence: Synthetic oligonucleotide
cugcacccugcugccuggc

SEQ ID NO: 1078030 - RNA, 19 nt, Artificial Sequence
  Description of Artificial Sequence: Synthetic oligonucleotide
ccgggcagaggguggucag

SEQ ID NO: 1078031 - RNA, 19 nt, Artificial Sequence
  Description of Artificial Sequence: Synthetic oligonucleotide
gggcggguugccggggcgg

SEQ ID NO: 1078032 - RNA, 19 nt, Artificial Sequence
  Description of Artificial Sequence: Synthetic oligonucleotide
gagcccggacugcccuguc

SEQ ID NO: 1078033 - RNA, 19 nt, Artificial Sequence
  Description of Artificial Sequence: Synthetic oligonucleotide
ggccccaacggggcaggag

SEQ ID NO: 1078034 - RNA, 19 nt, Artificial Sequence
  Description of Artificial Sequence: Synthetic oligonucleotide
ccacgcuggaagcucaacu

SEQ ID NO: 1078035 - RNA, 19 nt, Artificial Sequence
  Description of Artificial Sequence: Synthetic oligonucleotide
ccaucacgcccacagcgaa

SEQ ID NO: 1078036 - RNA, 19 nt, Artificial Sequence
  Description of Artificial Sequence: Synthetic oligonucleotide
cuuccccacgcuggaagcu

SEQ ID NO: 1078037 - RNA, 19 nt, Artificial Sequence
  Description of Artificial Sequence: Synthetic oligonucleotide
cagcuaucaggagaccuuu

SEQ ID NO: 1078038 - RNA, 19 nt, Artificial Sequence
  Description of Artificial Sequence: Synthetic oligonucleotide
gaccucuccugaagucccu

SEQ ID NO: 1078039 - RNA, 19 nt, Artificial Sequence
  Description of Artificial Sequence: Synthetic oligonucleotide
ggaggacaagggagcccug

SEQ ID NO: 1078040 - RNA, 19 nt, Artificial Sequence
  Description of Artificial Sequence: Synthetic oligonucleotide
cucugggccccgggagcac

SEQ ID NO: 1078041 - RNA, 19 nt, Artificial Sequence
  Description of Artificial Sequence: Synthetic oligonucleotide
gcguagacccgagaagccu

SEQ ID NO: 1078042 - RNA, 19 nt, Artificial Sequence
  Description of Artificial Sequence: Synthetic oligonucleotide
gggaucccaucgaaugugu

SEQ ID NO: 1078043 - RNA, 19 nt, Artificial Sequence
  Description of Artificial Sequence: Synthetic oligonucleotide
gcucaacuggucagguccu

SEQ ID NO: 1078044 - RNA, 19 nt, Artificial Sequence
  Description of Artificial Sequence: Synthetic oligonucleotide
ggccugcguccuccuggag

SEQ ID NO: 1078045 - RNA, 19 nt, Artificial Sequence
  Description of Artificial Sequence: Synthetic oligonucleotide
gccccaaccacacgcuuuu

SEQ ID NO: 1078046 - RNA, 19 nt, Artificial Sequence
  Description of Artificial Sequence: Synthetic oligonucleotide
gaagucccucggagacucu

SEQ ID NO: 1078047 - RNA, 19 nt, Artificial Sequence
  Description of Artificial Sequence: Synthetic oligonucleotide
ggcgaguccacaggcuccu

SEQ ID NO: 1078048 - RNA, 19 nt, Artificial Sequence
  Description of Artificial Sequence: Synthetic oligonucleotide
guccugcggcagugugguc

SEQ ID NO: 1078049 - RNA, 19 nt, Artificial Sequence
  Description of Artificial Sequence: Synthetic oligonucleotide
cccacgcuggaagcucaac

SEQ ID NO: 1078050 - RNA, 19 nt, Artificial Sequence
  Description of Artificial Sequence: Synthetic oligonucleotide
cagcgaagccagucuucau

SEQ ID NO: 1078051 - RNA, 19 nt, Artificial Sequence
  Description of Artificial Sequence: Synthetic oligonucleotide
cgcuggaagcucaacuggu

SEQ ID NO: 1078052 - RNA, 19 nt, Artificial Sequence
  Description of Artificial Sequence: Synthetic oligonucleotide
gucggcugaccuggcugua

SEQ ID NO: 1078053 - RNA, 19 nt, Artificial Sequence
  Description of Artificial Sequence: Synthetic oligonucleotide
gccagucggcugaccuggc

SEQ ID NO: 1078054 - RNA, 19 nt, Artificial Sequence
  Description of Artificial Sequence: Synthetic oligonucleotide
gugccgccagaggcguaga

SEQ ID NO: 1078055 - RNA, 19 nt, Artificial Sequence
  Description of Artificial Sequence: Synthetic oligonucleotide
gggcagaggcauguacuau

SEQ ID NO: 1078056 - RNA, 19 nt, Artificial Sequence
  Description of Artificial Sequence: Synthetic oligonucleotide
cauccgggcucagccgacu

SEQ ID NO: 1078057 - RNA, 19 nt, Artificial Sequence
  Description of Artificial Sequence: Synthetic oligonucleotide
cgggagcaccggcaaacga

SEQ ID NO: 1078058 - RNA, 19 nt, Artificial Sequence
  Description of Artificial Sequence: Synthetic oligonucleotide
cgaaugugugcaggaaccu

SEQ ID NO: 1078059 - RNA, 19 nt, Artificial Sequence
  Description of Artificial Sequence: Synthetic oligonucleotide
ccgcgcacccucagcagua

SEQ ID NO: 1078060 - RNA, 19 nt, Artificial Sequence
  Description of Artificial Sequence: Synthetic oligonucleotide
gcuacugagcggggccagu

SEQ ID NO: 1078061 - RNA, 19 nt, Artificial Sequence
  Description of Artificial Sequence: Synthetic oligonucleotide
cagugccgccagaggcgua

SEQ ID NO: 1078062 - RNA, 19 nt, Artificial Sequence
  Description of Artificial Sequence: Synthetic oligonucleotide
ccagucggcugaccuggcu

SEQ ID NO: 1078063 - RNA, 19 nt, Artificial Sequence
  Description of Artificial Sequence: Synthetic oligonucleotide
gggcaaccagcuggauggu

SEQ ID NO: 1078064 - RNA, 19 nt, Artificial Sequence
  Description of Artificial Sequence: Synthetic oligonucleotide
ccccacgcuggaagcucaa

SEQ ID NO: 1078065 - RNA, 19 nt, Artificial Sequence
  Description of Artificial Sequence: Synthetic oligonucleotide
cugcguccuccuggaggcu

SEQ ID NO: 1078066 - RNA, 19 nt, Artificial Sequence
  Description of Artificial Sequence: Synthetic oligonucleotide
cccacccaccagggguguc

SEQ ID NO: 1078067 - RNA, 19 nt, Artificial Sequence
  Description of Artificial Sequence: Synthetic oligonucleotide
cgucucccgcgcacccuca

SEQ ID NO: 1078068 - RNA, 19 nt, Artificial Sequence
  Description of Artificial Sequence: Synthetic oligonucleotide
cggggcggaagagucugua

SEQ ID NO: 1078069 - RNA, 19 nt, Artificial Sequence
  Description of Artificial Sequence: Synthetic oligonucleotide
ccacacgcuuuugccuggu

SEQ ID NO: 1078070 - RNA, 19 nt, Artificial Sequence
  Description of Artificial Sequence: Synthetic oligonucleotide
uaaaauacgagucaaauug

SEQ ID NO: 1078071 - RNA, 19 nt, Artificial Sequence
  Description of Artificial Sequence: Synthetic oligonucleotide
aagacaucaggccucaucc

SEQ ID NO: 1078072 - RNA, 19 nt, Artificial Sequence
  Description of Artificial Sequence: Synthetic oligonucleotide
aguauuuacacgcugagcu

SEQ ID NO: 1078073 - RNA, 19 nt, Artificial Sequence
  Description of Artificial Sequence: Synthetic oligonucleotide
cagauaaacacaaaacacg

SEQ ID NO: 1078074 - RNA, 19 nt, Artificial Sequence
  Description of Artificial Sequence: Synthetic oligonucleotide
uuaagcaguggaaagacca

SEQ ID NO: 1078075 - RNA, 19 nt, Artificial Sequence
  Description of Artificial Sequence: Synthetic oligonucleotide
uuucaugguaaucacacug

SEQ ID NO: 1078076 - RNA, 19 nt, Artificial Sequence
  Description of Artificial Sequence: Synthetic oligonucleotide
ugccaagacaaucagaagc

SEQ ID NO: 1078077 - RNA, 19 nt, Artificial Sequence
  Description of Artificial Sequence: Synthetic oligonucleotide
aacguuuucucacaaauau

SEQ ID NO: 1078078 - RNA, 19 nt, Artificial Sequence
  Description of Artificial Sequence: Synthetic oligonucleotide
aauauugcauuuguggcag

SEQ ID NO: 1078079 - RNA, 19 nt, Artificial Sequence
  Description of Artificial Sequence: Synthetic oligonucleotide
auacgagucaaauuggaag

SEQ ID NO: 1078080 - RNA, 19 nt, Artificial Sequence
  Description of Artificial Sequence: Synthetic oligonucleotide
uugauucuagcuuugaagu

SEQ ID NO: 1078081 - RNA, 19 nt, Artificial Sequence
  Description of Artificial Sequence: Synthetic oligonucleotide
agaaucaucuugcccaggc

SEQ ID NO: 1078082 - RNA, 19 nt, Artificial Sequence
  Description of Artificial Sequence: Synthetic oligonucleotide
aagauuagacaccguugcc

SEQ ID NO: 1078083 - RNA, 19 nt, Artificial Sequence
  Description of Artificial Sequence: Synthetic oligonucleotide
cugaugauuaacaagacga

SEQ ID NO: 1078084 - RNA, 19 nt, Artificial Sequence
  Description of Artificial Sequence: Synthetic oligonucleotide
uacuguacugcucaaaacu

SEQ ID NO: 1078085 - RNA, 19 nt, Artificial Sequence
  Description of Artificial Sequence: Synthetic oligonucleotide
aagacgauaguuucuguca

SEQ ID NO: 1078086 - RNA, 19 nt, Artificial Sequence
  Description of Artificial Sequence: Synthetic oligonucleotide
cucacuuaaaauacgaguc

SEQ ID NO: 1078087 - RNA, 19 nt, Artificial Sequence
  Description of Artificial Sequence: Synthetic oligonucleotide
uggagugcaaugaaccugg

SEQ ID NO: 1078088 - RNA, 19 nt, Artificial Sequence
  Description of Artificial Sequence: Synthetic oligonucleotide
aaacgccuauuuuaugugg

SEQ ID NO: 1078089 - RNA, 19 nt, Artificial Sequence
  Description of Artificial Sequence: Synthetic oligonucleotide
ucaagauuagacaccguug

SEQ ID NO: 1078090 - RNA, 19 nt, Artificial Sequence
  Description of Artificial Sequence: Synthetic oligonucleotide
acucaagccguuuuaaaag

SEQ ID NO: 1078091 - RNA, 19 nt, Artificial Sequence
  Description of Artificial Sequence: Synthetic oligonucleotide
aaauuggaagaccaccuga

SEQ ID NO: 1078092 - RNA, 19 nt, Artificial Sequence
  Description of Artificial Sequence: Synthetic oligonucleotide
accaaguucaagauuagac

SEQ ID NO: 1078093 - RNA, 19 nt, Artificial Sequence
  Description of Artificial Sequence: Synthetic oligonucleotide
uguguauucccuuaugauc

SEQ ID NO: 1078094 - RNA, 19 nt, Artificial Sequence
  Description of Artificial Sequence: Synthetic oligonucleotide
uuuuacugaaucacugcug

SEQ ID NO: 1078095 - RNA, 19 nt, Artificial Sequence
  Description of Artificial Sequence: Synthetic oligonucleotide
ucacuuaaaauacgaguca

SEQ ID NO: 1078096 - RNA, 19 nt, Artificial Sequence
  Description of Artificial Sequence: Synthetic oligonucleotide
ucuccuguggcuaaugaga

SEQ ID NO: 1078097 - RNA, 19 nt, Artificial Sequence
  Description of Artificial Sequence: Synthetic oligonucleotide
uacgagucaaauuggaaga

SEQ ID NO: 1078098 - RNA, 19 nt, Artificial Sequence
  Description of Artificial Sequence: Synthetic oligonucleotide
acaaacgccuauuuuaugu

SEQ ID NO: 1078099 - RNA, 19 nt, Artificial Sequence
  Description of Artificial Sequence: Synthetic oligonucleotide
gaauucggaacauucugcc

SEQ ID NO: 1078100 - RNA, 19 nt, Artificial Sequence
  Description of Artificial Sequence: Synthetic oligonucleotide
uucaugguaaucacacugc

SEQ ID NO: 1078101 - RNA, 19 nt, Artificial Sequence
  Description of Artificial Sequence: Synthetic oligonucleotide
aaugagaaggaaugagcga

SEQ ID NO: 1078102 - RNA, 19 nt, Artificial Sequence
  Description of Artificial Sequence: Synthetic oligonucleotide
agcgaagcugccuaaagag

SEQ ID NO: 1078103 - RNA, 19 nt, Artificial Sequence
  Description of Artificial Sequence: Synthetic oligonucleotide
ugcuuuuacugaaucacug

SEQ ID NO: 1078104 - RNA, 19 nt, Artificial Sequence
  Description of Artificial Sequence: Synthetic oligonucleotide
agaccaugucgacugaagc

SEQ ID NO: 1078105 - RNA, 19 nt, Artificial Sequence
  Description of Artificial Sequence: Synthetic oligonucleotide
aagacaaucagaagcuguc

SEQ ID NO: 1078106 - RNA, 19 nt, Artificial Sequence
  Description of Artificial Sequence: Synthetic oligonucleotide
aaugagcgaauucggaaca

SEQ ID NO: 1078107 - RNA, 19 nt, Artificial Sequence
  Description of Artificial Sequence: Synthetic oligonucleotide
aacgcaucugaucaaggcu

SEQ ID NO: 1078108 - RNA, 19 nt, Artificial Sequence
  Description of Artificial Sequence: Synthetic oligonucleotide
aacaagacgauaguuucug

SEQ ID NO: 1078109 - RNA, 19 nt, Artificial Sequence
  Description of Artificial Sequence: Synthetic oligonucleotide
uggguaggcacugagacag

SEQ ID NO: 1078110 - RNA, 19 nt, Artificial Sequence
  Description of Artificial Sequence: Synthetic oligonucleotide
uccgaaccaaaguauagcc

SEQ ID NO: 1078111 - RNA, 19 nt, Artificial Sequence
  Description of Artificial Sequence: Synthetic oligonucleotide
cuauccaaugcacaucagg

SEQ ID NO: 1078112 - RNA, 19 nt, Artificial Sequence
  Description of Artificial Sequence: Synthetic oligonucleotide
gaaugagcgaauucggaac

SEQ ID NO: 1078113 - RNA, 19 nt, Artificial Sequence
  Description of Artificial Sequence: Synthetic oligonucleotide
uguagcauggauccucuga

SEQ ID NO: 1078114 - RNA, 19 nt, Artificial Sequence
  Description of Artificial Sequence: Synthetic oligonucleotide
uucaagauuagacaccguu

SEQ ID NO: 1078115 - RNA, 19 nt, Artificial Sequence
  Description of Artificial Sequence: Synthetic oligonucleotide
gagcugacggaauagcucc

SEQ ID NO: 1078116 - RNA, 19 nt, Artificial Sequence
  Description of Artificial Sequence: Synthetic oligonucleotide
uaugacuuucauccagugc

SEQ ID NO: 1078117 - RNA, 19 nt, Artificial Sequence
  Description of Artificial Sequence: Synthetic oligonucleotide
ucucacgcccuuuaugggg

SEQ ID NO: 1078118 - RNA, 19 nt, Artificial Sequence
  Description of Artificial Sequence: Synthetic oligonucleotide
uuugaagucucucuauuuu

SEQ ID NO: 1078119 - RNA, 19 nt, Artificial Sequence
  Description of Artificial Sequence: Synthetic oligonucleotide
gaguaugacuuucauccag

SEQ ID NO: 1078120 - RNA, 19 nt, Artificial Sequence
  Description of Artificial Sequence: Synthetic oligonucleotide
uacuguacgaagguguucc

SEQ ID NO: 1078121 - RNA, 19 nt, Artificial Sequence
  Description of Artificial Sequence: Synthetic oligonucleotide
caguggaaagaccaugucg

SEQ ID NO: 1078122 - RNA, 19 nt, Artificial Sequence
  Description of Artificial Sequence: Synthetic oligonucleotide
auuggaacuccaucggaag

SEQ ID NO: 1078123 - RNA, 19 nt, Artificial Sequence
  Description of Artificial Sequence: Synthetic oligonucleotide
agauaaacacaaaacacgu

SEQ ID NO: 1078124 - RNA, 19 nt, Artificial Sequence
  Description of Artificial Sequence: Synthetic oligonucleotide
agccguuuuaaaaguaucc

SEQ ID NO: 1078125 - RNA, 19 nt, Artificial Sequence
  Description of Artificial Sequence: Synthetic oligonucleotide
uuuccucucaugucgggag

SEQ ID NO: 1078126 - RNA, 19 nt, Artificial Sequence
  Description of Artificial Sequence: Synthetic oligonucleotide
uucuuuacuguacgaaggu

SEQ ID NO: 1078127 - RNA, 19 nt, Artificial Sequence
  Description of Artificial Sequence: Synthetic oligonucleotide
aaggaaugagcgaauucgg

SEQ ID NO: 1078128 - RNA, 19 nt, Artificial Sequence
  Description of Artificial Sequence: Synthetic oligonucleotide
gaccaugucgacugaagcc

SEQ ID NO: 1078129 - RNA, 19 nt, Artificial Sequence
  Description of Artificial Sequence: Synthetic oligonucleotide
gacggaauagcuccuggcc

SEQ ID NO: 1078130 - RNA, 19 nt, Artificial Sequence
  Description of Artificial Sequence: Synthetic oligonucleotide
aaaguauccccaacgcauc

SEQ ID NO: 1078131 - RNA, 19 nt, Artificial Sequence
  Description of Artificial Sequence: Synthetic oligonucleotide
uuacguguaaagguuuucc

SEQ ID NO: 1078132 - RNA, 19 nt, Artificial Sequence
  Description of Artificial Sequence: Synthetic oligonucleotide
acuguguauucccuuauga

SEQ ID NO: 1078133 - RNA, 19 nt, Artificial Sequence
  Description of Artificial Sequence: Synthetic oligonucleotide
aaccuggaacucuugucag

SEQ ID NO: 1078134 - RNA, 19 nt, Artificial Sequence
  Description of Artificial Sequence: Synthetic oligonucleotide
aauucggaacauucugcca

SEQ ID NO: 1078135 - RNA, 19 nt, Artificial Sequence
  Description of Artificial Sequence: Synthetic oligonucleotide
uauuuacacgcugagcuga

SEQ ID NO: 1078136 - RNA, 19 nt, Artificial Sequence
  Description of Artificial Sequence: Synthetic oligonucleotide
uguacugcucaaaacuguc

SEQ ID NO: 1078137 - RNA, 19 nt, Artificial Sequence
  Description of Artificial Sequence: Synthetic oligonucleotide
gcuaaugagaugugaaugc

SEQ ID NO: 1078138 - RNA, 19 nt, Artificial Sequence
  Description of Artificial Sequence: Synthetic oligonucleotide
acgucugcugcuuuuacug

SEQ ID NO: 1078139 - RNA, 19 nt, Artificial Sequence
  Description of Artificial Sequence: Synthetic oligonucleotide
uucgagaaggucaccguca

SEQ ID NO: 1078140 - RNA, 19 nt, Artificial Sequence
  Description of Artificial Sequence: Synthetic oligonucleotide
gaagccugagcugaauggg

SEQ ID NO: 1078141 - RNA, 19 nt, Artificial Sequence
  Description of Artificial Sequence: Synthetic oligonucleotide
gaggggaccauaucugugc

SEQ ID NO: 1078142 - RNA, 19 nt, Artificial Sequence
  Description of Artificial Sequence: Synthetic oligonucleotide
uuagacaccguugccaaga

SEQ ID NO: 1078143 - RNA, 19 nt, Artificial Sequence
  Description of Artificial Sequence: Synthetic oligonucleotide
gucaaauuggaagaccacc

SEQ ID NO: 1078144 - RNA, 19 nt, Artificial Sequence
  Description of Artificial Sequence: Synthetic oligonucleotide
cucaugucgggagagauug

SEQ ID NO: 1078145 - RNA, 19 nt, Artificial Sequence
  Description of Artificial Sequence: Synthetic oligonucleotide
uccuucgagaaggucaccg

SEQ ID NO: 1078146 - RNA, 19 nt, Artificial Sequence
  Description of Artificial Sequence: Synthetic oligonucleotide
accgucacauccuggaaag

SEQ ID NO: 1078147 - RNA, 19 nt, Artificial Sequence
  Description of Artificial Sequence: Synthetic oligonucleotide
ugucgggagagauuggaac

SEQ ID NO: 1078148 - RNA, 19 nt, Artificial Sequence
  Description of Artificial Sequence: Synthetic oligonucleotide
ugggaguaucuucucagca

SEQ ID NO: 1078149 - RNA, 19 nt, Artificial Sequence
  Description of Artificial Sequence: Synthetic oligonucleotide
uugccaaacguuuucucac

SEQ ID NO: 1078150 - RNA, 19 nt, Artificial Sequence
  Description of Artificial Sequence: Synthetic oligonucleotide
agucaaagcuuccugguau

SEQ ID NO: 1078151 - RNA, 19 nt, Artificial Sequence
  Description of Artificial Sequence: Synthetic oligonucleotide
uguugcaaagaguguuucc

SEQ ID NO: 1078152 - RNA, 19 nt, Artificial Sequence
  Description of Artificial Sequence: Synthetic oligonucleotide
aagccguuuuaaaaguauc

SEQ ID NO: 1078153 - RNA, 19 nt, Artificial Sequence
  Description of Artificial Sequence: Synthetic oligonucleotide
uuacacgcugagcugaguc

SEQ ID NO: 1078154 - RNA, 19 nt, Artificial Sequence
  Description of Artificial Sequence: Synthetic oligonucleotide
gcaauugugcacuuuggag

SEQ ID NO: 1078155 - RNA, 19 nt, Artificial Sequence
  Description of Artificial Sequence: Synthetic oligonucleotide
guaacaccugccuggaggc

SEQ ID NO: 1078156 - RNA, 19 nt, Artificial Sequence
  Description of Artificial Sequence: Synthetic oligonucleotide
uagcgcacaauguuauuug

SEQ ID NO: 1078157 - RNA, 19 nt, Artificial Sequence
  Description of Artificial Sequence: Synthetic oligonucleotide
cugucauccaguacuguac

SEQ ID NO: 1078158 - RNA, 19 nt, Artificial Sequence
  Description of Artificial Sequence: Synthetic oligonucleotide
uuuacuguacgaagguguu

SEQ ID NO: 1078159 - RNA, 19 nt, Artificial Sequence
  Description of Artificial Sequence: Synthetic oligonucleotide
caagacgauaguuucuguc

SEQ ID NO: 1078160 - RNA, 19 nt, Artificial Sequence
  Description of Artificial Sequence: Synthetic oligonucleotide
agauuagacaccguugcca

SEQ ID NO: 1078161 - RNA, 19 nt, Artificial Sequence
  Description of Artificial Sequence: Synthetic oligonucleotide
uuaagugucuguggccggg

SEQ ID NO: 1078162 - RNA, 19 nt, Artificial Sequence
  Description of Artificial Sequence: Synthetic oligonucleotide
cagcguaacaccugccugg

SEQ ID NO: 1078163 - RNA, 19 nt, Artificial Sequence
  Description of Artificial Sequence: Synthetic oligonucleotide
uccggugccuauccaaugc

SEQ ID NO: 1078164 - RNA, 19 nt, Artificial Sequence
  Description of Artificial Sequence: Synthetic oligonucleotide
ucuggagugcaaugaaccu

SEQ ID NO: 1078165 - RNA, 19 nt, Artificial Sequence
  Description of Artificial Sequence: Synthetic oligonucleotide
gagucaaauuggaagacca

SEQ ID NO: 1078166 - RNA, 19 nt, Artificial Sequence
  Description of Artificial Sequence: Synthetic oligonucleotide
agcaauugugcacuuugga

SEQ ID NO: 1078167 - RNA, 19 nt, Artificial Sequence
  Description of Artificial Sequence: Synthetic oligonucleotide
uucucagcaugguagcgca

SEQ ID NO: 1078168 - RNA, 19 nt, Artificial Sequence
  Description of Artificial Sequence: Synthetic oligonucleotide
caaacgccuauuuuaugug

SEQ ID NO: 1078169 - RNA, 19 nt, Artificial Sequence
  Description of Artificial Sequence: Synthetic oligonucleotide
aauuggaagaccaccugaa

SEQ ID NO: 1078170 - RNA, 19 nt, Artificial Sequence
  Description of Artificial Sequence: Synthetic oligonucleotide
ugauucuagcuuugaaguc

SEQ ID NO: 1078171 - RNA, 19 nt, Artificial Sequence
  Description of Artificial Sequence: Synthetic oligonucleotide
cuccgcgccacucucaggg

SEQ ID NO: 1078172 - RNA, 19 nt, Artificial Sequence
  Description of Artificial Sequence: Synthetic oligonucleotide
uuuucaugguaaucacacu

SEQ ID NO: 1078173 - RNA, 19 nt, Artificial Sequence
  Description of Artificial Sequence: Synthetic oligonucleotide
gccuauuuuauguggaggc

SEQ ID NO: 1078174 - RNA, 19 nt, Artificial Sequence
  Description of Artificial Sequence: Synthetic oligonucleotide
uuuuacguguaaagguuuu

SEQ ID NO: 1078175 - RNA, 19 nt, Artificial Sequence
  Description of Artificial Sequence: Synthetic oligonucleotide
aaguauccccaacgcaucu

SEQ ID NO: 1078176 - RNA, 19 nt, Artificial Sequence
  Description of Artificial Sequence: Synthetic oligonucleotide
uccuacccagcaauugugc

SEQ ID NO: 1078177 - RNA, 19 nt, Artificial Sequence
  Description of Artificial Sequence: Synthetic oligonucleotide
gguucugagaaaggcaugg

SEQ ID NO: 1078178 - RNA, 19 nt, Artificial Sequence
  Description of Artificial Sequence: Synthetic oligonucleotide
aucaaggcucacuuaaaau

SEQ ID NO: 1078179 - RNA, 19 nt, Artificial Sequence
  Description of Artificial Sequence: Synthetic oligonucleotide
agagcugacggaauagcuc

SEQ ID NO: 1078180 - RNA, 19 nt, Artificial Sequence
  Description of Artificial Sequence: Synthetic oligonucleotide
acuguacgaagguguuccc

SEQ ID NO: 1078181 - RNA, 19 nt, Artificial Sequence
  Description of Artificial Sequence: Synthetic oligonucleotide
aagaccaugucgacugaag

SEQ ID NO: 1078182 - RNA, 19 nt, Artificial Sequence
  Description of Artificial Sequence: Synthetic oligonucleotide
ugccaacaguauuuacacg

SEQ ID NO: 1078183 - RNA, 19 nt, Artificial Sequence
  Description of Artificial Sequence: Synthetic oligonucleotide
acuuuggaguaugacuuuc

SEQ ID NO: 1078184 - RNA, 19 nt, Artificial Sequence
  Description of Artificial Sequence: Synthetic oligonucleotide
guggguacuuucuggagug

SEQ ID NO: 1078185 - RNA, 19 nt, Artificial Sequence
  Description of Artificial Sequence: Synthetic oligonucleotide
acgcaucugaucaaggcuc

SEQ ID NO: 1078186 - RNA, 19 nt, Artificial Sequence
  Description of Artificial Sequence: Synthetic oligonucleotide
uaugaucuaaaaggcuucu

SEQ ID NO: 1078187 - RNA, 19 nt, Artificial Sequence
  Description of Artificial Sequence: Synthetic oligonucleotide
caaauuggaagaccaccug

SEQ ID NO: 1078188 - RNA, 19 nt, Artificial Sequence
  Description of Artificial Sequence: Synthetic oligonucleotide
acaugcgcagcuccgcagg

SEQ ID NO: 1078189 - RNA, 19 nt, Artificial Sequence
  Description of Artificial Sequence: Synthetic oligonucleotide
uguacccacaugcgcagcu

SEQ ID NO: 1078190 - RNA, 19 nt, Artificial Sequence
  Description of Artificial Sequence: Synthetic oligonucleotide
ugacggaauagcuccuggc

SEQ ID NO: 1078191 - RNA, 19 nt, Artificial Sequence
  Description of Artificial Sequence: Synthetic oligonucleotide
cuuaugaucuaaaaggcuu

SEQ ID NO: 1078192 - RNA, 19 nt, Artificial Sequence
  Description of Artificial Sequence: Synthetic oligonucleotide
acuguacugcucaaaacug

SEQ ID NO: 1078193 - RNA, 19 nt, Artificial Sequence
  Description of Artificial Sequence: Synthetic oligonucleotide
acgagucaaauuggaagac

SEQ ID NO: 1078194 - RNA, 19 nt, Artificial Sequence
  Description of Artificial Sequence: Synthetic oligonucleotide
acggaauagcuccuggcca

SEQ ID NO: 1078195 - RNA, 19 nt, Artificial Sequence
  Description of Artificial Sequence: Synthetic oligonucleotide
agauuggaacuccaucgga

SEQ ID NO: 1078196 - RNA, 19 nt, Artificial Sequence
  Description of Artificial Sequence: Synthetic oligonucleotide
agucaaauuggaagaccac

SEQ ID NO: 1078197 - RNA, 19 nt, Artificial Sequence
  Description of Artificial Sequence: Synthetic oligonucleotide
ucagaaggguucucacgcc

SEQ ID NO: 1078198 - RNA, 19 nt, Artificial Sequence
  Description of Artificial Sequence: Synthetic oligonucleotide
uugccaagacaaucagaag

SEQ ID NO: 1078199 - RNA, 19 nt, Artificial Sequence
  Description of Artificial Sequence: Synthetic oligonucleotide
guacgaagguguucccugg

SEQ ID NO: 1078200 - RNA, 19 nt, Artificial Sequence
  Description of Artificial Sequence: Synthetic oligonucleotide
uaguggguacuuucuggag

SEQ ID NO: 1078201 - RNA, 19 nt, Artificial Sequence
  Description of Artificial Sequence: Synthetic oligonucleotide
auauugcauuuguggcagc

SEQ ID NO: 1078202 - RNA, 19 nt, Artificial Sequence
  Description of Artificial Sequence: Synthetic oligonucleotide
caauugugcacuuuggagu

SEQ ID NO: 1078203 - RNA, 19 nt, Artificial Sequence
  Description of Artificial Sequence: Synthetic oligonucleotide
guuaagugucuguggccgg

SEQ ID NO: 1078204 - RNA, 19 nt, Artificial Sequence
  Description of Artificial Sequence: Synthetic oligonucleotide
guaggagaaucaucuugcc

SEQ ID NO: 1078205 - RNA, 19 nt, Artificial Sequence
  Description of Artificial Sequence: Synthetic oligonucleotide
ucaagccguuuuaaaagua

SEQ ID NO: 1078206 - RNA, 19 nt, Artificial Sequence
  Description of Artificial Sequence: Synthetic oligonucleotide
aacgccuauuuuaugugga

SEQ ID NO: 1078207 - RNA, 19 nt, Artificial Sequence
  Description of Artificial Sequence: Synthetic oligonucleotide
guaugacuuucauccagug

SEQ ID NO: 1078208 - RNA, 19 nt, Artificial Sequence
  Description of Artificial Sequence: Synthetic oligonucleotide
cucacgcccuuuauggggc

SEQ ID NO: 1078209 - RNA, 19 nt, Artificial Sequence
  Description of Artificial Sequence: Synthetic oligonucleotide
uucagugguauuccaugau

SEQ ID NO: 1078210 - RNA, 19 nt, Artificial Sequence
  Description of Artificial Sequence: Synthetic oligonucleotide
ccguuuuaaaaguaucccc

SEQ ID NO: 1078211 - RNA, 19 nt, Artificial Sequence
  Description of Artificial Sequence: Synthetic oligonucleotide
ucaaagcuuccugguaucc

SEQ ID NO: 1078212 - RNA, 19 nt, Artificial Sequence
  Description of Artificial Sequence: Synthetic oligonucleotide
cacuuugcauuugaagggc

SEQ ID NO: 1078213 - RNA, 19 nt, Artificial Sequence
  Description of Artificial Sequence: Synthetic oligonucleotide
cugaucaaggcucacuuaa

SEQ ID NO: 1078214 - RNA, 19 nt, Artificial Sequence
  Description of Artificial Sequence: Synthetic oligonucleotide
ugguagcgcacaauguuau

SEQ ID NO: 1078215 - RNA, 19 nt, Artificial Sequence
  Description of Artificial Sequence: Synthetic oligonucleotide
uacccagcaauugugcacu

SEQ ID NO: 1078216 - RNA, 19 nt, Artificial Sequence
  Description of Artificial Sequence: Synthetic oligonucleotide
guguauucccuuaugaucu

SEQ ID NO: 1078217 - RNA, 19 nt, Artificial Sequence
  Description of Artificial Sequence: Synthetic oligonucleotide
cagaagacucaugguagcg

SEQ ID NO: 1078218 - RNA, 19 nt, Artificial Sequence
  Description of Artificial Sequence: Synthetic oligonucleotide
agugcuugacucaagccgu

SEQ ID NO: 1078219 - RNA, 19 nt, Artificial Sequence
  Description of Artificial Sequence: Synthetic oligonucleotide
ugugcacuuuggaguauga

SEQ ID NO: 1078220 - RNA, 19 nt, Artificial Sequence
  Description of Artificial Sequence: Synthetic oligonucleotide
ugccaaacguuuucucaca

SEQ ID NO: 1078221 - RNA, 19 nt, Artificial Sequence
  Description of Artificial Sequence: Synthetic oligonucleotide
ugggcuccuacccagcaau

SEQ ID NO: 1078222 - RNA, 19 nt, Artificial Sequence
  Description of Artificial Sequence: Synthetic oligonucleotide
auuagacaccguugccaag

SEQ ID NO: 1078223 - RNA, 19 nt, Artificial Sequence
  Description of Artificial Sequence: Synthetic oligonucleotide
agacgauaguuucugucaa

SEQ ID NO: 1078224 - RNA, 19 nt, Artificial Sequence
  Description of Artificial Sequence: Synthetic oligonucleotide
ugucgacugaagccugagc

SEQ ID NO: 1078225 - RNA, 19 nt, Artificial Sequence
  Description of Artificial Sequence: Synthetic oligonucleotide
ucaugucgggagagauugg

SEQ ID NO: 1078226 - RNA, 19 nt, Artificial Sequence
  Description of Artificial Sequence: Synthetic oligonucleotide
gucgacugaagccugagcu

SEQ ID NO: 1078227 - RNA, 19 nt, Artificial Sequence
  Description of Artificial Sequence: Synthetic oligonucleotide
caacaguauuuacacgcug

SEQ ID NO: 1078228 - RNA, 19 nt, Artificial Sequence
  Description of Artificial Sequence: Synthetic oligonucleotide
ucuuccgcacacuuugcau

SEQ ID NO: 1078229 - RNA, 19 nt, Artificial Sequence
  Description of Artificial Sequence: Synthetic oligonucleotide
aaaucuccuguggcuaaug

SEQ ID NO: 1078230 - RNA, 19 nt, Artificial Sequence
  Description of Artificial Sequence: Synthetic oligonucleotide
gauuggaacuccaucggaa

SEQ ID NO: 1078231 - RNA, 19 nt, Artificial Sequence
  Description of Artificial Sequence: Synthetic oligonucleotide
acacgucugcugcuuuuac

SEQ ID NO: 1078232 - RNA, 19 nt, Artificial Sequence
  Description of Artificial Sequence: Synthetic oligonucleotide
aguaugacuuucauccagu

SEQ ID NO: 1078233 - RNA, 19 nt, Artificial Sequence
  Description of Artificial Sequence: Synthetic oligonucleotide
aaugcuugccaaacguuuu

SEQ ID NO: 1078234 - RNA, 19 nt, Artificial Sequence
  Description of Artificial Sequence: Synthetic oligonucleotide
uuuacguguaaagguuuuc

SEQ ID NO: 1078235 - RNA, 19 nt, Artificial Sequence
  Description of Artificial Sequence: Synthetic oligonucleotide
aaacguuuucucacaaaua

SEQ ID NO: 1078236 - RNA, 19 nt, Artificial Sequence
  Description of Artificial Sequence: Synthetic oligonucleotide
cuucgagaaggucaccguc

SEQ ID NO: 1078237 - RNA, 19 nt, Artificial Sequence
  Description of Artificial Sequence: Synthetic oligonucleotide
gcgaauucggaacauucug

SEQ ID NO: 1078238 - RNA, 19 nt, Artificial Sequence
  Description of Artificial Sequence: Synthetic oligonucleotide
gagcgaauucggaacauuc

SEQ ID NO: 1078239 - RNA, 19 nt, Artificial Sequence
  Description of Artificial Sequence: Synthetic oligonucleotide
cuccuacccagcaauugug

SEQ ID NO: 1078240 - RNA, 19 nt, Artificial Sequence
  Description of Artificial Sequence: Synthetic oligonucleotide
gucaccgucacauccugga

SEQ ID NO: 1078241 - RNA, 19 nt, Artificial Sequence
  Description of Artificial Sequence: Synthetic oligonucleotide
acgauaguuucugucaaaa

SEQ ID NO: 1078242 - RNA, 19 nt, Artificial Sequence
  Description of Artificial Sequence: Synthetic oligonucleotide
gaauagcuccuggccaggg

SEQ ID NO: 1078243 - RNA, 19 nt, Artificial Sequence
  Description of Artificial Sequence: Synthetic oligonucleotide
cguaacaccugccuggagg

SEQ ID NO: 1078244 - RNA, 19 nt, Artificial Sequence
  Description of Artificial Sequence: Synthetic oligonucleotide
gggucacccagauaaacac

SEQ ID NO: 1078245 - RNA, 19 nt, Artificial Sequence
  Description of Artificial Sequence: Synthetic oligonucleotide
cuggagugcaaugaaccug

SEQ ID NO: 1078246 - RNA, 19 nt, Artificial Sequence
  Description of Artificial Sequence: Synthetic oligonucleotide
ugcaaugaaccuggaacuc

SEQ ID NO: 1078247 - RNA, 19 nt, Artificial Sequence
  Description of Artificial Sequence: Synthetic oligonucleotide
cuagugugaacucucagau

SEQ ID NO: 1078248 - RNA, 19 nt, Artificial Sequence
  Description of Artificial Sequence: Synthetic oligonucleotide
ggaaugagcgaauucggaa

SEQ ID NO: 1078249 - RNA, 19 nt, Artificial Sequence
  Description of Artificial Sequence: Synthetic oligonucleotide
guugcaaagaguguuuccu

SEQ ID NO: 1078250 - RNA, 19 nt, Artificial Sequence
  Description of Artificial Sequence: Synthetic oligonucleotide
acucucagaugaaugagaa

SEQ ID NO: 1078251 - RNA, 19 nt, Artificial Sequence
  Description of Artificial Sequence: Synthetic oligonucleotide
ggcgguuaagugucugugg

SEQ ID NO: 1078252 - RNA, 19 nt, Artificial Sequence
  Description of Artificial Sequence: Synthetic oligonucleotide
gccguuuuaaaaguauccc

SEQ ID NO: 1078253 - RNA, 19 nt, Artificial Sequence
  Description of Artificial Sequence: Synthetic oligonucleotide
agcuguacccacaugcgca

SEQ ID NO: 1078254 - RNA, 19 nt, Artificial Sequence
  Description of Artificial Sequence: Synthetic oligonucleotide
gcgguuaagugucuguggc

SEQ ID NO: 1078255 - RNA, 19 nt, Artificial Sequence
  Description of Artificial Sequence: Synthetic oligonucleotide
acaagacgauaguuucugu

SEQ ID NO: 1078256 - RNA, 19 nt, Artificial Sequence
  Description of Artificial Sequence: Synthetic oligonucleotide
aacucuugucagaaggguu

SEQ ID NO: 1078257 - RNA, 19 nt, Artificial Sequence
  Description of Artificial Sequence: Synthetic oligonucleotide
ugugcgaggggaccauauc

SEQ ID NO: 1078258 - RNA, 19 nt, Artificial Sequence
  Description of Artificial Sequence: Synthetic oligonucleotide
aacauucugccaacaguau

SEQ ID NO: 1078259 - RNA, 19 nt, Artificial Sequence
  Description of Artificial Sequence: Synthetic oligonucleotide
aacaccugccuggaggcau

SEQ ID NO: 1078260 - RNA, 19 nt, Artificial Sequence
  Description of Artificial Sequence: Synthetic oligonucleotide
uagacaccguugccaagac

SEQ ID NO: 1078261 - RNA, 19 nt, Artificial Sequence
  Description of Artificial Sequence: Synthetic oligonucleotide
gaugaucccucugcaacuc

SEQ ID NO: 1078262 - RNA, 19 nt, Artificial Sequence
  Description of Artificial Sequence: Synthetic oligonucleotide
aguuccuuaagcaguggaa

SEQ ID NO: 1078263 - RNA, 19 nt, Artificial Sequence
  Description of Artificial Sequence: Synthetic oligonucleotide
uccguagcugggcuccuac

SEQ ID NO: 1078264 - RNA, 19 nt, Artificial Sequence
  Description of Artificial Sequence: Synthetic oligonucleotide
ucgacugaagccugagcuu

SEQ ID NO: 1078265 - RNA, 19 nt, Artificial Sequence
  Description of Artificial Sequence: Synthetic oligonucleotide
agcgaauucggaacauucu

SEQ ID NO: 1078266 - RNA, 19 nt, Artificial Sequence
  Description of Artificial Sequence: Synthetic oligonucleotide
gcucacuuaaaauacgagu

SEQ ID NO: 1078267 - RNA, 19 nt, Artificial Sequence
  Description of Artificial Sequence: Synthetic oligonucleotide
gcucaaaacuguccguagc

SEQ ID NO: 1078268 - RNA, 19 nt, Artificial Sequence
  Description of Artificial Sequence: Synthetic oligonucleotide
ucucaugucgggagagauu

SEQ ID NO: 1078269 - RNA, 19 nt, Artificial Sequence
  Description of Artificial Sequence: Synthetic oligonucleotide
ugaucccucugcaacucuu

SEQ ID NO: 1078270 - RNA, 19 nt, Artificial Sequence
  Description of Artificial Sequence: Synthetic oligonucleotide
gccuauccaaugcacauca

SEQ ID NO: 1078271 - RNA, 19 nt, Artificial Sequence
  Description of Artificial Sequence: Synthetic oligonucleotide
uugugcgaggggaccauau

SEQ ID NO: 1078272 - RNA, 19 nt, Artificial Sequence
  Description of Artificial Sequence: Synthetic oligonucleotide
uguauucccuuaugaucua

SEQ ID NO: 1078273 - RNA, 19 nt, Artificial Sequence
  Description of Artificial Sequence: Synthetic oligonucleotide
guggaaagaccaugucgac

SEQ ID NO: 1078274 - RNA, 19 nt, Artificial Sequence
  Description of Artificial Sequence: Synthetic oligonucleotide
gagaaucaucuugcccagg

SEQ ID NO: 1078275 - RNA, 19 nt, Artificial Sequence
  Description of Artificial Sequence: Synthetic oligonucleotide
auuuacacgcugagcugag

SEQ ID NO: 1078276 - RNA, 19 nt, Artificial Sequence
  Description of Artificial Sequence: Synthetic oligonucleotide
uuccgcacacuuugcauuu

SEQ ID NO: 1078277 - RNA, 19 nt, Artificial Sequence
  Description of Artificial Sequence: Synthetic oligonucleotide
gaaccaaaguauagccauc

SEQ ID NO: 1078278 - RNA, 19 nt, Artificial Sequence
  Description of Artificial Sequence: Synthetic oligonucleotide
agggucacccagauaaaca

SEQ ID NO: 1078279 - RNA, 19 nt, Artificial Sequence
  Description of Artificial Sequence: Synthetic oligonucleotide
gacgauaguuucugucaaa

SEQ ID NO: 1078280 - RNA, 19 nt, Artificial Sequence
  Description of Artificial Sequence: Synthetic oligonucleotide
aggaaugagcgaauucgga

SEQ ID NO: 1078281 - RNA, 19 nt, Artificial Sequence
  Description of Artificial Sequence: Synthetic oligonucleotide
uuacuguacgaagguguuc

SEQ ID NO: 1078282 - RNA, 19 nt, Artificial Sequence
  Description of Artificial Sequence: Synthetic oligonucleotide
acuccaucggaaggcuuuc

SEQ ID NO: 1078283 - RNA, 19 nt, Artificial Sequence
  Description of Artificial Sequence: Synthetic oligonucleotide
cacaugcgcagcuccgcag

SEQ ID NO: 1078284 - RNA, 19 nt, Artificial Sequence
  Description of Artificial Sequence: Synthetic oligonucleotide
guucuugugcgaggggacc

SEQ ID NO: 1078285 - RNA, 19 nt, Artificial Sequence
  Description of Artificial Sequence: Synthetic oligonucleotide
aguauccccaacgcaucug

SEQ ID NO: 1078286 - RNA, 19 nt, Artificial Sequence
  Description of Artificial Sequence: Synthetic oligonucleotide
cucaagccguuuuaaaagu

SEQ ID NO: 1078287 - RNA, 19 nt, Artificial Sequence
  Description of Artificial Sequence: Synthetic oligonucleotide
aacacgucugcugcuuuua

SEQ ID NO: 1078288 - RNA, 19 nt, Artificial Sequence
  Description of Artificial Sequence: Synthetic oligonucleotide
agggcgguuaagugucugu

SEQ ID NO: 1078289 - RNA, 19 nt, Artificial Sequence
  Description of Artificial Sequence: Synthetic oligonucleotide
cuguugcaaagaguguuuc

SEQ ID NO: 1078290 - RNA, 19 nt, Artificial Sequence
  Description of Artificial Sequence: Synthetic oligonucleotide
ggcucacuuaaaauacgag

SEQ ID NO: 1078291 - RNA, 19 nt, Artificial Sequence
  Description of Artificial Sequence: Synthetic oligonucleotide
acgaagguguucccuggaa

SEQ ID NO: 1078292 - RNA, 19 nt, Artificial Sequence
  Description of Artificial Sequence: Synthetic oligonucleotide
cuugacucaagccguuuua

SEQ ID NO: 1078293 - RNA, 19 nt, Artificial Sequence
  Description of Artificial Sequence: Synthetic oligonucleotide
gacugaagccugagcuucc

SEQ ID NO: 1078294 - RNA, 19 nt, Artificial Sequence
  Description of Artificial Sequence: Synthetic oligonucleotide
ugccuauccaaugcacauc

SEQ ID NO: 1078295 - RNA, 19 nt, Artificial Sequence
  Description of Artificial Sequence: Synthetic oligonucleotide
augucgacugaagccugag

SEQ ID NO: 1078296 - RNA, 19 nt, Artificial Sequence
  Description of Artificial Sequence: Synthetic oligonucleotide
caugcgcagcuccgcaggc

SEQ ID NO: 1078297 - RNA, 19 nt, Artificial Sequence
  Description of Artificial Sequence: Synthetic oligonucleotide
uuuacacgcugagcugagu

SEQ ID NO: 1078298 - RNA, 19 nt, Artificial Sequence
  Description of Artificial Sequence: Synthetic oligonucleotide
ugagcgaauucggaacauu

SEQ ID NO: 1078299 - RNA, 19 nt, Artificial Sequence
  Description of Artificial Sequence: Synthetic oligonucleotide
cuaaugagaugugaaugcu

SEQ ID NO: 1078300 - RNA, 19 nt, Artificial Sequence
  Description of Artificial Sequence: Synthetic oligonucleotide
augguagcgcacaauguua

SEQ ID NO: 1078301 - RNA, 19 nt, Artificial Sequence
  Description of Artificial Sequence: Synthetic oligonucleotide
guuuccucucaugucggga

SEQ ID NO: 1078302 - RNA, 19 nt, Artificial Sequence
  Description of Artificial Sequence: Synthetic oligonucleotide
gagcugaaugggcagcgua

SEQ ID NO: 1078303 - RNA, 19 nt, Artificial Sequence
  Description of Artificial Sequence: Synthetic oligonucleotide
gggaccauaucugugcaga

SEQ ID NO: 1078304 - RNA, 19 nt, Artificial Sequence
  Description of Artificial Sequence: Synthetic oligonucleotide
ucucagcaugguagcgcac

SEQ ID NO: 1078305 - RNA, 19 nt, Artificial Sequence
  Description of Artificial Sequence: Synthetic oligonucleotide
cuuuuacguguaaagguuu

SEQ ID NO: 1078306 - RNA, 19 nt, Artificial Sequence
  Description of Artificial Sequence: Synthetic oligonucleotide
caagccguuuuaaaaguau

SEQ ID NO: 1078307 - RNA, 19 nt, Artificial Sequence
  Description of Artificial Sequence: Synthetic oligonucleotide
gugcgaggggaccauaucu

SEQ ID NO: 1078308 - RNA, 19 nt, Artificial Sequence
  Description of Artificial Sequence: Synthetic oligonucleotide
cuccggugccuauccaaug

SEQ ID NO: 1078309 - RNA, 19 nt, Artificial Sequence
  Description of Artificial Sequence: Synthetic oligonucleotide
ggaguaugacuuucaucca

SEQ ID NO: 1078310 - RNA, 19 nt, Artificial Sequence
  Description of Artificial Sequence: Synthetic oligonucleotide
cugaaugggcagcguaaca

SEQ ID NO: 1078311 - RNA, 19 nt, Artificial Sequence
  Description of Artificial Sequence: Synthetic oligonucleotide
acgcccuuuauggggcuuc

SEQ ID NO: 1078312 - RNA, 19 nt, Artificial Sequence
  Description of Artificial Sequence: Synthetic oligonucleotide
cgauaguuucugucaaaag

SEQ ID NO: 1078313 - RNA, 19 nt, Artificial Sequence
  Description of Artificial Sequence: Synthetic oligonucleotide
agcguaacaccugccugga

SEQ ID NO: 1078314 - RNA, 19 nt, Artificial Sequence
  Description of Artificial Sequence: Synthetic oligonucleotide
gaccauaucugugcagacu

SEQ ID NO: 1078315 - RNA, 19 nt, Artificial Sequence
  Description of Artificial Sequence: Synthetic oligonucleotide
caugucgacugaagccuga

SEQ ID NO: 1078316 - RNA, 19 nt, Artificial Sequence
  Description of Artificial Sequence: Synthetic oligonucleotide
ggaaguuacaaacgccuau

SEQ ID NO: 1078317 - RNA, 19 nt, Artificial Sequence
  Description of Artificial Sequence: Synthetic oligonucleotide
gugcacuuuggaguaugac

SEQ ID NO: 1078318 - RNA, 19 nt, Artificial Sequence
  Description of Artificial Sequence: Synthetic oligonucleotide
ccauaucugugcagacugc

SEQ ID NO: 1078319 - RNA, 19 nt, Artificial Sequence
  Description of Artificial Sequence: Synthetic oligonucleotide
ggugccuauccaaugcaca

SEQ ID NO: 1078320 - RNA, 19 nt, Artificial Sequence
  Description of Artificial Sequence: Synthetic oligonucleotide
guagcgcacaauguuauuu

SEQ ID NO: 1078321 - RNA, 19 nt, Artificial Sequence
  Description of Artificial Sequence: Synthetic oligonucleotide
ucuugugcgaggggaccau

SEQ ID NO: 1078322 - RNA, 19 nt, Artificial Sequence
  Description of Artificial Sequence: Synthetic oligonucleotide
gccaagacaaucagaagcu

SEQ ID NO: 1078323 - RNA, 19 nt, Artificial Sequence
  Description of Artificial Sequence: Synthetic oligonucleotide
augagcgaauucggaacau

SEQ ID NO: 1078324 - RNA, 19 nt, Artificial Sequence
  Description of Artificial Sequence: Synthetic oligonucleotide
ggagccgccucagaguuuc

SEQ ID NO: 1078325 - RNA, 19 nt, Artificial Sequence
  Description of Artificial Sequence: Synthetic oligonucleotide
gccuaaagagcugacggaa

SEQ ID NO: 1078326 - RNA, 19 nt, Artificial Sequence
  Description of Artificial Sequence: Synthetic oligonucleotide
gcaguggaaagaccauguc

SEQ ID NO: 1078327 - RNA, 19 nt, Artificial Sequence
  Description of Artificial Sequence: Synthetic oligonucleotide
cuccaucggaaggcuuucc

SEQ ID NO: 1078328 - RNA, 19 nt, Artificial Sequence
  Description of Artificial Sequence: Synthetic oligonucleotide
cgagucaaauuggaagacc

SEQ ID NO: 1078329 - RNA, 19 nt, Artificial Sequence
  Description of Artificial Sequence: Synthetic oligonucleotide
gggcgguuaagugucugug

SEQ ID NO: 1078330 - RNA, 19 nt, Artificial Sequence
  Description of Artificial Sequence: Synthetic oligonucleotide
caccaaguucaagauuaga

SEQ ID NO: 1078331 - RNA, 19 nt, Artificial Sequence
  Description of Artificial Sequence: Synthetic oligonucleotide
ccuuaugaucuaaaaggcu

SEQ ID NO: 1078332 - RNA, 19 nt, Artificial Sequence
  Description of Artificial Sequence: Synthetic oligonucleotide
uuccuucgagaaggucacc

SEQ ID NO: 1078333 - RNA, 19 nt, Artificial Sequence
  Description of Artificial Sequence: Synthetic oligonucleotide
ccgaaccaaaguauagcca

SEQ ID NO: 1078334 - RNA, 19 nt, Artificial Sequence
  Description of Artificial Sequence: Synthetic oligonucleotide
ggcuccuacccagcaauug

SEQ ID NO: 1078335 - RNA, 19 nt, Artificial Sequence
  Description of Artificial Sequence: Synthetic oligonucleotide
guauucccuuaugaucuaa

SEQ ID NO: 1078336 - RNA, 19 nt, Artificial Sequence
  Description of Artificial Sequence: Synthetic oligonucleotide
gggaguaucuucucagcau

SEQ ID NO: 1078337 - RNA, 19 nt, Artificial Sequence
  Description of Artificial Sequence: Synthetic oligonucleotide
cagccuuucuuagugggua

SEQ ID NO: 1078338 - RNA, 19 nt, Artificial Sequence
  Description of Artificial Sequence: Synthetic oligonucleotide
ugcuugacucaagccguuu

SEQ ID NO: 1078339 - RNA, 19 nt, Artificial Sequence
  Description of Artificial Sequence: Synthetic oligonucleotide
ccguugccaagacaaucag

SEQ ID NO: 1078340 - RNA, 19 nt, Artificial Sequence
  Description of Artificial Sequence: Synthetic oligonucleotide
gggcguccgaaccaaagua

SEQ ID NO: 1078341 - RNA, 19 nt, Artificial Sequence
  Description of Artificial Sequence: Synthetic oligonucleotide
ccaagacaaucagaagcug

SEQ ID NO: 1078342 - RNA, 19 nt, Artificial Sequence
  Description of Artificial Sequence: Synthetic oligonucleotide
ccuauccaaugcacaucag

SEQ ID NO: 1078343 - RNA, 19 nt, Artificial Sequence
  Description of Artificial Sequence: Synthetic oligonucleotide
ggucacccagauaaacaca

SEQ ID NO: 1078344 - RNA, 19 nt, Artificial Sequence
  Description of Artificial Sequence: Synthetic oligonucleotide
ccaugucgacugaagccug

SEQ ID NO: 1078345 - RNA, 19 nt, Artificial Sequence
  Description of Artificial Sequence: Synthetic oligonucleotide
gcuccuacccagcaauugu

SEQ ID NO: 1078346 - RNA, 19 nt, Artificial Sequence
  Description of Artificial Sequence: Synthetic oligonucleotide
caugguagcgaagcugccu

SEQ ID NO: 1078347 - RNA, 19 nt, Artificial Sequence
  Description of Artificial Sequence: Synthetic oligonucleotide
cacgucugcugcuuuuacu

SEQ ID NO: 1078348 - RNA, 19 nt, Artificial Sequence
  Description of Artificial Sequence: Synthetic oligonucleotide
gcugacggaauagcuccug

SEQ ID NO: 1078349 - RNA, 19 nt, Artificial Sequence
  Description of Artificial Sequence: Synthetic oligonucleotide
cagggcgguuaagugucug

SEQ ID NO: 1078350 - RNA, 19 nt, Artificial Sequence
  Description of Artificial Sequence: Synthetic oligonucleotide
agcugacggaauagcuccu

SEQ ID NO: 1078351 - RNA, 19 nt, Artificial Sequence
  Description of Artificial Sequence: Synthetic oligonucleotide
ccaacaguauuuacacgcu

SEQ ID NO: 1078352 - RNA, 19 nt, Artificial Sequence
  Description of Artificial Sequence: Synthetic oligonucleotide
cuggagccgccucagaguu

SEQ ID NO: 1078353 - RNA, 19 nt, Artificial Sequence
  Description of Artificial Sequence: Synthetic oligonucleotide
cuuucuuaguggguacuuu

SEQ ID NO: 1078354 - RNA, 19 nt, Artificial Sequence
  Description of Artificial Sequence: Synthetic oligonucleotide
caaaacacgucugcugcuu

SEQ ID NO: 1078355 - RNA, 19 nt, Artificial Sequence
  Description of Artificial Sequence: Synthetic oligonucleotide
cucucaugucgggagagau

SEQ ID NO: 1078356 - RNA, 19 nt, Artificial Sequence
  Description of Artificial Sequence: Synthetic oligonucleotide
cuguacgaagguguucccu

SEQ ID NO: 1078357 - RNA, 19 nt, Artificial Sequence
  Description of Artificial Sequence: Synthetic oligonucleotide
ccguagcugggcuccuacc

SEQ ID NO: 1078358 - RNA, 19 nt, Artificial Sequence
  Description of Artificial Sequence: Synthetic oligonucleotide
cccuuuauggggcuucucu

SEQ ID NO: 1078359 - RNA, 19 nt, Artificial Sequence
  Description of Artificial Sequence: Synthetic oligonucleotide
acgcugagcugaguccaaa

SEQ ID NO: 1078360 - RNA, 19 nt, Artificial Sequence
  Description of Artificial Sequence: Synthetic oligonucleotide
ggggcguccgaaccaaagu

SEQ ID NO: 1078361 - RNA, 19 nt, Artificial Sequence
  Description of Artificial Sequence: Synthetic oligonucleotide
acccagcaauugugcacuu

SEQ ID NO: 1078362 - RNA, 19 nt, Artificial Sequence
  Description of Artificial Sequence: Synthetic oligonucleotide
cggugccuauccaaugcac

SEQ ID NO: 1078363 - RNA, 19 nt, Artificial Sequence
  Description of Artificial Sequence: Synthetic oligonucleotide
cguugccaagacaaucaga

SEQ ID NO: 1078364 - RNA, 19 nt, Artificial Sequence
  Description of Artificial Sequence: Synthetic oligonucleotide
gcgaggggaccauaucugu

SEQ ID NO: 1078365 - RNA, 19 nt, Artificial Sequence
  Description of Artificial Sequence: Synthetic oligonucleotide
gcuugacucaagccguuuu

SEQ ID NO: 1078366 - RNA, 19 nt, Artificial Sequence
  Description of Artificial Sequence: Synthetic oligonucleotide
gcguccgaaccaaaguaua

SEQ ID NO: 1078367 - RNA, 19 nt, Artificial Sequence
  Description of Artificial Sequence: Synthetic oligonucleotide
ggcguccgaaccaaaguau

SEQ ID NO: 1078368 - RNA, 19 nt, Artificial Sequence
  Description of Artificial Sequence: Synthetic oligonucleotide
ccggugccuauccaaugca

SEQ ID NO: 1078369 - RNA, 19 nt, Artificial Sequence
  Description of Artificial Sequence: Synthetic oligonucleotide
gagccgccucagaguuucc

SEQ ID NO: 1078370 - RNA, 19 nt, Artificial Sequence
  Description of Artificial Sequence: Synthetic oligonucleotide
cuugugcgaggggaccaua

SEQ ID NO: 1078371 - RNA, 19 nt, Artificial Sequence
  Description of Artificial Sequence: Synthetic oligonucleotide
cuccuggccagggcgguua

SEQ ID NO: 1078372 - RNA, 19 nt, Artificial Sequence
  Description of Artificial Sequence: Synthetic oligonucleotide
ggccggggcguccgaacca

SEQ ID NO: 1078373 - RNA, 19 nt, Artificial Sequence
  Description of Artificial Sequence: Synthetic oligonucleotide
gguagcgcacaauguuauu

SEQ ID NO: 1078374 - RNA, 19 nt, Artificial Sequence
  Description of Artificial Sequence: Synthetic oligonucleotide
ggagugcaaugaaccugga

SEQ ID NO: 1078375 - RNA, 19 nt, Artificial Sequence
  Description of Artificial Sequence: Synthetic oligonucleotide
gcauugcucuugucagggu

SEQ ID NO: 1078376 - RNA, 19 nt, Artificial Sequence
  Description of Artificial Sequence: Synthetic oligonucleotide
gcagccuuucuuagugggu

SEQ ID NO: 1078377 - RNA, 19 nt, Artificial Sequence
  Description of Artificial Sequence: Synthetic oligonucleotide
gccuuucuuaguggguacu

SEQ ID NO: 1078378 - RNA, 19 nt, Artificial Sequence
  Description of Artificial Sequence: Synthetic oligonucleotide
ccgcgccacucucagggca

SEQ ID NO: 1078379 - RNA, 19 nt, Artificial Sequence
  Description of Artificial Sequence: Synthetic oligonucleotide
gugcuugacucaagccguu

SEQ ID NO: 1078380 - RNA, 19 nt, Artificial Sequence
  Description of Artificial Sequence: Synthetic oligonucleotide
gcccuuuauggggcuucuc

SEQ ID NO: 1078381 - RNA, 19 nt, Artificial Sequence
  Description of Artificial Sequence: Synthetic oligonucleotide
gccggggcguccgaaccaa

SEQ ID NO: 1078382 - RNA, 19 nt, Artificial Sequence
  Description of Artificial Sequence: Synthetic oligonucleotide
cacgcccuuuauggggcuu

SEQ ID NO: 1078383 - RNA, 19 nt, Artificial Sequence
  Description of Artificial Sequence: Synthetic oligonucleotide
ccagggcgguuaagugucu

SEQ ID NO: 1078384 - RNA, 19 nt, Artificial Sequence
  Description of Artificial Sequence: Synthetic oligonucleotide
caccagcggcagagcuccu

SEQ ID NO: 1078385 - RNA, 19 nt, Artificial Sequence
  Description of Artificial Sequence: Synthetic oligonucleotide
gggcuccuacccagcaauu

SEQ ID NO: 1078386 - RNA, 19 nt, Artificial Sequence
  Description of Artificial Sequence: Synthetic oligonucleotide
ccggggcguccgaaccaaa

SEQ ID NO: 1078387 - RNA, 19 nt, Artificial Sequence
  Description of Artificial Sequence: Synthetic oligonucleotide
cccagcaauugugcacuuu

SEQ ID NO: 1078388 - RNA, 19 nt, Artificial Sequence
  Description of Artificial Sequence: Synthetic oligonucleotide
aacacacacacacacaccc

SEQ ID NO: 1078389 - RNA, 19 nt, Artificial Sequence
  Description of Artificial Sequence: Synthetic oligonucleotide
aacacacacacacacacgc

SEQ ID NO: 1078390 - RNA, 19 nt, Artificial Sequence
  Description of Artificial Sequence: Synthetic oligonucleotide
aggaccaucacauaaacac

SEQ ID NO: 1078391 - RNA, 19 nt, Artificial Sequence
  Description of Artificial Sequence: Synthetic oligonucleotide
ucaaacucaaacaagcccc

SEQ ID NO: 1078392 - RNA, 19 nt, Artificial Sequence
  Description of Artificial Sequence: Synthetic oligonucleotide
uuuccuagcaacaagcuca

SEQ ID NO: 1078393 - RNA, 19 nt, Artificial Sequence
  Description of Artificial Sequence: Synthetic oligonucleotide
gauaccugagccuaaagag

SEQ ID NO: 1078394 - RNA, 19 nt, Artificial Sequence
  Description of Artificial Sequence: Synthetic oligonucleotide
uuaaacuaaaucucaaucu

SEQ ID NO: 1078395 - RNA, 19 nt, Artificial Sequence
  Description of Artificial Sequence: Synthetic oligonucleotide
aaacacagaggacccaucc

SEQ ID NO: 1078396 - RNA, 19 nt, Artificial Sequence
  Description of Artificial Sequence: Synthetic oligonucleotide
aaggguagcauucucagug

SEQ ID NO: 1078397 - RNA, 19 nt, Artificial Sequence
  Description of Artificial Sequence: Synthetic oligonucleotide
agaucuagaguucagcagg

SEQ ID NO: 1078398 - RNA, 19 nt, Artificial Sequence
  Description of Artificial Sequence: Synthetic oligonucleotide
aagggugucagcccuaaac

SEQ ID NO: 1078399 - RNA, 19 nt, Artificial Sequence
  Description of Artificial Sequence: Synthetic oligonucleotide
aagagguuggcucggaagg

SEQ ID NO: 1078400 - RNA, 19 nt, Artificial Sequence
  Description of Artificial Sequence: Synthetic oligonucleotide
aguucugcugaguuuaccc

SEQ ID NO: 1078401 - RNA, 19 nt, Artificial Sequence
  Description of Artificial Sequence: Synthetic oligonucleotide
uaaagaguugcuaagcaac

SEQ ID NO: 1078402 - RNA, 19 nt, Artificial Sequence
  Description of Artificial Sequence: Synthetic oligonucleotide
aaagaucuagaguucagca

SEQ ID NO: 1078403 - RNA, 19 nt, Artificial Sequence
  Description of Artificial Sequence: Synthetic oligonucleotide
aaacuaaaucucaaucugc

SEQ ID NO: 1078404 - RNA, 19 nt, Artificial Sequence
  Description of Artificial Sequence: Synthetic oligonucleotide
gaaauugaggauaugccgg

SEQ ID NO: 1078405 - RNA, 19 nt, Artificial Sequence
  Description of Artificial Sequence: Synthetic oligonucleotide
uacacagucaagugaaggg

SEQ ID NO: 1078406 - RNA, 19 nt, Artificial Sequence
  Description of Artificial Sequence: Synthetic oligonucleotide
agaaaugcuaucccuuccc

SEQ ID NO: 1078407 - RNA, 19 nt, Artificial Sequence
  Description of Artificial Sequence: Synthetic oligonucleotide
aauucacggaugcuuuccc

SEQ ID NO: 1078408 - RNA, 19 nt, Artificial Sequence
  Description of Artificial Sequence: Synthetic oligonucleotide
uaagccccaguguagaucg

SEQ ID NO: 1078409 - RNA, 19 nt, Artificial Sequence
  Description of Artificial Sequence: Synthetic oligonucleotide
uggcuuuuaccuaucauag

SEQ ID NO: 1078410 - RNA, 19 nt, Artificial Sequence
  Description of Artificial Sequence: Synthetic oligonucleotide
aaucccagaguccaucuag

SEQ ID NO: 1078411 - RNA, 19 nt, Artificial Sequence
  Description of Artificial Sequence: Synthetic oligonucleotide
ugggaaucgggacagcucg

SEQ ID NO: 1078412 - RNA, 19 nt, Artificial Sequence
  Description of Artificial Sequence: Synthetic oligonucleotide
agaggacccauccucaagc

SEQ ID NO: 1078413 - RNA, 19 nt, Artificial Sequence
  Description of Artificial Sequence: Synthetic oligonucleotide
aaugcuaucccuucccaca

SEQ ID NO: 1078414 - RNA, 19 nt, Artificial Sequence
  Description of Artificial Sequence: Synthetic oligonucleotide
aguguagaucgucuggacc

SEQ ID NO: 1078415 - RNA, 19 nt, Artificial Sequence
  Description of Artificial Sequence: Synthetic oligonucleotide
aaaauguggaccucccucu

SEQ ID NO: 1078416 - RNA, 19 nt, Artificial Sequence
  Description of Artificial Sequence: Synthetic oligonucleotide
aaaugcuaucccuucccac

SEQ ID NO: 1078417 - RNA, 19 nt, Artificial Sequence
  Description of Artificial Sequence: Synthetic oligonucleotide
agcgcaaagaucuagaguu

SEQ ID NO: 1078418 - RNA, 19 nt, Artificial Sequence
  Description of Artificial Sequence: Synthetic oligonucleotide
auacccacggggcaggucc

SEQ ID NO: 1078419 - RNA, 19 nt, Artificial Sequence
  Description of Artificial Sequence: Synthetic oligonucleotide
ucuacaucugcauggagca

SEQ ID NO: 1078420 - RNA, 19 nt, Artificial Sequence
  Description of Artificial Sequence: Synthetic oligonucleotide
cuaugauuaaacuaaaucu

SEQ ID NO: 1078421 - RNA, 19 nt, Artificial Sequence
  Description of Artificial Sequence: Synthetic oligonucleotide
auaaacacaagagucagca

SEQ ID NO: 1078422 - RNA, 19 nt, Artificial Sequence
  Description of Artificial Sequence: Synthetic oligonucleotide
ggaaauugaggauaugccg

SEQ ID NO: 1078423 - RNA, 19 nt, Artificial Sequence
  Description of Artificial Sequence: Synthetic oligonucleotide
cacgcaaacacacacacac

SEQ ID NO: 1078424 - RNA, 19 nt, Artificial Sequence
  Description of Artificial Sequence: Synthetic oligonucleotide
aacagaucuacauuuugau

SEQ ID NO: 1078425 - RNA, 19 nt, Artificial Sequence
  Description of Artificial Sequence: Synthetic oligonucleotide
uugauaauucaaaguaugu

SEQ ID NO: 1078426 - RNA, 19 nt, Artificial Sequence
  Description of Artificial Sequence: Synthetic oligonucleotide
uugaggauaugccggaaag

SEQ ID NO: 1078427 - RNA, 19 nt, Artificial Sequence
  Description of Artificial Sequence: Synthetic oligonucleotide
ucagcccuaaacauggccc

SEQ ID NO: 1078428 - RNA, 19 nt, Artificial Sequence
  Description of Artificial Sequence: Synthetic oligonucleotide
caaacacacacacacacac

SEQ ID NO: 1078429 - RNA, 19 nt, Artificial Sequence
  Description of Artificial Sequence: Synthetic oligonucleotide
cacauuuagggucacgggg

SEQ ID NO: 1078430 - RNA, 19 nt, Artificial Sequence
  Description of Artificial Sequence: Synthetic oligonucleotide
ccaagcaucagucagauac

SEQ ID NO: 1078431 - RNA, 19 nt, Artificial Sequence
  Description of Artificial Sequence: Synthetic oligonucleotide
aagcccaguggcuuuuacc

SEQ ID NO: 1078432 - RNA, 19 nt, Artificial Sequence
  Description of Artificial Sequence: Synthetic oligonucleotide
cacccagacacucaggucg

SEQ ID NO: 1078433 - RNA, 19 nt, Artificial Sequence
  Description of Artificial Sequence: Synthetic oligonucleotide
ucucaaucugcucucacac

SEQ ID NO: 1078434 - RNA, 19 nt, Artificial Sequence
  Description of Artificial Sequence: Synthetic oligonucleotide
uagacgaaaauguggaccu

SEQ ID NO: 1078435 - RNA, 19 nt, Artificial Sequence
  Description of Artificial Sequence: Synthetic oligonucleotide
ugcuaagcaaccucaaaca

SEQ ID NO: 1078436 - RNA, 19 nt, Artificial Sequence
  Description of Artificial Sequence: Synthetic oligonucleotide
gaaaauguggaccucccuc

SEQ ID NO: 1078437 - RNA, 19 nt, Artificial Sequence
  Description of Artificial Sequence: Synthetic oligonucleotide
aaauugaggauaugccgga

SEQ ID NO: 1078438 - RNA, 19 nt, Artificial Sequence
  Description of Artificial Sequence: Synthetic oligonucleotide
cucaguggcggacaaagcg

SEQ ID NO: 1078439 - RNA, 19 nt, Artificial Sequence
  Description of Artificial Sequence: Synthetic oligonucleotide
cuagacgaaaauguggacc

SEQ ID NO: 1078440 - RNA, 19 nt, Artificial Sequence
  Description of Artificial Sequence: Synthetic oligonucleotide
agaguugcuaagcaaccuc

SEQ ID NO: 1078441 - RNA, 19 nt, Artificial Sequence
  Description of Artificial Sequence: Synthetic oligonucleotide
gaggauaugccggaaagcc

SEQ ID NO: 1078442 - RNA, 19 nt, Artificial Sequence
  Description of Artificial Sequence: Synthetic oligonucleotide
aacuaaaucucaaucugcu

SEQ ID NO: 1078443 - RNA, 19 nt, Artificial Sequence
  Description of Artificial Sequence: Synthetic oligonucleotide
ugauaauucaaaguauguc

SEQ ID NO: 1078444 - RNA, 19 nt, Artificial Sequence
  Description of Artificial Sequence: Synthetic oligonucleotide
ugcucaaaccuccagaguu

SEQ ID NO: 1078445 - RNA, 19 nt, Artificial Sequence
  Description of Artificial Sequence: Synthetic oligonucleotide
ucccacaccagaacuagag

SEQ ID NO: 1078446 - RNA, 19 nt, Artificial Sequence
  Description of Artificial Sequence: Synthetic oligonucleotide
uuacccagcuauuuccuag

SEQ ID NO: 1078447 - RNA, 19 nt, Artificial Sequence
  Description of Artificial Sequence: Synthetic oligonucleotide
ucucugucgaugaaguagu

SEQ ID NO: 1078448 - RNA, 19 nt, Artificial Sequence
  Description of Artificial Sequence: Synthetic oligonucleotide
agauaccugagccuaaaga

SEQ ID NO: 1078449 - RNA, 19 nt, Artificial Sequence
  Description of Artificial Sequence: Synthetic oligonucleotide
accuaucauaggaaaagcc

SEQ ID NO: 1078450 - RNA, 19 nt, Artificial Sequence
  Description of Artificial Sequence: Synthetic oligonucleotide
agucagauacauugccugg

SEQ ID NO: 1078451 - RNA, 19 nt, Artificial Sequence
  Description of Artificial Sequence: Synthetic oligonucleotide
aaacacacacacacacacc

SEQ ID NO: 1078452 - RNA, 19 nt, Artificial Sequence
  Description of Artificial Sequence: Synthetic oligonucleotide
ucugggaagcgugucaggg

SEQ ID NO: 1078453 - RNA, 19 nt, Artificial Sequence
  Description of Artificial Sequence: Synthetic oligonucleotide
cucgauuugggaaucccag

SEQ ID NO: 1078454 - RNA, 19 nt, Artificial Sequence
  Description of Artificial Sequence: Synthetic oligonucleotide
ucugucucgucucugccca

SEQ ID NO: 1078455 - RNA, 19 nt, Artificial Sequence
  Description of Artificial Sequence: Synthetic oligonucleotide
cuuucccaggauaagcccc

SEQ ID NO: 1078456 - RNA, 19 nt, Artificial Sequence
  Description of Artificial Sequence: Synthetic oligonucleotide
uuaggccuuacccagcuau

SEQ ID NO: 1078457 - RNA, 19 nt, Artificial Sequence
  Description of Artificial Sequence: Synthetic oligonucleotide
uguagggguaccccgagaa

SEQ ID NO: 1078458 - RNA, 19 nt, Artificial Sequence
  Description of Artificial Sequence: Synthetic oligonucleotide
ugcucucacacauaccaca

SEQ ID NO: 1078459 - RNA, 19 nt, Artificial Sequence
  Description of Artificial Sequence: Synthetic oligonucleotide
cauaccacagagauaccug

SEQ ID NO: 1078460 - RNA, 19 nt, Artificial Sequence
  Description of Artificial Sequence: Synthetic oligonucleotide
gacagagcucagcucauag

SEQ ID NO: 1078461 - RNA, 19 nt, Artificial Sequence
  Description of Artificial Sequence: Synthetic oligonucleotide
uaauucaaaguaugucuuc

SEQ ID NO: 1078462 - RNA, 19 nt, Artificial Sequence
  Description of Artificial Sequence: Synthetic oligonucleotide
aggaaaagccuggugacuc

SEQ ID NO: 1078463 - RNA, 19 nt, Artificial Sequence
  Description of Artificial Sequence: Synthetic oligonucleotide
augcuuucccaggauaagc

SEQ ID NO: 1078464 - RNA, 19 nt, Artificial Sequence
  Description of Artificial Sequence: Synthetic oligonucleotide
cagucagauacauugccug

SEQ ID NO: 1078465 - RNA, 19 nt, Artificial Sequence
  Description of Artificial Sequence: Synthetic oligonucleotide
agggaacagaucuacauuu

SEQ ID NO: 1078466 - RNA, 19 nt, Artificial Sequence
  Description of Artificial Sequence: Synthetic oligonucleotide
agaauucacggaugcuuuc

SEQ ID NO: 1078467 - RNA, 19 nt, Artificial Sequence
  Description of Artificial Sequence: Synthetic oligonucleotide
cucgagaauucacggaugc

SEQ ID NO: 1078468 - RNA, 19 nt, Artificial Sequence
  Description of Artificial Sequence: Synthetic oligonucleotide
aaacacacacacacacacg

SEQ ID NO: 1078469 - RNA, 19 nt, Artificial Sequence
  Description of Artificial Sequence: Synthetic oligonucleotide
cuacacagucaagugaagg

SEQ ID NO: 1078470 - RNA, 19 nt, Artificial Sequence
  Description of Artificial Sequence: Synthetic oligonucleotide
gucgguacagaagagguug

SEQ ID NO: 1078471 - RNA, 19 nt, Artificial Sequence
  Description of Artificial Sequence: Synthetic oligonucleotide
aguggugugggcauaaaca

SEQ ID NO: 1078472 - RNA, 19 nt, Artificial Sequence
  Description of Artificial Sequence: Synthetic oligonucleotide
aaauguggaccucccucug

SEQ ID NO: 1078473 - RNA, 19 nt, Artificial Sequence
  Description of Artificial Sequence: Synthetic oligonucleotide
auaccacagagauaccuga

SEQ ID NO: 1078474 - RNA, 19 nt, Artificial Sequence
  Description of Artificial Sequence: Synthetic oligonucleotide
gacgaaaauguggaccucc

SEQ ID NO: 1078475 - RNA, 19 nt, Artificial Sequence
  Description of Artificial Sequence: Synthetic oligonucleotide
acucugucucgucucugcc

SEQ ID NO: 1078476 - RNA, 19 nt, Artificial Sequence
  Description of Artificial Sequence: Synthetic oligonucleotide
agcaacaagcucaugguug

SEQ ID NO: 1078477 - RNA, 19 nt, Artificial Sequence
  Description of Artificial Sequence: Synthetic oligonucleotide
ucuacacagucaagugaag

SEQ ID NO: 1078478 - RNA, 19 nt, Artificial Sequence
  Description of Artificial Sequence: Synthetic oligonucleotide
gaauucacggaugcuuucc

SEQ ID NO: 1078479 - RNA, 19 nt, Artificial Sequence
  Description of Artificial Sequence: Synthetic oligonucleotide
agccuuaggccuuacccag

SEQ ID NO: 1078480 - RNA, 19 nt, Artificial Sequence
  Description of Artificial Sequence: Synthetic oligonucleotide
ucacggaugcuuucccagg

SEQ ID NO: 1078481 - RNA, 19 nt, Artificial Sequence
  Description of Artificial Sequence: Synthetic oligonucleotide
uagggguaccccgagaagc

SEQ ID NO: 1078482 - RNA, 19 nt, Artificial Sequence
  Description of Artificial Sequence: Synthetic oligonucleotide
guggugugggcauaaacac

SEQ ID NO: 1078483 - RNA, 19 nt, Artificial Sequence
  Description of Artificial Sequence: Synthetic oligonucleotide
guaguggccaucuccuugc

SEQ ID NO: 1078484 - RNA, 19 nt, Artificial Sequence
  Description of Artificial Sequence: Synthetic oligonucleotide
aagccuggugacucaaacu

SEQ ID NO: 1078485 - RNA, 19 nt, Artificial Sequence
  Description of Artificial Sequence: Synthetic oligonucleotide
caggcucgagaauucacgg

SEQ ID NO: 1078486 - RNA, 19 nt, Artificial Sequence
  Description of Artificial Sequence: Synthetic oligonucleotide
agguaggcgcguuugccac

SEQ ID NO: 1078487 - RNA, 19 nt, Artificial Sequence
  Description of Artificial Sequence: Synthetic oligonucleotide
ucuagggaacagaucuaca

SEQ ID NO: 1078488 - RNA, 19 nt, Artificial Sequence
  Description of Artificial Sequence: Synthetic oligonucleotide
cacucuagacgaaaaugug

SEQ ID NO: 1078489 - RNA, 19 nt, Artificial Sequence
  Description of Artificial Sequence: Synthetic oligonucleotide
uaucccuucccacauccuc

SEQ ID NO: 1078490 - RNA, 19 nt, Artificial Sequence
  Description of Artificial Sequence: Synthetic oligonucleotide
caagaucacagaaggacca

SEQ ID NO: 1078491 - RNA, 19 nt, Artificial Sequence
  Description of Artificial Sequence: Synthetic oligonucleotide
acacccuaugauuaaacua

SEQ ID NO: 1078492 - RNA, 19 nt, Artificial Sequence
  Description of Artificial Sequence: Synthetic oligonucleotide
gugggcauaaacacacacg

SEQ ID NO: 1078493 - RNA, 19 nt, Artificial Sequence
  Description of Artificial Sequence: Synthetic oligonucleotide
ccagcuauuuccuagcaac

SEQ ID NO: 1078494 - RNA, 19 nt, Artificial Sequence
  Description of Artificial Sequence: Synthetic oligonucleotide
acggggcagguccagacgg

SEQ ID NO: 1078495 - RNA, 19 nt, Artificial Sequence
  Description of Artificial Sequence: Synthetic oligonucleotide
acaaagcgcaaagaucuag

SEQ ID NO: 1078496 - RNA, 19 nt, Artificial Sequence
  Description of Artificial Sequence: Synthetic oligonucleotide
ucuagacgaaaauguggac

SEQ ID NO: 1078497 - RNA, 19 nt, Artificial Sequence
  Description of Artificial Sequence: Synthetic oligonucleotide
uuuagggucacggggcccc

SEQ ID NO: 1078498 - RNA, 19 nt, Artificial Sequence
  Description of Artificial Sequence: Synthetic oligonucleotide
gacgcagcagcauucuuuc

SEQ ID NO: 1078499 - RNA, 19 nt, Artificial Sequence
  Description of Artificial Sequence: Synthetic oligonucleotide
gagccuaaagaguugcuaa

SEQ ID NO: 1078500 - RNA, 19 nt, Artificial Sequence
  Description of Artificial Sequence: Synthetic oligonucleotide
auaagccccaguguagauc

SEQ ID NO: 1078501 - RNA, 19 nt, Artificial Sequence
  Description of Artificial Sequence: Synthetic oligonucleotide
uaggcuccagucagguggg

SEQ ID NO: 1078502 - RNA, 19 nt, Artificial Sequence
  Description of Artificial Sequence: Synthetic oligonucleotide
guggcuuuuaccuaucaua

SEQ ID NO: 1078503 - RNA, 19 nt, Artificial Sequence
  Description of Artificial Sequence: Synthetic oligonucleotide
agcucauaguggugugggc

SEQ ID NO: 1078504 - RNA, 19 nt, Artificial Sequence
  Description of Artificial Sequence: Synthetic oligonucleotide
aagaguugcuaagcaaccu

SEQ ID NO: 1078505 - RNA, 19 nt, Artificial Sequence
  Description of Artificial Sequence: Synthetic oligonucleotide
ucuccaaugugguggaaua

SEQ ID NO: 1078506 - RNA, 19 nt, Artificial Sequence
  Description of Artificial Sequence: Synthetic oligonucleotide
acacacacacacccuauga

SEQ ID NO: 1078507 - RNA, 19 nt, Artificial Sequence
  Description of Artificial Sequence: Synthetic oligonucleotide
ggcauaaacacacacgcaa

SEQ ID NO: 1078508 - RNA, 19 nt, Artificial Sequence
  Description of Artificial Sequence: Synthetic oligonucleotide
acgaaaauguggaccuccc

SEQ ID NO: 1078509 - RNA, 19 nt, Artificial Sequence
  Description of Artificial Sequence: Synthetic oligonucleotide
acauaccacagagauaccu

SEQ ID NO: 1078510 - RNA, 19 nt, Artificial Sequence
  Description of Artificial Sequence: Synthetic oligonucleotide
ugaggauaugccggaaagc

SEQ ID NO: 1078511 - RNA, 19 nt, Artificial Sequence
  Description of Artificial Sequence: Synthetic oligonucleotide
ucuccauacccacggggca

SEQ ID NO: 1078512 - RNA, 19 nt, Artificial Sequence
  Description of Artificial Sequence: Synthetic oligonucleotide
uggcggacaaagcgcaaag

SEQ ID NO: 1078513 - RNA, 19 nt, Artificial Sequence
  Description of Artificial Sequence: Synthetic oligonucleotide
ucgauuugggaaucccaga

SEQ ID NO: 1078514 - RNA, 19 nt, Artificial Sequence
  Description of Artificial Sequence: Synthetic oligonucleotide
cuaaagaguugcuaagcaa

SEQ ID NO: 1078515 - RNA, 19 nt, Artificial Sequence
  Description of Artificial Sequence: Synthetic oligonucleotide
gaaaugcuaucccuuccca

SEQ ID NO: 1078516 - RNA, 19 nt, Artificial Sequence
  Description of Artificial Sequence: Synthetic oligonucleotide
ugccuggcaagucuaggga

SEQ ID NO: 1078517 - RNA, 19 nt, Artificial Sequence
  Description of Artificial Sequence: Synthetic oligonucleotide
ucaggucgguacagaagag

SEQ ID NO: 1078518 - RNA, 19 nt, Artificial Sequence
  Description of Artificial Sequence: Synthetic oligonucleotide
uacauaguggugugggcau

SEQ ID NO: 1078519 - RNA, 19 nt, Artificial Sequence
  Description of Artificial Sequence: Synthetic oligonucleotide
ccaagaucacagaaggacc

SEQ ID NO: 1078520 - RNA, 19 nt, Artificial Sequence
  Description of Artificial Sequence: Synthetic oligonucleotide
guggaauauaguguucccc

SEQ ID NO: 1078521 - RNA, 19 nt, Artificial Sequence
  Description of Artificial Sequence: Synthetic oligonucleotide
cagacacucaggucgguac

SEQ ID NO: 1078522 - RNA, 19 nt, Artificial Sequence
  Description of Artificial Sequence: Synthetic oligonucleotide
ccauccucaagcaagagca

SEQ ID NO: 1078523 - RNA, 19 nt, Artificial Sequence
  Description of Artificial Sequence: Synthetic oligonucleotide
acuggccacaccaaaucgg

SEQ ID NO: 1078524 - RNA, 19 nt, Artificial Sequence
  Description of Artificial Sequence: Synthetic oligonucleotide
auugaggauaugccggaaa

SEQ ID NO: 1078525 - RNA, 19 nt, Artificial Sequence
  Description of Artificial Sequence: Synthetic oligonucleotide
uaccccgagaagcuuccag

SEQ ID NO: 1078526 - RNA, 19 nt, Artificial Sequence
  Description of Artificial Sequence: Synthetic oligonucleotide
cauuuagggucacggggcc

SEQ ID NO: 1078527 - RNA, 19 nt, Artificial Sequence
  Description of Artificial Sequence: Synthetic oligonucleotide
gucagcccuaaacauggcc

SEQ ID NO: 1078528 - RNA, 19 nt, Artificial Sequence
  Description of Artificial Sequence: Synthetic oligonucleotide
agaucacagaaggaccauc

SEQ ID NO: 1078529 - RNA, 19 nt, Artificial Sequence
  Description of Artificial Sequence: Synthetic oligonucleotide
agagucagcaacacugaug

SEQ ID NO: 1078530 - RNA, 19 nt, Artificial Sequence
  Description of Artificial Sequence: Synthetic oligonucleotide
gaccaucacauaaacacaa

SEQ ID NO: 1078531 - RNA, 19 nt, Artificial Sequence
  Description of Artificial Sequence: Synthetic oligonucleotide
ucgucuggaccacucuuga

SEQ ID NO: 1078532 - RNA, 19 nt, Artificial Sequence
  Description of Artificial Sequence: Synthetic oligonucleotide
gaggggccggaucugguag

SEQ ID NO: 1078533 - RNA, 19 nt, Artificial Sequence
  Description of Artificial Sequence: Synthetic oligonucleotide
cacacacacacacgcaaac

SEQ ID NO: 1078534 - RNA, 19 nt, Artificial Sequence
  Description of Artificial Sequence: Synthetic oligonucleotide
ccaaugugguggaauauag

SEQ ID NO: 1078535 - RNA, 19 nt, Artificial Sequence
  Description of Artificial Sequence: Synthetic oligonucleotide
gccaagaucacagaaggac

SEQ ID NO: 1078536 - RNA, 19 nt, Artificial Sequence
  Description of Artificial Sequence: Synthetic oligonucleotide
caaagcgcaaagaucuaga

SEQ ID NO: 1078537 - RNA, 19 nt, Artificial Sequence
  Description of Artificial Sequence: Synthetic oligonucleotide
acagucaagugaaggguag

SEQ ID NO: 1078538 - RNA, 19 nt, Artificial Sequence
  Description of Artificial Sequence: Synthetic oligonucleotide
ggaucccugccucucauag

SEQ ID NO: 1078539 - RNA, 19 nt, Artificial Sequence
  Description of Artificial Sequence: Synthetic oligonucleotide
ugagccuaaagaguugcua

SEQ ID NO: 1078540 - RNA, 19 nt, Artificial Sequence
  Description of Artificial Sequence: Synthetic oligonucleotide
cagccucugccuuaagaag

SEQ ID NO: 1078541 - RNA, 19 nt, Artificial Sequence
  Description of Artificial Sequence: Synthetic oligonucleotide
cucugucucgucucugccc

SEQ ID NO: 1078542 - RNA, 19 nt, Artificial Sequence
  Description of Artificial Sequence: Synthetic oligonucleotide
guuucuccauacccacggg

SEQ ID NO: 1078543 - RNA, 19 nt, Artificial Sequence
  Description of Artificial Sequence: Synthetic oligonucleotide
ugugggccccuuccgagca

SEQ ID NO: 1078544 - RNA, 19 nt, Artificial Sequence
  Description of Artificial Sequence: Synthetic oligonucleotide
gaguugcuaagcaaccuca

SEQ ID NO: 1078545 - RNA, 19 nt, Artificial Sequence
  Description of Artificial Sequence: Synthetic oligonucleotide
auacauugccuggcaaguc

SEQ ID NO: 1078546 - RNA, 19 nt, Artificial Sequence
  Description of Artificial Sequence: Synthetic oligonucleotide
ucccaacucugucucgucu

SEQ ID NO: 1078547 - RNA, 19 nt, Artificial Sequence
  Description of Artificial Sequence: Synthetic oligonucleotide
auucacggaugcuuuccca

SEQ ID NO: 1078548 - RNA, 19 nt, Artificial Sequence
  Description of Artificial Sequence: Synthetic oligonucleotide
caagucuagggaacagauc

SEQ ID NO: 1078549 - RNA, 19 nt, Artificial Sequence
  Description of Artificial Sequence: Synthetic oligonucleotide
caggucgguacagaagagg

SEQ ID NO: 1078550 - RNA, 19 nt, Artificial Sequence
  Description of Artificial Sequence: Synthetic oligonucleotide
aaggaccaucacauaaaca

SEQ ID NO: 1078551 - RNA, 19 nt, Artificial Sequence
  Description of Artificial Sequence: Synthetic oligonucleotide
auaugccggaaagccuugc

SEQ ID NO: 1078552 - RNA, 19 nt, Artificial Sequence
  Description of Artificial Sequence: Synthetic oligonucleotide
acaccaaaucggcugcgca

SEQ ID NO: 1078553 - RNA, 19 nt, Artificial Sequence
  Description of Artificial Sequence: Synthetic oligonucleotide
cuacauaguggugugggca

SEQ ID NO: 1078554 - RNA, 19 nt, Artificial Sequence
  Description of Artificial Sequence: Synthetic oligonucleotide
accaaaucggcugcgcaug

SEQ ID NO: 1078555 - RNA, 19 nt, Artificial Sequence
  Description of Artificial Sequence: Synthetic oligonucleotide
agacuggcugggauaaggg

SEQ ID NO: 1078556 - RNA, 19 nt, Artificial Sequence
  Description of Artificial Sequence: Synthetic oligonucleotide
cucaagcaagagcaggcuc

SEQ ID NO: 1078557 - RNA, 19 nt, Artificial Sequence
  Description of Artificial Sequence: Synthetic oligonucleotide
gaucccugccucucauagc

SEQ ID NO: 1078558 - RNA, 19 nt, Artificial Sequence
  Description of Artificial Sequence: Synthetic oligonucleotide
accccgagaagcuuccagu

SEQ ID NO: 1078559 - RNA, 19 nt, Artificial Sequence
  Description of Artificial Sequence: Synthetic oligonucleotide
caucuaggcuccagucagg

SEQ ID NO: 1078560 - RNA, 19 nt, Artificial Sequence
  Description of Artificial Sequence: Synthetic oligonucleotide
aggauaagccccaguguag

SEQ ID NO: 1078561 - RNA, 19 nt, Artificial Sequence
  Description of Artificial Sequence: Synthetic oligonucleotide
guucccgaagggcauccag

SEQ ID NO: 1078562 - RNA, 19 nt, Artificial Sequence
  Description of Artificial Sequence: Synthetic oligonucleotide
ccccuaaacacagaggacc

SEQ ID NO: 1078563 - RNA, 19 nt, Artificial Sequence
  Description of Artificial Sequence: Synthetic oligonucleotide
gguagcauucucaguggcg

SEQ ID NO: 1078564 - RNA, 19 nt, Artificial Sequence
  Description of Artificial Sequence: Synthetic oligonucleotide
accucucuccgaucuuccg

SEQ ID NO: 1078565 - RNA, 19 nt, Artificial Sequence
  Description of Artificial Sequence: Synthetic oligonucleotide
ugucucgucucugcccagg

SEQ ID NO: 1078566 - RNA, 19 nt, Artificial Sequence
  Description of Artificial Sequence: Synthetic oligonucleotide
cauugccuggcaagucuag

SEQ ID NO: 1078567 - RNA, 19 nt, Artificial Sequence
  Description of Artificial Sequence: Synthetic oligonucleotide
acaucuacaucugcaugga

SEQ ID NO: 1078568 - RNA, 19 nt, Artificial Sequence
  Description of Artificial Sequence: Synthetic oligonucleotide
cugcgcauggcacccagac

SEQ ID NO: 1078569 - RNA, 19 nt, Artificial Sequence
  Description of Artificial Sequence: Synthetic oligonucleotide
cauccucaagcaagagcag

SEQ ID NO: 1078570 - RNA, 19 nt, Artificial Sequence
  Description of Artificial Sequence: Synthetic oligonucleotide
aauugaggauaugccggaa

SEQ ID NO: 1078571 - RNA, 19 nt, Artificial Sequence
  Description of Artificial Sequence: Synthetic oligonucleotide
caagcaucagucagauaca

SEQ ID NO: 1078572 - RNA, 19 nt, Artificial Sequence
  Description of Artificial Sequence: Synthetic oligonucleotide
guagggguaccccgagaag

SEQ ID NO: 1078573 - RNA, 19 nt, Artificial Sequence
  Description of Artificial Sequence: Synthetic oligonucleotide
uaagcccaguggcuuuuac

SEQ ID NO: 1078574 - RNA, 19 nt, Artificial Sequence
  Description of Artificial Sequence: Synthetic oligonucleotide
ucgggagagccaucagccc

SEQ ID NO: 1078575 - RNA, 19 nt, Artificial Sequence
  Description of Artificial Sequence: Synthetic oligonucleotide
cuagggaacagaucuacau

SEQ ID NO: 1078576 - RNA, 19 nt, Artificial Sequence
  Description of Artificial Sequence: Synthetic oligonucleotide
gccuacauagugguguggg

SEQ ID NO: 1078577 - RNA, 19 nt, Artificial Sequence
  Description of Artificial Sequence: Synthetic oligonucleotide
agcuauuuccuagcaacaa

SEQ ID NO: 1078578 - RNA, 19 nt, Artificial Sequence
  Description of Artificial Sequence: Synthetic oligonucleotide
ucgggacagcucgauuugg

SEQ ID NO: 1078579 - RNA, 19 nt, Artificial Sequence
  Description of Artificial Sequence: Synthetic oligonucleotide
gacagcucgauuugggaau

SEQ ID NO: 1078580 - RNA, 19 nt, Artificial Sequence
  Description of Artificial Sequence: Synthetic oligonucleotide
acaccccuaaacacagagg

SEQ ID NO: 1078581 - RNA, 19 nt, Artificial Sequence
  Description of Artificial Sequence: Synthetic oligonucleotide
guugcuaagcaaccucaaa

SEQ ID NO: 1078582 - RNA, 19 nt, Artificial Sequence
  Description of Artificial Sequence: Synthetic oligonucleotide
cacacacacacacccuaug

SEQ ID NO: 1078583 - RNA, 19 nt, Artificial Sequence
  Description of Artificial Sequence: Synthetic oligonucleotide
gcguuugccaccucucucc

SEQ ID NO: 1078584 - RNA, 19 nt, Artificial Sequence
  Description of Artificial Sequence: Synthetic oligonucleotide
cugggaaucgggacagcuc

SEQ ID NO: 1078585 - RNA, 19 nt, Artificial Sequence
  Description of Artificial Sequence: Synthetic oligonucleotide
cacucagggacccagaaau

SEQ ID NO: 1078586 - RNA, 19 nt, Artificial Sequence
  Description of Artificial Sequence: Synthetic oligonucleotide
cuggaccacucuugagucc

SEQ ID NO: 1078587 - RNA, 19 nt, Artificial Sequence
  Description of Artificial Sequence: Synthetic oligonucleotide
cacacacacacacacgcaa

SEQ ID NO: 1078588 - RNA, 19 nt, Artificial Sequence
  Description of Artificial Sequence: Synthetic oligonucleotide
caucuacaucugcauggag

SEQ ID NO: 1078589 - RNA, 19 nt, Artificial Sequence
  Description of Artificial Sequence: Synthetic oligonucleotide
cccagcuaagcccaguggc

SEQ ID NO: 1078590 - RNA, 19 nt, Artificial Sequence
  Description of Artificial Sequence: Synthetic oligonucleotide
cugccuacauaguggugug

SEQ ID NO: 1078591 - RNA, 19 nt, Artificial Sequence
  Description of Artificial Sequence: Synthetic oligonucleotide
guggugugggccccuuccg

SEQ ID NO: 1078592 - RNA, 19 nt, Artificial Sequence
  Description of Artificial Sequence: Synthetic oligonucleotide
gaguucugcugaguuuacc

SEQ ID NO: 1078593 - RNA, 19 nt, Artificial Sequence
  Description of Artificial Sequence: Synthetic oligonucleotide
acacacacacacgcaaaca

SEQ ID NO: 1078594 - RNA, 19 nt, Artificial Sequence
  Description of Artificial Sequence: Synthetic oligonucleotide
gagguuggcucggaaggug

SEQ ID NO: 1078595 - RNA, 19 nt, Artificial Sequence
  Description of Artificial Sequence: Synthetic oligonucleotide
aucuagaguucagcagguc

SEQ ID NO: 1078596 - RNA, 19 nt, Artificial Sequence
  Description of Artificial Sequence: Synthetic oligonucleotide
augcuaucccuucccacau

SEQ ID NO: 1078597 - RNA, 19 nt, Artificial Sequence
  Description of Artificial Sequence: Synthetic oligonucleotide
aggcucgagaauucacgga

SEQ ID NO: 1078598 - RNA, 19 nt, Artificial Sequence
  Description of Artificial Sequence: Synthetic oligonucleotide
aucgucuggaccacucuug

SEQ ID NO: 1078599 - RNA, 19 nt, Artificial Sequence
  Description of Artificial Sequence: Synthetic oligonucleotide
cagccuuaggccuuaccca

SEQ ID NO: 1078600 - RNA, 19 nt, Artificial Sequence
  Description of Artificial Sequence: Synthetic oligonucleotide
cgcaaacacacacacacac

SEQ ID NO: 1078601 - RNA, 19 nt, Artificial Sequence
  Description of Artificial Sequence: Synthetic oligonucleotide
ugccuacauaguggugugg

SEQ ID NO: 1078602 - RNA, 19 nt, Artificial Sequence
  Description of Artificial Sequence: Synthetic oligonucleotide
cauccacucagggacccag

SEQ ID NO: 1078603 - RNA, 19 nt, Artificial Sequence
  Description of Artificial Sequence: Synthetic oligonucleotide
agacgaaaauguggaccuc

SEQ ID NO: 1078604 - RNA, 19 nt, Artificial Sequence
  Description of Artificial Sequence: Synthetic oligonucleotide
cagcuauuuccuagcaaca

SEQ ID NO: 1078605 - RNA, 19 nt, Artificial Sequence
  Description of Artificial Sequence: Synthetic oligonucleotide
gucugggaagcgugucagg

SEQ ID NO: 1078606 - RNA, 19 nt, Artificial Sequence
  Description of Artificial Sequence: Synthetic oligonucleotide
aggauaugccggaaagccu

SEQ ID NO: 1078607 - RNA, 19 nt, Artificial Sequence
  Description of Artificial Sequence: Synthetic oligonucleotide
cagucaagugaaggguagc

SEQ ID NO: 1078608 - RNA, 19 nt, Artificial Sequence
  Description of Artificial Sequence: Synthetic oligonucleotide
uccugccuacauaguggug

SEQ ID NO: 1078609 - RNA, 19 nt, Artificial Sequence
  Description of Artificial Sequence: Synthetic oligonucleotide
cacggggcagguccagacg

SEQ ID NO: 1078610 - RNA, 19 nt, Artificial Sequence
  Description of Artificial Sequence: Synthetic oligonucleotide
cuccauacccacggggcag

SEQ ID NO: 1078611 - RNA, 19 nt, Artificial Sequence
  Description of Artificial Sequence: Synthetic oligonucleotide
agagauaccugagccuaaa

SEQ ID NO: 1078612 - RNA, 19 nt, Artificial Sequence
  Description of Artificial Sequence: Synthetic oligonucleotide
acccagcuauuuccuagca

SEQ ID NO: 1078613 - RNA, 19 nt, Artificial Sequence
  Description of Artificial Sequence: Synthetic oligonucleotide
cuugcggguuggagacugg

SEQ ID NO: 1078614 - RNA, 19 nt, Artificial Sequence
  Description of Artificial Sequence: Synthetic oligonucleotide
cucugucgaugaaguagug

SEQ ID NO: 1078615 - RNA, 19 nt, Artificial Sequence
  Description of Artificial Sequence: Synthetic oligonucleotide
agagguuggcucggaaggu

SEQ ID NO: 1078616 - RNA, 19 nt, Artificial Sequence
  Description of Artificial Sequence: Synthetic oligonucleotide
ccucucuccgaucuuccgg

SEQ ID NO: 1078617 - RNA, 19 nt, Artificial Sequence
  Description of Artificial Sequence: Synthetic oligonucleotide
gcucggaagguguccaccc

SEQ ID NO: 1078618 - RNA, 19 nt, Artificial Sequence
  Description of Artificial Sequence: Synthetic oligonucleotide
cccacucuagacgaaaaug

SEQ ID NO: 1078619 - RNA, 19 nt, Artificial Sequence
  Description of Artificial Sequence: Synthetic oligonucleotide
cacaccaaaucggcugcgc

SEQ ID NO: 1078620 - RNA, 19 nt, Artificial Sequence
  Description of Artificial Sequence: Synthetic oligonucleotide
gccccagucuuucauacuc

SEQ ID NO: 1078621 - RNA, 19 nt, Artificial Sequence
  Description of Artificial Sequence: Synthetic oligonucleotide
gguguagggguaccccgag

SEQ ID NO: 1078622 - RNA, 19 nt, Artificial Sequence
  Description of Artificial Sequence: Synthetic oligonucleotide
ccuacauaguggugugggc

SEQ ID NO: 1078623 - RNA, 19 nt, Artificial Sequence
  Description of Artificial Sequence: Synthetic oligonucleotide
cagacggccgagccucagg

SEQ ID NO: 1078624 - RNA, 19 nt, Artificial Sequence
  Description of Artificial Sequence: Synthetic oligonucleotide
ggacagcucgauuugggaa

SEQ ID NO: 1078625 - RNA, 19 nt, Artificial Sequence
  Description of Artificial Sequence: Synthetic oligonucleotide
cacacacacacacacccua

SEQ ID NO: 1078626 - RNA, 19 nt, Artificial Sequence
  Description of Artificial Sequence: Synthetic oligonucleotide
guccagacggccgagccuc

SEQ ID NO: 1078627 - RNA, 19 nt, Artificial Sequence
  Description of Artificial Sequence: Synthetic oligonucleotide
ggguagcauucucaguggc

SEQ ID NO: 1078628 - RNA, 19 nt, Artificial Sequence
  Description of Artificial Sequence: Synthetic oligonucleotide
ugcuaucccuucccacauc

SEQ ID NO: 1078629 - RNA, 19 nt, Artificial Sequence
  Description of Artificial Sequence: Synthetic oligonucleotide
caaacucaaacaagccccu

SEQ ID NO: 1078630 - RNA, 19 nt, Artificial Sequence
  Description of Artificial Sequence: Synthetic oligonucleotide
cacacccuaugauuaaacu

SEQ ID NO: 1078631 - RNA, 19 nt, Artificial Sequence
  Description of Artificial Sequence: Synthetic oligonucleotide
cgagccucaggaaauugag

SEQ ID NO: 1078632 - RNA, 19 nt, Artificial Sequence
  Description of Artificial Sequence: Synthetic oligonucleotide
gcucaugguugucucagca

SEQ ID NO: 1078633 - RNA, 19 nt, Artificial Sequence
  Description of Artificial Sequence: Synthetic oligonucleotide
aggcgcguuugccaccucu

SEQ ID NO: 1078634 - RNA, 19 nt, Artificial Sequence
  Description of Artificial Sequence: Synthetic oligonucleotide
ccagaacuagagucuucgg

SEQ ID NO: 1078635 - RNA, 19 nt, Artificial Sequence
  Description of Artificial Sequence: Synthetic oligonucleotide
caagcucaugguugucuca

SEQ ID NO: 1078636 - RNA, 19 nt, Artificial Sequence
  Description of Artificial Sequence: Synthetic oligonucleotide
gaucuagaguucagcaggu

SEQ ID NO: 1078637 - RNA, 19 nt, Artificial Sequence
  Description of Artificial Sequence: Synthetic oligonucleotide
gaaucccagaguccaucua

SEQ ID NO: 1078638 - RNA, 19 nt, Artificial Sequence
  Description of Artificial Sequence: Synthetic oligonucleotide
gucuucgggagagccauca

SEQ ID NO: 1078639 - RNA, 19 nt, Artificial Sequence
  Description of Artificial Sequence: Synthetic oligonucleotide
gagaauucacggaugcuuu

SEQ ID NO: 1078640 - RNA, 19 nt, Artificial Sequence
  Description of Artificial Sequence: Synthetic oligonucleotide
cuagagucuucgggagagc

SEQ ID NO: 1078641 - RNA, 19 nt, Artificial Sequence
  Description of Artificial Sequence: Synthetic oligonucleotide
cacggaugcuuucccagga

SEQ ID NO: 1078642 - RNA, 19 nt, Artificial Sequence
  Description of Artificial Sequence: Synthetic oligonucleotide
acagcgguugcagccccag

SEQ ID NO: 1078643 - RNA, 19 nt, Artificial Sequence
  Description of Artificial Sequence: Synthetic oligonucleotide
cacucaggucgguacagaa

SEQ ID NO: 1078644 - RNA, 19 nt, Artificial Sequence
  Description of Artificial Sequence: Synthetic oligonucleotide
ggauaagccccaguguaga

SEQ ID NO: 1078645 - RNA, 19 nt, Artificial Sequence
  Description of Artificial Sequence: Synthetic oligonucleotide
acggaugcuuucccaggau

SEQ ID NO: 1078646 - RNA, 19 nt, Artificial Sequence
  Description of Artificial Sequence: Synthetic oligonucleotide
agcuaagcccaguggcuuu

SEQ ID NO: 1078647 - RNA, 19 nt, Artificial Sequence
  Description of Artificial Sequence: Synthetic oligonucleotide
caccagaacuagagucuuc

SEQ ID NO: 1078648 - RNA, 19 nt, Artificial Sequence
  Description of Artificial Sequence: Synthetic oligonucleotide
acacacacacacacacgca

SEQ ID NO: 1078649 - RNA, 19 nt, Artificial Sequence
  Description of Artificial Sequence: Synthetic oligonucleotide
caguucccgaagggcaucc

SEQ ID NO: 1078650 - RNA, 19 nt, Artificial Sequence
  Description of Artificial Sequence: Synthetic oligonucleotide
ggauaagggugucagcccu

SEQ ID NO: 1078651 - RNA, 19 nt, Artificial Sequence
  Description of Artificial Sequence: Synthetic oligonucleotide
ccacucuagacgaaaaugu

SEQ ID NO: 1078652 - RNA, 19 nt, Artificial Sequence
  Description of Artificial Sequence: Synthetic oligonucleotide
gauaagccccaguguagau

SEQ ID NO: 1078653 - RNA, 19 nt, Artificial Sequence
  Description of Artificial Sequence: Synthetic oligonucleotide
cuuacccagcuauuuccua

SEQ ID NO: 1078654 - RNA, 19 nt, Artificial Sequence
  Description of Artificial Sequence: Synthetic oligonucleotide
gcaacaagcucaugguugu

SEQ ID NO: 1078655 - RNA, 19 nt, Artificial Sequence
  Description of Artificial Sequence: Synthetic oligonucleotide
acacacacacacacacccu

SEQ ID NO: 1078656 - RNA, 19 nt, Artificial Sequence
  Description of Artificial Sequence: Synthetic oligonucleotide
acacacacacacacgcaaa

SEQ ID NO: 1078657 - RNA, 19 nt, Artificial Sequence
  Description of Artificial Sequence: Synthetic oligonucleotide
cagggacccagaaaugcua

SEQ ID NO: 1078658 - RNA, 19 nt, Artificial Sequence
  Description of Artificial Sequence: Synthetic oligonucleotide
gaagggcauccaggagggg

SEQ ID NO: 1078659 - RNA, 19 nt, Artificial Sequence
  Description of Artificial Sequence: Synthetic oligonucleotide
cagggauccaagcaucagu

SEQ ID NO: 1078660 - RNA, 19 nt, Artificial Sequence
  Description of Artificial Sequence: Synthetic oligonucleotide
gcccagcuaagcccagugg

SEQ ID NO: 1078661 - RNA, 19 nt, Artificial Sequence
  Description of Artificial Sequence: Synthetic oligonucleotide
ggccggaucugguagaagu

SEQ ID NO: 1078662 - RNA, 19 nt, Artificial Sequence
  Description of Artificial Sequence: Synthetic oligonucleotide
gguaccccgagaagcuucc

SEQ ID NO: 1078663 - RNA, 19 nt, Artificial Sequence
  Description of Artificial Sequence: Synthetic oligonucleotide
aggggccggaucugguaga

SEQ ID NO: 1078664 - RNA, 19 nt, Artificial Sequence
  Description of Artificial Sequence: Synthetic oligonucleotide
ggccuuacccagcuauuuc

SEQ ID NO: 1078665 - RNA, 19 nt, Artificial Sequence
  Description of Artificial Sequence: Synthetic oligonucleotide
acgcaaacacacacacaca

SEQ ID NO: 1078666 - RNA, 19 nt, Artificial Sequence
  Description of Artificial Sequence: Synthetic oligonucleotide
agggacccagaaaugcuau

SEQ ID NO: 1078667 - RNA, 19 nt, Artificial Sequence
  Description of Artificial Sequence: Synthetic oligonucleotide
agcgugucagggucuccaa

SEQ ID NO: 1078668 - RNA, 19 nt, Artificial Sequence
  Description of Artificial Sequence: Synthetic oligonucleotide
gauaagggugucagcccua

SEQ ID NO: 1078669 - RNA, 19 nt, Artificial Sequence
  Description of Artificial Sequence: Synthetic oligonucleotide
acacacacacacacccuau

SEQ ID NO: 1078670 - RNA, 19 nt, Artificial Sequence
  Description of Artificial Sequence: Synthetic oligonucleotide
gcaaacacacacacacaca

SEQ ID NO: 1078671 - RNA, 19 nt, Artificial Sequence
  Description of Artificial Sequence: Synthetic oligonucleotide
caagagcucccagaggucu

SEQ ID NO: 1078672 - RNA, 19 nt, Artificial Sequence
  Description of Artificial Sequence: Synthetic oligonucleotide
gguaggcgcguuugccacc

SEQ ID NO: 1078673 - RNA, 19 nt, Artificial Sequence
  Description of Artificial Sequence: Synthetic oligonucleotide
aggccuuacccagcuauuu

SEQ ID NO: 1078674 - RNA, 19 nt, Artificial Sequence
  Description of Artificial Sequence: Synthetic oligonucleotide
ggcaagucuagggaacaga

SEQ ID NO: 1078675 - RNA, 19 nt, Artificial Sequence
  Description of Artificial Sequence: Synthetic oligonucleotide
uccagacggccgagccuca

SEQ ID NO: 1078676 - RNA, 19 nt, Artificial Sequence
  Description of Artificial Sequence: Synthetic oligonucleotide
gacaaagcgcaaagaucua

SEQ ID NO: 1078677 - RNA, 19 nt, Artificial Sequence
  Description of Artificial Sequence: Synthetic oligonucleotide
gcggacaaagcgcaaagau

SEQ ID NO: 1078678 - RNA, 19 nt, Artificial Sequence
  Description of Artificial Sequence: Synthetic oligonucleotide
gcucaaaccuccagaguuc

SEQ ID NO: 1078679 - RNA, 19 nt, Artificial Sequence
  Description of Artificial Sequence: Synthetic oligonucleotide
caguggcuuuuaccuauca

SEQ ID NO: 1078680 - RNA, 19 nt, Artificial Sequence
  Description of Artificial Sequence: Synthetic oligonucleotide
gcucgagaauucacggaug

SEQ ID NO: 1078681 - RNA, 19 nt, Artificial Sequence
  Description of Artificial Sequence: Synthetic oligonucleotide
cugucucgucucugcccag

SEQ ID NO: 1078682 - RNA, 19 nt, Artificial Sequence
  Description of Artificial Sequence: Synthetic oligonucleotide
gggaaucccagaguccauc

SEQ ID NO: 1078683 - RNA, 19 nt, Artificial Sequence
  Description of Artificial Sequence: Synthetic oligonucleotide
cagagauaccugagccuaa

SEQ ID NO: 1078684 - RNA, 19 nt, Artificial Sequence
  Description of Artificial Sequence: Synthetic oligonucleotide
uccuagcaacaagcucaug

SEQ ID NO: 1078685 - RNA, 19 nt, Artificial Sequence
  Description of Artificial Sequence: Synthetic oligonucleotide
ggcucggaagguguccacc

SEQ ID NO: 1078686 - RNA, 19 nt, Artificial Sequence
  Description of Artificial Sequence: Synthetic oligonucleotide
guguagggguaccccgaga

SEQ ID NO: 1078687 - RNA, 19 nt, Artificial Sequence
  Description of Artificial Sequence: Synthetic oligonucleotide
cucaaaccuccagaguucu

SEQ ID NO: 1078688 - RNA, 19 nt, Artificial Sequence
  Description of Artificial Sequence: Synthetic oligonucleotide
ggauaugccggaaagccuu

SEQ ID NO: 1078689 - RNA, 19 nt, Artificial Sequence
  Description of Artificial Sequence: Synthetic oligonucleotide
caccaaaucggcugcgcau

SEQ ID NO: 1078690 - RNA, 19 nt, Artificial Sequence
  Description of Artificial Sequence: Synthetic oligonucleotide
agcucccacaccagaacua

SEQ ID NO: 1078691 - RNA, 19 nt, Artificial Sequence
  Description of Artificial Sequence: Synthetic oligonucleotide
cacacacccuaugauuaaa

SEQ ID NO: 1078692 - RNA, 19 nt, Artificial Sequence
  Description of Artificial Sequence: Synthetic oligonucleotide
aggcccacucuagacgaaa

SEQ ID NO: 1078693 - RNA, 19 nt, Artificial Sequence
  Description of Artificial Sequence: Synthetic oligonucleotide
gucaagugaaggguagcau

SEQ ID NO: 1078694 - RNA, 19 nt, Artificial Sequence
  Description of Artificial Sequence: Synthetic oligonucleotide
guggcggacaaagcgcaaa

SEQ ID NO: 1078695 - RNA, 19 nt, Artificial Sequence
  Description of Artificial Sequence: Synthetic oligonucleotide
acauaguggugugggcaua

SEQ ID NO: 1078696 - RNA, 19 nt, Artificial Sequence
  Description of Artificial Sequence: Synthetic oligonucleotide
gccuggcaagucuagggaa

SEQ ID NO: 1078697 - RNA, 19 nt, Artificial Sequence
  Description of Artificial Sequence: Synthetic oligonucleotide
ccaguguagaucgucugga

SEQ ID NO: 1078698 - RNA, 19 nt, Artificial Sequence
  Description of Artificial Sequence: Synthetic oligonucleotide
gaaucgggacagcucgauu

SEQ ID NO: 1078699 - RNA, 19 nt, Artificial Sequence
  Description of Artificial Sequence: Synthetic oligonucleotide
gcaagucuagggaacagau

SEQ ID NO: 1078700 - RNA, 19 nt, Artificial Sequence
  Description of Artificial Sequence: Synthetic oligonucleotide
gacggccgagccucaggaa

SEQ ID NO: 1078701 - RNA, 19 nt, Artificial Sequence
  Description of Artificial Sequence: Synthetic oligonucleotide
ccugccuacauaguggugu

SEQ ID NO: 1078702 - RNA, 19 nt, Artificial Sequence
  Description of Artificial Sequence: Synthetic oligonucleotide
ccgagccucaggaaauuga

SEQ ID NO: 1078703 - RNA, 19 nt, Artificial Sequence
  Description of Artificial Sequence: Synthetic oligonucleotide
cugagccuaaagaguugcu

SEQ ID NO: 1078704 - RNA, 19 nt, Artificial Sequence
  Description of Artificial Sequence: Synthetic oligonucleotide
gcucagcucauaguggugu

SEQ ID NO: 1078705 - RNA, 19 nt, Artificial Sequence
  Description of Artificial Sequence: Synthetic oligonucleotide
ggguaccccgagaagcuuc

SEQ ID NO: 1078706 - RNA, 19 nt, Artificial Sequence
  Description of Artificial Sequence: Synthetic oligonucleotide
agacagaguccaggcggaa

SEQ ID NO: 1078707 - RNA, 19 nt, Artificial Sequence
  Description of Artificial Sequence: Synthetic oligonucleotide
aggacagccuuaggccuua

SEQ ID NO: 1078708 - RNA, 19 nt, Artificial Sequence
  Description of Artificial Sequence: Synthetic oligonucleotide
guaggcgcguuugccaccu

SEQ ID NO: 1078709 - RNA, 19 nt, Artificial Sequence
  Description of Artificial Sequence: Synthetic oligonucleotide
ggcugacgcagcagcauuc

SEQ ID NO: 1078710 - RNA, 19 nt, Artificial Sequence
  Description of Artificial Sequence: Synthetic oligonucleotide
ggcggacaaagcgcaaaga

SEQ ID NO: 1078711 - RNA, 19 nt, Artificial Sequence
  Description of Artificial Sequence: Synthetic oligonucleotide
cccgaagggcauccaggag

SEQ ID NO: 1078712 - RNA, 19 nt, Artificial Sequence
  Description of Artificial Sequence: Synthetic oligonucleotide
auggagcagggcagcucug

SEQ ID NO: 1078713 - RNA, 19 nt, Artificial Sequence
  Description of Artificial Sequence: Synthetic oligonucleotide
ccggaucugguagaaguca

SEQ ID NO: 1078714 - RNA, 19 nt, Artificial Sequence
  Description of Artificial Sequence: Synthetic oligonucleotide
gccuggugacucaaacuca

SEQ ID NO: 1078715 - RNA, 19 nt, Artificial Sequence
  Description of Artificial Sequence: Synthetic oligonucleotide
gcgcaaagaucuagaguuc

SEQ ID NO: 1078716 - RNA, 19 nt, Artificial Sequence
  Description of Artificial Sequence: Synthetic oligonucleotide
auaguggugugggccccuu

SEQ ID NO: 1078717 - RNA, 19 nt, Artificial Sequence
  Description of Artificial Sequence: Synthetic oligonucleotide
cuuaggccuuacccagcua

SEQ ID NO: 1078718 - RNA, 19 nt, Artificial Sequence
  Description of Artificial Sequence: Synthetic oligonucleotide
ggguguagggguaccccga

SEQ ID NO: 1078719 - RNA, 19 nt, Artificial Sequence
  Description of Artificial Sequence: Synthetic oligonucleotide
cgucuggaccacucuugag

SEQ ID NO: 1078720 - RNA, 19 nt, Artificial Sequence
  Description of Artificial Sequence: Synthetic oligonucleotide
ccccuacugcucaaaccuc

SEQ ID NO: 1078721 - RNA, 19 nt, Artificial Sequence
  Description of Artificial Sequence: Synthetic oligonucleotide
gccgagccucaggaaauug

SEQ ID NO: 1078722 - RNA, 19 nt, Artificial Sequence
  Description of Artificial Sequence: Synthetic oligonucleotide
cucggaagguguccacccu

SEQ ID NO: 1078723 - RNA, 19 nt, Artificial Sequence
  Description of Artificial Sequence: Synthetic oligonucleotide
gccuuaggccuuacccagc

SEQ ID NO: 1078724 - RNA, 19 nt, Artificial Sequence
  Description of Artificial Sequence: Synthetic oligonucleotide
ggcgcguuugccaccucuc

SEQ ID NO: 1078725 - RNA, 19 nt, Artificial Sequence
  Description of Artificial Sequence: Synthetic oligonucleotide
ccuuacccagcuauuuccu

SEQ ID NO: 1078726 - RNA, 19 nt, Artificial Sequence
  Description of Artificial Sequence: Synthetic oligonucleotide
ggcagaggugcuuccuuau

SEQ ID NO: 1078727 - RNA, 19 nt, Artificial Sequence
  Description of Artificial Sequence: Synthetic oligonucleotide
cccagaaaugcuaucccuu

SEQ ID NO: 1078728 - RNA, 19 nt, Artificial Sequence
  Description of Artificial Sequence: Synthetic oligonucleotide
uaggcgcguuugccaccuc

SEQ ID NO: 1078729 - RNA, 19 nt, Artificial Sequence
  Description of Artificial Sequence: Synthetic oligonucleotide
gcgggaggcccacucuaga

SEQ ID NO: 1078730 - RNA, 19 nt, Artificial Sequence
  Description of Artificial Sequence: Synthetic oligonucleotide
ccuuaggccuuacccagcu

SEQ ID NO: 1078731 - RNA, 19 nt, Artificial Sequence
  Description of Artificial Sequence: Synthetic oligonucleotide
cccuaugauuaaacuaaau

SEQ ID NO: 1078732 - RNA, 19 nt, Artificial Sequence
  Description of Artificial Sequence: Synthetic oligonucleotide
guaccccgagaagcuucca

SEQ ID NO: 1078733 - RNA, 19 nt, Artificial Sequence
  Description of Artificial Sequence: Synthetic oligonucleotide
cagccccuuggcugacgca

SEQ ID NO: 1078734 - RNA, 19 nt, Artificial Sequence
  Description of Artificial Sequence: Synthetic oligonucleotide
cuaagcccaguggcuuuua

SEQ ID NO: 1078735 - RNA, 19 nt, Artificial Sequence
  Description of Artificial Sequence: Synthetic oligonucleotide
cagcuaagcccaguggcuu

SEQ ID NO: 1078736 - RNA, 19 nt, Artificial Sequence
  Description of Artificial Sequence: Synthetic oligonucleotide
gggccggaucugguagaag

SEQ ID NO: 1078737 - RNA, 19 nt, Artificial Sequence
  Description of Artificial Sequence: Synthetic oligonucleotide
cauaguggugugggccccu

SEQ ID NO: 1078738 - RNA, 19 nt, Artificial Sequence
  Description of Artificial Sequence: Synthetic oligonucleotide
aggcuccagucagguggga

SEQ ID NO: 1078739 - RNA, 19 nt, Artificial Sequence
  Description of Artificial Sequence: Synthetic oligonucleotide
cggaaagccuugccaucuc

SEQ ID NO: 1078740 - RNA, 19 nt, Artificial Sequence
  Description of Artificial Sequence: Synthetic oligonucleotide
ccggaaagccuugccaucu

SEQ ID NO: 1078741 - RNA, 19 nt, Artificial Sequence
  Description of Artificial Sequence: Synthetic oligonucleotide
gggccccuuccgagcagag

SEQ ID NO: 1078742 - RNA, 19 nt, Artificial Sequence
  Description of Artificial Sequence: Synthetic oligonucleotide
ggggccggaucugguagaa

SEQ ID NO: 1078743 - RNA, 19 nt, Artificial Sequence
  Description of Artificial Sequence: Synthetic oligonucleotide
ccagacggccgagccucag

SEQ ID NO: 1078744 - RNA, 19 nt, Artificial Sequence
  Description of Artificial Sequence: Synthetic oligonucleotide
ccucaagcaagagcaggcu

SEQ ID NO: 1078745 - RNA, 19 nt, Artificial Sequence
  Description of Artificial Sequence: Synthetic oligonucleotide
cgaaaauguggaccucccu

SEQ ID NO: 1078746 - RNA, 19 nt, Artificial Sequence
  Description of Artificial Sequence: Synthetic oligonucleotide
gggaagcgugucagggucu

SEQ ID NO: 1078747 - RNA, 19 nt, Artificial Sequence
  Description of Artificial Sequence: Synthetic oligonucleotide
ccagacacucaggucggua

SEQ ID NO: 1078748 - RNA, 19 nt, Artificial Sequence
  Description of Artificial Sequence: Synthetic oligonucleotide
gcgugucagggucuccaau

SEQ ID NO: 1078749 - RNA, 19 nt, Artificial Sequence
  Description of Artificial Sequence: Synthetic oligonucleotide
ccaagaugacagggaucca

SEQ ID NO: 1078750 - RNA, 19 nt, Artificial Sequence
  Description of Artificial Sequence: Synthetic oligonucleotide
gcugcgcauggcacccaga

SEQ ID NO: 1078751 - RNA, 19 nt, Artificial Sequence
  Description of Artificial Sequence: Synthetic oligonucleotide
ggggcgggaggcccacucu

SEQ ID NO: 1078752 - RNA, 19 nt, Artificial Sequence
  Description of Artificial Sequence: Synthetic oligonucleotide
ggcuccagucaggugggau

SEQ ID NO: 1078753 - RNA, 19 nt, Artificial Sequence
  Description of Artificial Sequence: Synthetic oligonucleotide
ggacagccuuaggccuuac

SEQ ID NO: 1078754 - RNA, 19 nt, Artificial Sequence
  Description of Artificial Sequence: Synthetic oligonucleotide
cagcgguugcagccccagu

SEQ ID NO: 1078755 - RNA, 19 nt, Artificial Sequence
  Description of Artificial Sequence: Synthetic oligonucleotide
ggccgagccucaggaaauu

SEQ ID NO: 1078756 - RNA, 19 nt, Artificial Sequence
  Description of Artificial Sequence: Synthetic oligonucleotide
cggccgagccucaggaaau

SEQ ID NO: 1078757 - RNA, 19 nt, Artificial Sequence
  Description of Artificial Sequence: Synthetic oligonucleotide
ccauacccacggggcaggu

SEQ ID NO: 1078758 - RNA, 19 nt, Artificial Sequence
  Description of Artificial Sequence: Synthetic oligonucleotide
acauguuaagaccagaugg

SEQ ID NO: 1078759 - RNA, 19 nt, Artificial Sequence
  Description of Artificial Sequence: Synthetic oligonucleotide
aacgaaacagcacaaauca

SEQ ID NO: 1078760 - RNA, 19 nt, Artificial Sequence
  Description of Artificial Sequence: Synthetic oligonucleotide
ucuuacuugaauaaccgag

SEQ ID NO: 1078761 - RNA, 19 nt, Artificial Sequence
  Description of Artificial Sequence: Synthetic oligonucleotide
aagaaguugaccccuuggc

SEQ ID NO: 1078762 - RNA, 19 nt, Artificial Sequence
  Description of Artificial Sequence: Synthetic oligonucleotide
uguuuaugagugaaggagg

SEQ ID NO: 1078763 - RNA, 19 nt, Artificial Sequence
  Description of Artificial Sequence: Synthetic oligonucleotide
aacuuacugagcuacaugu

SEQ ID NO: 1078764 - RNA, 19 nt, Artificial Sequence
  Description of Artificial Sequence: Synthetic oligonucleotide
uuacaaaccaacccuuugg

SEQ ID NO: 1078765 - RNA, 19 nt, Artificial Sequence
  Description of Artificial Sequence: Synthetic oligonucleotide
auuaggucagcauuggguc

SEQ ID NO: 1078766 - RNA, 19 nt, Artificial Sequence
  Description of Artificial Sequence: Synthetic oligonucleotide
cauacauacauuuggggcc

SEQ ID NO: 1078767 - RNA, 19 nt, Artificial Sequence
  Description of Artificial Sequence: Synthetic oligonucleotide
accaggauuccauacauac

SEQ ID NO: 1078768 - RNA, 19 nt, Artificial Sequence
  Description of Artificial Sequence: Synthetic oligonucleotide
uuuucuggcaauaauggau

SEQ ID NO: 1078769 - RNA, 19 nt, Artificial Sequence
  Description of Artificial Sequence: Synthetic oligonucleotide
uuccauacauacauuuggg

SEQ ID NO: 1078770 - RNA, 19 nt, Artificial Sequence
  Description of Artificial Sequence: Synthetic oligonucleotide
aaucccacuccucucacag

SEQ ID NO: 1078771 - RNA, 19 nt, Artificial Sequence
  Description of Artificial Sequence: Synthetic oligonucleotide
ucuuuaggcagauucaggu

SEQ ID NO: 1078772 - RNA, 19 nt, Artificial Sequence
  Description of Artificial Sequence: Synthetic oligonucleotide
aacggcuaacauuagguca

SEQ ID NO: 1078773 - RNA, 19 nt, Artificial Sequence
  Description of Artificial Sequence: Synthetic oligonucleotide
cuuacuugaauaaccgagc

SEQ ID NO: 1078774 - RNA, 19 nt, Artificial Sequence
  Description of Artificial Sequence: Synthetic oligonucleotide
uuaugagugaaggagguug

SEQ ID NO: 1078775 - RNA, 19 nt, Artificial Sequence
  Description of Artificial Sequence: Synthetic oligonucleotide
ucucccuucaacauggaac

SEQ ID NO: 1078776 - RNA, 19 nt, Artificial Sequence
  Description of Artificial Sequence: Synthetic oligonucleotide
cugaguuagugcuagcugg

SEQ ID NO: 1078777 - RNA, 19 nt, Artificial Sequence
  Description of Artificial Sequence: Synthetic oligonucleotide
uguaacauccauuugccau

SEQ ID NO: 1078778 - RNA, 19 nt, Artificial Sequence
  Description of Artificial Sequence: Synthetic oligonucleotide
uuacuugaauaaccgagcc

SEQ ID NO: 1078779 - RNA, 19 nt, Artificial Sequence
  Description of Artificial Sequence: Synthetic oligonucleotide
aaauuuucuaacaccuuag

SEQ ID NO: 1078780 - RNA, 19 nt, Artificial Sequence
  Description of Artificial Sequence: Synthetic oligonucleotide
uccauacauacauuugggg

SEQ ID NO: 1078781 - RNA, 19 nt, Artificial Sequence
  Description of Artificial Sequence: Synthetic oligonucleotide
agcuauacaccuucccugc

SEQ ID NO: 1078782 - RNA, 19 nt, Artificial Sequence
  Description of Artificial Sequence: Synthetic oligonucleotide
cucccuucaacauggaacg

SEQ ID NO: 1078783 - RNA, 19 nt, Artificial Sequence
  Description of Artificial Sequence: Synthetic oligonucleotide
gguuguaacauccauuugc

SEQ ID NO: 1078784 - RNA, 19 nt, Artificial Sequence
  Description of Artificial Sequence: Synthetic oligonucleotide
agugcuaaacgccggcugc

SEQ ID NO: 1078785 - RNA, 19 nt, Artificial Sequence
  Description of Artificial Sequence: Synthetic oligonucleotide
auaauggaucaccucagag

SEQ ID NO: 1078786 - RNA, 19 nt, Artificial Sequence
  Description of Artificial Sequence: Synthetic oligonucleotide
guguuuaugagugaaggag

SEQ ID NO: 1078787 - RNA, 19 nt, Artificial Sequence
  Description of Artificial Sequence: Synthetic oligonucleotide
gaagaaguugaccccuugg

SEQ ID NO: 1078788 - RNA, 19 nt, Artificial Sequence
  Description of Artificial Sequence: Synthetic oligonucleotide
agguuuacaaaccaacccu

SEQ ID NO: 1078789 - RNA, 19 nt, Artificial Sequence
  Description of Artificial Sequence: Synthetic oligonucleotide
gugugggucagacagagcc

SEQ ID NO: 1078790 - RNA, 19 nt, Artificial Sequence
  Description of Artificial Sequence: Synthetic oligonucleotide
ucaacuggucuauacaccu

SEQ ID NO: 1078791 - RNA, 19 nt, Artificial Sequence
  Description of Artificial Sequence: Synthetic oligonucleotide
uacauguuaagaccagaug

SEQ ID NO: 1078792 - RNA, 19 nt, Artificial Sequence
  Description of Artificial Sequence: Synthetic oligonucleotide
augugugcugucucuaggc

SEQ ID NO: 1078793 - RNA, 19 nt, Artificial Sequence
  Description of Artificial Sequence: Synthetic oligonucleotide
agacauuagggucucaacu

SEQ ID NO: 1078794 - RNA, 19 nt, Artificial Sequence
  Description of Artificial Sequence: Synthetic oligonucleotide
agggucucaacuuacugag

SEQ ID NO: 1078795 - RNA, 19 nt, Artificial Sequence
  Description of Artificial Sequence: Synthetic oligonucleotide
auagcuauacaccuucccu

SEQ ID NO: 1078796 - RNA, 19 nt, Artificial Sequence
  Description of Artificial Sequence: Synthetic oligonucleotide
uguuaagaccagauggcca

SEQ ID NO: 1078797 - RNA, 19 nt, Artificial Sequence
  Description of Artificial Sequence: Synthetic oligonucleotide
uggagguuuacaaaccaac

SEQ ID NO: 1078798 - RNA, 19 nt, Artificial Sequence
  Description of Artificial Sequence: Synthetic oligonucleotide
aauaauggaucaccucaga

SEQ ID NO: 1078799 - RNA, 19 nt, Artificial Sequence
  Description of Artificial Sequence: Synthetic oligonucleotide
aacuggucuauacaccugu

SEQ ID NO: 1078800 - RNA, 19 nt, Artificial Sequence
  Description of Artificial Sequence: Synthetic oligonucleotide
cugagcuacauguuaagac

SEQ ID NO: 1078801 - RNA, 19 nt, Artificial Sequence
  Description of Artificial Sequence: Synthetic oligonucleotide
cucagagugcuaaacgccg

SEQ ID NO: 1078802 - RNA, 19 nt, Artificial Sequence
  Description of Artificial Sequence: Synthetic oligonucleotide
gaucagagacauuaggguc

SEQ ID NO: 1078803 - RNA, 19 nt, Artificial Sequence
  Description of Artificial Sequence: Synthetic oligonucleotide
agacccaaccauucaacac

SEQ ID NO: 1078804 - RNA, 19 nt, Artificial Sequence
  Description of Artificial Sequence: Synthetic oligonucleotide
ugcaccuauagaaccaggc

SEQ ID NO: 1078805 - RNA, 19 nt, Artificial Sequence
  Description of Artificial Sequence: Synthetic oligonucleotide
uucaacuggucuauacacc

SEQ ID NO: 1078806 - RNA, 19 nt, Artificial Sequence
  Description of Artificial Sequence: Synthetic oligonucleotide
aauaaccgagccaggaauc

SEQ ID NO: 1078807 - RNA, 19 nt, Artificial Sequence
  Description of Artificial Sequence: Synthetic oligonucleotide
ucuguugcaccuauagaac

SEQ ID NO: 1078808 - RNA, 19 nt, Artificial Sequence
  Description of Artificial Sequence: Synthetic oligonucleotide
auguuaagaccagauggcc

SEQ ID NO: 1078809 - RNA, 19 nt, Artificial Sequence
  Description of Artificial Sequence: Synthetic oligonucleotide
aacauuaggucagcauugg

SEQ ID NO: 1078810 - RNA, 19 nt, Artificial Sequence
  Description of Artificial Sequence: Synthetic oligonucleotide
auacauacauuuggggccc

SEQ ID NO: 1078811 - RNA, 19 nt, Artificial Sequence
  Description of Artificial Sequence: Synthetic oligonucleotide
gaagauggcgcuguguucc

SEQ ID NO: 1078812 - RNA, 19 nt, Artificial Sequence
  Description of Artificial Sequence: Synthetic oligonucleotide
caggacuacuagcagagcg

SEQ ID NO: 1078813 - RNA, 19 nt, Artificial Sequence
  Description of Artificial Sequence: Synthetic oligonucleotide
agagccucugccuagauuu

SEQ ID NO: 1078814 - RNA, 19 nt, Artificial Sequence
  Description of Artificial Sequence: Synthetic oligonucleotide
cacagcucaaguugggugg

SEQ ID NO: 1078815 - RNA, 19 nt, Artificial Sequence
  Description of Artificial Sequence: Synthetic oligonucleotide
uuagggucucaacuuacug

SEQ ID NO: 1078816 - RNA, 19 nt, Artificial Sequence
  Description of Artificial Sequence: Synthetic oligonucleotide
aagacugcacaguucacau

SEQ ID NO: 1078817 - RNA, 19 nt, Artificial Sequence
  Description of Artificial Sequence: Synthetic oligonucleotide
aaucgguuucugcuguaag

SEQ ID NO: 1078818 - RNA, 19 nt, Artificial Sequence
  Description of Artificial Sequence: Synthetic oligonucleotide
uagcuauacaccuucccug

SEQ ID NO: 1078819 - RNA, 19 nt, Artificial Sequence
  Description of Artificial Sequence: Synthetic oligonucleotide
uggaacggcuaacauuagg

SEQ ID NO: 1078820 - RNA, 19 nt, Artificial Sequence
  Description of Artificial Sequence: Synthetic oligonucleotide
uguugcaccuauagaacca

SEQ ID NO: 1078821 - RNA, 19 nt, Artificial Sequence
  Description of Artificial Sequence: Synthetic oligonucleotide
gaaguaguagcugcugagg

SEQ ID NO: 1078822 - RNA, 19 nt, Artificial Sequence
  Description of Artificial Sequence: Synthetic oligonucleotide
aaaggaauucuugccccac

SEQ ID NO: 1078823 - RNA, 19 nt, Artificial Sequence
  Description of Artificial Sequence: Synthetic oligonucleotide
ugcauaugugaugucauug

SEQ ID NO: 1078824 - RNA, 19 nt, Artificial Sequence
  Description of Artificial Sequence: Synthetic oligonucleotide
aaugaaccaacaacaacga

SEQ ID NO: 1078825 - RNA, 19 nt, Artificial Sequence
  Description of Artificial Sequence: Synthetic oligonucleotide
aagacccaaccauucaaca

SEQ ID NO: 1078826 - RNA, 19 nt, Artificial Sequence
  Description of Artificial Sequence: Synthetic oligonucleotide
guuagugcuagcuggagga

SEQ ID NO: 1078827 - RNA, 19 nt, Artificial Sequence
  Description of Artificial Sequence: Synthetic oligonucleotide
agggaucagagacauuagg

SEQ ID NO: 1078828 - RNA, 19 nt, Artificial Sequence
  Description of Artificial Sequence: Synthetic oligonucleotide
uucucuuuaggcagauuca

SEQ ID NO: 1078829 - RNA, 19 nt, Artificial Sequence
  Description of Artificial Sequence: Synthetic oligonucleotide
caauaauggaucaccucag

SEQ ID NO: 1078830 - RNA, 19 nt, Artificial Sequence
  Description of Artificial Sequence: Synthetic oligonucleotide
uguuggcugaaacuugcug

SEQ ID NO: 1078831 - RNA, 19 nt, Artificial Sequence
  Description of Artificial Sequence: Synthetic oligonucleotide
cauggaacggcuaacauua

SEQ ID NO: 1078832 - RNA, 19 nt, Artificial Sequence
  Description of Artificial Sequence: Synthetic oligonucleotide
gucaguuaugaccagguuc

SEQ ID NO: 1078833 - RNA, 19 nt, Artificial Sequence
  Description of Artificial Sequence: Synthetic oligonucleotide
uuacugagcuacauguuaa

SEQ ID NO: 1078834 - RNA, 19 nt, Artificial Sequence
  Description of Artificial Sequence: Synthetic oligonucleotide
guuaugaccagguucuguc

SEQ ID NO: 1078835 - RNA, 19 nt, Artificial Sequence
  Description of Artificial Sequence: Synthetic oligonucleotide
guuguaacauccauuugcc

SEQ ID NO: 1078836 - RNA, 19 nt, Artificial Sequence
  Description of Artificial Sequence: Synthetic oligonucleotide
auaaccgagccaggaaucc

SEQ ID NO: 1078837 - RNA, 19 nt, Artificial Sequence
  Description of Artificial Sequence: Synthetic oligonucleotide
ugccccacagcucaaguug

SEQ ID NO: 1078838 - RNA, 19 nt, Artificial Sequence
  Description of Artificial Sequence: Synthetic oligonucleotide
ucagagugcuaaacgccgg

SEQ ID NO: 1078839 - RNA, 19 nt, Artificial Sequence
  Description of Artificial Sequence: Synthetic oligonucleotide
aaggagguugucacugacc

SEQ ID NO: 1078840 - RNA, 19 nt, Artificial Sequence
  Description of Artificial Sequence: Synthetic oligonucleotide
gacccaaccauucaacaca

SEQ ID NO: 1078841 - RNA, 19 nt, Artificial Sequence
  Description of Artificial Sequence: Synthetic oligonucleotide
aacuuaagacaaaaucuga

SEQ ID NO: 1078842 - RNA, 19 nt, Artificial Sequence
  Description of Artificial Sequence: Synthetic oligonucleotide
ucugaucuaaaggaauucu

SEQ ID NO: 1078843 - RNA, 19 nt, Artificial Sequence
  Description of Artificial Sequence: Synthetic oligonucleotide
cucuguugcaccuauagaa

SEQ ID NO: 1078844 - RNA, 19 nt, Artificial Sequence
  Description of Artificial Sequence: Synthetic oligonucleotide
ucucaacuuacugagcuac

SEQ ID NO: 1078845 - RNA, 19 nt, Artificial Sequence
  Description of Artificial Sequence: Synthetic oligonucleotide
ugaauaaccgagccaggaa

SEQ ID NO: 1078846 - RNA, 19 nt, Artificial Sequence
  Description of Artificial Sequence: Synthetic oligonucleotide
cuggaucuggguuauuccc

SEQ ID NO: 1078847 - RNA, 19 nt, Artificial Sequence
  Description of Artificial Sequence: Synthetic oligonucleotide
gcaauaauggaucaccuca

SEQ ID NO: 1078848 - RNA, 19 nt, Artificial Sequence
  Description of Artificial Sequence: Synthetic oligonucleotide
ccauacauacauuuggggc

SEQ ID NO: 1078849 - RNA, 19 nt, Artificial Sequence
  Description of Artificial Sequence: Synthetic oligonucleotide
agaaguugaccccuuggcu

SEQ ID NO: 1078850 - RNA, 19 nt, Artificial Sequence
  Description of Artificial Sequence: Synthetic oligonucleotide
aggacuacuagcagagcgc

SEQ ID NO: 1078851 - RNA, 19 nt, Artificial Sequence
  Description of Artificial Sequence: Synthetic oligonucleotide
uguccuuucaacuggucua

SEQ ID NO: 1078852 - RNA, 19 nt, Artificial Sequence
  Description of Artificial Sequence: Synthetic oligonucleotide
ugaguuagugcuagcugga

SEQ ID NO: 1078853 - RNA, 19 nt, Artificial Sequence
  Description of Artificial Sequence: Synthetic oligonucleotide
accuauagaaccaggcagg

SEQ ID NO: 1078854 - RNA, 19 nt, Artificial Sequence
  Description of Artificial Sequence: Synthetic oligonucleotide
uuccaggacaagaaacugu

SEQ ID NO: 1078855 - RNA, 19 nt, Artificial Sequence
  Description of Artificial Sequence: Synthetic oligonucleotide
uugaauaaccgagccagga

SEQ ID NO: 1078856 - RNA, 19 nt, Artificial Sequence
  Description of Artificial Sequence: Synthetic oligonucleotide
uucuuacuugaauaaccga

SEQ ID NO: 1078857 - RNA, 19 nt, Artificial Sequence
  Description of Artificial Sequence: Synthetic oligonucleotide
uuaugaccagguucugucc

SEQ ID NO: 1078858 - RNA, 19 nt, Artificial Sequence
  Description of Artificial Sequence: Synthetic oligonucleotide
agaggguuccgucuccccg

SEQ ID NO: 1078859 - RNA, 19 nt, Artificial Sequence
  Description of Artificial Sequence: Synthetic oligonucleotide
uucacaagacccaaccauu

SEQ ID NO: 1078860 - RNA, 19 nt, Artificial Sequence
  Description of Artificial Sequence: Synthetic oligonucleotide
aagacagcccaagaagaug

SEQ ID NO: 1078861 - RNA, 19 nt, Artificial Sequence
  Description of Artificial Sequence: Synthetic oligonucleotide
uggucaguuaugaccaggu

SEQ ID NO: 1078862 - RNA, 19 nt, Artificial Sequence
  Description of Artificial Sequence: Synthetic oligonucleotide
uuuccucuguuugauccgg

SEQ ID NO: 1078863 - RNA, 19 nt, Artificial Sequence
  Description of Artificial Sequence: Synthetic oligonucleotide
ucaggcugccccacuaaag

SEQ ID NO: 1078864 - RNA, 19 nt, Artificial Sequence
  Description of Artificial Sequence: Synthetic oligonucleotide
aaccgggcccgguucgucc

SEQ ID NO: 1078865 - RNA, 19 nt, Artificial Sequence
  Description of Artificial Sequence: Synthetic oligonucleotide
aacauggaacggcuaacau

SEQ ID NO: 1078866 - RNA, 19 nt, Artificial Sequence
  Description of Artificial Sequence: Synthetic oligonucleotide
caagcugggacuggaaagg

SEQ ID NO: 1078867 - RNA, 19 nt, Artificial Sequence
  Description of Artificial Sequence: Synthetic oligonucleotide
ugucucaaugcucgcauau

SEQ ID NO: 1078868 - RNA, 19 nt, Artificial Sequence
  Description of Artificial Sequence: Synthetic oligonucleotide
uacugagcuacauguuaag

SEQ ID NO: 1078869 - RNA, 19 nt, Artificial Sequence
  Description of Artificial Sequence: Synthetic oligonucleotide
cuugaauaaccgagccagg

SEQ ID NO: 1078870 - RNA, 19 nt, Artificial Sequence
  Description of Artificial Sequence: Synthetic oligonucleotide
gcuguaagaaaauccuucc

SEQ ID NO: 1078871 - RNA, 19 nt, Artificial Sequence
  Description of Artificial Sequence: Synthetic oligonucleotide
uggaucuggguuauucccu

SEQ ID NO: 1078872 - RNA, 19 nt, Artificial Sequence
  Description of Artificial Sequence: Synthetic oligonucleotide
ugucucuaggcagagggga

SEQ ID NO: 1078873 - RNA, 19 nt, Artificial Sequence
  Description of Artificial Sequence: Synthetic oligonucleotide
acuacuagcagagcgcaca

SEQ ID NO: 1078874 - RNA, 19 nt, Artificial Sequence
  Description of Artificial Sequence: Synthetic oligonucleotide
uuaggucagcauuggguca

SEQ ID NO: 1078875 - RNA, 19 nt, Artificial Sequence
  Description of Artificial Sequence: Synthetic oligonucleotide
cuagauuugcuagccagug

SEQ ID NO: 1078876 - RNA, 19 nt, Artificial Sequence
  Description of Artificial Sequence: Synthetic oligonucleotide
caagacccaaccauucaac

SEQ ID NO: 1078877 - RNA, 19 nt, Artificial Sequence
  Description of Artificial Sequence: Synthetic oligonucleotide
aaggaauucuugccccaca

SEQ ID NO: 1078878 - RNA, 19 nt, Artificial Sequence
  Description of Artificial Sequence: Synthetic oligonucleotide
auaugugaugucauugaug

SEQ ID NO: 1078879 - RNA, 19 nt, Artificial Sequence
  Description of Artificial Sequence: Synthetic oligonucleotide
cuagccagugacagagggg

SEQ ID NO: 1078880 - RNA, 19 nt, Artificial Sequence
  Description of Artificial Sequence: Synthetic oligonucleotide
aaaggaggcggggccacac

SEQ ID NO: 1078881 - RNA, 19 nt, Artificial Sequence
  Description of Artificial Sequence: Synthetic oligonucleotide
gaacggcuaacauuagguc

SEQ ID NO: 1078882 - RNA, 19 nt, Artificial Sequence
  Description of Artificial Sequence: Synthetic oligonucleotide
agucacguggcuguguaag

SEQ ID NO: 1078883 - RNA, 19 nt, Artificial Sequence
  Description of Artificial Sequence: Synthetic oligonucleotide
uagauuugcuagccaguga

SEQ ID NO: 1078884 - RNA, 19 nt, Artificial Sequence
  Description of Artificial Sequence: Synthetic oligonucleotide
acaagacccaaccauucaa

SEQ ID NO: 1078885 - RNA, 19 nt, Artificial Sequence
  Description of Artificial Sequence: Synthetic oligonucleotide
agcaggacuacuagcagag

SEQ ID NO: 1078886 - RNA, 19 nt, Artificial Sequence
  Description of Artificial Sequence: Synthetic oligonucleotide
cauuagggucucaacuuac

SEQ ID NO: 1078887 - RNA, 19 nt, Artificial Sequence
  Description of Artificial Sequence: Synthetic oligonucleotide
acggcuaacauuaggucag

SEQ ID NO: 1078888 - RNA, 19 nt, Artificial Sequence
  Description of Artificial Sequence: Synthetic oligonucleotide
cagagcgcacaccacaccc

SEQ ID NO: 1078889 - RNA, 19 nt, Artificial Sequence
  Description of Artificial Sequence: Synthetic oligonucleotide
caggcugccccacuaaagc

SEQ ID NO: 1078890 - RNA, 19 nt, Artificial Sequence
  Description of Artificial Sequence: Synthetic oligonucleotide
uugcaccuauagaaccagg

SEQ ID NO: 1078891 - RNA, 19 nt, Artificial Sequence
  Description of Artificial Sequence: Synthetic oligonucleotide
aaguugaccccuuggcuuu

SEQ ID NO: 1078892 - RNA, 19 nt, Artificial Sequence
  Description of Artificial Sequence: Synthetic oligonucleotide
ucgugcaaccuuguggaag

SEQ ID NO: 1078893 - RNA, 19 nt, Artificial Sequence
  Description of Artificial Sequence: Synthetic oligonucleotide
auacauuuggggcccuuca

SEQ ID NO: 1078894 - RNA, 19 nt, Artificial Sequence
  Description of Artificial Sequence: Synthetic oligonucleotide
acauggaacggcuaacauu

SEQ ID NO: 1078895 - RNA, 19 nt, Artificial Sequence
  Description of Artificial Sequence: Synthetic oligonucleotide
cuaaacgccggcugcuggc

SEQ ID NO: 1078896 - RNA, 19 nt, Artificial Sequence
  Description of Artificial Sequence: Synthetic oligonucleotide
ugccccacuaaagcuauag

SEQ ID NO: 1078897 - RNA, 19 nt, Artificial Sequence
  Description of Artificial Sequence: Synthetic oligonucleotide
cagcacaaaucaaauuuuc

SEQ ID NO: 1078898 - RNA, 19 nt, Artificial Sequence
  Description of Artificial Sequence: Synthetic oligonucleotide
agcguauugcugcugaguu

SEQ ID NO: 1078899 - RNA, 19 nt, Artificial Sequence
  Description of Artificial Sequence: Synthetic oligonucleotide
ggcucgugcaaccuugugg

SEQ ID NO: 1078900 - RNA, 19 nt, Artificial Sequence
  Description of Artificial Sequence: Synthetic oligonucleotide
ggacaagaaacuguuagac

SEQ ID NO: 1078901 - RNA, 19 nt, Artificial Sequence
  Description of Artificial Sequence: Synthetic oligonucleotide
uggucuaggagagaggguu

SEQ ID NO: 1078902 - RNA, 19 nt, Artificial Sequence
  Description of Artificial Sequence: Synthetic oligonucleotide
gagugcuaaacgccggcug

SEQ ID NO: 1078903 - RNA, 19 nt, Artificial Sequence
  Description of Artificial Sequence: Synthetic oligonucleotide
agcgcuguuggcugaaacu

SEQ ID NO: 1078904 - RNA, 19 nt, Artificial Sequence
  Description of Artificial Sequence: Synthetic oligonucleotide
gaauaaccgagccaggaau

SEQ ID NO: 1078905 - RNA, 19 nt, Artificial Sequence
  Description of Artificial Sequence: Synthetic oligonucleotide
cugaccuucucccuucaac

SEQ ID NO: 1078906 - RNA, 19 nt, Artificial Sequence
  Description of Artificial Sequence: Synthetic oligonucleotide
ucaacuuacugagcuacau

SEQ ID NO: 1078907 - RNA, 19 nt, Artificial Sequence
  Description of Artificial Sequence: Synthetic oligonucleotide
gcuauagcuauacaccuuc

SEQ ID NO: 1078908 - RNA, 19 nt, Artificial Sequence
  Description of Artificial Sequence: Synthetic oligonucleotide
gcuggucuaggagagaggg

SEQ ID NO: 1078909 - RNA, 19 nt, Artificial Sequence
  Description of Artificial Sequence: Synthetic oligonucleotide
uaagaaccgggcccgguuc

SEQ ID NO: 1078910 - RNA, 19 nt, Artificial Sequence
  Description of Artificial Sequence: Synthetic oligonucleotide
caacuuacugagcuacaug

SEQ ID NO: 1078911 - RNA, 19 nt, Artificial Sequence
  Description of Artificial Sequence: Synthetic oligonucleotide
ugcuggucuaggagagagg

SEQ ID NO: 1078912 - RNA, 19 nt, Artificial Sequence
  Description of Artificial Sequence: Synthetic oligonucleotide
ugugggucagacagagccu

SEQ ID NO: 1078913 - RNA, 19 nt, Artificial Sequence
  Description of Artificial Sequence: Synthetic oligonucleotide
gccuagauuugcuagccag

SEQ ID NO: 1078914 - RNA, 19 nt, Artificial Sequence
  Description of Artificial Sequence: Synthetic oligonucleotide
uuaagaccagauggccagg

SEQ ID NO: 1078915 - RNA, 19 nt, Artificial Sequence
  Description of Artificial Sequence: Synthetic oligonucleotide
aacaacgaaacagcacaaa

SEQ ID NO: 1078916 - RNA, 19 nt, Artificial Sequence
  Description of Artificial Sequence: Synthetic oligonucleotide
agugaaggagguugucacu

SEQ ID NO: 1078917 - RNA, 19 nt, Artificial Sequence
  Description of Artificial Sequence: Synthetic oligonucleotide
cauuaggucagcauugggu

SEQ ID NO: 1078918 - RNA, 19 nt, Artificial Sequence
  Description of Artificial Sequence: Synthetic oligonucleotide
uuauucccuggcauucuuc

SEQ ID NO: 1078919 - RNA, 19 nt, Artificial Sequence
  Description of Artificial Sequence: Synthetic oligonucleotide
ucaacauggaacggcuaac

SEQ ID NO: 1078920 - RNA, 19 nt, Artificial Sequence
  Description of Artificial Sequence: Synthetic oligonucleotide
ucccuggcauucuucucgg

SEQ ID NO: 1078921 - RNA, 19 nt, Artificial Sequence
  Description of Artificial Sequence: Synthetic oligonucleotide
acauuagggucucaacuua

SEQ ID NO: 1078922 - RNA, 19 nt, Artificial Sequence
  Description of Artificial Sequence: Synthetic oligonucleotide
accucagacuucacaagac

SEQ ID NO: 1078923 - RNA, 19 nt, Artificial Sequence
  Description of Artificial Sequence: Synthetic oligonucleotide
cagacaaggcugcacuuac

SEQ ID NO: 1078924 - RNA, 19 nt, Artificial Sequence
  Description of Artificial Sequence: Synthetic oligonucleotide
gagcuacauguuaagacca

SEQ ID NO: 1078925 - RNA, 19 nt, Artificial Sequence
  Description of Artificial Sequence: Synthetic oligonucleotide
ucuaggagagaggguuccg

SEQ ID NO: 1078926 - RNA, 19 nt, Artificial Sequence
  Description of Artificial Sequence: Synthetic oligonucleotide
gcaagcugggacuggaaag

SEQ ID NO: 1078927 - RNA, 19 nt, Artificial Sequence
  Description of Artificial Sequence: Synthetic oligonucleotide
guugcaccuauagaaccag

SEQ ID NO: 1078928 - RNA, 19 nt, Artificial Sequence
  Description of Artificial Sequence: Synthetic oligonucleotide
agggguuugcccuggcuca

SEQ ID NO: 1078929 - RNA, 19 nt, Artificial Sequence
  Description of Artificial Sequence: Synthetic oligonucleotide
gacauuagggucucaacuu

SEQ ID NO: 1078930 - RNA, 19 nt, Artificial Sequence
  Description of Artificial Sequence: Synthetic oligonucleotide
ugugugguuguugggcuca

SEQ ID NO: 1078931 - RNA, 19 nt, Artificial Sequence
  Description of Artificial Sequence: Synthetic oligonucleotide
ucuggccuaggcaguuugc

SEQ ID NO: 1078932 - RNA, 19 nt, Artificial Sequence
  Description of Artificial Sequence: Synthetic oligonucleotide
aaaucgguuucugcuguaa

SEQ ID NO: 1078933 - RNA, 19 nt, Artificial Sequence
  Description of Artificial Sequence: Synthetic oligonucleotide
caguuucuuacuugaauaa

SEQ ID NO: 1078934 - RNA, 19 nt, Artificial Sequence
  Description of Artificial Sequence: Synthetic oligonucleotide
gcacaaaucaaauuuucua

SEQ ID NO: 1078935 - RNA, 19 nt, Artificial Sequence
  Description of Artificial Sequence: Synthetic oligonucleotide
aaaaucgguuucugcugua

SEQ ID NO: 1078936 - RNA, 19 nt, Artificial Sequence
  Description of Artificial Sequence: Synthetic oligonucleotide
auauucugugugguuguug

SEQ ID NO: 1078937 - RNA, 19 nt, Artificial Sequence
  Description of Artificial Sequence: Synthetic oligonucleotide
caaccauucaacacaugaa

SEQ ID NO: 1078938 - RNA, 19 nt, Artificial Sequence
  Description of Artificial Sequence: Synthetic oligonucleotide
acugagcuacauguuaaga

SEQ ID NO: 1078939 - RNA, 19 nt, Artificial Sequence
  Description of Artificial Sequence: Synthetic oligonucleotide
uguggucaguuaugaccag

SEQ ID NO: 1078940 - RNA, 19 nt, Artificial Sequence
  Description of Artificial Sequence: Synthetic oligonucleotide
agcagagcgcacaccacac

SEQ ID NO: 1078941 - RNA, 19 nt, Artificial Sequence
  Description of Artificial Sequence: Synthetic oligonucleotide
gccuugaaguaguagcugc

SEQ ID NO: 1078942 - RNA, 19 nt, Artificial Sequence
  Description of Artificial Sequence: Synthetic oligonucleotide
agguuguaacauccauuug

SEQ ID NO: 1078943 - RNA, 19 nt, Artificial Sequence
  Description of Artificial Sequence: Synthetic oligonucleotide
ucuaacaccuuagcuucaa

SEQ ID NO: 1078944 - RNA, 19 nt, Artificial Sequence
  Description of Artificial Sequence: Synthetic oligonucleotide
uccuggaucuggguuauuc

SEQ ID NO: 1078945 - RNA, 19 nt, Artificial Sequence
  Description of Artificial Sequence: Synthetic oligonucleotide
uucaggcugccccacuaaa

SEQ ID NO: 1078946 - RNA, 19 nt, Artificial Sequence
  Description of Artificial Sequence: Synthetic oligonucleotide
aguuaugaccagguucugu

SEQ ID NO: 1078947 - RNA, 19 nt, Artificial Sequence
  Description of Artificial Sequence: Synthetic oligonucleotide
uggguuauucccuggcauu

SEQ ID NO: 1078948 - RNA, 19 nt, Artificial Sequence
  Description of Artificial Sequence: Synthetic oligonucleotide
ugauccggaggagguagag

SEQ ID NO: 1078949 - RNA, 19 nt, Artificial Sequence
  Description of Artificial Sequence: Synthetic oligonucleotide
gauggcgcuguguuccuga

SEQ ID NO: 1078950 - RNA, 19 nt, Artificial Sequence
  Description of Artificial Sequence: Synthetic oligonucleotide
cagagugcuaaacgccggc

SEQ ID NO: 1078951 - RNA, 19 nt, Artificial Sequence
  Description of Artificial Sequence: Synthetic oligonucleotide
uucucccuucaacauggaa

SEQ ID NO: 1078952 - RNA, 19 nt, Artificial Sequence
  Description of Artificial Sequence: Synthetic oligonucleotide
cuaacaccuuagcuucaag

SEQ ID NO: 1078953 - RNA, 19 nt, Artificial Sequence
  Description of Artificial Sequence: Synthetic oligonucleotide
cugccuagauuugcuagcc

SEQ ID NO: 1078954 - RNA, 19 nt, Artificial Sequence
  Description of Artificial Sequence: Synthetic oligonucleotide
gcucgcauauucugugugg

SEQ ID NO: 1078955 - RNA, 19 nt, Artificial Sequence
  Description of Artificial Sequence: Synthetic oligonucleotide
gcugaguuagugcuagcug

SEQ ID NO: 1078956 - RNA, 19 nt, Artificial Sequence
  Description of Artificial Sequence: Synthetic oligonucleotide
ccucagagugcuaaacgcc

SEQ ID NO: 1078957 - RNA, 19 nt, Artificial Sequence
  Description of Artificial Sequence: Synthetic oligonucleotide
uucucgggcucgugcaacc

SEQ ID NO: 1078958 - RNA, 19 nt, Artificial Sequence
  Description of Artificial Sequence: Synthetic oligonucleotide
ggcuagucagccuggcagg

SEQ ID NO: 1078959 - RNA, 19 nt, Artificial Sequence
  Description of Artificial Sequence: Synthetic oligonucleotide
gcuguguaagaaccgggcc

SEQ ID NO: 1078960 - RNA, 19 nt, Artificial Sequence
  Description of Artificial Sequence: Synthetic oligonucleotide
ucagacaaggcugcacuua

SEQ ID NO: 1078961 - RNA, 19 nt, Artificial Sequence
  Description of Artificial Sequence: Synthetic oligonucleotide
aagauggcgcuguguuccu

SEQ ID NO: 1078962 - RNA, 19 nt, Artificial Sequence
  Description of Artificial Sequence: Synthetic oligonucleotide
uggccuaggcaguuugccu

SEQ ID NO: 1078963 - RNA, 19 nt, Artificial Sequence
  Description of Artificial Sequence: Synthetic oligonucleotide
ugccuagauuugcuagcca

SEQ ID NO: 1078964 - RNA, 19 nt, Artificial Sequence
  Description of Artificial Sequence: Synthetic oligonucleotide
auuagggucucaacuuacu

SEQ ID NO: 1078965 - RNA, 19 nt, Artificial Sequence
  Description of Artificial Sequence: Synthetic oligonucleotide
agucugaucuaaaggaauu

SEQ ID NO: 1078966 - RNA, 19 nt, Artificial Sequence
  Description of Artificial Sequence: Synthetic oligonucleotide
gguuucugcuguaagaaaa

SEQ ID NO: 1078967 - RNA, 19 nt, Artificial Sequence
  Description of Artificial Sequence: Synthetic oligonucleotide
cguauugcugcugaguuag

SEQ ID NO: 1078968 - RNA, 19 nt, Artificial Sequence
  Description of Artificial Sequence: Synthetic oligonucleotide
gucuaggagagaggguucc

SEQ ID NO: 1078969 - RNA, 19 nt, Artificial Sequence
  Description of Artificial Sequence: Synthetic oligonucleotide
cuggccuaggcaguuugcc

SEQ ID NO: 1078970 - RNA, 19 nt, Artificial Sequence
  Description of Artificial Sequence: Synthetic oligonucleotide
uuuaugagugaaggagguu

SEQ ID NO: 1078971 - RNA, 19 nt, Artificial Sequence
  Description of Artificial Sequence: Synthetic oligonucleotide
ggaucuggguuauucccug

SEQ ID NO: 1078972 - RNA, 19 nt, Artificial Sequence
  Description of Artificial Sequence: Synthetic oligonucleotide
agacuucacaagacccaac

SEQ ID NO: 1078973 - RNA, 19 nt, Artificial Sequence
  Description of Artificial Sequence: Synthetic oligonucleotide
cuaaagcuauagcuauaca

SEQ ID NO: 1078974 - RNA, 19 nt, Artificial Sequence
  Description of Artificial Sequence: Synthetic oligonucleotide
ggaauucuugccccacagc

SEQ ID NO: 1078975 - RNA, 19 nt, Artificial Sequence
  Description of Artificial Sequence: Synthetic oligonucleotide
cccuuuggaauuagaagac

SEQ ID NO: 1078976 - RNA, 19 nt, Artificial Sequence
  Description of Artificial Sequence: Synthetic oligonucleotide
cagguuguaacauccauuu

SEQ ID NO: 1078977 - RNA, 19 nt, Artificial Sequence
  Description of Artificial Sequence: Synthetic oligonucleotide
caguucacauuucucaaua

SEQ ID NO: 1078978 - RNA, 19 nt, Artificial Sequence
  Description of Artificial Sequence: Synthetic oligonucleotide
agcuacauguuaagaccag

SEQ ID NO: 1078979 - RNA, 19 nt, Artificial Sequence
  Description of Artificial Sequence: Synthetic oligonucleotide
ggcaauaauggaucaccuc

SEQ ID NO: 1078980 - RNA, 19 nt, Artificial Sequence
  Description of Artificial Sequence: Synthetic oligonucleotide
gauuugcuagccagugaca

SEQ ID NO: 1078981 - RNA, 19 nt, Artificial Sequence
  Description of Artificial Sequence: Synthetic oligonucleotide
guuuaugagugaaggaggu

SEQ ID NO: 1078982 - RNA, 19 nt, Artificial Sequence
  Description of Artificial Sequence: Synthetic oligonucleotide
gucagugagaggcuguccu

SEQ ID NO: 1078983 - RNA, 19 nt, Artificial Sequence
  Description of Artificial Sequence: Synthetic oligonucleotide
gucuauacaccugugugua

SEQ ID NO: 1078984 - RNA, 19 nt, Artificial Sequence
  Description of Artificial Sequence: Synthetic oligonucleotide
gcuaaacgccggcugcugg

SEQ ID NO: 1078985 - RNA, 19 nt, Artificial Sequence
  Description of Artificial Sequence: Synthetic oligonucleotide
ucccuucaacauggaacgg

SEQ ID NO: 1078986 - RNA, 19 nt, Artificial Sequence
  Description of Artificial Sequence: Synthetic oligonucleotide
uggccgagcguccuuucuc

SEQ ID NO: 1078987 - RNA, 19 nt, Artificial Sequence
  Description of Artificial Sequence: Synthetic oligonucleotide
gcugagugccuugaaguag

SEQ ID NO: 1078988 - RNA, 19 nt, Artificial Sequence
  Description of Artificial Sequence: Synthetic oligonucleotide
cuguuagaccucagacuuc

SEQ ID NO: 1078989 - RNA, 19 nt, Artificial Sequence
  Description of Artificial Sequence: Synthetic oligonucleotide
cccucuguugcaccuauag

SEQ ID NO: 1078990 - RNA, 19 nt, Artificial Sequence
  Description of Artificial Sequence: Synthetic oligonucleotide
cagcaggacuacuagcaga

SEQ ID NO: 1078991 - RNA, 19 nt, Artificial Sequence
  Description of Artificial Sequence: Synthetic oligonucleotide
ugcuaaacgccggcugcug

SEQ ID NO: 1078992 - RNA, 19 nt, Artificial Sequence
  Description of Artificial Sequence: Synthetic oligonucleotide
gcuguuggcugaaacuugc

SEQ ID NO: 1078993 - RNA, 19 nt, Artificial Sequence
  Description of Artificial Sequence: Synthetic oligonucleotide
gcaccuauagaaccaggca

SEQ ID NO: 1078994 - RNA, 19 nt, Artificial Sequence
  Description of Artificial Sequence: Synthetic oligonucleotide
uucgucccagugaggcuga

SEQ ID NO: 1078995 - RNA, 19 nt, Artificial Sequence
  Description of Artificial Sequence: Synthetic oligonucleotide
agagugcuaaacgccggcu

SEQ ID NO: 1078996 - RNA, 19 nt, Artificial Sequence
  Description of Artificial Sequence: Synthetic oligonucleotide
agagggguuugcccuggcu

SEQ ID NO: 1078997 - RNA, 19 nt, Artificial Sequence
  Description of Artificial Sequence: Synthetic oligonucleotide
gaagggugugggucagaca

SEQ ID NO: 1078998 - RNA, 19 nt, Artificial Sequence
  Description of Artificial Sequence: Synthetic oligonucleotide
ggcuguguaagaaccgggc

SEQ ID NO: 1078999 - RNA, 19 nt, Artificial Sequence
  Description of Artificial Sequence: Synthetic oligonucleotide
ggaacggcuaacauuaggu

SEQ ID NO: 1079000 - RNA, 19 nt, Artificial Sequence
  Description of Artificial Sequence: Synthetic oligonucleotide
caacaacgaaacagcacaa

SEQ ID NO: 1079001 - RNA, 19 nt, Artificial Sequence
  Description of Artificial Sequence: Synthetic oligonucleotide
gacagcccaagaagauggc

SEQ ID NO: 1079002 - RNA, 19 nt, Artificial Sequence
  Description of Artificial Sequence: Synthetic oligonucleotide
ggagagaggguuccgucuc

SEQ ID NO: 1079003 - RNA, 19 nt, Artificial Sequence
  Description of Artificial Sequence: Synthetic oligonucleotide
uggcuuuccucuguuugau

SEQ ID NO: 1079004 - RNA, 19 nt, Artificial Sequence
  Description of Artificial Sequence: Synthetic oligonucleotide
gguuugcccuggcucacag

SEQ ID NO: 1079005 - RNA, 19 nt, Artificial Sequence
  Description of Artificial Sequence: Synthetic oligonucleotide
ucgcauauucugugugguu

SEQ ID NO: 1079006 - RNA, 19 nt, Artificial Sequence
  Description of Artificial Sequence: Synthetic oligonucleotide
auggagguuuacaaaccaa

SEQ ID NO: 1079007 - RNA, 19 nt, Artificial Sequence
  Description of Artificial Sequence: Synthetic oligonucleotide
caccacacccacagcgaug

SEQ ID NO: 1079008 - RNA, 19 nt, Artificial Sequence
  Description of Artificial Sequence: Synthetic oligonucleotide
ugagugccuugaaguagua

SEQ ID NO: 1079009 - RNA, 19 nt, Artificial Sequence
  Description of Artificial Sequence: Synthetic oligonucleotide
cccgguucgucccagugag

SEQ ID NO: 1079010 - RNA, 19 nt, Artificial Sequence
  Description of Artificial Sequence: Synthetic oligonucleotide
gcauccaguuugaagggug

SEQ ID NO: 1079011 - RNA, 19 nt, Artificial Sequence
  Description of Artificial Sequence: Synthetic oligonucleotide
cccacuaaagcuauagcua

SEQ ID NO: 1079012 - RNA, 19 nt, Artificial Sequence
  Description of Artificial Sequence: Synthetic oligonucleotide
ggacggggcagucugaucu

SEQ ID NO: 1079013 - RNA, 19 nt, Artificial Sequence
  Description of Artificial Sequence: Synthetic oligonucleotide
acuggucuauacaccugug

SEQ ID NO: 1079014 - RNA, 19 nt, Artificial Sequence
  Description of Artificial Sequence: Synthetic oligonucleotide
gaagacagcccaagaagau

SEQ ID NO: 1079015 - RNA, 19 nt, Artificial Sequence
  Description of Artificial Sequence: Synthetic oligonucleotide
cccuucaacauggaacggc

SEQ ID NO: 1079016 - RNA, 19 nt, Artificial Sequence
  Description of Artificial Sequence: Synthetic oligonucleotide
gcuauacaccuucccugcc

SEQ ID NO: 1079017 - RNA, 19 nt, Artificial Sequence
  Description of Artificial Sequence: Synthetic oligonucleotide
cuggguauccucuggccua

SEQ ID NO: 1079018 - RNA, 19 nt, Artificial Sequence
  Description of Artificial Sequence: Synthetic oligonucleotide
cagcgcuguuggcugaaac

SEQ ID NO: 1079019 - RNA, 19 nt, Artificial Sequence
  Description of Artificial Sequence: Synthetic oligonucleotide
cuucucgggcucgugcaac

SEQ ID NO: 1079020 - RNA, 19 nt, Artificial Sequence
  Description of Artificial Sequence: Synthetic oligonucleotide
cgcauauucugugugguug

SEQ ID NO: 1079021 - RNA, 19 nt, Artificial Sequence
  Description of Artificial Sequence: Synthetic oligonucleotide
aaccaacccuuuggaauua

SEQ ID NO: 1079022 - RNA, 19 nt, Artificial Sequence
  Description of Artificial Sequence: Synthetic oligonucleotide
acgaaacagcacaaaucaa

SEQ ID NO: 1079023 - RNA, 19 nt, Artificial Sequence
  Description of Artificial Sequence: Synthetic oligonucleotide
gucucaacuuacugagcua

SEQ ID NO: 1079024 - RNA, 19 nt, Artificial Sequence
  Description of Artificial Sequence: Synthetic oligonucleotide
acagagcguauugcugcug

SEQ ID NO: 1079025 - RNA, 19 nt, Artificial Sequence
  Description of Artificial Sequence: Synthetic oligonucleotide
gacuacuagcagagcgcac

SEQ ID NO: 1079026 - RNA, 19 nt, Artificial Sequence
  Description of Artificial Sequence: Synthetic oligonucleotide
ggacuacuagcagagcgca

SEQ ID NO: 1079027 - RNA, 19 nt, Artificial Sequence
  Description of Artificial Sequence: Synthetic oligonucleotide
cugagguguuuaugaguga

SEQ ID NO: 1079028 - RNA, 19 nt, Artificial Sequence
  Description of Artificial Sequence: Synthetic oligonucleotide
acccaaccauucaacacau

SEQ ID NO: 1079029 - RNA, 19 nt, Artificial Sequence
  Description of Artificial Sequence: Synthetic oligonucleotide
cuagucagccuggcaggug

SEQ ID NO: 1079030 - RNA, 19 nt, Artificial Sequence
  Description of Artificial Sequence: Synthetic oligonucleotide
agcuauagcuauacaccuu

SEQ ID NO: 1079031 - RNA, 19 nt, Artificial Sequence
  Description of Artificial Sequence: Synthetic oligonucleotide
ggcgcuguguuccugacau

SEQ ID NO: 1079032 - RNA, 19 nt, Artificial Sequence
  Description of Artificial Sequence: Synthetic oligonucleotide
aggagguagagggcugcca

SEQ ID NO: 1079033 - RNA, 19 nt, Artificial Sequence
  Description of Artificial Sequence: Synthetic oligonucleotide
cuggucuauacaccugugu

SEQ ID NO: 1079034 - RNA, 19 nt, Artificial Sequence
  Description of Artificial Sequence: Synthetic oligonucleotide
ggagucugcuggucuagga

SEQ ID NO: 1079035 - RNA, 19 nt, Artificial Sequence
  Description of Artificial Sequence: Synthetic oligonucleotide
gaggcggggccacacugaa

SEQ ID NO: 1079036 - RNA, 19 nt, Artificial Sequence
  Description of Artificial Sequence: Synthetic oligonucleotide
agguuggcucaguuucuua

SEQ ID NO: 1079037 - RNA, 19 nt, Artificial Sequence
  Description of Artificial Sequence: Synthetic oligonucleotide
cauccaguuugaagggugu

SEQ ID NO: 1079038 - RNA, 19 nt, Artificial Sequence
  Description of Artificial Sequence: Synthetic oligonucleotide
gcuacauguuaagaccaga

SEQ ID NO: 1079039 - RNA, 19 nt, Artificial Sequence
  Description of Artificial Sequence: Synthetic oligonucleotide
uggacggggcagucugauc

SEQ ID NO: 1079040 - RNA, 19 nt, Artificial Sequence
  Description of Artificial Sequence: Synthetic oligonucleotide
cuucaacauggaacggcua

SEQ ID NO: 1079041 - RNA, 19 nt, Artificial Sequence
  Description of Artificial Sequence: Synthetic oligonucleotide
gccccacagcucaaguugg

SEQ ID NO: 1079042 - RNA, 19 nt, Artificial Sequence
  Description of Artificial Sequence: Synthetic oligonucleotide
uacauacauuuggggcccu

SEQ ID NO: 1079043 - RNA, 19 nt, Artificial Sequence
  Description of Artificial Sequence: Synthetic oligonucleotide
cuggguuauucccuggcau

SEQ ID NO: 1079044 - RNA, 19 nt, Artificial Sequence
  Description of Artificial Sequence: Synthetic oligonucleotide
gcauauucugugugguugu

SEQ ID NO: 1079045 - RNA, 19 nt, Artificial Sequence
  Description of Artificial Sequence: Synthetic oligonucleotide
guaagaaccgggcccgguu

SEQ ID NO: 1079046 - RNA, 19 nt, Artificial Sequence
  Description of Artificial Sequence: Synthetic oligonucleotide
guuauucccuggcauucuu

SEQ ID NO: 1079047 - RNA, 19 nt, Artificial Sequence
  Description of Artificial Sequence: Synthetic oligonucleotide
guugaccccuuggcuuucc

SEQ ID NO: 1079048 - RNA, 19 nt, Artificial Sequence
  Description of Artificial Sequence: Synthetic oligonucleotide
caguuaugaccagguucug

SEQ ID NO: 1079049 - RNA, 19 nt, Artificial Sequence
  Description of Artificial Sequence: Synthetic oligonucleotide
cuucaggcugccccacuaa

SEQ ID NO: 1079050 - RNA, 19 nt, Artificial Sequence
  Description of Artificial Sequence: Synthetic oligonucleotide
cucgcauauucuguguggu

SEQ ID NO: 1079051 - RNA, 19 nt, Artificial Sequence
  Description of Artificial Sequence: Synthetic oligonucleotide
gggagucugcuggucuagg

SEQ ID NO: 1079052 - RNA, 19 nt, Artificial Sequence
  Description of Artificial Sequence: Synthetic oligonucleotide
cgguucgucccagugaggc

SEQ ID NO: 1079053 - RNA, 19 nt, Artificial Sequence
  Description of Artificial Sequence: Synthetic oligonucleotide
gacggggcagucugaucua

SEQ ID NO: 1079054 - RNA, 19 nt, Artificial Sequence
  Description of Artificial Sequence: Synthetic oligonucleotide
cggcauccaguuugaaggg

SEQ ID NO: 1079055 - RNA, 19 nt, Artificial Sequence
  Description of Artificial Sequence: Synthetic oligonucleotide
ccuucaacauggaacggcu

SEQ ID NO: 1079056 - RNA, 19 nt, Artificial Sequence
  Description of Artificial Sequence: Synthetic oligonucleotide
gaaaggaggcggggccaca

SEQ ID NO: 1079057 - RNA, 19 nt, Artificial Sequence
  Description of Artificial Sequence: Synthetic oligonucleotide
uccuuucaacuggucuaua

SEQ ID NO: 1079058 - RNA, 19 nt, Artificial Sequence
  Description of Artificial Sequence: Synthetic oligonucleotide
ggagguagagggcugccau

SEQ ID NO: 1079059 - RNA, 19 nt, Artificial Sequence
  Description of Artificial Sequence: Synthetic oligonucleotide
gguuuacaaaccaacccuu

SEQ ID NO: 1079060 - RNA, 19 nt, Artificial Sequence
  Description of Artificial Sequence: Synthetic oligonucleotide
cuaggagagaggguuccgu

SEQ ID NO: 1079061 - RNA, 19 nt, Artificial Sequence
  Description of Artificial Sequence: Synthetic oligonucleotide
agaaccgggcccgguucgu

SEQ ID NO: 1079062 - RNA, 19 nt, Artificial Sequence
  Description of Artificial Sequence: Synthetic oligonucleotide
cacagagcguauugcugcu

SEQ ID NO: 1079063 - RNA, 19 nt, Artificial Sequence
  Description of Artificial Sequence: Synthetic oligonucleotide
ugcuggccgagcguccuuu

SEQ ID NO: 1079064 - RNA, 19 nt, Artificial Sequence
  Description of Artificial Sequence: Synthetic oligonucleotide
caaccuuguggaagaaguu

SEQ ID NO: 1079065 - RNA, 19 nt, Artificial Sequence
  Description of Artificial Sequence: Synthetic oligonucleotide
ggcccgguucgucccagug

SEQ ID NO: 1079066 - RNA, 19 nt, Artificial Sequence
  Description of Artificial Sequence: Synthetic oligonucleotide
aggcggggccacacugaac

SEQ ID NO: 1079067 - RNA, 19 nt, Artificial Sequence
  Description of Artificial Sequence: Synthetic oligonucleotide
cgagcguccuuucucucug

SEQ ID NO: 1079068 - RNA, 19 nt, Artificial Sequence
  Description of Artificial Sequence: Synthetic oligonucleotide
ccucuguugcaccuauaga

SEQ ID NO: 1079069 - RNA, 19 nt, Artificial Sequence
  Description of Artificial Sequence: Synthetic oligonucleotide
acauacauuuggggcccuu

SEQ ID NO: 1079070 - RNA, 19 nt, Artificial Sequence
  Description of Artificial Sequence: Synthetic oligonucleotide
gguugucacugaccuucuc

SEQ ID NO: 1079071 - RNA, 19 nt, Artificial Sequence
  Description of Artificial Sequence: Synthetic oligonucleotide
gaaccgggcccgguucguc

SEQ ID NO: 1079072 - RNA, 19 nt, Artificial Sequence
  Description of Artificial Sequence: Synthetic oligonucleotide
ggcuaacauuaggucagca

SEQ ID NO: 1079073 - RNA, 19 nt, Artificial Sequence
  Description of Artificial Sequence: Synthetic oligonucleotide
cuguuggcugaaacuugcu

SEQ ID NO: 1079074 - RNA, 19 nt, Artificial Sequence
  Description of Artificial Sequence: Synthetic oligonucleotide
cacugaccuucucccuuca

SEQ ID NO: 1079075 - RNA, 19 nt, Artificial Sequence
  Description of Artificial Sequence: Synthetic oligonucleotide
acggggcagucugaucuaa

SEQ ID NO: 1079076 - RNA, 19 nt, Artificial Sequence
  Description of Artificial Sequence: Synthetic oligonucleotide
cuggucuaggagagagggu

SEQ ID NO: 1079077 - RNA, 19 nt, Artificial Sequence
  Description of Artificial Sequence: Synthetic oligonucleotide
ucgucccagugaggcugag

SEQ ID NO: 1079078 - RNA, 19 nt, Artificial Sequence
  Description of Artificial Sequence: Synthetic oligonucleotide
gggcucgugcaaccuugug

SEQ ID NO: 1079079 - RNA, 19 nt, Artificial Sequence
  Description of Artificial Sequence: Synthetic oligonucleotide
ccaacccuuuggaauuaga

SEQ ID NO: 1079080 - RNA, 19 nt, Artificial Sequence
  Description of Artificial Sequence: Synthetic oligonucleotide
gcguauugcugcugaguua

SEQ ID NO: 1079081 - RNA, 19 nt, Artificial Sequence
  Description of Artificial Sequence: Synthetic oligonucleotide
agcgcacaccacacccaca

SEQ ID NO: 1079082 - RNA, 19 nt, Artificial Sequence
  Description of Artificial Sequence: Synthetic oligonucleotide
gcccgguucgucccaguga

SEQ ID NO: 1079083 - RNA, 19 nt, Artificial Sequence
  Description of Artificial Sequence: Synthetic oligonucleotide
gugcuaaacgccggcugcu

SEQ ID NO: 1079084 - RNA, 19 nt, Artificial Sequence
  Description of Artificial Sequence: Synthetic oligonucleotide
gccugucucaaugcucgca

SEQ ID NO: 1079085 - RNA, 19 nt, Artificial Sequence
  Description of Artificial Sequence: Synthetic oligonucleotide
ggccgagcguccuuucucu

SEQ ID NO: 1079086 - RNA, 19 nt, Artificial Sequence
  Description of Artificial Sequence: Synthetic oligonucleotide
ccagguuguaacauccauu

SEQ ID NO: 1079087 - RNA, 19 nt, Artificial Sequence
  Description of Artificial Sequence: Synthetic oligonucleotide
ccgguucgucccagugagg

SEQ ID NO: 1079088 - RNA, 19 nt, Artificial Sequence
  Description of Artificial Sequence: Synthetic oligonucleotide
guagcugcugaggguuccu

SEQ ID NO: 1079089 - RNA, 19 nt, Artificial Sequence
  Description of Artificial Sequence: Synthetic oligonucleotide
ggucaguuaugaccagguu

SEQ ID NO: 1079090 - RNA, 19 nt, Artificial Sequence
  Description of Artificial Sequence: Synthetic oligonucleotide
gggguuugcccuggcucac

SEQ ID NO: 1079091 - RNA, 19 nt, Artificial Sequence
  Description of Artificial Sequence: Synthetic oligonucleotide
ccuuagcuucaagacugca

SEQ ID NO: 1079092 - RNA, 19 nt, Artificial Sequence
  Description of Artificial Sequence: Synthetic oligonucleotide
gccuaggcaguuugccugu

SEQ ID NO: 1079093 - RNA, 19 nt, Artificial Sequence
  Description of Artificial Sequence: Synthetic oligonucleotide
cuggccgagcguccuuucu

SEQ ID NO: 1079094 - RNA, 19 nt, Artificial Sequence
  Description of Artificial Sequence: Synthetic oligonucleotide
cauauucugugugguuguu

SEQ ID NO: 1079095 - RNA, 19 nt, Artificial Sequence
  Description of Artificial Sequence: Synthetic oligonucleotide
gcgcuguuggcugaaacuu

SEQ ID NO: 1079096 - RNA, 19 nt, Artificial Sequence
  Description of Artificial Sequence: Synthetic oligonucleotide
gccgagcguccuuucucuc

SEQ ID NO: 1079097 - RNA, 19 nt, Artificial Sequence
  Description of Artificial Sequence: Synthetic oligonucleotide
gcuggccgagcguccuuuc

SEQ ID NO: 1079098 - RNA, 19 nt, Artificial Sequence
  Description of Artificial Sequence: Synthetic oligonucleotide
cagagccucugccuagauu

SEQ ID NO: 1079099 - RNA, 19 nt, Artificial Sequence
  Description of Artificial Sequence: Synthetic oligonucleotide
ggguuugcccuggcucaca

SEQ ID NO: 1079100 - RNA, 19 nt, Artificial Sequence
  Description of Artificial Sequence: Synthetic oligonucleotide
ccgagcguccuuucucucu

SEQ ID NO: 1079101 - RNA, 19 nt, Artificial Sequence
  Description of Artificial Sequence: Synthetic oligonucleotide
cggcuaacauuaggucagc

SEQ ID NO: 1079102 - RNA, 19 nt, Artificial Sequence
  Description of Artificial Sequence: Synthetic oligonucleotide
ccggaggagguagagggcu

SEQ ID NO: 1079103 - RNA, 19 nt, Artificial Sequence
  Description of Artificial Sequence: Synthetic oligonucleotide
ccuaggcaguuugccuguc

SEQ ID NO: 1079104 - RNA, 19 nt, Artificial Sequence
  Description of Artificial Sequence: Synthetic oligonucleotide
gccccggcauccaguuuga

SEQ ID NO: 1079105 - RNA, 19 nt, Artificial Sequence
  Description of Artificial Sequence: Synthetic oligonucleotide
ccccagggaucagagacau

SEQ ID NO: 1079106 - RNA, 19 nt, Artificial Sequence
  Description of Artificial Sequence: Synthetic oligonucleotide
gccagccagucacguggcu

SEQ ID NO: 1079107 - RNA, 19 nt, Artificial Sequence
  Description of Artificial Sequence: Synthetic oligonucleotide
cggggcagucugaucuaaa

SEQ ID NO: 1079108 - RNA, 19 nt, Artificial Sequence
  Description of Artificial Sequence: Synthetic oligonucleotide
ccccucuguugcaccuaua

SEQ ID NO: 1079109 - RNA, 19 nt, Artificial Sequence
  Description of Artificial Sequence: Synthetic oligonucleotide
ccgggcccgguucguccca

SEQ ID NO: 1079110 - RNA, 19 nt, Artificial Sequence
  Description of Artificial Sequence: Synthetic oligonucleotide
gcgcuguguuccugacauu

SEQ ID NO: 1079111 - RNA, 19 nt, Artificial Sequence
  Description of Artificial Sequence: Synthetic oligonucleotide
cgggcucgugcaaccuugu

SEQ ID NO: 1079112 - RNA, 19 nt, Artificial Sequence
  Description of Artificial Sequence: Synthetic oligonucleotide
cccagggaucagagacauu

SEQ ID NO: 1079113 - RNA, 19 nt, Artificial Sequence
  Description of Artificial Sequence: Synthetic oligonucleotide
ugaacuaagaacagcgucg

SEQ ID NO: 1079114 - RNA, 19 nt, Artificial Sequence
  Description of Artificial Sequence: Synthetic oligonucleotide
aauuuuauacaauggcuag

SEQ ID NO: 1079115 - RNA, 19 nt, Artificial Sequence
  Description of Artificial Sequence: Synthetic oligonucleotide
uuaguaaccagccagaaau

SEQ ID NO: 1079116 - RNA, 19 nt, Artificial Sequence
  Description of Artificial Sequence: Synthetic oligonucleotide
uaagauuuccucuuuaaag

SEQ ID NO: 1079117 - RNA, 19 nt, Artificial Sequence
  Description of Artificial Sequence: Synthetic oligonucleotide
uauacaauggcuagcaggc

SEQ ID NO: 1079118 - RNA, 19 nt, Artificial Sequence
  Description of Artificial Sequence: Synthetic oligonucleotide
cauguaacaaacuucacag

SEQ ID NO: 1079119 - RNA, 19 nt, Artificial Sequence
  Description of Artificial Sequence: Synthetic oligonucleotide
aaauccacuagccaugcuc

SEQ ID NO: 1079120 - RNA, 19 nt, Artificial Sequence
  Description of Artificial Sequence: Synthetic oligonucleotide
auuagaaucgguccccacc

SEQ ID NO: 1079121 - RNA, 19 nt, Artificial Sequence
  Description of Artificial Sequence: Synthetic oligonucleotide
aacacguaaccacagcgac

SEQ ID NO: 1079122 - RNA, 19 nt, Artificial Sequence
  Description of Artificial Sequence: Synthetic oligonucleotide
gaagcaagaauuaaggcug

SEQ ID NO: 1079123 - RNA, 19 nt, Artificial Sequence
  Description of Artificial Sequence: Synthetic oligonucleotide
aguggagcuaauuuuaaag

SEQ ID NO: 1079124 - RNA, 19 nt, Artificial Sequence
  Description of Artificial Sequence: Synthetic oligonucleotide
uguuaaacuaaaacugagc

SEQ ID NO: 1079125 - RNA, 19 nt, Artificial Sequence
  Description of Artificial Sequence: Synthetic oligonucleotide
uuuggauugagacacuacu

SEQ ID NO: 1079126 - RNA, 19 nt, Artificial Sequence
  Description of Artificial Sequence: Synthetic oligonucleotide
agaacacguaaccacagcg

SEQ ID NO: 1079127 - RNA, 19 nt, Artificial Sequence
  Description of Artificial Sequence: Synthetic oligonucleotide
uguguguaagucaaucuag

SEQ ID NO: 1079128 - RNA, 19 nt, Artificial Sequence
  Description of Artificial Sequence: Synthetic oligonucleotide
ucaaucuagggcacaacgg

SEQ ID NO: 1079129 - RNA, 19 nt, Artificial Sequence
  Description of Artificial Sequence: Synthetic oligonucleotide
uguaaguuggacuccagca

SEQ ID NO: 1079130 - RNA, 19 nt, Artificial Sequence
  Description of Artificial Sequence: Synthetic oligonucleotide
uguacgauugguuuaauuu

SEQ ID NO: 1079131 - RNA, 19 nt, Artificial Sequence
  Description of Artificial Sequence: Synthetic oligonucleotide
agauacaagaauuuccgcu

SEQ ID NO: 1079132 - RNA, 19 nt, Artificial Sequence
  Description of Artificial Sequence: Synthetic oligonucleotide
uguguaagucaaucuaggg

SEQ ID NO: 1079133 - RNA, 19 nt, Artificial Sequence
  Description of Artificial Sequence: Synthetic oligonucleotide
uuagaaucgguccccaccc

SEQ ID NO: 1079134 - RNA, 19 nt, Artificial Sequence
  Description of Artificial Sequence: Synthetic oligonucleotide
aacggguuaaauaagauuu

SEQ ID NO: 1079135 - RNA, 19 nt, Artificial Sequence
  Description of Artificial Sequence: Synthetic oligonucleotide
uggauugagacacuacuug

SEQ ID NO: 1079136 - RNA, 19 nt, Artificial Sequence
  Description of Artificial Sequence: Synthetic oligonucleotide
uccuaaauaaggcuaacau

SEQ ID NO: 1079137 - RNA, 19 nt, Artificial Sequence
  Description of Artificial Sequence: Synthetic oligonucleotide
cagaugaaacuccaaaugc

SEQ ID NO: 1079138 - RNA, 19 nt, Artificial Sequence
  Description of Artificial Sequence: Synthetic oligonucleotide
uggagcuaauuuuaaagug

SEQ ID NO: 1079139 - RNA, 19 nt, Artificial Sequence
  Description of Artificial Sequence: Synthetic oligonucleotide
gacgguguaacauacagaa

SEQ ID NO: 1079140 - RNA, 19 nt, Artificial Sequence
  Description of Artificial Sequence: Synthetic oligonucleotide
ugaaaggccggacacgaag

SEQ ID NO: 1079141 - RNA, 19 nt, Artificial Sequence
  Description of Artificial Sequence: Synthetic oligonucleotide
uccugaagcaagaauuaag

SEQ ID NO: 1079142 - RNA, 19 nt, Artificial Sequence
  Description of Artificial Sequence: Synthetic oligonucleotide
acuacuugcagaugaaacu

SEQ ID NO: 1079143 - RNA, 19 nt, Artificial Sequence
  Description of Artificial Sequence: Synthetic oligonucleotide
gagacgguguaacauacag

SEQ ID NO: 1079144 - RNA, 19 nt, Artificial Sequence
  Description of Artificial Sequence: Synthetic oligonucleotide
gucaaucuagggcacaacg

SEQ ID NO: 1079145 - RNA, 19 nt, Artificial Sequence
  Description of Artificial Sequence: Synthetic oligonucleotide
caaucuagggcacaacggg

SEQ ID NO: 1079146 - RNA, 19 nt, Artificial Sequence
  Description of Artificial Sequence: Synthetic oligonucleotide
gaauuaaggcuggagauug

SEQ ID NO: 1079147 - RNA, 19 nt, Artificial Sequence
  Description of Artificial Sequence: Synthetic oligonucleotide
ugugugacgaguuucccca

SEQ ID NO: 1079148 - RNA, 19 nt, Artificial Sequence
  Description of Artificial Sequence: Synthetic oligonucleotide
acuuuguccuaaauaaggc

SEQ ID NO: 1079149 - RNA, 19 nt, Artificial Sequence
  Description of Artificial Sequence: Synthetic oligonucleotide
uuuccuauucgguauuuug

SEQ ID NO: 1079150 - RNA, 19 nt, Artificial Sequence
  Description of Artificial Sequence: Synthetic oligonucleotide
guguaagucaaucuagggc

SEQ ID NO: 1079151 - RNA, 19 nt, Artificial Sequence
  Description of Artificial Sequence: Synthetic oligonucleotide
uguguuguuuuaaauccac

SEQ ID NO: 1079152 - RNA, 19 nt, Artificial Sequence
  Description of Artificial Sequence: Synthetic oligonucleotide
ucuugugugacgaguuucc

SEQ ID NO: 1079153 - RNA, 19 nt, Artificial Sequence
  Description of Artificial Sequence: Synthetic oligonucleotide
caugauggcuuccucacgg

SEQ ID NO: 1079154 - RNA, 19 nt, Artificial Sequence
  Description of Artificial Sequence: Synthetic oligonucleotide
gaacguacagucaugcugc

SEQ ID NO: 1079155 - RNA, 19 nt, Artificial Sequence
  Description of Artificial Sequence: Synthetic oligonucleotide
caugcguggacuaaucuug

SEQ ID NO: 1079156 - RNA, 19 nt, Artificial Sequence
  Description of Artificial Sequence: Synthetic oligonucleotide
cuaaacuacaguaccagga

SEQ ID NO: 1079157 - RNA, 19 nt, Artificial Sequence
  Description of Artificial Sequence: Synthetic oligonucleotide
aaagcuuccuccauuagaa

SEQ ID NO: 1079158 - RNA, 19 nt, Artificial Sequence
  Description of Artificial Sequence: Synthetic oligonucleotide
guaaguuggacuccagcag

SEQ ID NO: 1079159 - RNA, 19 nt, Artificial Sequence
  Description of Artificial Sequence: Synthetic oligonucleotide
gaagaguuccugucaaagc

SEQ ID NO: 1079160 - RNA, 19 nt, Artificial Sequence
  Description of Artificial Sequence: Synthetic oligonucleotide
uauguguguaagucaaucu

SEQ ID NO: 1079161 - RNA, 19 nt, Artificial Sequence
  Description of Artificial Sequence: Synthetic oligonucleotide
uuuauacaauggcuagcag

SEQ ID NO: 1079162 - RNA, 19 nt, Artificial Sequence
  Description of Artificial Sequence: Synthetic oligonucleotide
ugcagaguggauauagggu

SEQ ID NO: 1079163 - RNA, 19 nt, Artificial Sequence
  Description of Artificial Sequence: Synthetic oligonucleotide
agaauaaaguuacaagauu

SEQ ID NO: 1079164 - RNA, 19 nt, Artificial Sequence
  Description of Artificial Sequence: Synthetic oligonucleotide
ugagcucuaggcuaugugu

SEQ ID NO: 1079165 - RNA, 19 nt, Artificial Sequence
  Description of Artificial Sequence: Synthetic oligonucleotide
ugaggggcuaagaaggaca

SEQ ID NO: 1079166 - RNA, 19 nt, Artificial Sequence
  Description of Artificial Sequence: Synthetic oligonucleotide
acaaacuucacagaacaga

SEQ ID NO: 1079167 - RNA, 19 nt, Artificial Sequence
  Description of Artificial Sequence: Synthetic oligonucleotide
uuccgcuucccuuacaugu

SEQ ID NO: 1079168 - RNA, 19 nt, Artificial Sequence
  Description of Artificial Sequence: Synthetic oligonucleotide
auacaagaauuuccgcuuc

SEQ ID NO: 1079169 - RNA, 19 nt, Artificial Sequence
  Description of Artificial Sequence: Synthetic oligonucleotide
uccuauucgguauuuugga

SEQ ID NO: 1079170 - RNA, 19 nt, Artificial Sequence
  Description of Artificial Sequence: Synthetic oligonucleotide
uuagugaacuaagaacagc

SEQ ID NO: 1079171 - RNA, 19 nt, Artificial Sequence
  Description of Artificial Sequence: Synthetic oligonucleotide
agugguaaacgcugggcag

SEQ ID NO: 1079172 - RNA, 19 nt, Artificial Sequence
  Description of Artificial Sequence: Synthetic oligonucleotide
uugaguggagcuaauuuua

SEQ ID NO: 1079173 - RNA, 19 nt, Artificial Sequence
  Description of Artificial Sequence: Synthetic oligonucleotide
cacuacuugcagaugaaac

SEQ ID NO: 1079174 - RNA, 19 nt, Artificial Sequence
  Description of Artificial Sequence: Synthetic oligonucleotide
caccuuaguaaccagccag

SEQ ID NO: 1079175 - RNA, 19 nt, Artificial Sequence
  Description of Artificial Sequence: Synthetic oligonucleotide
auaagauuuccucuuuaaa

SEQ ID NO: 1079176 - RNA, 19 nt, Artificial Sequence
  Description of Artificial Sequence: Synthetic oligonucleotide
agaccuagccccugagccc

SEQ ID NO: 1079177 - RNA, 19 nt, Artificial Sequence
  Description of Artificial Sequence: Synthetic oligonucleotide
uaaccagccagaaaucaau

SEQ ID NO: 1079178 - RNA, 19 nt, Artificial Sequence
  Description of Artificial Sequence: Synthetic oligonucleotide
aagccucguucucagacug

SEQ ID NO: 1079179 - RNA, 19 nt, Artificial Sequence
  Description of Artificial Sequence: Synthetic oligonucleotide
augauuuccuauucgguau

SEQ ID NO: 1079180 - RNA, 19 nt, Artificial Sequence
  Description of Artificial Sequence: Synthetic oligonucleotide
uggacuaaucuugagugga

SEQ ID NO: 1079181 - RNA, 19 nt, Artificial Sequence
  Description of Artificial Sequence: Synthetic oligonucleotide
cacguaaccacagcgacag

SEQ ID NO: 1079182 - RNA, 19 nt, Artificial Sequence
  Description of Artificial Sequence: Synthetic oligonucleotide
uacaagaauuuccgcuucc

SEQ ID NO: 1079183 - RNA, 19 nt, Artificial Sequence
  Description of Artificial Sequence: Synthetic oligonucleotide
uguagucugacgcgugccc

SEQ ID NO: 1079184 - RNA, 19 nt, Artificial Sequence
  Description of Artificial Sequence: Synthetic oligonucleotide
uucccuuacauguaacaaa

SEQ ID NO: 1079185 - RNA, 19 nt, Artificial Sequence
  Description of Artificial Sequence: Synthetic oligonucleotide
auguuaaacuaaaacugag

SEQ ID NO: 1079186 - RNA, 19 nt, Artificial Sequence
  Description of Artificial Sequence: Synthetic oligonucleotide
ccucuagugacucaguccg

SEQ ID NO: 1079187 - RNA, 19 nt, Artificial Sequence
  Description of Artificial Sequence: Synthetic oligonucleotide
uaggcuauguguguaaguc

SEQ ID NO: 1079188 - RNA, 19 nt, Artificial Sequence
  Description of Artificial Sequence: Synthetic oligonucleotide
ugacaacagugguaaacgc

SEQ ID NO: 1079189 - RNA, 19 nt, Artificial Sequence
  Description of Artificial Sequence: Synthetic oligonucleotide
uggucgaacguacagucau

SEQ ID NO: 1079190 - RNA, 19 nt, Artificial Sequence
  Description of Artificial Sequence: Synthetic oligonucleotide
uguggcgccucgcugagga

SEQ ID NO: 1079191 - RNA, 19 nt, Artificial Sequence
  Description of Artificial Sequence: Synthetic oligonucleotide
auguguguaagucaaucua

SEQ ID NO: 1079192 - RNA, 19 nt, Artificial Sequence
  Description of Artificial Sequence: Synthetic oligonucleotide
uucgguauuuuggauugag

SEQ ID NO: 1079193 - RNA, 19 nt, Artificial Sequence
  Description of Artificial Sequence: Synthetic oligonucleotide
ggcacaacggguuaaauaa

SEQ ID NO: 1079194 - RNA, 19 nt, Artificial Sequence
  Description of Artificial Sequence: Synthetic oligonucleotide
cauguggucgaacguacag

SEQ ID NO: 1079195 - RNA, 19 nt, Artificial Sequence
  Description of Artificial Sequence: Synthetic oligonucleotide
guggacuaaucuugagugg

SEQ ID NO: 1079196 - RNA, 19 nt, Artificial Sequence
  Description of Artificial Sequence: Synthetic oligonucleotide
acucaguccggucuggaca

SEQ ID NO: 1079197 - RNA, 19 nt, Artificial Sequence
  Description of Artificial Sequence: Synthetic oligonucleotide
agaugaaacuccaaaugca

SEQ ID NO: 1079198 - RNA, 19 nt, Artificial Sequence
  Description of Artificial Sequence: Synthetic oligonucleotide
augauggcuuccucacggc

SEQ ID NO: 1079199 - RNA, 19 nt, Artificial Sequence
  Description of Artificial Sequence: Synthetic oligonucleotide
uuggauugagacacuacuu

SEQ ID NO: 1079200 - RNA, 19 nt, Artificial Sequence
  Description of Artificial Sequence: Synthetic oligonucleotide
acuacaguaccaggauggc

SEQ ID NO: 1079201 - RNA, 19 nt, Artificial Sequence
  Description of Artificial Sequence: Synthetic oligonucleotide
accaagcaaaagugaagag

SEQ ID NO: 1079202 - RNA, 19 nt, Artificial Sequence
  Description of Artificial Sequence: Synthetic oligonucleotide
aaacgcugggcagaccuag

SEQ ID NO: 1079203 - RNA, 19 nt, Artificial Sequence
  Description of Artificial Sequence: Synthetic oligonucleotide
uccauuagaaucggucccc

SEQ ID NO: 1079204 - RNA, 19 nt, Artificial Sequence
  Description of Artificial Sequence: Synthetic oligonucleotide
aagaggugaaaggccggac

SEQ ID NO: 1079205 - RNA, 19 nt, Artificial Sequence
  Description of Artificial Sequence: Synthetic oligonucleotide
ggauugagacacuacuugc

SEQ ID NO: 1079206 - RNA, 19 nt, Artificial Sequence
  Description of Artificial Sequence: Synthetic oligonucleotide
cuagcaggcaccuuaguaa

SEQ ID NO: 1079207 - RNA, 19 nt, Artificial Sequence
  Description of Artificial Sequence: Synthetic oligonucleotide
gauacaagaauuuccgcuu

SEQ ID NO: 1079208 - RNA, 19 nt, Artificial Sequence
  Description of Artificial Sequence: Synthetic oligonucleotide
cuauguguguaagucaauc

SEQ ID NO: 1079209 - RNA, 19 nt, Artificial Sequence
  Description of Artificial Sequence: Synthetic oligonucleotide
agaggugaaaggccggaca

SEQ ID NO: 1079210 - RNA, 19 nt, Artificial Sequence
  Description of Artificial Sequence: Synthetic oligonucleotide
aguaaccagccagaaauca

SEQ ID NO: 1079211 - RNA, 19 nt, Artificial Sequence
  Description of Artificial Sequence: Synthetic oligonucleotide
ucgguauuuuggauugaga

SEQ ID NO: 1079212 - RNA, 19 nt, Artificial Sequence
  Description of Artificial Sequence: Synthetic oligonucleotide
ugcccuagagugaggcgcg

SEQ ID NO: 1079213 - RNA, 19 nt, Artificial Sequence
  Description of Artificial Sequence: Synthetic oligonucleotide
acgcugggcagaccuagcc

SEQ ID NO: 1079214 - RNA, 19 nt, Artificial Sequence
  Description of Artificial Sequence: Synthetic oligonucleotide
ugaguggagcuaauuuuaa

SEQ ID NO: 1079215 - RNA, 19 nt, Artificial Sequence
  Description of Artificial Sequence: Synthetic oligonucleotide
acggccgcggcccaugugg

SEQ ID NO: 1079216 - RNA, 19 nt, Artificial Sequence
  Description of Artificial Sequence: Synthetic oligonucleotide
ucuaggcuauguguguaag

SEQ ID NO: 1079217 - RNA, 19 nt, Artificial Sequence
  Description of Artificial Sequence: Synthetic oligonucleotide
auauagggugggaagaaca

SEQ ID NO: 1079218 - RNA, 19 nt, Artificial Sequence
  Description of Artificial Sequence: Synthetic oligonucleotide
guguaacauacagaacacg

SEQ ID NO: 1079219 - RNA, 19 nt, Artificial Sequence
  Description of Artificial Sequence: Synthetic oligonucleotide
aggcuuuuguaaguuggac

SEQ ID NO: 1079220 - RNA, 19 nt, Artificial Sequence
  Description of Artificial Sequence: Synthetic oligonucleotide
agaacagacacugcaggga

SEQ ID NO: 1079221 - RNA, 19 nt, Artificial Sequence
  Description of Artificial Sequence: Synthetic oligonucleotide
aagguggggagcaugcgug

SEQ ID NO: 1079222 - RNA, 19 nt, Artificial Sequence
  Description of Artificial Sequence: Synthetic oligonucleotide
uuuugucuguacgauuggu

SEQ ID NO: 1079223 - RNA, 19 nt, Artificial Sequence
  Description of Artificial Sequence: Synthetic oligonucleotide
ggacacuuuccgcuuaagg

SEQ ID NO: 1079224 - RNA, 19 nt, Artificial Sequence
  Description of Artificial Sequence: Synthetic oligonucleotide
acauguggcgccucgcuga

SEQ ID NO: 1079225 - RNA, 19 nt, Artificial Sequence
  Description of Artificial Sequence: Synthetic oligonucleotide
aacuaagaacagcgucgug

SEQ ID NO: 1079226 - RNA, 19 nt, Artificial Sequence
  Description of Artificial Sequence: Synthetic oligonucleotide
acaagcccuuccucccucc

SEQ ID NO: 1079227 - RNA, 19 nt, Artificial Sequence
  Description of Artificial Sequence: Synthetic oligonucleotide
cagccagaaaucaauuuca

SEQ ID NO: 1079228 - RNA, 19 nt, Artificial Sequence
  Description of Artificial Sequence: Synthetic oligonucleotide
ucuagugacucaguccggu

SEQ ID NO: 1079229 - RNA, 19 nt, Artificial Sequence
  Description of Artificial Sequence: Synthetic oligonucleotide
ggauccugugcagaaaagg

SEQ ID NO: 1079230 - RNA, 19 nt, Artificial Sequence
  Description of Artificial Sequence: Synthetic oligonucleotide
auggcuagcaggcaccuua

SEQ ID NO: 1079231 - RNA, 19 nt, Artificial Sequence
  Description of Artificial Sequence: Synthetic oligonucleotide
uggagauugugcagugggu

SEQ ID NO: 1079232 - RNA, 19 nt, Artificial Sequence
  Description of Artificial Sequence: Synthetic oligonucleotide
uaguaaccagccagaaauc

SEQ ID NO: 1079233 - RNA, 19 nt, Artificial Sequence
  Description of Artificial Sequence: Synthetic oligonucleotide
cucaguccggucuggacac

SEQ ID NO: 1079234 - RNA, 19 nt, Artificial Sequence
  Description of Artificial Sequence: Synthetic oligonucleotide
ccaucaaccccuaaacuac

SEQ ID NO: 1079235 - RNA, 19 nt, Artificial Sequence
  Description of Artificial Sequence: Synthetic oligonucleotide
uccggucuggacacuuucc

SEQ ID NO: 1079236 - RNA, 19 nt, Artificial Sequence
  Description of Artificial Sequence: Synthetic oligonucleotide
acgccgacucuucugcuuc

SEQ ID NO: 1079237 - RNA, 19 nt, Artificial Sequence
  Description of Artificial Sequence: Synthetic oligonucleotide
aggagcgccccacuuuccg

SEQ ID NO: 1079238 - RNA, 19 nt, Artificial Sequence
  Description of Artificial Sequence: Synthetic oligonucleotide
guaaacgcugggcagaccu

SEQ ID NO: 1079239 - RNA, 19 nt, Artificial Sequence
  Description of Artificial Sequence: Synthetic oligonucleotide
gagcuaauuuuaaagugaa

SEQ ID NO: 1079240 - RNA, 19 nt, Artificial Sequence
  Description of Artificial Sequence: Synthetic oligonucleotide
acgaguuuccccauuacau

SEQ ID NO: 1079241 - RNA, 19 nt, Artificial Sequence
  Description of Artificial Sequence: Synthetic oligonucleotide
acggguuaaauaagauuuc

SEQ ID NO: 1079242 - RNA, 19 nt, Artificial Sequence
  Description of Artificial Sequence: Synthetic oligonucleotide
aggcuauguguguaaguca

SEQ ID NO: 1079243 - RNA, 19 nt, Artificial Sequence
  Description of Artificial Sequence: Synthetic oligonucleotide
gaacacguaaccacagcga

SEQ ID NO: 1079244 - RNA, 19 nt, Artificial Sequence
  Description of Artificial Sequence: Synthetic oligonucleotide
guggagcuaauuuuaaagu

SEQ ID NO: 1079245 - RNA, 19 nt, Artificial Sequence
  Description of Artificial Sequence: Synthetic oligonucleotide
gucgaacguacagucaugc

SEQ ID NO: 1079246 - RNA, 19 nt, Artificial Sequence
  Description of Artificial Sequence: Synthetic oligonucleotide
ggagcuaauuuuaaaguga

SEQ ID NO: 1079247 - RNA, 19 nt, Artificial Sequence
  Description of Artificial Sequence: Synthetic oligonucleotide
aaguuggacuccagcagug

SEQ ID NO: 1079248 - RNA, 19 nt, Artificial Sequence
  Description of Artificial Sequence: Synthetic oligonucleotide
uccugcguggcugaggccu

SEQ ID NO: 1079249 - RNA, 19 nt, Artificial Sequence
  Description of Artificial Sequence: Synthetic oligonucleotide
ccuaaacuacaguaccagg

SEQ ID NO: 1079250 - RNA, 19 nt, Artificial Sequence
  Description of Artificial Sequence: Synthetic oligonucleotide
aagucaaucuagggcacaa

SEQ ID NO: 1079251 - RNA, 19 nt, Artificial Sequence
  Description of Artificial Sequence: Synthetic oligonucleotide
cacuggaagcaccuacgcc

SEQ ID NO: 1079252 - RNA, 19 nt, Artificial Sequence
  Description of Artificial Sequence: Synthetic oligonucleotide
uggcuagcaggcaccuuag

SEQ ID NO: 1079253 - RNA, 19 nt, Artificial Sequence
  Description of Artificial Sequence: Synthetic oligonucleotide
ucugacgcgugcccaguac

SEQ ID NO: 1079254 - RNA, 19 nt, Artificial Sequence
  Description of Artificial Sequence: Synthetic oligonucleotide
uagucugacgcgugcccag

SEQ ID NO: 1079255 - RNA, 19 nt, Artificial Sequence
  Description of Artificial Sequence: Synthetic oligonucleotide
ccucuaguagucucggccg

SEQ ID NO: 1079256 - RNA, 19 nt, Artificial Sequence
  Description of Artificial Sequence: Synthetic oligonucleotide
agcaugcguggacuaaucu

SEQ ID NO: 1079257 - RNA, 19 nt, Artificial Sequence
  Description of Artificial Sequence: Synthetic oligonucleotide
ugcguggacuaaucuugag

SEQ ID NO: 1079258 - RNA, 19 nt, Artificial Sequence
  Description of Artificial Sequence: Synthetic oligonucleotide
gcuaacauuagugaacuaa

SEQ ID NO: 1079259 - RNA, 19 nt, Artificial Sequence
  Description of Artificial Sequence: Synthetic oligonucleotide
gaauuuccgcuucccuuac

SEQ ID NO: 1079260 - RNA, 19 nt, Artificial Sequence
  Description of Artificial Sequence: Synthetic oligonucleotide
cuuuguccuaaauaaggcu

SEQ ID NO: 1079261 - RNA, 19 nt, Artificial Sequence
  Description of Artificial Sequence: Synthetic oligonucleotide
caguuucaccauuuucaug

SEQ ID NO: 1079262 - RNA, 19 nt, Artificial Sequence
  Description of Artificial Sequence: Synthetic oligonucleotide
gcccuugucaaguugcagc

SEQ ID NO: 1079263 - RNA, 19 nt, Artificial Sequence
  Description of Artificial Sequence: Synthetic oligonucleotide
gaucccugggugcaagguc

SEQ ID NO: 1079264 - RNA, 19 nt, Artificial Sequence
  Description of Artificial Sequence: Synthetic oligonucleotide
uagaaucgguccccacccc

SEQ ID NO: 1079265 - RNA, 19 nt, Artificial Sequence
  Description of Artificial Sequence: Synthetic oligonucleotide
caugagcaacacucuugcc

SEQ ID NO: 1079266 - RNA, 19 nt, Artificial Sequence
  Description of Artificial Sequence: Synthetic oligonucleotide
agugaacuaagaacagcgu

SEQ ID NO: 1079267 - RNA, 19 nt, Artificial Sequence
  Description of Artificial Sequence: Synthetic oligonucleotide
agcuaauuuuaaagugaag

SEQ ID NO: 1079268 - RNA, 19 nt, Artificial Sequence
  Description of Artificial Sequence: Synthetic oligonucleotide
ugcuucgaccggcugcucu

SEQ ID NO: 1079269 - RNA, 19 nt, Artificial Sequence
  Description of Artificial Sequence: Synthetic oligonucleotide
gaaaggccggacacgaaga

SEQ ID NO: 1079270 - RNA, 19 nt, Artificial Sequence
  Description of Artificial Sequence: Synthetic oligonucleotide
aaacugagcucuaggcuau

SEQ ID NO: 1079271 - RNA, 19 nt, Artificial Sequence
  Description of Artificial Sequence: Synthetic oligonucleotide
aacggccggcuguagucug

SEQ ID NO: 1079272 - RNA, 19 nt, Artificial Sequence
  Description of Artificial Sequence: Synthetic oligonucleotide
ucgaacguacagucaugcu

SEQ ID NO: 1079273 - RNA, 19 nt, Artificial Sequence
  Description of Artificial Sequence: Synthetic oligonucleotide
acgggugcagaguggauau

SEQ ID NO: 1079274 - RNA, 19 nt, Artificial Sequence
  Description of Artificial Sequence: Synthetic oligonucleotide
ugcccucuaguagucucgg

SEQ ID NO: 1079275 - RNA, 19 nt, Artificial Sequence
  Description of Artificial Sequence: Synthetic oligonucleotide
guacgauugguuuaauuuu

SEQ ID NO: 1079276 - RNA, 19 nt, Artificial Sequence
  Description of Artificial Sequence: Synthetic oligonucleotide
agggagacgguguaacaua

SEQ ID NO: 1079277 - RNA, 19 nt, Artificial Sequence
  Description of Artificial Sequence: Synthetic oligonucleotide
cucuagugacucaguccgg

SEQ ID NO: 1079278 - RNA, 19 nt, Artificial Sequence
  Description of Artificial Sequence: Synthetic oligonucleotide
cccucuaguagucucggcc

SEQ ID NO: 1079279 - RNA, 19 nt, Artificial Sequence
  Description of Artificial Sequence: Synthetic oligonucleotide
gaguggagcuaauuuuaaa

SEQ ID NO: 1079280 - RNA, 19 nt, Artificial Sequence
  Description of Artificial Sequence: Synthetic oligonucleotide
cgaacguacagucaugcug

SEQ ID NO: 1079281 - RNA, 19 nt, Artificial Sequence
  Description of Artificial Sequence: Synthetic oligonucleotide
ugacgcgugcccaguacaa

SEQ ID NO: 1079282 - RNA, 19 nt, Artificial Sequence
  Description of Artificial Sequence: Synthetic oligonucleotide
gaacagcgucguguggugg

SEQ ID NO: 1079283 - RNA, 19 nt, Artificial Sequence
  Description of Artificial Sequence: Synthetic oligonucleotide
uguccuaaauaaggcuaac

SEQ ID NO: 1079284 - RNA, 19 nt, Artificial Sequence
  Description of Artificial Sequence: Synthetic oligonucleotide
aaacggccggcuguagucu

SEQ ID NO: 1079285 - RNA, 19 nt, Artificial Sequence
  Description of Artificial Sequence: Synthetic oligonucleotide
cuugaguggagcuaauuuu

SEQ ID NO: 1079286 - RNA, 19 nt, Artificial Sequence
  Description of Artificial Sequence: Synthetic oligonucleotide
accuacgccgacucuucug

SEQ ID NO: 1079287 - RNA, 19 nt, Artificial Sequence
  Description of Artificial Sequence: Synthetic oligonucleotide
cuuaguaaccagccagaaa

SEQ ID NO: 1079288 - RNA, 19 nt, Artificial Sequence
  Description of Artificial Sequence: Synthetic oligonucleotide
cagugggucauggccacgg

SEQ ID NO: 1079289 - RNA, 19 nt, Artificial Sequence
  Description of Artificial Sequence: Synthetic oligonucleotide
acgguguaacauacagaac

SEQ ID NO: 1079290 - RNA, 19 nt, Artificial Sequence
  Description of Artificial Sequence: Synthetic oligonucleotide
guagucucggccguuucac

SEQ ID NO: 1079291 - RNA, 19 nt, Artificial Sequence
  Description of Artificial Sequence: Synthetic oligonucleotide
auguggucgaacguacagu

SEQ ID NO: 1079292 - RNA, 19 nt, Artificial Sequence
  Description of Artificial Sequence: Synthetic oligonucleotide
cuagugacucaguccgguc

SEQ ID NO: 1079293 - RNA, 19 nt, Artificial Sequence
  Description of Artificial Sequence: Synthetic oligonucleotide
ggucccaucugacgggugc

SEQ ID NO: 1079294 - RNA, 19 nt, Artificial Sequence
  Description of Artificial Sequence: Synthetic oligonucleotide
guccuaaauaaggcuaaca

SEQ ID NO: 1079295 - RNA, 19 nt, Artificial Sequence
  Description of Artificial Sequence: Synthetic oligonucleotide
ugugacgaguuuccccauu

SEQ ID NO: 1079296 - RNA, 19 nt, Artificial Sequence
  Description of Artificial Sequence: Synthetic oligonucleotide
ccuacgccgacucuucugc

SEQ ID NO: 1079297 - RNA, 19 nt, Artificial Sequence
  Description of Artificial Sequence: Synthetic oligonucleotide
cuauucgguauuuuggauu

SEQ ID NO: 1079298 - RNA, 19 nt, Artificial Sequence
  Description of Artificial Sequence: Synthetic oligonucleotide
accuuaguaaccagccaga

SEQ ID NO: 1079299 - RNA, 19 nt, Artificial Sequence
  Description of Artificial Sequence: Synthetic oligonucleotide
ugacagguauguguuguuu

SEQ ID NO: 1079300 - RNA, 19 nt, Artificial Sequence
  Description of Artificial Sequence: Synthetic oligonucleotide
aggcgcgguggucuggguc

SEQ ID NO: 1079301 - RNA, 19 nt, Artificial Sequence
  Description of Artificial Sequence: Synthetic oligonucleotide
ugguaaacgcugggcagac

SEQ ID NO: 1079302 - RNA, 19 nt, Artificial Sequence
  Description of Artificial Sequence: Synthetic oligonucleotide
cuguagucugacgcgugcc

SEQ ID NO: 1079303 - RNA, 19 nt, Artificial Sequence
  Description of Artificial Sequence: Synthetic oligonucleotide
uacaaggugucuggcugac

SEQ ID NO: 1079304 - RNA, 19 nt, Artificial Sequence
  Description of Artificial Sequence: Synthetic oligonucleotide
caucaaccccuaaacuaca

SEQ ID NO: 1079305 - RNA, 19 nt, Artificial Sequence
  Description of Artificial Sequence: Synthetic oligonucleotide
aaggaaacggccggcugua

SEQ ID NO: 1079306 - RNA, 19 nt, Artificial Sequence
  Description of Artificial Sequence: Synthetic oligonucleotide
uggggagcaugcguggacu

SEQ ID NO: 1079307 - RNA, 19 nt, Artificial Sequence
  Description of Artificial Sequence: Synthetic oligonucleotide
ucaaagccuccugcguggc

SEQ ID NO: 1079308 - RNA, 19 nt, Artificial Sequence
  Description of Artificial Sequence: Synthetic oligonucleotide
agugaggcgcgguggucug

SEQ ID NO: 1079309 - RNA, 19 nt, Artificial Sequence
  Description of Artificial Sequence: Synthetic oligonucleotide
cguacagucaugcugcuca

SEQ ID NO: 1079310 - RNA, 19 nt, Artificial Sequence
  Description of Artificial Sequence: Synthetic oligonucleotide
gacgcgugcccaguacaag

SEQ ID NO: 1079311 - RNA, 19 nt, Artificial Sequence
  Description of Artificial Sequence: Synthetic oligonucleotide
uggcgccucgcugaggaug

SEQ ID NO: 1079312 - RNA, 19 nt, Artificial Sequence
  Description of Artificial Sequence: Synthetic oligonucleotide
ggugaaaggccggacacga

SEQ ID NO: 1079313 - RNA, 19 nt, Artificial Sequence
  Description of Artificial Sequence: Synthetic oligonucleotide
cgcuuaaggcuuuuguaag

SEQ ID NO: 1079314 - RNA, 19 nt, Artificial Sequence
  Description of Artificial Sequence: Synthetic oligonucleotide
cauguggcgccucgcugag

SEQ ID NO: 1079315 - RNA, 19 nt, Artificial Sequence
  Description of Artificial Sequence: Synthetic oligonucleotide
cccuaaacuacaguaccag

SEQ ID NO: 1079316 - RNA, 19 nt, Artificial Sequence
  Description of Artificial Sequence: Synthetic oligonucleotide
ccaucugacgggugcagag

SEQ ID NO: 1079317 - RNA, 19 nt, Artificial Sequence
  Description of Artificial Sequence: Synthetic oligonucleotide
gcuguagucugacgcgugc

SEQ ID NO: 1079318 - RNA, 19 nt, Artificial Sequence
  Description of Artificial Sequence: Synthetic oligonucleotide
cacgaagaguuccugucaa

SEQ ID NO: 1079319 - RNA, 19 nt, Artificial Sequence
  Description of Artificial Sequence: Synthetic oligonucleotide
gucuguacgauugguuuaa

SEQ ID NO: 1079320 - RNA, 19 nt, Artificial Sequence
  Description of Artificial Sequence: Synthetic oligonucleotide
ggggcuaagaaggacaugu

SEQ ID NO: 1079321 - RNA, 19 nt, Artificial Sequence
  Description of Artificial Sequence: Synthetic oligonucleotide
caggcaccuuaguaaccag

SEQ ID NO: 1079322 - RNA, 19 nt, Artificial Sequence
  Description of Artificial Sequence: Synthetic oligonucleotide
aaacuaaaacugagcucua

SEQ ID NO: 1079323 - RNA, 19 nt, Artificial Sequence
  Description of Artificial Sequence: Synthetic oligonucleotide
ggacuaaucuugaguggag

SEQ ID NO: 1079324 - RNA, 19 nt, Artificial Sequence
  Description of Artificial Sequence: Synthetic oligonucleotide
cuggaagcaccuacgccga

SEQ ID NO: 1079325 - RNA, 19 nt, Artificial Sequence
  Description of Artificial Sequence: Synthetic oligonucleotide
ccggucuggacacuuuccg

SEQ ID NO: 1079326 - RNA, 19 nt, Artificial Sequence
  Description of Artificial Sequence: Synthetic oligonucleotide
aagcaccuacgccgacucu

SEQ ID NO: 1079327 - RNA, 19 nt, Artificial Sequence
  Description of Artificial Sequence: Synthetic oligonucleotide
agagugaggcgcggugguc

SEQ ID NO: 1079328 - RNA, 19 nt, Artificial Sequence
  Description of Artificial Sequence: Synthetic oligonucleotide
gacacuacuugcagaugaa

SEQ ID NO: 1079329 - RNA, 19 nt, Artificial Sequence
  Description of Artificial Sequence: Synthetic oligonucleotide
acacuacuugcagaugaaa

SEQ ID NO: 1079330 - RNA, 19 nt, Artificial Sequence
  Description of Artificial Sequence: Synthetic oligonucleotide
gaugcgcuggcaggagcgc

SEQ ID NO: 1079331 - RNA, 19 nt, Artificial Sequence
  Description of Artificial Sequence: Synthetic oligonucleotide
agcaccuacgccgacucuu

SEQ ID NO: 1079332 - RNA, 19 nt, Artificial Sequence
  Description of Artificial Sequence: Synthetic oligonucleotide
uacgccgacucuucugcuu

SEQ ID NO: 1079333 - RNA, 19 nt, Artificial Sequence
  Description of Artificial Sequence: Synthetic oligonucleotide
acacguaaccacagcgaca

SEQ ID NO: 1079334 - RNA, 19 nt, Artificial Sequence
  Description of Artificial Sequence: Synthetic oligonucleotide
gugacgaguuuccccauua

SEQ ID NO: 1079335 - RNA, 19 nt, Artificial Sequence
  Description of Artificial Sequence: Synthetic oligonucleotide
acguacagucaugcugcuc

SEQ ID NO: 1079336 - RNA, 19 nt, Artificial Sequence
  Description of Artificial Sequence: Synthetic oligonucleotide
gcuagcaggcaccuuagua

SEQ ID NO: 1079337 - RNA, 19 nt, Artificial Sequence
  Description of Artificial Sequence: Synthetic oligonucleotide
caacggguuaaauaagauu

SEQ ID NO: 1079338 - RNA, 19 nt, Artificial Sequence
  Description of Artificial Sequence: Synthetic oligonucleotide
guagucugacgcgugccca

SEQ ID NO: 1079339 - RNA, 19 nt, Artificial Sequence
  Description of Artificial Sequence: Synthetic oligonucleotide
guccggucuggacacuuuc

SEQ ID NO: 1079340 - RNA, 19 nt, Artificial Sequence
  Description of Artificial Sequence: Synthetic oligonucleotide
uagggcacaacggguuaaa

SEQ ID NO: 1079341 - RNA, 19 nt, Artificial Sequence
  Description of Artificial Sequence: Synthetic oligonucleotide
ggaccugaggggcuaagaa

SEQ ID NO: 1079342 - RNA, 19 nt, Artificial Sequence
  Description of Artificial Sequence: Synthetic oligonucleotide
cugacgcgugcccaguaca

SEQ ID NO: 1079343 - RNA, 19 nt, Artificial Sequence
  Description of Artificial Sequence: Synthetic oligonucleotide
cucuaggcuauguguguaa

SEQ ID NO: 1079344 - RNA, 19 nt, Artificial Sequence
  Description of Artificial Sequence: Synthetic oligonucleotide
gagcaugcguggacuaauc

SEQ ID NO: 1079345 - RNA, 19 nt, Artificial Sequence
  Description of Artificial Sequence: Synthetic oligonucleotide
gggagacgguguaacauac

SEQ ID NO: 1079346 - RNA, 19 nt, Artificial Sequence
  Description of Artificial Sequence: Synthetic oligonucleotide
agcgucgugugguggcccu

SEQ ID NO: 1079347 - RNA, 19 nt, Artificial Sequence
  Description of Artificial Sequence: Synthetic oligonucleotide
uggaagcaccuacgccgac

SEQ ID NO: 1079348 - RNA, 19 nt, Artificial Sequence
  Description of Artificial Sequence: Synthetic oligonucleotide
gcacaacggguuaaauaag

SEQ ID NO: 1079349 - RNA, 19 nt, Artificial Sequence
  Description of Artificial Sequence: Synthetic oligonucleotide
cuucgaccggcugcucucc

SEQ ID NO: 1079350 - RNA, 19 nt, Artificial Sequence
  Description of Artificial Sequence: Synthetic oligonucleotide
ccgcuuaaggcuuuuguaa

SEQ ID NO: 1079351 - RNA, 19 nt, Artificial Sequence
  Description of Artificial Sequence: Synthetic oligonucleotide
aucuugaguggagcuaauu

SEQ ID NO: 1079352 - RNA, 19 nt, Artificial Sequence
  Description of Artificial Sequence: Synthetic oligonucleotide
uucgaccggcugcucuccu

SEQ ID NO: 1079353 - RNA, 19 nt, Artificial Sequence
  Description of Artificial Sequence: Synthetic oligonucleotide
cuaggcuauguguguaagu

SEQ ID NO: 1079354 - RNA, 19 nt, Artificial Sequence
  Description of Artificial Sequence: Synthetic oligonucleotide
ggcgccucgcugaggaugg

SEQ ID NO: 1079355 - RNA, 19 nt, Artificial Sequence
  Description of Artificial Sequence: Synthetic oligonucleotide
cgaugcgcuggcaggagcg

SEQ ID NO: 1079356 - RNA, 19 nt, Artificial Sequence
  Description of Artificial Sequence: Synthetic oligonucleotide
gggcacaacggguuaaaua

SEQ ID NO: 1079357 - RNA, 19 nt, Artificial Sequence
  Description of Artificial Sequence: Synthetic oligonucleotide
gcaggagcgccccacuuuc

SEQ ID NO: 1079358 - RNA, 19 nt, Artificial Sequence
  Description of Artificial Sequence: Synthetic oligonucleotide
augcguggacuaaucuuga

SEQ ID NO: 1079359 - RNA, 19 nt, Artificial Sequence
  Description of Artificial Sequence: Synthetic oligonucleotide
gaguggauauaggguggga

SEQ ID NO: 1079360 - RNA, 19 nt, Artificial Sequence
  Description of Artificial Sequence: Synthetic oligonucleotide
gccgcggcccauguggucg

SEQ ID NO: 1079361 - RNA, 19 nt, Artificial Sequence
  Description of Artificial Sequence: Synthetic oligonucleotide
gccggacacgaagaguucc

SEQ ID NO: 1079362 - RNA, 19 nt, Artificial Sequence
  Description of Artificial Sequence: Synthetic oligonucleotide
gaccuagccccugagcccu

SEQ ID NO: 1079363 - RNA, 19 nt, Artificial Sequence
  Description of Artificial Sequence: Synthetic oligonucleotide
gcggccagagggcuguggc

SEQ ID NO: 1079364 - RNA, 19 nt, Artificial Sequence
  Description of Artificial Sequence: Synthetic oligonucleotide
guggucgaacguacaguca

SEQ ID NO: 1079365 - RNA, 19 nt, Artificial Sequence
  Description of Artificial Sequence: Synthetic oligonucleotide
ccacuagccaugcucaaaa

SEQ ID NO: 1079366 - RNA, 19 nt, Artificial Sequence
  Description of Artificial Sequence: Synthetic oligonucleotide
ggucgaacguacagucaug

SEQ ID NO: 1079367 - RNA, 19 nt, Artificial Sequence
  Description of Artificial Sequence: Synthetic oligonucleotide
gcuucgaccggcugcucuc

SEQ ID NO: 1079368 - RNA, 19 nt, Artificial Sequence
  Description of Artificial Sequence: Synthetic oligonucleotide
agucugacgcgugcccagu

SEQ ID NO: 1079369 - RNA, 19 nt, Artificial Sequence
  Description of Artificial Sequence: Synthetic oligonucleotide
gcaccuuaguaaccagcca

SEQ ID NO: 1079370 - RNA, 19 nt, Artificial Sequence
  Description of Artificial Sequence: Synthetic oligonucleotide
gcguggacuaaucuugagu

SEQ ID NO: 1079371 - RNA, 19 nt, Artificial Sequence
  Description of Artificial Sequence: Synthetic oligonucleotide
gaggggcuaagaaggacau

SEQ ID NO: 1079372 - RNA, 19 nt, Artificial Sequence
  Description of Artificial Sequence: Synthetic oligonucleotide
gggcuaagaaggacaugug

SEQ ID NO: 1079373 - RNA, 19 nt, Artificial Sequence
  Description of Artificial Sequence: Synthetic oligonucleotide
gauuuccuauucgguauuu

SEQ ID NO: 1079374 - RNA, 19 nt, Artificial Sequence
  Description of Artificial Sequence: Synthetic oligonucleotide
cacuuuccgcuuaaggcuu

SEQ ID NO: 1079375 - RNA, 19 nt, Artificial Sequence
  Description of Artificial Sequence: Synthetic oligonucleotide
uccucacggccgcggccca

SEQ ID NO: 1079376 - RNA, 19 nt, Artificial Sequence
  Description of Artificial Sequence: Synthetic oligonucleotide
aguugcagccagagccagu

SEQ ID NO: 1079377 - RNA, 19 nt, Artificial Sequence
  Description of Artificial Sequence: Synthetic oligonucleotide
gcgugcccaguacaaggug

SEQ ID NO: 1079378 - RNA, 19 nt, Artificial Sequence
  Description of Artificial Sequence: Synthetic oligonucleotide
agggcacaacggguuaaau

SEQ ID NO: 1079379 - RNA, 19 nt, Artificial Sequence
  Description of Artificial Sequence: Synthetic oligonucleotide
cuagggcacaacggguuaa

SEQ ID NO: 1079380 - RNA, 19 nt, Artificial Sequence
  Description of Artificial Sequence: Synthetic oligonucleotide
cuguacgauugguuuaauu

SEQ ID NO: 1079381 - RNA, 19 nt, Artificial Sequence
  Description of Artificial Sequence: Synthetic oligonucleotide
cggucuggacacuuuccgc

SEQ ID NO: 1079382 - RNA, 19 nt, Artificial Sequence
  Description of Artificial Sequence: Synthetic oligonucleotide
ggagcaccccuccccgaug

SEQ ID NO: 1079383 - RNA, 19 nt, Artificial Sequence
  Description of Artificial Sequence: Synthetic oligonucleotide
gugaggcgcgguggucugg

SEQ ID NO: 1079384 - RNA, 19 nt, Artificial Sequence
  Description of Artificial Sequence: Synthetic oligonucleotide
ggccacggauccugugcag

SEQ ID NO: 1079385 - RNA, 19 nt, Artificial Sequence
  Description of Artificial Sequence: Synthetic oligonucleotide
ggcuuccucacggccgcgg

SEQ ID NO: 1079386 - RNA, 19 nt, Artificial Sequence
  Description of Artificial Sequence: Synthetic oligonucleotide
gucccaucugacgggugca

SEQ ID NO: 1079387 - RNA, 19 nt, Artificial Sequence
  Description of Artificial Sequence: Synthetic oligonucleotide
ggccaugcggccagagggc

SEQ ID NO: 1079388 - RNA, 19 nt, Artificial Sequence
  Description of Artificial Sequence: Synthetic oligonucleotide
gcaugcguggacuaaucuu

SEQ ID NO: 1079389 - RNA, 19 nt, Artificial Sequence
  Description of Artificial Sequence: Synthetic oligonucleotide
cagcgucgugugguggccc

SEQ ID NO: 1079390 - RNA, 19 nt, Artificial Sequence
  Description of Artificial Sequence: Synthetic oligonucleotide
gguaaacgcugggcagacc

SEQ ID NO: 1079391 - RNA, 19 nt, Artificial Sequence
  Description of Artificial Sequence: Synthetic oligonucleotide
accccuccccgaugcgcug

SEQ ID NO: 1079392 - RNA, 19 nt, Artificial Sequence
  Description of Artificial Sequence: Synthetic oligonucleotide
auguggcgccucgcugagg

SEQ ID NO: 1079393 - RNA, 19 nt, Artificial Sequence
  Description of Artificial Sequence: Synthetic oligonucleotide
ggcuguagucugacgcgug

SEQ ID NO: 1079394 - RNA, 19 nt, Artificial Sequence
  Description of Artificial Sequence: Synthetic oligonucleotide
cucccguggccaaggcaca

SEQ ID NO: 1079395 - RNA, 19 nt, Artificial Sequence
  Description of Artificial Sequence: Synthetic oligonucleotide
cagggagacgguguaacau

SEQ ID NO: 1079396 - RNA, 19 nt, Artificial Sequence
  Description of Artificial Sequence: Synthetic oligonucleotide
ggagacgguguaacauaca

SEQ ID NO: 1079397 - RNA, 19 nt, Artificial Sequence
  Description of Artificial Sequence: Synthetic oligonucleotide
cggauccugugcagaaaag

SEQ ID NO: 1079398 - RNA, 19 nt, Artificial Sequence
  Description of Artificial Sequence: Synthetic oligonucleotide
cccauuacaucagguaaaa

SEQ ID NO: 1079399 - RNA, 19 nt, Artificial Sequence
  Description of Artificial Sequence: Synthetic oligonucleotide
ccgaugcgcuggcaggagc

SEQ ID NO: 1079400 - RNA, 19 nt, Artificial Sequence
  Description of Artificial Sequence: Synthetic oligonucleotide
agccucguucucagacugu

SEQ ID NO: 1079401 - RNA, 19 nt, Artificial Sequence
  Description of Artificial Sequence: Synthetic oligonucleotide
gcccucuaguagucucggc

SEQ ID NO: 1079402 - RNA, 19 nt, Artificial Sequence
  Description of Artificial Sequence: Synthetic oligonucleotide
gucugacgcgugcccagua

SEQ ID NO: 1079403 - RNA, 19 nt, Artificial Sequence
  Description of Artificial Sequence: Synthetic oligonucleotide
ccuauucgguauuuuggau

SEQ ID NO: 1079404 - RNA, 19 nt, Artificial Sequence
  Description of Artificial Sequence: Synthetic oligonucleotide
ccuuaguaaccagccagaa

SEQ ID NO: 1079405 - RNA, 19 nt, Artificial Sequence
  Description of Artificial Sequence: Synthetic oligonucleotide
gccacggauccugugcaga

SEQ ID NO: 1079406 - RNA, 19 nt, Artificial Sequence
  Description of Artificial Sequence: Synthetic oligonucleotide
caauggcuagcaggcaccu

SEQ ID NO: 1079407 - RNA, 19 nt, Artificial Sequence
  Description of Artificial Sequence: Synthetic oligonucleotide
ccauguggucgaacguaca

SEQ ID NO: 1079408 - RNA, 19 nt, Artificial Sequence
  Description of Artificial Sequence: Synthetic oligonucleotide
cacggauccugugcagaaa

SEQ ID NO: 1079409 - RNA, 19 nt, Artificial Sequence
  Description of Artificial Sequence: Synthetic oligonucleotide
aguccggucuggacacuuu

SEQ ID NO: 1079410 - RNA, 19 nt, Artificial Sequence
  Description of Artificial Sequence: Synthetic oligonucleotide
gcaccuacgccgacucuuc

SEQ ID NO: 1079411 - RNA, 19 nt, Artificial Sequence
  Description of Artificial Sequence: Synthetic oligonucleotide
gcccauguggucgaacgua

SEQ ID NO: 1079412 - RNA, 19 nt, Artificial Sequence
  Description of Artificial Sequence: Synthetic oligonucleotide
gcgccccacuuuccggucc

SEQ ID NO: 1079413 - RNA, 19 nt, Artificial Sequence
  Description of Artificial Sequence: Synthetic oligonucleotide
cacggccgcggcccaugug

SEQ ID NO: 1079414 - RNA, 19 nt, Artificial Sequence
  Description of Artificial Sequence: Synthetic oligonucleotide
cgcuucccuuacauguaac

SEQ ID NO: 1079415 - RNA, 19 nt, Artificial Sequence
  Description of Artificial Sequence: Synthetic oligonucleotide
ccacggauccugugcagaa

SEQ ID NO: 1079416 - RNA, 19 nt, Artificial Sequence
  Description of Artificial Sequence: Synthetic oligonucleotide
cuacgccgacucuucugcu

SEQ ID NO: 1079417 - RNA, 19 nt, Artificial Sequence
  Description of Artificial Sequence: Synthetic oligonucleotide
cuaguagucucggccguuu

SEQ ID NO: 1079418 - RNA, 19 nt, Artificial Sequence
  Description of Artificial Sequence: Synthetic oligonucleotide
gggagcaugcguggacuaa

SEQ ID NO: 1079419 - RNA, 19 nt, Artificial Sequence
  Description of Artificial Sequence: Synthetic oligonucleotide
ggggagcaugcguggacua

SEQ ID NO: 1079420 - RNA, 19 nt, Artificial Sequence
  Description of Artificial Sequence: Synthetic oligonucleotide
caaagccuccugcguggcu

SEQ ID NO: 1079421 - RNA, 19 nt, Artificial Sequence
  Description of Artificial Sequence: Synthetic oligonucleotide
gugugacgaguuuccccau

SEQ ID NO: 1079422 - RNA, 19 nt, Artificial Sequence
  Description of Artificial Sequence: Synthetic oligonucleotide
gcccuagagugaggcgcgg

SEQ ID NO: 1079423 - RNA, 19 nt, Artificial Sequence
  Description of Artificial Sequence: Synthetic oligonucleotide
cccuuacauguaacaaacu

SEQ ID NO: 1079424 - RNA, 19 nt, Artificial Sequence
  Description of Artificial Sequence: Synthetic oligonucleotide
ggcugacuuuguccuaaau

SEQ ID NO: 1079425 - RNA, 19 nt, Artificial Sequence
  Description of Artificial Sequence: Synthetic oligonucleotide
cgucgugugguggcccugc

SEQ ID NO: 1079426 - RNA, 19 nt, Artificial Sequence
  Description of Artificial Sequence: Synthetic oligonucleotide
ggccggacacgaagaguuc

SEQ ID NO: 1079427 - RNA, 19 nt, Artificial Sequence
  Description of Artificial Sequence: Synthetic oligonucleotide
cccacuuuccgguccaguu

SEQ ID NO: 1079428 - RNA, 19 nt, Artificial Sequence
  Description of Artificial Sequence: Synthetic oligonucleotide
ccgcuucccuuacauguaa

SEQ ID NO: 1079429 - RNA, 19 nt, Artificial Sequence
  Description of Artificial Sequence: Synthetic oligonucleotide
cccgaugcgcuggcaggag

SEQ ID NO: 1079430 - RNA, 19 nt, Artificial Sequence
  Description of Artificial Sequence: Synthetic oligonucleotide
ccggacacgaagaguuccu

SEQ ID NO: 1079431 - RNA, 19 nt, Artificial Sequence
  Description of Artificial Sequence: Synthetic oligonucleotide
gcuauguguguaagucaau

SEQ ID NO: 1079432 - RNA, 19 nt, Artificial Sequence
  Description of Artificial Sequence: Synthetic oligonucleotide
ggcuagcaggcaccuuagu

SEQ ID NO: 1079433 - RNA, 19 nt, Artificial Sequence
  Description of Artificial Sequence: Synthetic oligonucleotide
ccacuuuccgguccaguuu

SEQ ID NO: 1079434 - RNA, 19 nt, Artificial Sequence
  Description of Artificial Sequence: Synthetic oligonucleotide
ggccgcggcccaugugguc

SEQ ID NO: 1079435 - RNA, 19 nt, Artificial Sequence
  Description of Artificial Sequence: Synthetic oligonucleotide
ggucauggccacggauccu

SEQ ID NO: 1079436 - RNA, 19 nt, Artificial Sequence
  Description of Artificial Sequence: Synthetic oligonucleotide
gcgucgugugguggcccug

SEQ ID NO: 1079437 - RNA, 19 nt, Artificial Sequence
  Description of Artificial Sequence: Synthetic oligonucleotide
caguccggucuggacacuu

SEQ ID NO: 1079438 - RNA, 19 nt, Artificial Sequence
  Description of Artificial Sequence: Synthetic oligonucleotide
cgcgugcccaguacaaggu

SEQ ID NO: 1079439 - RNA, 19 nt, Artificial Sequence
  Description of Artificial Sequence: Synthetic oligonucleotide
guggcgccucgcugaggau

SEQ ID NO: 1079440 - RNA, 19 nt, Artificial Sequence
  Description of Artificial Sequence: Synthetic oligonucleotide
cugcguggcugaggccugu

SEQ ID NO: 1079441 - RNA, 19 nt, Artificial Sequence
  Description of Artificial Sequence: Synthetic oligonucleotide
ccgcggcccauguggucga

SEQ ID NO: 1079442 - RNA, 19 nt, Artificial Sequence
  Description of Artificial Sequence: Synthetic oligonucleotide
ccacagcgacaggauccca

SEQ ID NO: 1079443 - RNA, 19 nt, Artificial Sequence
  Description of Artificial Sequence: Synthetic oligonucleotide
gcgccucgcugaggauggc

SEQ ID NO: 1079444 - RNA, 19 nt, Artificial Sequence
  Description of Artificial Sequence: Synthetic oligonucleotide
cccuagagugaggcgcggu

SEQ ID NO: 1079445 - RNA, 19 nt, Artificial Sequence
  Description of Artificial Sequence: Synthetic oligonucleotide
cggcuguagucugacgcgu

SEQ ID NO: 1079446 - RNA, 19 nt, Artificial Sequence
  Description of Artificial Sequence: Synthetic oligonucleotide
cggccgcggcccauguggu

SEQ ID NO: 1079447 - RNA, 19 nt, Artificial Sequence
  Description of Artificial Sequence: Synthetic oligonucleotide
cggggaccugaggggcuaa

SEQ ID NO: 1079448 - RNA, 19 nt, Artificial Sequence
  Description of Artificial Sequence: Synthetic oligonucleotide
ugcauugaugcaaugaucg

SEQ ID NO: 1079449 - RNA, 19 nt, Artificial Sequence
  Description of Artificial Sequence: Synthetic oligonucleotide
guaugugaaagauagaucc

SEQ ID NO: 1079450 - RNA, 19 nt, Artificial Sequence
  Description of Artificial Sequence: Synthetic oligonucleotide
uaugacuccagcaagaaga

SEQ ID NO: 1079451 - RNA, 19 nt, Artificial Sequence
  Description of Artificial Sequence: Synthetic oligonucleotide
aacguugcguuucagaguc

SEQ ID NO: 1079452 - RNA, 19 nt, Artificial Sequence
  Description of Artificial Sequence: Synthetic oligonucleotide
ucauuaaugacaaggguug

SEQ ID NO: 1079453 - RNA, 19 nt, Artificial Sequence
  Description of Artificial Sequence: Synthetic oligonucleotide
ucagugcuaauuuagaagc

SEQ ID NO: 1079454 - RNA, 19 nt, Artificial Sequence
  Description of Artificial Sequence: Synthetic oligonucleotide
acuaguaugugaaagauag

SEQ ID NO: 1079455 - RNA, 19 nt, Artificial Sequence
  Description of Artificial Sequence: Synthetic oligonucleotide
uuaacguugcguuucagag

SEQ ID NO: 1079456 - RNA, 19 nt, Artificial Sequence
  Description of Artificial Sequence: Synthetic oligonucleotide
aauuuagaagcuccaaaug

SEQ ID NO: 1079457 - RNA, 19 nt, Artificial Sequence
  Description of Artificial Sequence: Synthetic oligonucleotide
uuaugcacacgauagauca

SEQ ID NO: 1079458 - RNA, 19 nt, Artificial Sequence
  Description of Artificial Sequence: Synthetic oligonucleotide
aaugaucgcuucuacccgc

SEQ ID NO: 1079459 - RNA, 19 nt, Artificial Sequence
  Description of Artificial Sequence: Synthetic oligonucleotide
uugacuugccaauaaaucc

SEQ ID NO: 1079460 - RNA, 19 nt, Artificial Sequence
  Description of Artificial Sequence: Synthetic oligonucleotide
aaucccaucgucuggaaug

SEQ ID NO: 1079461 - RNA, 19 nt, Artificial Sequence
  Description of Artificial Sequence: Synthetic oligonucleotide
aggaacuagguacaugucc

SEQ ID NO: 1079462 - RNA, 19 nt, Artificial Sequence
  Description of Artificial Sequence: Synthetic oligonucleotide
uuaccuuuuccuaucaagc

SEQ ID NO: 1079463 - RNA, 19 nt, Artificial Sequence
  Description of Artificial Sequence: Synthetic oligonucleotide
cuaagcauucgcaauaccc

SEQ ID NO: 1079464 - RNA, 19 nt, Artificial Sequence
  Description of Artificial Sequence: Synthetic oligonucleotide
cauuuugccauucaacagg

SEQ ID NO: 1079465 - RNA, 19 nt, Artificial Sequence
  Description of Artificial Sequence: Synthetic oligonucleotide
uuaggaauuuccuggagug

SEQ ID NO: 1079466 - RNA, 19 nt, Artificial Sequence
  Description of Artificial Sequence: Synthetic oligonucleotide
aaugacaaggguuggggca

SEQ ID NO: 1079467 - RNA, 19 nt, Artificial Sequence
  Description of Artificial Sequence: Synthetic oligonucleotide
gaaagauagaucccaacac

SEQ ID NO: 1079468 - RNA, 19 nt, Artificial Sequence
  Description of Artificial Sequence: Synthetic oligonucleotide
gauguuauagcugccaggc

SEQ ID NO: 1079469 - RNA, 19 nt, Artificial Sequence
  Description of Artificial Sequence: Synthetic oligonucleotide
agacggaauauucuggcac

SEQ ID NO: 1079470 - RNA, 19 nt, Artificial Sequence
  Description of Artificial Sequence: Synthetic oligonucleotide
uaauuuagaagcuccaaau

SEQ ID NO: 1079471 - RNA, 19 nt, Artificial Sequence
  Description of Artificial Sequence: Synthetic oligonucleotide
aagcauucgcaauacccgg

SEQ ID NO: 1079472 - RNA, 19 nt, Artificial Sequence
  Description of Artificial Sequence: Synthetic oligonucleotide
uuuaggaauuuccuggagu

SEQ ID NO: 1079473 - RNA, 19 nt, Artificial Sequence
  Description of Artificial Sequence: Synthetic oligonucleotide
gauguaugacuccagcaag

SEQ ID NO: 1079474 - RNA, 19 nt, Artificial Sequence
  Description of Artificial Sequence: Synthetic oligonucleotide
ucuaguagccgcuuguucu

SEQ ID NO: 1079475 - RNA, 19 nt, Artificial Sequence
  Description of Artificial Sequence: Synthetic oligonucleotide
cuuaccuuuuccuaucaag

SEQ ID NO: 1079476 - RNA, 19 nt, Artificial Sequence
  Description of Artificial Sequence: Synthetic oligonucleotide
cacaacacugcguuuaugc

SEQ ID NO: 1079477 - RNA, 19 nt, Artificial Sequence
  Description of Artificial Sequence: Synthetic oligonucleotide
ggaauauucuggcacagcg

SEQ ID NO: 1079478 - RNA, 19 nt, Artificial Sequence
  Description of Artificial Sequence: Synthetic oligonucleotide
ugcaauaccagacggaaua

SEQ ID NO: 1079479 - RNA, 19 nt, Artificial Sequence
  Description of Artificial Sequence: Synthetic oligonucleotide
guuggcuaugcucuuauag

SEQ ID NO: 1079480 - RNA, 19 nt, Artificial Sequence
  Description of Artificial Sequence: Synthetic oligonucleotide
gaucacgagguuauggugg

SEQ ID NO: 1079481 - RNA, 19 nt, Artificial Sequence
  Description of Artificial Sequence: Synthetic oligonucleotide
aauuacucuaagaggcugg

SEQ ID NO: 1079482 - RNA, 19 nt, Artificial Sequence
  Description of Artificial Sequence: Synthetic oligonucleotide
uaugugaaagauagauccc

SEQ ID NO: 1079483 - RNA, 19 nt, Artificial Sequence
  Description of Artificial Sequence: Synthetic oligonucleotide
uuggcuaugcucuuauagc

SEQ ID NO: 1079484 - RNA, 19 nt, Artificial Sequence
  Description of Artificial Sequence: Synthetic oligonucleotide
ucauccggagcauuguccg

SEQ ID NO: 1079485 - RNA, 19 nt, Artificial Sequence
  Description of Artificial Sequence: Synthetic oligonucleotide
aacuuguuaacguugcguu

SEQ ID NO: 1079486 - RNA, 19 nt, Artificial Sequence
  Description of Artificial Sequence: Synthetic oligonucleotide
cuuucguuucaaauugccg

SEQ ID NO: 1079487 - RNA, 19 nt, Artificial Sequence
  Description of Artificial Sequence: Synthetic oligonucleotide
gguuaucucacucauccgg

SEQ ID NO: 1079488 - RNA, 19 nt, Artificial Sequence
  Description of Artificial Sequence: Synthetic oligonucleotide
auagauguaccgaggauac

SEQ ID NO: 1079489 - RNA, 19 nt, Artificial Sequence
  Description of Artificial Sequence: Synthetic oligonucleotide
auucgcaauacccggcuac

SEQ ID NO: 1079490 - RNA, 19 nt, Artificial Sequence
  Description of Artificial Sequence: Synthetic oligonucleotide
guuuugguaguauagaugu

SEQ ID NO: 1079491 - RNA, 19 nt, Artificial Sequence
  Description of Artificial Sequence: Synthetic oligonucleotide
gugaguaucugccagucgc

SEQ ID NO: 1079492 - RNA, 19 nt, Artificial Sequence
  Description of Artificial Sequence: Synthetic oligonucleotide
acugcguuuaugcacacga

SEQ ID NO: 1079493 - RNA, 19 nt, Artificial Sequence
  Description of Artificial Sequence: Synthetic oligonucleotide
aagaugguuucaucuaccu

SEQ ID NO: 1079494 - RNA, 19 nt, Artificial Sequence
  Description of Artificial Sequence: Synthetic oligonucleotide
uacagauagaagguccugg

SEQ ID NO: 1079495 - RNA, 19 nt, Artificial Sequence
  Description of Artificial Sequence: Synthetic oligonucleotide
aaauugccgccuuucuauc

SEQ ID NO: 1079496 - RNA, 19 nt, Artificial Sequence
  Description of Artificial Sequence: Synthetic oligonucleotide
ggcaauuacucuaagaggc

SEQ ID NO: 1079497 - RNA, 19 nt, Artificial Sequence
  Description of Artificial Sequence: Synthetic oligonucleotide
aaugcauuugauaccucag

SEQ ID NO: 1079498 - RNA, 19 nt, Artificial Sequence
  Description of Artificial Sequence: Synthetic oligonucleotide
uauagauguaccgaggaua

SEQ ID NO: 1079499 - RNA, 19 nt, Artificial Sequence
  Description of Artificial Sequence: Synthetic oligonucleotide
ugugcaacagcauccuggc

SEQ ID NO: 1079500 - RNA, 19 nt, Artificial Sequence
  Description of Artificial Sequence: Synthetic oligonucleotide
ggagccuuagaacucaggg

SEQ ID NO: 1079501 - RNA, 19 nt, Artificial Sequence
  Description of Artificial Sequence: Synthetic oligonucleotide
auaacucagugguacagca

SEQ ID NO: 1079502 - RNA, 19 nt, Artificial Sequence
  Description of Artificial Sequence: Synthetic oligonucleotide
auagaucacgagguuaugg

SEQ ID NO: 1079503 - RNA, 19 nt, Artificial Sequence
  Description of Artificial Sequence: Synthetic oligonucleotide
acauucaccguguacagau

SEQ ID NO: 1079504 - RNA, 19 nt, Artificial Sequence
  Description of Artificial Sequence: Synthetic oligonucleotide
aggauaccuaagcauucgc

SEQ ID NO: 1079505 - RNA, 19 nt, Artificial Sequence
  Description of Artificial Sequence: Synthetic oligonucleotide
uguuuugguuucuuggccu

SEQ ID NO: 1079506 - RNA, 19 nt, Artificial Sequence
  Description of Artificial Sequence: Synthetic oligonucleotide
uggcuaugcucuuauagca

SEQ ID NO: 1079507 - RNA, 19 nt, Artificial Sequence
  Description of Artificial Sequence: Synthetic oligonucleotide
agugcuaauuuagaagcuc

SEQ ID NO: 1079508 - RNA, 19 nt, Artificial Sequence
  Description of Artificial Sequence: Synthetic oligonucleotide
gauaccuaagcauucgcaa

SEQ ID NO: 1079509 - RNA, 19 nt, Artificial Sequence
  Description of Artificial Sequence: Synthetic oligonucleotide
cucgcuacuugucuggucc

SEQ ID NO: 1079510 - RNA, 19 nt, Artificial Sequence
  Description of Artificial Sequence: Synthetic oligonucleotide
cucacaauugcuuggucac

SEQ ID NO: 1079511 - RNA, 19 nt, Artificial Sequence
  Description of Artificial Sequence: Synthetic oligonucleotide
cauucgguuugcaacugcg

SEQ ID NO: 1079512 - RNA, 19 nt, Artificial Sequence
  Description of Artificial Sequence: Synthetic oligonucleotide
auuacucuaagaggcuggc

SEQ ID NO: 1079513 - RNA, 19 nt, Artificial Sequence
  Description of Artificial Sequence: Synthetic oligonucleotide
ucuucgucagaugaucucc

SEQ ID NO: 1079514 - RNA, 19 nt, Artificial Sequence
  Description of Artificial Sequence: Synthetic oligonucleotide
cuucugcaauaccagacgg

SEQ ID NO: 1079515 - RNA, 19 nt, Artificial Sequence
  Description of Artificial Sequence: Synthetic oligonucleotide
gauaugaaguucucugaga

SEQ ID NO: 1079516 - RNA, 19 nt, Artificial Sequence
  Description of Artificial Sequence: Synthetic oligonucleotide
ugcaacugcgcucacaauu

SEQ ID NO: 1079517 - RNA, 19 nt, Artificial Sequence
  Description of Artificial Sequence: Synthetic oligonucleotide
auuagguggacuccaauuu

SEQ ID NO: 1079518 - RNA, 19 nt, Artificial Sequence
  Description of Artificial Sequence: Synthetic oligonucleotide
uauagcaccugugcaacag

SEQ ID NO: 1079519 - RNA, 19 nt, Artificial Sequence
  Description of Artificial Sequence: Synthetic oligonucleotide
aagugaguaucugccaguc

SEQ ID NO: 1079520 - RNA, 19 nt, Artificial Sequence
  Description of Artificial Sequence: Synthetic oligonucleotide
uuaucuguguguuuugguu

SEQ ID NO: 1079521 - RNA, 19 nt, Artificial Sequence
  Description of Artificial Sequence: Synthetic oligonucleotide
cauacuccacaacacugcg

SEQ ID NO: 1079522 - RNA, 19 nt, Artificial Sequence
  Description of Artificial Sequence: Synthetic oligonucleotide
auagcaccugugcaacagc

SEQ ID NO: 1079523 - RNA, 19 nt, Artificial Sequence
  Description of Artificial Sequence: Synthetic oligonucleotide
aaucgccaguggcaggaac

SEQ ID NO: 1079524 - RNA, 19 nt, Artificial Sequence
  Description of Artificial Sequence: Synthetic oligonucleotide
cauuguccgcacaaucucg

SEQ ID NO: 1079525 - RNA, 19 nt, Artificial Sequence
  Description of Artificial Sequence: Synthetic oligonucleotide
ucuaucaaguuggcuaugc

SEQ ID NO: 1079526 - RNA, 19 nt, Artificial Sequence
  Description of Artificial Sequence: Synthetic oligonucleotide
ugauccagugauguuuccg

SEQ ID NO: 1079527 - RNA, 19 nt, Artificial Sequence
  Description of Artificial Sequence: Synthetic oligonucleotide
ugcuaauuuagaagcucca

SEQ ID NO: 1079528 - RNA, 19 nt, Artificial Sequence
  Description of Artificial Sequence: Synthetic oligonucleotide
auauaacucagugguacag

SEQ ID NO: 1079529 - RNA, 19 nt, Artificial Sequence
  Description of Artificial Sequence: Synthetic oligonucleotide
aacacugcguuuaugcaca

SEQ ID NO: 1079530 - RNA, 19 nt, Artificial Sequence
  Description of Artificial Sequence: Synthetic oligonucleotide
ucgucagaugaucuccucc

SEQ ID NO: 1079531 - RNA, 19 nt, Artificial Sequence
  Description of Artificial Sequence: Synthetic oligonucleotide
ucaucuaccuggaucucac

SEQ ID NO: 1079532 - RNA, 19 nt, Artificial Sequence
  Description of Artificial Sequence: Synthetic oligonucleotide
ucgauguaugacuccagca

SEQ ID NO: 1079533 - RNA, 19 nt, Artificial Sequence
  Description of Artificial Sequence: Synthetic oligonucleotide
gccgacaguacauucaccg

SEQ ID NO: 1079534 - RNA, 19 nt, Artificial Sequence
  Description of Artificial Sequence: Synthetic oligonucleotide
uaucucacucauccggagc

SEQ ID NO: 1079535 - RNA, 19 nt, Artificial Sequence
  Description of Artificial Sequence: Synthetic oligonucleotide
ucugcaauaccagacggaa

SEQ ID NO: 1079536 - RNA, 19 nt, Artificial Sequence
  Description of Artificial Sequence: Synthetic oligonucleotide
caaugaucgcuucuacccg

SEQ ID NO: 1079537 - RNA, 19 nt, Artificial Sequence
  Description of Artificial Sequence: Synthetic oligonucleotide
augcacacgauagaucacg

SEQ ID NO: 1079538 - RNA, 19 nt, Artificial Sequence
  Description of Artificial Sequence: Synthetic oligonucleotide
uucaaauugccgccuuucu

SEQ ID NO: 1079539 - RNA, 19 nt, Artificial Sequence
  Description of Artificial Sequence: Synthetic oligonucleotide
aucucacucauccggagca

SEQ ID NO: 1079540 - RNA, 19 nt, Artificial Sequence
  Description of Artificial Sequence: Synthetic oligonucleotide
ugcucuuauagcaccugug

SEQ ID NO: 1079541 - RNA, 19 nt, Artificial Sequence
  Description of Artificial Sequence: Synthetic oligonucleotide
gauauaacucagugguaca

SEQ ID NO: 1079542 - RNA, 19 nt, Artificial Sequence
  Description of Artificial Sequence: Synthetic oligonucleotide
ugugaaagauagaucccaa

SEQ ID NO: 1079543 - RNA, 19 nt, Artificial Sequence
  Description of Artificial Sequence: Synthetic oligonucleotide
aauugccgccuuucuauca

SEQ ID NO: 1079544 - RNA, 19 nt, Artificial Sequence
  Description of Artificial Sequence: Synthetic oligonucleotide
uuaucucacucauccggag

SEQ ID NO: 1079545 - RNA, 19 nt, Artificial Sequence
  Description of Artificial Sequence: Synthetic oligonucleotide
cuaucaagcucaguuuagg

SEQ ID NO: 1079546 - RNA, 19 nt, Artificial Sequence
  Description of Artificial Sequence: Synthetic oligonucleotide
ucugauuagguggacucca

SEQ ID NO: 1079547 - RNA, 19 nt, Artificial Sequence
  Description of Artificial Sequence: Synthetic oligonucleotide
agaucacgagguuauggug

SEQ ID NO: 1079548 - RNA, 19 nt, Artificial Sequence
  Description of Artificial Sequence: Synthetic oligonucleotide
ugugagucgaucugcuacu

SEQ ID NO: 1079549 - RNA, 19 nt, Artificial Sequence
  Description of Artificial Sequence: Synthetic oligonucleotide
acagauagaagguccugga

SEQ ID NO: 1079550 - RNA, 19 nt, Artificial Sequence
  Description of Artificial Sequence: Synthetic oligonucleotide
cugguuggggauauaacuc

SEQ ID NO: 1079551 - RNA, 19 nt, Artificial Sequence
  Description of Artificial Sequence: Synthetic oligonucleotide
gaggauaccuaagcauucg

SEQ ID NO: 1079552 - RNA, 19 nt, Artificial Sequence
  Description of Artificial Sequence: Synthetic oligonucleotide
guacgaagugaguaucugc

SEQ ID NO: 1079553 - RNA, 19 nt, Artificial Sequence
  Description of Artificial Sequence: Synthetic oligonucleotide
ugcguuuaugcacacgaua

SEQ ID NO: 1079554 - RNA, 19 nt, Artificial Sequence
  Description of Artificial Sequence: Synthetic oligonucleotide
guuauagcugccaggcagg

SEQ ID NO: 1079555 - RNA, 19 nt, Artificial Sequence
  Description of Artificial Sequence: Synthetic oligonucleotide
auuguccgcacaaucucgc

SEQ ID NO: 1079556 - RNA, 19 nt, Artificial Sequence
  Description of Artificial Sequence: Synthetic oligonucleotide
gggcaauuacucuaagagg

SEQ ID NO: 1079557 - RNA, 19 nt, Artificial Sequence
  Description of Artificial Sequence: Synthetic oligonucleotide
uucugcaauaccagacgga

SEQ ID NO: 1079558 - RNA, 19 nt, Artificial Sequence
  Description of Artificial Sequence: Synthetic oligonucleotide
augugaaagauagauccca

SEQ ID NO: 1079559 - RNA, 19 nt, Artificial Sequence
  Description of Artificial Sequence: Synthetic oligonucleotide
uguuuccgugucaugggca

SEQ ID NO: 1079560 - RNA, 19 nt, Artificial Sequence
  Description of Artificial Sequence: Synthetic oligonucleotide
cuaauuuagaagcuccaaa

SEQ ID NO: 1079561 - RNA, 19 nt, Artificial Sequence
  Description of Artificial Sequence: Synthetic oligonucleotide
uguacgaagugaguaucug

SEQ ID NO: 1079562 - RNA, 19 nt, Artificial Sequence
  Description of Artificial Sequence: Synthetic oligonucleotide
agugucacuguacagcguu

SEQ ID NO: 1079563 - RNA, 19 nt, Artificial Sequence
  Description of Artificial Sequence: Synthetic oligonucleotide
agugaguaucugccagucg

SEQ ID NO: 1079564 - RNA, 19 nt, Artificial Sequence
  Description of Artificial Sequence: Synthetic oligonucleotide
uggaaucugucaagguuga

SEQ ID NO: 1079565 - RNA, 19 nt, Artificial Sequence
  Description of Artificial Sequence: Synthetic oligonucleotide
ugguuaucucacucauccg

SEQ ID NO: 1079566 - RNA, 19 nt, Artificial Sequence
  Description of Artificial Sequence: Synthetic oligonucleotide
ugacuaguaugugaaagau

SEQ ID NO: 1079567 - RNA, 19 nt, Artificial Sequence
  Description of Artificial Sequence: Synthetic oligonucleotide
ucuagugggucaucagcca

SEQ ID NO: 1079568 - RNA, 19 nt, Artificial Sequence
  Description of Artificial Sequence: Synthetic oligonucleotide
guuaacguugcguuucaga

SEQ ID NO: 1079569 - RNA, 19 nt, Artificial Sequence
  Description of Artificial Sequence: Synthetic oligonucleotide
uuugauaccucagcauagu

SEQ ID NO: 1079570 - RNA, 19 nt, Artificial Sequence
  Description of Artificial Sequence: Synthetic oligonucleotide
guguacagauagaaggucc

SEQ ID NO: 1079571 - RNA, 19 nt, Artificial Sequence
  Description of Artificial Sequence: Synthetic oligonucleotide
acugucgccagacuuucca

SEQ ID NO: 1079572 - RNA, 19 nt, Artificial Sequence
  Description of Artificial Sequence: Synthetic oligonucleotide
cagcguuuugguaguauag

SEQ ID NO: 1079573 - RNA, 19 nt, Artificial Sequence
  Description of Artificial Sequence: Synthetic oligonucleotide
auaccuaagcauucgcaau

SEQ ID NO: 1079574 - RNA, 19 nt, Artificial Sequence
  Description of Artificial Sequence: Synthetic oligonucleotide
uuagguggacuccaauuuu

SEQ ID NO: 1079575 - RNA, 19 nt, Artificial Sequence
  Description of Artificial Sequence: Synthetic oligonucleotide
uccucuuaccuuuuccuau

SEQ ID NO: 1079576 - RNA, 19 nt, Artificial Sequence
  Description of Artificial Sequence: Synthetic oligonucleotide
gacggaauauucuggcaca

SEQ ID NO: 1079577 - RNA, 19 nt, Artificial Sequence
  Description of Artificial Sequence: Synthetic oligonucleotide
ugccaauaaaucccaucgu

SEQ ID NO: 1079578 - RNA, 19 nt, Artificial Sequence
  Description of Artificial Sequence: Synthetic oligonucleotide
uaacguugcguuucagagu

SEQ ID NO: 1079579 - RNA, 19 nt, Artificial Sequence
  Description of Artificial Sequence: Synthetic oligonucleotide
agucgcgguggcuagggag

SEQ ID NO: 1079580 - RNA, 19 nt, Artificial Sequence
  Description of Artificial Sequence: Synthetic oligonucleotide
gauagaucccaacacugcu

SEQ ID NO: 1079581 - RNA, 19 nt, Artificial Sequence
  Description of Artificial Sequence: Synthetic oligonucleotide
accgaggauaccuaagcau

SEQ ID NO: 1079582 - RNA, 19 nt, Artificial Sequence
  Description of Artificial Sequence: Synthetic oligonucleotide
cauuugauaccucagcaua

SEQ ID NO: 1079583 - RNA, 19 nt, Artificial Sequence
  Description of Artificial Sequence: Synthetic oligonucleotide
uuuccuggagugauaugaa

SEQ ID NO: 1079584 - RNA, 19 nt, Artificial Sequence
  Description of Artificial Sequence: Synthetic oligonucleotide
ugcucucgauguaugacuc

SEQ ID NO: 1079585 - RNA, 19 nt, Artificial Sequence
  Description of Artificial Sequence: Synthetic oligonucleotide
cauuaaugacaaggguugg

SEQ ID NO: 1079586 - RNA, 19 nt, Artificial Sequence
  Description of Artificial Sequence: Synthetic oligonucleotide
auucgguuugcaacugcgc

SEQ ID NO: 1079587 - RNA, 19 nt, Artificial Sequence
  Description of Artificial Sequence: Synthetic oligonucleotide
ugacagacuccagagucgc

SEQ ID NO: 1079588 - RNA, 19 nt, Artificial Sequence
  Description of Artificial Sequence: Synthetic oligonucleotide
uucuaguagccgcuuguuc

SEQ ID NO: 1079589 - RNA, 19 nt, Artificial Sequence
  Description of Artificial Sequence: Synthetic oligonucleotide
uagagauguuauagcugcc

SEQ ID NO: 1079590 - RNA, 19 nt, Artificial Sequence
  Description of Artificial Sequence: Synthetic oligonucleotide
uucaccugauccagugaug

SEQ ID NO: 1079591 - RNA, 19 nt, Artificial Sequence
  Description of Artificial Sequence: Synthetic oligonucleotide
cugaucaaggacuugcuua

SEQ ID NO: 1079592 - RNA, 19 nt, Artificial Sequence
  Description of Artificial Sequence: Synthetic oligonucleotide
uuguuaacguugcguuuca

SEQ ID NO: 1079593 - RNA, 19 nt, Artificial Sequence
  Description of Artificial Sequence: Synthetic oligonucleotide
agagauguuauagcugcca

SEQ ID NO: 1079594 - RNA, 19 nt, Artificial Sequence
  Description of Artificial Sequence: Synthetic oligonucleotide
gugaaagauagaucccaac

SEQ ID NO: 1079595 - RNA, 19 nt, Artificial Sequence
  Description of Artificial Sequence: Synthetic oligonucleotide
caggggacagcgcuguacg

SEQ ID NO: 1079596 - RNA, 19 nt, Artificial Sequence
  Description of Artificial Sequence: Synthetic oligonucleotide
caauuacucuaagaggcug

SEQ ID NO: 1079597 - RNA, 19 nt, Artificial Sequence
  Description of Artificial Sequence: Synthetic oligonucleotide
gcucuuauagcaccugugc

SEQ ID NO: 1079598 - RNA, 19 nt, Artificial Sequence
  Description of Artificial Sequence: Synthetic oligonucleotide
gcuaugcucuuauagcacc

SEQ ID NO: 1079599 - RNA, 19 nt, Artificial Sequence
  Description of Artificial Sequence: Synthetic oligonucleotide
acgagguuaugguggauga

SEQ ID NO: 1079600 - RNA, 19 nt, Artificial Sequence
  Description of Artificial Sequence: Synthetic oligonucleotide
caaucucgcuacuugucug

SEQ ID NO: 1079601 - RNA, 19 nt, Artificial Sequence
  Description of Artificial Sequence: Synthetic oligonucleotide
agcauucgcaauacccggc

SEQ ID NO: 1079602 - RNA, 19 nt, Artificial Sequence
  Description of Artificial Sequence: Synthetic oligonucleotide
ugcacacgauagaucacga

SEQ ID NO: 1079603 - RNA, 19 nt, Artificial Sequence
  Description of Artificial Sequence: Synthetic oligonucleotide
ucucuccuggaugacagac

SEQ ID NO: 1079604 - RNA, 19 nt, Artificial Sequence
  Description of Artificial Sequence: Synthetic oligonucleotide
uucugauuagguggacucc

SEQ ID NO: 1079605 - RNA, 19 nt, Artificial Sequence
  Description of Artificial Sequence: Synthetic oligonucleotide
uaugcacacgauagaucac

SEQ ID NO: 1079606 - RNA, 19 nt, Artificial Sequence
  Description of Artificial Sequence: Synthetic oligonucleotide
ugccagucgcacaaaugca

SEQ ID NO: 1079607 - RNA, 19 nt, Artificial Sequence
  Description of Artificial Sequence: Synthetic oligonucleotide
agggucagugcuaauuuag

SEQ ID NO: 1079608 - RNA, 19 nt, Artificial Sequence
  Description of Artificial Sequence: Synthetic oligonucleotide
uggcuagggaggccaaugc

SEQ ID NO: 1079609 - RNA, 19 nt, Artificial Sequence
  Description of Artificial Sequence: Synthetic oligonucleotide
accagacggaauauucugg

SEQ ID NO: 1079610 - RNA, 19 nt, Artificial Sequence
  Description of Artificial Sequence: Synthetic oligonucleotide
aaugccuuauggagguuga

SEQ ID NO: 1079611 - RNA, 19 nt, Artificial Sequence
  Description of Artificial Sequence: Synthetic oligonucleotide
gguaguauagauguaccga

SEQ ID NO: 1079612 - RNA, 19 nt, Artificial Sequence
  Description of Artificial Sequence: Synthetic oligonucleotide
ugauuagguggacuccaau

SEQ ID NO: 1079613 - RNA, 19 nt, Artificial Sequence
  Description of Artificial Sequence: Synthetic oligonucleotide
agccgcuuguucucuuucg

SEQ ID NO: 1079614 - RNA, 19 nt, Artificial Sequence
  Description of Artificial Sequence: Synthetic oligonucleotide
ugugaucaucuccucuauc

SEQ ID NO: 1079615 - RNA, 19 nt, Artificial Sequence
  Description of Artificial Sequence: Synthetic oligonucleotide
gauccagugauguuuccgu

SEQ ID NO: 1079616 - RNA, 19 nt, Artificial Sequence
  Description of Artificial Sequence: Synthetic oligonucleotide
agaaucgccaguggcagga

SEQ ID NO: 1079617 - RNA, 19 nt, Artificial Sequence
  Description of Artificial Sequence: Synthetic oligonucleotide
gccuuauggagguugauga

SEQ ID NO: 1079618 - RNA, 19 nt, Artificial Sequence
  Description of Artificial Sequence: Synthetic oligonucleotide
cuaguagccgcuuguucuc

SEQ ID NO: 1079619 - RNA, 19 nt, Artificial Sequence
  Description of Artificial Sequence: Synthetic oligonucleotide
ucuuaccuuuuccuaucaa

SEQ ID NO: 1079620 - RNA, 19 nt, Artificial Sequence
  Description of Artificial Sequence: Synthetic oligonucleotide
guccgcacaaucucgcuac

SEQ ID NO: 1079621 - RNA, 19 nt, Artificial Sequence
  Description of Artificial Sequence: Synthetic oligonucleotide
agugauguuuccgugucau

SEQ ID NO: 1079622 - RNA, 19 nt, Artificial Sequence
  Description of Artificial Sequence: Synthetic oligonucleotide
aucacgagguuauggugga

SEQ ID NO: 1079623 - RNA, 19 nt, Artificial Sequence
  Description of Artificial Sequence: Synthetic oligonucleotide
acagcgagacccgaaucuc

SEQ ID NO: 1079624 - RNA, 19 nt, Artificial Sequence
  Description of Artificial Sequence: Synthetic oligonucleotide
acgaagugaguaucugcca

SEQ ID NO: 1079625 - RNA, 19 nt, Artificial Sequence
  Description of Artificial Sequence: Synthetic oligonucleotide
agcguuuugguaguauaga

SEQ ID NO: 1079626 - RNA, 19 nt, Artificial Sequence
  Description of Artificial Sequence: Synthetic oligonucleotide
aucccaucgucuggaaugg

SEQ ID NO: 1079627 - RNA, 19 nt, Artificial Sequence
  Description of Artificial Sequence: Synthetic oligonucleotide
caaugccuuauggagguug

SEQ ID NO: 1079628 - RNA, 19 nt, Artificial Sequence
  Description of Artificial Sequence: Synthetic oligonucleotide
gauuagguggacuccaauu

SEQ ID NO: 1079629 - RNA, 19 nt, Artificial Sequence
  Description of Artificial Sequence: Synthetic oligonucleotide
guuacugucucuucauggu

SEQ ID NO: 1079630 - RNA, 19 nt, Artificial Sequence
  Description of Artificial Sequence: Synthetic oligonucleotide
cagcgcuguacgaagugag

SEQ ID NO: 1079631 - RNA, 19 nt, Artificial Sequence
  Description of Artificial Sequence: Synthetic oligonucleotide
ggucagaaucgccaguggc

SEQ ID NO: 1079632 - RNA, 19 nt, Artificial Sequence
  Description of Artificial Sequence: Synthetic oligonucleotide
gaucgcuucuacccgcuga

SEQ ID NO: 1079633 - RNA, 19 nt, Artificial Sequence
  Description of Artificial Sequence: Synthetic oligonucleotide
augcucuuauagcaccugu

SEQ ID NO: 1079634 - RNA, 19 nt, Artificial Sequence
  Description of Artificial Sequence: Synthetic oligonucleotide
auugccgccuuucuaucaa

SEQ ID NO: 1079635 - RNA, 19 nt, Artificial Sequence
  Description of Artificial Sequence: Synthetic oligonucleotide
ucgccagacuuuccaauaa

SEQ ID NO: 1079636 - RNA, 19 nt, Artificial Sequence
  Description of Artificial Sequence: Synthetic oligonucleotide
caccguguacagauagaag

SEQ ID NO: 1079637 - RNA, 19 nt, Artificial Sequence
  Description of Artificial Sequence: Synthetic oligonucleotide
ucgcacaaaugcauuugau

SEQ ID NO: 1079638 - RNA, 19 nt, Artificial Sequence
  Description of Artificial Sequence: Synthetic oligonucleotide
uaggaacuagguacauguc

SEQ ID NO: 1079639 - RNA, 19 nt, Artificial Sequence
  Description of Artificial Sequence: Synthetic oligonucleotide
acuuguuaacguugcguuu

SEQ ID NO: 1079640 - RNA, 19 nt, Artificial Sequence
  Description of Artificial Sequence: Synthetic oligonucleotide
uaggaauuuccuggaguga

SEQ ID NO: 1079641 - RNA, 19 nt, Artificial Sequence
  Description of Artificial Sequence: Synthetic oligonucleotide
aacuagguacauguccuuu

SEQ ID NO: 1079642 - RNA, 19 nt, Artificial Sequence
  Description of Artificial Sequence: Synthetic oligonucleotide
caaauugccgccuuucuau

SEQ ID NO: 1079643 - RNA, 19 nt, Artificial Sequence
  Description of Artificial Sequence: Synthetic oligonucleotide
cuuuuccuaucaagcucag

SEQ ID NO: 1079644 - RNA, 19 nt, Artificial Sequence
  Description of Artificial Sequence: Synthetic oligonucleotide
guuaucucacucauccgga

SEQ ID NO: 1079645 - RNA, 19 nt, Artificial Sequence
  Description of Artificial Sequence: Synthetic oligonucleotide
uuggagccuuagaacucag

SEQ ID NO: 1079646 - RNA, 19 nt, Artificial Sequence
  Description of Artificial Sequence: Synthetic oligonucleotide
ccagacggaauauucuggc

SEQ ID NO: 1079647 - RNA, 19 nt, Artificial Sequence
  Description of Artificial Sequence: Synthetic oligonucleotide
cuugcuuagagauguuaua

SEQ ID NO: 1079648 - RNA, 19 nt, Artificial Sequence
  Description of Artificial Sequence: Synthetic oligonucleotide
cacgagguuaugguggaug

SEQ ID NO: 1079649 - RNA, 19 nt, Artificial Sequence
  Description of Artificial Sequence: Synthetic oligonucleotide
caguacauucaccguguac

SEQ ID NO: 1079650 - RNA, 19 nt, Artificial Sequence
  Description of Artificial Sequence: Synthetic oligonucleotide
uucgcaauacccggcuaca

SEQ ID NO: 1079651 - RNA, 19 nt, Artificial Sequence
  Description of Artificial Sequence: Synthetic oligonucleotide
agugguuaucucacucauc

SEQ ID NO: 1079652 - RNA, 19 nt, Artificial Sequence
  Description of Artificial Sequence: Synthetic oligonucleotide
gucgcgguggcuagggagg

SEQ ID NO: 1079653 - RNA, 19 nt, Artificial Sequence
  Description of Artificial Sequence: Synthetic oligonucleotide
ugucgccagacuuuccaau

SEQ ID NO: 1079654 - RNA, 19 nt, Artificial Sequence
  Description of Artificial Sequence: Synthetic oligonucleotide
agcucaguuuaggaacuag

SEQ ID NO: 1079655 - RNA, 19 nt, Artificial Sequence
  Description of Artificial Sequence: Synthetic oligonucleotide
gagacccgaaucucuccug

SEQ ID NO: 1079656 - RNA, 19 nt, Artificial Sequence
  Description of Artificial Sequence: Synthetic oligonucleotide
gucgcacaaaugcauuuga

SEQ ID NO: 1079657 - RNA, 19 nt, Artificial Sequence
  Description of Artificial Sequence: Synthetic oligonucleotide
auguaugacuccagcaaga

SEQ ID NO: 1079658 - RNA, 19 nt, Artificial Sequence
  Description of Artificial Sequence: Synthetic oligonucleotide
agguugacuugccaauaaa

SEQ ID NO: 1079659 - RNA, 19 nt, Artificial Sequence
  Description of Artificial Sequence: Synthetic oligonucleotide
ugccgccuuucuaucaagu

SEQ ID NO: 1079660 - RNA, 19 nt, Artificial Sequence
  Description of Artificial Sequence: Synthetic oligonucleotide
acggaauauucuggcacag

SEQ ID NO: 1079661 - RNA, 19 nt, Artificial Sequence
  Description of Artificial Sequence: Synthetic oligonucleotide
aacagcugacauugucauu

SEQ ID NO: 1079662 - RNA, 19 nt, Artificial Sequence
  Description of Artificial Sequence: Synthetic oligonucleotide
uguuaacguugcguuucag

SEQ ID NO: 1079663 - RNA, 19 nt, Artificial Sequence
  Description of Artificial Sequence: Synthetic oligonucleotide
auguuauagcugccaggca

SEQ ID NO: 1079664 - RNA, 19 nt, Artificial Sequence
  Description of Artificial Sequence: Synthetic oligonucleotide
gagccuuagaacucagggu

SEQ ID NO: 1079665 - RNA, 19 nt, Artificial Sequence
  Description of Artificial Sequence: Synthetic oligonucleotide
uugaugcaaugaucgcuuc

SEQ ID NO: 1079666 - RNA, 19 nt, Artificial Sequence
  Description of Artificial Sequence: Synthetic oligonucleotide
agcgagacccgaaucucuc

SEQ ID NO: 1079667 - RNA, 19 nt, Artificial Sequence
  Description of Artificial Sequence: Synthetic oligonucleotide
gggacagcgcuguacgaag

SEQ ID NO: 1079668 - RNA, 19 nt, Artificial Sequence
  Description of Artificial Sequence: Synthetic oligonucleotide
agugugagguacugaucaa

SEQ ID NO: 1079669 - RNA, 19 nt, Artificial Sequence
  Description of Artificial Sequence: Synthetic oligonucleotide
guuuccgugucaugggcaa

SEQ ID NO: 1079670 - RNA, 19 nt, Artificial Sequence
  Description of Artificial Sequence: Synthetic oligonucleotide
cguuuugguaguauagaug

SEQ ID NO: 1079671 - RNA, 19 nt, Artificial Sequence
  Description of Artificial Sequence: Synthetic oligonucleotide
acacugcguuuaugcacac

SEQ ID NO: 1079672 - RNA, 19 nt, Artificial Sequence
  Description of Artificial Sequence: Synthetic oligonucleotide
uugccgccuuucuaucaag

SEQ ID NO: 1079673 - RNA, 19 nt, Artificial Sequence
  Description of Artificial Sequence: Synthetic oligonucleotide
gguaaauggggcacccgag

SEQ ID NO: 1079674 - RNA, 19 nt, Artificial Sequence
  Description of Artificial Sequence: Synthetic oligonucleotide
auguaccgaggauaccuaa

SEQ ID NO: 1079675 - RNA, 19 nt, Artificial Sequence
  Description of Artificial Sequence: Synthetic oligonucleotide
uucgucagaugaucuccuc

SEQ ID NO: 1079676 - RNA, 19 nt, Artificial Sequence
  Description of Artificial Sequence: Synthetic oligonucleotide
acgauagaucacgagguua

SEQ ID NO: 1079677 - RNA, 19 nt, Artificial Sequence
  Description of Artificial Sequence: Synthetic oligonucleotide
cagaaucgccaguggcagg

SEQ ID NO: 1079678 - RNA, 19 nt, Artificial Sequence
  Description of Artificial Sequence: Synthetic oligonucleotide
uuacucuaagaggcuggcu

SEQ ID NO: 1079679 - RNA, 19 nt, Artificial Sequence
  Description of Artificial Sequence: Synthetic oligonucleotide
cuuggagccuuagaacuca

SEQ ID NO: 1079680 - RNA, 19 nt, Artificial Sequence
  Description of Artificial Sequence: Synthetic oligonucleotide
aaaugcucuugcagcaaua

SEQ ID NO: 1079681 - RNA, 19 nt, Artificial Sequence
  Description of Artificial Sequence: Synthetic oligonucleotide
uuguccgcacaaucucgcu

SEQ ID NO: 1079682 - RNA, 19 nt, Artificial Sequence
  Description of Artificial Sequence: Synthetic oligonucleotide
ugccauucaacaggagcuc

SEQ ID NO: 1079683 - RNA, 19 nt, Artificial Sequence
  Description of Artificial Sequence: Synthetic oligonucleotide
gcaggugacuaguauguga

SEQ ID NO: 1079684 - RNA, 19 nt, Artificial Sequence
  Description of Artificial Sequence: Synthetic oligonucleotide
aggagcucuucaacaauca

SEQ ID NO: 1079685 - RNA, 19 nt, Artificial Sequence
  Description of Artificial Sequence: Synthetic oligonucleotide
gacagacuccagagucgcg

SEQ ID NO: 1079686 - RNA, 19 nt, Artificial Sequence
  Description of Artificial Sequence: Synthetic oligonucleotide
cauccggagcauuguccgc

SEQ ID NO: 1079687 - RNA, 19 nt, Artificial Sequence
  Description of Artificial Sequence: Synthetic oligonucleotide
agacuccagagucgcggug

SEQ ID NO: 1079688 - RNA, 19 nt, Artificial Sequence
  Description of Artificial Sequence: Synthetic oligonucleotide
ucgcuacuugucuggucca

SEQ ID NO: 1079689 - RNA, 19 nt, Artificial Sequence
  Description of Artificial Sequence: Synthetic oligonucleotide
agccgacaguacauucacc

SEQ ID NO: 1079690 - RNA, 19 nt, Artificial Sequence
  Description of Artificial Sequence: Synthetic oligonucleotide
gagugguuaucucacucau

SEQ ID NO: 1079691 - RNA, 19 nt, Artificial Sequence
  Description of Artificial Sequence: Synthetic oligonucleotide
cagacggaauauucuggca

SEQ ID NO: 1079692 - RNA, 19 nt, Artificial Sequence
  Description of Artificial Sequence: Synthetic oligonucleotide
cauugucauuuugccauuc

SEQ ID NO: 1079693 - RNA, 19 nt, Artificial Sequence
  Description of Artificial Sequence: Synthetic oligonucleotide
gugcucucgauguaugacu

SEQ ID NO: 1079694 - RNA, 19 nt, Artificial Sequence
  Description of Artificial Sequence: Synthetic oligonucleotide
ggaacuagguacauguccu

SEQ ID NO: 1079695 - RNA, 19 nt, Artificial Sequence
  Description of Artificial Sequence: Synthetic oligonucleotide
gacuugcuuagagauguua

SEQ ID NO: 1079696 - RNA, 19 nt, Artificial Sequence
  Description of Artificial Sequence: Synthetic oligonucleotide
ggauaccuaagcauucgca

SEQ ID NO: 1079697 - RNA, 19 nt, Artificial Sequence
  Description of Artificial Sequence: Synthetic oligonucleotide
ccaacuuguuaacguugcg

SEQ ID NO: 1079698 - RNA, 19 nt, Artificial Sequence
  Description of Artificial Sequence: Synthetic oligonucleotide
caagcucaguuuaggaacu

SEQ ID NO: 1079699 - RNA, 19 nt, Artificial Sequence
  Description of Artificial Sequence: Synthetic oligonucleotide
cgacaguacauucaccgug

SEQ ID NO: 1079700 - RNA, 19 nt, Artificial Sequence
  Description of Artificial Sequence: Synthetic oligonucleotide
cucuuaccuuuuccuauca

SEQ ID NO: 1079701 - RNA, 19 nt, Artificial Sequence
  Description of Artificial Sequence: Synthetic oligonucleotide
gucgccagacuuuccaaua

SEQ ID NO: 1079702 - RNA, 19 nt, Artificial Sequence
  Description of Artificial Sequence: Synthetic oligonucleotide
gauguaccgaggauaccua

SEQ ID NO: 1079703 - RNA, 19 nt, Artificial Sequence
  Description of Artificial Sequence: Synthetic oligonucleotide
guggccugcauugaugcaa

SEQ ID NO: 1079704 - RNA, 19 nt, Artificial Sequence
  Description of Artificial Sequence: Synthetic oligonucleotide
uccgcacaaucucgcuacu

SEQ ID NO: 1079705 - RNA, 19 nt, Artificial Sequence
  Description of Artificial Sequence: Synthetic oligonucleotide
caacuuguuaacguugcgu

SEQ ID NO: 1079706 - RNA, 19 nt, Artificial Sequence
  Description of Artificial Sequence: Synthetic oligonucleotide
ucgcaauacccggcuacac

SEQ ID NO: 1079707 - RNA, 19 nt, Artificial Sequence
  Description of Artificial Sequence: Synthetic oligonucleotide
gacccgaaucucuccugga

SEQ ID NO: 1079708 - RNA, 19 nt, Artificial Sequence
  Description of Artificial Sequence: Synthetic oligonucleotide
uaguagccgcuuguucucu

SEQ ID NO: 1079709 - RNA, 19 nt, Artificial Sequence
  Description of Artificial Sequence: Synthetic oligonucleotide
ugcuugagucauugugcuu

SEQ ID NO: 1079710 - RNA, 19 nt, Artificial Sequence
  Description of Artificial Sequence: Synthetic oligonucleotide
auggugcucucgauguaug

SEQ ID NO: 1079711 - RNA, 19 nt, Artificial Sequence
  Description of Artificial Sequence: Synthetic oligonucleotide
ccagugauguuuccguguc

SEQ ID NO: 1079712 - RNA, 19 nt, Artificial Sequence
  Description of Artificial Sequence: Synthetic oligonucleotide
cacugcguuuaugcacacg

SEQ ID NO: 1079713 - RNA, 19 nt, Artificial Sequence
  Description of Artificial Sequence: Synthetic oligonucleotide
cuaugcucuuauagcaccu

SEQ ID NO: 1079714 - RNA, 19 nt, Artificial Sequence
  Description of Artificial Sequence: Synthetic oligonucleotide
gcuaauuuagaagcuccaa

SEQ ID NO: 1079715 - RNA, 19 nt, Artificial Sequence
  Description of Artificial Sequence: Synthetic oligonucleotide
ccucuuaccuuuuccuauc

SEQ ID NO: 1079716 - RNA, 19 nt, Artificial Sequence
  Description of Artificial Sequence: Synthetic oligonucleotide
caucuucgucagaugaucu

SEQ ID NO: 1079717 - RNA, 19 nt, Artificial Sequence
  Description of Artificial Sequence: Synthetic oligonucleotide
acaguacauucaccgugua

SEQ ID NO: 1079718 - RNA, 19 nt, Artificial Sequence
  Description of Artificial Sequence: Synthetic oligonucleotide
ggcuaugcucuuauagcac

SEQ ID NO: 1079719 - RNA, 19 nt, Artificial Sequence
  Description of Artificial Sequence: Synthetic oligonucleotide
cuacccgcugagacuuuuc

SEQ ID NO: 1079720 - RNA, 19 nt, Artificial Sequence
  Description of Artificial Sequence: Synthetic oligonucleotide
cuguacgaagugaguaucu

SEQ ID NO: 1079721 - RNA, 19 nt, Artificial Sequence
  Description of Artificial Sequence: Synthetic oligonucleotide
cacugucgccagacuuucc

SEQ ID NO: 1079722 - RNA, 19 nt, Artificial Sequence
  Description of Artificial Sequence: Synthetic oligonucleotide
cugauuagguggacuccaa

SEQ ID NO: 1079723 - RNA, 19 nt, Artificial Sequence
  Description of Artificial Sequence: Synthetic oligonucleotide
gguacugaucaaggacuug

SEQ ID NO: 1079724 - RNA, 19 nt, Artificial Sequence
  Description of Artificial Sequence: Synthetic oligonucleotide
ucuacccgcugagacuuuu

SEQ ID NO: 1079725 - RNA, 19 nt, Artificial Sequence
  Description of Artificial Sequence: Synthetic oligonucleotide
acccgcugagacuuuucua

SEQ ID NO: 1079726 - RNA, 19 nt, Artificial Sequence
  Description of Artificial Sequence: Synthetic oligonucleotide
aucucgcuacuugucuggu

SEQ ID NO: 1079727 - RNA, 19 nt, Artificial Sequence
  Description of Artificial Sequence: Synthetic oligonucleotide
ucucacucauccggagcau

SEQ ID NO: 1079728 - RNA, 19 nt, Artificial Sequence
  Description of Artificial Sequence: Synthetic oligonucleotide
cagugcuaauuuagaagcu

SEQ ID NO: 1079729 - RNA, 19 nt, Artificial Sequence
  Description of Artificial Sequence: Synthetic oligonucleotide
agcgcuguacgaagugagu

SEQ ID NO: 1079730 - RNA, 19 nt, Artificial Sequence
  Description of Artificial Sequence: Synthetic oligonucleotide
cgauguaugacuccagcaa

SEQ ID NO: 1079731 - RNA, 19 nt, Artificial Sequence
  Description of Artificial Sequence: Synthetic oligonucleotide
acuccacaacacugcguuu

SEQ ID NO: 1079732 - RNA, 19 nt, Artificial Sequence
  Description of Artificial Sequence: Synthetic oligonucleotide
gaacuagguacauguccuu

SEQ ID NO: 1079733 - RNA, 19 nt, Artificial Sequence
  Description of Artificial Sequence: Synthetic oligonucleotide
uccgugucaugggcaauua

SEQ ID NO: 1079734 - RNA, 19 nt, Artificial Sequence
  Description of Artificial Sequence: Synthetic oligonucleotide
ccauucgguuugcaacugc

SEQ ID NO: 1079735 - RNA, 19 nt, Artificial Sequence
  Description of Artificial Sequence: Synthetic oligonucleotide
ucgcgguggcuagggaggc

SEQ ID NO: 1079736 - RNA, 19 nt, Artificial Sequence
  Description of Artificial Sequence: Synthetic oligonucleotide
gcgagacccgaaucucucc

SEQ ID NO: 1079737 - RNA, 19 nt, Artificial Sequence
  Description of Artificial Sequence: Synthetic oligonucleotide
gccugcauugaugcaauga

SEQ ID NO: 1079738 - RNA, 19 nt, Artificial Sequence
  Description of Artificial Sequence: Synthetic oligonucleotide
cuucuacccgcugagacuu

SEQ ID NO: 1079739 - RNA, 19 nt, Artificial Sequence
  Description of Artificial Sequence: Synthetic oligonucleotide
ucgcuucuacccgcugaga

SEQ ID NO: 1079740 - RNA, 19 nt, Artificial Sequence
  Description of Artificial Sequence: Synthetic oligonucleotide
gcagccgacaguacauuca

SEQ ID NO: 1079741 - RNA, 19 nt, Artificial Sequence
  Description of Artificial Sequence: Synthetic oligonucleotide
gggucagugcuaauuuaga

SEQ ID NO: 1079742 - RNA, 19 nt, Artificial Sequence
  Description of Artificial Sequence: Synthetic oligonucleotide
acccguggccugcauugau

SEQ ID NO: 1079743 - RNA, 19 nt, Artificial Sequence
  Description of Artificial Sequence: Synthetic oligonucleotide
cagagucgcgguggcuagg

SEQ ID NO: 1079744 - RNA, 19 nt, Artificial Sequence
  Description of Artificial Sequence: Synthetic oligonucleotide
gcacaaucucgcuacuugu

SEQ ID NO: 1079745 - RNA, 19 nt, Artificial Sequence
  Description of Artificial Sequence: Synthetic oligonucleotide
cauucaccguguacagaua

SEQ ID NO: 1079746 - RNA, 19 nt, Artificial Sequence
  Description of Artificial Sequence: Synthetic oligonucleotide
agcaccugugcaacagcau

SEQ ID NO: 1079747 - RNA, 19 nt, Artificial Sequence
  Description of Artificial Sequence: Synthetic oligonucleotide
cagauagaagguccuggau

SEQ ID NO: 1079748 - RNA, 19 nt, Artificial Sequence
  Description of Artificial Sequence: Synthetic oligonucleotide
gcauucgcaauacccggcu

SEQ ID NO: 1079749 - RNA, 19 nt, Artificial Sequence
  Description of Artificial Sequence: Synthetic oligonucleotide
cccguggccugcauugaug

SEQ ID NO: 1079750 - RNA, 19 nt, Artificial Sequence
  Description of Artificial Sequence: Synthetic oligonucleotide
uucuacccgcugagacuuu

SEQ ID NO: 1079751 - RNA, 19 nt, Artificial Sequence
  Description of Artificial Sequence: Synthetic oligonucleotide
cauucgcaauacccggcua

SEQ ID NO: 1079752 - RNA, 19 nt, Artificial Sequence
  Description of Artificial Sequence: Synthetic oligonucleotide
gcacagcgagacccgaauc

SEQ ID NO: 1079753 - RNA, 19 nt, Artificial Sequence
  Description of Artificial Sequence: Synthetic oligonucleotide
gagucgcgguggcuaggga

SEQ ID NO: 1079754 - RNA, 19 nt, Artificial Sequence
  Description of Artificial Sequence: Synthetic oligonucleotide
ucacgagguuaugguggau

SEQ ID NO: 1079755 - RNA, 19 nt, Artificial Sequence
  Description of Artificial Sequence: Synthetic oligonucleotide
cguuuaugcacacgauaga

SEQ ID NO: 1079756 - RNA, 19 nt, Artificial Sequence
  Description of Artificial Sequence: Synthetic oligonucleotide
cagucgcacaaaugcauuu

SEQ ID NO: 1079757 - RNA, 19 nt, Artificial Sequence
  Description of Artificial Sequence: Synthetic oligonucleotide
ggaaucugucaagguugac

SEQ ID NO: 1079758 - RNA, 19 nt, Artificial Sequence
  Description of Artificial Sequence: Synthetic oligonucleotide
cugcaauaccagacggaau

SEQ ID NO: 1079759 - RNA, 19 nt, Artificial Sequence
  Description of Artificial Sequence: Synthetic oligonucleotide
ggggacagcgcuguacgaa

SEQ ID NO: 1079760 - RNA, 19 nt, Artificial Sequence
  Description of Artificial Sequence: Synthetic oligonucleotide
ccgaggauaccuaagcauu

SEQ ID NO: 1079761 - RNA, 19 nt, Artificial Sequence
  Description of Artificial Sequence: Synthetic oligonucleotide
gcgcuguacgaagugagua

SEQ ID NO: 1079762 - RNA, 19 nt, Artificial Sequence
  Description of Artificial Sequence: Synthetic oligonucleotide
cacgauagaucacgagguu

SEQ ID NO: 1079763 - RNA, 19 nt, Artificial Sequence
  Description of Artificial Sequence: Synthetic oligonucleotide
cacggaagugcugguggaa

SEQ ID NO: 1079764 - RNA, 19 nt, Artificial Sequence
  Description of Artificial Sequence: Synthetic oligonucleotide
ccgugucaugggcaauuac

SEQ ID NO: 1079765 - RNA, 19 nt, Artificial Sequence
  Description of Artificial Sequence: Synthetic oligonucleotide
ggcacagcgagacccgaau

SEQ ID NO: 1079766 - RNA, 19 nt, Artificial Sequence
  Description of Artificial Sequence: Synthetic oligonucleotide
cugcguuuaugcacacgau

SEQ ID NO: 1079767 - RNA, 19 nt, Artificial Sequence
  Description of Artificial Sequence: Synthetic oligonucleotide
caucuaccuggaucucacu

SEQ ID NO: 1079768 - RNA, 19 nt, Artificial Sequence
  Description of Artificial Sequence: Synthetic oligonucleotide
ccacugucgccagacuuuc

SEQ ID NO: 1079769 - RNA, 19 nt, Artificial Sequence
  Description of Artificial Sequence: Synthetic oligonucleotide
gcguggucugggguuuuag

SEQ ID NO: 1079770 - RNA, 19 nt, Artificial Sequence
  Description of Artificial Sequence: Synthetic oligonucleotide
gccagucgcacaaaugcau

SEQ ID NO: 1079771 - RNA, 19 nt, Artificial Sequence
  Description of Artificial Sequence: Synthetic oligonucleotide
ccacaacacugcguuuaug

SEQ ID NO: 1079772 - RNA, 19 nt, Artificial Sequence
  Description of Artificial Sequence: Synthetic oligonucleotide
gcaauaccagacggaauau

SEQ ID NO: 1079773 - RNA, 19 nt, Artificial Sequence
  Description of Artificial Sequence: Synthetic oligonucleotide
gcacccgagggagugguua

SEQ ID NO: 1079774 - RNA, 19 nt, Artificial Sequence
  Description of Artificial Sequence: Synthetic oligonucleotide
cacccgagggagugguuau

SEQ ID NO: 1079775 - RNA, 19 nt, Artificial Sequence
  Description of Artificial Sequence: Synthetic oligonucleotide
ccgacaguacauucaccgu

SEQ ID NO: 1079776 - RNA, 19 nt, Artificial Sequence
  Description of Artificial Sequence: Synthetic oligonucleotide
gccgccuuucuaucaaguu

SEQ ID NO: 1079777 - RNA, 19 nt, Artificial Sequence
  Description of Artificial Sequence: Synthetic oligonucleotide
cucacucauccggagcauu

SEQ ID NO: 1079778 - RNA, 19 nt, Artificial Sequence
  Description of Artificial Sequence: Synthetic oligonucleotide
ccagucgcacaaaugcauu

SEQ ID NO: 1079779 - RNA, 19 nt, Artificial Sequence
  Description of Artificial Sequence: Synthetic oligonucleotide
cguggccugcauugaugca

SEQ ID NO: 1079780 - RNA, 19 nt, Artificial Sequence
  Description of Artificial Sequence: Synthetic oligonucleotide
ccggcuacacugggcuuca

SEQ ID NO: 1079781 - RNA, 19 nt, Artificial Sequence
  Description of Artificial Sequence: Synthetic oligonucleotide
ccgcuuguucucuuucguu

SEQ ID NO: 1079782 - RNA, 19 nt, Artificial Sequence
  Description of Artificial Sequence: Synthetic oligonucleotide
ggggcguggucugggguuu

SEQ ID NO: 1079783 - RNA, 19 nt, Artificial Sequence
  Description of Artificial Sequence: Synthetic oligonucleotide
gcucaggggcugugaucau

SEQ ID NO: 1079784 - RNA, 19 nt, Artificial Sequence
  Description of Artificial Sequence: Synthetic oligonucleotide
cgcuacuugucugguccau

SEQ ID NO: 1079785 - RNA, 19 nt, Artificial Sequence
  Description of Artificial Sequence: Synthetic oligonucleotide
gggcguggucugggguuuu

SEQ ID NO: 1079786 - RNA, 19 nt, Artificial Sequence
  Description of Artificial Sequence: Synthetic oligonucleotide
cggcuacacugggcuucau

SEQ ID NO: 1079787 - RNA, 19 nt, Artificial Sequence
  Description of Artificial Sequence: Synthetic oligonucleotide
aaugggaugccuuuuacuc

SEQ ID NO: 1079788 - RNA, 19 nt, Artificial Sequence
  Description of Artificial Sequence: Synthetic oligonucleotide
cuuauuacgauauucaguc

SEQ ID NO: 1079789 - RNA, 19 nt, Artificial Sequence
  Description of Artificial Sequence: Synthetic oligonucleotide
gaaacucacacuuauuacg

SEQ ID NO: 1079790 - RNA, 19 nt, Artificial Sequence
  Description of Artificial Sequence: Synthetic oligonucleotide
cuuuuacucgguuagaugg

SEQ ID NO: 1079791 - RNA, 19 nt, Artificial Sequence
  Description of Artificial Sequence: Synthetic oligonucleotide
aaugcaugaggggagaugc

SEQ ID NO: 1079792 - RNA, 19 nt, Artificial Sequence
  Description of Artificial Sequence: Synthetic oligonucleotide
aaugaauuccuggaaggcc

SEQ ID NO: 1079793 - RNA, 19 nt, Artificial Sequence
  Description of Artificial Sequence: Synthetic oligonucleotide
ugcgaaauguuacaaaggc

SEQ ID NO: 1079794 - RNA, 19 nt, Artificial Sequence
  Description of Artificial Sequence: Synthetic oligonucleotide
cuuauguagcuguagagcc

SEQ ID NO: 1079795 - RNA, 19 nt, Artificial Sequence
  Description of Artificial Sequence: Synthetic oligonucleotide
ugggcaacaagccuuauug

SEQ ID NO: 1079796 - RNA, 19 nt, Artificial Sequence
  Description of Artificial Sequence: Synthetic oligonucleotide
uaggauagcuacaaguugc

SEQ ID NO: 1079797 - RNA, 19 nt, Artificial Sequence
  Description of Artificial Sequence: Synthetic oligonucleotide
auagcuacaaguugcuggg

SEQ ID NO: 1079798 - RNA, 19 nt, Artificial Sequence
  Description of Artificial Sequence: Synthetic oligonucleotide
guuacaaaggcacauggug

SEQ ID NO: 1079799 - RNA, 19 nt, Artificial Sequence
  Description of Artificial Sequence: Synthetic oligonucleotide
ugugcacagugucaaaggg

SEQ ID NO: 1079800 - RNA, 19 nt, Artificial Sequence
  Description of Artificial Sequence: Synthetic oligonucleotide
gggauuguagaccaaaacg

SEQ ID NO: 1079801 - RNA, 19 nt, Artificial Sequence
  Description of Artificial Sequence: Synthetic oligonucleotide
caaaguagaggcaagucac

SEQ ID NO: 1079802 - RNA, 19 nt, Artificial Sequence
  Description of Artificial Sequence: Synthetic oligonucleotide
aguagaggcaagucacucc

SEQ ID NO: 1079803 - RNA, 19 nt, Artificial Sequence
  Description of Artificial Sequence: Synthetic oligonucleotide
ugugggaacagguccacgg

SEQ ID NO: 1079804 - RNA, 19 nt, Artificial Sequence
  Description of Artificial Sequence: Synthetic oligonucleotide
augucucggggucauaugc

SEQ ID NO: 1079805 - RNA, 19 nt, Artificial Sequence
  Description of Artificial Sequence: Synthetic oligonucleotide
uuuuacucgguuagauggg

SEQ ID NO: 1079806 - RNA, 19 nt, Artificial Sequence
  Description of Artificial Sequence: Synthetic oligonucleotide
aaugccauuaggauguugu

SEQ ID NO: 1079807 - RNA, 19 nt, Artificial Sequence
  Description of Artificial Sequence: Synthetic oligonucleotide
ucuuauguagcuguagagc

SEQ ID NO: 1079808 - RNA, 19 nt, Artificial Sequence
  Description of Artificial Sequence: Synthetic oligonucleotide
acaaaguagaggcaaguca

SEQ ID NO: 1079809 - RNA, 19 nt, Artificial Sequence
  Description of Artificial Sequence: Synthetic oligonucleotide
uuugugggauuguagacca

SEQ ID NO: 1079810 - RNA, 19 nt, Artificial Sequence
  Description of Artificial Sequence: Synthetic oligonucleotide
aaaugguauaccagggagg

SEQ ID NO: 1079811 - RNA, 19 nt, Artificial Sequence
  Description of Artificial Sequence: Synthetic oligonucleotide
ucuacgaauggccaguauc

SEQ ID NO: 1079812 - RNA, 19 nt, Artificial Sequence
  Description of Artificial Sequence: Synthetic oligonucleotide
aucuaucccaacuccgacc

SEQ ID NO: 1079813 - RNA, 19 nt, Artificial Sequence
  Description of Artificial Sequence: Synthetic oligonucleotide
ucuaggauagcuacaaguu

SEQ ID NO: 1079814 - RNA, 19 nt, Artificial Sequence
  Description of Artificial Sequence: Synthetic oligonucleotide
ggauuguagaccaaaacgg

SEQ ID NO: 1079815 - RNA, 19 nt, Artificial Sequence
  Description of Artificial Sequence: Synthetic oligonucleotide
uccaugaaaugguauacca

SEQ ID NO: 1079816 - RNA, 19 nt, Artificial Sequence
  Description of Artificial Sequence: Synthetic oligonucleotide
auuacgauauucagucugc

SEQ ID NO: 1079817 - RNA, 19 nt, Artificial Sequence
  Description of Artificial Sequence: Synthetic oligonucleotide
uggcacaagauccucagcu

SEQ ID NO: 1079818 - RNA, 19 nt, Artificial Sequence
  Description of Artificial Sequence: Synthetic oligonucleotide
ugggaugccuuuuacucgg

SEQ ID NO: 1079819 - RNA, 19 nt, Artificial Sequence
  Description of Artificial Sequence: Synthetic oligonucleotide
ugauggcucaccaucaccu

SEQ ID NO: 1079820 - RNA, 19 nt, Artificial Sequence
  Description of Artificial Sequence: Synthetic oligonucleotide
auggugguuguccaaagag

SEQ ID NO: 1079821 - RNA, 19 nt, Artificial Sequence
  Description of Artificial Sequence: Synthetic oligonucleotide
uaucaccuuggaauguagg

SEQ ID NO: 1079822 - RNA, 19 nt, Artificial Sequence
  Description of Artificial Sequence: Synthetic oligonucleotide
cuuauugugucguugucuc

SEQ ID NO: 1079823 - RNA, 19 nt, Artificial Sequence
  Description of Artificial Sequence: Synthetic oligonucleotide
ggugagggcauucacacgg

SEQ ID NO: 1079824 - RNA, 19 nt, Artificial Sequence
  Description of Artificial Sequence: Synthetic oligonucleotide
acgaauggccaguaucacc

SEQ ID NO: 1079825 - RNA, 19 nt, Artificial Sequence
  Description of Artificial Sequence: Synthetic oligonucleotide
aagaggggucaccacgucg

SEQ ID NO: 1079826 - RNA, 19 nt, Artificial Sequence
  Description of Artificial Sequence: Synthetic oligonucleotide
uggaagaaugcaugagggg

SEQ ID NO: 1079827 - RNA, 19 nt, Artificial Sequence
  Description of Artificial Sequence: Synthetic oligonucleotide
gauguucucagcucuacga

SEQ ID NO: 1079828 - RNA, 19 nt, Artificial Sequence
  Description of Artificial Sequence: Synthetic oligonucleotide
gauuguagaccaaaacggc

SEQ ID NO: 1079829 - RNA, 19 nt, Artificial Sequence
  Description of Artificial Sequence: Synthetic oligonucleotide
cuaucaagaagaucucuug

SEQ ID NO: 1079830 - RNA, 19 nt, Artificial Sequence
  Description of Artificial Sequence: Synthetic oligonucleotide
acucgcaaggccuugucuc

SEQ ID NO: 1079831 - RNA, 19 nt, Artificial Sequence
  Description of Artificial Sequence: Synthetic oligonucleotide
caguuuaaagaucucugag

SEQ ID NO: 1079832 - RNA, 19 nt, Artificial Sequence
  Description of Artificial Sequence: Synthetic oligonucleotide
uaguuggagagucuugaug

SEQ ID NO: 1079833 - RNA, 19 nt, Artificial Sequence
  Description of Artificial Sequence: Synthetic oligonucleotide
auucacacgggcauccucc

SEQ ID NO: 1079834 - RNA, 19 nt, Artificial Sequence
  Description of Artificial Sequence: Synthetic oligonucleotide
ugauguucucagcucuacg

SEQ ID NO: 1079835 - RNA, 19 nt, Artificial Sequence
  Description of Artificial Sequence: Synthetic oligonucleotide
aauguaggccagcccgugg

SEQ ID NO: 1079836 - RNA, 19 nt, Artificial Sequence
  Description of Artificial Sequence: Synthetic oligonucleotide
aaguagaggcaagucacuc

SEQ ID NO: 1079837 - RNA, 19 nt, Artificial Sequence
  Description of Artificial Sequence: Synthetic oligonucleotide
aaacucacacuuauuacga

SEQ ID NO: 1079838 - RNA, 19 nt, Artificial Sequence
  Description of Artificial Sequence: Synthetic oligonucleotide
uauucagucugcuggggug

SEQ ID NO: 1079839 - RNA, 19 nt, Artificial Sequence
  Description of Artificial Sequence: Synthetic oligonucleotide
uugcucaacucauugguga

SEQ ID NO: 1079840 - RNA, 19 nt, Artificial Sequence
  Description of Artificial Sequence: Synthetic oligonucleotide
augccuuuuacucgguuag

SEQ ID NO: 1079841 - RNA, 19 nt, Artificial Sequence
  Description of Artificial Sequence: Synthetic oligonucleotide
cucagcucuacgaauggcc

SEQ ID NO: 1079842 - RNA, 19 nt, Artificial Sequence
  Description of Artificial Sequence: Synthetic oligonucleotide
cacuuauuacgauauucag

SEQ ID NO: 1079843 - RNA, 19 nt, Artificial Sequence
  Description of Artificial Sequence: Synthetic oligonucleotide
aacaagccuuauugugucg

SEQ ID NO: 1079844 - RNA, 19 nt, Artificial Sequence
  Description of Artificial Sequence: Synthetic oligonucleotide
aaaguugcccauggcugcc

SEQ ID NO: 1079845 - RNA, 19 nt, Artificial Sequence
  Description of Artificial Sequence: Synthetic oligonucleotide
uuuacucgguuagaugggg

SEQ ID NO: 1079846 - RNA, 19 nt, Artificial Sequence
  Description of Artificial Sequence: Synthetic oligonucleotide
agaugcggaaggucagucc

SEQ ID NO: 1079847 - RNA, 19 nt, Artificial Sequence
  Description of Artificial Sequence: Synthetic oligonucleotide
augggaugccuuuuacucg

SEQ ID NO: 1079848 - RNA, 19 nt, Artificial Sequence
  Description of Artificial Sequence: Synthetic oligonucleotide
cuugucucguucagcagcg

SEQ ID NO: 1079849 - RNA, 19 nt, Artificial Sequence
  Description of Artificial Sequence: Synthetic oligonucleotide
uucucagcucuacgaaugg

SEQ ID NO: 1079850 - RNA, 19 nt, Artificial Sequence
  Description of Artificial Sequence: Synthetic oligonucleotide
aucacugaagcuggcaugg

SEQ ID NO: 1079851 - RNA, 19 nt, Artificial Sequence
  Description of Artificial Sequence: Synthetic oligonucleotide
ugguuguccaaagaguuug

SEQ ID NO: 1079852 - RNA, 19 nt, Artificial Sequence
  Description of Artificial Sequence: Synthetic oligonucleotide
gcugcgaaauguuacaaag

SEQ ID NO: 1079853 - RNA, 19 nt, Artificial Sequence
  Description of Artificial Sequence: Synthetic oligonucleotide
guuagauggggcccuacag

SEQ ID NO: 1079854 - RNA, 19 nt, Artificial Sequence
  Description of Artificial Sequence: Synthetic oligonucleotide
cugcgaaauguuacaaagg

SEQ ID NO: 1079855 - RNA, 19 nt, Artificial Sequence
  Description of Artificial Sequence: Synthetic oligonucleotide
aucccaacuacucucuuca

SEQ ID NO: 1079856 - RNA, 19 nt, Artificial Sequence
  Description of Artificial Sequence: Synthetic oligonucleotide
agucgcuugauguucucag

SEQ ID NO: 1079857 - RNA, 19 nt, Artificial Sequence
  Description of Artificial Sequence: Synthetic oligonucleotide
ucagcucuacgaauggcca

SEQ ID NO: 1079858 - RNA, 19 nt, Artificial Sequence
  Description of Artificial Sequence: Synthetic oligonucleotide
agagucuugaugccccagg

SEQ ID NO: 1079859 - RNA, 19 nt, Artificial Sequence
  Description of Artificial Sequence: Synthetic oligonucleotide
augagcauuucgcagugug

SEQ ID NO: 1079860 - RNA, 19 nt, Artificial Sequence
  Description of Artificial Sequence: Synthetic oligonucleotide
uggagagucuugaugcccc

SEQ ID NO: 1079861 - RNA, 19 nt, Artificial Sequence
  Description of Artificial Sequence: Synthetic oligonucleotide
ugggauuguagaccaaaac

SEQ ID NO: 1079862 - RNA, 19 nt, Artificial Sequence
  Description of Artificial Sequence: Synthetic oligonucleotide
gaaugaauuccuggaaggc

SEQ ID NO: 1079863 - RNA, 19 nt, Artificial Sequence
  Description of Artificial Sequence: Synthetic oligonucleotide
cuaggauagcuacaaguug

SEQ ID NO: 1079864 - RNA, 19 nt, Artificial Sequence
  Description of Artificial Sequence: Synthetic oligonucleotide
acagcacacauccagcaca

SEQ ID NO: 1079865 - RNA, 19 nt, Artificial Sequence
  Description of Artificial Sequence: Synthetic oligonucleotide
aguaggguacuguccaaag

SEQ ID NO: 1079866 - RNA, 19 nt, Artificial Sequence
  Description of Artificial Sequence: Synthetic oligonucleotide
aguacugcucccauccagc

SEQ ID NO: 1079867 - RNA, 19 nt, Artificial Sequence
  Description of Artificial Sequence: Synthetic oligonucleotide
cucaaucccaacuacucuc

SEQ ID NO: 1079868 - RNA, 19 nt, Artificial Sequence
  Description of Artificial Sequence: Synthetic oligonucleotide
uggaaugugcacaguguca

SEQ ID NO: 1079869 - RNA, 19 nt, Artificial Sequence
  Description of Artificial Sequence: Synthetic oligonucleotide
ucugcggcugguacgaaca

SEQ ID NO: 1079870 - RNA, 19 nt, Artificial Sequence
  Description of Artificial Sequence: Synthetic oligonucleotide
ucggcaaucuguguaacug

SEQ ID NO: 1079871 - RNA, 19 nt, Artificial Sequence
  Description of Artificial Sequence: Synthetic oligonucleotide
cucaacucauuggugaggg

SEQ ID NO: 1079872 - RNA, 19 nt, Artificial Sequence
  Description of Artificial Sequence: Synthetic oligonucleotide
aggaugagcauuucgcagu

SEQ ID NO: 1079873 - RNA, 19 nt, Artificial Sequence
  Description of Artificial Sequence: Synthetic oligonucleotide
ugcaugaggggagaugcgg

SEQ ID NO: 1079874 - RNA, 19 nt, Artificial Sequence
  Description of Artificial Sequence: Synthetic oligonucleotide
ucaaucccaacuacucucu

SEQ ID NO: 1079875 - RNA, 19 nt, Artificial Sequence
  Description of Artificial Sequence: Synthetic oligonucleotide
uacucgguuagauggggcc

SEQ ID NO: 1079876 - RNA, 19 nt, Artificial Sequence
  Description of Artificial Sequence: Synthetic oligonucleotide
guuagugcucccaauuucc

SEQ ID NO: 1079877 - RNA, 19 nt, Artificial Sequence
  Description of Artificial Sequence: Synthetic oligonucleotide
acuccgaccagaaacucac

SEQ ID NO: 1079878 - RNA, 19 nt, Artificial Sequence
  Description of Artificial Sequence: Synthetic oligonucleotide
guagcuguagagcccaggc

SEQ ID NO: 1079879 - RNA, 19 nt, Artificial Sequence
  Description of Artificial Sequence: Synthetic oligonucleotide
acuuauuacgauauucagu

SEQ ID NO: 1079880 - RNA, 19 nt, Artificial Sequence
  Description of Artificial Sequence: Synthetic oligonucleotide
uguagaccaaaacggccca

SEQ ID NO: 1079881 - RNA, 19 nt, Artificial Sequence
  Description of Artificial Sequence: Synthetic oligonucleotide
uugacuggauggaauggga

SEQ ID NO: 1079882 - RNA, 19 nt, Artificial Sequence
  Description of Artificial Sequence: Synthetic oligonucleotide
cuugacuggauggaauggg

SEQ ID NO: 1079883 - RNA, 19 nt, Artificial Sequence
  Description of Artificial Sequence: Synthetic oligonucleotide
uacgauauucagucugcug

SEQ ID NO: 1079884 - RNA, 19 nt, Artificial Sequence
  Description of Artificial Sequence: Synthetic oligonucleotide
cuacgaauggccaguauca

SEQ ID NO: 1079885 - RNA, 19 nt, Artificial Sequence
  Description of Artificial Sequence: Synthetic oligonucleotide
uccgaccagaaacucacac

SEQ ID NO: 1079886 - RNA, 19 nt, Artificial Sequence
  Description of Artificial Sequence: Synthetic oligonucleotide
uggugguuguccaaagagu

SEQ ID NO: 1079887 - RNA, 19 nt, Artificial Sequence
  Description of Artificial Sequence: Synthetic oligonucleotide
auaugcuccaggggcaggc

SEQ ID NO: 1079888 - RNA, 19 nt, Artificial Sequence
  Description of Artificial Sequence: Synthetic oligonucleotide
gucguugucucugagugag

SEQ ID NO: 1079889 - RNA, 19 nt, Artificial Sequence
  Description of Artificial Sequence: Synthetic oligonucleotide
acugauggcucaccaucac

SEQ ID NO: 1079890 - RNA, 19 nt, Artificial Sequence
  Description of Artificial Sequence: Synthetic oligonucleotide
acaagauccucagcucugc

SEQ ID NO: 1079891 - RNA, 19 nt, Artificial Sequence
  Description of Artificial Sequence: Synthetic oligonucleotide
ucggaguaggguacugucc

SEQ ID NO: 1079892 - RNA, 19 nt, Artificial Sequence
  Description of Artificial Sequence: Synthetic oligonucleotide
gauguuguuccauccuuuc

SEQ ID NO: 1079893 - RNA, 19 nt, Artificial Sequence
  Description of Artificial Sequence: Synthetic oligonucleotide
ugggaacagguccacggcc

SEQ ID NO: 1079894 - RNA, 19 nt, Artificial Sequence
  Description of Artificial Sequence: Synthetic oligonucleotide
agcucaaucccaacuacuc

SEQ ID NO: 1079895 - RNA, 19 nt, Artificial Sequence
  Description of Artificial Sequence: Synthetic oligonucleotide
gaccgaaugaauuccugga

SEQ ID NO: 1079896 - RNA, 19 nt, Artificial Sequence
  Description of Artificial Sequence: Synthetic oligonucleotide
cuguauaugucucgggguc

SEQ ID NO: 1079897 - RNA, 19 nt, Artificial Sequence
  Description of Artificial Sequence: Synthetic oligonucleotide
gguguguuuaccuggaaga

SEQ ID NO: 1079898 - RNA, 19 nt, Artificial Sequence
  Description of Artificial Sequence: Synthetic oligonucleotide
uuagugcucccaauuuccu

SEQ ID NO: 1079899 - RNA, 19 nt, Artificial Sequence
  Description of Artificial Sequence: Synthetic oligonucleotide
auauucagucugcuggggu

SEQ ID NO: 1079900 - RNA, 19 nt, Artificial Sequence
  Description of Artificial Sequence: Synthetic oligonucleotide
guguagagcaccucagcug

SEQ ID NO: 1079901 - RNA, 19 nt, Artificial Sequence
  Description of Artificial Sequence: Synthetic oligonucleotide
uuauuacgauauucagucu

SEQ ID NO: 1079902 - RNA, 19 nt, Artificial Sequence
  Description of Artificial Sequence: Synthetic oligonucleotide
caacaagccuuauuguguc

SEQ ID NO: 1079903 - RNA, 19 nt, Artificial Sequence
  Description of Artificial Sequence: Synthetic oligonucleotide
gguacgaacagucagcugu

SEQ ID NO: 1079904 - RNA, 19 nt, Artificial Sequence
  Description of Artificial Sequence: Synthetic oligonucleotide
agaguuugauuuuguggga

SEQ ID NO: 1079905 - RNA, 19 nt, Artificial Sequence
  Description of Artificial Sequence: Synthetic oligonucleotide
cuuggaugacuguguagag

SEQ ID NO: 1079906 - RNA, 19 nt, Artificial Sequence
  Description of Artificial Sequence: Synthetic oligonucleotide
ggaccgaaugaauuccugg

SEQ ID NO: 1079907 - RNA, 19 nt, Artificial Sequence
  Description of Artificial Sequence: Synthetic oligonucleotide
cauggcgaggcacauuuug

SEQ ID NO: 1079908 - RNA, 19 nt, Artificial Sequence
  Description of Artificial Sequence: Synthetic oligonucleotide
uugcagcuccaguuuaaag

SEQ ID NO: 1079909 - RNA, 19 nt, Artificial Sequence
  Description of Artificial Sequence: Synthetic oligonucleotide
cucgcaaggccuugucucg

SEQ ID NO: 1079910 - RNA, 19 nt, Artificial Sequence
  Description of Artificial Sequence: Synthetic oligonucleotide
auggcgaggcacauuuugc

SEQ ID NO: 1079911 - RNA, 19 nt, Artificial Sequence
  Description of Artificial Sequence: Synthetic oligonucleotide
gaggugaacagaucaucuc

SEQ ID NO: 1079912 - RNA, 19 nt, Artificial Sequence
  Description of Artificial Sequence: Synthetic oligonucleotide
agccuuauugugucguugu

SEQ ID NO: 1079913 - RNA, 19 nt, Artificial Sequence
  Description of Artificial Sequence: Synthetic oligonucleotide
uacaaaguagaggcaaguc

SEQ ID NO: 1079914 - RNA, 19 nt, Artificial Sequence
  Description of Artificial Sequence: Synthetic oligonucleotide
uggaccgaaugaauuccug

SEQ ID NO: 1079915 - RNA, 19 nt, Artificial Sequence
  Description of Artificial Sequence: Synthetic oligonucleotide
agaggcaagucacuccacu

SEQ ID NO: 1079916 - RNA, 19 nt, Artificial Sequence
  Description of Artificial Sequence: Synthetic oligonucleotide
gccuguauaugucucgggg

SEQ ID NO: 1079917 - RNA, 19 nt, Artificial Sequence
  Description of Artificial Sequence: Synthetic oligonucleotide
uuguuccauccuuucaaac

SEQ ID NO: 1079918 - RNA, 19 nt, Artificial Sequence
  Description of Artificial Sequence: Synthetic oligonucleotide
aaaguagaggcaagucacu

SEQ ID NO: 1079919 - RNA, 19 nt, Artificial Sequence
  Description of Artificial Sequence: Synthetic oligonucleotide
uguauaugucucgggguca

SEQ ID NO: 1079920 - RNA, 19 nt, Artificial Sequence
  Description of Artificial Sequence: Synthetic oligonucleotide
uaugucucggggucauaug

SEQ ID NO: 1079921 - RNA, 19 nt, Artificial Sequence
  Description of Artificial Sequence: Synthetic oligonucleotide
ugucucguucagcagcgcu

SEQ ID NO: 1079922 - RNA, 19 nt, Artificial Sequence
  Description of Artificial Sequence: Synthetic oligonucleotide
agcgccgugcagcacucgc

SEQ ID NO: 1079923 - RNA, 19 nt, Artificial Sequence
  Description of Artificial Sequence: Synthetic oligonucleotide
ugugggauuguagaccaaa

SEQ ID NO: 1079924 - RNA, 19 nt, Artificial Sequence
  Description of Artificial Sequence: Synthetic oligonucleotide
ugagugggcggccuuucca

SEQ ID NO: 1079925 - RNA, 19 nt, Artificial Sequence
  Description of Artificial Sequence: Synthetic oligonucleotide
gucauaugccaaguauggg

SEQ ID NO: 1079926 - RNA, 19 nt, Artificial Sequence
  Description of Artificial Sequence: Synthetic oligonucleotide
uggggucagccuugggucg

SEQ ID NO: 1079927 - RNA, 19 nt, Artificial Sequence
  Description of Artificial Sequence: Synthetic oligonucleotide
gggauugcaggaaacauac

SEQ ID NO: 1079928 - RNA, 19 nt, Artificial Sequence
  Description of Artificial Sequence: Synthetic oligonucleotide
gaacucaacauugcucaac

SEQ ID NO: 1079929 - RNA, 19 nt, Artificial Sequence
  Description of Artificial Sequence: Synthetic oligonucleotide
aagaaugcaugaggggaga

SEQ ID NO: 1079930 - RNA, 19 nt, Artificial Sequence
  Description of Artificial Sequence: Synthetic oligonucleotide
cagcugagcccauucuugg

SEQ ID NO: 1079931 - RNA, 19 nt, Artificial Sequence
  Description of Artificial Sequence: Synthetic oligonucleotide
aguuccacccuuguacuug

SEQ ID NO: 1079932 - RNA, 19 nt, Artificial Sequence
  Description of Artificial Sequence: Synthetic oligonucleotide
cccaacuccgaccagaaac

SEQ ID NO: 1079933 - RNA, 19 nt, Artificial Sequence
  Description of Artificial Sequence: Synthetic oligonucleotide
uucagcagcgcugcgaaau

SEQ ID NO: 1079934 - RNA, 19 nt, Artificial Sequence
  Description of Artificial Sequence: Synthetic oligonucleotide
cagucagcuguuuccagug

SEQ ID NO: 1079935 - RNA, 19 nt, Artificial Sequence
  Description of Artificial Sequence: Synthetic oligonucleotide
cgaaugaauuccuggaagg

SEQ ID NO: 1079936 - RNA, 19 nt, Artificial Sequence
  Description of Artificial Sequence: Synthetic oligonucleotide
gauggggcccuacagaggu

SEQ ID NO: 1079937 - RNA, 19 nt, Artificial Sequence
  Description of Artificial Sequence: Synthetic oligonucleotide
ugcacuggucaccagccau

SEQ ID NO: 1079938 - RNA, 19 nt, Artificial Sequence
  Description of Artificial Sequence: Synthetic oligonucleotide
uacuugccaaaccggcagc

SEQ ID NO: 1079939 - RNA, 19 nt, Artificial Sequence
  Description of Artificial Sequence: Synthetic oligonucleotide
ucagcagcgcugcgaaaug

SEQ ID NO: 1079940 - RNA, 19 nt, Artificial Sequence
  Description of Artificial Sequence: Synthetic oligonucleotide
ucucguucagcagcgcugc

SEQ ID NO: 1079941 - RNA, 19 nt, Artificial Sequence
  Description of Artificial Sequence: Synthetic oligonucleotide
ugccacagcacaaguucca

SEQ ID NO: 1079942 - RNA, 19 nt, Artificial Sequence
  Description of Artificial Sequence: Synthetic oligonucleotide
ugccauuaggauguuguuc

SEQ ID NO: 1079943 - RNA, 19 nt, Artificial Sequence
  Description of Artificial Sequence: Synthetic oligonucleotide
caguggaacucaacauugc

SEQ ID NO: 1079944 - RNA, 19 nt, Artificial Sequence
  Description of Artificial Sequence: Synthetic oligonucleotide
cugauggcucaccaucacc

SEQ ID NO: 1079945 - RNA, 19 nt, Artificial Sequence
  Description of Artificial Sequence: Synthetic oligonucleotide
accgaaugaauuccuggaa

SEQ ID NO: 1079946 - RNA, 19 nt, Artificial Sequence
  Description of Artificial Sequence: Synthetic oligonucleotide
acagaagucgcuugauguu

SEQ ID NO: 1079947 - RNA, 19 nt, Artificial Sequence
  Description of Artificial Sequence: Synthetic oligonucleotide
ccagccauaugcuccaggg

SEQ ID NO: 1079948 - RNA, 19 nt, Artificial Sequence
  Description of Artificial Sequence: Synthetic oligonucleotide
gaguugcaggcccugcagc

SEQ ID NO: 1079949 - RNA, 19 nt, Artificial Sequence
  Description of Artificial Sequence: Synthetic oligonucleotide
agcgcugcgaaauguuaca

SEQ ID NO: 1079950 - RNA, 19 nt, Artificial Sequence
  Description of Artificial Sequence: Synthetic oligonucleotide
caucuaucccaacuccgac

SEQ ID NO: 1079951 - RNA, 19 nt, Artificial Sequence
  Description of Artificial Sequence: Synthetic oligonucleotide
uuucgcaguguggagucug

SEQ ID NO: 1079952 - RNA, 19 nt, Artificial Sequence
  Description of Artificial Sequence: Synthetic oligonucleotide
uggugagggcauucacacg

SEQ ID NO: 1079953 - RNA, 19 nt, Artificial Sequence
  Description of Artificial Sequence: Synthetic oligonucleotide
aguggcgugcuaucaagaa

SEQ ID NO: 1079954 - RNA, 19 nt, Artificial Sequence
  Description of Artificial Sequence: Synthetic oligonucleotide
uagcuguagagcccaggcu

SEQ ID NO: 1079955 - RNA, 19 nt, Artificial Sequence
  Description of Artificial Sequence: Synthetic oligonucleotide
uggaaugggaugccuuuua

SEQ ID NO: 1079956 - RNA, 19 nt, Artificial Sequence
  Description of Artificial Sequence: Synthetic oligonucleotide
gguagcagggcacgguuag

SEQ ID NO: 1079957 - RNA, 19 nt, Artificial Sequence
  Description of Artificial Sequence: Synthetic oligonucleotide
cucggaguaggguacuguc

SEQ ID NO: 1079958 - RNA, 19 nt, Artificial Sequence
  Description of Artificial Sequence: Synthetic oligonucleotide
acaagccuuauugugucgu

SEQ ID NO: 1079959 - RNA, 19 nt, Artificial Sequence
  Description of Artificial Sequence: Synthetic oligonucleotide
auugugucguugucucuga

SEQ ID NO: 1079960 - RNA, 19 nt, Artificial Sequence
  Description of Artificial Sequence: Synthetic oligonucleotide
guaugggguggaccgaaug

SEQ ID NO: 1079961 - RNA, 19 nt, Artificial Sequence
  Description of Artificial Sequence: Synthetic oligonucleotide
auugcucaacucauuggug

SEQ ID NO: 1079962 - RNA, 19 nt, Artificial Sequence
  Description of Artificial Sequence: Synthetic oligonucleotide
aguggccuguauaugucuc

SEQ ID NO: 1079963 - RNA, 19 nt, Artificial Sequence
  Description of Artificial Sequence: Synthetic oligonucleotide
ucugccgcaguggaacuca

SEQ ID NO: 1079964 - RNA, 19 nt, Artificial Sequence
  Description of Artificial Sequence: Synthetic oligonucleotide
aacuccgaccagaaacuca

SEQ ID NO: 1079965 - RNA, 19 nt, Artificial Sequence
  Description of Artificial Sequence: Synthetic oligonucleotide
gucucuguuuccaguggcg

SEQ ID NO: 1079966 - RNA, 19 nt, Artificial Sequence
  Description of Artificial Sequence: Synthetic oligonucleotide
uuacgauauucagucugcu

SEQ ID NO: 1079967 - RNA, 19 nt, Artificial Sequence
  Description of Artificial Sequence: Synthetic oligonucleotide
ccaguaucaccuuggaaug

SEQ ID NO: 1079968 - RNA, 19 nt, Artificial Sequence
  Description of Artificial Sequence: Synthetic oligonucleotide
aggguuccaaugccauuag

SEQ ID NO: 1079969 - RNA, 19 nt, Artificial Sequence
  Description of Artificial Sequence: Synthetic oligonucleotide
ccgaaugaauuccuggaag

SEQ ID NO: 1079970 - RNA, 19 nt, Artificial Sequence
  Description of Artificial Sequence: Synthetic oligonucleotide
uccaguggcgugcuaucaa

SEQ ID NO: 1079971 - RNA, 19 nt, Artificial Sequence
  Description of Artificial Sequence: Synthetic oligonucleotide
auaugucucggggucauau

SEQ ID NO: 1079972 - RNA, 19 nt, Artificial Sequence
  Description of Artificial Sequence: Synthetic oligonucleotide
ucaacucauuggugagggc

SEQ ID NO: 1079973 - RNA, 19 nt, Artificial Sequence
  Description of Artificial Sequence: Synthetic oligonucleotide
acgguuagugcucccaauu

SEQ ID NO: 1079974 - RNA, 19 nt, Artificial Sequence
  Description of Artificial Sequence: Synthetic oligonucleotide
uagccauggggucagccuu

SEQ ID NO: 1079975 - RNA, 19 nt, Artificial Sequence
  Description of Artificial Sequence: Synthetic oligonucleotide
guaggguacuguccaaaga

SEQ ID NO: 1079976 - RNA, 19 nt, Artificial Sequence
  Description of Artificial Sequence: Synthetic oligonucleotide
uuuccaguggcgugcuauc

SEQ ID NO: 1079977 - RNA, 19 nt, Artificial Sequence
  Description of Artificial Sequence: Synthetic oligonucleotide
ucucagcucuacgaauggc

SEQ ID NO: 1079978 - RNA, 19 nt, Artificial Sequence
  Description of Artificial Sequence: Synthetic oligonucleotide
cagaagucgcuugauguuc

SEQ ID NO: 1079979 - RNA, 19 nt, Artificial Sequence
  Description of Artificial Sequence: Synthetic oligonucleotide
cucuacaaaguagaggcaa

SEQ ID NO: 1079980 - RNA, 19 nt, Artificial Sequence
  Description of Artificial Sequence: Synthetic oligonucleotide
uccuuucaaacaggaugag

SEQ ID NO: 1079981 - RNA, 19 nt, Artificial Sequence
  Description of Artificial Sequence: Synthetic oligonucleotide
ugccaaaccggcagccaac

SEQ ID NO: 1079982 - RNA, 19 nt, Artificial Sequence
  Description of Artificial Sequence: Synthetic oligonucleotide
cagcgcugcgaaauguuac

SEQ ID NO: 1079983 - RNA, 19 nt, Artificial Sequence
  Description of Artificial Sequence: Synthetic oligonucleotide
cacaaaguugcccauggcu

SEQ ID NO: 1079984 - RNA, 19 nt, Artificial Sequence
  Description of Artificial Sequence: Synthetic oligonucleotide
cuacucucuucaccuuccg

SEQ ID NO: 1079985 - RNA, 19 nt, Artificial Sequence
  Description of Artificial Sequence: Synthetic oligonucleotide
ggcaagucacuccacuggc

SEQ ID NO: 1079986 - RNA, 19 nt, Artificial Sequence
  Description of Artificial Sequence: Synthetic oligonucleotide
gggucauaugccaaguaug

SEQ ID NO: 1079987 - RNA, 19 nt, Artificial Sequence
  Description of Artificial Sequence: Synthetic oligonucleotide
gguuagugcucccaauuuc

SEQ ID NO: 1079988 - RNA, 19 nt, Artificial Sequence
  Description of Artificial Sequence: Synthetic oligonucleotide
uuugcagcuccaguuuaaa

SEQ ID NO: 1079989 - RNA, 19 nt, Artificial Sequence
  Description of Artificial Sequence: Synthetic oligonucleotide
agcugcucggaguagggua

SEQ ID NO: 1079990 - RNA, 19 nt, Artificial Sequence
  Description of Artificial Sequence: Synthetic oligonucleotide
agaccaaaacggcccaaaa

SEQ ID NO: 1079991 - RNA, 19 nt, Artificial Sequence
  Description of Artificial Sequence: Synthetic oligonucleotide
uucacacgggcauccucca

SEQ ID NO: 1079992 - RNA, 19 nt, Artificial Sequence
  Description of Artificial Sequence: Synthetic oligonucleotide
cuacaaguugcugggagga

SEQ ID NO: 1079993 - RNA, 19 nt, Artificial Sequence
  Description of Artificial Sequence: Synthetic oligonucleotide
aaguuccacccuuguacuu

SEQ ID NO: 1079994 - RNA, 19 nt, Artificial Sequence
  Description of Artificial Sequence: Synthetic oligonucleotide
gcggccuuuccagagagcg

SEQ ID NO: 1079995 - RNA, 19 nt, Artificial Sequence
  Description of Artificial Sequence: Synthetic oligonucleotide
agggcacgguuagugcucc

SEQ ID NO: 1079996 - RNA, 19 nt, Artificial Sequence
  Description of Artificial Sequence: Synthetic oligonucleotide
guuuccaguggccuguaua

SEQ ID NO: 1079997 - RNA, 19 nt, Artificial Sequence
  Description of Artificial Sequence: Synthetic oligonucleotide
cacagcacacauccagcac

SEQ ID NO: 1079998 - RNA, 19 nt, Artificial Sequence
  Description of Artificial Sequence: Synthetic oligonucleotide
uucgcaguguggagucugu

SEQ ID NO: 1079999 - RNA, 19 nt, Artificial Sequence
  Description of Artificial Sequence: Synthetic oligonucleotide
ggccuuuccagagagcgcc

SEQ ID NO: 1080000 - RNA, 19 nt, Artificial Sequence
  Description of Artificial Sequence: Synthetic oligonucleotide
agcucuacgaauggccagu

SEQ ID NO: 1080001 - RNA, 19 nt, Artificial Sequence
  Description of Artificial Sequence: Synthetic oligonucleotide
cagcucuacgaauggccag

SEQ ID NO: 1080002 - RNA, 19 nt, Artificial Sequence
  Description of Artificial Sequence: Synthetic oligonucleotide
uggccaguaucaccuugga

SEQ ID NO: 1080003 - RNA, 19 nt, Artificial Sequence
  Description of Artificial Sequence: Synthetic oligonucleotide
ugggguggaccgaaugaau

SEQ ID NO: 1080004 - RNA, 19 nt, Artificial Sequence
  Description of Artificial Sequence: Synthetic oligonucleotide
cucuuucuagccauggggu

SEQ ID NO: 1080005 - RNA, 19 nt, Artificial Sequence
  Description of Artificial Sequence: Synthetic oligonucleotide
caagaagaucucuuguagu

SEQ ID NO: 1080006 - RNA, 19 nt, Artificial Sequence
  Description of Artificial Sequence: Synthetic oligonucleotide
gcagcacccguucacauuc

SEQ ID NO: 1080007 - RNA, 19 nt, Artificial Sequence
  Description of Artificial Sequence: Synthetic oligonucleotide
accacgucggcaaucugug

SEQ ID NO: 1080008 - RNA, 19 nt, Artificial Sequence
  Description of Artificial Sequence: Synthetic oligonucleotide
ggcgaggcacauuuugcag

SEQ ID NO: 1080009 - RNA, 19 nt, Artificial Sequence
  Description of Artificial Sequence: Synthetic oligonucleotide
gauggaaugggaugccuuu

SEQ ID NO: 1080010 - RNA, 19 nt, Artificial Sequence
  Description of Artificial Sequence: Synthetic oligonucleotide
acgucggcaaucuguguaa

SEQ ID NO: 1080011 - RNA, 19 nt, Artificial Sequence
  Description of Artificial Sequence: Synthetic oligonucleotide
ccuuuuacucgguuagaug

SEQ ID NO: 1080012 - RNA, 19 nt, Artificial Sequence
  Description of Artificial Sequence: Synthetic oligonucleotide
uugggucgagccaggcgca

SEQ ID NO: 1080013 - RNA, 19 nt, Artificial Sequence
  Description of Artificial Sequence: Synthetic oligonucleotide
gcgaggcacauuuugcagc

SEQ ID NO: 1080014 - RNA, 19 nt, Artificial Sequence
  Description of Artificial Sequence: Synthetic oligonucleotide
augaggggagaugcggaag

SEQ ID NO: 1080015 - RNA, 19 nt, Artificial Sequence
  Description of Artificial Sequence: Synthetic oligonucleotide
ucacacuuauuacgauauu

SEQ ID NO: 1080016 - RNA, 19 nt, Artificial Sequence
  Description of Artificial Sequence: Synthetic oligonucleotide
gccuugacuggauggaaug

SEQ ID NO: 1080017 - RNA, 19 nt, Artificial Sequence
  Description of Artificial Sequence: Synthetic oligonucleotide
agaagucgcuugauguucu

SEQ ID NO: 1080018 - RNA, 19 nt, Artificial Sequence
  Description of Artificial Sequence: Synthetic oligonucleotide
ggaaugggaugccuuuuac

SEQ ID NO: 1080019 - RNA, 19 nt, Artificial Sequence
  Description of Artificial Sequence: Synthetic oligonucleotide
cuuuccagagagcgccgug

SEQ ID NO: 1080020 - RNA, 19 nt, Artificial Sequence
  Description of Artificial Sequence: Synthetic oligonucleotide
aagcgccggacaucacuga

SEQ ID NO: 1080021 - RNA, 19 nt, Artificial Sequence
  Description of Artificial Sequence: Synthetic oligonucleotide
uggccucugcggcugguac

SEQ ID NO: 1080022 - RNA, 19 nt, Artificial Sequence
  Description of Artificial Sequence: Synthetic oligonucleotide
gagaugcggaaggucaguc

SEQ ID NO: 1080023 - RNA, 19 nt, Artificial Sequence
  Description of Artificial Sequence: Synthetic oligonucleotide
agcugagcccauucuugga

SEQ ID NO: 1080024 - RNA, 19 nt, Artificial Sequence
  Description of Artificial Sequence: Synthetic oligonucleotide
agcacaaguuccacccuug

SEQ ID NO: 1080025 - RNA, 19 nt, Artificial Sequence
  Description of Artificial Sequence: Synthetic oligonucleotide
uagugcucccaauuuccuu

SEQ ID NO: 1080026 - RNA, 19 nt, Artificial Sequence
  Description of Artificial Sequence: Synthetic oligonucleotide
ugccgccucuuucuagcca

SEQ ID NO: 1080027 - RNA, 19 nt, Artificial Sequence
  Description of Artificial Sequence: Synthetic oligonucleotide
ggaaugugcacagugucaa

SEQ ID NO: 1080028 - RNA, 19 nt, Artificial Sequence
  Description of Artificial Sequence: Synthetic oligonucleotide
guaggccagcccguggcgg

SEQ ID NO: 1080029 - RNA, 19 nt, Artificial Sequence
  Description of Artificial Sequence: Synthetic oligonucleotide
augccccaggguuccaaug

SEQ ID NO: 1080030 - RNA, 19 nt, Artificial Sequence
  Description of Artificial Sequence: Synthetic oligonucleotide
ugggcggccuuuccagaga

SEQ ID NO: 1080031 - RNA, 19 nt, Artificial Sequence
  Description of Artificial Sequence: Synthetic oligonucleotide
agcccauucuuggaugacu

SEQ ID NO: 1080032 - RNA, 19 nt, Artificial Sequence
  Description of Artificial Sequence: Synthetic oligonucleotide
accggcagccaacaguguu

SEQ ID NO: 1080033 - RNA, 19 nt, Artificial Sequence
  Description of Artificial Sequence: Synthetic oligonucleotide
gugaacagaucaucucuua

SEQ ID NO: 1080034 - RNA, 19 nt, Artificial Sequence
  Description of Artificial Sequence: Synthetic oligonucleotide
gcgggucuaggauagcuac

SEQ ID NO: 1080035 - RNA, 19 nt, Artificial Sequence
  Description of Artificial Sequence: Synthetic oligonucleotide
cucugcggcugguacgaac

SEQ ID NO: 1080036 - RNA, 19 nt, Artificial Sequence
  Description of Artificial Sequence: Synthetic oligonucleotide
caaaccggcagccaacagu

SEQ ID NO: 1080037 - RNA, 19 nt, Artificial Sequence
  Description of Artificial Sequence: Synthetic oligonucleotide
caagucacuccacuggccu

SEQ ID NO: 1080038 - RNA, 19 nt, Artificial Sequence
  Description of Artificial Sequence: Synthetic oligonucleotide
ccuuucaaacaggaugagc

SEQ ID NO: 1080039 - RNA, 19 nt, Artificial Sequence
  Description of Artificial Sequence: Synthetic oligonucleotide
ugcagcacccguucacauu

SEQ ID NO: 1080040 - RNA, 19 nt, Artificial Sequence
  Description of Artificial Sequence: Synthetic oligonucleotide
ucccaacuacucucuucac

SEQ ID NO: 1080041 - RNA, 19 nt, Artificial Sequence
  Description of Artificial Sequence: Synthetic oligonucleotide
ggccuguauaugucucggg

SEQ ID NO: 1080042 - RNA, 19 nt, Artificial Sequence
  Description of Artificial Sequence: Synthetic oligonucleotide
ugccuuuuacucgguuaga

SEQ ID NO: 1080043 - RNA, 19 nt, Artificial Sequence
  Description of Artificial Sequence: Synthetic oligonucleotide
cuacagagguccacaaagu

SEQ ID NO: 1080044 - RNA, 19 nt, Artificial Sequence
  Description of Artificial Sequence: Synthetic oligonucleotide
gguuagauggggcccuaca

SEQ ID NO: 1080045 - RNA, 19 nt, Artificial Sequence
  Description of Artificial Sequence: Synthetic oligonucleotide
agugggcggccuuuccaga

SEQ ID NO: 1080046 - RNA, 19 nt, Artificial Sequence
  Description of Artificial Sequence: Synthetic oligonucleotide
gcugcccggggauugcagg

SEQ ID NO: 1080047 - RNA, 19 nt, Artificial Sequence
  Description of Artificial Sequence: Synthetic oligonucleotide
ucggggucauaugccaagu

SEQ ID NO: 1080048 - RNA, 19 nt, Artificial Sequence
  Description of Artificial Sequence: Synthetic oligonucleotide
caugaggggagaugcggaa

SEQ ID NO: 1080049 - RNA, 19 nt, Artificial Sequence
  Description of Artificial Sequence: Synthetic oligonucleotide
augcaugaggggagaugcg

SEQ ID NO: 1080050 - RNA, 19 nt, Artificial Sequence
  Description of Artificial Sequence: Synthetic oligonucleotide
agccaggguagcagggcac

SEQ ID NO: 1080051 - RNA, 19 nt, Artificial Sequence
  Description of Artificial Sequence: Synthetic oligonucleotide
ccaguggcgugcuaucaag

SEQ ID NO: 1080052 - RNA, 19 nt, Artificial Sequence
  Description of Artificial Sequence: Synthetic oligonucleotide
uuccacccuuguacuugcc

SEQ ID NO: 1080053 - RNA, 19 nt, Artificial Sequence
  Description of Artificial Sequence: Synthetic oligonucleotide
cugagugggcggccuuucc

SEQ ID NO: 1080054 - RNA, 19 nt, Artificial Sequence
  Description of Artificial Sequence: Synthetic oligonucleotide
cacgucggcaaucugugua

SEQ ID NO: 1080055 - RNA, 19 nt, Artificial Sequence
  Description of Artificial Sequence: Synthetic oligonucleotide
aggacagccugcucaccaa

SEQ ID NO: 1080056 - RNA, 19 nt, Artificial Sequence
  Description of Artificial Sequence: Synthetic oligonucleotide
agcgccggacaucacugaa

SEQ ID NO: 1080057 - RNA, 19 nt, Artificial Sequence
  Description of Artificial Sequence: Synthetic oligonucleotide
caggguuccaaugccauua

SEQ ID NO: 1080058 - RNA, 19 nt, Artificial Sequence
  Description of Artificial Sequence: Synthetic oligonucleotide
guaacugauggcucaccau

SEQ ID NO: 1080059 - RNA, 19 nt, Artificial Sequence
  Description of Artificial Sequence: Synthetic oligonucleotide
ggucgagccaggcgcacgc

SEQ ID NO: 1080060 - RNA, 19 nt, Artificial Sequence
  Description of Artificial Sequence: Synthetic oligonucleotide
cugccgccucuuucuagcc

SEQ ID NO: 1080061 - RNA, 19 nt, Artificial Sequence
  Description of Artificial Sequence: Synthetic oligonucleotide
ugccgcaguggaacucaac

SEQ ID NO: 1080062 - RNA, 19 nt, Artificial Sequence
  Description of Artificial Sequence: Synthetic oligonucleotide
ugcggcugguacgaacagu

SEQ ID NO: 1080063 - RNA, 19 nt, Artificial Sequence
  Description of Artificial Sequence: Synthetic oligonucleotide
ccuccucuacaaaguagag

SEQ ID NO: 1080064 - RNA, 19 nt, Artificial Sequence
  Description of Artificial Sequence: Synthetic oligonucleotide
gcgaaauguuacaaaggca

SEQ ID NO: 1080065 - RNA, 19 nt, Artificial Sequence
  Description of Artificial Sequence: Synthetic oligonucleotide
auccucagcucugccgcag

SEQ ID NO: 1080066 - RNA, 19 nt, Artificial Sequence
  Description of Artificial Sequence: Synthetic oligonucleotide
accuuggaauguaggccag

SEQ ID NO: 1080067 - RNA, 19 nt, Artificial Sequence
  Description of Artificial Sequence: Synthetic oligonucleotide
caguggcgugcuaucaaga

SEQ ID NO: 1080068 - RNA, 19 nt, Artificial Sequence
  Description of Artificial Sequence: Synthetic oligonucleotide
cagagagcgccgugcagca

SEQ ID NO: 1080069 - RNA, 19 nt, Artificial Sequence
  Description of Artificial Sequence: Synthetic oligonucleotide
agaaugcaugaggggagau

SEQ ID NO: 1080070 - RNA, 19 nt, Artificial Sequence
  Description of Artificial Sequence: Synthetic oligonucleotide
caaugccauuaggauguug

SEQ ID NO: 1080071 - RNA, 19 nt, Artificial Sequence
  Description of Artificial Sequence: Synthetic oligonucleotide
ucccaacuccgaccagaaa

SEQ ID NO: 1080072 - RNA, 19 nt, Artificial Sequence
  Description of Artificial Sequence: Synthetic oligonucleotide
ugcucggaguaggguacug

SEQ ID NO: 1080073 - RNA, 19 nt, Artificial Sequence
  Description of Artificial Sequence: Synthetic oligonucleotide
cucguucagcagcgcugcg

SEQ ID NO: 1080074 - RNA, 19 nt, Artificial Sequence
  Description of Artificial Sequence: Synthetic oligonucleotide
caacuccgaccagaaacuc

SEQ ID NO: 1080075 - RNA, 19 nt, Artificial Sequence
  Description of Artificial Sequence: Synthetic oligonucleotide
gggucuaggauagcuacaa

SEQ ID NO: 1080076 - RNA, 19 nt, Artificial Sequence
  Description of Artificial Sequence: Synthetic oligonucleotide
auggaaugggaugccuuuu

SEQ ID NO: 1080077 - RNA, 19 nt, Artificial Sequence
  Description of Artificial Sequence: Synthetic oligonucleotide
cagcacccguucacauucc

SEQ ID NO: 1080078 - RNA, 19 nt, Artificial Sequence
  Description of Artificial Sequence: Synthetic oligonucleotide
gguccuuccaugaaauggu

SEQ ID NO: 1080079 - RNA, 19 nt, Artificial Sequence
  Description of Artificial Sequence: Synthetic oligonucleotide
gcggcugguacgaacaguc

SEQ ID NO: 1080080 - RNA, 19 nt, Artificial Sequence
  Description of Artificial Sequence: Synthetic oligonucleotide
cuuguaguuggagagucuu

SEQ ID NO: 1080081 - RNA, 19 nt, Artificial Sequence
  Description of Artificial Sequence: Synthetic oligonucleotide
auuucgcaguguggagucu

SEQ ID NO: 1080082 - RNA, 19 nt, Artificial Sequence
  Description of Artificial Sequence: Synthetic oligonucleotide
ucgcaaggccuugucucgu

SEQ ID NO: 1080083 - RNA, 19 nt, Artificial Sequence
  Description of Artificial Sequence: Synthetic oligonucleotide
gggcggccuuuccagagag

SEQ ID NO: 1080084 - RNA, 19 nt, Artificial Sequence
  Description of Artificial Sequence: Synthetic oligonucleotide
cacaaguuccacccuugua

SEQ ID NO: 1080085 - RNA, 19 nt, Artificial Sequence
  Description of Artificial Sequence: Synthetic oligonucleotide
guuuccaguggcgugcuau

SEQ ID NO: 1080086 - RNA, 19 nt, Artificial Sequence
  Description of Artificial Sequence: Synthetic oligonucleotide
uugucucguucagcagcgc

SEQ ID NO: 1080087 - RNA, 19 nt, Artificial Sequence
  Description of Artificial Sequence: Synthetic oligonucleotide
cgaauggccaguaucaccu

SEQ ID NO: 1080088 - RNA, 19 nt, Artificial Sequence
  Description of Artificial Sequence: Synthetic oligonucleotide
gagcccauucuuggaugac

SEQ ID NO: 1080089 - RNA, 19 nt, Artificial Sequence
  Description of Artificial Sequence: Synthetic oligonucleotide
guaguuggagagucuugau

SEQ ID NO: 1080090 - RNA, 19 nt, Artificial Sequence
  Description of Artificial Sequence: Synthetic oligonucleotide
ggugguuguccaaagaguu

SEQ ID NO: 1080091 - RNA, 19 nt, Artificial Sequence
  Description of Artificial Sequence: Synthetic oligonucleotide
agcacucgcaaggccuugu

SEQ ID NO: 1080092 - RNA, 19 nt, Artificial Sequence
  Description of Artificial Sequence: Synthetic oligonucleotide
gcugcucggaguaggguac

SEQ ID NO: 1080093 - RNA, 19 nt, Artificial Sequence
  Description of Artificial Sequence: Synthetic oligonucleotide
ggcauggcgaggcacauuu

SEQ ID NO: 1080094 - RNA, 19 nt, Artificial Sequence
  Description of Artificial Sequence: Synthetic oligonucleotide
cacauuccugccgcuucug

SEQ ID NO: 1080095 - RNA, 19 nt, Artificial Sequence
  Description of Artificial Sequence: Synthetic oligonucleotide
uauaugucucggggucaua

SEQ ID NO: 1080096 - RNA, 19 nt, Artificial Sequence
  Description of Artificial Sequence: Synthetic oligonucleotide
cugcccggggauugcagga

SEQ ID NO: 1080097 - RNA, 19 nt, Artificial Sequence
  Description of Artificial Sequence: Synthetic oligonucleotide
accugcuuaguggccucug

SEQ ID NO: 1080098 - RNA, 19 nt, Artificial Sequence
  Description of Artificial Sequence: Synthetic oligonucleotide
uucagucugcuggggugau

SEQ ID NO: 1080099 - RNA, 19 nt, Artificial Sequence
  Description of Artificial Sequence: Synthetic oligonucleotide
gucggcaaucuguguaacu

SEQ ID NO: 1080100 - RNA, 19 nt, Artificial Sequence
  Description of Artificial Sequence: Synthetic oligonucleotide
gucaccacgucggcaaucu

SEQ ID NO: 1080101 - RNA, 19 nt, Artificial Sequence
  Description of Artificial Sequence: Synthetic oligonucleotide
ggaacucaacauugcucaa

SEQ ID NO: 1080102 - RNA, 19 nt, Artificial Sequence
  Description of Artificial Sequence: Synthetic oligonucleotide
cuauggugccagugccaca

SEQ ID NO: 1080103 - RNA, 19 nt, Artificial Sequence
  Description of Artificial Sequence: Synthetic oligonucleotide
ggggauugcaggaaacaua

SEQ ID NO: 1080104 - RNA, 19 nt, Artificial Sequence
  Description of Artificial Sequence: Synthetic oligonucleotide
gccuuauugugucguuguc

SEQ ID NO: 1080105 - RNA, 19 nt, Artificial Sequence
  Description of Artificial Sequence: Synthetic oligonucleotide
ccaacuccgaccagaaacu

SEQ ID NO: 1080106 - RNA, 19 nt, Artificial Sequence
  Description of Artificial Sequence: Synthetic oligonucleotide
cagugggcaacaagccuua

SEQ ID NO: 1080107 - RNA, 19 nt, Artificial Sequence
  Description of Artificial Sequence: Synthetic oligonucleotide
agcagcgcugcgaaauguu

SEQ ID NO: 1080108 - RNA, 19 nt, Artificial Sequence
  Description of Artificial Sequence: Synthetic oligonucleotide
ggagagucuugaugcccca

SEQ ID NO: 1080109 - RNA, 19 nt, Artificial Sequence
  Description of Artificial Sequence: Synthetic oligonucleotide
aaccggcagccaacagugu

SEQ ID NO: 1080110 - RNA, 19 nt, Artificial Sequence
  Description of Artificial Sequence: Synthetic oligonucleotide
aguaugggguggaccgaau

SEQ ID NO: 1080111 - RNA, 19 nt, Artificial Sequence
  Description of Artificial Sequence: Synthetic oligonucleotide
cucugccgcaguggaacuc

SEQ ID NO: 1080112 - RNA, 19 nt, Artificial Sequence
  Description of Artificial Sequence: Synthetic oligonucleotide
guagaccaaaacggcccaa

SEQ ID NO: 1080113 - RNA, 19 nt, Artificial Sequence
  Description of Artificial Sequence: Synthetic oligonucleotide
ugcucccauccagcugagc

SEQ ID NO: 1080114 - RNA, 19 nt, Artificial Sequence
  Description of Artificial Sequence: Synthetic oligonucleotide
ccauggccuggccucugcg

SEQ ID NO: 1080115 - RNA, 19 nt, Artificial Sequence
  Description of Artificial Sequence: Synthetic oligonucleotide
agcccguggcgggucuagg

SEQ ID NO: 1080116 - RNA, 19 nt, Artificial Sequence
  Description of Artificial Sequence: Synthetic oligonucleotide
gcauuucgcaguguggagu

SEQ ID NO: 1080117 - RNA, 19 nt, Artificial Sequence
  Description of Artificial Sequence: Synthetic oligonucleotide
cuccgaccagaaacucaca

SEQ ID NO: 1080118 - RNA, 19 nt, Artificial Sequence
  Description of Artificial Sequence: Synthetic oligonucleotide
gcugagcccauucuuggau

SEQ ID NO: 1080119 - RNA, 19 nt, Artificial Sequence
  Description of Artificial Sequence: Synthetic oligonucleotide
gcgccggacaucacugaag

SEQ ID NO: 1080120 - RNA, 19 nt, Artificial Sequence
  Description of Artificial Sequence: Synthetic oligonucleotide
ggccaguaucaccuuggaa

SEQ ID NO: 1080121 - RNA, 19 nt, Artificial Sequence
  Description of Artificial Sequence: Synthetic oligonucleotide
cacucgcaaggccuugucu

SEQ ID NO: 1080122 - RNA, 19 nt, Artificial Sequence
  Description of Artificial Sequence: Synthetic oligonucleotide
cgugcagcacucgcaaggc

SEQ ID NO: 1080123 - RNA, 19 nt, Artificial Sequence
  Description of Artificial Sequence: Synthetic oligonucleotide
guggaccgaaugaauuccu

SEQ ID NO: 1080124 - RNA, 19 nt, Artificial Sequence
  Description of Artificial Sequence: Synthetic oligonucleotide
gagcgccgugcagcacucg

SEQ ID NO: 1080125 - RNA, 19 nt, Artificial Sequence
  Description of Artificial Sequence: Synthetic oligonucleotide
cccggggauugcaggaaac

SEQ ID NO: 1080126 - RNA, 19 nt, Artificial Sequence
  Description of Artificial Sequence: Synthetic oligonucleotide
gggucgagccaggcgcacg

SEQ ID NO: 1080127 - RNA, 19 nt, Artificial Sequence
  Description of Artificial Sequence: Synthetic oligonucleotide
gccgugcagcacucgcaag

SEQ ID NO: 1080128 - RNA, 19 nt, Artificial Sequence
  Description of Artificial Sequence: Synthetic oligonucleotide
gugggcaacaagccuuauu

SEQ ID NO: 1080129 - RNA, 19 nt, Artificial Sequence
  Description of Artificial Sequence: Synthetic oligonucleotide
ggugaacagaucaucucuu

SEQ ID NO: 1080130 - RNA, 19 nt, Artificial Sequence
  Description of Artificial Sequence: Synthetic oligonucleotide
ccauuaggauguuguucca

SEQ ID NO: 1080131 - RNA, 19 nt, Artificial Sequence
  Description of Artificial Sequence: Synthetic oligonucleotide
ucgguuagauggggcccua

SEQ ID NO: 1080132 - RNA, 19 nt, Artificial Sequence
  Description of Artificial Sequence: Synthetic oligonucleotide
gccaaaccggcagccaaca

SEQ ID NO: 1080133 - RNA, 19 nt, Artificial Sequence
  Description of Artificial Sequence: Synthetic oligonucleotide
cagcccguggcgggucuag

SEQ ID NO: 1080134 - RNA, 19 nt, Artificial Sequence
  Description of Artificial Sequence: Synthetic oligonucleotide
cucgguuagauggggcccu

SEQ ID NO: 1080135 - RNA, 19 nt, Artificial Sequence
  Description of Artificial Sequence: Synthetic oligonucleotide
agugggcaacaagccuuau

SEQ ID NO: 1080136 - RNA, 19 nt, Artificial Sequence
  Description of Artificial Sequence: Synthetic oligonucleotide
cagccuugacuggauggaa

SEQ ID NO: 1080137 - RNA, 19 nt, Artificial Sequence
  Description of Artificial Sequence: Synthetic oligonucleotide
cgaccagaaacucacacuu

SEQ ID NO: 1080138 - RNA, 19 nt, Artificial Sequence
  Description of Artificial Sequence: Synthetic oligonucleotide
guacgaacagucagcuguu

SEQ ID NO: 1080139 - RNA, 19 nt, Artificial Sequence
  Description of Artificial Sequence: Synthetic oligonucleotide
gugguuguccaaagaguuu

SEQ ID NO: 1080140 - RNA, 19 nt, Artificial Sequence
  Description of Artificial Sequence: Synthetic oligonucleotide
cagcacaaguuccacccuu

SEQ ID NO: 1080141 - RNA, 19 nt, Artificial Sequence
  Description of Artificial Sequence: Synthetic oligonucleotide
ccgaccagaaacucacacu

SEQ ID NO: 1080142 - RNA, 19 nt, Artificial Sequence
  Description of Artificial Sequence: Synthetic oligonucleotide
gcgugcuaucaagaagauc

SEQ ID NO: 1080143 - RNA, 19 nt, Artificial Sequence
  Description of Artificial Sequence: Synthetic oligonucleotide
gcggaaggucagucccagc

SEQ ID NO: 1080144 - RNA, 19 nt, Artificial Sequence
  Description of Artificial Sequence: Synthetic oligonucleotide
ggaggccuucagcccugcc

SEQ ID NO: 1080145 - RNA, 19 nt, Artificial Sequence
  Description of Artificial Sequence: Synthetic oligonucleotide
acgcugagugggcggccuu

SEQ ID NO: 1080146 - RNA, 19 nt, Artificial Sequence
  Description of Artificial Sequence: Synthetic oligonucleotide
gcagcgcugcgaaauguua

SEQ ID NO: 1080147 - RNA, 19 nt, Artificial Sequence
  Description of Artificial Sequence: Synthetic oligonucleotide
cucuacgaauggccaguau

SEQ ID NO: 1080148 - RNA, 19 nt, Artificial Sequence
  Description of Artificial Sequence: Synthetic oligonucleotide
ggagaugcggaaggucagu

SEQ ID NO: 1080149 - RNA, 19 nt, Artificial Sequence
  Description of Artificial Sequence: Synthetic oligonucleotide
gcugagugggcggccuuuc

SEQ ID NO: 1080150 - RNA, 19 nt, Artificial Sequence
  Description of Artificial Sequence: Synthetic oligonucleotide
ggcgggucuaggauagcua

SEQ ID NO: 1080151 - RNA, 19 nt, Artificial Sequence
  Description of Artificial Sequence: Synthetic oligonucleotide
guagcagggcacgguuagu

SEQ ID NO: 1080152 - RNA, 19 nt, Artificial Sequence
  Description of Artificial Sequence: Synthetic oligonucleotide
cugccgcaguggaacucaa

SEQ ID NO: 1080153 - RNA, 19 nt, Artificial Sequence
  Description of Artificial Sequence: Synthetic oligonucleotide
caaucccaacuacucucuu

SEQ ID NO: 1080154 - RNA, 19 nt, Artificial Sequence
  Description of Artificial Sequence: Synthetic oligonucleotide
cacuggucaccagccauau

SEQ ID NO: 1080155 - RNA, 19 nt, Artificial Sequence
  Description of Artificial Sequence: Synthetic oligonucleotide
gcgcugcgaaauguuacaa

SEQ ID NO: 1080156 - RNA, 19 nt, Artificial Sequence
  Description of Artificial Sequence: Synthetic oligonucleotide
cgcugcgaaauguuacaaa

SEQ ID NO: 1080157 - RNA, 19 nt, Artificial Sequence
  Description of Artificial Sequence: Synthetic oligonucleotide
ggggucagccuugggucga

SEQ ID NO: 1080158 - RNA, 19 nt, Artificial Sequence
  Description of Artificial Sequence: Synthetic oligonucleotide
gggcacgguuagugcuccc

SEQ ID NO: 1080159 - RNA, 19 nt, Artificial Sequence
  Description of Artificial Sequence: Synthetic oligonucleotide
cccuacagagguccacaaa

SEQ ID NO: 1080160 - RNA, 19 nt, Artificial Sequence
  Description of Artificial Sequence: Synthetic oligonucleotide
cagcagcgcugcgaaaugu

SEQ ID NO: 1080161 - RNA, 19 nt, Artificial Sequence
  Description of Artificial Sequence: Synthetic oligonucleotide
cgggucuaggauagcuaca

SEQ ID NO: 1080162 - RNA, 19 nt, Artificial Sequence
  Description of Artificial Sequence: Synthetic oligonucleotide
gcccggggauugcaggaaa

SEQ ID NO: 1080163 - RNA, 19 nt, Artificial Sequence
  Description of Artificial Sequence: Synthetic oligonucleotide
ccgcaguggaacucaacau

SEQ ID NO: 1080164 - RNA, 19 nt, Artificial Sequence
  Description of Artificial Sequence: Synthetic oligonucleotide
gcucggaguaggguacugu

SEQ ID NO: 1080165 - RNA, 19 nt, Artificial Sequence
  Description of Artificial Sequence: Synthetic oligonucleotide
gcucuacgaauggccagua

SEQ ID NO: 1080166 - RNA, 19 nt, Artificial Sequence
  Description of Artificial Sequence: Synthetic oligonucleotide
cgucggcaaucuguguaac

SEQ ID NO: 1080167 - RNA, 19 nt, Artificial Sequence
  Description of Artificial Sequence: Synthetic oligonucleotide
gcacgcugagugggcggcc

SEQ ID NO: 1080168 - RNA, 19 nt, Artificial Sequence
  Description of Artificial Sequence: Synthetic oligonucleotide
cacgcugagugggcggccu

SEQ ID NO: 1080169 - RNA, 19 nt, Artificial Sequence
  Description of Artificial Sequence: Synthetic oligonucleotide
ccguggcgggucuaggaua

SEQ ID NO: 1080170 - RNA, 19 nt, Artificial Sequence
  Description of Artificial Sequence: Synthetic oligonucleotide
gcucugccgcaguggaacu

SEQ ID NO: 1080171 - RNA, 19 nt, Artificial Sequence
  Description of Artificial Sequence: Synthetic oligonucleotide
gcgccgugcagcacucgca

SEQ ID NO: 1080172 - RNA, 19 nt, Artificial Sequence
  Description of Artificial Sequence: Synthetic oligonucleotide
caucaccuuccugccgccu

SEQ ID NO: 1080173 - RNA, 19 nt, Artificial Sequence
  Description of Artificial Sequence: Synthetic oligonucleotide
ggcgugcuaucaagaagau

SEQ ID NO: 1080174 - RNA, 19 nt, Artificial Sequence
  Description of Artificial Sequence: Synthetic oligonucleotide
cggcugguacgaacaguca

SEQ ID NO: 1080175 - RNA, 19 nt, Artificial Sequence
  Description of Artificial Sequence: Synthetic oligonucleotide
gucgagccaggcgcacgcu

SEQ ID NO: 1080176 - RNA, 19 nt, Artificial Sequence
  Description of Artificial Sequence: Synthetic oligonucleotide
cgguuagauggggcccuac

SEQ ID NO: 1080177 - RNA, 19 nt, Artificial Sequence
  Description of Artificial Sequence: Synthetic oligonucleotide
cccguggcgggucuaggau

SEQ ID NO: 1080178 - RNA, 19 nt, Artificial Sequence
  Description of Artificial Sequence: Synthetic oligonucleotide
gggaugccuuuuacucggu

SEQ ID NO: 1080179 - RNA, 19 nt, Artificial Sequence
  Description of Artificial Sequence: Synthetic oligonucleotide
ccuuuccagagagcgccgu

SEQ ID NO: 1080180 - RNA, 19 nt, Artificial Sequence
  Description of Artificial Sequence: Synthetic oligonucleotide
ccacgucggcaaucugugu

SEQ ID NO: 1080181 - RNA, 19 nt, Artificial Sequence
  Description of Artificial Sequence: Synthetic oligonucleotide
gcauggcgaggcacauuuu

SEQ ID NO: 1080182 - RNA, 19 nt, Artificial Sequence
  Description of Artificial Sequence: Synthetic oligonucleotide
ccaggccuauggugccagu

SEQ ID NO: 1080183 - RNA, 19 nt, Artificial Sequence
  Description of Artificial Sequence: Synthetic oligonucleotide
cgcaaggccuugucucguu

SEQ ID NO: 1080184 - RNA, 19 nt, Artificial Sequence
  Description of Artificial Sequence: Synthetic oligonucleotide
ccucugcggcugguacgaa

SEQ ID NO: 1080185 - RNA, 19 nt, Artificial Sequence
  Description of Artificial Sequence: Synthetic oligonucleotide
ccccuccagugggcaacaa

SEQ ID NO: 1080186 - RNA, 19 nt, Artificial Sequence
  Description of Artificial Sequence: Synthetic oligonucleotide
auaaacaggacuucuaacc

SEQ ID NO: 1080187 - RNA, 19 nt, Artificial Sequence
  Description of Artificial Sequence: Synthetic oligonucleotide
uguuuugacaacaggaagg

SEQ ID NO: 1080188 - RNA, 19 nt, Artificial Sequence
  Description of Artificial Sequence: Synthetic oligonucleotide
ugaagggaaacuuagaaug

SEQ ID NO: 1080189 - RNA, 19 nt, Artificial Sequence
  Description of Artificial Sequence: Synthetic oligonucleotide
uuuucagaagaccuaaaag

SEQ ID NO: 1080190 - RNA, 19 nt, Artificial Sequence
  Description of Artificial Sequence: Synthetic oligonucleotide
aauugagagcaccaaagag

SEQ ID NO: 1080191 - RNA, 19 nt, Artificial Sequence
  Description of Artificial Sequence: Synthetic oligonucleotide
uaaauguuacuucagaguc

SEQ ID NO: 1080192 - RNA, 19 nt, Artificial Sequence
  Description of Artificial Sequence: Synthetic oligonucleotide
uauaaauguuacuucagag

SEQ ID NO: 1080193 - RNA, 19 nt, Artificial Sequence
  Description of Artificial Sequence: Synthetic oligonucleotide
aacgauagacuucaggaag

SEQ ID NO: 1080194 - RNA, 19 nt, Artificial Sequence
  Description of Artificial Sequence: Synthetic oligonucleotide
aauguaacauucccucagc

SEQ ID NO: 1080195 - RNA, 19 nt, Artificial Sequence
  Description of Artificial Sequence: Synthetic oligonucleotide
agagacauagcacugaaug

SEQ ID NO: 1080196 - RNA, 19 nt, Artificial Sequence
  Description of Artificial Sequence: Synthetic oligonucleotide
uugacaacaggaaggaggg

SEQ ID NO: 1080197 - RNA, 19 nt, Artificial Sequence
  Description of Artificial Sequence: Synthetic oligonucleotide
guuauaauuaucaagugac

SEQ ID NO: 1080198 - RNA, 19 nt, Artificial Sequence
  Description of Artificial Sequence: Synthetic oligonucleotide
auugagagcaccaaagagc

SEQ ID NO: 1080199 - RNA, 19 nt, Artificial Sequence
  Description of Artificial Sequence: Synthetic oligonucleotide
uauaauuaucaagugaccc

SEQ ID NO: 1080200 - RNA, 19 nt, Artificial Sequence
  Description of Artificial Sequence: Synthetic oligonucleotide
agugguuauaauuaucaag

SEQ ID NO: 1080201 - RNA, 19 nt, Artificial Sequence
  Description of Artificial Sequence: Synthetic oligonucleotide
ucagauuuucagaagaccu

SEQ ID NO: 1080202 - RNA, 19 nt, Artificial Sequence
  Description of Artificial Sequence: Synthetic oligonucleotide
acuguagacaaaugaaggg

SEQ ID NO: 1080203 - RNA, 19 nt, Artificial Sequence
  Description of Artificial Sequence: Synthetic oligonucleotide
uuacuucagagucaagggg

SEQ ID NO: 1080204 - RNA, 19 nt, Artificial Sequence
  Description of Artificial Sequence: Synthetic oligonucleotide
uauuccugaaauuuucugc

SEQ ID NO: 1080205 - RNA, 19 nt, Artificial Sequence
  Description of Artificial Sequence: Synthetic oligonucleotide
cuuagaauguaacauuccc

SEQ ID NO: 1080206 - RNA, 19 nt, Artificial Sequence
  Description of Artificial Sequence: Synthetic oligonucleotide
ugaaauuuucugccggccg

SEQ ID NO: 1080207 - RNA, 19 nt, Artificial Sequence
  Description of Artificial Sequence: Synthetic oligonucleotide
uaauucuauucugaaaagg

SEQ ID NO: 1080208 - RNA, 19 nt, Artificial Sequence
  Description of Artificial Sequence: Synthetic oligonucleotide
aaaaccucaggcuggcuag

SEQ ID NO: 1080209 - RNA, 19 nt, Artificial Sequence
  Description of Artificial Sequence: Synthetic oligonucleotide
auagcuguuggguagcagg

SEQ ID NO: 1080210 - RNA, 19 nt, Artificial Sequence
  Description of Artificial Sequence: Synthetic oligonucleotide
agugacgagaaaucugggc

SEQ ID NO: 1080211 - RNA, 19 nt, Artificial Sequence
  Description of Artificial Sequence: Synthetic oligonucleotide
aagaccuaaauauuguuuu

SEQ ID NO: 1080212 - RNA, 19 nt, Artificial Sequence
  Description of Artificial Sequence: Synthetic oligonucleotide
uaauccaagaaguugaguu

SEQ ID NO: 1080213 - RNA, 19 nt, Artificial Sequence
  Description of Artificial Sequence: Synthetic oligonucleotide
gaauguaacauucccucag

SEQ ID NO: 1080214 - RNA, 19 nt, Artificial Sequence
  Description of Artificial Sequence: Synthetic oligonucleotide
ucuucuauaaauguuacuu

SEQ ID NO: 1080215 - RNA, 19 nt, Artificial Sequence
  Description of Artificial Sequence: Synthetic oligonucleotide
auaauuaucaagugacccu

SEQ ID NO: 1080216 - RNA, 19 nt, Artificial Sequence
  Description of Artificial Sequence: Synthetic oligonucleotide
aaggguauuuguuguguuc

SEQ ID NO: 1080217 - RNA, 19 nt, Artificial Sequence
  Description of Artificial Sequence: Synthetic oligonucleotide
aauaagccucccuuuccac

SEQ ID NO: 1080218 - RNA, 19 nt, Artificial Sequence
  Description of Artificial Sequence: Synthetic oligonucleotide
accuaaauauuguuuugac

SEQ ID NO: 1080219 - RNA, 19 nt, Artificial Sequence
  Description of Artificial Sequence: Synthetic oligonucleotide
gagagcaccaaagagcacg

SEQ ID NO: 1080220 - RNA, 19 nt, Artificial Sequence
  Description of Artificial Sequence: Synthetic oligonucleotide
ugcagagaagccuggacgg

SEQ ID NO: 1080221 - RNA, 19 nt, Artificial Sequence
  Description of Artificial Sequence: Synthetic oligonucleotide
uaauagauguuuuccauau

SEQ ID NO: 1080222 - RNA, 19 nt, Artificial Sequence
  Description of Artificial Sequence: Synthetic oligonucleotide
uaucaagugacccuguuuu

SEQ ID NO: 1080223 - RNA, 19 nt, Artificial Sequence
  Description of Artificial Sequence: Synthetic oligonucleotide
uccagcacaagucauuucu

SEQ ID NO: 1080224 - RNA, 19 nt, Artificial Sequence
  Description of Artificial Sequence: Synthetic oligonucleotide
ugggauagauuucugaaaa

SEQ ID NO: 1080225 - RNA, 19 nt, Artificial Sequence
  Description of Artificial Sequence: Synthetic oligonucleotide
caaaucugaguuuggagag

SEQ ID NO: 1080226 - RNA, 19 nt, Artificial Sequence
  Description of Artificial Sequence: Synthetic oligonucleotide
uccugaaauuuucugccgg

SEQ ID NO: 1080227 - RNA, 19 nt, Artificial Sequence
  Description of Artificial Sequence: Synthetic oligonucleotide
aaauaagccucccuuucca

SEQ ID NO: 1080228 - RNA, 19 nt, Artificial Sequence
  Description of Artificial Sequence: Synthetic oligonucleotide
aacgagucuuggcuguagc

SEQ ID NO: 1080229 - RNA, 19 nt, Artificial Sequence
  Description of Artificial Sequence: Synthetic oligonucleotide
gugacgagaaaucugggcc

SEQ ID NO: 1080230 - RNA, 19 nt, Artificial Sequence
  Description of Artificial Sequence: Synthetic oligonucleotide
uaauuaucaagugacccug

SEQ ID NO: 1080231 - RNA, 19 nt, Artificial Sequence
  Description of Artificial Sequence: Synthetic oligonucleotide
aggacuucuaaccucaccu

SEQ ID NO: 1080232 - RNA, 19 nt, Artificial Sequence
  Description of Artificial Sequence: Synthetic oligonucleotide
ucuauuugguuuauucccu

SEQ ID NO: 1080233 - RNA, 19 nt, Artificial Sequence
  Description of Artificial Sequence: Synthetic oligonucleotide
ugcucguuagaacuggacc

SEQ ID NO: 1080234 - RNA, 19 nt, Artificial Sequence
  Description of Artificial Sequence: Synthetic oligonucleotide
auguaacauucccucagcc

SEQ ID NO: 1080235 - RNA, 19 nt, Artificial Sequence
  Description of Artificial Sequence: Synthetic oligonucleotide
uccucagauuuucagaaga

SEQ ID NO: 1080236 - RNA, 19 nt, Artificial Sequence
  Description of Artificial Sequence: Synthetic oligonucleotide
aacuggaccgaugaugggg

SEQ ID NO: 1080237 - RNA, 19 nt, Artificial Sequence
  Description of Artificial Sequence: Synthetic oligonucleotide
ucagauagcuaauccaaga

SEQ ID NO: 1080238 - RNA, 19 nt, Artificial Sequence
  Description of Artificial Sequence: Synthetic oligonucleotide
aaguugaguuuccaugcag

SEQ ID NO: 1080239 - RNA, 19 nt, Artificial Sequence
  Description of Artificial Sequence: Synthetic oligonucleotide
aaugguuacaggagggguc

SEQ ID NO: 1080240 - RNA, 19 nt, Artificial Sequence
  Description of Artificial Sequence: Synthetic oligonucleotide
uuccacauaaauugagagc

SEQ ID NO: 1080241 - RNA, 19 nt, Artificial Sequence
  Description of Artificial Sequence: Synthetic oligonucleotide
aacauaguuagaucaggaa

SEQ ID NO: 1080242 - RNA, 19 nt, Artificial Sequence
  Description of Artificial Sequence: Synthetic oligonucleotide
uccucauucccuaugaaua

SEQ ID NO: 1080243 - RNA, 19 nt, Artificial Sequence
  Description of Artificial Sequence: Synthetic oligonucleotide
uuauccuaugggcaggucu

SEQ ID NO: 1080244 - RNA, 19 nt, Artificial Sequence
  Description of Artificial Sequence: Synthetic oligonucleotide
aaaguugcucacaccaaac

SEQ ID NO: 1080245 - RNA, 19 nt, Artificial Sequence
  Description of Artificial Sequence: Synthetic oligonucleotide
uaucuagccagccuauucu

SEQ ID NO: 1080246 - RNA, 19 nt, Artificial Sequence
  Description of Artificial Sequence: Synthetic oligonucleotide
acacuuaauagauguuuuc

SEQ ID NO: 1080247 - RNA, 19 nt, Artificial Sequence
  Description of Artificial Sequence: Synthetic oligonucleotide
aauguuacuucagagucaa

SEQ ID NO: 1080248 - RNA, 19 nt, Artificial Sequence
  Description of Artificial Sequence: Synthetic oligonucleotide
auucuauucugaaaagggg

SEQ ID NO: 1080249 - RNA, 19 nt, Artificial Sequence
  Description of Artificial Sequence: Synthetic oligonucleotide
aagagcacgaguaauccug

SEQ ID NO: 1080250 - RNA, 19 nt, Artificial Sequence
  Description of Artificial Sequence: Synthetic oligonucleotide
aaacugggaagaacgaguc

SEQ ID NO: 1080251 - RNA, 19 nt, Artificial Sequence
  Description of Artificial Sequence: Synthetic oligonucleotide
uauacuguaugugugcacu

SEQ ID NO: 1080252 - RNA, 19 nt, Artificial Sequence
  Description of Artificial Sequence: Synthetic oligonucleotide
ugaauacacuuaauagaug

SEQ ID NO: 1080253 - RNA, 19 nt, Artificial Sequence
  Description of Artificial Sequence: Synthetic oligonucleotide
uccauauuaguuuaaucuu

SEQ ID NO: 1080254 - RNA, 19 nt, Artificial Sequence
  Description of Artificial Sequence: Synthetic oligonucleotide
aguuagaucaggaaauucu

SEQ ID NO: 1080255 - RNA, 19 nt, Artificial Sequence
  Description of Artificial Sequence: Synthetic oligonucleotide
aguugcucacaccaaacug

SEQ ID NO: 1080256 - RNA, 19 nt, Artificial Sequence
  Description of Artificial Sequence: Synthetic oligonucleotide
ugguuuauucccucaucgg

SEQ ID NO: 1080257 - RNA, 19 nt, Artificial Sequence
  Description of Artificial Sequence: Synthetic oligonucleotide
cacuuaauagauguuuucc

SEQ ID NO: 1080258 - RNA, 19 nt, Artificial Sequence
  Description of Artificial Sequence: Synthetic oligonucleotide
caggaagaccuaaauauug

SEQ ID NO: 1080259 - RNA, 19 nt, Artificial Sequence
  Description of Artificial Sequence: Synthetic oligonucleotide
uguaacauucccucagccu

SEQ ID NO: 1080260 - RNA, 19 nt, Artificial Sequence
  Description of Artificial Sequence: Synthetic oligonucleotide
uuaauagauguuuuccaua

SEQ ID NO: 1080261 - RNA, 19 nt, Artificial Sequence
  Description of Artificial Sequence: Synthetic oligonucleotide
gaagaacgagucuuggcug

SEQ ID NO: 1080262 - RNA, 19 nt, Artificial Sequence
  Description of Artificial Sequence: Synthetic oligonucleotide
guuagaacuggaccgauga

SEQ ID NO: 1080263 - RNA, 19 nt, Artificial Sequence
  Description of Artificial Sequence: Synthetic oligonucleotide
cucacacacacacacacac

SEQ ID NO: 1080264 - RNA, 19 nt, Artificial Sequence
  Description of Artificial Sequence: Synthetic oligonucleotide
aaguugcucacaccaaacu

SEQ ID NO: 1080265 - RNA, 19 nt, Artificial Sequence
  Description of Artificial Sequence: Synthetic oligonucleotide
uaauaucugcagcucuucc

SEQ ID NO: 1080266 - RNA, 19 nt, Artificial Sequence
  Description of Artificial Sequence: Synthetic oligonucleotide
acuuagaauguaacauucc

SEQ ID NO: 1080267 - RNA, 19 nt, Artificial Sequence
  Description of Artificial Sequence: Synthetic oligonucleotide
ucuauugacuggcaccaga

SEQ ID NO: 1080268 - RNA, 19 nt, Artificial Sequence
  Description of Artificial Sequence: Synthetic oligonucleotide
auaaauugagagcaccaaa

SEQ ID NO: 1080269 - RNA, 19 nt, Artificial Sequence
  Description of Artificial Sequence: Synthetic oligonucleotide
ugguuauaauuaucaagug

SEQ ID NO: 1080270 - RNA, 19 nt, Artificial Sequence
  Description of Artificial Sequence: Synthetic oligonucleotide
gacaaugguuacaggaggg

SEQ ID NO: 1080271 - RNA, 19 nt, Artificial Sequence
  Description of Artificial Sequence: Synthetic oligonucleotide
ucauucccuaugaauacac

SEQ ID NO: 1080272 - RNA, 19 nt, Artificial Sequence
  Description of Artificial Sequence: Synthetic oligonucleotide
cugaaaguugcucacacca

SEQ ID NO: 1080273 - RNA, 19 nt, Artificial Sequence
  Description of Artificial Sequence: Synthetic oligonucleotide
cugacaguguuuaucuagc

SEQ ID NO: 1080274 - RNA, 19 nt, Artificial Sequence
  Description of Artificial Sequence: Synthetic oligonucleotide
uuaucuagccagccuauuc

SEQ ID NO: 1080275 - RNA, 19 nt, Artificial Sequence
  Description of Artificial Sequence: Synthetic oligonucleotide
cacacacacacacacacac

SEQ ID NO: 1080276 - RNA, 19 nt, Artificial Sequence
  Description of Artificial Sequence: Synthetic oligonucleotide
cacucuauugacuggcacc

SEQ ID NO: 1080277 - RNA, 19 nt, Artificial Sequence
  Description of Artificial Sequence: Synthetic oligonucleotide
ugaucacugacuguguucu

SEQ ID NO: 1080278 - RNA, 19 nt, Artificial Sequence
  Description of Artificial Sequence: Synthetic oligonucleotide
aagaacgagucuuggcugu

SEQ ID NO: 1080279 - RNA, 19 nt, Artificial Sequence
  Description of Artificial Sequence: Synthetic oligonucleotide
acgagucuuggcuguagcc

SEQ ID NO: 1080280 - RNA, 19 nt, Artificial Sequence
  Description of Artificial Sequence: Synthetic oligonucleotide
uucccuaugaauacacuua

SEQ ID NO: 1080281 - RNA, 19 nt, Artificial Sequence
  Description of Artificial Sequence: Synthetic oligonucleotide
cucucucacacacacacac

SEQ ID NO: 1080282 - RNA, 19 nt, Artificial Sequence
  Description of Artificial Sequence: Synthetic oligonucleotide
gcucguuagaacuggaccg

SEQ ID NO: 1080283 - RNA, 19 nt, Artificial Sequence
  Description of Artificial Sequence: Synthetic oligonucleotide
gaugauggcuggacaaugg

SEQ ID NO: 1080284 - RNA, 19 nt, Artificial Sequence
  Description of Artificial Sequence: Synthetic oligonucleotide
augucugcugaacauguug

SEQ ID NO: 1080285 - RNA, 19 nt, Artificial Sequence
  Description of Artificial Sequence: Synthetic oligonucleotide
aaaguuggauccacgguug

SEQ ID NO: 1080286 - RNA, 19 nt, Artificial Sequence
  Description of Artificial Sequence: Synthetic oligonucleotide
ucucaaggguauuuguugu

SEQ ID NO: 1080287 - RNA, 19 nt, Artificial Sequence
  Description of Artificial Sequence: Synthetic oligonucleotide
uacacuuaauagauguuuu

SEQ ID NO: 1080288 - RNA, 19 nt, Artificial Sequence
  Description of Artificial Sequence: Synthetic oligonucleotide
ugggaauucaguccauuuc

SEQ ID NO: 1080289 - RNA, 19 nt, Artificial Sequence
  Description of Artificial Sequence: Synthetic oligonucleotide
agucugggaauucagucca

SEQ ID NO: 1080290 - RNA, 19 nt, Artificial Sequence
  Description of Artificial Sequence: Synthetic oligonucleotide
gguuauaauuaucaaguga

SEQ ID NO: 1080291 - RNA, 19 nt, Artificial Sequence
  Description of Artificial Sequence: Synthetic oligonucleotide
agaauagcuguuggguagc

SEQ ID NO: 1080292 - RNA, 19 nt, Artificial Sequence
  Description of Artificial Sequence: Synthetic oligonucleotide
cuauugacuggcaccagac

SEQ ID NO: 1080293 - RNA, 19 nt, Artificial Sequence
  Description of Artificial Sequence: Synthetic oligonucleotide
cucucacacacacacacac

SEQ ID NO: 1080294 - RNA, 19 nt, Artificial Sequence
  Description of Artificial Sequence: Synthetic oligonucleotide
uguugcucguuagaacugg

SEQ ID NO: 1080295 - RNA, 19 nt, Artificial Sequence
  Description of Artificial Sequence: Synthetic oligonucleotide
ggagugacgagaaaucugg

SEQ ID NO: 1080296 - RNA, 19 nt, Artificial Sequence
  Description of Artificial Sequence: Synthetic oligonucleotide
uauaggagggcuuucuauu

SEQ ID NO: 1080297 - RNA, 19 nt, Artificial Sequence
  Description of Artificial Sequence: Synthetic oligonucleotide
guuggugagaguaggguag

SEQ ID NO: 1080298 - RNA, 19 nt, Artificial Sequence
  Description of Artificial Sequence: Synthetic oligonucleotide
caaagagcacgaguaaucc

SEQ ID NO: 1080299 - RNA, 19 nt, Artificial Sequence
  Description of Artificial Sequence: Synthetic oligonucleotide
aaguuggauccacgguugg

SEQ ID NO: 1080300 - RNA, 19 nt, Artificial Sequence
  Description of Artificial Sequence: Synthetic oligonucleotide
uuucagaaggaaaguugga

SEQ ID NO: 1080301 - RNA, 19 nt, Artificial Sequence
  Description of Artificial Sequence: Synthetic oligonucleotide
agaccuaaauauuguuuug

SEQ ID NO: 1080302 - RNA, 19 nt, Artificial Sequence
  Description of Artificial Sequence: Synthetic oligonucleotide
caaagaacgauagacuuca

SEQ ID NO: 1080303 - RNA, 19 nt, Artificial Sequence
  Description of Artificial Sequence: Synthetic oligonucleotide
cacauaaauugagagcacc

SEQ ID NO: 1080304 - RNA, 19 nt, Artificial Sequence
  Description of Artificial Sequence: Synthetic oligonucleotide
uuuccacucuauugacugg

SEQ ID NO: 1080305 - RNA, 19 nt, Artificial Sequence
  Description of Artificial Sequence: Synthetic oligonucleotide
cacacacacacacacacuc

SEQ ID NO: 1080306 - RNA, 19 nt, Artificial Sequence
  Description of Artificial Sequence: Synthetic oligonucleotide
ggaacuuuuauucuguuua

SEQ ID NO: 1080307 - RNA, 19 nt, Artificial Sequence
  Description of Artificial Sequence: Synthetic oligonucleotide
cuucuaaccucaccugucc

SEQ ID NO: 1080308 - RNA, 19 nt, Artificial Sequence
  Description of Artificial Sequence: Synthetic oligonucleotide
ucugaaaguugcucacacc

SEQ ID NO: 1080309 - RNA, 19 nt, Artificial Sequence
  Description of Artificial Sequence: Synthetic oligonucleotide
aaaaugcagcauuauccua

SEQ ID NO: 1080310 - RNA, 19 nt, Artificial Sequence
  Description of Artificial Sequence: Synthetic oligonucleotide
uccgggacuggaauugucc

SEQ ID NO: 1080311 - RNA, 19 nt, Artificial Sequence
  Description of Artificial Sequence: Synthetic oligonucleotide
uuauccucaccccaauaau

SEQ ID NO: 1080312 - RNA, 19 nt, Artificial Sequence
  Description of Artificial Sequence: Synthetic oligonucleotide
agcacaagucauuucugug

SEQ ID NO: 1080313 - RNA, 19 nt, Artificial Sequence
  Description of Artificial Sequence: Synthetic oligonucleotide
agcuaauccaagaaguuga

SEQ ID NO: 1080314 - RNA, 19 nt, Artificial Sequence
  Description of Artificial Sequence: Synthetic oligonucleotide
auucccuaugaauacacuu

SEQ ID NO: 1080315 - RNA, 19 nt, Artificial Sequence
  Description of Artificial Sequence: Synthetic oligonucleotide
uguuggguagcagggacag

SEQ ID NO: 1080316 - RNA, 19 nt, Artificial Sequence
  Description of Artificial Sequence: Synthetic oligonucleotide
agaauguaacauucccuca

SEQ ID NO: 1080317 - RNA, 19 nt, Artificial Sequence
  Description of Artificial Sequence: Synthetic oligonucleotide
agccuauucugguaauauc

SEQ ID NO: 1080318 - RNA, 19 nt, Artificial Sequence
  Description of Artificial Sequence: Synthetic oligonucleotide
aauuguccugcagucuguc

SEQ ID NO: 1080319 - RNA, 19 nt, Artificial Sequence
  Description of Artificial Sequence: Synthetic oligonucleotide
guugggauagauuucugaa

SEQ ID NO: 1080320 - RNA, 19 nt, Artificial Sequence
  Description of Artificial Sequence: Synthetic oligonucleotide
acuggaccgaugauggggc

SEQ ID NO: 1080321 - RNA, 19 nt, Artificial Sequence
  Description of Artificial Sequence: Synthetic oligonucleotide
accacuauuccugaaauuu

SEQ ID NO: 1080322 - RNA, 19 nt, Artificial Sequence
  Description of Artificial Sequence: Synthetic oligonucleotide
cacaagucauuucugugac

SEQ ID NO: 1080323 - RNA, 19 nt, Artificial Sequence
  Description of Artificial Sequence: Synthetic oligonucleotide
cucccuuuccacucuauug

SEQ ID NO: 1080324 - RNA, 19 nt, Artificial Sequence
  Description of Artificial Sequence: Synthetic oligonucleotide
gcagcaaagaacgauagac

SEQ ID NO: 1080325 - RNA, 19 nt, Artificial Sequence
  Description of Artificial Sequence: Synthetic oligonucleotide
ggaaacuuagaauguaaca

SEQ ID NO: 1080326 - RNA, 19 nt, Artificial Sequence
  Description of Artificial Sequence: Synthetic oligonucleotide
auggcuggacaaugguuac

SEQ ID NO: 1080327 - RNA, 19 nt, Artificial Sequence
  Description of Artificial Sequence: Synthetic oligonucleotide
guacuagggguccaaguug

SEQ ID NO: 1080328 - RNA, 19 nt, Artificial Sequence
  Description of Artificial Sequence: Synthetic oligonucleotide
uauccucaccccaauaauu

SEQ ID NO: 1080329 - RNA, 19 nt, Artificial Sequence
  Description of Artificial Sequence: Synthetic oligonucleotide
uuaucaagugacccuguuu

SEQ ID NO: 1080330 - RNA, 19 nt, Artificial Sequence
  Description of Artificial Sequence: Synthetic oligonucleotide
ucggugaggacuuccacuc

SEQ ID NO: 1080331 - RNA, 19 nt, Artificial Sequence
  Description of Artificial Sequence: Synthetic oligonucleotide
gauuucugaaaaccuugga

SEQ ID NO: 1080332 - RNA, 19 nt, Artificial Sequence
  Description of Artificial Sequence: Synthetic oligonucleotide
cacacacacacacucacuc

SEQ ID NO: 1080333 - RNA, 19 nt, Artificial Sequence
  Description of Artificial Sequence: Synthetic oligonucleotide
uacccuguggugccguggg

SEQ ID NO: 1080334 - RNA, 19 nt, Artificial Sequence
  Description of Artificial Sequence: Synthetic oligonucleotide
gaacgauagacuucaggaa

SEQ ID NO: 1080335 - RNA, 19 nt, Artificial Sequence
  Description of Artificial Sequence: Synthetic oligonucleotide
uucuagugguuauaauuau

SEQ ID NO: 1080336 - RNA, 19 nt, Artificial Sequence
  Description of Artificial Sequence: Synthetic oligonucleotide
uauugacuggcaccagacu

SEQ ID NO: 1080337 - RNA, 19 nt, Artificial Sequence
  Description of Artificial Sequence: Synthetic oligonucleotide
aauagauguuuuccauauu

SEQ ID NO: 1080338 - RNA, 19 nt, Artificial Sequence
  Description of Artificial Sequence: Synthetic oligonucleotide
uugcccugggagaauagcu

SEQ ID NO: 1080339 - RNA, 19 nt, Artificial Sequence
  Description of Artificial Sequence: Synthetic oligonucleotide
acucuauugacuggcacca

SEQ ID NO: 1080340 - RNA, 19 nt, Artificial Sequence
  Description of Artificial Sequence: Synthetic oligonucleotide
gaaaguuggauccacgguu

SEQ ID NO: 1080341 - RNA, 19 nt, Artificial Sequence
  Description of Artificial Sequence: Synthetic oligonucleotide
guagcuguugcucuggucu

SEQ ID NO: 1080342 - RNA, 19 nt, Artificial Sequence
  Description of Artificial Sequence: Synthetic oligonucleotide
caugcagaaauaaccucuc

SEQ ID NO: 1080343 - RNA, 19 nt, Artificial Sequence
  Description of Artificial Sequence: Synthetic oligonucleotide
uuccacucuauugacuggc

SEQ ID NO: 1080344 - RNA, 19 nt, Artificial Sequence
  Description of Artificial Sequence: Synthetic oligonucleotide
uaacauucccucagccucu

SEQ ID NO: 1080345 - RNA, 19 nt, Artificial Sequence
  Description of Artificial Sequence: Synthetic oligonucleotide
gaacauaguuagaucagga

SEQ ID NO: 1080346 - RNA, 19 nt, Artificial Sequence
  Description of Artificial Sequence: Synthetic oligonucleotide
ucaucggugaggacuucca

SEQ ID NO: 1080347 - RNA, 19 nt, Artificial Sequence
  Description of Artificial Sequence: Synthetic oligonucleotide
ggaacauaguuagaucagg

SEQ ID NO: 1080348 - RNA, 19 nt, Artificial Sequence
  Description of Artificial Sequence: Synthetic oligonucleotide
agauuuucagaagaccuaa

SEQ ID NO: 1080349 - RNA, 19 nt, Artificial Sequence
  Description of Artificial Sequence: Synthetic oligonucleotide
cauguugcucguuagaacu

SEQ ID NO: 1080350 - RNA, 19 nt, Artificial Sequence
  Description of Artificial Sequence: Synthetic oligonucleotide
aauuuucugccggccgggg

SEQ ID NO: 1080351 - RNA, 19 nt, Artificial Sequence
  Description of Artificial Sequence: Synthetic oligonucleotide
cacacacacacacacucac

SEQ ID NO: 1080352 - RNA, 19 nt, Artificial Sequence
  Description of Artificial Sequence: Synthetic oligonucleotide
agaccacuauuccugaaau

SEQ ID NO: 1080353 - RNA, 19 nt, Artificial Sequence
  Description of Artificial Sequence: Synthetic oligonucleotide
ucccucaucggugaggacu

SEQ ID NO: 1080354 - RNA, 19 nt, Artificial Sequence
  Description of Artificial Sequence: Synthetic oligonucleotide
aacugggaagaacgagucu

SEQ ID NO: 1080355 - RNA, 19 nt, Artificial Sequence
  Description of Artificial Sequence: Synthetic oligonucleotide
guagaguuggagugacgag

SEQ ID NO: 1080356 - RNA, 19 nt, Artificial Sequence
  Description of Artificial Sequence: Synthetic oligonucleotide
acauaaauugagagcacca

SEQ ID NO: 1080357 - RNA, 19 nt, Artificial Sequence
  Description of Artificial Sequence: Synthetic oligonucleotide
cuuauccucaccccaauaa

SEQ ID NO: 1080358 - RNA, 19 nt, Artificial Sequence
  Description of Artificial Sequence: Synthetic oligonucleotide
aggguauuuguuguguucu

SEQ ID NO: 1080359 - RNA, 19 nt, Artificial Sequence
  Description of Artificial Sequence: Synthetic oligonucleotide
ucucacacacacacacaca

SEQ ID NO: 1080360 - RNA, 19 nt, Artificial Sequence
  Description of Artificial Sequence: Synthetic oligonucleotide
agagcacgaguaauccugc

SEQ ID NO: 1080361 - RNA, 19 nt, Artificial Sequence
  Description of Artificial Sequence: Synthetic oligonucleotide
aucuagccagccuauucug

SEQ ID NO: 1080362 - RNA, 19 nt, Artificial Sequence
  Description of Artificial Sequence: Synthetic oligonucleotide
acuucuaaccucaccuguc

SEQ ID NO: 1080363 - RNA, 19 nt, Artificial Sequence
  Description of Artificial Sequence: Synthetic oligonucleotide
gauagacuucaggaagacc

SEQ ID NO: 1080364 - RNA, 19 nt, Artificial Sequence
  Description of Artificial Sequence: Synthetic oligonucleotide
ucacacacacacacacaca

SEQ ID NO: 1080365 - RNA, 19 nt, Artificial Sequence
  Description of Artificial Sequence: Synthetic oligonucleotide
uuuugacaacaggaaggag

SEQ ID NO: 1080366 - RNA, 19 nt, Artificial Sequence
  Description of Artificial Sequence: Synthetic oligonucleotide
cuguagacaaaugaaggga

SEQ ID NO: 1080367 - RNA, 19 nt, Artificial Sequence
  Description of Artificial Sequence: Synthetic oligonucleotide
ucucucacacacacacaca

SEQ ID NO: 1080368 - RNA, 19 nt, Artificial Sequence
  Description of Artificial Sequence: Synthetic oligonucleotide
cugaaauuuucugccggcc

SEQ ID NO: 1080369 - RNA, 19 nt, Artificial Sequence
  Description of Artificial Sequence: Synthetic oligonucleotide
gcacgaguaauccugcuug

SEQ ID NO: 1080370 - RNA, 19 nt, Artificial Sequence
  Description of Artificial Sequence: Synthetic oligonucleotide
ucaagugacccuguuuuau

SEQ ID NO: 1080371 - RNA, 19 nt, Artificial Sequence
  Description of Artificial Sequence: Synthetic oligonucleotide
cacucagauagcuaaucca

SEQ ID NO: 1080372 - RNA, 19 nt, Artificial Sequence
  Description of Artificial Sequence: Synthetic oligonucleotide
gaacauguugcucguuaga

SEQ ID NO: 1080373 - RNA, 19 nt, Artificial Sequence
  Description of Artificial Sequence: Synthetic oligonucleotide
uuauucccucaucggugag

SEQ ID NO: 1080374 - RNA, 19 nt, Artificial Sequence
  Description of Artificial Sequence: Synthetic oligonucleotide
aagaugauggcuggacaau

SEQ ID NO: 1080375 - RNA, 19 nt, Artificial Sequence
  Description of Artificial Sequence: Synthetic oligonucleotide
uugcucguuagaacuggac

SEQ ID NO: 1080376 - RNA, 19 nt, Artificial Sequence
  Description of Artificial Sequence: Synthetic oligonucleotide
cucaaggguauuuguugug

SEQ ID NO: 1080377 - RNA, 19 nt, Artificial Sequence
  Description of Artificial Sequence: Synthetic oligonucleotide
cuuaauagauguuuuccau

SEQ ID NO: 1080378 - RNA, 19 nt, Artificial Sequence
  Description of Artificial Sequence: Synthetic oligonucleotide
aagggaaacuuagaaugua

SEQ ID NO: 1080379 - RNA, 19 nt, Artificial Sequence
  Description of Artificial Sequence: Synthetic oligonucleotide
cuaaaagucugggaauuca

SEQ ID NO: 1080380 - RNA, 19 nt, Artificial Sequence
  Description of Artificial Sequence: Synthetic oligonucleotide
uaguuagaucaggaaauuc

SEQ ID NO: 1080381 - RNA, 19 nt, Artificial Sequence
  Description of Artificial Sequence: Synthetic oligonucleotide
aggggucagaccacuauuc

SEQ ID NO: 1080382 - RNA, 19 nt, Artificial Sequence
  Description of Artificial Sequence: Synthetic oligonucleotide
agccuggacggguacuagg

SEQ ID NO: 1080383 - RNA, 19 nt, Artificial Sequence
  Description of Artificial Sequence: Synthetic oligonucleotide
acuauuccugaaauuuucu

SEQ ID NO: 1080384 - RNA, 19 nt, Artificial Sequence
  Description of Artificial Sequence: Synthetic oligonucleotide
acacacacacacucacuca

SEQ ID NO: 1080385 - RNA, 19 nt, Artificial Sequence
  Description of Artificial Sequence: Synthetic oligonucleotide
aggaagaccuaaauauugu

SEQ ID NO: 1080386 - RNA, 19 nt, Artificial Sequence
  Description of Artificial Sequence: Synthetic oligonucleotide
aaaccucaggcuggcuagg

SEQ ID NO: 1080387 - RNA, 19 nt, Artificial Sequence
  Description of Artificial Sequence: Synthetic oligonucleotide
auuaucaagugacccuguu

SEQ ID NO: 1080388 - RNA, 19 nt, Artificial Sequence
  Description of Artificial Sequence: Synthetic oligonucleotide
agcccuaucaacacucucu

SEQ ID NO: 1080389 - RNA, 19 nt, Artificial Sequence
  Description of Artificial Sequence: Synthetic oligonucleotide
guauacuguaugugugcac

SEQ ID NO: 1080390 - RNA, 19 nt, Artificial Sequence
  Description of Artificial Sequence: Synthetic oligonucleotide
ggaagaacgagucuuggcu

SEQ ID NO: 1080391 - RNA, 19 nt, Artificial Sequence
  Description of Artificial Sequence: Synthetic oligonucleotide
uggauccacgguuggugag

SEQ ID NO: 1080392 - RNA, 19 nt, Artificial Sequence
  Description of Artificial Sequence: Synthetic oligonucleotide
uccacucuauugacuggca

SEQ ID NO: 1080393 - RNA, 19 nt, Artificial Sequence
  Description of Artificial Sequence: Synthetic oligonucleotide
ucucucucacacacacaca

SEQ ID NO: 1080394 - RNA, 19 nt, Artificial Sequence
  Description of Artificial Sequence: Synthetic oligonucleotide
ggugaggacuuccacucag

SEQ ID NO: 1080395 - RNA, 19 nt, Artificial Sequence
  Description of Artificial Sequence: Synthetic oligonucleotide
uagacuucaggaagaccua

SEQ ID NO: 1080396 - RNA, 19 nt, Artificial Sequence
  Description of Artificial Sequence: Synthetic oligonucleotide
augguuacaggagggguca

SEQ ID NO: 1080397 - RNA, 19 nt, Artificial Sequence
  Description of Artificial Sequence: Synthetic oligonucleotide
cacgguuggugagaguagg

SEQ ID NO: 1080398 - RNA, 19 nt, Artificial Sequence
  Description of Artificial Sequence: Synthetic oligonucleotide
gguagaguuggagugacga

SEQ ID NO: 1080399 - RNA, 19 nt, Artificial Sequence
  Description of Artificial Sequence: Synthetic oligonucleotide
cagauagcuaauccaagaa

SEQ ID NO: 1080400 - RNA, 19 nt, Artificial Sequence
  Description of Artificial Sequence: Synthetic oligonucleotide
cugaugucugcugaacaug

SEQ ID NO: 1080401 - RNA, 19 nt, Artificial Sequence
  Description of Artificial Sequence: Synthetic oligonucleotide
gagugacgagaaaucuggg

SEQ ID NO: 1080402 - RNA, 19 nt, Artificial Sequence
  Description of Artificial Sequence: Synthetic oligonucleotide
agcuguugcucuggucucc

SEQ ID NO: 1080403 - RNA, 19 nt, Artificial Sequence
  Description of Artificial Sequence: Synthetic oligonucleotide
gauccacgguuggugagag

SEQ ID NO: 1080404 - RNA, 19 nt, Artificial Sequence
  Description of Artificial Sequence: Synthetic oligonucleotide
gcacaagucauuucuguga

SEQ ID NO: 1080405 - RNA, 19 nt, Artificial Sequence
  Description of Artificial Sequence: Synthetic oligonucleotide
caggacuucuaaccucacc

SEQ ID NO: 1080406 - RNA, 19 nt, Artificial Sequence
  Description of Artificial Sequence: Synthetic oligonucleotide
cauaaauugagagcaccaa

SEQ ID NO: 1080407 - RNA, 19 nt, Artificial Sequence
  Description of Artificial Sequence: Synthetic oligonucleotide
ccaaagagcacgaguaauc

SEQ ID NO: 1080408 - RNA, 19 nt, Artificial Sequence
  Description of Artificial Sequence: Synthetic oligonucleotide
auaguuagaucaggaaauu

SEQ ID NO: 1080409 - RNA, 19 nt, Artificial Sequence
  Description of Artificial Sequence: Synthetic oligonucleotide
gacuucuaaccucaccugu

SEQ ID NO: 1080410 - RNA, 19 nt, Artificial Sequence
  Description of Artificial Sequence: Synthetic oligonucleotide
ccuaugaauacacuuaaua

SEQ ID NO: 1080411 - RNA, 19 nt, Artificial Sequence
  Description of Artificial Sequence: Synthetic oligonucleotide
ccuaaauauuguuuugaca

SEQ ID NO: 1080412 - RNA, 19 nt, Artificial Sequence
  Description of Artificial Sequence: Synthetic oligonucleotide
auagcuaauccaagaaguu

SEQ ID NO: 1080413 - RNA, 19 nt, Artificial Sequence
  Description of Artificial Sequence: Synthetic oligonucleotide
accaaagagcacgaguaau

SEQ ID NO: 1080414 - RNA, 19 nt, Artificial Sequence
  Description of Artificial Sequence: Synthetic oligonucleotide
gguaggcagaaguacccug

SEQ ID NO: 1080415 - RNA, 19 nt, Artificial Sequence
  Description of Artificial Sequence: Synthetic oligonucleotide
gggaacauaguuagaucag

SEQ ID NO: 1080416 - RNA, 19 nt, Artificial Sequence
  Description of Artificial Sequence: Synthetic oligonucleotide
agcacgaguaauccugcuu

SEQ ID NO: 1080417 - RNA, 19 nt, Artificial Sequence
  Description of Artificial Sequence: Synthetic oligonucleotide
ccugaaauuuucugccggc

SEQ ID NO: 1080418 - RNA, 19 nt, Artificial Sequence
  Description of Artificial Sequence: Synthetic oligonucleotide
cagauuuucagaagaccua

SEQ ID NO: 1080419 - RNA, 19 nt, Artificial Sequence
  Description of Artificial Sequence: Synthetic oligonucleotide
gaagggaaacuuagaaugu

SEQ ID NO: 1080420 - RNA, 19 nt, Artificial Sequence
  Description of Artificial Sequence: Synthetic oligonucleotide
aaccucuccagaacacaca

SEQ ID NO: 1080421 - RNA, 19 nt, Artificial Sequence
  Description of Artificial Sequence: Synthetic oligonucleotide
acauguauaggagggcuuu

SEQ ID NO: 1080422 - RNA, 19 nt, Artificial Sequence
  Description of Artificial Sequence: Synthetic oligonucleotide
ucacucacucuugucucca

SEQ ID NO: 1080423 - RNA, 19 nt, Artificial Sequence
  Description of Artificial Sequence: Synthetic oligonucleotide
gaacgagucuuggcuguag

SEQ ID NO: 1080424 - RNA, 19 nt, Artificial Sequence
  Description of Artificial Sequence: Synthetic oligonucleotide
guuaggagggaauggaguu

SEQ ID NO: 1080425 - RNA, 19 nt, Artificial Sequence
  Description of Artificial Sequence: Synthetic oligonucleotide
gggaaacuuagaauguaac

SEQ ID NO: 1080426 - RNA, 19 nt, Artificial Sequence
  Description of Artificial Sequence: Synthetic oligonucleotide
gggaagaacgagucuuggc

SEQ ID NO: 1080427 - RNA, 19 nt, Artificial Sequence
  Description of Artificial Sequence: Synthetic oligonucleotide
gguuuauucccucaucggu

SEQ ID NO: 1080428 - RNA, 19 nt, Artificial Sequence
  Description of Artificial Sequence: Synthetic oligonucleotide
agggaaacuuagaauguaa

SEQ ID NO: 1080429 - RNA, 19 nt, Artificial Sequence
  Description of Artificial Sequence: Synthetic oligonucleotide
auuauccuaugggcagguc

SEQ ID NO: 1080430 - RNA, 19 nt, Artificial Sequence
  Description of Artificial Sequence: Synthetic oligonucleotide
uaaccucaccuguccucag

SEQ ID NO: 1080431 - RNA, 19 nt, Artificial Sequence
  Description of Artificial Sequence: Synthetic oligonucleotide
ugagagcaccaaagagcac

SEQ ID NO: 1080432 - RNA, 19 nt, Artificial Sequence
  Description of Artificial Sequence: Synthetic oligonucleotide
auacuguaugugugcacuu

SEQ ID NO: 1080433 - RNA, 19 nt, Artificial Sequence
  Description of Artificial Sequence: Synthetic oligonucleotide
uuacucugaucugcacuga

SEQ ID NO: 1080434 - RNA, 19 nt, Artificial Sequence
  Description of Artificial Sequence: Synthetic oligonucleotide
aucaagugacccuguuuua

SEQ ID NO: 1080435 - RNA, 19 nt, Artificial Sequence
  Description of Artificial Sequence: Synthetic oligonucleotide
cugugacacuucugguaag

SEQ ID NO: 1080436 - RNA, 19 nt, Artificial Sequence
  Description of Artificial Sequence: Synthetic oligonucleotide
uuuaucuagccagccuauu

SEQ ID NO: 1080437 - RNA, 19 nt, Artificial Sequence
  Description of Artificial Sequence: Synthetic oligonucleotide
caucggugaggacuuccac

SEQ ID NO: 1080438 - RNA, 19 nt, Artificial Sequence
  Description of Artificial Sequence: Synthetic oligonucleotide
ucccuggguagaguuggag

SEQ ID NO: 1080439 - RNA, 19 nt, Artificial Sequence
  Description of Artificial Sequence: Synthetic oligonucleotide
cacucacucacucuugucu

SEQ ID NO: 1080440 - RNA, 19 nt, Artificial Sequence
  Description of Artificial Sequence: Synthetic oligonucleotide
cagaccacuauuccugaaa

SEQ ID NO: 1080441 - RNA, 19 nt, Artificial Sequence
  Description of Artificial Sequence: Synthetic oligonucleotide
uggaccgaugauggggcug

SEQ ID NO: 1080442 - RNA, 19 nt, Artificial Sequence
  Description of Artificial Sequence: Synthetic oligonucleotide
gcuaauccaagaaguugag

SEQ ID NO: 1080443 - RNA, 19 nt, Artificial Sequence
  Description of Artificial Sequence: Synthetic oligonucleotide
auguugcucguuagaacug

SEQ ID NO: 1080444 - RNA, 19 nt, Artificial Sequence
  Description of Artificial Sequence: Synthetic oligonucleotide
gucagaccacuauuccuga

SEQ ID NO: 1080445 - RNA, 19 nt, Artificial Sequence
  Description of Artificial Sequence: Synthetic oligonucleotide
acgguuggugagaguaggg

SEQ ID NO: 1080446 - RNA, 19 nt, Artificial Sequence
  Description of Artificial Sequence: Synthetic oligonucleotide
uggcuaggcgguugugcug

SEQ ID NO: 1080447 - RNA, 19 nt, Artificial Sequence
  Description of Artificial Sequence: Synthetic oligonucleotide
gcacccgggagagacauag

SEQ ID NO: 1080448 - RNA, 19 nt, Artificial Sequence
  Description of Artificial Sequence: Synthetic oligonucleotide
gugccgugggagcacccgg

SEQ ID NO: 1080449 - RNA, 19 nt, Artificial Sequence
  Description of Artificial Sequence: Synthetic oligonucleotide
guuagaucaggaaauucuu

SEQ ID NO: 1080450 - RNA, 19 nt, Artificial Sequence
  Description of Artificial Sequence: Synthetic oligonucleotide
aguuggauccacgguuggu

SEQ ID NO: 1080451 - RNA, 19 nt, Artificial Sequence
  Description of Artificial Sequence: Synthetic oligonucleotide
gagaaaucugggccaacau

SEQ ID NO: 1080452 - RNA, 19 nt, Artificial Sequence
  Description of Artificial Sequence: Synthetic oligonucleotide
ggguauuuguuguguucug

SEQ ID NO: 1080453 - RNA, 19 nt, Artificial Sequence
  Description of Artificial Sequence: Synthetic oligonucleotide
cauguauaggagggcuuuc

SEQ ID NO: 1080454 - RNA, 19 nt, Artificial Sequence
  Description of Artificial Sequence: Synthetic oligonucleotide
gguuggugagaguagggua

SEQ ID NO: 1080455 - RNA, 19 nt, Artificial Sequence
  Description of Artificial Sequence: Synthetic oligonucleotide
gccuauucugguaauaucu

SEQ ID NO: 1080456 - RNA, 19 nt, Artificial Sequence
  Description of Artificial Sequence: Synthetic oligonucleotide
cucguuagaacuggaccga

SEQ ID NO: 1080457 - RNA, 19 nt, Artificial Sequence
  Description of Artificial Sequence: Synthetic oligonucleotide
acacacacacacacacuca

SEQ ID NO: 1080458 - RNA, 19 nt, Artificial Sequence
  Description of Artificial Sequence: Synthetic oligonucleotide
cucauucccuaugaauaca

SEQ ID NO: 1080459 - RNA, 19 nt, Artificial Sequence
  Description of Artificial Sequence: Synthetic oligonucleotide
guggccagacacccacacc

SEQ ID NO: 1080460 - RNA, 19 nt, Artificial Sequence
  Description of Artificial Sequence: Synthetic oligonucleotide
cacgaguaauccugcuuga

SEQ ID NO: 1080461 - RNA, 19 nt, Artificial Sequence
  Description of Artificial Sequence: Synthetic oligonucleotide
acgagaaaucugggccaac

SEQ ID NO: 1080462 - RNA, 19 nt, Artificial Sequence
  Description of Artificial Sequence: Synthetic oligonucleotide
caagaaguugaguuuccau

SEQ ID NO: 1080463 - RNA, 19 nt, Artificial Sequence
  Description of Artificial Sequence: Synthetic oligonucleotide
cacccuuauccucacccca

SEQ ID NO: 1080464 - RNA, 19 nt, Artificial Sequence
  Description of Artificial Sequence: Synthetic oligonucleotide
cuagccagccuauucuggu

SEQ ID NO: 1080465 - RNA, 19 nt, Artificial Sequence
  Description of Artificial Sequence: Synthetic oligonucleotide
uggcuggacaaugguuaca

SEQ ID NO: 1080466 - RNA, 19 nt, Artificial Sequence
  Description of Artificial Sequence: Synthetic oligonucleotide
ggaccgaugauggggcugc

SEQ ID NO: 1080467 - RNA, 19 nt, Artificial Sequence
  Description of Artificial Sequence: Synthetic oligonucleotide
gguacuagggguccaaguu

SEQ ID NO: 1080468 - RNA, 19 nt, Artificial Sequence
  Description of Artificial Sequence: Synthetic oligonucleotide
gacgagaaaucugggccaa

SEQ ID NO: 1080469 - RNA, 19 nt, Artificial Sequence
  Description of Artificial Sequence: Synthetic oligonucleotide
ggaaaguuggauccacggu

SEQ ID NO: 1080470 - RNA, 19 nt, Artificial Sequence
  Description of Artificial Sequence: Synthetic oligonucleotide
cugggcaaagagaccaucu

SEQ ID NO: 1080471 - RNA, 19 nt, Artificial Sequence
  Description of Artificial Sequence: Synthetic oligonucleotide
acacacacacacacacaca

SEQ ID NO: 1080472 - RNA, 19 nt, Artificial Sequence
  Description of Artificial Sequence: Synthetic oligonucleotide
acacacacacacacucacu

SEQ ID NO: 1080473 - RNA, 19 nt, Artificial Sequence
  Description of Artificial Sequence: Synthetic oligonucleotide
acacacacacacacacacu

SEQ ID NO: 1080474 - RNA, 19 nt, Artificial Sequence
  Description of Artificial Sequence: Synthetic oligonucleotide
ucguuagaacuggaccgau

SEQ ID NO: 1080475 - RNA, 19 nt, Artificial Sequence
  Description of Artificial Sequence: Synthetic oligonucleotide
gggagcacccgggagagac

SEQ ID NO: 1080476 - RNA, 19 nt, Artificial Sequence
  Description of Artificial Sequence: Synthetic oligonucleotide
uggcccugccacuguggcc

SEQ ID NO: 1080477 - RNA, 19 nt, Artificial Sequence
  Description of Artificial Sequence: Synthetic oligonucleotide
cuccagcacaagucauuuc

SEQ ID NO: 1080478 - RNA, 19 nt, Artificial Sequence
  Description of Artificial Sequence: Synthetic oligonucleotide
gcccuaucaacacucucuc

SEQ ID NO: 1080479 - RNA, 19 nt, Artificial Sequence
  Description of Artificial Sequence: Synthetic oligonucleotide
aucugcccugcagaagaug

SEQ ID NO: 1080480 - RNA, 19 nt, Artificial Sequence
  Description of Artificial Sequence: Synthetic oligonucleotide
gaagccuggacggguacua

SEQ ID NO: 1080481 - RNA, 19 nt, Artificial Sequence
  Description of Artificial Sequence: Synthetic oligonucleotide
acgaguaauccugcuugau

SEQ ID NO: 1080482 - RNA, 19 nt, Artificial Sequence
  Description of Artificial Sequence: Synthetic oligonucleotide
cucuauugacuggcaccag

SEQ ID NO: 1080483 - RNA, 19 nt, Artificial Sequence
  Description of Artificial Sequence: Synthetic oligonucleotide
cagcacaagucauuucugu

SEQ ID NO: 1080484 - RNA, 19 nt, Artificial Sequence
  Description of Artificial Sequence: Synthetic oligonucleotide
cgaguaauccugcuugauc

SEQ ID NO: 1080485 - RNA, 19 nt, Artificial Sequence
  Description of Artificial Sequence: Synthetic oligonucleotide
cagcccuaucaacacucuc

SEQ ID NO: 1080486 - RNA, 19 nt, Artificial Sequence
  Description of Artificial Sequence: Synthetic oligonucleotide
ggagaugccuuuacucuga

SEQ ID NO: 1080487 - RNA, 19 nt, Artificial Sequence
  Description of Artificial Sequence: Synthetic oligonucleotide
guaggagaccagcccuauc

SEQ ID NO: 1080488 - RNA, 19 nt, Artificial Sequence
  Description of Artificial Sequence: Synthetic oligonucleotide
acuuccacucagauagcua

SEQ ID NO: 1080489 - RNA, 19 nt, Artificial Sequence
  Description of Artificial Sequence: Synthetic oligonucleotide
cuggguagaguuggaguga

SEQ ID NO: 1080490 - RNA, 19 nt, Artificial Sequence
  Description of Artificial Sequence: Synthetic oligonucleotide
ccacccuuauccucacccc

SEQ ID NO: 1080491 - RNA, 19 nt, Artificial Sequence
  Description of Artificial Sequence: Synthetic oligonucleotide
cccgggagagacauagcac

SEQ ID NO: 1080492 - RNA, 19 nt, Artificial Sequence
  Description of Artificial Sequence: Synthetic oligonucleotide
cuggcuaggcgguugugcu

SEQ ID NO: 1080493 - RNA, 19 nt, Artificial Sequence
  Description of Artificial Sequence: Synthetic oligonucleotide
gcuggcuaggcgguugugc

SEQ ID NO: 1080494 - RNA, 19 nt, Artificial Sequence
  Description of Artificial Sequence: Synthetic oligonucleotide
caaugguuacaggaggggu

SEQ ID NO: 1080495 - RNA, 19 nt, Artificial Sequence
  Description of Artificial Sequence: Synthetic oligonucleotide
gaggggucagaccacuauu

SEQ ID NO: 1080496 - RNA, 19 nt, Artificial Sequence
  Description of Artificial Sequence: Synthetic oligonucleotide
ggugccgugggagcacccg

SEQ ID NO: 1080497 - RNA, 19 nt, Artificial Sequence
  Description of Artificial Sequence: Synthetic oligonucleotide
aggcuggcuaggcgguugu

SEQ ID NO: 1080498 - RNA, 19 nt, Artificial Sequence
  Description of Artificial Sequence: Synthetic oligonucleotide
guugcucguuagaacugga

SEQ ID NO: 1080499 - RNA, 19 nt, Artificial Sequence
  Description of Artificial Sequence: Synthetic oligonucleotide
ggguuucugacaguguuua

SEQ ID NO: 1080500 - RNA, 19 nt, Artificial Sequence
  Description of Artificial Sequence: Synthetic oligonucleotide
uggugccgugggagcaccc

SEQ ID NO: 1080501 - RNA, 19 nt, Artificial Sequence
  Description of Artificial Sequence: Synthetic oligonucleotide
cuguaggagaccagcccua

SEQ ID NO: 1080502 - RNA, 19 nt, Artificial Sequence
  Description of Artificial Sequence: Synthetic oligonucleotide
ggacauguauaggagggcu

SEQ ID NO: 1080503 - RNA, 19 nt, Artificial Sequence
  Description of Artificial Sequence: Synthetic oligonucleotide
gugacacuucugguaagaa

SEQ ID NO: 1080504 - RNA, 19 nt, Artificial Sequence
  Description of Artificial Sequence: Synthetic oligonucleotide
gcgguugugcugaugucug

SEQ ID NO: 1080505 - RNA, 19 nt, Artificial Sequence
  Description of Artificial Sequence: Synthetic oligonucleotide
guuuaucuagccagccuau

SEQ ID NO: 1080506 - RNA, 19 nt, Artificial Sequence
  Description of Artificial Sequence: Synthetic oligonucleotide
acccuuauccucaccccaa

SEQ ID NO: 1080507 - RNA, 19 nt, Artificial Sequence
  Description of Artificial Sequence: Synthetic oligonucleotide
ggcuaggcgguugugcuga

SEQ ID NO: 1080508 - RNA, 19 nt, Artificial Sequence
  Description of Artificial Sequence: Synthetic oligonucleotide
ccacgguuggugagaguag

SEQ ID NO: 1080509 - RNA, 19 nt, Artificial Sequence
  Description of Artificial Sequence: Synthetic oligonucleotide
aucugaguuuggagaggca

SEQ ID NO: 1080510 - RNA, 19 nt, Artificial Sequence
  Description of Artificial Sequence: Synthetic oligonucleotide
agagaccaucugacuucuc

SEQ ID NO: 1080511 - RNA, 19 nt, Artificial Sequence
  Description of Artificial Sequence: Synthetic oligonucleotide
gacauguauaggagggcuu

SEQ ID NO: 1080512 - RNA, 19 nt, Artificial Sequence
  Description of Artificial Sequence: Synthetic oligonucleotide
cguuagaacuggaccgaug

SEQ ID NO: 1080513 - RNA, 19 nt, Artificial Sequence
  Description of Artificial Sequence: Synthetic oligonucleotide
agaacgagucuuggcugua

SEQ ID NO: 1080514 - RNA, 19 nt, Artificial Sequence
  Description of Artificial Sequence: Synthetic oligonucleotide
gagcacgaguaauccugcu

SEQ ID NO: 1080515 - RNA, 19 nt, Artificial Sequence
  Description of Artificial Sequence: Synthetic oligonucleotide
ccgggagagacauagcacu

SEQ ID NO: 1080516 - RNA, 19 nt, Artificial Sequence
  Description of Artificial Sequence: Synthetic oligonucleotide
ggguagaguuggagugacg

SEQ ID NO: 1080517 - RNA, 19 nt, Artificial Sequence
  Description of Artificial Sequence: Synthetic oligonucleotide
ggacggguacuaggggucc

SEQ ID NO: 1080518 - RNA, 19 nt, Artificial Sequence
  Description of Artificial Sequence: Synthetic oligonucleotide
gcuguugcucuggucuccc

SEQ ID NO: 1080519 - RNA, 19 nt, Artificial Sequence
  Description of Artificial Sequence: Synthetic oligonucleotide
caaggguauuuguuguguu

SEQ ID NO: 1080520 - RNA, 19 nt, Artificial Sequence
  Description of Artificial Sequence: Synthetic oligonucleotide
auccacgguuggugagagu

SEQ ID NO: 1080521 - RNA, 19 nt, Artificial Sequence
  Description of Artificial Sequence: Synthetic oligonucleotide
ggguacuagggguccaagu

SEQ ID NO: 1080522 - RNA, 19 nt, Artificial Sequence
  Description of Artificial Sequence: Synthetic oligonucleotide
acggguacuagggguccaa

SEQ ID NO: 1080523 - RNA, 19 nt, Artificial Sequence
  Description of Artificial Sequence: Synthetic oligonucleotide
gagcacccgggagagacau

SEQ ID NO: 1080524 - RNA, 19 nt, Artificial Sequence
  Description of Artificial Sequence: Synthetic oligonucleotide
ugggcaggucugggguuuc

SEQ ID NO: 1080525 - RNA, 19 nt, Artificial Sequence
  Description of Artificial Sequence: Synthetic oligonucleotide
gcuccucauucccuaugaa

SEQ ID NO: 1080526 - RNA, 19 nt, Artificial Sequence
  Description of Artificial Sequence: Synthetic oligonucleotide
guagccugugugggcaccu

SEQ ID NO: 1080527 - RNA, 19 nt, Artificial Sequence
  Description of Artificial Sequence: Synthetic oligonucleotide
ccuuuccacucuauugacu

SEQ ID NO: 1080528 - RNA, 19 nt, Artificial Sequence
  Description of Artificial Sequence: Synthetic oligonucleotide
ccgugggagcacccgggag

SEQ ID NO: 1080529 - RNA, 19 nt, Artificial Sequence
  Description of Artificial Sequence: Synthetic oligonucleotide
cuggaccgaugauggggcu

SEQ ID NO: 1080530 - RNA, 19 nt, Artificial Sequence
  Description of Artificial Sequence: Synthetic oligonucleotide
ggagggcuuucuauuuggu

SEQ ID NO: 1080531 - RNA, 19 nt, Artificial Sequence
  Description of Artificial Sequence: Synthetic oligonucleotide
caggaggggucagaccacu

SEQ ID NO: 1080532 - RNA, 19 nt, Artificial Sequence
  Description of Artificial Sequence: Synthetic oligonucleotide
ccgggacuggaauuguccu

SEQ ID NO: 1080533 - RNA, 19 nt, Artificial Sequence
  Description of Artificial Sequence: Synthetic oligonucleotide
cgagucuuggcuguagccu

SEQ ID NO: 1080534 - RNA, 19 nt, Artificial Sequence
  Description of Artificial Sequence: Synthetic oligonucleotide
gggguuucugacaguguuu

SEQ ID NO: 1080535 - RNA, 19 nt, Artificial Sequence
  Description of Artificial Sequence: Synthetic oligonucleotide
ggcuggcuaggcgguugug

SEQ ID NO: 1080536 - RNA, 19 nt, Artificial Sequence
  Description of Artificial Sequence: Synthetic oligonucleotide
cccuaugaauacacuuaau

SEQ ID NO: 1080537 - RNA, 19 nt, Artificial Sequence
  Description of Artificial Sequence: Synthetic oligonucleotide
ccagccuauucugguaaua

SEQ ID NO: 1080538 - RNA, 19 nt, Artificial Sequence
  Description of Artificial Sequence: Synthetic oligonucleotide
cccuaucaacacucucucu

SEQ ID NO: 1080539 - RNA, 19 nt, Artificial Sequence
  Description of Artificial Sequence: Synthetic oligonucleotide
cggguacuagggguccaag

SEQ ID NO: 1080540 - RNA, 19 nt, Artificial Sequence
  Description of Artificial Sequence: Synthetic oligonucleotide
cccucaucggugaggacuu

SEQ ID NO: 1080541 - RNA, 19 nt, Artificial Sequence
  Description of Artificial Sequence: Synthetic oligonucleotide
ccccacccuuauccucacc

SEQ ID NO: 1080542 - RNA, 19 nt, Artificial Sequence
  Description of Artificial Sequence: Synthetic oligonucleotide
agcacccgggagagacaua

SEQ ID NO: 1080543 - RNA, 19 nt, Artificial Sequence
  Description of Artificial Sequence: Synthetic oligonucleotide
gaccgaugauggggcugcu

SEQ ID NO: 1080544 - RNA, 19 nt, Artificial Sequence
  Description of Artificial Sequence: Synthetic oligonucleotide
gguccaaguuggagcugcu

SEQ ID NO: 1080545 - RNA, 19 nt, Artificial Sequence
  Description of Artificial Sequence: Synthetic oligonucleotide
uuuaauauguccauggugu

SEQ ID NO: 1080546 - RNA, 19 nt, Artificial Sequence
  Description of Artificial Sequence: Synthetic oligonucleotide
ugaaugguaagcaaggccg

SEQ ID NO: 1080547 - RNA, 19 nt, Artificial Sequence
  Description of Artificial Sequence: Synthetic oligonucleotide
uacaccuucuuuaauaugc

SEQ ID NO: 1080548 - RNA, 19 nt, Artificial Sequence
  Description of Artificial Sequence: Synthetic oligonucleotide
acuacguuucagcagcucc

SEQ ID NO: 1080549 - RNA, 19 nt, Artificial Sequence
  Description of Artificial Sequence: Synthetic oligonucleotide
cucggauucacucaguucc

SEQ ID NO: 1080550 - RNA, 19 nt, Artificial Sequence
  Description of Artificial Sequence: Synthetic oligonucleotide
auugcaagcugugugauac

SEQ ID NO: 1080551 - RNA, 19 nt, Artificial Sequence
  Description of Artificial Sequence: Synthetic oligonucleotide
aguauguguauauugcaag

SEQ ID NO: 1080552 - RNA, 19 nt, Artificial Sequence
  Description of Artificial Sequence: Synthetic oligonucleotide
auacaaagaucuucucucc

SEQ ID NO: 1080553 - RNA, 19 nt, Artificial Sequence
  Description of Artificial Sequence: Synthetic oligonucleotide
guguuuaauauguccaugg

SEQ ID NO: 1080554 - RNA, 19 nt, Artificial Sequence
  Description of Artificial Sequence: Synthetic oligonucleotide
uugagauacucccuggugc

SEQ ID NO: 1080555 - RNA, 19 nt, Artificial Sequence
  Description of Artificial Sequence: Synthetic oligonucleotide
ugcaaguauguguauauug

SEQ ID NO: 1080556 - RNA, 19 nt, Artificial Sequence
  Description of Artificial Sequence: Synthetic oligonucleotide
uugaaugguaagcaaggcc

SEQ ID NO: 1080557 - RNA, 19 nt, Artificial Sequence
  Description of Artificial Sequence: Synthetic oligonucleotide
aaagcuugccaccagcccu

SEQ ID NO: 1080558 - RNA, 19 nt, Artificial Sequence
  Description of Artificial Sequence: Synthetic oligonucleotide
uguguauauugcaagcugu

SEQ ID NO: 1080559 - RNA, 19 nt, Artificial Sequence
  Description of Artificial Sequence: Synthetic oligonucleotide
guuuaauauguccauggug

SEQ ID NO: 1080560 - RNA, 19 nt, Artificial Sequence
  Description of Artificial Sequence: Synthetic oligonucleotide
aagugacucagcaaagugg

SEQ ID NO: 1080561 - RNA, 19 nt, Artificial Sequence
  Description of Artificial Sequence: Synthetic oligonucleotide
agcaaggccguguagacag

SEQ ID NO: 1080562 - RNA, 19 nt, Artificial Sequence
  Description of Artificial Sequence: Synthetic oligonucleotide
agagacuugccuuucagga

SEQ ID NO: 1080563 - RNA, 19 nt, Artificial Sequence
  Description of Artificial Sequence: Synthetic oligonucleotide
cagagaaucuuccagcacc

SEQ ID NO: 1080564 - RNA, 19 nt, Artificial Sequence
  Description of Artificial Sequence: Synthetic oligonucleotide
accagaucugcucucaauc

SEQ ID NO: 1080565 - RNA, 19 nt, Artificial Sequence
  Description of Artificial Sequence: Synthetic oligonucleotide
guauauugcaagcugugug

SEQ ID NO: 1080566 - RNA, 19 nt, Artificial Sequence
  Description of Artificial Sequence: Synthetic oligonucleotide
cagauggacccaaauaggg

SEQ ID NO: 1080567 - RNA, 19 nt, Artificial Sequence
  Description of Artificial Sequence: Synthetic oligonucleotide
agucugagaagcgugcucc

SEQ ID NO: 1080568 - RNA, 19 nt, Artificial Sequence
  Description of Artificial Sequence: Synthetic oligonucleotide
uccccaaugggcucuaggg

SEQ ID NO: 1080569 - RNA, 19 nt, Artificial Sequence
  Description of Artificial Sequence: Synthetic oligonucleotide
uccuguguuuaauaugucc

SEQ ID NO: 1080570 - RNA, 19 nt, Artificial Sequence
  Description of Artificial Sequence: Synthetic oligonucleotide
agugacucagcaaaguggg

SEQ ID NO: 1080571 - RNA, 19 nt, Artificial Sequence
  Description of Artificial Sequence: Synthetic oligonucleotide
ugugauacagacagacaga

SEQ ID NO: 1080572 - RNA, 19 nt, Artificial Sequence
  Description of Artificial Sequence: Synthetic oligonucleotide
uuugagagguacgacacca

SEQ ID NO: 1080573 - RNA, 19 nt, Artificial Sequence
  Description of Artificial Sequence: Synthetic oligonucleotide
ugugucauggcugugcucu

SEQ ID NO: 1080574 - RNA, 19 nt, Artificial Sequence
  Description of Artificial Sequence: Synthetic oligonucleotide
uuuccagggaaugucaccc

SEQ ID NO: 1080575 - RNA, 19 nt, Artificial Sequence
  Description of Artificial Sequence: Synthetic oligonucleotide
guauguguauauugcaagc

SEQ ID NO: 1080576 - RNA, 19 nt, Artificial Sequence
  Description of Artificial Sequence: Synthetic oligonucleotide
agagguacgacaccagucu

SEQ ID NO: 1080577 - RNA, 19 nt, Artificial Sequence
  Description of Artificial Sequence: Synthetic oligonucleotide
auguguauauugcaagcug

SEQ ID NO: 1080578 - RNA, 19 nt, Artificial Sequence
  Description of Artificial Sequence: Synthetic oligonucleotide
cuggacaggaguauacacc

SEQ ID NO: 1080579 - RNA, 19 nt, Artificial Sequence
  Description of Artificial Sequence: Synthetic oligonucleotide
aaagaugcgccugacuuga

SEQ ID NO: 1080580 - RNA, 19 nt, Artificial Sequence
  Description of Artificial Sequence: Synthetic oligonucleotide
gaaugucacccucuccugg

SEQ ID NO: 1080581 - RNA, 19 nt, Artificial Sequence
  Description of Artificial Sequence: Synthetic oligonucleotide
ucaucuuugagagguacga

SEQ ID NO: 1080582 - RNA, 19 nt, Artificial Sequence
  Description of Artificial Sequence: Synthetic oligonucleotide
ugacucagcaaagugggcc

SEQ ID NO: 1080583 - RNA, 19 nt, Artificial Sequence
  Description of Artificial Sequence: Synthetic oligonucleotide
aaugucacccucuccugga

SEQ ID NO: 1080584 - RNA, 19 nt, Artificial Sequence
  Description of Artificial Sequence: Synthetic oligonucleotide
uauguguauauugcaagcu

SEQ ID NO: 1080585 - RNA, 19 nt, Artificial Sequence
  Description of Artificial Sequence: Synthetic oligonucleotide
ucaccaagggacaccugcg

SEQ ID NO: 1080586 - RNA, 19 nt, Artificial Sequence
  Description of Artificial Sequence: Synthetic oligonucleotide
uccucuaagaucugcugca

SEQ ID NO: 1080587 - RNA, 19 nt, Artificial Sequence
  Description of Artificial Sequence: Synthetic oligonucleotide
caguccaagcccaaggccc

SEQ ID NO: 1080588 - RNA, 19 nt, Artificial Sequence
  Description of Artificial Sequence: Synthetic oligonucleotide
agagccagggcgcacuacg

SEQ ID NO: 1080589 - RNA, 19 nt, Artificial Sequence
  Description of Artificial Sequence: Synthetic oligonucleotide
acaccgaggagucugagaa

SEQ ID NO: 1080590 - RNA, 19 nt, Artificial Sequence
  Description of Artificial Sequence: Synthetic oligonucleotide
agauggacccaaauagggc

SEQ ID NO: 1080591 - RNA, 19 nt, Artificial Sequence
  Description of Artificial Sequence: Synthetic oligonucleotide
uguguuuaauauguccaug

SEQ ID NO: 1080592 - RNA, 19 nt, Artificial Sequence
  Description of Artificial Sequence: Synthetic oligonucleotide
agagccacaagugacucag

SEQ ID NO: 1080593 - RNA, 19 nt, Artificial Sequence
  Description of Artificial Sequence: Synthetic oligonucleotide
ugagauacucccuggugcu

SEQ ID NO: 1080594 - RNA, 19 nt, Artificial Sequence
  Description of Artificial Sequence: Synthetic oligonucleotide
ugagaagcgugcucccugg

SEQ ID NO: 1080595 - RNA, 19 nt, Artificial Sequence
  Description of Artificial Sequence: Synthetic oligonucleotide
uacucccuggugcuuaucc

SEQ ID NO: 1080596 - RNA, 19 nt, Artificial Sequence
  Description of Artificial Sequence: Synthetic oligonucleotide
ucagacagugacaccguca

SEQ ID NO: 1080597 - RNA, 19 nt, Artificial Sequence
  Description of Artificial Sequence: Synthetic oligonucleotide
cacgcaaggagaucucugg

SEQ ID NO: 1080598 - RNA, 19 nt, Artificial Sequence
  Description of Artificial Sequence: Synthetic oligonucleotide
aagcgugcucccuggcacc

SEQ ID NO: 1080599 - RNA, 19 nt, Artificial Sequence
  Description of Artificial Sequence: Synthetic oligonucleotide
uccuccguggcuuucucag

SEQ ID NO: 1080600 - RNA, 19 nt, Artificial Sequence
  Description of Artificial Sequence: Synthetic oligonucleotide
ucuguacccuuucaugaac

SEQ ID NO: 1080601 - RNA, 19 nt, Artificial Sequence
  Description of Artificial Sequence: Synthetic oligonucleotide
acagguguggccuagucuu

SEQ ID NO: 1080602 - RNA, 19 nt, Artificial Sequence
  Description of Artificial Sequence: Synthetic oligonucleotide
uccaaagcuugccaccagc

SEQ ID NO: 1080603 - RNA, 19 nt, Artificial Sequence
  Description of Artificial Sequence: Synthetic oligonucleotide
guauacaccuucuuuaaua

SEQ ID NO: 1080604 - RNA, 19 nt, Artificial Sequence
  Description of Artificial Sequence: Synthetic oligonucleotide
ucuuuaauaugcucucuuu

SEQ ID NO: 1080605 - RNA, 19 nt, Artificial Sequence
  Description of Artificial Sequence: Synthetic oligonucleotide
acagguacuggaccgcguc

SEQ ID NO: 1080606 - RNA, 19 nt, Artificial Sequence
  Description of Artificial Sequence: Synthetic oligonucleotide
gacaccugcguccuucugc

SEQ ID NO: 1080607 - RNA, 19 nt, Artificial Sequence
  Description of Artificial Sequence: Synthetic oligonucleotide
gauggacccaaauagggcu

SEQ ID NO: 1080608 - RNA, 19 nt, Artificial Sequence
  Description of Artificial Sequence: Synthetic oligonucleotide
caagugacucagcaaagug

SEQ ID NO: 1080609 - RNA, 19 nt, Artificial Sequence
  Description of Artificial Sequence: Synthetic oligonucleotide
uggucagugucucggauuc

SEQ ID NO: 1080610 - RNA, 19 nt, Artificial Sequence
  Description of Artificial Sequence: Synthetic oligonucleotide
ugagagguacgacaccagu

SEQ ID NO: 1080611 - RNA, 19 nt, Artificial Sequence
  Description of Artificial Sequence: Synthetic oligonucleotide
uguauauugcaagcugugu

SEQ ID NO: 1080612 - RNA, 19 nt, Artificial Sequence
  Description of Artificial Sequence: Synthetic oligonucleotide
uuaauauguccaugguguc

SEQ ID NO: 1080613 - RNA, 19 nt, Artificial Sequence
  Description of Artificial Sequence: Synthetic oligonucleotide
agcagcucgggccaccuuc

SEQ ID NO: 1080614 - RNA, 19 nt, Artificial Sequence
  Description of Artificial Sequence: Synthetic oligonucleotide
agcaccgcacuguucugcc

SEQ ID NO: 1080615 - RNA, 19 nt, Artificial Sequence
  Description of Artificial Sequence: Synthetic oligonucleotide
ucuagggacagguguggcc

SEQ ID NO: 1080616 - RNA, 19 nt, Artificial Sequence
  Description of Artificial Sequence: Synthetic oligonucleotide
ugcucggccauuacacucc

SEQ ID NO: 1080617 - RNA, 19 nt, Artificial Sequence
  Description of Artificial Sequence: Synthetic oligonucleotide
ugcaagcugugugauacag

SEQ ID NO: 1080618 - RNA, 19 nt, Artificial Sequence
  Description of Artificial Sequence: Synthetic oligonucleotide
uugccuuucaggauccauc

SEQ ID NO: 1080619 - RNA, 19 nt, Artificial Sequence
  Description of Artificial Sequence: Synthetic oligonucleotide
cuugagauacucccuggug

SEQ ID NO: 1080620 - RNA, 19 nt, Artificial Sequence
  Description of Artificial Sequence: Synthetic oligonucleotide
cuuuugcagaaguucccgc

SEQ ID NO: 1080621 - RNA, 19 nt, Artificial Sequence
  Description of Artificial Sequence: Synthetic oligonucleotide
agagaaucuuccagcaccg

SEQ ID NO: 1080622 - RNA, 19 nt, Artificial Sequence
  Description of Artificial Sequence: Synthetic oligonucleotide
caauauguguggcacugug

SEQ ID NO: 1080623 - RNA, 19 nt, Artificial Sequence
  Description of Artificial Sequence: Synthetic oligonucleotide
gaagcgugcucccuggcac

SEQ ID NO: 1080624 - RNA, 19 nt, Artificial Sequence
  Description of Artificial Sequence: Synthetic oligonucleotide
cucucuuucuuccggcggg

SEQ ID NO: 1080625 - RNA, 19 nt, Artificial Sequence
  Description of Artificial Sequence: Synthetic oligonucleotide
agugucucggauucacuca

SEQ ID NO: 1080626 - RNA, 19 nt, Artificial Sequence
  Description of Artificial Sequence: Synthetic oligonucleotide
ugugauaggcaugggugcc

SEQ ID NO: 1080627 - RNA, 19 nt, Artificial Sequence
  Description of Artificial Sequence: Synthetic oligonucleotide
aggaguauacaccuucuuu

SEQ ID NO: 1080628 - RNA, 19 nt, Artificial Sequence
  Description of Artificial Sequence: Synthetic oligonucleotide
uuccccaaugggcucuagg

SEQ ID NO: 1080629 - RNA, 19 nt, Artificial Sequence
  Description of Artificial Sequence: Synthetic oligonucleotide
cuugaaugguaagcaaggc

SEQ ID NO: 1080630 - RNA, 19 nt, Artificial Sequence
  Description of Artificial Sequence: Synthetic oligonucleotide
ugcucucuuucuuccggcg

SEQ ID NO: 1080631 - RNA, 19 nt, Artificial Sequence
  Description of Artificial Sequence: Synthetic oligonucleotide
cuggaagccucaccaaggg

SEQ ID NO: 1080632 - RNA, 19 nt, Artificial Sequence
  Description of Artificial Sequence: Synthetic oligonucleotide
cuuauccuggggucagucc

SEQ ID NO: 1080633 - RNA, 19 nt, Artificial Sequence
  Description of Artificial Sequence: Synthetic oligonucleotide
agugcuuuucacugacugu

SEQ ID NO: 1080634 - RNA, 19 nt, Artificial Sequence
  Description of Artificial Sequence: Synthetic oligonucleotide
gcaaguauguguauauugc

SEQ ID NO: 1080635 - RNA, 19 nt, Artificial Sequence
  Description of Artificial Sequence: Synthetic oligonucleotide
uguagccgcugccucacgc

SEQ ID NO: 1080636 - RNA, 19 nt, Artificial Sequence
  Description of Artificial Sequence: Synthetic oligonucleotide
agagccaauauguguggca

SEQ ID NO: 1080637 - RNA, 19 nt, Artificial Sequence
  Description of Artificial Sequence: Synthetic oligonucleotide
accaagggacaccugcguc

SEQ ID NO: 1080638 - RNA, 19 nt, Artificial Sequence
  Description of Artificial Sequence: Synthetic oligonucleotide
ugcgccugacuugagauac

SEQ ID NO: 1080639 - RNA, 19 nt, Artificial Sequence
  Description of Artificial Sequence: Synthetic oligonucleotide
aaugguaagcaaggccgug

SEQ ID NO: 1080640 - RNA, 19 nt, Artificial Sequence
  Description of Artificial Sequence: Synthetic oligonucleotide
uacuggaccgcguccuccg

SEQ ID NO: 1080641 - RNA, 19 nt, Artificial Sequence
  Description of Artificial Sequence: Synthetic oligonucleotide
agacagauggacccaaaua

SEQ ID NO: 1080642 - RNA, 19 nt, Artificial Sequence
  Description of Artificial Sequence: Synthetic oligonucleotide
uucacugacuguguccagc

SEQ ID NO: 1080643 - RNA, 19 nt, Artificial Sequence
  Description of Artificial Sequence: Synthetic oligonucleotide
acuugagauacucccuggu

SEQ ID NO: 1080644 - RNA, 19 nt, Artificial Sequence
  Description of Artificial Sequence: Synthetic oligonucleotide
uguacccuuucaugaacac

SEQ ID NO: 1080645 - RNA, 19 nt, Artificial Sequence
  Description of Artificial Sequence: Synthetic oligonucleotide
gucaguccaagcccaaggc

SEQ ID NO: 1080646 - RNA, 19 nt, Artificial Sequence
  Description of Artificial Sequence: Synthetic oligonucleotide
agccacaagugacucagca

SEQ ID NO: 1080647 - RNA, 19 nt, Artificial Sequence
  Description of Artificial Sequence: Synthetic oligonucleotide
ccugugauaggcaugggug

SEQ ID NO: 1080648 - RNA, 19 nt, Artificial Sequence
  Description of Artificial Sequence: Synthetic oligonucleotide
gugucucggauucacucag

SEQ ID NO: 1080649 - RNA, 19 nt, Artificial Sequence
  Description of Artificial Sequence: Synthetic oligonucleotide
uauguguggcacugugucu

SEQ ID NO: 1080650 - RNA, 19 nt, Artificial Sequence
  Description of Artificial Sequence: Synthetic oligonucleotide
ucugcgcacaggcugacuu

SEQ ID NO: 1080651 - RNA, 19 nt, Artificial Sequence
  Description of Artificial Sequence: Synthetic oligonucleotide
aagcaccacaccgaggagu

SEQ ID NO: 1080652 - RNA, 19 nt, Artificial Sequence
  Description of Artificial Sequence: Synthetic oligonucleotide
ugcgcacaggcugacuugg

SEQ ID NO: 1080653 - RNA, 19 nt, Artificial Sequence
  Description of Artificial Sequence: Synthetic oligonucleotide
gagccaauauguguggcac

SEQ ID NO: 1080654 - RNA, 19 nt, Artificial Sequence
  Description of Artificial Sequence: Synthetic oligonucleotide
guaagcaaggccguguaga

SEQ ID NO: 1080655 - RNA, 19 nt, Artificial Sequence
  Description of Artificial Sequence: Synthetic oligonucleotide
cagcagcaagucuugaaug

SEQ ID NO: 1080656 - RNA, 19 nt, Artificial Sequence
  Description of Artificial Sequence: Synthetic oligonucleotide
aguauacaccuucuuuaau

SEQ ID NO: 1080657 - RNA, 19 nt, Artificial Sequence
  Description of Artificial Sequence: Synthetic oligonucleotide
cugagugcuuuucacugac

SEQ ID NO: 1080658 - RNA, 19 nt, Artificial Sequence
  Description of Artificial Sequence: Synthetic oligonucleotide
ucccauucucugcugugug

SEQ ID NO: 1080659 - RNA, 19 nt, Artificial Sequence
  Description of Artificial Sequence: Synthetic oligonucleotide
cagugucucggauucacuc

SEQ ID NO: 1080660 - RNA, 19 nt, Artificial Sequence
  Description of Artificial Sequence: Synthetic oligonucleotide
gugccaguuccccaauggg

SEQ ID NO: 1080661 - RNA, 19 nt, Artificial Sequence
  Description of Artificial Sequence: Synthetic oligonucleotide
gucaucuuugagagguacg

SEQ ID NO: 1080662 - RNA, 19 nt, Artificial Sequence
  Description of Artificial Sequence: Synthetic oligonucleotide
auccuugacucaccagauc

SEQ ID NO: 1080663 - RNA, 19 nt, Artificial Sequence
  Description of Artificial Sequence: Synthetic oligonucleotide
cuggaagcaccacaccgag

SEQ ID NO: 1080664 - RNA, 19 nt, Artificial Sequence
  Description of Artificial Sequence: Synthetic oligonucleotide
uggaagcaccacaccgagg

SEQ ID NO: 1080665 - RNA, 19 nt, Artificial Sequence
  Description of Artificial Sequence: Synthetic oligonucleotide
gggguuucgccccagcccg

SEQ ID NO: 1080666 - RNA, 19 nt, Artificial Sequence
  Description of Artificial Sequence: Synthetic oligonucleotide
aauccuugacucaccagau

SEQ ID NO: 1080667 - RNA, 19 nt, Artificial Sequence
  Description of Artificial Sequence: Synthetic oligonucleotide
gaggagucugagaagcgug

SEQ ID NO: 1080668 - RNA, 19 nt, Artificial Sequence
  Description of Artificial Sequence: Synthetic oligonucleotide
uuccggcgggcccagagca

SEQ ID NO: 1080669 - RNA, 19 nt, Artificial Sequence
  Description of Artificial Sequence: Synthetic oligonucleotide
acccggaggucaucuaggg

SEQ ID NO: 1080670 - RNA, 19 nt, Artificial Sequence
  Description of Artificial Sequence: Synthetic oligonucleotide
aacacgcaaggagaucucu

SEQ ID NO: 1080671 - RNA, 19 nt, Artificial Sequence
  Description of Artificial Sequence: Synthetic oligonucleotide
caaagugggccuccugggc

SEQ ID NO: 1080672 - RNA, 19 nt, Artificial Sequence
  Description of Artificial Sequence: Synthetic oligonucleotide
ggcuuucucagacagugac

SEQ ID NO: 1080673 - RNA, 19 nt, Artificial Sequence
  Description of Artificial Sequence: Synthetic oligonucleotide
guguauauugcaagcugug

SEQ ID NO: 1080674 - RNA, 19 nt, Artificial Sequence
  Description of Artificial Sequence: Synthetic oligonucleotide
ggagagccaauaugugugg

SEQ ID NO: 1080675 - RNA, 19 nt, Artificial Sequence
  Description of Artificial Sequence: Synthetic oligonucleotide
ugcagugcgagccgcugac

SEQ ID NO: 1080676 - RNA, 19 nt, Artificial Sequence
  Description of Artificial Sequence: Synthetic oligonucleotide
aagugcucccaaugccuca

SEQ ID NO: 1080677 - RNA, 19 nt, Artificial Sequence
  Description of Artificial Sequence: Synthetic oligonucleotide
ucucggauucacucaguuc

SEQ ID NO: 1080678 - RNA, 19 nt, Artificial Sequence
  Description of Artificial Sequence: Synthetic oligonucleotide
uggaggaaagaugcgccug

SEQ ID NO: 1080679 - RNA, 19 nt, Artificial Sequence
  Description of Artificial Sequence: Synthetic oligonucleotide
agcccaaggcccugcuggc

SEQ ID NO: 1080680 - RNA, 19 nt, Artificial Sequence
  Description of Artificial Sequence: Synthetic oligonucleotide
ggguccaucagccauccac

SEQ ID NO: 1080681 - RNA, 19 nt, Artificial Sequence
  Description of Artificial Sequence: Synthetic oligonucleotide
agcaccacaccgaggaguc

SEQ ID NO: 1080682 - RNA, 19 nt, Artificial Sequence
  Description of Artificial Sequence: Synthetic oligonucleotide
cagugacaccgucaggacc

SEQ ID NO: 1080683 - RNA, 19 nt, Artificial Sequence
  Description of Artificial Sequence: Synthetic oligonucleotide
uccugggaggaacacgcaa

SEQ ID NO: 1080684 - RNA, 19 nt, Artificial Sequence
  Description of Artificial Sequence: Synthetic oligonucleotide
ugugcucggccauuacacu

SEQ ID NO: 1080685 - RNA, 19 nt, Artificial Sequence
  Description of Artificial Sequence: Synthetic oligonucleotide
ucugccgcuccucucucac

SEQ ID NO: 1080686 - RNA, 19 nt, Artificial Sequence
  Description of Artificial Sequence: Synthetic oligonucleotide
ucagucccuggcugcacag

SEQ ID NO: 1080687 - RNA, 19 nt, Artificial Sequence
  Description of Artificial Sequence: Synthetic oligonucleotide
cagcauggcagagacuugc

SEQ ID NO: 1080688 - RNA, 19 nt, Artificial Sequence
  Description of Artificial Sequence: Synthetic oligonucleotide
gagagguacgacaccaguc

SEQ ID NO: 1080689 - RNA, 19 nt, Artificial Sequence
  Description of Artificial Sequence: Synthetic oligonucleotide
uuacacuccuccacuggua

SEQ ID NO: 1080690 - RNA, 19 nt, Artificial Sequence
  Description of Artificial Sequence: Synthetic oligonucleotide
cucccuggugcuuauccug

SEQ ID NO: 1080691 - RNA, 19 nt, Artificial Sequence
  Description of Artificial Sequence: Synthetic oligonucleotide
agaagcgugcucccuggca

SEQ ID NO: 1080692 - RNA, 19 nt, Artificial Sequence
  Description of Artificial Sequence: Synthetic oligonucleotide
ugugucuaugcugcaagua

SEQ ID NO: 1080693 - RNA, 19 nt, Artificial Sequence
  Description of Artificial Sequence: Synthetic oligonucleotide
ugcgaagccgcuggaagca

SEQ ID NO: 1080694 - RNA, 19 nt, Artificial Sequence
  Description of Artificial Sequence: Synthetic oligonucleotide
cacuggagagccaauaugu

SEQ ID NO: 1080695 - RNA, 19 nt, Artificial Sequence
  Description of Artificial Sequence: Synthetic oligonucleotide
gcaaagugggccuccuggg

SEQ ID NO: 1080696 - RNA, 19 nt, Artificial Sequence
  Description of Artificial Sequence: Synthetic oligonucleotide
gacccggaggucaucuagg

SEQ ID NO: 1080697 - RNA, 19 nt, Artificial Sequence
  Description of Artificial Sequence: Synthetic oligonucleotide
ugaacaccaagugcuccca

SEQ ID NO: 1080698 - RNA, 19 nt, Artificial Sequence
  Description of Artificial Sequence: Synthetic oligonucleotide
caccauugucaucuuugag

SEQ ID NO: 1080699 - RNA, 19 nt, Artificial Sequence
  Description of Artificial Sequence: Synthetic oligonucleotide
uccuugugcuuuugcagaa

SEQ ID NO: 1080700 - RNA, 19 nt, Artificial Sequence
  Description of Artificial Sequence: Synthetic oligonucleotide
gcuuuugcagaaguucccg

SEQ ID NO: 1080701 - RNA, 19 nt, Artificial Sequence
  Description of Artificial Sequence: Synthetic oligonucleotide
agaugcgccugacuugaga

SEQ ID NO: 1080702 - RNA, 19 nt, Artificial Sequence
  Description of Artificial Sequence: Synthetic oligonucleotide
uguggccuagucuuccuuu

SEQ ID NO: 1080703 - RNA, 19 nt, Artificial Sequence
  Description of Artificial Sequence: Synthetic oligonucleotide
caccgcacuguucugccgc

SEQ ID NO: 1080704 - RNA, 19 nt, Artificial Sequence
  Description of Artificial Sequence: Synthetic oligonucleotide
uggaccgcguccuccgcag

SEQ ID NO: 1080705 - RNA, 19 nt, Artificial Sequence
  Description of Artificial Sequence: Synthetic oligonucleotide
cugguaaauccugcuguag

SEQ ID NO: 1080706 - RNA, 19 nt, Artificial Sequence
  Description of Artificial Sequence: Synthetic oligonucleotide
uucgccccagcccgggucc

SEQ ID NO: 1080707 - RNA, 19 nt, Artificial Sequence
  Description of Artificial Sequence: Synthetic oligonucleotide
gaugcgccugacuugagau

SEQ ID NO: 1080708 - RNA, 19 nt, Artificial Sequence
  Description of Artificial Sequence: Synthetic oligonucleotide
uguggucugagugcuuuuc

SEQ ID NO: 1080709 - RNA, 19 nt, Artificial Sequence
  Description of Artificial Sequence: Synthetic oligonucleotide
uauugcaagcugugugaua

SEQ ID NO: 1080710 - RNA, 19 nt, Artificial Sequence
  Description of Artificial Sequence: Synthetic oligonucleotide
ccaagggacaccugcgucc

SEQ ID NO: 1080711 - RNA, 19 nt, Artificial Sequence
  Description of Artificial Sequence: Synthetic oligonucleotide
gacccaaauagggcuggag

SEQ ID NO: 1080712 - RNA, 19 nt, Artificial Sequence
  Description of Artificial Sequence: Synthetic oligonucleotide
guagccgcugccucacgcc

SEQ ID NO: 1080713 - RNA, 19 nt, Artificial Sequence
  Description of Artificial Sequence: Synthetic oligonucleotide
agugcucccaaugccucag

SEQ ID NO: 1080714 - RNA, 19 nt, Artificial Sequence
  Description of Artificial Sequence: Synthetic oligonucleotide
cuguacccuuucaugaaca

SEQ ID NO: 1080715 - RNA, 19 nt, Artificial Sequence
  Description of Artificial Sequence: Synthetic oligonucleotide
uauccuggggucaguccaa

SEQ ID NO: 1080716 - RNA, 19 nt, Artificial Sequence
  Description of Artificial Sequence: Synthetic oligonucleotide
acuggaccgcguccuccgc

SEQ ID NO: 1080717 - RNA, 19 nt, Artificial Sequence
  Description of Artificial Sequence: Synthetic oligonucleotide
caugcuuuccagagaaucu

SEQ ID NO: 1080718 - RNA, 19 nt, Artificial Sequence
  Description of Artificial Sequence: Synthetic oligonucleotide
gagagccaauauguguggc

SEQ ID NO: 1080719 - RNA, 19 nt, Artificial Sequence
  Description of Artificial Sequence: Synthetic oligonucleotide
cccaaugggcucuagggac

SEQ ID NO: 1080720 - RNA, 19 nt, Artificial Sequence
  Description of Artificial Sequence: Synthetic oligonucleotide
cgcacuacguuucagcagc

SEQ ID NO: 1080721 - RNA, 19 nt, Artificial Sequence
  Description of Artificial Sequence: Synthetic oligonucleotide
gacuugccuuucaggaucc

SEQ ID NO: 1080722 - RNA, 19 nt, Artificial Sequence
  Description of Artificial Sequence: Synthetic oligonucleotide
augggcucuagggacaggu

SEQ ID NO: 1080723 - RNA, 19 nt, Artificial Sequence
  Description of Artificial Sequence: Synthetic oligonucleotide
ccaaagcuugccaccagcc

SEQ ID NO: 1080724 - RNA, 19 nt, Artificial Sequence
  Description of Artificial Sequence: Synthetic oligonucleotide
ugcagaaguucccgccuuc

SEQ ID NO: 1080725 - RNA, 19 nt, Artificial Sequence
  Description of Artificial Sequence: Synthetic oligonucleotide
acuuggucagugucucgga

SEQ ID NO: 1080726 - RNA, 19 nt, Artificial Sequence
  Description of Artificial Sequence: Synthetic oligonucleotide
agcaagucuugaaugguaa

SEQ ID NO: 1080727 - RNA, 19 nt, Artificial Sequence
  Description of Artificial Sequence: Synthetic oligonucleotide
auauugcaagcugugugau

SEQ ID NO: 1080728 - RNA, 19 nt, Artificial Sequence
  Description of Artificial Sequence: Synthetic oligonucleotide
gguacgacaccagucucag

SEQ ID NO: 1080729 - RNA, 19 nt, Artificial Sequence
  Description of Artificial Sequence: Synthetic oligonucleotide
cuccaauccuugacucacc

SEQ ID NO: 1080730 - RNA, 19 nt, Artificial Sequence
  Description of Artificial Sequence: Synthetic oligonucleotide
agccucaccaagggacacc

SEQ ID NO: 1080731 - RNA, 19 nt, Artificial Sequence
  Description of Artificial Sequence: Synthetic oligonucleotide
augguaagcaaggccgugu

SEQ ID NO: 1080732 - RNA, 19 nt, Artificial Sequence
  Description of Artificial Sequence: Synthetic oligonucleotide
ggaggaacacgcaaggaga

SEQ ID NO: 1080733 - RNA, 19 nt, Artificial Sequence
  Description of Artificial Sequence: Synthetic oligonucleotide
aggaacacgcaaggagauc

SEQ ID NO: 1080734 - RNA, 19 nt, Artificial Sequence
  Description of Artificial Sequence: Synthetic oligonucleotide
gagguacgacaccagucuc

SEQ ID NO: 1080735 - RNA, 19 nt, Artificial Sequence
  Description of Artificial Sequence: Synthetic oligonucleotide
gucagugucucggauucac

SEQ ID NO: 1080736 - RNA, 19 nt, Artificial Sequence
  Description of Artificial Sequence: Synthetic oligonucleotide
caucuuugagagguacgac

SEQ ID NO: 1080737 - RNA, 19 nt, Artificial Sequence
  Description of Artificial Sequence: Synthetic oligonucleotide
ugcugcaaguauguguaua

SEQ ID NO: 1080738 - RNA, 19 nt, Artificial Sequence
  Description of Artificial Sequence: Synthetic oligonucleotide
gugcucggccauuacacuc

SEQ ID NO: 1080739 - RNA, 19 nt, Artificial Sequence
  Description of Artificial Sequence: Synthetic oligonucleotide
cagguacuggaccgcgucc

SEQ ID NO: 1080740 - RNA, 19 nt, Artificial Sequence
  Description of Artificial Sequence: Synthetic oligonucleotide
ugugcagugcgagccgcug

SEQ ID NO: 1080741 - RNA, 19 nt, Artificial Sequence
  Description of Artificial Sequence: Synthetic oligonucleotide
ccuagucuuccuuuuccag

SEQ ID NO: 1080742 - RNA, 19 nt, Artificial Sequence
  Description of Artificial Sequence: Synthetic oligonucleotide
accgcguccuccgcagugc

SEQ ID NO: 1080743 - RNA, 19 nt, Artificial Sequence
  Description of Artificial Sequence: Synthetic oligonucleotide
gguaagcaaggccguguag

SEQ ID NO: 1080744 - RNA, 19 nt, Artificial Sequence
  Description of Artificial Sequence: Synthetic oligonucleotide
ucgggccaccuucuggaac

SEQ ID NO: 1080745 - RNA, 19 nt, Artificial Sequence
  Description of Artificial Sequence: Synthetic oligonucleotide
gcucucuuucuuccggcgg

SEQ ID NO: 1080746 - RNA, 19 nt, Artificial Sequence
  Description of Artificial Sequence: Synthetic oligonucleotide
ugcacagacuggccauggu

SEQ ID NO: 1080747 - RNA, 19 nt, Artificial Sequence
  Description of Artificial Sequence: Synthetic oligonucleotide
ugguguccaccccugugau

SEQ ID NO: 1080748 - RNA, 19 nt, Artificial Sequence
  Description of Artificial Sequence: Synthetic oligonucleotide
acaccuucuuuaauaugcu

SEQ ID NO: 1080749 - RNA, 19 nt, Artificial Sequence
  Description of Artificial Sequence: Synthetic oligonucleotide
ugucucggauucacucagu

SEQ ID NO: 1080750 - RNA, 19 nt, Artificial Sequence
  Description of Artificial Sequence: Synthetic oligonucleotide
gcuggaggaaagaugcgcc

SEQ ID NO: 1080751 - RNA, 19 nt, Artificial Sequence
  Description of Artificial Sequence: Synthetic oligonucleotide
ggacccggaggucaucuag

SEQ ID NO: 1080752 - RNA, 19 nt, Artificial Sequence
  Description of Artificial Sequence: Synthetic oligonucleotide
gucugagaagcgugcuccc

SEQ ID NO: 1080753 - RNA, 19 nt, Artificial Sequence
  Description of Artificial Sequence: Synthetic oligonucleotide
ugguccagacgcuccugca

SEQ ID NO: 1080754 - RNA, 19 nt, Artificial Sequence
  Description of Artificial Sequence: Synthetic oligonucleotide
gguccagacgcuccugcag

SEQ ID NO: 1080755 - RNA, 19 nt, Artificial Sequence
  Description of Artificial Sequence: Synthetic oligonucleotide
acaccagucucagucccug

SEQ ID NO: 1080756 - RNA, 19 nt, Artificial Sequence
  Description of Artificial Sequence: Synthetic oligonucleotide
uguccaccccugugauagg

SEQ ID NO: 1080757 - RNA, 19 nt, Artificial Sequence
  Description of Artificial Sequence: Synthetic oligonucleotide
uugcaagcugugugauaca

SEQ ID NO: 1080758 - RNA, 19 nt, Artificial Sequence
  Description of Artificial Sequence: Synthetic oligonucleotide
agccucuguacccuuucau

SEQ ID NO: 1080759 - RNA, 19 nt, Artificial Sequence
  Description of Artificial Sequence: Synthetic oligonucleotide
uccgcagugcuggaagccu

SEQ ID NO: 1080760 - RNA, 19 nt, Artificial Sequence
  Description of Artificial Sequence: Synthetic oligonucleotide
ggcuggaggaaagaugcgc

SEQ ID NO: 1080761 - RNA, 19 nt, Artificial Sequence
  Description of Artificial Sequence: Synthetic oligonucleotide
ugcucccuggcaccauugu

SEQ ID NO: 1080762 - RNA, 19 nt, Artificial Sequence
  Description of Artificial Sequence: Synthetic oligonucleotide
ccacaagugacucagcaaa

SEQ ID NO: 1080763 - RNA, 19 nt, Artificial Sequence
  Description of Artificial Sequence: Synthetic oligonucleotide
uggccuagucuuccuuuuc

SEQ ID NO: 1080764 - RNA, 19 nt, Artificial Sequence
  Description of Artificial Sequence: Synthetic oligonucleotide
caccacaccgaggagucug

SEQ ID NO: 1080765 - RNA, 19 nt, Artificial Sequence
  Description of Artificial Sequence: Synthetic oligonucleotide
ugggaggaacacgcaagga

SEQ ID NO: 1080766 - RNA, 19 nt, Artificial Sequence
  Description of Artificial Sequence: Synthetic oligonucleotide
gagaagcgugcucccuggc

SEQ ID NO: 1080767 - RNA, 19 nt, Artificial Sequence
  Description of Artificial Sequence: Synthetic oligonucleotide
cucagcaaagugggccucc

SEQ ID NO: 1080768 - RNA, 19 nt, Artificial Sequence
  Description of Artificial Sequence: Synthetic oligonucleotide
gaccgcguccuccgcagug

SEQ ID NO: 1080769 - RNA, 19 nt, Artificial Sequence
  Description of Artificial Sequence: Synthetic oligonucleotide
ccuccacugguacagguac

SEQ ID NO: 1080770 - RNA, 19 nt, Artificial Sequence
  Description of Artificial Sequence: Synthetic oligonucleotide
guggucugagugcuuuuca

SEQ ID NO: 1080771 - RNA, 19 nt, Artificial Sequence
  Description of Artificial Sequence: Synthetic oligonucleotide
agguacgacaccagucuca

SEQ ID NO: 1080772 - RNA, 19 nt, Artificial Sequence
  Description of Artificial Sequence: Synthetic oligonucleotide
gugauacagacagacagau

SEQ ID NO: 1080773 - RNA, 19 nt, Artificial Sequence
  Description of Artificial Sequence: Synthetic oligonucleotide
cucagacagugacaccguc

SEQ ID NO: 1080774 - RNA, 19 nt, Artificial Sequence
  Description of Artificial Sequence: Synthetic oligonucleotide
cccaaauagggcuggagga

SEQ ID NO: 1080775 - RNA, 19 nt, Artificial Sequence
  Description of Artificial Sequence: Synthetic oligonucleotide
agguacuggaccgcguccu

SEQ ID NO: 1080776 - RNA, 19 nt, Artificial Sequence
  Description of Artificial Sequence: Synthetic oligonucleotide
caccgucaggacccggagg

SEQ ID NO: 1080777 - RNA, 19 nt, Artificial Sequence
  Description of Artificial Sequence: Synthetic oligonucleotide
cuuccggcgggcccagagc

SEQ ID NO: 1080778 - RNA, 19 nt, Artificial Sequence
  Description of Artificial Sequence: Synthetic oligonucleotide
cugcuguccaaagcuugcc

SEQ ID NO: 1080779 - RNA, 19 nt, Artificial Sequence
  Description of Artificial Sequence: Synthetic oligonucleotide
cagugcuggaagccucacc

SEQ ID NO: 1080780 - RNA, 19 nt, Artificial Sequence
  Description of Artificial Sequence: Synthetic oligonucleotide
cuugugcuuuugcagaagu

SEQ ID NO: 1080781 - RNA, 19 nt, Artificial Sequence
  Description of Artificial Sequence: Synthetic oligonucleotide
ccucuguacccuuucauga

SEQ ID NO: 1080782 - RNA, 19 nt, Artificial Sequence
  Description of Artificial Sequence: Synthetic oligonucleotide
ggaacacgcaaggagaucu

SEQ ID NO: 1080783 - RNA, 19 nt, Artificial Sequence
  Description of Artificial Sequence: Synthetic oligonucleotide
ccuuugggcucuugaauac

SEQ ID NO: 1080784 - RNA, 19 nt, Artificial Sequence
  Description of Artificial Sequence: Synthetic oligonucleotide
cgcuggaagcaccacaccg

SEQ ID NO: 1080785 - RNA, 19 nt, Artificial Sequence
  Description of Artificial Sequence: Synthetic oligonucleotide
ggcgcacuacguuucagca

SEQ ID NO: 1080786 - RNA, 19 nt, Artificial Sequence
  Description of Artificial Sequence: Synthetic oligonucleotide
cuacguuucagcagcuccu

SEQ ID NO: 1080787 - RNA, 19 nt, Artificial Sequence
  Description of Artificial Sequence: Synthetic oligonucleotide
aaguucccgccuucucuua

SEQ ID NO: 1080788 - RNA, 19 nt, Artificial Sequence
  Description of Artificial Sequence: Synthetic oligonucleotide
gacaccgucaggacccgga

SEQ ID NO: 1080789 - RNA, 19 nt, Artificial Sequence
  Description of Artificial Sequence: Synthetic oligonucleotide
cuccuguguuuaauauguc

SEQ ID NO: 1080790 - RNA, 19 nt, Artificial Sequence
  Description of Artificial Sequence: Synthetic oligonucleotide
ccucuugcccugcucagcc

SEQ ID NO: 1080791 - RNA, 19 nt, Artificial Sequence
  Description of Artificial Sequence: Synthetic oligonucleotide
acgcccugcaccagcuccc

SEQ ID NO: 1080792 - RNA, 19 nt, Artificial Sequence
  Description of Artificial Sequence: Synthetic oligonucleotide
ucucucacccucugcuguu

SEQ ID NO: 1080793 - RNA, 19 nt, Artificial Sequence
  Description of Artificial Sequence: Synthetic oligonucleotide
agauacucccuggugcuua

SEQ ID NO: 1080794 - RNA, 19 nt, Artificial Sequence
  Description of Artificial Sequence: Synthetic oligonucleotide
gccgcagcauggcagagac

SEQ ID NO: 1080795 - RNA, 19 nt, Artificial Sequence
  Description of Artificial Sequence: Synthetic oligonucleotide
uccaugcuuuccagagaau

SEQ ID NO: 1080796 - RNA, 19 nt, Artificial Sequence
  Description of Artificial Sequence: Synthetic oligonucleotide
caccagucucagucccugg

SEQ ID NO: 1080797 - RNA, 19 nt, Artificial Sequence
  Description of Artificial Sequence: Synthetic oligonucleotide
uucccgccuucucuuaguu

SEQ ID NO: 1080798 - RNA, 19 nt, Artificial Sequence
  Description of Artificial Sequence: Synthetic oligonucleotide
aaggccguguagacagaga

SEQ ID NO: 1080799 - RNA, 19 nt, Artificial Sequence
  Description of Artificial Sequence: Synthetic oligonucleotide
gugcuuauccuggggucag

SEQ ID NO: 1080800 - RNA, 19 nt, Artificial Sequence
  Description of Artificial Sequence: Synthetic oligonucleotide
gggcgcacuacguuucagc

SEQ ID NO: 1080801 - RNA, 19 nt, Artificial Sequence
  Description of Artificial Sequence: Synthetic oligonucleotide
aggaagagccagggcgcac

SEQ ID NO: 1080802 - RNA, 19 nt, Artificial Sequence
  Description of Artificial Sequence: Synthetic oligonucleotide
ugugggacuccaggaucug

SEQ ID NO: 1080803 - RNA, 19 nt, Artificial Sequence
  Description of Artificial Sequence: Synthetic oligonucleotide
guacuggaccgcguccucc

SEQ ID NO: 1080804 - RNA, 19 nt, Artificial Sequence
  Description of Artificial Sequence: Synthetic oligonucleotide
acguuucagcagcuccugu

SEQ ID NO: 1080805 - RNA, 19 nt, Artificial Sequence
  Description of Artificial Sequence: Synthetic oligonucleotide
cccauucucugcugugugg

SEQ ID NO: 1080806 - RNA, 19 nt, Artificial Sequence
  Description of Artificial Sequence: Synthetic oligonucleotide
gugcgagccgcugacuccc

SEQ ID NO: 1080807 - RNA, 19 nt, Artificial Sequence
  Description of Artificial Sequence: Synthetic oligonucleotide
ccgacugugcuccucuaag

SEQ ID NO: 1080808 - RNA, 19 nt, Artificial Sequence
  Description of Artificial Sequence: Synthetic oligonucleotide
cuccgcagugcuggaagcc

SEQ ID NO: 1080809 - RNA, 19 nt, Artificial Sequence
  Description of Artificial Sequence: Synthetic oligonucleotide
cugacuugagauacucccu

SEQ ID NO: 1080810 - RNA, 19 nt, Artificial Sequence
  Description of Artificial Sequence: Synthetic oligonucleotide
ccuuguucagggccugccg

SEQ ID NO: 1080811 - RNA, 19 nt, Artificial Sequence
  Description of Artificial Sequence: Synthetic oligonucleotide
gaaugguaagcaaggccgu

SEQ ID NO: 1080812 - RNA, 19 nt, Artificial Sequence
  Description of Artificial Sequence: Synthetic oligonucleotide
guccaccccugugauaggc

SEQ ID NO: 1080813 - RNA, 19 nt, Artificial Sequence
  Description of Artificial Sequence: Synthetic oligonucleotide
cuguguuuaauauguccau

SEQ ID NO: 1080814 - RNA, 19 nt, Artificial Sequence
  Description of Artificial Sequence: Synthetic oligonucleotide
cguguagacagagaggguc

SEQ ID NO: 1080815 - RNA, 19 nt, Artificial Sequence
  Description of Artificial Sequence: Synthetic oligonucleotide
cauccucuccaauccuuga

SEQ ID NO: 1080816 - RNA, 19 nt, Artificial Sequence
  Description of Artificial Sequence: Synthetic oligonucleotide
gcugugggacuccaggauc

SEQ ID NO: 1080817 - RNA, 19 nt, Artificial Sequence
  Description of Artificial Sequence: Synthetic oligonucleotide
aguccaagcccaaggcccu

SEQ ID NO: 1080818 - RNA, 19 nt, Artificial Sequence
  Description of Artificial Sequence: Synthetic oligonucleotide
gcucuagggacaggugugg

SEQ ID NO: 1080819 - RNA, 19 nt, Artificial Sequence
  Description of Artificial Sequence: Synthetic oligonucleotide
cauggcagagacuugccuu

SEQ ID NO: 1080820 - RNA, 19 nt, Artificial Sequence
  Description of Artificial Sequence: Synthetic oligonucleotide
gucuaugcugcaaguaugu

SEQ ID NO: 1080821 - RNA, 19 nt, Artificial Sequence
  Description of Artificial Sequence: Synthetic oligonucleotide
gaacacgcaaggagaucuc

SEQ ID NO: 1080822 - RNA, 19 nt, Artificial Sequence
  Description of Artificial Sequence: Synthetic oligonucleotide
cuagggacagguguggccu

SEQ ID NO: 1080823 - RNA, 19 nt, Artificial Sequence
  Description of Artificial Sequence: Synthetic oligonucleotide
ggcugacuuggucaguguc

SEQ ID NO: 1080824 - RNA, 19 nt, Artificial Sequence
  Description of Artificial Sequence: Synthetic oligonucleotide
cuuugggcucuugaauaca

SEQ ID NO: 1080825 - RNA, 19 nt, Artificial Sequence
  Description of Artificial Sequence: Synthetic oligonucleotide
gcgcacuacguuucagcag

SEQ ID NO: 1080826 - RNA, 19 nt, Artificial Sequence
  Description of Artificial Sequence: Synthetic oligonucleotide
gugacucagcaaagugggc

SEQ ID NO: 1080827 - RNA, 19 nt, Artificial Sequence
  Description of Artificial Sequence: Synthetic oligonucleotide
ggccguguagacagagagg

SEQ ID NO: 1080828 - RNA, 19 nt, Artificial Sequence
  Description of Artificial Sequence: Synthetic oligonucleotide
aagaugcgccugacuugag

SEQ ID NO: 1080829 - RNA, 19 nt, Artificial Sequence
  Description of Artificial Sequence: Synthetic oligonucleotide
ggugcuuauccugggguca

SEQ ID NO: 1080830 - RNA, 19 nt, Artificial Sequence
  Description of Artificial Sequence: Synthetic oligonucleotide
cugcuccucagugcaggcc

SEQ ID NO: 1080831 - RNA, 19 nt, Artificial Sequence
  Description of Artificial Sequence: Synthetic oligonucleotide
ccaauccuugacucaccag

SEQ ID NO: 1080832 - RNA, 19 nt, Artificial Sequence
  Description of Artificial Sequence: Synthetic oligonucleotide
gcugcaaguauguguauau

SEQ ID NO: 1080833 - RNA, 19 nt, Artificial Sequence
  Description of Artificial Sequence: Synthetic oligonucleotide
cuggugcuuauccuggggu

SEQ ID NO: 1080834 - RNA, 19 nt, Artificial Sequence
  Description of Artificial Sequence: Synthetic oligonucleotide
augcgccugacuugagaua

SEQ ID NO: 1080835 - RNA, 19 nt, Artificial Sequence
  Description of Artificial Sequence: Synthetic oligonucleotide
augcugcaaguauguguau

SEQ ID NO: 1080836 - RNA, 19 nt, Artificial Sequence
  Description of Artificial Sequence: Synthetic oligonucleotide
gaggaacacgcaaggagau

SEQ ID NO: 1080837 - RNA, 19 nt, Artificial Sequence
  Description of Artificial Sequence: Synthetic oligonucleotide
auccuggggucaguccaag

SEQ ID NO: 1080838 - RNA, 19 nt, Artificial Sequence
  Description of Artificial Sequence: Synthetic oligonucleotide
gccuagucuuccuuuucca

SEQ ID NO: 1080839 - RNA, 19 nt, Artificial Sequence
  Description of Artificial Sequence: Synthetic oligonucleotide
ucccgccuucucuuaguua

SEQ ID NO: 1080840 - RNA, 19 nt, Artificial Sequence
  Description of Artificial Sequence: Synthetic oligonucleotide
cugccgcuccucucucacc

SEQ ID NO: 1080841 - RNA, 19 nt, Artificial Sequence
  Description of Artificial Sequence: Synthetic oligonucleotide
auacucccuggugcuuauc

SEQ ID NO: 1080842 - RNA, 19 nt, Artificial Sequence
  Description of Artificial Sequence: Synthetic oligonucleotide
caggccucugguaaauccu

SEQ ID NO: 1080843 - RNA, 19 nt, Artificial Sequence
  Description of Artificial Sequence: Synthetic oligonucleotide
cagagccacaagugacuca

SEQ ID NO: 1080844 - RNA, 19 nt, Artificial Sequence
  Description of Artificial Sequence: Synthetic oligonucleotide
cuggaggaaagaugcgccu

SEQ ID NO: 1080845 - RNA, 19 nt, Artificial Sequence
  Description of Artificial Sequence: Synthetic oligonucleotide
gugacaccgucaggacccg

SEQ ID NO: 1080846 - RNA, 19 nt, Artificial Sequence
  Description of Artificial Sequence: Synthetic oligonucleotide
cagcaaagugggccuccug

SEQ ID NO: 1080847 - RNA, 19 nt, Artificial Sequence
  Description of Artificial Sequence: Synthetic oligonucleotide
gauacucccuggugcuuau

SEQ ID NO: 1080848 - RNA, 19 nt, Artificial Sequence
  Description of Artificial Sequence: Synthetic oligonucleotide
gaucugcgcacaggcugac

SEQ ID NO: 1080849 - RNA, 19 nt, Artificial Sequence
  Description of Artificial Sequence: Synthetic oligonucleotide
gccgcuggaagcaccacac

SEQ ID NO: 1080850 - RNA, 19 nt, Artificial Sequence
  Description of Artificial Sequence: Synthetic oligonucleotide
cacuacguuucagcagcuc

SEQ ID NO: 1080851 - RNA, 19 nt, Artificial Sequence
  Description of Artificial Sequence: Synthetic oligonucleotide
agggcgcacuacguuucag

SEQ ID NO: 1080852 - RNA, 19 nt, Artificial Sequence
  Description of Artificial Sequence: Synthetic oligonucleotide
gcuccgggcuggcuguggg

SEQ ID NO: 1080853 - RNA, 19 nt, Artificial Sequence
  Description of Artificial Sequence: Synthetic oligonucleotide
cuguagccgcugccucacg

SEQ ID NO: 1080854 - RNA, 19 nt, Artificial Sequence
  Description of Artificial Sequence: Synthetic oligonucleotide
gagccacaagugacucagc

SEQ ID NO: 1080855 - RNA, 19 nt, Artificial Sequence
  Description of Artificial Sequence: Synthetic oligonucleotide
gugcagugcgagccgcuga

SEQ ID NO: 1080856 - RNA, 19 nt, Artificial Sequence
  Description of Artificial Sequence: Synthetic oligonucleotide
cagugugcucggccauuac

SEQ ID NO: 1080857 - RNA, 19 nt, Artificial Sequence
  Description of Artificial Sequence: Synthetic oligonucleotide
gguuucgccccagcccggg

SEQ ID NO: 1080858 - RNA, 19 nt, Artificial Sequence
  Description of Artificial Sequence: Synthetic oligonucleotide
gucucggauucacucaguu

SEQ ID NO: 1080859 - RNA, 19 nt, Artificial Sequence
  Description of Artificial Sequence: Synthetic oligonucleotide
ccucuaagaucugcugcag

SEQ ID NO: 1080860 - RNA, 19 nt, Artificial Sequence
  Description of Artificial Sequence: Synthetic oligonucleotide
gcaccgcacuguucugccg

SEQ ID NO: 1080861 - RNA, 19 nt, Artificial Sequence
  Description of Artificial Sequence: Synthetic oligonucleotide
gcugacucccgacugugcu

SEQ ID NO: 1080862 - RNA, 19 nt, Artificial Sequence
  Description of Artificial Sequence: Synthetic oligonucleotide
ccaaugggcucuagggaca

SEQ ID NO: 1080863 - RNA, 19 nt, Artificial Sequence
  Description of Artificial Sequence: Synthetic oligonucleotide
cagacuggccaugguguca

SEQ ID NO: 1080864 - RNA, 19 nt, Artificial Sequence
  Description of Artificial Sequence: Synthetic oligonucleotide
cagacagauggacccaaau

SEQ ID NO: 1080865 - RNA, 19 nt, Artificial Sequence
  Description of Artificial Sequence: Synthetic oligonucleotide
agcgugcucccuggcacca

SEQ ID NO: 1080866 - RNA, 19 nt, Artificial Sequence
  Description of Artificial Sequence: Synthetic oligonucleotide
ggccucugguaaauccugc

SEQ ID NO: 1080867 - RNA, 19 nt, Artificial Sequence
  Description of Artificial Sequence: Synthetic oligonucleotide
accacaccgaggagucuga

SEQ ID NO: 1080868 - RNA, 19 nt, Artificial Sequence
  Description of Artificial Sequence: Synthetic oligonucleotide
gugcucccuggcaccauug

SEQ ID NO: 1080869 - RNA, 19 nt, Artificial Sequence
  Description of Artificial Sequence: Synthetic oligonucleotide
cgggguuucgccccagccc

SEQ ID NO: 1080870 - RNA, 19 nt, Artificial Sequence
  Description of Artificial Sequence: Synthetic oligonucleotide
cuuggucagugucucggau

SEQ ID NO: 1080871 - RNA, 19 nt, Artificial Sequence
  Description of Artificial Sequence: Synthetic oligonucleotide
ggaccugcugcugcucagc

SEQ ID NO: 1080872 - RNA, 19 nt, Artificial Sequence
  Description of Artificial Sequence: Synthetic oligonucleotide
cacugugucuaugcugcaa

SEQ ID NO: 1080873 - RNA, 19 nt, Artificial Sequence
  Description of Artificial Sequence: Synthetic oligonucleotide
cuggaccgcguccuccgca

SEQ ID NO: 1080874 - RNA, 19 nt, Artificial Sequence
  Description of Artificial Sequence: Synthetic oligonucleotide
guucccgccuucucuuagu

SEQ ID NO: 1080875 - RNA, 19 nt, Artificial Sequence
  Description of Artificial Sequence: Synthetic oligonucleotide
ccagaucugcucucaaucu

SEQ ID NO: 1080876 - RNA, 19 nt, Artificial Sequence
  Description of Artificial Sequence: Synthetic oligonucleotide
gcuguagccgcugccucac

SEQ ID NO: 1080877 - RNA, 19 nt, Artificial Sequence
  Description of Artificial Sequence: Synthetic oligonucleotide
gauaggcaugggugccagu

SEQ ID NO: 1080878 - RNA, 19 nt, Artificial Sequence
  Description of Artificial Sequence: Synthetic oligonucleotide
ucaggacccggaggucauc

SEQ ID NO: 1080879 - RNA, 19 nt, Artificial Sequence
  Description of Artificial Sequence: Synthetic oligonucleotide
aggacccggaggucaucua

SEQ ID NO: 1080880 - RNA, 19 nt, Artificial Sequence
  Description of Artificial Sequence: Synthetic oligonucleotide
gcgucucagcuccuccgug

SEQ ID NO: 1080881 - RNA, 19 nt, Artificial Sequence
  Description of Artificial Sequence: Synthetic oligonucleotide
ccgggguuucgccccagcc

SEQ ID NO: 1080882 - RNA, 19 nt, Artificial Sequence
  Description of Artificial Sequence: Synthetic oligonucleotide
cccgccuucucuuaguuau

SEQ ID NO: 1080883 - RNA, 19 nt, Artificial Sequence
  Description of Artificial Sequence: Synthetic oligonucleotide
gacaccagucucagucccu

SEQ ID NO: 1080884 - RNA, 19 nt, Artificial Sequence
  Description of Artificial Sequence: Synthetic oligonucleotide
cucggccauuacacuccuc

SEQ ID NO: 1080885 - RNA, 19 nt, Artificial Sequence
  Description of Artificial Sequence: Synthetic oligonucleotide
ucccgacugugcuccucua

SEQ ID NO: 1080886 - RNA, 19 nt, Artificial Sequence
  Description of Artificial Sequence: Synthetic oligonucleotide
ggacaccugcguccuucug

SEQ ID NO: 1080887 - RNA, 19 nt, Artificial Sequence
  Description of Artificial Sequence: Synthetic oligonucleotide
caccaagggacaccugcgu

SEQ ID NO: 1080888 - RNA, 19 nt, Artificial Sequence
  Description of Artificial Sequence: Synthetic oligonucleotide
aggcugcgaagccgcugga

SEQ ID NO: 1080889 - RNA, 19 nt, Artificial Sequence
  Description of Artificial Sequence: Synthetic oligonucleotide
aucugcgcacaggcugacu

SEQ ID NO: 1080890 - RNA, 19 nt, Artificial Sequence
  Description of Artificial Sequence: Synthetic oligonucleotide
gggcagccugguccagacg

SEQ ID NO: 1080891 - RNA, 19 nt, Artificial Sequence
  Description of Artificial Sequence: Synthetic oligonucleotide
ccccaaugggcucuaggga

SEQ ID NO: 1080892 - RNA, 19 nt, Artificial Sequence
  Description of Artificial Sequence: Synthetic oligonucleotide
caccagaucugcucucaau

SEQ ID NO: 1080893 - RNA, 19 nt, Artificial Sequence
  Description of Artificial Sequence: Synthetic oligonucleotide
ccaugcugucucuccucug

SEQ ID NO: 1080894 - RNA, 19 nt, Artificial Sequence
  Description of Artificial Sequence: Synthetic oligonucleotide
caggaguauacaccuucuu

SEQ ID NO: 1080895 - RNA, 19 nt, Artificial Sequence
  Description of Artificial Sequence: Synthetic oligonucleotide
ggccaguagcugaggcugc

SEQ ID NO: 1080896 - RNA, 19 nt, Artificial Sequence
  Description of Artificial Sequence: Synthetic oligonucleotide
cuccgggcuggcuguggga

SEQ ID NO: 1080897 - RNA, 19 nt, Artificial Sequence
  Description of Artificial Sequence: Synthetic oligonucleotide
cucgggccaccuucuggaa

SEQ ID NO: 1080898 - RNA, 19 nt, Artificial Sequence
  Description of Artificial Sequence: Synthetic oligonucleotide
ccgcuggaagcaccacacc

SEQ ID NO: 1080899 - RNA, 19 nt, Artificial Sequence
  Description of Artificial Sequence: Synthetic oligonucleotide
ccgcagugcuggaagccuc

SEQ ID NO: 1080900 - RNA, 19 nt, Artificial Sequence
  Description of Artificial Sequence: Synthetic oligonucleotide
ccggguccaucagccaucc

SEQ ID NO: 1080901 - RNA, 19 nt, Artificial Sequence
  Description of Artificial Sequence: Synthetic oligonucleotide
ggguuucgccccagcccgg

SEQ ID NO: 1080902 - RNA, 19 nt, Artificial Sequence
  Description of Artificial Sequence: Synthetic oligonucleotide
gguguccaccccugugaua

SEQ ID NO: 1080903 - RNA, 19 nt, Artificial Sequence
  Description of Artificial Sequence: Synthetic oligonucleotide
caggacccggaggucaucu

SEQ ID NO: 1080904 - RNA, 19 nt, Artificial Sequence
  Description of Artificial Sequence: Synthetic oligonucleotide
cugcaaguauguguauauu

SEQ ID NO: 1080905 - RNA, 19 nt, Artificial Sequence
  Description of Artificial Sequence: Synthetic oligonucleotide
cccugugauaggcaugggu

SEQ ID NO: 1080906 - RNA, 19 nt, Artificial Sequence
  Description of Artificial Sequence: Synthetic oligonucleotide
gcagcuccgggcuggcugu

SEQ ID NO: 1080907 - RNA, 19 nt, Artificial Sequence
  Description of Artificial Sequence: Synthetic oligonucleotide
cgcugacucccgacugugc

SEQ ID NO: 1080908 - RNA, 19 nt, Artificial Sequence
  Description of Artificial Sequence: Synthetic oligonucleotide
cgccugacuugagauacuc

SEQ ID NO: 1080909 - RNA, 19 nt, Artificial Sequence
  Description of Artificial Sequence: Synthetic oligonucleotide
gcugugcucugcaggcguc

SEQ ID NO: 1080910 - RNA, 19 nt, Artificial Sequence
  Description of Artificial Sequence: Synthetic oligonucleotide
ggucagugucucggauuca

SEQ ID NO: 1080911 - RNA, 19 nt, Artificial Sequence
  Description of Artificial Sequence: Synthetic oligonucleotide
cgcagcauggcagagacuu

SEQ ID NO: 1080912 - RNA, 19 nt, Artificial Sequence
  Description of Artificial Sequence: Synthetic oligonucleotide
ccgcugacucccgacugug

SEQ ID NO: 1080913 - RNA, 19 nt, Artificial Sequence
  Description of Artificial Sequence: Synthetic oligonucleotide
ggacccaaauagggcugga

SEQ ID NO: 1080914 - RNA, 19 nt, Artificial Sequence
  Description of Artificial Sequence: Synthetic oligonucleotide
gucccuggcugcacagacu

SEQ ID NO: 1080915 - RNA, 19 nt, Artificial Sequence
  Description of Artificial Sequence: Synthetic oligonucleotide
ccacaccgaggagucugag

SEQ ID NO: 1080916 - RNA, 19 nt, Artificial Sequence
  Description of Artificial Sequence: Synthetic oligonucleotide
ccuccguggcuuucucaga

SEQ ID NO: 1080917 - RNA, 19 nt, Artificial Sequence
  Description of Artificial Sequence: Synthetic oligonucleotide
gcgaagccgcuggaagcac

SEQ ID NO: 1080918 - RNA, 19 nt, Artificial Sequence
  Description of Artificial Sequence: Synthetic oligonucleotide
gucaggacccggaggucau

SEQ ID NO: 1080919 - RNA, 19 nt, Artificial Sequence
  Description of Artificial Sequence: Synthetic oligonucleotide
gggacaccugcguccuucu

SEQ ID NO: 1080920 - RNA, 19 nt, Artificial Sequence
  Description of Artificial Sequence: Synthetic oligonucleotide
gacucccgacugugcuccu

SEQ ID NO: 1080921 - RNA, 19 nt, Artificial Sequence
  Description of Artificial Sequence: Synthetic oligonucleotide
gcacuguucugccgcuccu

SEQ ID NO: 1080922 - RNA, 19 nt, Artificial Sequence
  Description of Artificial Sequence: Synthetic oligonucleotide
gccgcugacucccgacugu

SEQ ID NO: 1080923 - RNA, 19 nt, Artificial Sequence
  Description of Artificial Sequence: Synthetic oligonucleotide
gcgggcccagagcauccuc

SEQ ID NO: 1080924 - RNA, 19 nt, Artificial Sequence
  Description of Artificial Sequence: Synthetic oligonucleotide
gcccggguccaucagccau

SEQ ID NO: 1080925 - RNA, 19 nt, Artificial Sequence
  Description of Artificial Sequence: Synthetic oligonucleotide
cccgggguuucgccccagc

SEQ ID NO: 1080926 - RNA, 19 nt, Artificial Sequence
  Description of Artificial Sequence: Synthetic oligonucleotide
cccgacugugcuccucuaa

SEQ ID NO: 1080927 - RNA, 19 nt, Artificial Sequence
  Description of Artificial Sequence: Synthetic oligonucleotide
cagcuccgggcuggcugug

SEQ ID NO: 1080928 - RNA, 19 nt, Artificial Sequence
  Description of Artificial Sequence: Synthetic oligonucleotide
gcucggccauuacacuccu

SEQ ID NO: 1080929 - RNA, 19 nt, Artificial Sequence
  Description of Artificial Sequence: Synthetic oligonucleotide
ccaccccugugauaggcau

SEQ ID NO: 1080930 - RNA, 19 nt, Artificial Sequence
  Description of Artificial Sequence: Synthetic oligonucleotide
gccucacgcccugcaccag

SEQ ID NO: 1080931 - RNA, 19 nt, Artificial Sequence
  Description of Artificial Sequence: Synthetic oligonucleotide
ggggucaguccaagcccaa

SEQ ID NO: 1080932 - RNA, 19 nt, Artificial Sequence
  Description of Artificial Sequence: Synthetic oligonucleotide
cgccuucucuuaguuauua

SEQ ID NO: 1080933 - RNA, 19 nt, Artificial Sequence
  Description of Artificial Sequence: Synthetic oligonucleotide
cgcguccuccgcagugcug

SEQ ID NO: 1080934 - RNA, 19 nt, Artificial Sequence
  Description of Artificial Sequence: Synthetic oligonucleotide
ccguguagacagagagggu

SEQ ID NO: 1080935 - RNA, 19 nt, Artificial Sequence
  Description of Artificial Sequence: Synthetic oligonucleotide
gcacuacguuucagcagcu

SEQ ID NO: 1080936 - RNA, 19 nt, Artificial Sequence
  Description of Artificial Sequence: Synthetic oligonucleotide
ccgucaggacccggagguc

SEQ ID NO: 1080937 - RNA, 19 nt, Artificial Sequence
  Description of Artificial Sequence: Synthetic oligonucleotide
cguggcuuucucagacagu

SEQ ID NO: 1080938 - RNA, 19 nt, Artificial Sequence
  Description of Artificial Sequence: Synthetic oligonucleotide
gcagugcgagccgcugacu

SEQ ID NO: 1080939 - RNA, 19 nt, Artificial Sequence
  Description of Artificial Sequence: Synthetic oligonucleotide
ggaccgcguccuccgcagu

SEQ ID NO: 1080940 - RNA, 19 nt, Artificial Sequence
  Description of Artificial Sequence: Synthetic oligonucleotide
gcgccugacuugagauacu

SEQ ID NO: 1080941 - RNA, 19 nt, Artificial Sequence
  Description of Artificial Sequence: Synthetic oligonucleotide
ccgccuucucuuaguuauu

SEQ ID NO: 1080942 - RNA, 19 nt, Artificial Sequence
  Description of Artificial Sequence: Synthetic oligonucleotide
ccccgggguuucgccccag

SEQ ID NO: 1080943 - RNA, 19 nt, Artificial Sequence
  Description of Artificial Sequence: Synthetic oligonucleotide
ccgcagcauggcagagacu

SEQ ID NO: 1080944 - RNA, 19 nt, Artificial Sequence
  Description of Artificial Sequence: Synthetic oligonucleotide
gcgugcucccuggcaccau

SEQ ID NO: 1080945 - RNA, 19 nt, Artificial Sequence
  Description of Artificial Sequence: Synthetic oligonucleotide
uuaauauacaaccaaaugg

SEQ ID NO: 1080946 - RNA, 19 nt, Artificial Sequence
  Description of Artificial Sequence: Synthetic oligonucleotide
auucuauuaauauacaacc

SEQ ID NO: 1080947 - RNA, 19 nt, Artificial Sequence
  Description of Artificial Sequence: Synthetic oligonucleotide
aaugucagaaaugaguagg

SEQ ID NO: 1080948 - RNA, 19 nt, Artificial Sequence
  Description of Artificial Sequence: Synthetic oligonucleotide
ugcaauaagaaucacuuca

SEQ ID NO: 1080949 - RNA, 19 nt, Artificial Sequence
  Description of Artificial Sequence: Synthetic oligonucleotide
ucuagugcaggacagagcc

SEQ ID NO: 1080950 - RNA, 19 nt, Artificial Sequence
  Description of Artificial Sequence: Synthetic oligonucleotide
gaguuggugagucagaggg

SEQ ID NO: 1080951 - RNA, 19 nt, Artificial Sequence
  Description of Artificial Sequence: Synthetic oligonucleotide
uacaacucgaauauugggg

SEQ ID NO: 1080952 - RNA, 19 nt, Artificial Sequence
  Description of Artificial Sequence: Synthetic oligonucleotide
uuuacaacucgaauauugg

SEQ ID NO: 1080953 - RNA, 19 nt, Artificial Sequence
  Description of Artificial Sequence: Synthetic oligonucleotide
ugcauaacgcuucuuaagg

SEQ ID NO: 1080954 - RNA, 19 nt, Artificial Sequence
  Description of Artificial Sequence: Synthetic oligonucleotide
auuaauauacaaccaaaug

SEQ ID NO: 1080955 - RNA, 19 nt, Artificial Sequence
  Description of Artificial Sequence: Synthetic oligonucleotide
uuaaggaacaugauuuucc

SEQ ID NO: 1080956 - RNA, 19 nt, Artificial Sequence
  Description of Artificial Sequence: Synthetic oligonucleotide
acaacucgaauauuggggc

SEQ ID NO: 1080957 - RNA, 19 nt, Artificial Sequence
  Description of Artificial Sequence: Synthetic oligonucleotide
auacauaguuccuucaugg

SEQ ID NO: 1080958 - RNA, 19 nt, Artificial Sequence
  Description of Artificial Sequence: Synthetic oligonucleotide
uuaucuagcucauugauaa

SEQ ID NO: 1080959 - RNA, 19 nt, Artificial Sequence
  Description of Artificial Sequence: Synthetic oligonucleotide
ucuauuaauauacaaccaa

SEQ ID NO: 1080960 - RNA, 19 nt, Artificial Sequence
  Description of Artificial Sequence: Synthetic oligonucleotide
uuagauuugagguaaaguu

SEQ ID NO: 1080961 - RNA, 19 nt, Artificial Sequence
  Description of Artificial Sequence: Synthetic oligonucleotide
uuguaauauucucaaaacc

SEQ ID NO: 1080962 - RNA, 19 nt, Artificial Sequence
  Description of Artificial Sequence: Synthetic oligonucleotide
uaaaguuccucaaggauug

SEQ ID NO: 1080963 - RNA, 19 nt, Artificial Sequence
  Description of Artificial Sequence: Synthetic oligonucleotide
uauagaagaaaguccaaug

SEQ ID NO: 1080964 - RNA, 19 nt, Artificial Sequence
  Description of Artificial Sequence: Synthetic oligonucleotide
agauuugagguaaaguucc

SEQ ID NO: 1080965 - RNA, 19 nt, Artificial Sequence
  Description of Artificial Sequence: Synthetic oligonucleotide
uggacaaauuuacaacucg

SEQ ID NO: 1080966 - RNA, 19 nt, Artificial Sequence
  Description of Artificial Sequence: Synthetic oligonucleotide
cuuccaacuauuaaggaac

SEQ ID NO: 1080967 - RNA, 19 nt, Artificial Sequence
  Description of Artificial Sequence: Synthetic oligonucleotide
guuaccaucgcacuaguag

SEQ ID NO: 1080968 - RNA, 19 nt, Artificial Sequence
  Description of Artificial Sequence: Synthetic oligonucleotide
uauacaaccaaaugguccu

SEQ ID NO: 1080969 - RNA, 19 nt, Artificial Sequence
  Description of Artificial Sequence: Synthetic oligonucleotide
gagguaaaguuccucaagg

SEQ ID NO: 1080970 - RNA, 19 nt, Artificial Sequence
  Description of Artificial Sequence: Synthetic oligonucleotide
uauggaucugcccucagcc

SEQ ID NO: 1080971 - RNA, 19 nt, Artificial Sequence
  Description of Artificial Sequence: Synthetic oligonucleotide
uuuuggacaaauuuacaac

SEQ ID NO: 1080972 - RNA, 19 nt, Artificial Sequence
  Description of Artificial Sequence: Synthetic oligonucleotide
ucuaguaaccucauuuucu

SEQ ID NO: 1080973 - RNA, 19 nt, Artificial Sequence
  Description of Artificial Sequence: Synthetic oligonucleotide
uuuggacgaacaaaggagc

SEQ ID NO: 1080974 - RNA, 19 nt, Artificial Sequence
  Description of Artificial Sequence: Synthetic oligonucleotide
acagaauaaaacuguaaug

SEQ ID NO: 1080975 - RNA, 19 nt, Artificial Sequence
  Description of Artificial Sequence: Synthetic oligonucleotide
aagacgugacagcaguccc

SEQ ID NO: 1080976 - RNA, 19 nt, Artificial Sequence
  Description of Artificial Sequence: Synthetic oligonucleotide
ugaucuucagugauaguag

SEQ ID NO: 1080977 - RNA, 19 nt, Artificial Sequence
  Description of Artificial Sequence: Synthetic oligonucleotide
uuacaacucgaauauuggg

SEQ ID NO: 1080978 - RNA, 19 nt, Artificial Sequence
  Description of Artificial Sequence: Synthetic oligonucleotide
uugucauugacuaccaggu

SEQ ID NO: 1080979 - RNA, 19 nt, Artificial Sequence
  Description of Artificial Sequence: Synthetic oligonucleotide
aucaagcucagcuccacgc

SEQ ID NO: 1080980 - RNA, 19 nt, Artificial Sequence
  Description of Artificial Sequence: Synthetic oligonucleotide
auagaagaaaguccaaugu

SEQ ID NO: 1080981 - RNA, 19 nt, Artificial Sequence
  Description of Artificial Sequence: Synthetic oligonucleotide
uucuauuaauauacaacca

SEQ ID NO: 1080982 - RNA, 19 nt, Artificial Sequence
  Description of Artificial Sequence: Synthetic oligonucleotide
aacgcacuguugcaaauuc

SEQ ID NO: 1080983 - RNA, 19 nt, Artificial Sequence
  Description of Artificial Sequence: Synthetic oligonucleotide
uguuauucccauuuuauuu

SEQ ID NO: 1080984 - RNA, 19 nt, Artificial Sequence
  Description of Artificial Sequence: Synthetic oligonucleotide
accuuuugaacugucaugg

SEQ ID NO: 1080985 - RNA, 19 nt, Artificial Sequence
  Description of Artificial Sequence: Synthetic oligonucleotide
ugguuugagcauuugaucu

SEQ ID NO: 1080986 - RNA, 19 nt, Artificial Sequence
  Description of Artificial Sequence: Synthetic oligonucleotide
aaaugaguagguguucuag

SEQ ID NO: 1080987 - RNA, 19 nt, Artificial Sequence
  Description of Artificial Sequence: Synthetic oligonucleotide
ucugggaaauguauagaag

SEQ ID NO: 1080988 - RNA, 19 nt, Artificial Sequence
  Description of Artificial Sequence: Synthetic oligonucleotide
ucuagcucaauuucucugc

SEQ ID NO: 1080989 - RNA, 19 nt, Artificial Sequence
  Description of Artificial Sequence: Synthetic oligonucleotide
uugcaaugcucucaauugg

SEQ ID NO: 1080990 - RNA, 19 nt, Artificial Sequence
  Description of Artificial Sequence: Synthetic oligonucleotide
aaauucuccguuaacguca

SEQ ID NO: 1080991 - RNA, 19 nt, Artificial Sequence
  Description of Artificial Sequence: Synthetic oligonucleotide
aacgucaacucuucuacca

SEQ ID NO: 1080992 - RNA, 19 nt, Artificial Sequence
  Description of Artificial Sequence: Synthetic oligonucleotide
uucaggugcaccauauuug

SEQ ID NO: 1080993 - RNA, 19 nt, Artificial Sequence
  Description of Artificial Sequence: Synthetic oligonucleotide
aaaugucacccauuauaag

SEQ ID NO: 1080994 - RNA, 19 nt, Artificial Sequence
  Description of Artificial Sequence: Synthetic oligonucleotide
uggauauauuguuagauuu

SEQ ID NO: 1080995 - RNA, 19 nt, Artificial Sequence
  Description of Artificial Sequence: Synthetic oligonucleotide
aaugaguagguguucuagu

SEQ ID NO: 1080996 - RNA, 19 nt, Artificial Sequence
  Description of Artificial Sequence: Synthetic oligonucleotide
ucuguaauuuaucuagcuc

SEQ ID NO: 1080997 - RNA, 19 nt, Artificial Sequence
  Description of Artificial Sequence: Synthetic oligonucleotide
uuaggauugucccacucga

SEQ ID NO: 1080998 - RNA, 19 nt, Artificial Sequence
  Description of Artificial Sequence: Synthetic oligonucleotide
aaugucuugcaaugcucuc

SEQ ID NO: 1080999 - RNA, 19 nt, Artificial Sequence
  Description of Artificial Sequence: Synthetic oligonucleotide
caacuauuaaggaacauga

SEQ ID NO: 1081000 - RNA, 19 nt, Artificial Sequence
  Description of Artificial Sequence: Synthetic oligonucleotide
cauauuugcagcagagaag

SEQ ID NO: 1081001 - RNA, 19 nt, Artificial Sequence
  Description of Artificial Sequence: Synthetic oligonucleotide
auuauaagacagcaggaau

SEQ ID NO: 1081002 - RNA, 19 nt, Artificial Sequence
  Description of Artificial Sequence: Synthetic oligonucleotide
acuaccagguacugcaagg

SEQ ID NO: 1081003 - RNA, 19 nt, Artificial Sequence
  Description of Artificial Sequence: Synthetic oligonucleotide
uaaugcauaacgcuucuua

SEQ ID NO: 1081004 - RNA, 19 nt, Artificial Sequence
  Description of Artificial Sequence: Synthetic oligonucleotide
aguuggauuguuaccaucg

SEQ ID NO: 1081005 - RNA, 19 nt, Artificial Sequence
  Description of Artificial Sequence: Synthetic oligonucleotide
aaguuggauuguuaccauc

SEQ ID NO: 1081006 - RNA, 19 nt, Artificial Sequence
  Description of Artificial Sequence: Synthetic oligonucleotide
uuugagaagacgugacagc

SEQ ID NO: 1081007 - RNA, 19 nt, Artificial Sequence
  Description of Artificial Sequence: Synthetic oligonucleotide
ucccuuuaccuuuugaacu

SEQ ID NO: 1081008 - RNA, 19 nt, Artificial Sequence
  Description of Artificial Sequence: Synthetic oligonucleotide
ggcucuguaauuuaucuag

SEQ ID NO: 1081009 - RNA, 19 nt, Artificial Sequence
  Description of Artificial Sequence: Synthetic oligonucleotide
uuuaccuuuugaacuguca

SEQ ID NO: 1081010 - RNA, 19 nt, Artificial Sequence
  Description of Artificial Sequence: Synthetic oligonucleotide
ugagcauuugaucuucagu

SEQ ID NO: 1081011 - RNA, 19 nt, Artificial Sequence
  Description of Artificial Sequence: Synthetic oligonucleotide
acaaucuccauucuccaca

SEQ ID NO: 1081012 - RNA, 19 nt, Artificial Sequence
  Description of Artificial Sequence: Synthetic oligonucleotide
acuuucauaggacaacaga

SEQ ID NO: 1081013 - RNA, 19 nt, Artificial Sequence
  Description of Artificial Sequence: Synthetic oligonucleotide
acaaauuuacaacucgaau

SEQ ID NO: 1081014 - RNA, 19 nt, Artificial Sequence
  Description of Artificial Sequence: Synthetic oligonucleotide
uuaccaucgcacuaguaga

SEQ ID NO: 1081015 - RNA, 19 nt, Artificial Sequence
  Description of Artificial Sequence: Synthetic oligonucleotide
ugagucagagggaaacugc

SEQ ID NO: 1081016 - RNA, 19 nt, Artificial Sequence
  Description of Artificial Sequence: Synthetic oligonucleotide
ucccaagaagacaacaagu

SEQ ID NO: 1081017 - RNA, 19 nt, Artificial Sequence
  Description of Artificial Sequence: Synthetic oligonucleotide
cuaguaaccucauuuucug

SEQ ID NO: 1081018 - RNA, 19 nt, Artificial Sequence
  Description of Artificial Sequence: Synthetic oligonucleotide
gguaaucaagcucagcucc

SEQ ID NO: 1081019 - RNA, 19 nt, Artificial Sequence
  Description of Artificial Sequence: Synthetic oligonucleotide
aaucaagcucagcuccacg

SEQ ID NO: 1081020 - RNA, 19 nt, Artificial Sequence
  Description of Artificial Sequence: Synthetic oligonucleotide
auuguuaccaucgcacuag

SEQ ID NO: 1081021 - RNA, 19 nt, Artificial Sequence
  Description of Artificial Sequence: Synthetic oligonucleotide
gucauugacuaccagguac

SEQ ID NO: 1081022 - RNA, 19 nt, Artificial Sequence
  Description of Artificial Sequence: Synthetic oligonucleotide
aguuccucaaggauuggcc

SEQ ID NO: 1081023 - RNA, 19 nt, Artificial Sequence
  Description of Artificial Sequence: Synthetic oligonucleotide
ucauugacuaccagguacu

SEQ ID NO: 1081024 - RNA, 19 nt, Artificial Sequence
  Description of Artificial Sequence: Synthetic oligonucleotide
acauaguuccuucauggcu

SEQ ID NO: 1081025 - RNA, 19 nt, Artificial Sequence
  Description of Artificial Sequence: Synthetic oligonucleotide
uucuaaugcauaacgcuuc

SEQ ID NO: 1081026 - RNA, 19 nt, Artificial Sequence
  Description of Artificial Sequence: Synthetic oligonucleotide
gcaggaauccaaaauaugg

SEQ ID NO: 1081027 - RNA, 19 nt, Artificial Sequence
  Description of Artificial Sequence: Synthetic oligonucleotide
aaaugguccuuucccaagu

SEQ ID NO: 1081028 - RNA, 19 nt, Artificial Sequence
  Description of Artificial Sequence: Synthetic oligonucleotide
ucgacuccuagccagaguc

SEQ ID NO: 1081029 - RNA, 19 nt, Artificial Sequence
  Description of Artificial Sequence: Synthetic oligonucleotide
auguauagaagaaagucca

SEQ ID NO: 1081030 - RNA, 19 nt, Artificial Sequence
  Description of Artificial Sequence: Synthetic oligonucleotide
ucuaccaaugacaucuaau

SEQ ID NO: 1081031 - RNA, 19 nt, Artificial Sequence
  Description of Artificial Sequence: Synthetic oligonucleotide
cauaggacaacagaaguuc

SEQ ID NO: 1081032 - RNA, 19 nt, Artificial Sequence
  Description of Artificial Sequence: Synthetic oligonucleotide
uauuguuagauuugaggua

SEQ ID NO: 1081033 - RNA, 19 nt, Artificial Sequence
  Description of Artificial Sequence: Synthetic oligonucleotide
uuucuagugcaggacagag

SEQ ID NO: 1081034 - RNA, 19 nt, Artificial Sequence
  Description of Artificial Sequence: Synthetic oligonucleotide
augcauaacgcuucuuaag

SEQ ID NO: 1081035 - RNA, 19 nt, Artificial Sequence
  Description of Artificial Sequence: Synthetic oligonucleotide
uaauggcaaaaugucaccc

SEQ ID NO: 1081036 - RNA, 19 nt, Artificial Sequence
  Description of Artificial Sequence: Synthetic oligonucleotide
gacaacagaaguucugaca

SEQ ID NO: 1081037 - RNA, 19 nt, Artificial Sequence
  Description of Artificial Sequence: Synthetic oligonucleotide
aacucgaauauuggggcag

SEQ ID NO: 1081038 - RNA, 19 nt, Artificial Sequence
  Description of Artificial Sequence: Synthetic oligonucleotide
uccauucauuuccaaaggu

SEQ ID NO: 1081039 - RNA, 19 nt, Artificial Sequence
  Description of Artificial Sequence: Synthetic oligonucleotide
uuggacgaacaaaggagcc

SEQ ID NO: 1081040 - RNA, 19 nt, Artificial Sequence
  Description of Artificial Sequence: Synthetic oligonucleotide
ucauugauaaaugaccauu

SEQ ID NO: 1081041 - RNA, 19 nt, Artificial Sequence
  Description of Artificial Sequence: Synthetic oligonucleotide
aggucuaguaaccucauuu

SEQ ID NO: 1081042 - RNA, 19 nt, Artificial Sequence
  Description of Artificial Sequence: Synthetic oligonucleotide
ucuaaugcauaacgcuucu

SEQ ID NO: 1081043 - RNA, 19 nt, Artificial Sequence
  Description of Artificial Sequence: Synthetic oligonucleotide
gaagacgugacagcagucc

SEQ ID NO: 1081044 - RNA, 19 nt, Artificial Sequence
  Description of Artificial Sequence: Synthetic oligonucleotide
auugacuaccagguacugc

SEQ ID NO: 1081045 - RNA, 19 nt, Artificial Sequence
  Description of Artificial Sequence: Synthetic oligonucleotide
uaggacaacagaaguucug

SEQ ID NO: 1081046 - RNA, 19 nt, Artificial Sequence
  Description of Artificial Sequence: Synthetic oligonucleotide
ucauaggacaacagaaguu

SEQ ID NO: 1081047 - RNA, 19 nt, Artificial Sequence
  Description of Artificial Sequence: Synthetic oligonucleotide
uacauaguuccuucauggc

SEQ ID NO: 1081048 - RNA, 19 nt, Artificial Sequence
  Description of Artificial Sequence: Synthetic oligonucleotide
uccguuaacgucaacucuu

SEQ ID NO: 1081049 - RNA, 19 nt, Artificial Sequence
  Description of Artificial Sequence: Synthetic oligonucleotide
aggacgggaacauggaugu

SEQ ID NO: 1081050 - RNA, 19 nt, Artificial Sequence
  Description of Artificial Sequence: Synthetic oligonucleotide
uucuccguuaacgucaacu

SEQ ID NO: 1081051 - RNA, 19 nt, Artificial Sequence
  Description of Artificial Sequence: Synthetic oligonucleotide
auggaucugcccucagccc

SEQ ID NO: 1081052 - RNA, 19 nt, Artificial Sequence
  Description of Artificial Sequence: Synthetic oligonucleotide
uucuuaagggcaguaagaa

SEQ ID NO: 1081053 - RNA, 19 nt, Artificial Sequence
  Description of Artificial Sequence: Synthetic oligonucleotide
caaauucuccguuaacguc

SEQ ID NO: 1081054 - RNA, 19 nt, Artificial Sequence
  Description of Artificial Sequence: Synthetic oligonucleotide
uaacgcuucuuaagggcag

SEQ ID NO: 1081055 - RNA, 19 nt, Artificial Sequence
  Description of Artificial Sequence: Synthetic oligonucleotide
ugucauggaaucuggcaac

SEQ ID NO: 1081056 - RNA, 19 nt, Artificial Sequence
  Description of Artificial Sequence: Synthetic oligonucleotide
uuagaggaaaggucuagua

SEQ ID NO: 1081057 - RNA, 19 nt, Artificial Sequence
  Description of Artificial Sequence: Synthetic oligonucleotide
ucuaggaugggcugacaga

SEQ ID NO: 1081058 - RNA, 19 nt, Artificial Sequence
  Description of Artificial Sequence: Synthetic oligonucleotide
ugagcugcucugcaauaag

SEQ ID NO: 1081059 - RNA, 19 nt, Artificial Sequence
  Description of Artificial Sequence: Synthetic oligonucleotide
gauugucccacucgacucc

SEQ ID NO: 1081060 - RNA, 19 nt, Artificial Sequence
  Description of Artificial Sequence: Synthetic oligonucleotide
ucuagucugggcagguaug

SEQ ID NO: 1081061 - RNA, 19 nt, Artificial Sequence
  Description of Artificial Sequence: Synthetic oligonucleotide
ucuccguuaacgucaacuc

SEQ ID NO: 1081062 - RNA, 19 nt, Artificial Sequence
  Description of Artificial Sequence: Synthetic oligonucleotide
uccaucuucuaaugcauaa

SEQ ID NO: 1081063 - RNA, 19 nt, Artificial Sequence
  Description of Artificial Sequence: Synthetic oligonucleotide
uauuaaggaacaugauuuu

SEQ ID NO: 1081064 - RNA, 19 nt, Artificial Sequence
  Description of Artificial Sequence: Synthetic oligonucleotide
aucgcacuaguagacaauc

SEQ ID NO: 1081065 - RNA, 19 nt, Artificial Sequence
  Description of Artificial Sequence: Synthetic oligonucleotide
aggauugucccacucgacu

SEQ ID NO: 1081066 - RNA, 19 nt, Artificial Sequence
  Description of Artificial Sequence: Synthetic oligonucleotide
auaaaugaccauucugaua

SEQ ID NO: 1081067 - RNA, 19 nt, Artificial Sequence
  Description of Artificial Sequence: Synthetic oligonucleotide
aagccuuuauuauucuauu

SEQ ID NO: 1081068 - RNA, 19 nt, Artificial Sequence
  Description of Artificial Sequence: Synthetic oligonucleotide
aagggguuucuagugcagg

SEQ ID NO: 1081069 - RNA, 19 nt, Artificial Sequence
  Description of Artificial Sequence: Synthetic oligonucleotide
uuccaacuauuaaggaaca

SEQ ID NO: 1081070 - RNA, 19 nt, Artificial Sequence
  Description of Artificial Sequence: Synthetic oligonucleotide
agcacaauucacggcacac

SEQ ID NO: 1081071 - RNA, 19 nt, Artificial Sequence
  Description of Artificial Sequence: Synthetic oligonucleotide
uucuagugcaggacagagc

SEQ ID NO: 1081072 - RNA, 19 nt, Artificial Sequence
  Description of Artificial Sequence: Synthetic oligonucleotide
accauucugauauuugguu

SEQ ID NO: 1081073 - RNA, 19 nt, Artificial Sequence
  Description of Artificial Sequence: Synthetic oligonucleotide
gcaucugggaaauguauag

SEQ ID NO: 1081074 - RNA, 19 nt, Artificial Sequence
  Description of Artificial Sequence: Synthetic oligonucleotide
aguuuguacuuguuuacuu

SEQ ID NO: 1081075 - RNA, 19 nt, Artificial Sequence
  Description of Artificial Sequence: Synthetic oligonucleotide
ugucccacucgacuccuag

SEQ ID NO: 1081076 - RNA, 19 nt, Artificial Sequence
  Description of Artificial Sequence: Synthetic oligonucleotide
uacuuccaacuauuaagga

SEQ ID NO: 1081077 - RNA, 19 nt, Artificial Sequence
  Description of Artificial Sequence: Synthetic oligonucleotide
acaagggguuucuagugca

SEQ ID NO: 1081078 - RNA, 19 nt, Artificial Sequence
  Description of Artificial Sequence: Synthetic oligonucleotide
aacaaaggagccuccuguu

SEQ ID NO: 1081079 - RNA, 19 nt, Artificial Sequence
  Description of Artificial Sequence: Synthetic oligonucleotide
cuagcucaauuucucugcc

SEQ ID NO: 1081080 - RNA, 19 nt, Artificial Sequence
  Description of Artificial Sequence: Synthetic oligonucleotide
aggauuggccaugaagggg

SEQ ID NO: 1081081 - RNA, 19 nt, Artificial Sequence
  Description of Artificial Sequence: Synthetic oligonucleotide
uguuuacuuccaacuauua

SEQ ID NO: 1081082 - RNA, 19 nt, Artificial Sequence
  Description of Artificial Sequence: Synthetic oligonucleotide
uaccaucgcacuaguagac

SEQ ID NO: 1081083 - RNA, 19 nt, Artificial Sequence
  Description of Artificial Sequence: Synthetic oligonucleotide
ugggacuuucauaggacaa

SEQ ID NO: 1081084 - RNA, 19 nt, Artificial Sequence
  Description of Artificial Sequence: Synthetic oligonucleotide
uaguaaccucauuuucugc

SEQ ID NO: 1081085 - RNA, 19 nt, Artificial Sequence
  Description of Artificial Sequence: Synthetic oligonucleotide
gucacccauuauaagacag

SEQ ID NO: 1081086 - RNA, 19 nt, Artificial Sequence
  Description of Artificial Sequence: Synthetic oligonucleotide
uaacgucaacucuucuacc

SEQ ID NO: 1081087 - RNA, 19 nt, Artificial Sequence
  Description of Artificial Sequence: Synthetic oligonucleotide
guuaacgucaacucuucua

SEQ ID NO: 1081088 - RNA, 19 nt, Artificial Sequence
  Description of Artificial Sequence: Synthetic oligonucleotide
uucagugauaguagcugau

SEQ ID NO: 1081089 - RNA, 19 nt, Artificial Sequence
  Description of Artificial Sequence: Synthetic oligonucleotide
gaacaaaggagccuccugu

SEQ ID NO: 1081090 - RNA, 19 nt, Artificial Sequence
  Description of Artificial Sequence: Synthetic oligonucleotide
gauaaaugaccauucugau

SEQ ID NO: 1081091 - RNA, 19 nt, Artificial Sequence
  Description of Artificial Sequence: Synthetic oligonucleotide
gacaaauuuacaacucgaa

SEQ ID NO: 1081092 - RNA, 19 nt, Artificial Sequence
  Description of Artificial Sequence: Synthetic oligonucleotide
ugucacccauuauaagaca

SEQ ID NO: 1081093 - RNA, 19 nt, Artificial Sequence
  Description of Artificial Sequence: Synthetic oligonucleotide
guuggauuguuaccaucgc

SEQ ID NO: 1081094 - RNA, 19 nt, Artificial Sequence
  Description of Artificial Sequence: Synthetic oligonucleotide
cacgccuuuccucuggaag

SEQ ID NO: 1081095 - RNA, 19 nt, Artificial Sequence
  Description of Artificial Sequence: Synthetic oligonucleotide
uguugcaaauucuccguua

SEQ ID NO: 1081096 - RNA, 19 nt, Artificial Sequence
  Description of Artificial Sequence: Synthetic oligonucleotide
uugagcaugaauggcugcu

SEQ ID NO: 1081097 - RNA, 19 nt, Artificial Sequence
  Description of Artificial Sequence: Synthetic oligonucleotide
cacuaguagacaaucucca

SEQ ID NO: 1081098 - RNA, 19 nt, Artificial Sequence
  Description of Artificial Sequence: Synthetic oligonucleotide
ggugccugcauuuaaaaua

SEQ ID NO: 1081099 - RNA, 19 nt, Artificial Sequence
  Description of Artificial Sequence: Synthetic oligonucleotide
augaugaucucuucugcuu

SEQ ID NO: 1081100 - RNA, 19 nt, Artificial Sequence
  Description of Artificial Sequence: Synthetic oligonucleotide
agcaccucagcccauguua

SEQ ID NO: 1081101 - RNA, 19 nt, Artificial Sequence
  Description of Artificial Sequence: Synthetic oligonucleotide
ggauauauuguuagauuug

SEQ ID NO: 1081102 - RNA, 19 nt, Artificial Sequence
  Description of Artificial Sequence: Synthetic oligonucleotide
gaauauuggggcaggcuuc

SEQ ID NO: 1081103 - RNA, 19 nt, Artificial Sequence
  Description of Artificial Sequence: Synthetic oligonucleotide
acgccuuuccucuggaaga

SEQ ID NO: 1081104 - RNA, 19 nt, Artificial Sequence
  Description of Artificial Sequence: Synthetic oligonucleotide
uagguguucuagucugggc

SEQ ID NO: 1081105 - RNA, 19 nt, Artificial Sequence
  Description of Artificial Sequence: Synthetic oligonucleotide
guugcaaauucuccguuaa

SEQ ID NO: 1081106 - RNA, 19 nt, Artificial Sequence
  Description of Artificial Sequence: Synthetic oligonucleotide
cacagaauaaaacuguaau

SEQ ID NO: 1081107 - RNA, 19 nt, Artificial Sequence
  Description of Artificial Sequence: Synthetic oligonucleotide
aacuauuaaggaacaugau

SEQ ID NO: 1081108 - RNA, 19 nt, Artificial Sequence
  Description of Artificial Sequence: Synthetic oligonucleotide
agaagcugguaucuaggau

SEQ ID NO: 1081109 - RNA, 19 nt, Artificial Sequence
  Description of Artificial Sequence: Synthetic oligonucleotide
agagggaaacugcaguuua

SEQ ID NO: 1081110 - RNA, 19 nt, Artificial Sequence
  Description of Artificial Sequence: Synthetic oligonucleotide
gacuuucauaggacaacag

SEQ ID NO: 1081111 - RNA, 19 nt, Artificial Sequence
  Description of Artificial Sequence: Synthetic oligonucleotide
agcaugaauggcugcugug

SEQ ID NO: 1081112 - RNA, 19 nt, Artificial Sequence
  Description of Artificial Sequence: Synthetic oligonucleotide
cauuauaagacagcaggaa

SEQ ID NO: 1081113 - RNA, 19 nt, Artificial Sequence
  Description of Artificial Sequence: Synthetic oligonucleotide
uaugaggcacagcuggcuu

SEQ ID NO: 1081114 - RNA, 19 nt, Artificial Sequence
  Description of Artificial Sequence: Synthetic oligonucleotide
aaugguccuuucccaaguu

SEQ ID NO: 1081115 - RNA, 19 nt, Artificial Sequence
  Description of Artificial Sequence: Synthetic oligonucleotide
cuagucugggcagguaugc

SEQ ID NO: 1081116 - RNA, 19 nt, Artificial Sequence
  Description of Artificial Sequence: Synthetic oligonucleotide
accaaucuuggcaaugaug

SEQ ID NO: 1081117 - RNA, 19 nt, Artificial Sequence
  Description of Artificial Sequence: Synthetic oligonucleotide
gagaagacgugacagcagu

SEQ ID NO: 1081118 - RNA, 19 nt, Artificial Sequence
  Description of Artificial Sequence: Synthetic oligonucleotide
acagcuggcuuucaucaau

SEQ ID NO: 1081119 - RNA, 19 nt, Artificial Sequence
  Description of Artificial Sequence: Synthetic oligonucleotide
ccaacuauuaaggaacaug

SEQ ID NO: 1081120 - RNA, 19 nt, Artificial Sequence
  Description of Artificial Sequence: Synthetic oligonucleotide
gcuuucaucaauggcuggg

SEQ ID NO: 1081121 - RNA, 19 nt, Artificial Sequence
  Description of Artificial Sequence: Synthetic oligonucleotide
cuaauacuuucuguucaug

SEQ ID NO: 1081122 - RNA, 19 nt, Artificial Sequence
  Description of Artificial Sequence: Synthetic oligonucleotide
acguucacuggccuuucug

SEQ ID NO: 1081123 - RNA, 19 nt, Artificial Sequence
  Description of Artificial Sequence: Synthetic oligonucleotide
agggguuucuagugcagga

SEQ ID NO: 1081124 - RNA, 19 nt, Artificial Sequence
  Description of Artificial Sequence: Synthetic oligonucleotide
ucgaauauuggggcaggcu

SEQ ID NO: 1081125 - RNA, 19 nt, Artificial Sequence
  Description of Artificial Sequence: Synthetic oligonucleotide
gucaacucuucuaccaaug

SEQ ID NO: 1081126 - RNA, 19 nt, Artificial Sequence
  Description of Artificial Sequence: Synthetic oligonucleotide
uggacgaacaaaggagccu

SEQ ID NO: 1081127 - RNA, 19 nt, Artificial Sequence
  Description of Artificial Sequence: Synthetic oligonucleotide
cugcaauaagaaucacuuc

SEQ ID NO: 1081128 - RNA, 19 nt, Artificial Sequence
  Description of Artificial Sequence: Synthetic oligonucleotide
acaauucacggcacacuuc

SEQ ID NO: 1081129 - RNA, 19 nt, Artificial Sequence
  Description of Artificial Sequence: Synthetic oligonucleotide
ucgcacuaguagacaaucu

SEQ ID NO: 1081130 - RNA, 19 nt, Artificial Sequence
  Description of Artificial Sequence: Synthetic oligonucleotide
agccuuuauuauucuauua

SEQ ID NO: 1081131 - RNA, 19 nt, Artificial Sequence
  Description of Artificial Sequence: Synthetic oligonucleotide
gcacuaguagacaaucucc

SEQ ID NO: 1081132 - RNA, 19 nt, Artificial Sequence
  Description of Artificial Sequence: Synthetic oligonucleotide
gggcagguaugcuaugagg

SEQ ID NO: 1081133 - RNA, 19 nt, Artificial Sequence
  Description of Artificial Sequence: Synthetic oligonucleotide
uuguuaccaucgcacuagu

SEQ ID NO: 1081134 - RNA, 19 nt, Artificial Sequence
  Description of Artificial Sequence: Synthetic oligonucleotide
caucagauccaucuucuaa

SEQ ID NO: 1081135 - RNA, 19 nt, Artificial Sequence
  Description of Artificial Sequence: Synthetic oligonucleotide
ugcaccgcgagucccucac

SEQ ID NO: 1081136 - RNA, 19 nt, Artificial Sequence
  Description of Artificial Sequence: Synthetic oligonucleotide
uuccucaaggauuggccau

SEQ ID NO: 1081137 - RNA, 19 nt, Artificial Sequence
  Description of Artificial Sequence: Synthetic oligonucleotide
aagaaucacuucaucccaa

SEQ ID NO: 1081138 - RNA, 19 nt, Artificial Sequence
  Description of Artificial Sequence: Synthetic oligonucleotide
uaaucaagcucagcuccac

SEQ ID NO: 1081139 - RNA, 19 nt, Artificial Sequence
  Description of Artificial Sequence: Synthetic oligonucleotide
uggaaucuggcaacugcuu

SEQ ID NO: 1081140 - RNA, 19 nt, Artificial Sequence
  Description of Artificial Sequence: Synthetic oligonucleotide
aaccaacaguuuguacuug

SEQ ID NO: 1081141 - RNA, 19 nt, Artificial Sequence
  Description of Artificial Sequence: Synthetic oligonucleotide
aguagguguucuagucugg

SEQ ID NO: 1081142 - RNA, 19 nt, Artificial Sequence
  Description of Artificial Sequence: Synthetic oligonucleotide
cuaggaugggcugacagaa

SEQ ID NO: 1081143 - RNA, 19 nt, Artificial Sequence
  Description of Artificial Sequence: Synthetic oligonucleotide
aaacgcacuguugcaaauu

SEQ ID NO: 1081144 - RNA, 19 nt, Artificial Sequence
  Description of Artificial Sequence: Synthetic oligonucleotide
ugggugccugcauuuaaaa

SEQ ID NO: 1081145 - RNA, 19 nt, Artificial Sequence
  Description of Artificial Sequence: Synthetic oligonucleotide
augucagaaaugaguaggu

SEQ ID NO: 1081146 - RNA, 19 nt, Artificial Sequence
  Description of Artificial Sequence: Synthetic oligonucleotide
ugucuggauccggaugucc

SEQ ID NO: 1081147 - RNA, 19 nt, Artificial Sequence
  Description of Artificial Sequence: Synthetic oligonucleotide
cuccuagccagaguccugc

SEQ ID NO: 1081148 - RNA, 19 nt, Artificial Sequence
  Description of Artificial Sequence: Synthetic oligonucleotide
guugguuugagcauuugau

SEQ ID NO: 1081149 - RNA, 19 nt, Artificial Sequence
  Description of Artificial Sequence: Synthetic oligonucleotide
auaggacaacagaaguucu

SEQ ID NO: 1081150 - RNA, 19 nt, Artificial Sequence
  Description of Artificial Sequence: Synthetic oligonucleotide
cuuguuuacuuccaacuau

SEQ ID NO: 1081151 - RNA, 19 nt, Artificial Sequence
  Description of Artificial Sequence: Synthetic oligonucleotide
ggauugucccacucgacuc

SEQ ID NO: 1081152 - RNA, 19 nt, Artificial Sequence
  Description of Artificial Sequence: Synthetic oligonucleotide
uucccaaguuggauuguua

SEQ ID NO: 1081153 - RNA, 19 nt, Artificial Sequence
  Description of Artificial Sequence: Synthetic oligonucleotide
agaagacgugacagcaguc

SEQ ID NO: 1081154 - RNA, 19 nt, Artificial Sequence
  Description of Artificial Sequence: Synthetic oligonucleotide
cacccauuauaagacagca

SEQ ID NO: 1081155 - RNA, 19 nt, Artificial Sequence
  Description of Artificial Sequence: Synthetic oligonucleotide
aaaggucuaguaaccucau

SEQ ID NO: 1081156 - RNA, 19 nt, Artificial Sequence
  Description of Artificial Sequence: Synthetic oligonucleotide
uguuaccaucgcacuagua

SEQ ID NO: 1081157 - RNA, 19 nt, Artificial Sequence
  Description of Artificial Sequence: Synthetic oligonucleotide
acgucaacucuucuaccaa

SEQ ID NO: 1081158 - RNA, 19 nt, Artificial Sequence
  Description of Artificial Sequence: Synthetic oligonucleotide
aauucuccguuaacgucaa

SEQ ID NO: 1081159 - RNA, 19 nt, Artificial Sequence
  Description of Artificial Sequence: Synthetic oligonucleotide
aacgcuucuuaagggcagu

SEQ ID NO: 1081160 - RNA, 19 nt, Artificial Sequence
  Description of Artificial Sequence: Synthetic oligonucleotide
aaggucuaguaaccucauu

SEQ ID NO: 1081161 - RNA, 19 nt, Artificial Sequence
  Description of Artificial Sequence: Synthetic oligonucleotide
guuuugcacccaauuccag

SEQ ID NO: 1081162 - RNA, 19 nt, Artificial Sequence
  Description of Artificial Sequence: Synthetic oligonucleotide
gucagagggaaacugcagu

SEQ ID NO: 1081163 - RNA, 19 nt, Artificial Sequence
  Description of Artificial Sequence: Synthetic oligonucleotide
agggcaguaagaaaaucua

SEQ ID NO: 1081164 - RNA, 19 nt, Artificial Sequence
  Description of Artificial Sequence: Synthetic oligonucleotide
agguacugcaaggacggga

SEQ ID NO: 1081165 - RNA, 19 nt, Artificial Sequence
  Description of Artificial Sequence: Synthetic oligonucleotide
cauuugaucuucagugaua

SEQ ID NO: 1081166 - RNA, 19 nt, Artificial Sequence
  Description of Artificial Sequence: Synthetic oligonucleotide
cacggcacacuuccacagg

SEQ ID NO: 1081167 - RNA, 19 nt, Artificial Sequence
  Description of Artificial Sequence: Synthetic oligonucleotide
ggacaaauuuacaacucga

SEQ ID NO: 1081168 - RNA, 19 nt, Artificial Sequence
  Description of Artificial Sequence: Synthetic oligonucleotide
uccggauguccaccagccc

SEQ ID NO: 1081169 - RNA, 19 nt, Artificial Sequence
  Description of Artificial Sequence: Synthetic oligonucleotide
aguuggaguuggugaguca

SEQ ID NO: 1081170 - RNA, 19 nt, Artificial Sequence
  Description of Artificial Sequence: Synthetic oligonucleotide
guaucuaggaugggcugac

SEQ ID NO: 1081171 - RNA, 19 nt, Artificial Sequence
  Description of Artificial Sequence: Synthetic oligonucleotide
cagaguccugccacaggag

SEQ ID NO: 1081172 - RNA, 19 nt, Artificial Sequence
  Description of Artificial Sequence: Synthetic oligonucleotide
ccaaguuggauuguuacca

SEQ ID NO: 1081173 - RNA, 19 nt, Artificial Sequence
  Description of Artificial Sequence: Synthetic oligonucleotide
caccgcgagucccucacgc

SEQ ID NO: 1081174 - RNA, 19 nt, Artificial Sequence
  Description of Artificial Sequence: Synthetic oligonucleotide
gacgaacaaaggagccucc

SEQ ID NO: 1081175 - RNA, 19 nt, Artificial Sequence
  Description of Artificial Sequence: Synthetic oligonucleotide
aggcucuguaauuuaucua

SEQ ID NO: 1081176 - RNA, 19 nt, Artificial Sequence
  Description of Artificial Sequence: Synthetic oligonucleotide
cucugcaauaagaaucacu

SEQ ID NO: 1081177 - RNA, 19 nt, Artificial Sequence
  Description of Artificial Sequence: Synthetic oligonucleotide
guauagaagaaaguccaau

SEQ ID NO: 1081178 - RNA, 19 nt, Artificial Sequence
  Description of Artificial Sequence: Synthetic oligonucleotide
guaaucaagcucagcucca

SEQ ID NO: 1081179 - RNA, 19 nt, Artificial Sequence
  Description of Artificial Sequence: Synthetic oligonucleotide
caacucgaauauuggggca

SEQ ID NO: 1081180 - RNA, 19 nt, Artificial Sequence
  Description of Artificial Sequence: Synthetic oligonucleotide
guaggcucuguaauuuauc

SEQ ID NO: 1081181 - RNA, 19 nt, Artificial Sequence
  Description of Artificial Sequence: Synthetic oligonucleotide
ggacaacagaaguucugac

SEQ ID NO: 1081182 - RNA, 19 nt, Artificial Sequence
  Description of Artificial Sequence: Synthetic oligonucleotide
uuucccaaguuggauuguu

SEQ ID NO: 1081183 - RNA, 19 nt, Artificial Sequence
  Description of Artificial Sequence: Synthetic oligonucleotide
cuccacgccuuuccucugg

SEQ ID NO: 1081184 - RNA, 19 nt, Artificial Sequence
  Description of Artificial Sequence: Synthetic oligonucleotide
uccaacuauuaaggaacau

SEQ ID NO: 1081185 - RNA, 19 nt, Artificial Sequence
  Description of Artificial Sequence: Synthetic oligonucleotide
uggcaacugcuuuucuaau

SEQ ID NO: 1081186 - RNA, 19 nt, Artificial Sequence
  Description of Artificial Sequence: Synthetic oligonucleotide
ggguuucuagugcaggaca

SEQ ID NO: 1081187 - RNA, 19 nt, Artificial Sequence
  Description of Artificial Sequence: Synthetic oligonucleotide
ccauuauaagacagcagga

SEQ ID NO: 1081188 - RNA, 19 nt, Artificial Sequence
  Description of Artificial Sequence: Synthetic oligonucleotide
cauugacuaccagguacug

SEQ ID NO: 1081189 - RNA, 19 nt, Artificial Sequence
  Description of Artificial Sequence: Synthetic oligonucleotide
ggacgaacaaaggagccuc

SEQ ID NO: 1081190 - RNA, 19 nt, Artificial Sequence
  Description of Artificial Sequence: Synthetic oligonucleotide
ccacucgacuccuagccag

SEQ ID NO: 1081191 - RNA, 19 nt, Artificial Sequence
  Description of Artificial Sequence: Synthetic oligonucleotide
cucgaauauuggggcaggc

SEQ ID NO: 1081192 - RNA, 19 nt, Artificial Sequence
  Description of Artificial Sequence: Synthetic oligonucleotide
gaccauucugauauuuggu

SEQ ID NO: 1081193 - RNA, 19 nt, Artificial Sequence
  Description of Artificial Sequence: Synthetic oligonucleotide
acgaacaaaggagccuccu

SEQ ID NO: 1081194 - RNA, 19 nt, Artificial Sequence
  Description of Artificial Sequence: Synthetic oligonucleotide
gugcaccauauuugcagca

SEQ ID NO: 1081195 - RNA, 19 nt, Artificial Sequence
  Description of Artificial Sequence: Synthetic oligonucleotide
agggaaacugcaguuuauu

SEQ ID NO: 1081196 - RNA, 19 nt, Artificial Sequence
  Description of Artificial Sequence: Synthetic oligonucleotide
agguaugcuaugaggcaca

SEQ ID NO: 1081197 - RNA, 19 nt, Artificial Sequence
  Description of Artificial Sequence: Synthetic oligonucleotide
auucuccguuaacgucaac

SEQ ID NO: 1081198 - RNA, 19 nt, Artificial Sequence
  Description of Artificial Sequence: Synthetic oligonucleotide
uccuagccagaguccugcc

SEQ ID NO: 1081199 - RNA, 19 nt, Artificial Sequence
  Description of Artificial Sequence: Synthetic oligonucleotide
accaucgcacuaguagaca

SEQ ID NO: 1081200 - RNA, 19 nt, Artificial Sequence
  Description of Artificial Sequence: Synthetic oligonucleotide
uccuguugggugccugcau

SEQ ID NO: 1081201 - RNA, 19 nt, Artificial Sequence
  Description of Artificial Sequence: Synthetic oligonucleotide
caucugggaaauguauaga

SEQ ID NO: 1081202 - RNA, 19 nt, Artificial Sequence
  Description of Artificial Sequence: Synthetic oligonucleotide
gagcaugaauggcugcugu

SEQ ID NO: 1081203 - RNA, 19 nt, Artificial Sequence
  Description of Artificial Sequence: Synthetic oligonucleotide
aggacguucacuggccuuu

SEQ ID NO: 1081204 - RNA, 19 nt, Artificial Sequence
  Description of Artificial Sequence: Synthetic oligonucleotide
gguacugcaaggacgggaa

SEQ ID NO: 1081205 - RNA, 19 nt, Artificial Sequence
  Description of Artificial Sequence: Synthetic oligonucleotide
gguaucuaggaugggcuga

SEQ ID NO: 1081206 - RNA, 19 nt, Artificial Sequence
  Description of Artificial Sequence: Synthetic oligonucleotide
caugauuuuccaucaucau

SEQ ID NO: 1081207 - RNA, 19 nt, Artificial Sequence
  Description of Artificial Sequence: Synthetic oligonucleotide
guuagaggaaaggucuagu

SEQ ID NO: 1081208 - RNA, 19 nt, Artificial Sequence
  Description of Artificial Sequence: Synthetic oligonucleotide
agacgugacagcagucccu

SEQ ID NO: 1081209 - RNA, 19 nt, Artificial Sequence
  Description of Artificial Sequence: Synthetic oligonucleotide
cccauuuuauuuaggacua

SEQ ID NO: 1081210 - RNA, 19 nt, Artificial Sequence
  Description of Artificial Sequence: Synthetic oligonucleotide
uguugggugccugcauuua

SEQ ID NO: 1081211 - RNA, 19 nt, Artificial Sequence
  Description of Artificial Sequence: Synthetic oligonucleotide
cucauugauaaaugaccau

SEQ ID NO: 1081212 - RNA, 19 nt, Artificial Sequence
  Description of Artificial Sequence: Synthetic oligonucleotide
gacgggaacauggauguuu

SEQ ID NO: 1081213 - RNA, 19 nt, Artificial Sequence
  Description of Artificial Sequence: Synthetic oligonucleotide
gacuccuagccagaguccu

SEQ ID NO: 1081214 - RNA, 19 nt, Artificial Sequence
  Description of Artificial Sequence: Synthetic oligonucleotide
caugaauggcugcuguggu

SEQ ID NO: 1081215 - RNA, 19 nt, Artificial Sequence
  Description of Artificial Sequence: Synthetic oligonucleotide
gguaugcuaugaggcacag

SEQ ID NO: 1081216 - RNA, 19 nt, Artificial Sequence
  Description of Artificial Sequence: Synthetic oligonucleotide
guacugcaaggacgggaac

SEQ ID NO: 1081217 - RNA, 19 nt, Artificial Sequence
  Description of Artificial Sequence: Synthetic oligonucleotide
guaugcuaugaggcacagc

SEQ ID NO: 1081218 - RNA, 19 nt, Artificial Sequence
  Description of Artificial Sequence: Synthetic oligonucleotide
ggauuguuaccaucgcacu

SEQ ID NO: 1081219 - RNA, 19 nt, Artificial Sequence
  Description of Artificial Sequence: Synthetic oligonucleotide
accgcgagucccucacgcu

SEQ ID NO: 1081220 - RNA, 19 nt, Artificial Sequence
  Description of Artificial Sequence: Synthetic oligonucleotide
gauuugagguaaaguuccu

SEQ ID NO: 1081221 - RNA, 19 nt, Artificial Sequence
  Description of Artificial Sequence: Synthetic oligonucleotide
acgggaacauggauguuuu

SEQ ID NO: 1081222 - RNA, 19 nt, Artificial Sequence
  Description of Artificial Sequence: Synthetic oligonucleotide
cuccguuaacgucaacucu

SEQ ID NO: 1081223 - RNA, 19 nt, Artificial Sequence
  Description of Artificial Sequence: Synthetic oligonucleotide
ggucuaguaaccucauuuu

SEQ ID NO: 1081224 - RNA, 19 nt, Artificial Sequence
  Description of Artificial Sequence: Synthetic oligonucleotide
caggugcaccauauuugca

SEQ ID NO: 1081225 - RNA, 19 nt, Artificial Sequence
  Description of Artificial Sequence: Synthetic oligonucleotide
ugcucucaauuggcucugc

SEQ ID NO: 1081226 - RNA, 19 nt, Artificial Sequence
  Description of Artificial Sequence: Synthetic oligonucleotide
acgcacuguugcaaauucu

SEQ ID NO: 1081227 - RNA, 19 nt, Artificial Sequence
  Description of Artificial Sequence: Synthetic oligonucleotide
gggguuucuagugcaggac

SEQ ID NO: 1081228 - RNA, 19 nt, Artificial Sequence
  Description of Artificial Sequence: Synthetic oligonucleotide
ggauccggauguccaccag

SEQ ID NO: 1081229 - RNA, 19 nt, Artificial Sequence
  Description of Artificial Sequence: Synthetic oligonucleotide
ccguuaacgucaacucuuc

SEQ ID NO: 1081230 - RNA, 19 nt, Artificial Sequence
  Description of Artificial Sequence: Synthetic oligonucleotide
acuccuagccagaguccug

SEQ ID NO: 1081231 - RNA, 19 nt, Artificial Sequence
  Description of Artificial Sequence: Synthetic oligonucleotide
cacucgacuccuagccaga

SEQ ID NO: 1081232 - RNA, 19 nt, Artificial Sequence
  Description of Artificial Sequence: Synthetic oligonucleotide
caaguuggauuguuaccau

SEQ ID NO: 1081233 - RNA, 19 nt, Artificial Sequence
  Description of Artificial Sequence: Synthetic oligonucleotide
caguuuguacuuguuuacu

SEQ ID NO: 1081234 - RNA, 19 nt, Artificial Sequence
  Description of Artificial Sequence: Synthetic oligonucleotide
gucauggaaucuggcaacu

SEQ ID NO: 1081235 - RNA, 19 nt, Artificial Sequence
  Description of Artificial Sequence: Synthetic oligonucleotide
cuaugaggcacagcuggcu

SEQ ID NO: 1081236 - RNA, 19 nt, Artificial Sequence
  Description of Artificial Sequence: Synthetic oligonucleotide
ccaucgcacuaguagacaa

SEQ ID NO: 1081237 - RNA, 19 nt, Artificial Sequence
  Description of Artificial Sequence: Synthetic oligonucleotide
gagggaaacugcaguuuau

SEQ ID NO: 1081238 - RNA, 19 nt, Artificial Sequence
  Description of Artificial Sequence: Synthetic oligonucleotide
gacgugacagcagucccuu

SEQ ID NO: 1081239 - RNA, 19 nt, Artificial Sequence
  Description of Artificial Sequence: Synthetic oligonucleotide
caucgcacuaguagacaau

SEQ ID NO: 1081240 - RNA, 19 nt, Artificial Sequence
  Description of Artificial Sequence: Synthetic oligonucleotide
gucugggcagguaugcuau

SEQ ID NO: 1081241 - RNA, 19 nt, Artificial Sequence
  Description of Artificial Sequence: Synthetic oligonucleotide
caaggacgggaacauggau

SEQ ID NO: 1081242 - RNA, 19 nt, Artificial Sequence
  Description of Artificial Sequence: Synthetic oligonucleotide
gacguucacuggccuuucu

SEQ ID NO: 1081243 - RNA, 19 nt, Artificial Sequence
  Description of Artificial Sequence: Synthetic oligonucleotide
cgacuccuagccagagucc

SEQ ID NO: 1081244 - RNA, 19 nt, Artificial Sequence
  Description of Artificial Sequence: Synthetic oligonucleotide
agcagucccuuuaccuuuu

SEQ ID NO: 1081245 - RNA, 19 nt, Artificial Sequence
  Description of Artificial Sequence: Synthetic oligonucleotide
cucaaggauuggccaugaa

SEQ ID NO: 1081246 - RNA, 19 nt, Artificial Sequence
  Description of Artificial Sequence: Synthetic oligonucleotide
acgcuucuuaagggcagua

SEQ ID NO: 1081247 - RNA, 19 nt, Artificial Sequence
  Description of Artificial Sequence: Synthetic oligonucleotide
ccgcgagucccucacgcuc

SEQ ID NO: 1081248 - RNA, 19 nt, Artificial Sequence
  Description of Artificial Sequence: Synthetic oligonucleotide
guucuagucugggcaggua

SEQ ID NO: 1081249 - RNA, 19 nt, Artificial Sequence
  Description of Artificial Sequence: Synthetic oligonucleotide
gcaccgcgagucccucacg

SEQ ID NO: 1081250 - RNA, 19 nt, Artificial Sequence
  Description of Artificial Sequence: Synthetic oligonucleotide
ccuagccagaguccugcca

SEQ ID NO: 1081251 - RNA, 19 nt, Artificial Sequence
  Description of Artificial Sequence: Synthetic oligonucleotide
cgaauauuggggcaggcuu

SEQ ID NO: 1081252 - RNA, 19 nt, Artificial Sequence
  Description of Artificial Sequence: Synthetic oligonucleotide
acgugacagcagucccuuu

SEQ ID NO: 1081253 - RNA, 19 nt, Artificial Sequence
  Description of Artificial Sequence: Synthetic oligonucleotide
gcucugcaauaagaaucac

SEQ ID NO: 1081254 - RNA, 19 nt, Artificial Sequence
  Description of Artificial Sequence: Synthetic oligonucleotide
caucaauggcuggguuaga

SEQ ID NO: 1081255 - RNA, 19 nt, Artificial Sequence
  Description of Artificial Sequence: Synthetic oligonucleotide
gcacaauucacggcacacu

SEQ ID NO: 1081256 - RNA, 19 nt, Artificial Sequence
  Description of Artificial Sequence: Synthetic oligonucleotide
gcuccacgccuuuccucug

SEQ ID NO: 1081257 - RNA, 19 nt, Artificial Sequence
  Description of Artificial Sequence: Synthetic oligonucleotide
cucgacuccuagccagagu

SEQ ID NO: 1081258 - RNA, 19 nt, Artificial Sequence
  Description of Artificial Sequence: Synthetic oligonucleotide
ggguuagaggaaaggucua

SEQ ID NO: 1081259 - RNA, 19 nt, Artificial Sequence
  Description of Artificial Sequence: Synthetic oligonucleotide
cuuucccaaguuggauugu

SEQ ID NO: 1081260 - RNA, 19 nt, Artificial Sequence
  Description of Artificial Sequence: Synthetic oligonucleotide
ggcaggcuucagcaauucu

SEQ ID NO: 1081261 - RNA, 19 nt, Artificial Sequence
  Description of Artificial Sequence: Synthetic oligonucleotide
acgcucucucagcgacgaa

SEQ ID NO: 1081262 - RNA, 19 nt, Artificial Sequence
  Description of Artificial Sequence: Synthetic oligonucleotide
ggacguucacuggccuuuc

SEQ ID NO: 1081263 - RNA, 19 nt, Artificial Sequence
  Description of Artificial Sequence: Synthetic oligonucleotide
cuaaugcauaacgcuucuu

SEQ ID NO: 1081264 - RNA, 19 nt, Artificial Sequence
  Description of Artificial Sequence: Synthetic oligonucleotide
gcaggacguucacuggccu

SEQ ID NO: 1081265 - RNA, 19 nt, Artificial Sequence
  Description of Artificial Sequence: Synthetic oligonucleotide
caggacguucacuggccuu

SEQ ID NO: 1081266 - RNA, 19 nt, Artificial Sequence
  Description of Artificial Sequence: Synthetic oligonucleotide
cgggaacauggauguuuug

SEQ ID NO: 1081267 - RNA, 19 nt, Artificial Sequence
  Description of Artificial Sequence: Synthetic oligonucleotide
gcaccucagcccauguuau

SEQ ID NO: 1081268 - RNA, 19 nt, Artificial Sequence
  Description of Artificial Sequence: Synthetic oligonucleotide
cgucaacucuucuaccaau

SEQ ID NO: 1081269 - RNA, 19 nt, Artificial Sequence
  Description of Artificial Sequence: Synthetic oligonucleotide
cguuaacgucaacucuucu

SEQ ID NO: 1081270 - RNA, 19 nt, Artificial Sequence
  Description of Artificial Sequence: Synthetic oligonucleotide
ccacgccuuuccucuggaa

SEQ ID NO: 1081271 - RNA, 19 nt, Artificial Sequence
  Description of Artificial Sequence: Synthetic oligonucleotide
ggacgggaacauggauguu

SEQ ID NO: 1081272 - RNA, 19 nt, Artificial Sequence
  Description of Artificial Sequence: Synthetic oligonucleotide
cgagucccucacgcucucu

SEQ ID NO: 1081273 - RNA, 19 nt, Artificial Sequence
  Description of Artificial Sequence: Synthetic oligonucleotide
uuaguuauaguaaacagga

SEQ ID NO: 1081274 - RNA, 19 nt, Artificial Sequence
  Description of Artificial Sequence: Synthetic oligonucleotide
acugauuacgguuuaaagc

SEQ ID NO: 1081275 - RNA, 19 nt, Artificial Sequence
  Description of Artificial Sequence: Synthetic oligonucleotide
aguaaugauguuuggaugc

SEQ ID NO: 1081276 - RNA, 19 nt, Artificial Sequence
  Description of Artificial Sequence: Synthetic oligonucleotide
ugagccaacaccaauaucc

SEQ ID NO: 1081277 - RNA, 19 nt, Artificial Sequence
  Description of Artificial Sequence: Synthetic oligonucleotide
uggauuaccagauucaucc

SEQ ID NO: 1081278 - RNA, 19 nt, Artificial Sequence
  Description of Artificial Sequence: Synthetic oligonucleotide
uuuagaguaaugauguuug

SEQ ID NO: 1081279 - RNA, 19 nt, Artificial Sequence
  Description of Artificial Sequence: Synthetic oligonucleotide
aacaauugaaugcacacca

SEQ ID NO: 1081280 - RNA, 19 nt, Artificial Sequence
  Description of Artificial Sequence: Synthetic oligonucleotide
uguuuaguugguauugugg

SEQ ID NO: 1081281 - RNA, 19 nt, Artificial Sequence
  Description of Artificial Sequence: Synthetic oligonucleotide
aaguucuguuacuacauac

SEQ ID NO: 1081282 - RNA, 19 nt, Artificial Sequence
  Description of Artificial Sequence: Synthetic oligonucleotide
uuugcuguaucugaaacgg

SEQ ID NO: 1081283 - RNA, 19 nt, Artificial Sequence
  Description of Artificial Sequence: Synthetic oligonucleotide
aguuauaguaaacaggaca

SEQ ID NO: 1081284 - RNA, 19 nt, Artificial Sequence
  Description of Artificial Sequence: Synthetic oligonucleotide
ucuguuacuacauacacau

SEQ ID NO: 1081285 - RNA, 19 nt, Artificial Sequence
  Description of Artificial Sequence: Synthetic oligonucleotide
aaccuugucguuucaaaac

SEQ ID NO: 1081286 - RNA, 19 nt, Artificial Sequence
  Description of Artificial Sequence: Synthetic oligonucleotide
uggaguaucaucaggacca

SEQ ID NO: 1081287 - RNA, 19 nt, Artificial Sequence
  Description of Artificial Sequence: Synthetic oligonucleotide
ugcaaacagaguaugagcc

SEQ ID NO: 1081288 - RNA, 19 nt, Artificial Sequence
  Description of Artificial Sequence: Synthetic oligonucleotide
uuuacgaucuuuuccuugg

SEQ ID NO: 1081289 - RNA, 19 nt, Artificial Sequence
  Description of Artificial Sequence: Synthetic oligonucleotide
ugagguaauagcaacaaaa

SEQ ID NO: 1081290 - RNA, 19 nt, Artificial Sequence
  Description of Artificial Sequence: Synthetic oligonucleotide
aagaccaccagucagcacu

SEQ ID NO: 1081291 - RNA, 19 nt, Artificial Sequence
  Description of Artificial Sequence: Synthetic oligonucleotide
agcaacaaaacuaaacccc

SEQ ID NO: 1081292 - RNA, 19 nt, Artificial Sequence
  Description of Artificial Sequence: Synthetic oligonucleotide
ugcaguauaacaaggaguc

SEQ ID NO: 1081293 - RNA, 19 nt, Artificial Sequence
  Description of Artificial Sequence: Synthetic oligonucleotide
ucguaaaagacucugggcu

SEQ ID NO: 1081294 - RNA, 19 nt, Artificial Sequence
  Description of Artificial Sequence: Synthetic oligonucleotide
aauucgaauagauucugga

SEQ ID NO: 1081295 - RNA, 19 nt, Artificial Sequence
  Description of Artificial Sequence: Synthetic oligonucleotide
aauaccucuccguugagca

SEQ ID NO: 1081296 - RNA, 19 nt, Artificial Sequence
  Description of Artificial Sequence: Synthetic oligonucleotide
auucguaaaagacucuggg

SEQ ID NO: 1081297 - RNA, 19 nt, Artificial Sequence
  Description of Artificial Sequence: Synthetic oligonucleotide
uuuugcaguaaacucagga

SEQ ID NO: 1081298 - RNA, 19 nt, Artificial Sequence
  Description of Artificial Sequence: Synthetic oligonucleotide
uccauaacgaagaagaauu

SEQ ID NO: 1081299 - RNA, 19 nt, Artificial Sequence
  Description of Artificial Sequence: Synthetic oligonucleotide
guuauaguaaacaggacag

SEQ ID NO: 1081300 - RNA, 19 nt, Artificial Sequence
  Description of Artificial Sequence: Synthetic oligonucleotide
uuaaagcagaguauguagc

SEQ ID NO: 1081301 - RNA, 19 nt, Artificial Sequence
  Description of Artificial Sequence: Synthetic oligonucleotide
acuaguuuauuccaguucu

SEQ ID NO: 1081302 - RNA, 19 nt, Artificial Sequence
  Description of Artificial Sequence: Synthetic oligonucleotide
aagguaguguaccagugag

SEQ ID NO: 1081303 - RNA, 19 nt, Artificial Sequence
  Description of Artificial Sequence: Synthetic oligonucleotide
uguaauugcugaacaauug

SEQ ID NO: 1081304 - RNA, 19 nt, Artificial Sequence
  Description of Artificial Sequence: Synthetic oligonucleotide
gacuccauauaucacaggc

SEQ ID NO: 1081305 - RNA, 19 nt, Artificial Sequence
  Description of Artificial Sequence: Synthetic oligonucleotide
uacgguuuaaagcagagua

SEQ ID NO: 1081306 - RNA, 19 nt, Artificial Sequence
  Description of Artificial Sequence: Synthetic oligonucleotide
ugugcauuagcacuaggug

SEQ ID NO: 1081307 - RNA, 19 nt, Artificial Sequence
  Description of Artificial Sequence: Synthetic oligonucleotide
accuugucguuucaaaacc

SEQ ID NO: 1081308 - RNA, 19 nt, Artificial Sequence
  Description of Artificial Sequence: Synthetic oligonucleotide
aauuucccgcuaccuaucc

SEQ ID NO: 1081309 - RNA, 19 nt, Artificial Sequence
  Description of Artificial Sequence: Synthetic oligonucleotide
aguaugaccucuccgauug

SEQ ID NO: 1081310 - RNA, 19 nt, Artificial Sequence
  Description of Artificial Sequence: Synthetic oligonucleotide
uuuauguauacaucucuug

SEQ ID NO: 1081311 - RNA, 19 nt, Artificial Sequence
  Description of Artificial Sequence: Synthetic oligonucleotide
uucuuuacgaucuuuuccu

SEQ ID NO: 1081312 - RNA, 19 nt, Artificial Sequence
  Description of Artificial Sequence: Synthetic oligonucleotide
aagcauucguaaaagacuc

SEQ ID NO: 1081313 - RNA, 19 nt, Artificial Sequence
  Description of Artificial Sequence: Synthetic oligonucleotide
uagucauuguuucuuuacg

SEQ ID NO: 1081314 - RNA, 19 nt, Artificial Sequence
  Description of Artificial Sequence: Synthetic oligonucleotide
accagauucauccacauaa

SEQ ID NO: 1081315 - RNA, 19 nt, Artificial Sequence
  Description of Artificial Sequence: Synthetic oligonucleotide
uggaguguaaccaguaagc

SEQ ID NO: 1081316 - RNA, 19 nt, Artificial Sequence
  Description of Artificial Sequence: Synthetic oligonucleotide
auauauuccacaguuccac

SEQ ID NO: 1081317 - RNA, 19 nt, Artificial Sequence
  Description of Artificial Sequence: Synthetic oligonucleotide
guugagcaagaguagaacg

SEQ ID NO: 1081318 - RNA, 19 nt, Artificial Sequence
  Description of Artificial Sequence: Synthetic oligonucleotide
uguauaaaggaggacacca

SEQ ID NO: 1081319 - RNA, 19 nt, Artificial Sequence
  Description of Artificial Sequence: Synthetic oligonucleotide
guaagcauuguauaaagga

SEQ ID NO: 1081320 - RNA, 19 nt, Artificial Sequence
  Description of Artificial Sequence: Synthetic oligonucleotide
guuuaguugguauuguggc

SEQ ID NO: 1081321 - RNA, 19 nt, Artificial Sequence
  Description of Artificial Sequence: Synthetic oligonucleotide
cugauuacgguuuaaagca

SEQ ID NO: 1081322 - RNA, 19 nt, Artificial Sequence
  Description of Artificial Sequence: Synthetic oligonucleotide
aaagcauucguaaaagacu

SEQ ID NO: 1081323 - RNA, 19 nt, Artificial Sequence
  Description of Artificial Sequence: Synthetic oligonucleotide
accuaauucuguuugcagg

SEQ ID NO: 1081324 - RNA, 19 nt, Artificial Sequence
  Description of Artificial Sequence: Synthetic oligonucleotide
auugaaugcacaccaacug

SEQ ID NO: 1081325 - RNA, 19 nt, Artificial Sequence
  Description of Artificial Sequence: Synthetic oligonucleotide
ucuccguugagcaagagua

SEQ ID NO: 1081326 - RNA, 19 nt, Artificial Sequence
  Description of Artificial Sequence: Synthetic oligonucleotide
aauuugcaguauaacaagg

SEQ ID NO: 1081327 - RNA, 19 nt, Artificial Sequence
  Description of Artificial Sequence: Synthetic oligonucleotide
auauaucacaggcagcauc

SEQ ID NO: 1081328 - RNA, 19 nt, Artificial Sequence
  Description of Artificial Sequence: Synthetic oligonucleotide
caaaauuugcaguauaaca

SEQ ID NO: 1081329 - RNA, 19 nt, Artificial Sequence
  Description of Artificial Sequence: Synthetic oligonucleotide
uauguauacaucucuugca

SEQ ID NO: 1081330 - RNA, 19 nt, Artificial Sequence
  Description of Artificial Sequence: Synthetic oligonucleotide
ucaacaguuuuaguuauag

SEQ ID NO: 1081331 - RNA, 19 nt, Artificial Sequence
  Description of Artificial Sequence: Synthetic oligonucleotide
aguagaacggccuacuggu

SEQ ID NO: 1081332 - RNA, 19 nt, Artificial Sequence
  Description of Artificial Sequence: Synthetic oligonucleotide
auuagcacuagguggaaug

SEQ ID NO: 1081333 - RNA, 19 nt, Artificial Sequence
  Description of Artificial Sequence: Synthetic oligonucleotide
ugcauuagcacuaggugga

SEQ ID NO: 1081334 - RNA, 19 nt, Artificial Sequence
  Description of Artificial Sequence: Synthetic oligonucleotide
uauuccaguucuauuguug

SEQ ID NO: 1081335 - RNA, 19 nt, Artificial Sequence
  Description of Artificial Sequence: Synthetic oligonucleotide
accaauauccucuuugacu

SEQ ID NO: 1081336 - RNA, 19 nt, Artificial Sequence
  Description of Artificial Sequence: Synthetic oligonucleotide
aguucagccaaguagaauu

SEQ ID NO: 1081337 - RNA, 19 nt, Artificial Sequence
  Description of Artificial Sequence: Synthetic oligonucleotide
gugcauuagcacuaggugg

SEQ ID NO: 1081338 - RNA, 19 nt, Artificial Sequence
  Description of Artificial Sequence: Synthetic oligonucleotide
ucaagaaguauguuuucug

SEQ ID NO: 1081339 - RNA, 19 nt, Artificial Sequence
  Description of Artificial Sequence: Synthetic oligonucleotide
uucgaauagauucuggauu

SEQ ID NO: 1081340 - RNA, 19 nt, Artificial Sequence
  Description of Artificial Sequence: Synthetic oligonucleotide
aucucuugcaaacagagua

SEQ ID NO: 1081341 - RNA, 19 nt, Artificial Sequence
  Description of Artificial Sequence: Synthetic oligonucleotide
cuguccauaacgaagaaga

SEQ ID NO: 1081342 - RNA, 19 nt, Artificial Sequence
  Description of Artificial Sequence: Synthetic oligonucleotide
ugagaagaccauuuucugc

SEQ ID NO: 1081343 - RNA, 19 nt, Artificial Sequence
  Description of Artificial Sequence: Synthetic oligonucleotide
ggugcaacaaaauuugcag

SEQ ID NO: 1081344 - RNA, 19 nt, Artificial Sequence
  Description of Artificial Sequence: Synthetic oligonucleotide
gaguagaacggccuacugg

SEQ ID NO: 1081345 - RNA, 19 nt, Artificial Sequence
  Description of Artificial Sequence: Synthetic oligonucleotide
ucugaaacggaauuccagu

SEQ ID NO: 1081346 - RNA, 19 nt, Artificial Sequence
  Description of Artificial Sequence: Synthetic oligonucleotide
uguggcuuuauguauacau

SEQ ID NO: 1081347 - RNA, 19 nt, Artificial Sequence
  Description of Artificial Sequence: Synthetic oligonucleotide
caauagacuccuuacuuag

SEQ ID NO: 1081348 - RNA, 19 nt, Artificial Sequence
  Description of Artificial Sequence: Synthetic oligonucleotide
uucaucaagaaguauguuu

SEQ ID NO: 1081349 - RNA, 19 nt, Artificial Sequence
  Description of Artificial Sequence: Synthetic oligonucleotide
aucaauaaucuucacugca

SEQ ID NO: 1081350 - RNA, 19 nt, Artificial Sequence
  Description of Artificial Sequence: Synthetic oligonucleotide
uaaccaguaagcauuguau

SEQ ID NO: 1081351 - RNA, 19 nt, Artificial Sequence
  Description of Artificial Sequence: Synthetic oligonucleotide
uugcaguauaacaaggagu

SEQ ID NO: 1081352 - RNA, 19 nt, Artificial Sequence
  Description of Artificial Sequence: Synthetic oligonucleotide
acugagugagaauuucccg

SEQ ID NO: 1081353 - RNA, 19 nt, Artificial Sequence
  Description of Artificial Sequence: Synthetic oligonucleotide
uugcaaacagaguaugagc

SEQ ID NO: 1081354 - RNA, 19 nt, Artificial Sequence
  Description of Artificial Sequence: Synthetic oligonucleotide
aucauaaccuugucguuuc

SEQ ID NO: 1081355 - RNA, 19 nt, Artificial Sequence
  Description of Artificial Sequence: Synthetic oligonucleotide
uucguaaaagacucugggc

SEQ ID NO: 1081356 - RNA, 19 nt, Artificial Sequence
  Description of Artificial Sequence: Synthetic oligonucleotide
agugagaauuucccgcuac

SEQ ID NO: 1081357 - RNA, 19 nt, Artificial Sequence
  Description of Artificial Sequence: Synthetic oligonucleotide
uuagaguaaugauguuugg

SEQ ID NO: 1081358 - RNA, 19 nt, Artificial Sequence
  Description of Artificial Sequence: Synthetic oligonucleotide
aaacggaauuccaguaacc

SEQ ID NO: 1081359 - RNA, 19 nt, Artificial Sequence
  Description of Artificial Sequence: Synthetic oligonucleotide
uaaagcagaguauguagcu

SEQ ID NO: 1081360 - RNA, 19 nt, Artificial Sequence
  Description of Artificial Sequence: Synthetic oligonucleotide
uauuguggcaguugguccc

SEQ ID NO: 1081361 - RNA, 19 nt, Artificial Sequence
  Description of Artificial Sequence: Synthetic oligonucleotide
uccgauugacuacuucugg

SEQ ID NO: 1081362 - RNA, 19 nt, Artificial Sequence
  Description of Artificial Sequence: Synthetic oligonucleotide
uuugcaguaaacucaggau

SEQ ID NO: 1081363 - RNA, 19 nt, Artificial Sequence
  Description of Artificial Sequence: Synthetic oligonucleotide
gaaacggaauuccaguaac

SEQ ID NO: 1081364 - RNA, 19 nt, Artificial Sequence
  Description of Artificial Sequence: Synthetic oligonucleotide
aaagguaguguaccaguga

SEQ ID NO: 1081365 - RNA, 19 nt, Artificial Sequence
  Description of Artificial Sequence: Synthetic oligonucleotide
uaauugcugaacaauugaa

SEQ ID NO: 1081366 - RNA, 19 nt, Artificial Sequence
  Description of Artificial Sequence: Synthetic oligonucleotide
uggugcaacaaaauuugca

SEQ ID NO: 1081367 - RNA, 19 nt, Artificial Sequence
  Description of Artificial Sequence: Synthetic oligonucleotide
auaacgaagaagaauuuca

SEQ ID NO: 1081368 - RNA, 19 nt, Artificial Sequence
  Description of Artificial Sequence: Synthetic oligonucleotide
ugucguuucaaaaccucug

SEQ ID NO: 1081369 - RNA, 19 nt, Artificial Sequence
  Description of Artificial Sequence: Synthetic oligonucleotide
ucaguaaauugaauacugu

SEQ ID NO: 1081370 - RNA, 19 nt, Artificial Sequence
  Description of Artificial Sequence: Synthetic oligonucleotide
ugguccagcaccuaauucu

SEQ ID NO: 1081371 - RNA, 19 nt, Artificial Sequence
  Description of Artificial Sequence: Synthetic oligonucleotide
gauugacuacuucuggagc

SEQ ID NO: 1081372 - RNA, 19 nt, Artificial Sequence
  Description of Artificial Sequence: Synthetic oligonucleotide
aacgaagaagaauuucaau

SEQ ID NO: 1081373 - RNA, 19 nt, Artificial Sequence
  Description of Artificial Sequence: Synthetic oligonucleotide
aaauucgaauagauucugg

SEQ ID NO: 1081374 - RNA, 19 nt, Artificial Sequence
  Description of Artificial Sequence: Synthetic oligonucleotide
cuugcaaacagaguaugag

SEQ ID NO: 1081375 - RNA, 19 nt, Artificial Sequence
  Description of Artificial Sequence: Synthetic oligonucleotide
acggaauuccaguaaccac

SEQ ID NO: 1081376 - RNA, 19 nt, Artificial Sequence
  Description of Artificial Sequence: Synthetic oligonucleotide
cauucguaaaagacucugg

SEQ ID NO: 1081377 - RNA, 19 nt, Artificial Sequence
  Description of Artificial Sequence: Synthetic oligonucleotide
agauacucaacaguuuuag

SEQ ID NO: 1081378 - RNA, 19 nt, Artificial Sequence
  Description of Artificial Sequence: Synthetic oligonucleotide
gucguuucaaaaccucugg

SEQ ID NO: 1081379 - RNA, 19 nt, Artificial Sequence
  Description of Artificial Sequence: Synthetic oligonucleotide
ucgaauagauucuggauua

SEQ ID NO: 1081380 - RNA, 19 nt, Artificial Sequence
  Description of Artificial Sequence: Synthetic oligonucleotide
gauuaccagauucauccac

SEQ ID NO: 1081381 - RNA, 19 nt, Artificial Sequence
  Description of Artificial Sequence: Synthetic oligonucleotide
cuuggaaagguaguguacc

SEQ ID NO: 1081382 - RNA, 19 nt, Artificial Sequence
  Description of Artificial Sequence: Synthetic oligonucleotide
ugauuacgguuuaaagcag

SEQ ID NO: 1081383 - RNA, 19 nt, Artificial Sequence
  Description of Artificial Sequence: Synthetic oligonucleotide
uucuguuacuacauacaca

SEQ ID NO: 1081384 - RNA, 19 nt, Artificial Sequence
  Description of Artificial Sequence: Synthetic oligonucleotide
caguaagcauuguauaaag

SEQ ID NO: 1081385 - RNA, 19 nt, Artificial Sequence
  Description of Artificial Sequence: Synthetic oligonucleotide
agaauuucccgcuaccuau

SEQ ID NO: 1081386 - RNA, 19 nt, Artificial Sequence
  Description of Artificial Sequence: Synthetic oligonucleotide
aggauuccguuugaaaagc

SEQ ID NO: 1081387 - RNA, 19 nt, Artificial Sequence
  Description of Artificial Sequence: Synthetic oligonucleotide
ugaaacggaauuccaguaa

SEQ ID NO: 1081388 - RNA, 19 nt, Artificial Sequence
  Description of Artificial Sequence: Synthetic oligonucleotide
gagguaauagcaacaaaac

SEQ ID NO: 1081389 - RNA, 19 nt, Artificial Sequence
  Description of Artificial Sequence: Synthetic oligonucleotide
aacggaauuccaguaacca

SEQ ID NO: 1081390 - RNA, 19 nt, Artificial Sequence
  Description of Artificial Sequence: Synthetic oligonucleotide
ucauuguuucuuuacgauc

SEQ ID NO: 1081391 - RNA, 19 nt, Artificial Sequence
  Description of Artificial Sequence: Synthetic oligonucleotide
agcaccuaauucuguuugc

SEQ ID NO: 1081392 - RNA, 19 nt, Artificial Sequence
  Description of Artificial Sequence: Synthetic oligonucleotide
uauccagcaauucgccucc

SEQ ID NO: 1081393 - RNA, 19 nt, Artificial Sequence
  Description of Artificial Sequence: Synthetic oligonucleotide
aauucgccuccuuucauaa

SEQ ID NO: 1081394 - RNA, 19 nt, Artificial Sequence
  Description of Artificial Sequence: Synthetic oligonucleotide
guucuguuacuacauacac

SEQ ID NO: 1081395 - RNA, 19 nt, Artificial Sequence
  Description of Artificial Sequence: Synthetic oligonucleotide
ucaauagacuccuuacuua

SEQ ID NO: 1081396 - RNA, 19 nt, Artificial Sequence
  Description of Artificial Sequence: Synthetic oligonucleotide
uaaaaggugggugaauuuc

SEQ ID NO: 1081397 - RNA, 19 nt, Artificial Sequence
  Description of Artificial Sequence: Synthetic oligonucleotide
guuugcaggauuccguuug

SEQ ID NO: 1081398 - RNA, 19 nt, Artificial Sequence
  Description of Artificial Sequence: Synthetic oligonucleotide
ucugucuaagaauuuuauc

SEQ ID NO: 1081399 - RNA, 19 nt, Artificial Sequence
  Description of Artificial Sequence: Synthetic oligonucleotide
ugugaaccaccccuugugc

SEQ ID NO: 1081400 - RNA, 19 nt, Artificial Sequence
  Description of Artificial Sequence: Synthetic oligonucleotide
agaguaagccuucuucuca

SEQ ID NO: 1081401 - RNA, 19 nt, Artificial Sequence
  Description of Artificial Sequence: Synthetic oligonucleotide
acauccuuuagaguaauga

SEQ ID NO: 1081402 - RNA, 19 nt, Artificial Sequence
  Description of Artificial Sequence: Synthetic oligonucleotide
uccucuuugacuucauauc

SEQ ID NO: 1081403 - RNA, 19 nt, Artificial Sequence
  Description of Artificial Sequence: Synthetic oligonucleotide
agaguaugagccaacacca

SEQ ID NO: 1081404 - RNA, 19 nt, Artificial Sequence
  Description of Artificial Sequence: Synthetic oligonucleotide
auaaagaauguugcuaggu

SEQ ID NO: 1081405 - RNA, 19 nt, Artificial Sequence
  Description of Artificial Sequence: Synthetic oligonucleotide
cucuauagaugauucccag

SEQ ID NO: 1081406 - RNA, 19 nt, Artificial Sequence
  Description of Artificial Sequence: Synthetic oligonucleotide
agcacucugaguaugaccu

SEQ ID NO: 1081407 - RNA, 19 nt, Artificial Sequence
  Description of Artificial Sequence: Synthetic oligonucleotide
uaugagccaacaccaauau

SEQ ID NO: 1081408 - RNA, 19 nt, Artificial Sequence
  Description of Artificial Sequence: Synthetic oligonucleotide
aguuaacuugaugugaccu

SEQ ID NO: 1081409 - RNA, 19 nt, Artificial Sequence
  Description of Artificial Sequence: Synthetic oligonucleotide
caauugaaugcacaccaac

SEQ ID NO: 1081410 - RNA, 19 nt, Artificial Sequence
  Description of Artificial Sequence: Synthetic oligonucleotide
auucgaauagauucuggau

SEQ ID NO: 1081411 - RNA, 19 nt, Artificial Sequence
  Description of Artificial Sequence: Synthetic oligonucleotide
aguguaaccaguaagcauu

SEQ ID NO: 1081412 - RNA, 19 nt, Artificial Sequence
  Description of Artificial Sequence: Synthetic oligonucleotide
ucauaaguucuguuacuac

SEQ ID NO: 1081413 - RNA, 19 nt, Artificial Sequence
  Description of Artificial Sequence: Synthetic oligonucleotide
gacaccagguccuuugcug

SEQ ID NO: 1081414 - RNA, 19 nt, Artificial Sequence
  Description of Artificial Sequence: Synthetic oligonucleotide
caccaaaagaccaccaguc

SEQ ID NO: 1081415 - RNA, 19 nt, Artificial Sequence
  Description of Artificial Sequence: Synthetic oligonucleotide
aaccaguaagcauuguaua

SEQ ID NO: 1081416 - RNA, 19 nt, Artificial Sequence
  Description of Artificial Sequence: Synthetic oligonucleotide
auagaugauucccaggcua

SEQ ID NO: 1081417 - RNA, 19 nt, Artificial Sequence
  Description of Artificial Sequence: Synthetic oligonucleotide
uugucguuucaaaaccucu

SEQ ID NO: 1081418 - RNA, 19 nt, Artificial Sequence
  Description of Artificial Sequence: Synthetic oligonucleotide
uccguuugaaaagcauucg

SEQ ID NO: 1081419 - RNA, 19 nt, Artificial Sequence
  Description of Artificial Sequence: Synthetic oligonucleotide
acaaauucgaauagauucu

SEQ ID NO: 1081420 - RNA, 19 nt, Artificial Sequence
  Description of Artificial Sequence: Synthetic oligonucleotide
uuucccgcuaccuauccgu

SEQ ID NO: 1081421 - RNA, 19 nt, Artificial Sequence
  Description of Artificial Sequence: Synthetic oligonucleotide
guauuguggcaguuggucc

SEQ ID NO: 1081422 - RNA, 19 nt, Artificial Sequence
  Description of Artificial Sequence: Synthetic oligonucleotide
uuauaguaaacaggacagc

SEQ ID NO: 1081423 - RNA, 19 nt, Artificial Sequence
  Description of Artificial Sequence: Synthetic oligonucleotide
uagaguaaugauguuugga

SEQ ID NO: 1081424 - RNA, 19 nt, Artificial Sequence
  Description of Artificial Sequence: Synthetic oligonucleotide
uuaacuugaugugaccuuc

SEQ ID NO: 1081425 - RNA, 19 nt, Artificial Sequence
  Description of Artificial Sequence: Synthetic oligonucleotide
uaaccuugucguuucaaaa

SEQ ID NO: 1081426 - RNA, 19 nt, Artificial Sequence
  Description of Artificial Sequence: Synthetic oligonucleotide
ugaauacuguuccugugua

SEQ ID NO: 1081427 - RNA, 19 nt, Artificial Sequence
  Description of Artificial Sequence: Synthetic oligonucleotide
gaugauucccaggcuaugc

SEQ ID NO: 1081428 - RNA, 19 nt, Artificial Sequence
  Description of Artificial Sequence: Synthetic oligonucleotide
ucuaaagcaagugcaaguu

SEQ ID NO: 1081429 - RNA, 19 nt, Artificial Sequence
  Description of Artificial Sequence: Synthetic oligonucleotide
accaguaagcauuguauaa

SEQ ID NO: 1081430 - RNA, 19 nt, Artificial Sequence
  Description of Artificial Sequence: Synthetic oligonucleotide
aaguauguuuucugguuuu

SEQ ID NO: 1081431 - RNA, 19 nt, Artificial Sequence
  Description of Artificial Sequence: Synthetic oligonucleotide
uccauauaucacaggcagc

SEQ ID NO: 1081432 - RNA, 19 nt, Artificial Sequence
  Description of Artificial Sequence: Synthetic oligonucleotide
aaaggugggugaauuucuc

SEQ ID NO: 1081433 - RNA, 19 nt, Artificial Sequence
  Description of Artificial Sequence: Synthetic oligonucleotide
uaagaaucauagucauugu

SEQ ID NO: 1081434 - RNA, 19 nt, Artificial Sequence
  Description of Artificial Sequence: Synthetic oligonucleotide
ucucuugcaaacagaguau

SEQ ID NO: 1081435 - RNA, 19 nt, Artificial Sequence
  Description of Artificial Sequence: Synthetic oligonucleotide
aacuggugacugauuacgg

SEQ ID NO: 1081436 - RNA, 19 nt, Artificial Sequence
  Description of Artificial Sequence: Synthetic oligonucleotide
uauccgugccaauauuucu

SEQ ID NO: 1081437 - RNA, 19 nt, Artificial Sequence
  Description of Artificial Sequence: Synthetic oligonucleotide
cugaguaugaccucuccga

SEQ ID NO: 1081438 - RNA, 19 nt, Artificial Sequence
  Description of Artificial Sequence: Synthetic oligonucleotide
ugaagauacucaacaguuu

SEQ ID NO: 1081439 - RNA, 19 nt, Artificial Sequence
  Description of Artificial Sequence: Synthetic oligonucleotide
caacugucugcauagccug

SEQ ID NO: 1081440 - RNA, 19 nt, Artificial Sequence
  Description of Artificial Sequence: Synthetic oligonucleotide
uaguuauaguaaacaggac

SEQ ID NO: 1081441 - RNA, 19 nt, Artificial Sequence
  Description of Artificial Sequence: Synthetic oligonucleotide
aaacagaguaugagccaac

SEQ ID NO: 1081442 - RNA, 19 nt, Artificial Sequence
  Description of Artificial Sequence: Synthetic oligonucleotide
uaguguaccagugagcauu

SEQ ID NO: 1081443 - RNA, 19 nt, Artificial Sequence
  Description of Artificial Sequence: Synthetic oligonucleotide
acgaucuuuuccuuggaaa

SEQ ID NO: 1081444 - RNA, 19 nt, Artificial Sequence
  Description of Artificial Sequence: Synthetic oligonucleotide
cauaacgaagaagaauuuc

SEQ ID NO: 1081445 - RNA, 19 nt, Artificial Sequence
  Description of Artificial Sequence: Synthetic oligonucleotide
auggucuaaagcaagugca

SEQ ID NO: 1081446 - RNA, 19 nt, Artificial Sequence
  Description of Artificial Sequence: Synthetic oligonucleotide
aaaagcugaugugcauuag

SEQ ID NO: 1081447 - RNA, 19 nt, Artificial Sequence
  Description of Artificial Sequence: Synthetic oligonucleotide
aguaucaucaggaccauuu

SEQ ID NO: 1081448 - RNA, 19 nt, Artificial Sequence
  Description of Artificial Sequence: Synthetic oligonucleotide
aggcuuaaaagguggguga

SEQ ID NO: 1081449 - RNA, 19 nt, Artificial Sequence
  Description of Artificial Sequence: Synthetic oligonucleotide
uagaacggccuacugguuc

SEQ ID NO: 1081450 - RNA, 19 nt, Artificial Sequence
  Description of Artificial Sequence: Synthetic oligonucleotide
uggaaagguaguguaccag

SEQ ID NO: 1081451 - RNA, 19 nt, Artificial Sequence
  Description of Artificial Sequence: Synthetic oligonucleotide
cuugucguuucaaaaccuc

SEQ ID NO: 1081452 - RNA, 19 nt, Artificial Sequence
  Description of Artificial Sequence: Synthetic oligonucleotide
aguugcaggcuuaaaaggu

SEQ ID NO: 1081453 - RNA, 19 nt, Artificial Sequence
  Description of Artificial Sequence: Synthetic oligonucleotide
auuacgguuuaaagcagag

SEQ ID NO: 1081454 - RNA, 19 nt, Artificial Sequence
  Description of Artificial Sequence: Synthetic oligonucleotide
ucucagcuguuuugcaaag

SEQ ID NO: 1081455 - RNA, 19 nt, Artificial Sequence
  Description of Artificial Sequence: Synthetic oligonucleotide
gaugugcauuagcacuagg

SEQ ID NO: 1081456 - RNA, 19 nt, Artificial Sequence
  Description of Artificial Sequence: Synthetic oligonucleotide
aaaaccucuggugcaacaa

SEQ ID NO: 1081457 - RNA, 19 nt, Artificial Sequence
  Description of Artificial Sequence: Synthetic oligonucleotide
ugaguaugaccucuccgau

SEQ ID NO: 1081458 - RNA, 19 nt, Artificial Sequence
  Description of Artificial Sequence: Synthetic oligonucleotide
aguauaacaaggagucaug

SEQ ID NO: 1081459 - RNA, 19 nt, Artificial Sequence
  Description of Artificial Sequence: Synthetic oligonucleotide
gaagauacucaacaguuuu

SEQ ID NO: 1081460 - RNA, 19 nt, Artificial Sequence
  Description of Artificial Sequence: Synthetic oligonucleotide
guaucaucaggaccauuug

SEQ ID NO: 1081461 - RNA, 19 nt, Artificial Sequence
  Description of Artificial Sequence: Synthetic oligonucleotide
caaauucgaauagauucug

SEQ ID NO: 1081462 - RNA, 19 nt, Artificial Sequence
  Description of Artificial Sequence: Synthetic oligonucleotide
acucaacaguuuuaguuau

SEQ ID NO: 1081463 - RNA, 19 nt, Artificial Sequence
  Description of Artificial Sequence: Synthetic oligonucleotide
aguucuguuacuacauaca

SEQ ID NO: 1081464 - RNA, 19 nt, Artificial Sequence
  Description of Artificial Sequence: Synthetic oligonucleotide
uuguauaaaggaggacacc

SEQ ID NO: 1081465 - RNA, 19 nt, Artificial Sequence
  Description of Artificial Sequence: Synthetic oligonucleotide
aagaguagaacggccuacu

SEQ ID NO: 1081466 - RNA, 19 nt, Artificial Sequence
  Description of Artificial Sequence: Synthetic oligonucleotide
caggaucaaaauaaaaugu

SEQ ID NO: 1081467 - RNA, 19 nt, Artificial Sequence
  Description of Artificial Sequence: Synthetic oligonucleotide
ucucuuucuuauacuaguu

SEQ ID NO: 1081468 - RNA, 19 nt, Artificial Sequence
  Description of Artificial Sequence: Synthetic oligonucleotide
ucuucuguugggucucucu

SEQ ID NO: 1081469 - RNA, 19 nt, Artificial Sequence
  Description of Artificial Sequence: Synthetic oligonucleotide
agcaauucgccuccuuuca

SEQ ID NO: 1081470 - RNA, 19 nt, Artificial Sequence
  Description of Artificial Sequence: Synthetic oligonucleotide
cuaaagcaagugcaaguuc

SEQ ID NO: 1081471 - RNA, 19 nt, Artificial Sequence
  Description of Artificial Sequence: Synthetic oligonucleotide
ccucuuugacuucauaucc

SEQ ID NO: 1081472 - RNA, 19 nt, Artificial Sequence
  Description of Artificial Sequence: Synthetic oligonucleotide
uuugcaggauuccguuuga

SEQ ID NO: 1081473 - RNA, 19 nt, Artificial Sequence
  Description of Artificial Sequence: Synthetic oligonucleotide
acuggugacugauuacggu

SEQ ID NO: 1081474 - RNA, 19 nt, Artificial Sequence
  Description of Artificial Sequence: Synthetic oligonucleotide
auuucccgcuaccuauccg

SEQ ID NO: 1081475 - RNA, 19 nt, Artificial Sequence
  Description of Artificial Sequence: Synthetic oligonucleotide
ugaccucuccgauugacua

SEQ ID NO: 1081476 - RNA, 19 nt, Artificial Sequence
  Description of Artificial Sequence: Synthetic oligonucleotide
caccuaauucuguuugcag

SEQ ID NO: 1081477 - RNA, 19 nt, Artificial Sequence
  Description of Artificial Sequence: Synthetic oligonucleotide
cuguuuaguugguauugug

SEQ ID NO: 1081478 - RNA, 19 nt, Artificial Sequence
  Description of Artificial Sequence: Synthetic oligonucleotide
uaauaccucuccguugagc

SEQ ID NO: 1081479 - RNA, 19 nt, Artificial Sequence
  Description of Artificial Sequence: Synthetic oligonucleotide
uaaguucuguuacuacaua

SEQ ID NO: 1081480 - RNA, 19 nt, Artificial Sequence
  Description of Artificial Sequence: Synthetic oligonucleotide
uuaagucucuauagaugau

SEQ ID NO: 1081481 - RNA, 19 nt, Artificial Sequence
  Description of Artificial Sequence: Synthetic oligonucleotide
acugguuccaaaacuggug

SEQ ID NO: 1081482 - RNA, 19 nt, Artificial Sequence
  Description of Artificial Sequence: Synthetic oligonucleotide
ccuuacuuaggccaaaauc

SEQ ID NO: 1081483 - RNA, 19 nt, Artificial Sequence
  Description of Artificial Sequence: Synthetic oligonucleotide
ucuguuuaguugguauugu

SEQ ID NO: 1081484 - RNA, 19 nt, Artificial Sequence
  Description of Artificial Sequence: Synthetic oligonucleotide
cacccuuuacgagaugugg

SEQ ID NO: 1081485 - RNA, 19 nt, Artificial Sequence
  Description of Artificial Sequence: Synthetic oligonucleotide
ugcaggauuccguuugaaa

SEQ ID NO: 1081486 - RNA, 19 nt, Artificial Sequence
  Description of Artificial Sequence: Synthetic oligonucleotide
aaggaugucugagcacaag

SEQ ID NO: 1081487 - RNA, 19 nt, Artificial Sequence
  Description of Artificial Sequence: Synthetic oligonucleotide
uacgaucuuuuccuuggaa

SEQ ID NO: 1081488 - RNA, 19 nt, Artificial Sequence
  Description of Artificial Sequence: Synthetic oligonucleotide
gguaguguaccagugagca

SEQ ID NO: 1081489 - RNA, 19 nt, Artificial Sequence
  Description of Artificial Sequence: Synthetic oligonucleotide
augagccaacaccaauauc

SEQ ID NO: 1081490 - RNA, 19 nt, Artificial Sequence
  Description of Artificial Sequence: Synthetic oligonucleotide
ugaaccaccccuugugcau

SEQ ID NO: 1081491 - RNA, 19 nt, Artificial Sequence
  Description of Artificial Sequence: Synthetic oligonucleotide
cggaauuccaguaaccacc

SEQ ID NO: 1081492 - RNA, 19 nt, Artificial Sequence
  Description of Artificial Sequence: Synthetic oligonucleotide
cagcaccuaauucuguuug

SEQ ID NO: 1081493 - RNA, 19 nt, Artificial Sequence
  Description of Artificial Sequence: Synthetic oligonucleotide
agauggucuaaagcaagug

SEQ ID NO: 1081494 - RNA, 19 nt, Artificial Sequence
  Description of Artificial Sequence: Synthetic oligonucleotide
auggucaauagacuccuua

SEQ ID NO: 1081495 - RNA, 19 nt, Artificial Sequence
  Description of Artificial Sequence: Synthetic oligonucleotide
acuagguggaaugccaggu

SEQ ID NO: 1081496 - RNA, 19 nt, Artificial Sequence
  Description of Artificial Sequence: Synthetic oligonucleotide
ggaccauuugcaaauggag

SEQ ID NO: 1081497 - RNA, 19 nt, Artificial Sequence
  Description of Artificial Sequence: Synthetic oligonucleotide
gauuacgguuuaaagcaga

SEQ ID NO: 1081498 - RNA, 19 nt, Artificial Sequence
  Description of Artificial Sequence: Synthetic oligonucleotide
augugcauuagcacuaggu

SEQ ID NO: 1081499 - RNA, 19 nt, Artificial Sequence
  Description of Artificial Sequence: Synthetic oligonucleotide
agguaguguaccagugagc

SEQ ID NO: 1081500 - RNA, 19 nt, Artificial Sequence
  Description of Artificial Sequence: Synthetic oligonucleotide
uggugacugauuacgguuu

SEQ ID NO: 1081501 - RNA, 19 nt, Artificial Sequence
  Description of Artificial Sequence: Synthetic oligonucleotide
gacaccaagacuccauaua

SEQ ID NO: 1081502 - RNA, 19 nt, Artificial Sequence
  Description of Artificial Sequence: Synthetic oligonucleotide
guaaccaguaagcauugua

SEQ ID NO: 1081503 - RNA, 19 nt, Artificial Sequence
  Description of Artificial Sequence: Synthetic oligonucleotide
cuuuacgagauguggugca

SEQ ID NO: 1081504 - RNA, 19 nt, Artificial Sequence
  Description of Artificial Sequence: Synthetic oligonucleotide
ugacugauuacgguuuaaa

SEQ ID NO: 1081505 - RNA, 19 nt, Artificial Sequence
  Description of Artificial Sequence: Synthetic oligonucleotide
uaugaccucuccgauugac

SEQ ID NO: 1081506 - RNA, 19 nt, Artificial Sequence
  Description of Artificial Sequence: Synthetic oligonucleotide
cugguuccaaaacugguga

SEQ ID NO: 1081507 - RNA, 19 nt, Artificial Sequence
  Description of Artificial Sequence: Synthetic oligonucleotide
uaccuauccgugccaauau

SEQ ID NO: 1081508 - RNA, 19 nt, Artificial Sequence
  Description of Artificial Sequence: Synthetic oligonucleotide
uggcuuuaagaaucauagu

SEQ ID NO: 1081509 - RNA, 19 nt, Artificial Sequence
  Description of Artificial Sequence: Synthetic oligonucleotide
cuggugcaacaaaauuugc

SEQ ID NO: 1081510 - RNA, 19 nt, Artificial Sequence
  Description of Artificial Sequence: Synthetic oligonucleotide
uucaaaaccucuggugcaa

SEQ ID NO: 1081511 - RNA, 19 nt, Artificial Sequence
  Description of Artificial Sequence: Synthetic oligonucleotide
ugaugugcauuagcacuag

SEQ ID NO: 1081512 - RNA, 19 nt, Artificial Sequence
  Description of Artificial Sequence: Synthetic oligonucleotide
gagaauuucccgcuaccua

SEQ ID NO: 1081513 - RNA, 19 nt, Artificial Sequence
  Description of Artificial Sequence: Synthetic oligonucleotide
ugaugaggaucuacaugaa

SEQ ID NO: 1081514 - RNA, 19 nt, Artificial Sequence
  Description of Artificial Sequence: Synthetic oligonucleotide
uccgugccaauauuucuuc

SEQ ID NO: 1081515 - RNA, 19 nt, Artificial Sequence
  Description of Artificial Sequence: Synthetic oligonucleotide
uuccaaaacuggugacuga

SEQ ID NO: 1081516 - RNA, 19 nt, Artificial Sequence
  Description of Artificial Sequence: Synthetic oligonucleotide
cuagguggaaugccaggug

SEQ ID NO: 1081517 - RNA, 19 nt, Artificial Sequence
  Description of Artificial Sequence: Synthetic oligonucleotide
cagcaauucgccuccuuuc

SEQ ID NO: 1081518 - RNA, 19 nt, Artificial Sequence
  Description of Artificial Sequence: Synthetic oligonucleotide
gagcaagaguagaacggcc

SEQ ID NO: 1081519 - RNA, 19 nt, Artificial Sequence
  Description of Artificial Sequence: Synthetic oligonucleotide
aggugggugaauuucucuu

SEQ ID NO: 1081520 - RNA, 19 nt, Artificial Sequence
  Description of Artificial Sequence: Synthetic oligonucleotide
uuacgguuuaaagcagagu

SEQ ID NO: 1081521 - RNA, 19 nt, Artificial Sequence
  Description of Artificial Sequence: Synthetic oligonucleotide
aagauacucaacaguuuua

SEQ ID NO: 1081522 - RNA, 19 nt, Artificial Sequence
  Description of Artificial Sequence: Synthetic oligonucleotide
ugacaccagguccuuugcu

SEQ ID NO: 1081523 - RNA, 19 nt, Artificial Sequence
  Description of Artificial Sequence: Synthetic oligonucleotide
uccuuacuuaggccaaaau

SEQ ID NO: 1081524 - RNA, 19 nt, Artificial Sequence
  Description of Artificial Sequence: Synthetic oligonucleotide
uggucccagugcacaaucc

SEQ ID NO: 1081525 - RNA, 19 nt, Artificial Sequence
  Description of Artificial Sequence: Synthetic oligonucleotide
agcaagaguagaacggccu

SEQ ID NO: 1081526 - RNA, 19 nt, Artificial Sequence
  Description of Artificial Sequence: Synthetic oligonucleotide
gaauacuguuccuguguaa

SEQ ID NO: 1081527 - RNA, 19 nt, Artificial Sequence
  Description of Artificial Sequence: Synthetic oligonucleotide
aaccucuggugcaacaaaa

SEQ ID NO: 1081528 - RNA, 19 nt, Artificial Sequence
  Description of Artificial Sequence: Synthetic oligonucleotide
caagaguagaacggccuac

SEQ ID NO: 1081529 - RNA, 19 nt, Artificial Sequence
  Description of Artificial Sequence: Synthetic oligonucleotide
cuugugcaugaagauacuc

SEQ ID NO: 1081530 - RNA, 19 nt, Artificial Sequence
  Description of Artificial Sequence: Synthetic oligonucleotide
caccaauauccucuuugac

SEQ ID NO: 1081531 - RNA, 19 nt, Artificial Sequence
  Description of Artificial Sequence: Synthetic oligonucleotide
uagcacuagguggaaugcc

SEQ ID NO: 1081532 - RNA, 19 nt, Artificial Sequence
  Description of Artificial Sequence: Synthetic oligonucleotide
uaaaagacucugggcuuca

SEQ ID NO: 1081533 - RNA, 19 nt, Artificial Sequence
  Description of Artificial Sequence: Synthetic oligonucleotide
gucaauagacuccuuacuu

SEQ ID NO: 1081534 - RNA, 19 nt, Artificial Sequence
  Description of Artificial Sequence: Synthetic oligonucleotide
acuccauauaucacaggca

SEQ ID NO: 1081535 - RNA, 19 nt, Artificial Sequence
  Description of Artificial Sequence: Synthetic oligonucleotide
uuccaguucuauuguugaa

SEQ ID NO: 1081536 - RNA, 19 nt, Artificial Sequence
  Description of Artificial Sequence: Synthetic oligonucleotide
ucuuuacgaucuuuuccuu

SEQ ID NO: 1081537 - RNA, 19 nt, Artificial Sequence
  Description of Artificial Sequence: Synthetic oligonucleotide
caccaagacuccauauauc

SEQ ID NO: 1081538 - RNA, 19 nt, Artificial Sequence
  Description of Artificial Sequence: Synthetic oligonucleotide
gaccucuccgauugacuac

SEQ ID NO: 1081539 - RNA, 19 nt, Artificial Sequence
  Description of Artificial Sequence: Synthetic oligonucleotide
gcauucguaaaagacucug

SEQ ID NO: 1081540 - RNA, 19 nt, Artificial Sequence
  Description of Artificial Sequence: Synthetic oligonucleotide
uucccgcuaccuauccgug

SEQ ID NO: 1081541 - RNA, 19 nt, Artificial Sequence
  Description of Artificial Sequence: Synthetic oligonucleotide
ccuaauucuguuugcagga

SEQ ID NO: 1081542 - RNA, 19 nt, Artificial Sequence
  Description of Artificial Sequence: Synthetic oligonucleotide
auacuguuccuguguaauu

SEQ ID NO: 1081543 - RNA, 19 nt, Artificial Sequence
  Description of Artificial Sequence: Synthetic oligonucleotide
cugaugugcauuagcacua

SEQ ID NO: 1081544 - RNA, 19 nt, Artificial Sequence
  Description of Artificial Sequence: Synthetic oligonucleotide
ccgaguuuggcuuuaagaa

SEQ ID NO: 1081545 - RNA, 19 nt, Artificial Sequence
  Description of Artificial Sequence: Synthetic oligonucleotide
ccuuugcuguaucugaaac

SEQ ID NO: 1081546 - RNA, 19 nt, Artificial Sequence
  Description of Artificial Sequence: Synthetic oligonucleotide
uguuugcaggauuccguuu

SEQ ID NO: 1081547 - RNA, 19 nt, Artificial Sequence
  Description of Artificial Sequence: Synthetic oligonucleotide
ccauauaucacaggcagca

SEQ ID NO: 1081548 - RNA, 19 nt, Artificial Sequence
  Description of Artificial Sequence: Synthetic oligonucleotide
agggcuguugaggugauuu

SEQ ID NO: 1081549 - RNA, 19 nt, Artificial Sequence
  Description of Artificial Sequence: Synthetic oligonucleotide
uuuacgagauguggugcau

SEQ ID NO: 1081550 - RNA, 19 nt, Artificial Sequence
  Description of Artificial Sequence: Synthetic oligonucleotide
cgauugacuacuucuggag

SEQ ID NO: 1081551 - RNA, 19 nt, Artificial Sequence
  Description of Artificial Sequence: Synthetic oligonucleotide
gucauuguuucuuuacgau

SEQ ID NO: 1081552 - RNA, 19 nt, Artificial Sequence
  Description of Artificial Sequence: Synthetic oligonucleotide
gaagaccauuuucugcucu

SEQ ID NO: 1081553 - RNA, 19 nt, Artificial Sequence
  Description of Artificial Sequence: Synthetic oligonucleotide
ugcacaauccaaggauguc

SEQ ID NO: 1081554 - RNA, 19 nt, Artificial Sequence
  Description of Artificial Sequence: Synthetic oligonucleotide
ucaaaaccucuggugcaac

SEQ ID NO: 1081555 - RNA, 19 nt, Artificial Sequence
  Description of Artificial Sequence: Synthetic oligonucleotide
guguaaccaguaagcauug

SEQ ID NO: 1081556 - RNA, 19 nt, Artificial Sequence
  Description of Artificial Sequence: Synthetic oligonucleotide
ggcaguuggucccagugca

SEQ ID NO: 1081557 - RNA, 19 nt, Artificial Sequence
  Description of Artificial Sequence: Synthetic oligonucleotide
cucagcuguuuugcaaagc

SEQ ID NO: 1081558 - RNA, 19 nt, Artificial Sequence
  Description of Artificial Sequence: Synthetic oligonucleotide
ucagcacucugaguaugac

SEQ ID NO: 1081559 - RNA, 19 nt, Artificial Sequence
  Description of Artificial Sequence: Synthetic oligonucleotide
gcuuuauguauacaucucu

SEQ ID NO: 1081560 - RNA, 19 nt, Artificial Sequence
  Description of Artificial Sequence: Synthetic oligonucleotide
ccagucagcacucugagua

SEQ ID NO: 1081561 - RNA, 19 nt, Artificial Sequence
  Description of Artificial Sequence: Synthetic oligonucleotide
cuguguaauugcugaacaa

SEQ ID NO: 1081562 - RNA, 19 nt, Artificial Sequence
  Description of Artificial Sequence: Synthetic oligonucleotide
ucccgcuaccuauccgugc

SEQ ID NO: 1081563 - RNA, 19 nt, Artificial Sequence
  Description of Artificial Sequence: Synthetic oligonucleotide
agaugauucccaggcuaug

SEQ ID NO: 1081564 - RNA, 19 nt, Artificial Sequence
  Description of Artificial Sequence: Synthetic oligonucleotide
acgguuuaaagcagaguau

SEQ ID NO: 1081565 - RNA, 19 nt, Artificial Sequence
  Description of Artificial Sequence: Synthetic oligonucleotide
caaauggaguguaaccagu

SEQ ID NO: 1081566 - RNA, 19 nt, Artificial Sequence
  Description of Artificial Sequence: Synthetic oligonucleotide
caaaaccucuggugcaaca

SEQ ID NO: 1081567 - RNA, 19 nt, Artificial Sequence
  Description of Artificial Sequence: Synthetic oligonucleotide
acccuuuacgagauguggu

SEQ ID NO: 1081568 - RNA, 19 nt, Artificial Sequence
  Description of Artificial Sequence: Synthetic oligonucleotide
uguaaccaguaagcauugu

SEQ ID NO: 1081569 - RNA, 19 nt, Artificial Sequence
  Description of Artificial Sequence: Synthetic oligonucleotide
gccaggugaaucuuuggga

SEQ ID NO: 1081570 - RNA, 19 nt, Artificial Sequence
  Description of Artificial Sequence: Synthetic oligonucleotide
ggugcauccugucuguuua

SEQ ID NO: 1081571 - RNA, 19 nt, Artificial Sequence
  Description of Artificial Sequence: Synthetic oligonucleotide
caguauaacaaggagucau

SEQ ID NO: 1081572 - RNA, 19 nt, Artificial Sequence
  Description of Artificial Sequence: Synthetic oligonucleotide
cagaacuguggcaucccga

SEQ ID NO: 1081573 - RNA, 19 nt, Artificial Sequence
  Description of Artificial Sequence: Synthetic oligonucleotide
uggugcauccugucuguuu

SEQ ID NO: 1081574 - RNA, 19 nt, Artificial Sequence
  Description of Artificial Sequence: Synthetic oligonucleotide
acaauugaaugcacaccaa

SEQ ID NO: 1081575 - RNA, 19 nt, Artificial Sequence
  Description of Artificial Sequence: Synthetic oligonucleotide
auaccucuccguugagcaa

SEQ ID NO: 1081576 - RNA, 19 nt, Artificial Sequence
  Description of Artificial Sequence: Synthetic oligonucleotide
gauuccguuugaaaagcau

SEQ ID NO: 1081577 - RNA, 19 nt, Artificial Sequence
  Description of Artificial Sequence: Synthetic oligonucleotide
cucuccgauugacuacuuc

SEQ ID NO: 1081578 - RNA, 19 nt, Artificial Sequence
  Description of Artificial Sequence: Synthetic oligonucleotide
ccuuuacgagauguggugc

SEQ ID NO: 1081579 - RNA, 19 nt, Artificial Sequence
  Description of Artificial Sequence: Synthetic oligonucleotide
ccuguguaauugcugaaca

SEQ ID NO: 1081580 - RNA, 19 nt, Artificial Sequence
  Description of Artificial Sequence: Synthetic oligonucleotide
auuguggcaguugguccca

SEQ ID NO: 1081581 - RNA, 19 nt, Artificial Sequence
  Description of Artificial Sequence: Synthetic oligonucleotide
cagugcacaauccaaggau

SEQ ID NO: 1081582 - RNA, 19 nt, Artificial Sequence
  Description of Artificial Sequence: Synthetic oligonucleotide
uuguggcuuuauguauaca

SEQ ID NO: 1081583 - RNA, 19 nt, Artificial Sequence
  Description of Artificial Sequence: Synthetic oligonucleotide
auccgugccaauauuucuu

SEQ ID NO: 1081584 - RNA, 19 nt, Artificial Sequence
  Description of Artificial Sequence: Synthetic oligonucleotide
ggucaauagacuccuuacu

SEQ ID NO: 1081585 - RNA, 19 nt, Artificial Sequence
  Description of Artificial Sequence: Synthetic oligonucleotide
accuauccgugccaauauu

SEQ ID NO: 1081586 - RNA, 19 nt, Artificial Sequence
  Description of Artificial Sequence: Synthetic oligonucleotide
cgguuuaaagcagaguaug

SEQ ID NO: 1081587 - RNA, 19 nt, Artificial Sequence
  Description of Artificial Sequence: Synthetic oligonucleotide
agcauucguaaaagacucu

SEQ ID NO: 1081588 - RNA, 19 nt, Artificial Sequence
  Description of Artificial Sequence: Synthetic oligonucleotide
cccgcuaccuauccgugcc

SEQ ID NO: 1081589 - RNA, 19 nt, Artificial Sequence
  Description of Artificial Sequence: Synthetic oligonucleotide
cuaccuauccgugccaaua

SEQ ID NO: 1081590 - RNA, 19 nt, Artificial Sequence
  Description of Artificial Sequence: Synthetic oligonucleotide
gacuccuuacuuaggccaa

SEQ ID NO: 1081591 - RNA, 19 nt, Artificial Sequence
  Description of Artificial Sequence: Synthetic oligonucleotide
cugagguaauagcaacaaa

SEQ ID NO: 1081592 - RNA, 19 nt, Artificial Sequence
  Description of Artificial Sequence: Synthetic oligonucleotide
ggauuaccagauucaucca

SEQ ID NO: 1081593 - RNA, 19 nt, Artificial Sequence
  Description of Artificial Sequence: Synthetic oligonucleotide
aaguagaauuugacaucuu

SEQ ID NO: 1081594 - RNA, 19 nt, Artificial Sequence
  Description of Artificial Sequence: Synthetic oligonucleotide
acacauccuuuagaguaau

SEQ ID NO: 1081595 - RNA, 19 nt, Artificial Sequence
  Description of Artificial Sequence: Synthetic oligonucleotide
cuggugacugauuacgguu

SEQ ID NO: 1081596 - RNA, 19 nt, Artificial Sequence
  Description of Artificial Sequence: Synthetic oligonucleotide
gucagcacucugaguauga

SEQ ID NO: 1081597 - RNA, 19 nt, Artificial Sequence
  Description of Artificial Sequence: Synthetic oligonucleotide
gaguaugagccaacaccaa

SEQ ID NO: 1081598 - RNA, 19 nt, Artificial Sequence
  Description of Artificial Sequence: Synthetic oligonucleotide
gagccaacaccaauauccu

SEQ ID NO: 1081599 - RNA, 19 nt, Artificial Sequence
  Description of Artificial Sequence: Synthetic oligonucleotide
caacaguuuuaguuauagu

SEQ ID NO: 1081600 - RNA, 19 nt, Artificial Sequence
  Description of Artificial Sequence: Synthetic oligonucleotide
ggccuacugguuccaaaac

SEQ ID NO: 1081601 - RNA, 19 nt, Artificial Sequence
  Description of Artificial Sequence: Synthetic oligonucleotide
cucaacaguuuuaguuaua

SEQ ID NO: 1081602 - RNA, 19 nt, Artificial Sequence
  Description of Artificial Sequence: Synthetic oligonucleotide
caguucuauuguugaaugu

SEQ ID NO: 1081603 - RNA, 19 nt, Artificial Sequence
  Description of Artificial Sequence: Synthetic oligonucleotide
gaguaugaccucuccgauu

SEQ ID NO: 1081604 - RNA, 19 nt, Artificial Sequence
  Description of Artificial Sequence: Synthetic oligonucleotide
ccgauugacuacuucugga

SEQ ID NO: 1081605 - RNA, 19 nt, Artificial Sequence
  Description of Artificial Sequence: Synthetic oligonucleotide
gaggaucuacaugaagcau

SEQ ID NO: 1081606 - RNA, 19 nt, Artificial Sequence
  Description of Artificial Sequence: Synthetic oligonucleotide
cucugaugaggaucuacau

SEQ ID NO: 1081607 - RNA, 19 nt, Artificial Sequence
  Description of Artificial Sequence: Synthetic oligonucleotide
acgagauguggugcauccu

SEQ ID NO: 1081608 - RNA, 19 nt, Artificial Sequence
  Description of Artificial Sequence: Synthetic oligonucleotide
gcaagaguagaacggccua

SEQ ID NO: 1081609 - RNA, 19 nt, Artificial Sequence
  Description of Artificial Sequence: Synthetic oligonucleotide
cguugagcaagaguagaac

SEQ ID NO: 1081610 - RNA, 19 nt, Artificial Sequence
  Description of Artificial Sequence: Synthetic oligonucleotide
cacucugaguaugaccucu

SEQ ID NO: 1081611 - RNA, 19 nt, Artificial Sequence
  Description of Artificial Sequence: Synthetic oligonucleotide
guaugaccucuccgauuga

SEQ ID NO: 1081612 - RNA, 19 nt, Artificial Sequence
  Description of Artificial Sequence: Synthetic oligonucleotide
cuguuugcaggauuccguu

SEQ ID NO: 1081613 - RNA, 19 nt, Artificial Sequence
  Description of Artificial Sequence: Synthetic oligonucleotide
acuccuuacuuaggccaaa

SEQ ID NO: 1081614 - RNA, 19 nt, Artificial Sequence
  Description of Artificial Sequence: Synthetic oligonucleotide
uggcacccuuuacgagaug

SEQ ID NO: 1081615 - RNA, 19 nt, Artificial Sequence
  Description of Artificial Sequence: Synthetic oligonucleotide
ccagugcacaauccaagga

SEQ ID NO: 1081616 - RNA, 19 nt, Artificial Sequence
  Description of Artificial Sequence: Synthetic oligonucleotide
ggauuccguuugaaaagca

SEQ ID NO: 1081617 - RNA, 19 nt, Artificial Sequence
  Description of Artificial Sequence: Synthetic oligonucleotide
aacggccuacugguuccaa

SEQ ID NO: 1081618 - RNA, 19 nt, Artificial Sequence
  Description of Artificial Sequence: Synthetic oligonucleotide
ggcuuaaaaggugggugaa

SEQ ID NO: 1081619 - RNA, 19 nt, Artificial Sequence
  Description of Artificial Sequence: Synthetic oligonucleotide
gcaguauaacaaggaguca

SEQ ID NO: 1081620 - RNA, 19 nt, Artificial Sequence
  Description of Artificial Sequence: Synthetic oligonucleotide
ggaucuacaugaagcauuu

SEQ ID NO: 1081621 - RNA, 19 nt, Artificial Sequence
  Description of Artificial Sequence: Synthetic oligonucleotide
gcacccuuuacgagaugug

SEQ ID NO: 1081622 - RNA, 19 nt, Artificial Sequence
  Description of Artificial Sequence: Synthetic oligonucleotide
guaguguaccagugagcau

SEQ ID NO: 1081623 - RNA, 19 nt, Artificial Sequence
  Description of Artificial Sequence: Synthetic oligonucleotide
cuccuuacuuaggccaaaa

SEQ ID NO: 1081624 - RNA, 19 nt, Artificial Sequence
  Description of Artificial Sequence: Synthetic oligonucleotide
ccguugagcaagaguagaa

SEQ ID NO: 1081625 - RNA, 19 nt, Artificial Sequence
  Description of Artificial Sequence: Synthetic oligonucleotide
accucuccguugagcaaga

SEQ ID NO: 1081626 - RNA, 19 nt, Artificial Sequence
  Description of Artificial Sequence: Synthetic oligonucleotide
gcacucugaguaugaccuc

SEQ ID NO: 1081627 - RNA, 19 nt, Artificial Sequence
  Description of Artificial Sequence: Synthetic oligonucleotide
ccuugucguuucaaaaccu

SEQ ID NO: 1081628 - RNA, 19 nt, Artificial Sequence
  Description of Artificial Sequence: Synthetic oligonucleotide
ccguuugaaaagcauucgu

SEQ ID NO: 1081629 - RNA, 19 nt, Artificial Sequence
  Description of Artificial Sequence: Synthetic oligonucleotide
cauauaucacaggcagcau

SEQ ID NO: 1081630 - RNA, 19 nt, Artificial Sequence
  Description of Artificial Sequence: Synthetic oligonucleotide
cgaauagauucuggauuac

SEQ ID NO: 1081631 - RNA, 19 nt, Artificial Sequence
  Description of Artificial Sequence: Synthetic oligonucleotide
gcuguaucugaaacggaau

SEQ ID NO: 1081632 - RNA, 19 nt, Artificial Sequence
  Description of Artificial Sequence: Synthetic oligonucleotide
guuuggcuuuaagaaucau

SEQ ID NO: 1081633 - RNA, 19 nt, Artificial Sequence
  Description of Artificial Sequence: Synthetic oligonucleotide
guuggucccagugcacaau

SEQ ID NO: 1081634 - RNA, 19 nt, Artificial Sequence
  Description of Artificial Sequence: Synthetic oligonucleotide
auccagcaauucgccuccu

SEQ ID NO: 1081635 - RNA, 19 nt, Artificial Sequence
  Description of Artificial Sequence: Synthetic oligonucleotide
cauuagcacuagguggaau

SEQ ID NO: 1081636 - RNA, 19 nt, Artificial Sequence
  Description of Artificial Sequence: Synthetic oligonucleotide
guguaccagugagcauuuc

SEQ ID NO: 1081637 - RNA, 19 nt, Artificial Sequence
  Description of Artificial Sequence: Synthetic oligonucleotide
agucucugaugaggaucua

SEQ ID NO: 1081638 - RNA, 19 nt, Artificial Sequence
  Description of Artificial Sequence: Synthetic oligonucleotide
gaucuacaugaagcauuuu

SEQ ID NO: 1081639 - RNA, 19 nt, Artificial Sequence
  Description of Artificial Sequence: Synthetic oligonucleotide
cugccaguugcaggcuuaa

SEQ ID NO: 1081640 - RNA, 19 nt, Artificial Sequence
  Description of Artificial Sequence: Synthetic oligonucleotide
ccauaacgaagaagaauuu

SEQ ID NO: 1081641 - RNA, 19 nt, Artificial Sequence
  Description of Artificial Sequence: Synthetic oligonucleotide
gcuuaaaaggugggugaau

SEQ ID NO: 1081642 - RNA, 19 nt, Artificial Sequence
  Description of Artificial Sequence: Synthetic oligonucleotide
cggccuacugguuccaaaa

SEQ ID NO: 1081643 - RNA, 19 nt, Artificial Sequence
  Description of Artificial Sequence: Synthetic oligonucleotide
cguaaaagacucugggcuu

SEQ ID NO: 1081644 - RNA, 19 nt, Artificial Sequence
  Description of Artificial Sequence: Synthetic oligonucleotide
caucccgaguuuggcuuua

SEQ ID NO: 1081645 - RNA, 19 nt, Artificial Sequence
  Description of Artificial Sequence: Synthetic oligonucleotide
ccagcaccuaauucuguuu

SEQ ID NO: 1081646 - RNA, 19 nt, Artificial Sequence
  Description of Artificial Sequence: Synthetic oligonucleotide
gcuaccuauccgugccaau

SEQ ID NO: 1081647 - RNA, 19 nt, Artificial Sequence
  Description of Artificial Sequence: Synthetic oligonucleotide
gcaucccgaguuuggcuuu

SEQ ID NO: 1081648 - RNA, 19 nt, Artificial Sequence
  Description of Artificial Sequence: Synthetic oligonucleotide
ccgugccaauauuucuucu

SEQ ID NO: 1081649 - RNA, 19 nt, Artificial Sequence
  Description of Artificial Sequence: Synthetic oligonucleotide
ccgcuaccuauccgugcca

SEQ ID NO: 1081650 - RNA, 19 nt, Artificial Sequence
  Description of Artificial Sequence: Synthetic oligonucleotide
cgcuaccuauccgugccaa

SEQ ID NO: 1081651 - RNA, 19 nt, Artificial Sequence
  Description of Artificial Sequence: Synthetic oligonucleotide
auaauagugaccuggcucc

SEQ ID NO: 1081652 - RNA, 19 nt, Artificial Sequence
  Description of Artificial Sequence: Synthetic oligonucleotide
aaauaagguccccaaacgc

SEQ ID NO: 1081653 - RNA, 19 nt, Artificial Sequence
  Description of Artificial Sequence: Synthetic oligonucleotide
aauguuucgauaggaaucc

SEQ ID NO: 1081654 - RNA, 19 nt, Artificial Sequence
  Description of Artificial Sequence: Synthetic oligonucleotide
auaggaauccccuucaugg

SEQ ID NO: 1081655 - RNA, 19 nt, Artificial Sequence
  Description of Artificial Sequence: Synthetic oligonucleotide
auuaucaccaaugagaucu

SEQ ID NO: 1081656 - RNA, 19 nt, Artificial Sequence
  Description of Artificial Sequence: Synthetic oligonucleotide
aaaugucccgccuuguccc

SEQ ID NO: 1081657 - RNA, 19 nt, Artificial Sequence
  Description of Artificial Sequence: Synthetic oligonucleotide
aaacauguaaaucaacagu

SEQ ID NO: 1081658 - RNA, 19 nt, Artificial Sequence
  Description of Artificial Sequence: Synthetic oligonucleotide
uguaaaucaacagugagga

SEQ ID NO: 1081659 - RNA, 19 nt, Artificial Sequence
  Description of Artificial Sequence: Synthetic oligonucleotide
uuuccauucaugauugccg

SEQ ID NO: 1081660 - RNA, 19 nt, Artificial Sequence
  Description of Artificial Sequence: Synthetic oligonucleotide
caugauaauguuucgauag

SEQ ID NO: 1081661 - RNA, 19 nt, Artificial Sequence
  Description of Artificial Sequence: Synthetic oligonucleotide
aaaccaaucaucuuccaga

SEQ ID NO: 1081662 - RNA, 19 nt, Artificial Sequence
  Description of Artificial Sequence: Synthetic oligonucleotide
gauggcaagaucaucaagg

SEQ ID NO: 1081663 - RNA, 19 nt, Artificial Sequence
  Description of Artificial Sequence: Synthetic oligonucleotide
accaccuacauacugaagg

SEQ ID NO: 1081664 - RNA, 19 nt, Artificial Sequence
  Description of Artificial Sequence: Synthetic oligonucleotide
acaaccaaagaacacgugg

SEQ ID NO: 1081665 - RNA, 19 nt, Artificial Sequence
  Description of Artificial Sequence: Synthetic oligonucleotide
ucaaugaugaaacgagucc

SEQ ID NO: 1081666 - RNA, 19 nt, Artificial Sequence
  Description of Artificial Sequence: Synthetic oligonucleotide
ugaaacgagucccaaaagc

SEQ ID NO: 1081667 - RNA, 19 nt, Artificial Sequence
  Description of Artificial Sequence: Synthetic oligonucleotide
aaaucaacagugaggaaac

SEQ ID NO: 1081668 - RNA, 19 nt, Artificial Sequence
  Description of Artificial Sequence: Synthetic oligonucleotide
uaugcauauauacucuggc

SEQ ID NO: 1081669 - RNA, 19 nt, Artificial Sequence
  Description of Artificial Sequence: Synthetic oligonucleotide
aaccucucacaucugcucc

SEQ ID NO: 1081670 - RNA, 19 nt, Artificial Sequence
  Description of Artificial Sequence: Synthetic oligonucleotide
uaauuaucaccaaugagau

SEQ ID NO: 1081671 - RNA, 19 nt, Artificial Sequence
  Description of Artificial Sequence: Synthetic oligonucleotide
uccaugauaagaagucugg

SEQ ID NO: 1081672 - RNA, 19 nt, Artificial Sequence
  Description of Artificial Sequence: Synthetic oligonucleotide
uuguccaagacaaccaaag

SEQ ID NO: 1081673 - RNA, 19 nt, Artificial Sequence
  Description of Artificial Sequence: Synthetic oligonucleotide
uggccaaacauguaaauca

SEQ ID NO: 1081674 - RNA, 19 nt, Artificial Sequence
  Description of Artificial Sequence: Synthetic oligonucleotide
uauauacucuggcaucugg

SEQ ID NO: 1081675 - RNA, 19 nt, Artificial Sequence
  Description of Artificial Sequence: Synthetic oligonucleotide
aggaugaaacuguuugucc

SEQ ID NO: 1081676 - RNA, 19 nt, Artificial Sequence
  Description of Artificial Sequence: Synthetic oligonucleotide
uccaauuacuccuaguccu

SEQ ID NO: 1081677 - RNA, 19 nt, Artificial Sequence
  Description of Artificial Sequence: Synthetic oligonucleotide
aagacaaggccaaagcagg

SEQ ID NO: 1081678 - RNA, 19 nt, Artificial Sequence
  Description of Artificial Sequence: Synthetic oligonucleotide
agaucuuccaaaccaauca

SEQ ID NO: 1081679 - RNA, 19 nt, Artificial Sequence
  Description of Artificial Sequence: Synthetic oligonucleotide
ugcuuguccaauaugaaau

SEQ ID NO: 1081680 - RNA, 19 nt, Artificial Sequence
  Description of Artificial Sequence: Synthetic oligonucleotide
aacaucgaugcccacauaa

SEQ ID NO: 1081681 - RNA, 19 nt, Artificial Sequence
  Description of Artificial Sequence: Synthetic oligonucleotide
aaacuguuuguccaagaca

SEQ ID NO: 1081682 - RNA, 19 nt, Artificial Sequence
  Description of Artificial Sequence: Synthetic oligonucleotide
aaagccagaaguauuccuc

SEQ ID NO: 1081683 - RNA, 19 nt, Artificial Sequence
  Description of Artificial Sequence: Synthetic oligonucleotide
ugcauauauacucuggcau

SEQ ID NO: 1081684 - RNA, 19 nt, Artificial Sequence
  Description of Artificial Sequence: Synthetic oligonucleotide
uguuccaacaucgaugccc

SEQ ID NO: 1081685 - RNA, 19 nt, Artificial Sequence
  Description of Artificial Sequence: Synthetic oligonucleotide
aauuguggcucccacuucu

SEQ ID NO: 1081686 - RNA, 19 nt, Artificial Sequence
  Description of Artificial Sequence: Synthetic oligonucleotide
ucggauucgguguacauca

SEQ ID NO: 1081687 - RNA, 19 nt, Artificial Sequence
  Description of Artificial Sequence: Synthetic oligonucleotide
gaucugcuaagggagaucg

SEQ ID NO: 1081688 - RNA, 19 nt, Artificial Sequence
  Description of Artificial Sequence: Synthetic oligonucleotide
agagagaccgugcugugac

SEQ ID NO: 1081689 - RNA, 19 nt, Artificial Sequence
  Description of Artificial Sequence: Synthetic oligonucleotide
ucaugcuuggucuuguuga

SEQ ID NO: 1081690 - RNA, 19 nt, Artificial Sequence
  Description of Artificial Sequence: Synthetic oligonucleotide
aauuaucaccaaugagauc

SEQ ID NO: 1081691 - RNA, 19 nt, Artificial Sequence
  Description of Artificial Sequence: Synthetic oligonucleotide
aaucagauccaggugacug

SEQ ID NO: 1081692 - RNA, 19 nt, Artificial Sequence
  Description of Artificial Sequence: Synthetic oligonucleotide
cauguaaaucaacagugag

SEQ ID NO: 1081693 - RNA, 19 nt, Artificial Sequence
  Description of Artificial Sequence: Synthetic oligonucleotide
uauggucuaucaauuuucc

SEQ ID NO: 1081694 - RNA, 19 nt, Artificial Sequence
  Description of Artificial Sequence: Synthetic oligonucleotide
cuugggaacacaacuuucc

SEQ ID NO: 1081695 - RNA, 19 nt, Artificial Sequence
  Description of Artificial Sequence: Synthetic oligonucleotide
cuucauucagccagaagcc

SEQ ID NO: 1081696 - RNA, 19 nt, Artificial Sequence
  Description of Artificial Sequence: Synthetic oligonucleotide
ucuuaauuggccguucugc

SEQ ID NO: 1081697 - RNA, 19 nt, Artificial Sequence
  Description of Artificial Sequence: Synthetic oligonucleotide
augauaauguuucgauagg

SEQ ID NO: 1081698 - RNA, 19 nt, Artificial Sequence
  Description of Artificial Sequence: Synthetic oligonucleotide
uugaacaauuuucuuugug

SEQ ID NO: 1081699 - RNA, 19 nt, Artificial Sequence
  Description of Artificial Sequence: Synthetic oligonucleotide
aauccagugaccaugcccu

SEQ ID NO: 1081700 - RNA, 19 nt, Artificial Sequence
  Description of Artificial Sequence: Synthetic oligonucleotide
uguacaucaauuccuugaa

SEQ ID NO: 1081701 - RNA, 19 nt, Artificial Sequence
  Description of Artificial Sequence: Synthetic oligonucleotide
auaauguuucgauaggaau

SEQ ID NO: 1081702 - RNA, 19 nt, Artificial Sequence
  Description of Artificial Sequence: Synthetic oligonucleotide
gagaucaaagaaauguccc

SEQ ID NO: 1081703 - RNA, 19 nt, Artificial Sequence
  Description of Artificial Sequence: Synthetic oligonucleotide
ugaaaucacauucuagcua

SEQ ID NO: 1081704 - RNA, 19 nt, Artificial Sequence
  Description of Artificial Sequence: Synthetic oligonucleotide
caaccaaagaacacguggc

SEQ ID NO: 1081705 - RNA, 19 nt, Artificial Sequence
  Description of Artificial Sequence: Synthetic oligonucleotide
gaaaugucccgccuugucc

SEQ ID NO: 1081706 - RNA, 19 nt, Artificial Sequence
  Description of Artificial Sequence: Synthetic oligonucleotide
acuaccuguuccaacaucg

SEQ ID NO: 1081707 - RNA, 19 nt, Artificial Sequence
  Description of Artificial Sequence: Synthetic oligonucleotide
uccccaugugacaagauga

SEQ ID NO: 1081708 - RNA, 19 nt, Artificial Sequence
  Description of Artificial Sequence: Synthetic oligonucleotide
augcccacauaauagugac

SEQ ID NO: 1081709 - RNA, 19 nt, Artificial Sequence
  Description of Artificial Sequence: Synthetic oligonucleotide
uguuucgauaggaaucccc

SEQ ID NO: 1081710 - RNA, 19 nt, Artificial Sequence
  Description of Artificial Sequence: Synthetic oligonucleotide
ugacauggcaacacgcugc

SEQ ID NO: 1081711 - RNA, 19 nt, Artificial Sequence
  Description of Artificial Sequence: Synthetic oligonucleotide
auucaugauugccgaauac

SEQ ID NO: 1081712 - RNA, 19 nt, Artificial Sequence
  Description of Artificial Sequence: Synthetic oligonucleotide
ugaaggacaucaugcuugg

SEQ ID NO: 1081713 - RNA, 19 nt, Artificial Sequence
  Description of Artificial Sequence: Synthetic oligonucleotide
cuuguugauccugugaacc

SEQ ID NO: 1081714 - RNA, 19 nt, Artificial Sequence
  Description of Artificial Sequence: Synthetic oligonucleotide
gacaucaugguuccuuugc

SEQ ID NO: 1081715 - RNA, 19 nt, Artificial Sequence
  Description of Artificial Sequence: Synthetic oligonucleotide
aauuggaucuuugcugauc

SEQ ID NO: 1081716 - RNA, 19 nt, Artificial Sequence
  Description of Artificial Sequence: Synthetic oligonucleotide
uccauuugcacaccaguga

SEQ ID NO: 1081717 - RNA, 19 nt, Artificial Sequence
  Description of Artificial Sequence: Synthetic oligonucleotide
ugccgaauacuccuucugg

SEQ ID NO: 1081718 - RNA, 19 nt, Artificial Sequence
  Description of Artificial Sequence: Synthetic oligonucleotide
augaaaucacauucuagcu

SEQ ID NO: 1081719 - RNA, 19 nt, Artificial Sequence
  Description of Artificial Sequence: Synthetic oligonucleotide
uucuuugugacauggcaac

SEQ ID NO: 1081720 - RNA, 19 nt, Artificial Sequence
  Description of Artificial Sequence: Synthetic oligonucleotide
uuucuuugugacauggcaa

SEQ ID NO: 1081721 - RNA, 19 nt, Artificial Sequence
  Description of Artificial Sequence: Synthetic oligonucleotide
acugguaaaggaugaaacu

SEQ ID NO: 1081722 - RNA, 19 nt, Artificial Sequence
  Description of Artificial Sequence: Synthetic oligonucleotide
gaucaaagaaaugucccgc

SEQ ID NO: 1081723 - RNA, 19 nt, Artificial Sequence
  Description of Artificial Sequence: Synthetic oligonucleotide
ugaauuguggcucccacuu

SEQ ID NO: 1081724 - RNA, 19 nt, Artificial Sequence
  Description of Artificial Sequence: Synthetic oligonucleotide
ugccauggaaaucuggcca

SEQ ID NO: 1081725 - RNA, 19 nt, Artificial Sequence
  Description of Artificial Sequence: Synthetic oligonucleotide
caugauugccgaauacucc

SEQ ID NO: 1081726 - RNA, 19 nt, Artificial Sequence
  Description of Artificial Sequence: Synthetic oligonucleotide
auauggucuaucaauuuuc

SEQ ID NO: 1081727 - RNA, 19 nt, Artificial Sequence
  Description of Artificial Sequence: Synthetic oligonucleotide
gaccaugcccuuuagaguc

SEQ ID NO: 1081728 - RNA, 19 nt, Artificial Sequence
  Description of Artificial Sequence: Synthetic oligonucleotide
ugauaagaagucugggaga

SEQ ID NO: 1081729 - RNA, 19 nt, Artificial Sequence
  Description of Artificial Sequence: Synthetic oligonucleotide
acaagaugauguuccacag

SEQ ID NO: 1081730 - RNA, 19 nt, Artificial Sequence
  Description of Artificial Sequence: Synthetic oligonucleotide
uugccuuccaugauaagaa

SEQ ID NO: 1081731 - RNA, 19 nt, Artificial Sequence
  Description of Artificial Sequence: Synthetic oligonucleotide
ugugacauggcaacacgcu

SEQ ID NO: 1081732 - RNA, 19 nt, Artificial Sequence
  Description of Artificial Sequence: Synthetic oligonucleotide
gaguauguccauuugcaca

SEQ ID NO: 1081733 - RNA, 19 nt, Artificial Sequence
  Description of Artificial Sequence: Synthetic oligonucleotide
ucgguguacaucaauuccu

SEQ ID NO: 1081734 - RNA, 19 nt, Artificial Sequence
  Description of Artificial Sequence: Synthetic oligonucleotide
cucaaugaugaaacgaguc

SEQ ID NO: 1081735 - RNA, 19 nt, Artificial Sequence
  Description of Artificial Sequence: Synthetic oligonucleotide
aaccaaagaacacguggca

SEQ ID NO: 1081736 - RNA, 19 nt, Artificial Sequence
  Description of Artificial Sequence: Synthetic oligonucleotide
uccucucuggucuaccagg

SEQ ID NO: 1081737 - RNA, 19 nt, Artificial Sequence
  Description of Artificial Sequence: Synthetic oligonucleotide
aaguccucggauucggugu

SEQ ID NO: 1081738 - RNA, 19 nt, Artificial Sequence
  Description of Artificial Sequence: Synthetic oligonucleotide
gagaccauaaccucucaca

SEQ ID NO: 1081739 - RNA, 19 nt, Artificial Sequence
  Description of Artificial Sequence: Synthetic oligonucleotide
ugauaauguuucgauagga

SEQ ID NO: 1081740 - RNA, 19 nt, Artificial Sequence
  Description of Artificial Sequence: Synthetic oligonucleotide
uggccguucugcaaaagcc

SEQ ID NO: 1081741 - RNA, 19 nt, Artificial Sequence
  Description of Artificial Sequence: Synthetic oligonucleotide
uucgauaggaauccccuuc

SEQ ID NO: 1081742 - RNA, 19 nt, Artificial Sequence
  Description of Artificial Sequence: Synthetic oligonucleotide
auucuagcuaagacaaggc

SEQ ID NO: 1081743 - RNA, 19 nt, Artificial Sequence
  Description of Artificial Sequence: Synthetic oligonucleotide
uguccauuugcacaccagu

SEQ ID NO: 1081744 - RNA, 19 nt, Artificial Sequence
  Description of Artificial Sequence: Synthetic oligonucleotide
uauacucuggcaucuggcu

SEQ ID NO: 1081745 - RNA, 19 nt, Artificial Sequence
  Description of Artificial Sequence: Synthetic oligonucleotide
ucuugcuuaggccuccaca

SEQ ID NO: 1081746 - RNA, 19 nt, Artificial Sequence
  Description of Artificial Sequence: Synthetic oligonucleotide
gaaacgagucccaaaagca

SEQ ID NO: 1081747 - RNA, 19 nt, Artificial Sequence
  Description of Artificial Sequence: Synthetic oligonucleotide
uaauuggccguucugcaaa

SEQ ID NO: 1081748 - RNA, 19 nt, Artificial Sequence
  Description of Artificial Sequence: Synthetic oligonucleotide
uuauccucacgucuuggga

SEQ ID NO: 1081749 - RNA, 19 nt, Artificial Sequence
  Description of Artificial Sequence: Synthetic oligonucleotide
aaccaaucaucuuccagaa

SEQ ID NO: 1081750 - RNA, 19 nt, Artificial Sequence
  Description of Artificial Sequence: Synthetic oligonucleotide
cacauaauagugaccuggc

SEQ ID NO: 1081751 - RNA, 19 nt, Artificial Sequence
  Description of Artificial Sequence: Synthetic oligonucleotide
uccuauuuugcuguaauua

SEQ ID NO: 1081752 - RNA, 19 nt, Artificial Sequence
  Description of Artificial Sequence: Synthetic oligonucleotide
caauccagugaccaugccc

SEQ ID NO: 1081753 - RNA, 19 nt, Artificial Sequence
  Description of Artificial Sequence: Synthetic oligonucleotide
ugaacaguggcgagguaga

SEQ ID NO: 1081754 - RNA, 19 nt, Artificial Sequence
  Description of Artificial Sequence: Synthetic oligonucleotide
acgucuugggaacacaacu

SEQ ID NO: 1081755 - RNA, 19 nt, Artificial Sequence
  Description of Artificial Sequence: Synthetic oligonucleotide
cuagccgugaugucacugg

SEQ ID NO: 1081756 - RNA, 19 nt, Artificial Sequence
  Description of Artificial Sequence: Synthetic oligonucleotide
auaugaaaucacauucuag

SEQ ID NO: 1081757 - RNA, 19 nt, Artificial Sequence
  Description of Artificial Sequence: Synthetic oligonucleotide
uucuuaauuggccguucug

SEQ ID NO: 1081758 - RNA, 19 nt, Artificial Sequence
  Description of Artificial Sequence: Synthetic oligonucleotide
caaaccaaucaucuuccag

SEQ ID NO: 1081759 - RNA, 19 nt, Artificial Sequence
  Description of Artificial Sequence: Synthetic oligonucleotide
gaaguauuccucucugguc

SEQ ID NO: 1081760 - RNA, 19 nt, Artificial Sequence
  Description of Artificial Sequence: Synthetic oligonucleotide
uuggccguucugcaaaagc

SEQ ID NO: 1081761 - RNA, 19 nt, Artificial Sequence
  Description of Artificial Sequence: Synthetic oligonucleotide
uaucaauuuuccagucaca

SEQ ID NO: 1081762 - RNA, 19 nt, Artificial Sequence
  Description of Artificial Sequence: Synthetic oligonucleotide
acuguucaaauaugcauau

SEQ ID NO: 1081763 - RNA, 19 nt, Artificial Sequence
  Description of Artificial Sequence: Synthetic oligonucleotide
acagacgagaccauaaccu

SEQ ID NO: 1081764 - RNA, 19 nt, Artificial Sequence
  Description of Artificial Sequence: Synthetic oligonucleotide
ucugcuaagggagaucggu

SEQ ID NO: 1081765 - RNA, 19 nt, Artificial Sequence
  Description of Artificial Sequence: Synthetic oligonucleotide
uuuuauccucacgucuugg

SEQ ID NO: 1081766 - RNA, 19 nt, Artificial Sequence
  Description of Artificial Sequence: Synthetic oligonucleotide
ucgauaggaauccccuuca

SEQ ID NO: 1081767 - RNA, 19 nt, Artificial Sequence
  Description of Artificial Sequence: Synthetic oligonucleotide
aaugaugaaacgaguccca

SEQ ID NO: 1081768 - RNA, 19 nt, Artificial Sequence
  Description of Artificial Sequence: Synthetic oligonucleotide
cuggcuguuccucacagac

SEQ ID NO: 1081769 - RNA, 19 nt, Artificial Sequence
  Description of Artificial Sequence: Synthetic oligonucleotide
augcauauauacucuggca

SEQ ID NO: 1081770 - RNA, 19 nt, Artificial Sequence
  Description of Artificial Sequence: Synthetic oligonucleotide
augggcgucaaugagugag

SEQ ID NO: 1081771 - RNA, 19 nt, Artificial Sequence
  Description of Artificial Sequence: Synthetic oligonucleotide
uuacuccuaguccuccugc

SEQ ID NO: 1081772 - RNA, 19 nt, Artificial Sequence
  Description of Artificial Sequence: Synthetic oligonucleotide
cacagacgagaccauaacc

SEQ ID NO: 1081773 - RNA, 19 nt, Artificial Sequence
  Description of Artificial Sequence: Synthetic oligonucleotide
cugaguauguccauuugca

SEQ ID NO: 1081774 - RNA, 19 nt, Artificial Sequence
  Description of Artificial Sequence: Synthetic oligonucleotide
aucaaacccaaguccucgg

SEQ ID NO: 1081775 - RNA, 19 nt, Artificial Sequence
  Description of Artificial Sequence: Synthetic oligonucleotide
uuaggccuccacauaagaa

SEQ ID NO: 1081776 - RNA, 19 nt, Artificial Sequence
  Description of Artificial Sequence: Synthetic oligonucleotide
uauguccauuugcacacca

SEQ ID NO: 1081777 - RNA, 19 nt, Artificial Sequence
  Description of Artificial Sequence: Synthetic oligonucleotide
uugcuuguccaauaugaaa

SEQ ID NO: 1081778 - RNA, 19 nt, Artificial Sequence
  Description of Artificial Sequence: Synthetic oligonucleotide
uugccauggaaaucuggcc

SEQ ID NO: 1081779 - RNA, 19 nt, Artificial Sequence
  Description of Artificial Sequence: Synthetic oligonucleotide
caaugagaucuuccaaacc

SEQ ID NO: 1081780 - RNA, 19 nt, Artificial Sequence
  Description of Artificial Sequence: Synthetic oligonucleotide
ucgaugcccacauaauagu

SEQ ID NO: 1081781 - RNA, 19 nt, Artificial Sequence
  Description of Artificial Sequence: Synthetic oligonucleotide
gcuguaauuaucaccaaug

SEQ ID NO: 1081782 - RNA, 19 nt, Artificial Sequence
  Description of Artificial Sequence: Synthetic oligonucleotide
cagaaguauuccucucugg

SEQ ID NO: 1081783 - RNA, 19 nt, Artificial Sequence
  Description of Artificial Sequence: Synthetic oligonucleotide
uuaauuggccguucugcaa

SEQ ID NO: 1081784 - RNA, 19 nt, Artificial Sequence
  Description of Artificial Sequence: Synthetic oligonucleotide
gauaauguuucgauaggaa

SEQ ID NO: 1081785 - RNA, 19 nt, Artificial Sequence
  Description of Artificial Sequence: Synthetic oligonucleotide
uuguugauccugugaaccu

SEQ ID NO: 1081786 - RNA, 19 nt, Artificial Sequence
  Description of Artificial Sequence: Synthetic oligonucleotide
agagaccgugcugugacac

SEQ ID NO: 1081787 - RNA, 19 nt, Artificial Sequence
  Description of Artificial Sequence: Synthetic oligonucleotide
ugacagcuagccgugaugu

SEQ ID NO: 1081788 - RNA, 19 nt, Artificial Sequence
  Description of Artificial Sequence: Synthetic oligonucleotide
gacauggcaacacgcugcc

SEQ ID NO: 1081789 - RNA, 19 nt, Artificial Sequence
  Description of Artificial Sequence: Synthetic oligonucleotide
caauggcuugaacaguggc

SEQ ID NO: 1081790 - RNA, 19 nt, Artificial Sequence
  Description of Artificial Sequence: Synthetic oligonucleotide
uugccgaauacuccuucug

SEQ ID NO: 1081791 - RNA, 19 nt, Artificial Sequence
  Description of Artificial Sequence: Synthetic oligonucleotide
cacacuaccuguuccaaca

SEQ ID NO: 1081792 - RNA, 19 nt, Artificial Sequence
  Description of Artificial Sequence: Synthetic oligonucleotide
uuacugguaaaggaugaaa

SEQ ID NO: 1081793 - RNA, 19 nt, Artificial Sequence
  Description of Artificial Sequence: Synthetic oligonucleotide
acauaauagugaccuggcu

SEQ ID NO: 1081794 - RNA, 19 nt, Artificial Sequence
  Description of Artificial Sequence: Synthetic oligonucleotide
guggcaucaaacccaaguc

SEQ ID NO: 1081795 - RNA, 19 nt, Artificial Sequence
  Description of Artificial Sequence: Synthetic oligonucleotide
acaugauaauguuucgaua

SEQ ID NO: 1081796 - RNA, 19 nt, Artificial Sequence
  Description of Artificial Sequence: Synthetic oligonucleotide
aucuuccaaaccaaucauc

SEQ ID NO: 1081797 - RNA, 19 nt, Artificial Sequence
  Description of Artificial Sequence: Synthetic oligonucleotide
gggaacacaacuuucccca

SEQ ID NO: 1081798 - RNA, 19 nt, Artificial Sequence
  Description of Artificial Sequence: Synthetic oligonucleotide
aaccauggcugagaaauaa

SEQ ID NO: 1081799 - RNA, 19 nt, Artificial Sequence
  Description of Artificial Sequence: Synthetic oligonucleotide
aaacgagucccaaaagcaa

SEQ ID NO: 1081800 - RNA, 19 nt, Artificial Sequence
  Description of Artificial Sequence: Synthetic oligonucleotide
accuguuccaacaucgaug

SEQ ID NO: 1081801 - RNA, 19 nt, Artificial Sequence
  Description of Artificial Sequence: Synthetic oligonucleotide
ugaugaaacgagucccaaa

SEQ ID NO: 1081802 - RNA, 19 nt, Artificial Sequence
  Description of Artificial Sequence: Synthetic oligonucleotide
caugccaguaaugucagca

SEQ ID NO: 1081803 - RNA, 19 nt, Artificial Sequence
  Description of Artificial Sequence: Synthetic oligonucleotide
augugacaagaugauguuc

SEQ ID NO: 1081804 - RNA, 19 nt, Artificial Sequence
  Description of Artificial Sequence: Synthetic oligonucleotide
cccacuuugcucauucucg

SEQ ID NO: 1081805 - RNA, 19 nt, Artificial Sequence
  Description of Artificial Sequence: Synthetic oligonucleotide
agcuaagacaaggccaaag

SEQ ID NO: 1081806 - RNA, 19 nt, Artificial Sequence
  Description of Artificial Sequence: Synthetic oligonucleotide
gagucccaaaagcaauggc

SEQ ID NO: 1081807 - RNA, 19 nt, Artificial Sequence
  Description of Artificial Sequence: Synthetic oligonucleotide
ugaggcugccacagcaaug

SEQ ID NO: 1081808 - RNA, 19 nt, Artificial Sequence
  Description of Artificial Sequence: Synthetic oligonucleotide
uccaacaucgaugcccaca

SEQ ID NO: 1081809 - RNA, 19 nt, Artificial Sequence
  Description of Artificial Sequence: Synthetic oligonucleotide
gugacauggcaacacgcug

SEQ ID NO: 1081810 - RNA, 19 nt, Artificial Sequence
  Description of Artificial Sequence: Synthetic oligonucleotide
cauggcaacacgcugccca

SEQ ID NO: 1081811 - RNA, 19 nt, Artificial Sequence
  Description of Artificial Sequence: Synthetic oligonucleotide
aggcaugccaguaauguca

SEQ ID NO: 1081812 - RNA, 19 nt, Artificial Sequence
  Description of Artificial Sequence: Synthetic oligonucleotide
augacagcuagccgugaug

SEQ ID NO: 1081813 - RNA, 19 nt, Artificial Sequence
  Description of Artificial Sequence: Synthetic oligonucleotide
cauaagaagaggguacuga

SEQ ID NO: 1081814 - RNA, 19 nt, Artificial Sequence
  Description of Artificial Sequence: Synthetic oligonucleotide
ccacauaauagugaccugg

SEQ ID NO: 1081815 - RNA, 19 nt, Artificial Sequence
  Description of Artificial Sequence: Synthetic oligonucleotide
aacgagucccaaaagcaau

SEQ ID NO: 1081816 - RNA, 19 nt, Artificial Sequence
  Description of Artificial Sequence: Synthetic oligonucleotide
gguuuacugguaaaggaug

SEQ ID NO: 1081817 - RNA, 19 nt, Artificial Sequence
  Description of Artificial Sequence: Synthetic oligonucleotide
accuacauacugaaggaca

SEQ ID NO: 1081818 - RNA, 19 nt, Artificial Sequence
  Description of Artificial Sequence: Synthetic oligonucleotide
uaggaauccccuucauggu

SEQ ID NO: 1081819 - RNA, 19 nt, Artificial Sequence
  Description of Artificial Sequence: Synthetic oligonucleotide
caaguccucggauucggug

SEQ ID NO: 1081820 - RNA, 19 nt, Artificial Sequence
  Description of Artificial Sequence: Synthetic oligonucleotide
auaagguccccaaacgccu

SEQ ID NO: 1081821 - RNA, 19 nt, Artificial Sequence
  Description of Artificial Sequence: Synthetic oligonucleotide
agggagaucgguugccaug

SEQ ID NO: 1081822 - RNA, 19 nt, Artificial Sequence
  Description of Artificial Sequence: Synthetic oligonucleotide
agccagaaguauuccucuc

SEQ ID NO: 1081823 - RNA, 19 nt, Artificial Sequence
  Description of Artificial Sequence: Synthetic oligonucleotide
gcgucaaugagugaggcug

SEQ ID NO: 1081824 - RNA, 19 nt, Artificial Sequence
  Description of Artificial Sequence: Synthetic oligonucleotide
cagacgagaccauaaccuc

SEQ ID NO: 1081825 - RNA, 19 nt, Artificial Sequence
  Description of Artificial Sequence: Synthetic oligonucleotide
auacuucuugucauaauau

SEQ ID NO: 1081826 - RNA, 19 nt, Artificial Sequence
  Description of Artificial Sequence: Synthetic oligonucleotide
aauuggccguucugcaaaa

SEQ ID NO: 1081827 - RNA, 19 nt, Artificial Sequence
  Description of Artificial Sequence: Synthetic oligonucleotide
acuucuuaauuggccguuc

SEQ ID NO: 1081828 - RNA, 19 nt, Artificial Sequence
  Description of Artificial Sequence: Synthetic oligonucleotide
ugauccugugaaccuggcu

SEQ ID NO: 1081829 - RNA, 19 nt, Artificial Sequence
  Description of Artificial Sequence: Synthetic oligonucleotide
agacagugucaauccagug

SEQ ID NO: 1081830 - RNA, 19 nt, Artificial Sequence
  Description of Artificial Sequence: Synthetic oligonucleotide
cagaugacagcuagccgug

SEQ ID NO: 1081831 - RNA, 19 nt, Artificial Sequence
  Description of Artificial Sequence: Synthetic oligonucleotide
ugauacuucuugucauaau

SEQ ID NO: 1081832 - RNA, 19 nt, Artificial Sequence
  Description of Artificial Sequence: Synthetic oligonucleotide
gaccauaaccucucacauc

SEQ ID NO: 1081833 - RNA, 19 nt, Artificial Sequence
  Description of Artificial Sequence: Synthetic oligonucleotide
cacgcacacuaccuguucc

SEQ ID NO: 1081834 - RNA, 19 nt, Artificial Sequence
  Description of Artificial Sequence: Synthetic oligonucleotide
uagccgugaugucacuggc

SEQ ID NO: 1081835 - RNA, 19 nt, Artificial Sequence
  Description of Artificial Sequence: Synthetic oligonucleotide
gauaagaagucugggagau

SEQ ID NO: 1081836 - RNA, 19 nt, Artificial Sequence
  Description of Artificial Sequence: Synthetic oligonucleotide
agcacgagauuuccuauuu

SEQ ID NO: 1081837 - RNA, 19 nt, Artificial Sequence
  Description of Artificial Sequence: Synthetic oligonucleotide
caauuacuccuaguccucc

SEQ ID NO: 1081838 - RNA, 19 nt, Artificial Sequence
  Description of Artificial Sequence: Synthetic oligonucleotide
guacaucaauuccuugaac

SEQ ID NO: 1081839 - RNA, 19 nt, Artificial Sequence
  Description of Artificial Sequence: Synthetic oligonucleotide
cucuggucuaccagggcug

SEQ ID NO: 1081840 - RNA, 19 nt, Artificial Sequence
  Description of Artificial Sequence: Synthetic oligonucleotide
cuaagggagaucgguugcc

SEQ ID NO: 1081841 - RNA, 19 nt, Artificial Sequence
  Description of Artificial Sequence: Synthetic oligonucleotide
agaagaggguacugagaga

SEQ ID NO: 1081842 - RNA, 19 nt, Artificial Sequence
  Description of Artificial Sequence: Synthetic oligonucleotide
aaaucacauucuagcuaag

SEQ ID NO: 1081843 - RNA, 19 nt, Artificial Sequence
  Description of Artificial Sequence: Synthetic oligonucleotide
gugguugaauuguggcucc

SEQ ID NO: 1081844 - RNA, 19 nt, Artificial Sequence
  Description of Artificial Sequence: Synthetic oligonucleotide
ccaaugagaucuuccaaac

SEQ ID NO: 1081845 - RNA, 19 nt, Artificial Sequence
  Description of Artificial Sequence: Synthetic oligonucleotide
gcauauauacucuggcauc

SEQ ID NO: 1081846 - RNA, 19 nt, Artificial Sequence
  Description of Artificial Sequence: Synthetic oligonucleotide
gacuccaccucuugugaca

SEQ ID NO: 1081847 - RNA, 19 nt, Artificial Sequence
  Description of Artificial Sequence: Synthetic oligonucleotide
cuggccaaacauguaaauc

SEQ ID NO: 1081848 - RNA, 19 nt, Artificial Sequence
  Description of Artificial Sequence: Synthetic oligonucleotide
agaucugcuaagggagauc

SEQ ID NO: 1081849 - RNA, 19 nt, Artificial Sequence
  Description of Artificial Sequence: Synthetic oligonucleotide
gacgagaccauaaccucuc

SEQ ID NO: 1081850 - RNA, 19 nt, Artificial Sequence
  Description of Artificial Sequence: Synthetic oligonucleotide
ggugguugaauuguggcuc

SEQ ID NO: 1081851 - RNA, 19 nt, Artificial Sequence
  Description of Artificial Sequence: Synthetic oligonucleotide
uuccuauuuugcuguaauu

SEQ ID NO: 1081852 - RNA, 19 nt, Artificial Sequence
  Description of Artificial Sequence: Synthetic oligonucleotide
agugagcagagagaccgug

SEQ ID NO: 1081853 - RNA, 19 nt, Artificial Sequence
  Description of Artificial Sequence: Synthetic oligonucleotide
ugcccuuuagagucagauc

SEQ ID NO: 1081854 - RNA, 19 nt, Artificial Sequence
  Description of Artificial Sequence: Synthetic oligonucleotide
uuucgauaggaauccccuu

SEQ ID NO: 1081855 - RNA, 19 nt, Artificial Sequence
  Description of Artificial Sequence: Synthetic oligonucleotide
agcaagucucucucaaguu

SEQ ID NO: 1081856 - RNA, 19 nt, Artificial Sequence
  Description of Artificial Sequence: Synthetic oligonucleotide
gcaagucucucucaaguuc

SEQ ID NO: 1081857 - RNA, 19 nt, Artificial Sequence
  Description of Artificial Sequence: Synthetic oligonucleotide
ugcuccaauuacuccuagu

SEQ ID NO: 1081858 - RNA, 19 nt, Artificial Sequence
  Description of Artificial Sequence: Synthetic oligonucleotide
accauauggucuaucaauu

SEQ ID NO: 1081859 - RNA, 19 nt, Artificial Sequence
  Description of Artificial Sequence: Synthetic oligonucleotide
cacaugauaauguuucgau

SEQ ID NO: 1081860 - RNA, 19 nt, Artificial Sequence
  Description of Artificial Sequence: Synthetic oligonucleotide
cucacagacgagaccauaa

SEQ ID NO: 1081861 - RNA, 19 nt, Artificial Sequence
  Description of Artificial Sequence: Synthetic oligonucleotide
aggaauccccuucaugguu

SEQ ID NO: 1081862 - RNA, 19 nt, Artificial Sequence
  Description of Artificial Sequence: Synthetic oligonucleotide
cuuaggccuccacauaaga

SEQ ID NO: 1081863 - RNA, 19 nt, Artificial Sequence
  Description of Artificial Sequence: Synthetic oligonucleotide
cacgucuugggaacacaac

SEQ ID NO: 1081864 - RNA, 19 nt, Artificial Sequence
  Description of Artificial Sequence: Synthetic oligonucleotide
ucaaugagugaggcugcca

SEQ ID NO: 1081865 - RNA, 19 nt, Artificial Sequence
  Description of Artificial Sequence: Synthetic oligonucleotide
augccaguaaugucagcau

SEQ ID NO: 1081866 - RNA, 19 nt, Artificial Sequence
  Description of Artificial Sequence: Synthetic oligonucleotide
gaauuguggcucccacuuc

SEQ ID NO: 1081867 - RNA, 19 nt, Artificial Sequence
  Description of Artificial Sequence: Synthetic oligonucleotide
gacugcucgaugguccagc

SEQ ID NO: 1081868 - RNA, 19 nt, Artificial Sequence
  Description of Artificial Sequence: Synthetic oligonucleotide
cuugcuuaggccuccacau

SEQ ID NO: 1081869 - RNA, 19 nt, Artificial Sequence
  Description of Artificial Sequence: Synthetic oligonucleotide
ucgccauugccuccugcac

SEQ ID NO: 1081870 - RNA, 19 nt, Artificial Sequence
  Description of Artificial Sequence: Synthetic oligonucleotide
gagaccgugcugugacacc

SEQ ID NO: 1081871 - RNA, 19 nt, Artificial Sequence
  Description of Artificial Sequence: Synthetic oligonucleotide
gcuaagggagaucgguugc

SEQ ID NO: 1081872 - RNA, 19 nt, Artificial Sequence
  Description of Artificial Sequence: Synthetic oligonucleotide
ggauggcaagaucaucaag

SEQ ID NO: 1081873 - RNA, 19 nt, Artificial Sequence
  Description of Artificial Sequence: Synthetic oligonucleotide
uggcuugaacaguggcgag

SEQ ID NO: 1081874 - RNA, 19 nt, Artificial Sequence
  Description of Artificial Sequence: Synthetic oligonucleotide
acgcacacuaccuguucca

SEQ ID NO: 1081875 - RNA, 19 nt, Artificial Sequence
  Description of Artificial Sequence: Synthetic oligonucleotide
agacgagaccauaaccucu

SEQ ID NO: 1081876 - RNA, 19 nt, Artificial Sequence
  Description of Artificial Sequence: Synthetic oligonucleotide
guucugcaaaagccagaag

SEQ ID NO: 1081877 - RNA, 19 nt, Artificial Sequence
  Description of Artificial Sequence: Synthetic oligonucleotide
gccgugaugucacuggcug

SEQ ID NO: 1081878 - RNA, 19 nt, Artificial Sequence
  Description of Artificial Sequence: Synthetic oligonucleotide
uggucuaccagggcugcac

SEQ ID NO: 1081879 - RNA, 19 nt, Artificial Sequence
  Description of Artificial Sequence: Synthetic oligonucleotide
ucuggucuaccagggcugc

SEQ ID NO: 1081880 - RNA, 19 nt, Artificial Sequence
  Description of Artificial Sequence: Synthetic oligonucleotide
caccauauggucuaucaau

SEQ ID NO: 1081881 - RNA, 19 nt, Artificial Sequence
  Description of Artificial Sequence: Synthetic oligonucleotide
guuucgauaggaauccccu

SEQ ID NO: 1081882 - RNA, 19 nt, Artificial Sequence
  Description of Artificial Sequence: Synthetic oligonucleotide
aacacgcugcccagauguc

SEQ ID NO: 1081883 - RNA, 19 nt, Artificial Sequence
  Description of Artificial Sequence: Synthetic oligonucleotide
agaccgugcugugacaccu

SEQ ID NO: 1081884 - RNA, 19 nt, Artificial Sequence
  Description of Artificial Sequence: Synthetic oligonucleotide
cucggauucgguguacauc

SEQ ID NO: 1081885 - RNA, 19 nt, Artificial Sequence
  Description of Artificial Sequence: Synthetic oligonucleotide
cugagaaauaaggucccca

SEQ ID NO: 1081886 - RNA, 19 nt, Artificial Sequence
  Description of Artificial Sequence: Synthetic oligonucleotide
gauucgguguacaucaauu

SEQ ID NO: 1081887 - RNA, 19 nt, Artificial Sequence
  Description of Artificial Sequence: Synthetic oligonucleotide
caccuacauacugaaggac

SEQ ID NO: 1081888 - RNA, 19 nt, Artificial Sequence
  Description of Artificial Sequence: Synthetic oligonucleotide
cucgccauugccuccugca

SEQ ID NO: 1081889 - RNA, 19 nt, Artificial Sequence
  Description of Artificial Sequence: Synthetic oligonucleotide
ccaugauaagaagucuggg

SEQ ID NO: 1081890 - RNA, 19 nt, Artificial Sequence
  Description of Artificial Sequence: Synthetic oligonucleotide
ugaccuggcuccuggucuc

SEQ ID NO: 1081891 - RNA, 19 nt, Artificial Sequence
  Description of Artificial Sequence: Synthetic oligonucleotide
ugcacgcacacuaccuguu

SEQ ID NO: 1081892 - RNA, 19 nt, Artificial Sequence
  Description of Artificial Sequence: Synthetic oligonucleotide
cauauggucuaucaauuuu

SEQ ID NO: 1081893 - RNA, 19 nt, Artificial Sequence
  Description of Artificial Sequence: Synthetic oligonucleotide
ggcuugaacaguggcgagg

SEQ ID NO: 1081894 - RNA, 19 nt, Artificial Sequence
  Description of Artificial Sequence: Synthetic oligonucleotide
uaauagugaccuggcuccu

SEQ ID NO: 1081895 - RNA, 19 nt, Artificial Sequence
  Description of Artificial Sequence: Synthetic oligonucleotide
acauucuagcuaagacaag

SEQ ID NO: 1081896 - RNA, 19 nt, Artificial Sequence
  Description of Artificial Sequence: Synthetic oligonucleotide
ccacuuugcucauucucgc

SEQ ID NO: 1081897 - RNA, 19 nt, Artificial Sequence
  Description of Artificial Sequence: Synthetic oligonucleotide
cauucaugauugccgaaua

SEQ ID NO: 1081898 - RNA, 19 nt, Artificial Sequence
  Description of Artificial Sequence: Synthetic oligonucleotide
agagaaguuccaggaggca

SEQ ID NO: 1081899 - RNA, 19 nt, Artificial Sequence
  Description of Artificial Sequence: Synthetic oligonucleotide
ccgaauacuccuucuggug

SEQ ID NO: 1081900 - RNA, 19 nt, Artificial Sequence
  Description of Artificial Sequence: Synthetic oligonucleotide
uuguggcucccacuucuua

SEQ ID NO: 1081901 - RNA, 19 nt, Artificial Sequence
  Description of Artificial Sequence: Synthetic oligonucleotide
cagacuccaccucuuguga

SEQ ID NO: 1081902 - RNA, 19 nt, Artificial Sequence
  Description of Artificial Sequence: Synthetic oligonucleotide
guaaaucaacagugaggaa

SEQ ID NO: 1081903 - RNA, 19 nt, Artificial Sequence
  Description of Artificial Sequence: Synthetic oligonucleotide
accgugcugugacaccugu

SEQ ID NO: 1081904 - RNA, 19 nt, Artificial Sequence
  Description of Artificial Sequence: Synthetic oligonucleotide
uuugcucauucucgccauu

SEQ ID NO: 1081905 - RNA, 19 nt, Artificial Sequence
  Description of Artificial Sequence: Synthetic oligonucleotide
caugguuccuuugcuuguc

SEQ ID NO: 1081906 - RNA, 19 nt, Artificial Sequence
  Description of Artificial Sequence: Synthetic oligonucleotide
acaucacaccaccuacaua

SEQ ID NO: 1081907 - RNA, 19 nt, Artificial Sequence
  Description of Artificial Sequence: Synthetic oligonucleotide
cagcaagucucucucaagu

SEQ ID NO: 1081908 - RNA, 19 nt, Artificial Sequence
  Description of Artificial Sequence: Synthetic oligonucleotide
ugguugaauuguggcuccc

SEQ ID NO: 1081909 - RNA, 19 nt, Artificial Sequence
  Description of Artificial Sequence: Synthetic oligonucleotide
acaucgaugcccacauaau

SEQ ID NO: 1081910 - RNA, 19 nt, Artificial Sequence
  Description of Artificial Sequence: Synthetic oligonucleotide
auuggccguucugcaaaag

SEQ ID NO: 1081911 - RNA, 19 nt, Artificial Sequence
  Description of Artificial Sequence: Synthetic oligonucleotide
ccaauuacuccuaguccuc

SEQ ID NO: 1081912 - RNA, 19 nt, Artificial Sequence
  Description of Artificial Sequence: Synthetic oligonucleotide
gcugcacgcacacuaccug

SEQ ID NO: 1081913 - RNA, 19 nt, Artificial Sequence
  Description of Artificial Sequence: Synthetic oligonucleotide
cccgccuugucccagcaag

SEQ ID NO: 1081914 - RNA, 19 nt, Artificial Sequence
  Description of Artificial Sequence: Synthetic oligonucleotide
aucugcuaagggagaucgg

SEQ ID NO: 1081915 - RNA, 19 nt, Artificial Sequence
  Description of Artificial Sequence: Synthetic oligonucleotide
ggcagcacgagauuuccua

SEQ ID NO: 1081916 - RNA, 19 nt, Artificial Sequence
  Description of Artificial Sequence: Synthetic oligonucleotide
cgaugguccagccacauga

SEQ ID NO: 1081917 - RNA, 19 nt, Artificial Sequence
  Description of Artificial Sequence: Synthetic oligonucleotide
cucauggugguugaauugu

SEQ ID NO: 1081918 - RNA, 19 nt, Artificial Sequence
  Description of Artificial Sequence: Synthetic oligonucleotide
uggcucccacuucuuaauu

SEQ ID NO: 1081919 - RNA, 19 nt, Artificial Sequence
  Description of Artificial Sequence: Synthetic oligonucleotide
acgagaccauaaccucuca

SEQ ID NO: 1081920 - RNA, 19 nt, Artificial Sequence
  Description of Artificial Sequence: Synthetic oligonucleotide
gcccacauaauagugaccu

SEQ ID NO: 1081921 - RNA, 19 nt, Artificial Sequence
  Description of Artificial Sequence: Synthetic oligonucleotide
ggccucaaugaugaaacga

SEQ ID NO: 1081922 - RNA, 19 nt, Artificial Sequence
  Description of Artificial Sequence: Synthetic oligonucleotide
ugacugcucgaugguccag

SEQ ID NO: 1081923 - RNA, 19 nt, Artificial Sequence
  Description of Artificial Sequence: Synthetic oligonucleotide
uccucacagacgagaccau

SEQ ID NO: 1081924 - RNA, 19 nt, Artificial Sequence
  Description of Artificial Sequence: Synthetic oligonucleotide
gagagaccgugcugugaca

SEQ ID NO: 1081925 - RNA, 19 nt, Artificial Sequence
  Description of Artificial Sequence: Synthetic oligonucleotide
accuguugccuuccaugau

SEQ ID NO: 1081926 - RNA, 19 nt, Artificial Sequence
  Description of Artificial Sequence: Synthetic oligonucleotide
augguccagccacaugaua

SEQ ID NO: 1081927 - RNA, 19 nt, Artificial Sequence
  Description of Artificial Sequence: Synthetic oligonucleotide
cuguuccaacaucgaugcc

SEQ ID NO: 1081928 - RNA, 19 nt, Artificial Sequence
  Description of Artificial Sequence: Synthetic oligonucleotide
gguuccuuugcuuguccaa

SEQ ID NO: 1081929 - RNA, 19 nt, Artificial Sequence
  Description of Artificial Sequence: Synthetic oligonucleotide
guuccaggaggcagcacga

SEQ ID NO: 1081930 - RNA, 19 nt, Artificial Sequence
  Description of Artificial Sequence: Synthetic oligonucleotide
uccucacgucuugggaaca

SEQ ID NO: 1081931 - RNA, 19 nt, Artificial Sequence
  Description of Artificial Sequence: Synthetic oligonucleotide
cacguggcaucaaacccaa

SEQ ID NO: 1081932 - RNA, 19 nt, Artificial Sequence
  Description of Artificial Sequence: Synthetic oligonucleotide
cuucuuaauuggccguucu

SEQ ID NO: 1081933 - RNA, 19 nt, Artificial Sequence
  Description of Artificial Sequence: Synthetic oligonucleotide
gugacaccuguugccuucc

SEQ ID NO: 1081934 - RNA, 19 nt, Artificial Sequence
  Description of Artificial Sequence: Synthetic oligonucleotide
cacauaagaagaggguacu

SEQ ID NO: 1081935 - RNA, 19 nt, Artificial Sequence
  Description of Artificial Sequence: Synthetic oligonucleotide
uccugugaaccuggcugac

SEQ ID NO: 1081936 - RNA, 19 nt, Artificial Sequence
  Description of Artificial Sequence: Synthetic oligonucleotide
guggccuuggcuuguaguu

SEQ ID NO: 1081937 - RNA, 19 nt, Artificial Sequence
  Description of Artificial Sequence: Synthetic oligonucleotide
guauuccucucuggucuac

SEQ ID NO: 1081938 - RNA, 19 nt, Artificial Sequence
  Description of Artificial Sequence: Synthetic oligonucleotide
gaucuuugcugauccccau

SEQ ID NO: 1081939 - RNA, 19 nt, Artificial Sequence
  Description of Artificial Sequence: Synthetic oligonucleotide
gccaaacauguaaaucaac

SEQ ID NO: 1081940 - RNA, 19 nt, Artificial Sequence
  Description of Artificial Sequence: Synthetic oligonucleotide
gcacacuaccuguuccaac

SEQ ID NO: 1081941 - RNA, 19 nt, Artificial Sequence
  Description of Artificial Sequence: Synthetic oligonucleotide
gcugucaucccaaccuuuc

SEQ ID NO: 1081942 - RNA, 19 nt, Artificial Sequence
  Description of Artificial Sequence: Synthetic oligonucleotide
gcugauccccaugugacaa

SEQ ID NO: 1081943 - RNA, 19 nt, Artificial Sequence
  Description of Artificial Sequence: Synthetic oligonucleotide
uuccaacaucgaugcccac

SEQ ID NO: 1081944 - RNA, 19 nt, Artificial Sequence
  Description of Artificial Sequence: Synthetic oligonucleotide
gaaccauggcugagaaaua

SEQ ID NO: 1081945 - RNA, 19 nt, Artificial Sequence
  Description of Artificial Sequence: Synthetic oligonucleotide
cccaaguccucggauucgg

SEQ ID NO: 1081946 - RNA, 19 nt, Artificial Sequence
  Description of Artificial Sequence: Synthetic oligonucleotide
gcuagccgugaugucacug

SEQ ID NO: 1081947 - RNA, 19 nt, Artificial Sequence
  Description of Artificial Sequence: Synthetic oligonucleotide
caugcuuggucuuguugau

SEQ ID NO: 1081948 - RNA, 19 nt, Artificial Sequence
  Description of Artificial Sequence: Synthetic oligonucleotide
uagcuaagacaaggccaaa

SEQ ID NO: 1081949 - RNA, 19 nt, Artificial Sequence
  Description of Artificial Sequence: Synthetic oligonucleotide
gguugaauuguggcuccca

SEQ ID NO: 1081950 - RNA, 19 nt, Artificial Sequence
  Description of Artificial Sequence: Synthetic oligonucleotide
agcuagccgugaugucacu

SEQ ID NO: 1081951 - RNA, 19 nt, Artificial Sequence
  Description of Artificial Sequence: Synthetic oligonucleotide
agccgugaugucacuggcu

SEQ ID NO: 1081952 - RNA, 19 nt, Artificial Sequence
  Description of Artificial Sequence: Synthetic oligonucleotide
gccgaauacuccuucuggu

SEQ ID NO: 1081953 - RNA, 19 nt, Artificial Sequence
  Description of Artificial Sequence: Synthetic oligonucleotide
caaacccaaguccucggau

SEQ ID NO: 1081954 - RNA, 19 nt, Artificial Sequence
  Description of Artificial Sequence: Synthetic oligonucleotide
cacgcugcccagauguccu

SEQ ID NO: 1081955 - RNA, 19 nt, Artificial Sequence
  Description of Artificial Sequence: Synthetic oligonucleotide
uggcaacacgcugcccaga

SEQ ID NO: 1081956 - RNA, 19 nt, Artificial Sequence
  Description of Artificial Sequence: Synthetic oligonucleotide
cugcacgcacacuaccugu

SEQ ID NO: 1081957 - RNA, 19 nt, Artificial Sequence
  Description of Artificial Sequence: Synthetic oligonucleotide
cucacgucuugggaacaca

SEQ ID NO: 1081958 - RNA, 19 nt, Artificial Sequence
  Description of Artificial Sequence: Synthetic oligonucleotide
ggcuuguaguucaggaaaa

SEQ ID NO: 1081959 - RNA, 19 nt, Artificial Sequence
  Description of Artificial Sequence: Synthetic oligonucleotide
ccacaugauaauguuucga

SEQ ID NO: 1081960 - RNA, 19 nt, Artificial Sequence
  Description of Artificial Sequence: Synthetic oligonucleotide
cccacauaauagugaccug

SEQ ID NO: 1081961 - RNA, 19 nt, Artificial Sequence
  Description of Artificial Sequence: Synthetic oligonucleotide
cauugccuccugcacagau

SEQ ID NO: 1081962 - RNA, 19 nt, Artificial Sequence
  Description of Artificial Sequence: Synthetic oligonucleotide
aggagcuuuggggccugca

SEQ ID NO: 1081963 - RNA, 19 nt, Artificial Sequence
  Description of Artificial Sequence: Synthetic oligonucleotide
gagugcccugcugucugca

SEQ ID NO: 1081964 - RNA, 19 nt, Artificial Sequence
  Description of Artificial Sequence: Synthetic oligonucleotide
gcaacacgcugcccagaug

SEQ ID NO: 1081965 - RNA, 19 nt, Artificial Sequence
  Description of Artificial Sequence: Synthetic oligonucleotide
cgagaccauaaccucucac

SEQ ID NO: 1081966 - RNA, 19 nt, Artificial Sequence
  Description of Artificial Sequence: Synthetic oligonucleotide
gguaaaggaugaaacuguu

SEQ ID NO: 1081967 - RNA, 19 nt, Artificial Sequence
  Description of Artificial Sequence: Synthetic oligonucleotide
ggauucgguguacaucaau

SEQ ID NO: 1081968 - RNA, 19 nt, Artificial Sequence
  Description of Artificial Sequence: Synthetic oligonucleotide
caugggcgucaaugaguga

SEQ ID NO: 1081969 - RNA, 19 nt, Artificial Sequence
  Description of Artificial Sequence: Synthetic oligonucleotide
ggguucuugcuuaggccuc

SEQ ID NO: 1081970 - RNA, 19 nt, Artificial Sequence
  Description of Artificial Sequence: Synthetic oligonucleotide
ccaaaccaaucaucuucca

SEQ ID NO: 1081971 - RNA, 19 nt, Artificial Sequence
  Description of Artificial Sequence: Synthetic oligonucleotide
ccaacaucgaugcccacau

SEQ ID NO: 1081972 - RNA, 19 nt, Artificial Sequence
  Description of Artificial Sequence: Synthetic oligonucleotide
cagccacaugauaauguuu

SEQ ID NO: 1081973 - RNA, 19 nt, Artificial Sequence
  Description of Artificial Sequence: Synthetic oligonucleotide
ccuaguccuccugcauggg

SEQ ID NO: 1081974 - RNA, 19 nt, Artificial Sequence
  Description of Artificial Sequence: Synthetic oligonucleotide
gcaagaucaucaaggcccu

SEQ ID NO: 1081975 - RNA, 19 nt, Artificial Sequence
  Description of Artificial Sequence: Synthetic oligonucleotide
gcagcacgagauuuccuau

SEQ ID NO: 1081976 - RNA, 19 nt, Artificial Sequence
  Description of Artificial Sequence: Synthetic oligonucleotide
cagaucugcuaagggagau

SEQ ID NO: 1081977 - RNA, 19 nt, Artificial Sequence
  Description of Artificial Sequence: Synthetic oligonucleotide
cagcacgagauuuccuauu

SEQ ID NO: 1081978 - RNA, 19 nt, Artificial Sequence
  Description of Artificial Sequence: Synthetic oligonucleotide
ccguucugcaaaagccaga

SEQ ID NO: 1081979 - RNA, 19 nt, Artificial Sequence
  Description of Artificial Sequence: Synthetic oligonucleotide
ccucacgucuugggaacac

SEQ ID NO: 1081980 - RNA, 19 nt, Artificial Sequence
  Description of Artificial Sequence: Synthetic oligonucleotide
cacuucuuaauuggccguu

SEQ ID NO: 1081981 - RNA, 19 nt, Artificial Sequence
  Description of Artificial Sequence: Synthetic oligonucleotide
acguggcaucaaacccaag

SEQ ID NO: 1081982 - RNA, 19 nt, Artificial Sequence
  Description of Artificial Sequence: Synthetic oligonucleotide
ccacuucuuaauuggccgu

SEQ ID NO: 1081983 - RNA, 19 nt, Artificial Sequence
  Description of Artificial Sequence: Synthetic oligonucleotide
ccagccacaugauaauguu

SEQ ID NO: 1081984 - RNA, 19 nt, Artificial Sequence
  Description of Artificial Sequence: Synthetic oligonucleotide
ggcugcacgcacacuaccu

SEQ ID NO: 1081985 - RNA, 19 nt, Artificial Sequence
  Description of Artificial Sequence: Synthetic oligonucleotide
ccauauggucuaucaauuu

SEQ ID NO: 1081986 - RNA, 19 nt, Artificial Sequence
  Description of Artificial Sequence: Synthetic oligonucleotide
caacaucgaugcccacaua

SEQ ID NO: 1081987 - RNA, 19 nt, Artificial Sequence
  Description of Artificial Sequence: Synthetic oligonucleotide
gcucugcaccauauggucu

SEQ ID NO: 1081988 - RNA, 19 nt, Artificial Sequence
  Description of Artificial Sequence: Synthetic oligonucleotide
caucaugcuuggucuuguu

SEQ ID NO: 1081989 - RNA, 19 nt, Artificial Sequence
  Description of Artificial Sequence: Synthetic oligonucleotide
cuggucuaccagggcugca

SEQ ID NO: 1081990 - RNA, 19 nt, Artificial Sequence
  Description of Artificial Sequence: Synthetic oligonucleotide
gcacgagauuuccuauuuu

SEQ ID NO: 1081991 - RNA, 19 nt, Artificial Sequence
  Description of Artificial Sequence: Synthetic oligonucleotide
cgucuugggaacacaacuu

SEQ ID NO: 1081992 - RNA, 19 nt, Artificial Sequence
  Description of Artificial Sequence: Synthetic oligonucleotide
ccacaggcaugccaguaau

SEQ ID NO: 1081993 - RNA, 19 nt, Artificial Sequence
  Description of Artificial Sequence: Synthetic oligonucleotide
ccccaaacgccuggcacaa

SEQ ID NO: 1081994 - RNA, 19 nt, Artificial Sequence
  Description of Artificial Sequence: Synthetic oligonucleotide
cgguguacaucaauuccuu

SEQ ID NO: 1081995 - RNA, 19 nt, Artificial Sequence
  Description of Artificial Sequence: Synthetic oligonucleotide
ccaaguccucggauucggu

SEQ ID NO: 1081996 - RNA, 19 nt, Artificial Sequence
  Description of Artificial Sequence: Synthetic oligonucleotide
caguggcgagguagaggau

SEQ ID NO: 1081997 - RNA, 19 nt, Artificial Sequence
  Description of Artificial Sequence: Synthetic oligonucleotide
ccucggauucgguguacau

SEQ ID NO: 1081998 - RNA, 19 nt, Artificial Sequence
  Description of Artificial Sequence: Synthetic oligonucleotide
ccgugaugucacuggcugu

SEQ ID NO: 1081999 - RNA, 19 nt, Artificial Sequence
  Description of Artificial Sequence: Synthetic oligonucleotide
cccaaacgccuggcacaaa

SEQ ID NO: 1082000 - RNA, 19 nt, Artificial Sequence
  Description of Artificial Sequence: Synthetic oligonucleotide
uuuaaguuaguaauaaaag

SEQ ID NO: 1082001 - RNA, 19 nt, Artificial Sequence
  Description of Artificial Sequence: Synthetic oligonucleotide
aguauaaggaaugucaucc

SEQ ID NO: 1082002 - RNA, 19 nt, Artificial Sequence
  Description of Artificial Sequence: Synthetic oligonucleotide
aagguuaauacuguuauuc

SEQ ID NO: 1082003 - RNA, 19 nt, Artificial Sequence
  Description of Artificial Sequence: Synthetic oligonucleotide
aacaauuuguuaccaauag

SEQ ID NO: 1082004 - RNA, 19 nt, Artificial Sequence
  Description of Artificial Sequence: Synthetic oligonucleotide
aaccccuguacccugaugc

SEQ ID NO: 1082005 - RNA, 19 nt, Artificial Sequence
  Description of Artificial Sequence: Synthetic oligonucleotide
aacacaaaagaagaggcac

SEQ ID NO: 1082006 - RNA, 19 nt, Artificial Sequence
  Description of Artificial Sequence: Synthetic oligonucleotide
uuaaguuaguaauaaaaga

SEQ ID NO: 1082007 - RNA, 19 nt, Artificial Sequence
  Description of Artificial Sequence: Synthetic oligonucleotide
aaauucuaagauuucauau

SEQ ID NO: 1082008 - RNA, 19 nt, Artificial Sequence
  Description of Artificial Sequence: Synthetic oligonucleotide
uuucauauaaaagucuggg

SEQ ID NO: 1082009 - RNA, 19 nt, Artificial Sequence
  Description of Artificial Sequence: Synthetic oligonucleotide
uguacagugauuugcagag

SEQ ID NO: 1082010 - RNA, 19 nt, Artificial Sequence
  Description of Artificial Sequence: Synthetic oligonucleotide
ucuuacauggcacuuacug

SEQ ID NO: 1082011 - RNA, 19 nt, Artificial Sequence
  Description of Artificial Sequence: Synthetic oligonucleotide
gauaacuugagacugagaa

SEQ ID NO: 1082012 - RNA, 19 nt, Artificial Sequence
  Description of Artificial Sequence: Synthetic oligonucleotide
uguuauuccgguuuuaagu

SEQ ID NO: 1082013 - RNA, 19 nt, Artificial Sequence
  Description of Artificial Sequence: Synthetic oligonucleotide
uuuauugccagccuaggcu

SEQ ID NO: 1082014 - RNA, 19 nt, Artificial Sequence
  Description of Artificial Sequence: Synthetic oligonucleotide
ucauauaaaagucuggguu

SEQ ID NO: 1082015 - RNA, 19 nt, Artificial Sequence
  Description of Artificial Sequence: Synthetic oligonucleotide
uugacuaguauaaggaaug

SEQ ID NO: 1082016 - RNA, 19 nt, Artificial Sequence
  Description of Artificial Sequence: Synthetic oligonucleotide
ugcugaaucgggaagggcg

SEQ ID NO: 1082017 - RNA, 19 nt, Artificial Sequence
  Description of Artificial Sequence: Synthetic oligonucleotide
ugugcuauuggguuugagg

SEQ ID NO: 1082018 - RNA, 19 nt, Artificial Sequence
  Description of Artificial Sequence: Synthetic oligonucleotide
augccagauaacuugagac

SEQ ID NO: 1082019 - RNA, 19 nt, Artificial Sequence
  Description of Artificial Sequence: Synthetic oligonucleotide
cuuagaaaugugcuaaugc

SEQ ID NO: 1082020 - RNA, 19 nt, Artificial Sequence
  Description of Artificial Sequence: Synthetic oligonucleotide
gaagauguaagaaacuacc

SEQ ID NO: 1082021 - RNA, 19 nt, Artificial Sequence
  Description of Artificial Sequence: Synthetic oligonucleotide
auugugaauaucuggcaac

SEQ ID NO: 1082022 - RNA, 19 nt, Artificial Sequence
  Description of Artificial Sequence: Synthetic oligonucleotide
uuaggguggaaugagaaag

SEQ ID NO: 1082023 - RNA, 19 nt, Artificial Sequence
  Description of Artificial Sequence: Synthetic oligonucleotide
uaacuugagacugagaaga

SEQ ID NO: 1082024 - RNA, 19 nt, Artificial Sequence
  Description of Artificial Sequence: Synthetic oligonucleotide
agguuaauacuguuauucc

SEQ ID NO: 1082025 - RNA, 19 nt, Artificial Sequence
  Description of Artificial Sequence: Synthetic oligonucleotide
aaugugcuaaugcaggcug

SEQ ID NO: 1082026 - RNA, 19 nt, Artificial Sequence
  Description of Artificial Sequence: Synthetic oligonucleotide
uguuucuugacuaguauaa

SEQ ID NO: 1082027 - RNA, 19 nt, Artificial Sequence
  Description of Artificial Sequence: Synthetic oligonucleotide
aaacuaccaccugugagcc

SEQ ID NO: 1082028 - RNA, 19 nt, Artificial Sequence
  Description of Artificial Sequence: Synthetic oligonucleotide
uguacccugaugcugaugu

SEQ ID NO: 1082029 - RNA, 19 nt, Artificial Sequence
  Description of Artificial Sequence: Synthetic oligonucleotide
acccguacgguuuauauag

SEQ ID NO: 1082030 - RNA, 19 nt, Artificial Sequence
  Description of Artificial Sequence: Synthetic oligonucleotide
uugaacuuaagauucccca

SEQ ID NO: 1082031 - RNA, 19 nt, Artificial Sequence
  Description of Artificial Sequence: Synthetic oligonucleotide
acuaguauaaggaauguca

SEQ ID NO: 1082032 - RNA, 19 nt, Artificial Sequence
  Description of Artificial Sequence: Synthetic oligonucleotide
uauuccgguuuuaaguuag

SEQ ID NO: 1082033 - RNA, 19 nt, Artificial Sequence
  Description of Artificial Sequence: Synthetic oligonucleotide
cuuacauggcacuuacugg

SEQ ID NO: 1082034 - RNA, 19 nt, Artificial Sequence
  Description of Artificial Sequence: Synthetic oligonucleotide
uuacauggcacuuacuggu

SEQ ID NO: 1082035 - RNA, 19 nt, Artificial Sequence
  Description of Artificial Sequence: Synthetic oligonucleotide
cuuacuggucacauuaggc

SEQ ID NO: 1082036 - RNA, 19 nt, Artificial Sequence
  Description of Artificial Sequence: Synthetic oligonucleotide
guacgguuuauauaguaag

SEQ ID NO: 1082037 - RNA, 19 nt, Artificial Sequence
  Description of Artificial Sequence: Synthetic oligonucleotide
auccauucuaccuaggccu

SEQ ID NO: 1082038 - RNA, 19 nt, Artificial Sequence
  Description of Artificial Sequence: Synthetic oligonucleotide
agaaacuaccaccugugag

SEQ ID NO: 1082039 - RNA, 19 nt, Artificial Sequence
  Description of Artificial Sequence: Synthetic oligonucleotide
agaaaugugcuaaugcagg

SEQ ID NO: 1082040 - RNA, 19 nt, Artificial Sequence
  Description of Artificial Sequence: Synthetic oligonucleotide
uuacuggucacauuaggcu

SEQ ID NO: 1082041 - RNA, 19 nt, Artificial Sequence
  Description of Artificial Sequence: Synthetic oligonucleotide
augagaaagguuaauacug

SEQ ID NO: 1082042 - RNA, 19 nt, Artificial Sequence
  Description of Artificial Sequence: Synthetic oligonucleotide
augaugacgguccucgcgg

SEQ ID NO: 1082043 - RNA, 19 nt, Artificial Sequence
  Description of Artificial Sequence: Synthetic oligonucleotide
agucuuaggaaguuguaga

SEQ ID NO: 1082044 - RNA, 19 nt, Artificial Sequence
  Description of Artificial Sequence: Synthetic oligonucleotide
ugagaaagguuaauacugu

SEQ ID NO: 1082045 - RNA, 19 nt, Artificial Sequence
  Description of Artificial Sequence: Synthetic oligonucleotide
ggagaauggggcuagaggc

SEQ ID NO: 1082046 - RNA, 19 nt, Artificial Sequence
  Description of Artificial Sequence: Synthetic oligonucleotide
ggaaguauagguccaacag

SEQ ID NO: 1082047 - RNA, 19 nt, Artificial Sequence
  Description of Artificial Sequence: Synthetic oligonucleotide
uggcaacauucuuacaugg

SEQ ID NO: 1082048 - RNA, 19 nt, Artificial Sequence
  Description of Artificial Sequence: Synthetic oligonucleotide
agcgacaggcuuuugauca

SEQ ID NO: 1082049 - RNA, 19 nt, Artificial Sequence
  Description of Artificial Sequence: Synthetic oligonucleotide
acuuacuggucacauuagg

SEQ ID NO: 1082050 - RNA, 19 nt, Artificial Sequence
  Description of Artificial Sequence: Synthetic oligonucleotide
aguccagaaaaccugggcu

SEQ ID NO: 1082051 - RNA, 19 nt, Artificial Sequence
  Description of Artificial Sequence: Synthetic oligonucleotide
gaaaugugcuaaugcaggc

SEQ ID NO: 1082052 - RNA, 19 nt, Artificial Sequence
  Description of Artificial Sequence: Synthetic oligonucleotide
aaaaccugggcuauccgag

SEQ ID NO: 1082053 - RNA, 19 nt, Artificial Sequence
  Description of Artificial Sequence: Synthetic oligonucleotide
agaacugaaggagaauggg

SEQ ID NO: 1082054 - RNA, 19 nt, Artificial Sequence
  Description of Artificial Sequence: Synthetic oligonucleotide
uaucuggcaacauucuuac

SEQ ID NO: 1082055 - RNA, 19 nt, Artificial Sequence
  Description of Artificial Sequence: Synthetic oligonucleotide
ucuaccuaggccucuuugc

SEQ ID NO: 1082056 - RNA, 19 nt, Artificial Sequence
  Description of Artificial Sequence: Synthetic oligonucleotide
guuaccaauaguuacaaau

SEQ ID NO: 1082057 - RNA, 19 nt, Artificial Sequence
  Description of Artificial Sequence: Synthetic oligonucleotide
ugcaaccugauccaggauc

SEQ ID NO: 1082058 - RNA, 19 nt, Artificial Sequence
  Description of Artificial Sequence: Synthetic oligonucleotide
acaggaaagaaagucuuag

SEQ ID NO: 1082059 - RNA, 19 nt, Artificial Sequence
  Description of Artificial Sequence: Synthetic oligonucleotide
uuccaguccagaaaaccug

SEQ ID NO: 1082060 - RNA, 19 nt, Artificial Sequence
  Description of Artificial Sequence: Synthetic oligonucleotide
uuaauacuguuauuccggu

SEQ ID NO: 1082061 - RNA, 19 nt, Artificial Sequence
  Description of Artificial Sequence: Synthetic oligonucleotide
aggaaugucauccauucua

SEQ ID NO: 1082062 - RNA, 19 nt, Artificial Sequence
  Description of Artificial Sequence: Synthetic oligonucleotide
auauugugaauaucuggca

SEQ ID NO: 1082063 - RNA, 19 nt, Artificial Sequence
  Description of Artificial Sequence: Synthetic oligonucleotide
uggguuuggggacuaagga

SEQ ID NO: 1082064 - RNA, 19 nt, Artificial Sequence
  Description of Artificial Sequence: Synthetic oligonucleotide
cucuggauacgguaguugc

SEQ ID NO: 1082065 - RNA, 19 nt, Artificial Sequence
  Description of Artificial Sequence: Synthetic oligonucleotide
uggggacuaaggaagaaaa

SEQ ID NO: 1082066 - RNA, 19 nt, Artificial Sequence
  Description of Artificial Sequence: Synthetic oligonucleotide
aaguauagguccaacaguu

SEQ ID NO: 1082067 - RNA, 19 nt, Artificial Sequence
  Description of Artificial Sequence: Synthetic oligonucleotide
acacgaugcaugaugacgg

SEQ ID NO: 1082068 - RNA, 19 nt, Artificial Sequence
  Description of Artificial Sequence: Synthetic oligonucleotide
uccgguuuuaaguuaguaa

SEQ ID NO: 1082069 - RNA, 19 nt, Artificial Sequence
  Description of Artificial Sequence: Synthetic oligonucleotide
cauagguacagcugccuag

SEQ ID NO: 1082070 - RNA, 19 nt, Artificial Sequence
  Description of Artificial Sequence: Synthetic oligonucleotide
agaggcuagaacugaagga

SEQ ID NO: 1082071 - RNA, 19 nt, Artificial Sequence
  Description of Artificial Sequence: Synthetic oligonucleotide
aaccucaggagaccaaggu

SEQ ID NO: 1082072 - RNA, 19 nt, Artificial Sequence
  Description of Artificial Sequence: Synthetic oligonucleotide
aagauguaagaaacuacca

SEQ ID NO: 1082073 - RNA, 19 nt, Artificial Sequence
  Description of Artificial Sequence: Synthetic oligonucleotide
accuaggccucuuugcagg

SEQ ID NO: 1082074 - RNA, 19 nt, Artificial Sequence
  Description of Artificial Sequence: Synthetic oligonucleotide
caggaaagaaagucuuagg

SEQ ID NO: 1082075 - RNA, 19 nt, Artificial Sequence
  Description of Artificial Sequence: Synthetic oligonucleotide
ucuggauacgguaguugcc

SEQ ID NO: 1082076 - RNA, 19 nt, Artificial Sequence
  Description of Artificial Sequence: Synthetic oligonucleotide
ugccagauaacuugagacu

SEQ ID NO: 1082077 - RNA, 19 nt, Artificial Sequence
  Description of Artificial Sequence: Synthetic oligonucleotide
gacuagauaugccauucca

SEQ ID NO: 1082078 - RNA, 19 nt, Artificial Sequence
  Description of Artificial Sequence: Synthetic oligonucleotide
aaaugugcuaaugcaggcu

SEQ ID NO: 1082079 - RNA, 19 nt, Artificial Sequence
  Description of Artificial Sequence: Synthetic oligonucleotide
guauagguccaacaguuga

SEQ ID NO: 1082080 - RNA, 19 nt, Artificial Sequence
  Description of Artificial Sequence: Synthetic oligonucleotide
caugaugacgguccucgcg

SEQ ID NO: 1082081 - RNA, 19 nt, Artificial Sequence
  Description of Artificial Sequence: Synthetic oligonucleotide
aagguuuauugccagccua

SEQ ID NO: 1082082 - RNA, 19 nt, Artificial Sequence
  Description of Artificial Sequence: Synthetic oligonucleotide
cuggauacgguaguugccg

SEQ ID NO: 1082083 - RNA, 19 nt, Artificial Sequence
  Description of Artificial Sequence: Synthetic oligonucleotide
uugucauggugcaaccuga

SEQ ID NO: 1082084 - RNA, 19 nt, Artificial Sequence
  Description of Artificial Sequence: Synthetic oligonucleotide
uuacaaauucuaagauuuc

SEQ ID NO: 1082085 - RNA, 19 nt, Artificial Sequence
  Description of Artificial Sequence: Synthetic oligonucleotide
aggacuagauaugccauuc

SEQ ID NO: 1082086 - RNA, 19 nt, Artificial Sequence
  Description of Artificial Sequence: Synthetic oligonucleotide
acccacucuggugugaacc

SEQ ID NO: 1082087 - RNA, 19 nt, Artificial Sequence
  Description of Artificial Sequence: Synthetic oligonucleotide
cacauuaggcugcaccucc

SEQ ID NO: 1082088 - RNA, 19 nt, Artificial Sequence
  Description of Artificial Sequence: Synthetic oligonucleotide
auacgguaguugccggugc

SEQ ID NO: 1082089 - RNA, 19 nt, Artificial Sequence
  Description of Artificial Sequence: Synthetic oligonucleotide
cacaaaagaagaggcacgc

SEQ ID NO: 1082090 - RNA, 19 nt, Artificial Sequence
  Description of Artificial Sequence: Synthetic oligonucleotide
guuuauugccagccuaggc

SEQ ID NO: 1082091 - RNA, 19 nt, Artificial Sequence
  Description of Artificial Sequence: Synthetic oligonucleotide
acaaaagaagaggcacgcc

SEQ ID NO: 1082092 - RNA, 19 nt, Artificial Sequence
  Description of Artificial Sequence: Synthetic oligonucleotide
acuagauaugccauuccag

SEQ ID NO: 1082093 - RNA, 19 nt, Artificial Sequence
  Description of Artificial Sequence: Synthetic oligonucleotide
gacgucaggacccgccugg

SEQ ID NO: 1082094 - RNA, 19 nt, Artificial Sequence
  Description of Artificial Sequence: Synthetic oligonucleotide
aaccugauccaggauccac

SEQ ID NO: 1082095 - RNA, 19 nt, Artificial Sequence
  Description of Artificial Sequence: Synthetic oligonucleotide
gcaaucuugauacagccca

SEQ ID NO: 1082096 - RNA, 19 nt, Artificial Sequence
  Description of Artificial Sequence: Synthetic oligonucleotide
uucuaccuaggccucuuug

SEQ ID NO: 1082097 - RNA, 19 nt, Artificial Sequence
  Description of Artificial Sequence: Synthetic oligonucleotide
uugugaauaucuggcaaca

SEQ ID NO: 1082098 - RNA, 19 nt, Artificial Sequence
  Description of Artificial Sequence: Synthetic oligonucleotide
gguuuggggacuaaggaag

SEQ ID NO: 1082099 - RNA, 19 nt, Artificial Sequence
  Description of Artificial Sequence: Synthetic oligonucleotide
gaugccagauaacuugaga

SEQ ID NO: 1082100 - RNA, 19 nt, Artificial Sequence
  Description of Artificial Sequence: Synthetic oligonucleotide
ggcuaucugcccuugagag

SEQ ID NO: 1082101 - RNA, 19 nt, Artificial Sequence
  Description of Artificial Sequence: Synthetic oligonucleotide
uggugcaaccugauccagg

SEQ ID NO: 1082102 - RNA, 19 nt, Artificial Sequence
  Description of Artificial Sequence: Synthetic oligonucleotide
cuguuauuccgguuuuaag

SEQ ID NO: 1082103 - RNA, 19 nt, Artificial Sequence
  Description of Artificial Sequence: Synthetic oligonucleotide
aacgacaauggggucaggu

SEQ ID NO: 1082104 - RNA, 19 nt, Artificial Sequence
  Description of Artificial Sequence: Synthetic oligonucleotide
uuauugccagccuaggcuu

SEQ ID NO: 1082105 - RNA, 19 nt, Artificial Sequence
  Description of Artificial Sequence: Synthetic oligonucleotide
gaaguauagguccaacagu

SEQ ID NO: 1082106 - RNA, 19 nt, Artificial Sequence
  Description of Artificial Sequence: Synthetic oligonucleotide
ucuggugugaaccccugua

SEQ ID NO: 1082107 - RNA, 19 nt, Artificial Sequence
  Description of Artificial Sequence: Synthetic oligonucleotide
ugccccuuugacccguacg

SEQ ID NO: 1082108 - RNA, 19 nt, Artificial Sequence
  Description of Artificial Sequence: Synthetic oligonucleotide
aggccacuuagaaaugugc

SEQ ID NO: 1082109 - RNA, 19 nt, Artificial Sequence
  Description of Artificial Sequence: Synthetic oligonucleotide
ugaugccagauaacuugag

SEQ ID NO: 1082110 - RNA, 19 nt, Artificial Sequence
  Description of Artificial Sequence: Synthetic oligonucleotide
accaauaguuacaaauucu

SEQ ID NO: 1082111 - RNA, 19 nt, Artificial Sequence
  Description of Artificial Sequence: Synthetic oligonucleotide
ggucacauuaggcugcacc

SEQ ID NO: 1082112 - RNA, 19 nt, Artificial Sequence
  Description of Artificial Sequence: Synthetic oligonucleotide
cuuaagauuccccaaacau

SEQ ID NO: 1082113 - RNA, 19 nt, Artificial Sequence
  Description of Artificial Sequence: Synthetic oligonucleotide
gauacgguaguugccggug

SEQ ID NO: 1082114 - RNA, 19 nt, Artificial Sequence
  Description of Artificial Sequence: Synthetic oligonucleotide
aaguccaugaugccccuuu

SEQ ID NO: 1082115 - RNA, 19 nt, Artificial Sequence
  Description of Artificial Sequence: Synthetic oligonucleotide
uguuuuggacaggaaagaa

SEQ ID NO: 1082116 - RNA, 19 nt, Artificial Sequence
  Description of Artificial Sequence: Synthetic oligonucleotide
uggauacgguaguugccgg

SEQ ID NO: 1082117 - RNA, 19 nt, Artificial Sequence
  Description of Artificial Sequence: Synthetic oligonucleotide
uggguuugagguuuuguuu

SEQ ID NO: 1082118 - RNA, 19 nt, Artificial Sequence
  Description of Artificial Sequence: Synthetic oligonucleotide
gguggaaugagaaagguua

SEQ ID NO: 1082119 - RNA, 19 nt, Artificial Sequence
  Description of Artificial Sequence: Synthetic oligonucleotide
caaauucuaagauuucaua

SEQ ID NO: 1082120 - RNA, 19 nt, Artificial Sequence
  Description of Artificial Sequence: Synthetic oligonucleotide
agagacggcaaucuugaua

SEQ ID NO: 1082121 - RNA, 19 nt, Artificial Sequence
  Description of Artificial Sequence: Synthetic oligonucleotide
cucgugggcagugaguagg

SEQ ID NO: 1082122 - RNA, 19 nt, Artificial Sequence
  Description of Artificial Sequence: Synthetic oligonucleotide
uaccuaggccucuuugcag

SEQ ID NO: 1082123 - RNA, 19 nt, Artificial Sequence
  Description of Artificial Sequence: Synthetic oligonucleotide
agugauuugcagaggcuag

SEQ ID NO: 1082124 - RNA, 19 nt, Artificial Sequence
  Description of Artificial Sequence: Synthetic oligonucleotide
agagaugaugccagauaac

SEQ ID NO: 1082125 - RNA, 19 nt, Artificial Sequence
  Description of Artificial Sequence: Synthetic oligonucleotide
acgguuuauauaguaagaa

SEQ ID NO: 1082126 - RNA, 19 nt, Artificial Sequence
  Description of Artificial Sequence: Synthetic oligonucleotide
gugcuauuggguuugaggu

SEQ ID NO: 1082127 - RNA, 19 nt, Artificial Sequence
  Description of Artificial Sequence: Synthetic oligonucleotide
agagagacggcaaucuuga

SEQ ID NO: 1082128 - RNA, 19 nt, Artificial Sequence
  Description of Artificial Sequence: Synthetic oligonucleotide
cuacacaagggaucuugac

SEQ ID NO: 1082129 - RNA, 19 nt, Artificial Sequence
  Description of Artificial Sequence: Synthetic oligonucleotide
agcgguacacgaugcauga

SEQ ID NO: 1082130 - RNA, 19 nt, Artificial Sequence
  Description of Artificial Sequence: Synthetic oligonucleotide
uuauuccgguuuuaaguua

SEQ ID NO: 1082131 - RNA, 19 nt, Artificial Sequence
  Description of Artificial Sequence: Synthetic oligonucleotide
cuucaugggaucccuguuc

SEQ ID NO: 1082132 - RNA, 19 nt, Artificial Sequence
  Description of Artificial Sequence: Synthetic oligonucleotide
caauaguuacaaauucuaa

SEQ ID NO: 1082133 - RNA, 19 nt, Artificial Sequence
  Description of Artificial Sequence: Synthetic oligonucleotide
ggugugaaccccuguaccc

SEQ ID NO: 1082134 - RNA, 19 nt, Artificial Sequence
  Description of Artificial Sequence: Synthetic oligonucleotide
gcuuuugaucacugcaggg

SEQ ID NO: 1082135 - RNA, 19 nt, Artificial Sequence
  Description of Artificial Sequence: Synthetic oligonucleotide
cagcccauagcugugcagg

SEQ ID NO: 1082136 - RNA, 19 nt, Artificial Sequence
  Description of Artificial Sequence: Synthetic oligonucleotide
ugacccguacgguuuauau

SEQ ID NO: 1082137 - RNA, 19 nt, Artificial Sequence
  Description of Artificial Sequence: Synthetic oligonucleotide
gagaccaagguugggucag

SEQ ID NO: 1082138 - RNA, 19 nt, Artificial Sequence
  Description of Artificial Sequence: Synthetic oligonucleotide
cuucauuccgugguggcug

SEQ ID NO: 1082139 - RNA, 19 nt, Artificial Sequence
  Description of Artificial Sequence: Synthetic oligonucleotide
caaucuugauacagcccag

SEQ ID NO: 1082140 - RNA, 19 nt, Artificial Sequence
  Description of Artificial Sequence: Synthetic oligonucleotide
cagauaacuugagacugag

SEQ ID NO: 1082141 - RNA, 19 nt, Artificial Sequence
  Description of Artificial Sequence: Synthetic oligonucleotide
guauaaggaaugucaucca

SEQ ID NO: 1082142 - RNA, 19 nt, Artificial Sequence
  Description of Artificial Sequence: Synthetic oligonucleotide
auagguccaacaguugaca

SEQ ID NO: 1082143 - RNA, 19 nt, Artificial Sequence
  Description of Artificial Sequence: Synthetic oligonucleotide
augacgguccucgcggucg

SEQ ID NO: 1082144 - RNA, 19 nt, Artificial Sequence
  Description of Artificial Sequence: Synthetic oligonucleotide
aggcuuuugaucacugcag

SEQ ID NO: 1082145 - RNA, 19 nt, Artificial Sequence
  Description of Artificial Sequence: Synthetic oligonucleotide
cagacaaguccaugaugcc

SEQ ID NO: 1082146 - RNA, 19 nt, Artificial Sequence
  Description of Artificial Sequence: Synthetic oligonucleotide
ucgcggucggucuaggcac

SEQ ID NO: 1082147 - RNA, 19 nt, Artificial Sequence
  Description of Artificial Sequence: Synthetic oligonucleotide
ugggcuauccgaggcuugg

SEQ ID NO: 1082148 - RNA, 19 nt, Artificial Sequence
  Description of Artificial Sequence: Synthetic oligonucleotide
guuauuccgguuuuaaguu

SEQ ID NO: 1082149 - RNA, 19 nt, Artificial Sequence
  Description of Artificial Sequence: Synthetic oligonucleotide
cuugacuaguauaaggaau

SEQ ID NO: 1082150 - RNA, 19 nt, Artificial Sequence
  Description of Artificial Sequence: Synthetic oligonucleotide
guugcucgugggcagugag

SEQ ID NO: 1082151 - RNA, 19 nt, Artificial Sequence
  Description of Artificial Sequence: Synthetic oligonucleotide
ugauuugcagaggcuagaa

SEQ ID NO: 1082152 - RNA, 19 nt, Artificial Sequence
  Description of Artificial Sequence: Synthetic oligonucleotide
gccccuuugacccguacgg

SEQ ID NO: 1082153 - RNA, 19 nt, Artificial Sequence
  Description of Artificial Sequence: Synthetic oligonucleotide
agcgcacaugugcuauugg

SEQ ID NO: 1082154 - RNA, 19 nt, Artificial Sequence
  Description of Artificial Sequence: Synthetic oligonucleotide
gcuaaugcaggcugagccc

SEQ ID NO: 1082155 - RNA, 19 nt, Artificial Sequence
  Description of Artificial Sequence: Synthetic oligonucleotide
gccagauaacuugagacug

SEQ ID NO: 1082156 - RNA, 19 nt, Artificial Sequence
  Description of Artificial Sequence: Synthetic oligonucleotide
uucauuccgugguggcugc

SEQ ID NO: 1082157 - RNA, 19 nt, Artificial Sequence
  Description of Artificial Sequence: Synthetic oligonucleotide
cuccaggaacgacaauggg

SEQ ID NO: 1082158 - RNA, 19 nt, Artificial Sequence
  Description of Artificial Sequence: Synthetic oligonucleotide
cagcgguacacgaugcaug

SEQ ID NO: 1082159 - RNA, 19 nt, Artificial Sequence
  Description of Artificial Sequence: Synthetic oligonucleotide
gucacauuaggcugcaccu

SEQ ID NO: 1082160 - RNA, 19 nt, Artificial Sequence
  Description of Artificial Sequence: Synthetic oligonucleotide
ugggucaguuugaacuuaa

SEQ ID NO: 1082161 - RNA, 19 nt, Artificial Sequence
  Description of Artificial Sequence: Synthetic oligonucleotide
ggaggcuuaggguggaaug

SEQ ID NO: 1082162 - RNA, 19 nt, Artificial Sequence
  Description of Artificial Sequence: Synthetic oligonucleotide
cauuaggcugcaccucccc

SEQ ID NO: 1082163 - RNA, 19 nt, Artificial Sequence
  Description of Artificial Sequence: Synthetic oligonucleotide
gcgcacaugugcuauuggg

SEQ ID NO: 1082164 - RNA, 19 nt, Artificial Sequence
  Description of Artificial Sequence: Synthetic oligonucleotide
gguggggauaaccucagga

SEQ ID NO: 1082165 - RNA, 19 nt, Artificial Sequence
  Description of Artificial Sequence: Synthetic oligonucleotide
aggugccuuccuugaaggg

SEQ ID NO: 1082166 - RNA, 19 nt, Artificial Sequence
  Description of Artificial Sequence: Synthetic oligonucleotide
uaauacuguuauuccgguu

SEQ ID NO: 1082167 - RNA, 19 nt, Artificial Sequence
  Description of Artificial Sequence: Synthetic oligonucleotide
uacgguaguugccggugcu

SEQ ID NO: 1082168 - RNA, 19 nt, Artificial Sequence
  Description of Artificial Sequence: Synthetic oligonucleotide
uguuaccaauaguuacaaa

SEQ ID NO: 1082169 - RNA, 19 nt, Artificial Sequence
  Description of Artificial Sequence: Synthetic oligonucleotide
cacguugagcuccaccuuc

SEQ ID NO: 1082170 - RNA, 19 nt, Artificial Sequence
  Description of Artificial Sequence: Synthetic oligonucleotide
aaagucuuaggaaguugua

SEQ ID NO: 1082171 - RNA, 19 nt, Artificial Sequence
  Description of Artificial Sequence: Synthetic oligonucleotide
ugcuauuggguuugagguu

SEQ ID NO: 1082172 - RNA, 19 nt, Artificial Sequence
  Description of Artificial Sequence: Synthetic oligonucleotide
aggcaccaccgacuugacc

SEQ ID NO: 1082173 - RNA, 19 nt, Artificial Sequence
  Description of Artificial Sequence: Synthetic oligonucleotide
ggaagggcgcuugaggccg

SEQ ID NO: 1082174 - RNA, 19 nt, Artificial Sequence
  Description of Artificial Sequence: Synthetic oligonucleotide
gugaaguugcucgugggca

SEQ ID NO: 1082175 - RNA, 19 nt, Artificial Sequence
  Description of Artificial Sequence: Synthetic oligonucleotide
acaguugacaggaguccuc

SEQ ID NO: 1082176 - RNA, 19 nt, Artificial Sequence
  Description of Artificial Sequence: Synthetic oligonucleotide
aguuaucccaggagaagcu

SEQ ID NO: 1082177 - RNA, 19 nt, Artificial Sequence
  Description of Artificial Sequence: Synthetic oligonucleotide
ggugcaaccugauccagga

SEQ ID NO: 1082178 - RNA, 19 nt, Artificial Sequence
  Description of Artificial Sequence: Synthetic oligonucleotide
agccuaggcuuccagucca

SEQ ID NO: 1082179 - RNA, 19 nt, Artificial Sequence
  Description of Artificial Sequence: Synthetic oligonucleotide
agcugccuagcuguucuac

SEQ ID NO: 1082180 - RNA, 19 nt, Artificial Sequence
  Description of Artificial Sequence: Synthetic oligonucleotide
cuaccuaggccucuuugca

SEQ ID NO: 1082181 - RNA, 19 nt, Artificial Sequence
  Description of Artificial Sequence: Synthetic oligonucleotide
aguauagguccaacaguug

SEQ ID NO: 1082182 - RNA, 19 nt, Artificial Sequence
  Description of Artificial Sequence: Synthetic oligonucleotide
ggucuugcccucaacacug

SEQ ID NO: 1082183 - RNA, 19 nt, Artificial Sequence
  Description of Artificial Sequence: Synthetic oligonucleotide
acaagggaucuugacccag

SEQ ID NO: 1082184 - RNA, 19 nt, Artificial Sequence
  Description of Artificial Sequence: Synthetic oligonucleotide
auacuguuauuccgguuuu

SEQ ID NO: 1082185 - RNA, 19 nt, Artificial Sequence
  Description of Artificial Sequence: Synthetic oligonucleotide
ugucauggugcaaccugau

SEQ ID NO: 1082186 - RNA, 19 nt, Artificial Sequence
  Description of Artificial Sequence: Synthetic oligonucleotide
acucuggauacgguaguug

SEQ ID NO: 1082187 - RNA, 19 nt, Artificial Sequence
  Description of Artificial Sequence: Synthetic oligonucleotide
augaugccccuuugacccg

SEQ ID NO: 1082188 - RNA, 19 nt, Artificial Sequence
  Description of Artificial Sequence: Synthetic oligonucleotide
gagaauggggcuagaggca

SEQ ID NO: 1082189 - RNA, 19 nt, Artificial Sequence
  Description of Artificial Sequence: Synthetic oligonucleotide
aguccaugaugccccuuug

SEQ ID NO: 1082190 - RNA, 19 nt, Artificial Sequence
  Description of Artificial Sequence: Synthetic oligonucleotide
ggaaugucauccauucuac

SEQ ID NO: 1082191 - RNA, 19 nt, Artificial Sequence
  Description of Artificial Sequence: Synthetic oligonucleotide
aaugcaggcugagcccucu

SEQ ID NO: 1082192 - RNA, 19 nt, Artificial Sequence
  Description of Artificial Sequence: Synthetic oligonucleotide
aaucgggaagggcgcuuga

SEQ ID NO: 1082193 - RNA, 19 nt, Artificial Sequence
  Description of Artificial Sequence: Synthetic oligonucleotide
uauugccagccuaggcuuc

SEQ ID NO: 1082194 - RNA, 19 nt, Artificial Sequence
  Description of Artificial Sequence: Synthetic oligonucleotide
cuuaggguggaaugagaaa

SEQ ID NO: 1082195 - RNA, 19 nt, Artificial Sequence
  Description of Artificial Sequence: Synthetic oligonucleotide
gaaucgggaagggcgcuug

SEQ ID NO: 1082196 - RNA, 19 nt, Artificial Sequence
  Description of Artificial Sequence: Synthetic oligonucleotide
cagccuaggcuuccagucc

SEQ ID NO: 1082197 - RNA, 19 nt, Artificial Sequence
  Description of Artificial Sequence: Synthetic oligonucleotide
acgaugcaugaugacgguc

SEQ ID NO: 1082198 - RNA, 19 nt, Artificial Sequence
  Description of Artificial Sequence: Synthetic oligonucleotide
augaugccagauaacuuga

SEQ ID NO: 1082199 - RNA, 19 nt, Artificial Sequence
  Description of Artificial Sequence: Synthetic oligonucleotide
gcaaccugauccaggaucc

SEQ ID NO: 1082200 - RNA, 19 nt, Artificial Sequence
  Description of Artificial Sequence: Synthetic oligonucleotide
ugugaauaucuggcaacau

SEQ ID NO: 1082201 - RNA, 19 nt, Artificial Sequence
  Description of Artificial Sequence: Synthetic oligonucleotide
gcagcagcgguacacgaug

SEQ ID NO: 1082202 - RNA, 19 nt, Artificial Sequence
  Description of Artificial Sequence: Synthetic oligonucleotide
cagguuguacagugauuug

SEQ ID NO: 1082203 - RNA, 19 nt, Artificial Sequence
  Description of Artificial Sequence: Synthetic oligonucleotide
cuggugccccuucauuccg

SEQ ID NO: 1082204 - RNA, 19 nt, Artificial Sequence
  Description of Artificial Sequence: Synthetic oligonucleotide
aagguugggucaguuugaa

SEQ ID NO: 1082205 - RNA, 19 nt, Artificial Sequence
  Description of Artificial Sequence: Synthetic oligonucleotide
ucacauuaggcugcaccuc

SEQ ID NO: 1082206 - RNA, 19 nt, Artificial Sequence
  Description of Artificial Sequence: Synthetic oligonucleotide
ucaggucagguuguacagu

SEQ ID NO: 1082207 - RNA, 19 nt, Artificial Sequence
  Description of Artificial Sequence: Synthetic oligonucleotide
guacagugauuugcagagg

SEQ ID NO: 1082208 - RNA, 19 nt, Artificial Sequence
  Description of Artificial Sequence: Synthetic oligonucleotide
ccaauaguuacaaauucua

SEQ ID NO: 1082209 - RNA, 19 nt, Artificial Sequence
  Description of Artificial Sequence: Synthetic oligonucleotide
gggaaguauagguccaaca

SEQ ID NO: 1082210 - RNA, 19 nt, Artificial Sequence
  Description of Artificial Sequence: Synthetic oligonucleotide
ggggauaaccucaggagac

SEQ ID NO: 1082211 - RNA, 19 nt, Artificial Sequence
  Description of Artificial Sequence: Synthetic oligonucleotide
agcggggcccaagagcaac

SEQ ID NO: 1082212 - RNA, 19 nt, Artificial Sequence
  Description of Artificial Sequence: Synthetic oligonucleotide
gguuguacagugauuugca

SEQ ID NO: 1082213 - RNA, 19 nt, Artificial Sequence
  Description of Artificial Sequence: Synthetic oligonucleotide
ucaugggaucccuguucca

SEQ ID NO: 1082214 - RNA, 19 nt, Artificial Sequence
  Description of Artificial Sequence: Synthetic oligonucleotide
ucgugggcagugaguaggu

SEQ ID NO: 1082215 - RNA, 19 nt, Artificial Sequence
  Description of Artificial Sequence: Synthetic oligonucleotide
ugacuguuuuggacaggaa

SEQ ID NO: 1082216 - RNA, 19 nt, Artificial Sequence
  Description of Artificial Sequence: Synthetic oligonucleotide
ggacuagauaugccauucc

SEQ ID NO: 1082217 - RNA, 19 nt, Artificial Sequence
  Description of Artificial Sequence: Synthetic oligonucleotide
aaguugcucgugggcagug

SEQ ID NO: 1082218 - RNA, 19 nt, Artificial Sequence
  Description of Artificial Sequence: Synthetic oligonucleotide
ugaugacgguccucgcggu

SEQ ID NO: 1082219 - RNA, 19 nt, Artificial Sequence
  Description of Artificial Sequence: Synthetic oligonucleotide
uuccgguuuuaaguuagua

SEQ ID NO: 1082220 - RNA, 19 nt, Artificial Sequence
  Description of Artificial Sequence: Synthetic oligonucleotide
agacgucaggacccgccug

SEQ ID NO: 1082221 - RNA, 19 nt, Artificial Sequence
  Description of Artificial Sequence: Synthetic oligonucleotide
gacccguacgguuuauaua

SEQ ID NO: 1082222 - RNA, 19 nt, Artificial Sequence
  Description of Artificial Sequence: Synthetic oligonucleotide
agcaacaagcccagcacaa

SEQ ID NO: 1082223 - RNA, 19 nt, Artificial Sequence
  Description of Artificial Sequence: Synthetic oligonucleotide
cccauagcugugcaggggc

SEQ ID NO: 1082224 - RNA, 19 nt, Artificial Sequence
  Description of Artificial Sequence: Synthetic oligonucleotide
uugaggccgaggcgcgcag

SEQ ID NO: 1082225 - RNA, 19 nt, Artificial Sequence
  Description of Artificial Sequence: Synthetic oligonucleotide
cucgcggucggucuaggca

SEQ ID NO: 1082226 - RNA, 19 nt, Artificial Sequence
  Description of Artificial Sequence: Synthetic oligonucleotide
agguuggagcgacaggcuu

SEQ ID NO: 1082227 - RNA, 19 nt, Artificial Sequence
  Description of Artificial Sequence: Synthetic oligonucleotide
ggcaacauucuuacauggc

SEQ ID NO: 1082228 - RNA, 19 nt, Artificial Sequence
  Description of Artificial Sequence: Synthetic oligonucleotide
agcagcgguacacgaugca

SEQ ID NO: 1082229 - RNA, 19 nt, Artificial Sequence
  Description of Artificial Sequence: Synthetic oligonucleotide
ccgacuugacccugaagag

SEQ ID NO: 1082230 - RNA, 19 nt, Artificial Sequence
  Description of Artificial Sequence: Synthetic oligonucleotide
ucuaggcacugcagcucac

SEQ ID NO: 1082231 - RNA, 19 nt, Artificial Sequence
  Description of Artificial Sequence: Synthetic oligonucleotide
caccugugagccagauagc

SEQ ID NO: 1082232 - RNA, 19 nt, Artificial Sequence
  Description of Artificial Sequence: Synthetic oligonucleotide
gaugcaugaugacgguccu

SEQ ID NO: 1082233 - RNA, 19 nt, Artificial Sequence
  Description of Artificial Sequence: Synthetic oligonucleotide
accccuguacccugaugcu

SEQ ID NO: 1082234 - RNA, 19 nt, Artificial Sequence
  Description of Artificial Sequence: Synthetic oligonucleotide
accaagguugggucaguuu

SEQ ID NO: 1082235 - RNA, 19 nt, Artificial Sequence
  Description of Artificial Sequence: Synthetic oligonucleotide
gaugacgguccucgcgguc

SEQ ID NO: 1082236 - RNA, 19 nt, Artificial Sequence
  Description of Artificial Sequence: Synthetic oligonucleotide
acgguaguugccggugcuc

SEQ ID NO: 1082237 - RNA, 19 nt, Artificial Sequence
  Description of Artificial Sequence: Synthetic oligonucleotide
ccagccuaggcuuccaguc

SEQ ID NO: 1082238 - RNA, 19 nt, Artificial Sequence
  Description of Artificial Sequence: Synthetic oligonucleotide
ccuggugccccuucauucc

SEQ ID NO: 1082239 - RNA, 19 nt, Artificial Sequence
  Description of Artificial Sequence: Synthetic oligonucleotide
cccaggacuagauaugcca

SEQ ID NO: 1082240 - RNA, 19 nt, Artificial Sequence
  Description of Artificial Sequence: Synthetic oligonucleotide
guuuggggacuaaggaaga

SEQ ID NO: 1082241 - RNA, 19 nt, Artificial Sequence
  Description of Artificial Sequence: Synthetic oligonucleotide
ggcgcuugaggccgaggcg

SEQ ID NO: 1082242 - RNA, 19 nt, Artificial Sequence
  Description of Artificial Sequence: Synthetic oligonucleotide
ugaaccccuguacccugau

SEQ ID NO: 1082243 - RNA, 19 nt, Artificial Sequence
  Description of Artificial Sequence: Synthetic oligonucleotide
uggcacuuacuggucacau

SEQ ID NO: 1082244 - RNA, 19 nt, Artificial Sequence
  Description of Artificial Sequence: Synthetic oligonucleotide
gagcagcggggcccaagag

SEQ ID NO: 1082245 - RNA, 19 nt, Artificial Sequence
  Description of Artificial Sequence: Synthetic oligonucleotide
gcugaaucgggaagggcgc

SEQ ID NO: 1082246 - RNA, 19 nt, Artificial Sequence
  Description of Artificial Sequence: Synthetic oligonucleotide
gggaagggcgcuugaggcc

SEQ ID NO: 1082247 - RNA, 19 nt, Artificial Sequence
  Description of Artificial Sequence: Synthetic oligonucleotide
agauaacuugagacugaga

SEQ ID NO: 1082248 - RNA, 19 nt, Artificial Sequence
  Description of Artificial Sequence: Synthetic oligonucleotide
agggacaguggcagggcag

SEQ ID NO: 1082249 - RNA, 19 nt, Artificial Sequence
  Description of Artificial Sequence: Synthetic oligonucleotide
gugccccuucauuccgugg

SEQ ID NO: 1082250 - RNA, 19 nt, Artificial Sequence
  Description of Artificial Sequence: Synthetic oligonucleotide
gugauuugcagaggcuaga

SEQ ID NO: 1082251 - RNA, 19 nt, Artificial Sequence
  Description of Artificial Sequence: Synthetic oligonucleotide
ccagacgucaggacccgcc

SEQ ID NO: 1082252 - RNA, 19 nt, Artificial Sequence
  Description of Artificial Sequence: Synthetic oligonucleotide
ccgguuuuaaguuaguaau

SEQ ID NO: 1082253 - RNA, 19 nt, Artificial Sequence
  Description of Artificial Sequence: Synthetic oligonucleotide
aucuggcaacauucuuaca

SEQ ID NO: 1082254 - RNA, 19 nt, Artificial Sequence
  Description of Artificial Sequence: Synthetic oligonucleotide
acgucaggacccgccuggc

SEQ ID NO: 1082255 - RNA, 19 nt, Artificial Sequence
  Description of Artificial Sequence: Synthetic oligonucleotide
ccaucuggcaccagcgcac

SEQ ID NO: 1082256 - RNA, 19 nt, Artificial Sequence
  Description of Artificial Sequence: Synthetic oligonucleotide
guggaaugagaaagguuaa

SEQ ID NO: 1082257 - RNA, 19 nt, Artificial Sequence
  Description of Artificial Sequence: Synthetic oligonucleotide
uggugccccuucauuccgu

SEQ ID NO: 1082258 - RNA, 19 nt, Artificial Sequence
  Description of Artificial Sequence: Synthetic oligonucleotide
ccucaggucagguuguaca

SEQ ID NO: 1082259 - RNA, 19 nt, Artificial Sequence
  Description of Artificial Sequence: Synthetic oligonucleotide
aguugacaggaguccucau

SEQ ID NO: 1082260 - RNA, 19 nt, Artificial Sequence
  Description of Artificial Sequence: Synthetic oligonucleotide
gggauaaccucaggagacc

SEQ ID NO: 1082261 - RNA, 19 nt, Artificial Sequence
  Description of Artificial Sequence: Synthetic oligonucleotide
caguugacaggaguccuca

SEQ ID NO: 1082262 - RNA, 19 nt, Artificial Sequence
  Description of Artificial Sequence: Synthetic oligonucleotide
ugaugccccuuugacccgu

SEQ ID NO: 1082263 - RNA, 19 nt, Artificial Sequence
  Description of Artificial Sequence: Synthetic oligonucleotide
augugcuauuggguuugag

SEQ ID NO: 1082264 - RNA, 19 nt, Artificial Sequence
  Description of Artificial Sequence: Synthetic oligonucleotide
cauuccgugguggcugcug

SEQ ID NO: 1082265 - RNA, 19 nt, Artificial Sequence
  Description of Artificial Sequence: Synthetic oligonucleotide
accagcgcacaugugcuau

SEQ ID NO: 1082266 - RNA, 19 nt, Artificial Sequence
  Description of Artificial Sequence: Synthetic oligonucleotide
cagcgcacaugugcuauug

SEQ ID NO: 1082267 - RNA, 19 nt, Artificial Sequence
  Description of Artificial Sequence: Synthetic oligonucleotide
uacuguuauuccgguuuua

SEQ ID NO: 1082268 - RNA, 19 nt, Artificial Sequence
  Description of Artificial Sequence: Synthetic oligonucleotide
aagauuccccaaacauguu

SEQ ID NO: 1082269 - RNA, 19 nt, Artificial Sequence
  Description of Artificial Sequence: Synthetic oligonucleotide
uacagcugccuagcuguuc

SEQ ID NO: 1082270 - RNA, 19 nt, Artificial Sequence
  Description of Artificial Sequence: Synthetic oligonucleotide
cugggcuauccgaggcuug

SEQ ID NO: 1082271 - RNA, 19 nt, Artificial Sequence
  Description of Artificial Sequence: Synthetic oligonucleotide
ccacuuagaaaugugcuaa

SEQ ID NO: 1082272 - RNA, 19 nt, Artificial Sequence
  Description of Artificial Sequence: Synthetic oligonucleotide
gcuuaggguggaaugagaa

SEQ ID NO: 1082273 - RNA, 19 nt, Artificial Sequence
  Description of Artificial Sequence: Synthetic oligonucleotide
gcaacaagcccagcacaag

SEQ ID NO: 1082274 - RNA, 19 nt, Artificial Sequence
  Description of Artificial Sequence: Synthetic oligonucleotide
caggaacgacaaugggguc

SEQ ID NO: 1082275 - RNA, 19 nt, Artificial Sequence
  Description of Artificial Sequence: Synthetic oligonucleotide
gcuaucugcccuugagaga

SEQ ID NO: 1082276 - RNA, 19 nt, Artificial Sequence
  Description of Artificial Sequence: Synthetic oligonucleotide
agacggcaaucuugauaca

SEQ ID NO: 1082277 - RNA, 19 nt, Artificial Sequence
  Description of Artificial Sequence: Synthetic oligonucleotide
uccucccucaggucagguu

SEQ ID NO: 1082278 - RNA, 19 nt, Artificial Sequence
  Description of Artificial Sequence: Synthetic oligonucleotide
acgguccucgcggucgguc

SEQ ID NO: 1082279 - RNA, 19 nt, Artificial Sequence
  Description of Artificial Sequence: Synthetic oligonucleotide
ugaaucgggaagggcgcuu

SEQ ID NO: 1082280 - RNA, 19 nt, Artificial Sequence
  Description of Artificial Sequence: Synthetic oligonucleotide
ugauacagcccaggcgcuu

SEQ ID NO: 1082281 - RNA, 19 nt, Artificial Sequence
  Description of Artificial Sequence: Synthetic oligonucleotide
aggaggcuuaggguggaau

SEQ ID NO: 1082282 - RNA, 19 nt, Artificial Sequence
  Description of Artificial Sequence: Synthetic oligonucleotide
gggcuaucugcccuugaga

SEQ ID NO: 1082283 - RNA, 19 nt, Artificial Sequence
  Description of Artificial Sequence: Synthetic oligonucleotide
ggcuauccgaggcuuggga

SEQ ID NO: 1082284 - RNA, 19 nt, Artificial Sequence
  Description of Artificial Sequence: Synthetic oligonucleotide
ggugccccuucauuccgug

SEQ ID NO: 1082285 - RNA, 19 nt, Artificial Sequence
  Description of Artificial Sequence: Synthetic oligonucleotide
auuccgguuuuaaguuagu

SEQ ID NO: 1082286 - RNA, 19 nt, Artificial Sequence
  Description of Artificial Sequence: Synthetic oligonucleotide
gcugccuagcuguucuaca

SEQ ID NO: 1082287 - RNA, 19 nt, Artificial Sequence
  Description of Artificial Sequence: Synthetic oligonucleotide
uuugacccguacgguuuau

SEQ ID NO: 1082288 - RNA, 19 nt, Artificial Sequence
  Description of Artificial Sequence: Synthetic oligonucleotide
ccagauaacuugagacuga

SEQ ID NO: 1082289 - RNA, 19 nt, Artificial Sequence
  Description of Artificial Sequence: Synthetic oligonucleotide
aguugcucgugggcaguga

SEQ ID NO: 1082290 - RNA, 19 nt, Artificial Sequence
  Description of Artificial Sequence: Synthetic oligonucleotide
ggggcacccacucuggugu

SEQ ID NO: 1082291 - RNA, 19 nt, Artificial Sequence
  Description of Artificial Sequence: Synthetic oligonucleotide
cauccucccucaggucagg

SEQ ID NO: 1082292 - RNA, 19 nt, Artificial Sequence
  Description of Artificial Sequence: Synthetic oligonucleotide
uugacccguacgguuuaua

SEQ ID NO: 1082293 - RNA, 19 nt, Artificial Sequence
  Description of Artificial Sequence: Synthetic oligonucleotide
ccuugaagggacaguggca

SEQ ID NO: 1082294 - RNA, 19 nt, Artificial Sequence
  Description of Artificial Sequence: Synthetic oligonucleotide
gaacgacaauggggucagg

SEQ ID NO: 1082295 - RNA, 19 nt, Artificial Sequence
  Description of Artificial Sequence: Synthetic oligonucleotide
uggcaccagcgcacaugug

SEQ ID NO: 1082296 - RNA, 19 nt, Artificial Sequence
  Description of Artificial Sequence: Synthetic oligonucleotide
agcagcagcgguacacgau

SEQ ID NO: 1082297 - RNA, 19 nt, Artificial Sequence
  Description of Artificial Sequence: Synthetic oligonucleotide
cguacgguuuauauaguaa

SEQ ID NO: 1082298 - RNA, 19 nt, Artificial Sequence
  Description of Artificial Sequence: Synthetic oligonucleotide
ggggcccaagagcaacaag

SEQ ID NO: 1082299 - RNA, 19 nt, Artificial Sequence
  Description of Artificial Sequence: Synthetic oligonucleotide
uccucgcggucggucuagg

SEQ ID NO: 1082300 - RNA, 19 nt, Artificial Sequence
  Description of Artificial Sequence: Synthetic oligonucleotide
cccuguacccugaugcuga

SEQ ID NO: 1082301 - RNA, 19 nt, Artificial Sequence
  Description of Artificial Sequence: Synthetic oligonucleotide
gggucaguuugaacuuaag

SEQ ID NO: 1082302 - RNA, 19 nt, Artificial Sequence
  Description of Artificial Sequence: Synthetic oligonucleotide
accaccugugagccagaua

SEQ ID NO: 1082303 - RNA, 19 nt, Artificial Sequence
  Description of Artificial Sequence: Synthetic oligonucleotide
cuugaggccgaggcgcgca

SEQ ID NO: 1082304 - RNA, 19 nt, Artificial Sequence
  Description of Artificial Sequence: Synthetic oligonucleotide
gaaggagaauggggcuaga

SEQ ID NO: 1082305 - RNA, 19 nt, Artificial Sequence
  Description of Artificial Sequence: Synthetic oligonucleotide
cacucuggugugaaccccu

SEQ ID NO: 1082306 - RNA, 19 nt, Artificial Sequence
  Description of Artificial Sequence: Synthetic oligonucleotide
gaaguugcucgugggcagu

SEQ ID NO: 1082307 - RNA, 19 nt, Artificial Sequence
  Description of Artificial Sequence: Synthetic oligonucleotide
gcuauuggguuugagguuu

SEQ ID NO: 1082308 - RNA, 19 nt, Artificial Sequence
  Description of Artificial Sequence: Synthetic oligonucleotide
ggccacuuagaaaugugcu

SEQ ID NO: 1082309 - RNA, 19 nt, Artificial Sequence
  Description of Artificial Sequence: Synthetic oligonucleotide
cacccacucuggugugaac

SEQ ID NO: 1082310 - RNA, 19 nt, Artificial Sequence
  Description of Artificial Sequence: Synthetic oligonucleotide
cuguacccugaugcugaug

SEQ ID NO: 1082311 - RNA, 19 nt, Artificial Sequence
  Description of Artificial Sequence: Synthetic oligonucleotide
gggguggggauaaccucag

SEQ ID NO: 1082312 - RNA, 19 nt, Artificial Sequence
  Description of Artificial Sequence: Synthetic oligonucleotide
gcgacaggcuuuugaucac

SEQ ID NO: 1082313 - RNA, 19 nt, Artificial Sequence
  Description of Artificial Sequence: Synthetic oligonucleotide
agaccaagguugggucagu

SEQ ID NO: 1082314 - RNA, 19 nt, Artificial Sequence
  Description of Artificial Sequence: Synthetic oligonucleotide
accaccgacuugacccuga

SEQ ID NO: 1082315 - RNA, 19 nt, Artificial Sequence
  Description of Artificial Sequence: Synthetic oligonucleotide
cagcucggcagcuccaggu

SEQ ID NO: 1082316 - RNA, 19 nt, Artificial Sequence
  Description of Artificial Sequence: Synthetic oligonucleotide
uuggagcgacaggcuuuug

SEQ ID NO: 1082317 - RNA, 19 nt, Artificial Sequence
  Description of Artificial Sequence: Synthetic oligonucleotide
guacccugaugcugaugua

SEQ ID NO: 1082318 - RNA, 19 nt, Artificial Sequence
  Description of Artificial Sequence: Synthetic oligonucleotide
ggcuuaggguggaaugaga

SEQ ID NO: 1082319 - RNA, 19 nt, Artificial Sequence
  Description of Artificial Sequence: Synthetic oligonucleotide
ggauacgguaguugccggu

SEQ ID NO: 1082320 - RNA, 19 nt, Artificial Sequence
  Description of Artificial Sequence: Synthetic oligonucleotide
cacgaugcaugaugacggu

SEQ ID NO: 1082321 - RNA, 19 nt, Artificial Sequence
  Description of Artificial Sequence: Synthetic oligonucleotide
caucuggcaccagcgcaca

SEQ ID NO: 1082322 - RNA, 19 nt, Artificial Sequence
  Description of Artificial Sequence: Synthetic oligonucleotide
gaucccuguuccacauggu

SEQ ID NO: 1082323 - RNA, 19 nt, Artificial Sequence
  Description of Artificial Sequence: Synthetic oligonucleotide
gacccagaagccagccacu

SEQ ID NO: 1082324 - RNA, 19 nt, Artificial Sequence
  Description of Artificial Sequence: Synthetic oligonucleotide
cagacgucaggacccgccu

SEQ ID NO: 1082325 - RNA, 19 nt, Artificial Sequence
  Description of Artificial Sequence: Synthetic oligonucleotide
ccguacgguuuauauagua

SEQ ID NO: 1082326 - RNA, 19 nt, Artificial Sequence
  Description of Artificial Sequence: Synthetic oligonucleotide
auggggcuagaggcaggca

SEQ ID NO: 1082327 - RNA, 19 nt, Artificial Sequence
  Description of Artificial Sequence: Synthetic oligonucleotide
caaccugauccaggaucca

SEQ ID NO: 1082328 - RNA, 19 nt, Artificial Sequence
  Description of Artificial Sequence: Synthetic oligonucleotide
augcaggcugagcccucuu

SEQ ID NO: 1082329 - RNA, 19 nt, Artificial Sequence
  Description of Artificial Sequence: Synthetic oligonucleotide
caugugcuauuggguuuga

SEQ ID NO: 1082330 - RNA, 19 nt, Artificial Sequence
  Description of Artificial Sequence: Synthetic oligonucleotide
ccccuguacccugaugcug

SEQ ID NO: 1082331 - RNA, 19 nt, Artificial Sequence
  Description of Artificial Sequence: Synthetic oligonucleotide
cgcuugaggccgaggcgcg

SEQ ID NO: 1082332 - RNA, 19 nt, Artificial Sequence
  Description of Artificial Sequence: Synthetic oligonucleotide
gggcacccacucuggugug

SEQ ID NO: 1082333 - RNA, 19 nt, Artificial Sequence
  Description of Artificial Sequence: Synthetic oligonucleotide
caccagcgcacaugugcua

SEQ ID NO: 1082334 - RNA, 19 nt, Artificial Sequence
  Description of Artificial Sequence: Synthetic oligonucleotide
cgcacaugugcuauugggu

SEQ ID NO: 1082335 - RNA, 19 nt, Artificial Sequence
  Description of Artificial Sequence: Synthetic oligonucleotide
gcaccagcgcacaugugcu

SEQ ID NO: 1082336 - RNA, 19 nt, Artificial Sequence
  Description of Artificial Sequence: Synthetic oligonucleotide
gaccaagguugggucaguu

SEQ ID NO: 1082337 - RNA, 19 nt, Artificial Sequence
  Description of Artificial Sequence: Synthetic oligonucleotide
cugaaucgggaagggcgcu

SEQ ID NO: 1082338 - RNA, 19 nt, Artificial Sequence
  Description of Artificial Sequence: Synthetic oligonucleotide
cauucuaccuaggccucuu

SEQ ID NO: 1082339 - RNA, 19 nt, Artificial Sequence
  Description of Artificial Sequence: Synthetic oligonucleotide
gcuugaggccgaggcgcgc

SEQ ID NO: 1082340 - RNA, 19 nt, Artificial Sequence
  Description of Artificial Sequence: Synthetic oligonucleotide
ggcuagaggcaggcauuuc

SEQ ID NO: 1082341 - RNA, 19 nt, Artificial Sequence
  Description of Artificial Sequence: Synthetic oligonucleotide
gugcaaccugauccaggau

SEQ ID NO: 1082342 - RNA, 19 nt, Artificial Sequence
  Description of Artificial Sequence: Synthetic oligonucleotide
gcagcgguacacgaugcau

SEQ ID NO: 1082343 - RNA, 19 nt, Artificial Sequence
  Description of Artificial Sequence: Synthetic oligonucleotide
cccucaggucagguuguac

SEQ ID NO: 1082344 - RNA, 19 nt, Artificial Sequence
  Description of Artificial Sequence: Synthetic oligonucleotide
gcacccacucuggugugaa

SEQ ID NO: 1082345 - RNA, 19 nt, Artificial Sequence
  Description of Artificial Sequence: Synthetic oligonucleotide
ggcacccacucugguguga

SEQ ID NO: 1082346 - RNA, 19 nt, Artificial Sequence
  Description of Artificial Sequence: Synthetic oligonucleotide
gguccucgcggucggucua

SEQ ID NO: 1082347 - RNA, 19 nt, Artificial Sequence
  Description of Artificial Sequence: Synthetic oligonucleotide
cacucuggauacgguaguu

SEQ ID NO: 1082348 - RNA, 19 nt, Artificial Sequence
  Description of Artificial Sequence: Synthetic oligonucleotide
cgguaguugccggugcuca

SEQ ID NO: 1082349 - RNA, 19 nt, Artificial Sequence
  Description of Artificial Sequence: Synthetic oligonucleotide
cagcggggcccaagagcaa

SEQ ID NO: 1082350 - RNA, 19 nt, Artificial Sequence
  Description of Artificial Sequence: Synthetic oligonucleotide
gccggugcucagccagcuc

SEQ ID NO: 1082351 - RNA, 19 nt, Artificial Sequence
  Description of Artificial Sequence: Synthetic oligonucleotide
ggccaggcaccaccgacuu

SEQ ID NO: 1082352 - RNA, 19 nt, Artificial Sequence
  Description of Artificial Sequence: Synthetic oligonucleotide
ccuucauuccgugguggcu

SEQ ID NO: 1082353 - RNA, 19 nt, Artificial Sequence
  Description of Artificial Sequence: Synthetic oligonucleotide
gcggucggucuaggcacug

SEQ ID NO: 1082354 - RNA, 19 nt, Artificial Sequence
  Description of Artificial Sequence: Synthetic oligonucleotide
cccagacgucaggacccgc

SEQ ID NO: 1082355 - RNA, 19 nt, Artificial Sequence
  Description of Artificial Sequence: Synthetic oligonucleotide
gggucagguuggagcgaca

SEQ ID NO: 1082356 - RNA, 19 nt, Artificial Sequence
  Description of Artificial Sequence: Synthetic oligonucleotide
cccguacgguuuauauagu

SEQ ID NO: 1082357 - RNA, 19 nt, Artificial Sequence
  Description of Artificial Sequence: Synthetic oligonucleotide
cggucggucuaggcacugc

SEQ ID NO: 1082358 - RNA, 19 nt, Artificial Sequence
  Description of Artificial Sequence: Synthetic oligonucleotide
cccauuccuugacuguuuu

SEQ ID NO: 1082359 - RNA, 19 nt, Artificial Sequence
  Description of Artificial Sequence: Synthetic oligonucleotide
caaguccaugaugccccuu

SEQ ID NO: 1082360 - RNA, 19 nt, Artificial Sequence
  Description of Artificial Sequence: Synthetic oligonucleotide
ccauucuaccuaggccucu

SEQ ID NO: 1082361 - RNA, 19 nt, Artificial Sequence
  Description of Artificial Sequence: Synthetic oligonucleotide
gcgguacacgaugcaugau

SEQ ID NO: 1082362 - RNA, 19 nt, Artificial Sequence
  Description of Artificial Sequence: Synthetic oligonucleotide
ccagcgcacaugugcuauu

SEQ ID NO: 1082363 - RNA, 19 nt, Artificial Sequence
  Description of Artificial Sequence: Synthetic oligonucleotide
ggcuccgggcagggcucuc

SEQ ID NO: 1082364 - RNA, 19 nt, Artificial Sequence
  Description of Artificial Sequence: Synthetic oligonucleotide
cgcggucggucuaggcacu

SEQ ID NO: 1082365 - RNA, 19 nt, Artificial Sequence
  Description of Artificial Sequence: Synthetic oligonucleotide
caggacccgccuggcccau

SEQ ID NO: 1082366 - RNA, 19 nt, Artificial Sequence
  Description of Artificial Sequence: Synthetic oligonucleotide
aacaggaucgcaucgaagg

SEQ ID NO: 1082367 - RNA, 19 nt, Artificial Sequence
  Description of Artificial Sequence: Synthetic oligonucleotide
ugguguuuuauaaagaaag

SEQ ID NO: 1082368 - RNA, 19 nt, Artificial Sequence
  Description of Artificial Sequence: Synthetic oligonucleotide
aacucucucauagagaccc

SEQ ID NO: 1082369 - RNA, 19 nt, Artificial Sequence
  Description of Artificial Sequence: Synthetic oligonucleotide
aauagauagccccacugac

SEQ ID NO: 1082370 - RNA, 19 nt, Artificial Sequence
  Description of Artificial Sequence: Synthetic oligonucleotide
aauaaguugacugcgauga

SEQ ID NO: 1082371 - RNA, 19 nt, Artificial Sequence
  Description of Artificial Sequence: Synthetic oligonucleotide
aagggcgacaucuugggcc

SEQ ID NO: 1082372 - RNA, 19 nt, Artificial Sequence
  Description of Artificial Sequence: Synthetic oligonucleotide
gaauacaugguacaggcag

SEQ ID NO: 1082373 - RNA, 19 nt, Artificial Sequence
  Description of Artificial Sequence: Synthetic oligonucleotide
uuuguguuugaucacagac

SEQ ID NO: 1082374 - RNA, 19 nt, Artificial Sequence
  Description of Artificial Sequence: Synthetic oligonucleotide
aaauuguuacugcuauugg

SEQ ID NO: 1082375 - RNA, 19 nt, Artificial Sequence
  Description of Artificial Sequence: Synthetic oligonucleotide
gaucauauggacugcacag

SEQ ID NO: 1082376 - RNA, 19 nt, Artificial Sequence
  Description of Artificial Sequence: Synthetic oligonucleotide
cuuggcucaaacaggaucg

SEQ ID NO: 1082377 - RNA, 19 nt, Artificial Sequence
  Description of Artificial Sequence: Synthetic oligonucleotide
aacguccuggaucuugucc

SEQ ID NO: 1082378 - RNA, 19 nt, Artificial Sequence
  Description of Artificial Sequence: Synthetic oligonucleotide
cuauugguguuuuauaaag

SEQ ID NO: 1082379 - RNA, 19 nt, Artificial Sequence
  Description of Artificial Sequence: Synthetic oligonucleotide
aagagaacguccuggaucu

SEQ ID NO: 1082380 - RNA, 19 nt, Artificial Sequence
  Description of Artificial Sequence: Synthetic oligonucleotide
ugugaauaaguugacugcg

SEQ ID NO: 1082381 - RNA, 19 nt, Artificial Sequence
  Description of Artificial Sequence: Synthetic oligonucleotide
ucauagagacccuucacag

SEQ ID NO: 1082382 - RNA, 19 nt, Artificial Sequence
  Description of Artificial Sequence: Synthetic oligonucleotide
gagaauauaaugagcaccc

SEQ ID NO: 1082383 - RNA, 19 nt, Artificial Sequence
  Description of Artificial Sequence: Synthetic oligonucleotide
aagaaccuagucuucccac

SEQ ID NO: 1082384 - RNA, 19 nt, Artificial Sequence
  Description of Artificial Sequence: Synthetic oligonucleotide
uuugagagaauacauggua

SEQ ID NO: 1082385 - RNA, 19 nt, Artificial Sequence
  Description of Artificial Sequence: Synthetic oligonucleotide
guuuacgucucccauagcc

SEQ ID NO: 1082386 - RNA, 19 nt, Artificial Sequence
  Description of Artificial Sequence: Synthetic oligonucleotide
agguggaccacucuacugc

SEQ ID NO: 1082387 - RNA, 19 nt, Artificial Sequence
  Description of Artificial Sequence: Synthetic oligonucleotide
gaucuggugaaauuguuac

SEQ ID NO: 1082388 - RNA, 19 nt, Artificial Sequence
  Description of Artificial Sequence: Synthetic oligonucleotide
ugaauagauagccccacug

SEQ ID NO: 1082389 - RNA, 19 nt, Artificial Sequence
  Description of Artificial Sequence: Synthetic oligonucleotide
ucuguggccaaucugguac

SEQ ID NO: 1082390 - RNA, 19 nt, Artificial Sequence
  Description of Artificial Sequence: Synthetic oligonucleotide
gaccagaucauauggacug

SEQ ID NO: 1082391 - RNA, 19 nt, Artificial Sequence
  Description of Artificial Sequence: Synthetic oligonucleotide
ucuggugaaauuguuacug

SEQ ID NO: 1082392 - RNA, 19 nt, Artificial Sequence
  Description of Artificial Sequence: Synthetic oligonucleotide
uuggggauccaucucauug

SEQ ID NO: 1082393 - RNA, 19 nt, Artificial Sequence
  Description of Artificial Sequence: Synthetic oligonucleotide
acguccuggaucuuguccc

SEQ ID NO: 1082394 - RNA, 19 nt, Artificial Sequence
  Description of Artificial Sequence: Synthetic oligonucleotide
aaagcgcacuugcacaggg

SEQ ID NO: 1082395 - RNA, 19 nt, Artificial Sequence
  Description of Artificial Sequence: Synthetic oligonucleotide
uugacugcgaugaaagaac

SEQ ID NO: 1082396 - RNA, 19 nt, Artificial Sequence
  Description of Artificial Sequence: Synthetic oligonucleotide
uauaaugagcacccguucu

SEQ ID NO: 1082397 - RNA, 19 nt, Artificial Sequence
  Description of Artificial Sequence: Synthetic oligonucleotide
aggggcucaagauggaagc

SEQ ID NO: 1082398 - RNA, 19 nt, Artificial Sequence
  Description of Artificial Sequence: Synthetic oligonucleotide
ucauauggacugcacagug

SEQ ID NO: 1082399 - RNA, 19 nt, Artificial Sequence
  Description of Artificial Sequence: Synthetic oligonucleotide
auggacugcacagugagac

SEQ ID NO: 1082400 - RNA, 19 nt, Artificial Sequence
  Description of Artificial Sequence: Synthetic oligonucleotide
cugaguugcaccaaggguc

SEQ ID NO: 1082401 - RNA, 19 nt, Artificial Sequence
  Description of Artificial Sequence: Synthetic oligonucleotide
acauucaucagguagcgaa

SEQ ID NO: 1082402 - RNA, 19 nt, Artificial Sequence
  Description of Artificial Sequence: Synthetic oligonucleotide
uagccagaaagugauacgg

SEQ ID NO: 1082403 - RNA, 19 nt, Artificial Sequence
  Description of Artificial Sequence: Synthetic oligonucleotide
aguccaacuuuccuggagg

SEQ ID NO: 1082404 - RNA, 19 nt, Artificial Sequence
  Description of Artificial Sequence: Synthetic oligonucleotide
aaguugacugcgaugaaag

SEQ ID NO: 1082405 - RNA, 19 nt, Artificial Sequence
  Description of Artificial Sequence: Synthetic oligonucleotide
ugagagaauacaugguaca

SEQ ID NO: 1082406 - RNA, 19 nt, Artificial Sequence
  Description of Artificial Sequence: Synthetic oligonucleotide
ugucuaucaaugcugguuc

SEQ ID NO: 1082407 - RNA, 19 nt, Artificial Sequence
  Description of Artificial Sequence: Synthetic oligonucleotide
gauggaagcguucccaccc

SEQ ID NO: 1082408 - RNA, 19 nt, Artificial Sequence
  Description of Artificial Sequence: Synthetic oligonucleotide
agugauacgggacugcaga

SEQ ID NO: 1082409 - RNA, 19 nt, Artificial Sequence
  Description of Artificial Sequence: Synthetic oligonucleotide
aggagaauauaaugagcac

SEQ ID NO: 1082410 - RNA, 19 nt, Artificial Sequence
  Description of Artificial Sequence: Synthetic oligonucleotide
uuuacgucucccauagcca

SEQ ID NO: 1082411 - RNA, 19 nt, Artificial Sequence
  Description of Artificial Sequence: Synthetic oligonucleotide
cugugaauaaguugacugc

SEQ ID NO: 1082412 - RNA, 19 nt, Artificial Sequence
  Description of Artificial Sequence: Synthetic oligonucleotide
aaauccuuggguauagcug

SEQ ID NO: 1082413 - RNA, 19 nt, Artificial Sequence
  Description of Artificial Sequence: Synthetic oligonucleotide
ccuuugagagaauacaugg

SEQ ID NO: 1082414 - RNA, 19 nt, Artificial Sequence
  Description of Artificial Sequence: Synthetic oligonucleotide
ugccugaauagauagcccc

SEQ ID NO: 1082415 - RNA, 19 nt, Artificial Sequence
  Description of Artificial Sequence: Synthetic oligonucleotide
guaggagucuuccuuaagc

SEQ ID NO: 1082416 - RNA, 19 nt, Artificial Sequence
  Description of Artificial Sequence: Synthetic oligonucleotide
aggaucugucuaucaaugc

SEQ ID NO: 1082417 - RNA, 19 nt, Artificial Sequence
  Description of Artificial Sequence: Synthetic oligonucleotide
acaggaucgcaucgaaggc

SEQ ID NO: 1082418 - RNA, 19 nt, Artificial Sequence
  Description of Artificial Sequence: Synthetic oligonucleotide
acccguucuggucacaugg

SEQ ID NO: 1082419 - RNA, 19 nt, Artificial Sequence
  Description of Artificial Sequence: Synthetic oligonucleotide
auagauagccccacugacc

SEQ ID NO: 1082420 - RNA, 19 nt, Artificial Sequence
  Description of Artificial Sequence: Synthetic oligonucleotide
uugaccagaucauauggac

SEQ ID NO: 1082421 - RNA, 19 nt, Artificial Sequence
  Description of Artificial Sequence: Synthetic oligonucleotide
cuaaaccucacuccgguac

SEQ ID NO: 1082422 - RNA, 19 nt, Artificial Sequence
  Description of Artificial Sequence: Synthetic oligonucleotide
agagaauacaugguacagg

SEQ ID NO: 1082423 - RNA, 19 nt, Artificial Sequence
  Description of Artificial Sequence: Synthetic oligonucleotide
ggauccaucucauuggugc

SEQ ID NO: 1082424 - RNA, 19 nt, Artificial Sequence
  Description of Artificial Sequence: Synthetic oligonucleotide
uguagucaagccuccaugu

SEQ ID NO: 1082425 - RNA, 19 nt, Artificial Sequence
  Description of Artificial Sequence: Synthetic oligonucleotide
ugaguugcaccaagggucc

SEQ ID NO: 1082426 - RNA, 19 nt, Artificial Sequence
  Description of Artificial Sequence: Synthetic oligonucleotide
acacuucgcugucugaugg

SEQ ID NO: 1082427 - RNA, 19 nt, Artificial Sequence
  Description of Artificial Sequence: Synthetic oligonucleotide
uuacgucucccauagccag

SEQ ID NO: 1082428 - RNA, 19 nt, Artificial Sequence
  Description of Artificial Sequence: Synthetic oligonucleotide
auaaugagcacccguucug

SEQ ID NO: 1082429 - RNA, 19 nt, Artificial Sequence
  Description of Artificial Sequence: Synthetic oligonucleotide
ucucccauagccagaaagu

SEQ ID NO: 1082430 - RNA, 19 nt, Artificial Sequence
  Description of Artificial Sequence: Synthetic oligonucleotide
agcguucccacccaaacug

SEQ ID NO: 1082431 - RNA, 19 nt, Artificial Sequence
  Description of Artificial Sequence: Synthetic oligonucleotide
ugaauaaguugacugcgau

SEQ ID NO: 1082432 - RNA, 19 nt, Artificial Sequence
  Description of Artificial Sequence: Synthetic oligonucleotide
acaagggcgacaucuuggg

SEQ ID NO: 1082433 - RNA, 19 nt, Artificial Sequence
  Description of Artificial Sequence: Synthetic oligonucleotide
gaauagauagccccacuga

SEQ ID NO: 1082434 - RNA, 19 nt, Artificial Sequence
  Description of Artificial Sequence: Synthetic oligonucleotide
aaggucucgcacuuugugu

SEQ ID NO: 1082435 - RNA, 19 nt, Artificial Sequence
  Description of Artificial Sequence: Synthetic oligonucleotide
uggacaugggauuaugaaa

SEQ ID NO: 1082436 - RNA, 19 nt, Artificial Sequence
  Description of Artificial Sequence: Synthetic oligonucleotide
agcugcgcccaccuaaacc

SEQ ID NO: 1082437 - RNA, 19 nt, Artificial Sequence
  Description of Artificial Sequence: Synthetic oligonucleotide
caguaacucucucauagag

SEQ ID NO: 1082438 - RNA, 19 nt, Artificial Sequence
  Description of Artificial Sequence: Synthetic oligonucleotide
agaucauauggacugcaca

SEQ ID NO: 1082439 - RNA, 19 nt, Artificial Sequence
  Description of Artificial Sequence: Synthetic oligonucleotide
ggugccgacaagcucaugg

SEQ ID NO: 1082440 - RNA, 19 nt, Artificial Sequence
  Description of Artificial Sequence: Synthetic oligonucleotide
agugagaccuuugagagaa

SEQ ID NO: 1082441 - RNA, 19 nt, Artificial Sequence
  Description of Artificial Sequence: Synthetic oligonucleotide
acagcauagaccccguacu

SEQ ID NO: 1082442 - RNA, 19 nt, Artificial Sequence
  Description of Artificial Sequence: Synthetic oligonucleotide
guagcgaacugcuccagag

SEQ ID NO: 1082443 - RNA, 19 nt, Artificial Sequence
  Description of Artificial Sequence: Synthetic oligonucleotide
aggagauuggaggugcccc

SEQ ID NO: 1082444 - RNA, 19 nt, Artificial Sequence
  Description of Artificial Sequence: Synthetic oligonucleotide
uucucagaaccugaguugc

SEQ ID NO: 1082445 - RNA, 19 nt, Artificial Sequence
  Description of Artificial Sequence: Synthetic oligonucleotide
auagaccccguacugaggu

SEQ ID NO: 1082446 - RNA, 19 nt, Artificial Sequence
  Description of Artificial Sequence: Synthetic oligonucleotide
ggagaauauaaugagcacc

SEQ ID NO: 1082447 - RNA, 19 nt, Artificial Sequence
  Description of Artificial Sequence: Synthetic oligonucleotide
ugacugcgaugaaagaacc

SEQ ID NO: 1082448 - RNA, 19 nt, Artificial Sequence
  Description of Artificial Sequence: Synthetic oligonucleotide
gaagacacuucgcugucug

SEQ ID NO: 1082449 - RNA, 19 nt, Artificial Sequence
  Description of Artificial Sequence: Synthetic oligonucleotide
ugcagaguuguagucaagc

SEQ ID NO: 1082450 - RNA, 19 nt, Artificial Sequence
  Description of Artificial Sequence: Synthetic oligonucleotide
ugaucacagacaccaggcc

SEQ ID NO: 1082451 - RNA, 19 nt, Artificial Sequence
  Description of Artificial Sequence: Synthetic oligonucleotide
uagucaagccuccauguuc

SEQ ID NO: 1082452 - RNA, 19 nt, Artificial Sequence
  Description of Artificial Sequence: Synthetic oligonucleotide
gucucccauagccagaaag

SEQ ID NO: 1082453 - RNA, 19 nt, Artificial Sequence
  Description of Artificial Sequence: Synthetic oligonucleotide
ucuucccacaaggauacag

SEQ ID NO: 1082454 - RNA, 19 nt, Artificial Sequence
  Description of Artificial Sequence: Synthetic oligonucleotide
uaaugagcacccguucugg

SEQ ID NO: 1082455 - RNA, 19 nt, Artificial Sequence
  Description of Artificial Sequence: Synthetic oligonucleotide
ugaccagaucauauggacu

SEQ ID NO: 1082456 - RNA, 19 nt, Artificial Sequence
  Description of Artificial Sequence: Synthetic oligonucleotide
agucgggagaaccgguccc

SEQ ID NO: 1082457 - RNA, 19 nt, Artificial Sequence
  Description of Artificial Sequence: Synthetic oligonucleotide
cuuaagcuggccaucuuuc

SEQ ID NO: 1082458 - RNA, 19 nt, Artificial Sequence
  Description of Artificial Sequence: Synthetic oligonucleotide
uggccaaucugguacccgg

SEQ ID NO: 1082459 - RNA, 19 nt, Artificial Sequence
  Description of Artificial Sequence: Synthetic oligonucleotide
uuguuacugcuauuggugu

SEQ ID NO: 1082460 - RNA, 19 nt, Artificial Sequence
  Description of Artificial Sequence: Synthetic oligonucleotide
ugccauuggccccugacac

SEQ ID NO: 1082461 - RNA, 19 nt, Artificial Sequence
  Description of Artificial Sequence: Synthetic oligonucleotide
ugaugguuguggcauggca

SEQ ID NO: 1082462 - RNA, 19 nt, Artificial Sequence
  Description of Artificial Sequence: Synthetic oligonucleotide
uuaagcuggccaucuuucc

SEQ ID NO: 1082463 - RNA, 19 nt, Artificial Sequence
  Description of Artificial Sequence: Synthetic oligonucleotide
uaguccaacuuuccuggag

SEQ ID NO: 1082464 - RNA, 19 nt, Artificial Sequence
  Description of Artificial Sequence: Synthetic oligonucleotide
aaagugauacgggacugca

SEQ ID NO: 1082465 - RNA, 19 nt, Artificial Sequence
  Description of Artificial Sequence: Synthetic oligonucleotide
aguaggaucugucuaucaa

SEQ ID NO: 1082466 - RNA, 19 nt, Artificial Sequence
  Description of Artificial Sequence: Synthetic oligonucleotide
ugaaggucggucuggacau

SEQ ID NO: 1082467 - RNA, 19 nt, Artificial Sequence
  Description of Artificial Sequence: Synthetic oligonucleotide
ucuuccuuaagcuggccau

SEQ ID NO: 1082468 - RNA, 19 nt, Artificial Sequence
  Description of Artificial Sequence: Synthetic oligonucleotide
ggguggaacauguacaggc

SEQ ID NO: 1082469 - RNA, 19 nt, Artificial Sequence
  Description of Artificial Sequence: Synthetic oligonucleotide
ucaucagguagcgaacugc

SEQ ID NO: 1082470 - RNA, 19 nt, Artificial Sequence
  Description of Artificial Sequence: Synthetic oligonucleotide
ggaucaguaggucuggggc

SEQ ID NO: 1082471 - RNA, 19 nt, Artificial Sequence
  Description of Artificial Sequence: Synthetic oligonucleotide
aagaaagcagagcgguggu

SEQ ID NO: 1082472 - RNA, 19 nt, Artificial Sequence
  Description of Artificial Sequence: Synthetic oligonucleotide
aggaucaguaggucugggg

SEQ ID NO: 1082473 - RNA, 19 nt, Artificial Sequence
  Description of Artificial Sequence: Synthetic oligonucleotide
acagaguuugcccugugaa

SEQ ID NO: 1082474 - RNA, 19 nt, Artificial Sequence
  Description of Artificial Sequence: Synthetic oligonucleotide
aaguaggaucugucuauca

SEQ ID NO: 1082475 - RNA, 19 nt, Artificial Sequence
  Description of Artificial Sequence: Synthetic oligonucleotide
ggaggcuguguuuucaccg

SEQ ID NO: 1082476 - RNA, 19 nt, Artificial Sequence
  Description of Artificial Sequence: Synthetic oligonucleotide
acauuggcuagcuccagca

SEQ ID NO: 1082477 - RNA, 19 nt, Artificial Sequence
  Description of Artificial Sequence: Synthetic oligonucleotide
agaccuuugagagaauaca

SEQ ID NO: 1082478 - RNA, 19 nt, Artificial Sequence
  Description of Artificial Sequence: Synthetic oligonucleotide
agaccccguacugaggucc

SEQ ID NO: 1082479 - RNA, 19 nt, Artificial Sequence
  Description of Artificial Sequence: Synthetic oligonucleotide
aaccuagucuucccacaag

SEQ ID NO: 1082480 - RNA, 19 nt, Artificial Sequence
  Description of Artificial Sequence: Synthetic oligonucleotide
ugcgaugaaagaaccuagu

SEQ ID NO: 1082481 - RNA, 19 nt, Artificial Sequence
  Description of Artificial Sequence: Synthetic oligonucleotide
uggaccacucuacugccug

SEQ ID NO: 1082482 - RNA, 19 nt, Artificial Sequence
  Description of Artificial Sequence: Synthetic oligonucleotide
gaugguuguggcauggcac

SEQ ID NO: 1082483 - RNA, 19 nt, Artificial Sequence
  Description of Artificial Sequence: Synthetic oligonucleotide
uucaucagguagcgaacug

SEQ ID NO: 1082484 - RNA, 19 nt, Artificial Sequence
  Description of Artificial Sequence: Synthetic oligonucleotide
gaauauaaugagcacccgu

SEQ ID NO: 1082485 - RNA, 19 nt, Artificial Sequence
  Description of Artificial Sequence: Synthetic oligonucleotide
uugcccugugaauaaguug

SEQ ID NO: 1082486 - RNA, 19 nt, Artificial Sequence
  Description of Artificial Sequence: Synthetic oligonucleotide
uguuuucaccguuggaguc

SEQ ID NO: 1082487 - RNA, 19 nt, Artificial Sequence
  Description of Artificial Sequence: Synthetic oligonucleotide
aagcguucccacccaaacu

SEQ ID NO: 1082488 - RNA, 19 nt, Artificial Sequence
  Description of Artificial Sequence: Synthetic oligonucleotide
cugcgaugaaagaaccuag

SEQ ID NO: 1082489 - RNA, 19 nt, Artificial Sequence
  Description of Artificial Sequence: Synthetic oligonucleotide
ucaaacaggaucgcaucga

SEQ ID NO: 1082490 - RNA, 19 nt, Artificial Sequence
  Description of Artificial Sequence: Synthetic oligonucleotide
cauucaucagguagcgaac

SEQ ID NO: 1082491 - RNA, 19 nt, Artificial Sequence
  Description of Artificial Sequence: Synthetic oligonucleotide
agagcugugcagaagccuc

SEQ ID NO: 1082492 - RNA, 19 nt, Artificial Sequence
  Description of Artificial Sequence: Synthetic oligonucleotide
aaggucggucuggacaugg

SEQ ID NO: 1082493 - RNA, 19 nt, Artificial Sequence
  Description of Artificial Sequence: Synthetic oligonucleotide
gcucacaaggagcacaucc

SEQ ID NO: 1082494 - RNA, 19 nt, Artificial Sequence
  Description of Artificial Sequence: Synthetic oligonucleotide
aucugucuaucaaugcugg

SEQ ID NO: 1082495 - RNA, 19 nt, Artificial Sequence
  Description of Artificial Sequence: Synthetic oligonucleotide
cuggucacauggaggaggg

SEQ ID NO: 1082496 - RNA, 19 nt, Artificial Sequence
  Description of Artificial Sequence: Synthetic oligonucleotide
cccaguaacucucucauag

SEQ ID NO: 1082497 - RNA, 19 nt, Artificial Sequence
  Description of Artificial Sequence: Synthetic oligonucleotide
ugucugaugguuguggcau

SEQ ID NO: 1082498 - RNA, 19 nt, Artificial Sequence
  Description of Artificial Sequence: Synthetic oligonucleotide
aaugagcacccguucuggu

SEQ ID NO: 1082499 - RNA, 19 nt, Artificial Sequence
  Description of Artificial Sequence: Synthetic oligonucleotide
aaaccucacuccgguaccg

SEQ ID NO: 1082500 - RNA, 19 nt, Artificial Sequence
  Description of Artificial Sequence: Synthetic oligonucleotide
ggcggcuuggcucaaacag

SEQ ID NO: 1082501 - RNA, 19 nt, Artificial Sequence
  Description of Artificial Sequence: Synthetic oligonucleotide
uaaguugacugcgaugaaa

SEQ ID NO: 1082502 - RNA, 19 nt, Artificial Sequence
  Description of Artificial Sequence: Synthetic oligonucleotide
uauugagcauguucuccca

SEQ ID NO: 1082503 - RNA, 19 nt, Artificial Sequence
  Description of Artificial Sequence: Synthetic oligonucleotide
aucaguaggucuggggcac

SEQ ID NO: 1082504 - RNA, 19 nt, Artificial Sequence
  Description of Artificial Sequence: Synthetic oligonucleotide
ugggacaaggucucgcacu

SEQ ID NO: 1082505 - RNA, 19 nt, Artificial Sequence
  Description of Artificial Sequence: Synthetic oligonucleotide
uuugcccugugaauaaguu

SEQ ID NO: 1082506 - RNA, 19 nt, Artificial Sequence
  Description of Artificial Sequence: Synthetic oligonucleotide
ggucacauggaggagggcg

SEQ ID NO: 1082507 - RNA, 19 nt, Artificial Sequence
  Description of Artificial Sequence: Synthetic oligonucleotide
uagucgggagaaccggucc

SEQ ID NO: 1082508 - RNA, 19 nt, Artificial Sequence
  Description of Artificial Sequence: Synthetic oligonucleotide
agaaccuagucuucccaca

SEQ ID NO: 1082509 - RNA, 19 nt, Artificial Sequence
  Description of Artificial Sequence: Synthetic oligonucleotide
accuaaaccucacuccggu

SEQ ID NO: 1082510 - RNA, 19 nt, Artificial Sequence
  Description of Artificial Sequence: Synthetic oligonucleotide
gguuccacagaguuugccc

SEQ ID NO: 1082511 - RNA, 19 nt, Artificial Sequence
  Description of Artificial Sequence: Synthetic oligonucleotide
caccagggcaaguagugag

SEQ ID NO: 1082512 - RNA, 19 nt, Artificial Sequence
  Description of Artificial Sequence: Synthetic oligonucleotide
aguaggagucuuccuuaag

SEQ ID NO: 1082513 - RNA, 19 nt, Artificial Sequence
  Description of Artificial Sequence: Synthetic oligonucleotide
aagcagagcgguggucugc

SEQ ID NO: 1082514 - RNA, 19 nt, Artificial Sequence
  Description of Artificial Sequence: Synthetic oligonucleotide
gaaagugauacgggacugc

SEQ ID NO: 1082515 - RNA, 19 nt, Artificial Sequence
  Description of Artificial Sequence: Synthetic oligonucleotide
gacacuucgcugucugaug

SEQ ID NO: 1082516 - RNA, 19 nt, Artificial Sequence
  Description of Artificial Sequence: Synthetic oligonucleotide
aaacaggaucgcaucgaag

SEQ ID NO: 1082517 - RNA, 19 nt, Artificial Sequence
  Description of Artificial Sequence: Synthetic oligonucleotide
agaaagugauacgggacug

SEQ ID NO: 1082518 - RNA, 19 nt, Artificial Sequence
  Description of Artificial Sequence: Synthetic oligonucleotide
uccagcugcgcccaccuaa

SEQ ID NO: 1082519 - RNA, 19 nt, Artificial Sequence
  Description of Artificial Sequence: Synthetic oligonucleotide
agcgcacuugcacagggca

SEQ ID NO: 1082520 - RNA, 19 nt, Artificial Sequence
  Description of Artificial Sequence: Synthetic oligonucleotide
ucaccguuggagucucucc

SEQ ID NO: 1082521 - RNA, 19 nt, Artificial Sequence
  Description of Artificial Sequence: Synthetic oligonucleotide
gacauagaucccagagggg

SEQ ID NO: 1082522 - RNA, 19 nt, Artificial Sequence
  Description of Artificial Sequence: Synthetic oligonucleotide
gagcauguucucccaguag

SEQ ID NO: 1082523 - RNA, 19 nt, Artificial Sequence
  Description of Artificial Sequence: Synthetic oligonucleotide
uacgggacugcagaguugu

SEQ ID NO: 1082524 - RNA, 19 nt, Artificial Sequence
  Description of Artificial Sequence: Synthetic oligonucleotide
uaccguagucgggagaacc

SEQ ID NO: 1082525 - RNA, 19 nt, Artificial Sequence
  Description of Artificial Sequence: Synthetic oligonucleotide
gcaugucugcacuugcugg

SEQ ID NO: 1082526 - RNA, 19 nt, Artificial Sequence
  Description of Artificial Sequence: Synthetic oligonucleotide
guugacugcgaugaaagaa

SEQ ID NO: 1082527 - RNA, 19 nt, Artificial Sequence
  Description of Artificial Sequence: Synthetic oligonucleotide
auggcggcuuggcucaaac

SEQ ID NO: 1082528 - RNA, 19 nt, Artificial Sequence
  Description of Artificial Sequence: Synthetic oligonucleotide
acugcgaugaaagaaccua

SEQ ID NO: 1082529 - RNA, 19 nt, Artificial Sequence
  Description of Artificial Sequence: Synthetic oligonucleotide
gaucgcaucgaaggccacg

SEQ ID NO: 1082530 - RNA, 19 nt, Artificial Sequence
  Description of Artificial Sequence: Synthetic oligonucleotide
uggcuccacagcauagacc

SEQ ID NO: 1082531 - RNA, 19 nt, Artificial Sequence
  Description of Artificial Sequence: Synthetic oligonucleotide
gagaccuuugagagaauac

SEQ ID NO: 1082532 - RNA, 19 nt, Artificial Sequence
  Description of Artificial Sequence: Synthetic oligonucleotide
cacaaagcgcacuugcaca

SEQ ID NO: 1082533 - RNA, 19 nt, Artificial Sequence
  Description of Artificial Sequence: Synthetic oligonucleotide
aucuggugaaauuguuacu

SEQ ID NO: 1082534 - RNA, 19 nt, Artificial Sequence
  Description of Artificial Sequence: Synthetic oligonucleotide
gguauagcugguaaggaca

SEQ ID NO: 1082535 - RNA, 19 nt, Artificial Sequence
  Description of Artificial Sequence: Synthetic oligonucleotide
uaaggacauagaucccaga

SEQ ID NO: 1082536 - RNA, 19 nt, Artificial Sequence
  Description of Artificial Sequence: Synthetic oligonucleotide
aguaacucucucauagaga

SEQ ID NO: 1082537 - RNA, 19 nt, Artificial Sequence
  Description of Artificial Sequence: Synthetic oligonucleotide
uccgguaccguagucggga

SEQ ID NO: 1082538 - RNA, 19 nt, Artificial Sequence
  Description of Artificial Sequence: Synthetic oligonucleotide
aggguaguccaacuuuccu

SEQ ID NO: 1082539 - RNA, 19 nt, Artificial Sequence
  Description of Artificial Sequence: Synthetic oligonucleotide
caccuaaaccucacuccgg

SEQ ID NO: 1082540 - RNA, 19 nt, Artificial Sequence
  Description of Artificial Sequence: Synthetic oligonucleotide
ggcgccaccguuuccaucc

SEQ ID NO: 1082541 - RNA, 19 nt, Artificial Sequence
  Description of Artificial Sequence: Synthetic oligonucleotide
gagaacguccuggaucuug

SEQ ID NO: 1082542 - RNA, 19 nt, Artificial Sequence
  Description of Artificial Sequence: Synthetic oligonucleotide
aagacacuucgcugucuga

SEQ ID NO: 1082543 - RNA, 19 nt, Artificial Sequence
  Description of Artificial Sequence: Synthetic oligonucleotide
ggcacacuuuacaagggcg

SEQ ID NO: 1082544 - RNA, 19 nt, Artificial Sequence
  Description of Artificial Sequence: Synthetic oligonucleotide
ugaaauuguuacugcuauu

SEQ ID NO: 1082545 - RNA, 19 nt, Artificial Sequence
  Description of Artificial Sequence: Synthetic oligonucleotide
aguugcaccaaggguccac

SEQ ID NO: 1082546 - RNA, 19 nt, Artificial Sequence
  Description of Artificial Sequence: Synthetic oligonucleotide
cagaucauauggacugcac

SEQ ID NO: 1082547 - RNA, 19 nt, Artificial Sequence
  Description of Artificial Sequence: Synthetic oligonucleotide
aguugacugcgaugaaaga

SEQ ID NO: 1082548 - RNA, 19 nt, Artificial Sequence
  Description of Artificial Sequence: Synthetic oligonucleotide
ccaccuaaaccucacuccg

SEQ ID NO: 1082549 - RNA, 19 nt, Artificial Sequence
  Description of Artificial Sequence: Synthetic oligonucleotide
caggaucgcaucgaaggcc

SEQ ID NO: 1082550 - RNA, 19 nt, Artificial Sequence
  Description of Artificial Sequence: Synthetic oligonucleotide
cacuccgguaccguagucg

SEQ ID NO: 1082551 - RNA, 19 nt, Artificial Sequence
  Description of Artificial Sequence: Synthetic oligonucleotide
uguuacugcuauugguguu

SEQ ID NO: 1082552 - RNA, 19 nt, Artificial Sequence
  Description of Artificial Sequence: Synthetic oligonucleotide
aucauauggacugcacagu

SEQ ID NO: 1082553 - RNA, 19 nt, Artificial Sequence
  Description of Artificial Sequence: Synthetic oligonucleotide
aagcgcacuugcacagggc

SEQ ID NO: 1082554 - RNA, 19 nt, Artificial Sequence
  Description of Artificial Sequence: Synthetic oligonucleotide
aggucucgcacuuuguguu

SEQ ID NO: 1082555 - RNA, 19 nt, Artificial Sequence
  Description of Artificial Sequence: Synthetic oligonucleotide
agcugcaugucuuggggau

SEQ ID NO: 1082556 - RNA, 19 nt, Artificial Sequence
  Description of Artificial Sequence: Synthetic oligonucleotide
auacaggccucagagcuca

SEQ ID NO: 1082557 - RNA, 19 nt, Artificial Sequence
  Description of Artificial Sequence: Synthetic oligonucleotide
cucccauagccagaaagug

SEQ ID NO: 1082558 - RNA, 19 nt, Artificial Sequence
  Description of Artificial Sequence: Synthetic oligonucleotide
ugauacgggacugcagagu

SEQ ID NO: 1082559 - RNA, 19 nt, Artificial Sequence
  Description of Artificial Sequence: Synthetic oligonucleotide
gaaccuagucuucccacaa

SEQ ID NO: 1082560 - RNA, 19 nt, Artificial Sequence
  Description of Artificial Sequence: Synthetic oligonucleotide
gugggcagagcuauugagc

SEQ ID NO: 1082561 - RNA, 19 nt, Artificial Sequence
  Description of Artificial Sequence: Synthetic oligonucleotide
acaugguccccuugaccag

SEQ ID NO: 1082562 - RNA, 19 nt, Artificial Sequence
  Description of Artificial Sequence: Synthetic oligonucleotide
agaaucaccagggcaagua

SEQ ID NO: 1082563 - RNA, 19 nt, Artificial Sequence
  Description of Artificial Sequence: Synthetic oligonucleotide
uagcugguaaggacauaga

SEQ ID NO: 1082564 - RNA, 19 nt, Artificial Sequence
  Description of Artificial Sequence: Synthetic oligonucleotide
agggcgacaucuugggcca

SEQ ID NO: 1082565 - RNA, 19 nt, Artificial Sequence
  Description of Artificial Sequence: Synthetic oligonucleotide
uuccuuaagcuggccaucu

SEQ ID NO: 1082566 - RNA, 19 nt, Artificial Sequence
  Description of Artificial Sequence: Synthetic oligonucleotide
cuucgcugucugaugguug

SEQ ID NO: 1082567 - RNA, 19 nt, Artificial Sequence
  Description of Artificial Sequence: Synthetic oligonucleotide
gaaguaggaucugucuauc

SEQ ID NO: 1082568 - RNA, 19 nt, Artificial Sequence
  Description of Artificial Sequence: Synthetic oligonucleotide
gguaaggacauagauccca

SEQ ID NO: 1082569 - RNA, 19 nt, Artificial Sequence
  Description of Artificial Sequence: Synthetic oligonucleotide
ucgcacuuuguguuugauc

SEQ ID NO: 1082570 - RNA, 19 nt, Artificial Sequence
  Description of Artificial Sequence: Synthetic oligonucleotide
ggacauucaucagguagcg

SEQ ID NO: 1082571 - RNA, 19 nt, Artificial Sequence
  Description of Artificial Sequence: Synthetic oligonucleotide
acaagcucauggaggcccc

SEQ ID NO: 1082572 - RNA, 19 nt, Artificial Sequence
  Description of Artificial Sequence: Synthetic oligonucleotide
ccuucaucggcacaggauc

SEQ ID NO: 1082573 - RNA, 19 nt, Artificial Sequence
  Description of Artificial Sequence: Synthetic oligonucleotide
accguagucgggagaaccg

SEQ ID NO: 1082574 - RNA, 19 nt, Artificial Sequence
  Description of Artificial Sequence: Synthetic oligonucleotide
ccgacaagcucauggaggc

SEQ ID NO: 1082575 - RNA, 19 nt, Artificial Sequence
  Description of Artificial Sequence: Synthetic oligonucleotide
aggagggcgccaccguuuc

SEQ ID NO: 1082576 - RNA, 19 nt, Artificial Sequence
  Description of Artificial Sequence: Synthetic oligonucleotide
uggucgcugucugagcugc

SEQ ID NO: 1082577 - RNA, 19 nt, Artificial Sequence
  Description of Artificial Sequence: Synthetic oligonucleotide
cuguggccaaucugguacc

SEQ ID NO: 1082578 - RNA, 19 nt, Artificial Sequence
  Description of Artificial Sequence: Synthetic oligonucleotide
ugguuccauuuucaaugac

SEQ ID NO: 1082579 - RNA, 19 nt, Artificial Sequence
  Description of Artificial Sequence: Synthetic oligonucleotide
cccaccuaaaccucacucc

SEQ ID NO: 1082580 - RNA, 19 nt, Artificial Sequence
  Description of Artificial Sequence: Synthetic oligonucleotide
cauagaucccagaggggca

SEQ ID NO: 1082581 - RNA, 19 nt, Artificial Sequence
  Description of Artificial Sequence: Synthetic oligonucleotide
cucccaguaggagucuucc

SEQ ID NO: 1082582 - RNA, 19 nt, Artificial Sequence
  Description of Artificial Sequence: Synthetic oligonucleotide
gaggguaguccaacuuucc

SEQ ID NO: 1082583 - RNA, 19 nt, Artificial Sequence
  Description of Artificial Sequence: Synthetic oligonucleotide
ugcacagggcaggagaaua

SEQ ID NO: 1082584 - RNA, 19 nt, Artificial Sequence
  Description of Artificial Sequence: Synthetic oligonucleotide
guuuguaguggccaaggau

SEQ ID NO: 1082585 - RNA, 19 nt, Artificial Sequence
  Description of Artificial Sequence: Synthetic oligonucleotide
cacgucaggcaccuggauc

SEQ ID NO: 1082586 - RNA, 19 nt, Artificial Sequence
  Description of Artificial Sequence: Synthetic oligonucleotide
cagcauagaccccguacug

SEQ ID NO: 1082587 - RNA, 19 nt, Artificial Sequence
  Description of Artificial Sequence: Synthetic oligonucleotide
cauuggugccgacaagcuc

SEQ ID NO: 1082588 - RNA, 19 nt, Artificial Sequence
  Description of Artificial Sequence: Synthetic oligonucleotide
caaauccuuggguauagcu

SEQ ID NO: 1082589 - RNA, 19 nt, Artificial Sequence
  Description of Artificial Sequence: Synthetic oligonucleotide
uucaucggcacaggaucug

SEQ ID NO: 1082590 - RNA, 19 nt, Artificial Sequence
  Description of Artificial Sequence: Synthetic oligonucleotide
uuggucgcugucugagcug

SEQ ID NO: 1082591 - RNA, 19 nt, Artificial Sequence
  Description of Artificial Sequence: Synthetic oligonucleotide
gccgacaagcucauggagg

SEQ ID NO: 1082592 - RNA, 19 nt, Artificial Sequence
  Description of Artificial Sequence: Synthetic oligonucleotide
cacacuuuacaagggcgac

SEQ ID NO: 1082593 - RNA, 19 nt, Artificial Sequence
  Description of Artificial Sequence: Synthetic oligonucleotide
ugucccuguuuacgucucc

SEQ ID NO: 1082594 - RNA, 19 nt, Artificial Sequence
  Description of Artificial Sequence: Synthetic oligonucleotide
gaguuguagucaagccucc

SEQ ID NO: 1082595 - RNA, 19 nt, Artificial Sequence
  Description of Artificial Sequence: Synthetic oligonucleotide
aucgcaucgaaggccacga

SEQ ID NO: 1082596 - RNA, 19 nt, Artificial Sequence
  Description of Artificial Sequence: Synthetic oligonucleotide
ucggucuggacaugggauu

SEQ ID NO: 1082597 - RNA, 19 nt, Artificial Sequence
  Description of Artificial Sequence: Synthetic oligonucleotide
uuuucaccguuggagucuc

SEQ ID NO: 1082598 - RNA, 19 nt, Artificial Sequence
  Description of Artificial Sequence: Synthetic oligonucleotide
ucucccaguaggagucuuc

SEQ ID NO: 1082599 - RNA, 19 nt, Artificial Sequence
  Description of Artificial Sequence: Synthetic oligonucleotide
agauagccccacugaccuc

SEQ ID NO: 1082600 - RNA, 19 nt, Artificial Sequence
  Description of Artificial Sequence: Synthetic oligonucleotide
gccagaaagugauacggga

SEQ ID NO: 1082601 - RNA, 19 nt, Artificial Sequence
  Description of Artificial Sequence: Synthetic oligonucleotide
auaaguugacugcgaugaa

SEQ ID NO: 1082602 - RNA, 19 nt, Artificial Sequence
  Description of Artificial Sequence: Synthetic oligonucleotide
guguuuucaccguuggagu

SEQ ID NO: 1082603 - RNA, 19 nt, Artificial Sequence
  Description of Artificial Sequence: Synthetic oligonucleotide
aggaucgcaucgaaggcca

SEQ ID NO: 1082604 - RNA, 19 nt, Artificial Sequence
  Description of Artificial Sequence: Synthetic oligonucleotide
guuugaucacagacaccag

SEQ ID NO: 1082605 - RNA, 19 nt, Artificial Sequence
  Description of Artificial Sequence: Synthetic oligonucleotide
cccugggacauucaucagg

SEQ ID NO: 1082606 - RNA, 19 nt, Artificial Sequence
  Description of Artificial Sequence: Synthetic oligonucleotide
agaacguccuggaucuugu

SEQ ID NO: 1082607 - RNA, 19 nt, Artificial Sequence
  Description of Artificial Sequence: Synthetic oligonucleotide
uugucccuguuuacgucuc

SEQ ID NO: 1082608 - RNA, 19 nt, Artificial Sequence
  Description of Artificial Sequence: Synthetic oligonucleotide
gcgaugaaagaaccuaguc

SEQ ID NO: 1082609 - RNA, 19 nt, Artificial Sequence
  Description of Artificial Sequence: Synthetic oligonucleotide
acacuuuacaagggcgaca

SEQ ID NO: 1082610 - RNA, 19 nt, Artificial Sequence
  Description of Artificial Sequence: Synthetic oligonucleotide
guugcaccaaggguccacc

SEQ ID NO: 1082611 - RNA, 19 nt, Artificial Sequence
  Description of Artificial Sequence: Synthetic oligonucleotide
uguggccaaucugguaccc

SEQ ID NO: 1082612 - RNA, 19 nt, Artificial Sequence
  Description of Artificial Sequence: Synthetic oligonucleotide
agaauacaugguacaggca

SEQ ID NO: 1082613 - RNA, 19 nt, Artificial Sequence
  Description of Artificial Sequence: Synthetic oligonucleotide
caaagcgcacuugcacagg

SEQ ID NO: 1082614 - RNA, 19 nt, Artificial Sequence
  Description of Artificial Sequence: Synthetic oligonucleotide
gaagccacaaagcgcacuu

SEQ ID NO: 1082615 - RNA, 19 nt, Artificial Sequence
  Description of Artificial Sequence: Synthetic oligonucleotide
auggaagcguucccaccca

SEQ ID NO: 1082616 - RNA, 19 nt, Artificial Sequence
  Description of Artificial Sequence: Synthetic oligonucleotide
agaagccacaaagcgcacu

SEQ ID NO: 1082617 - RNA, 19 nt, Artificial Sequence
  Description of Artificial Sequence: Synthetic oligonucleotide
caagggcgacaucuugggc

SEQ ID NO: 1082618 - RNA, 19 nt, Artificial Sequence
  Description of Artificial Sequence: Synthetic oligonucleotide
gucugguuuguaguggcca

SEQ ID NO: 1082619 - RNA, 19 nt, Artificial Sequence
  Description of Artificial Sequence: Synthetic oligonucleotide
gucgggagaaccggucccg

SEQ ID NO: 1082620 - RNA, 19 nt, Artificial Sequence
  Description of Artificial Sequence: Synthetic oligonucleotide
cugagaugaaggucggucu

SEQ ID NO: 1082621 - RNA, 19 nt, Artificial Sequence
  Description of Artificial Sequence: Synthetic oligonucleotide
cagacugccucuguggcca

SEQ ID NO: 1082622 - RNA, 19 nt, Artificial Sequence
  Description of Artificial Sequence: Synthetic oligonucleotide
cugggacaaggucucgcac

SEQ ID NO: 1082623 - RNA, 19 nt, Artificial Sequence
  Description of Artificial Sequence: Synthetic oligonucleotide
ccacaaagcgcacuugcac

SEQ ID NO: 1082624 - RNA, 19 nt, Artificial Sequence
  Description of Artificial Sequence: Synthetic oligonucleotide
cuugucccuguuuacgucu

SEQ ID NO: 1082625 - RNA, 19 nt, Artificial Sequence
  Description of Artificial Sequence: Synthetic oligonucleotide
caggagauuggaggugccc

SEQ ID NO: 1082626 - RNA, 19 nt, Artificial Sequence
  Description of Artificial Sequence: Synthetic oligonucleotide
agcucauggaggccccaga

SEQ ID NO: 1082627 - RNA, 19 nt, Artificial Sequence
  Description of Artificial Sequence: Synthetic oligonucleotide
cuuccuuaagcuggccauc

SEQ ID NO: 1082628 - RNA, 19 nt, Artificial Sequence
  Description of Artificial Sequence: Synthetic oligonucleotide
guucccacccaaacugcug

SEQ ID NO: 1082629 - RNA, 19 nt, Artificial Sequence
  Description of Artificial Sequence: Synthetic oligonucleotide
caccguuggagucucucca

SEQ ID NO: 1082630 - RNA, 19 nt, Artificial Sequence
  Description of Artificial Sequence: Synthetic oligonucleotide
accguuggagucucuccau

SEQ ID NO: 1082631 - RNA, 19 nt, Artificial Sequence
  Description of Artificial Sequence: Synthetic oligonucleotide
cuuggucgcugucugagcu

SEQ ID NO: 1082632 - RNA, 19 nt, Artificial Sequence
  Description of Artificial Sequence: Synthetic oligonucleotide
ccugagaugaaggucgguc

SEQ ID NO: 1082633 - RNA, 19 nt, Artificial Sequence
  Description of Artificial Sequence: Synthetic oligonucleotide
accggucccggauggcuug

SEQ ID NO: 1082634 - RNA, 19 nt, Artificial Sequence
  Description of Artificial Sequence: Synthetic oligonucleotide
ggugaaauuguuacugcua

SEQ ID NO: 1082635 - RNA, 19 nt, Artificial Sequence
  Description of Artificial Sequence: Synthetic oligonucleotide
gagggcgccaccguuucca

SEQ ID NO: 1082636 - RNA, 19 nt, Artificial Sequence
  Description of Artificial Sequence: Synthetic oligonucleotide
gucccuguuuacgucuccc

SEQ ID NO: 1082637 - RNA, 19 nt, Artificial Sequence
  Description of Artificial Sequence: Synthetic oligonucleotide
uggcggcuuggcucaaaca

SEQ ID NO: 1082638 - RNA, 19 nt, Artificial Sequence
  Description of Artificial Sequence: Synthetic oligonucleotide
gcaacauacaggccucaga

SEQ ID NO: 1082639 - RNA, 19 nt, Artificial Sequence
  Description of Artificial Sequence: Synthetic oligonucleotide
ggcuuguggauggugggcc

SEQ ID NO: 1082640 - RNA, 19 nt, Artificial Sequence
  Description of Artificial Sequence: Synthetic oligonucleotide
cuggccaucuuucccagua

SEQ ID NO: 1082641 - RNA, 19 nt, Artificial Sequence
  Description of Artificial Sequence: Synthetic oligonucleotide
accugggcaucagaucuug

SEQ ID NO: 1082642 - RNA, 19 nt, Artificial Sequence
  Description of Artificial Sequence: Synthetic oligonucleotide
cugcuauugguguuuuaua

SEQ ID NO: 1082643 - RNA, 19 nt, Artificial Sequence
  Description of Artificial Sequence: Synthetic oligonucleotide
guuguagucaagccuccau

SEQ ID NO: 1082644 - RNA, 19 nt, Artificial Sequence
  Description of Artificial Sequence: Synthetic oligonucleotide
cuccgguaccguagucggg

SEQ ID NO: 1082645 - RNA, 19 nt, Artificial Sequence
  Description of Artificial Sequence: Synthetic oligonucleotide
ggcuuggucgcugucugag

SEQ ID NO: 1082646 - RNA, 19 nt, Artificial Sequence
  Description of Artificial Sequence: Synthetic oligonucleotide
ggugaggaucaguaggucu

SEQ ID NO: 1082647 - RNA, 19 nt, Artificial Sequence
  Description of Artificial Sequence: Synthetic oligonucleotide
gaacguccuggaucuuguc

SEQ ID NO: 1082648 - RNA, 19 nt, Artificial Sequence
  Description of Artificial Sequence: Synthetic oligonucleotide
guuuucaccguuggagucu

SEQ ID NO: 1082649 - RNA, 19 nt, Artificial Sequence
  Description of Artificial Sequence: Synthetic oligonucleotide
cguacugagguccagaagu

SEQ ID NO: 1082650 - RNA, 19 nt, Artificial Sequence
  Description of Artificial Sequence: Synthetic oligonucleotide
agaaccugaguugcaccaa

SEQ ID NO: 1082651 - RNA, 19 nt, Artificial Sequence
  Description of Artificial Sequence: Synthetic oligonucleotide
gcggcuuggcucaaacagg

SEQ ID NO: 1082652 - RNA, 19 nt, Artificial Sequence
  Description of Artificial Sequence: Synthetic oligonucleotide
agcagagcgguggucugca

SEQ ID NO: 1082653 - RNA, 19 nt, Artificial Sequence
  Description of Artificial Sequence: Synthetic oligonucleotide
cccggugcugccugaauag

SEQ ID NO: 1082654 - RNA, 19 nt, Artificial Sequence
  Description of Artificial Sequence: Synthetic oligonucleotide
ggggcucaagauggaagcg

SEQ ID NO: 1082655 - RNA, 19 nt, Artificial Sequence
  Description of Artificial Sequence: Synthetic oligonucleotide
acuucgcugucugaugguu

SEQ ID NO: 1082656 - RNA, 19 nt, Artificial Sequence
  Description of Artificial Sequence: Synthetic oligonucleotide
ucuugggccacaggcccuc

SEQ ID NO: 1082657 - RNA, 19 nt, Artificial Sequence
  Description of Artificial Sequence: Synthetic oligonucleotide
gccaaucugguacccggug

SEQ ID NO: 1082658 - RNA, 19 nt, Artificial Sequence
  Description of Artificial Sequence: Synthetic oligonucleotide
ucacuccgguaccguaguc

SEQ ID NO: 1082659 - RNA, 19 nt, Artificial Sequence
  Description of Artificial Sequence: Synthetic oligonucleotide
gacauucaucagguagcga

SEQ ID NO: 1082660 - RNA, 19 nt, Artificial Sequence
  Description of Artificial Sequence: Synthetic oligonucleotide
aggcaggagauuggaggug

SEQ ID NO: 1082661 - RNA, 19 nt, Artificial Sequence
  Description of Artificial Sequence: Synthetic oligonucleotide
guuacugcuauugguguuu

SEQ ID NO: 1082662 - RNA, 19 nt, Artificial Sequence
  Description of Artificial Sequence: Synthetic oligonucleotide
ccacgauguuggcagacac

SEQ ID NO: 1082663 - RNA, 19 nt, Artificial Sequence
  Description of Artificial Sequence: Synthetic oligonucleotide
cacuuuacaagggcgacau

SEQ ID NO: 1082664 - RNA, 19 nt, Artificial Sequence
  Description of Artificial Sequence: Synthetic oligonucleotide
agguagcgaacugcuccag

SEQ ID NO: 1082665 - RNA, 19 nt, Artificial Sequence
  Description of Artificial Sequence: Synthetic oligonucleotide
uggcuuggucgcugucuga

SEQ ID NO: 1082666 - RNA, 19 nt, Artificial Sequence
  Description of Artificial Sequence: Synthetic oligonucleotide
caguaggagucuuccuuaa

SEQ ID NO: 1082667 - RNA, 19 nt, Artificial Sequence
  Description of Artificial Sequence: Synthetic oligonucleotide
auacgggacugcagaguug

SEQ ID NO: 1082668 - RNA, 19 nt, Artificial Sequence
  Description of Artificial Sequence: Synthetic oligonucleotide
gcacacuuuacaagggcga

SEQ ID NO: 1082669 - RNA, 19 nt, Artificial Sequence
  Description of Artificial Sequence: Synthetic oligonucleotide
uacugcuauugguguuuua

SEQ ID NO: 1082670 - RNA, 19 nt, Artificial Sequence
  Description of Artificial Sequence: Synthetic oligonucleotide
accucacuccgguaccgua

SEQ ID NO: 1082671 - RNA, 19 nt, Artificial Sequence
  Description of Artificial Sequence: Synthetic oligonucleotide
cgaugaaagaaccuagucu

SEQ ID NO: 1082672 - RNA, 19 nt, Artificial Sequence
  Description of Artificial Sequence: Synthetic oligonucleotide
cacccguucuggucacaug

SEQ ID NO: 1082673 - RNA, 19 nt, Artificial Sequence
  Description of Artificial Sequence: Synthetic oligonucleotide
gaaggucggucuggacaug

SEQ ID NO: 1082674 - RNA, 19 nt, Artificial Sequence
  Description of Artificial Sequence: Synthetic oligonucleotide
uuucaccguuggagucucu

SEQ ID NO: 1082675 - RNA, 19 nt, Artificial Sequence
  Description of Artificial Sequence: Synthetic oligonucleotide
ggaucuggugaaauuguua

SEQ ID NO: 1082676 - RNA, 19 nt, Artificial Sequence
  Description of Artificial Sequence: Synthetic oligonucleotide
guauagcugguaaggacau

SEQ ID NO: 1082677 - RNA, 19 nt, Artificial Sequence
  Description of Artificial Sequence: Synthetic oligonucleotide
gguagcgaacugcuccaga

SEQ ID NO: 1082678 - RNA, 19 nt, Artificial Sequence
  Description of Artificial Sequence: Synthetic oligonucleotide
cugaggguaguccaacuuu

SEQ ID NO: 1082679 - RNA, 19 nt, Artificial Sequence
  Description of Artificial Sequence: Synthetic oligonucleotide
gagcacccguucuggucac

SEQ ID NO: 1082680 - RNA, 19 nt, Artificial Sequence
  Description of Artificial Sequence: Synthetic oligonucleotide
guacugagguccagaagua

SEQ ID NO: 1082681 - RNA, 19 nt, Artificial Sequence
  Description of Artificial Sequence: Synthetic oligonucleotide
caugguccccuugaccaga

SEQ ID NO: 1082682 - RNA, 19 nt, Artificial Sequence
  Description of Artificial Sequence: Synthetic oligonucleotide
uacccggugcugccugaau

SEQ ID NO: 1082683 - RNA, 19 nt, Artificial Sequence
  Description of Artificial Sequence: Synthetic oligonucleotide
gacugcgaugaaagaaccu

SEQ ID NO: 1082684 - RNA, 19 nt, Artificial Sequence
  Description of Artificial Sequence: Synthetic oligonucleotide
uggucacauggaggagggc

SEQ ID NO: 1082685 - RNA, 19 nt, Artificial Sequence
  Description of Artificial Sequence: Synthetic oligonucleotide
ucgcaucgaaggccacgau

SEQ ID NO: 1082686 - RNA, 19 nt, Artificial Sequence
  Description of Artificial Sequence: Synthetic oligonucleotide
cgcaucgaaggccacgaug

SEQ ID NO: 1082687 - RNA, 19 nt, Artificial Sequence
  Description of Artificial Sequence: Synthetic oligonucleotide
cgcacuugcacagggcagg

SEQ ID NO: 1082688 - RNA, 19 nt, Artificial Sequence
  Description of Artificial Sequence: Synthetic oligonucleotide
cagagcucacaaggagcac

SEQ ID NO: 1082689 - RNA, 19 nt, Artificial Sequence
  Description of Artificial Sequence: Synthetic oligonucleotide
ccguagucgggagaaccgg

SEQ ID NO: 1082690 - RNA, 19 nt, Artificial Sequence
  Description of Artificial Sequence: Synthetic oligonucleotide
cuaucaaugcugguuccau

SEQ ID NO: 1082691 - RNA, 19 nt, Artificial Sequence
  Description of Artificial Sequence: Synthetic oligonucleotide
uucucccaguaggagucuu

SEQ ID NO: 1082692 - RNA, 19 nt, Artificial Sequence
  Description of Artificial Sequence: Synthetic oligonucleotide
ccaguaacucucucauaga

SEQ ID NO: 1082693 - RNA, 19 nt, Artificial Sequence
  Description of Artificial Sequence: Synthetic oligonucleotide
ccagaaguaggaucugucu

SEQ ID NO: 1082694 - RNA, 19 nt, Artificial Sequence
  Description of Artificial Sequence: Synthetic oligonucleotide
gucggucuggacaugggau

SEQ ID NO: 1082695 - RNA, 19 nt, Artificial Sequence
  Description of Artificial Sequence: Synthetic oligonucleotide
aucuugggccacaggcccu

SEQ ID NO: 1082696 - RNA, 19 nt, Artificial Sequence
  Description of Artificial Sequence: Synthetic oligonucleotide
ccguacugagguccagaag

SEQ ID NO: 1082697 - RNA, 19 nt, Artificial Sequence
  Description of Artificial Sequence: Synthetic oligonucleotide
cccgggugaggaucaguag

SEQ ID NO: 1082698 - RNA, 19 nt, Artificial Sequence
  Description of Artificial Sequence: Synthetic oligonucleotide
ccuuggguauagcugguaa

SEQ ID NO: 1082699 - RNA, 19 nt, Artificial Sequence
  Description of Artificial Sequence: Synthetic oligonucleotide
ccugaguugcaccaagggu

SEQ ID NO: 1082700 - RNA, 19 nt, Artificial Sequence
  Description of Artificial Sequence: Synthetic oligonucleotide
ugguccccuugaccagauc

SEQ ID NO: 1082701 - RNA, 19 nt, Artificial Sequence
  Description of Artificial Sequence: Synthetic oligonucleotide
gcaucagaucuuguccauc

SEQ ID NO: 1082702 - RNA, 19 nt, Artificial Sequence
  Description of Artificial Sequence: Synthetic oligonucleotide
cagcugcgcccaccuaaac

SEQ ID NO: 1082703 - RNA, 19 nt, Artificial Sequence
  Description of Artificial Sequence: Synthetic oligonucleotide
guaccguagucgggagaac

SEQ ID NO: 1082704 - RNA, 19 nt, Artificial Sequence
  Description of Artificial Sequence: Synthetic oligonucleotide
gaccccguacugaggucca

SEQ ID NO: 1082705 - RNA, 19 nt, Artificial Sequence
  Description of Artificial Sequence: Synthetic oligonucleotide
ccguuggagucucuccaug

SEQ ID NO: 1082706 - RNA, 19 nt, Artificial Sequence
  Description of Artificial Sequence: Synthetic oligonucleotide
ggggauccaucucauuggu

SEQ ID NO: 1082707 - RNA, 19 nt, Artificial Sequence
  Description of Artificial Sequence: Synthetic oligonucleotide
gcgcacuugcacagggcag

SEQ ID NO: 1082708 - RNA, 19 nt, Artificial Sequence
  Description of Artificial Sequence: Synthetic oligonucleotide
ugggcccgucaggagcaca

SEQ ID NO: 1082709 - RNA, 19 nt, Artificial Sequence
  Description of Artificial Sequence: Synthetic oligonucleotide
gcguucccacccaaacugc

SEQ ID NO: 1082710 - RNA, 19 nt, Artificial Sequence
  Description of Artificial Sequence: Synthetic oligonucleotide
gccugggacaaggucucgc

SEQ ID NO: 1082711 - RNA, 19 nt, Artificial Sequence
  Description of Artificial Sequence: Synthetic oligonucleotide
ccagaucauauggacugca

SEQ ID NO: 1082712 - RNA, 19 nt, Artificial Sequence
  Description of Artificial Sequence: Synthetic oligonucleotide
cccacccaaacugcuggag

SEQ ID NO: 1082713 - RNA, 19 nt, Artificial Sequence
  Description of Artificial Sequence: Synthetic oligonucleotide
caaugaccacagccaaggu

SEQ ID NO: 1082714 - RNA, 19 nt, Artificial Sequence
  Description of Artificial Sequence: Synthetic oligonucleotide
accccguacugagguccag

SEQ ID NO: 1082715 - RNA, 19 nt, Artificial Sequence
  Description of Artificial Sequence: Synthetic oligonucleotide
auagccccacugaccuccu

SEQ ID NO: 1082716 - RNA, 19 nt, Artificial Sequence
  Description of Artificial Sequence: Synthetic oligonucleotide
cacuucgcugucugauggu

SEQ ID NO: 1082717 - RNA, 19 nt, Artificial Sequence
  Description of Artificial Sequence: Synthetic oligonucleotide
gggcucaagauggaagcgu

SEQ ID NO: 1082718 - RNA, 19 nt, Artificial Sequence
  Description of Artificial Sequence: Synthetic oligonucleotide
ccgguaccguagucgggag

SEQ ID NO: 1082719 - RNA, 19 nt, Artificial Sequence
  Description of Artificial Sequence: Synthetic oligonucleotide
gguacccggugcugccuga

SEQ ID NO: 1082720 - RNA, 19 nt, Artificial Sequence
  Description of Artificial Sequence: Synthetic oligonucleotide
ggcaucagaucuuguccau

SEQ ID NO: 1082721 - RNA, 19 nt, Artificial Sequence
  Description of Artificial Sequence: Synthetic oligonucleotide
ggagggcgccaccguuucc

SEQ ID NO: 1082722 - RNA, 19 nt, Artificial Sequence
  Description of Artificial Sequence: Synthetic oligonucleotide
ggaagcguucccacccaaa

SEQ ID NO: 1082723 - RNA, 19 nt, Artificial Sequence
  Description of Artificial Sequence: Synthetic oligonucleotide
gcccugugaauaaguugac

SEQ ID NO: 1082724 - RNA, 19 nt, Artificial Sequence
  Description of Artificial Sequence: Synthetic oligonucleotide
uggugccgacaagcucaug

SEQ ID NO: 1082725 - RNA, 19 nt, Artificial Sequence
  Description of Artificial Sequence: Synthetic oligonucleotide
caagcucauggaggcccca

SEQ ID NO: 1082726 - RNA, 19 nt, Artificial Sequence
  Description of Artificial Sequence: Synthetic oligonucleotide
cuuggggauccaucucauu

SEQ ID NO: 1082727 - RNA, 19 nt, Artificial Sequence
  Description of Artificial Sequence: Synthetic oligonucleotide
agagaacguccuggaucuu

SEQ ID NO: 1082728 - RNA, 19 nt, Artificial Sequence
  Description of Artificial Sequence: Synthetic oligonucleotide
guacccggugcugccugaa

SEQ ID NO: 1082729 - RNA, 19 nt, Artificial Sequence
  Description of Artificial Sequence: Synthetic oligonucleotide
ccuaaaccucacuccggua

SEQ ID NO: 1082730 - RNA, 19 nt, Artificial Sequence
  Description of Artificial Sequence: Synthetic oligonucleotide
ccagcugcgcccaccuaaa

SEQ ID NO: 1082731 - RNA, 19 nt, Artificial Sequence
  Description of Artificial Sequence: Synthetic oligonucleotide
cagaaucaccagggcaagu

SEQ ID NO: 1082732 - RNA, 19 nt, Artificial Sequence
  Description of Artificial Sequence: Synthetic oligonucleotide
gucuucccacaaggauaca

SEQ ID NO: 1082733 - RNA, 19 nt, Artificial Sequence
  Description of Artificial Sequence: Synthetic oligonucleotide
ggaucgcaucgaaggccac

SEQ ID NO: 1082734 - RNA, 19 nt, Artificial Sequence
  Description of Artificial Sequence: Synthetic oligonucleotide
gccuucaucggcacaggau

SEQ ID NO: 1082735 - RNA, 19 nt, Artificial Sequence
  Description of Artificial Sequence: Synthetic oligonucleotide
caucgaaggccacgauguu

SEQ ID NO: 1082736 - RNA, 19 nt, Artificial Sequence
  Description of Artificial Sequence: Synthetic oligonucleotide
ggucucgcacuuuguguuu

SEQ ID NO: 1082737 - RNA, 19 nt, Artificial Sequence
  Description of Artificial Sequence: Synthetic oligonucleotide
ccccuugaccagaucauau

SEQ ID NO: 1082738 - RNA, 19 nt, Artificial Sequence
  Description of Artificial Sequence: Synthetic oligonucleotide
cgacaagcucauggaggcc

SEQ ID NO: 1082739 - RNA, 19 nt, Artificial Sequence
  Description of Artificial Sequence: Synthetic oligonucleotide
cugggcccgucaggagcac

SEQ ID NO: 1082740 - RNA, 19 nt, Artificial Sequence
  Description of Artificial Sequence: Synthetic oligonucleotide
cauccacgucaggcaccug

SEQ ID NO: 1082741 - RNA, 19 nt, Artificial Sequence
  Description of Artificial Sequence: Synthetic oligonucleotide
gggcgccaccguuuccauc

SEQ ID NO: 1082742 - RNA, 19 nt, Artificial Sequence
  Description of Artificial Sequence: Synthetic oligonucleotide
ggcccucuccccagagcac

SEQ ID NO: 1082743 - RNA, 19 nt, Artificial Sequence
  Description of Artificial Sequence: Synthetic oligonucleotide
gcgcccaccuaaaccucac

SEQ ID NO: 1082744 - RNA, 19 nt, Artificial Sequence
  Description of Artificial Sequence: Synthetic oligonucleotide
cucgcacuuuguguuugau

SEQ ID NO: 1082745 - RNA, 19 nt, Artificial Sequence
  Description of Artificial Sequence: Synthetic oligonucleotide
cccuguuuacgucucccau

SEQ ID NO: 1082746 - RNA, 19 nt, Artificial Sequence
  Description of Artificial Sequence: Synthetic oligonucleotide
ccccucccgggugaggauc

SEQ ID NO: 1082747 - RNA, 19 nt, Artificial Sequence
  Description of Artificial Sequence: Synthetic oligonucleotide
cguagucgggagaaccggu

SEQ ID NO: 1082748 - RNA, 19 nt, Artificial Sequence
  Description of Artificial Sequence: Synthetic oligonucleotide
cccugugaauaaguugacu

SEQ ID NO: 1082749 - RNA, 19 nt, Artificial Sequence
  Description of Artificial Sequence: Synthetic oligonucleotide
cguucccacccaaacugcu

SEQ ID NO: 1082750 - RNA, 19 nt, Artificial Sequence
  Description of Artificial Sequence: Synthetic oligonucleotide
acgggacugcagaguugua

SEQ ID NO: 1082751 - RNA, 19 nt, Artificial Sequence
  Description of Artificial Sequence: Synthetic oligonucleotide
gcgccaccguuuccaucca

SEQ ID NO: 1082752 - RNA, 19 nt, Artificial Sequence
  Description of Artificial Sequence: Synthetic oligonucleotide
gcuggccaucuuucccagu

SEQ ID NO: 1082753 - RNA, 19 nt, Artificial Sequence
  Description of Artificial Sequence: Synthetic oligonucleotide
cgggagaaccggucccgga

SEQ ID NO: 1082754 - RNA, 19 nt, Artificial Sequence
  Description of Artificial Sequence: Synthetic oligonucleotide
cgccaccguuuccauccac

SEQ ID NO: 1082755 - RNA, 19 nt, Artificial Sequence
  Description of Artificial Sequence: Synthetic oligonucleotide
cggugcugccugaauagau

SEQ ID NO: 1082756 - RNA, 19 nt, Artificial Sequence
  Description of Artificial Sequence: Synthetic oligonucleotide
cggucuggacaugggauua

SEQ ID NO: 1082757 - RNA, 19 nt, Artificial Sequence
  Description of Artificial Sequence: Synthetic oligonucleotide
gggcgacaucuugggccac

SEQ ID NO: 1082758 - RNA, 19 nt, Artificial Sequence
  Description of Artificial Sequence: Synthetic oligonucleotide
ggcuuggcucaaacaggau

SEQ ID NO: 1082759 - RNA, 19 nt, Artificial Sequence
  Description of Artificial Sequence: Synthetic oligonucleotide
ggcccgucaggagcacaua

SEQ ID NO: 1082760 - RNA, 19 nt, Artificial Sequence
  Description of Artificial Sequence: Synthetic oligonucleotide
gcauggcggcuuggcucaa

SEQ ID NO: 1082761 - RNA, 19 nt, Artificial Sequence
  Description of Artificial Sequence: Synthetic oligonucleotide
cccggauggcuuggucgcu

SEQ ID NO: 1082762 - RNA, 19 nt, Artificial Sequence
  Description of Artificial Sequence: Synthetic oligonucleotide
aaaaucgagccuuuaacgc

SEQ ID NO: 1082763 - RNA, 19 nt, Artificial Sequence
  Description of Artificial Sequence: Synthetic oligonucleotide
uauuauauuauauauauau

SEQ ID NO: 1082764 - RNA, 19 nt, Artificial Sequence
  Description of Artificial Sequence: Synthetic oligonucleotide
auaacaacaagcaugacgc

SEQ ID NO: 1082765 - RNA, 19 nt, Artificial Sequence
  Description of Artificial Sequence: Synthetic oligonucleotide
uauauuauauuauauauau

SEQ ID NO: 1082766 - RNA, 19 nt, Artificial Sequence
  Description of Artificial Sequence: Synthetic oligonucleotide
uauauauauauuuauauau

SEQ ID NO: 1082767 - RNA, 19 nt, Artificial Sequence
  Description of Artificial Sequence: Synthetic oligonucleotide
uuugugacgaaaauguagg

SEQ ID NO: 1082768 - RNA, 19 nt, Artificial Sequence
  Description of Artificial Sequence: Synthetic oligonucleotide
uuuauauuauauuauauau

SEQ ID NO: 1082769 - RNA, 19 nt, Artificial Sequence
  Description of Artificial Sequence: Synthetic oligonucleotide
agaacuuucgcauucuccc

SEQ ID NO: 1082770 - RNA, 19 nt, Artificial Sequence
  Description of Artificial Sequence: Synthetic oligonucleotide
uuauauuauauauauauuu

SEQ ID NO: 1082771 - RNA, 19 nt, Artificial Sequence
  Description of Artificial Sequence: Synthetic oligonucleotide
auuauauauauauuuauau

SEQ ID NO: 1082772 - RNA, 19 nt, Artificial Sequence
  Description of Artificial Sequence: Synthetic oligonucleotide
uauuacagcauccuucggg

SEQ ID NO: 1082773 - RNA, 19 nt, Artificial Sequence
  Description of Artificial Sequence: Synthetic oligonucleotide
agaagcgacagucacauuc

SEQ ID NO: 1082774 - RNA, 19 nt, Artificial Sequence
  Description of Artificial Sequence: Synthetic oligonucleotide
cauucauugcagaagaagg

SEQ ID NO: 1082775 - RNA, 19 nt, Artificial Sequence
  Description of Artificial Sequence: Synthetic oligonucleotide
aguauuacagcauccuucg

SEQ ID NO: 1082776 - RNA, 19 nt, Artificial Sequence
  Description of Artificial Sequence: Synthetic oligonucleotide
uuugauauagaaaaugauu

SEQ ID NO: 1082777 - RNA, 19 nt, Artificial Sequence
  Description of Artificial Sequence: Synthetic oligonucleotide
uauauuauauauauauuua

SEQ ID NO: 1082778 - RNA, 19 nt, Artificial Sequence
  Description of Artificial Sequence: Synthetic oligonucleotide
acaaaaucgagccuuuaac

SEQ ID NO: 1082779 - RNA, 19 nt, Artificial Sequence
  Description of Artificial Sequence: Synthetic oligonucleotide
uucuuacuuauacagacgc

SEQ ID NO: 1082780 - RNA, 19 nt, Artificial Sequence
  Description of Artificial Sequence: Synthetic oligonucleotide
acagauuucacagggauac

SEQ ID NO: 1082781 - RNA, 19 nt, Artificial Sequence
  Description of Artificial Sequence: Synthetic oligonucleotide
ucugucuacacuucaaaag

SEQ ID NO: 1082782 - RNA, 19 nt, Artificial Sequence
  Description of Artificial Sequence: Synthetic oligonucleotide
ugucacaucagaacuuucg

SEQ ID NO: 1082783 - RNA, 19 nt, Artificial Sequence
  Description of Artificial Sequence: Synthetic oligonucleotide
uuuacaacgcaauaaugca

SEQ ID NO: 1082784 - RNA, 19 nt, Artificial Sequence
  Description of Artificial Sequence: Synthetic oligonucleotide
uuaguuagugacaacuuca

SEQ ID NO: 1082785 - RNA, 19 nt, Artificial Sequence
  Description of Artificial Sequence: Synthetic oligonucleotide
gacgcaauacuuaaaauag

SEQ ID NO: 1082786 - RNA, 19 nt, Artificial Sequence
  Description of Artificial Sequence: Synthetic oligonucleotide
agauguuacagcgauaggg

SEQ ID NO: 1082787 - RNA, 19 nt, Artificial Sequence
  Description of Artificial Sequence: Synthetic oligonucleotide
caaaaucgagccuuuaacg

SEQ ID NO: 1082788 - RNA, 19 nt, Artificial Sequence
  Description of Artificial Sequence: Synthetic oligonucleotide
uauauauauuuauauauuu

SEQ ID NO: 1082789 - RNA, 19 nt, Artificial Sequence
  Description of Artificial Sequence: Synthetic oligonucleotide
aacgcaauaaugcaguuua

SEQ ID NO: 1082790 - RNA, 19 nt, Artificial Sequence
  Description of Artificial Sequence: Synthetic oligonucleotide
aacuucaagucccuguguc

SEQ ID NO: 1082791 - RNA, 19 nt, Artificial Sequence
  Description of Artificial Sequence: Synthetic oligonucleotide
uauuauauauauauuuaua

SEQ ID NO: 1082792 - RNA, 19 nt, Artificial Sequence
  Description of Artificial Sequence: Synthetic oligonucleotide
uguaaaguauuacagcauc

SEQ ID NO: 1082793 - RNA, 19 nt, Artificial Sequence
  Description of Artificial Sequence: Synthetic oligonucleotide
aaugucuuauggcagugug

SEQ ID NO: 1082794 - RNA, 19 nt, Artificial Sequence
  Description of Artificial Sequence: Synthetic oligonucleotide
uuauauuauauuauauaua

SEQ ID NO: 1082795 - RNA, 19 nt, Artificial Sequence
  Description of Artificial Sequence: Synthetic oligonucleotide
uuauauauauauuuauaua

SEQ ID NO: 1082796 - RNA, 19 nt, Artificial Sequence
  Description of Artificial Sequence: Synthetic oligonucleotide
uuagugacaacuucaaguc

SEQ ID NO: 1082797 - RNA, 19 nt, Artificial Sequence
  Description of Artificial Sequence: Synthetic oligonucleotide
ucuuaaugucuuauggcag

SEQ ID NO: 1082798 - RNA, 19 nt, Artificial Sequence
  Description of Artificial Sequence: Synthetic oligonucleotide
uuugccuuacacauaggag

SEQ ID NO: 1082799 - RNA, 19 nt, Artificial Sequence
  Description of Artificial Sequence: Synthetic oligonucleotide
uugccuuacacauaggaga

SEQ ID NO: 1082800 - RNA, 19 nt, Artificial Sequence
  Description of Artificial Sequence: Synthetic oligonucleotide
ugucuuauggcaguguggg

SEQ ID NO: 1082801 - RNA, 19 nt, Artificial Sequence
  Description of Artificial Sequence: Synthetic oligonucleotide
auauuauauauauauuuau

SEQ ID NO: 1082802 - RNA, 19 nt, Artificial Sequence
  Description of Artificial Sequence: Synthetic oligonucleotide
uguaccuugguguugguga

SEQ ID NO: 1082803 - RNA, 19 nt, Artificial Sequence
  Description of Artificial Sequence: Synthetic oligonucleotide
ugucuacacuucaaaaggg

SEQ ID NO: 1082804 - RNA, 19 nt, Artificial Sequence
  Description of Artificial Sequence: Synthetic oligonucleotide
uuagacacagccaaacccu

SEQ ID NO: 1082805 - RNA, 19 nt, Artificial Sequence
  Description of Artificial Sequence: Synthetic oligonucleotide
guugcaaucugucacauca

SEQ ID NO: 1082806 - RNA, 19 nt, Artificial Sequence
  Description of Artificial Sequence: Synthetic oligonucleotide
agggauacggcuucucucc

SEQ ID NO: 1082807 - RNA, 19 nt, Artificial Sequence
  Description of Artificial Sequence: Synthetic oligonucleotide
cuaugauuugcacuagugg

SEQ ID NO: 1082808 - RNA, 19 nt, Artificial Sequence
  Description of Artificial Sequence: Synthetic oligonucleotide
uuucucaauagauucucag

SEQ ID NO: 1082809 - RNA, 19 nt, Artificial Sequence
  Description of Artificial Sequence: Synthetic oligonucleotide
uuguaaauuguaaaccuuc

SEQ ID NO: 1082810 - RNA, 19 nt, Artificial Sequence
  Description of Artificial Sequence: Synthetic oligonucleotide
uuacaacgcaauaaugcag

SEQ ID NO: 1082811 - RNA, 19 nt, Artificial Sequence
  Description of Artificial Sequence: Synthetic oligonucleotide
uguaaauuguaaaccuuca

SEQ ID NO: 1082812 - RNA, 19 nt, Artificial Sequence
  Description of Artificial Sequence: Synthetic oligonucleotide
aaaucgagccuuuaacgca

SEQ ID NO: 1082813 - RNA, 19 nt, Artificial Sequence
  Description of Artificial Sequence: Synthetic oligonucleotide
acagcuagaauccgaguac

SEQ ID NO: 1082814 - RNA, 19 nt, Artificial Sequence
  Description of Artificial Sequence: Synthetic oligonucleotide
uacgguuuaucgcugugcg

SEQ ID NO: 1082815 - RNA, 19 nt, Artificial Sequence
  Description of Artificial Sequence: Synthetic oligonucleotide
gcagauacaaaaucgagcc

SEQ ID NO: 1082816 - RNA, 19 nt, Artificial Sequence
  Description of Artificial Sequence: Synthetic oligonucleotide
aguacucugacugagucuc

SEQ ID NO: 1082817 - RNA, 19 nt, Artificial Sequence
  Description of Artificial Sequence: Synthetic oligonucleotide
aagguuuacauuccucgug

SEQ ID NO: 1082818 - RNA, 19 nt, Artificial Sequence
  Description of Artificial Sequence: Synthetic oligonucleotide
acuuguacgguuuaucgcu

SEQ ID NO: 1082819 - RNA, 19 nt, Artificial Sequence
  Description of Artificial Sequence: Synthetic oligonucleotide
uauuguaccuugguguugg

SEQ ID NO: 1082820 - RNA, 19 nt, Artificial Sequence
  Description of Artificial Sequence: Synthetic oligonucleotide
uacaacgcaauaaugcagu

SEQ ID NO: 1082821 - RNA, 19 nt, Artificial Sequence
  Description of Artificial Sequence: Synthetic oligonucleotide
ucaaacguucccaaagaga

SEQ ID NO: 1082822 - RNA, 19 nt, Artificial Sequence
  Description of Artificial Sequence: Synthetic oligonucleotide
uccaucguugaaaacuucc

SEQ ID NO: 1082823 - RNA, 19 nt, Artificial Sequence
  Description of Artificial Sequence: Synthetic oligonucleotide
agcgauaggguuucucacc

SEQ ID NO: 1082824 - RNA, 19 nt, Artificial Sequence
  Description of Artificial Sequence: Synthetic oligonucleotide
ucgagugugggucuucagg

SEQ ID NO: 1082825 - RNA, 19 nt, Artificial Sequence
  Description of Artificial Sequence: Synthetic oligonucleotide
ucuacacuucaaaagggga

SEQ ID NO: 1082826 - RNA, 19 nt, Artificial Sequence
  Description of Artificial Sequence: Synthetic oligonucleotide
aguuuagacacagccaaac

SEQ ID NO: 1082827 - RNA, 19 nt, Artificial Sequence
  Description of Artificial Sequence: Synthetic oligonucleotide
acgaaaauguagguuacac

SEQ ID NO: 1082828 - RNA, 19 nt, Artificial Sequence
  Description of Artificial Sequence: Synthetic oligonucleotide
uuauacagacgcaauacuu

SEQ ID NO: 1082829 - RNA, 19 nt, Artificial Sequence
  Description of Artificial Sequence: Synthetic oligonucleotide
aaagagaguuuaguuagug

SEQ ID NO: 1082830 - RNA, 19 nt, Artificial Sequence
  Description of Artificial Sequence: Synthetic oligonucleotide
ugaacugcgcuccacagau

SEQ ID NO: 1082831 - RNA, 19 nt, Artificial Sequence
  Description of Artificial Sequence: Synthetic oligonucleotide
aagagaguuuaguuaguga

SEQ ID NO: 1082832 - RNA, 19 nt, Artificial Sequence
  Description of Artificial Sequence: Synthetic oligonucleotide
aagugcucuuucucaauag

SEQ ID NO: 1082833 - RNA, 19 nt, Artificial Sequence
  Description of Artificial Sequence: Synthetic oligonucleotide
agacgcaauacuuaaaaua

SEQ ID NO: 1082834 - RNA, 19 nt, Artificial Sequence
  Description of Artificial Sequence: Synthetic oligonucleotide
uacacugaggcauuuuaga

SEQ ID NO: 1082835 - RNA, 19 nt, Artificial Sequence
  Description of Artificial Sequence: Synthetic oligonucleotide
ucguugaaaacuuccguga

SEQ ID NO: 1082836 - RNA, 19 nt, Artificial Sequence
  Description of Artificial Sequence: Synthetic oligonucleotide
uuuguaaauuguaaaccuu

SEQ ID NO: 1082837 - RNA, 19 nt, Artificial Sequence
  Description of Artificial Sequence: Synthetic oligonucleotide
ucguguugcaaucugucac

SEQ ID NO: 1082838 - RNA, 19 nt, Artificial Sequence
  Description of Artificial Sequence: Synthetic oligonucleotide
uugcacuaguggaugagag

SEQ ID NO: 1082839 - RNA, 19 nt, Artificial Sequence
  Description of Artificial Sequence: Synthetic oligonucleotide
uuuucgcugacaugguuug

SEQ ID NO: 1082840 - RNA, 19 nt, Artificial Sequence
  Description of Artificial Sequence: Synthetic oligonucleotide
uggaacaaaaguauacauu

SEQ ID NO: 1082841 - RNA, 19 nt, Artificial Sequence
  Description of Artificial Sequence: Synthetic oligonucleotide
uguagguuacacuucucac

SEQ ID NO: 1082842 - RNA, 19 nt, Artificial Sequence
  Description of Artificial Sequence: Synthetic oligonucleotide
uacaaaaucgagccuuuaa

SEQ ID NO: 1082843 - RNA, 19 nt, Artificial Sequence
  Description of Artificial Sequence: Synthetic oligonucleotide
ugacgcacaaugugggagg

SEQ ID NO: 1082844 - RNA, 19 nt, Artificial Sequence
  Description of Artificial Sequence: Synthetic oligonucleotide
gcgacagucacauucauug

SEQ ID NO: 1082845 - RNA, 19 nt, Artificial Sequence
  Description of Artificial Sequence: Synthetic oligonucleotide
uuuaacgcaguuuuauauu

SEQ ID NO: 1082846 - RNA, 19 nt, Artificial Sequence
  Description of Artificial Sequence: Synthetic oligonucleotide
ucguccaucguugaaaacu

SEQ ID NO: 1082847 - RNA, 19 nt, Artificial Sequence
  Description of Artificial Sequence: Synthetic oligonucleotide
uuaacgcaguuuuauauuu

SEQ ID NO: 1082848 - RNA, 19 nt, Artificial Sequence
  Description of Artificial Sequence: Synthetic oligonucleotide
uucaaaaggggauggcgca

SEQ ID NO: 1082849 - RNA, 19 nt, Artificial Sequence
  Description of Artificial Sequence: Synthetic oligonucleotide
caugggaugaccuuuguaa

SEQ ID NO: 1082850 - RNA, 19 nt, Artificial Sequence
  Description of Artificial Sequence: Synthetic oligonucleotide
aacuuucgcauucuccccu

SEQ ID NO: 1082851 - RNA, 19 nt, Artificial Sequence
  Description of Artificial Sequence: Synthetic oligonucleotide
ugggaugaccuuuguaaag

SEQ ID NO: 1082852 - RNA, 19 nt, Artificial Sequence
  Description of Artificial Sequence: Synthetic oligonucleotide
auguagguuacacuucuca

SEQ ID NO: 1082853 - RNA, 19 nt, Artificial Sequence
  Description of Artificial Sequence: Synthetic oligonucleotide
gcaauaaugcaguuuagac

SEQ ID NO: 1082854 - RNA, 19 nt, Artificial Sequence
  Description of Artificial Sequence: Synthetic oligonucleotide
aaucgagccuuuaacgcag

SEQ ID NO: 1082855 - RNA, 19 nt, Artificial Sequence
  Description of Artificial Sequence: Synthetic oligonucleotide
agcggucacacuuguacgg

SEQ ID NO: 1082856 - RNA, 19 nt, Artificial Sequence
  Description of Artificial Sequence: Synthetic oligonucleotide
ucaacguuuuauucuuaug

SEQ ID NO: 1082857 - RNA, 19 nt, Artificial Sequence
  Description of Artificial Sequence: Synthetic oligonucleotide
guaaauuguaaaccuucac

SEQ ID NO: 1082858 - RNA, 19 nt, Artificial Sequence
  Description of Artificial Sequence: Synthetic oligonucleotide
gugacgaaaauguagguua

SEQ ID NO: 1082859 - RNA, 19 nt, Artificial Sequence
  Description of Artificial Sequence: Synthetic oligonucleotide
aaaagagucaacacuccau

SEQ ID NO: 1082860 - RNA, 19 nt, Artificial Sequence
  Description of Artificial Sequence: Synthetic oligonucleotide
acagcgauaggguuucuca

SEQ ID NO: 1082861 - RNA, 19 nt, Artificial Sequence
  Description of Artificial Sequence: Synthetic oligonucleotide
agguuuacauuccucgugu

SEQ ID NO: 1082862 - RNA, 19 nt, Artificial Sequence
  Description of Artificial Sequence: Synthetic oligonucleotide
guuuagacacagccaaacc

SEQ ID NO: 1082863 - RNA, 19 nt, Artificial Sequence
  Description of Artificial Sequence: Synthetic oligonucleotide
uagaauccgaguacucuga

SEQ ID NO: 1082864 - RNA, 19 nt, Artificial Sequence
  Description of Artificial Sequence: Synthetic oligonucleotide
aaucuggccccacagguuu

SEQ ID NO: 1082865 - RNA, 19 nt, Artificial Sequence
  Description of Artificial Sequence: Synthetic oligonucleotide
guuugccuuacacauagga

SEQ ID NO: 1082866 - RNA, 19 nt, Artificial Sequence
  Description of Artificial Sequence: Synthetic oligonucleotide
gagugaauucgaguguggg

SEQ ID NO: 1082867 - RNA, 19 nt, Artificial Sequence
  Description of Artificial Sequence: Synthetic oligonucleotide
cugcagauacaaaaucgag

SEQ ID NO: 1082868 - RNA, 19 nt, Artificial Sequence
  Description of Artificial Sequence: Synthetic oligonucleotide
ugauuugcacuaguggaug

SEQ ID NO: 1082869 - RNA, 19 nt, Artificial Sequence
  Description of Artificial Sequence: Synthetic oligonucleotide
guagguuacacuucucaca

SEQ ID NO: 1082870 - RNA, 19 nt, Artificial Sequence
  Description of Artificial Sequence: Synthetic oligonucleotide
agucaaacguucccaaaga

SEQ ID NO: 1082871 - RNA, 19 nt, Artificial Sequence
  Description of Artificial Sequence: Synthetic oligonucleotide
agaauccgaguacucugac

SEQ ID NO: 1082872 - RNA, 19 nt, Artificial Sequence
  Description of Artificial Sequence: Synthetic oligonucleotide
uucggggagggucugagaa

SEQ ID NO: 1082873 - RNA, 19 nt, Artificial Sequence
  Description of Artificial Sequence: Synthetic oligonucleotide
auauauauauuuauauauu

SEQ ID NO: 1082874 - RNA, 19 nt, Artificial Sequence
  Description of Artificial Sequence: Synthetic oligonucleotide
agugaauucgagugugggu

SEQ ID NO: 1082875 - RNA, 19 nt, Artificial Sequence
  Description of Artificial Sequence: Synthetic oligonucleotide
gucaaacguucccaaagag

SEQ ID NO: 1082876 - RNA, 19 nt, Artificial Sequence
  Description of Artificial Sequence: Synthetic oligonucleotide
ugccuuacacauaggagaa

SEQ ID NO: 1082877 - RNA, 19 nt, Artificial Sequence
  Description of Artificial Sequence: Synthetic oligonucleotide
gaacuuucgcauucucccc

SEQ ID NO: 1082878 - RNA, 19 nt, Artificial Sequence
  Description of Artificial Sequence: Synthetic oligonucleotide
gugaauucgaguguggguc

SEQ ID NO: 1082879 - RNA, 19 nt, Artificial Sequence
  Description of Artificial Sequence: Synthetic oligonucleotide
acuaugauuugcacuagug

SEQ ID NO: 1082880 - RNA, 19 nt, Artificial Sequence
  Description of Artificial Sequence: Synthetic oligonucleotide
auuauauuauauauauauu

SEQ ID NO: 1082881 - RNA, 19 nt, Artificial Sequence
  Description of Artificial Sequence: Synthetic oligonucleotide
uuaaugucuuauggcagug

SEQ ID NO: 1082882 - RNA, 19 nt, Artificial Sequence
  Description of Artificial Sequence: Synthetic oligonucleotide
cuccggaguaauuauaaca

SEQ ID NO: 1082883 - RNA, 19 nt, Artificial Sequence
  Description of Artificial Sequence: Synthetic oligonucleotide
guauacauuucuccuucug

SEQ ID NO: 1082884 - RNA, 19 nt, Artificial Sequence
  Description of Artificial Sequence: Synthetic oligonucleotide
uuggccggccuauugaacu

SEQ ID NO: 1082885 - RNA, 19 nt, Artificial Sequence
  Description of Artificial Sequence: Synthetic oligonucleotide
agagaagcgacagucacau

SEQ ID NO: 1082886 - RNA, 19 nt, Artificial Sequence
  Description of Artificial Sequence: Synthetic oligonucleotide
cacaaaucuggccccacag

SEQ ID NO: 1082887 - RNA, 19 nt, Artificial Sequence
  Description of Artificial Sequence: Synthetic oligonucleotide
cuuacuuauacagacgcaa

SEQ ID NO: 1082888 - RNA, 19 nt, Artificial Sequence
  Description of Artificial Sequence: Synthetic oligonucleotide
gauggcgcaaguucgucca

SEQ ID NO: 1082889 - RNA, 19 nt, Artificial Sequence
  Description of Artificial Sequence: Synthetic oligonucleotide
uucgcugacaugguuugcc

SEQ ID NO: 1082890 - RNA, 19 nt, Artificial Sequence
  Description of Artificial Sequence: Synthetic oligonucleotide
uugcaaucugucacaucag

SEQ ID NO: 1082891 - RNA, 19 nt, Artificial Sequence
  Description of Artificial Sequence: Synthetic oligonucleotide
gcacuaguggaugagagag

SEQ ID NO: 1082892 - RNA, 19 nt, Artificial Sequence
  Description of Artificial Sequence: Synthetic oligonucleotide
augacgcacaaugugggag

SEQ ID NO: 1082893 - RNA, 19 nt, Artificial Sequence
  Description of Artificial Sequence: Synthetic oligonucleotide
uuugcacuaguggaugaga

SEQ ID NO: 1082894 - RNA, 19 nt, Artificial Sequence
  Description of Artificial Sequence: Synthetic oligonucleotide
ugcacuaguggaugagaga

SEQ ID NO: 1082895 - RNA, 19 nt, Artificial Sequence
  Description of Artificial Sequence: Synthetic oligonucleotide
ugcgucugcagugugugcc

SEQ ID NO: 1082896 - RNA, 19 nt, Artificial Sequence
  Description of Artificial Sequence: Synthetic oligonucleotide
augggcgcgaaggugggcc

SEQ ID NO: 1082897 - RNA, 19 nt, Artificial Sequence
  Description of Artificial Sequence: Synthetic oligonucleotide
acguuacagguauauacaa

SEQ ID NO: 1082898 - RNA, 19 nt, Artificial Sequence
  Description of Artificial Sequence: Synthetic oligonucleotide
cagcuauauuuuacaacgc

SEQ ID NO: 1082899 - RNA, 19 nt, Artificial Sequence
  Description of Artificial Sequence: Synthetic oligonucleotide
uccgaguacucugacugag

SEQ ID NO: 1082900 - RNA, 19 nt, Artificial Sequence
  Description of Artificial Sequence: Synthetic oligonucleotide
aaaaggggauggcgcaagu

SEQ ID NO: 1082901 - RNA, 19 nt, Artificial Sequence
  Description of Artificial Sequence: Synthetic oligonucleotide
aggugccugaagcgggugc

SEQ ID NO: 1082902 - RNA, 19 nt, Artificial Sequence
  Description of Artificial Sequence: Synthetic oligonucleotide
cuccccuacuuugauauag

SEQ ID NO: 1082903 - RNA, 19 nt, Artificial Sequence
  Description of Artificial Sequence: Synthetic oligonucleotide
uuuacaacucugccauaua

SEQ ID NO: 1082904 - RNA, 19 nt, Artificial Sequence
  Description of Artificial Sequence: Synthetic oligonucleotide
gauguuacagcgauagggu

SEQ ID NO: 1082905 - RNA, 19 nt, Artificial Sequence
  Description of Artificial Sequence: Synthetic oligonucleotide
gauuugcacuaguggauga

SEQ ID NO: 1082906 - RNA, 19 nt, Artificial Sequence
  Description of Artificial Sequence: Synthetic oligonucleotide
cacuaguggaugagagagg

SEQ ID NO: 1082907 - RNA, 19 nt, Artificial Sequence
  Description of Artificial Sequence: Synthetic oligonucleotide
agucaacacuccaugcuuc

SEQ ID NO: 1082908 - RNA, 19 nt, Artificial Sequence
  Description of Artificial Sequence: Synthetic oligonucleotide
cuuuaacgcaguuuuauau

SEQ ID NO: 1082909 - RNA, 19 nt, Artificial Sequence
  Description of Artificial Sequence: Synthetic oligonucleotide
auuugcacuaguggaugag

SEQ ID NO: 1082910 - RNA, 19 nt, Artificial Sequence
  Description of Artificial Sequence: Synthetic oligonucleotide
gcaguuuagacacagccaa

SEQ ID NO: 1082911 - RNA, 19 nt, Artificial Sequence
  Description of Artificial Sequence: Synthetic oligonucleotide
augggaugaccuuuguaaa

SEQ ID NO: 1082912 - RNA, 19 nt, Artificial Sequence
  Description of Artificial Sequence: Synthetic oligonucleotide
cuuguacgguuuaucgcug

SEQ ID NO: 1082913 - RNA, 19 nt, Artificial Sequence
  Description of Artificial Sequence: Synthetic oligonucleotide
cagcggucacacuuguacg

SEQ ID NO: 1082914 - RNA, 19 nt, Artificial Sequence
  Description of Artificial Sequence: Synthetic oligonucleotide
gaccuuuguaaaguauuac

SEQ ID NO: 1082915 - RNA, 19 nt, Artificial Sequence
  Description of Artificial Sequence: Synthetic oligonucleotide
cauuccucguguugcaauc

SEQ ID NO: 1082916 - RNA, 19 nt, Artificial Sequence
  Description of Artificial Sequence: Synthetic oligonucleotide
ucuccggaguaauuauaac

SEQ ID NO: 1082917 - RNA, 19 nt, Artificial Sequence
  Description of Artificial Sequence: Synthetic oligonucleotide
aggggauggcgcaaguucg

SEQ ID NO: 1082918 - RNA, 19 nt, Artificial Sequence
  Description of Artificial Sequence: Synthetic oligonucleotide
cugucuuggcucccggucc

SEQ ID NO: 1082919 - RNA, 19 nt, Artificial Sequence
  Description of Artificial Sequence: Synthetic oligonucleotide
guauuacagcauccuucgg

SEQ ID NO: 1082920 - RNA, 19 nt, Artificial Sequence
  Description of Artificial Sequence: Synthetic oligonucleotide
gaagcgacagucacauuca

SEQ ID NO: 1082921 - RNA, 19 nt, Artificial Sequence
  Description of Artificial Sequence: Synthetic oligonucleotide
guuacagcgauaggguuuc

SEQ ID NO: 1082922 - RNA, 19 nt, Artificial Sequence
  Description of Artificial Sequence: Synthetic oligonucleotide
uaacaacaagcaugacgca

SEQ ID NO: 1082923 - RNA, 19 nt, Artificial Sequence
  Description of Artificial Sequence: Synthetic oligonucleotide
aguucguccaucguugaaa

SEQ ID NO: 1082924 - RNA, 19 nt, Artificial Sequence
  Description of Artificial Sequence: Synthetic oligonucleotide
uccccuacuuugauauaga

SEQ ID NO: 1082925 - RNA, 19 nt, Artificial Sequence
  Description of Artificial Sequence: Synthetic oligonucleotide
aaagggcuagggagaaaag

SEQ ID NO: 1082926 - RNA, 19 nt, Artificial Sequence
  Description of Artificial Sequence: Synthetic oligonucleotide
ggaguaauuauaacaacaa

SEQ ID NO: 1082927 - RNA, 19 nt, Artificial Sequence
  Description of Artificial Sequence: Synthetic oligonucleotide
cuuaaugucuuauggcagu

SEQ ID NO: 1082928 - RNA, 19 nt, Artificial Sequence
  Description of Artificial Sequence: Synthetic oligonucleotide
uccucguguugcaaucugu

SEQ ID NO: 1082929 - RNA, 19 nt, Artificial Sequence
  Description of Artificial Sequence: Synthetic oligonucleotide
cuuugauauagaaaaugau

SEQ ID NO: 1082930 - RNA, 19 nt, Artificial Sequence
  Description of Artificial Sequence: Synthetic oligonucleotide
gaggcacuacaucauggga

SEQ ID NO: 1082931 - RNA, 19 nt, Artificial Sequence
  Description of Artificial Sequence: Synthetic oligonucleotide
gagccuuuaacgcaguuuu

SEQ ID NO: 1082932 - RNA, 19 nt, Artificial Sequence
  Description of Artificial Sequence: Synthetic oligonucleotide
auagauucucagauccgug

SEQ ID NO: 1082933 - RNA, 19 nt, Artificial Sequence
  Description of Artificial Sequence: Synthetic oligonucleotide
auccgugucugccugcaga

SEQ ID NO: 1082934 - RNA, 19 nt, Artificial Sequence
  Description of Artificial Sequence: Synthetic oligonucleotide
ugaaugcgcagguggcucu

SEQ ID NO: 1082935 - RNA, 19 nt, Artificial Sequence
  Description of Artificial Sequence: Synthetic oligonucleotide
ggcucuuuagagucugaag

SEQ ID NO: 1082936 - RNA, 19 nt, Artificial Sequence
  Description of Artificial Sequence: Synthetic oligonucleotide
gaagguuuacauuccucgu

SEQ ID NO: 1082937 - RNA, 19 nt, Artificial Sequence
  Description of Artificial Sequence: Synthetic oligonucleotide
cacgcgguauuguaccuug

SEQ ID NO: 1082938 - RNA, 19 nt, Artificial Sequence
  Description of Artificial Sequence: Synthetic oligonucleotide
agagugaauucgagugugg

SEQ ID NO: 1082939 - RNA, 19 nt, Artificial Sequence
  Description of Artificial Sequence: Synthetic oligonucleotide
uuucaacguuuuauucuua

SEQ ID NO: 1082940 - RNA, 19 nt, Artificial Sequence
  Description of Artificial Sequence: Synthetic oligonucleotide
ggcgcaaguucguccaucg

SEQ ID NO: 1082941 - RNA, 19 nt, Artificial Sequence
  Description of Artificial Sequence: Synthetic oligonucleotide
gaggagucaaacguuccca

SEQ ID NO: 1082942 - RNA, 19 nt, Artificial Sequence
  Description of Artificial Sequence: Synthetic oligonucleotide
ugcgcuccacagauguuac

SEQ ID NO: 1082943 - RNA, 19 nt, Artificial Sequence
  Description of Artificial Sequence: Synthetic oligonucleotide
ugugugccucuugagcgag

SEQ ID NO: 1082944 - RNA, 19 nt, Artificial Sequence
  Description of Artificial Sequence: Synthetic oligonucleotide
cacagcuagaauccgagua

SEQ ID NO: 1082945 - RNA, 19 nt, Artificial Sequence
  Description of Artificial Sequence: Synthetic oligonucleotide
auauuauauuauauauaua

SEQ ID NO: 1082946 - RNA, 19 nt, Artificial Sequence
  Description of Artificial Sequence: Synthetic oligonucleotide
cagcgauaggguuucucac

SEQ ID NO: 1082947 - RNA, 19 nt, Artificial Sequence
  Description of Artificial Sequence: Synthetic oligonucleotide
uaucgcugugcgucugcag

SEQ ID NO: 1082948 - RNA, 19 nt, Artificial Sequence
  Description of Artificial Sequence: Synthetic oligonucleotide
gaagaaggccccauuccuc

SEQ ID NO: 1082949 - RNA, 19 nt, Artificial Sequence
  Description of Artificial Sequence: Synthetic oligonucleotide
ggcuuuugugacgaaaaug

SEQ ID NO: 1082950 - RNA, 19 nt, Artificial Sequence
  Description of Artificial Sequence: Synthetic oligonucleotide
cuggcgcaagugaagucgc

SEQ ID NO: 1082951 - RNA, 19 nt, Artificial Sequence
  Description of Artificial Sequence: Synthetic oligonucleotide
guacgguuuaucgcugugc

SEQ ID NO: 1082952 - RNA, 19 nt, Artificial Sequence
  Description of Artificial Sequence: Synthetic oligonucleotide
uuguacgguuuaucgcugu

SEQ ID NO: 1082953 - RNA, 19 nt, Artificial Sequence
  Description of Artificial Sequence: Synthetic oligonucleotide
cagauguuacagcgauagg

SEQ ID NO: 1082954 - RNA, 19 nt, Artificial Sequence
  Description of Artificial Sequence: Synthetic oligonucleotide
gcaaguucguccaucguug

SEQ ID NO: 1082955 - RNA, 19 nt, Artificial Sequence
  Description of Artificial Sequence: Synthetic oligonucleotide
cuuauacagacgcaauacu

SEQ ID NO: 1082956 - RNA, 19 nt, Artificial Sequence
  Description of Artificial Sequence: Synthetic oligonucleotide
ucacccguguggacggucu

SEQ ID NO: 1082957 - RNA, 19 nt, Artificial Sequence
  Description of Artificial Sequence: Synthetic oligonucleotide
cacaucagaacuuucgcau

SEQ ID NO: 1082958 - RNA, 19 nt, Artificial Sequence
  Description of Artificial Sequence: Synthetic oligonucleotide
uucgagugugggucuucag

SEQ ID NO: 1082959 - RNA, 19 nt, Artificial Sequence
  Description of Artificial Sequence: Synthetic oligonucleotide
caccgugaggacacguuac

SEQ ID NO: 1082960 - RNA, 19 nt, Artificial Sequence
  Description of Artificial Sequence: Synthetic oligonucleotide
ugcuuuucgcugacauggu

SEQ ID NO: 1082961 - RNA, 19 nt, Artificial Sequence
  Description of Artificial Sequence: Synthetic oligonucleotide
accgugaggacacguuaca

SEQ ID NO: 1082962 - RNA, 19 nt, Artificial Sequence
  Description of Artificial Sequence: Synthetic oligonucleotide
aggcacuacaucaugggau

SEQ ID NO: 1082963 - RNA, 19 nt, Artificial Sequence
  Description of Artificial Sequence: Synthetic oligonucleotide
cuuacacauaggagaagaa

SEQ ID NO: 1082964 - RNA, 19 nt, Artificial Sequence
  Description of Artificial Sequence: Synthetic oligonucleotide
guucguccaucguugaaaa

SEQ ID NO: 1082965 - RNA, 19 nt, Artificial Sequence
  Description of Artificial Sequence: Synthetic oligonucleotide
uccgugucugccugcagau

SEQ ID NO: 1082966 - RNA, 19 nt, Artificial Sequence
  Description of Artificial Sequence: Synthetic oligonucleotide
ucgcugacaugguuugccu

SEQ ID NO: 1082967 - RNA, 19 nt, Artificial Sequence
  Description of Artificial Sequence: Synthetic oligonucleotide
caccugcacaaaucuggcc

SEQ ID NO: 1082968 - RNA, 19 nt, Artificial Sequence
  Description of Artificial Sequence: Synthetic oligonucleotide
agcuagaauccgaguacuc

SEQ ID NO: 1082969 - RNA, 19 nt, Artificial Sequence
  Description of Artificial Sequence: Synthetic oligonucleotide
cgugaggacacguuacagg

SEQ ID NO: 1082970 - RNA, 19 nt, Artificial Sequence
  Description of Artificial Sequence: Synthetic oligonucleotide
aagcgacagucacauucau

SEQ ID NO: 1082971 - RNA, 19 nt, Artificial Sequence
  Description of Artificial Sequence: Synthetic oligonucleotide
ucgcauucuccccuacuuu

SEQ ID NO: 1082972 - RNA, 19 nt, Artificial Sequence
  Description of Artificial Sequence: Synthetic oligonucleotide
gcuauauuuuacaacgcaa

SEQ ID NO: 1082973 - RNA, 19 nt, Artificial Sequence
  Description of Artificial Sequence: Synthetic oligonucleotide
gcgguauuguaccuuggug

SEQ ID NO: 1082974 - RNA, 19 nt, Artificial Sequence
  Description of Artificial Sequence: Synthetic oligonucleotide
cuuuugugacgaaaaugua

SEQ ID NO: 1082975 - RNA, 19 nt, Artificial Sequence
  Description of Artificial Sequence: Synthetic oligonucleotide
gacgaaaauguagguuaca

SEQ ID NO: 1082976 - RNA, 19 nt, Artificial Sequence
  Description of Artificial Sequence: Synthetic oligonucleotide
cuggaacaaaaguauacau

SEQ ID NO: 1082977 - RNA, 19 nt, Artificial Sequence
  Description of Artificial Sequence: Synthetic oligonucleotide
uggccggccuauugaacug

SEQ ID NO: 1082978 - RNA, 19 nt, Artificial Sequence
  Description of Artificial Sequence: Synthetic oligonucleotide
aaaggggauggcgcaaguu

SEQ ID NO: 1082979 - RNA, 19 nt, Artificial Sequence
  Description of Artificial Sequence: Synthetic oligonucleotide
ggauggcgcaaguucgucc

SEQ ID NO: 1082980 - RNA, 19 nt, Artificial Sequence
  Description of Artificial Sequence: Synthetic oligonucleotide
acgcaauacuuaaaauagu

SEQ ID NO: 1082981 - RNA, 19 nt, Artificial Sequence
  Description of Artificial Sequence: Synthetic oligonucleotide
uucguccaucguugaaaac

SEQ ID NO: 1082982 - RNA, 19 nt, Artificial Sequence
  Description of Artificial Sequence: Synthetic oligonucleotide
acaacgcaauaaugcaguu

SEQ ID NO: 1082983 - RNA, 19 nt, Artificial Sequence
  Description of Artificial Sequence: Synthetic oligonucleotide
caaaccccgcgccccaccc

SEQ ID NO: 1082984 - RNA, 19 nt, Artificial Sequence
  Description of Artificial Sequence: Synthetic oligonucleotide
cggaguaauuauaacaaca

SEQ ID NO: 1082985 - RNA, 19 nt, Artificial Sequence
  Description of Artificial Sequence: Synthetic oligonucleotide
auccgaguacucugacuga

SEQ ID NO: 1082986 - RNA, 19 nt, Artificial Sequence
  Description of Artificial Sequence: Synthetic oligonucleotide
gaauccgaguacucugacu

SEQ ID NO: 1082987 - RNA, 19 nt, Artificial Sequence
  Description of Artificial Sequence: Synthetic oligonucleotide
cuauugaacugcgcuccac

SEQ ID NO: 1082988 - RNA, 19 nt, Artificial Sequence
  Description of Artificial Sequence: Synthetic oligonucleotide
uggcucuuuagagucugaa

SEQ ID NO: 1082989 - RNA, 19 nt, Artificial Sequence
  Description of Artificial Sequence: Synthetic oligonucleotide
acgguuuaucgcugugcgu

SEQ ID NO: 1082990 - RNA, 19 nt, Artificial Sequence
  Description of Artificial Sequence: Synthetic oligonucleotide
auuccucguguugcaaucu

SEQ ID NO: 1082991 - RNA, 19 nt, Artificial Sequence
  Description of Artificial Sequence: Synthetic oligonucleotide
cuacaucaugggaugaccu

SEQ ID NO: 1082992 - RNA, 19 nt, Artificial Sequence
  Description of Artificial Sequence: Synthetic oligonucleotide
agucucuuaagugcucuuu

SEQ ID NO: 1082993 - RNA, 19 nt, Artificial Sequence
  Description of Artificial Sequence: Synthetic oligonucleotide
gaguacucugacugagucu

SEQ ID NO: 1082994 - RNA, 19 nt, Artificial Sequence
  Description of Artificial Sequence: Synthetic oligonucleotide
guagcggaaggaggccugg

SEQ ID NO: 1082995 - RNA, 19 nt, Artificial Sequence
  Description of Artificial Sequence: Synthetic oligonucleotide
acgcaguuuuauauuuuca

SEQ ID NO: 1082996 - RNA, 19 nt, Artificial Sequence
  Description of Artificial Sequence: Synthetic oligonucleotide
ucccgcaaaccccgcgccc

SEQ ID NO: 1082997 - RNA, 19 nt, Artificial Sequence
  Description of Artificial Sequence: Synthetic oligonucleotide
uuucgcugacaugguuugc

SEQ ID NO: 1082998 - RNA, 19 nt, Artificial Sequence
  Description of Artificial Sequence: Synthetic oligonucleotide
auucgagugugggucuuca

SEQ ID NO: 1082999 - RNA, 19 nt, Artificial Sequence
  Description of Artificial Sequence: Synthetic oligonucleotide
guuggcuuuugugacgaaa

SEQ ID NO: 1083000 - RNA, 19 nt, Artificial Sequence
  Description of Artificial Sequence: Synthetic oligonucleotide
cugucacaucagaacuuuc

SEQ ID NO: 1083001 - RNA, 19 nt, Artificial Sequence
  Description of Artificial Sequence: Synthetic oligonucleotide
ggcgccgugcuucuggcgc

SEQ ID NO: 1083002 - RNA, 19 nt, Artificial Sequence
  Description of Artificial Sequence: Synthetic oligonucleotide
caugacgcacaauguggga

SEQ ID NO: 1083003 - RNA, 19 nt, Artificial Sequence
  Description of Artificial Sequence: Synthetic oligonucleotide
ucggggagggucugagaaa

SEQ ID NO: 1083004 - RNA, 19 nt, Artificial Sequence
  Description of Artificial Sequence: Synthetic oligonucleotide
ggccuauugaacugcgcuc

SEQ ID NO: 1083005 - RNA, 19 nt, Artificial Sequence
  Description of Artificial Sequence: Synthetic oligonucleotide
agguugccuuuguagcgga

SEQ ID NO: 1083006 - RNA, 19 nt, Artificial Sequence
  Description of Artificial Sequence: Synthetic oligonucleotide
cuuucgcauucuccccuac

SEQ ID NO: 1083007 - RNA, 19 nt, Artificial Sequence
  Description of Artificial Sequence: Synthetic oligonucleotide
ccuuacacauaggagaaga

SEQ ID NO: 1083008 - RNA, 19 nt, Artificial Sequence
  Description of Artificial Sequence: Synthetic oligonucleotide
guuuaucgcugugcgucug

SEQ ID NO: 1083009 - RNA, 19 nt, Artificial Sequence
  Description of Artificial Sequence: Synthetic oligonucleotide
cgugucugccugcagauac

SEQ ID NO: 1083010 - RNA, 19 nt, Artificial Sequence
  Description of Artificial Sequence: Synthetic oligonucleotide
uggcgcaagugaagucgca

SEQ ID NO: 1083011 - RNA, 19 nt, Artificial Sequence
  Description of Artificial Sequence: Synthetic oligonucleotide
acuuucgcauucuccccua

SEQ ID NO: 1083012 - RNA, 19 nt, Artificial Sequence
  Description of Artificial Sequence: Synthetic oligonucleotide
acgcaauaaugcaguuuag

SEQ ID NO: 1083013 - RNA, 19 nt, Artificial Sequence
  Description of Artificial Sequence: Synthetic oligonucleotide
caaguucguccaucguuga

SEQ ID NO: 1083014 - RNA, 19 nt, Artificial Sequence
  Description of Artificial Sequence: Synthetic oligonucleotide
auuguaccuugguguuggu

SEQ ID NO: 1083015 - RNA, 19 nt, Artificial Sequence
  Description of Artificial Sequence: Synthetic oligonucleotide
cgacacgcgguauuguacc

SEQ ID NO: 1083016 - RNA, 19 nt, Artificial Sequence
  Description of Artificial Sequence: Synthetic oligonucleotide
agcugucuuggcucccggu

SEQ ID NO: 1083017 - RNA, 19 nt, Artificial Sequence
  Description of Artificial Sequence: Synthetic oligonucleotide
gauacaaaaucgagccuuu

SEQ ID NO: 1083018 - RNA, 19 nt, Artificial Sequence
  Description of Artificial Sequence: Synthetic oligonucleotide
ggucccgcaaaccccgcgc

SEQ ID NO: 1083019 - RNA, 19 nt, Artificial Sequence
  Description of Artificial Sequence: Synthetic oligonucleotide
ugcacaaaucuggccccac

SEQ ID NO: 1083020 - RNA, 19 nt, Artificial Sequence
  Description of Artificial Sequence: Synthetic oligonucleotide
ccucguguugcaaucuguc

SEQ ID NO: 1083021 - RNA, 19 nt, Artificial Sequence
  Description of Artificial Sequence: Synthetic oligonucleotide
gacgcacaaugugggagga

SEQ ID NO: 1083022 - RNA, 19 nt, Artificial Sequence
  Description of Artificial Sequence: Synthetic oligonucleotide
cgcauucuccccuacuuug

SEQ ID NO: 1083023 - RNA, 19 nt, Artificial Sequence
  Description of Artificial Sequence: Synthetic oligonucleotide
auacaaaaucgagccuuua

SEQ ID NO: 1083024 - RNA, 19 nt, Artificial Sequence
  Description of Artificial Sequence: Synthetic oligonucleotide
ugacugagucucucccauu

SEQ ID NO: 1083025 - RNA, 19 nt, Artificial Sequence
  Description of Artificial Sequence: Synthetic oligonucleotide
ucgagccuuuaacgcaguu

SEQ ID NO: 1083026 - RNA, 19 nt, Artificial Sequence
  Description of Artificial Sequence: Synthetic oligonucleotide
agguuacacuucucacaau

SEQ ID NO: 1083027 - RNA, 19 nt, Artificial Sequence
  Description of Artificial Sequence: Synthetic oligonucleotide
gucuuauggcaguguggga

SEQ ID NO: 1083028 - RNA, 19 nt, Artificial Sequence
  Description of Artificial Sequence: Synthetic oligonucleotide
gcauccuucggggaggguc

SEQ ID NO: 1083029 - RNA, 19 nt, Artificial Sequence
  Description of Artificial Sequence: Synthetic oligonucleotide
guuggccggccuauugaac

SEQ ID NO: 1083030 - RNA, 19 nt, Artificial Sequence
  Description of Artificial Sequence: Synthetic oligonucleotide
ggagucaaacguucccaaa

SEQ ID NO: 1083031 - RNA, 19 nt, Artificial Sequence
  Description of Artificial Sequence: Synthetic oligonucleotide
cgguuuaucgcugugcguc

SEQ ID NO: 1083032 - RNA, 19 nt, Artificial Sequence
  Description of Artificial Sequence: Synthetic oligonucleotide
ucuccccuacuuugauaua

SEQ ID NO: 1083033 - RNA, 19 nt, Artificial Sequence
  Description of Artificial Sequence: Synthetic oligonucleotide
cauccuucggggagggucu

SEQ ID NO: 1083034 - RNA, 19 nt, Artificial Sequence
  Description of Artificial Sequence: Synthetic oligonucleotide
gacacgcgguauuguaccu

SEQ ID NO: 1083035 - RNA, 19 nt, Artificial Sequence
  Description of Artificial Sequence: Synthetic oligonucleotide
ccgacacgcgguauuguac

SEQ ID NO: 1083036 - RNA, 19 nt, Artificial Sequence
  Description of Artificial Sequence: Synthetic oligonucleotide
ggaugaccuuuguaaagua

SEQ ID NO: 1083037 - RNA, 19 nt, Artificial Sequence
  Description of Artificial Sequence: Synthetic oligonucleotide
gcgggugccacagauuuca

SEQ ID NO: 1083038 - RNA, 19 nt, Artificial Sequence
  Description of Artificial Sequence: Synthetic oligonucleotide
gcuagaauccgaguacucu

SEQ ID NO: 1083039 - RNA, 19 nt, Artificial Sequence
  Description of Artificial Sequence: Synthetic oligonucleotide
cccuacuuugauauagaaa

SEQ ID NO: 1083040 - RNA, 19 nt, Artificial Sequence
  Description of Artificial Sequence: Synthetic oligonucleotide
cagacgcaauacuuaaaau

SEQ ID NO: 1083041 - RNA, 19 nt, Artificial Sequence
  Description of Artificial Sequence: Synthetic oligonucleotide
aagucgcaguuggcuuuug

SEQ ID NO: 1083042 - RNA, 19 nt, Artificial Sequence
  Description of Artificial Sequence: Synthetic oligonucleotide
gcaauaguauuuucuuaau

SEQ ID NO: 1083043 - RNA, 19 nt, Artificial Sequence
  Description of Artificial Sequence: Synthetic oligonucleotide
uggcgcaaguucguccauc

SEQ ID NO: 1083044 - RNA, 19 nt, Artificial Sequence
  Description of Artificial Sequence: Synthetic oligonucleotide
gguuggccggccuauugaa

SEQ ID NO: 1083045 - RNA, 19 nt, Artificial Sequence
  Description of Artificial Sequence: Synthetic oligonucleotide
gugcgucugcagugugugc

SEQ ID NO: 1083046 - RNA, 19 nt, Artificial Sequence
  Description of Artificial Sequence: Synthetic oligonucleotide
agcgggugccacagauuuc

SEQ ID NO: 1083047 - RNA, 19 nt, Artificial Sequence
  Description of Artificial Sequence: Synthetic oligonucleotide
cagccgacacgcgguauug

SEQ ID NO: 1083048 - RNA, 19 nt, Artificial Sequence
  Description of Artificial Sequence: Synthetic oligonucleotide
acgcgguauuguaccuugg

SEQ ID NO: 1083049 - RNA, 19 nt, Artificial Sequence
  Description of Artificial Sequence: Synthetic oligonucleotide
acgcacaaugugggaggag

SEQ ID NO: 1083050 - RNA, 19 nt, Artificial Sequence
  Description of Artificial Sequence: Synthetic oligonucleotide
aaugcgcagguggcucuuu

SEQ ID NO: 1083051 - RNA, 19 nt, Artificial Sequence
  Description of Artificial Sequence: Synthetic oligonucleotide
agcgacagucacauucauu

SEQ ID NO: 1083052 - RNA, 19 nt, Artificial Sequence
  Description of Artificial Sequence: Synthetic oligonucleotide
guaccuugguguuggugau

SEQ ID NO: 1083053 - RNA, 19 nt, Artificial Sequence
  Description of Artificial Sequence: Synthetic oligonucleotide
cgguauuguaccuuggugu

SEQ ID NO: 1083054 - RNA, 19 nt, Artificial Sequence
  Description of Artificial Sequence: Synthetic oligonucleotide
augagcacaugggcgcgaa

SEQ ID NO: 1083055 - RNA, 19 nt, Artificial Sequence
  Description of Artificial Sequence: Synthetic oligonucleotide
ccuuuaacgcaguuuuaua

SEQ ID NO: 1083056 - RNA, 19 nt, Artificial Sequence
  Description of Artificial Sequence: Synthetic oligonucleotide
guccaucguugaaaacuuc

SEQ ID NO: 1083057 - RNA, 19 nt, Artificial Sequence
  Description of Artificial Sequence: Synthetic oligonucleotide
gguuuaucgcugugcgucu

SEQ ID NO: 1083058 - RNA, 19 nt, Artificial Sequence
  Description of Artificial Sequence: Synthetic oligonucleotide
cugucuccggaguaauuau

SEQ ID NO: 1083059 - RNA, 19 nt, Artificial Sequence
  Description of Artificial Sequence: Synthetic oligonucleotide
auggcgcaaguucguccau

SEQ ID NO: 1083060 - RNA, 19 nt, Artificial Sequence
  Description of Artificial Sequence: Synthetic oligonucleotide
gugugccucuugagcgagg

SEQ ID NO: 1083061 - RNA, 19 nt, Artificial Sequence
  Description of Artificial Sequence: Synthetic oligonucleotide
acacgcgguauuguaccuu

SEQ ID NO: 1083062 - RNA, 19 nt, Artificial Sequence
  Description of Artificial Sequence: Synthetic oligonucleotide
gccuuacacauaggagaag

SEQ ID NO: 1083063 - RNA, 19 nt, Artificial Sequence
  Description of Artificial Sequence: Synthetic oligonucleotide
caugggcgcgaaggugggc

SEQ ID NO: 1083064 - RNA, 19 nt, Artificial Sequence
  Description of Artificial Sequence: Synthetic oligonucleotide
uccuucggggagggucuga

SEQ ID NO: 1083065 - RNA, 19 nt, Artificial Sequence
  Description of Artificial Sequence: Synthetic oligonucleotide
ccgugaggacacguuacag

SEQ ID NO: 1083066 - RNA, 19 nt, Artificial Sequence
  Description of Artificial Sequence: Synthetic oligonucleotide
gggauacggcuucucucca

SEQ ID NO: 1083067 - RNA, 19 nt, Artificial Sequence
  Description of Artificial Sequence: Synthetic oligonucleotide
gcugugcgucugcagugug

SEQ ID NO: 1083068 - RNA, 19 nt, Artificial Sequence
  Description of Artificial Sequence: Synthetic oligonucleotide
uuacagcgauaggguuucu

SEQ ID NO: 1083069 - RNA, 19 nt, Artificial Sequence
  Description of Artificial Sequence: Synthetic oligonucleotide
gccggccuauugaacugcg

SEQ ID NO: 1083070 - RNA, 19 nt, Artificial Sequence
  Description of Artificial Sequence: Synthetic oligonucleotide
gcaccgugaggacacguua

SEQ ID NO: 1083071 - RNA, 19 nt, Artificial Sequence
  Description of Artificial Sequence: Synthetic oligonucleotide
cucacccguguggacgguc

SEQ ID NO: 1083072 - RNA, 19 nt, Artificial Sequence
  Description of Artificial Sequence: Synthetic oligonucleotide
aucgagccuuuaacgcagu

SEQ ID NO: 1083073 - RNA, 19 nt, Artificial Sequence
  Description of Artificial Sequence: Synthetic oligonucleotide
gccuuuaacgcaguuuuau

SEQ ID NO: 1083074 - RNA, 19 nt, Artificial Sequence
  Description of Artificial Sequence: Synthetic oligonucleotide
gggccaccugcacaaaucu

SEQ ID NO: 1083075 - RNA, 19 nt, Artificial Sequence
  Description of Artificial Sequence: Synthetic oligonucleotide
agccgacacgcgguauugu

SEQ ID NO: 1083076 - RNA, 19 nt, Artificial Sequence
  Description of Artificial Sequence: Synthetic oligonucleotide
aggcaccgugaggacacgu

SEQ ID NO: 1083077 - RNA, 19 nt, Artificial Sequence
  Description of Artificial Sequence: Synthetic oligonucleotide
ggccaccugcacaaaucug

SEQ ID NO: 1083078 - RNA, 19 nt, Artificial Sequence
  Description of Artificial Sequence: Synthetic oligonucleotide
ggccggccuauugaacugc

SEQ ID NO: 1083079 - RNA, 19 nt, Artificial Sequence
  Description of Artificial Sequence: Synthetic oligonucleotide
auccuucggggagggucug

SEQ ID NO: 1083080 - RNA, 19 nt, Artificial Sequence
  Description of Artificial Sequence: Synthetic oligonucleotide
ccggccuauugaacugcgc

SEQ ID NO: 1083081 - RNA, 19 nt, Artificial Sequence
  Description of Artificial Sequence: Synthetic oligonucleotide
gaagucgcaguuggcuuuu

SEQ ID NO: 1083082 - RNA, 19 nt, Artificial Sequence
  Description of Artificial Sequence: Synthetic oligonucleotide
cccgcaaaccccgcgcccc

SEQ ID NO: 1083083 - RNA, 19 nt, Artificial Sequence
  Description of Artificial Sequence: Synthetic oligonucleotide
ccacagauguuacagcgau

SEQ ID NO: 1083084 - RNA, 19 nt, Artificial Sequence
  Description of Artificial Sequence: Synthetic oligonucleotide
ccccuacuuugauauagaa

SEQ ID NO: 1083085 - RNA, 19 nt, Artificial Sequence
  Description of Artificial Sequence: Synthetic oligonucleotide
gccgacacgcgguauugua

SEQ ID NO: 1083086 - RNA, 19 nt, Artificial Sequence
  Description of Artificial Sequence: Synthetic oligonucleotide
caacgcaauaaugcaguuu

SEQ ID NO: 1083087 - RNA, 19 nt, Artificial Sequence
  Description of Artificial Sequence: Synthetic oligonucleotide
caacauccugaagucuugu

SEQ ID NO: 1083088 - RNA, 19 nt, Artificial Sequence
  Description of Artificial Sequence: Synthetic oligonucleotide
cuguucccacagaagguuu

SEQ ID NO: 1083089 - RNA, 19 nt, Artificial Sequence
  Description of Artificial Sequence: Synthetic oligonucleotide
gaauucgagugugggucuu

SEQ ID NO: 1083090 - RNA, 19 nt, Artificial Sequence
  Description of Artificial Sequence: Synthetic oligonucleotide
ccuauugaacugcgcucca

SEQ ID NO: 1083091 - RNA, 19 nt, Artificial Sequence
  Description of Artificial Sequence: Synthetic oligonucleotide
gggauggcgcaaguucguc

SEQ ID NO: 1083092 - RNA, 19 nt, Artificial Sequence
  Description of Artificial Sequence: Synthetic oligonucleotide
cugaggcauuuuagacaaa

SEQ ID NO: 1083093 - RNA, 19 nt, Artificial Sequence
  Description of Artificial Sequence: Synthetic oligonucleotide
ggucagcagccgacacgcg

SEQ ID NO: 1083094 - RNA, 19 nt, Artificial Sequence
  Description of Artificial Sequence: Synthetic oligonucleotide
gaagcgggugccacagauu

SEQ ID NO: 1083095 - RNA, 19 nt, Artificial Sequence
  Description of Artificial Sequence: Synthetic oligonucleotide
agcagccgacacgcgguau

SEQ ID NO: 1083096 - RNA, 19 nt, Artificial Sequence
  Description of Artificial Sequence: Synthetic oligonucleotide
gugccugaagcgggugcca

SEQ ID NO: 1083097 - RNA, 19 nt, Artificial Sequence
  Description of Artificial Sequence: Synthetic oligonucleotide
cugaagcgggugccacaga

SEQ ID NO: 1083098 - RNA, 19 nt, Artificial Sequence
  Description of Artificial Sequence: Synthetic oligonucleotide
ggcgcgaaggugggccacc

SEQ ID NO: 1083099 - RNA, 19 nt, Artificial Sequence
  Description of Artificial Sequence: Synthetic oligonucleotide
aggacacguuacagguaua

SEQ ID NO: 1083100 - RNA, 19 nt, Artificial Sequence
  Description of Artificial Sequence: Synthetic oligonucleotide
ggcucccggucccgcaaac

SEQ ID NO: 1083101 - RNA, 19 nt, Artificial Sequence
  Description of Artificial Sequence: Synthetic oligonucleotide
agcauccuucggggagggu

SEQ ID NO: 1083102 - RNA, 19 nt, Artificial Sequence
  Description of Artificial Sequence: Synthetic oligonucleotide
guacucugacugagucucu

SEQ ID NO: 1083103 - RNA, 19 nt, Artificial Sequence
  Description of Artificial Sequence: Synthetic oligonucleotide
gaaugcgcagguggcucuu

SEQ ID NO: 1083104 - RNA, 19 nt, Artificial Sequence
  Description of Artificial Sequence: Synthetic oligonucleotide
cggccuauugaacugcgcu

SEQ ID NO: 1083105 - RNA, 19 nt, Artificial Sequence
  Description of Artificial Sequence: Synthetic oligonucleotide
gagaagcgacagucacauu

SEQ ID NO: 1083106 - RNA, 19 nt, Artificial Sequence
  Description of Artificial Sequence: Synthetic oligonucleotide
gcgcuccacagauguuaca

SEQ ID NO: 1083107 - RNA, 19 nt, Artificial Sequence
  Description of Artificial Sequence: Synthetic oligonucleotide
cagcagccgacacgcggua

SEQ ID NO: 1083108 - RNA, 19 nt, Artificial Sequence
  Description of Artificial Sequence: Synthetic oligonucleotide
gcagccgacacgcgguauu

SEQ ID NO: 1083109 - RNA, 19 nt, Artificial Sequence
  Description of Artificial Sequence: Synthetic oligonucleotide
gcggucacacuuguacggu

SEQ ID NO: 1083110 - RNA, 19 nt, Artificial Sequence
  Description of Artificial Sequence: Synthetic oligonucleotide
gguugccuuuguagcggaa

SEQ ID NO: 1083111 - RNA, 19 nt, Artificial Sequence
  Description of Artificial Sequence: Synthetic oligonucleotide
ggggauggcgcaaguucgu

SEQ ID NO: 1083112 - RNA, 19 nt, Artificial Sequence
  Description of Artificial Sequence: Synthetic oligonucleotide
ccgaguacucugacugagu

SEQ ID NO: 1083113 - RNA, 19 nt, Artificial Sequence
  Description of Artificial Sequence: Synthetic oligonucleotide
ccggucccgcaaaccccgc

SEQ ID NO: 1083114 - RNA, 19 nt, Artificial Sequence
  Description of Artificial Sequence: Synthetic oligonucleotide
gccgugcuucuggcgcaag

SEQ ID NO: 1083115 - RNA, 19 nt, Artificial Sequence
  Description of Artificial Sequence: Synthetic oligonucleotide
cgcgguauuguaccuuggu

SEQ ID NO: 1083116 - RNA, 19 nt, Artificial Sequence
  Description of Artificial Sequence: Synthetic oligonucleotide
ggcaccgugaggacacguu

SEQ ID NO: 1083117 - RNA, 19 nt, Artificial Sequence
  Description of Artificial Sequence: Synthetic oligonucleotide
gcgcaaguucguccaucgu

SEQ ID NO: 1083118 - RNA, 19 nt, Artificial Sequence
  Description of Artificial Sequence: Synthetic oligonucleotide
ccgcaaaccccgcgcccca

SEQ ID NO: 1083119 - RNA, 19 nt, Artificial Sequence
  Description of Artificial Sequence: Synthetic oligonucleotide
cgagccuuuaacgcaguuu

SEQ ID NO: 1083120 - RNA, 19 nt, Artificial Sequence
  Description of Artificial Sequence: Synthetic oligonucleotide
ccgugcuucuggcgcaagu

SEQ ID NO: 1083121 - RNA, 19 nt, Artificial Sequence
  Description of Artificial Sequence: Synthetic oligonucleotide
cacccguguggacggucuu

SEQ ID NO: 1083122 - RNA, 19 nt, Artificial Sequence
  Description of Artificial Sequence: Synthetic oligonucleotide
gcgcgaaggugggccaccu

SEQ ID NO: 1083123 - RNA, 19 nt, Artificial Sequence
  Description of Artificial Sequence: Synthetic oligonucleotide
cccugucuccggaguaauu

SEQ ID NO: 1083124 - RNA, 19 nt, Artificial Sequence
  Description of Artificial Sequence: Synthetic oligonucleotide
ccgugucugccugcagaua

SEQ ID NO: 1083125 - RNA, 19 nt, Artificial Sequence
  Description of Artificial Sequence: Synthetic oligonucleotide
uuucggaugacacacaagg

SEQ ID NO: 1083126 - RNA, 19 nt, Artificial Sequence
  Description of Artificial Sequence: Synthetic oligonucleotide
uuauuguuuagucacagug

SEQ ID NO: 1083127 - RNA, 19 nt, Artificial Sequence
  Description of Artificial Sequence: Synthetic oligonucleotide
uccgcaaaagcucucaugg

SEQ ID NO: 1083128 - RNA, 19 nt, Artificial Sequence
  Description of Artificial Sequence: Synthetic oligonucleotide
uauuguuuagucacagugg

SEQ ID NO: 1083129 - RNA, 19 nt, Artificial Sequence
  Description of Artificial Sequence: Synthetic oligonucleotide
ucgucuucgguuuaggugg

SEQ ID NO: 1083130 - RNA, 19 nt, Artificial Sequence
  Description of Artificial Sequence: Synthetic oligonucleotide
cuguuaaccacuuuggagc

SEQ ID NO: 1083131 - RNA, 19 nt, Artificial Sequence
  Description of Artificial Sequence: Synthetic oligonucleotide
auucguuacagugacaucg

SEQ ID NO: 1083132 - RNA, 19 nt, Artificial Sequence
  Description of Artificial Sequence: Synthetic oligonucleotide
ugcucuauggcaauucggg

SEQ ID NO: 1083133 - RNA, 19 nt, Artificial Sequence
  Description of Artificial Sequence: Synthetic oligonucleotide
aauggucacagcucuagag

SEQ ID NO: 1083134 - RNA, 19 nt, Artificial Sequence
  Description of Artificial Sequence: Synthetic oligonucleotide
uagaugauuggcuucauca

SEQ ID NO: 1083135 - RNA, 19 nt, Artificial Sequence
  Description of Artificial Sequence: Synthetic oligonucleotide
agcauuuugucuuuuguag

SEQ ID NO: 1083136 - RNA, 19 nt, Artificial Sequence
  Description of Artificial Sequence: Synthetic oligonucleotide
aaugagaucucucgcacca

SEQ ID NO: 1083137 - RNA, 19 nt, Artificial Sequence
  Description of Artificial Sequence: Synthetic oligonucleotide
auucacggcgaucucagcc

SEQ ID NO: 1083138 - RNA, 19 nt, Artificial Sequence
  Description of Artificial Sequence: Synthetic oligonucleotide
aauucgggcagccuguuca

SEQ ID NO: 1083139 - RNA, 19 nt, Artificial Sequence
  Description of Artificial Sequence: Synthetic oligonucleotide
ucuauggcaauucgggcag

SEQ ID NO: 1083140 - RNA, 19 nt, Artificial Sequence
  Description of Artificial Sequence: Synthetic oligonucleotide
aaucauucucaccauuugu

SEQ ID NO: 1083141 - RNA, 19 nt, Artificial Sequence
  Description of Artificial Sequence: Synthetic oligonucleotide
ucggaugacacacaaggca

SEQ ID NO: 1083142 - RNA, 19 nt, Artificial Sequence
  Description of Artificial Sequence: Synthetic oligonucleotide
aaaauggucacagcucuag

SEQ ID NO: 1083143 - RNA, 19 nt, Artificial Sequence
  Description of Artificial Sequence: Synthetic oligonucleotide
accaucauucguuacagug

SEQ ID NO: 1083144 - RNA, 19 nt, Artificial Sequence
  Description of Artificial Sequence: Synthetic oligonucleotide
ucauuugugcccuugugca

SEQ ID NO: 1083145 - RNA, 19 nt, Artificial Sequence
  Description of Artificial Sequence: Synthetic oligonucleotide
aacucgauugucucggaug

SEQ ID NO: 1083146 - RNA, 19 nt, Artificial Sequence
  Description of Artificial Sequence: Synthetic oligonucleotide
ugcagucugaaucaggggu

SEQ ID NO: 1083147 - RNA, 19 nt, Artificial Sequence
  Description of Artificial Sequence: Synthetic oligonucleotide
ucguuuaugucaacaagca

SEQ ID NO: 1083148 - RNA, 19 nt, Artificial Sequence
  Description of Artificial Sequence: Synthetic oligonucleotide
gaagaaguagaugauuggc

SEQ ID NO: 1083149 - RNA, 19 nt, Artificial Sequence
  Description of Artificial Sequence: Synthetic oligonucleotide
uccuuaucgacgaucacac

SEQ ID NO: 1083150 - RNA, 19 nt, Artificial Sequence
  Description of Artificial Sequence: Synthetic oligonucleotide
cugcauaucauuugugccc

SEQ ID NO: 1083151 - RNA, 19 nt, Artificial Sequence
  Description of Artificial Sequence: Synthetic oligonucleotide
auggcgaucagcucaaucu

SEQ ID NO: 1083152 - RNA, 19 nt, Artificial Sequence
  Description of Artificial Sequence: Synthetic oligonucleotide
uggcaaauagccagguuag

SEQ ID NO: 1083153 - RNA, 19 nt, Artificial Sequence
  Description of Artificial Sequence: Synthetic oligonucleotide
acagacgucacauccagcu

SEQ ID NO: 1083154 - RNA, 19 nt, Artificial Sequence
  Description of Artificial Sequence: Synthetic oligonucleotide
uucgucuucgguuuaggug

SEQ ID NO: 1083155 - RNA, 19 nt, Artificial Sequence
  Description of Artificial Sequence: Synthetic oligonucleotide
gagaaucgcaaucuuagca

SEQ ID NO: 1083156 - RNA, 19 nt, Artificial Sequence
  Description of Artificial Sequence: Synthetic oligonucleotide
ugaucaucuuguuuccucc

SEQ ID NO: 1083157 - RNA, 19 nt, Artificial Sequence
  Description of Artificial Sequence: Synthetic oligonucleotide
gacgcuuuccgacaaccgg

SEQ ID NO: 1083158 - RNA, 19 nt, Artificial Sequence
  Description of Artificial Sequence: Synthetic oligonucleotide
ugacacacaaggcaucgug

SEQ ID NO: 1083159 - RNA, 19 nt, Artificial Sequence
  Description of Artificial Sequence: Synthetic oligonucleotide
ucggacuucagucaugguc

SEQ ID NO: 1083160 - RNA, 19 nt, Artificial Sequence
  Description of Artificial Sequence: Synthetic oligonucleotide
acagcucuagaguucuuac

SEQ ID NO: 1083161 - RNA, 19 nt, Artificial Sequence
  Description of Artificial Sequence: Synthetic oligonucleotide
uguuaaccacuuuggagcc

SEQ ID NO: 1083162 - RNA, 19 nt, Artificial Sequence
  Description of Artificial Sequence: Synthetic oligonucleotide
uuacggaugucaucaaucu

SEQ ID NO: 1083163 - RNA, 19 nt, Artificial Sequence
  Description of Artificial Sequence: Synthetic oligonucleotide
ucuagaguucuuacauugc

SEQ ID NO: 1083164 - RNA, 19 nt, Artificial Sequence
  Description of Artificial Sequence: Synthetic oligonucleotide
cuuacggaugucaucaauc

SEQ ID NO: 1083165 - RNA, 19 nt, Artificial Sequence
  Description of Artificial Sequence: Synthetic oligonucleotide
uguggcaagagagaucugc

SEQ ID NO: 1083166 - RNA, 19 nt, Artificial Sequence
  Description of Artificial Sequence: Synthetic oligonucleotide
uuuccgacaaccggcacgg

SEQ ID NO: 1083167 - RNA, 19 nt, Artificial Sequence
  Description of Artificial Sequence: Synthetic oligonucleotide
uggaugguacaauuuauuc

SEQ ID NO: 1083168 - RNA, 19 nt, Artificial Sequence
  Description of Artificial Sequence: Synthetic oligonucleotide
uuggaaaguucaaccauga

SEQ ID NO: 1083169 - RNA, 19 nt, Artificial Sequence
  Description of Artificial Sequence: Synthetic oligonucleotide
gugagaaucgcaaucuuag

SEQ ID NO: 1083170 - RNA, 19 nt, Artificial Sequence
  Description of Artificial Sequence: Synthetic oligonucleotide
gaaucauucucaccauuug

SEQ ID NO: 1083171 - RNA, 19 nt, Artificial Sequence
  Description of Artificial Sequence: Synthetic oligonucleotide
ucuaugacgugcugaagcu

SEQ ID NO: 1083172 - RNA, 19 nt, Artificial Sequence
  Description of Artificial Sequence: Synthetic oligonucleotide
ucaucgaaggcgagggucc

SEQ ID NO: 1083173 - RNA, 19 nt, Artificial Sequence
  Description of Artificial Sequence: Synthetic oligonucleotide
ucauucguuacagugacau

SEQ ID NO: 1083174 - RNA, 19 nt, Artificial Sequence
  Description of Artificial Sequence: Synthetic oligonucleotide
gucaacaucucuccgcucc

SEQ ID NO: 1083175 - RNA, 19 nt, Artificial Sequence
  Description of Artificial Sequence: Synthetic oligonucleotide
agaucucucgcaccacacc

SEQ ID NO: 1083176 - RNA, 19 nt, Artificial Sequence
  Description of Artificial Sequence: Synthetic oligonucleotide
ugccacuguuuucugaaag

SEQ ID NO: 1083177 - RNA, 19 nt, Artificial Sequence
  Description of Artificial Sequence: Synthetic oligonucleotide
gaaaggggcgcccauacuc

SEQ ID NO: 1083178 - RNA, 19 nt, Artificial Sequence
  Description of Artificial Sequence: Synthetic oligonucleotide
aucaugcuuagaauggugg

SEQ ID NO: 1083179 - RNA, 19 nt, Artificial Sequence
  Description of Artificial Sequence: Synthetic oligonucleotide
ucgauugucucggaugagg

SEQ ID NO: 1083180 - RNA, 19 nt, Artificial Sequence
  Description of Artificial Sequence: Synthetic oligonucleotide
caucauucguuacagugac

SEQ ID NO: 1083181 - RNA, 19 nt, Artificial Sequence
  Description of Artificial Sequence: Synthetic oligonucleotide
uuagucacagugguggaug

SEQ ID NO: 1083182 - RNA, 19 nt, Artificial Sequence
  Description of Artificial Sequence: Synthetic oligonucleotide
cuuuccgacaaccggcacg

SEQ ID NO: 1083183 - RNA, 19 nt, Artificial Sequence
  Description of Artificial Sequence: Synthetic oligonucleotide
ggcaauucugauugggugg

SEQ ID NO: 1083184 - RNA, 19 nt, Artificial Sequence
  Description of Artificial Sequence: Synthetic oligonucleotide
augcuuagaaugguggcac

SEQ ID NO: 1083185 - RNA, 19 nt, Artificial Sequence
  Description of Artificial Sequence: Synthetic oligonucleotide
aauggacacgugagaaucg

SEQ ID NO: 1083186 - RNA, 19 nt, Artificial Sequence
  Description of Artificial Sequence: Synthetic oligonucleotide
gagguuucggaugacacac

SEQ ID NO: 1083187 - RNA, 19 nt, Artificial Sequence
  Description of Artificial Sequence: Synthetic oligonucleotide
caaaugagaucucucgcac

SEQ ID NO: 1083188 - RNA, 19 nt, Artificial Sequence
  Description of Artificial Sequence: Synthetic oligonucleotide
cucgagucccaugagacgg

SEQ ID NO: 1083189 - RNA, 19 nt, Artificial Sequence
  Description of Artificial Sequence: Synthetic oligonucleotide
aagcucucauggcauacug

SEQ ID NO: 1083190 - RNA, 19 nt, Artificial Sequence
  Description of Artificial Sequence: Synthetic oligonucleotide
acggacgccaugcugggcg

SEQ ID NO: 1083191 - RNA, 19 nt, Artificial Sequence
  Description of Artificial Sequence: Synthetic oligonucleotide
acucgauugucucggauga

SEQ ID NO: 1083192 - RNA, 19 nt, Artificial Sequence
  Description of Artificial Sequence: Synthetic oligonucleotide
gcuguuaaccacuuuggag

SEQ ID NO: 1083193 - RNA, 19 nt, Artificial Sequence
  Description of Artificial Sequence: Synthetic oligonucleotide
ugagaaucgcaaucuuagc

SEQ ID NO: 1083194 - RNA, 19 nt, Artificial Sequence
  Description of Artificial Sequence: Synthetic oligonucleotide
uucggaugacacacaaggc

SEQ ID NO: 1083195 - RNA, 19 nt, Artificial Sequence
  Description of Artificial Sequence: Synthetic oligonucleotide
caucaucuuaucuagccca

SEQ ID NO: 1083196 - RNA, 19 nt, Artificial Sequence
  Description of Artificial Sequence: Synthetic oligonucleotide
uggcaauucgggcagccug

SEQ ID NO: 1083197 - RNA, 19 nt, Artificial Sequence
  Description of Artificial Sequence: Synthetic oligonucleotide
ucgacgaucacaccuuuua

SEQ ID NO: 1083198 - RNA, 19 nt, Artificial Sequence
  Description of Artificial Sequence: Synthetic oligonucleotide
ugagaucucucgcaccaca

SEQ ID NO: 1083199 - RNA, 19 nt, Artificial Sequence
  Description of Artificial Sequence: Synthetic oligonucleotide
uggaaaguucaaccaugag

SEQ ID NO: 1083200 - RNA, 19 nt, Artificial Sequence
  Description of Artificial Sequence: Synthetic oligonucleotide
uuaaccacuuuggagccca

SEQ ID NO: 1083201 - RNA, 19 nt, Artificial Sequence
  Description of Artificial Sequence: Synthetic oligonucleotide
agucccaugagacgggacu

SEQ ID NO: 1083202 - RNA, 19 nt, Artificial Sequence
  Description of Artificial Sequence: Synthetic oligonucleotide
ugguggaugguacaauuua

SEQ ID NO: 1083203 - RNA, 19 nt, Artificial Sequence
  Description of Artificial Sequence: Synthetic oligonucleotide
aaauggucacagcucuaga

SEQ ID NO: 1083204 - RNA, 19 nt, Artificial Sequence
  Description of Artificial Sequence: Synthetic oligonucleotide
cacaaggcaucguggaggg

SEQ ID NO: 1083205 - RNA, 19 nt, Artificial Sequence
  Description of Artificial Sequence: Synthetic oligonucleotide
uucacggcgaucucagcca

SEQ ID NO: 1083206 - RNA, 19 nt, Artificial Sequence
  Description of Artificial Sequence: Synthetic oligonucleotide
uuaucgacgaucacaccuu

SEQ ID NO: 1083207 - RNA, 19 nt, Artificial Sequence
  Description of Artificial Sequence: Synthetic oligonucleotide
uuguuuagucacaguggug

SEQ ID NO: 1083208 - RNA, 19 nt, Artificial Sequence
  Description of Artificial Sequence: Synthetic oligonucleotide
agaaccucgggacgauccg

SEQ ID NO: 1083209 - RNA, 19 nt, Artificial Sequence
  Description of Artificial Sequence: Synthetic oligonucleotide
agaugauuggcuucaucau

SEQ ID NO: 1083210 - RNA, 19 nt, Artificial Sequence
  Description of Artificial Sequence: Synthetic oligonucleotide
ucugagaaccucgggacga

SEQ ID NO: 1083211 - RNA, 19 nt, Artificial Sequence
  Description of Artificial Sequence: Synthetic oligonucleotide
ucggcaauucugauugggu

SEQ ID NO: 1083212 - RNA, 19 nt, Artificial Sequence
  Description of Artificial Sequence: Synthetic oligonucleotide
cuuaucgacgaucacaccu

SEQ ID NO: 1083213 - RNA, 19 nt, Artificial Sequence
  Description of Artificial Sequence: Synthetic oligonucleotide
aaccaugagcuuggcaauc

SEQ ID NO: 1083214 - RNA, 19 nt, Artificial Sequence
  Description of Artificial Sequence: Synthetic oligonucleotide
aggcuuacggaugucauca

SEQ ID NO: 1083215 - RNA, 19 nt, Artificial Sequence
  Description of Artificial Sequence: Synthetic oligonucleotide
cauuugucgaugacagcug

SEQ ID NO: 1083216 - RNA, 19 nt, Artificial Sequence
  Description of Artificial Sequence: Synthetic oligonucleotide
acagucaaucccaagggca

SEQ ID NO: 1083217 - RNA, 19 nt, Artificial Sequence
  Description of Artificial Sequence: Synthetic oligonucleotide
uuggcucggacuucaguca

SEQ ID NO: 1083218 - RNA, 19 nt, Artificial Sequence
  Description of Artificial Sequence: Synthetic oligonucleotide
ucucauuguguuugcuaca

SEQ ID NO: 1083219 - RNA, 19 nt, Artificial Sequence
  Description of Artificial Sequence: Synthetic oligonucleotide
aaugaucaucuuguuuccu

SEQ ID NO: 1083220 - RNA, 19 nt, Artificial Sequence
  Description of Artificial Sequence: Synthetic oligonucleotide
aaccacuuuggagcccagc

SEQ ID NO: 1083221 - RNA, 19 nt, Artificial Sequence
  Description of Artificial Sequence: Synthetic oligonucleotide
ucaagguuucuaugacgug

SEQ ID NO: 1083222 - RNA, 19 nt, Artificial Sequence
  Description of Artificial Sequence: Synthetic oligonucleotide
uggaugggauucaugccac

SEQ ID NO: 1083223 - RNA, 19 nt, Artificial Sequence
  Description of Artificial Sequence: Synthetic oligonucleotide
gagaaccucgggacgaucc

SEQ ID NO: 1083224 - RNA, 19 nt, Artificial Sequence
  Description of Artificial Sequence: Synthetic oligonucleotide
cuugcggucuugauccuug

SEQ ID NO: 1083225 - RNA, 19 nt, Artificial Sequence
  Description of Artificial Sequence: Synthetic oligonucleotide
gcugaaguccuuaucgacg

SEQ ID NO: 1083226 - RNA, 19 nt, Artificial Sequence
  Description of Artificial Sequence: Synthetic oligonucleotide
cauuguguuugcuacagcu

SEQ ID NO: 1083227 - RNA, 19 nt, Artificial Sequence
  Description of Artificial Sequence: Synthetic oligonucleotide
aagagacgcuuuccgacaa

SEQ ID NO: 1083228 - RNA, 19 nt, Artificial Sequence
  Description of Artificial Sequence: Synthetic oligonucleotide
uccucggaugaaaaugguc

SEQ ID NO: 1083229 - RNA, 19 nt, Artificial Sequence
  Description of Artificial Sequence: Synthetic oligonucleotide
guugcaauggcgaucagcu

SEQ ID NO: 1083230 - RNA, 19 nt, Artificial Sequence
  Description of Artificial Sequence: Synthetic oligonucleotide
ucucgcaccacaccagcaa

SEQ ID NO: 1083231 - RNA, 19 nt, Artificial Sequence
  Description of Artificial Sequence: Synthetic oligonucleotide
cugaaguccuuaucgacga

SEQ ID NO: 1083232 - RNA, 19 nt, Artificial Sequence
  Description of Artificial Sequence: Synthetic oligonucleotide
auagccgucggcaauucug

SEQ ID NO: 1083233 - RNA, 19 nt, Artificial Sequence
  Description of Artificial Sequence: Synthetic oligonucleotide
uagccgucggcaauucuga

SEQ ID NO: 1083234 - RNA, 19 nt, Artificial Sequence
  Description of Artificial Sequence: Synthetic oligonucleotide
gagacgcuuuccgacaacc

SEQ ID NO: 1083235 - RNA, 19 nt, Artificial Sequence
  Description of Artificial Sequence: Synthetic oligonucleotide
ucgagucccaugagacggg

SEQ ID NO: 1083236 - RNA, 19 nt, Artificial Sequence
  Description of Artificial Sequence: Synthetic oligonucleotide
guuacagugacaucgccau

SEQ ID NO: 1083237 - RNA, 19 nt, Artificial Sequence
  Description of Artificial Sequence: Synthetic oligonucleotide
ucagccauuugucgaugac

SEQ ID NO: 1083238 - RNA, 19 nt, Artificial Sequence
  Description of Artificial Sequence: Synthetic oligonucleotide
gaaagggccauggggauga

SEQ ID NO: 1083239 - RNA, 19 nt, Artificial Sequence
  Description of Artificial Sequence: Synthetic oligonucleotide
accuuuuaucagcuuggug

SEQ ID NO: 1083240 - RNA, 19 nt, Artificial Sequence
  Description of Artificial Sequence: Synthetic oligonucleotide
uggcgaucagcucaaucuc

SEQ ID NO: 1083241 - RNA, 19 nt, Artificial Sequence
  Description of Artificial Sequence: Synthetic oligonucleotide
gucggcaauucugauuggg

SEQ ID NO: 1083242 - RNA, 19 nt, Artificial Sequence
  Description of Artificial Sequence: Synthetic oligonucleotide
aguucuuacauugcucaau

SEQ ID NO: 1083243 - RNA, 19 nt, Artificial Sequence
  Description of Artificial Sequence: Synthetic oligonucleotide
guagugccaaaugagaucu

SEQ ID NO: 1083244 - RNA, 19 nt, Artificial Sequence
  Description of Artificial Sequence: Synthetic oligonucleotide
caaugaccagcauuuuguc

SEQ ID NO: 1083245 - RNA, 19 nt, Artificial Sequence
  Description of Artificial Sequence: Synthetic oligonucleotide
aaaggggcgcccauacuca

SEQ ID NO: 1083246 - RNA, 19 nt, Artificial Sequence
  Description of Artificial Sequence: Synthetic oligonucleotide
uuucuaugacgugcugaag

SEQ ID NO: 1083247 - RNA, 19 nt, Artificial Sequence
  Description of Artificial Sequence: Synthetic oligonucleotide
cauaucauuugugcccuug

SEQ ID NO: 1083248 - RNA, 19 nt, Artificial Sequence
  Description of Artificial Sequence: Synthetic oligonucleotide
agagacgcuuuccgacaac

SEQ ID NO: 1083249 - RNA, 19 nt, Artificial Sequence
  Description of Artificial Sequence: Synthetic oligonucleotide
ucggaugaaaauggucaca

SEQ ID NO: 1083250 - RNA, 19 nt, Artificial Sequence
  Description of Artificial Sequence: Synthetic oligonucleotide
accucgggacgauccgucc

SEQ ID NO: 1083251 - RNA, 19 nt, Artificial Sequence
  Description of Artificial Sequence: Synthetic oligonucleotide
cacggugaggacagcauuc

SEQ ID NO: 1083252 - RNA, 19 nt, Artificial Sequence
  Description of Artificial Sequence: Synthetic oligonucleotide
cauacucaucgaaggcgag

SEQ ID NO: 1083253 - RNA, 19 nt, Artificial Sequence
  Description of Artificial Sequence: Synthetic oligonucleotide
gcaagagacgcuuuccgac

SEQ ID NO: 1083254 - RNA, 19 nt, Artificial Sequence
  Description of Artificial Sequence: Synthetic oligonucleotide
cucaucgaaggcgaggguc

SEQ ID NO: 1083255 - RNA, 19 nt, Artificial Sequence
  Description of Artificial Sequence: Synthetic oligonucleotide
aaccucgggacgauccguc

SEQ ID NO: 1083256 - RNA, 19 nt, Artificial Sequence
  Description of Artificial Sequence: Synthetic oligonucleotide
gcucaaauggacacgugag

SEQ ID NO: 1083257 - RNA, 19 nt, Artificial Sequence
  Description of Artificial Sequence: Synthetic oligonucleotide
uuggagcccagcguggucu

SEQ ID NO: 1083258 - RNA, 19 nt, Artificial Sequence
  Description of Artificial Sequence: Synthetic oligonucleotide
uugccaaucaagguuucua

SEQ ID NO: 1083259 - RNA, 19 nt, Artificial Sequence
  Description of Artificial Sequence: Synthetic oligonucleotide
ucgcaaucuuagcauuuuc

SEQ ID NO: 1083260 - RNA, 19 nt, Artificial Sequence
  Description of Artificial Sequence: Synthetic oligonucleotide
ccgucggcaauucugauug

SEQ ID NO: 1083261 - RNA, 19 nt, Artificial Sequence
  Description of Artificial Sequence: Synthetic oligonucleotide
agucaaucccaagggcagg

SEQ ID NO: 1083262 - RNA, 19 nt, Artificial Sequence
  Description of Artificial Sequence: Synthetic oligonucleotide
caaucugaugauccacauc

SEQ ID NO: 1083263 - RNA, 19 nt, Artificial Sequence
  Description of Artificial Sequence: Synthetic oligonucleotide
ugucuuuuguagugccaaa

SEQ ID NO: 1083264 - RNA, 19 nt, Artificial Sequence
  Description of Artificial Sequence: Synthetic oligonucleotide
agucaacaucucuccgcuc

SEQ ID NO: 1083265 - RNA, 19 nt, Artificial Sequence
  Description of Artificial Sequence: Synthetic oligonucleotide
gugcaaacagucaauccca

SEQ ID NO: 1083266 - RNA, 19 nt, Artificial Sequence
  Description of Artificial Sequence: Synthetic oligonucleotide
caagagacgcuuuccgaca

SEQ ID NO: 1083267 - RNA, 19 nt, Artificial Sequence
  Description of Artificial Sequence: Synthetic oligonucleotide
gugcucuauggcaauucgg

SEQ ID NO: 1083268 - RNA, 19 nt, Artificial Sequence
  Description of Artificial Sequence: Synthetic oligonucleotide
caugcuuagaaugguggca

SEQ ID NO: 1083269 - RNA, 19 nt, Artificial Sequence
  Description of Artificial Sequence: Synthetic oligonucleotide
aaucgcaaucuuagcauuu

SEQ ID NO: 1083270 - RNA, 19 nt, Artificial Sequence
  Description of Artificial Sequence: Synthetic oligonucleotide
cugauuggguggaugccuc

SEQ ID NO: 1083271 - RNA, 19 nt, Artificial Sequence
  Description of Artificial Sequence: Synthetic oligonucleotide
uuugugcccuugugcaaac

SEQ ID NO: 1083272 - RNA, 19 nt, Artificial Sequence
  Description of Artificial Sequence: Synthetic oligonucleotide
cuuaucuagcccauuuggu

SEQ ID NO: 1083273 - RNA, 19 nt, Artificial Sequence
  Description of Artificial Sequence: Synthetic oligonucleotide
ggcucaaauggacacguga

SEQ ID NO: 1083274 - RNA, 19 nt, Artificial Sequence
  Description of Artificial Sequence: Synthetic oligonucleotide
agcccagcguggucuuugc

SEQ ID NO: 1083275 - RNA, 19 nt, Artificial Sequence
  Description of Artificial Sequence: Synthetic oligonucleotide
agcauucacggcgaucuca

SEQ ID NO: 1083276 - RNA, 19 nt, Artificial Sequence
  Description of Artificial Sequence: Synthetic oligonucleotide
agggucguuuaugucaaca

SEQ ID NO: 1083277 - RNA, 19 nt, Artificial Sequence
  Description of Artificial Sequence: Synthetic oligonucleotide
gaugagaaaggggcgccca

SEQ ID NO: 1083278 - RNA, 19 nt, Artificial Sequence
  Description of Artificial Sequence: Synthetic oligonucleotide
guuucggaugacacacaag

SEQ ID NO: 1083279 - RNA, 19 nt, Artificial Sequence
  Description of Artificial Sequence: Synthetic oligonucleotide
ucuagccucccacccacuu

SEQ ID NO: 1083280 - RNA, 19 nt, Artificial Sequence
  Description of Artificial Sequence: Synthetic oligonucleotide
guguuugcuacagcuuuug

SEQ ID NO: 1083281 - RNA, 19 nt, Artificial Sequence
  Description of Artificial Sequence: Synthetic oligonucleotide
cuucgguuuagguggcuca

SEQ ID NO: 1083282 - RNA, 19 nt, Artificial Sequence
  Description of Artificial Sequence: Synthetic oligonucleotide
agacgcuuuccgacaaccg

SEQ ID NO: 1083283 - RNA, 19 nt, Artificial Sequence
  Description of Artificial Sequence: Synthetic oligonucleotide
ccgacaaccggcacggacc

SEQ ID NO: 1083284 - RNA, 19 nt, Artificial Sequence
  Description of Artificial Sequence: Synthetic oligonucleotide
cacacccuuuauuguuuag

SEQ ID NO: 1083285 - RNA, 19 nt, Artificial Sequence
  Description of Artificial Sequence: Synthetic oligonucleotide
ggcauucugaagaaguaga

SEQ ID NO: 1083286 - RNA, 19 nt, Artificial Sequence
  Description of Artificial Sequence: Synthetic oligonucleotide
ccaaaugagaucucucgca

SEQ ID NO: 1083287 - RNA, 19 nt, Artificial Sequence
  Description of Artificial Sequence: Synthetic oligonucleotide
augagaucucucgcaccac

SEQ ID NO: 1083288 - RNA, 19 nt, Artificial Sequence
  Description of Artificial Sequence: Synthetic oligonucleotide
ggcuuuguaguccuccaca

SEQ ID NO: 1083289 - RNA, 19 nt, Artificial Sequence
  Description of Artificial Sequence: Synthetic oligonucleotide
cuccuacccagcgaacugc

SEQ ID NO: 1083290 - RNA, 19 nt, Artificial Sequence
  Description of Artificial Sequence: Synthetic oligonucleotide
gauccguccuccuguugca

SEQ ID NO: 1083291 - RNA, 19 nt, Artificial Sequence
  Description of Artificial Sequence: Synthetic oligonucleotide
ccagguuagcaccaguuuc

SEQ ID NO: 1083292 - RNA, 19 nt, Artificial Sequence
  Description of Artificial Sequence: Synthetic oligonucleotide
ggggaugaccuccagggca

SEQ ID NO: 1083293 - RNA, 19 nt, Artificial Sequence
  Description of Artificial Sequence: Synthetic oligonucleotide
uaucgacgaucacaccuuu

SEQ ID NO: 1083294 - RNA, 19 nt, Artificial Sequence
  Description of Artificial Sequence: Synthetic oligonucleotide
agaaaggggcgcccauacu

SEQ ID NO: 1083295 - RNA, 19 nt, Artificial Sequence
  Description of Artificial Sequence: Synthetic oligonucleotide
gggcauucugaagaaguag

SEQ ID NO: 1083296 - RNA, 19 nt, Artificial Sequence
  Description of Artificial Sequence: Synthetic oligonucleotide
gcucuauggcaauucgggc

SEQ ID NO: 1083297 - RNA, 19 nt, Artificial Sequence
  Description of Artificial Sequence: Synthetic oligonucleotide
ugcuucgucuucgguuuag

SEQ ID NO: 1083298 - RNA, 19 nt, Artificial Sequence
  Description of Artificial Sequence: Synthetic oligonucleotide
caggcuuacggaugucauc

SEQ ID NO: 1083299 - RNA, 19 nt, Artificial Sequence
  Description of Artificial Sequence: Synthetic oligonucleotide
cuaugacgugcugaagcug

SEQ ID NO: 1083300 - RNA, 19 nt, Artificial Sequence
  Description of Artificial Sequence: Synthetic oligonucleotide
ucgaaggcgagggucccca

SEQ ID NO: 1083301 - RNA, 19 nt, Artificial Sequence
  Description of Artificial Sequence: Synthetic oligonucleotide
gggacuugcggucuugauc

SEQ ID NO: 1083302 - RNA, 19 nt, Artificial Sequence
  Description of Artificial Sequence: Synthetic oligonucleotide
caucucuccgcuccauauc

SEQ ID NO: 1083303 - RNA, 19 nt, Artificial Sequence
  Description of Artificial Sequence: Synthetic oligonucleotide
aucgaaggcgagggucccc

SEQ ID NO: 1083304 - RNA, 19 nt, Artificial Sequence
  Description of Artificial Sequence: Synthetic oligonucleotide
uggcucggacuucagucau

SEQ ID NO: 1083305 - RNA, 19 nt, Artificial Sequence
  Description of Artificial Sequence: Synthetic oligonucleotide
gaaucgcaaucuuagcauu

SEQ ID NO: 1083306 - RNA, 19 nt, Artificial Sequence
  Description of Artificial Sequence: Synthetic oligonucleotide
uggcucaaauggacacgug

SEQ ID NO: 1083307 - RNA, 19 nt, Artificial Sequence
  Description of Artificial Sequence: Synthetic oligonucleotide
uucgguuuagguggcucaa

SEQ ID NO: 1083308 - RNA, 19 nt, Artificial Sequence
  Description of Artificial Sequence: Synthetic oligonucleotide
cagguuagcaccaguuucu

SEQ ID NO: 1083309 - RNA, 19 nt, Artificial Sequence
  Description of Artificial Sequence: Synthetic oligonucleotide
cgaucucagccauuugucg

SEQ ID NO: 1083310 - RNA, 19 nt, Artificial Sequence
  Description of Artificial Sequence: Synthetic oligonucleotide
cauucacggcgaucucagc

SEQ ID NO: 1083311 - RNA, 19 nt, Artificial Sequence
  Description of Artificial Sequence: Synthetic oligonucleotide
guuaaccacuuuggagccc

SEQ ID NO: 1083312 - RNA, 19 nt, Artificial Sequence
  Description of Artificial Sequence: Synthetic oligonucleotide
aaggggcgcccauacucau

SEQ ID NO: 1083313 - RNA, 19 nt, Artificial Sequence
  Description of Artificial Sequence: Synthetic oligonucleotide
ucccaugagacgggacuug

SEQ ID NO: 1083314 - RNA, 19 nt, Artificial Sequence
  Description of Artificial Sequence: Synthetic oligonucleotide
uucacuugcuuggcucgga

SEQ ID NO: 1083315 - RNA, 19 nt, Artificial Sequence
  Description of Artificial Sequence: Synthetic oligonucleotide
guccccacggacgccaugc

SEQ ID NO: 1083316 - RNA, 19 nt, Artificial Sequence
  Description of Artificial Sequence: Synthetic oligonucleotide
gaccgcucgggacuagaga

SEQ ID NO: 1083317 - RNA, 19 nt, Artificial Sequence
  Description of Artificial Sequence: Synthetic oligonucleotide
gguuucggaugacacacaa

SEQ ID NO: 1083318 - RNA, 19 nt, Artificial Sequence
  Description of Artificial Sequence: Synthetic oligonucleotide
aggcaucguggagggaucg

SEQ ID NO: 1083319 - RNA, 19 nt, Artificial Sequence
  Description of Artificial Sequence: Synthetic oligonucleotide
gcauucacggcgaucucag

SEQ ID NO: 1083320 - RNA, 19 nt, Artificial Sequence
  Description of Artificial Sequence: Synthetic oligonucleotide
uuaugucaacaagcacacu

SEQ ID NO: 1083321 - RNA, 19 nt, Artificial Sequence
  Description of Artificial Sequence: Synthetic oligonucleotide
acggugaggacagcauuca

SEQ ID NO: 1083322 - RNA, 19 nt, Artificial Sequence
  Description of Artificial Sequence: Synthetic oligonucleotide
ugcggucuugauccuugau

SEQ ID NO: 1083323 - RNA, 19 nt, Artificial Sequence
  Description of Artificial Sequence: Synthetic oligonucleotide
aggacagcauucacggcga

SEQ ID NO: 1083324 - RNA, 19 nt, Artificial Sequence
  Description of Artificial Sequence: Synthetic oligonucleotide
cucgggacgauccguccuc

SEQ ID NO: 1083325 - RNA, 19 nt, Artificial Sequence
  Description of Artificial Sequence: Synthetic oligonucleotide
ugacaucgccauccuuauc

SEQ ID NO: 1083326 - RNA, 19 nt, Artificial Sequence
  Description of Artificial Sequence: Synthetic oligonucleotide
gguucagggucguuuaugu

SEQ ID NO: 1083327 - RNA, 19 nt, Artificial Sequence
  Description of Artificial Sequence: Synthetic oligonucleotide
aucgcaaucuuagcauuuu

SEQ ID NO: 1083328 - RNA, 19 nt, Artificial Sequence
  Description of Artificial Sequence: Synthetic oligonucleotide
uggagggaucgcuuugcuu

SEQ ID NO: 1083329 - RNA, 19 nt, Artificial Sequence
  Description of Artificial Sequence: Synthetic oligonucleotide
acucaucgaaggcgagggu

SEQ ID NO: 1083330 - RNA, 19 nt, Artificial Sequence
  Description of Artificial Sequence: Synthetic oligonucleotide
aucaucuuaucuagcccau

SEQ ID NO: 1083331 - RNA, 19 nt, Artificial Sequence
  Description of Artificial Sequence: Synthetic oligonucleotide
ccauacucaucgaaggcga

SEQ ID NO: 1083332 - RNA, 19 nt, Artificial Sequence
  Description of Artificial Sequence: Synthetic oligonucleotide
ggcgagcugcaagagacgc

SEQ ID NO: 1083333 - RNA, 19 nt, Artificial Sequence
  Description of Artificial Sequence: Synthetic oligonucleotide
gacagcauucacggcgauc

SEQ ID NO: 1083334 - RNA, 19 nt, Artificial Sequence
  Description of Artificial Sequence: Synthetic oligonucleotide
gggucguuuaugucaacaa

SEQ ID NO: 1083335 - RNA, 19 nt, Artificial Sequence
  Description of Artificial Sequence: Synthetic oligonucleotide
gcgcaggagauuucagcag

SEQ ID NO: 1083336 - RNA, 19 nt, Artificial Sequence
  Description of Artificial Sequence: Synthetic oligonucleotide
ggcgaucucagccauuugu

SEQ ID NO: 1083337 - RNA, 19 nt, Artificial Sequence
  Description of Artificial Sequence: Synthetic oligonucleotide
cauuugugcccuugugcaa

SEQ ID NO: 1083338 - RNA, 19 nt, Artificial Sequence
  Description of Artificial Sequence: Synthetic oligonucleotide
ccucgagucccaugagacg

SEQ ID NO: 1083339 - RNA, 19 nt, Artificial Sequence
  Description of Artificial Sequence: Synthetic oligonucleotide
agcgaacugcagggagggc

SEQ ID NO: 1083340 - RNA, 19 nt, Artificial Sequence
  Description of Artificial Sequence: Synthetic oligonucleotide
cgucacauccagcuugugc

SEQ ID NO: 1083341 - RNA, 19 nt, Artificial Sequence
  Description of Artificial Sequence: Synthetic oligonucleotide
gcgaucagcucaaucucag

SEQ ID NO: 1083342 - RNA, 19 nt, Artificial Sequence
  Description of Artificial Sequence: Synthetic oligonucleotide
caucgaaggcgaggguccc

SEQ ID NO: 1083343 - RNA, 19 nt, Artificial Sequence
  Description of Artificial Sequence: Synthetic oligonucleotide
gggacgauccguccuccug

SEQ ID NO: 1083344 - RNA, 19 nt, Artificial Sequence
  Description of Artificial Sequence: Synthetic oligonucleotide
acggcgaucucagccauuu

SEQ ID NO: 1083345 - RNA, 19 nt, Artificial Sequence
  Description of Artificial Sequence: Synthetic oligonucleotide
ucucaccauuuguguggca

SEQ ID NO: 1083346 - RNA, 19 nt, Artificial Sequence
  Description of Artificial Sequence: Synthetic oligonucleotide
ucaucuuaucuagcccauu

SEQ ID NO: 1083347 - RNA, 19 nt, Artificial Sequence
  Description of Artificial Sequence: Synthetic oligonucleotide
ucauagccgucggcaauuc

SEQ ID NO: 1083348 - RNA, 19 nt, Artificial Sequence
  Description of Artificial Sequence: Synthetic oligonucleotide
gccucgagucccaugagac

SEQ ID NO: 1083349 - RNA, 19 nt, Artificial Sequence
  Description of Artificial Sequence: Synthetic oligonucleotide
ggcacuuaucugccucuug

SEQ ID NO: 1083350 - RNA, 19 nt, Artificial Sequence
  Description of Artificial Sequence: Synthetic oligonucleotide
cguuuaugucaacaagcac

SEQ ID NO: 1083351 - RNA, 19 nt, Artificial Sequence
  Description of Artificial Sequence: Synthetic oligonucleotide
ccauuugucgaugacagcu

SEQ ID NO: 1083352 - RNA, 19 nt, Artificial Sequence
  Description of Artificial Sequence: Synthetic oligonucleotide
cucgauugucucggaugag

SEQ ID NO: 1083353 - RNA, 19 nt, Artificial Sequence
  Description of Artificial Sequence: Synthetic oligonucleotide
ucgguuuagguggcucaaa

SEQ ID NO: 1083354 - RNA, 19 nt, Artificial Sequence
  Description of Artificial Sequence: Synthetic oligonucleotide
acgauccguccuccuguug

SEQ ID NO: 1083355 - RNA, 19 nt, Artificial Sequence
  Description of Artificial Sequence: Synthetic oligonucleotide
caauucgggcagccuguuc

SEQ ID NO: 1083356 - RNA, 19 nt, Artificial Sequence
  Description of Artificial Sequence: Synthetic oligonucleotide
ugagaaccucgggacgauc

SEQ ID NO: 1083357 - RNA, 19 nt, Artificial Sequence
  Description of Artificial Sequence: Synthetic oligonucleotide
ucgggacgauccguccucc

SEQ ID NO: 1083358 - RNA, 19 nt, Artificial Sequence
  Description of Artificial Sequence: Synthetic oligonucleotide
auggcaauucgggcagccu

SEQ ID NO: 1083359 - RNA, 19 nt, Artificial Sequence
  Description of Artificial Sequence: Synthetic oligonucleotide
cuauggcaauucgggcagc

SEQ ID NO: 1083360 - RNA, 19 nt, Artificial Sequence
  Description of Artificial Sequence: Synthetic oligonucleotide
ggagauuucagcagccccu

SEQ ID NO: 1083361 - RNA, 19 nt, Artificial Sequence
  Description of Artificial Sequence: Synthetic oligonucleotide
ggguucagggucguuuaug

SEQ ID NO: 1083362 - RNA, 19 nt, Artificial Sequence
  Description of Artificial Sequence: Synthetic oligonucleotide
ggcaaauagccagguuagc

SEQ ID NO: 1083363 - RNA, 19 nt, Artificial Sequence
  Description of Artificial Sequence: Synthetic oligonucleotide
gcgcccauacucaucgaag

SEQ ID NO: 1083364 - RNA, 19 nt, Artificial Sequence
  Description of Artificial Sequence: Synthetic oligonucleotide
cucucgcaccacaccagca

SEQ ID NO: 1083365 - RNA, 19 nt, Artificial Sequence
  Description of Artificial Sequence: Synthetic oligonucleotide
augugagacuugagggccu

SEQ ID NO: 1083366 - RNA, 19 nt, Artificial Sequence
  Description of Artificial Sequence: Synthetic oligonucleotide
ugacgugcugaagcugcau

SEQ ID NO: 1083367 - RNA, 19 nt, Artificial Sequence
  Description of Artificial Sequence: Synthetic oligonucleotide
gucuuuuguagugccaaau

SEQ ID NO: 1083368 - RNA, 19 nt, Artificial Sequence
  Description of Artificial Sequence: Synthetic oligonucleotide
gccauuugucgaugacagc

SEQ ID NO: 1083369 - RNA, 19 nt, Artificial Sequence
  Description of Artificial Sequence: Synthetic oligonucleotide
ggagggcauucugaagaag

SEQ ID NO: 1083370 - RNA, 19 nt, Artificial Sequence
  Description of Artificial Sequence: Synthetic oligonucleotide
gcgaucucagccauuuguc

SEQ ID NO: 1083371 - RNA, 19 nt, Artificial Sequence
  Description of Artificial Sequence: Synthetic oligonucleotide
cguuacagugacaucgcca

SEQ ID NO: 1083372 - RNA, 19 nt, Artificial Sequence
  Description of Artificial Sequence: Synthetic oligonucleotide
cacccacuuugccuuccac

SEQ ID NO: 1083373 - RNA, 19 nt, Artificial Sequence
  Description of Artificial Sequence: Synthetic oligonucleotide
ccuuaucgacgaucacacc

SEQ ID NO: 1083374 - RNA, 19 nt, Artificial Sequence
  Description of Artificial Sequence: Synthetic oligonucleotide
guucaaccaugagcuuggc

SEQ ID NO: 1083375 - RNA, 19 nt, Artificial Sequence
  Description of Artificial Sequence: Synthetic oligonucleotide
gagucccaugagacgggac

SEQ ID NO: 1083376 - RNA, 19 nt, Artificial Sequence
  Description of Artificial Sequence: Synthetic oligonucleotide
cgcuccauaucugccacgg

SEQ ID NO: 1083377 - RNA, 19 nt, Artificial Sequence
  Description of Artificial Sequence: Synthetic oligonucleotide
ccuccuacccagcgaacug

SEQ ID NO: 1083378 - RNA, 19 nt, Artificial Sequence
  Description of Artificial Sequence: Synthetic oligonucleotide
ggucacagcucuagaguuc

SEQ ID NO: 1083379 - RNA, 19 nt, Artificial Sequence
  Description of Artificial Sequence: Synthetic oligonucleotide
cgacaaccggcacggaccg

SEQ ID NO: 1083380 - RNA, 19 nt, Artificial Sequence
  Description of Artificial Sequence: Synthetic oligonucleotide
ggcgaucagcucaaucuca

SEQ ID NO: 1083381 - RNA, 19 nt, Artificial Sequence
  Description of Artificial Sequence: Synthetic oligonucleotide
agggcgcaggagauuucag

SEQ ID NO: 1083382 - RNA, 19 nt, Artificial Sequence
  Description of Artificial Sequence: Synthetic oligonucleotide
aggggcgcccauacucauc

SEQ ID NO: 1083383 - RNA, 19 nt, Artificial Sequence
  Description of Artificial Sequence: Synthetic oligonucleotide
cuagcccauuuggucccag

SEQ ID NO: 1083384 - RNA, 19 nt, Artificial Sequence
  Description of Artificial Sequence: Synthetic oligonucleotide
cagggcgcaggagauuuca

SEQ ID NO: 1083385 - RNA, 19 nt, Artificial Sequence
  Description of Artificial Sequence: Synthetic oligonucleotide
ggacgauccguccuccugu

SEQ ID NO: 1083386 - RNA, 19 nt, Artificial Sequence
  Description of Artificial Sequence: Synthetic oligonucleotide
agguuucggaugacacaca

SEQ ID NO: 1083387 - RNA, 19 nt, Artificial Sequence
  Description of Artificial Sequence: Synthetic oligonucleotide
ccauacacaacucgauugu

SEQ ID NO: 1083388 - RNA, 19 nt, Artificial Sequence
  Description of Artificial Sequence: Synthetic oligonucleotide
gagacgggacuugcggucu

SEQ ID NO: 1083389 - RNA, 19 nt, Artificial Sequence
  Description of Artificial Sequence: Synthetic oligonucleotide
ggcgcccauacucaucgaa

SEQ ID NO: 1083390 - RNA, 19 nt, Artificial Sequence
  Description of Artificial Sequence: Synthetic oligonucleotide
gggccuccuacccagcgaa

SEQ ID NO: 1083391 - RNA, 19 nt, Artificial Sequence
  Description of Artificial Sequence: Synthetic oligonucleotide
gaaccucgggacgauccgu

SEQ ID NO: 1083392 - RNA, 19 nt, Artificial Sequence
  Description of Artificial Sequence: Synthetic oligonucleotide
gguggaugguacaauuuau

SEQ ID NO: 1083393 - RNA, 19 nt, Artificial Sequence
  Description of Artificial Sequence: Synthetic oligonucleotide
ggaccgcucgggacuagag

SEQ ID NO: 1083394 - RNA, 19 nt, Artificial Sequence
  Description of Artificial Sequence: Synthetic oligonucleotide
guugggcacuuaucugccu

SEQ ID NO: 1083395 - RNA, 19 nt, Artificial Sequence
  Description of Artificial Sequence: Synthetic oligonucleotide
aucagggguucagggucgu

SEQ ID NO: 1083396 - RNA, 19 nt, Artificial Sequence
  Description of Artificial Sequence: Synthetic oligonucleotide
caaccggcacggaccgcuc

SEQ ID NO: 1083397 - RNA, 19 nt, Artificial Sequence
  Description of Artificial Sequence: Synthetic oligonucleotide
gacaaccggcacggaccgc

SEQ ID NO: 1083398 - RNA, 19 nt, Artificial Sequence
  Description of Artificial Sequence: Synthetic oligonucleotide
gggcgagcugcaagagacg

SEQ ID NO: 1083399 - RNA, 19 nt, Artificial Sequence
  Description of Artificial Sequence: Synthetic oligonucleotide
gccucccacccacuuugcc

SEQ ID NO: 1083400 - RNA, 19 nt, Artificial Sequence
  Description of Artificial Sequence: Synthetic oligonucleotide
cgugagaaucgcaaucuua

SEQ ID NO: 1083401 - RNA, 19 nt, Artificial Sequence
  Description of Artificial Sequence: Synthetic oligonucleotide
aucgacgaucacaccuuuu

SEQ ID NO: 1083402 - RNA, 19 nt, Artificial Sequence
  Description of Artificial Sequence: Synthetic oligonucleotide
agacgggacuugcggucuu

SEQ ID NO: 1083403 - RNA, 19 nt, Artificial Sequence
  Description of Artificial Sequence: Synthetic oligonucleotide
uaucugccucuuggcugac

SEQ ID NO: 1083404 - RNA, 19 nt, Artificial Sequence
  Description of Artificial Sequence: Synthetic oligonucleotide
gcuuuccgacaaccggcac

SEQ ID NO: 1083405 - RNA, 19 nt, Artificial Sequence
  Description of Artificial Sequence: Synthetic oligonucleotide
cguggagggaucgcuuugc

SEQ ID NO: 1083406 - RNA, 19 nt, Artificial Sequence
  Description of Artificial Sequence: Synthetic oligonucleotide
caaucccaagggcaggguu

SEQ ID NO: 1083407 - RNA, 19 nt, Artificial Sequence
  Description of Artificial Sequence: Synthetic oligonucleotide
gacgauccguccuccuguu

SEQ ID NO: 1083408 - RNA, 19 nt, Artificial Sequence
  Description of Artificial Sequence: Synthetic oligonucleotide
gcuuacggaugucaucaau

SEQ ID NO: 1083409 - RNA, 19 nt, Artificial Sequence
  Description of Artificial Sequence: Synthetic oligonucleotide
auccguccuccuguugcaa

SEQ ID NO: 1083410 - RNA, 19 nt, Artificial Sequence
  Description of Artificial Sequence: Synthetic oligonucleotide
gugguggaugguacaauuu

SEQ ID NO: 1083411 - RNA, 19 nt, Artificial Sequence
  Description of Artificial Sequence: Synthetic oligonucleotide
ggcaauucgggcagccugu

SEQ ID NO: 1083412 - RNA, 19 nt, Artificial Sequence
  Description of Artificial Sequence: Synthetic oligonucleotide
gggccucgagucccaugag

SEQ ID NO: 1083413 - RNA, 19 nt, Artificial Sequence
  Description of Artificial Sequence: Synthetic oligonucleotide
gcccuugugcaaacaguca

SEQ ID NO: 1083414 - RNA, 19 nt, Artificial Sequence
  Description of Artificial Sequence: Synthetic oligonucleotide
cccauuuggucccagugau

SEQ ID NO: 1083415 - RNA, 19 nt, Artificial Sequence
  Description of Artificial Sequence: Synthetic oligonucleotide
cgucuucgguuuagguggc

SEQ ID NO: 1083416 - RNA, 19 nt, Artificial Sequence
  Description of Artificial Sequence: Synthetic oligonucleotide
ggcucggacuucagucaug

SEQ ID NO: 1083417 - RNA, 19 nt, Artificial Sequence
  Description of Artificial Sequence: Synthetic oligonucleotide
ggcuuacggaugucaucaa

SEQ ID NO: 1083418 - RNA, 19 nt, Artificial Sequence
  Description of Artificial Sequence: Synthetic oligonucleotide
uuccgacaaccggcacgga

SEQ ID NO: 1083419 - RNA, 19 nt, Artificial Sequence
  Description of Artificial Sequence: Synthetic oligonucleotide
ccucccacccacuuugccu

SEQ ID NO: 1083420 - RNA, 19 nt, Artificial Sequence
  Description of Artificial Sequence: Synthetic oligonucleotide
cuagccucccacccacuuu

SEQ ID NO: 1083421 - RNA, 19 nt, Artificial Sequence
  Description of Artificial Sequence: Synthetic oligonucleotide
ucagggguucagggucguu

SEQ ID NO: 1083422 - RNA, 19 nt, Artificial Sequence
  Description of Artificial Sequence: Synthetic oligonucleotide
gccagguuagcaccaguuu

SEQ ID NO: 1083423 - RNA, 19 nt, Artificial Sequence
  Description of Artificial Sequence: Synthetic oligonucleotide
cgucggcaauucugauugg

SEQ ID NO: 1083424 - RNA, 19 nt, Artificial Sequence
  Description of Artificial Sequence: Synthetic oligonucleotide
gcaucguggagggaucgcu

SEQ ID NO: 1083425 - RNA, 19 nt, Artificial Sequence
  Description of Artificial Sequence: Synthetic oligonucleotide
gucccaugagacgggacuu

SEQ ID NO: 1083426 - RNA, 19 nt, Artificial Sequence
  Description of Artificial Sequence: Synthetic oligonucleotide
ggcauccgcaaaagcucuc

SEQ ID NO: 1083427 - RNA, 19 nt, Artificial Sequence
  Description of Artificial Sequence: Synthetic oligonucleotide
gggcauccgcaaaagcucu

SEQ ID NO: 1083428 - RNA, 19 nt, Artificial Sequence
  Description of Artificial Sequence: Synthetic oligonucleotide
cgcuuuccgacaaccggca

SEQ ID NO: 1083429 - RNA, 19 nt, Artificial Sequence
  Description of Artificial Sequence: Synthetic oligonucleotide
acggaccgcucgggacuag

SEQ ID NO: 1083430 - RNA, 19 nt, Artificial Sequence
  Description of Artificial Sequence: Synthetic oligonucleotide
gccuccuacccagcgaacu

SEQ ID NO: 1083431 - RNA, 19 nt, Artificial Sequence
  Description of Artificial Sequence: Synthetic oligonucleotide
cagugguggaugguacaau

SEQ ID NO: 1083432 - RNA, 19 nt, Artificial Sequence
  Description of Artificial Sequence: Synthetic oligonucleotide
ccagggcgcaggagauuuc

SEQ ID NO: 1083433 - RNA, 19 nt, Artificial Sequence
  Description of Artificial Sequence: Synthetic oligonucleotide
cucuagccucccacccacu

SEQ ID NO: 1083434 - RNA, 19 nt, Artificial Sequence
  Description of Artificial Sequence: Synthetic oligonucleotide
gcccagcguggucuuugca

SEQ ID NO: 1083435 - RNA, 19 nt, Artificial Sequence
  Description of Artificial Sequence: Synthetic oligonucleotide
cacggaccgcucgggacua

SEQ ID NO: 1083436 - RNA, 19 nt, Artificial Sequence
  Description of Artificial Sequence: Synthetic oligonucleotide
ccuuaucuaccaucaucuu

SEQ ID NO: 1083437 - RNA, 19 nt, Artificial Sequence
  Description of Artificial Sequence: Synthetic oligonucleotide
cguggucuuugcagucuga

SEQ ID NO: 1083438 - RNA, 19 nt, Artificial Sequence
  Description of Artificial Sequence: Synthetic oligonucleotide
gggguucagggucguuuau

SEQ ID NO: 1083439 - RNA, 19 nt, Artificial Sequence
  Description of Artificial Sequence: Synthetic oligonucleotide
ccucgggacgauccguccu

SEQ ID NO: 1083440 - RNA, 19 nt, Artificial Sequence
  Description of Artificial Sequence: Synthetic oligonucleotide
cgagcugcaagagacgcuu

SEQ ID NO: 1083441 - RNA, 19 nt, Artificial Sequence
  Description of Artificial Sequence: Synthetic oligonucleotide
gcgagcugcaagagacgcu

SEQ ID NO: 1083442 - RNA, 19 nt, Artificial Sequence
  Description of Artificial Sequence: Synthetic oligonucleotide
gcauaucauuugugcccuu

SEQ ID NO: 1083443 - RNA, 19 nt, Artificial Sequence
  Description of Artificial Sequence: Synthetic oligonucleotide
cacggcgaucucagccauu

SEQ ID NO: 1083444 - RNA, 19 nt, Artificial Sequence
  Description of Artificial Sequence: Synthetic oligonucleotide
cggcgaucucagccauuug

SEQ ID NO: 1083445 - RNA, 19 nt, Artificial Sequence
  Description of Artificial Sequence: Synthetic oligonucleotide
gcaauucgggcagccuguu

SEQ ID NO: 1083446 - RNA, 19 nt, Artificial Sequence
  Description of Artificial Sequence: Synthetic oligonucleotide
cggcacggaccgcucggga

SEQ ID NO: 1083447 - RNA, 19 nt, Artificial Sequence
  Description of Artificial Sequence: Synthetic oligonucleotide
cggaccgcucgggacuaga

SEQ ID NO: 1083448 - RNA, 19 nt, Artificial Sequence
  Description of Artificial Sequence: Synthetic oligonucleotide
cgggacuugcggucuugau

SEQ ID NO: 1083449 - RNA, 19 nt, Artificial Sequence
  Description of Artificial Sequence: Synthetic oligonucleotide
cgggacgauccguccuccu

SEQ ID NO: 1083450 - RNA, 19 nt, Artificial Sequence
  Description of Artificial Sequence: Synthetic oligonucleotide
aauaauuaaguuauuaccc

SEQ ID NO: 1083451 - RNA, 19 nt, Artificial Sequence
  Description of Artificial Sequence: Synthetic oligonucleotide
uaaguuauuacccugacag

SEQ ID NO: 1083452 - RNA, 19 nt, Artificial Sequence
  Description of Artificial Sequence: Synthetic oligonucleotide
  modified_base (7)..(7): a, c, u, g, unknown or other
aagaucncaauccuaacag

SEQ ID NO: 1083453 - RNA, 19 nt, Artificial Sequence
  Description of Artificial Sequence: Synthetic oligonucleotide
aaauggagacaccugaggc

SEQ ID NO: 1083454 - RNA, 19 nt, Artificial Sequence
  Description of Artificial Sequence: Synthetic oligonucleotide
ucuagcauugcuuucaggg

SEQ ID NO: 1083455 - RNA, 19 nt, Artificial Sequence
  Description of Artificial Sequence: Synthetic oligonucleotide
acacccaucagauugaugg

SEQ ID NO: 1083456 - RNA, 19 nt, Artificial Sequence
  Description of Artificial Sequence: Synthetic oligonucleotide
aacauugucaaccacgcug

SEQ ID NO: 1083457 - RNA, 19 nt, Artificial Sequence
  Description of Artificial Sequence: Synthetic oligonucleotide
ucuaccauuaucauggcug

SEQ ID NO: 1083458 - RNA, 19 nt, Artificial Sequence
  Description of Artificial Sequence: Synthetic oligonucleotide
ugaaauguaugccagcucc

SEQ ID NO: 1083459 - RNA, 19 nt, Artificial Sequence
  Description of Artificial Sequence: Synthetic oligonucleotide
aauuuaaauccuuuuguga

SEQ ID NO: 1083460 - RNA, 19 nt, Artificial Sequence
  Description of Artificial Sequence: Synthetic oligonucleotide
ucugguaaucugaagacag

SEQ ID NO: 1083461 - RNA, 19 nt, Artificial Sequence
  Description of Artificial Sequence: Synthetic oligonucleotide
uuauuacccugacagaagg

SEQ ID NO: 1083462 - RNA, 19 nt, Artificial Sequence
  Description of Artificial Sequence: Synthetic oligonucleotide
aaucugaagacagauuaac

SEQ ID NO: 1083463 - RNA, 19 nt, Artificial Sequence
  Description of Artificial Sequence: Synthetic oligonucleotide
guuagaaacauugucaacc

SEQ ID NO: 1083464 - RNA, 19 nt, Artificial Sequence
  Description of Artificial Sequence: Synthetic oligonucleotide
uaaaaugacauagagacua

SEQ ID NO: 1083465 - RNA, 19 nt, Artificial Sequence
  Description of Artificial Sequence: Synthetic oligonucleotide
agacucaacucauuggacc

SEQ ID NO: 1083466 - RNA, 19 nt, Artificial Sequence
  Description of Artificial Sequence: Synthetic oligonucleotide
uaacaauugacugugacac

SEQ ID NO: 1083467 - RNA, 19 nt, Artificial Sequence
  Description of Artificial Sequence: Synthetic oligonucleotide
uuagcugucaucuauccac

SEQ ID NO: 1083468 - RNA, 19 nt, Artificial Sequence
  Description of Artificial Sequence: Synthetic oligonucleotide
aaacacauagauuagucua

SEQ ID NO: 1083469 - RNA, 19 nt, Artificial Sequence
  Description of Artificial Sequence: Synthetic oligonucleotide
uguuaaaaugacauagaga

SEQ ID NO: 1083470 - RNA, 19 nt, Artificial Sequence
  Description of Artificial Sequence: Synthetic oligonucleotide
gucgaaaagacuuuucucc

SEQ ID NO: 1083471 - RNA, 19 nt, Artificial Sequence
  Description of Artificial Sequence: Synthetic oligonucleotide
ugugacuaguaccaucugg

SEQ ID NO: 1083472 - RNA, 19 nt, Artificial Sequence
  Description of Artificial Sequence: Synthetic oligonucleotide
aaguuccugaguuaaaggu

SEQ ID NO: 1083473 - RNA, 19 nt, Artificial Sequence
  Description of Artificial Sequence: Synthetic oligonucleotide
auuaaccuugucaaguucc

SEQ ID NO: 1083474 - RNA, 19 nt, Artificial Sequence
  Description of Artificial Sequence: Synthetic oligonucleotide
auaauuaaguuauuacccu

SEQ ID NO: 1083475 - RNA, 19 nt, Artificial Sequence
  Description of Artificial Sequence: Synthetic oligonucleotide
uuuaacaauugacugugac

SEQ ID NO: 1083476 - RNA, 19 nt, Artificial Sequence
  Description of Artificial Sequence: Synthetic oligonucleotide
auaugauuauucucgauga

SEQ ID NO: 1083477 - RNA, 19 nt, Artificial Sequence
  Description of Artificial Sequence: Synthetic oligonucleotide
ucaucuauccaccccaagc

SEQ ID NO: 1083478 - RNA, 19 nt, Artificial Sequence
  Description of Artificial Sequence: Synthetic oligonucleotide
ugucaugaacaucuaaggc

SEQ ID NO: 1083479 - RNA, 19 nt, Artificial Sequence
  Description of Artificial Sequence: Synthetic oligonucleotide
uuaacaauugacugugaca

SEQ ID NO: 1083480 - RNA, 19 nt, Artificial Sequence
  Description of Artificial Sequence: Synthetic oligonucleotide
aagucgaaaagacuuuucu

SEQ ID NO: 1083481 - RNA, 19 nt, Artificial Sequence
  Description of Artificial Sequence: Synthetic oligonucleotide
uacuggguaacgaagauau

SEQ ID NO: 1083482 - RNA, 19 nt, Artificial Sequence
  Description of Artificial Sequence: Synthetic oligonucleotide
aacucauuggaccucuuca

SEQ ID NO: 1083483 - RNA, 19 nt, Artificial Sequence
  Description of Artificial Sequence: Synthetic oligonucleotide
cugaguuaaagguacuggg

SEQ ID NO: 1083484 - RNA, 19 nt, Artificial Sequence
  Description of Artificial Sequence: Synthetic oligonucleotide
  modified_base (3)..(3): a, c, u, g, unknown or other
ucncaauccuaacagucag

SEQ ID NO: 1083485 - RNA, 19 nt, Artificial Sequence
  Description of Artificial Sequence: Synthetic oligonucleotide
ucugcguuuacacccauca

SEQ ID NO: 1083486 - RNA, 19 nt, Artificial Sequence
  Description of Artificial Sequence: Synthetic oligonucleotide
uaauuaaguuauuacccug

SEQ ID NO: 1083487 - RNA, 19 nt, Artificial Sequence
  Description of Artificial Sequence: Synthetic oligonucleotide
ugugcuagaggucuucuug

SEQ ID NO: 1083488 - RNA, 19 nt, Artificial Sequence
  Description of Artificial Sequence: Synthetic oligonucleotide
gacacuaguguaugguugg

SEQ ID NO: 1083489 - RNA, 19 nt, Artificial Sequence
  Description of Artificial Sequence: Synthetic oligonucleotide
ucaaacacauagauuaguc

SEQ ID NO: 1083490 - RNA, 19 nt, Artificial Sequence
  Description of Artificial Sequence: Synthetic oligonucleotide
aacccaguuauguuuaagu

SEQ ID NO: 1083491 - RNA, 19 nt, Artificial Sequence
  Description of Artificial Sequence: Synthetic oligonucleotide
acauagauuagucuaucug

SEQ ID NO: 1083492 - RNA, 19 nt, Artificial Sequence
  Description of Artificial Sequence: Synthetic oligonucleotide
ugcguuuacacccaucaga

SEQ ID NO: 1083493 - RNA, 19 nt, Artificial Sequence
  Description of Artificial Sequence: Synthetic oligonucleotide
uuauucucgaugauguggu

SEQ ID NO: 1083494 - RNA, 19 nt, Artificial Sequence
  Description of Artificial Sequence: Synthetic oligonucleotide
uuuucuaauuuuccaugcc

SEQ ID NO: 1083495 - RNA, 19 nt, Artificial Sequence
  Description of Artificial Sequence: Synthetic oligonucleotide
uguccuaacaagucgaaaa

SEQ ID NO: 1083496 - RNA, 19 nt, Artificial Sequence
  Description of Artificial Sequence: Synthetic oligonucleotide
auaugggacuugcugaaac

SEQ ID NO: 1083497 - RNA, 19 nt, Artificial Sequence
  Description of Artificial Sequence: Synthetic oligonucleotide
aauguccuauccuguguac

SEQ ID NO: 1083498 - RNA, 19 nt, Artificial Sequence
  Description of Artificial Sequence: Synthetic oligonucleotide
cugucaugaacaucuaagg

SEQ ID NO: 1083499 - RNA, 19 nt, Artificial Sequence
  Description of Artificial Sequence: Synthetic oligonucleotide
agucgaaaagacuuuucuc

SEQ ID NO: 1083500 - RNA, 19 nt, Artificial Sequence
  Description of Artificial Sequence: Synthetic oligonucleotide
gacuuugcacaccacauug

SEQ ID NO: 1083501 - RNA, 19 nt, Artificial Sequence
  Description of Artificial Sequence: Synthetic oligonucleotide
ucuuuggccucacacaucu

SEQ ID NO: 1083502 - RNA, 19 nt, Artificial Sequence
  Description of Artificial Sequence: Synthetic oligonucleotide
uucaaguccaccucuuugc

SEQ ID NO: 1083503 - RNA, 19 nt, Artificial Sequence
  Description of Artificial Sequence: Synthetic oligonucleotide
uuguuuaacaauugacugu

SEQ ID NO: 1083504 - RNA, 19 nt, Artificial Sequence
  Description of Artificial Sequence: Synthetic oligonucleotide
ucagaagucagcaaccuuu

SEQ ID NO: 1083505 - RNA, 19 nt, Artificial Sequence
  Description of Artificial Sequence: Synthetic oligonucleotide
uuuaaauccuuuugugacu

SEQ ID NO: 1083506 - RNA, 19 nt, Artificial Sequence
  Description of Artificial Sequence: Synthetic oligonucleotide
ucagauugauggcagguga

SEQ ID NO: 1083507 - RNA, 19 nt, Artificial Sequence
  Description of Artificial Sequence: Synthetic oligonucleotide
ucucuuucgguccucaagu

SEQ ID NO: 1083508 - RNA, 19 nt, Artificial Sequence
  Description of Artificial Sequence: Synthetic oligonucleotide
gaaacaaccuuugacuccc

SEQ ID NO: 1083509 - RNA, 19 nt, Artificial Sequence
  Description of Artificial Sequence: Synthetic oligonucleotide
ugggguaauaauuaaguua

SEQ ID NO: 1083510 - RNA, 19 nt, Artificial Sequence
  Description of Artificial Sequence: Synthetic oligonucleotide
ugcugaaacaaccuuugac

SEQ ID NO: 1083511 - RNA, 19 nt, Artificial Sequence
  Description of Artificial Sequence: Synthetic oligonucleotide
aaagucaggaacaaguuuu

SEQ ID NO: 1083512 - RNA, 19 nt, Artificial Sequence
  Description of Artificial Sequence: Synthetic oligonucleotide
aacaguuucaggguuagaa

SEQ ID NO: 1083513 - RNA, 19 nt, Artificial Sequence
  Description of Artificial Sequence: Synthetic oligonucleotide
uauccuguguacaaaucca

SEQ ID NO: 1083514 - RNA, 19 nt, Artificial Sequence
  Description of Artificial Sequence: Synthetic oligonucleotide
aaagguacuggguaacgaa

SEQ ID NO: 1083515 - RNA, 19 nt, Artificial Sequence
  Description of Artificial Sequence: Synthetic oligonucleotide
acaaauacuggggcaacgc

SEQ ID NO: 1083516 - RNA, 19 nt, Artificial Sequence
  Description of Artificial Sequence: Synthetic oligonucleotide
agauuagucuaucugugcu

SEQ ID NO: 1083517 - RNA, 19 nt, Artificial Sequence
  Description of Artificial Sequence: Synthetic oligonucleotide
caucuauccaccccaagcc

SEQ ID NO: 1083518 - RNA, 19 nt, Artificial Sequence
  Description of Artificial Sequence: Synthetic oligonucleotide
uacccugacagaaggagcc

SEQ ID NO: 1083519 - RNA, 19 nt, Artificial Sequence
  Description of Artificial Sequence: Synthetic oligonucleotide
  modified_base (8)..(8): a, c, u, g, unknown or other
gaagaucncaauccuaaca

SEQ ID NO: 1083520 - RNA, 19 nt, Artificial Sequence
  Description of Artificial Sequence: Synthetic oligonucleotide
caaacugucucuuucgguc

SEQ ID NO: 1083521 - RNA, 19 nt, Artificial Sequence
  Description of Artificial Sequence: Synthetic oligonucleotide
uggguaacgaagauaugug

SEQ ID NO: 1083522 - RNA, 19 nt, Artificial Sequence
  Description of Artificial Sequence: Synthetic oligonucleotide
uggugcuguaacaaugucc

SEQ ID NO: 1083523 - RNA, 19 nt, Artificial Sequence
  Description of Artificial Sequence: Synthetic oligonucleotide
acuaguaccaucugguaau

SEQ ID NO: 1083524 - RNA, 19 nt, Artificial Sequence
  Description of Artificial Sequence: Synthetic oligonucleotide
uuaaaaugacauagagacu

SEQ ID NO: 1083525 - RNA, 19 nt, Artificial Sequence
  Description of Artificial Sequence: Synthetic oligonucleotide
aaaagccguguaugucucc

SEQ ID NO: 1083526 - RNA, 19 nt, Artificial Sequence
  Description of Artificial Sequence: Synthetic oligonucleotide
acccaguuauguuuaaguc

SEQ ID NO: 1083527 - RNA, 19 nt, Artificial Sequence
  Description of Artificial Sequence: Synthetic oligonucleotide
cuagcauugcuuucagggg

SEQ ID NO: 1083528 - RNA, 19 nt, Artificial Sequence
  Description of Artificial Sequence: Synthetic oligonucleotide
ucuaaucucuagcauugcu

SEQ ID NO: 1083529 - RNA, 19 nt, Artificial Sequence
  Description of Artificial Sequence: Synthetic oligonucleotide
uugcaaaacugauauggga

SEQ ID NO: 1083530 - RNA, 19 nt, Artificial Sequence
  Description of Artificial Sequence: Synthetic oligonucleotide
ugugaaagccgacuuugca

SEQ ID NO: 1083531 - RNA, 19 nt, Artificial Sequence
  Description of Artificial Sequence: Synthetic oligonucleotide
uuuacacccaucagauuga

SEQ ID NO: 1083532 - RNA, 19 nt, Artificial Sequence
  Description of Artificial Sequence: Synthetic oligonucleotide
uccuagacaggucuucacc

SEQ ID NO: 1083533 - RNA, 19 nt, Artificial Sequence
  Description of Artificial Sequence: Synthetic oligonucleotide
auuacccugacagaaggag

SEQ ID NO: 1083534 - RNA, 19 nt, Artificial Sequence
  Description of Artificial Sequence: Synthetic oligonucleotide
gucaggaacaaguuuuagc

SEQ ID NO: 1083535 - RNA, 19 nt, Artificial Sequence
  Description of Artificial Sequence: Synthetic oligonucleotide
auuagucuaucugugcuag

SEQ ID NO: 1083536 - RNA, 19 nt, Artificial Sequence
  Description of Artificial Sequence: Synthetic oligonucleotide
guagagaauaugauuauuc

SEQ ID NO: 1083537 - RNA, 19 nt, Artificial Sequence
  Description of Artificial Sequence: Synthetic oligonucleotide
uagauuagucuaucugugc

SEQ ID NO: 1083538 - RNA, 19 nt, Artificial Sequence
  Description of Artificial Sequence: Synthetic oligonucleotide
  modified_base (5)..(5): a, c, u, g, unknown or other
gaucncaauccuaacaguc

SEQ ID NO: 1083539 - RNA, 19 nt, Artificial Sequence
  Description of Artificial Sequence: Synthetic oligonucleotide
ucgaaaagacuuuucuccu

SEQ ID NO: 1083540 - RNA, 19 nt, Artificial Sequence
  Description of Artificial Sequence: Synthetic oligonucleotide
guaacgaagauauguguga

SEQ ID NO: 1083541 - RNA, 19 nt, Artificial Sequence
  Description of Artificial Sequence: Synthetic oligonucleotide
cugaaacaaccuuugacuc

SEQ ID NO: 1083542 - RNA, 19 nt, Artificial Sequence
  Description of Artificial Sequence: Synthetic oligonucleotide
uccacccaagcccugcugg

SEQ ID NO: 1083543 - RNA, 19 nt, Artificial Sequence
  Description of Artificial Sequence: Synthetic oligonucleotide
caucugguaaucugaagac

SEQ ID NO: 1083544 - RNA, 19 nt, Artificial Sequence
  Description of Artificial Sequence: Synthetic oligonucleotide
ucuaucucaaugaguccug

SEQ ID NO: 1083545 - RNA, 19 nt, Artificial Sequence
  Description of Artificial Sequence: Synthetic oligonucleotide
guccuaacaagucgaaaag

SEQ ID NO: 1083546 - RNA, 19 nt, Artificial Sequence
  Description of Artificial Sequence: Synthetic oligonucleotide
acagauuaaccuugucaag

SEQ ID NO: 1083547 - RNA, 19 nt, Artificial Sequence
  Description of Artificial Sequence: Synthetic oligonucleotide
auugcaaaacugauauggg

SEQ ID NO: 1083548 - RNA, 19 nt, Artificial Sequence
  Description of Artificial Sequence: Synthetic oligonucleotide
cuaccauuaucauggcugc

SEQ ID NO: 1083549 - RNA, 19 nt, Artificial Sequence
  Description of Artificial Sequence: Synthetic oligonucleotide
aauacuggggcaacgccug

SEQ ID NO: 1083550 - RNA, 19 nt, Artificial Sequence
  Description of Artificial Sequence: Synthetic oligonucleotide
aaagccgacuuugcacacc

SEQ ID NO: 1083551 - RNA, 19 nt, Artificial Sequence
  Description of Artificial Sequence: Synthetic oligonucleotide
auagauuagucuaucugug

SEQ ID NO: 1083552 - RNA, 19 nt, Artificial Sequence
  Description of Artificial Sequence: Synthetic oligonucleotide
acauagagacuaaacagug

SEQ ID NO: 1083553 - RNA, 19 nt, Artificial Sequence
  Description of Artificial Sequence: Synthetic oligonucleotide
uuaagucacugacagucau

SEQ ID NO: 1083554 - RNA, 19 nt, Artificial Sequence
  Description of Artificial Sequence: Synthetic oligonucleotide
aguuaaagguacuggguaa

SEQ ID NO: 1083555 - RNA, 19 nt, Artificial Sequence
  Description of Artificial Sequence: Synthetic oligonucleotide
guugaguacagucugugaa

SEQ ID NO: 1083556 - RNA, 19 nt, Artificial Sequence
  Description of Artificial Sequence: Synthetic oligonucleotide
uuuugugacuaguaccauc

SEQ ID NO: 1083557 - RNA, 19 nt, Artificial Sequence
  Description of Artificial Sequence: Synthetic oligonucleotide
agcgcauuauucuguaucu

SEQ ID NO: 1083558 - RNA, 19 nt, Artificial Sequence
  Description of Artificial Sequence: Synthetic oligonucleotide
aagguacuggguaacgaag

SEQ ID NO: 1083559 - RNA, 19 nt, Artificial Sequence
  Description of Artificial Sequence: Synthetic oligonucleotide
ccauaugagaccuccaacc

SEQ ID NO: 1083560 - RNA, 19 nt, Artificial Sequence
  Description of Artificial Sequence: Synthetic oligonucleotide
cauagauuagucuaucugu

SEQ ID NO: 1083561 - RNA, 19 nt, Artificial Sequence
  Description of Artificial Sequence: Synthetic oligonucleotide
aggguuagaaacauuguca

SEQ ID NO: 1083562 - RNA, 19 nt, Artificial Sequence
  Description of Artificial Sequence: Synthetic oligonucleotide
aaccuugucaaguucccuu

SEQ ID NO: 1083563 - RNA, 19 nt, Artificial Sequence
  Description of Artificial Sequence: Synthetic oligonucleotide
uugaguacagucugugaaa

SEQ ID NO: 1083564 - RNA, 19 nt, Artificial Sequence
  Description of Artificial Sequence: Synthetic oligonucleotide
gugaaagccgacuuugcac

SEQ ID NO: 1083565 - RNA, 19 nt, Artificial Sequence
  Description of Artificial Sequence: Synthetic oligonucleotide
aggugauccggcuucaagu

SEQ ID NO: 1083566 - RNA, 19 nt, Artificial Sequence
  Description of Artificial Sequence: Synthetic oligonucleotide
uaugggacuugcugaaaca

SEQ ID NO: 1083567 - RNA, 19 nt, Artificial Sequence
  Description of Artificial Sequence: Synthetic oligonucleotide
aaccuuugacucccagguc

SEQ ID NO: 1083568 - RNA, 19 nt, Artificial Sequence
  Description of Artificial Sequence: Synthetic oligonucleotide
uccugcuuguuuaacaauu

SEQ ID NO: 1083569 - RNA, 19 nt, Artificial Sequence
  Description of Artificial Sequence: Synthetic oligonucleotide
ugauaugggacuugcugaa

SEQ ID NO: 1083570 - RNA, 19 nt, Artificial Sequence
  Description of Artificial Sequence: Synthetic oligonucleotide
gagcgcauuauucuguauc

SEQ ID NO: 1083571 - RNA, 19 nt, Artificial Sequence
  Description of Artificial Sequence: Synthetic oligonucleotide
uuaaauccuuuugugacua

SEQ ID NO: 1083572 - RNA, 19 nt, Artificial Sequence
  Description of Artificial Sequence: Synthetic oligonucleotide
ccuaacaagucgaaaagac

SEQ ID NO: 1083573 - RNA, 19 nt, Artificial Sequence
  Description of Artificial Sequence: Synthetic oligonucleotide
agagaccaucgcuagaccu

SEQ ID NO: 1083574 - RNA, 19 nt, Artificial Sequence
  Description of Artificial Sequence: Synthetic oligonucleotide
caaauacuggggcaacgcc

SEQ ID NO: 1083575 - RNA, 19 nt, Artificial Sequence
  Description of Artificial Sequence: Synthetic oligonucleotide
gaagauaugugugaaauuu

SEQ ID NO: 1083576 - RNA, 19 nt, Artificial Sequence
  Description of Artificial Sequence: Synthetic oligonucleotide
gaugaguaguccugucccc

SEQ ID NO: 1083577 - RNA, 19 nt, Artificial Sequence
  Description of Artificial Sequence: Synthetic oligonucleotide
gaguuaaagguacugggua

SEQ ID NO: 1083578 - RNA, 19 nt, Artificial Sequence
  Description of Artificial Sequence: Synthetic oligonucleotide
cauuauucuguaucugcuc

SEQ ID NO: 1083579 - RNA, 19 nt, Artificial Sequence
  Description of Artificial Sequence: Synthetic oligonucleotide
  modified_base (9)..(9): a, c, u, g, unknown or other
ugaagaucncaauccuaac

SEQ ID NO: 1083580 - RNA, 19 nt, Artificial Sequence
  Description of Artificial Sequence: Synthetic oligonucleotide
aacacauagauuagucuau

SEQ ID NO: 1083581 - RNA, 19 nt, Artificial Sequence
  Description of Artificial Sequence: Synthetic oligonucleotide
gaacaucuaaggccccagg

SEQ ID NO: 1083582 - RNA, 19 nt, Artificial Sequence
  Description of Artificial Sequence: Synthetic oligonucleotide
gauuaaccuugucaaguuc

SEQ ID NO: 1083583 - RNA, 19 nt, Artificial Sequence
  Description of Artificial Sequence: Synthetic oligonucleotide
acgaagauaugugugaaau

SEQ ID NO: 1083584 - RNA, 19 nt, Artificial Sequence
  Description of Artificial Sequence: Synthetic oligonucleotide
ugcuuuaguaacccaguua

SEQ ID NO: 1083585 - RNA, 19 nt, Artificial Sequence
  Description of Artificial Sequence: Synthetic oligonucleotide
agaccugaugaguaguccu

SEQ ID NO: 1083586 - RNA, 19 nt, Artificial Sequence
  Description of Artificial Sequence: Synthetic oligonucleotide
caggguuagaaacauuguc

SEQ ID NO: 1083587 - RNA, 19 nt, Artificial Sequence
  Description of Artificial Sequence: Synthetic oligonucleotide
uccauuucaaguccugcuu

SEQ ID NO: 1083588 - RNA, 19 nt, Artificial Sequence
  Description of Artificial Sequence: Synthetic oligonucleotide
uuaguaacccaguuauguu

SEQ ID NO: 1083589 - RNA, 19 nt, Artificial Sequence
  Description of Artificial Sequence: Synthetic oligonucleotide
aacgaagauaugugugaaa

SEQ ID NO: 1083590 - RNA, 19 nt, Artificial Sequence
  Description of Artificial Sequence: Synthetic oligonucleotide
uauuacccugacagaagga

SEQ ID NO: 1083591 - RNA, 19 nt, Artificial Sequence
  Description of Artificial Sequence: Synthetic oligonucleotide
  modified_base (6)..(6): a, c, u, g, unknown or other
agaucncaauccuaacagu

SEQ ID NO: 1083592 - RNA, 19 nt, Artificial Sequence
  Description of Artificial Sequence: Synthetic oligonucleotide
uguugaguacagucuguga

SEQ ID NO: 1083593 - RNA, 19 nt, Artificial Sequence
  Description of Artificial Sequence: Synthetic oligonucleotide
uguaugguuggugcuuuag

SEQ ID NO: 1083594 - RNA, 19 nt, Artificial Sequence
  Description of Artificial Sequence: Synthetic oligonucleotide
  modified_base (2)..(2): a, c, u, g, unknown or other
cncaauccuaacagucagg

SEQ ID NO: 1083595 - RNA, 19 nt, Artificial Sequence
  Description of Artificial Sequence: Synthetic oligonucleotide
ugccauaugagaccuccaa

SEQ ID NO: 1083596 - RNA, 19 nt, Artificial Sequence
  Description of Artificial Sequence: Synthetic oligonucleotide
cugaaauggagacaccuga

SEQ ID NO: 1083597 - RNA, 19 nt, Artificial Sequence
  Description of Artificial Sequence: Synthetic oligonucleotide
ucaugcucauucuugccaa

SEQ ID NO: 1083598 - RNA, 19 nt, Artificial Sequence
  Description of Artificial Sequence: Synthetic oligonucleotide
gacuaguaccaucugguaa

SEQ ID NO: 1083599 - RNA, 19 nt, Artificial Sequence
  Description of Artificial Sequence: Synthetic oligonucleotide
cagugcugccauaugagac

SEQ ID NO: 1083600 - RNA, 19 nt, Artificial Sequence
  Description of Artificial Sequence: Synthetic oligonucleotide
acuuugcacaccacauugc

SEQ ID NO: 1083601 - RNA, 19 nt, Artificial Sequence
  Description of Artificial Sequence: Synthetic oligonucleotide
ucucccugaacuucacaca

SEQ ID NO: 1083602 - RNA, 19 nt, Artificial Sequence
  Description of Artificial Sequence: Synthetic oligonucleotide
cauuguccuaacaagucga

SEQ ID NO: 1083603 - RNA, 19 nt, Artificial Sequence
  Description of Artificial Sequence: Synthetic oligonucleotide
cacauugcaaaacugauau

SEQ ID NO: 1083604 - RNA, 19 nt, Artificial Sequence
  Description of Artificial Sequence: Synthetic oligonucleotide
agauuaaccuugucaaguu

SEQ ID NO: 1083605 - RNA, 19 nt, Artificial Sequence
  Description of Artificial Sequence: Synthetic oligonucleotide
uuucaucuaccauuaucau

SEQ ID NO: 1083606 - RNA, 19 nt, Artificial Sequence
  Description of Artificial Sequence: Synthetic oligonucleotide
accucuaaucucuagcauu

SEQ ID NO: 1083607 - RNA, 19 nt, Artificial Sequence
  Description of Artificial Sequence: Synthetic oligonucleotide
gacauagagacuaaacagu

SEQ ID NO: 1083608 - RNA, 19 nt, Artificial Sequence
  Description of Artificial Sequence: Synthetic oligonucleotide
aauguaugccagcuccaua

SEQ ID NO: 1083609 - RNA, 19 nt, Artificial Sequence
  Description of Artificial Sequence: Synthetic oligonucleotide
  modified_base (4)..(4): a, c, u, g, unknown or other
aucncaauccuaacaguca

SEQ ID NO: 1083610 - RNA, 19 nt, Artificial Sequence
  Description of Artificial Sequence: Synthetic oligonucleotide
acacauagauuagucuauc

SEQ ID NO: 1083611 - RNA, 19 nt, Artificial Sequence
  Description of Artificial Sequence: Synthetic oligonucleotide
caaguuuuagcugucaucu

SEQ ID NO: 1083612 - RNA, 19 nt, Artificial Sequence
  Description of Artificial Sequence: Synthetic oligonucleotide
cugcugguuguuaaaauga

SEQ ID NO: 1083613 - RNA, 19 nt, Artificial Sequence
  Description of Artificial Sequence: Synthetic oligonucleotide
ugggacuugcugaaacaac

SEQ ID NO: 1083614 - RNA, 19 nt, Artificial Sequence
  Description of Artificial Sequence: Synthetic oligonucleotide
cugguuguuaaaaugacau

SEQ ID NO: 1083615 - RNA, 19 nt, Artificial Sequence
  Description of Artificial Sequence: Synthetic oligonucleotide
agccaugagcgcauuauuc

SEQ ID NO: 1083616 - RNA, 19 nt, Artificial Sequence
  Description of Artificial Sequence: Synthetic oligonucleotide
cauaugagaccuccaacca

SEQ ID NO: 1083617 - RNA, 19 nt, Artificial Sequence
  Description of Artificial Sequence: Synthetic oligonucleotide
auccuguguacaaauccac

SEQ ID NO: 1083618 - RNA, 19 nt, Artificial Sequence
  Description of Artificial Sequence: Synthetic oligonucleotide
caucgcuagaccugaugag

SEQ ID NO: 1083619 - RNA, 19 nt, Artificial Sequence
  Description of Artificial Sequence: Synthetic oligonucleotide
guuaaagguacuggguaac

SEQ ID NO: 1083620 - RNA, 19 nt, Artificial Sequence
  Description of Artificial Sequence: Synthetic oligonucleotide
acucauuggaccucuucau

SEQ ID NO: 1083621 - RNA, 19 nt, Artificial Sequence
  Description of Artificial Sequence: Synthetic oligonucleotide
uucucgaugaugugguguu

SEQ ID NO: 1083622 - RNA, 19 nt, Artificial Sequence
  Description of Artificial Sequence: Synthetic oligonucleotide
aauccuuuugugacuagua

SEQ ID NO: 1083623 - RNA, 19 nt, Artificial Sequence
  Description of Artificial Sequence: Synthetic oligonucleotide
cuagaccugaugaguaguc

SEQ ID NO: 1083624 - RNA, 19 nt, Artificial Sequence
  Description of Artificial Sequence: Synthetic oligonucleotide
gauuagucuaucugugcua

SEQ ID NO: 1083625 - RNA, 19 nt, Artificial Sequence
  Description of Artificial Sequence: Synthetic oligonucleotide
accgcaucuuucaauaucu

SEQ ID NO: 1083626 - RNA, 19 nt, Artificial Sequence
  Description of Artificial Sequence: Synthetic oligonucleotide
uuuccuagacaggucuuca

SEQ ID NO: 1083627 - RNA, 19 nt, Artificial Sequence
  Description of Artificial Sequence: Synthetic oligonucleotide
uaacgaagauaugugugaa

SEQ ID NO: 1083628 - RNA, 19 nt, Artificial Sequence
  Description of Artificial Sequence: Synthetic oligonucleotide
cuucacaacccacaagcca

SEQ ID NO: 1083629 - RNA, 19 nt, Artificial Sequence
  Description of Artificial Sequence: Synthetic oligonucleotide
uagaccugaugaguagucc

SEQ ID NO: 1083630 - RNA, 19 nt, Artificial Sequence
  Description of Artificial Sequence: Synthetic oligonucleotide
acugacaggacaauuuaaa

SEQ ID NO: 1083631 - RNA, 19 nt, Artificial Sequence
  Description of Artificial Sequence: Synthetic oligonucleotide
acauugcaaaacugauaug

SEQ ID NO: 1083632 - RNA, 19 nt, Artificial Sequence
  Description of Artificial Sequence: Synthetic oligonucleotide
accaucugguaaucugaag

SEQ ID NO: 1083633 - RNA, 19 nt, Artificial Sequence
  Description of Artificial Sequence: Synthetic oligonucleotide
agguagagaauaugauuau

SEQ ID NO: 1083634 - RNA, 19 nt, Artificial Sequence
  Description of Artificial Sequence: Synthetic oligonucleotide
uaacccaguuauguuuaag

SEQ ID NO: 1083635 - RNA, 19 nt, Artificial Sequence
  Description of Artificial Sequence: Synthetic oligonucleotide
ccauuguccuaacaagucg

SEQ ID NO: 1083636 - RNA, 19 nt, Artificial Sequence
  Description of Artificial Sequence: Synthetic oligonucleotide
gguaauaauuaaguuauua

SEQ ID NO: 1083637 - RNA, 19 nt, Artificial Sequence
  Description of Artificial Sequence: Synthetic oligonucleotide
auucucgaugauguggugu

SEQ ID NO: 1083638 - RNA, 19 nt, Artificial Sequence
  Description of Artificial Sequence: Synthetic oligonucleotide
auugcuuucaggggacgug

SEQ ID NO: 1083639 - RNA, 19 nt, Artificial Sequence
  Description of Artificial Sequence: Synthetic oligonucleotide
aauccacccaagcccugcu

SEQ ID NO: 1083640 - RNA, 19 nt, Artificial Sequence
  Description of Artificial Sequence: Synthetic oligonucleotide
ugguuguuaaaaugacaua

SEQ ID NO: 1083641 - RNA, 19 nt, Artificial Sequence
  Description of Artificial Sequence: Synthetic oligonucleotide
aucgcuagaccugaugagu

SEQ ID NO: 1083642 - RNA, 19 nt, Artificial Sequence
  Description of Artificial Sequence: Synthetic oligonucleotide
gacucaacucauuggaccu

SEQ ID NO: 1083643 - RNA, 19 nt, Artificial Sequence
  Description of Artificial Sequence: Synthetic oligonucleotide
agcauugcuuucaggggac

SEQ ID NO: 1083644 - RNA, 19 nt, Artificial Sequence
  Description of Artificial Sequence: Synthetic oligonucleotide
aucuaaggccccaggacuc

SEQ ID NO: 1083645 - RNA, 19 nt, Artificial Sequence
  Description of Artificial Sequence: Synthetic oligonucleotide
aacaagucgaaaagacuuu

SEQ ID NO: 1083646 - RNA, 19 nt, Artificial Sequence
  Description of Artificial Sequence: Synthetic oligonucleotide
cacaaauacuggggcaacg

SEQ ID NO: 1083647 - RNA, 19 nt, Artificial Sequence
  Description of Artificial Sequence: Synthetic oligonucleotide
ccucuaaucucuagcauug

SEQ ID NO: 1083648 - RNA, 19 nt, Artificial Sequence
  Description of Artificial Sequence: Synthetic oligonucleotide
ucuuggcguucucucuucc

SEQ ID NO: 1083649 - RNA, 19 nt, Artificial Sequence
  Description of Artificial Sequence: Synthetic oligonucleotide
uauucucgaugauguggug

SEQ ID NO: 1083650 - RNA, 19 nt, Artificial Sequence
  Description of Artificial Sequence: Synthetic oligonucleotide
ucgcuagaccugaugagua

SEQ ID NO: 1083651 - RNA, 19 nt, Artificial Sequence
  Description of Artificial Sequence: Synthetic oligonucleotide
cuaacaagucgaaaagacu

SEQ ID NO: 1083652 - RNA, 19 nt, Artificial Sequence
  Description of Artificial Sequence: Synthetic oligonucleotide
cugucaucuauccacccca

SEQ ID NO: 1083653 - RNA, 19 nt, Artificial Sequence
  Description of Artificial Sequence: Synthetic oligonucleotide
cucauuggaccucuucauc

SEQ ID NO: 1083654 - RNA, 19 nt, Artificial Sequence
  Description of Artificial Sequence: Synthetic oligonucleotide
ccuuuugugacuaguacca

SEQ ID NO: 1083655 - RNA, 19 nt, Artificial Sequence
  Description of Artificial Sequence: Synthetic oligonucleotide
aacgccugcaugccauuaa

SEQ ID NO: 1083656 - RNA, 19 nt, Artificial Sequence
  Description of Artificial Sequence: Synthetic oligonucleotide
uugcuuucaggggacguga

SEQ ID NO: 1083657 - RNA, 19 nt, Artificial Sequence
  Description of Artificial Sequence: Synthetic oligonucleotide
ucaggggacgugacagucu

SEQ ID NO: 1083658 - RNA, 19 nt, Artificial Sequence
  Description of Artificial Sequence: Synthetic oligonucleotide
caaacacauagauuagucu

SEQ ID NO: 1083659 - RNA, 19 nt, Artificial Sequence
  Description of Artificial Sequence: Synthetic oligonucleotide
uacaucuaguuggaggcau

SEQ ID NO: 1083660 - RNA, 19 nt, Artificial Sequence
  Description of Artificial Sequence: Synthetic oligonucleotide
accaucgcuagaccugaug

SEQ ID NO: 1083661 - RNA, 19 nt, Artificial Sequence
  Description of Artificial Sequence: Synthetic oligonucleotide
gaaagccgacuuugcacac

SEQ ID NO: 1083662 - RNA, 19 nt, Artificial Sequence
  Description of Artificial Sequence: Synthetic oligonucleotide
uuauugguccauuguccua

SEQ ID NO: 1083663 - RNA, 19 nt, Artificial Sequence
  Description of Artificial Sequence: Synthetic oligonucleotide
ucaaccacgcugucaugaa

SEQ ID NO: 1083664 - RNA, 19 nt, Artificial Sequence
  Description of Artificial Sequence: Synthetic oligonucleotide
ugauggcaggugauccggc

SEQ ID NO: 1083665 - RNA, 19 nt, Artificial Sequence
  Description of Artificial Sequence: Synthetic oligonucleotide
gagacucaacucauuggac

SEQ ID NO: 1083666 - RNA, 19 nt, Artificial Sequence
  Description of Artificial Sequence: Synthetic oligonucleotide
cuuauugguccauuguccu

SEQ ID NO: 1083667 - RNA, 19 nt, Artificial Sequence
  Description of Artificial Sequence: Synthetic oligonucleotide
gacgugacagucucugaaa

SEQ ID NO: 1083668 - RNA, 19 nt, Artificial Sequence
  Description of Artificial Sequence: Synthetic oligonucleotide
acgugacagucucugaaau

SEQ ID NO: 1083669 - RNA, 19 nt, Artificial Sequence
  Description of Artificial Sequence: Synthetic oligonucleotide
uuccuagacaggucuucac

SEQ ID NO: 1083670 - RNA, 19 nt, Artificial Sequence
  Description of Artificial Sequence: Synthetic oligonucleotide
agucaggaacaaguuuuag

SEQ ID NO: 1083671 - RNA, 19 nt, Artificial Sequence
  Description of Artificial Sequence: Synthetic oligonucleotide
ggguuagaaacauugucaa

SEQ ID NO: 1083672 - RNA, 19 nt, Artificial Sequence
  Description of Artificial Sequence: Synthetic oligonucleotide
ugccaagguagagaauaug

SEQ ID NO: 1083673 - RNA, 19 nt, Artificial Sequence
  Description of Artificial Sequence: Synthetic oligonucleotide
gaaauguaugccagcucca

SEQ ID NO: 1083674 - RNA, 19 nt, Artificial Sequence
  Description of Artificial Sequence: Synthetic oligonucleotide
caauccacucuuuggccuc

SEQ ID NO: 1083675 - RNA, 19 nt, Artificial Sequence
  Description of Artificial Sequence: Synthetic oligonucleotide
cgcauuauucuguaucugc

SEQ ID NO: 1083676 - RNA, 19 nt, Artificial Sequence
  Description of Artificial Sequence: Synthetic oligonucleotide
gaaggcagugagacacuag

SEQ ID NO: 1083677 - RNA, 19 nt, Artificial Sequence
  Description of Artificial Sequence: Synthetic oligonucleotide
guaccaucugguaaucuga

SEQ ID NO: 1083678 - RNA, 19 nt, Artificial Sequence
  Description of Artificial Sequence: Synthetic oligonucleotide
gggguaauaauuaaguuau

SEQ ID NO: 1083679 - RNA, 19 nt, Artificial Sequence
  Description of Artificial Sequence: Synthetic oligonucleotide
caccgcaucuuucaauauc

SEQ ID NO: 1083680 - RNA, 19 nt, Artificial Sequence
  Description of Artificial Sequence: Synthetic oligonucleotide
guguugaguacagucugug

SEQ ID NO: 1083681 - RNA, 19 nt, Artificial Sequence
  Description of Artificial Sequence: Synthetic oligonucleotide
uuucgguccucaaguuccu

SEQ ID NO: 1083682 - RNA, 19 nt, Artificial Sequence
  Description of Artificial Sequence: Synthetic oligonucleotide
gguuagaaacauugucaac

SEQ ID NO: 1083683 - RNA, 19 nt, Artificial Sequence
  Description of Artificial Sequence: Synthetic oligonucleotide
aguaacccaguuauguuua

SEQ ID NO: 1083684 - RNA, 19 nt, Artificial Sequence
  Description of Artificial Sequence: Synthetic oligonucleotide
aguuccugaguuaaaggua

SEQ ID NO: 1083685 - RNA, 19 nt, Artificial Sequence
  Description of Artificial Sequence: Synthetic oligonucleotide
acucaacucauuggaccuc

SEQ ID NO: 1083686 - RNA, 19 nt, Artificial Sequence
  Description of Artificial Sequence: Synthetic oligonucleotide
uugguccauuguccuaaca

SEQ ID NO: 1083687 - RNA, 19 nt, Artificial Sequence
  Description of Artificial Sequence: Synthetic oligonucleotide
cauacugacaggacaauuu

SEQ ID NO: 1083688 - RNA, 19 nt, Artificial Sequence
  Description of Artificial Sequence: Synthetic oligonucleotide
uuccugaguuaaagguacu

SEQ ID NO: 1083689 - RNA, 19 nt, Artificial Sequence
  Description of Artificial Sequence: Synthetic oligonucleotide
cuggguaacgaagauaugu

SEQ ID NO: 1083690 - RNA, 19 nt, Artificial Sequence
  Description of Artificial Sequence: Synthetic oligonucleotide
ucaauccacccaagcccug

SEQ ID NO: 1083691 - RNA, 19 nt, Artificial Sequence
  Description of Artificial Sequence: Synthetic oligonucleotide
aggacaauuuaaauccuuu

SEQ ID NO: 1083692 - RNA, 19 nt, Artificial Sequence
  Description of Artificial Sequence: Synthetic oligonucleotide
gucaaccacgcugucauga

SEQ ID NO: 1083693 - RNA, 19 nt, Artificial Sequence
  Description of Artificial Sequence: Synthetic oligonucleotide
ggugauccggcuucaaguc

SEQ ID NO: 1083694 - RNA, 19 nt, Artificial Sequence
  Description of Artificial Sequence: Synthetic oligonucleotide
caacucauuggaccucuuc

SEQ ID NO: 1083695 - RNA, 19 nt, Artificial Sequence
  Description of Artificial Sequence: Synthetic oligonucleotide
cuaucugugcuagaggucu

SEQ ID NO: 1083696 - RNA, 19 nt, Artificial Sequence
  Description of Artificial Sequence: Synthetic oligonucleotide
caaccuuucaauccacucu

SEQ ID NO: 1083697 - RNA, 19 nt, Artificial Sequence
  Description of Artificial Sequence: Synthetic oligonucleotide
gcugucaucuauccacccc

SEQ ID NO: 1083698 - RNA, 19 nt, Artificial Sequence
  Description of Artificial Sequence: Synthetic oligonucleotide
gcuagaggucuucuugacc

SEQ ID NO: 1083699 - RNA, 19 nt, Artificial Sequence
  Description of Artificial Sequence: Synthetic oligonucleotide
gaacaaguuuuagcuguca

SEQ ID NO: 1083700 - RNA, 19 nt, Artificial Sequence
  Description of Artificial Sequence: Synthetic oligonucleotide
ucugugcuagaggucuucu

SEQ ID NO: 1083701 - RNA, 19 nt, Artificial Sequence
  Description of Artificial Sequence: Synthetic oligonucleotide
cagauuaaccuugucaagu

SEQ ID NO: 1083702 - RNA, 19 nt, Artificial Sequence
  Description of Artificial Sequence: Synthetic oligonucleotide
cuaaucucuagcauugcuu

SEQ ID NO: 1083703 - RNA, 19 nt, Artificial Sequence
  Description of Artificial Sequence: Synthetic oligonucleotide
ugaccuugucugcuaguuu

SEQ ID NO: 1083704 - RNA, 19 nt, Artificial Sequence
  Description of Artificial Sequence: Synthetic oligonucleotide
uaaccuugucaaguucccu

SEQ ID NO: 1083705 - RNA, 19 nt, Artificial Sequence
  Description of Artificial Sequence: Synthetic oligonucleotide
ugcuuucaggggacgugac

SEQ ID NO: 1083706 - RNA, 19 nt, Artificial Sequence
  Description of Artificial Sequence: Synthetic oligonucleotide
uuguccuaacaagucgaaa

SEQ ID NO: 1083707 - RNA, 19 nt, Artificial Sequence
  Description of Artificial Sequence: Synthetic oligonucleotide
caggggacgugacagucuc

SEQ ID NO: 1083708 - RNA, 19 nt, Artificial Sequence
  Description of Artificial Sequence: Synthetic oligonucleotide
aauccacucuuuggccuca

SEQ ID NO: 1083709 - RNA, 19 nt, Artificial Sequence
  Description of Artificial Sequence: Synthetic oligonucleotide
cugcguuuacacccaucag

SEQ ID NO: 1083710 - RNA, 19 nt, Artificial Sequence
  Description of Artificial Sequence: Synthetic oligonucleotide
cugguaaucugaagacaga

SEQ ID NO: 1083711 - RNA, 19 nt, Artificial Sequence
  Description of Artificial Sequence: Synthetic oligonucleotide
cucuaaucucuagcauugc

SEQ ID NO: 1083712 - RNA, 19 nt, Artificial Sequence
  Description of Artificial Sequence: Synthetic oligonucleotide
gcaaccuuucaauccacuc

SEQ ID NO: 1083713 - RNA, 19 nt, Artificial Sequence
  Description of Artificial Sequence: Synthetic oligonucleotide
ccucaaacacauagauuag

SEQ ID NO: 1083714 - RNA, 19 nt, Artificial Sequence
  Description of Artificial Sequence: Synthetic oligonucleotide
ggugggguaauaauuaagu

SEQ ID NO: 1083715 - RNA, 19 nt, Artificial Sequence
  Description of Artificial Sequence: Synthetic oligonucleotide
cacaucuggugcuguaaca

SEQ ID NO: 1083716 - RNA, 19 nt, Artificial Sequence
  Description of Artificial Sequence: Synthetic oligonucleotide
acagucugugaaagccgac

SEQ ID NO: 1083717 - RNA, 19 nt, Artificial Sequence
  Description of Artificial Sequence: Synthetic oligonucleotide
cacuaguguaugguuggug

SEQ ID NO: 1083718 - RNA, 19 nt, Artificial Sequence
  Description of Artificial Sequence: Synthetic oligonucleotide
cucuaggaaggcagccaug

SEQ ID NO: 1083719 - RNA, 19 nt, Artificial Sequence
  Description of Artificial Sequence: Synthetic oligonucleotide
caaccacgcugucaugaac

SEQ ID NO: 1083720 - RNA, 19 nt, Artificial Sequence
  Description of Artificial Sequence: Synthetic oligonucleotide
ggcagugagacacuagugu

SEQ ID NO: 1083721 - RNA, 19 nt, Artificial Sequence
  Description of Artificial Sequence: Synthetic oligonucleotide
ucuugccaagguagagaau

SEQ ID NO: 1083722 - RNA, 19 nt, Artificial Sequence
  Description of Artificial Sequence: Synthetic oligonucleotide
gccauaugagaccuccaac

SEQ ID NO: 1083723 - RNA, 19 nt, Artificial Sequence
  Description of Artificial Sequence: Synthetic oligonucleotide
caauguccuauccugugua

SEQ ID NO: 1083724 - RNA, 19 nt, Artificial Sequence
  Description of Artificial Sequence: Synthetic oligonucleotide
caacccacaagccacacuu

SEQ ID NO: 1083725 - RNA, 19 nt, Artificial Sequence
  Description of Artificial Sequence: Synthetic oligonucleotide
ccuucacaacccacaagcc

SEQ ID NO: 1083726 - RNA, 19 nt, Artificial Sequence
  Description of Artificial Sequence: Synthetic oligonucleotide
ccauaaacugggucaugag

SEQ ID NO: 1083727 - RNA, 19 nt, Artificial Sequence
  Description of Artificial Sequence: Synthetic oligonucleotide
uggcguucucucuuccauc

SEQ ID NO: 1083728 - RNA, 19 nt, Artificial Sequence
  Description of Artificial Sequence: Synthetic oligonucleotide
ggugaagagaccaucgcua

SEQ ID NO: 1083729 - RNA, 19 nt, Artificial Sequence
  Description of Artificial Sequence: Synthetic oligonucleotide
aacugggucaugagguguu

SEQ ID NO: 1083730 - RNA, 19 nt, Artificial Sequence
  Description of Artificial Sequence: Synthetic oligonucleotide
ugagcgcauuauucuguau

SEQ ID NO: 1083731 - RNA, 19 nt, Artificial Sequence
  Description of Artificial Sequence: Synthetic oligonucleotide
gaguaguccuguccccaca

SEQ ID NO: 1083732 - RNA, 19 nt, Artificial Sequence
  Description of Artificial Sequence: Synthetic oligonucleotide
ucaccgcaucuuucaauau

SEQ ID NO: 1083733 - RNA, 19 nt, Artificial Sequence
  Description of Artificial Sequence: Synthetic oligonucleotide
gguuggugcuuuaguaacc

SEQ ID NO: 1083734 - RNA, 19 nt, Artificial Sequence
  Description of Artificial Sequence: Synthetic oligonucleotide
guaugguuggugcuuuagu

SEQ ID NO: 1083735 - RNA, 19 nt, Artificial Sequence
  Description of Artificial Sequence: Synthetic oligonucleotide
cugacaggacaauuuaaau

SEQ ID NO: 1083736 - RNA, 19 nt, Artificial Sequence
  Description of Artificial Sequence: Synthetic oligonucleotide
ccacucuuuggccucacac

SEQ ID NO: 1083737 - RNA, 19 nt, Artificial Sequence
  Description of Artificial Sequence: Synthetic oligonucleotide
cucuuggcguucucucuuc

SEQ ID NO: 1083738 - RNA, 19 nt, Artificial Sequence
  Description of Artificial Sequence: Synthetic oligonucleotide
auuguccuaacaagucgaa

SEQ ID NO: 1083739 - RNA, 19 nt, Artificial Sequence
  Description of Artificial Sequence: Synthetic oligonucleotide
aggcagugagacacuagug

SEQ ID NO: 1083740 - RNA, 19 nt, Artificial Sequence
  Description of Artificial Sequence: Synthetic oligonucleotide
ugcugagacucaacucauu

SEQ ID NO: 1083741 - RNA, 19 nt, Artificial Sequence
  Description of Artificial Sequence: Synthetic oligonucleotide
gugguguuccucagaaguc

SEQ ID NO: 1083742 - RNA, 19 nt, Artificial Sequence
  Description of Artificial Sequence: Synthetic oligonucleotide
ccaucgcuagaccugauga

SEQ ID NO: 1083743 - RNA, 19 nt, Artificial Sequence
  Description of Artificial Sequence: Synthetic oligonucleotide
ggacgugacagucucugaa

SEQ ID NO: 1083744 - RNA, 19 nt, Artificial Sequence
  Description of Artificial Sequence: Synthetic oligonucleotide
gcagugagacacuagugua

SEQ ID NO: 1083745 - RNA, 19 nt, Artificial Sequence
  Description of Artificial Sequence: Synthetic oligonucleotide
uuacacccaucagauugau

SEQ ID NO: 1083746 - RNA, 19 nt, Artificial Sequence
  Description of Artificial Sequence: Synthetic oligonucleotide
uaccauuaucauggcugcu

SEQ ID NO: 1083747 - RNA, 19 nt, Artificial Sequence
  Description of Artificial Sequence: Synthetic oligonucleotide
agaaggcagugagacacua

SEQ ID NO: 1083748 - RNA, 19 nt, Artificial Sequence
  Description of Artificial Sequence: Synthetic oligonucleotide
gugggguaauaauuaaguu

SEQ ID NO: 1083749 - RNA, 19 nt, Artificial Sequence
  Description of Artificial Sequence: Synthetic oligonucleotide
ucaauggcggugggguaau

SEQ ID NO: 1083750 - RNA, 19 nt, Artificial Sequence
  Description of Artificial Sequence: Synthetic oligonucleotide
ucaacucauuggaccucuu

SEQ ID NO: 1083751 - RNA, 19 nt, Artificial Sequence
  Description of Artificial Sequence: Synthetic oligonucleotide
cuugccacuucucccugaa

SEQ ID NO: 1083752 - RNA, 19 nt, Artificial Sequence
  Description of Artificial Sequence: Synthetic oligonucleotide
cauugucaaccacgcuguc

SEQ ID NO: 1083753 - RNA, 19 nt, Artificial Sequence
  Description of Artificial Sequence: Synthetic oligonucleotide
acucaauggcgguggggua

SEQ ID NO: 1083754 - RNA, 19 nt, Artificial Sequence
  Description of Artificial Sequence: Synthetic oligonucleotide
uucgguccucaaguuccug

SEQ ID NO: 1083755 - RNA, 19 nt, Artificial Sequence
  Description of Artificial Sequence: Synthetic oligonucleotide
gccaugagcgcauuauucu

SEQ ID NO: 1083756 - RNA, 19 nt, Artificial Sequence
  Description of Artificial Sequence: Synthetic oligonucleotide
uccaugccacauggaacac

SEQ ID NO: 1083757 - RNA, 19 nt, Artificial Sequence
  Description of Artificial Sequence: Synthetic oligonucleotide
cucaauggcggugggguaa

SEQ ID NO: 1083758 - RNA, 19 nt, Artificial Sequence
  Description of Artificial Sequence: Synthetic oligonucleotide
acuggguaacgaagauaug

SEQ ID NO: 1083759 - RNA, 19 nt, Artificial Sequence
  Description of Artificial Sequence: Synthetic oligonucleotide
aaacaaccuuugacuccca

SEQ ID NO: 1083760 - RNA, 19 nt, Artificial Sequence
  Description of Artificial Sequence: Synthetic oligonucleotide
guacuggguaacgaagaua

SEQ ID NO: 1083761 - RNA, 19 nt, Artificial Sequence
  Description of Artificial Sequence: Synthetic oligonucleotide
ggacucaauggcggugggg

SEQ ID NO: 1083762 - RNA, 19 nt, Artificial Sequence
  Description of Artificial Sequence: Synthetic oligonucleotide
cagugagacacuaguguau

SEQ ID NO: 1083763 - RNA, 19 nt, Artificial Sequence
  Description of Artificial Sequence: Synthetic oligonucleotide
augagguguugaguacagu

SEQ ID NO: 1083764 - RNA, 19 nt, Artificial Sequence
  Description of Artificial Sequence: Synthetic oligonucleotide
aucuaguuggaggcauuuu

SEQ ID NO: 1083765 - RNA, 19 nt, Artificial Sequence
  Description of Artificial Sequence: Synthetic oligonucleotide
cacaacccacaagccacac

SEQ ID NO: 1083766 - RNA, 19 nt, Artificial Sequence
  Description of Artificial Sequence: Synthetic oligonucleotide
cggugggguaauaauuaag

SEQ ID NO: 1083767 - RNA, 19 nt, Artificial Sequence
  Description of Artificial Sequence: Synthetic oligonucleotide
cuuuggccucacacaucuc

SEQ ID NO: 1083768 - RNA, 19 nt, Artificial Sequence
  Description of Artificial Sequence: Synthetic oligonucleotide
gcuuucaggggacgugaca

SEQ ID NO: 1083769 - RNA, 19 nt, Artificial Sequence
  Description of Artificial Sequence: Synthetic oligonucleotide
ggugcuuuaguaacccagu

SEQ ID NO: 1083770 - RNA, 19 nt, Artificial Sequence
  Description of Artificial Sequence: Synthetic oligonucleotide
cuucaccgcaucuuucaau

SEQ ID NO: 1083771 - RNA, 19 nt, Artificial Sequence
  Description of Artificial Sequence: Synthetic oligonucleotide
cugccauaugagaccucca

SEQ ID NO: 1083772 - RNA, 19 nt, Artificial Sequence
  Description of Artificial Sequence: Synthetic oligonucleotide
ggcggugggguaauaauua

SEQ ID NO: 1083773 - RNA, 19 nt, Artificial Sequence
  Description of Artificial Sequence: Synthetic oligonucleotide
gcauugcuuucaggggacg

SEQ ID NO: 1083774 - RNA, 19 nt, Artificial Sequence
  Description of Artificial Sequence: Synthetic oligonucleotide
cucaacucauuggaccucu

SEQ ID NO: 1083775 - RNA, 19 nt, Artificial Sequence
  Description of Artificial Sequence: Synthetic oligonucleotide
gcacaccacauugcaaaac

SEQ ID NO: 1083776 - RNA, 19 nt, Artificial Sequence
  Description of Artificial Sequence: Synthetic oligonucleotide
ccguguaugucuccacauc

SEQ ID NO: 1083777 - RNA, 19 nt, Artificial Sequence
  Description of Artificial Sequence: Synthetic oligonucleotide
cacacaucucuucugcguu

SEQ ID NO: 1083778 - RNA, 19 nt, Artificial Sequence
  Description of Artificial Sequence: Synthetic oligonucleotide
cuuugacucccagguccuc

SEQ ID NO: 1083779 - RNA, 19 nt, Artificial Sequence
  Description of Artificial Sequence: Synthetic oligonucleotide
acaucuaguuggaggcauu

SEQ ID NO: 1083780 - RNA, 19 nt, Artificial Sequence
  Description of Artificial Sequence: Synthetic oligonucleotide
cgcuagaccugaugaguag

SEQ ID NO: 1083781 - RNA, 19 nt, Artificial Sequence
  Description of Artificial Sequence: Synthetic oligonucleotide
gcgcauuauucuguaucug

SEQ ID NO: 1083782 - RNA, 19 nt, Artificial Sequence
  Description of Artificial Sequence: Synthetic oligonucleotide
gugcuuuaguaacccaguu

SEQ ID NO: 1083783 - RNA, 19 nt, Artificial Sequence
  Description of Artificial Sequence: Synthetic oligonucleotide
gcguuuacacccaucagau

SEQ ID NO: 1083784 - RNA, 19 nt, Artificial Sequence
  Description of Artificial Sequence: Synthetic oligonucleotide
gucugugaaagccgacuuu

SEQ ID NO: 1083785 - RNA, 19 nt, Artificial Sequence
  Description of Artificial Sequence: Synthetic oligonucleotide
ggggcaacgccugcaugcc

SEQ ID NO: 1083786 - RNA, 19 nt, Artificial Sequence
  Description of Artificial Sequence: Synthetic oligonucleotide
gguagagaauaugauuauu

SEQ ID NO: 1083787 - RNA, 19 nt, Artificial Sequence
  Description of Artificial Sequence: Synthetic oligonucleotide
ccgcaucuuucaauaucug

SEQ ID NO: 1083788 - RNA, 19 nt, Artificial Sequence
  Description of Artificial Sequence: Synthetic oligonucleotide
cugucucuuucgguccuca

SEQ ID NO: 1083789 - RNA, 19 nt, Artificial Sequence
  Description of Artificial Sequence: Synthetic oligonucleotide
ggacuugcugaaacaaccu

SEQ ID NO: 1083790 - RNA, 19 nt, Artificial Sequence
  Description of Artificial Sequence: Synthetic oligonucleotide
gcggugggguaauaauuaa

SEQ ID NO: 1083791 - RNA, 19 nt, Artificial Sequence
  Description of Artificial Sequence: Synthetic oligonucleotide
cuccaaccaggacuguggu

SEQ ID NO: 1083792 - RNA, 19 nt, Artificial Sequence
  Description of Artificial Sequence: Synthetic oligonucleotide
caccucuaaucucuagcau

SEQ ID NO: 1083793 - RNA, 19 nt, Artificial Sequence
  Description of Artificial Sequence: Synthetic oligonucleotide
ccaagcccaaagguaaaga

SEQ ID NO: 1083794 - RNA, 19 nt, Artificial Sequence
  Description of Artificial Sequence: Synthetic oligonucleotide
guguaugguuggugcuuua

SEQ ID NO: 1083795 - RNA, 19 nt, Artificial Sequence
  Description of Artificial Sequence: Synthetic oligonucleotide
gggacgugacagucucuga

SEQ ID NO: 1083796 - RNA, 19 nt, Artificial Sequence
  Description of Artificial Sequence: Synthetic oligonucleotide
caccucuuugcuccccucu

SEQ ID NO: 1083797 - RNA, 19 nt, Artificial Sequence
  Description of Artificial Sequence: Synthetic oligonucleotide
ggcucuuggugaaauguau

SEQ ID NO: 1083798 - RNA, 19 nt, Artificial Sequence
  Description of Artificial Sequence: Synthetic oligonucleotide
cuuuugugacuaguaccau

SEQ ID NO: 1083799 - RNA, 19 nt, Artificial Sequence
  Description of Artificial Sequence: Synthetic oligonucleotide
gguguugaguacagucugu

SEQ ID NO: 1083800 - RNA, 19 nt, Artificial Sequence
  Description of Artificial Sequence: Synthetic oligonucleotide
cucuuucgguccucaaguu

SEQ ID NO: 1083801 - RNA, 19 nt, Artificial Sequence
  Description of Artificial Sequence: Synthetic oligonucleotide
ccgacuuugcacaccacau

SEQ ID NO: 1083802 - RNA, 19 nt, Artificial Sequence
  Description of Artificial Sequence: Synthetic oligonucleotide
aggggacgugacagucucu

SEQ ID NO: 1083803 - RNA, 19 nt, Artificial Sequence
  Description of Artificial Sequence: Synthetic oligonucleotide
gcuccauaaacugggucau

SEQ ID NO: 1083804 - RNA, 19 nt, Artificial Sequence
  Description of Artificial Sequence: Synthetic oligonucleotide
cugugcuagaggucuucuu

SEQ ID NO: 1083805 - RNA, 19 nt, Artificial Sequence
  Description of Artificial Sequence: Synthetic oligonucleotide
cacauacugacaggacaau

SEQ ID NO: 1083806 - RNA, 19 nt, Artificial Sequence
  Description of Artificial Sequence: Synthetic oligonucleotide
ccuuugacucccagguccu

SEQ ID NO: 1083807 - RNA, 19 nt, Artificial Sequence
  Description of Artificial Sequence: Synthetic oligonucleotide
caacgccugcaugccauua

SEQ ID NO: 1083808 - RNA, 19 nt, Artificial Sequence
  Description of Artificial Sequence: Synthetic oligonucleotide
cgaugaugugguguuccuc

SEQ ID NO: 1083809 - RNA, 19 nt, Artificial Sequence
  Description of Artificial Sequence: Synthetic oligonucleotide
ggguuucuucuuugugcau

SEQ ID NO: 1083810 - RNA, 19 nt, Artificial Sequence
  Description of Artificial Sequence: Synthetic oligonucleotide
ggguaauaauuaaguuauu

SEQ ID NO: 1083811 - RNA, 19 nt, Artificial Sequence
  Description of Artificial Sequence: Synthetic oligonucleotide
cgccugcaugccauuaaaa

SEQ ID NO: 1083812 - RNA, 19 nt, Artificial Sequence
  Description of Artificial Sequence: Synthetic oligonucleotide
gaccaucgcuagaccugau

SEQ ID NO: 1083813 - RNA, 19 nt, Artificial Sequence
  Description of Artificial Sequence: Synthetic oligonucleotide
caauggcggugggguaaua

SEQ ID NO: 1083814 - RNA, 19 nt, Artificial Sequence
  Description of Artificial Sequence: Synthetic oligonucleotide
cgacuuugcacaccacauu

SEQ ID NO: 1083815 - RNA, 19 nt, Artificial Sequence
  Description of Artificial Sequence: Synthetic oligonucleotide
cguuuacacccaucagauu

SEQ ID NO: 1083816 - RNA, 19 nt, Artificial Sequence
  Description of Artificial Sequence: Synthetic oligonucleotide
  modified_base (1)..(1): a, c, u, g, unknown or other
ncaauccuaacagucaggg

SEQ ID NO: 1083817 - RNA, 19 nt, Artificial Sequence
  Description of Artificial Sequence: Synthetic oligonucleotide
uguauugucccuuucagag

SEQ ID NO: 1083818 - RNA, 19 nt, Artificial Sequence
  Description of Artificial Sequence: Synthetic oligonucleotide
uuuggguuuauaauacugg

SEQ ID NO: 1083819 - RNA, 19 nt, Artificial Sequence
  Description of Artificial Sequence: Synthetic oligonucleotide
gaauuuuaguugcaggucg

SEQ ID NO: 1083820 - RNA, 19 nt, Artificial Sequence
  Description of Artificial Sequence: Synthetic oligonucleotide
uugaggaacaugaagagga

SEQ ID NO: 1083821 - RNA, 19 nt, Artificial Sequence
  Description of Artificial Sequence: Synthetic oligonucleotide
uauugucccuuucagaggg

SEQ ID NO: 1083822 - RNA, 19 nt, Artificial Sequence
  Description of Artificial Sequence: Synthetic oligonucleotide
uaaaguuccucuuauauau

SEQ ID NO: 1083823 - RNA, 19 nt, Artificial Sequence
  Description of Artificial Sequence: Synthetic oligonucleotide
uuaguugcaggucggaggg

SEQ ID NO: 1083824 - RNA, 19 nt, Artificial Sequence
  Description of Artificial Sequence: Synthetic oligonucleotide
uuuaguugcaggucggagg

SEQ ID NO: 1083825 - RNA, 19 nt, Artificial Sequence
  Description of Artificial Sequence: Synthetic oligonucleotide
aauggauugaggaacauga

SEQ ID NO: 1083826 - RNA, 19 nt, Artificial Sequence
  Description of Artificial Sequence: Synthetic oligonucleotide
aagaguccaaaugagucgc

SEQ ID NO: 1083827 - RNA, 19 nt, Artificial Sequence
  Description of Artificial Sequence: Synthetic oligonucleotide
augaagaacacucugugug

SEQ ID NO: 1083828 - RNA, 19 nt, Artificial Sequence
  Description of Artificial Sequence: Synthetic oligonucleotide
aguagagguguauuguccc

SEQ ID NO: 1083829 - RNA, 19 nt, Artificial Sequence
  Description of Artificial Sequence: Synthetic oligonucleotide
aaaaugaagucaaaguuca

SEQ ID NO: 1083830 - RNA, 19 nt, Artificial Sequence
  Description of Artificial Sequence: Synthetic oligonucleotide
uauaugcacacacacacac

SEQ ID NO: 1083831 - RNA, 19 nt, Artificial Sequence
  Description of Artificial Sequence: Synthetic oligonucleotide
gaagaguccaaaugagucg

SEQ ID NO: 1083832 - RNA, 19 nt, Artificial Sequence
  Description of Artificial Sequence: Synthetic oligonucleotide
uguaaaguuccucuuauau

SEQ ID NO: 1083833 - RNA, 19 nt, Artificial Sequence
  Description of Artificial Sequence: Synthetic oligonucleotide
ucugcugauuguaagcggg

SEQ ID NO: 1083834 - RNA, 19 nt, Artificial Sequence
  Description of Artificial Sequence: Synthetic oligonucleotide
uggcauaaaagacauuugc

SEQ ID NO: 1083835 - RNA, 19 nt, Artificial Sequence
  Description of Artificial Sequence: Synthetic oligonucleotide
uccauaguccagaacaucc

SEQ ID NO: 1083836 - RNA, 19 nt, Artificial Sequence
  Description of Artificial Sequence: Synthetic oligonucleotide
uuucguaaaaugaagucaa

SEQ ID NO: 1083837 - RNA, 19 nt, Artificial Sequence
  Description of Artificial Sequence: Synthetic oligonucleotide
aaaccuucccuugauggcc

SEQ ID NO: 1083838 - RNA, 19 nt, Artificial Sequence
  Description of Artificial Sequence: Synthetic oligonucleotide
uccagaggcauugugaugg

SEQ ID NO: 1083839 - RNA, 19 nt, Artificial Sequence
  Description of Artificial Sequence: Synthetic oligonucleotide
ucaaaguucacuuggcugu

SEQ ID NO: 1083840 - RNA, 19 nt, Artificial Sequence
  Description of Artificial Sequence: Synthetic oligonucleotide
uuguauuacccuuucaugu

SEQ ID NO: 1083841 - RNA, 19 nt, Artificial Sequence
  Description of Artificial Sequence: Synthetic oligonucleotide
uuuucguaaaaugaaguca

SEQ ID NO: 1083842 - RNA, 19 nt, Artificial Sequence
  Description of Artificial Sequence: Synthetic oligonucleotide
ugugugguaggucugauuc

SEQ ID NO: 1083843 - RNA, 19 nt, Artificial Sequence
  Description of Artificial Sequence: Synthetic oligonucleotide
auugaaacaagcuuguguu

SEQ ID NO: 1083844 - RNA, 19 nt, Artificial Sequence
  Description of Artificial Sequence: Synthetic oligonucleotide
uggauugaggaacaugaag

SEQ ID NO: 1083845 - RNA, 19 nt, Artificial Sequence
  Description of Artificial Sequence: Synthetic oligonucleotide
gauggaacccuccucagcc

SEQ ID NO: 1083846 - RNA, 19 nt, Artificial Sequence
  Description of Artificial Sequence: Synthetic oligonucleotide
ugaagaacacucugugugg

SEQ ID NO: 1083847 - RNA, 19 nt, Artificial Sequence
  Description of Artificial Sequence: Synthetic oligonucleotide
auaucuguuggcuucacca

SEQ ID NO: 1083848 - RNA, 19 nt, Artificial Sequence
  Description of Artificial Sequence: Synthetic oligonucleotide
agaaacauaacaggguuuc

SEQ ID NO: 1083849 - RNA, 19 nt, Artificial Sequence
  Description of Artificial Sequence: Synthetic oligonucleotide
aaguagagguguauugucc

SEQ ID NO: 1083850 - RNA, 19 nt, Artificial Sequence
  Description of Artificial Sequence: Synthetic oligonucleotide
ucugaacucaauaaauauc

SEQ ID NO: 1083851 - RNA, 19 nt, Artificial Sequence
  Description of Artificial Sequence: Synthetic oligonucleotide
uaugagacuagguucucag

SEQ ID NO: 1083852 - RNA, 19 nt, Artificial Sequence
  Description of Artificial Sequence: Synthetic oligonucleotide
uguuacuccaacagccccg

SEQ ID NO: 1083853 - RNA, 19 nt, Artificial Sequence
  Description of Artificial Sequence: Synthetic oligonucleotide
uaaguuauggaagaccgca

SEQ ID NO: 1083854 - RNA, 19 nt, Artificial Sequence
  Description of Artificial Sequence: Synthetic oligonucleotide
uugacucacaggaugacac

SEQ ID NO: 1083855 - RNA, 19 nt, Artificial Sequence
  Description of Artificial Sequence: Synthetic oligonucleotide
uuaaugucaaauucacuuc

SEQ ID NO: 1083856 - RNA, 19 nt, Artificial Sequence
  Description of Artificial Sequence: Synthetic oligonucleotide
aguacuguggagguaauag

SEQ ID NO: 1083857 - RNA, 19 nt, Artificial Sequence
  Description of Artificial Sequence: Synthetic oligonucleotide
gguaauagaggucacggag

SEQ ID NO: 1083858 - RNA, 19 nt, Artificial Sequence
  Description of Artificial Sequence: Synthetic oligonucleotide
uuggguuuauaauacuggc

SEQ ID NO: 1083859 - RNA, 19 nt, Artificial Sequence
  Description of Artificial Sequence: Synthetic oligonucleotide
aauucguguccauggaaug

SEQ ID NO: 1083860 - RNA, 19 nt, Artificial Sequence
  Description of Artificial Sequence: Synthetic oligonucleotide
ugauaaguuauggaagacc

SEQ ID NO: 1083861 - RNA, 19 nt, Artificial Sequence
  Description of Artificial Sequence: Synthetic oligonucleotide
uaugcacacacacacacua

SEQ ID NO: 1083862 - RNA, 19 nt, Artificial Sequence
  Description of Artificial Sequence: Synthetic oligonucleotide
acaagcuuguguugacucc

SEQ ID NO: 1083863 - RNA, 19 nt, Artificial Sequence
  Description of Artificial Sequence: Synthetic oligonucleotide
acacacacacacuagauau

SEQ ID NO: 1083864 - RNA, 19 nt, Artificial Sequence
  Description of Artificial Sequence: Synthetic oligonucleotide
ugguuugacucacaggaug

SEQ ID NO: 1083865 - RNA, 19 nt, Artificial Sequence
  Description of Artificial Sequence: Synthetic oligonucleotide
ucguaaaaugaagucaaag

SEQ ID NO: 1083866 - RNA, 19 nt, Artificial Sequence
  Description of Artificial Sequence: Synthetic oligonucleotide
aacuucucaggccauugug

SEQ ID NO: 1083867 - RNA, 19 nt, Artificial Sequence
  Description of Artificial Sequence: Synthetic oligonucleotide
ugauuaaggaugacauccc

SEQ ID NO: 1083868 - RNA, 19 nt, Artificial Sequence
  Description of Artificial Sequence: Synthetic oligonucleotide
agaacauccuguaaaguuc

SEQ ID NO: 1083869 - RNA, 19 nt, Artificial Sequence
  Description of Artificial Sequence: Synthetic oligonucleotide
uauggaagaccgcagcuac

SEQ ID NO: 1083870 - RNA, 19 nt, Artificial Sequence
  Description of Artificial Sequence: Synthetic oligonucleotide
uaugugagugcauauacuu

SEQ ID NO: 1083871 - RNA, 19 nt, Artificial Sequence
  Description of Artificial Sequence: Synthetic oligonucleotide
uaauagaggucacggagac

SEQ ID NO: 1083872 - RNA, 19 nt, Artificial Sequence
  Description of Artificial Sequence: Synthetic oligonucleotide
uugauggccuuucaugcag

SEQ ID NO: 1083873 - RNA, 19 nt, Artificial Sequence
  Description of Artificial Sequence: Synthetic oligonucleotide
aggaugacaucccugagga

SEQ ID NO: 1083874 - RNA, 19 nt, Artificial Sequence
  Description of Artificial Sequence: Synthetic oligonucleotide
ucuucuacgcugaugcgga

SEQ ID NO: 1083875 - RNA, 19 nt, Artificial Sequence
  Description of Artificial Sequence: Synthetic oligonucleotide
aauuuuaguugcaggucgg

SEQ ID NO: 1083876 - RNA, 19 nt, Artificial Sequence
  Description of Artificial Sequence: Synthetic oligonucleotide
uggaucauuuuguauuacc

SEQ ID NO: 1083877 - RNA, 19 nt, Artificial Sequence
  Description of Artificial Sequence: Synthetic oligonucleotide
ucuacguagugcuuuguac

SEQ ID NO: 1083878 - RNA, 19 nt, Artificial Sequence
  Description of Artificial Sequence: Synthetic oligonucleotide
cauuuauccuuuuaauguc

SEQ ID NO: 1083879 - RNA, 19 nt, Artificial Sequence
  Description of Artificial Sequence: Synthetic oligonucleotide
uggcugauaaguuauggaa

SEQ ID NO: 1083880 - RNA, 19 nt, Artificial Sequence
  Description of Artificial Sequence: Synthetic oligonucleotide
ucuacgcugaugcggauga

SEQ ID NO: 1083881 - RNA, 19 nt, Artificial Sequence
  Description of Artificial Sequence: Synthetic oligonucleotide
acacuagauaugugagugc

SEQ ID NO: 1083882 - RNA, 19 nt, Artificial Sequence
  Description of Artificial Sequence: Synthetic oligonucleotide
uggguuuauaauacuggca

SEQ ID NO: 1083883 - RNA, 19 nt, Artificial Sequence
  Description of Artificial Sequence: Synthetic oligonucleotide
gagacuagguucucagucc

SEQ ID NO: 1083884 - RNA, 19 nt, Artificial Sequence
  Description of Artificial Sequence: Synthetic oligonucleotide
uguauuacccuuucauguc

SEQ ID NO: 1083885 - RNA, 19 nt, Artificial Sequence
  Description of Artificial Sequence: Synthetic oligonucleotide
ucggagagcuucuuugagg

SEQ ID NO: 1083886 - RNA, 19 nt, Artificial Sequence
  Description of Artificial Sequence: Synthetic oligonucleotide
cugauuguaagcgggaggc

SEQ ID NO: 1083887 - RNA, 19 nt, Artificial Sequence
  Description of Artificial Sequence: Synthetic oligonucleotide
uuuggaagguaugagacua

SEQ ID NO: 1083888 - RNA, 19 nt, Artificial Sequence
  Description of Artificial Sequence: Synthetic oligonucleotide
aaugucaagcugguccgac

SEQ ID NO: 1083889 - RNA, 19 nt, Artificial Sequence
  Description of Artificial Sequence: Synthetic oligonucleotide
ugugagugcauauacuuuu

SEQ ID NO: 1083890 - RNA, 19 nt, Artificial Sequence
  Description of Artificial Sequence: Synthetic oligonucleotide
ugaacucaauaaauaucug

SEQ ID NO: 1083891 - RNA, 19 nt, Artificial Sequence
  Description of Artificial Sequence: Synthetic oligonucleotide
uucuuuaggagagaacaca

SEQ ID NO: 1083892 - RNA, 19 nt, Artificial Sequence
  Description of Artificial Sequence: Synthetic oligonucleotide
aaaugagucgccagucuuc

SEQ ID NO: 1083893 - RNA, 19 nt, Artificial Sequence
  Description of Artificial Sequence: Synthetic oligonucleotide
ugguguguucuuuaggaga

SEQ ID NO: 1083894 - RNA, 19 nt, Artificial Sequence
  Description of Artificial Sequence: Synthetic oligonucleotide
cacacacuagauaugugag

SEQ ID NO: 1083895 - RNA, 19 nt, Artificial Sequence
  Description of Artificial Sequence: Synthetic oligonucleotide
guaggucugauucuauuug

SEQ ID NO: 1083896 - RNA, 19 nt, Artificial Sequence
  Description of Artificial Sequence: Synthetic oligonucleotide
cugaacucaauaaauaucu

SEQ ID NO: 1083897 - RNA, 19 nt, Artificial Sequence
  Description of Artificial Sequence: Synthetic oligonucleotide
ugcacacacacacacuaga

SEQ ID NO: 1083898 - RNA, 19 nt, Artificial Sequence
  Description of Artificial Sequence: Synthetic oligonucleotide
acuucucaggccauugugc

SEQ ID NO: 1083899 - RNA, 19 nt, Artificial Sequence
  Description of Artificial Sequence: Synthetic oligonucleotide
uuuauccuuuuaaugucaa

SEQ ID NO: 1083900 - RNA, 19 nt, Artificial Sequence
  Description of Artificial Sequence: Synthetic oligonucleotide
ucagugaaucauuuauccu

SEQ ID NO: 1083901 - RNA, 19 nt, Artificial Sequence
  Description of Artificial Sequence: Synthetic oligonucleotide
guauuacccuuucaugucc

SEQ ID NO: 1083902 - RNA, 19 nt, Artificial Sequence
  Description of Artificial Sequence: Synthetic oligonucleotide
gauaccacagcuguucuca

SEQ ID NO: 1083903 - RNA, 19 nt, Artificial Sequence
  Description of Artificial Sequence: Synthetic oligonucleotide
uucugcugauuguaagcgg

SEQ ID NO: 1083904 - RNA, 19 nt, Artificial Sequence
  Description of Artificial Sequence: Synthetic oligonucleotide
aucuugcugugucuguuac

SEQ ID NO: 1083905 - RNA, 19 nt, Artificial Sequence
  Description of Artificial Sequence: Synthetic oligonucleotide
ugaauuuuaguugcagguc

SEQ ID NO: 1083906 - RNA, 19 nt, Artificial Sequence
  Description of Artificial Sequence: Synthetic oligonucleotide
uugaaacaagcuuguguug

SEQ ID NO: 1083907 - RNA, 19 nt, Artificial Sequence
  Description of Artificial Sequence: Synthetic oligonucleotide
gcuugugaauuuuaguugc

SEQ ID NO: 1083908 - RNA, 19 nt, Artificial Sequence
  Description of Artificial Sequence: Synthetic oligonucleotide
uuccacucucucuacguag

SEQ ID NO: 1083909 - RNA, 19 nt, Artificial Sequence
  Description of Artificial Sequence: Synthetic oligonucleotide
uuuuaguugcaggucggag

SEQ ID NO: 1083910 - RNA, 19 nt, Artificial Sequence
  Description of Artificial Sequence: Synthetic oligonucleotide
guuuggguuuauaauacug

SEQ ID NO: 1083911 - RNA, 19 nt, Artificial Sequence
  Description of Artificial Sequence: Synthetic oligonucleotide
auaaguuauggaagaccgc

SEQ ID NO: 1083912 - RNA, 19 nt, Artificial Sequence
  Description of Artificial Sequence: Synthetic oligonucleotide
uggaauggauugaggaaca

SEQ ID NO: 1083913 - RNA, 19 nt, Artificial Sequence
  Description of Artificial Sequence: Synthetic oligonucleotide
auuuguuuggaagguauga

SEQ ID NO: 1083914 - RNA, 19 nt, Artificial Sequence
  Description of Artificial Sequence: Synthetic oligonucleotide
agggugaucuugcuguguc

SEQ ID NO: 1083915 - RNA, 19 nt, Artificial Sequence
  Description of Artificial Sequence: Synthetic oligonucleotide
uacuugugcaguaaagauu

SEQ ID NO: 1083916 - RNA, 19 nt, Artificial Sequence
  Description of Artificial Sequence: Synthetic oligonucleotide
caggccauugugcaaauug

SEQ ID NO: 1083917 - RNA, 19 nt, Artificial Sequence
  Description of Artificial Sequence: Synthetic oligonucleotide
uguaucacagcaggggucu

SEQ ID NO: 1083918 - RNA, 19 nt, Artificial Sequence
  Description of Artificial Sequence: Synthetic oligonucleotide
caaaccuucccuugauggc

SEQ ID NO: 1083919 - RNA, 19 nt, Artificial Sequence
  Description of Artificial Sequence: Synthetic oligonucleotide
uguuagaagcugcugccuc

SEQ ID NO: 1083920 - RNA, 19 nt, Artificial Sequence
  Description of Artificial Sequence: Synthetic oligonucleotide
ucaagcugguccgacuacg

SEQ ID NO: 1083921 - RNA, 19 nt, Artificial Sequence
  Description of Artificial Sequence: Synthetic oligonucleotide
agaacacucugugugguag

SEQ ID NO: 1083922 - RNA, 19 nt, Artificial Sequence
  Description of Artificial Sequence: Synthetic oligonucleotide
aaaugaagucaaaguucac

SEQ ID NO: 1083923 - RNA, 19 nt, Artificial Sequence
  Description of Artificial Sequence: Synthetic oligonucleotide
acgcugacugaguccaugc

SEQ ID NO: 1083924 - RNA, 19 nt, Artificial Sequence
  Description of Artificial Sequence: Synthetic oligonucleotide
uauuacccuuucaugucca

SEQ ID NO: 1083925 - RNA, 19 nt, Artificial Sequence
  Description of Artificial Sequence: Synthetic oligonucleotide
agcugguccgacuacgcag

SEQ ID NO: 1083926 - RNA, 19 nt, Artificial Sequence
  Description of Artificial Sequence: Synthetic oligonucleotide
aaugagucgccagucuucu

SEQ ID NO: 1083927 - RNA, 19 nt, Artificial Sequence
  Description of Artificial Sequence: Synthetic oligonucleotide
agagaagaguccaaaugag

SEQ ID NO: 1083928 - RNA, 19 nt, Artificial Sequence
  Description of Artificial Sequence: Synthetic oligonucleotide
uuugcagagucugguauca

SEQ ID NO: 1083929 - RNA, 19 nt, Artificial Sequence
  Description of Artificial Sequence: Synthetic oligonucleotide
cuugcugugucuguuacuc

SEQ ID NO: 1083930 - RNA, 19 nt, Artificial Sequence
  Description of Artificial Sequence: Synthetic oligonucleotide
accaaugauccucaacacu

SEQ ID NO: 1083931 - RNA, 19 nt, Artificial Sequence
  Description of Artificial Sequence: Synthetic oligonucleotide
uucaccaaugauccucaac

SEQ ID NO: 1083932 - RNA, 19 nt, Artificial Sequence
  Description of Artificial Sequence: Synthetic oligonucleotide
aguccaaaugagucgccag

SEQ ID NO: 1083933 - RNA, 19 nt, Artificial Sequence
  Description of Artificial Sequence: Synthetic oligonucleotide
caaguagagguguauuguc

SEQ ID NO: 1083934 - RNA, 19 nt, Artificial Sequence
  Description of Artificial Sequence: Synthetic oligonucleotide
uaaagauugugguguguuc

SEQ ID NO: 1083935 - RNA, 19 nt, Artificial Sequence
  Description of Artificial Sequence: Synthetic oligonucleotide
gucuucuacgcugaugcgg

SEQ ID NO: 1083936 - RNA, 19 nt, Artificial Sequence
  Description of Artificial Sequence: Synthetic oligonucleotide
gaagguaugagacuagguu

SEQ ID NO: 1083937 - RNA, 19 nt, Artificial Sequence
  Description of Artificial Sequence: Synthetic oligonucleotide
gguguauugucccuuucag

SEQ ID NO: 1083938 - RNA, 19 nt, Artificial Sequence
  Description of Artificial Sequence: Synthetic oligonucleotide
ggauugaggaacaugaaga

SEQ ID NO: 1083939 - RNA, 19 nt, Artificial Sequence
  Description of Artificial Sequence: Synthetic oligonucleotide
gaaacaagcuuguguugac

SEQ ID NO: 1083940 - RNA, 19 nt, Artificial Sequence
  Description of Artificial Sequence: Synthetic oligonucleotide
gaauggauugaggaacaug

SEQ ID NO: 1083941 - RNA, 19 nt, Artificial Sequence
  Description of Artificial Sequence: Synthetic oligonucleotide
cuacguagugcuuuguaca

SEQ ID NO: 1083942 - RNA, 19 nt, Artificial Sequence
  Description of Artificial Sequence: Synthetic oligonucleotide
acaggguuuccagaaauug

SEQ ID NO: 1083943 - RNA, 19 nt, Artificial Sequence
  Description of Artificial Sequence: Synthetic oligonucleotide
gcuucaaucucacaggaga

SEQ ID NO: 1083944 - RNA, 19 nt, Artificial Sequence
  Description of Artificial Sequence: Synthetic oligonucleotide
uuggaagguaugagacuag

SEQ ID NO: 1083945 - RNA, 19 nt, Artificial Sequence
  Description of Artificial Sequence: Synthetic oligonucleotide
uaagcgggaggcaguacug

SEQ ID NO: 1083946 - RNA, 19 nt, Artificial Sequence
  Description of Artificial Sequence: Synthetic oligonucleotide
caugacugagaaaguaauc

SEQ ID NO: 1083947 - RNA, 19 nt, Artificial Sequence
  Description of Artificial Sequence: Synthetic oligonucleotide
uuugacucacaggaugaca

SEQ ID NO: 1083948 - RNA, 19 nt, Artificial Sequence
  Description of Artificial Sequence: Synthetic oligonucleotide
cuuucagagggugaucuug

SEQ ID NO: 1083949 - RNA, 19 nt, Artificial Sequence
  Description of Artificial Sequence: Synthetic oligonucleotide
aaguuauggaagaccgcag

SEQ ID NO: 1083950 - RNA, 19 nt, Artificial Sequence
  Description of Artificial Sequence: Synthetic oligonucleotide
uguguucuuuaggagagaa

SEQ ID NO: 1083951 - RNA, 19 nt, Artificial Sequence
  Description of Artificial Sequence: Synthetic oligonucleotide
acuuccacucucucuacgu

SEQ ID NO: 1083952 - RNA, 19 nt, Artificial Sequence
  Description of Artificial Sequence: Synthetic oligonucleotide
uuuauaauacuggcaugaa

SEQ ID NO: 1083953 - RNA, 19 nt, Artificial Sequence
  Description of Artificial Sequence: Synthetic oligonucleotide
auuuauccuuuuaauguca

SEQ ID NO: 1083954 - RNA, 19 nt, Artificial Sequence
  Description of Artificial Sequence: Synthetic oligonucleotide
agauaccacagcuguucuc

SEQ ID NO: 1083955 - RNA, 19 nt, Artificial Sequence
  Description of Artificial Sequence: Synthetic oligonucleotide
agguguauugucccuuuca

SEQ ID NO: 1083956 - RNA, 19 nt, Artificial Sequence
  Description of Artificial Sequence: Synthetic oligonucleotide
guugauuaaggaugacauc

SEQ ID NO: 1083957 - RNA, 19 nt, Artificial Sequence
  Description of Artificial Sequence: Synthetic oligonucleotide
acacacuagauaugugagu

SEQ ID NO: 1083958 - RNA, 19 nt, Artificial Sequence
  Description of Artificial Sequence: Synthetic oligonucleotide
aagauugugguguguucuu

SEQ ID NO: 1083959 - RNA, 19 nt, Artificial Sequence
  Description of Artificial Sequence: Synthetic oligonucleotide
gcugauaaguuauggaaga

SEQ ID NO: 1083960 - RNA, 19 nt, Artificial Sequence
  Description of Artificial Sequence: Synthetic oligonucleotide
ucacaggaugacacgcuga

SEQ ID NO: 1083961 - RNA, 19 nt, Artificial Sequence
  Description of Artificial Sequence: Synthetic oligonucleotide
ggaggcaguacuguggagg

SEQ ID NO: 1083962 - RNA, 19 nt, Artificial Sequence
  Description of Artificial Sequence: Synthetic oligonucleotide
ugaagcuccggcagacaca

SEQ ID NO: 1083963 - RNA, 19 nt, Artificial Sequence
  Description of Artificial Sequence: Synthetic oligonucleotide
cucaacacugggugguggc

SEQ ID NO: 1083964 - RNA, 19 nt, Artificial Sequence
  Description of Artificial Sequence: Synthetic oligonucleotide
ucuuccacugaguucuuuu

SEQ ID NO: 1083965 - RNA, 19 nt, Artificial Sequence
  Description of Artificial Sequence: Synthetic oligonucleotide
uucguaaaaugaagucaaa

SEQ ID NO: 1083966 - RNA, 19 nt, Artificial Sequence
  Description of Artificial Sequence: Synthetic oligonucleotide
cacaggaugacacgcugac

SEQ ID NO: 1083967 - RNA, 19 nt, Artificial Sequence
  Description of Artificial Sequence: Synthetic oligonucleotide
ggcaaguagagguguauug

SEQ ID NO: 1083968 - RNA, 19 nt, Artificial Sequence
  Description of Artificial Sequence: Synthetic oligonucleotide
gugguguguucuuuaggag

SEQ ID NO: 1083969 - RNA, 19 nt, Artificial Sequence
  Description of Artificial Sequence: Synthetic oligonucleotide
guaauagaggucacggaga

SEQ ID NO: 1083970 - RNA, 19 nt, Artificial Sequence
  Description of Artificial Sequence: Synthetic oligonucleotide
ugcugauuguaagcgggag

SEQ ID NO: 1083971 - RNA, 19 nt, Artificial Sequence
  Description of Artificial Sequence: Synthetic oligonucleotide
ugacacgcugacugagucc

SEQ ID NO: 1083972 - RNA, 19 nt, Artificial Sequence
  Description of Artificial Sequence: Synthetic oligonucleotide
ggcugauaaguuauggaag

SEQ ID NO: 1083973 - RNA, 19 nt, Artificial Sequence
  Description of Artificial Sequence: Synthetic oligonucleotide
agguaauagaggucacgga

SEQ ID NO: 1083974 - RNA, 19 nt, Artificial Sequence
  Description of Artificial Sequence: Synthetic oligonucleotide
ugggagugcucccagugau

SEQ ID NO: 1083975 - RNA, 19 nt, Artificial Sequence
  Description of Artificial Sequence: Synthetic oligonucleotide
cacaucugaacucaauaaa

SEQ ID NO: 1083976 - RNA, 19 nt, Artificial Sequence
  Description of Artificial Sequence: Synthetic oligonucleotide
ucccugaggaauucguguc

SEQ ID NO: 1083977 - RNA, 19 nt, Artificial Sequence
  Description of Artificial Sequence: Synthetic oligonucleotide
cuccgagaugaccuguacc

SEQ ID NO: 1083978 - RNA, 19 nt, Artificial Sequence
  Description of Artificial Sequence: Synthetic oligonucleotide
aacacucugugugguaggu

SEQ ID NO: 1083979 - RNA, 19 nt, Artificial Sequence
  Description of Artificial Sequence: Synthetic oligonucleotide
ugugguaggucugauucua

SEQ ID NO: 1083980 - RNA, 19 nt, Artificial Sequence
  Description of Artificial Sequence: Synthetic oligonucleotide
cugagaaaguaauccucuc

SEQ ID NO: 1083981 - RNA, 19 nt, Artificial Sequence
  Description of Artificial Sequence: Synthetic oligonucleotide
ucuauuuguuuggaaggua

SEQ ID NO: 1083982 - RNA, 19 nt, Artificial Sequence
  Description of Artificial Sequence: Synthetic oligonucleotide
aggcauugugauggggacc

SEQ ID NO: 1083983 - RNA, 19 nt, Artificial Sequence
  Description of Artificial Sequence: Synthetic oligonucleotide
aggaauucguguccaugga

SEQ ID NO: 1083984 - RNA, 19 nt, Artificial Sequence
  Description of Artificial Sequence: Synthetic oligonucleotide
ucugagugguuugacucac

SEQ ID NO: 1083985 - RNA, 19 nt, Artificial Sequence
  Description of Artificial Sequence: Synthetic oligonucleotide
caccaugcucuuccgaggc

SEQ ID NO: 1083986 - RNA, 19 nt, Artificial Sequence
  Description of Artificial Sequence: Synthetic oligonucleotide
ugccuuuggcaaguagagg

SEQ ID NO: 1083987 - RNA, 19 nt, Artificial Sequence
  Description of Artificial Sequence: Synthetic oligonucleotide
gauuaaggaugacaucccu

SEQ ID NO: 1083988 - RNA, 19 nt, Artificial Sequence
  Description of Artificial Sequence: Synthetic oligonucleotide
agcaucgcucucuguauca

SEQ ID NO: 1083989 - RNA, 19 nt, Artificial Sequence
  Description of Artificial Sequence: Synthetic oligonucleotide
caagcugguccgacuacgc

SEQ ID NO: 1083990 - RNA, 19 nt, Artificial Sequence
  Description of Artificial Sequence: Synthetic oligonucleotide
acaugacugagaaaguaau

SEQ ID NO: 1083991 - RNA, 19 nt, Artificial Sequence
  Description of Artificial Sequence: Synthetic oligonucleotide
cuguaucacagcagggguc

SEQ ID NO: 1083992 - RNA, 19 nt, Artificial Sequence
  Description of Artificial Sequence: Synthetic oligonucleotide
uuuggcaaguagaggugua

SEQ ID NO: 1083993 - RNA, 19 nt, Artificial Sequence
  Description of Artificial Sequence: Synthetic oligonucleotide
uacuccaacagccccgcuu

SEQ ID NO: 1083994 - RNA, 19 nt, Artificial Sequence
  Description of Artificial Sequence: Synthetic oligonucleotide
auaugugagugcauauacu

SEQ ID NO: 1083995 - RNA, 19 nt, Artificial Sequence
  Description of Artificial Sequence: Synthetic oligonucleotide
uguccauggaauggauuga

SEQ ID NO: 1083996 - RNA, 19 nt, Artificial Sequence
  Description of Artificial Sequence: Synthetic oligonucleotide
cacuagauaugugagugca

SEQ ID NO: 1083997 - RNA, 19 nt, Artificial Sequence
  Description of Artificial Sequence: Synthetic oligonucleotide
cugauaaguuauggaagac

SEQ ID NO: 1083998 - RNA, 19 nt, Artificial Sequence
  Description of Artificial Sequence: Synthetic oligonucleotide
caucccugaggaauucgug

SEQ ID NO: 1083999 - RNA, 19 nt, Artificial Sequence
  Description of Artificial Sequence: Synthetic oligonucleotide
caguaaagauuguggugug

SEQ ID NO: 1084000 - RNA, 19 nt, Artificial Sequence
  Description of Artificial Sequence: Synthetic oligonucleotide
aagaacacucuguguggua

SEQ ID NO: 1084001 - RNA, 19 nt, Artificial Sequence
  Description of Artificial Sequence: Synthetic oligonucleotide
gaagaccgcagcuacuugu

SEQ ID NO: 1084002 - RNA, 19 nt, Artificial Sequence
  Description of Artificial Sequence: Synthetic oligonucleotide
agugaaucauuuauccuuu

SEQ ID NO: 1084003 - RNA, 19 nt, Artificial Sequence
  Description of Artificial Sequence: Synthetic oligonucleotide
ggcauaaaagacauuugca

SEQ ID NO: 1084004 - RNA, 19 nt, Artificial Sequence
  Description of Artificial Sequence: Synthetic oligonucleotide
augagacuagguucucagu

SEQ ID NO: 1084005 - RNA, 19 nt, Artificial Sequence
  Description of Artificial Sequence: Synthetic oligonucleotide
gagcgcuugugaauuuuag

SEQ ID NO: 1084006 - RNA, 19 nt, Artificial Sequence
  Description of Artificial Sequence: Synthetic oligonucleotide
auacuggcaugaagaacac

SEQ ID NO: 1084007 - RNA, 19 nt, Artificial Sequence
  Description of Artificial Sequence: Synthetic oligonucleotide
ugaccucugcaguuuguuc

SEQ ID NO: 1084008 - RNA, 19 nt, Artificial Sequence
  Description of Artificial Sequence: Synthetic oligonucleotide
cuagauaugugagugcaua

SEQ ID NO: 1084009 - RNA, 19 nt, Artificial Sequence
  Description of Artificial Sequence: Synthetic oligonucleotide
caucugguguguccauggg

SEQ ID NO: 1084010 - RNA, 19 nt, Artificial Sequence
  Description of Artificial Sequence: Synthetic oligonucleotide
uucuacgcugaugcggaug

SEQ ID NO: 1084011 - RNA, 19 nt, Artificial Sequence
  Description of Artificial Sequence: Synthetic oligonucleotide
cuugugaauuuuaguugca

SEQ ID NO: 1084012 - RNA, 19 nt, Artificial Sequence
  Description of Artificial Sequence: Synthetic oligonucleotide
agaguccaaaugagucgcc

SEQ ID NO: 1084013 - RNA, 19 nt, Artificial Sequence
  Description of Artificial Sequence: Synthetic oligonucleotide
cuugauggccuuucaugca

SEQ ID NO: 1084014 - RNA, 19 nt, Artificial Sequence
  Description of Artificial Sequence: Synthetic oligonucleotide
guuacuccaacagccccgc

SEQ ID NO: 1084015 - RNA, 19 nt, Artificial Sequence
  Description of Artificial Sequence: Synthetic oligonucleotide
cuguggagguaauagaggu

SEQ ID NO: 1084016 - RNA, 19 nt, Artificial Sequence
  Description of Artificial Sequence: Synthetic oligonucleotide
cucuggaaccacuggauaa

SEQ ID NO: 1084017 - RNA, 19 nt, Artificial Sequence
  Description of Artificial Sequence: Synthetic oligonucleotide
auauaugcacacacacaca

SEQ ID NO: 1084018 - RNA, 19 nt, Artificial Sequence
  Description of Artificial Sequence: Synthetic oligonucleotide
gguccgacuacgcagcuuc

SEQ ID NO: 1084019 - RNA, 19 nt, Artificial Sequence
  Description of Artificial Sequence: Synthetic oligonucleotide
acauuugcagagucuggua

SEQ ID NO: 1084020 - RNA, 19 nt, Artificial Sequence
  Description of Artificial Sequence: Synthetic oligonucleotide
ucucucuacguagugcuuu

SEQ ID NO: 1084021 - RNA, 19 nt, Artificial Sequence
  Description of Artificial Sequence: Synthetic oligonucleotide
uggaagaccgcagcuacuu

SEQ ID NO: 1084022 - RNA, 19 nt, Artificial Sequence
  Description of Artificial Sequence: Synthetic oligonucleotide
gacauuugcagagucuggu

SEQ ID NO: 1084023 - RNA, 19 nt, Artificial Sequence
  Description of Artificial Sequence: Synthetic oligonucleotide
gugcaguaaagauuguggu

SEQ ID NO: 1084024 - RNA, 19 nt, Artificial Sequence
  Description of Artificial Sequence: Synthetic oligonucleotide
agcaucagugaaucauuua

SEQ ID NO: 1084025 - RNA, 19 nt, Artificial Sequence
  Description of Artificial Sequence: Synthetic oligonucleotide
gaauucguguccauggaau

SEQ ID NO: 1084026 - RNA, 19 nt, Artificial Sequence
  Description of Artificial Sequence: Synthetic oligonucleotide
cuacuugugcaguaaagau

SEQ ID NO: 1084027 - RNA, 19 nt, Artificial Sequence
  Description of Artificial Sequence: Synthetic oligonucleotide
ugauuguaagcgggaggca

SEQ ID NO: 1084028 - RNA, 19 nt, Artificial Sequence
  Description of Artificial Sequence: Synthetic oligonucleotide
auccucaacacuggguggu

SEQ ID NO: 1084029 - RNA, 19 nt, Artificial Sequence
  Description of Artificial Sequence: Synthetic oligonucleotide
gguugauuaaggaugacau

SEQ ID NO: 1084030 - RNA, 19 nt, Artificial Sequence
  Description of Artificial Sequence: Synthetic oligonucleotide
auuguaagcgggaggcagu

SEQ ID NO: 1084031 - RNA, 19 nt, Artificial Sequence
  Description of Artificial Sequence: Synthetic oligonucleotide
gcuacuugugcaguaaaga

SEQ ID NO: 1084032 - RNA, 19 nt, Artificial Sequence
  Description of Artificial Sequence: Synthetic oligonucleotide
uccggcagacacaggcaga

SEQ ID NO: 1084033 - RNA, 19 nt, Artificial Sequence
  Description of Artificial Sequence: Synthetic oligonucleotide
auccaaaccuucccuugau

SEQ ID NO: 1084034 - RNA, 19 nt, Artificial Sequence
  Description of Artificial Sequence: Synthetic oligonucleotide
agagguguauugucccuuu

SEQ ID NO: 1084035 - RNA, 19 nt, Artificial Sequence
  Description of Artificial Sequence: Synthetic oligonucleotide
ugucaacaugaugcuuuug

SEQ ID NO: 1084036 - RNA, 19 nt, Artificial Sequence
  Description of Artificial Sequence: Synthetic oligonucleotide
uuggcaaguagagguguau

SEQ ID NO: 1084037 - RNA, 19 nt, Artificial Sequence
  Description of Artificial Sequence: Synthetic oligonucleotide
cauccaaaccuucccuuga

SEQ ID NO: 1084038 - RNA, 19 nt, Artificial Sequence
  Description of Artificial Sequence: Synthetic oligonucleotide
gagucgccagucuucugca

SEQ ID NO: 1084039 - RNA, 19 nt, Artificial Sequence
  Description of Artificial Sequence: Synthetic oligonucleotide
auaugcacacacacacacu

SEQ ID NO: 1084040 - RNA, 19 nt, Artificial Sequence
  Description of Artificial Sequence: Synthetic oligonucleotide
gaggcaguacuguggaggu

SEQ ID NO: 1084041 - RNA, 19 nt, Artificial Sequence
  Description of Artificial Sequence: Synthetic oligonucleotide
uguggccagucugaccucu

SEQ ID NO: 1084042 - RNA, 19 nt, Artificial Sequence
  Description of Artificial Sequence: Synthetic oligonucleotide
auggaacccuccucagccu

SEQ ID NO: 1084043 - RNA, 19 nt, Artificial Sequence
  Description of Artificial Sequence: Synthetic oligonucleotide
guuugacucacaggaugac

SEQ ID NO: 1084044 - RNA, 19 nt, Artificial Sequence
  Description of Artificial Sequence: Synthetic oligonucleotide
gguuugacucacaggauga

SEQ ID NO: 1084045 - RNA, 19 nt, Artificial Sequence
  Description of Artificial Sequence: Synthetic oligonucleotide
aagcgggaggcaguacugu

SEQ ID NO: 1084046 - RNA, 19 nt, Artificial Sequence
  Description of Artificial Sequence: Synthetic oligonucleotide
caugaagaacacucugugu

SEQ ID NO: 1084047 - RNA, 19 nt, Artificial Sequence
  Description of Artificial Sequence: Synthetic oligonucleotide
ggggucuuauccuggcuug

SEQ ID NO: 1084048 - RNA, 19 nt, Artificial Sequence
  Description of Artificial Sequence: Synthetic oligonucleotide
cgcuugugaauuuuaguug

SEQ ID NO: 1084049 - RNA, 19 nt, Artificial Sequence
  Description of Artificial Sequence: Synthetic oligonucleotide
aguucacuuggcuguucau

SEQ ID NO: 1084050 - RNA, 19 nt, Artificial Sequence
  Description of Artificial Sequence: Synthetic oligonucleotide
cugcagauaccacagcugu

SEQ ID NO: 1084051 - RNA, 19 nt, Artificial Sequence
  Description of Artificial Sequence: Synthetic oligonucleotide
gucugaccucugcaguuug

SEQ ID NO: 1084052 - RNA, 19 nt, Artificial Sequence
  Description of Artificial Sequence: Synthetic oligonucleotide
cccagaaacaguaggcuca

SEQ ID NO: 1084053 - RNA, 19 nt, Artificial Sequence
  Description of Artificial Sequence: Synthetic oligonucleotide
ggcuucaccaaugauccuc

SEQ ID NO: 1084054 - RNA, 19 nt, Artificial Sequence
  Description of Artificial Sequence: Synthetic oligonucleotide
cacacacacacacuagaua

SEQ ID NO: 1084055 - RNA, 19 nt, Artificial Sequence
  Description of Artificial Sequence: Synthetic oligonucleotide
uagagguguauugucccuu

SEQ ID NO: 1084056 - RNA, 19 nt, Artificial Sequence
  Description of Artificial Sequence: Synthetic oligonucleotide
ggguugauuaaggaugaca

SEQ ID NO: 1084057 - RNA, 19 nt, Artificial Sequence
  Description of Artificial Sequence: Synthetic oligonucleotide
augcacacacacacacuag

SEQ ID NO: 1084058 - RNA, 19 nt, Artificial Sequence
  Description of Artificial Sequence: Synthetic oligonucleotide
gagguguauugucccuuuc

SEQ ID NO: 1084059 - RNA, 19 nt, Artificial Sequence
  Description of Artificial Sequence: Synthetic oligonucleotide
gaagaacacucuguguggu

SEQ ID NO: 1084060 - RNA, 19 nt, Artificial Sequence
  Description of Artificial Sequence: Synthetic oligonucleotide
ggaugacacgcugacugag

SEQ ID NO: 1084061 - RNA, 19 nt, Artificial Sequence
  Description of Artificial Sequence: Synthetic oligonucleotide
uuguaagcgggaggcagua

SEQ ID NO: 1084062 - RNA, 19 nt, Artificial Sequence
  Description of Artificial Sequence: Synthetic oligonucleotide
ucucacaggagagggcaua

SEQ ID NO: 1084063 - RNA, 19 nt, Artificial Sequence
  Description of Artificial Sequence: Synthetic oligonucleotide
aggugucuucguucugcug

SEQ ID NO: 1084064 - RNA, 19 nt, Artificial Sequence
  Description of Artificial Sequence: Synthetic oligonucleotide
gucaagcugguccgacuac

SEQ ID NO: 1084065 - RNA, 19 nt, Artificial Sequence
  Description of Artificial Sequence: Synthetic oligonucleotide
guaugagacuagguucuca

SEQ ID NO: 1084066 - RNA, 19 nt, Artificial Sequence
  Description of Artificial Sequence: Synthetic oligonucleotide
uccuccgagaugaccugua

SEQ ID NO: 1084067 - RNA, 19 nt, Artificial Sequence
  Description of Artificial Sequence: Synthetic oligonucleotide
cacaggagagggcauagcu

SEQ ID NO: 1084068 - RNA, 19 nt, Artificial Sequence
  Description of Artificial Sequence: Synthetic oligonucleotide
ggaauucguguccauggaa

SEQ ID NO: 1084069 - RNA, 19 nt, Artificial Sequence
  Description of Artificial Sequence: Synthetic oligonucleotide
guaaagauugugguguguu

SEQ ID NO: 1084070 - RNA, 19 nt, Artificial Sequence
  Description of Artificial Sequence: Synthetic oligonucleotide
ccuuuggcaaguagaggug

SEQ ID NO: 1084071 - RNA, 19 nt, Artificial Sequence
  Description of Artificial Sequence: Synthetic oligonucleotide
guccaaaugagucgccagu

SEQ ID NO: 1084072 - RNA, 19 nt, Artificial Sequence
  Description of Artificial Sequence: Synthetic oligonucleotide
uccgacuacgcagcuucac

SEQ ID NO: 1084073 - RNA, 19 nt, Artificial Sequence
  Description of Artificial Sequence: Synthetic oligonucleotide
uggcaaguagagguguauu

SEQ ID NO: 1084074 - RNA, 19 nt, Artificial Sequence
  Description of Artificial Sequence: Synthetic oligonucleotide
ggcaguacuguggagguaa

SEQ ID NO: 1084075 - RNA, 19 nt, Artificial Sequence
  Description of Artificial Sequence: Synthetic oligonucleotide
uguaagcgggaggcaguac

SEQ ID NO: 1084076 - RNA, 19 nt, Artificial Sequence
  Description of Artificial Sequence: Synthetic oligonucleotide
uacuggcaugaagaacacu

SEQ ID NO: 1084077 - RNA, 19 nt, Artificial Sequence
  Description of Artificial Sequence: Synthetic oligonucleotide
cugcugauuguaagcggga

SEQ ID NO: 1084078 - RNA, 19 nt, Artificial Sequence
  Description of Artificial Sequence: Synthetic oligonucleotide
ccgacuacgcagcuucacc

SEQ ID NO: 1084079 - RNA, 19 nt, Artificial Sequence
  Description of Artificial Sequence: Synthetic oligonucleotide
acguagugcuuuguacaca

SEQ ID NO: 1084080 - RNA, 19 nt, Artificial Sequence
  Description of Artificial Sequence: Synthetic oligonucleotide
cagcaucgcucucuguauc

SEQ ID NO: 1084081 - RNA, 19 nt, Artificial Sequence
  Description of Artificial Sequence: Synthetic oligonucleotide
aggucggaggggaggacag

SEQ ID NO: 1084082 - RNA, 19 nt, Artificial Sequence
  Description of Artificial Sequence: Synthetic oligonucleotide
gugggagugcucccaguga

SEQ ID NO: 1084083 - RNA, 19 nt, Artificial Sequence
  Description of Artificial Sequence: Synthetic oligonucleotide
cacgcugacugaguccaug

SEQ ID NO: 1084084 - RNA, 19 nt, Artificial Sequence
  Description of Artificial Sequence: Synthetic oligonucleotide
agauugugguguguucuuu

SEQ ID NO: 1084085 - RNA, 19 nt, Artificial Sequence
  Description of Artificial Sequence: Synthetic oligonucleotide
augagucgccagucuucug

SEQ ID NO: 1084086 - RNA, 19 nt, Artificial Sequence
  Description of Artificial Sequence: Synthetic oligonucleotide
cuggcaugaagaacacucu

SEQ ID NO: 1084087 - RNA, 19 nt, Artificial Sequence
  Description of Artificial Sequence: Synthetic oligonucleotide
gcgcuugugaauuuuaguu

SEQ ID NO: 1084088 - RNA, 19 nt, Artificial Sequence
  Description of Artificial Sequence: Synthetic oligonucleotide
uggcaucggcagcugcuuc

SEQ ID NO: 1084089 - RNA, 19 nt, Artificial Sequence
  Description of Artificial Sequence: Synthetic oligonucleotide
ggaagaccgcagcuacuug

SEQ ID NO: 1084090 - RNA, 19 nt, Artificial Sequence
  Description of Artificial Sequence: Synthetic oligonucleotide
gcugguccgacuacgcagc

SEQ ID NO: 1084091 - RNA, 19 nt, Artificial Sequence
  Description of Artificial Sequence: Synthetic oligonucleotide
cucuacguagugcuuugua

SEQ ID NO: 1084092 - RNA, 19 nt, Artificial Sequence
  Description of Artificial Sequence: Synthetic oligonucleotide
gucacggagacggagcgcu

SEQ ID NO: 1084093 - RNA, 19 nt, Artificial Sequence
  Description of Artificial Sequence: Synthetic oligonucleotide
ggaggacucggagagcuuc

SEQ ID NO: 1084094 - RNA, 19 nt, Artificial Sequence
  Description of Artificial Sequence: Synthetic oligonucleotide
aggucugauucuauuuguu

SEQ ID NO: 1084095 - RNA, 19 nt, Artificial Sequence
  Description of Artificial Sequence: Synthetic oligonucleotide
uuacuccaacagccccgcu

SEQ ID NO: 1084096 - RNA, 19 nt, Artificial Sequence
  Description of Artificial Sequence: Synthetic oligonucleotide
uccucggcugggucugagu

SEQ ID NO: 1084097 - RNA, 19 nt, Artificial Sequence
  Description of Artificial Sequence: Synthetic oligonucleotide
gcgggaggcaguacugugg

SEQ ID NO: 1084098 - RNA, 19 nt, Artificial Sequence
  Description of Artificial Sequence: Synthetic oligonucleotide
cacggagacggagcgcuug

SEQ ID NO: 1084099 - RNA, 19 nt, Artificial Sequence
  Description of Artificial Sequence: Synthetic oligonucleotide
gcaggggucuuauccuggc

SEQ ID NO: 1084100 - RNA, 19 nt, Artificial Sequence
  Description of Artificial Sequence: Synthetic oligonucleotide
caaaugagucgccagucuu

SEQ ID NO: 1084101 - RNA, 19 nt, Artificial Sequence
  Description of Artificial Sequence: Synthetic oligonucleotide
ccccagaaacaguaggcuc

SEQ ID NO: 1084102 - RNA, 19 nt, Artificial Sequence
  Description of Artificial Sequence: Synthetic oligonucleotide
uggcuucaccaaugauccu

SEQ ID NO: 1084103 - RNA, 19 nt, Artificial Sequence
  Description of Artificial Sequence: Synthetic oligonucleotide
cuuccacucucucuacgua

SEQ ID NO: 1084104 - RNA, 19 nt, Artificial Sequence
  Description of Artificial Sequence: Synthetic oligonucleotide
uugcagagucugguaucac

SEQ ID NO: 1084105 - RNA, 19 nt, Artificial Sequence
  Description of Artificial Sequence: Synthetic oligonucleotide
gagucugguaucaccaguu

SEQ ID NO: 1084106 - RNA, 19 nt, Artificial Sequence
  Description of Artificial Sequence: Synthetic oligonucleotide
ggugugauggaacccuccu

SEQ ID NO: 1084107 - RNA, 19 nt, Artificial Sequence
  Description of Artificial Sequence: Synthetic oligonucleotide
gcaaguagagguguauugu

SEQ ID NO: 1084108 - RNA, 19 nt, Artificial Sequence
  Description of Artificial Sequence: Synthetic oligonucleotide
cagaaacauaacaggguuu

SEQ ID NO: 1084109 - RNA, 19 nt, Artificial Sequence
  Description of Artificial Sequence: Synthetic oligonucleotide
cuccaacagccccgcuuag

SEQ ID NO: 1084110 - RNA, 19 nt, Artificial Sequence
  Description of Artificial Sequence: Synthetic oligonucleotide
gagagggcauagcucuccu

SEQ ID NO: 1084111 - RNA, 19 nt, Artificial Sequence
  Description of Artificial Sequence: Synthetic oligonucleotide
gugugguaggucugauucu

SEQ ID NO: 1084112 - RNA, 19 nt, Artificial Sequence
  Description of Artificial Sequence: Synthetic oligonucleotide
ucccuuucagagggugauc

SEQ ID NO: 1084113 - RNA, 19 nt, Artificial Sequence
  Description of Artificial Sequence: Synthetic oligonucleotide
ccucggcugggucugaguc

SEQ ID NO: 1084114 - RNA, 19 nt, Artificial Sequence
  Description of Artificial Sequence: Synthetic oligonucleotide
ccauugugcaaauugguuu

SEQ ID NO: 1084115 - RNA, 19 nt, Artificial Sequence
  Description of Artificial Sequence: Synthetic oligonucleotide
cugagugguuugacucaca

SEQ ID NO: 1084116 - RNA, 19 nt, Artificial Sequence
  Description of Artificial Sequence: Synthetic oligonucleotide
cgaaggccucugaagcucc

SEQ ID NO: 1084117 - RNA, 19 nt, Artificial Sequence
  Description of Artificial Sequence: Synthetic oligonucleotide
caggucggaggggaggaca

SEQ ID NO: 1084118 - RNA, 19 nt, Artificial Sequence
  Description of Artificial Sequence: Synthetic oligonucleotide
gguaugagacuagguucuc

SEQ ID NO: 1084119 - RNA, 19 nt, Artificial Sequence
  Description of Artificial Sequence: Synthetic oligonucleotide
ucacggagacggagcgcuu

SEQ ID NO: 1084120 - RNA, 19 nt, Artificial Sequence
  Description of Artificial Sequence: Synthetic oligonucleotide
ggaagguaugagacuaggu

SEQ ID NO: 1084121 - RNA, 19 nt, Artificial Sequence
  Description of Artificial Sequence: Synthetic oligonucleotide
ccgagaugaccuguaccag

SEQ ID NO: 1084122 - RNA, 19 nt, Artificial Sequence
  Description of Artificial Sequence: Synthetic oligonucleotide
acggagcgcuugugaauuu

SEQ ID NO: 1084123 - RNA, 19 nt, Artificial Sequence
  Description of Artificial Sequence: Synthetic oligonucleotide
gucccuuucagagggugau

SEQ ID NO: 1084124 - RNA, 19 nt, Artificial Sequence
  Description of Artificial Sequence: Synthetic oligonucleotide
ccuccgagaugaccuguac

SEQ ID NO: 1084125 - RNA, 19 nt, Artificial Sequence
  Description of Artificial Sequence: Synthetic oligonucleotide
cuugugcaguaaagauugu

SEQ ID NO: 1084126 - RNA, 19 nt, Artificial Sequence
  Description of Artificial Sequence: Synthetic oligonucleotide
ggucacggagacggagcgc

SEQ ID NO: 1084127 - RNA, 19 nt, Artificial Sequence
  Description of Artificial Sequence: Synthetic oligonucleotide
gagcucccgcuggccgugg

SEQ ID NO: 1084128 - RNA, 19 nt, Artificial Sequence
  Description of Artificial Sequence: Synthetic oligonucleotide
gugguuugacucacaggau

SEQ ID NO: 1084129 - RNA, 19 nt, Artificial Sequence
  Description of Artificial Sequence: Synthetic oligonucleotide
agcucccgcuggccgugga

SEQ ID NO: 1084130 - RNA, 19 nt, Artificial Sequence
  Description of Artificial Sequence: Synthetic oligonucleotide
gucagaccccagaaacagu

SEQ ID NO: 1084131 - RNA, 19 nt, Artificial Sequence
  Description of Artificial Sequence: Synthetic oligonucleotide
cguagugcuuuguacacau

SEQ ID NO: 1084132 - RNA, 19 nt, Artificial Sequence
  Description of Artificial Sequence: Synthetic oligonucleotide
caguacuguggagguaaua

SEQ ID NO: 1084133 - RNA, 19 nt, Artificial Sequence
  Description of Artificial Sequence: Synthetic oligonucleotide
ccagauugugcuucagcau

SEQ ID NO: 1084134 - RNA, 19 nt, Artificial Sequence
  Description of Artificial Sequence: Synthetic oligonucleotide
gcugggucugaguccagau

SEQ ID NO: 1084135 - RNA, 19 nt, Artificial Sequence
  Description of Artificial Sequence: Synthetic oligonucleotide
gcacacacacacacuagau

SEQ ID NO: 1084136 - RNA, 19 nt, Artificial Sequence
  Description of Artificial Sequence: Synthetic oligonucleotide
cugaccucugcaguuuguu

SEQ ID NO: 1084137 - RNA, 19 nt, Artificial Sequence
  Description of Artificial Sequence: Synthetic oligonucleotide
guccgacuacgcagcuuca

SEQ ID NO: 1084138 - RNA, 19 nt, Artificial Sequence
  Description of Artificial Sequence: Synthetic oligonucleotide
ggccguggacuugggcugc

SEQ ID NO: 1084139 - RNA, 19 nt, Artificial Sequence
  Description of Artificial Sequence: Synthetic oligonucleotide
cgacuacgcagcuucaccu

SEQ ID NO: 1084140 - RNA, 19 nt, Artificial Sequence
  Description of Artificial Sequence: Synthetic oligonucleotide
cucucucuacguagugcuu

SEQ ID NO: 1084141 - RNA, 19 nt, Artificial Sequence
  Description of Artificial Sequence: Synthetic oligonucleotide
gccccgcuuagcuguccug

SEQ ID NO: 1084142 - RNA, 19 nt, Artificial Sequence
  Description of Artificial Sequence: Synthetic oligonucleotide
gugguaggucugauucuau

SEQ ID NO: 1084143 - RNA, 19 nt, Artificial Sequence
  Description of Artificial Sequence: Synthetic oligonucleotide
cuucuacgcugaugcggau

SEQ ID NO: 1084144 - RNA, 19 nt, Artificial Sequence
  Description of Artificial Sequence: Synthetic oligonucleotide
cugguccgacuacgcagcu

SEQ ID NO: 1084145 - RNA, 19 nt, Artificial Sequence
  Description of Artificial Sequence: Synthetic oligonucleotide
acacgcugacugaguccau

SEQ ID NO: 1084146 - RNA, 19 nt, Artificial Sequence
  Description of Artificial Sequence: Synthetic oligonucleotide
ggggaccagcaaggcacga

SEQ ID NO: 1084147 - RNA, 19 nt, Artificial Sequence
  Description of Artificial Sequence: Synthetic oligonucleotide
cgcagcuacuugugcagua

SEQ ID NO: 1084148 - RNA, 19 nt, Artificial Sequence
  Description of Artificial Sequence: Synthetic oligonucleotide
caucggcagcugcuucaau

SEQ ID NO: 1084149 - RNA, 19 nt, Artificial Sequence
  Description of Artificial Sequence: Synthetic oligonucleotide
cccgcuggccguggacuug

SEQ ID NO: 1084150 - RNA, 19 nt, Artificial Sequence
  Description of Artificial Sequence: Synthetic oligonucleotide
guaucacagcaggggucuu

SEQ ID NO: 1084151 - RNA, 19 nt, Artificial Sequence
  Description of Artificial Sequence: Synthetic oligonucleotide
ccaugcucuuccgaggcuu

SEQ ID NO: 1084152 - RNA, 19 nt, Artificial Sequence
  Description of Artificial Sequence: Synthetic oligonucleotide
cuacgcugaugcggaugau

SEQ ID NO: 1084153 - RNA, 19 nt, Artificial Sequence
  Description of Artificial Sequence: Synthetic oligonucleotide
cgcugacugaguccaugcu

SEQ ID NO: 1084154 - RNA, 19 nt, Artificial Sequence
  Description of Artificial Sequence: Synthetic oligonucleotide
ccgcagcuacuugugcagu

SEQ ID NO: 1084155 - RNA, 19 nt, Artificial Sequence
  Description of Artificial Sequence: Synthetic oligonucleotide
gccguggacuugggcugcu

SEQ ID NO: 1084156 - RNA, 19 nt, Artificial Sequence
  Description of Artificial Sequence: Synthetic oligonucleotide
aauagauauaaccccaggg

SEQ ID NO: 1084157 - RNA, 19 nt, Artificial Sequence
  Description of Artificial Sequence: Synthetic oligonucleotide
ucaacuauaggcuaguucc

SEQ ID NO: 1084158 - RNA, 19 nt, Artificial Sequence
  Description of Artificial Sequence: Synthetic oligonucleotide
aauacuucaguuuaaguga

SEQ ID NO: 1084159 - RNA, 19 nt, Artificial Sequence
  Description of Artificial Sequence: Synthetic oligonucleotide
aaugcuaacuuccuauccc

SEQ ID NO: 1084160 - RNA, 19 nt, Artificial Sequence
  Description of Artificial Sequence: Synthetic oligonucleotide
uguaagaccaucagaaugg

SEQ ID NO: 1084161 - RNA, 19 nt, Artificial Sequence
  Description of Artificial Sequence: Synthetic oligonucleotide
auaauagugacauuggaug

SEQ ID NO: 1084162 - RNA, 19 nt, Artificial Sequence
  Description of Artificial Sequence: Synthetic oligonucleotide
aaaaggguuacuuaugacu

SEQ ID NO: 1084163 - RNA, 19 nt, Artificial Sequence
  Description of Artificial Sequence: Synthetic oligonucleotide
aaguuaaggguauguaacc

SEQ ID NO: 1084164 - RNA, 19 nt, Artificial Sequence
  Description of Artificial Sequence: Synthetic oligonucleotide
uaaaauaucgcauugcaua

SEQ ID NO: 1084165 - RNA, 19 nt, Artificial Sequence
  Description of Artificial Sequence: Synthetic oligonucleotide
ucuacauccuauuacaaca

SEQ ID NO: 1084166 - RNA, 19 nt, Artificial Sequence
  Description of Artificial Sequence: Synthetic oligonucleotide
uaugcagugaaaauacaag

SEQ ID NO: 1084167 - RNA, 19 nt, Artificial Sequence
  Description of Artificial Sequence: Synthetic oligonucleotide
uucaucuuaauguguaagg

SEQ ID NO: 1084168 - RNA, 19 nt, Artificial Sequence
  Description of Artificial Sequence: Synthetic oligonucleotide
aauaaacagagcuaaguua

SEQ ID NO: 1084169 - RNA, 19 nt, Artificial Sequence
  Description of Artificial Sequence: Synthetic oligonucleotide
uaccacuuaaccaacaaga

SEQ ID NO: 1084170 - RNA, 19 nt, Artificial Sequence
  Description of Artificial Sequence: Synthetic oligonucleotide
uuaaggguauguaaccagg

SEQ ID NO: 1084171 - RNA, 19 nt, Artificial Sequence
  Description of Artificial Sequence: Synthetic oligonucleotide
ugaacuauacaaaaggguu

SEQ ID NO: 1084172 - RNA, 19 nt, Artificial Sequence
  Description of Artificial Sequence: Synthetic oligonucleotide
ucauuccucaaccagaaac

SEQ ID NO: 1084173 - RNA, 19 nt, Artificial Sequence
  Description of Artificial Sequence: Synthetic oligonucleotide
gaaugaaacaccaccaugc

SEQ ID NO: 1084174 - RNA, 19 nt, Artificial Sequence
  Description of Artificial Sequence: Synthetic oligonucleotide
uguuuucuaaacauuggca

SEQ ID NO: 1084175 - RNA, 19 nt, Artificial Sequence
  Description of Artificial Sequence: Synthetic oligonucleotide
aauaucgcauugcauaagu

SEQ ID NO: 1084176 - RNA, 19 nt, Artificial Sequence
  Description of Artificial Sequence: Synthetic oligonucleotide
agacuuuuggaagagcucc

SEQ ID NO: 1084177 - RNA, 19 nt, Artificial Sequence
  Description of Artificial Sequence: Synthetic oligonucleotide
accaacaagagacuuuugg

SEQ ID NO: 1084178 - RNA, 19 nt, Artificial Sequence
  Description of Artificial Sequence: Synthetic oligonucleotide
augacucuugaucacuucc

SEQ ID NO: 1084179 - RNA, 19 nt, Artificial Sequence
  Description of Artificial Sequence: Synthetic oligonucleotide
ucuacacaaacugaaaccc

SEQ ID NO: 1084180 - RNA, 19 nt, Artificial Sequence
  Description of Artificial Sequence: Synthetic oligonucleotide
aauagugacauuggaugac

SEQ ID NO: 1084181 - RNA, 19 nt, Artificial Sequence
  Description of Artificial Sequence: Synthetic oligonucleotide
aaaauaucgcauugcauaa

SEQ ID NO: 1084182 - RNA, 19 nt, Artificial Sequence
  Description of Artificial Sequence: Synthetic oligonucleotide
guaccuaacagaaacacag

SEQ ID NO: 1084183 - RNA, 19 nt, Artificial Sequence
  Description of Artificial Sequence: Synthetic oligonucleotide
aggucaagauaauugacuc

SEQ ID NO: 1084184 - RNA, 19 nt, Artificial Sequence
  Description of Artificial Sequence: Synthetic oligonucleotide
aguacaucuacauuggaaa

SEQ ID NO: 1084185 - RNA, 19 nt, Artificial Sequence
  Description of Artificial Sequence: Synthetic oligonucleotide
uggaaggucaauaaacaga

SEQ ID NO: 1084186 - RNA, 19 nt, Artificial Sequence
  Description of Artificial Sequence: Synthetic oligonucleotide
agauuuuaccacuuaacca

SEQ ID NO: 1084187 - RNA, 19 nt, Artificial Sequence
  Description of Artificial Sequence: Synthetic oligonucleotide
uccucaaccagaaacaaau

SEQ ID NO: 1084188 - RNA, 19 nt, Artificial Sequence
  Description of Artificial Sequence: Synthetic oligonucleotide
aaacccaaggcauccauca

SEQ ID NO: 1084189 - RNA, 19 nt, Artificial Sequence
  Description of Artificial Sequence: Synthetic oligonucleotide
aagaccaucagaauggagu

SEQ ID NO: 1084190 - RNA, 19 nt, Artificial Sequence
  Description of Artificial Sequence: Synthetic oligonucleotide
auguguaaggugaaaacgc

SEQ ID NO: 1084191 - RNA, 19 nt, Artificial Sequence
  Description of Artificial Sequence: Synthetic oligonucleotide
uuuagcuggagauucacaa

SEQ ID NO: 1084192 - RNA, 19 nt, Artificial Sequence
  Description of Artificial Sequence: Synthetic oligonucleotide
uaucgcauugcauaaguca

SEQ ID NO: 1084193 - RNA, 19 nt, Artificial Sequence
  Description of Artificial Sequence: Synthetic oligonucleotide
ucuagcccuauguucaugg

SEQ ID NO: 1084194 - RNA, 19 nt, Artificial Sequence
  Description of Artificial Sequence: Synthetic oligonucleotide
augcacuucaucuuaaugu

SEQ ID NO: 1084195 - RNA, 19 nt, Artificial Sequence
  Description of Artificial Sequence: Synthetic oligonucleotide
ugugucuacauccuauuac

SEQ ID NO: 1084196 - RNA, 19 nt, Artificial Sequence
  Description of Artificial Sequence: Synthetic oligonucleotide
acugcauaaggcugugugc

SEQ ID NO: 1084197 - RNA, 19 nt, Artificial Sequence
  Description of Artificial Sequence: Synthetic oligonucleotide
acauccuagguacugggac

SEQ ID NO: 1084198 - RNA, 19 nt, Artificial Sequence
  Description of Artificial Sequence: Synthetic oligonucleotide
uucaauauguaaagacagc

SEQ ID NO: 1084199 - RNA, 19 nt, Artificial Sequence
  Description of Artificial Sequence: Synthetic oligonucleotide
uauaucugugccauuggca

SEQ ID NO: 1084200 - RNA, 19 nt, Artificial Sequence
  Description of Artificial Sequence: Synthetic oligonucleotide
aauugacuccuuauuacuc

SEQ ID NO: 1084201 - RNA, 19 nt, Artificial Sequence
  Description of Artificial Sequence: Synthetic oligonucleotide
uauuacucugcucuagcug

SEQ ID NO: 1084202 - RNA, 19 nt, Artificial Sequence
  Description of Artificial Sequence: Synthetic oligonucleotide
uaaauggagguauaucugu

SEQ ID NO: 1084203 - RNA, 19 nt, Artificial Sequence
  Description of Artificial Sequence: Synthetic oligonucleotide
aaacgcaguagcacuaggc

SEQ ID NO: 1084204 - RNA, 19 nt, Artificial Sequence
  Description of Artificial Sequence: Synthetic oligonucleotide
cucaaccagaaacaaauag

SEQ ID NO: 1084205 - RNA, 19 nt, Artificial Sequence
  Description of Artificial Sequence: Synthetic oligonucleotide
gauauaaccccagggaacc

SEQ ID NO: 1084206 - RNA, 19 nt, Artificial Sequence
  Description of Artificial Sequence: Synthetic oligonucleotide
uucaggguucacuaaauga

SEQ ID NO: 1084207 - RNA, 19 nt, Artificial Sequence
  Description of Artificial Sequence: Synthetic oligonucleotide
uguagaucccaacuuuacc

SEQ ID NO: 1084208 - RNA, 19 nt, Artificial Sequence
  Description of Artificial Sequence: Synthetic oligonucleotide
agagcauggaaucugcuca

SEQ ID NO: 1084209 - RNA, 19 nt, Artificial Sequence
  Description of Artificial Sequence: Synthetic oligonucleotide
ucaggguucacuaaaugau

SEQ ID NO: 1084210 - RNA, 19 nt, Artificial Sequence
  Description of Artificial Sequence: Synthetic oligonucleotide
uuaccacuuaaccaacaag

SEQ ID NO: 1084211 - RNA, 19 nt, Artificial Sequence
  Description of Artificial Sequence: Synthetic oligonucleotide
ugcaguaaaaugcuaacuu

SEQ ID NO: 1084212 - RNA, 19 nt, Artificial Sequence
  Description of Artificial Sequence: Synthetic oligonucleotide
ugauaauagugacauugga

SEQ ID NO: 1084213 - RNA, 19 nt, Artificial Sequence
  Description of Artificial Sequence: Synthetic oligonucleotide
agugaacuauacaaaaggg

SEQ ID NO: 1084214 - RNA, 19 nt, Artificial Sequence
  Description of Artificial Sequence: Synthetic oligonucleotide
uccaugacgaguuaccaac

SEQ ID NO: 1084215 - RNA, 19 nt, Artificial Sequence
  Description of Artificial Sequence: Synthetic oligonucleotide
aaucuaauagaaaagucua

SEQ ID NO: 1084216 - RNA, 19 nt, Artificial Sequence
  Description of Artificial Sequence: Synthetic oligonucleotide
aacgcaguagcacuaggcu

SEQ ID NO: 1084217 - RNA, 19 nt, Artificial Sequence
  Description of Artificial Sequence: Synthetic oligonucleotide
aauagaguuuacauaaaau

SEQ ID NO: 1084218 - RNA, 19 nt, Artificial Sequence
  Description of Artificial Sequence: Synthetic oligonucleotide
uaauugacuccuuauuacu

SEQ ID NO: 1084219 - RNA, 19 nt, Artificial Sequence
  Description of Artificial Sequence: Synthetic oligonucleotide
agaaugaaacaccaccaug

SEQ ID NO: 1084220 - RNA, 19 nt, Artificial Sequence
  Description of Artificial Sequence: Synthetic oligonucleotide
cugagucacacgaaaauac

SEQ ID NO: 1084221 - RNA, 19 nt, Artificial Sequence
  Description of Artificial Sequence: Synthetic oligonucleotide
aaaacgcaguagcacuagg

SEQ ID NO: 1084222 - RNA, 19 nt, Artificial Sequence
  Description of Artificial Sequence: Synthetic oligonucleotide
guugacuggcaauaggaag

SEQ ID NO: 1084223 - RNA, 19 nt, Artificial Sequence
  Description of Artificial Sequence: Synthetic oligonucleotide
caaacugaaacccaaggca

SEQ ID NO: 1084224 - RNA, 19 nt, Artificial Sequence
  Description of Artificial Sequence: Synthetic oligonucleotide
uggcauaaaaugaaggcua

SEQ ID NO: 1084225 - RNA, 19 nt, Artificial Sequence
  Description of Artificial Sequence: Synthetic oligonucleotide
uaacucaacuauaggcuag

SEQ ID NO: 1084226 - RNA, 19 nt, Artificial Sequence
  Description of Artificial Sequence: Synthetic oligonucleotide
uaaguuaucugcagccgug

SEQ ID NO: 1084227 - RNA, 19 nt, Artificial Sequence
  Description of Artificial Sequence: Synthetic oligonucleotide
guuaaggguauguaaccag

SEQ ID NO: 1084228 - RNA, 19 nt, Artificial Sequence
  Description of Artificial Sequence: Synthetic oligonucleotide
auaaacagagcuaaguuau

SEQ ID NO: 1084229 - RNA, 19 nt, Artificial Sequence
  Description of Artificial Sequence: Synthetic oligonucleotide
uaaggucaagauaauugac

SEQ ID NO: 1084230 - RNA, 19 nt, Artificial Sequence
  Description of Artificial Sequence: Synthetic oligonucleotide
ugcuacuuggcaaaaguau

SEQ ID NO: 1084231 - RNA, 19 nt, Artificial Sequence
  Description of Artificial Sequence: Synthetic oligonucleotide
aaggucaagauaauugacu

SEQ ID NO: 1084232 - RNA, 19 nt, Artificial Sequence
  Description of Artificial Sequence: Synthetic oligonucleotide
aaacagagcuaaguuaucu

SEQ ID NO: 1084233 - RNA, 19 nt, Artificial Sequence
  Description of Artificial Sequence: Synthetic oligonucleotide
aaauagacuccugugcugu

SEQ ID NO: 1084234 - RNA, 19 nt, Artificial Sequence
  Description of Artificial Sequence: Synthetic oligonucleotide
ugcaaccaaaaccacaaau

SEQ ID NO: 1084235 - RNA, 19 nt, Artificial Sequence
  Description of Artificial Sequence: Synthetic oligonucleotide
agagcuaaguuaucugcag

SEQ ID NO: 1084236 - RNA, 19 nt, Artificial Sequence
  Description of Artificial Sequence: Synthetic oligonucleotide
auaucugugccauuggcaa

SEQ ID NO: 1084237 - RNA, 19 nt, Artificial Sequence
  Description of Artificial Sequence: Synthetic oligonucleotide
agauauaaccccagggaac

SEQ ID NO: 1084238 - RNA, 19 nt, Artificial Sequence
  Description of Artificial Sequence: Synthetic oligonucleotide
ggaaggucaauaaacagag

SEQ ID NO: 1084239 - RNA, 19 nt, Artificial Sequence
  Description of Artificial Sequence: Synthetic oligonucleotide
aauguuugcugaaggacug

SEQ ID NO: 1084240 - RNA, 19 nt, Artificial Sequence
  Description of Artificial Sequence: Synthetic oligonucleotide
uguuaccaaauguuuucag

SEQ ID NO: 1084241 - RNA, 19 nt, Artificial Sequence
  Description of Artificial Sequence: Synthetic oligonucleotide
cuuauuacucugcucuagc

SEQ ID NO: 1084242 - RNA, 19 nt, Artificial Sequence
  Description of Artificial Sequence: Synthetic oligonucleotide
agaguuuacauaaaauaga

SEQ ID NO: 1084243 - RNA, 19 nt, Artificial Sequence
  Description of Artificial Sequence: Synthetic oligonucleotide
uaaggugaaaacgcaguag

SEQ ID NO: 1084244 - RNA, 19 nt, Artificial Sequence
  Description of Artificial Sequence: Synthetic oligonucleotide
acaagagacuuuuggaaga

SEQ ID NO: 1084245 - RNA, 19 nt, Artificial Sequence
  Description of Artificial Sequence: Synthetic oligonucleotide
agucacacgaaaauacuuc

SEQ ID NO: 1084246 - RNA, 19 nt, Artificial Sequence
  Description of Artificial Sequence: Synthetic oligonucleotide
cauggaaucugcucacagg

SEQ ID NO: 1084247 - RNA, 19 nt, Artificial Sequence
  Description of Artificial Sequence: Synthetic oligonucleotide
acaucuaccuagugaggac

SEQ ID NO: 1084248 - RNA, 19 nt, Artificial Sequence
  Description of Artificial Sequence: Synthetic oligonucleotide
aaaggguuacuuaugacua

SEQ ID NO: 1084249 - RNA, 19 nt, Artificial Sequence
  Description of Artificial Sequence: Synthetic oligonucleotide
gaggguggcaugauaauag

SEQ ID NO: 1084250 - RNA, 19 nt, Artificial Sequence
  Description of Artificial Sequence: Synthetic oligonucleotide
ugaaggcuaggaaugcuac

SEQ ID NO: 1084251 - RNA, 19 nt, Artificial Sequence
  Description of Artificial Sequence: Synthetic oligonucleotide
ugcauaugcagugaaaaua

SEQ ID NO: 1084252 - RNA, 19 nt, Artificial Sequence
  Description of Artificial Sequence: Synthetic oligonucleotide
ucacgcucauuccucaacc

SEQ ID NO: 1084253 - RNA, 19 nt, Artificial Sequence
  Description of Artificial Sequence: Synthetic oligonucleotide
gaauggagugcugaggccc

SEQ ID NO: 1084254 - RNA, 19 nt, Artificial Sequence
  Description of Artificial Sequence: Synthetic oligonucleotide
caguuuaagugaacuauac

SEQ ID NO: 1084255 - RNA, 19 nt, Artificial Sequence
  Description of Artificial Sequence: Synthetic oligonucleotide
uuauuacucugcucuagcu

SEQ ID NO: 1084256 - RNA, 19 nt, Artificial Sequence
  Description of Artificial Sequence: Synthetic oligonucleotide
uaaaugauggcuugccuuu

SEQ ID NO: 1084257 - RNA, 19 nt, Artificial Sequence
  Description of Artificial Sequence: Synthetic oligonucleotide
aagagacuuuuggaagagc

SEQ ID NO: 1084258 - RNA, 19 nt, Artificial Sequence
  Description of Artificial Sequence: Synthetic oligonucleotide
ugcacacguguugagauag

SEQ ID NO: 1084259 - RNA, 19 nt, Artificial Sequence
  Description of Artificial Sequence: Synthetic oligonucleotide
auagugacauuggaugacg

SEQ ID NO: 1084260 - RNA, 19 nt, Artificial Sequence
  Description of Artificial Sequence: Synthetic oligonucleotide
aaauaucgcauugcauaag

SEQ ID NO: 1084261 - RNA, 19 nt, Artificial Sequence
  Description of Artificial Sequence: Synthetic oligonucleotide
gaaaguuguaagaccauca

SEQ ID NO: 1084262 - RNA, 19 nt, Artificial Sequence
  Description of Artificial Sequence: Synthetic oligonucleotide
gaauaugaaauaaucucaa

SEQ ID NO: 1084263 - RNA, 19 nt, Artificial Sequence
  Description of Artificial Sequence: Synthetic oligonucleotide
uauaggcuaguuccagccc

SEQ ID NO: 1084264 - RNA, 19 nt, Artificial Sequence
  Description of Artificial Sequence: Synthetic oligonucleotide
gccuaacucaacuauaggc

SEQ ID NO: 1084265 - RNA, 19 nt, Artificial Sequence
  Description of Artificial Sequence: Synthetic oligonucleotide
aaacugaaacccaaggcau

SEQ ID NO: 1084266 - RNA, 19 nt, Artificial Sequence
  Description of Artificial Sequence: Synthetic oligonucleotide
cuuuaccugagucacacga

SEQ ID NO: 1084267 - RNA, 19 nt, Artificial Sequence
  Description of Artificial Sequence: Synthetic oligonucleotide
agggcucaagcacaucuac

SEQ ID NO: 1084268 - RNA, 19 nt, Artificial Sequence
  Description of Artificial Sequence: Synthetic oligonucleotide
auaaauggagguauaucug

SEQ ID NO: 1084269 - RNA, 19 nt, Artificial Sequence
  Description of Artificial Sequence: Synthetic oligonucleotide
uuaccugagucacacgaaa

SEQ ID NO: 1084270 - RNA, 19 nt, Artificial Sequence
  Description of Artificial Sequence: Synthetic oligonucleotide
accuagugaggacuguggg

SEQ ID NO: 1084271 - RNA, 19 nt, Artificial Sequence
  Description of Artificial Sequence: Synthetic oligonucleotide
guauaucugugccauuggc

SEQ ID NO: 1084272 - RNA, 19 nt, Artificial Sequence
  Description of Artificial Sequence: Synthetic oligonucleotide
gugauugucccaauguuug

SEQ ID NO: 1084273 - RNA, 19 nt, Artificial Sequence
  Description of Artificial Sequence: Synthetic oligonucleotide
acuaaaguuaaggguaugu

SEQ ID NO: 1084274 - RNA, 19 nt, Artificial Sequence
  Description of Artificial Sequence: Synthetic oligonucleotide
uaggaaugcuacuuggcaa

SEQ ID NO: 1084275 - RNA, 19 nt, Artificial Sequence
  Description of Artificial Sequence: Synthetic oligonucleotide
auaggcuaguuccagcccu

SEQ ID NO: 1084276 - RNA, 19 nt, Artificial Sequence
  Description of Artificial Sequence: Synthetic oligonucleotide
uccuauuacaacacagauu

SEQ ID NO: 1084277 - RNA, 19 nt, Artificial Sequence
  Description of Artificial Sequence: Synthetic oligonucleotide
uguugacuggcaauaggaa

SEQ ID NO: 1084278 - RNA, 19 nt, Artificial Sequence
  Description of Artificial Sequence: Synthetic oligonucleotide
acauccuauuacaacacag

SEQ ID NO: 1084279 - RNA, 19 nt, Artificial Sequence
  Description of Artificial Sequence: Synthetic oligonucleotide
uacauccuauuacaacaca

SEQ ID NO: 1084280 - RNA, 19 nt, Artificial Sequence
  Description of Artificial Sequence: Synthetic oligonucleotide
uaacuuccuaucccacuag

SEQ ID NO: 1084281 - RNA, 19 nt, Artificial Sequence
  Description of Artificial Sequence: Synthetic oligonucleotide
acacgaaaauacuucaguu

SEQ ID NO: 1084282 - RNA, 19 nt, Artificial Sequence
  Description of Artificial Sequence: Synthetic oligonucleotide
gugucuacauccuauuaca

SEQ ID NO: 1084283 - RNA, 19 nt, Artificial Sequence
  Description of Artificial Sequence: Synthetic oligonucleotide
uaagaccaucagaauggag

SEQ ID NO: 1084284 - RNA, 19 nt, Artificial Sequence
  Description of Artificial Sequence: Synthetic oligonucleotide
aacugaaacccaaggcauc

SEQ ID NO: 1084285 - RNA, 19 nt, Artificial Sequence
  Description of Artificial Sequence: Synthetic oligonucleotide
agagacuuuuggaagagcu

SEQ ID NO: 1084286 - RNA, 19 nt, Artificial Sequence
  Description of Artificial Sequence: Synthetic oligonucleotide
auuuuaccacuuaaccaac

SEQ ID NO: 1084287 - RNA, 19 nt, Artificial Sequence
  Description of Artificial Sequence: Synthetic oligonucleotide
ucuuaauguguaaggugaa

SEQ ID NO: 1084288 - RNA, 19 nt, Artificial Sequence
  Description of Artificial Sequence: Synthetic oligonucleotide
ugaaaacgcaguagcacua

SEQ ID NO: 1084289 - RNA, 19 nt, Artificial Sequence
  Description of Artificial Sequence: Synthetic oligonucleotide
ugacgaguuaccaacucuu

SEQ ID NO: 1084290 - RNA, 19 nt, Artificial Sequence
  Description of Artificial Sequence: Synthetic oligonucleotide
gucuacauccuauuacaac

SEQ ID NO: 1084291 - RNA, 19 nt, Artificial Sequence
  Description of Artificial Sequence: Synthetic oligonucleotide
agacugacugacuuugcca

SEQ ID NO: 1084292 - RNA, 19 nt, Artificial Sequence
  Description of Artificial Sequence: Synthetic oligonucleotide
cagacaguaccuaacagaa

SEQ ID NO: 1084293 - RNA, 19 nt, Artificial Sequence
  Description of Artificial Sequence: Synthetic oligonucleotide
aauagacuccugugcugug

SEQ ID NO: 1084294 - RNA, 19 nt, Artificial Sequence
  Description of Artificial Sequence: Synthetic oligonucleotide
ugauuaggggaggugaggu

SEQ ID NO: 1084295 - RNA, 19 nt, Artificial Sequence
  Description of Artificial Sequence: Synthetic oligonucleotide
agccuaacucaacuauagg

SEQ ID NO: 1084296 - RNA, 19 nt, Artificial Sequence
  Description of Artificial Sequence: Synthetic oligonucleotide
aaugaaggcuaggaaugcu

SEQ ID NO: 1084297 - RNA, 19 nt, Artificial Sequence
  Description of Artificial Sequence: Synthetic oligonucleotide
augacgaguuaccaacucu

SEQ ID NO: 1084298 - RNA, 19 nt, Artificial Sequence
  Description of Artificial Sequence: Synthetic oligonucleotide
auacuugcuauacauuauu

SEQ ID NO: 1084299 - RNA, 19 nt, Artificial Sequence
  Description of Artificial Sequence: Synthetic oligonucleotide
aaggcuaggaaugcuacuu

SEQ ID NO: 1084300 - RNA, 19 nt, Artificial Sequence
  Description of Artificial Sequence: Synthetic oligonucleotide
accuaacagaaacacagua

SEQ ID NO: 1084301 - RNA, 19 nt, Artificial Sequence
  Description of Artificial Sequence: Synthetic oligonucleotide
aaacuaaaguuaaggguau

SEQ ID NO: 1084302 - RNA, 19 nt, Artificial Sequence
  Description of Artificial Sequence: Synthetic oligonucleotide
aguuaaggguauguaacca

SEQ ID NO: 1084303 - RNA, 19 nt, Artificial Sequence
  Description of Artificial Sequence: Synthetic oligonucleotide
aguuaccaacucuuuaaaa

SEQ ID NO: 1084304 - RNA, 19 nt, Artificial Sequence
  Description of Artificial Sequence: Synthetic oligonucleotide
agaggcuaaaauucuguuu

SEQ ID NO: 1084305 - RNA, 19 nt, Artificial Sequence
  Description of Artificial Sequence: Synthetic oligonucleotide
gaaaacgcaguagcacuag

SEQ ID NO: 1084306 - RNA, 19 nt, Artificial Sequence
  Description of Artificial Sequence: Synthetic oligonucleotide
cauccuauuacaacacaga

SEQ ID NO: 1084307 - RNA, 19 nt, Artificial Sequence
  Description of Artificial Sequence: Synthetic oligonucleotide
gauaauagugacauuggau

SEQ ID NO: 1084308 - RNA, 19 nt, Artificial Sequence
  Description of Artificial Sequence: Synthetic oligonucleotide
ucuaguuagcaagcuaaaa

SEQ ID NO: 1084309 - RNA, 19 nt, Artificial Sequence
  Description of Artificial Sequence: Synthetic oligonucleotide
accacuuaaccaacaagag

SEQ ID NO: 1084310 - RNA, 19 nt, Artificial Sequence
  Description of Artificial Sequence: Synthetic oligonucleotide
gauagccuaacucaacuau

SEQ ID NO: 1084311 - RNA, 19 nt, Artificial Sequence
  Description of Artificial Sequence: Synthetic oligonucleotide
caguaccuaacagaaacac

SEQ ID NO: 1084312 - RNA, 19 nt, Artificial Sequence
  Description of Artificial Sequence: Synthetic oligonucleotide
guuacuuaugacuaauuuu

SEQ ID NO: 1084313 - RNA, 19 nt, Artificial Sequence
  Description of Artificial Sequence: Synthetic oligonucleotide
uaaacagagcuaaguuauc

SEQ ID NO: 1084314 - RNA, 19 nt, Artificial Sequence
  Description of Artificial Sequence: Synthetic oligonucleotide
uaccuaacagaaacacagu

SEQ ID NO: 1084315 - RNA, 19 nt, Artificial Sequence
  Description of Artificial Sequence: Synthetic oligonucleotide
aaggguuacuuaugacuaa

SEQ ID NO: 1084316 - RNA, 19 nt, Artificial Sequence
  Description of Artificial Sequence: Synthetic oligonucleotide
cauaaggcugugugcacac

SEQ ID NO: 1084317 - RNA, 19 nt, Artificial Sequence
  Description of Artificial Sequence: Synthetic oligonucleotide
ucccaacuuuaccugaguc

SEQ ID NO: 1084318 - RNA, 19 nt, Artificial Sequence
  Description of Artificial Sequence: Synthetic oligonucleotide
aagcucugagucacuguac

SEQ ID NO: 1084319 - RNA, 19 nt, Artificial Sequence
  Description of Artificial Sequence: Synthetic oligonucleotide
uccuaucccacuagccaug

SEQ ID NO: 1084320 - RNA, 19 nt, Artificial Sequence
  Description of Artificial Sequence: Synthetic oligonucleotide
aacuaaaguuaaggguaug

SEQ ID NO: 1084321 - RNA, 19 nt, Artificial Sequence
  Description of Artificial Sequence: Synthetic oligonucleotide
acgcucauuccucaaccag

SEQ ID NO: 1084322 - RNA, 19 nt, Artificial Sequence
  Description of Artificial Sequence: Synthetic oligonucleotide
aacucaacuauaggcuagu

SEQ ID NO: 1084323 - RNA, 19 nt, Artificial Sequence
  Description of Artificial Sequence: Synthetic oligonucleotide
guguuucugauuaggggag

SEQ ID NO: 1084324 - RNA, 19 nt, Artificial Sequence
  Description of Artificial Sequence: Synthetic oligonucleotide
cuggagauucacaaacuga

SEQ ID NO: 1084325 - RNA, 19 nt, Artificial Sequence
  Description of Artificial Sequence: Synthetic oligonucleotide
ggucaagauaauugacucc

SEQ ID NO: 1084326 - RNA, 19 nt, Artificial Sequence
  Description of Artificial Sequence: Synthetic oligonucleotide
caagaggguggcaugauaa

SEQ ID NO: 1084327 - RNA, 19 nt, Artificial Sequence
  Description of Artificial Sequence: Synthetic oligonucleotide
agaucccaacuuuaccuga

SEQ ID NO: 1084328 - RNA, 19 nt, Artificial Sequence
  Description of Artificial Sequence: Synthetic oligonucleotide
gaacuauacaaaaggguua

SEQ ID NO: 1084329 - RNA, 19 nt, Artificial Sequence
  Description of Artificial Sequence: Synthetic oligonucleotide
gguggcaugauaauaguga

SEQ ID NO: 1084330 - RNA, 19 nt, Artificial Sequence
  Description of Artificial Sequence: Synthetic oligonucleotide
gaaugcuacuuggcaaaag

SEQ ID NO: 1084331 - RNA, 19 nt, Artificial Sequence
  Description of Artificial Sequence: Synthetic oligonucleotide
cuaacucaacuauaggcua

SEQ ID NO: 1084332 - RNA, 19 nt, Artificial Sequence
  Description of Artificial Sequence: Synthetic oligonucleotide
uuucugauuaggggaggug

SEQ ID NO: 1084333 - RNA, 19 nt, Artificial Sequence
  Description of Artificial Sequence: Synthetic oligonucleotide
auaucgcauugcauaaguc

SEQ ID NO: 1084334 - RNA, 19 nt, Artificial Sequence
  Description of Artificial Sequence: Synthetic oligonucleotide
aaguuaucugcagccgugu

SEQ ID NO: 1084335 - RNA, 19 nt, Artificial Sequence
  Description of Artificial Sequence: Synthetic oligonucleotide
gugaaaacgcaguagcacu

SEQ ID NO: 1084336 - RNA, 19 nt, Artificial Sequence
  Description of Artificial Sequence: Synthetic oligonucleotide
cacacguguugagauagcc

SEQ ID NO: 1084337 - RNA, 19 nt, Artificial Sequence
  Description of Artificial Sequence: Synthetic oligonucleotide
aucgcauugcauaagucaa

SEQ ID NO: 1084338 - RNA, 19 nt, Artificial Sequence
  Description of Artificial Sequence: Synthetic oligonucleotide
cacguguugagauagccua

SEQ ID NO: 1084339 - RNA, 19 nt, Artificial Sequence
  Description of Artificial Sequence: Synthetic oligonucleotide
ggugaaaacgcaguagcac

SEQ ID NO: 1084340 - RNA, 19 nt, Artificial Sequence
  Description of Artificial Sequence: Synthetic oligonucleotide
cuagugaggacugugggaa

SEQ ID NO: 1084341 - RNA, 19 nt, Artificial Sequence
  Description of Artificial Sequence: Synthetic oligonucleotide
gcuggagauucacaaacug

SEQ ID NO: 1084342 - RNA, 19 nt, Artificial Sequence
  Description of Artificial Sequence: Synthetic oligonucleotide
aguaccuaacagaaacaca

SEQ ID NO: 1084343 - RNA, 19 nt, Artificial Sequence
  Description of Artificial Sequence: Synthetic oligonucleotide
caguacaucuacauuggaa

SEQ ID NO: 1084344 - RNA, 19 nt, Artificial Sequence
  Description of Artificial Sequence: Synthetic oligonucleotide
caucacaccgccaucuuaa

SEQ ID NO: 1084345 - RNA, 19 nt, Artificial Sequence
  Description of Artificial Sequence: Synthetic oligonucleotide
cagagcuaaguuaucugca

SEQ ID NO: 1084346 - RNA, 19 nt, Artificial Sequence
  Description of Artificial Sequence: Synthetic oligonucleotide
cuaacuuccuaucccacua

SEQ ID NO: 1084347 - RNA, 19 nt, Artificial Sequence
  Description of Artificial Sequence: Synthetic oligonucleotide
caugacgaguuaccaacuc

SEQ ID NO: 1084348 - RNA, 19 nt, Artificial Sequence
  Description of Artificial Sequence: Synthetic oligonucleotide
agauagccuaacucaacua

SEQ ID NO: 1084349 - RNA, 19 nt, Artificial Sequence
  Description of Artificial Sequence: Synthetic oligonucleotide
gagcauggaaucugcucac

SEQ ID NO: 1084350 - RNA, 19 nt, Artificial Sequence
  Description of Artificial Sequence: Synthetic oligonucleotide
uacuucaguuuaagugaac

SEQ ID NO: 1084351 - RNA, 19 nt, Artificial Sequence
  Description of Artificial Sequence: Synthetic oligonucleotide
ccaacuuuaccugagucac

SEQ ID NO: 1084352 - RNA, 19 nt, Artificial Sequence
  Description of Artificial Sequence: Synthetic oligonucleotide
guaaggugaaaacgcagua

SEQ ID NO: 1084353 - RNA, 19 nt, Artificial Sequence
  Description of Artificial Sequence: Synthetic oligonucleotide
gcuaaguuaucugcagccg

SEQ ID NO: 1084354 - RNA, 19 nt, Artificial Sequence
  Description of Artificial Sequence: Synthetic oligonucleotide
gugaacuauacaaaagggu

SEQ ID NO: 1084355 - RNA, 19 nt, Artificial Sequence
  Description of Artificial Sequence: Synthetic oligonucleotide
ugcauaaggcugugugcac

SEQ ID NO: 1084356 - RNA, 19 nt, Artificial Sequence
  Description of Artificial Sequence: Synthetic oligonucleotide
acgaguuaccaacucuuua

SEQ ID NO: 1084357 - RNA, 19 nt, Artificial Sequence
  Description of Artificial Sequence: Synthetic oligonucleotide
cauaugcagugaaaauaca

SEQ ID NO: 1084358 - RNA, 19 nt, Artificial Sequence
  Description of Artificial Sequence: Synthetic oligonucleotide
cacagauuuuaccacuuaa

SEQ ID NO: 1084359 - RNA, 19 nt, Artificial Sequence
  Description of Artificial Sequence: Synthetic oligonucleotide
cuuguggaaggucaauaaa

SEQ ID NO: 1084360 - RNA, 19 nt, Artificial Sequence
  Description of Artificial Sequence: Synthetic oligonucleotide
gagacuuuuggaagagcuc

SEQ ID NO: 1084361 - RNA, 19 nt, Artificial Sequence
  Description of Artificial Sequence: Synthetic oligonucleotide
aggguggcaugauaauagu

SEQ ID NO: 1084362 - RNA, 19 nt, Artificial Sequence
  Description of Artificial Sequence: Synthetic oligonucleotide
cugcauaaggcugugugca

SEQ ID NO: 1084363 - RNA, 19 nt, Artificial Sequence
  Description of Artificial Sequence: Synthetic oligonucleotide
aauggagugcugaggcccu

SEQ ID NO: 1084364 - RNA, 19 nt, Artificial Sequence
  Description of Artificial Sequence: Synthetic oligonucleotide
agcccuauguucauggaaa

SEQ ID NO: 1084365 - RNA, 19 nt, Artificial Sequence
  Description of Artificial Sequence: Synthetic oligonucleotide
ggcauaaaaugaaggcuag

SEQ ID NO: 1084366 - RNA, 19 nt, Artificial Sequence
  Description of Artificial Sequence: Synthetic oligonucleotide
gggaaccauauacauuggc

SEQ ID NO: 1084367 - RNA, 19 nt, Artificial Sequence
  Description of Artificial Sequence: Synthetic oligonucleotide
cucacgcucauuccucaac

SEQ ID NO: 1084368 - RNA, 19 nt, Artificial Sequence
  Description of Artificial Sequence: Synthetic oligonucleotide
cuaaugugcagggcucaag

SEQ ID NO: 1084369 - RNA, 19 nt, Artificial Sequence
  Description of Artificial Sequence: Synthetic oligonucleotide
cuaaaguuaaggguaugua

SEQ ID NO: 1084370 - RNA, 19 nt, Artificial Sequence
  Description of Artificial Sequence: Synthetic oligonucleotide
gcauggaaucugcucacag

SEQ ID NO: 1084371 - RNA, 19 nt, Artificial Sequence
  Description of Artificial Sequence: Synthetic oligonucleotide
acaguaccuaacagaaaca

SEQ ID NO: 1084372 - RNA, 19 nt, Artificial Sequence
  Description of Artificial Sequence: Synthetic oligonucleotide
guaaccaggcuggaaguuc

SEQ ID NO: 1084373 - RNA, 19 nt, Artificial Sequence
  Description of Artificial Sequence: Synthetic oligonucleotide
cacacgaaaauacuucagu

SEQ ID NO: 1084374 - RNA, 19 nt, Artificial Sequence
  Description of Artificial Sequence: Synthetic oligonucleotide
uccuuauuacucugcucua

SEQ ID NO: 1084375 - RNA, 19 nt, Artificial Sequence
  Description of Artificial Sequence: Synthetic oligonucleotide
guguagaucccaacuuuac

SEQ ID NO: 1084376 - RNA, 19 nt, Artificial Sequence
  Description of Artificial Sequence: Synthetic oligonucleotide
ccaacaagagacuuuugga

SEQ ID NO: 1084377 - RNA, 19 nt, Artificial Sequence
  Description of Artificial Sequence: Synthetic oligonucleotide
ggcaugauaauagugacau

SEQ ID NO: 1084378 - RNA, 19 nt, Artificial Sequence
  Description of Artificial Sequence: Synthetic oligonucleotide
auacuucaguuuaagugaa

SEQ ID NO: 1084379 - RNA, 19 nt, Artificial Sequence
  Description of Artificial Sequence: Synthetic oligonucleotide
ggcccuucaaagcucugag

SEQ ID NO: 1084380 - RNA, 19 nt, Artificial Sequence
  Description of Artificial Sequence: Synthetic oligonucleotide
acaccgccaucuuaaacua

SEQ ID NO: 1084381 - RNA, 19 nt, Artificial Sequence
  Description of Artificial Sequence: Synthetic oligonucleotide
aggucaauaaacagagcua

SEQ ID NO: 1084382 - RNA, 19 nt, Artificial Sequence
  Description of Artificial Sequence: Synthetic oligonucleotide
acgcaguagcacuaggcuu

SEQ ID NO: 1084383 - RNA, 19 nt, Artificial Sequence
  Description of Artificial Sequence: Synthetic oligonucleotide
gaccuaaugugcagggcuc

SEQ ID NO: 1084384 - RNA, 19 nt, Artificial Sequence
  Description of Artificial Sequence: Synthetic oligonucleotide
ccuaacucaacuauaggcu

SEQ ID NO: 1084385 - RNA, 19 nt, Artificial Sequence
  Description of Artificial Sequence: Synthetic oligonucleotide
gaggugcauaugcagugaa

SEQ ID NO: 1084386 - RNA, 19 nt, Artificial Sequence
  Description of Artificial Sequence: Synthetic oligonucleotide
uaaucucaagaagcccagu

SEQ ID NO: 1084387 - RNA, 19 nt, Artificial Sequence
  Description of Artificial Sequence: Synthetic oligonucleotide
uguaaccaggcuggaaguu

SEQ ID NO: 1084388 - RNA, 19 nt, Artificial Sequence
  Description of Artificial Sequence: Synthetic oligonucleotide
auagccuaacucaacuaua

SEQ ID NO: 1084389 - RNA, 19 nt, Artificial Sequence
  Description of Artificial Sequence: Synthetic oligonucleotide
acacagauuuuaccacuua

SEQ ID NO: 1084390 - RNA, 19 nt, Artificial Sequence
  Description of Artificial Sequence: Synthetic oligonucleotide
cacgaaaauacuucaguuu

SEQ ID NO: 1084391 - RNA, 19 nt, Artificial Sequence
  Description of Artificial Sequence: Synthetic oligonucleotide
cuuaauguguaaggugaaa

SEQ ID NO: 1084392 - RNA, 19 nt, Artificial Sequence
  Description of Artificial Sequence: Synthetic oligonucleotide
accgccaucuuaaacuaaa

SEQ ID NO: 1084393 - RNA, 19 nt, Artificial Sequence
  Description of Artificial Sequence: Synthetic oligonucleotide
uucuagcccuauguucaug

SEQ ID NO: 1084394 - RNA, 19 nt, Artificial Sequence
  Description of Artificial Sequence: Synthetic oligonucleotide
acacguguugagauagccu

SEQ ID NO: 1084395 - RNA, 19 nt, Artificial Sequence
  Description of Artificial Sequence: Synthetic oligonucleotide
gguuacuuaugacuaauuu

SEQ ID NO: 1084396 - RNA, 19 nt, Artificial Sequence
  Description of Artificial Sequence: Synthetic oligonucleotide
gcuaggaaugcuacuuggc

SEQ ID NO: 1084397 - RNA, 19 nt, Artificial Sequence
  Description of Artificial Sequence: Synthetic oligonucleotide
gaaggcuaggaaugcuacu

SEQ ID NO: 1084398 - RNA, 19 nt, Artificial Sequence
  Description of Artificial Sequence: Synthetic oligonucleotide
agcacuaggcuugcuuacu

SEQ ID NO: 1084399 - RNA, 19 nt, Artificial Sequence
  Description of Artificial Sequence: Synthetic oligonucleotide
aggcacauccuagguacug

SEQ ID NO: 1084400 - RNA, 19 nt, Artificial Sequence
  Description of Artificial Sequence: Synthetic oligonucleotide
gcuuguggaaggucaauaa

SEQ ID NO: 1084401 - RNA, 19 nt, Artificial Sequence
  Description of Artificial Sequence: Synthetic oligonucleotide
ucccacuagccaugaucca

SEQ ID NO: 1084402 - RNA, 19 nt, Artificial Sequence
  Description of Artificial Sequence: Synthetic oligonucleotide
cuacuuggcaaaaguauuu

SEQ ID NO: 1084403 - RNA, 19 nt, Artificial Sequence
  Description of Artificial Sequence: Synthetic oligonucleotide
cuauguucauggaaaguuu

SEQ ID NO: 1084404 - RNA, 19 nt, Artificial Sequence
  Description of Artificial Sequence: Synthetic oligonucleotide
ccuuauuacucugcucuag

SEQ ID NO: 1084405 - RNA, 19 nt, Artificial Sequence
  Description of Artificial Sequence: Synthetic oligonucleotide
gguucacuaaaugauggcu

SEQ ID NO: 1084406 - RNA, 19 nt, Artificial Sequence
  Description of Artificial Sequence: Synthetic oligonucleotide
uaggcuaguuccagcccuu

SEQ ID NO: 1084407 - RNA, 19 nt, Artificial Sequence
  Description of Artificial Sequence: Synthetic oligonucleotide
accuaaugugcagggcuca

SEQ ID NO: 1084408 - RNA, 19 nt, Artificial Sequence
  Description of Artificial Sequence: Synthetic oligonucleotide
cacauccuagguacuggga

SEQ ID NO: 1084409 - RNA, 19 nt, Artificial Sequence
  Description of Artificial Sequence: Synthetic oligonucleotide
augcuacuuggcaaaagua

SEQ ID NO: 1084410 - RNA, 19 nt, Artificial Sequence
  Description of Artificial Sequence: Synthetic oligonucleotide
gcacuaggcuugcuuacug

SEQ ID NO: 1084411 - RNA, 19 nt, Artificial Sequence
  Description of Artificial Sequence: Synthetic oligonucleotide
ccacuuaaccaacaagaga

SEQ ID NO: 1084412 - RNA, 19 nt, Artificial Sequence
  Description of Artificial Sequence: Synthetic oligonucleotide
gcuugccuuugucagguca

SEQ ID NO: 1084413 - RNA, 19 nt, Artificial Sequence
  Description of Artificial Sequence: Synthetic oligonucleotide
cacgcucauuccucaacca

SEQ ID NO: 1084414 - RNA, 19 nt, Artificial Sequence
  Description of Artificial Sequence: Synthetic oligonucleotide
aggcccuucaaagcucuga

SEQ ID NO: 1084415 - RNA, 19 nt, Artificial Sequence
  Description of Artificial Sequence: Synthetic oligonucleotide
auccuagguacugggacuu

SEQ ID NO: 1084416 - RNA, 19 nt, Artificial Sequence
  Description of Artificial Sequence: Synthetic oligonucleotide
cuagcccuauguucaugga

SEQ ID NO: 1084417 - RNA, 19 nt, Artificial Sequence
  Description of Artificial Sequence: Synthetic oligonucleotide
agcauggaaucugcucaca

SEQ ID NO: 1084418 - RNA, 19 nt, Artificial Sequence
  Description of Artificial Sequence: Synthetic oligonucleotide
cgaguuaccaacucuuuaa

SEQ ID NO: 1084419 - RNA, 19 nt, Artificial Sequence
  Description of Artificial Sequence: Synthetic oligonucleotide
ggcuaguuccagcccuucc

SEQ ID NO: 1084420 - RNA, 19 nt, Artificial Sequence
  Description of Artificial Sequence: Synthetic oligonucleotide
cuuaaccaacaagagacuu

SEQ ID NO: 1084421 - RNA, 19 nt, Artificial Sequence
  Description of Artificial Sequence: Synthetic oligonucleotide
guauguaaccaggcuggaa

SEQ ID NO: 1084422 - RNA, 19 nt, Artificial Sequence
  Description of Artificial Sequence: Synthetic oligonucleotide
aggcuaguuccagcccuuc

SEQ ID NO: 1084423 - RNA, 19 nt, Artificial Sequence
  Description of Artificial Sequence: Synthetic oligonucleotide
caucuaccuagugaggacu

SEQ ID NO: 1084424 - RNA, 19 nt, Artificial Sequence
  Description of Artificial Sequence: Synthetic oligonucleotide
ggagguauaucugugccau

SEQ ID NO: 1084425 - RNA, 19 nt, Artificial Sequence
  Description of Artificial Sequence: Synthetic oligonucleotide
guguugagauagccuaacu

SEQ ID NO: 1084426 - RNA, 19 nt, Artificial Sequence
  Description of Artificial Sequence: Synthetic oligonucleotide
guuucugauuaggggaggu

SEQ ID NO: 1084427 - RNA, 19 nt, Artificial Sequence
  Description of Artificial Sequence: Synthetic oligonucleotide
gggacuucaaucagaugaa

SEQ ID NO: 1084428 - RNA, 19 nt, Artificial Sequence
  Description of Artificial Sequence: Synthetic oligonucleotide
gcuaacuuccuaucccacu

SEQ ID NO: 1084429 - RNA, 19 nt, Artificial Sequence
  Description of Artificial Sequence: Synthetic oligonucleotide
acguguugagauagccuaa

SEQ ID NO: 1084430 - RNA, 19 nt, Artificial Sequence
  Description of Artificial Sequence: Synthetic oligonucleotide
aggugcauaugcagugaaa

SEQ ID NO: 1084431 - RNA, 19 nt, Artificial Sequence
  Description of Artificial Sequence: Synthetic oligonucleotide
cagaggcuaaaauucuguu

SEQ ID NO: 1084432 - RNA, 19 nt, Artificial Sequence
  Description of Artificial Sequence: Synthetic oligonucleotide
uccuagguacugggacuuc

SEQ ID NO: 1084433 - RNA, 19 nt, Artificial Sequence
  Description of Artificial Sequence: Synthetic oligonucleotide
acacugcauaaggcugugu

SEQ ID NO: 1084434 - RNA, 19 nt, Artificial Sequence
  Description of Artificial Sequence: Synthetic oligonucleotide
gcuacuuggcaaaaguauu

SEQ ID NO: 1084435 - RNA, 19 nt, Artificial Sequence
  Description of Artificial Sequence: Synthetic oligonucleotide
gacgaguuaccaacucuuu

SEQ ID NO: 1084436 - RNA, 19 nt, Artificial Sequence
  Description of Artificial Sequence: Synthetic oligonucleotide
cguguugagauagccuaac

SEQ ID NO: 1084437 - RNA, 19 nt, Artificial Sequence
  Description of Artificial Sequence: Synthetic oligonucleotide
auccaucaagaggguggca

SEQ ID NO: 1084438 - RNA, 19 nt, Artificial Sequence
  Description of Artificial Sequence: Synthetic oligonucleotide
ccugagucacacgaaaaua

SEQ ID NO: 1084439 - RNA, 19 nt, Artificial Sequence
  Description of Artificial Sequence: Synthetic oligonucleotide
caccgccaucuuaaacuaa

SEQ ID NO: 1084440 - RNA, 19 nt, Artificial Sequence
  Description of Artificial Sequence: Synthetic oligonucleotide
gagguauaucugugccauu

SEQ ID NO: 1084441 - RNA, 19 nt, Artificial Sequence
  Description of Artificial Sequence: Synthetic oligonucleotide
ggccucacgcucauuccuc

SEQ ID NO: 1084442 - RNA, 19 nt, Artificial Sequence
  Description of Artificial Sequence: Synthetic oligonucleotide
gcacacguguugagauagc

SEQ ID NO: 1084443 - RNA, 19 nt, Artificial Sequence
  Description of Artificial Sequence: Synthetic oligonucleotide
ccaugacgaguuaccaacu

SEQ ID NO: 1084444 - RNA, 19 nt, Artificial Sequence
  Description of Artificial Sequence: Synthetic oligonucleotide
ccuaucccacuagccauga

SEQ ID NO: 1084445 - RNA, 19 nt, Artificial Sequence
  Description of Artificial Sequence: Synthetic oligonucleotide
ggguuacuuaugacuaauu

SEQ ID NO: 1084446 - RNA, 19 nt, Artificial Sequence
  Description of Artificial Sequence: Synthetic oligonucleotide
ccuaaugugcagggcucaa

SEQ ID NO: 1084447 - RNA, 19 nt, Artificial Sequence
  Description of Artificial Sequence: Synthetic oligonucleotide
cugcuuguggaaggucaau

SEQ ID NO: 1084448 - RNA, 19 nt, Artificial Sequence
  Description of Artificial Sequence: Synthetic oligonucleotide
ccucacgcucauuccucaa

SEQ ID NO: 1084449 - RNA, 19 nt, Artificial Sequence
  Description of Artificial Sequence: Synthetic oligonucleotide
uuuaauauccccaaagcag

SEQ ID NO: 1084450 - RNA, 19 nt, Artificial Sequence
  Description of Artificial Sequence: Synthetic oligonucleotide
aauuuaaagaggcacagca

SEQ ID NO: 1084451 - RNA, 19 nt, Artificial Sequence
  Description of Artificial Sequence: Synthetic oligonucleotide
auuaucaucaccuggauug

SEQ ID NO: 1084452 - RNA, 19 nt, Artificial Sequence
  Description of Artificial Sequence: Synthetic oligonucleotide
auuagauagagguucauuc

SEQ ID NO: 1084453 - RNA, 19 nt, Artificial Sequence
  Description of Artificial Sequence: Synthetic oligonucleotide
uuuagcacuagauauagug

SEQ ID NO: 1084454 - RNA, 19 nt, Artificial Sequence
  Description of Artificial Sequence: Synthetic oligonucleotide
aaagggaaugcccuguggc

SEQ ID NO: 1084455 - RNA, 19 nt, Artificial Sequence
  Description of Artificial Sequence: Synthetic oligonucleotide
ucaacagacauaauaaaug

SEQ ID NO: 1084456 - RNA, 19 nt, Artificial Sequence
  Description of Artificial Sequence: Synthetic oligonucleotide
auacacaagaacaauagcc

SEQ ID NO: 1084457 - RNA, 19 nt, Artificial Sequence
  Description of Artificial Sequence: Synthetic oligonucleotide
cuuguuuuaaauagcagcc

SEQ ID NO: 1084458 - RNA, 19 nt, Artificial Sequence
  Description of Artificial Sequence: Synthetic oligonucleotide
cuagauauagugauugugg

SEQ ID NO: 1084459 - RNA, 19 nt, Artificial Sequence
  Description of Artificial Sequence: Synthetic oligonucleotide
aaagcuuccuuguaugcgg

SEQ ID NO: 1084460 - RNA, 19 nt, Artificial Sequence
  Description of Artificial Sequence: Synthetic oligonucleotide
uuuauaaagcugaugguga

SEQ ID NO: 1084461 - RNA, 19 nt, Artificial Sequence
  Description of Artificial Sequence: Synthetic oligonucleotide
cacgccauaauuuaaagag

SEQ ID NO: 1084462 - RNA, 19 nt, Artificial Sequence
  Description of Artificial Sequence: Synthetic oligonucleotide
agagccaagacaucguugc

SEQ ID NO: 1084463 - RNA, 19 nt, Artificial Sequence
  Description of Artificial Sequence: Synthetic oligonucleotide
ucaauuaucaucaccugga

SEQ ID NO: 1084464 - RNA, 19 nt, Artificial Sequence
  Description of Artificial Sequence: Synthetic oligonucleotide
augaagguuuaucugaaac

SEQ ID NO: 1084465 - RNA, 19 nt, Artificial Sequence
  Description of Artificial Sequence: Synthetic oligonucleotide
aaguccaaaacauuuauuu

SEQ ID NO: 1084466 - RNA, 19 nt, Artificial Sequence
  Description of Artificial Sequence: Synthetic oligonucleotide
uagagguucauucagcucu

SEQ ID NO: 1084467 - RNA, 19 nt, Artificial Sequence
  Description of Artificial Sequence: Synthetic oligonucleotide
ugaaggaacaagcugucgc

SEQ ID NO: 1084468 - RNA, 19 nt, Artificial Sequence
  Description of Artificial Sequence: Synthetic oligonucleotide
caacagacauaauaaaugc

SEQ ID NO: 1084469 - RNA, 19 nt, Artificial Sequence
  Description of Artificial Sequence: Synthetic oligonucleotide
agucuggcauuucauaacc

SEQ ID NO: 1084470 - RNA, 19 nt, Artificial Sequence
  Description of Artificial Sequence: Synthetic oligonucleotide
uccauuagcugaaggaagg

SEQ ID NO: 1084471 - RNA, 19 nt, Artificial Sequence
  Description of Artificial Sequence: Synthetic oligonucleotide
uagaucaacagacauaaua

SEQ ID NO: 1084472 - RNA, 19 nt, Artificial Sequence
  Description of Artificial Sequence: Synthetic oligonucleotide
gucagcuuguuuuaaauag

SEQ ID NO: 1084473 - RNA, 19 nt, Artificial Sequence
  Description of Artificial Sequence: Synthetic oligonucleotide
aagacaucguugcaaacug

SEQ ID NO: 1084474 - RNA, 19 nt, Artificial Sequence
  Description of Artificial Sequence: Synthetic oligonucleotide
accaacuacauucuuguag

SEQ ID NO: 1084475 - RNA, 19 nt, Artificial Sequence
  Description of Artificial Sequence: Synthetic oligonucleotide
uugccauagaucaacagac

SEQ ID NO: 1084476 - RNA, 19 nt, Artificial Sequence
  Description of Artificial Sequence: Synthetic oligonucleotide
cucgaugcuacuaaugacc

SEQ ID NO: 1084477 - RNA, 19 nt, Artificial Sequence
  Description of Artificial Sequence: Synthetic oligonucleotide
ugaaacugcuucccaaggg

SEQ ID NO: 1084478 - RNA, 19 nt, Artificial Sequence
  Description of Artificial Sequence: Synthetic oligonucleotide
agauauagugauuguggcg

SEQ ID NO: 1084479 - RNA, 19 nt, Artificial Sequence
  Description of Artificial Sequence: Synthetic oligonucleotide
aucguugcaaacugucucc

SEQ ID NO: 1084480 - RNA, 19 nt, Artificial Sequence
  Description of Artificial Sequence: Synthetic oligonucleotide
gauuucgaaagcuuccuug

SEQ ID NO: 1084481 - RNA, 19 nt, Artificial Sequence
  Description of Artificial Sequence: Synthetic oligonucleotide
gaagguuuaucugaaacug

SEQ ID NO: 1084482 - RNA, 19 nt, Artificial Sequence
  Description of Artificial Sequence: Synthetic oligonucleotide
gauauagugauuguggcga

SEQ ID NO: 1084483 - RNA, 19 nt, Artificial Sequence
  Description of Artificial Sequence: Synthetic oligonucleotide
ucuacacucaauuaucauc

SEQ ID NO: 1084484 - RNA, 19 nt, Artificial Sequence
  Description of Artificial Sequence: Synthetic oligonucleotide
cuaaugacccuccaagagg

SEQ ID NO: 1084485 - RNA, 19 nt, Artificial Sequence
  Description of Artificial Sequence: Synthetic oligonucleotide
acuaaugacccuccaagag

SEQ ID NO: 1084486 - RNA, 19 nt, Artificial Sequence
  Description of Artificial Sequence: Synthetic oligonucleotide
ugcacaauucaaaagggaa

SEQ ID NO: 1084487 - RNA, 19 nt, Artificial Sequence
  Description of Artificial Sequence: Synthetic oligonucleotide
auugccauagaucaacaga

SEQ ID NO: 1084488 - RNA, 19 nt, Artificial Sequence
  Description of Artificial Sequence: Synthetic oligonucleotide
cuacuaaugacccuccaag

SEQ ID NO: 1084489 - RNA, 19 nt, Artificial Sequence
  Description of Artificial Sequence: Synthetic oligonucleotide
uccaugaagguuuaucuga

SEQ ID NO: 1084490 - RNA, 19 nt, Artificial Sequence
  Description of Artificial Sequence: Synthetic oligonucleotide
uuagcacuagauauaguga

SEQ ID NO: 1084491 - RNA, 19 nt, Artificial Sequence
  Description of Artificial Sequence: Synthetic oligonucleotide
ugaagguuuaucugaaacu

SEQ ID NO: 1084492 - RNA, 19 nt, Artificial Sequence
  Description of Artificial Sequence: Synthetic oligonucleotide
uaaugacccuccaagagga

SEQ ID NO: 1084493 - RNA, 19 nt, Artificial Sequence
  Description of Artificial Sequence: Synthetic oligonucleotide
acacucaauuaucaucacc

SEQ ID NO: 1084494 - RNA, 19 nt, Artificial Sequence
  Description of Artificial Sequence: Synthetic oligonucleotide
uagauauagugauuguggc

SEQ ID NO: 1084495 - RNA, 19 nt, Artificial Sequence
  Description of Artificial Sequence: Synthetic oligonucleotide
cucaauuaucaucaccugg

SEQ ID NO: 1084496 - RNA, 19 nt, Artificial Sequence
  Description of Artificial Sequence: Synthetic oligonucleotide
uggucgcucguccagaggg

SEQ ID NO: 1084497 - RNA, 19 nt, Artificial Sequence
  Description of Artificial Sequence: Synthetic oligonucleotide
gauugacacagguugacac

SEQ ID NO: 1084498 - RNA, 19 nt, Artificial Sequence
  Description of Artificial Sequence: Synthetic oligonucleotide
auuuauuuuagcagucugg

SEQ ID NO: 1084499 - RNA, 19 nt, Artificial Sequence
  Description of Artificial Sequence: Synthetic oligonucleotide
gauacacaagaacaauagc

SEQ ID NO: 1084500 - RNA, 19 nt, Artificial Sequence
  Description of Artificial Sequence: Synthetic oligonucleotide
aagcugauggugaaggaac

SEQ ID NO: 1084501 - RNA, 19 nt, Artificial Sequence
  Description of Artificial Sequence: Synthetic oligonucleotide
aaaagaaagugugcacacg

SEQ ID NO: 1084502 - RNA, 19 nt, Artificial Sequence
  Description of Artificial Sequence: Synthetic oligonucleotide
auagcugugcugccaauac

SEQ ID NO: 1084503 - RNA, 19 nt, Artificial Sequence
  Description of Artificial Sequence: Synthetic oligonucleotide
uuuaaguccaaaacauuua

SEQ ID NO: 1084504 - RNA, 19 nt, Artificial Sequence
  Description of Artificial Sequence: Synthetic oligonucleotide
uugaagggacuucaguugc

SEQ ID NO: 1084505 - RNA, 19 nt, Artificial Sequence
  Description of Artificial Sequence: Synthetic oligonucleotide
ugcucgaugcuacuaauga

SEQ ID NO: 1084506 - RNA, 19 nt, Artificial Sequence
  Description of Artificial Sequence: Synthetic oligonucleotide
ucagcuuguuuuaaauagc

SEQ ID NO: 1084507 - RNA, 19 nt, Artificial Sequence
  Description of Artificial Sequence: Synthetic oligonucleotide
cuacacucaauuaucauca

SEQ ID NO: 1084508 - RNA, 19 nt, Artificial Sequence
  Description of Artificial Sequence: Synthetic oligonucleotide
ucauuuaauguguccagcu

SEQ ID NO: 1084509 - RNA, 19 nt, Artificial Sequence
  Description of Artificial Sequence: Synthetic oligonucleotide
ucauaaccacccaucauga

SEQ ID NO: 1084510 - RNA, 19 nt, Artificial Sequence
  Description of Artificial Sequence: Synthetic oligonucleotide
aucauugcaguucuugaug

SEQ ID NO: 1084511 - RNA, 19 nt, Artificial Sequence
  Description of Artificial Sequence: Synthetic oligonucleotide
agaaucagugaugaugggg

SEQ ID NO: 1084512 - RNA, 19 nt, Artificial Sequence
  Description of Artificial Sequence: Synthetic oligonucleotide
ucaggauacacaagaacaa

SEQ ID NO: 1084513 - RNA, 19 nt, Artificial Sequence
  Description of Artificial Sequence: Synthetic oligonucleotide
ucgaugcuacuaaugaccc

SEQ ID NO: 1084514 - RNA, 19 nt, Artificial Sequence
  Description of Artificial Sequence: Synthetic oligonucleotide
ugucaggauacacaagaac

SEQ ID NO: 1084515 - RNA, 19 nt, Artificial Sequence
  Description of Artificial Sequence: Synthetic oligonucleotide
ugugucaguuuccauuagc

SEQ ID NO: 1084516 - RNA, 19 nt, Artificial Sequence
  Description of Artificial Sequence: Synthetic oligonucleotide
ugccaauacagauagguuu

SEQ ID NO: 1084517 - RNA, 19 nt, Artificial Sequence
  Description of Artificial Sequence: Synthetic oligonucleotide
auuucgaaagcuuccuugu

SEQ ID NO: 1084518 - RNA, 19 nt, Artificial Sequence
  Description of Artificial Sequence: Synthetic oligonucleotide
uugaaaagaaagugugcac

SEQ ID NO: 1084519 - RNA, 19 nt, Artificial Sequence
  Description of Artificial Sequence: Synthetic oligonucleotide
cauacuggaaaucauugca

SEQ ID NO: 1084520 - RNA, 19 nt, Artificial Sequence
  Description of Artificial Sequence: Synthetic oligonucleotide
uguuuggcuaagaggcagg

SEQ ID NO: 1084521 - RNA, 19 nt, Artificial Sequence
  Description of Artificial Sequence: Synthetic oligonucleotide
gaugcuacuaaugacccuc

SEQ ID NO: 1084522 - RNA, 19 nt, Artificial Sequence
  Description of Artificial Sequence: Synthetic oligonucleotide
acuagauauagugauugug

SEQ ID NO: 1084523 - RNA, 19 nt, Artificial Sequence
  Description of Artificial Sequence: Synthetic oligonucleotide
ucgaaagcuuccuuguaug

SEQ ID NO: 1084524 - RNA, 19 nt, Artificial Sequence
  Description of Artificial Sequence: Synthetic oligonucleotide
cauagaucaacagacauaa

SEQ ID NO: 1084525 - RNA, 19 nt, Artificial Sequence
  Description of Artificial Sequence: Synthetic oligonucleotide
uuguaugcggccucagaag

SEQ ID NO: 1084526 - RNA, 19 nt, Artificial Sequence
  Description of Artificial Sequence: Synthetic oligonucleotide
aagcagcauuuauuuacuc

SEQ ID NO: 1084527 - RNA, 19 nt, Artificial Sequence
  Description of Artificial Sequence: Synthetic oligonucleotide
caauucaaaagggaaugcc

SEQ ID NO: 1084528 - RNA, 19 nt, Artificial Sequence
  Description of Artificial Sequence: Synthetic oligonucleotide
uagcacuagauauagugau

SEQ ID NO: 1084529 - RNA, 19 nt, Artificial Sequence
  Description of Artificial Sequence: Synthetic oligonucleotide
aauguguccagcucagcua

SEQ ID NO: 1084530 - RNA, 19 nt, Artificial Sequence
  Description of Artificial Sequence: Synthetic oligonucleotide
agauagagguucauucagc

SEQ ID NO: 1084531 - RNA, 19 nt, Artificial Sequence
  Description of Artificial Sequence: Synthetic oligonucleotide
cagguugacacacaugaug

SEQ ID NO: 1084532 - RNA, 19 nt, Artificial Sequence
  Description of Artificial Sequence: Synthetic oligonucleotide
gauugccauagaucaacag

SEQ ID NO: 1084533 - RNA, 19 nt, Artificial Sequence
  Description of Artificial Sequence: Synthetic oligonucleotide
aaagcuggcguuaaacagu

SEQ ID NO: 1084534 - RNA, 19 nt, Artificial Sequence
  Description of Artificial Sequence: Synthetic oligonucleotide
cuggcauuucauaaccacc

SEQ ID NO: 1084535 - RNA, 19 nt, Artificial Sequence
  Description of Artificial Sequence: Synthetic oligonucleotide
agcagcauuuauuuacucu

SEQ ID NO: 1084536 - RNA, 19 nt, Artificial Sequence
  Description of Artificial Sequence: Synthetic oligonucleotide
gauucuuaaucacaaccaa

SEQ ID NO: 1084537 - RNA, 19 nt, Artificial Sequence
  Description of Artificial Sequence: Synthetic oligonucleotide
uucgaaagcuuccuuguau

SEQ ID NO: 1084538 - RNA, 19 nt, Artificial Sequence
  Description of Artificial Sequence: Synthetic oligonucleotide
auagagguucauucagcuc

SEQ ID NO: 1084539 - RNA, 19 nt, Artificial Sequence
  Description of Artificial Sequence: Synthetic oligonucleotide
aacaccuugcucucauacu

SEQ ID NO: 1084540 - RNA, 19 nt, Artificial Sequence
  Description of Artificial Sequence: Synthetic oligonucleotide
aagggaaugcccuguggcu

SEQ ID NO: 1084541 - RNA, 19 nt, Artificial Sequence
  Description of Artificial Sequence: Synthetic oligonucleotide
auaaccacccaucaugauu

SEQ ID NO: 1084542 - RNA, 19 nt, Artificial Sequence
  Description of Artificial Sequence: Synthetic oligonucleotide
ugugcacacgccauaauuu

SEQ ID NO: 1084543 - RNA, 19 nt, Artificial Sequence
  Description of Artificial Sequence: Synthetic oligonucleotide
ggaauccucauuuaaugug

SEQ ID NO: 1084544 - RNA, 19 nt, Artificial Sequence
  Description of Artificial Sequence: Synthetic oligonucleotide
uuauaaagcugauggugaa

SEQ ID NO: 1084545 - RNA, 19 nt, Artificial Sequence
  Description of Artificial Sequence: Synthetic oligonucleotide
ggauacacaagaacaauag

SEQ ID NO: 1084546 - RNA, 19 nt, Artificial Sequence
  Description of Artificial Sequence: Synthetic oligonucleotide
augcacaagauguacugcu

SEQ ID NO: 1084547 - RNA, 19 nt, Artificial Sequence
  Description of Artificial Sequence: Synthetic oligonucleotide
uguguuggcuaauucuccu

SEQ ID NO: 1084548 - RNA, 19 nt, Artificial Sequence
  Description of Artificial Sequence: Synthetic oligonucleotide
auaaauccaugauucuuaa

SEQ ID NO: 1084549 - RNA, 19 nt, Artificial Sequence
  Description of Artificial Sequence: Synthetic oligonucleotide
caaagcaaccaucagucca

SEQ ID NO: 1084550 - RNA, 19 nt, Artificial Sequence
  Description of Artificial Sequence: Synthetic oligonucleotide
cacccaucaugauugacac

SEQ ID NO: 1084551 - RNA, 19 nt, Artificial Sequence
  Description of Artificial Sequence: Synthetic oligonucleotide
cauuagcugaaggaagggg

SEQ ID NO: 1084552 - RNA, 19 nt, Artificial Sequence
  Description of Artificial Sequence: Synthetic oligonucleotide
gaggaagaaucagugauga

SEQ ID NO: 1084553 - RNA, 19 nt, Artificial Sequence
  Description of Artificial Sequence: Synthetic oligonucleotide
ucgccuggcaccaacuaca

SEQ ID NO: 1084554 - RNA, 19 nt, Artificial Sequence
  Description of Artificial Sequence: Synthetic oligonucleotide
ugucaccgccuucauggcg

SEQ ID NO: 1084555 - RNA, 19 nt, Artificial Sequence
  Description of Artificial Sequence: Synthetic oligonucleotide
gauagagguucauucagcu

SEQ ID NO: 1084556 - RNA, 19 nt, Artificial Sequence
  Description of Artificial Sequence: Synthetic oligonucleotide
caucguugcaaacugucuc

SEQ ID NO: 1084557 - RNA, 19 nt, Artificial Sequence
  Description of Artificial Sequence: Synthetic oligonucleotide
ugucaagcagagccaagac

SEQ ID NO: 1084558 - RNA, 19 nt, Artificial Sequence
  Description of Artificial Sequence: Synthetic oligonucleotide
cuguguuggcuaauucucc

SEQ ID NO: 1084559 - RNA, 19 nt, Artificial Sequence
  Description of Artificial Sequence: Synthetic oligonucleotide
aggguggaguccuuauagg

SEQ ID NO: 1084560 - RNA, 19 nt, Artificial Sequence
  Description of Artificial Sequence: Synthetic oligonucleotide
gauguacugcuuaacagaa

SEQ ID NO: 1084561 - RNA, 19 nt, Artificial Sequence
  Description of Artificial Sequence: Synthetic oligonucleotide
caugauucuuaaucacaac

SEQ ID NO: 1084562 - RNA, 19 nt, Artificial Sequence
  Description of Artificial Sequence: Synthetic oligonucleotide
auauagugauuguggcgag

SEQ ID NO: 1084563 - RNA, 19 nt, Artificial Sequence
  Description of Artificial Sequence: Synthetic oligonucleotide
cacacgccauaauuuaaag

SEQ ID NO: 1084564 - RNA, 19 nt, Artificial Sequence
  Description of Artificial Sequence: Synthetic oligonucleotide
uguuggcuaauucuccuuu

SEQ ID NO: 1084565 - RNA, 19 nt, Artificial Sequence
  Description of Artificial Sequence: Synthetic oligonucleotide
acacgccauaauuuaaaga

SEQ ID NO: 1084566 - RNA, 19 nt, Artificial Sequence
  Description of Artificial Sequence: Synthetic oligonucleotide
ucugaauagcugugcugcc

SEQ ID NO: 1084567 - RNA, 19 nt, Artificial Sequence
  Description of Artificial Sequence: Synthetic oligonucleotide
gcugucaggauacacaaga

SEQ ID NO: 1084568 - RNA, 19 nt, Artificial Sequence
  Description of Artificial Sequence: Synthetic oligonucleotide
auagugauuguggcgagga

SEQ ID NO: 1084569 - RNA, 19 nt, Artificial Sequence
  Description of Artificial Sequence: Synthetic oligonucleotide
ccuggauugccauagauca

SEQ ID NO: 1084570 - RNA, 19 nt, Artificial Sequence
  Description of Artificial Sequence: Synthetic oligonucleotide
ugucucucgcgacucggcc

SEQ ID NO: 1084571 - RNA, 19 nt, Artificial Sequence
  Description of Artificial Sequence: Synthetic oligonucleotide
agguucauucagcucuguc

SEQ ID NO: 1084572 - RNA, 19 nt, Artificial Sequence
  Description of Artificial Sequence: Synthetic oligonucleotide
cugaaagcuggcguuaaac

SEQ ID NO: 1084573 - RNA, 19 nt, Artificial Sequence
  Description of Artificial Sequence: Synthetic oligonucleotide
acgccauaauuuaaagagg

SEQ ID NO: 1084574 - RNA, 19 nt, Artificial Sequence
  Description of Artificial Sequence: Synthetic oligonucleotide
cuuguaugcggccucagaa

SEQ ID NO: 1084575 - RNA, 19 nt, Artificial Sequence
  Description of Artificial Sequence: Synthetic oligonucleotide
cauucuggaucucauagua

SEQ ID NO: 1084576 - RNA, 19 nt, Artificial Sequence
  Description of Artificial Sequence: Synthetic oligonucleotide
aauagcugugcugccaaua

SEQ ID NO: 1084577 - RNA, 19 nt, Artificial Sequence
  Description of Artificial Sequence: Synthetic oligonucleotide
gcacuagauauagugauug

SEQ ID NO: 1084578 - RNA, 19 nt, Artificial Sequence
  Description of Artificial Sequence: Synthetic oligonucleotide
cuggaucucauaguagaac

SEQ ID NO: 1084579 - RNA, 19 nt, Artificial Sequence
  Description of Artificial Sequence: Synthetic oligonucleotide
caugcacaagauguacugc

SEQ ID NO: 1084580 - RNA, 19 nt, Artificial Sequence
  Description of Artificial Sequence: Synthetic oligonucleotide
uccuuucuacacucaauua

SEQ ID NO: 1084581 - RNA, 19 nt, Artificial Sequence
  Description of Artificial Sequence: Synthetic oligonucleotide
uugcaugcacaagauguac

SEQ ID NO: 1084582 - RNA, 19 nt, Artificial Sequence
  Description of Artificial Sequence: Synthetic oligonucleotide
ucccgguaagcuuuaacuu

SEQ ID NO: 1084583 - RNA, 19 nt, Artificial Sequence
  Description of Artificial Sequence: Synthetic oligonucleotide
cagaucugaauagcugugc

SEQ ID NO: 1084584 - RNA, 19 nt, Artificial Sequence
  Description of Artificial Sequence: Synthetic oligonucleotide
guguguuggcugcaugugc

SEQ ID NO: 1084585 - RNA, 19 nt, Artificial Sequence
  Description of Artificial Sequence: Synthetic oligonucleotide
caaucuucucccgguaagc

SEQ ID NO: 1084586 - RNA, 19 nt, Artificial Sequence
  Description of Artificial Sequence: Synthetic oligonucleotide
caauacagauagguuuagc

SEQ ID NO: 1084587 - RNA, 19 nt, Artificial Sequence
  Description of Artificial Sequence: Synthetic oligonucleotide
caagaggaucgccuggcac

SEQ ID NO: 1084588 - RNA, 19 nt, Artificial Sequence
  Description of Artificial Sequence: Synthetic oligonucleotide
cuugucaagcagagccaag

SEQ ID NO: 1084589 - RNA, 19 nt, Artificial Sequence
  Description of Artificial Sequence: Synthetic oligonucleotide
ugauuucgaaagcuuccuu

SEQ ID NO: 1084590 - RNA, 19 nt, Artificial Sequence
  Description of Artificial Sequence: Synthetic oligonucleotide
uggaguccuuauaggaauc

SEQ ID NO: 1084591 - RNA, 19 nt, Artificial Sequence
  Description of Artificial Sequence: Synthetic oligonucleotide
agccuguguuggcuaauuc

SEQ ID NO: 1084592 - RNA, 19 nt, Artificial Sequence
  Description of Artificial Sequence: Synthetic oligonucleotide
caaaagggaaugcccugug

SEQ ID NO: 1084593 - RNA, 19 nt, Artificial Sequence
  Description of Artificial Sequence: Synthetic oligonucleotide
cagccauagccuguguugg

SEQ ID NO: 1084594 - RNA, 19 nt, Artificial Sequence
  Description of Artificial Sequence: Synthetic oligonucleotide
ggcguuaaacaguuuauaa

SEQ ID NO: 1084595 - RNA, 19 nt, Artificial Sequence
  Description of Artificial Sequence: Synthetic oligonucleotide
uacacucaauuaucaucac

SEQ ID NO: 1084596 - RNA, 19 nt, Artificial Sequence
  Description of Artificial Sequence: Synthetic oligonucleotide
acacuucucugcacaauuc

SEQ ID NO: 1084597 - RNA, 19 nt, Artificial Sequence
  Description of Artificial Sequence: Synthetic oligonucleotide
augcuacuaaugacccucc

SEQ ID NO: 1084598 - RNA, 19 nt, Artificial Sequence
  Description of Artificial Sequence: Synthetic oligonucleotide
accgccuucauggcggagg

SEQ ID NO: 1084599 - RNA, 19 nt, Artificial Sequence
  Description of Artificial Sequence: Synthetic oligonucleotide
uggcuaauucuccuuucua

SEQ ID NO: 1084600 - RNA, 19 nt, Artificial Sequence
  Description of Artificial Sequence: Synthetic oligonucleotide
gcagccauagccuguguug

SEQ ID NO: 1084601 - RNA, 19 nt, Artificial Sequence
  Description of Artificial Sequence: Synthetic oligonucleotide
caacacacuucucugcaca

SEQ ID NO: 1084602 - RNA, 19 nt, Artificial Sequence
  Description of Artificial Sequence: Synthetic oligonucleotide
gugaaggaacaagcugucg

SEQ ID NO: 1084603 - RNA, 19 nt, Artificial Sequence
  Description of Artificial Sequence: Synthetic oligonucleotide
cugcuugcucgcucgcucg

SEQ ID NO: 1084604 - RNA, 19 nt, Artificial Sequence
  Description of Artificial Sequence: Synthetic oligonucleotide
cugcacaauucaaaaggga

SEQ ID NO: 1084605 - RNA, 19 nt, Artificial Sequence
  Description of Artificial Sequence: Synthetic oligonucleotide
cugcucgaugcuacuaaug

SEQ ID NO: 1084606 - RNA, 19 nt, Artificial Sequence
  Description of Artificial Sequence: Synthetic oligonucleotide
aggauacacaagaacaaua

SEQ ID NO: 1084607 - RNA, 19 nt, Artificial Sequence
  Description of Artificial Sequence: Synthetic oligonucleotide
agcagucuggcauuucaua

SEQ ID NO: 1084608 - RNA, 19 nt, Artificial Sequence
  Description of Artificial Sequence: Synthetic oligonucleotide
gcguuaaacaguuuauaaa

SEQ ID NO: 1084609 - RNA, 19 nt, Artificial Sequence
  Description of Artificial Sequence: Synthetic oligonucleotide
cuuguuuggcuaagaggca

SEQ ID NO: 1084610 - RNA, 19 nt, Artificial Sequence
  Description of Artificial Sequence: Synthetic oligonucleotide
aacuucugaugcauugcau

SEQ ID NO: 1084611 - RNA, 19 nt, Artificial Sequence
  Description of Artificial Sequence: Synthetic oligonucleotide
cauucagcucugucaccgc

SEQ ID NO: 1084612 - RNA, 19 nt, Artificial Sequence
  Description of Artificial Sequence: Synthetic oligonucleotide
cacaagauguacugcuuaa

SEQ ID NO: 1084613 - RNA, 19 nt, Artificial Sequence
  Description of Artificial Sequence: Synthetic oligonucleotide
uggcguuaaacaguuuaua

SEQ ID NO: 1084614 - RNA, 19 nt, Artificial Sequence
  Description of Artificial Sequence: Synthetic oligonucleotide
cugucgcugugucaguuuc

SEQ ID NO: 1084615 - RNA, 19 nt, Artificial Sequence
  Description of Artificial Sequence: Synthetic oligonucleotide
gucagggacuugaagggac

SEQ ID NO: 1084616 - RNA, 19 nt, Artificial Sequence
  Description of Artificial Sequence: Synthetic oligonucleotide
aagcuggcguuaaacaguu

SEQ ID NO: 1084617 - RNA, 19 nt, Artificial Sequence
  Description of Artificial Sequence: Synthetic oligonucleotide
acaucguugcaaacugucu

SEQ ID NO: 1084618 - RNA, 19 nt, Artificial Sequence
  Description of Artificial Sequence: Synthetic oligonucleotide
caucaugauugacacaggu

SEQ ID NO: 1084619 - RNA, 19 nt, Artificial Sequence
  Description of Artificial Sequence: Synthetic oligonucleotide
cugcccguccgcuucccgg

SEQ ID NO: 1084620 - RNA, 19 nt, Artificial Sequence
  Description of Artificial Sequence: Synthetic oligonucleotide
ugcucucauacuggaaauc

SEQ ID NO: 1084621 - RNA, 19 nt, Artificial Sequence
  Description of Artificial Sequence: Synthetic oligonucleotide
uagugauuguggcgaggaa

SEQ ID NO: 1084622 - RNA, 19 nt, Artificial Sequence
  Description of Artificial Sequence: Synthetic oligonucleotide
ggaacaagcugucgcugug

SEQ ID NO: 1084623 - RNA, 19 nt, Artificial Sequence
  Description of Artificial Sequence: Synthetic oligonucleotide
accgccugcuugcucgcuc

SEQ ID NO: 1084624 - RNA, 19 nt, Artificial Sequence
  Description of Artificial Sequence: Synthetic oligonucleotide
aaccacccaucaugauuga

SEQ ID NO: 1084625 - RNA, 19 nt, Artificial Sequence
  Description of Artificial Sequence: Synthetic oligonucleotide
ucauuagauagagguucau

SEQ ID NO: 1084626 - RNA, 19 nt, Artificial Sequence
  Description of Artificial Sequence: Synthetic oligonucleotide
accaucaguccagcaaaug

SEQ ID NO: 1084627 - RNA, 19 nt, Artificial Sequence
  Description of Artificial Sequence: Synthetic oligonucleotide
uaugcggccucagaagcuu

SEQ ID NO: 1084628 - RNA, 19 nt, Artificial Sequence
  Description of Artificial Sequence: Synthetic oligonucleotide
gcuggcguuaaacaguuua

SEQ ID NO: 1084629 - RNA, 19 nt, Artificial Sequence
  Description of Artificial Sequence: Synthetic oligonucleotide
agaggaucgccuggcacca

SEQ ID NO: 1084630 - RNA, 19 nt, Artificial Sequence
  Description of Artificial Sequence: Synthetic oligonucleotide
gcagucuggcauuucauaa

SEQ ID NO: 1084631 - RNA, 19 nt, Artificial Sequence
  Description of Artificial Sequence: Synthetic oligonucleotide
ccaugauucuuaaucacaa

SEQ ID NO: 1084632 - RNA, 19 nt, Artificial Sequence
  Description of Artificial Sequence: Synthetic oligonucleotide
gugcacacgccauaauuua

SEQ ID NO: 1084633 - RNA, 19 nt, Artificial Sequence
  Description of Artificial Sequence: Synthetic oligonucleotide
cugugucaguuuccauuag

SEQ ID NO: 1084634 - RNA, 19 nt, Artificial Sequence
  Description of Artificial Sequence: Synthetic oligonucleotide
uccgcuucccggucuccgc

SEQ ID NO: 1084635 - RNA, 19 nt, Artificial Sequence
  Description of Artificial Sequence: Synthetic oligonucleotide
ggcugcaugugcucuuugc

SEQ ID NO: 1084636 - RNA, 19 nt, Artificial Sequence
  Description of Artificial Sequence: Synthetic oligonucleotide
ucgcucguccagaggguga

SEQ ID NO: 1084637 - RNA, 19 nt, Artificial Sequence
  Description of Artificial Sequence: Synthetic oligonucleotide
gugucaguuuccauuagcu

SEQ ID NO: 1084638 - RNA, 19 nt, Artificial Sequence
  Description of Artificial Sequence: Synthetic oligonucleotide
gcucgaugcuacuaaugac

SEQ ID NO: 1084639 - RNA, 19 nt, Artificial Sequence
  Description of Artificial Sequence: Synthetic oligonucleotide
gcucucauacuggaaauca

SEQ ID NO: 1084640 - RNA, 19 nt, Artificial Sequence
  Description of Artificial Sequence: Synthetic oligonucleotide
ccgguaagcuuuaacuuuc

SEQ ID NO: 1084641 - RNA, 19 nt, Artificial Sequence
  Description of Artificial Sequence: Synthetic oligonucleotide
ggugggugaaggaaggguc

SEQ ID NO: 1084642 - RNA, 19 nt, Artificial Sequence
  Description of Artificial Sequence: Synthetic oligonucleotide
cugucaccgccuucauggc

SEQ ID NO: 1084643 - RNA, 19 nt, Artificial Sequence
  Description of Artificial Sequence: Synthetic oligonucleotide
ccacccaucaugauugaca

SEQ ID NO: 1084644 - RNA, 19 nt, Artificial Sequence
  Description of Artificial Sequence: Synthetic oligonucleotide
gguaagcuuuaacuuucuc

SEQ ID NO: 1084645 - RNA, 19 nt, Artificial Sequence
  Description of Artificial Sequence: Synthetic oligonucleotide
caugaagguuuaucugaaa

SEQ ID NO: 1084646 - RNA, 19 nt, Artificial Sequence
  Description of Artificial Sequence: Synthetic oligonucleotide
cugucaggauacacaagaa

SEQ ID NO: 1084647 - RNA, 19 nt, Artificial Sequence
  Description of Artificial Sequence: Synthetic oligonucleotide
acccuccaagaggaucgcc

SEQ ID NO: 1084648 - RNA, 19 nt, Artificial Sequence
  Description of Artificial Sequence: Synthetic oligonucleotide
gcuacuaaugacccuccaa

SEQ ID NO: 1084649 - RNA, 19 nt, Artificial Sequence
  Description of Artificial Sequence: Synthetic oligonucleotide
cugaauagcugugcugcca

SEQ ID NO: 1084650 - RNA, 19 nt, Artificial Sequence
  Description of Artificial Sequence: Synthetic oligonucleotide
cuggucgcucguccagagg

SEQ ID NO: 1084651 - RNA, 19 nt, Artificial Sequence
  Description of Artificial Sequence: Synthetic oligonucleotide
gcagaucugaauagcugug

SEQ ID NO: 1084652 - RNA, 19 nt, Artificial Sequence
  Description of Artificial Sequence: Synthetic oligonucleotide
ugcccguccgcuucccggu

SEQ ID NO: 1084653 - RNA, 19 nt, Artificial Sequence
  Description of Artificial Sequence: Synthetic oligonucleotide
gguguguuggcugcaugug

SEQ ID NO: 1084654 - RNA, 19 nt, Artificial Sequence
  Description of Artificial Sequence: Synthetic oligonucleotide
cugcuggucgcucguccag

SEQ ID NO: 1084655 - RNA, 19 nt, Artificial Sequence
  Description of Artificial Sequence: Synthetic oligonucleotide
cuggcucgccggcuggcgg

SEQ ID NO: 1084656 - RNA, 19 nt, Artificial Sequence
  Description of Artificial Sequence: Synthetic oligonucleotide
cgaggaagaaucagugaug

SEQ ID NO: 1084657 - RNA, 19 nt, Artificial Sequence
  Description of Artificial Sequence: Synthetic oligonucleotide
ccauuagcugaaggaaggg

SEQ ID NO: 1084658 - RNA, 19 nt, Artificial Sequence
  Description of Artificial Sequence: Synthetic oligonucleotide
cauagccuguguuggcuaa

SEQ ID NO: 1084659 - RNA, 19 nt, Artificial Sequence
  Description of Artificial Sequence: Synthetic oligonucleotide
acccaucaugauugacaca

SEQ ID NO: 1084660 - RNA, 19 nt, Artificial Sequence
  Description of Artificial Sequence: Synthetic oligonucleotide
ccaucaugauugacacagg

SEQ ID NO: 1084661 - RNA, 19 nt, Artificial Sequence
  Description of Artificial Sequence: Synthetic oligonucleotide
gauuguggcgaggaagaau

SEQ ID NO: 1084662 - RNA, 19 nt, Artificial Sequence
  Description of Artificial Sequence: Synthetic oligonucleotide
agacaucguugcaaacugu

SEQ ID NO: 1084663 - RNA, 19 nt, Artificial Sequence
  Description of Artificial Sequence: Synthetic oligonucleotide
ggugaaggaacaagcuguc

SEQ ID NO: 1084664 - RNA, 19 nt, Artificial Sequence
  Description of Artificial Sequence: Synthetic oligonucleotide
cgcaccgccugcuugcucg

SEQ ID NO: 1084665 - RNA, 19 nt, Artificial Sequence
  Description of Artificial Sequence: Synthetic oligonucleotide
ugcuggucgcucguccaga

SEQ ID NO: 1084666 - RNA, 19 nt, Artificial Sequence
  Description of Artificial Sequence: Synthetic oligonucleotide
ggcgaggaagaaucaguga

SEQ ID NO: 1084667 - RNA, 19 nt, Artificial Sequence
  Description of Artificial Sequence: Synthetic oligonucleotide
gccaauacagauagguuua

SEQ ID NO: 1084668 - RNA, 19 nt, Artificial Sequence
  Description of Artificial Sequence: Synthetic oligonucleotide
gucgcucguccagagggug

SEQ ID NO: 1084669 - RNA, 19 nt, Artificial Sequence
  Description of Artificial Sequence: Synthetic oligonucleotide
ccggucuccgccgaggccg

SEQ ID NO: 1084670 - RNA, 19 nt, Artificial Sequence
  Description of Artificial Sequence: Synthetic oligonucleotide
cuggcguuaaacaguuuau

SEQ ID NO: 1084671 - RNA, 19 nt, Artificial Sequence
  Description of Artificial Sequence: Synthetic oligonucleotide
ggccaagccggauggggug

SEQ ID NO: 1084672 - RNA, 19 nt, Artificial Sequence
  Description of Artificial Sequence: Synthetic oligonucleotide
ccuuucuacacucaauuau

SEQ ID NO: 1084673 - RNA, 19 nt, Artificial Sequence
  Description of Artificial Sequence: Synthetic oligonucleotide
gcucgcgcccucucgcugg

SEQ ID NO: 1084674 - RNA, 19 nt, Artificial Sequence
  Description of Artificial Sequence: Synthetic oligonucleotide
cugauuucgaaagcuuccu

SEQ ID NO: 1084675 - RNA, 19 nt, Artificial Sequence
  Description of Artificial Sequence: Synthetic oligonucleotide
cagaacacugucagcuugu

SEQ ID NO: 1084676 - RNA, 19 nt, Artificial Sequence
  Description of Artificial Sequence: Synthetic oligonucleotide
gggaaugcccuguggcuca

SEQ ID NO: 1084677 - RNA, 19 nt, Artificial Sequence
  Description of Artificial Sequence: Synthetic oligonucleotide
gccauaauuuaaagaggca

SEQ ID NO: 1084678 - RNA, 19 nt, Artificial Sequence
  Description of Artificial Sequence: Synthetic oligonucleotide
cacuagauauagugauugu

SEQ ID NO: 1084679 - RNA, 19 nt, Artificial Sequence
  Description of Artificial Sequence: Synthetic oligonucleotide
caguuuccauuagcugaag

SEQ ID NO: 1084680 - RNA, 19 nt, Artificial Sequence
  Description of Artificial Sequence: Synthetic oligonucleotide
gggugcgagggucggauuc

SEQ ID NO: 1084681 - RNA, 19 nt, Artificial Sequence
  Description of Artificial Sequence: Synthetic oligonucleotide
ccaagacaucguugcaaac

SEQ ID NO: 1084682 - RNA, 19 nt, Artificial Sequence
  Description of Artificial Sequence: Synthetic oligonucleotide
uagccuguguuggcuaauu

SEQ ID NO: 1084683 - RNA, 19 nt, Artificial Sequence
  Description of Artificial Sequence: Synthetic oligonucleotide
uccgccugcuccgccaguc

SEQ ID NO: 1084684 - RNA, 19 nt, Artificial Sequence
  Description of Artificial Sequence: Synthetic oligonucleotide
uuggcugcaugugcucuuu

SEQ ID NO: 1084685 - RNA, 19 nt, Artificial Sequence
  Description of Artificial Sequence: Synthetic oligonucleotide
auagaucaacagacauaau

SEQ ID NO: 1084686 - RNA, 19 nt, Artificial Sequence
  Description of Artificial Sequence: Synthetic oligonucleotide
cacggagaggagauuucua

SEQ ID NO: 1084687 - RNA, 19 nt, Artificial Sequence
  Description of Artificial Sequence: Synthetic oligonucleotide
ugcgagggucggauucauu

SEQ ID NO: 1084688 - RNA, 19 nt, Artificial Sequence
  Description of Artificial Sequence: Synthetic oligonucleotide
gguugacacacaugaugcu

SEQ ID NO: 1084689 - RNA, 19 nt, Artificial Sequence
  Description of Artificial Sequence: Synthetic oligonucleotide
cagucgcgcccgcugcagc

SEQ ID NO: 1084690 - RNA, 19 nt, Artificial Sequence
  Description of Artificial Sequence: Synthetic oligonucleotide
gucucucgcgacucggccu

SEQ ID NO: 1084691 - RNA, 19 nt, Artificial Sequence
  Description of Artificial Sequence: Synthetic oligonucleotide
cugccaauacagauagguu

SEQ ID NO: 1084692 - RNA, 19 nt, Artificial Sequence
  Description of Artificial Sequence: Synthetic oligonucleotide
cuucccggucuccgccgag

SEQ ID NO: 1084693 - RNA, 19 nt, Artificial Sequence
  Description of Artificial Sequence: Synthetic oligonucleotide
gcacacgccauaauuuaaa

SEQ ID NO: 1084694 - RNA, 19 nt, Artificial Sequence
  Description of Artificial Sequence: Synthetic oligonucleotide
ccaugucucucgcgacucg

SEQ ID NO: 1084695 - RNA, 19 nt, Artificial Sequence
  Description of Artificial Sequence: Synthetic oligonucleotide
agcugucgcugugucaguu

SEQ ID NO: 1084696 - RNA, 19 nt, Artificial Sequence
  Description of Artificial Sequence: Synthetic oligonucleotide
gcgagggucggauucauuu

SEQ ID NO: 1084697 - RNA, 19 nt, Artificial Sequence
  Description of Artificial Sequence: Synthetic oligonucleotide
ucucgcgacucggccucgc

SEQ ID NO: 1084698 - RNA, 19 nt, Artificial Sequence
  Description of Artificial Sequence: Synthetic oligonucleotide
ccgccugcuugcucgcucg

SEQ ID NO: 1084699 - RNA, 19 nt, Artificial Sequence
  Description of Artificial Sequence: Synthetic oligonucleotide
guuuagcacuagauauagu

SEQ ID NO: 1084700 - RNA, 19 nt, Artificial Sequence
  Description of Artificial Sequence: Synthetic oligonucleotide
cauaaccacccaucaugau

SEQ ID NO: 1084701 - RNA, 19 nt, Artificial Sequence
  Description of Artificial Sequence: Synthetic oligonucleotide
gcccgcaccgccugcuugc

SEQ ID NO: 1084702 - RNA, 19 nt, Artificial Sequence
  Description of Artificial Sequence: Synthetic oligonucleotide
cugccaaguagcgguagua

SEQ ID NO: 1084703 - RNA, 19 nt, Artificial Sequence
  Description of Artificial Sequence: Synthetic oligonucleotide
gcgacucggccucgccucg

SEQ ID NO: 1084704 - RNA, 19 nt, Artificial Sequence
  Description of Artificial Sequence: Synthetic oligonucleotide
ggugcgagggucggauuca

SEQ ID NO: 1084705 - RNA, 19 nt, Artificial Sequence
  Description of Artificial Sequence: Synthetic oligonucleotide
gucgcgcccgcugcagcag

SEQ ID NO: 1084706 - RNA, 19 nt, Artificial Sequence
  Description of Artificial Sequence: Synthetic oligonucleotide
caggagggcagaucugaau

SEQ ID NO: 1084707 - RNA, 19 nt, Artificial Sequence
  Description of Artificial Sequence: Synthetic oligonucleotide
uucucccgguaagcuuuaa

SEQ ID NO: 1084708 - RNA, 19 nt, Artificial Sequence
  Description of Artificial Sequence: Synthetic oligonucleotide
uccgccagucgcgcccgcu

SEQ ID NO: 1084709 - RNA, 19 nt, Artificial Sequence
  Description of Artificial Sequence: Synthetic oligonucleotide
ccuuguaugcggccucaga

SEQ ID NO: 1084710 - RNA, 19 nt, Artificial Sequence
  Description of Artificial Sequence: Synthetic oligonucleotide
cugcugaaagcuggcguua

SEQ ID NO: 1084711 - RNA, 19 nt, Artificial Sequence
  Description of Artificial Sequence: Synthetic oligonucleotide
cucucgcgacucggccucg

SEQ ID NO: 1084712 - RNA, 19 nt, Artificial Sequence
  Description of Artificial Sequence: Synthetic oligonucleotide
ggcucgcgcccucucgcug

SEQ ID NO: 1084713 - RNA, 19 nt, Artificial Sequence
  Description of Artificial Sequence: Synthetic oligonucleotide
ccgcuucccggucuccgcc

SEQ ID NO: 1084714 - RNA, 19 nt, Artificial Sequence
  Description of Artificial Sequence: Synthetic oligonucleotide
gcugaaggaaggggugcga

SEQ ID NO: 1084715 - RNA, 19 nt, Artificial Sequence
  Description of Artificial Sequence: Synthetic oligonucleotide
cccgguaagcuuuaacuuu

SEQ ID NO: 1084716 - RNA, 19 nt, Artificial Sequence
  Description of Artificial Sequence: Synthetic oligonucleotide
gagguucauucagcucugu

SEQ ID NO: 1084717 - RNA, 19 nt, Artificial Sequence
  Description of Artificial Sequence: Synthetic oligonucleotide
gccacggagaggagauuuc

SEQ ID NO: 1084718 - RNA, 19 nt, Artificial Sequence
  Description of Artificial Sequence: Synthetic oligonucleotide
cgcgacucggccucgccuc

SEQ ID NO: 1084719 - RNA, 19 nt, Artificial Sequence
  Description of Artificial Sequence: Synthetic oligonucleotide
ccaagaggaucgccuggca

SEQ ID NO: 1084720 - RNA, 19 nt, Artificial Sequence
  Description of Artificial Sequence: Synthetic oligonucleotide
cagaagcuucaaccacacu

SEQ ID NO: 1084721 - RNA, 19 nt, Artificial Sequence
  Description of Artificial Sequence: Synthetic oligonucleotide
ccauagccuguguuggcua

SEQ ID NO: 1084722 - RNA, 19 nt, Artificial Sequence
  Description of Artificial Sequence: Synthetic oligonucleotide
ccgccugcuccgccagucg

SEQ ID NO: 1084723 - RNA, 19 nt, Artificial Sequence
  Description of Artificial Sequence: Synthetic oligonucleotide
ccugcccguccgcuucccg

SEQ ID NO: 1084724 - RNA, 19 nt, Artificial Sequence
  Description of Artificial Sequence: Synthetic oligonucleotide
cgcucguccagagggugag

SEQ ID NO: 1084725 - RNA, 19 nt, Artificial Sequence
  Description of Artificial Sequence: Synthetic oligonucleotide
gcuucccggucuccgccga

SEQ ID NO: 1084726 - RNA, 19 nt, Artificial Sequence
  Description of Artificial Sequence: Synthetic oligonucleotide
cccggucuccgccgaggcc

SEQ ID NO: 1084727 - RNA, 19 nt, Artificial Sequence
  Description of Artificial Sequence: Synthetic oligonucleotide
cggccucagaagcuucaac

SEQ ID NO: 1084728 - RNA, 19 nt, Artificial Sequence
  Description of Artificial Sequence: Synthetic oligonucleotide
gccggcuggcgggaggcug

SEQ ID NO: 1084729 - RNA, 19 nt, Artificial Sequence
  Description of Artificial Sequence: Synthetic oligonucleotide
ggccacggagaggagauuu

SEQ ID NO: 1084730 - RNA, 19 nt, Artificial Sequence
  Description of Artificial Sequence: Synthetic oligonucleotide
cgcgcacgcgcacuggcuc

SEQ ID NO: 1084731 - RNA, 19 nt, Artificial Sequence
  Description of Artificial Sequence: Synthetic oligonucleotide
ccgccagucgcgcccgcug

SEQ ID NO: 1084732 - RNA, 19 nt, Artificial Sequence
  Description of Artificial Sequence: Synthetic oligonucleotide
ccgccugcccguccgcuuc

SEQ ID NO: 1084733 - RNA, 19 nt, Artificial Sequence
  Description of Artificial Sequence: Synthetic oligonucleotide
cuggggcauucuggaucuc

SEQ ID NO: 1084734 - RNA, 19 nt, Artificial Sequence
  Description of Artificial Sequence: Synthetic oligonucleotide
gcugucgcugugucaguuu

SEQ ID NO: 1084735 - RNA, 19 nt, Artificial Sequence
  Description of Artificial Sequence: Synthetic oligonucleotide
agcuggcguuaaacaguuu

SEQ ID NO: 1084736 - RNA, 19 nt, Artificial Sequence
  Description of Artificial Sequence: Synthetic oligonucleotide
ucgcgcccucucgcuggcu

SEQ ID NO: 1084737 - RNA, 19 nt, Artificial Sequence
  Description of Artificial Sequence: Synthetic oligonucleotide
cagggacuugaagggacuu

SEQ ID NO: 1084738 - RNA, 19 nt, Artificial Sequence
  Description of Artificial Sequence: Synthetic oligonucleotide
ggucgcucguccagagggu

SEQ ID NO: 1084739 - RNA, 19 nt, Artificial Sequence
  Description of Artificial Sequence: Synthetic oligonucleotide
gcggccucagaagcuucaa

SEQ ID NO: 1084740 - RNA, 19 nt, Artificial Sequence
  Description of Artificial Sequence: Synthetic oligonucleotide
gugcgagggucggauucau

SEQ ID NO: 1084741 - RNA, 19 nt, Artificial Sequence
  Description of Artificial Sequence: Synthetic oligonucleotide
gcacgcgcacuggcucgcc

SEQ ID NO: 1084742 - RNA, 19 nt, Artificial Sequence
  Description of Artificial Sequence: Synthetic oligonucleotide
cgaugcuacuaaugacccu

SEQ ID NO: 1084743 - RNA, 19 nt, Artificial Sequence
  Description of Artificial Sequence: Synthetic oligonucleotide
cgguaagcuuuaacuuucu

SEQ ID NO: 1084744 - RNA, 19 nt, Artificial Sequence
  Description of Artificial Sequence: Synthetic oligonucleotide
gcccguccgcuucccgguc

SEQ ID NO: 1084745 - RNA, 19 nt, Artificial Sequence
  Description of Artificial Sequence: Synthetic oligonucleotide
cgcccgcaccgccugcuug

SEQ ID NO: 1084746 - RNA, 19 nt, Artificial Sequence
  Description of Artificial Sequence: Synthetic oligonucleotide
cgagggucggauucauuuu

SEQ ID NO: 1084747 - RNA, 19 nt, Artificial Sequence
  Description of Artificial Sequence: Synthetic oligonucleotide
ggcucgccggcuggcggga

SEQ ID NO: 1084748 - RNA, 19 nt, Artificial Sequence
  Description of Artificial Sequence: Synthetic oligonucleotide
gccugcccguccgcuuccc

SEQ ID NO: 1084749 - RNA, 19 nt, Artificial Sequence
  Description of Artificial Sequence: Synthetic oligonucleotide
caccgccugcuugcucgcu

SEQ ID NO: 1084750 - RNA, 19 nt, Artificial Sequence
  Description of Artificial Sequence: Synthetic oligonucleotide
cccguccgcuucccggucu

SEQ ID NO: 1084751 - RNA, 19 nt, Artificial Sequence
  Description of Artificial Sequence: Synthetic oligonucleotide
gcucgcccgccugcccguc

SEQ ID NO: 1084752 - RNA, 19 nt, Artificial Sequence
  Description of Artificial Sequence: Synthetic oligonucleotide
cggccucgccucgcgcgcc

SEQ ID NO: 1084753 - RNA, 19 nt, Artificial Sequence
  Description of Artificial Sequence: Synthetic oligonucleotide
gccgcggcucgcgcccucu

SEQ ID NO: 1084754 - RNA, 19 nt, Artificial Sequence
  Description of Artificial Sequence: Synthetic oligonucleotide
cggcucgcgcccucucgcu

SEQ ID NO: 1084755 - RNA, 19 nt, Artificial Sequence
  Description of Artificial Sequence: Synthetic oligonucleotide
cccgccugcccguccgcuu

SEQ ID NO: 1084756 - RNA, 19 nt, Artificial Sequence
  Description of Artificial Sequence: Synthetic oligonucleotide
aaugggugcacccucggcc

SEQ ID NO: 1084757 - RNA, 19 nt, Artificial Sequence
  Description of Artificial Sequence: Synthetic oligonucleotide
cauuggacaaagaacaugg

SEQ ID NO: 1084758 - RNA, 19 nt, Artificial Sequence
  Description of Artificial Sequence: Synthetic oligonucleotide
agugacaugauugaguagg

SEQ ID NO: 1084759 - RNA, 19 nt, Artificial Sequence
  Description of Artificial Sequence: Synthetic oligonucleotide
gaagaaauuagugacauga

SEQ ID NO: 1084760 - RNA, 19 nt, Artificial Sequence
  Description of Artificial Sequence: Synthetic oligonucleotide
aacagguauacugaacccc

SEQ ID NO: 1084761 - RNA, 19 nt, Artificial Sequence
  Description of Artificial Sequence: Synthetic oligonucleotide
agacaauccagcuuccagc

SEQ ID NO: 1084762 - RNA, 19 nt, Artificial Sequence
  Description of Artificial Sequence: Synthetic oligonucleotide
aaauuagugacaugauuga

SEQ ID NO: 1084763 - RNA, 19 nt, Artificial Sequence
  Description of Artificial Sequence: Synthetic oligonucleotide
aaaaucagaccuagcaucg

SEQ ID NO: 1084764 - RNA, 19 nt, Artificial Sequence
  Description of Artificial Sequence: Synthetic oligonucleotide
ucauaccuuaucuggaagg

SEQ ID NO: 1084765 - RNA, 19 nt, Artificial Sequence
  Description of Artificial Sequence: Synthetic oligonucleotide
uugaucacugggcuuaggg

SEQ ID NO: 1084766 - RNA, 19 nt, Artificial Sequence
  Description of Artificial Sequence: Synthetic oligonucleotide
aaagugacuuggguaagcc

SEQ ID NO: 1084767 - RNA, 19 nt, Artificial Sequence
  Description of Artificial Sequence: Synthetic oligonucleotide
aacuuccacuuucugggcc

SEQ ID NO: 1084768 - RNA, 19 nt, Artificial Sequence
  Description of Artificial Sequence: Synthetic oligonucleotide
auagucguauuucuucagc

SEQ ID NO: 1084769 - RNA, 19 nt, Artificial Sequence
  Description of Artificial Sequence: Synthetic oligonucleotide
uuagggauaucaaugucca

SEQ ID NO: 1084770 - RNA, 19 nt, Artificial Sequence
  Description of Artificial Sequence: Synthetic oligonucleotide
uacugaaccccauaaagug

SEQ ID NO: 1084771 - RNA, 19 nt, Artificial Sequence
  Description of Artificial Sequence: Synthetic oligonucleotide
uguacacuccccuauaaga

SEQ ID NO: 1084772 - RNA, 19 nt, Artificial Sequence
  Description of Artificial Sequence: Synthetic oligonucleotide
caaaaucagaccuagcauc

SEQ ID NO: 1084773 - RNA, 19 nt, Artificial Sequence
  Description of Artificial Sequence: Synthetic oligonucleotide
uaaagcauuuauucaggag

SEQ ID NO: 1084774 - RNA, 19 nt, Artificial Sequence
  Description of Artificial Sequence: Synthetic oligonucleotide
aacuaugcugucccgguag

SEQ ID NO: 1084775 - RNA, 19 nt, Artificial Sequence
  Description of Artificial Sequence: Synthetic oligonucleotide
uuagugacaugauugagua

SEQ ID NO: 1084776 - RNA, 19 nt, Artificial Sequence
  Description of Artificial Sequence: Synthetic oligonucleotide
gaaucucuugcgcacagag

SEQ ID NO: 1084777 - RNA, 19 nt, Artificial Sequence
  Description of Artificial Sequence: Synthetic oligonucleotide
uuggacaaagaacauggcu

SEQ ID NO: 1084778 - RNA, 19 nt, Artificial Sequence
  Description of Artificial Sequence: Synthetic oligonucleotide
cuguuaugcagaacuaugc

SEQ ID NO: 1084779 - RNA, 19 nt, Artificial Sequence
  Description of Artificial Sequence: Synthetic oligonucleotide
auguccauagccuuuccag

SEQ ID NO: 1084780 - RNA, 19 nt, Artificial Sequence
  Description of Artificial Sequence: Synthetic oligonucleotide
ucuucauaccuuaucugga

SEQ ID NO: 1084781 - RNA, 19 nt, Artificial Sequence
  Description of Artificial Sequence: Synthetic oligonucleotide
cucaaaaucagaccuagca

SEQ ID NO: 1084782 - RNA, 19 nt, Artificial Sequence
  Description of Artificial Sequence: Synthetic oligonucleotide
uucauaccuuaucuggaag

SEQ ID NO: 1084783 - RNA, 19 nt, Artificial Sequence
  Description of Artificial Sequence: Synthetic oligonucleotide
ucggacacucccaagcucc

SEQ ID NO: 1084784 - RNA, 19 nt, Artificial Sequence
  Description of Artificial Sequence: Synthetic oligonucleotide
agaucccuuguacacuccc

SEQ ID NO: 1084785 - RNA, 19 nt, Artificial Sequence
  Description of Artificial Sequence: Synthetic oligonucleotide
guagagguuauguuugcgc

SEQ ID NO: 1084786 - RNA, 19 nt, Artificial Sequence
  Description of Artificial Sequence: Synthetic oligonucleotide
ucgaggacugcuaugggcu

SEQ ID NO: 1084787 - RNA, 19 nt, Artificial Sequence
  Description of Artificial Sequence: Synthetic oligonucleotide
uaacagguauacugaaccc

SEQ ID NO: 1084788 - RNA, 19 nt, Artificial Sequence
  Description of Artificial Sequence: Synthetic oligonucleotide
cuugcauaaagaggaagcc

SEQ ID NO: 1084789 - RNA, 19 nt, Artificial Sequence
  Description of Artificial Sequence: Synthetic oligonucleotide
agaaauuagugacaugauu

SEQ ID NO: 1084790 - RNA, 19 nt, Artificial Sequence
  Description of Artificial Sequence: Synthetic oligonucleotide
uuguacacuccccuauaag

SEQ ID NO: 1084791 - RNA, 19 nt, Artificial Sequence
  Description of Artificial Sequence: Synthetic oligonucleotide
cugcguaccagccacauuc

SEQ ID NO: 1084792 - RNA, 19 nt, Artificial Sequence
  Description of Artificial Sequence: Synthetic oligonucleotide
aaucggacacucccaagcu

SEQ ID NO: 1084793 - RNA, 19 nt, Artificial Sequence
  Description of Artificial Sequence: Synthetic oligonucleotide
uagucguauuucuucagca

SEQ ID NO: 1084794 - RNA, 19 nt, Artificial Sequence
  Description of Artificial Sequence: Synthetic oligonucleotide
gaagcccucaaaaucagac

SEQ ID NO: 1084795 - RNA, 19 nt, Artificial Sequence
  Description of Artificial Sequence: Synthetic oligonucleotide
cuagcaucggagaccagcc

SEQ ID NO: 1084796 - RNA, 19 nt, Artificial Sequence
  Description of Artificial Sequence: Synthetic oligonucleotide
cauaccuuaucuggaaggg

SEQ ID NO: 1084797 - RNA, 19 nt, Artificial Sequence
  Description of Artificial Sequence: Synthetic oligonucleotide
aauggugaucugcaacagu

SEQ ID NO: 1084798 - RNA, 19 nt, Artificial Sequence
  Description of Artificial Sequence: Synthetic oligonucleotide
acgccuagaacucugucug

SEQ ID NO: 1084799 - RNA, 19 nt, Artificial Sequence
  Description of Artificial Sequence: Synthetic oligonucleotide
ugcaacaccaccucuucgu

SEQ ID NO: 1084800 - RNA, 19 nt, Artificial Sequence
  Description of Artificial Sequence: Synthetic oligonucleotide
guauguguucuccaccaag

SEQ ID NO: 1084801 - RNA, 19 nt, Artificial Sequence
  Description of Artificial Sequence: Synthetic oligonucleotide
uugcauaaagaggaagccc

SEQ ID NO: 1084802 - RNA, 19 nt, Artificial Sequence
  Description of Artificial Sequence: Synthetic oligonucleotide
guaccagccacauucuaug

SEQ ID NO: 1084803 - RNA, 19 nt, Artificial Sequence
  Description of Artificial Sequence: Synthetic oligonucleotide
auggugaucugcaacagug

SEQ ID NO: 1084804 - RNA, 19 nt, Artificial Sequence
  Description of Artificial Sequence: Synthetic oligonucleotide
agcuccgacuugcaggugg

SEQ ID NO: 1084805 - RNA, 19 nt, Artificial Sequence
  Description of Artificial Sequence: Synthetic oligonucleotide
uacuguucgccccagucaa

SEQ ID NO: 1084806 - RNA, 19 nt, Artificial Sequence
  Description of Artificial Sequence: Synthetic oligonucleotide
aaaucagaccuagcaucgg

SEQ ID NO: 1084807 - RNA, 19 nt, Artificial Sequence
  Description of Artificial Sequence: Synthetic oligonucleotide
auguuugcgcugcacugcg

SEQ ID NO: 1084808 - RNA, 19 nt, Artificial Sequence
  Description of Artificial Sequence: Synthetic oligonucleotide
cuucaugacugucugcaac

SEQ ID NO: 1084809 - RNA, 19 nt, Artificial Sequence
  Description of Artificial Sequence: Synthetic oligonucleotide
ugccacaccaccccagacc

SEQ ID NO: 1084810 - RNA, 19 nt, Artificial Sequence
  Description of Artificial Sequence: Synthetic oligonucleotide
acuguuaugcagaacuaug

SEQ ID NO: 1084811 - RNA, 19 nt, Artificial Sequence
  Description of Artificial Sequence: Synthetic oligonucleotide
agugccucccggaagaauc

SEQ ID NO: 1084812 - RNA, 19 nt, Artificial Sequence
  Description of Artificial Sequence: Synthetic oligonucleotide
ugcauagauucuucauacc

SEQ ID NO: 1084813 - RNA, 19 nt, Artificial Sequence
  Description of Artificial Sequence: Synthetic oligonucleotide
ccuugcauaaagaggaagc

SEQ ID NO: 1084814 - RNA, 19 nt, Artificial Sequence
  Description of Artificial Sequence: Synthetic oligonucleotide
caugauugaguagggcugg

SEQ ID NO: 1084815 - RNA, 19 nt, Artificial Sequence
  Description of Artificial Sequence: Synthetic oligonucleotide
auuggacaaagaacauggc

SEQ ID NO: 1084816 - RNA, 19 nt, Artificial Sequence
  Description of Artificial Sequence: Synthetic oligonucleotide
agagguuauguuugcgcug

SEQ ID NO: 1084817 - RNA, 19 nt, Artificial Sequence
  Description of Artificial Sequence: Synthetic oligonucleotide
cucgaggacugcuaugggc

SEQ ID NO: 1084818 - RNA, 19 nt, Artificial Sequence
  Description of Artificial Sequence: Synthetic oligonucleotide
ucagaccuagcaucggaga

SEQ ID NO: 1084819 - RNA, 19 nt, Artificial Sequence
  Description of Artificial Sequence: Synthetic oligonucleotide
acaugauugaguagggcug

SEQ ID NO: 1084820 - RNA, 19 nt, Artificial Sequence
  Description of Artificial Sequence: Synthetic oligonucleotide
aucgccgcuguccccauac

SEQ ID NO: 1084821 - RNA, 19 nt, Artificial Sequence
  Description of Artificial Sequence: Synthetic oligonucleotide
cauagucguauuucuucag

SEQ ID NO: 1084822 - RNA, 19 nt, Artificial Sequence
  Description of Artificial Sequence: Synthetic oligonucleotide
uggugaucugcaacagugc

SEQ ID NO: 1084823 - RNA, 19 nt, Artificial Sequence
  Description of Artificial Sequence: Synthetic oligonucleotide
ucguccuggaucacggaca

SEQ ID NO: 1084824 - RNA, 19 nt, Artificial Sequence
  Description of Artificial Sequence: Synthetic oligonucleotide
ggugaaggcaguucggagc

SEQ ID NO: 1084825 - RNA, 19 nt, Artificial Sequence
  Description of Artificial Sequence: Synthetic oligonucleotide
uaucaauguccauagccuu

SEQ ID NO: 1084826 - RNA, 19 nt, Artificial Sequence
  Description of Artificial Sequence: Synthetic oligonucleotide
cuagagagcaucagaagaa

SEQ ID NO: 1084827 - RNA, 19 nt, Artificial Sequence
  Description of Artificial Sequence: Synthetic oligonucleotide
cuucguauguguucuccac

SEQ ID NO: 1084828 - RNA, 19 nt, Artificial Sequence
  Description of Artificial Sequence: Synthetic oligonucleotide
auacugaaccccauaaagu

SEQ ID NO: 1084829 - RNA, 19 nt, Artificial Sequence
  Description of Artificial Sequence: Synthetic oligonucleotide
agccucaaaaggcagcccu

SEQ ID NO: 1084830 - RNA, 19 nt, Artificial Sequence
  Description of Artificial Sequence: Synthetic oligonucleotide
auugggugucccugcguac

SEQ ID NO: 1084831 - RNA, 19 nt, Artificial Sequence
  Description of Artificial Sequence: Synthetic oligonucleotide
cacuagagagcaucagaag

SEQ ID NO: 1084832 - RNA, 19 nt, Artificial Sequence
  Description of Artificial Sequence: Synthetic oligonucleotide
uaccagccacauucuaugg

SEQ ID NO: 1084833 - RNA, 19 nt, Artificial Sequence
  Description of Artificial Sequence: Synthetic oligonucleotide
augcagaacuaugcugucc

SEQ ID NO: 1084834 - RNA, 19 nt, Artificial Sequence
  Description of Artificial Sequence: Synthetic oligonucleotide
agcaucggagaccagccca

SEQ ID NO: 1084835 - RNA, 19 nt, Artificial Sequence
  Description of Artificial Sequence: Synthetic oligonucleotide
uggguaagccagacccugg

SEQ ID NO: 1084836 - RNA, 19 nt, Artificial Sequence
  Description of Artificial Sequence: Synthetic oligonucleotide
ugauugaguagggcugggg

SEQ ID NO: 1084837 - RNA, 19 nt, Artificial Sequence
  Description of Artificial Sequence: Synthetic oligonucleotide
ucaaucggacacucccaag

SEQ ID NO: 1084838 - RNA, 19 nt, Artificial Sequence
  Description of Artificial Sequence: Synthetic oligonucleotide
guucgccccagucaauggg

SEQ ID NO: 1084839 - RNA, 19 nt, Artificial Sequence
  Description of Artificial Sequence: Synthetic oligonucleotide
agcagguguagguuggggu

SEQ ID NO: 1084840 - RNA, 19 nt, Artificial Sequence
  Description of Artificial Sequence: Synthetic oligonucleotide
ggagaaguggcccagcgca

SEQ ID NO: 1084841 - RNA, 19 nt, Artificial Sequence
  Description of Artificial Sequence: Synthetic oligonucleotide
aagcguggcagcuccgacu

SEQ ID NO: 1084842 - RNA, 19 nt, Artificial Sequence
  Description of Artificial Sequence: Synthetic oligonucleotide
aggugaaggcaguucggag

SEQ ID NO: 1084843 - RNA, 19 nt, Artificial Sequence
  Description of Artificial Sequence: Synthetic oligonucleotide
aggcaguucggagccagcc

SEQ ID NO: 1084844 - RNA, 19 nt, Artificial Sequence
  Description of Artificial Sequence: Synthetic oligonucleotide
cauagccuuuccagguggg

SEQ ID NO: 1084845 - RNA, 19 nt, Artificial Sequence
  Description of Artificial Sequence: Synthetic oligonucleotide
cagccccuugcauaaagag

SEQ ID NO: 1084846 - RNA, 19 nt, Artificial Sequence
  Description of Artificial Sequence: Synthetic oligonucleotide
aguggcccagcgcagcauc

SEQ ID NO: 1084847 - RNA, 19 nt, Artificial Sequence
  Description of Artificial Sequence: Synthetic oligonucleotide
ucggagccagccucaaaag

SEQ ID NO: 1084848 - RNA, 19 nt, Artificial Sequence
  Description of Artificial Sequence: Synthetic oligonucleotide
cagaacuaugcugucccgg

SEQ ID NO: 1084849 - RNA, 19 nt, Artificial Sequence
  Description of Artificial Sequence: Synthetic oligonucleotide
uccauuggacaaagaacau

SEQ ID NO: 1084850 - RNA, 19 nt, Artificial Sequence
  Description of Artificial Sequence: Synthetic oligonucleotide
uagugacaugauugaguag

SEQ ID NO: 1084851 - RNA, 19 nt, Artificial Sequence
  Description of Artificial Sequence: Synthetic oligonucleotide
ggagaggacgccuagaacu

SEQ ID NO: 1084852 - RNA, 19 nt, Artificial Sequence
  Description of Artificial Sequence: Synthetic oligonucleotide
ugacaugauugaguagggc

SEQ ID NO: 1084853 - RNA, 19 nt, Artificial Sequence
  Description of Artificial Sequence: Synthetic oligonucleotide
uucgccccagucaaugggu

SEQ ID NO: 1084854 - RNA, 19 nt, Artificial Sequence
  Description of Artificial Sequence: Synthetic oligonucleotide
acagguauacugaacccca

SEQ ID NO: 1084855 - RNA, 19 nt, Artificial Sequence
  Description of Artificial Sequence: Synthetic oligonucleotide
ugguacgccagcugugaca

SEQ ID NO: 1084856 - RNA, 19 nt, Artificial Sequence
  Description of Artificial Sequence: Synthetic oligonucleotide
gguauacugaaccccauaa

SEQ ID NO: 1084857 - RNA, 19 nt, Artificial Sequence
  Description of Artificial Sequence: Synthetic oligonucleotide
gagcaaguccauuggacaa

SEQ ID NO: 1084858 - RNA, 19 nt, Artificial Sequence
  Description of Artificial Sequence: Synthetic oligonucleotide
gugacaugauugaguaggg

SEQ ID NO: 1084859 - RNA, 19 nt, Artificial Sequence
  Description of Artificial Sequence: Synthetic oligonucleotide
gcaauagccagcaaaguga

SEQ ID NO: 1084860 - RNA, 19 nt, Artificial Sequence
  Description of Artificial Sequence: Synthetic oligonucleotide
uaugcagaacuaugcuguc

SEQ ID NO: 1084861 - RNA, 19 nt, Artificial Sequence
  Description of Artificial Sequence: Synthetic oligonucleotide
uagagagcaucagaagaaa

SEQ ID NO: 1084862 - RNA, 19 nt, Artificial Sequence
  Description of Artificial Sequence: Synthetic oligonucleotide
ugaguguggcugcuucaga

SEQ ID NO: 1084863 - RNA, 19 nt, Artificial Sequence
  Description of Artificial Sequence: Synthetic oligonucleotide
gguacgccagcugugacag

SEQ ID NO: 1084864 - RNA, 19 nt, Artificial Sequence
  Description of Artificial Sequence: Synthetic oligonucleotide
agccuuuccaggugggaga

SEQ ID NO: 1084865 - RNA, 19 nt, Artificial Sequence
  Description of Artificial Sequence: Synthetic oligonucleotide
cuucauaccuuaucuggaa

SEQ ID NO: 1084866 - RNA, 19 nt, Artificial Sequence
  Description of Artificial Sequence: Synthetic oligonucleotide
caccaagaugaaccuggcg

SEQ ID NO: 1084867 - RNA, 19 nt, Artificial Sequence
  Description of Artificial Sequence: Synthetic oligonucleotide
guauacugaaccccauaaa

SEQ ID NO: 1084868 - RNA, 19 nt, Artificial Sequence
  Description of Artificial Sequence: Synthetic oligonucleotide
aucggagaccagcccacag

SEQ ID NO: 1084869 - RNA, 19 nt, Artificial Sequence
  Description of Artificial Sequence: Synthetic oligonucleotide
gacgccuagaacucugucu

SEQ ID NO: 1084870 - RNA, 19 nt, Artificial Sequence
  Description of Artificial Sequence: Synthetic oligonucleotide
aaggcacuagagagcauca

SEQ ID NO: 1084871 - RNA, 19 nt, Artificial Sequence
  Description of Artificial Sequence: Synthetic oligonucleotide
ugggguaccccuccccaga

SEQ ID NO: 1084872 - RNA, 19 nt, Artificial Sequence
  Description of Artificial Sequence: Synthetic oligonucleotide
aagccccacccucccacag

SEQ ID NO: 1084873 - RNA, 19 nt, Artificial Sequence
  Description of Artificial Sequence: Synthetic oligonucleotide
uuggucgggucccuuccca

SEQ ID NO: 1084874 - RNA, 19 nt, Artificial Sequence
  Description of Artificial Sequence: Synthetic oligonucleotide
ugcgcuuuucugugagugu

SEQ ID NO: 1084875 - RNA, 19 nt, Artificial Sequence
  Description of Artificial Sequence: Synthetic oligonucleotide
acgcuugcgcuuuucugug

SEQ ID NO: 1084876 - RNA, 19 nt, Artificial Sequence
  Description of Artificial Sequence: Synthetic oligonucleotide
cugcaacaccaccucuucg

SEQ ID NO: 1084877 - RNA, 19 nt, Artificial Sequence
  Description of Artificial Sequence: Synthetic oligonucleotide
gaccuagcaucggagacca

SEQ ID NO: 1084878 - RNA, 19 nt, Artificial Sequence
  Description of Artificial Sequence: Synthetic oligonucleotide
aaggcaguucggagccagc

SEQ ID NO: 1084879 - RNA, 19 nt, Artificial Sequence
  Description of Artificial Sequence: Synthetic oligonucleotide
caucuucucguaacagcuc

SEQ ID NO: 1084880 - RNA, 19 nt, Artificial Sequence
  Description of Artificial Sequence: Synthetic oligonucleotide
ugcguaccagccacauucu

SEQ ID NO: 1084881 - RNA, 19 nt, Artificial Sequence
  Description of Artificial Sequence: Synthetic oligonucleotide
acuaugcugucccgguaga

SEQ ID NO: 1084882 - RNA, 19 nt, Artificial Sequence
  Description of Artificial Sequence: Synthetic oligonucleotide
agcauuuauucaggagcag

SEQ ID NO: 1084883 - RNA, 19 nt, Artificial Sequence
  Description of Artificial Sequence: Synthetic oligonucleotide
gguagagguuauguuugcg

SEQ ID NO: 1084884 - RNA, 19 nt, Artificial Sequence
  Description of Artificial Sequence: Synthetic oligonucleotide
ucuuuccaucacagauccc

SEQ ID NO: 1084885 - RNA, 19 nt, Artificial Sequence
  Description of Artificial Sequence: Synthetic oligonucleotide
uggacacuugcuccccagu

SEQ ID NO: 1084886 - RNA, 19 nt, Artificial Sequence
  Description of Artificial Sequence: Synthetic oligonucleotide
agcgcagcauccaacagaa

SEQ ID NO: 1084887 - RNA, 19 nt, Artificial Sequence
  Description of Artificial Sequence: Synthetic oligonucleotide
auaccuuaucuggaaggga

SEQ ID NO: 1084888 - RNA, 19 nt, Artificial Sequence
  Description of Artificial Sequence: Synthetic oligonucleotide
caccucuucguauguguuc

SEQ ID NO: 1084889 - RNA, 19 nt, Artificial Sequence
  Description of Artificial Sequence: Synthetic oligonucleotide
cauaaagaggaagcccuca

SEQ ID NO: 1084890 - RNA, 19 nt, Artificial Sequence
  Description of Artificial Sequence: Synthetic oligonucleotide
gaagcguggcagcuccgac

SEQ ID NO: 1084891 - RNA, 19 nt, Artificial Sequence
  Description of Artificial Sequence: Synthetic oligonucleotide
aaccuggcgaaguccucaa

SEQ ID NO: 1084892 - RNA, 19 nt, Artificial Sequence
  Description of Artificial Sequence: Synthetic oligonucleotide
ggcacuagagagcaucaga

SEQ ID NO: 1084893 - RNA, 19 nt, Artificial Sequence
  Description of Artificial Sequence: Synthetic oligonucleotide
gaaccuggcgaaguccuca

SEQ ID NO: 1084894 - RNA, 19 nt, Artificial Sequence
  Description of Artificial Sequence: Synthetic oligonucleotide
agcguggcagcuccgacuu

SEQ ID NO: 1084895 - RNA, 19 nt, Artificial Sequence
  Description of Artificial Sequence: Synthetic oligonucleotide
ccgguagagguuauguuug

SEQ ID NO: 1084896 - RNA, 19 nt, Artificial Sequence
  Description of Artificial Sequence: Synthetic oligonucleotide
uggucgggucccuucccag

SEQ ID NO: 1084897 - RNA, 19 nt, Artificial Sequence
  Description of Artificial Sequence: Synthetic oligonucleotide
uggaagcguggcagcuccg

SEQ ID NO: 1084898 - RNA, 19 nt, Artificial Sequence
  Description of Artificial Sequence: Synthetic oligonucleotide
cauccuggccucaaucgga

SEQ ID NO: 1084899 - RNA, 19 nt, Artificial Sequence
  Description of Artificial Sequence: Synthetic oligonucleotide
guggugaggaggccucgag

SEQ ID NO: 1084900 - RNA, 19 nt, Artificial Sequence
  Description of Artificial Sequence: Synthetic oligonucleotide
ugacacuguccggggaugc

SEQ ID NO: 1084901 - RNA, 19 nt, Artificial Sequence
  Description of Artificial Sequence: Synthetic oligonucleotide
cuuguacacuccccuauaa

SEQ ID NO: 1084902 - RNA, 19 nt, Artificial Sequence
  Description of Artificial Sequence: Synthetic oligonucleotide
gaggacgccuagaacucug

SEQ ID NO: 1084903 - RNA, 19 nt, Artificial Sequence
  Description of Artificial Sequence: Synthetic oligonucleotide
gaaguggcccagcgcagca

SEQ ID NO: 1084904 - RNA, 19 nt, Artificial Sequence
  Description of Artificial Sequence: Synthetic oligonucleotide
cuguucgccccagucaaug

SEQ ID NO: 1084905 - RNA, 19 nt, Artificial Sequence
  Description of Artificial Sequence: Synthetic oligonucleotide
cacccucccacagcaauag

SEQ ID NO: 1084906 - RNA, 19 nt, Artificial Sequence
  Description of Artificial Sequence: Synthetic oligonucleotide
agagagcaucagaagaaau

SEQ ID NO: 1084907 - RNA, 19 nt, Artificial Sequence
  Description of Artificial Sequence: Synthetic oligonucleotide
ggggcaguaacagguauac

SEQ ID NO: 1084908 - RNA, 19 nt, Artificial Sequence
  Description of Artificial Sequence: Synthetic oligonucleotide
cucaaucggacacucccaa

SEQ ID NO: 1084909 - RNA, 19 nt, Artificial Sequence
  Description of Artificial Sequence: Synthetic oligonucleotide
ggcauugggugucccugcg

SEQ ID NO: 1084910 - RNA, 19 nt, Artificial Sequence
  Description of Artificial Sequence: Synthetic oligonucleotide
gcagguguagguugggguc

SEQ ID NO: 1084911 - RNA, 19 nt, Artificial Sequence
  Description of Artificial Sequence: Synthetic oligonucleotide
cacgcuugcgcuuuucugu

SEQ ID NO: 1084912 - RNA, 19 nt, Artificial Sequence
  Description of Artificial Sequence: Synthetic oligonucleotide
cuaugcugucccgguagag

SEQ ID NO: 1084913 - RNA, 19 nt, Artificial Sequence
  Description of Artificial Sequence: Synthetic oligonucleotide
gcagaacuaugcugucccg

SEQ ID NO: 1084914 - RNA, 19 nt, Artificial Sequence
  Description of Artificial Sequence: Synthetic oligonucleotide
ccauccuggccucaaucgg

SEQ ID NO: 1084915 - RNA, 19 nt, Artificial Sequence
  Description of Artificial Sequence: Synthetic oligonucleotide
ggcucuccuggacaggggc

SEQ ID NO: 1084916 - RNA, 19 nt, Artificial Sequence
  Description of Artificial Sequence: Synthetic oligonucleotide
agcaaguccauuggacaaa

SEQ ID NO: 1084917 - RNA, 19 nt, Artificial Sequence
  Description of Artificial Sequence: Synthetic oligonucleotide
cagcgcagcauccaacaga

SEQ ID NO: 1084918 - RNA, 19 nt, Artificial Sequence
  Description of Artificial Sequence: Synthetic oligonucleotide
gcuuagggauaucaauguc

SEQ ID NO: 1084919 - RNA, 19 nt, Artificial Sequence
  Description of Artificial Sequence: Synthetic oligonucleotide
ucccgguagagguuauguu

SEQ ID NO: 1084920 - RNA, 19 nt, Artificial Sequence
  Description of Artificial Sequence: Synthetic oligonucleotide
cacauucuaugggccuugg

SEQ ID NO: 1084921 - RNA, 19 nt, Artificial Sequence
  Description of Artificial Sequence: Synthetic oligonucleotide
cauugggugucccugcgua

SEQ ID NO: 1084922 - RNA, 19 nt, Artificial Sequence
  Description of Artificial Sequence: Synthetic oligonucleotide
cacuccccuauaagacccc

SEQ ID NO: 1084923 - RNA, 19 nt, Artificial Sequence
  Description of Artificial Sequence: Synthetic oligonucleotide
ccauuggacaaagaacaug

SEQ ID NO: 1084924 - RNA, 19 nt, Artificial Sequence
  Description of Artificial Sequence: Synthetic oligonucleotide
uagggauaucaauguccau

SEQ ID NO: 1084925 - RNA, 19 nt, Artificial Sequence
  Description of Artificial Sequence: Synthetic oligonucleotide
acggggcaguaacagguau

SEQ ID NO: 1084926 - RNA, 19 nt, Artificial Sequence
  Description of Artificial Sequence: Synthetic oligonucleotide
ggcuuagggauaucaaugu

SEQ ID NO: 1084927 - RNA, 19 nt, Artificial Sequence
  Description of Artificial Sequence: Synthetic oligonucleotide
augcccaaggggugaggcu

SEQ ID NO: 1084928 - RNA, 19 nt, Artificial Sequence
  Description of Artificial Sequence: Synthetic oligonucleotide
aggcacuagagagcaucag

SEQ ID NO: 1084929 - RNA, 19 nt, Artificial Sequence
  Description of Artificial Sequence: Synthetic oligonucleotide
gcaguucggagccagccuc

SEQ ID NO: 1084930 - RNA, 19 nt, Artificial Sequence
  Description of Artificial Sequence: Synthetic oligonucleotide
ugcgcacagagcugcuguc

SEQ ID NO: 1084931 - RNA, 19 nt, Artificial Sequence
  Description of Artificial Sequence: Synthetic oligonucleotide
gcacuagagagcaucagaa

SEQ ID NO: 1084932 - RNA, 19 nt, Artificial Sequence
  Description of Artificial Sequence: Synthetic oligonucleotide
ucccuuguacacuccccua

SEQ ID NO: 1084933 - RNA, 19 nt, Artificial Sequence
  Description of Artificial Sequence: Synthetic oligonucleotide
agcauccaacagaagccug

SEQ ID NO: 1084934 - RNA, 19 nt, Artificial Sequence
  Description of Artificial Sequence: Synthetic oligonucleotide
gacacuuccccugcacaaa

SEQ ID NO: 1084935 - RNA, 19 nt, Artificial Sequence
  Description of Artificial Sequence: Synthetic oligonucleotide
agaaucucuugcgcacaga

SEQ ID NO: 1084936 - RNA, 19 nt, Artificial Sequence
  Description of Artificial Sequence: Synthetic oligonucleotide
agaggacgccuagaacucu

SEQ ID NO: 1084937 - RNA, 19 nt, Artificial Sequence
  Description of Artificial Sequence: Synthetic oligonucleotide
gacacgcuugcgcuuuucu

SEQ ID NO: 1084938 - RNA, 19 nt, Artificial Sequence
  Description of Artificial Sequence: Synthetic oligonucleotide
gugacacuguccggggaug

SEQ ID NO: 1084939 - RNA, 19 nt, Artificial Sequence
  Description of Artificial Sequence: Synthetic oligonucleotide
ggacacuuccccugcacaa

SEQ ID NO: 1084940 - RNA, 19 nt, Artificial Sequence
  Description of Artificial Sequence: Synthetic oligonucleotide
caggugaaggcaguucgga

SEQ ID NO: 1084941 - RNA, 19 nt, Artificial Sequence
  Description of Artificial Sequence: Synthetic oligonucleotide
ccaagacaauccagcuucc

SEQ ID NO: 1084942 - RNA, 19 nt, Artificial Sequence
  Description of Artificial Sequence: Synthetic oligonucleotide
ccucaaaaucagaccuagc

SEQ ID NO: 1084943 - RNA, 19 nt, Artificial Sequence
  Description of Artificial Sequence: Synthetic oligonucleotide
gguuauguuugcgcugcac

SEQ ID NO: 1084944 - RNA, 19 nt, Artificial Sequence
  Description of Artificial Sequence: Synthetic oligonucleotide
ccaucuucucguaacagcu

SEQ ID NO: 1084945 - RNA, 19 nt, Artificial Sequence
  Description of Artificial Sequence: Synthetic oligonucleotide
cccagagaugagcccauag

SEQ ID NO: 1084946 - RNA, 19 nt, Artificial Sequence
  Description of Artificial Sequence: Synthetic oligonucleotide
agguuauguuugcgcugca

SEQ ID NO: 1084947 - RNA, 19 nt, Artificial Sequence
  Description of Artificial Sequence: Synthetic oligonucleotide
gugguacgccagcugugac

SEQ ID NO: 1084948 - RNA, 19 nt, Artificial Sequence
  Description of Artificial Sequence: Synthetic oligonucleotide
gaaccccauaaagugacuu

SEQ ID NO: 1084949 - RNA, 19 nt, Artificial Sequence
  Description of Artificial Sequence: Synthetic oligonucleotide
ggucgggucccuucccagc

SEQ ID NO: 1084950 - RNA, 19 nt, Artificial Sequence
  Description of Artificial Sequence: Synthetic oligonucleotide
ggguaagccagacccugga

SEQ ID NO: 1084951 - RNA, 19 nt, Artificial Sequence
  Description of Artificial Sequence: Synthetic oligonucleotide
ccaccaagaugaaccuggc

SEQ ID NO: 1084952 - RNA, 19 nt, Artificial Sequence
  Description of Artificial Sequence: Synthetic oligonucleotide
gcaacagugccucccggaa

SEQ ID NO: 1084953 - RNA, 19 nt, Artificial Sequence
  Description of Artificial Sequence: Synthetic oligonucleotide
gggcauugggugucccugc

SEQ ID NO: 1084954 - RNA, 19 nt, Artificial Sequence
  Description of Artificial Sequence: Synthetic oligonucleotide
gggacggcuaccagggcug

SEQ ID NO: 1084955 - RNA, 19 nt, Artificial Sequence
  Description of Artificial Sequence: Synthetic oligonucleotide
ucgggucccuucccagcuc

SEQ ID NO: 1084956 - RNA, 19 nt, Artificial Sequence
  Description of Artificial Sequence: Synthetic oligonucleotide
ggugguacgccagcuguga

SEQ ID NO: 1084957 - RNA, 19 nt, Artificial Sequence
  Description of Artificial Sequence: Synthetic oligonucleotide
caguucggagccagccuca

SEQ ID NO: 1084958 - RNA, 19 nt, Artificial Sequence
  Description of Artificial Sequence: Synthetic oligonucleotide
cagccucaaaaggcagccc

SEQ ID NO: 1084959 - RNA, 19 nt, Artificial Sequence
  Description of Artificial Sequence: Synthetic oligonucleotide
gggguaccccuccccagag

SEQ ID NO: 1084960 - RNA, 19 nt, Artificial Sequence
  Description of Artificial Sequence: Synthetic oligonucleotide
gguaccccuccccagagau

SEQ ID NO: 1084961 - RNA, 19 nt, Artificial Sequence
  Description of Artificial Sequence: Synthetic oligonucleotide
gcuccgacuugcagguggg

SEQ ID NO: 1084962 - RNA, 19 nt, Artificial Sequence
  Description of Artificial Sequence: Synthetic oligonucleotide
ucgccgcuguccccauacu

SEQ ID NO: 1084963 - RNA, 19 nt, Artificial Sequence
  Description of Artificial Sequence: Synthetic oligonucleotide
cuguccggggaugcaggug

SEQ ID NO: 1084964 - RNA, 19 nt, Artificial Sequence
  Description of Artificial Sequence: Synthetic oligonucleotide
aggacgccuagaacucugu

SEQ ID NO: 1084965 - RNA, 19 nt, Artificial Sequence
  Description of Artificial Sequence: Synthetic oligonucleotide
gucgggucccuucccagcu

SEQ ID NO: 1084966 - RNA, 19 nt, Artificial Sequence
  Description of Artificial Sequence: Synthetic oligonucleotide
ggacgccuagaacucuguc

SEQ ID NO: 1084967 - RNA, 19 nt, Artificial Sequence
  Description of Artificial Sequence: Synthetic oligonucleotide
ccucgaggacugcuauggg

SEQ ID NO: 1084968 - RNA, 19 nt, Artificial Sequence
  Description of Artificial Sequence: Synthetic oligonucleotide
ggggugguacgccagcugu

SEQ ID NO: 1084969 - RNA, 19 nt, Artificial Sequence
  Description of Artificial Sequence: Synthetic oligonucleotide
cacagaucccuuguacacu

SEQ ID NO: 1084970 - RNA, 19 nt, Artificial Sequence
  Description of Artificial Sequence: Synthetic oligonucleotide
cagugacacuguccgggga

SEQ ID NO: 1084971 - RNA, 19 nt, Artificial Sequence
  Description of Artificial Sequence: Synthetic oligonucleotide
aguucggagccagccucaa

SEQ ID NO: 1084972 - RNA, 19 nt, Artificial Sequence
  Description of Artificial Sequence: Synthetic oligonucleotide
gagcagaagcuuacacagu

SEQ ID NO: 1084973 - RNA, 19 nt, Artificial Sequence
  Description of Artificial Sequence: Synthetic oligonucleotide
caagccccacccucccaca

SEQ ID NO: 1084974 - RNA, 19 nt, Artificial Sequence
  Description of Artificial Sequence: Synthetic oligonucleotide
gcaucggagaccagcccac

SEQ ID NO: 1084975 - RNA, 19 nt, Artificial Sequence
  Description of Artificial Sequence: Synthetic oligonucleotide
ggggacggcuaccagggcu

SEQ ID NO: 1084976 - RNA, 19 nt, Artificial Sequence
  Description of Artificial Sequence: Synthetic oligonucleotide
guacgccagcugugacagc

SEQ ID NO: 1084977 - RNA, 19 nt, Artificial Sequence
  Description of Artificial Sequence: Synthetic oligonucleotide
ggaagcguggcagcuccga

SEQ ID NO: 1084978 - RNA, 19 nt, Artificial Sequence
  Description of Artificial Sequence: Synthetic oligonucleotide
cagucaaugggugcacccu

SEQ ID NO: 1084979 - RNA, 19 nt, Artificial Sequence
  Description of Artificial Sequence: Synthetic oligonucleotide
ggaagcccucaaaaucaga

SEQ ID NO: 1084980 - RNA, 19 nt, Artificial Sequence
  Description of Artificial Sequence: Synthetic oligonucleotide
cuggggcauuggguguccc

SEQ ID NO: 1084981 - RNA, 19 nt, Artificial Sequence
  Description of Artificial Sequence: Synthetic oligonucleotide
augagcccauagugcccaa

SEQ ID NO: 1084982 - RNA, 19 nt, Artificial Sequence
  Description of Artificial Sequence: Synthetic oligonucleotide
acuguucgccccagucaau

SEQ ID NO: 1084983 - RNA, 19 nt, Artificial Sequence
  Description of Artificial Sequence: Synthetic oligonucleotide
cccgguagagguuauguuu

SEQ ID NO: 1084984 - RNA, 19 nt, Artificial Sequence
  Description of Artificial Sequence: Synthetic oligonucleotide
ggcaguucggagccagccu

SEQ ID NO: 1084985 - RNA, 19 nt, Artificial Sequence
  Description of Artificial Sequence: Synthetic oligonucleotide
caucggagaccagcccaca

SEQ ID NO: 1084986 - RNA, 19 nt, Artificial Sequence
  Description of Artificial Sequence: Synthetic oligonucleotide
cgccuagaacucugucugc

SEQ ID NO: 1084987 - RNA, 19 nt, Artificial Sequence
  Description of Artificial Sequence: Synthetic oligonucleotide
gggccccauugagaagggg

SEQ ID NO: 1084988 - RNA, 19 nt, Artificial Sequence
  Description of Artificial Sequence: Synthetic oligonucleotide
gguggugaggaggccucga

SEQ ID NO: 1084989 - RNA, 19 nt, Artificial Sequence
  Description of Artificial Sequence: Synthetic oligonucleotide
ccuuguacacuccccuaua

SEQ ID NO: 1084990 - RNA, 19 nt, Artificial Sequence
  Description of Artificial Sequence: Synthetic oligonucleotide
gccgcuguccccauacugu

SEQ ID NO: 1084991 - RNA, 19 nt, Artificial Sequence
  Description of Artificial Sequence: Synthetic oligonucleotide
cuggccucaaucggacacu

SEQ ID NO: 1084992 - RNA, 19 nt, Artificial Sequence
  Description of Artificial Sequence: Synthetic oligonucleotide
cgccgcuguccccauacug

SEQ ID NO: 1084993 - RNA, 19 nt, Artificial Sequence
  Description of Artificial Sequence: Synthetic oligonucleotide
ggguaccccuccccagaga

SEQ ID NO: 1084994 - RNA, 19 nt, Artificial Sequence
  Description of Artificial Sequence: Synthetic oligonucleotide
cucaaccacccaagacaau

SEQ ID NO: 1084995 - RNA, 19 nt, Artificial Sequence
  Description of Artificial Sequence: Synthetic oligonucleotide
accuagcaucggagaccag

SEQ ID NO: 1084996 - RNA, 19 nt, Artificial Sequence
  Description of Artificial Sequence: Synthetic oligonucleotide
ggggcuccaucuucucgua

SEQ ID NO: 1084997 - RNA, 19 nt, Artificial Sequence
  Description of Artificial Sequence: Synthetic oligonucleotide
cacccucggccagcaggug

SEQ ID NO: 1084998 - RNA, 19 nt, Artificial Sequence
  Description of Artificial Sequence: Synthetic oligonucleotide
gcauugggugucccugcgu

SEQ ID NO: 1084999 - RNA, 19 nt, Artificial Sequence
  Description of Artificial Sequence: Synthetic oligonucleotide
gcguaccagccacauucua

SEQ ID NO: 1085000 - RNA, 19 nt, Artificial Sequence
  Description of Artificial Sequence: Synthetic oligonucleotide
cucggagcucagugacacu

SEQ ID NO: 1085001 - RNA, 19 nt, Artificial Sequence
  Description of Artificial Sequence: Synthetic oligonucleotide
cagcuccgacuugcaggug

SEQ ID NO: 1085002 - RNA, 19 nt, Artificial Sequence
  Description of Artificial Sequence: Synthetic oligonucleotide
cacugggcuuagggauauc

SEQ ID NO: 1085003 - RNA, 19 nt, Artificial Sequence
  Description of Artificial Sequence: Synthetic oligonucleotide
acgccagcugugacagcuu

SEQ ID NO: 1085004 - RNA, 19 nt, Artificial Sequence
  Description of Artificial Sequence: Synthetic oligonucleotide
gcagaagcuuacacaguuu

SEQ ID NO: 1085005 - RNA, 19 nt, Artificial Sequence
  Description of Artificial Sequence: Synthetic oligonucleotide
ccccuugcauaaagaggaa

SEQ ID NO: 1085006 - RNA, 19 nt, Artificial Sequence
  Description of Artificial Sequence: Synthetic oligonucleotide
cguauguguucuccaccaa

SEQ ID NO: 1085007 - RNA, 19 nt, Artificial Sequence
  Description of Artificial Sequence: Synthetic oligonucleotide
gcguggcagcuccgacuug

SEQ ID NO: 1085008 - RNA, 19 nt, Artificial Sequence
  Description of Artificial Sequence: Synthetic oligonucleotide
ccuuuccaggugggagaug

SEQ ID NO: 1085009 - RNA, 19 nt, Artificial Sequence
  Description of Artificial Sequence: Synthetic oligonucleotide
gccacauucuaugggccuu

SEQ ID NO: 1085010 - RNA, 19 nt, Artificial Sequence
  Description of Artificial Sequence: Synthetic oligonucleotide
cggggcaguaacagguaua

SEQ ID NO: 1085011 - RNA, 19 nt, Artificial Sequence
  Description of Artificial Sequence: Synthetic oligonucleotide
ccuugggcccaugcuugga

SEQ ID NO: 1085012 - RNA, 19 nt, Artificial Sequence
  Description of Artificial Sequence: Synthetic oligonucleotide
caucgccgcuguccccaua

SEQ ID NO: 1085013 - RNA, 19 nt, Artificial Sequence
  Description of Artificial Sequence: Synthetic oligonucleotide
ccgcuguccccauacuguu

SEQ ID NO: 1085014 - RNA, 19 nt, Artificial Sequence
  Description of Artificial Sequence: Synthetic oligonucleotide
cuaugggccuugggcccau

SEQ ID NO: 1085015 - RNA, 19 nt, Artificial Sequence
  Description of Artificial Sequence: Synthetic oligonucleotide
cccugcguaccagccacau

SEQ ID NO: 1085016 - RNA, 19 nt, Artificial Sequence
  Description of Artificial Sequence: Synthetic oligonucleotide
ccaucgccgcuguccccau

SEQ ID NO: 1085017 - RNA, 19 nt, Artificial Sequence
  Description of Artificial Sequence: Synthetic oligonucleotide
ugaauugaaguuaagaugg

SEQ ID NO: 1085018 - RNA, 19 nt, Artificial Sequence
  Description of Artificial Sequence: Synthetic oligonucleotide
ucuauuacuaguuuaaaag

SEQ ID NO: 1085019 - RNA, 19 nt, Artificial Sequence
  Description of Artificial Sequence: Synthetic oligonucleotide
aauaacuuaguucacacca

SEQ ID NO: 1085020 - RNA, 19 nt, Artificial Sequence
  Description of Artificial Sequence: Synthetic oligonucleotide
ucaaguuacaccaagauuc

SEQ ID NO: 1085021 - RNA, 19 nt, Artificial Sequence
  Description of Artificial Sequence: Synthetic oligonucleotide
aaauuuaugcagcaauaac

SEQ ID NO: 1085022 - RNA, 19 nt, Artificial Sequence
  Description of Artificial Sequence: Synthetic oligonucleotide
uuggauaagaaccuaacag

SEQ ID NO: 1085023 - RNA, 19 nt, Artificial Sequence
  Description of Artificial Sequence: Synthetic oligonucleotide
uuguauacaacugaggagg

SEQ ID NO: 1085024 - RNA, 19 nt, Artificial Sequence
  Description of Artificial Sequence: Synthetic oligonucleotide
aauagguacaguuuaacau

SEQ ID NO: 1085025 - RNA, 19 nt, Artificial Sequence
  Description of Artificial Sequence: Synthetic oligonucleotide
aaucaaaagcccgugaagg

SEQ ID NO: 1085026 - RNA, 19 nt, Artificial Sequence
  Description of Artificial Sequence: Synthetic oligonucleotide
agaauaaacagguagcgug

SEQ ID NO: 1085027 - RNA, 19 nt, Artificial Sequence
  Description of Artificial Sequence: Synthetic oligonucleotide
aaaagaugaacagaccagg

SEQ ID NO: 1085028 - RNA, 19 nt, Artificial Sequence
  Description of Artificial Sequence: Synthetic oligonucleotide
gaugaaaagaugaacagac

SEQ ID NO: 1085029 - RNA, 19 nt, Artificial Sequence
  Description of Artificial Sequence: Synthetic oligonucleotide
uaaacauaugcuaccauca

SEQ ID NO: 1085030 - RNA, 19 nt, Artificial Sequence
  Description of Artificial Sequence: Synthetic oligonucleotide
uucuauacuauuugaaggc

SEQ ID NO: 1085031 - RNA, 19 nt, Artificial Sequence
  Description of Artificial Sequence: Synthetic oligonucleotide
uuagacucaaauuugcaga

SEQ ID NO: 1085032 - RNA, 19 nt, Artificial Sequence
  Description of Artificial Sequence: Synthetic oligonucleotide
aauuauacacaacaacgau

SEQ ID NO: 1085033 - RNA, 19 nt, Artificial Sequence
  Description of Artificial Sequence: Synthetic oligonucleotide
aaguuaagauggaagagac

SEQ ID NO: 1085034 - RNA, 19 nt, Artificial Sequence
  Description of Artificial Sequence: Synthetic oligonucleotide
gauacacaagcuuuuguag

SEQ ID NO: 1085035 - RNA, 19 nt, Artificial Sequence
  Description of Artificial Sequence: Synthetic oligonucleotide
uugauaaaauagaaguaug

SEQ ID NO: 1085036 - RNA, 19 nt, Artificial Sequence
  Description of Artificial Sequence: Synthetic oligonucleotide
agaaaauucuauuacuagu

SEQ ID NO: 1085037 - RNA, 19 nt, Artificial Sequence
  Description of Artificial Sequence: Synthetic oligonucleotide
ugcaguacaacuuguauac

SEQ ID NO: 1085038 - RNA, 19 nt, Artificial Sequence
  Description of Artificial Sequence: Synthetic oligonucleotide
acagguagcgugcagcugc

SEQ ID NO: 1085039 - RNA, 19 nt, Artificial Sequence
  Description of Artificial Sequence: Synthetic oligonucleotide
ugggagguaaauuauacac

SEQ ID NO: 1085040 - RNA, 19 nt, Artificial Sequence
  Description of Artificial Sequence: Synthetic oligonucleotide
auugugaagucacaauagg

SEQ ID NO: 1085041 - RNA, 19 nt, Artificial Sequence
  Description of Artificial Sequence: Synthetic oligonucleotide
cugaauugaaguuaagaug

SEQ ID NO: 1085042 - RNA, 19 nt, Artificial Sequence
  Description of Artificial Sequence: Synthetic oligonucleotide
auacacaagcuuuuguagg

SEQ ID NO: 1085043 - RNA, 19 nt, Artificial Sequence
  Description of Artificial Sequence: Synthetic oligonucleotide
aaauuauacacaacaacga

SEQ ID NO: 1085044 - RNA, 19 nt, Artificial Sequence
  Description of Artificial Sequence: Synthetic oligonucleotide
uuaaaagguaguuugcaaa

SEQ ID NO: 1085045 - RNA, 19 nt, Artificial Sequence
  Description of Artificial Sequence: Synthetic oligonucleotide
uauuacuaguuuaaaagua

SEQ ID NO: 1085046 - RNA, 19 nt, Artificial Sequence
  Description of Artificial Sequence: Synthetic oligonucleotide
uggauaagaaccuaacagu

SEQ ID NO: 1085047 - RNA, 19 nt, Artificial Sequence
  Description of Artificial Sequence: Synthetic oligonucleotide
uauuaugaaucauuccagc

SEQ ID NO: 1085048 - RNA, 19 nt, Artificial Sequence
  Description of Artificial Sequence: Synthetic oligonucleotide
aacaacgaugaaaagauga

SEQ ID NO: 1085049 - RNA, 19 nt, Artificial Sequence
  Description of Artificial Sequence: Synthetic oligonucleotide
auugcuaauacugcggcac

SEQ ID NO: 1085050 - RNA, 19 nt, Artificial Sequence
  Description of Artificial Sequence: Synthetic oligonucleotide
uauaauuacucaacugaac

SEQ ID NO: 1085051 - RNA, 19 nt, Artificial Sequence
  Description of Artificial Sequence: Synthetic oligonucleotide
acuccaucgauucugcagg

SEQ ID NO: 1085052 - RNA, 19 nt, Artificial Sequence
  Description of Artificial Sequence: Synthetic oligonucleotide
uuaaucaaaagcccgugaa

SEQ ID NO: 1085053 - RNA, 19 nt, Artificial Sequence
  Description of Artificial Sequence: Synthetic oligonucleotide
cauaugugggacuccaucg

SEQ ID NO: 1085054 - RNA, 19 nt, Artificial Sequence
  Description of Artificial Sequence: Synthetic oligonucleotide
uuuggauaagaaccuaaca

SEQ ID NO: 1085055 - RNA, 19 nt, Artificial Sequence
  Description of Artificial Sequence: Synthetic oligonucleotide
aaacauaugcuaccaucag

SEQ ID NO: 1085056 - RNA, 19 nt, Artificial Sequence
  Description of Artificial Sequence: Synthetic oligonucleotide
gauggugcaccacugaccc

SEQ ID NO: 1085057 - RNA, 19 nt, Artificial Sequence
  Description of Artificial Sequence: Synthetic oligonucleotide
aagaugaacagaccaggug

SEQ ID NO: 1085058 - RNA, 19 nt, Artificial Sequence
  Description of Artificial Sequence: Synthetic oligonucleotide
aacuuaguucacaccaugc

SEQ ID NO: 1085059 - RNA, 19 nt, Artificial Sequence
  Description of Artificial Sequence: Synthetic oligonucleotide
agaauuuacuuguauauuu

SEQ ID NO: 1085060 - RNA, 19 nt, Artificial Sequence
  Description of Artificial Sequence: Synthetic oligonucleotide
uauacaacugaggagguga

SEQ ID NO: 1085061 - RNA, 19 nt, Artificial Sequence
  Description of Artificial Sequence: Synthetic oligonucleotide
ugucuauuaugaaucauuc

SEQ ID NO: 1085062 - RNA, 19 nt, Artificial Sequence
  Description of Artificial Sequence: Synthetic oligonucleotide
aauauaacugcguuccauu

SEQ ID NO: 1085063 - RNA, 19 nt, Artificial Sequence
  Description of Artificial Sequence: Synthetic oligonucleotide
cuugcaaucgcuugaaauc

SEQ ID NO: 1085064 - RNA, 19 nt, Artificial Sequence
  Description of Artificial Sequence: Synthetic oligonucleotide
acaacuuguauacaacuga

SEQ ID NO: 1085065 - RNA, 19 nt, Artificial Sequence
  Description of Artificial Sequence: Synthetic oligonucleotide
cuaaacauaugcuaccauc

SEQ ID NO: 1085066 - RNA, 19 nt, Artificial Sequence
  Description of Artificial Sequence: Synthetic oligonucleotide
cuuguauacaacugaggag

SEQ ID NO: 1085067 - RNA, 19 nt, Artificial Sequence
  Description of Artificial Sequence: Synthetic oligonucleotide
auugaaguuaagauggaag

SEQ ID NO: 1085068 - RNA, 19 nt, Artificial Sequence
  Description of Artificial Sequence: Synthetic oligonucleotide
uuuuggauaagaaccuaac

SEQ ID NO: 1085069 - RNA, 19 nt, Artificial Sequence
  Description of Artificial Sequence: Synthetic oligonucleotide
uauaacugcguuccauugc

SEQ ID NO: 1085070 - RNA, 19 nt, Artificial Sequence
  Description of Artificial Sequence: Synthetic oligonucleotide
uuuguagguucuaaacuga

SEQ ID NO: 1085071 - RNA, 19 nt, Artificial Sequence
  Description of Artificial Sequence: Synthetic oligonucleotide
uguagguucuaaacugaag

SEQ ID NO: 1085072 - RNA, 19 nt, Artificial Sequence
  Description of Artificial Sequence: Synthetic oligonucleotide
uguauuagcuuucuacaau

SEQ ID NO: 1085073 - RNA, 19 nt, Artificial Sequence
  Description of Artificial Sequence: Synthetic oligonucleotide
uucuuaaucaaaagcccgu

SEQ ID NO: 1085074 - RNA, 19 nt, Artificial Sequence
  Description of Artificial Sequence: Synthetic oligonucleotide
uuggcuauuugcuggacug

SEQ ID NO: 1085075 - RNA, 19 nt, Artificial Sequence
  Description of Artificial Sequence: Synthetic oligonucleotide
uugugaagucacaauaggu

SEQ ID NO: 1085076 - RNA, 19 nt, Artificial Sequence
  Description of Artificial Sequence: Synthetic oligonucleotide
aaacccguggcacuuaaaa

SEQ ID NO: 1085077 - RNA, 19 nt, Artificial Sequence
  Description of Artificial Sequence: Synthetic oligonucleotide
aggauagcuuuguauuagc

SEQ ID NO: 1085078 - RNA, 19 nt, Artificial Sequence
  Description of Artificial Sequence: Synthetic oligonucleotide
aaucgcuugaaaucccgca

SEQ ID NO: 1085079 - RNA, 19 nt, Artificial Sequence
  Description of Artificial Sequence: Synthetic oligonucleotide
aacuaagaugcaguacaac

SEQ ID NO: 1085080 - RNA, 19 nt, Artificial Sequence
  Description of Artificial Sequence: Synthetic oligonucleotide
auuauacacaacaacgaug

SEQ ID NO: 1085081 - RNA, 19 nt, Artificial Sequence
  Description of Artificial Sequence: Synthetic oligonucleotide
uguguauauucugucauga

SEQ ID NO: 1085082 - RNA, 19 nt, Artificial Sequence
  Description of Artificial Sequence: Synthetic oligonucleotide
ucaaauuugcagacuuucu

SEQ ID NO: 1085083 - RNA, 19 nt, Artificial Sequence
  Description of Artificial Sequence: Synthetic oligonucleotide
acaacaacgaugaaaagau

SEQ ID NO: 1085084 - RNA, 19 nt, Artificial Sequence
  Description of Artificial Sequence: Synthetic oligonucleotide
ugguucaacagaauuuacu

SEQ ID NO: 1085085 - RNA, 19 nt, Artificial Sequence
  Description of Artificial Sequence: Synthetic oligonucleotide
uaacuuaguucacaccaug

SEQ ID NO: 1085086 - RNA, 19 nt, Artificial Sequence
  Description of Artificial Sequence: Synthetic oligonucleotide
gaagucacaauagguacag

SEQ ID NO: 1085087 - RNA, 19 nt, Artificial Sequence
  Description of Artificial Sequence: Synthetic oligonucleotide
cucaaaccaacacaaccgg

SEQ ID NO: 1085088 - RNA, 19 nt, Artificial Sequence
  Description of Artificial Sequence: Synthetic oligonucleotide
auaacugcguuccauugca

SEQ ID NO: 1085089 - RNA, 19 nt, Artificial Sequence
  Description of Artificial Sequence: Synthetic oligonucleotide
gaaguaugaucuucugcag

SEQ ID NO: 1085090 - RNA, 19 nt, Artificial Sequence
  Description of Artificial Sequence: Synthetic oligonucleotide
aauggccgaaacucucuuc

SEQ ID NO: 1085091 - RNA, 19 nt, Artificial Sequence
  Description of Artificial Sequence: Synthetic oligonucleotide
uccugcacagauaaggaaa

SEQ ID NO: 1085092 - RNA, 19 nt, Artificial Sequence
  Description of Artificial Sequence: Synthetic oligonucleotide
aacuuguauacaacugagg

SEQ ID NO: 1085093 - RNA, 19 nt, Artificial Sequence
  Description of Artificial Sequence: Synthetic oligonucleotide
aucacugugggucgccgcc

SEQ ID NO: 1085094 - RNA, 19 nt, Artificial Sequence
  Description of Artificial Sequence: Synthetic oligonucleotide
aacugguggagaguuagag

SEQ ID NO: 1085095 - RNA, 19 nt, Artificial Sequence
  Description of Artificial Sequence: Synthetic oligonucleotide
gaagcaacucggcaggccc

SEQ ID NO: 1085096 - RNA, 19 nt, Artificial Sequence
  Description of Artificial Sequence: Synthetic oligonucleotide
uuaacaaguggcccaaaua

SEQ ID NO: 1085097 - RNA, 19 nt, Artificial Sequence
  Description of Artificial Sequence: Synthetic oligonucleotide
caaaagcccgugaaggugc

SEQ ID NO: 1085098 - RNA, 19 nt, Artificial Sequence
  Description of Artificial Sequence: Synthetic oligonucleotide
gaggugagaagcaacucgg

SEQ ID NO: 1085099 - RNA, 19 nt, Artificial Sequence
  Description of Artificial Sequence: Synthetic oligonucleotide
gauaagaaccuaacaguug

SEQ ID NO: 1085100 - RNA, 19 nt, Artificial Sequence
  Description of Artificial Sequence: Synthetic oligonucleotide
auucaaguuacaccaagau

SEQ ID NO: 1085101 - RNA, 19 nt, Artificial Sequence
  Description of Artificial Sequence: Synthetic oligonucleotide
uugcagacuuucuugauaa

SEQ ID NO: 1085102 - RNA, 19 nt, Artificial Sequence
  Description of Artificial Sequence: Synthetic oligonucleotide
aaggcauucaauauuugaa

SEQ ID NO: 1085103 - RNA, 19 nt, Artificial Sequence
  Description of Artificial Sequence: Synthetic oligonucleotide
uacacaagcuuuuguaggu

SEQ ID NO: 1085104 - RNA, 19 nt, Artificial Sequence
  Description of Artificial Sequence: Synthetic oligonucleotide
uuaaaaguaccaucuucaa

SEQ ID NO: 1085105 - RNA, 19 nt, Artificial Sequence
  Description of Artificial Sequence: Synthetic oligonucleotide
acugggagguaaauuauac

SEQ ID NO: 1085106 - RNA, 19 nt, Artificial Sequence
  Description of Artificial Sequence: Synthetic oligonucleotide
aacugcguuccauugcaug

SEQ ID NO: 1085107 - RNA, 19 nt, Artificial Sequence
  Description of Artificial Sequence: Synthetic oligonucleotide
uugcaaucgcuugaaaucc

SEQ ID NO: 1085108 - RNA, 19 nt, Artificial Sequence
  Description of Artificial Sequence: Synthetic oligonucleotide
ccaaauauaacugcguucc

SEQ ID NO: 1085109 - RNA, 19 nt, Artificial Sequence
  Description of Artificial Sequence: Synthetic oligonucleotide
ucauaugugggacuccauc

SEQ ID NO: 1085110 - RNA, 19 nt, Artificial Sequence
  Description of Artificial Sequence: Synthetic oligonucleotide
auucugucaugaaaacucc

SEQ ID NO: 1085111 - RNA, 19 nt, Artificial Sequence
  Description of Artificial Sequence: Synthetic oligonucleotide
gauucugcaggauaucuaa

SEQ ID NO: 1085112 - RNA, 19 nt, Artificial Sequence
  Description of Artificial Sequence: Synthetic oligonucleotide
agauacacaagcuuuugua

SEQ ID NO: 1085113 - RNA, 19 nt, Artificial Sequence
  Description of Artificial Sequence: Synthetic oligonucleotide
acuuaguucacaccaugca

SEQ ID NO: 1085114 - RNA, 19 nt, Artificial Sequence
  Description of Artificial Sequence: Synthetic oligonucleotide
aacaauggccgaaacucuc

SEQ ID NO: 1085115 - RNA, 19 nt, Artificial Sequence
  Description of Artificial Sequence: Synthetic oligonucleotide
agucacaauagguacaguu

SEQ ID NO: 1085116 - RNA, 19 nt, Artificial Sequence
  Description of Artificial Sequence: Synthetic oligonucleotide
uaaauggugaugguuuuac

SEQ ID NO: 1085117 - RNA, 19 nt, Artificial Sequence
  Description of Artificial Sequence: Synthetic oligonucleotide
guuagagacuucucagucc

SEQ ID NO: 1085118 - RNA, 19 nt, Artificial Sequence
  Description of Artificial Sequence: Synthetic oligonucleotide
augaaaagaugaacagacc

SEQ ID NO: 1085119 - RNA, 19 nt, Artificial Sequence
  Description of Artificial Sequence: Synthetic oligonucleotide
ugcaggauaucuaaacaua

SEQ ID NO: 1085120 - RNA, 19 nt, Artificial Sequence
  Description of Artificial Sequence: Synthetic oligonucleotide
aguaugaucuucugcaguu

SEQ ID NO: 1085121 - RNA, 19 nt, Artificial Sequence
  Description of Artificial Sequence: Synthetic oligonucleotide
uuacuuguauauuuuccau

SEQ ID NO: 1085122 - RNA, 19 nt, Artificial Sequence
  Description of Artificial Sequence: Synthetic oligonucleotide
uuugcagacuuucuugaua

SEQ ID NO: 1085123 - RNA, 19 nt, Artificial Sequence
  Description of Artificial Sequence: Synthetic oligonucleotide
uugcuaauacugcggcacg

SEQ ID NO: 1085124 - RNA, 19 nt, Artificial Sequence
  Description of Artificial Sequence: Synthetic oligonucleotide
cuagccuuucuacugggag

SEQ ID NO: 1085125 - RNA, 19 nt, Artificial Sequence
  Description of Artificial Sequence: Synthetic oligonucleotide
aauacugcggcacggcguu

SEQ ID NO: 1085126 - RNA, 19 nt, Artificial Sequence
  Description of Artificial Sequence: Synthetic oligonucleotide
caaacaacccugcaaugac

SEQ ID NO: 1085127 - RNA, 19 nt, Artificial Sequence
  Description of Artificial Sequence: Synthetic oligonucleotide
ucuuaaucaaaagcccgug

SEQ ID NO: 1085128 - RNA, 19 nt, Artificial Sequence
  Description of Artificial Sequence: Synthetic oligonucleotide
aaaguacauuaaucaagau

SEQ ID NO: 1085129 - RNA, 19 nt, Artificial Sequence
  Description of Artificial Sequence: Synthetic oligonucleotide
cuaauacugcggcacggcg

SEQ ID NO: 1085130 - RNA, 19 nt, Artificial Sequence
  Description of Artificial Sequence: Synthetic oligonucleotide
aauugaaguuaagauggaa

SEQ ID NO: 1085131 - RNA, 19 nt, Artificial Sequence
  Description of Artificial Sequence: Synthetic oligonucleotide
gugacaaagucucuugcac

SEQ ID NO: 1085132 - RNA, 19 nt, Artificial Sequence
  Description of Artificial Sequence: Synthetic oligonucleotide
uaauacugcggcacggcgu

SEQ ID NO: 1085133 - RNA, 19 nt, Artificial Sequence
  Description of Artificial Sequence: Synthetic oligonucleotide
cacggcguuugguaaaugg

SEQ ID NO: 1085134 - RNA, 19 nt, Artificial Sequence
  Description of Artificial Sequence: Synthetic oligonucleotide
aggcauucaauauuugaaa

SEQ ID NO: 1085135 - RNA, 19 nt, Artificial Sequence
  Description of Artificial Sequence: Synthetic oligonucleotide
uguauacaacugaggaggu

SEQ ID NO: 1085136 - RNA, 19 nt, Artificial Sequence
  Description of Artificial Sequence: Synthetic oligonucleotide
acagcuuuacauguaauau

SEQ ID NO: 1085137 - RNA, 19 nt, Artificial Sequence
  Description of Artificial Sequence: Synthetic oligonucleotide
gcucaaaccaacacaaccg

SEQ ID NO: 1085138 - RNA, 19 nt, Artificial Sequence
  Description of Artificial Sequence: Synthetic oligonucleotide
ggaugaaacauuuuggaua

SEQ ID NO: 1085139 - RNA, 19 nt, Artificial Sequence
  Description of Artificial Sequence: Synthetic oligonucleotide
aaccggccauugcuaauac

SEQ ID NO: 1085140 - RNA, 19 nt, Artificial Sequence
  Description of Artificial Sequence: Synthetic oligonucleotide
ucccuucugguccaaauau

SEQ ID NO: 1085141 - RNA, 19 nt, Artificial Sequence
  Description of Artificial Sequence: Synthetic oligonucleotide
ucuacaauacuguguuuua

SEQ ID NO: 1085142 - RNA, 19 nt, Artificial Sequence
  Description of Artificial Sequence: Synthetic oligonucleotide
uuuaagugcuuuucuccaa

SEQ ID NO: 1085143 - RNA, 19 nt, Artificial Sequence
  Description of Artificial Sequence: Synthetic oligonucleotide
uuuaugcagcaauaacuua

SEQ ID NO: 1085144 - RNA, 19 nt, Artificial Sequence
  Description of Artificial Sequence: Synthetic oligonucleotide
agcuuucuacaauacugug

SEQ ID NO: 1085145 - RNA, 19 nt, Artificial Sequence
  Description of Artificial Sequence: Synthetic oligonucleotide
auaugugggacuccaucga

SEQ ID NO: 1085146 - RNA, 19 nt, Artificial Sequence
  Description of Artificial Sequence: Synthetic oligonucleotide
gagacugcacaaacaaccc

SEQ ID NO: 1085147 - RNA, 19 nt, Artificial Sequence
  Description of Artificial Sequence: Synthetic oligonucleotide
uuugguaaauggugauggu

SEQ ID NO: 1085148 - RNA, 19 nt, Artificial Sequence
  Description of Artificial Sequence: Synthetic oligonucleotide
gaaaauucuauuacuaguu

SEQ ID NO: 1085149 - RNA, 19 nt, Artificial Sequence
  Description of Artificial Sequence: Synthetic oligonucleotide
auaugcuaccaucagcaua

SEQ ID NO: 1085150 - RNA, 19 nt, Artificial Sequence
  Description of Artificial Sequence: Synthetic oligonucleotide
uuacaccaagauuccuucc

SEQ ID NO: 1085151 - RNA, 19 nt, Artificial Sequence
  Description of Artificial Sequence: Synthetic oligonucleotide
ugcuaauacugcggcacgg

SEQ ID NO: 1085152 - RNA, 19 nt, Artificial Sequence
  Description of Artificial Sequence: Synthetic oligonucleotide
uggugaugguuuuacuuuc

SEQ ID NO: 1085153 - RNA, 19 nt, Artificial Sequence
  Description of Artificial Sequence: Synthetic oligonucleotide
gaaucagaccaguaagucu

SEQ ID NO: 1085154 - RNA, 19 nt, Artificial Sequence
  Description of Artificial Sequence: Synthetic oligonucleotide
ugccacacaacagagucaa

SEQ ID NO: 1085155 - RNA, 19 nt, Artificial Sequence
  Description of Artificial Sequence: Synthetic oligonucleotide
auaagugacaaagucucuu

SEQ ID NO: 1085156 - RNA, 19 nt, Artificial Sequence
  Description of Artificial Sequence: Synthetic oligonucleotide
uaugugggacuccaucgau

SEQ ID NO: 1085157 - RNA, 19 nt, Artificial Sequence
  Description of Artificial Sequence: Synthetic oligonucleotide
uuugcucaacaauggccga

SEQ ID NO: 1085158 - RNA, 19 nt, Artificial Sequence
  Description of Artificial Sequence: Synthetic oligonucleotide
cauaggauagcuuuguauu

SEQ ID NO: 1085159 - RNA, 19 nt, Artificial Sequence
  Description of Artificial Sequence: Synthetic oligonucleotide
caaucgcuugaaaucccgc

SEQ ID NO: 1085160 - RNA, 19 nt, Artificial Sequence
  Description of Artificial Sequence: Synthetic oligonucleotide
cuuaaucaaaagcccguga

SEQ ID NO: 1085161 - RNA, 19 nt, Artificial Sequence
  Description of Artificial Sequence: Synthetic oligonucleotide
gcagaauccuuaaaacccg

SEQ ID NO: 1085162 - RNA, 19 nt, Artificial Sequence
  Description of Artificial Sequence: Synthetic oligonucleotide
uugguaaauggugaugguu

SEQ ID NO: 1085163 - RNA, 19 nt, Artificial Sequence
  Description of Artificial Sequence: Synthetic oligonucleotide
uagcuuuguauuagcuuuc

SEQ ID NO: 1085164 - RNA, 19 nt, Artificial Sequence
  Description of Artificial Sequence: Synthetic oligonucleotide
agacugcacaaacaacccu

SEQ ID NO: 1085165 - RNA, 19 nt, Artificial Sequence
  Description of Artificial Sequence: Synthetic oligonucleotide
uacugggagguaaauuaua

SEQ ID NO: 1085166 - RNA, 19 nt, Artificial Sequence
  Description of Artificial Sequence: Synthetic oligonucleotide
agaucagaauugguuuuag

SEQ ID NO: 1085167 - RNA, 19 nt, Artificial Sequence
  Description of Artificial Sequence: Synthetic oligonucleotide
gauagcuuuguauuagcuu

SEQ ID NO: 1085168 - RNA, 19 nt, Artificial Sequence
  Description of Artificial Sequence: Synthetic oligonucleotide
cacguuaacaaguggccca

SEQ ID NO: 1085169 - RNA, 19 nt, Artificial Sequence
  Description of Artificial Sequence: Synthetic oligonucleotide
auuuuggauaagaaccuaa

SEQ ID NO: 1085170 - RNA, 19 nt, Artificial Sequence
  Description of Artificial Sequence: Synthetic oligonucleotide
uaguucacaccaugcaaua

SEQ ID NO: 1085171 - RNA, 19 nt, Artificial Sequence
  Description of Artificial Sequence: Synthetic oligonucleotide
auacucccguuuguuuucc

SEQ ID NO: 1085172 - RNA, 19 nt, Artificial Sequence
  Description of Artificial Sequence: Synthetic oligonucleotide
gcacagauaaggaaauaag

SEQ ID NO: 1085173 - RNA, 19 nt, Artificial Sequence
  Description of Artificial Sequence: Synthetic oligonucleotide
aagaugcaguacaacuugu

SEQ ID NO: 1085174 - RNA, 19 nt, Artificial Sequence
  Description of Artificial Sequence: Synthetic oligonucleotide
acauuuggaugaaacauuu

SEQ ID NO: 1085175 - RNA, 19 nt, Artificial Sequence
  Description of Artificial Sequence: Synthetic oligonucleotide
ccggccauugcuaauacug

SEQ ID NO: 1085176 - RNA, 19 nt, Artificial Sequence
  Description of Artificial Sequence: Synthetic oligonucleotide
acucccguuuguuuuccug

SEQ ID NO: 1085177 - RNA, 19 nt, Artificial Sequence
  Description of Artificial Sequence: Synthetic oligonucleotide
cccgcggucagucugaaag

SEQ ID NO: 1085178 - RNA, 19 nt, Artificial Sequence
  Description of Artificial Sequence: Synthetic oligonucleotide
caacaacgaugaaaagaug

SEQ ID NO: 1085179 - RNA, 19 nt, Artificial Sequence
  Description of Artificial Sequence: Synthetic oligonucleotide
gacucaaauuugcagacuu

SEQ ID NO: 1085180 - RNA, 19 nt, Artificial Sequence
  Description of Artificial Sequence: Synthetic oligonucleotide
cauugcaugauguuguuuu

SEQ ID NO: 1085181 - RNA, 19 nt, Artificial Sequence
  Description of Artificial Sequence: Synthetic oligonucleotide
ugccaauugugaagucaca

SEQ ID NO: 1085182 - RNA, 19 nt, Artificial Sequence
  Description of Artificial Sequence: Synthetic oligonucleotide
uggacagaaucagaccagu

SEQ ID NO: 1085183 - RNA, 19 nt, Artificial Sequence
  Description of Artificial Sequence: Synthetic oligonucleotide
ugcuaccaucagcauacac

SEQ ID NO: 1085184 - RNA, 19 nt, Artificial Sequence
  Description of Artificial Sequence: Synthetic oligonucleotide
cuaccaucagcauacacau

SEQ ID NO: 1085185 - RNA, 19 nt, Artificial Sequence
  Description of Artificial Sequence: Synthetic oligonucleotide
aggugagaagcaacucggc

SEQ ID NO: 1085186 - RNA, 19 nt, Artificial Sequence
  Description of Artificial Sequence: Synthetic oligonucleotide
aguuacaccaagauuccuu

SEQ ID NO: 1085187 - RNA, 19 nt, Artificial Sequence
  Description of Artificial Sequence: Synthetic oligonucleotide
aaguuacaccaagauuccu

SEQ ID NO: 1085188 - RNA, 19 nt, Artificial Sequence
  Description of Artificial Sequence: Synthetic oligonucleotide
guuuucagauggugcacca

SEQ ID NO: 1085189 - RNA, 19 nt, Artificial Sequence
  Description of Artificial Sequence: Synthetic oligonucleotide
gaguuagagacuucucagu

SEQ ID NO: 1085190 - RNA, 19 nt, Artificial Sequence
  Description of Artificial Sequence: Synthetic oligonucleotide
agcccgugaaggugcugcc

SEQ ID NO: 1085191 - RNA, 19 nt, Artificial Sequence
  Description of Artificial Sequence: Synthetic oligonucleotide
agucucuugcacugaaguu

SEQ ID NO: 1085192 - RNA, 19 nt, Artificial Sequence
  Description of Artificial Sequence: Synthetic oligonucleotide
cugccaugcucaaaccaac

SEQ ID NO: 1085193 - RNA, 19 nt, Artificial Sequence
  Description of Artificial Sequence: Synthetic oligonucleotide
guagcgugcagcugcauua

SEQ ID NO: 1085194 - RNA, 19 nt, Artificial Sequence
  Description of Artificial Sequence: Synthetic oligonucleotide
gaauugaaguuaagaugga

SEQ ID NO: 1085195 - RNA, 19 nt, Artificial Sequence
  Description of Artificial Sequence: Synthetic oligonucleotide
uaaagccggagaucagaau

SEQ ID NO: 1085196 - RNA, 19 nt, Artificial Sequence
  Description of Artificial Sequence: Synthetic oligonucleotide
cugggagguaaauuauaca

SEQ ID NO: 1085197 - RNA, 19 nt, Artificial Sequence
  Description of Artificial Sequence: Synthetic oligonucleotide
uggccgaggugccaauugu

SEQ ID NO: 1085198 - RNA, 19 nt, Artificial Sequence
  Description of Artificial Sequence: Synthetic oligonucleotide
uggguccucuugcaaucgc

SEQ ID NO: 1085199 - RNA, 19 nt, Artificial Sequence
  Description of Artificial Sequence: Synthetic oligonucleotide
auggugcaccacugacccc

SEQ ID NO: 1085200 - RNA, 19 nt, Artificial Sequence
  Description of Artificial Sequence: Synthetic oligonucleotide
agcugcauuaaaagguagu

SEQ ID NO: 1085201 - RNA, 19 nt, Artificial Sequence
  Description of Artificial Sequence: Synthetic oligonucleotide
aggauauauuacaaauuua

SEQ ID NO: 1085202 - RNA, 19 nt, Artificial Sequence
  Description of Artificial Sequence: Synthetic oligonucleotide
gaaaucccgcaugagccuc

SEQ ID NO: 1085203 - RNA, 19 nt, Artificial Sequence
  Description of Artificial Sequence: Synthetic oligonucleotide
cuuucuacugggagguaaa

SEQ ID NO: 1085204 - RNA, 19 nt, Artificial Sequence
  Description of Artificial Sequence: Synthetic oligonucleotide
caacacaaccggccauugc

SEQ ID NO: 1085205 - RNA, 19 nt, Artificial Sequence
  Description of Artificial Sequence: Synthetic oligonucleotide
cucccguuuguuuuccuga

SEQ ID NO: 1085206 - RNA, 19 nt, Artificial Sequence
  Description of Artificial Sequence: Synthetic oligonucleotide
uucuacugggagguaaauu

SEQ ID NO: 1085207 - RNA, 19 nt, Artificial Sequence
  Description of Artificial Sequence: Synthetic oligonucleotide
caucauaugugggacucca

SEQ ID NO: 1085208 - RNA, 19 nt, Artificial Sequence
  Description of Artificial Sequence: Synthetic oligonucleotide
ggccgaaucacuguggguc

SEQ ID NO: 1085209 - RNA, 19 nt, Artificial Sequence
  Description of Artificial Sequence: Synthetic oligonucleotide
ggauuugguucauccaaca

SEQ ID NO: 1085210 - RNA, 19 nt, Artificial Sequence
  Description of Artificial Sequence: Synthetic oligonucleotide
gccgaaucacugugggucg

SEQ ID NO: 1085211 - RNA, 19 nt, Artificial Sequence
  Description of Artificial Sequence: Synthetic oligonucleotide
cauugcuaauacugcggca

SEQ ID NO: 1085212 - RNA, 19 nt, Artificial Sequence
  Description of Artificial Sequence: Synthetic oligonucleotide
gcaaucgcuugaaaucccg

SEQ ID NO: 1085213 - RNA, 19 nt, Artificial Sequence
  Description of Artificial Sequence: Synthetic oligonucleotide
guggccgaggugccaauug

SEQ ID NO: 1085214 - RNA, 19 nt, Artificial Sequence
  Description of Artificial Sequence: Synthetic oligonucleotide
ugauaaagcugugcugcuu

SEQ ID NO: 1085215 - RNA, 19 nt, Artificial Sequence
  Description of Artificial Sequence: Synthetic oligonucleotide
gguucuaaacugaaggacu

SEQ ID NO: 1085216 - RNA, 19 nt, Artificial Sequence
  Description of Artificial Sequence: Synthetic oligonucleotide
acggcguuugguaaauggu

SEQ ID NO: 1085217 - RNA, 19 nt, Artificial Sequence
  Description of Artificial Sequence: Synthetic oligonucleotide
gggagguaaauuauacaca

SEQ ID NO: 1085218 - RNA, 19 nt, Artificial Sequence
  Description of Artificial Sequence: Synthetic oligonucleotide
aggugccaauugugaaguc

SEQ ID NO: 1085219 - RNA, 19 nt, Artificial Sequence
  Description of Artificial Sequence: Synthetic oligonucleotide
uugcucaacaauggccgaa

SEQ ID NO: 1085220 - RNA, 19 nt, Artificial Sequence
  Description of Artificial Sequence: Synthetic oligonucleotide
uacugcggcacggcguuug

SEQ ID NO: 1085221 - RNA, 19 nt, Artificial Sequence
  Description of Artificial Sequence: Synthetic oligonucleotide
aguucacaccaugcaauaa

SEQ ID NO: 1085222 - RNA, 19 nt, Artificial Sequence
  Description of Artificial Sequence: Synthetic oligonucleotide
gagaagcaacucggcaggc

SEQ ID NO: 1085223 - RNA, 19 nt, Artificial Sequence
  Description of Artificial Sequence: Synthetic oligonucleotide
aagucacaauagguacagu

SEQ ID NO: 1085224 - RNA, 19 nt, Artificial Sequence
  Description of Artificial Sequence: Synthetic oligonucleotide
caucgauucugcaggauau

SEQ ID NO: 1085225 - RNA, 19 nt, Artificial Sequence
  Description of Artificial Sequence: Synthetic oligonucleotide
uaacugcguuccauugcau

SEQ ID NO: 1085226 - RNA, 19 nt, Artificial Sequence
  Description of Artificial Sequence: Synthetic oligonucleotide
gccgagacugcacaaacaa

SEQ ID NO: 1085227 - RNA, 19 nt, Artificial Sequence
  Description of Artificial Sequence: Synthetic oligonucleotide
gcacaaacaacccugcaau

SEQ ID NO: 1085228 - RNA, 19 nt, Artificial Sequence
  Description of Artificial Sequence: Synthetic oligonucleotide
gcggccgaaucacuguggg

SEQ ID NO: 1085229 - RNA, 19 nt, Artificial Sequence
  Description of Artificial Sequence: Synthetic oligonucleotide
gugucuauuaugaaucauu

SEQ ID NO: 1085230 - RNA, 19 nt, Artificial Sequence
  Description of Artificial Sequence: Synthetic oligonucleotide
acaaccggccauugcuaau

SEQ ID NO: 1085231 - RNA, 19 nt, Artificial Sequence
  Description of Artificial Sequence: Synthetic oligonucleotide
ccuucugguccaaauauaa

SEQ ID NO: 1085232 - RNA, 19 nt, Artificial Sequence
  Description of Artificial Sequence: Synthetic oligonucleotide
gucgacaugcuccgcagcu

SEQ ID NO: 1085233 - RNA, 19 nt, Artificial Sequence
  Description of Artificial Sequence: Synthetic oligonucleotide
ggccgaaacucucuucuca

SEQ ID NO: 1085234 - RNA, 19 nt, Artificial Sequence
  Description of Artificial Sequence: Synthetic oligonucleotide
acguuaacaaguggcccaa

SEQ ID NO: 1085235 - RNA, 19 nt, Artificial Sequence
  Description of Artificial Sequence: Synthetic oligonucleotide
agcggccgaaucacugugg

SEQ ID NO: 1085236 - RNA, 19 nt, Artificial Sequence
  Description of Artificial Sequence: Synthetic oligonucleotide
cagcggccgaaucacugug

SEQ ID NO: 1085237 - RNA, 19 nt, Artificial Sequence
  Description of Artificial Sequence: Synthetic oligonucleotide
ggauaagaaccuaacaguu

SEQ ID NO: 1085238 - RNA, 19 nt, Artificial Sequence
  Description of Artificial Sequence: Synthetic oligonucleotide
gggucgacaugcuccgcag

SEQ ID NO: 1085239 - RNA, 19 nt, Artificial Sequence
  Description of Artificial Sequence: Synthetic oligonucleotide
accggccauugcuaauacu

SEQ ID NO: 1085240 - RNA, 19 nt, Artificial Sequence
  Description of Artificial Sequence: Synthetic oligonucleotide
ccguuuguuuuccugauaa

SEQ ID NO: 1085241 - RNA, 19 nt, Artificial Sequence
  Description of Artificial Sequence: Synthetic oligonucleotide
guaaauggugaugguuuua

SEQ ID NO: 1085242 - RNA, 19 nt, Artificial Sequence
  Description of Artificial Sequence: Synthetic oligonucleotide
aaaacccguggcacuuaaa

SEQ ID NO: 1085243 - RNA, 19 nt, Artificial Sequence
  Description of Artificial Sequence: Synthetic oligonucleotide
gcauaggauagcuuuguau

SEQ ID NO: 1085244 - RNA, 19 nt, Artificial Sequence
  Description of Artificial Sequence: Synthetic oligonucleotide
cccgcaugagccuccuacg

SEQ ID NO: 1085245 - RNA, 19 nt, Artificial Sequence
  Description of Artificial Sequence: Synthetic oligonucleotide
cauuuuggauaagaaccua

SEQ ID NO: 1085246 - RNA, 19 nt, Artificial Sequence
  Description of Artificial Sequence: Synthetic oligonucleotide
cacaaccggccauugcuaa

SEQ ID NO: 1085247 - RNA, 19 nt, Artificial Sequence
  Description of Artificial Sequence: Synthetic oligonucleotide
cccaaauacagagcuggac

SEQ ID NO: 1085248 - RNA, 19 nt, Artificial Sequence
  Description of Artificial Sequence: Synthetic oligonucleotide
caccaagauuccuuccaaa

SEQ ID NO: 1085249 - RNA, 19 nt, Artificial Sequence
  Description of Artificial Sequence: Synthetic oligonucleotide
cggcguuugguaaauggug

SEQ ID NO: 1085250 - RNA, 19 nt, Artificial Sequence
  Description of Artificial Sequence: Synthetic oligonucleotide
gccaauugugaagucacaa

SEQ ID NO: 1085251 - RNA, 19 nt, Artificial Sequence
  Description of Artificial Sequence: Synthetic oligonucleotide
ccgcaugagccuccuacgg

SEQ ID NO: 1085252 - RNA, 19 nt, Artificial Sequence
  Description of Artificial Sequence: Synthetic oligonucleotide
gcuuucuacaauacugugu

SEQ ID NO: 1085253 - RNA, 19 nt, Artificial Sequence
  Description of Artificial Sequence: Synthetic oligonucleotide
caacugguggagaguuaga

SEQ ID NO: 1085254 - RNA, 19 nt, Artificial Sequence
  Description of Artificial Sequence: Synthetic oligonucleotide
ccgagacugcacaaacaac

SEQ ID NO: 1085255 - RNA, 19 nt, Artificial Sequence
  Description of Artificial Sequence: Synthetic oligonucleotide
cuccaucgauucugcagga

SEQ ID NO: 1085256 - RNA, 19 nt, Artificial Sequence
  Description of Artificial Sequence: Synthetic oligonucleotide
cugccccgcggucagucug

SEQ ID NO: 1085257 - RNA, 19 nt, Artificial Sequence
  Description of Artificial Sequence: Synthetic oligonucleotide
cuccuacgggccggggucg

SEQ ID NO: 1085258 - RNA, 19 nt, Artificial Sequence
  Description of Artificial Sequence: Synthetic oligonucleotide
ggagaguuagagacuucuc

SEQ ID NO: 1085259 - RNA, 19 nt, Artificial Sequence
  Description of Artificial Sequence: Synthetic oligonucleotide
ggucgacaugcuccgcagc

SEQ ID NO: 1085260 - RNA, 19 nt, Artificial Sequence
  Description of Artificial Sequence: Synthetic oligonucleotide
cggccauugcuaauacugc

SEQ ID NO: 1085261 - RNA, 19 nt, Artificial Sequence
  Description of Artificial Sequence: Synthetic oligonucleotide
ccggggucgacaugcuccg

SEQ ID NO: 1085262 - RNA, 19 nt, Artificial Sequence
  Description of Artificial Sequence: Synthetic oligonucleotide
cccgugaaggugcugccac

SEQ ID NO: 1085263 - RNA, 19 nt, Artificial Sequence
  Description of Artificial Sequence: Synthetic oligonucleotide
gcucaacaauggccgaaac

SEQ ID NO: 1085264 - RNA, 19 nt, Artificial Sequence
  Description of Artificial Sequence: Synthetic oligonucleotide
ggggucgacaugcuccgca

SEQ ID NO: 1085265 - RNA, 19 nt, Artificial Sequence
  Description of Artificial Sequence: Synthetic oligonucleotide
gggacuccaucgauucugc

SEQ ID NO: 1085266 - RNA, 19 nt, Artificial Sequence
  Description of Artificial Sequence: Synthetic oligonucleotide
acacaaccggccauugcua

SEQ ID NO: 1085267 - RNA, 19 nt, Artificial Sequence
  Description of Artificial Sequence: Synthetic oligonucleotide
agcgugcagcugcauuaaa

SEQ ID NO: 1085268 - RNA, 19 nt, Artificial Sequence
  Description of Artificial Sequence: Synthetic oligonucleotide
caaccggccauugcuaaua

SEQ ID NO: 1085269 - RNA, 19 nt, Artificial Sequence
  Description of Artificial Sequence: Synthetic oligonucleotide
gguccaaauauaacugcgu

SEQ ID NO: 1085270 - RNA, 19 nt, Artificial Sequence
  Description of Artificial Sequence: Synthetic oligonucleotide
aucauaugugggacuccau

SEQ ID NO: 1085271 - RNA, 19 nt, Artificial Sequence
  Description of Artificial Sequence: Synthetic oligonucleotide
caagcuuuuguagguucua

SEQ ID NO: 1085272 - RNA, 19 nt, Artificial Sequence
  Description of Artificial Sequence: Synthetic oligonucleotide
ccuccuacgggccgggguc

SEQ ID NO: 1085273 - RNA, 19 nt, Artificial Sequence
  Description of Artificial Sequence: Synthetic oligonucleotide
cagaccaggugucuauuau

SEQ ID NO: 1085274 - RNA, 19 nt, Artificial Sequence
  Description of Artificial Sequence: Synthetic oligonucleotide
cagguagcgugcagcugca

SEQ ID NO: 1085275 - RNA, 19 nt, Artificial Sequence
  Description of Artificial Sequence: Synthetic oligonucleotide
ccaucgauucugcaggaua

SEQ ID NO: 1085276 - RNA, 19 nt, Artificial Sequence
  Description of Artificial Sequence: Synthetic oligonucleotide
cucaacugguggagaguua

SEQ ID NO: 1085277 - RNA, 19 nt, Artificial Sequence
  Description of Artificial Sequence: Synthetic oligonucleotide
gccgaggugccaauuguga

SEQ ID NO: 1085278 - RNA, 19 nt, Artificial Sequence
  Description of Artificial Sequence: Synthetic oligonucleotide
ggccgaggugccaauugug

SEQ ID NO: 1085279 - RNA, 19 nt, Artificial Sequence
  Description of Artificial Sequence: Synthetic oligonucleotide
gcaguacaacuuguauaca

SEQ ID NO: 1085280 - RNA, 19 nt, Artificial Sequence
  Description of Artificial Sequence: Synthetic oligonucleotide
gcgugcagcugcauuaaaa

SEQ ID NO: 1085281 - RNA, 19 nt, Artificial Sequence
  Description of Artificial Sequence: Synthetic oligonucleotide
ccuuucuacugggagguaa

SEQ ID NO: 1085282 - RNA, 19 nt, Artificial Sequence
  Description of Artificial Sequence: Synthetic oligonucleotide
uccuacgggccggggucga

SEQ ID NO: 1085283 - RNA, 19 nt, Artificial Sequence
  Description of Artificial Sequence: Synthetic oligonucleotide
augcuaccaucagcauaca

SEQ ID NO: 1085284 - RNA, 19 nt, Artificial Sequence
  Description of Artificial Sequence: Synthetic oligonucleotide
gccgaaacucucuucucau

SEQ ID NO: 1085285 - RNA, 19 nt, Artificial Sequence
  Description of Artificial Sequence: Synthetic oligonucleotide
cuacgggccggggucgaca

SEQ ID NO: 1085286 - RNA, 19 nt, Artificial Sequence
  Description of Artificial Sequence: Synthetic oligonucleotide
ccacggguggguccucuug

SEQ ID NO: 1085287 - RNA, 19 nt, Artificial Sequence
  Description of Artificial Sequence: Synthetic oligonucleotide
caauggccgaaacucucuu

SEQ ID NO: 1085288 - RNA, 19 nt, Artificial Sequence
  Description of Artificial Sequence: Synthetic oligonucleotide
cagucccuccugcacagau

SEQ ID NO: 1085289 - RNA, 19 nt, Artificial Sequence
  Description of Artificial Sequence: Synthetic oligonucleotide
ccgaaucacugugggucgc

SEQ ID NO: 1085290 - RNA, 19 nt, Artificial Sequence
  Description of Artificial Sequence: Synthetic oligonucleotide
gugggucgccgccgccgcc

SEQ ID NO: 1085291 - RNA, 19 nt, Artificial Sequence
  Description of Artificial Sequence: Synthetic oligonucleotide
gcagcggccgaaucacugu

SEQ ID NO: 1085292 - RNA, 19 nt, Artificial Sequence
  Description of Artificial Sequence: Synthetic oligonucleotide
agccuccuacgggccgggg

SEQ ID NO: 1085293 - RNA, 19 nt, Artificial Sequence
  Description of Artificial Sequence: Synthetic oligonucleotide
ccgcggucagucugaaaga

SEQ ID NO: 1085294 - RNA, 19 nt, Artificial Sequence
  Description of Artificial Sequence: Synthetic oligonucleotide
ggcuauuugcuggacuguu

SEQ ID NO: 1085295 - RNA, 19 nt, Artificial Sequence
  Description of Artificial Sequence: Synthetic oligonucleotide
gcguuccauugcaugaugu

SEQ ID NO: 1085296 - RNA, 19 nt, Artificial Sequence
  Description of Artificial Sequence: Synthetic oligonucleotide
ccgaaacucucuucucaua

SEQ ID NO: 1085297 - RNA, 19 nt, Artificial Sequence
  Description of Artificial Sequence: Synthetic oligonucleotide
gcggucagucugaaagaaa

SEQ ID NO: 1085298 - RNA, 19 nt, Artificial Sequence
  Description of Artificial Sequence: Synthetic oligonucleotide
caacucggcaggcccuggu

SEQ ID NO: 1085299 - RNA, 19 nt, Artificial Sequence
  Description of Artificial Sequence: Synthetic oligonucleotide
agguagcgugcagcugcau

SEQ ID NO: 1085300 - RNA, 19 nt, Artificial Sequence
  Description of Artificial Sequence: Synthetic oligonucleotide
ccgugaaggugcugccaca

SEQ ID NO: 1085301 - RNA, 19 nt, Artificial Sequence
  Description of Artificial Sequence: Synthetic oligonucleotide
auacugcggcacggcguuu

SEQ ID NO: 1085302 - RNA, 19 nt, Artificial Sequence
  Description of Artificial Sequence: Synthetic oligonucleotide
gcacggcguuugguaaaug

SEQ ID NO: 1085303 - RNA, 19 nt, Artificial Sequence
  Description of Artificial Sequence: Synthetic oligonucleotide
gccgccgagacugcacaaa

SEQ ID NO: 1085304 - RNA, 19 nt, Artificial Sequence
  Description of Artificial Sequence: Synthetic oligonucleotide
cgccgagacugcacaaaca

SEQ ID NO: 1085305 - RNA, 19 nt, Artificial Sequence
  Description of Artificial Sequence: Synthetic oligonucleotide
gcccgugaaggugcugcca

SEQ ID NO: 1085306 - RNA, 19 nt, Artificial Sequence
  Description of Artificial Sequence: Synthetic oligonucleotide
cguuccauugcaugauguu

SEQ ID NO: 1085307 - RNA, 19 nt, Artificial Sequence
  Description of Artificial Sequence: Synthetic oligonucleotide
cgcggucagucugaaagaa

SEQ ID NO: 1085308 - RNA, 19 nt, Artificial Sequence
  Description of Artificial Sequence: Synthetic oligonucleotide
ccuacgggccggggucgac

SEQ ID NO: 1085309 - RNA, 19 nt, Artificial Sequence
  Description of Artificial Sequence: Synthetic oligonucleotide
cugcggcacggcguuuggu

SEQ ID NO: 1085310 - RNA, 19 nt, Artificial Sequence
  Description of Artificial Sequence: Synthetic oligonucleotide
cggcacggcguuugguaaa

SEQ ID NO: 1085311 - RNA, 19 nt, Artificial Sequence
  Description of Artificial Sequence: Synthetic oligonucleotide
cggggucgacaugcuccgc

SEQ ID NO: 1085312 - RNA, 19 nt, Artificial Sequence
  Description of Artificial Sequence: Synthetic oligonucleotide
cggccgaaucacugugggu

SEQ ID NO: 1085313 - RNA, 19 nt, Artificial Sequence
  Description of Artificial Sequence: Synthetic oligonucleotide
ccccgcggucagucugaaa

SEQ ID NO: 1085314 - RNA, 19 nt, Artificial Sequence
  Description of Artificial Sequence: Synthetic oligonucleotide
cccacggguggguccucuu

SEQ ID NO: 1085315 - RNA, 19 nt, Artificial Sequence
  Description of Artificial Sequence: Synthetic oligonucleotide
ccccacggguggguccucu

SEQ ID NO: 1085316 - RNA, 19 nt, Artificial Sequence
  Description of Artificial Sequence: Synthetic oligonucleotide
ucuuauuugaguaagaggu

SEQ ID NO: 1085317 - RNA, 19 nt, Artificial Sequence
  Description of Artificial Sequence: Synthetic oligonucleotide
agauuaucaagauagacuc

SEQ ID NO: 1085318 - RNA, 19 nt, Artificial Sequence
  Description of Artificial Sequence: Synthetic oligonucleotide
aauuaaucuaacagcaucc

SEQ ID NO: 1085319 - RNA, 19 nt, Artificial Sequence
  Description of Artificial Sequence: Synthetic oligonucleotide
uauaguaaguugcagcucg

SEQ ID NO: 1085320 - RNA, 19 nt, Artificial Sequence
  Description of Artificial Sequence: Synthetic oligonucleotide
ucaguaaacauacuuaaug

SEQ ID NO: 1085321 - RNA, 19 nt, Artificial Sequence
  Description of Artificial Sequence: Synthetic oligonucleotide
aauacucucaauuauucca

SEQ ID NO: 1085322 - RNA, 19 nt, Artificial Sequence
  Description of Artificial Sequence: Synthetic oligonucleotide
ucuaauauuuucuugcuug

SEQ ID NO: 1085323 - RNA, 19 nt, Artificial Sequence
  Description of Artificial Sequence: Synthetic oligonucleotide
uuauugucaagccaaggcg

SEQ ID NO: 1085324 - RNA, 19 nt, Artificial Sequence
  Description of Artificial Sequence: Synthetic oligonucleotide
aguaagaggugauacaugg

SEQ ID NO: 1085325 - RNA, 19 nt, Artificial Sequence
  Description of Artificial Sequence: Synthetic oligonucleotide
ucuugcuugccuaagaucc

SEQ ID NO: 1085326 - RNA, 19 nt, Artificial Sequence
  Description of Artificial Sequence: Synthetic oligonucleotide
uuaaugauucaauucauga

SEQ ID NO: 1085327 - RNA, 19 nt, Artificial Sequence
  Description of Artificial Sequence: Synthetic oligonucleotide
ucgaaaaugauauuaauua

SEQ ID NO: 1085328 - RNA, 19 nt, Artificial Sequence
  Description of Artificial Sequence: Synthetic oligonucleotide
aauaacgccaguugcauca

SEQ ID NO: 1085329 - RNA, 19 nt, Artificial Sequence
  Description of Artificial Sequence: Synthetic oligonucleotide
uauaauaaccauuucugcu

SEQ ID NO: 1085330 - RNA, 19 nt, Artificial Sequence
  Description of Artificial Sequence: Synthetic oligonucleotide
uuaaauuuccaaaugugaa

SEQ ID NO: 1085331 - RNA, 19 nt, Artificial Sequence
  Description of Artificial Sequence: Synthetic oligonucleotide
uguauggucugucauggcg

SEQ ID NO: 1085332 - RNA, 19 nt, Artificial Sequence
  Description of Artificial Sequence: Synthetic oligonucleotide
cuaagauccgcacacaccg

SEQ ID NO: 1085333 - RNA, 19 nt, Artificial Sequence
  Description of Artificial Sequence: Synthetic oligonucleotide
auacuuaaugauucaauuc

SEQ ID NO: 1085334 - RNA, 19 nt, Artificial Sequence
  Description of Artificial Sequence: Synthetic oligonucleotide
gauucaauucaugaggagg

SEQ ID NO: 1085335 - RNA, 19 nt, Artificial Sequence
  Description of Artificial Sequence: Synthetic oligonucleotide
acuacgaaaauguuuaaca

SEQ ID NO: 1085336 - RNA, 19 nt, Artificial Sequence
  Description of Artificial Sequence: Synthetic oligonucleotide
aacagaacaaugcucccuc

SEQ ID NO: 1085337 - RNA, 19 nt, Artificial Sequence
  Description of Artificial Sequence: Synthetic oligonucleotide
acgaaaauguuuaacaaac

SEQ ID NO: 1085338 - RNA, 19 nt, Artificial Sequence
  Description of Artificial Sequence: Synthetic oligonucleotide
aguugcaucacucuaauau

SEQ ID NO: 1085339 - RNA, 19 nt, Artificial Sequence
  Description of Artificial Sequence: Synthetic oligonucleotide
gauaaugaaaucugucuug

SEQ ID NO: 1085340 - RNA, 19 nt, Artificial Sequence
  Description of Artificial Sequence: Synthetic oligonucleotide
uguacagacaauuguuggg

SEQ ID NO: 1085341 - RNA, 19 nt, Artificial Sequence
  Description of Artificial Sequence: Synthetic oligonucleotide
uuaacauuggaaauccgcu

SEQ ID NO: 1085342 - RNA, 19 nt, Artificial Sequence
  Description of Artificial Sequence: Synthetic oligonucleotide
aaucuaacagcauccaccu

SEQ ID NO: 1085343 - RNA, 19 nt, Artificial Sequence
  Description of Artificial Sequence: Synthetic oligonucleotide
ucauguuaauguaaguccc

SEQ ID NO: 1085344 - RNA, 19 nt, Artificial Sequence
  Description of Artificial Sequence: Synthetic oligonucleotide
aagauauggcaucuccugg

SEQ ID NO: 1085345 - RNA, 19 nt, Artificial Sequence
  Description of Artificial Sequence: Synthetic oligonucleotide
ucucguuuaguaaacauau

SEQ ID NO: 1085346 - RNA, 19 nt, Artificial Sequence
  Description of Artificial Sequence: Synthetic oligonucleotide
auguuuaugaugcugacau

SEQ ID NO: 1085347 - RNA, 19 nt, Artificial Sequence
  Description of Artificial Sequence: Synthetic oligonucleotide
cuuaacauguccaucauga

SEQ ID NO: 1085348 - RNA, 19 nt, Artificial Sequence
  Description of Artificial Sequence: Synthetic oligonucleotide
aaauguaugcccauuauaa

SEQ ID NO: 1085349 - RNA, 19 nt, Artificial Sequence
  Description of Artificial Sequence: Synthetic oligonucleotide
aagaugacuacgaaaaugu

SEQ ID NO: 1085350 - RNA, 19 nt, Artificial Sequence
  Description of Artificial Sequence: Synthetic oligonucleotide
uguaacugcgcucauacau

SEQ ID NO: 1085351 - RNA, 19 nt, Artificial Sequence
  Description of Artificial Sequence: Synthetic oligonucleotide
ugauacauggaguuuguca

SEQ ID NO: 1085352 - RNA, 19 nt, Artificial Sequence
  Description of Artificial Sequence: Synthetic oligonucleotide
auuaguauuugauccagca

SEQ ID NO: 1085353 - RNA, 19 nt, Artificial Sequence
  Description of Artificial Sequence: Synthetic oligonucleotide
ugcauauucagcaaguauu

SEQ ID NO: 1085354 - RNA, 19 nt, Artificial Sequence
  Description of Artificial Sequence: Synthetic oligonucleotide
uauuccaagaugacuacga

SEQ ID NO: 1085355 - RNA, 19 nt, Artificial Sequence
  Description of Artificial Sequence: Synthetic oligonucleotide
gaagauauggcaucuccug

SEQ ID NO: 1085356 - RNA, 19 nt, Artificial Sequence
  Description of Artificial Sequence: Synthetic oligonucleotide
ugucuugggacacucaaca

SEQ ID NO: 1085357 - RNA, 19 nt, Artificial Sequence
  Description of Artificial Sequence: Synthetic oligonucleotide
uauucccugaaauaacgcc

SEQ ID NO: 1085358 - RNA, 19 nt, Artificial Sequence
  Description of Artificial Sequence: Synthetic oligonucleotide
guaauguugagugaaauuc

SEQ ID NO: 1085359 - RNA, 19 nt, Artificial Sequence
  Description of Artificial Sequence: Synthetic oligonucleotide
uuagucuuauuugaguaag

SEQ ID NO: 1085360 - RNA, 19 nt, Artificial Sequence
  Description of Artificial Sequence: Synthetic oligonucleotide
guaaguugcagcucggugc

SEQ ID NO: 1085361 - RNA, 19 nt, Artificial Sequence
  Description of Artificial Sequence: Synthetic oligonucleotide
agagcuaacugcaauacuc

SEQ ID NO: 1085362 - RNA, 19 nt, Artificial Sequence
  Description of Artificial Sequence: Synthetic oligonucleotide
ugcuuuaucaucacccaca

SEQ ID NO: 1085363 - RNA, 19 nt, Artificial Sequence
  Description of Artificial Sequence: Synthetic oligonucleotide
gucuuauuugaguaagagg

SEQ ID NO: 1085364 - RNA, 19 nt, Artificial Sequence
  Description of Artificial Sequence: Synthetic oligonucleotide
gaagcccuuaaugauacgg

SEQ ID NO: 1085365 - RNA, 19 nt, Artificial Sequence
  Description of Artificial Sequence: Synthetic oligonucleotide
ugauaaugaaaucugucuu

SEQ ID NO: 1085366 - RNA, 19 nt, Artificial Sequence
  Description of Artificial Sequence: Synthetic oligonucleotide
agauauggcaucuccuggg

SEQ ID NO: 1085367 - RNA, 19 nt, Artificial Sequence
  Description of Artificial Sequence: Synthetic oligonucleotide
uauugucaagccaaggcgu

SEQ ID NO: 1085368 - RNA, 19 nt, Artificial Sequence
  Description of Artificial Sequence: Synthetic oligonucleotide
uuugaguaagaggugauac

SEQ ID NO: 1085369 - RNA, 19 nt, Artificial Sequence
  Description of Artificial Sequence: Synthetic oligonucleotide
uacggugaaauguaugccc

SEQ ID NO: 1085370 - RNA, 19 nt, Artificial Sequence
  Description of Artificial Sequence: Synthetic oligonucleotide
uaugcccauuauaauaacc

SEQ ID NO: 1085371 - RNA, 19 nt, Artificial Sequence
  Description of Artificial Sequence: Synthetic oligonucleotide
aauaugaagcggcugguua

SEQ ID NO: 1085372 - RNA, 19 nt, Artificial Sequence
  Description of Artificial Sequence: Synthetic oligonucleotide
aaauaacgccaguugcauc

SEQ ID NO: 1085373 - RNA, 19 nt, Artificial Sequence
  Description of Artificial Sequence: Synthetic oligonucleotide
caguucacguucuacagcc

SEQ ID NO: 1085374 - RNA, 19 nt, Artificial Sequence
  Description of Artificial Sequence: Synthetic oligonucleotide
ugugaaagucucauguuaa

SEQ ID NO: 1085375 - RNA, 19 nt, Artificial Sequence
  Description of Artificial Sequence: Synthetic oligonucleotide
auuuagucuuauuugagua

SEQ ID NO: 1085376 - RNA, 19 nt, Artificial Sequence
  Description of Artificial Sequence: Synthetic oligonucleotide
aguguauggucugucaugg

SEQ ID NO: 1085377 - RNA, 19 nt, Artificial Sequence
  Description of Artificial Sequence: Synthetic oligonucleotide
aaagauguacagacaauug

SEQ ID NO: 1085378 - RNA, 19 nt, Artificial Sequence
  Description of Artificial Sequence: Synthetic oligonucleotide
cauguaacugcgcucauac

SEQ ID NO: 1085379 - RNA, 19 nt, Artificial Sequence
  Description of Artificial Sequence: Synthetic oligonucleotide
aauguaugcccauuauaau

SEQ ID NO: 1085380 - RNA, 19 nt, Artificial Sequence
  Description of Artificial Sequence: Synthetic oligonucleotide
uaaggcuuaucuguuuugg

SEQ ID NO: 1085381 - RNA, 19 nt, Artificial Sequence
  Description of Artificial Sequence: Synthetic oligonucleotide
ucucauguuaauguaaguc

SEQ ID NO: 1085382 - RNA, 19 nt, Artificial Sequence
  Description of Artificial Sequence: Synthetic oligonucleotide
uaacugcgcucauacaugg

SEQ ID NO: 1085383 - RNA, 19 nt, Artificial Sequence
  Description of Artificial Sequence: Synthetic oligonucleotide
uauaacuuuaaugcccagc

SEQ ID NO: 1085384 - RNA, 19 nt, Artificial Sequence
  Description of Artificial Sequence: Synthetic oligonucleotide
uauagcacgaaguguccag

SEQ ID NO: 1085385 - RNA, 19 nt, Artificial Sequence
  Description of Artificial Sequence: Synthetic oligonucleotide
cauucgucguccaaauucc

SEQ ID NO: 1085386 - RNA, 19 nt, Artificial Sequence
  Description of Artificial Sequence: Synthetic oligonucleotide
uuaaugcccagcauuguuc

SEQ ID NO: 1085387 - RNA, 19 nt, Artificial Sequence
  Description of Artificial Sequence: Synthetic oligonucleotide
uuuagucuuauuugaguaa

SEQ ID NO: 1085388 - RNA, 19 nt, Artificial Sequence
  Description of Artificial Sequence: Synthetic oligonucleotide
uuaaucuaacagcauccac

SEQ ID NO: 1085389 - RNA, 19 nt, Artificial Sequence
  Description of Artificial Sequence: Synthetic oligonucleotide
ucuugguaccacaugugug

SEQ ID NO: 1085390 - RNA, 19 nt, Artificial Sequence
  Description of Artificial Sequence: Synthetic oligonucleotide
ucucugugcauguaacugc

SEQ ID NO: 1085391 - RNA, 19 nt, Artificial Sequence
  Description of Artificial Sequence: Synthetic oligonucleotide
cagauuugucugaagaaac

SEQ ID NO: 1085392 - RNA, 19 nt, Artificial Sequence
  Description of Artificial Sequence: Synthetic oligonucleotide
ucccuuuuacuuuggaaug

SEQ ID NO: 1085393 - RNA, 19 nt, Artificial Sequence
  Description of Artificial Sequence: Synthetic oligonucleotide
uuagucacucguccaaaca

SEQ ID NO: 1085394 - RNA, 19 nt, Artificial Sequence
  Description of Artificial Sequence: Synthetic oligonucleotide
caauacucucaauuauucc

SEQ ID NO: 1085395 - RNA, 19 nt, Artificial Sequence
  Description of Artificial Sequence: Synthetic oligonucleotide
auuugucugaagaaaccac

SEQ ID NO: 1085396 - RNA, 19 nt, Artificial Sequence
  Description of Artificial Sequence: Synthetic oligonucleotide
cuuauuugaguaagaggug

SEQ ID NO: 1085397 - RNA, 19 nt, Artificial Sequence
  Description of Artificial Sequence: Synthetic oligonucleotide
ugaguaagaggugauacau

SEQ ID NO: 1085398 - RNA, 19 nt, Artificial Sequence
  Description of Artificial Sequence: Synthetic oligonucleotide
uucucguuuaguaaacaua

SEQ ID NO: 1085399 - RNA, 19 nt, Artificial Sequence
  Description of Artificial Sequence: Synthetic oligonucleotide
cauuauaauaaccauuucu

SEQ ID NO: 1085400 - RNA, 19 nt, Artificial Sequence
  Description of Artificial Sequence: Synthetic oligonucleotide
gucgaaguucacuacauca

SEQ ID NO: 1085401 - RNA, 19 nt, Artificial Sequence
  Description of Artificial Sequence: Synthetic oligonucleotide
agauagacucuuucaaacu

SEQ ID NO: 1085402 - RNA, 19 nt, Artificial Sequence
  Description of Artificial Sequence: Synthetic oligonucleotide
aguaaguugcagcucggug

SEQ ID NO: 1085403 - RNA, 19 nt, Artificial Sequence
  Description of Artificial Sequence: Synthetic oligonucleotide
cagcaaguauuaaauuucc

SEQ ID NO: 1085404 - RNA, 19 nt, Artificial Sequence
  Description of Artificial Sequence: Synthetic oligonucleotide
guaagucccuuuuacuuug

SEQ ID NO: 1085405 - RNA, 19 nt, Artificial Sequence
  Description of Artificial Sequence: Synthetic oligonucleotide
ugaaauguaugcccauuau

SEQ ID NO: 1085406 - RNA, 19 nt, Artificial Sequence
  Description of Artificial Sequence: Synthetic oligonucleotide
caaggcguugguacuaccg

SEQ ID NO: 1085407 - RNA, 19 nt, Artificial Sequence
  Description of Artificial Sequence: Synthetic oligonucleotide
cuauucccugaaauaacgc

SEQ ID NO: 1085408 - RNA, 19 nt, Artificial Sequence
  Description of Artificial Sequence: Synthetic oligonucleotide
ugcaauacucucaauuauu

SEQ ID NO: 1085409 - RNA, 19 nt, Artificial Sequence
  Description of Artificial Sequence: Synthetic oligonucleotide
gauuugucugaagaaacca

SEQ ID NO: 1085410 - RNA, 19 nt, Artificial Sequence
  Description of Artificial Sequence: Synthetic oligonucleotide
gauauggcaucuccugggc

SEQ ID NO: 1085411 - RNA, 19 nt, Artificial Sequence
  Description of Artificial Sequence: Synthetic oligonucleotide
acucgaucauuccagauuu

SEQ ID NO: 1085412 - RNA, 19 nt, Artificial Sequence
  Description of Artificial Sequence: Synthetic oligonucleotide
gguacuaccguuaugaaaa

SEQ ID NO: 1085413 - RNA, 19 nt, Artificial Sequence
  Description of Artificial Sequence: Synthetic oligonucleotide
caguacucgaucauuccag

SEQ ID NO: 1085414 - RNA, 19 nt, Artificial Sequence
  Description of Artificial Sequence: Synthetic oligonucleotide
auccucguaaggcuuaucu

SEQ ID NO: 1085415 - RNA, 19 nt, Artificial Sequence
  Description of Artificial Sequence: Synthetic oligonucleotide
augacuacgaaaauguuua

SEQ ID NO: 1085416 - RNA, 19 nt, Artificial Sequence
  Description of Artificial Sequence: Synthetic oligonucleotide
gagauuaucaagauagacu

SEQ ID NO: 1085417 - RNA, 19 nt, Artificial Sequence
  Description of Artificial Sequence: Synthetic oligonucleotide
ucgucguccaaauuccaug

SEQ ID NO: 1085418 - RNA, 19 nt, Artificial Sequence
  Description of Artificial Sequence: Synthetic oligonucleotide
ugaaacucguuuugguccu

SEQ ID NO: 1085419 - RNA, 19 nt, Artificial Sequence
  Description of Artificial Sequence: Synthetic oligonucleotide
uuggaaauccgcugcacaa

SEQ ID NO: 1085420 - RNA, 19 nt, Artificial Sequence
  Description of Artificial Sequence: Synthetic oligonucleotide
aacaucucggucagaaucu

SEQ ID NO: 1085421 - RNA, 19 nt, Artificial Sequence
  Description of Artificial Sequence: Synthetic oligonucleotide
aguauuugauccagcauug

SEQ ID NO: 1085422 - RNA, 19 nt, Artificial Sequence
  Description of Artificial Sequence: Synthetic oligonucleotide
ugcuauucccugaaauaac

SEQ ID NO: 1085423 - RNA, 19 nt, Artificial Sequence
  Description of Artificial Sequence: Synthetic oligonucleotide
guucuacagccauucgucg

SEQ ID NO: 1085424 - RNA, 19 nt, Artificial Sequence
  Description of Artificial Sequence: Synthetic oligonucleotide
aacgccaguugcaucacuc

SEQ ID NO: 1085425 - RNA, 19 nt, Artificial Sequence
  Description of Artificial Sequence: Synthetic oligonucleotide
ugucaagccaaggcguugg

SEQ ID NO: 1085426 - RNA, 19 nt, Artificial Sequence
  Description of Artificial Sequence: Synthetic oligonucleotide
uguuggaucuccugucuga

SEQ ID NO: 1085427 - RNA, 19 nt, Artificial Sequence
  Description of Artificial Sequence: Synthetic oligonucleotide
gauuuagucuuauuugagu

SEQ ID NO: 1085428 - RNA, 19 nt, Artificial Sequence
  Description of Artificial Sequence: Synthetic oligonucleotide
uuacuugacagugauguuu

SEQ ID NO: 1085429 - RNA, 19 nt, Artificial Sequence
  Description of Artificial Sequence: Synthetic oligonucleotide
uuuagucacucguccaaac

SEQ ID NO: 1085430 - RNA, 19 nt, Artificial Sequence
  Description of Artificial Sequence: Synthetic oligonucleotide
ugcuuauugucaagccaag

SEQ ID NO: 1085431 - RNA, 19 nt, Artificial Sequence
  Description of Artificial Sequence: Synthetic oligonucleotide
agucucauguuaauguaag

SEQ ID NO: 1085432 - RNA, 19 nt, Artificial Sequence
  Description of Artificial Sequence: Synthetic oligonucleotide
gaaauguaugcccauuaua

SEQ ID NO: 1085433 - RNA, 19 nt, Artificial Sequence
  Description of Artificial Sequence: Synthetic oligonucleotide
aauagccaagcuucagcau

SEQ ID NO: 1085434 - RNA, 19 nt, Artificial Sequence
  Description of Artificial Sequence: Synthetic oligonucleotide
augugaaagucucauguua

SEQ ID NO: 1085435 - RNA, 19 nt, Artificial Sequence
  Description of Artificial Sequence: Synthetic oligonucleotide
cauuaguauuugauccagc

SEQ ID NO: 1085436 - RNA, 19 nt, Artificial Sequence
  Description of Artificial Sequence: Synthetic oligonucleotide
uuccaagaugacuacgaaa

SEQ ID NO: 1085437 - RNA, 19 nt, Artificial Sequence
  Description of Artificial Sequence: Synthetic oligonucleotide
uacucucaauuauuccaag

SEQ ID NO: 1085438 - RNA, 19 nt, Artificial Sequence
  Description of Artificial Sequence: Synthetic oligonucleotide
uuauaacuuuaaugcccag

SEQ ID NO: 1085439 - RNA, 19 nt, Artificial Sequence
  Description of Artificial Sequence: Synthetic oligonucleotide
augcccauuauaauaacca

SEQ ID NO: 1085440 - RNA, 19 nt, Artificial Sequence
  Description of Artificial Sequence: Synthetic oligonucleotide
ugucugaaucaugaagccc

SEQ ID NO: 1085441 - RNA, 19 nt, Artificial Sequence
  Description of Artificial Sequence: Synthetic oligonucleotide
agcccuuaaugauacggug

SEQ ID NO: 1085442 - RNA, 19 nt, Artificial Sequence
  Description of Artificial Sequence: Synthetic oligonucleotide
auaugaagcggcugguuau

SEQ ID NO: 1085443 - RNA, 19 nt, Artificial Sequence
  Description of Artificial Sequence: Synthetic oligonucleotide
aaacucuccuccccauaug

SEQ ID NO: 1085444 - RNA, 19 nt, Artificial Sequence
  Description of Artificial Sequence: Synthetic oligonucleotide
aauuccaugucuggcaguu

SEQ ID NO: 1085445 - RNA, 19 nt, Artificial Sequence
  Description of Artificial Sequence: Synthetic oligonucleotide
cacucguccaaacacggug

SEQ ID NO: 1085446 - RNA, 19 nt, Artificial Sequence
  Description of Artificial Sequence: Synthetic oligonucleotide
aagauccgcacacaccgau

SEQ ID NO: 1085447 - RNA, 19 nt, Artificial Sequence
  Description of Artificial Sequence: Synthetic oligonucleotide
aguuucaucgaaaaugaua

SEQ ID NO: 1085448 - RNA, 19 nt, Artificial Sequence
  Description of Artificial Sequence: Synthetic oligonucleotide
uccucguaaggcuuaucug

SEQ ID NO: 1085449 - RNA, 19 nt, Artificial Sequence
  Description of Artificial Sequence: Synthetic oligonucleotide
cuacgaaaauguuuaacaa

SEQ ID NO: 1085450 - RNA, 19 nt, Artificial Sequence
  Description of Artificial Sequence: Synthetic oligonucleotide
cugucauggcguaauguug

SEQ ID NO: 1085451 - RNA, 19 nt, Artificial Sequence
  Description of Artificial Sequence: Synthetic oligonucleotide
acguucuacagccauucgu

SEQ ID NO: 1085452 - RNA, 19 nt, Artificial Sequence
  Description of Artificial Sequence: Synthetic oligonucleotide
ugguacuaccguuaugaaa

SEQ ID NO: 1085453 - RNA, 19 nt, Artificial Sequence
  Description of Artificial Sequence: Synthetic oligonucleotide
aucgaaaaugauauuaauu

SEQ ID NO: 1085454 - RNA, 19 nt, Artificial Sequence
  Description of Artificial Sequence: Synthetic oligonucleotide
gcuauucccugaaauaacg

SEQ ID NO: 1085455 - RNA, 19 nt, Artificial Sequence
  Description of Artificial Sequence: Synthetic oligonucleotide
gacuacgaaaauguuuaac

SEQ ID NO: 1085456 - RNA, 19 nt, Artificial Sequence
  Description of Artificial Sequence: Synthetic oligonucleotide
cuaacugcaauacucucaa

SEQ ID NO: 1085457 - RNA, 19 nt, Artificial Sequence
  Description of Artificial Sequence: Synthetic oligonucleotide
agucacucguccaaacacg

SEQ ID NO: 1085458 - RNA, 19 nt, Artificial Sequence
  Description of Artificial Sequence: Synthetic oligonucleotide
ucgaucauuccagauuugu

SEQ ID NO: 1085459 - RNA, 19 nt, Artificial Sequence
  Description of Artificial Sequence: Synthetic oligonucleotide
acaccgauuuguuucuaca

SEQ ID NO: 1085460 - RNA, 19 nt, Artificial Sequence
  Description of Artificial Sequence: Synthetic oligonucleotide
uguauggacaauggcacua

SEQ ID NO: 1085461 - RNA, 19 nt, Artificial Sequence
  Description of Artificial Sequence: Synthetic oligonucleotide
agaguguauggucugucau

SEQ ID NO: 1085462 - RNA, 19 nt, Artificial Sequence
  Description of Artificial Sequence: Synthetic oligonucleotide
ugguucucguuuaguaaac

SEQ ID NO: 1085463 - RNA, 19 nt, Artificial Sequence
  Description of Artificial Sequence: Synthetic oligonucleotide
augcugacauccucguaag

SEQ ID NO: 1085464 - RNA, 19 nt, Artificial Sequence
  Description of Artificial Sequence: Synthetic oligonucleotide
gguaccacaugugugauca

SEQ ID NO: 1085465 - RNA, 19 nt, Artificial Sequence
  Description of Artificial Sequence: Synthetic oligonucleotide
uucauugcuuuaucaucac

SEQ ID NO: 1085466 - RNA, 19 nt, Artificial Sequence
  Description of Artificial Sequence: Synthetic oligonucleotide
uguuaauguaagucccuuu

SEQ ID NO: 1085467 - RNA, 19 nt, Artificial Sequence
  Description of Artificial Sequence: Synthetic oligonucleotide
ugcccauuauaauaaccau

SEQ ID NO: 1085468 - RNA, 19 nt, Artificial Sequence
  Description of Artificial Sequence: Synthetic oligonucleotide
ggaaauccgcugcacaacc

SEQ ID NO: 1085469 - RNA, 19 nt, Artificial Sequence
  Description of Artificial Sequence: Synthetic oligonucleotide
guaacugcgcucauacaug

SEQ ID NO: 1085470 - RNA, 19 nt, Artificial Sequence
  Description of Artificial Sequence: Synthetic oligonucleotide
cacuggggagauuaucaag

SEQ ID NO: 1085471 - RNA, 19 nt, Artificial Sequence
  Description of Artificial Sequence: Synthetic oligonucleotide
ugcaucacucuaauauuuu

SEQ ID NO: 1085472 - RNA, 19 nt, Artificial Sequence
  Description of Artificial Sequence: Synthetic oligonucleotide
uagacucuuucaaacucua

SEQ ID NO: 1085473 - RNA, 19 nt, Artificial Sequence
  Description of Artificial Sequence: Synthetic oligonucleotide
ugggauugacuuuaacauu

SEQ ID NO: 1085474 - RNA, 19 nt, Artificial Sequence
  Description of Artificial Sequence: Synthetic oligonucleotide
ggagauuaucaagauagac

SEQ ID NO: 1085475 - RNA, 19 nt, Artificial Sequence
  Description of Artificial Sequence: Synthetic oligonucleotide
cagacaauuguugggucag

SEQ ID NO: 1085476 - RNA, 19 nt, Artificial Sequence
  Description of Artificial Sequence: Synthetic oligonucleotide
aagcccuuaaugauacggu

SEQ ID NO: 1085477 - RNA, 19 nt, Artificial Sequence
  Description of Artificial Sequence: Synthetic oligonucleotide
uuguauggacaauggcacu

SEQ ID NO: 1085478 - RNA, 19 nt, Artificial Sequence
  Description of Artificial Sequence: Synthetic oligonucleotide
gcuuguauggacaauggca

SEQ ID NO: 1085479 - RNA, 19 nt, Artificial Sequence
  Description of Artificial Sequence: Synthetic oligonucleotide
acauacuuaaugauucaau

SEQ ID NO: 1085480 - RNA, 19 nt, Artificial Sequence
  Description of Artificial Sequence: Synthetic oligonucleotide
ugucgaaguucacuacauc

SEQ ID NO: 1085481 - RNA, 19 nt, Artificial Sequence
  Description of Artificial Sequence: Synthetic oligonucleotide
uacagacaauuguuggguc

SEQ ID NO: 1085482 - RNA, 19 nt, Artificial Sequence
  Description of Artificial Sequence: Synthetic oligonucleotide
gagaguguauggucuguca

SEQ ID NO: 1085483 - RNA, 19 nt, Artificial Sequence
  Description of Artificial Sequence: Synthetic oligonucleotide
gaguaagaggugauacaug

SEQ ID NO: 1085484 - RNA, 19 nt, Artificial Sequence
  Description of Artificial Sequence: Synthetic oligonucleotide
cauacuuaaugauucaauu

SEQ ID NO: 1085485 - RNA, 19 nt, Artificial Sequence
  Description of Artificial Sequence: Synthetic oligonucleotide
accgauuuguuucuacauu

SEQ ID NO: 1085486 - RNA, 19 nt, Artificial Sequence
  Description of Artificial Sequence: Synthetic oligonucleotide
ucucccaugcuuguaugga

SEQ ID NO: 1085487 - RNA, 19 nt, Artificial Sequence
  Description of Artificial Sequence: Synthetic oligonucleotide
ccauucgucguccaaauuc

SEQ ID NO: 1085488 - RNA, 19 nt, Artificial Sequence
  Description of Artificial Sequence: Synthetic oligonucleotide
uggcguaauguugagugaa

SEQ ID NO: 1085489 - RNA, 19 nt, Artificial Sequence
  Description of Artificial Sequence: Synthetic oligonucleotide
caugaagcccuuaaugaua

SEQ ID NO: 1085490 - RNA, 19 nt, Artificial Sequence
  Description of Artificial Sequence: Synthetic oligonucleotide
cacggugugcuuauuguca

SEQ ID NO: 1085491 - RNA, 19 nt, Artificial Sequence
  Description of Artificial Sequence: Synthetic oligonucleotide
agacaauuguugggucagc

SEQ ID NO: 1085492 - RNA, 19 nt, Artificial Sequence
  Description of Artificial Sequence: Synthetic oligonucleotide
uuuacuugacagugauguu

SEQ ID NO: 1085493 - RNA, 19 nt, Artificial Sequence
  Description of Artificial Sequence: Synthetic oligonucleotide
auacucucaauuauuccaa

SEQ ID NO: 1085494 - RNA, 19 nt, Artificial Sequence
  Description of Artificial Sequence: Synthetic oligonucleotide
uccgcacacaccgauuugu

SEQ ID NO: 1085495 - RNA, 19 nt, Artificial Sequence
  Description of Artificial Sequence: Synthetic oligonucleotide
uggaaauccgcugcacaac

SEQ ID NO: 1085496 - RNA, 19 nt, Artificial Sequence
  Description of Artificial Sequence: Synthetic oligonucleotide
auauggcaucuccugggca

SEQ ID NO: 1085497 - RNA, 19 nt, Artificial Sequence
  Description of Artificial Sequence: Synthetic oligonucleotide
caucacucuaauauuuucu

SEQ ID NO: 1085498 - RNA, 19 nt, Artificial Sequence
  Description of Artificial Sequence: Synthetic oligonucleotide
guaccuguuggaucuccug

SEQ ID NO: 1085499 - RNA, 19 nt, Artificial Sequence
  Description of Artificial Sequence: Synthetic oligonucleotide
cuugccuaagauccgcaca

SEQ ID NO: 1085500 - RNA, 19 nt, Artificial Sequence
  Description of Artificial Sequence: Synthetic oligonucleotide
auacauggaguuugucaaa

SEQ ID NO: 1085501 - RNA, 19 nt, Artificial Sequence
  Description of Artificial Sequence: Synthetic oligonucleotide
ucaaacucuccuccccaua

SEQ ID NO: 1085502 - RNA, 19 nt, Artificial Sequence
  Description of Artificial Sequence: Synthetic oligonucleotide
guaugcccauuauaauaac

SEQ ID NO: 1085503 - RNA, 19 nt, Artificial Sequence
  Description of Artificial Sequence: Synthetic oligonucleotide
uugcuugccuaagauccgc

SEQ ID NO: 1085504 - RNA, 19 nt, Artificial Sequence
  Description of Artificial Sequence: Synthetic oligonucleotide
auaacgccaguugcaucac

SEQ ID NO: 1085505 - RNA, 19 nt, Artificial Sequence
  Description of Artificial Sequence: Synthetic oligonucleotide
cacaccgauuuguuucuac

SEQ ID NO: 1085506 - RNA, 19 nt, Artificial Sequence
  Description of Artificial Sequence: Synthetic oligonucleotide
cacauuuacuugacaguga

SEQ ID NO: 1085507 - RNA, 19 nt, Artificial Sequence
  Description of Artificial Sequence: Synthetic oligonucleotide
cacaugugugaucacaucu

SEQ ID NO: 1085508 - RNA, 19 nt, Artificial Sequence
  Description of Artificial Sequence: Synthetic oligonucleotide
auggcguaauguugaguga

SEQ ID NO: 1085509 - RNA, 19 nt, Artificial Sequence
  Description of Artificial Sequence: Synthetic oligonucleotide
ugacuacgaaaauguuuaa

SEQ ID NO: 1085510 - RNA, 19 nt, Artificial Sequence
  Description of Artificial Sequence: Synthetic oligonucleotide
uugguacuaccguuaugaa

SEQ ID NO: 1085511 - RNA, 19 nt, Artificial Sequence
  Description of Artificial Sequence: Synthetic oligonucleotide
gcaauacucucaauuauuc

SEQ ID NO: 1085512 - RNA, 19 nt, Artificial Sequence
  Description of Artificial Sequence: Synthetic oligonucleotide
uucacguucuacagccauu

SEQ ID NO: 1085513 - RNA, 19 nt, Artificial Sequence
  Description of Artificial Sequence: Synthetic oligonucleotide
uucaauucaugaggagguc

SEQ ID NO: 1085514 - RNA, 19 nt, Artificial Sequence
  Description of Artificial Sequence: Synthetic oligonucleotide
gucauggcguaauguugag

SEQ ID NO: 1085515 - RNA, 19 nt, Artificial Sequence
  Description of Artificial Sequence: Synthetic oligonucleotide
gaucaugucgaaguucacu

SEQ ID NO: 1085516 - RNA, 19 nt, Artificial Sequence
  Description of Artificial Sequence: Synthetic oligonucleotide
ucacucguccaaacacggu

SEQ ID NO: 1085517 - RNA, 19 nt, Artificial Sequence
  Description of Artificial Sequence: Synthetic oligonucleotide
agguccaguccaguacucg

SEQ ID NO: 1085518 - RNA, 19 nt, Artificial Sequence
  Description of Artificial Sequence: Synthetic oligonucleotide
ugagaguguauggucuguc

SEQ ID NO: 1085519 - RNA, 19 nt, Artificial Sequence
  Description of Artificial Sequence: Synthetic oligonucleotide
agcaaguauuaaauuucca

SEQ ID NO: 1085520 - RNA, 19 nt, Artificial Sequence
  Description of Artificial Sequence: Synthetic oligonucleotide
uugucaagccaaggcguug

SEQ ID NO: 1085521 - RNA, 19 nt, Artificial Sequence
  Description of Artificial Sequence: Synthetic oligonucleotide
acggugaaauguaugccca

SEQ ID NO: 1085522 - RNA, 19 nt, Artificial Sequence
  Description of Artificial Sequence: Synthetic oligonucleotide
ugaagcggcugguuaucuc

SEQ ID NO: 1085523 - RNA, 19 nt, Artificial Sequence
  Description of Artificial Sequence: Synthetic oligonucleotide
cugucuugguaccacaugu

SEQ ID NO: 1085524 - RNA, 19 nt, Artificial Sequence
  Description of Artificial Sequence: Synthetic oligonucleotide
gcuuauugucaagccaagg

SEQ ID NO: 1085525 - RNA, 19 nt, Artificial Sequence
  Description of Artificial Sequence: Synthetic oligonucleotide
ugggauccauuaguauuug

SEQ ID NO: 1085526 - RNA, 19 nt, Artificial Sequence
  Description of Artificial Sequence: Synthetic oligonucleotide
auagcacgaaguguccagu

SEQ ID NO: 1085527 - RNA, 19 nt, Artificial Sequence
  Description of Artificial Sequence: Synthetic oligonucleotide
ccaaauuccaugucuggca

SEQ ID NO: 1085528 - RNA, 19 nt, Artificial Sequence
  Description of Artificial Sequence: Synthetic oligonucleotide
auccacucacacuguccag

SEQ ID NO: 1085529 - RNA, 19 nt, Artificial Sequence
  Description of Artificial Sequence: Synthetic oligonucleotide
cuccucccauaccaguacc

SEQ ID NO: 1085530 - RNA, 19 nt, Artificial Sequence
  Description of Artificial Sequence: Synthetic oligonucleotide
agccauucgucguccaaau

SEQ ID NO: 1085531 - RNA, 19 nt, Artificial Sequence
  Description of Artificial Sequence: Synthetic oligonucleotide
agcacgaaguguccaguuu

SEQ ID NO: 1085532 - RNA, 19 nt, Artificial Sequence
  Description of Artificial Sequence: Synthetic oligonucleotide
auguuaauguaagucccuu

SEQ ID NO: 1085533 - RNA, 19 nt, Artificial Sequence
  Description of Artificial Sequence: Synthetic oligonucleotide
gcaucacucuaauauuuuc

SEQ ID NO: 1085534 - RNA, 19 nt, Artificial Sequence
  Description of Artificial Sequence: Synthetic oligonucleotide
gugaaugucucccaugcuu

SEQ ID NO: 1085535 - RNA, 19 nt, Artificial Sequence
  Description of Artificial Sequence: Synthetic oligonucleotide
ucauggcguaauguugagu

SEQ ID NO: 1085536 - RNA, 19 nt, Artificial Sequence
  Description of Artificial Sequence: Synthetic oligonucleotide
ucguccaaacacggugugc

SEQ ID NO: 1085537 - RNA, 19 nt, Artificial Sequence
  Description of Artificial Sequence: Synthetic oligonucleotide
cccauaugcuuucuccucc

SEQ ID NO: 1085538 - RNA, 19 nt, Artificial Sequence
  Description of Artificial Sequence: Synthetic oligonucleotide
agacucuuucaaacucuag

SEQ ID NO: 1085539 - RNA, 19 nt, Artificial Sequence
  Description of Artificial Sequence: Synthetic oligonucleotide
gcacgaaguguccaguuuc

SEQ ID NO: 1085540 - RNA, 19 nt, Artificial Sequence
  Description of Artificial Sequence: Synthetic oligonucleotide
ucguaaggcuuaucuguuu

SEQ ID NO: 1085541 - RNA, 19 nt, Artificial Sequence
  Description of Artificial Sequence: Synthetic oligonucleotide
uaacgccaguugcaucacu

SEQ ID NO: 1085542 - RNA, 19 nt, Artificial Sequence
  Description of Artificial Sequence: Synthetic oligonucleotide
gcuaacugcaauacucuca

SEQ ID NO: 1085543 - RNA, 19 nt, Artificial Sequence
  Description of Artificial Sequence: Synthetic oligonucleotide
guucucguuuaguaaacau

SEQ ID NO: 1085544 - RNA, 19 nt, Artificial Sequence
  Description of Artificial Sequence: Synthetic oligonucleotide
cuacagccauucgucgucc

SEQ ID NO: 1085545 - RNA, 19 nt, Artificial Sequence
  Description of Artificial Sequence: Synthetic oligonucleotide
augucgaaguucacuacau

SEQ ID NO: 1085546 - RNA, 19 nt, Artificial Sequence
  Description of Artificial Sequence: Synthetic oligonucleotide
gagcuaacugcaauacucu

SEQ ID NO: 1085547 - RNA, 19 nt, Artificial Sequence
  Description of Artificial Sequence: Synthetic oligonucleotide
caucgaaaaugauauuaau

SEQ ID NO: 1085548 - RNA, 19 nt, Artificial Sequence
  Description of Artificial Sequence: Synthetic oligonucleotide
uagcacgaaguguccaguu

SEQ ID NO: 1085549 - RNA, 19 nt, Artificial Sequence
  Description of Artificial Sequence: Synthetic oligonucleotide
ccacugcuuuauaaacugg

SEQ ID NO: 1085550 - RNA, 19 nt, Artificial Sequence
  Description of Artificial Sequence: Synthetic oligonucleotide
gauccgcacacaccgauuu

SEQ ID NO: 1085551 - RNA, 19 nt, Artificial Sequence
  Description of Artificial Sequence: Synthetic oligonucleotide
guguauggucugucauggc

SEQ ID NO: 1085552 - RNA, 19 nt, Artificial Sequence
  Description of Artificial Sequence: Synthetic oligonucleotide
cccauuauaauaaccauuu

SEQ ID NO: 1085553 - RNA, 19 nt, Artificial Sequence
  Description of Artificial Sequence: Synthetic oligonucleotide
ccauaugcuuucuccuccc

SEQ ID NO: 1085554 - RNA, 19 nt, Artificial Sequence
  Description of Artificial Sequence: Synthetic oligonucleotide
gccuaagauccgcacacac

SEQ ID NO: 1085555 - RNA, 19 nt, Artificial Sequence
  Description of Artificial Sequence: Synthetic oligonucleotide
auugucaagccaaggcguu

SEQ ID NO: 1085556 - RNA, 19 nt, Artificial Sequence
  Description of Artificial Sequence: Synthetic oligonucleotide
aggcguugguacuaccguu

SEQ ID NO: 1085557 - RNA, 19 nt, Artificial Sequence
  Description of Artificial Sequence: Synthetic oligonucleotide
cugugcauguaacugcgcu

SEQ ID NO: 1085558 - RNA, 19 nt, Artificial Sequence
  Description of Artificial Sequence: Synthetic oligonucleotide
aguaccuguuggaucuccu

SEQ ID NO: 1085559 - RNA, 19 nt, Artificial Sequence
  Description of Artificial Sequence: Synthetic oligonucleotide
gguccaguccaguacucga

SEQ ID NO: 1085560 - RNA, 19 nt, Artificial Sequence
  Description of Artificial Sequence: Synthetic oligonucleotide
ugcauguaacugcgcucau

SEQ ID NO: 1085561 - RNA, 19 nt, Artificial Sequence
  Description of Artificial Sequence: Synthetic oligonucleotide
cuuuagucacucguccaaa

SEQ ID NO: 1085562 - RNA, 19 nt, Artificial Sequence
  Description of Artificial Sequence: Synthetic oligonucleotide
cacuaucugaaacucguuu

SEQ ID NO: 1085563 - RNA, 19 nt, Artificial Sequence
  Description of Artificial Sequence: Synthetic oligonucleotide
gucucauguuaauguaagu

SEQ ID NO: 1085564 - RNA, 19 nt, Artificial Sequence
  Description of Artificial Sequence: Synthetic oligonucleotide
caaacucuccuccccauau

SEQ ID NO: 1085565 - RNA, 19 nt, Artificial Sequence
  Description of Artificial Sequence: Synthetic oligonucleotide
cugcaauacucucaauuau

SEQ ID NO: 1085566 - RNA, 19 nt, Artificial Sequence
  Description of Artificial Sequence: Synthetic oligonucleotide
uggcaguuguugccucauc

SEQ ID NO: 1085567 - RNA, 19 nt, Artificial Sequence
  Description of Artificial Sequence: Synthetic oligonucleotide
ggcaguuguugccucaucu

SEQ ID NO: 1085568 - RNA, 19 nt, Artificial Sequence
  Description of Artificial Sequence: Synthetic oligonucleotide
auucgucguccaaauucca

SEQ ID NO: 1085569 - RNA, 19 nt, Artificial Sequence
  Description of Artificial Sequence: Synthetic oligonucleotide
ccagauuugucugaagaaa

SEQ ID NO: 1085570 - RNA, 19 nt, Artificial Sequence
  Description of Artificial Sequence: Synthetic oligonucleotide
gacauccucguaaggcuua

SEQ ID NO: 1085571 - RNA, 19 nt, Artificial Sequence
  Description of Artificial Sequence: Synthetic oligonucleotide
cacacaccgauuuguuucu

SEQ ID NO: 1085572 - RNA, 19 nt, Artificial Sequence
  Description of Artificial Sequence: Synthetic oligonucleotide
aucuaacagcauccaccuu

SEQ ID NO: 1085573 - RNA, 19 nt, Artificial Sequence
  Description of Artificial Sequence: Synthetic oligonucleotide
gaaauccgcugcacaaccu

SEQ ID NO: 1085574 - RNA, 19 nt, Artificial Sequence
  Description of Artificial Sequence: Synthetic oligonucleotide
aguucacguucuacagcca

SEQ ID NO: 1085575 - RNA, 19 nt, Artificial Sequence
  Description of Artificial Sequence: Synthetic oligonucleotide
gguucucguuuaguaaaca

SEQ ID NO: 1085576 - RNA, 19 nt, Artificial Sequence
  Description of Artificial Sequence: Synthetic oligonucleotide
ccauuccuuuagucacucg

SEQ ID NO: 1085577 - RNA, 19 nt, Artificial Sequence
  Description of Artificial Sequence: Synthetic oligonucleotide
guacucgaucauuccagau

SEQ ID NO: 1085578 - RNA, 19 nt, Artificial Sequence
  Description of Artificial Sequence: Synthetic oligonucleotide
acgaaguguccaguuucau

SEQ ID NO: 1085579 - RNA, 19 nt, Artificial Sequence
  Description of Artificial Sequence: Synthetic oligonucleotide
cucguaaggcuuaucuguu

SEQ ID NO: 1085580 - RNA, 19 nt, Artificial Sequence
  Description of Artificial Sequence: Synthetic oligonucleotide
gggauccauuaguauuuga

SEQ ID NO: 1085581 - RNA, 19 nt, Artificial Sequence
  Description of Artificial Sequence: Synthetic oligonucleotide
gggagauuaucaagauaga

SEQ ID NO: 1085582 - RNA, 19 nt, Artificial Sequence
  Description of Artificial Sequence: Synthetic oligonucleotide
cacugucuugggacacuca

SEQ ID NO: 1085583 - RNA, 19 nt, Artificial Sequence
  Description of Artificial Sequence: Synthetic oligonucleotide
gcacuggggagauuaucaa

SEQ ID NO: 1085584 - RNA, 19 nt, Artificial Sequence
  Description of Artificial Sequence: Synthetic oligonucleotide
agccaaggcguugguacua

SEQ ID NO: 1085585 - RNA, 19 nt, Artificial Sequence
  Description of Artificial Sequence: Synthetic oligonucleotide
ccgauuuguuucuacauuu

SEQ ID NO: 1085586 - RNA, 19 nt, Artificial Sequence
  Description of Artificial Sequence: Synthetic oligonucleotide
ccaaggcguugguacuacc

SEQ ID NO: 1085587 - RNA, 19 nt, Artificial Sequence
  Description of Artificial Sequence: Synthetic oligonucleotide
agauccgcacacaccgauu

SEQ ID NO: 1085588 - RNA, 19 nt, Artificial Sequence
  Description of Artificial Sequence: Synthetic oligonucleotide
caguugcaucacucuaaua

SEQ ID NO: 1085589 - RNA, 19 nt, Artificial Sequence
  Description of Artificial Sequence: Synthetic oligonucleotide
ggcguugguacuaccguua

SEQ ID NO: 1085590 - RNA, 19 nt, Artificial Sequence
  Description of Artificial Sequence: Synthetic oligonucleotide
gcuuaucuguuuugggauu

SEQ ID NO: 1085591 - RNA, 19 nt, Artificial Sequence
  Description of Artificial Sequence: Synthetic oligonucleotide
ggcguaauguugagugaaa

SEQ ID NO: 1085592 - RNA, 19 nt, Artificial Sequence
  Description of Artificial Sequence: Synthetic oligonucleotide
gcccauuauaauaaccauu

SEQ ID NO: 1085593 - RNA, 19 nt, Artificial Sequence
  Description of Artificial Sequence: Synthetic oligonucleotide
cugagaguguauggucugu

SEQ ID NO: 1085594 - RNA, 19 nt, Artificial Sequence
  Description of Artificial Sequence: Synthetic oligonucleotide
gccaaggcguugguacuac

SEQ ID NO: 1085595 - RNA, 19 nt, Artificial Sequence
  Description of Artificial Sequence: Synthetic oligonucleotide
acacaccgauuuguuucua

SEQ ID NO: 1085596 - RNA, 19 nt, Artificial Sequence
  Description of Artificial Sequence: Synthetic oligonucleotide
cguugguacuaccguuaug

SEQ ID NO: 1085597 - RNA, 19 nt, Artificial Sequence
  Description of Artificial Sequence: Synthetic oligonucleotide
cguaauguugagugaaauu

SEQ ID NO: 1085598 - RNA, 19 nt, Artificial Sequence
  Description of Artificial Sequence: Synthetic oligonucleotide
gcguaauguugagugaaau

SEQ ID NO: 1085599 - RNA, 19 nt, Artificial Sequence
  Description of Artificial Sequence: Synthetic oligonucleotide
cgucguccaaauuccaugu

SEQ ID NO: 1085600 - RNA, 19 nt, Artificial Sequence
  Description of Artificial Sequence: Synthetic oligonucleotide
ccaguugcaucacucuaau

SEQ ID NO: 1085601 - RNA, 19 nt, Artificial Sequence
  Description of Artificial Sequence: Synthetic oligonucleotide
cccuuuuacuuuggaaugu

SEQ ID NO: 1085602 - RNA, 19 nt, Artificial Sequence
  Description of Artificial Sequence: Synthetic oligonucleotide
gggucagcuugaacauucu

SEQ ID NO: 1085603 - RNA, 19 nt, Artificial Sequence
  Description of Artificial Sequence: Synthetic oligonucleotide
cgccaguugcaucacucua

SEQ ID NO: 1085604 - RNA, 19 nt, Artificial Sequence
  Description of Artificial Sequence: Synthetic oligonucleotide
gccauucgucguccaaauu

SEQ ID NO: 1085605 - RNA, 19 nt, Artificial Sequence
  Description of Artificial Sequence: Synthetic oligonucleotide
gcacuaucugaaacucguu

SEQ ID NO: 1085606 - RNA, 19 nt, Artificial Sequence
  Description of Artificial Sequence: Synthetic oligonucleotide
ccgcacacaccgauuuguu

SEQ ID NO: 1085607 - RNA, 19 nt, Artificial Sequence
  Description of Artificial Sequence: Synthetic oligonucleotide
ccaugcuuguauggacaau

SEQ ID NO: 1085608 - RNA, 19 nt, Artificial Sequence
  Description of Artificial Sequence: Synthetic oligonucleotide
aauaauuggacuuuugugg

SEQ ID NO: 1085609 - RNA, 19 nt, Artificial Sequence
  Description of Artificial Sequence: Synthetic oligonucleotide
ugagacaaaagaaugagag

SEQ ID NO: 1085610 - RNA, 19 nt, Artificial Sequence
  Description of Artificial Sequence: Synthetic oligonucleotide
acaauuaaaaccuuuaugu

SEQ ID NO: 1085611 - RNA, 19 nt, Artificial Sequence
  Description of Artificial Sequence: Synthetic oligonucleotide
uguacuaaauuuuacauca

SEQ ID NO: 1085612 - RNA, 19 nt, Artificial Sequence
  Description of Artificial Sequence: Synthetic oligonucleotide
uuugagacaauuaaaaccu

SEQ ID NO: 1085613 - RNA, 19 nt, Artificial Sequence
  Description of Artificial Sequence: Synthetic oligonucleotide
aaaaggaaaagggugagac

SEQ ID NO: 1085614 - RNA, 19 nt, Artificial Sequence
  Description of Artificial Sequence: Synthetic oligonucleotide
aagaaugagagcaagacag

SEQ ID NO: 1085615 - RNA, 19 nt, Artificial Sequence
  Description of Artificial Sequence: Synthetic oligonucleotide
aaauaauuggacuuuugug

SEQ ID NO: 1085616 - RNA, 19 nt, Artificial Sequence
  Description of Artificial Sequence: Synthetic oligonucleotide
aaaagggugagacaaaaga

SEQ ID NO: 1085617 - RNA, 19 nt, Artificial Sequence
  Description of Artificial Sequence: Synthetic oligonucleotide
guaccaaugaaauaauugg

SEQ ID NO: 1085618 - RNA, 19 nt, Artificial Sequence
  Description of Artificial Sequence: Synthetic oligonucleotide
auaauuggacuuuuguggc

SEQ ID NO: 1085619 - RNA, 19 nt, Artificial Sequence
  Description of Artificial Sequence: Synthetic oligonucleotide
uguaccaaugaaauaauug

SEQ ID NO: 1085620 - RNA, 19 nt, Artificial Sequence
  Description of Artificial Sequence: Synthetic oligonucleotide
acuuuuauucacuugaagu

SEQ ID NO: 1085621 - RNA, 19 nt, Artificial Sequence
  Description of Artificial Sequence: Synthetic oligonucleotide
agcuacauaaaacuagggg

SEQ ID NO: 1085622 - RNA, 19 nt, Artificial Sequence
  Description of Artificial Sequence: Synthetic oligonucleotide
uuauguacuaaauuuuaca

SEQ ID NO: 1085623 - RNA, 19 nt, Artificial Sequence
  Description of Artificial Sequence: Synthetic oligonucleotide
uaaaaucuguuccaaaccu

SEQ ID NO: 1085624 - RNA, 19 nt, Artificial Sequence
  Description of Artificial Sequence: Synthetic oligonucleotide
cuacauaaaacuaggggcc

SEQ ID NO: 1085625 - RNA, 19 nt, Artificial Sequence
  Description of Artificial Sequence: Synthetic oligonucleotide
gacaauuaaaaccuuuaug

SEQ ID NO: 1085626 - RNA, 19 nt, Artificial Sequence
  Description of Artificial Sequence: Synthetic oligonucleotide
ucagaagaagagaaggaag

SEQ ID NO: 1085627 - RNA, 19 nt, Artificial Sequence
  Description of Artificial Sequence: Synthetic oligonucleotide
agacaaaagaaugagagca

SEQ ID NO: 1085628 - RNA, 19 nt, Artificial Sequence
  Description of Artificial Sequence: Synthetic oligonucleotide
uauguacuaaauuuuacau

SEQ ID NO: 1085629 - RNA, 19 nt, Artificial Sequence
  Description of Artificial Sequence: Synthetic oligonucleotide
uuaugucagaagaagagaa

SEQ ID NO: 1085630 - RNA, 19 nt, Artificial Sequence
  Description of Artificial Sequence: Synthetic oligonucleotide
uaaaacuaggggcccagcg

SEQ ID NO: 1085631 - RNA, 19 nt, Artificial Sequence
  Description of Artificial Sequence: Synthetic oligonucleotide
aaugagagcaagacaggcc

SEQ ID NO: 1085632 - RNA, 19 nt, Artificial Sequence
  Description of Artificial Sequence: Synthetic oligonucleotide
aaagaaugagagcaagaca

SEQ ID NO: 1085633 - RNA, 19 nt, Artificial Sequence
  Description of Artificial Sequence: Synthetic oligonucleotide
aaaucuguuccaaaccugg

SEQ ID NO: 1085634 - RNA, 19 nt, Artificial Sequence
  Description of Artificial Sequence: Synthetic oligonucleotide
gcuacauaaaacuaggggc

SEQ ID NO: 1085635 - RNA, 19 nt, Artificial Sequence
  Description of Artificial Sequence: Synthetic oligonucleotide
auacaugucucacccauac

SEQ ID NO: 1085636 - RNA, 19 nt, Artificial Sequence
  Description of Artificial Sequence: Synthetic oligonucleotide
aucuauauguucccuguac

SEQ ID NO: 1085637 - RNA, 19 nt, Artificial Sequence
  Description of Artificial Sequence: Synthetic oligonucleotide
uuuauguacuaaauuuuac

SEQ ID NO: 1085638 - RNA, 19 nt, Artificial Sequence
  Description of Artificial Sequence: Synthetic oligonucleotide
ucuauauguucccuguacc

SEQ ID NO: 1085639 - RNA, 19 nt, Artificial Sequence
  Description of Artificial Sequence: Synthetic oligonucleotide
agucuugccauugacuucc

SEQ ID NO: 1085640 - RNA, 19 nt, Artificial Sequence
  Description of Artificial Sequence: Synthetic oligonucleotide
uacuaaauuuuacaucaug

SEQ ID NO: 1085641 - RNA, 19 nt, Artificial Sequence
  Description of Artificial Sequence: Synthetic oligonucleotide
aaugaugacagaauaugcu

SEQ ID NO: 1085642 - RNA, 19 nt, Artificial Sequence
  Description of Artificial Sequence: Synthetic oligonucleotide
uuuaacuuuuauucacuug

SEQ ID NO: 1085643 - RNA, 19 nt, Artificial Sequence
  Description of Artificial Sequence: Synthetic oligonucleotide
aaggaaaagggugagacaa

SEQ ID NO: 1085644 - RNA, 19 nt, Artificial Sequence
  Description of Artificial Sequence: Synthetic oligonucleotide
guucauacaugucucaccc

SEQ ID NO: 1085645 - RNA, 19 nt, Artificial Sequence
  Description of Artificial Sequence: Synthetic oligonucleotide
acaugucucacccauacca

SEQ ID NO: 1085646 - RNA, 19 nt, Artificial Sequence
  Description of Artificial Sequence: Synthetic oligonucleotide
uaugucagaagaagagaag

SEQ ID NO: 1085647 - RNA, 19 nt, Artificial Sequence
  Description of Artificial Sequence: Synthetic oligonucleotide
aagaagagaaggaagacaa

SEQ ID NO: 1085648 - RNA, 19 nt, Artificial Sequence
  Description of Artificial Sequence: Synthetic oligonucleotide
accaaugaaauaauuggac

SEQ ID NO: 1085649 - RNA, 19 nt, Artificial Sequence
  Description of Artificial Sequence: Synthetic oligonucleotide
uaccaaugaaauaauugga

SEQ ID NO: 1085650 - RNA, 19 nt, Artificial Sequence
  Description of Artificial Sequence: Synthetic oligonucleotide
auuaaaaccuuuauguacu

SEQ ID NO: 1085651 - RNA, 19 nt, Artificial Sequence
  Description of Artificial Sequence: Synthetic oligonucleotide
caaugaugacagaauaugc

SEQ ID NO: 1085652 - RNA, 19 nt, Artificial Sequence
  Description of Artificial Sequence: Synthetic oligonucleotide
aagacaaaaggaaaagggu

SEQ ID NO: 1085653 - RNA, 19 nt, Artificial Sequence
  Description of Artificial Sequence: Synthetic oligonucleotide
aaguucuuuccauaauugu

SEQ ID NO: 1085654 - RNA, 19 nt, Artificial Sequence
  Description of Artificial Sequence: Synthetic oligonucleotide
agcaagacaggccagaaaa

SEQ ID NO: 1085655 - RNA, 19 nt, Artificial Sequence
  Description of Artificial Sequence: Synthetic oligonucleotide
auucacuugaaguuuauuu

SEQ ID NO: 1085656 - RNA, 19 nt, Artificial Sequence
  Description of Artificial Sequence: Synthetic oligonucleotide
uucccagcuacauaaaacu

SEQ ID NO: 1085657 - RNA, 19 nt, Artificial Sequence
  Description of Artificial Sequence: Synthetic oligonucleotide
cuuuccauaauugucauca

SEQ ID NO: 1085658 - RNA, 19 nt, Artificial Sequence
  Description of Artificial Sequence: Synthetic oligonucleotide
acuaaauuuuacaucauga

SEQ ID NO: 1085659 - RNA, 19 nt, Artificial Sequence
  Description of Artificial Sequence: Synthetic oligonucleotide
aauuggacuuuuguggcag

SEQ ID NO: 1085660 - RNA, 19 nt, Artificial Sequence
  Description of Artificial Sequence: Synthetic oligonucleotide
aagacaggccagaaaauuc

SEQ ID NO: 1085661 - RNA, 19 nt, Artificial Sequence
  Description of Artificial Sequence: Synthetic oligonucleotide
gagacaaaagaaugagagc

SEQ ID NO: 1085662 - RNA, 19 nt, Artificial Sequence
  Description of Artificial Sequence: Synthetic oligonucleotide
augagagcaagacaggcca

SEQ ID NO: 1085663 - RNA, 19 nt, Artificial Sequence
  Description of Artificial Sequence: Synthetic oligonucleotide
uccaaaccuggaaucaucc

SEQ ID NO: 1085664 - RNA, 19 nt, Artificial Sequence
  Description of Artificial Sequence: Synthetic oligonucleotide
uguucauacaugucucacc

SEQ ID NO: 1085665 - RNA, 19 nt, Artificial Sequence
  Description of Artificial Sequence: Synthetic oligonucleotide
ugaugacagaauaugcuaa

SEQ ID NO: 1085666 - RNA, 19 nt, Artificial Sequence
  Description of Artificial Sequence: Synthetic oligonucleotide
ucauacaugucucacccau

SEQ ID NO: 1085667 - RNA, 19 nt, Artificial Sequence
  Description of Artificial Sequence: Synthetic oligonucleotide
aaaggaaaagggugagaca

SEQ ID NO: 1085668 - RNA, 19 nt, Artificial Sequence
  Description of Artificial Sequence: Synthetic oligonucleotide
ucaucuauauguucccugu

SEQ ID NO: 1085669 - RNA, 19 nt, Artificial Sequence
  Description of Artificial Sequence: Synthetic oligonucleotide
gaaguucuuuccauaauug

SEQ ID NO: 1085670 - RNA, 19 nt, Artificial Sequence
  Description of Artificial Sequence: Synthetic oligonucleotide
uucccuguaccaaugaaau

SEQ ID NO: 1085671 - RNA, 19 nt, Artificial Sequence
  Description of Artificial Sequence: Synthetic oligonucleotide
gaugacagaauaugcuaac

SEQ ID NO: 1085672 - RNA, 19 nt, Artificial Sequence
  Description of Artificial Sequence: Synthetic oligonucleotide
agaaguucuuuccauaauu

SEQ ID NO: 1085673 - RNA, 19 nt, Artificial Sequence
  Description of Artificial Sequence: Synthetic oligonucleotide
ucagaaguucuuuccauaa

SEQ ID NO: 1085674 - RNA, 19 nt, Artificial Sequence
  Description of Artificial Sequence: Synthetic oligonucleotide
auugacuuccuguucauuu

SEQ ID NO: 1085675 - RNA, 19 nt, Artificial Sequence
  Description of Artificial Sequence: Synthetic oligonucleotide
acaaaagaaugagagcaag

SEQ ID NO: 1085676 - RNA, 19 nt, Artificial Sequence
  Description of Artificial Sequence: Synthetic oligonucleotide
gaaugagagcaagacaggc

SEQ ID NO: 1085677 - RNA, 19 nt, Artificial Sequence
  Description of Artificial Sequence: Synthetic oligonucleotide
aaaaucuguuccaaaccug

SEQ ID NO: 1085678 - RNA, 19 nt, Artificial Sequence
  Description of Artificial Sequence: Synthetic oligonucleotide
aaagggugagacaaaagaa

SEQ ID NO: 1085679 - RNA, 19 nt, Artificial Sequence
  Description of Artificial Sequence: Synthetic oligonucleotide
ugcgucagaaguucuuucc

SEQ ID NO: 1085680 - RNA, 19 nt, Artificial Sequence
  Description of Artificial Sequence: Synthetic oligonucleotide
ugacuuccuguucauuucc

SEQ ID NO: 1085681 - RNA, 19 nt, Artificial Sequence
  Description of Artificial Sequence: Synthetic oligonucleotide
ugacagaauaugcuaacuu

SEQ ID NO: 1085682 - RNA, 19 nt, Artificial Sequence
  Description of Artificial Sequence: Synthetic oligonucleotide
uauguucccuguaccaaug

SEQ ID NO: 1085683 - RNA, 19 nt, Artificial Sequence
  Description of Artificial Sequence: Synthetic oligonucleotide
acagaauaugcuaacuuug

SEQ ID NO: 1085684 - RNA, 19 nt, Artificial Sequence
  Description of Artificial Sequence: Synthetic oligonucleotide
agaaggaagacaaaaggaa

SEQ ID NO: 1085685 - RNA, 19 nt, Artificial Sequence
  Description of Artificial Sequence: Synthetic oligonucleotide
ucccuuaugucagaagaag

SEQ ID NO: 1085686 - RNA, 19 nt, Artificial Sequence
  Description of Artificial Sequence: Synthetic oligonucleotide
augaugacagaauaugcua

SEQ ID NO: 1085687 - RNA, 19 nt, Artificial Sequence
  Description of Artificial Sequence: Synthetic oligonucleotide
ugucucacccauaccaaga

SEQ ID NO: 1085688 - RNA, 19 nt, Artificial Sequence
  Description of Artificial Sequence: Synthetic oligonucleotide
agacaauuaaaaccuuuau

SEQ ID NO: 1085689 - RNA, 19 nt, Artificial Sequence
  Description of Artificial Sequence: Synthetic oligonucleotide
gaagaagagaaggaagaca

SEQ ID NO: 1085690 - RNA, 19 nt, Artificial Sequence
  Description of Artificial Sequence: Synthetic oligonucleotide
aagggugagacaaaagaau

SEQ ID NO: 1085691 - RNA, 19 nt, Artificial Sequence
  Description of Artificial Sequence: Synthetic oligonucleotide
ccuuaugucagaagaagag

SEQ ID NO: 1085692 - RNA, 19 nt, Artificial Sequence
  Description of Artificial Sequence: Synthetic oligonucleotide
uacauaaaacuaggggccc

SEQ ID NO: 1085693 - RNA, 19 nt, Artificial Sequence
  Description of Artificial Sequence: Synthetic oligonucleotide
uguuccaaaccuggaauca

SEQ ID NO: 1085694 - RNA, 19 nt, Artificial Sequence
  Description of Artificial Sequence: Synthetic oligonucleotide
ggugagacaaaagaaugag

SEQ ID NO: 1085695 - RNA, 19 nt, Artificial Sequence
  Description of Artificial Sequence: Synthetic oligonucleotide
acaaaaggaaaagggugag

SEQ ID NO: 1085696 - RNA, 19 nt, Artificial Sequence
  Description of Artificial Sequence: Synthetic oligonucleotide
auuggacuuuuguggcagc

SEQ ID NO: 1085697 - RNA, 19 nt, Artificial Sequence
  Description of Artificial Sequence: Synthetic oligonucleotide
uuuccauaauugucaucag

SEQ ID NO: 1085698 - RNA, 19 nt, Artificial Sequence
  Description of Artificial Sequence: Synthetic oligonucleotide
agaauaugcuaacuuugaa

SEQ ID NO: 1085699 - RNA, 19 nt, Artificial Sequence
  Description of Artificial Sequence: Synthetic oligonucleotide
uauauguucccuguaccaa

SEQ ID NO: 1085700 - RNA, 19 nt, Artificial Sequence
  Description of Artificial Sequence: Synthetic oligonucleotide
acuuuuguggcagcaacug

SEQ ID NO: 1085701 - RNA, 19 nt, Artificial Sequence
  Description of Artificial Sequence: Synthetic oligonucleotide
gaaaagggugagacaaaag

SEQ ID NO: 1085702 - RNA, 19 nt, Artificial Sequence
  Description of Artificial Sequence: Synthetic oligonucleotide
uaauuggacuuuuguggca

SEQ ID NO: 1085703 - RNA, 19 nt, Artificial Sequence
  Description of Artificial Sequence: Synthetic oligonucleotide
ucucacccauaccaagaag

SEQ ID NO: 1085704 - RNA, 19 nt, Artificial Sequence
  Description of Artificial Sequence: Synthetic oligonucleotide
ccagcuacauaaaacuagg

SEQ ID NO: 1085705 - RNA, 19 nt, Artificial Sequence
  Description of Artificial Sequence: Synthetic oligonucleotide
gcaaugaugacagaauaug

SEQ ID NO: 1085706 - RNA, 19 nt, Artificial Sequence
  Description of Artificial Sequence: Synthetic oligonucleotide
cuauauguucccuguacca

SEQ ID NO: 1085707 - RNA, 19 nt, Artificial Sequence
  Description of Artificial Sequence: Synthetic oligonucleotide
aggccagaaaauucuucuc

SEQ ID NO: 1085708 - RNA, 19 nt, Artificial Sequence
  Description of Artificial Sequence: Synthetic oligonucleotide
agggugagacaaaagaaug

SEQ ID NO: 1085709 - RNA, 19 nt, Artificial Sequence
  Description of Artificial Sequence: Synthetic oligonucleotide
uugacuuccuguucauuuc

SEQ ID NO: 1085710 - RNA, 19 nt, Artificial Sequence
  Description of Artificial Sequence: Synthetic oligonucleotide
augucucacccauaccaag

SEQ ID NO: 1085711 - RNA, 19 nt, Artificial Sequence
  Description of Artificial Sequence: Synthetic oligonucleotide
auauguucccuguaccaau

SEQ ID NO: 1085712 - RNA, 19 nt, Artificial Sequence
  Description of Artificial Sequence: Synthetic oligonucleotide
cuuuuauucacuugaaguu

SEQ ID NO: 1085713 - RNA, 19 nt, Artificial Sequence
  Description of Artificial Sequence: Synthetic oligonucleotide
agaaugagagcaagacagg

SEQ ID NO: 1085714 - RNA, 19 nt, Artificial Sequence
  Description of Artificial Sequence: Synthetic oligonucleotide
cagcuacauaaaacuaggg

SEQ ID NO: 1085715 - RNA, 19 nt, Artificial Sequence
  Description of Artificial Sequence: Synthetic oligonucleotide
ggccagaaaauucuucucc

SEQ ID NO: 1085716 - RNA, 19 nt, Artificial Sequence
  Description of Artificial Sequence: Synthetic oligonucleotide
auaaaacuaggggcccagc

SEQ ID NO: 1085717 - RNA, 19 nt, Artificial Sequence
  Description of Artificial Sequence: Synthetic oligonucleotide
ugagagcaagacaggccag

SEQ ID NO: 1085718 - RNA, 19 nt, Artificial Sequence
  Description of Artificial Sequence: Synthetic oligonucleotide
cagaauaugcuaacuuuga

SEQ ID NO: 1085719 - RNA, 19 nt, Artificial Sequence
  Description of Artificial Sequence: Synthetic oligonucleotide
caauuaaaaccuuuaugua

SEQ ID NO: 1085720 - RNA, 19 nt, Artificial Sequence
  Description of Artificial Sequence: Synthetic oligonucleotide
uuccaaaccuggaaucauc

SEQ ID NO: 1085721 - RNA, 19 nt, Artificial Sequence
  Description of Artificial Sequence: Synthetic oligonucleotide
cacuccucccuuaugucag

SEQ ID NO: 1085722 - RNA, 19 nt, Artificial Sequence
  Description of Artificial Sequence: Synthetic oligonucleotide
agccacuccucccuuaugu

SEQ ID NO: 1085723 - RNA, 19 nt, Artificial Sequence
  Description of Artificial Sequence: Synthetic oligonucleotide
uuaaaaccuuuauguacua

SEQ ID NO: 1085724 - RNA, 19 nt, Artificial Sequence
  Description of Artificial Sequence: Synthetic oligonucleotide
gacagaauaugcuaacuuu

SEQ ID NO: 1085725 - RNA, 19 nt, Artificial Sequence
  Description of Artificial Sequence: Synthetic oligonucleotide
uacaugucucacccauacc

SEQ ID NO: 1085726 - RNA, 19 nt, Artificial Sequence
  Description of Artificial Sequence: Synthetic oligonucleotide
cuuaugucagaagaagaga

SEQ ID NO: 1085727 - RNA, 19 nt, Artificial Sequence
  Description of Artificial Sequence: Synthetic oligonucleotide
uguucccuguaccaaugaa

SEQ ID NO: 1085728 - RNA, 19 nt, Artificial Sequence
  Description of Artificial Sequence: Synthetic oligonucleotide
cuguuccaaaccuggaauc

SEQ ID NO: 1085729 - RNA, 19 nt, Artificial Sequence
  Description of Artificial Sequence: Synthetic oligonucleotide
uuauucacuugaaguuuau

SEQ ID NO: 1085730 - RNA, 19 nt, Artificial Sequence
  Description of Artificial Sequence: Synthetic oligonucleotide
gagacaauuaaaaccuuua

SEQ ID NO: 1085731 - RNA, 19 nt, Artificial Sequence
  Description of Artificial Sequence: Synthetic oligonucleotide
cccagcuacauaaaacuag

SEQ ID NO: 1085732 - RNA, 19 nt, Artificial Sequence
  Description of Artificial Sequence: Synthetic oligonucleotide
cauaaaacuaggggcccag

SEQ ID NO: 1085733 - RNA, 19 nt, Artificial Sequence
  Description of Artificial Sequence: Synthetic oligonucleotide
uugccauugacuuccuguu

SEQ ID NO: 1085734 - RNA, 19 nt, Artificial Sequence
  Description of Artificial Sequence: Synthetic oligonucleotide
agacaggccagaaaauucu

SEQ ID NO: 1085735 - RNA, 19 nt, Artificial Sequence
  Description of Artificial Sequence: Synthetic oligonucleotide
uucauacaugucucaccca

SEQ ID NO: 1085736 - RNA, 19 nt, Artificial Sequence
  Description of Artificial Sequence: Synthetic oligonucleotide
gccagaaaauucuucuccc

SEQ ID NO: 1085737 - RNA, 19 nt, Artificial Sequence
  Description of Artificial Sequence: Synthetic oligonucleotide
caaugaaauaauuggacuu

SEQ ID NO: 1085738 - RNA, 19 nt, Artificial Sequence
  Description of Artificial Sequence: Synthetic oligonucleotide
augacagaauaugcuaacu

SEQ ID NO: 1085739 - RNA, 19 nt, Artificial Sequence
  Description of Artificial Sequence: Synthetic oligonucleotide
ucccagcuacauaaaacua

SEQ ID NO: 1085740 - RNA, 19 nt, Artificial Sequence
  Description of Artificial Sequence: Synthetic oligonucleotide
cuugccauugacuuccugu

SEQ ID NO: 1085741 - RNA, 19 nt, Artificial Sequence
  Description of Artificial Sequence: Synthetic oligonucleotide
gucagaagaagagaaggaa

SEQ ID NO: 1085742 - RNA, 19 nt, Artificial Sequence
  Description of Artificial Sequence: Synthetic oligonucleotide
aaucuguuccaaaccugga

SEQ ID NO: 1085743 - RNA, 19 nt, Artificial Sequence
  Description of Artificial Sequence: Synthetic oligonucleotide
uugagacaauuaaaaccuu

SEQ ID NO: 1085744 - RNA, 19 nt, Artificial Sequence
  Description of Artificial Sequence: Synthetic oligonucleotide
gacaaaagaaugagagcaa

SEQ ID NO: 1085745 - RNA, 19 nt, Artificial Sequence
  Description of Artificial Sequence: Synthetic oligonucleotide
ucuuuccauaauugucauc

SEQ ID NO: 1085746 - RNA, 19 nt, Artificial Sequence
  Description of Artificial Sequence: Synthetic oligonucleotide
uccucccuuaugucagaag

SEQ ID NO: 1085747 - RNA, 19 nt, Artificial Sequence
  Description of Artificial Sequence: Synthetic oligonucleotide
agcaaugaugacagaauau

SEQ ID NO: 1085748 - RNA, 19 nt, Artificial Sequence
  Description of Artificial Sequence: Synthetic oligonucleotide
uuggacuuuuguggcagca

SEQ ID NO: 1085749 - RNA, 19 nt, Artificial Sequence
  Description of Artificial Sequence: Synthetic oligonucleotide
ggacuuuuguggcagcaac

SEQ ID NO: 1085750 - RNA, 19 nt, Artificial Sequence
  Description of Artificial Sequence: Synthetic oligonucleotide
ccagaaaauucuucucccc

SEQ ID NO: 1085751 - RNA, 19 nt, Artificial Sequence
  Description of Artificial Sequence: Synthetic oligonucleotide
ugccauugacuuccuguuc

SEQ ID NO: 1085752 - RNA, 19 nt, Artificial Sequence
  Description of Artificial Sequence: Synthetic oligonucleotide
ucuugccauugacuuccug

SEQ ID NO: 1085753 - RNA, 19 nt, Artificial Sequence
  Description of Artificial Sequence: Synthetic oligonucleotide
gugagacaaaagaaugaga

SEQ ID NO: 1085754 - RNA, 19 nt, Artificial Sequence
  Description of Artificial Sequence: Synthetic oligonucleotide
acauaaaacuaggggccca

SEQ ID NO: 1085755 - RNA, 19 nt, Artificial Sequence
  Description of Artificial Sequence: Synthetic oligonucleotide
gucagaaguucuuuccaua

SEQ ID NO: 1085756 - RNA, 19 nt, Artificial Sequence
  Description of Artificial Sequence: Synthetic oligonucleotide
guucccuguaccaaugaaa

SEQ ID NO: 1085757 - RNA, 19 nt, Artificial Sequence
  Description of Artificial Sequence: Synthetic oligonucleotide
auguucccuguaccaauga

SEQ ID NO: 1085758 - RNA, 19 nt, Artificial Sequence
  Description of Artificial Sequence: Synthetic oligonucleotide
caggccagaaaauucuucu

SEQ ID NO: 1085759 - RNA, 19 nt, Artificial Sequence
  Description of Artificial Sequence: Synthetic oligonucleotide
caugucucacccauaccaa

SEQ ID NO: 1085760 - RNA, 19 nt, Artificial Sequence
  Description of Artificial Sequence: Synthetic oligonucleotide
uggacuuuuguggcagcaa

SEQ ID NO: 1085761 - RNA, 19 nt, Artificial Sequence
  Description of Artificial Sequence: Synthetic oligonucleotide
gucucacccauaccaagaa

SEQ ID NO: 1085762 - RNA, 19 nt, Artificial Sequence
  Description of Artificial Sequence: Synthetic oligonucleotide
ccucccuuaugucagaaga

SEQ ID NO: 1085763 - RNA, 19 nt, Artificial Sequence
  Description of Artificial Sequence: Synthetic oligonucleotide
cccuguaccaaugaaauaa

SEQ ID NO: 1085764 - RNA, 19 nt, Artificial Sequence
  Description of Artificial Sequence: Synthetic oligonucleotide
ccaaugaaauaauuggacu

SEQ ID NO: 1085765 - RNA, 19 nt, Artificial Sequence
  Description of Artificial Sequence: Synthetic oligonucleotide
cucccuuaugucagaagaa

SEQ ID NO: 1085766 - RNA, 19 nt, Artificial Sequence
  Description of Artificial Sequence: Synthetic oligonucleotide
ggaaaagggugagacaaaa

SEQ ID NO: 1085767 - RNA, 19 nt, Artificial Sequence
  Description of Artificial Sequence: Synthetic oligonucleotide
ccaaaccuggaaucauccc

SEQ ID NO: 1085768 - RNA, 19 nt, Artificial Sequence
  Description of Artificial Sequence: Synthetic oligonucleotide
gagcaagacaggccagaaa

SEQ ID NO: 1085769 - RNA, 19 nt, Artificial Sequence
  Description of Artificial Sequence: Synthetic oligonucleotide
gggcccgcgccgcagaagg

SEQ ID NO: 1085770 - RNA, 19 nt, Artificial Sequence
  Description of Artificial Sequence: Synthetic oligonucleotide
agagcaagacaggccagaa

SEQ ID NO: 1085771 - RNA, 19 nt, Artificial Sequence
  Description of Artificial Sequence: Synthetic oligonucleotide
gggugagacaaaagaauga

SEQ ID NO: 1085772 - RNA, 19 nt, Artificial Sequence
  Description of Artificial Sequence: Synthetic oligonucleotide
gacuuuuguggcagcaacu

SEQ ID NO: 1085773 - RNA, 19 nt, Artificial Sequence
  Description of Artificial Sequence: Synthetic oligonucleotide
acuccucccuuaugucaga

SEQ ID NO: 1085774 - RNA, 19 nt, Artificial Sequence
  Description of Artificial Sequence: Synthetic oligonucleotide
cauacaugucucacccaua

SEQ ID NO: 1085775 - RNA, 19 nt, Artificial Sequence
  Description of Artificial Sequence: Synthetic oligonucleotide
cccuuaugucagaagaaga

SEQ ID NO: 1085776 - RNA, 19 nt, Artificial Sequence
  Description of Artificial Sequence: Synthetic oligonucleotide
gcgucagaaguucuuucca

SEQ ID NO: 1085777 - RNA, 19 nt, Artificial Sequence
  Description of Artificial Sequence: Synthetic oligonucleotide
caucuauauguucccugua

SEQ ID NO: 1085778 - RNA, 19 nt, Artificial Sequence
  Description of Artificial Sequence: Synthetic oligonucleotide
aggaaaagggugagacaaa

SEQ ID NO: 1085779 - RNA, 19 nt, Artificial Sequence
  Description of Artificial Sequence: Synthetic oligonucleotide
caagacaggccagaaaauu

SEQ ID NO: 1085780 - RNA, 19 nt, Artificial Sequence
  Description of Artificial Sequence: Synthetic oligonucleotide
cuguaccaaugaaauaauu

SEQ ID NO: 1085781 - RNA, 19 nt, Artificial Sequence
  Description of Artificial Sequence: Synthetic oligonucleotide
gacuuccuguucauuuccu

SEQ ID NO: 1085782 - RNA, 19 nt, Artificial Sequence
  Description of Artificial Sequence: Synthetic oligonucleotide
ccacuccucccuuauguca

SEQ ID NO: 1085783 - RNA, 19 nt, Artificial Sequence
  Description of Artificial Sequence: Synthetic oligonucleotide
cagaaguucuuuccauaau

SEQ ID NO: 1085784 - RNA, 19 nt, Artificial Sequence
  Description of Artificial Sequence: Synthetic oligonucleotide
guuccaaaccuggaaucau

SEQ ID NO: 1085785 - RNA, 19 nt, Artificial Sequence
  Description of Artificial Sequence: Synthetic oligonucleotide
guacuaaauuuuacaucau

SEQ ID NO: 1085786 - RNA, 19 nt, Artificial Sequence
  Description of Artificial Sequence: Synthetic oligonucleotide
accagccacuccucccuua

SEQ ID NO: 1085787 - RNA, 19 nt, Artificial Sequence
  Description of Artificial Sequence: Synthetic oligonucleotide
cagccacuccucccuuaug

SEQ ID NO: 1085788 - RNA, 19 nt, Artificial Sequence
  Description of Artificial Sequence: Synthetic oligonucleotide
gccacuccucccuuauguc

SEQ ID NO: 1085789 - RNA, 19 nt, Artificial Sequence
  Description of Artificial Sequence: Synthetic oligonucleotide
uggcgagggcccgcgccgc

SEQ ID NO: 1085790 - RNA, 19 nt, Artificial Sequence
  Description of Artificial Sequence: Synthetic oligonucleotide
agggcccgcgccgcagaag

SEQ ID NO: 1085791 - RNA, 19 nt, Artificial Sequence
  Description of Artificial Sequence: Synthetic oligonucleotide
ccuguaccaaugaaauaau

SEQ ID NO: 1085792 - RNA, 19 nt, Artificial Sequence
  Description of Artificial Sequence: Synthetic oligonucleotide
gagggcccgcgccgcagaa

SEQ ID NO: 1085793 - RNA, 19 nt, Artificial Sequence
  Description of Artificial Sequence: Synthetic oligonucleotide
cuccucccuuaugucagaa

SEQ ID NO: 1085794 - RNA, 19 nt, Artificial Sequence
  Description of Artificial Sequence: Synthetic oligonucleotide
cauugacuuccuguucauu

SEQ ID NO: 1085795 - RNA, 19 nt, Artificial Sequence
  Description of Artificial Sequence: Synthetic oligonucleotide
cgucagaaguucuuuccau

SEQ ID NO: 1085796 - RNA, 19 nt, Artificial Sequence
  Description of Artificial Sequence: Synthetic oligonucleotide
ccauugacuuccuguucau

SEQ ID NO: 1085797 - RNA, 19 nt, Artificial Sequence
  Description of Artificial Sequence: Synthetic oligonucleotide
gucuugccauugacuuccu

SEQ ID NO: 1085798 - RNA, 19 nt, Artificial Sequence
  Description of Artificial Sequence: Synthetic oligonucleotide
ccagccacuccucccuuau

SEQ ID NO: 1085799 - RNA, 19 nt, Artificial Sequence
  Description of Artificial Sequence: Synthetic oligonucleotide
ggcccgcgccgcagaagga

SEQ ID NO: 1085800 - RNA, 19 nt, Artificial Sequence
  Description of Artificial Sequence: Synthetic oligonucleotide
cgagggcccgcgccgcaga

SEQ ID NO: 1085801 - RNA, 19 nt, Artificial Sequence
  Description of Artificial Sequence: Synthetic oligonucleotide
aauaucacuacugaugucc

SEQ ID NO: 1085802 - RNA, 19 nt, Artificial Sequence
  Description of Artificial Sequence: Synthetic oligonucleotide
aauauagucgcucagcagu

SEQ ID NO: 1085803 - RNA, 19 nt, Artificial Sequence
  Description of Artificial Sequence: Synthetic oligonucleotide
auaaguguccgucaugucc

SEQ ID NO: 1085804 - RNA, 19 nt, Artificial Sequence
  Description of Artificial Sequence: Synthetic oligonucleotide
gugaugacaacuuaguacg

SEQ ID NO: 1085805 - RNA, 19 nt, Artificial Sequence
  Description of Artificial Sequence: Synthetic oligonucleotide
accuaaauacuucaccucc

SEQ ID NO: 1085806 - RNA, 19 nt, Artificial Sequence
  Description of Artificial Sequence: Synthetic oligonucleotide
auaucagcuguccaggacc

SEQ ID NO: 1085807 - RNA, 19 nt, Artificial Sequence
  Description of Artificial Sequence: Synthetic oligonucleotide
uaaauggcgacacaauucc

SEQ ID NO: 1085808 - RNA, 19 nt, Artificial Sequence
  Description of Artificial Sequence: Synthetic oligonucleotide
uguguuagggcacaugucc

SEQ ID NO: 1085809 - RNA, 19 nt, Artificial Sequence
  Description of Artificial Sequence: Synthetic oligonucleotide
aauaucagcuguccaggac

SEQ ID NO: 1085810 - RNA, 19 nt, Artificial Sequence
  Description of Artificial Sequence: Synthetic oligonucleotide
ggaauacucguuuaaaugg

SEQ ID NO: 1085811 - RNA, 19 nt, Artificial Sequence
  Description of Artificial Sequence: Synthetic oligonucleotide
auuucaguccuacuggagg

SEQ ID NO: 1085812 - RNA, 19 nt, Artificial Sequence
  Description of Artificial Sequence: Synthetic oligonucleotide
uuugccuugucuaugaaau

SEQ ID NO: 1085813 - RNA, 19 nt, Artificial Sequence
  Description of Artificial Sequence: Synthetic oligonucleotide
ucaugugcaaaauaucagc

SEQ ID NO: 1085814 - RNA, 19 nt, Artificial Sequence
  Description of Artificial Sequence: Synthetic oligonucleotide
gacaacuuaguacguagcg

SEQ ID NO: 1085815 - RNA, 19 nt, Artificial Sequence
  Description of Artificial Sequence: Synthetic oligonucleotide
aaagucgaugguugacucc

SEQ ID NO: 1085816 - RNA, 19 nt, Artificial Sequence
  Description of Artificial Sequence: Synthetic oligonucleotide
gacgaagaggcccagaggc

SEQ ID NO: 1085817 - RNA, 19 nt, Artificial Sequence
  Description of Artificial Sequence: Synthetic oligonucleotide
ucaauauagucgcucagca

SEQ ID NO: 1085818 - RNA, 19 nt, Artificial Sequence
  Description of Artificial Sequence: Synthetic oligonucleotide
ugacguuguaggcagacag

SEQ ID NO: 1085819 - RNA, 19 nt, Artificial Sequence
  Description of Artificial Sequence: Synthetic oligonucleotide
agaacucauggauggaggc

SEQ ID NO: 1085820 - RNA, 19 nt, Artificial Sequence
  Description of Artificial Sequence: Synthetic oligonucleotide
aaugcaggauuucaguccu

SEQ ID NO: 1085821 - RNA, 19 nt, Artificial Sequence
  Description of Artificial Sequence: Synthetic oligonucleotide
aggaauacucguuuaaaug

SEQ ID NO: 1085822 - RNA, 19 nt, Artificial Sequence
  Description of Artificial Sequence: Synthetic oligonucleotide
aguguacgcugucacaacc

SEQ ID NO: 1085823 - RNA, 19 nt, Artificial Sequence
  Description of Artificial Sequence: Synthetic oligonucleotide
ucaccuuuuaggaauacuc

SEQ ID NO: 1085824 - RNA, 19 nt, Artificial Sequence
  Description of Artificial Sequence: Synthetic oligonucleotide
aagucgaugguugacuccg

SEQ ID NO: 1085825 - RNA, 19 nt, Artificial Sequence
  Description of Artificial Sequence: Synthetic oligonucleotide
uauggauguuaacugaccu

SEQ ID NO: 1085826 - RNA, 19 nt, Artificial Sequence
  Description of Artificial Sequence: Synthetic oligonucleotide
aauacucguuuaaauggcg

SEQ ID NO: 1085827 - RNA, 19 nt, Artificial Sequence
  Description of Artificial Sequence: Synthetic oligonucleotide
ugcacuaucugacaaggaa

SEQ ID NO: 1085828 - RNA, 19 nt, Artificial Sequence
  Description of Artificial Sequence: Synthetic oligonucleotide
aagcugucagugaugauac

SEQ ID NO: 1085829 - RNA, 19 nt, Artificial Sequence
  Description of Artificial Sequence: Synthetic oligonucleotide
agcgcuucaauaucacuac

SEQ ID NO: 1085830 - RNA, 19 nt, Artificial Sequence
  Description of Artificial Sequence: Synthetic oligonucleotide
agucugucuggcucgacgc

SEQ ID NO: 1085831 - RNA, 19 nt, Artificial Sequence
  Description of Artificial Sequence: Synthetic oligonucleotide
gacagcagcgaugucaugg

SEQ ID NO: 1085832 - RNA, 19 nt, Artificial Sequence
  Description of Artificial Sequence: Synthetic oligonucleotide
uuuaggaauacucguuuaa

SEQ ID NO: 1085833 - RNA, 19 nt, Artificial Sequence
  Description of Artificial Sequence: Synthetic oligonucleotide
acuggagggguucagguag

SEQ ID NO: 1085834 - RNA, 19 nt, Artificial Sequence
  Description of Artificial Sequence: Synthetic oligonucleotide
uaugcuacaggcauugcua

SEQ ID NO: 1085835 - RNA, 19 nt, Artificial Sequence
  Description of Artificial Sequence: Synthetic oligonucleotide
caacuuaguacguagcgug

SEQ ID NO: 1085836 - RNA, 19 nt, Artificial Sequence
  Description of Artificial Sequence: Synthetic oligonucleotide
aucucuacucuuuucaccu

SEQ ID NO: 1085837 - RNA, 19 nt, Artificial Sequence
  Description of Artificial Sequence: Synthetic oligonucleotide
uuguggaagagucaucgcu

SEQ ID NO: 1085838 - RNA, 19 nt, Artificial Sequence
  Description of Artificial Sequence: Synthetic oligonucleotide
aacccaucacgcugagucc

SEQ ID NO: 1085839 - RNA, 19 nt, Artificial Sequence
  Description of Artificial Sequence: Synthetic oligonucleotide
caccuuuuaggaauacucg

SEQ ID NO: 1085840 - RNA, 19 nt, Artificial Sequence
  Description of Artificial Sequence: Synthetic oligonucleotide
ucuugcuauggggugaugg

SEQ ID NO: 1085841 - RNA, 19 nt, Artificial Sequence
  Description of Artificial Sequence: Synthetic oligonucleotide
aauggcgacacaauuccag

SEQ ID NO: 1085842 - RNA, 19 nt, Artificial Sequence
  Description of Artificial Sequence: Synthetic oligonucleotide
gaugaagggccucaaacca

SEQ ID NO: 1085843 - RNA, 19 nt, Artificial Sequence
  Description of Artificial Sequence: Synthetic oligonucleotide
ucugcggcgaccuugcucu

SEQ ID NO: 1085844 - RNA, 19 nt, Artificial Sequence
  Description of Artificial Sequence: Synthetic oligonucleotide
uaucucuacucuuuucacc

SEQ ID NO: 1085845 - RNA, 19 nt, Artificial Sequence
  Description of Artificial Sequence: Synthetic oligonucleotide
aaggaucauguccuccccg

SEQ ID NO: 1085846 - RNA, 19 nt, Artificial Sequence
  Description of Artificial Sequence: Synthetic oligonucleotide
ugucagugaugauaccacg

SEQ ID NO: 1085847 - RNA, 19 nt, Artificial Sequence
  Description of Artificial Sequence: Synthetic oligonucleotide
ucauaaguguccgucaugu

SEQ ID NO: 1085848 - RNA, 19 nt, Artificial Sequence
  Description of Artificial Sequence: Synthetic oligonucleotide
ucagcaucauaaguguccg

SEQ ID NO: 1085849 - RNA, 19 nt, Artificial Sequence
  Description of Artificial Sequence: Synthetic oligonucleotide
uaagacaaguguacgcugu

SEQ ID NO: 1085850 - RNA, 19 nt, Artificial Sequence
  Description of Artificial Sequence: Synthetic oligonucleotide
agcaucauaaguguccguc

SEQ ID NO: 1085851 - RNA, 19 nt, Artificial Sequence
  Description of Artificial Sequence: Synthetic oligonucleotide
aaguguacgcugucacaac

SEQ ID NO: 1085852 - RNA, 19 nt, Artificial Sequence
  Description of Artificial Sequence: Synthetic oligonucleotide
guggggauaugcuacaggc

SEQ ID NO: 1085853 - RNA, 19 nt, Artificial Sequence
  Description of Artificial Sequence: Synthetic oligonucleotide
agcugucgcaggcugauac

SEQ ID NO: 1085854 - RNA, 19 nt, Artificial Sequence
  Description of Artificial Sequence: Synthetic oligonucleotide
uauucauguagcagugcug

SEQ ID NO: 1085855 - RNA, 19 nt, Artificial Sequence
  Description of Artificial Sequence: Synthetic oligonucleotide
gaauacucguuuaaauggc

SEQ ID NO: 1085856 - RNA, 19 nt, Artificial Sequence
  Description of Artificial Sequence: Synthetic oligonucleotide
gcugucacaacccaucacg

SEQ ID NO: 1085857 - RNA, 19 nt, Artificial Sequence
  Description of Artificial Sequence: Synthetic oligonucleotide
uccguguaaacaaucugga

SEQ ID NO: 1085858 - RNA, 19 nt, Artificial Sequence
  Description of Artificial Sequence: Synthetic oligonucleotide
ucucugacauaggagacag

SEQ ID NO: 1085859 - RNA, 19 nt, Artificial Sequence
  Description of Artificial Sequence: Synthetic oligonucleotide
aauauugcucgguccagaa

SEQ ID NO: 1085860 - RNA, 19 nt, Artificial Sequence
  Description of Artificial Sequence: Synthetic oligonucleotide
acugcacuaucugacaagg

SEQ ID NO: 1085861 - RNA, 19 nt, Artificial Sequence
  Description of Artificial Sequence: Synthetic oligonucleotide
ucucaauauagucgcucag

SEQ ID NO: 1085862 - RNA, 19 nt, Artificial Sequence
  Description of Artificial Sequence: Synthetic oligonucleotide
agggccucaaaccaagcag

SEQ ID NO: 1085863 - RNA, 19 nt, Artificial Sequence
  Description of Artificial Sequence: Synthetic oligonucleotide
uggauguuaacugaccuaa

SEQ ID NO: 1085864 - RNA, 19 nt, Artificial Sequence
  Description of Artificial Sequence: Synthetic oligonucleotide
uagcgcuucaauaucacua

SEQ ID NO: 1085865 - RNA, 19 nt, Artificial Sequence
  Description of Artificial Sequence: Synthetic oligonucleotide
caaaccaagcagcaggaac

SEQ ID NO: 1085866 - RNA, 19 nt, Artificial Sequence
  Description of Artificial Sequence: Synthetic oligonucleotide
ugacaacuuaguacguagc

SEQ ID NO: 1085867 - RNA, 19 nt, Artificial Sequence
  Description of Artificial Sequence: Synthetic oligonucleotide
ucacgcugaguccuggucc

SEQ ID NO: 1085868 - RNA, 19 nt, Artificial Sequence
  Description of Artificial Sequence: Synthetic oligonucleotide
uuaguacguagcgugagca

SEQ ID NO: 1085869 - RNA, 19 nt, Artificial Sequence
  Description of Artificial Sequence: Synthetic oligonucleotide
auagcuguguaagacaagu

SEQ ID NO: 1085870 - RNA, 19 nt, Artificial Sequence
  Description of Artificial Sequence: Synthetic oligonucleotide
accuuuuaggaauacucgu

SEQ ID NO: 1085871 - RNA, 19 nt, Artificial Sequence
  Description of Artificial Sequence: Synthetic oligonucleotide
gauaccacggccaucuuuc

SEQ ID NO: 1085872 - RNA, 19 nt, Artificial Sequence
  Description of Artificial Sequence: Synthetic oligonucleotide
cuugcuauggggugauggc

SEQ ID NO: 1085873 - RNA, 19 nt, Artificial Sequence
  Description of Artificial Sequence: Synthetic oligonucleotide
uaggaauacucguuuaaau

SEQ ID NO: 1085874 - RNA, 19 nt, Artificial Sequence
  Description of Artificial Sequence: Synthetic oligonucleotide
acguuguaggcagacagac

SEQ ID NO: 1085875 - RNA, 19 nt, Artificial Sequence
  Description of Artificial Sequence: Synthetic oligonucleotide
agcgugagcauguaguccu

SEQ ID NO: 1085876 - RNA, 19 nt, Artificial Sequence
  Description of Artificial Sequence: Synthetic oligonucleotide
uaaggucucugagaguuag

SEQ ID NO: 1085877 - RNA, 19 nt, Artificial Sequence
  Description of Artificial Sequence: Synthetic oligonucleotide
aggacuggcucuuccugcc

SEQ ID NO: 1085878 - RNA, 19 nt, Artificial Sequence
  Description of Artificial Sequence: Synthetic oligonucleotide
cuuuggcucggagagaugc

SEQ ID NO: 1085879 - RNA, 19 nt, Artificial Sequence
  Description of Artificial Sequence: Synthetic oligonucleotide
auggcgacacaauuccagg

SEQ ID NO: 1085880 - RNA, 19 nt, Artificial Sequence
  Description of Artificial Sequence: Synthetic oligonucleotide
gaugucauggaugggcacc

SEQ ID NO: 1085881 - RNA, 19 nt, Artificial Sequence
  Description of Artificial Sequence: Synthetic oligonucleotide
aguggggauaugcuacagg

SEQ ID NO: 1085882 - RNA, 19 nt, Artificial Sequence
  Description of Artificial Sequence: Synthetic oligonucleotide
gacaaguguacgcugucac

SEQ ID NO: 1085883 - RNA, 19 nt, Artificial Sequence
  Description of Artificial Sequence: Synthetic oligonucleotide
cucaauauagucgcucagc

SEQ ID NO: 1085884 - RNA, 19 nt, Artificial Sequence
  Description of Artificial Sequence: Synthetic oligonucleotide
ugaccggucaucagggcug

SEQ ID NO: 1085885 - RNA, 19 nt, Artificial Sequence
  Description of Artificial Sequence: Synthetic oligonucleotide
uguacgcugucacaaccca

SEQ ID NO: 1085886 - RNA, 19 nt, Artificial Sequence
  Description of Artificial Sequence: Synthetic oligonucleotide
uacucguuuaaauggcgac

SEQ ID NO: 1085887 - RNA, 19 nt, Artificial Sequence
  Description of Artificial Sequence: Synthetic oligonucleotide
uucucaugggcuuucuuau

SEQ ID NO: 1085888 - RNA, 19 nt, Artificial Sequence
  Description of Artificial Sequence: Synthetic oligonucleotide
ugcggcuguccccauagag

SEQ ID NO: 1085889 - RNA, 19 nt, Artificial Sequence
  Description of Artificial Sequence: Synthetic oligonucleotide
cauugcuaagccccugacg

SEQ ID NO: 1085890 - RNA, 19 nt, Artificial Sequence
  Description of Artificial Sequence: Synthetic oligonucleotide
aucaugugcaaaauaucag

SEQ ID NO: 1085891 - RNA, 19 nt, Artificial Sequence
  Description of Artificial Sequence: Synthetic oligonucleotide
caauauagucgcucagcag

SEQ ID NO: 1085892 - RNA, 19 nt, Artificial Sequence
  Description of Artificial Sequence: Synthetic oligonucleotide
uuuuaggaauacucguuua

SEQ ID NO: 1085893 - RNA, 19 nt, Artificial Sequence
  Description of Artificial Sequence: Synthetic oligonucleotide
uggugcucagggcacggcg

SEQ ID NO: 1085894 - RNA, 19 nt, Artificial Sequence
  Description of Artificial Sequence: Synthetic oligonucleotide
cugacgaagaggcccagag

SEQ ID NO: 1085895 - RNA, 19 nt, Artificial Sequence
  Description of Artificial Sequence: Synthetic oligonucleotide
uguggaggccccaucaaau

SEQ ID NO: 1085896 - RNA, 19 nt, Artificial Sequence
  Description of Artificial Sequence: Synthetic oligonucleotide
ucuucugcggcgaccuugc

SEQ ID NO: 1085897 - RNA, 19 nt, Artificial Sequence
  Description of Artificial Sequence: Synthetic oligonucleotide
ucacuacugauguccaaga

SEQ ID NO: 1085898 - RNA, 19 nt, Artificial Sequence
  Description of Artificial Sequence: Synthetic oligonucleotide
guaaacaaucuggaagacc

SEQ ID NO: 1085899 - RNA, 19 nt, Artificial Sequence
  Description of Artificial Sequence: Synthetic oligonucleotide
aagaucaugcggucccacu

SEQ ID NO: 1085900 - RNA, 19 nt, Artificial Sequence
  Description of Artificial Sequence: Synthetic oligonucleotide
cuuaguacguagcgugagc

SEQ ID NO: 1085901 - RNA, 19 nt, Artificial Sequence
  Description of Artificial Sequence: Synthetic oligonucleotide
cugacagucuugcuauggg

SEQ ID NO: 1085902 - RNA, 19 nt, Artificial Sequence
  Description of Artificial Sequence: Synthetic oligonucleotide
ugacaaggaaccugcgcug

SEQ ID NO: 1085903 - RNA, 19 nt, Artificial Sequence
  Description of Artificial Sequence: Synthetic oligonucleotide
aaauauugcucgguccaga

SEQ ID NO: 1085904 - RNA, 19 nt, Artificial Sequence
  Description of Artificial Sequence: Synthetic oligonucleotide
uccccagagucugagaagc

SEQ ID NO: 1085905 - RNA, 19 nt, Artificial Sequence
  Description of Artificial Sequence: Synthetic oligonucleotide
gaugauaccacggccaucu

SEQ ID NO: 1085906 - RNA, 19 nt, Artificial Sequence
  Description of Artificial Sequence: Synthetic oligonucleotide
gaccuaaauacuucaccuc

SEQ ID NO: 1085907 - RNA, 19 nt, Artificial Sequence
  Description of Artificial Sequence: Synthetic oligonucleotide
gaauagcuguguaagacaa

SEQ ID NO: 1085908 - RNA, 19 nt, Artificial Sequence
  Description of Artificial Sequence: Synthetic oligonucleotide
agaaagucgaugguugacu

SEQ ID NO: 1085909 - RNA, 19 nt, Artificial Sequence
  Description of Artificial Sequence: Synthetic oligonucleotide
cuaucugacaaggaaccug

SEQ ID NO: 1085910 - RNA, 19 nt, Artificial Sequence
  Description of Artificial Sequence: Synthetic oligonucleotide
cuacaggcauugcuaagcc

SEQ ID NO: 1085911 - RNA, 19 nt, Artificial Sequence
  Description of Artificial Sequence: Synthetic oligonucleotide
ucauggaugggcacccuaa

SEQ ID NO: 1085912 - RNA, 19 nt, Artificial Sequence
  Description of Artificial Sequence: Synthetic oligonucleotide
aucuuucacgccaaugguc

SEQ ID NO: 1085913 - RNA, 19 nt, Artificial Sequence
  Description of Artificial Sequence: Synthetic oligonucleotide
ucuggcucgacgcgcucgg

SEQ ID NO: 1085914 - RNA, 19 nt, Artificial Sequence
  Description of Artificial Sequence: Synthetic oligonucleotide
aguacguagcgugagcaug

SEQ ID NO: 1085915 - RNA, 19 nt, Artificial Sequence
  Description of Artificial Sequence: Synthetic oligonucleotide
uuucugcacauagacuuug

SEQ ID NO: 1085916 - RNA, 19 nt, Artificial Sequence
  Description of Artificial Sequence: Synthetic oligonucleotide
gauuucaguccuacuggag

SEQ ID NO: 1085917 - RNA, 19 nt, Artificial Sequence
  Description of Artificial Sequence: Synthetic oligonucleotide
ugcuaagccccugacgaag

SEQ ID NO: 1085918 - RNA, 19 nt, Artificial Sequence
  Description of Artificial Sequence: Synthetic oligonucleotide
agcauguaguccugcagca

SEQ ID NO: 1085919 - RNA, 19 nt, Artificial Sequence
  Description of Artificial Sequence: Synthetic oligonucleotide
cucacucucgcugacaguc

SEQ ID NO: 1085920 - RNA, 19 nt, Artificial Sequence
  Description of Artificial Sequence: Synthetic oligonucleotide
gagaguuagaagaggaaaa

SEQ ID NO: 1085921 - RNA, 19 nt, Artificial Sequence
  Description of Artificial Sequence: Synthetic oligonucleotide
auguccaccuuuguggaag

SEQ ID NO: 1085922 - RNA, 19 nt, Artificial Sequence
  Description of Artificial Sequence: Synthetic oligonucleotide
aaguguccgucauguccac

SEQ ID NO: 1085923 - RNA, 19 nt, Artificial Sequence
  Description of Artificial Sequence: Synthetic oligonucleotide
cacaguagaggaccuggcc

SEQ ID NO: 1085924 - RNA, 19 nt, Artificial Sequence
  Description of Artificial Sequence: Synthetic oligonucleotide
auauagucgcucagcaguc

SEQ ID NO: 1085925 - RNA, 19 nt, Artificial Sequence
  Description of Artificial Sequence: Synthetic oligonucleotide
aucauaaguguccgucaug

SEQ ID NO: 1085926 - RNA, 19 nt, Artificial Sequence
  Description of Artificial Sequence: Synthetic oligonucleotide
cagugaugauaccacggcc

SEQ ID NO: 1085927 - RNA, 19 nt, Artificial Sequence
  Description of Artificial Sequence: Synthetic oligonucleotide
acaacuuaguacguagcgu

SEQ ID NO: 1085928 - RNA, 19 nt, Artificial Sequence
  Description of Artificial Sequence: Synthetic oligonucleotide
uggggauaugcuacaggca

SEQ ID NO: 1085929 - RNA, 19 nt, Artificial Sequence
  Description of Artificial Sequence: Synthetic oligonucleotide
cuugcggcuguccccauag

SEQ ID NO: 1085930 - RNA, 19 nt, Artificial Sequence
  Description of Artificial Sequence: Synthetic oligonucleotide
ugggccgucuucaggacca

SEQ ID NO: 1085931 - RNA, 19 nt, Artificial Sequence
  Description of Artificial Sequence: Synthetic oligonucleotide
ucccguuggugguagaggu

SEQ ID NO: 1085932 - RNA, 19 nt, Artificial Sequence
  Description of Artificial Sequence: Synthetic oligonucleotide
agaguuagaagaggaaaau

SEQ ID NO: 1085933 - RNA, 19 nt, Artificial Sequence
  Description of Artificial Sequence: Synthetic oligonucleotide
auagucgcucagcagucug

SEQ ID NO: 1085934 - RNA, 19 nt, Artificial Sequence
  Description of Artificial Sequence: Synthetic oligonucleotide
uggcgacacaauuccaggc

SEQ ID NO: 1085935 - RNA, 19 nt, Artificial Sequence
  Description of Artificial Sequence: Synthetic oligonucleotide
agccuagcgcuucaauauc

SEQ ID NO: 1085936 - RNA, 19 nt, Artificial Sequence
  Description of Artificial Sequence: Synthetic oligonucleotide
acuuaguacguagcgugag

SEQ ID NO: 1085937 - RNA, 19 nt, Artificial Sequence
  Description of Artificial Sequence: Synthetic oligonucleotide
ucgaugguugacuccgugu

SEQ ID NO: 1085938 - RNA, 19 nt, Artificial Sequence
  Description of Artificial Sequence: Synthetic oligonucleotide
acaaguguacgcugucaca

SEQ ID NO: 1085939 - RNA, 19 nt, Artificial Sequence
  Description of Artificial Sequence: Synthetic oligonucleotide
uucaguccuacuggagggg

SEQ ID NO: 1085940 - RNA, 19 nt, Artificial Sequence
  Description of Artificial Sequence: Synthetic oligonucleotide
cuggcccuccccaaguggg

SEQ ID NO: 1085941 - RNA, 19 nt, Artificial Sequence
  Description of Artificial Sequence: Synthetic oligonucleotide
uugacuccguguaaacaau

SEQ ID NO: 1085942 - RNA, 19 nt, Artificial Sequence
  Description of Artificial Sequence: Synthetic oligonucleotide
aguccuacuggagggguuc

SEQ ID NO: 1085943 - RNA, 19 nt, Artificial Sequence
  Description of Artificial Sequence: Synthetic oligonucleotide
ugcuacaggcauugcuaag

SEQ ID NO: 1085944 - RNA, 19 nt, Artificial Sequence
  Description of Artificial Sequence: Synthetic oligonucleotide
cuucucaauauagucgcuc

SEQ ID NO: 1085945 - RNA, 19 nt, Artificial Sequence
  Description of Artificial Sequence: Synthetic oligonucleotide
cacucaucucccucggaag

SEQ ID NO: 1085946 - RNA, 19 nt, Artificial Sequence
  Description of Artificial Sequence: Synthetic oligonucleotide
uucccguuggugguagagg

SEQ ID NO: 1085947 - RNA, 19 nt, Artificial Sequence
  Description of Artificial Sequence: Synthetic oligonucleotide
gaucaugcggucccacuca

SEQ ID NO: 1085948 - RNA, 19 nt, Artificial Sequence
  Description of Artificial Sequence: Synthetic oligonucleotide
ugacuccguguaaacaauc

SEQ ID NO: 1085949 - RNA, 19 nt, Artificial Sequence
  Description of Artificial Sequence: Synthetic oligonucleotide
aacuuaguacguagcguga

SEQ ID NO: 1085950 - RNA, 19 nt, Artificial Sequence
  Description of Artificial Sequence: Synthetic oligonucleotide
uccagguaucuccucccug

SEQ ID NO: 1085951 - RNA, 19 nt, Artificial Sequence
  Description of Artificial Sequence: Synthetic oligonucleotide
gaggccccaucaaauauug

SEQ ID NO: 1085952 - RNA, 19 nt, Artificial Sequence
  Description of Artificial Sequence: Synthetic oligonucleotide
ggaauagcuguguaagaca

SEQ ID NO: 1085953 - RNA, 19 nt, Artificial Sequence
  Description of Artificial Sequence: Synthetic oligonucleotide
guagcgugagcauguaguc

SEQ ID NO: 1085954 - RNA, 19 nt, Artificial Sequence
  Description of Artificial Sequence: Synthetic oligonucleotide
aguagaggaccuggccacc

SEQ ID NO: 1085955 - RNA, 19 nt, Artificial Sequence
  Description of Artificial Sequence: Synthetic oligonucleotide
ugauaccacggccaucuuu

SEQ ID NO: 1085956 - RNA, 19 nt, Artificial Sequence
  Description of Artificial Sequence: Synthetic oligonucleotide
ccuggaauagcuguguaag

SEQ ID NO: 1085957 - RNA, 19 nt, Artificial Sequence
  Description of Artificial Sequence: Synthetic oligonucleotide
acucguuuaaauggcgaca

SEQ ID NO: 1085958 - RNA, 19 nt, Artificial Sequence
  Description of Artificial Sequence: Synthetic oligonucleotide
cacagugugcagagggcgc

SEQ ID NO: 1085959 - RNA, 19 nt, Artificial Sequence
  Description of Artificial Sequence: Synthetic oligonucleotide
ucguuuaaauggcgacaca

SEQ ID NO: 1085960 - RNA, 19 nt, Artificial Sequence
  Description of Artificial Sequence: Synthetic oligonucleotide
gacgcgcucggguaaugcc

SEQ ID NO: 1085961 - RNA, 19 nt, Artificial Sequence
  Description of Artificial Sequence: Synthetic oligonucleotide
caaauauugcucgguccag

SEQ ID NO: 1085962 - RNA, 19 nt, Artificial Sequence
  Description of Artificial Sequence: Synthetic oligonucleotide
cauagacuuuggcucggag

SEQ ID NO: 1085963 - RNA, 19 nt, Artificial Sequence
  Description of Artificial Sequence: Synthetic oligonucleotide
uccaccuuuguggaagagu

SEQ ID NO: 1085964 - RNA, 19 nt, Artificial Sequence
  Description of Artificial Sequence: Synthetic oligonucleotide
cuucagcaucauaaguguc

SEQ ID NO: 1085965 - RNA, 19 nt, Artificial Sequence
  Description of Artificial Sequence: Synthetic oligonucleotide
cugacaaggaaccugcgcu

SEQ ID NO: 1085966 - RNA, 19 nt, Artificial Sequence
  Description of Artificial Sequence: Synthetic oligonucleotide
uccccauagagcugucgca

SEQ ID NO: 1085967 - RNA, 19 nt, Artificial Sequence
  Description of Artificial Sequence: Synthetic oligonucleotide
uuagggcacauguccugug

SEQ ID NO: 1085968 - RNA, 19 nt, Artificial Sequence
  Description of Artificial Sequence: Synthetic oligonucleotide
cauggaugggcacccuaag

SEQ ID NO: 1085969 - RNA, 19 nt, Artificial Sequence
  Description of Artificial Sequence: Synthetic oligonucleotide
cuugacguuguaggcagac

SEQ ID NO: 1085970 - RNA, 19 nt, Artificial Sequence
  Description of Artificial Sequence: Synthetic oligonucleotide
uagcgugagcauguagucc

SEQ ID NO: 1085971 - RNA, 19 nt, Artificial Sequence
  Description of Artificial Sequence: Synthetic oligonucleotide
gcuacaggcauugcuaagc

SEQ ID NO: 1085972 - RNA, 19 nt, Artificial Sequence
  Description of Artificial Sequence: Synthetic oligonucleotide
ccaccuuuguggaagaguc

SEQ ID NO: 1085973 - RNA, 19 nt, Artificial Sequence
  Description of Artificial Sequence: Synthetic oligonucleotide
ugcagagggcgccucucug

SEQ ID NO: 1085974 - RNA, 19 nt, Artificial Sequence
  Description of Artificial Sequence: Synthetic oligonucleotide
ugucgcaggcugauacaga

SEQ ID NO: 1085975 - RNA, 19 nt, Artificial Sequence
  Description of Artificial Sequence: Synthetic oligonucleotide
auacucguuuaaauggcga

SEQ ID NO: 1085976 - RNA, 19 nt, Artificial Sequence
  Description of Artificial Sequence: Synthetic oligonucleotide
agcagcgaugucauggaug

SEQ ID NO: 1085977 - RNA, 19 nt, Artificial Sequence
  Description of Artificial Sequence: Synthetic oligonucleotide
guucagguagccagguaug

SEQ ID NO: 1085978 - RNA, 19 nt, Artificial Sequence
  Description of Artificial Sequence: Synthetic oligonucleotide
uagucgcucagcagucugu

SEQ ID NO: 1085979 - RNA, 19 nt, Artificial Sequence
  Description of Artificial Sequence: Synthetic oligonucleotide
agucgcucagcagucuguc

SEQ ID NO: 1085980 - RNA, 19 nt, Artificial Sequence
  Description of Artificial Sequence: Synthetic oligonucleotide
cugucgcaggcugauacag

SEQ ID NO: 1085981 - RNA, 19 nt, Artificial Sequence
  Description of Artificial Sequence: Synthetic oligonucleotide
gaugacaacuuaguacgua

SEQ ID NO: 1085982 - RNA, 19 nt, Artificial Sequence
  Description of Artificial Sequence: Synthetic oligonucleotide
uuccugccaagcugcaacu

SEQ ID NO: 1085983 - RNA, 19 nt, Artificial Sequence
  Description of Artificial Sequence: Synthetic oligonucleotide
ucaucgcugggcagcgaca

SEQ ID NO: 1085984 - RNA, 19 nt, Artificial Sequence
  Description of Artificial Sequence: Synthetic oligonucleotide
gaugguugacuccguguaa

SEQ ID NO: 1085985 - RNA, 19 nt, Artificial Sequence
  Description of Artificial Sequence: Synthetic oligonucleotide
uuaaggucucugagaguua

SEQ ID NO: 1085986 - RNA, 19 nt, Artificial Sequence
  Description of Artificial Sequence: Synthetic oligonucleotide
caauaucacuacugauguc

SEQ ID NO: 1085987 - RNA, 19 nt, Artificial Sequence
  Description of Artificial Sequence: Synthetic oligonucleotide
aaauggcgacacaauucca

SEQ ID NO: 1085988 - RNA, 19 nt, Artificial Sequence
  Description of Artificial Sequence: Synthetic oligonucleotide
cuguguuagggcacauguc

SEQ ID NO: 1085989 - RNA, 19 nt, Artificial Sequence
  Description of Artificial Sequence: Synthetic oligonucleotide
acggcgaugccugccaaag

SEQ ID NO: 1085990 - RNA, 19 nt, Artificial Sequence
  Description of Artificial Sequence: Synthetic oligonucleotide
caaguguacgcugucacaa

SEQ ID NO: 1085991 - RNA, 19 nt, Artificial Sequence
  Description of Artificial Sequence: Synthetic oligonucleotide
uuggcucggagagaugccu

SEQ ID NO: 1085992 - RNA, 19 nt, Artificial Sequence
  Description of Artificial Sequence: Synthetic oligonucleotide
gucaucgcugggcagcgac

SEQ ID NO: 1085993 - RNA, 19 nt, Artificial Sequence
  Description of Artificial Sequence: Synthetic oligonucleotide
cagaaagucgaugguugac

SEQ ID NO: 1085994 - RNA, 19 nt, Artificial Sequence
  Description of Artificial Sequence: Synthetic oligonucleotide
acuaucugacaaggaaccu

SEQ ID NO: 1085995 - RNA, 19 nt, Artificial Sequence
  Description of Artificial Sequence: Synthetic oligonucleotide
auauugcucgguccagaaa

SEQ ID NO: 1085996 - RNA, 19 nt, Artificial Sequence
  Description of Artificial Sequence: Synthetic oligonucleotide
gcgaccuugcucucugugg

SEQ ID NO: 1085997 - RNA, 19 nt, Artificial Sequence
  Description of Artificial Sequence: Synthetic oligonucleotide
ucacucucgcugacagucu

SEQ ID NO: 1085998 - RNA, 19 nt, Artificial Sequence
  Description of Artificial Sequence: Synthetic oligonucleotide
uggcucggagagaugccug

SEQ ID NO: 1085999 - RNA, 19 nt, Artificial Sequence
  Description of Artificial Sequence: Synthetic oligonucleotide
cuaagccccugacgaagag

SEQ ID NO: 1086000 - RNA, 19 nt, Artificial Sequence
  Description of Artificial Sequence: Synthetic oligonucleotide
uauagucgcucagcagucu

SEQ ID NO: 1086001 - RNA, 19 nt, Artificial Sequence
  Description of Artificial Sequence: Synthetic oligonucleotide
uggcccuccccaagugggg

SEQ ID NO: 1086002 - RNA, 19 nt, Artificial Sequence
  Description of Artificial Sequence: Synthetic oligonucleotide
guguacgcugucacaaccc

SEQ ID NO: 1086003 - RNA, 19 nt, Artificial Sequence
  Description of Artificial Sequence: Synthetic oligonucleotide
uaccacggccaucuuucac

SEQ ID NO: 1086004 - RNA, 19 nt, Artificial Sequence
  Description of Artificial Sequence: Synthetic oligonucleotide
uaguacguagcgugagcau

SEQ ID NO: 1086005 - RNA, 19 nt, Artificial Sequence
  Description of Artificial Sequence: Synthetic oligonucleotide
ucggaaggcgcugaccggu

SEQ ID NO: 1086006 - RNA, 19 nt, Artificial Sequence
  Description of Artificial Sequence: Synthetic oligonucleotide
acguagcgugagcauguag

SEQ ID NO: 1086007 - RNA, 19 nt, Artificial Sequence
  Description of Artificial Sequence: Synthetic oligonucleotide
cauaaguguccgucauguc

SEQ ID NO: 1086008 - RNA, 19 nt, Artificial Sequence
  Description of Artificial Sequence: Synthetic oligonucleotide
ucaguccuacuggaggggu

SEQ ID NO: 1086009 - RNA, 19 nt, Artificial Sequence
  Description of Artificial Sequence: Synthetic oligonucleotide
cucggaaggcgcugaccgg

SEQ ID NO: 1086010 - RNA, 19 nt, Artificial Sequence
  Description of Artificial Sequence: Synthetic oligonucleotide
caugcggucccacucaucu

SEQ ID NO: 1086011 - RNA, 19 nt, Artificial Sequence
  Description of Artificial Sequence: Synthetic oligonucleotide
guucccguuggugguagag

SEQ ID NO: 1086012 - RNA, 19 nt, Artificial Sequence
  Description of Artificial Sequence: Synthetic oligonucleotide
ucgguccagaaagucgaug

SEQ ID NO: 1086013 - RNA, 19 nt, Artificial Sequence
  Description of Artificial Sequence: Synthetic oligonucleotide
cuuuuaggaauacucguuu

SEQ ID NO: 1086014 - RNA, 19 nt, Artificial Sequence
  Description of Artificial Sequence: Synthetic oligonucleotide
gcacuaucugacaaggaac

SEQ ID NO: 1086015 - RNA, 19 nt, Artificial Sequence
  Description of Artificial Sequence: Synthetic oligonucleotide
ggauuucaguccuacugga

SEQ ID NO: 1086016 - RNA, 19 nt, Artificial Sequence
  Description of Artificial Sequence: Synthetic oligonucleotide
gucgaugguugacuccgug

SEQ ID NO: 1086017 - RNA, 19 nt, Artificial Sequence
  Description of Artificial Sequence: Synthetic oligonucleotide
ccugccaagcugcaacugg

SEQ ID NO: 1086018 - RNA, 19 nt, Artificial Sequence
  Description of Artificial Sequence: Synthetic oligonucleotide
cugagaguuagaagaggaa

SEQ ID NO: 1086019 - RNA, 19 nt, Artificial Sequence
  Description of Artificial Sequence: Synthetic oligonucleotide
gccaacaccacagugugca

SEQ ID NO: 1086020 - RNA, 19 nt, Artificial Sequence
  Description of Artificial Sequence: Synthetic oligonucleotide
auggggugauggcugcaug

SEQ ID NO: 1086021 - RNA, 19 nt, Artificial Sequence
  Description of Artificial Sequence: Synthetic oligonucleotide
cuggagggguucagguagc

SEQ ID NO: 1086022 - RNA, 19 nt, Artificial Sequence
  Description of Artificial Sequence: Synthetic oligonucleotide
caucucccucggaaggcgc

SEQ ID NO: 1086023 - RNA, 19 nt, Artificial Sequence
  Description of Artificial Sequence: Synthetic oligonucleotide
ucgcaggcugauacagaac

SEQ ID NO: 1086024 - RNA, 19 nt, Artificial Sequence
  Description of Artificial Sequence: Synthetic oligonucleotide
gugagcauguaguccugca

SEQ ID NO: 1086025 - RNA, 19 nt, Artificial Sequence
  Description of Artificial Sequence: Synthetic oligonucleotide
gacguuguaggcagacaga

SEQ ID NO: 1086026 - RNA, 19 nt, Artificial Sequence
  Description of Artificial Sequence: Synthetic oligonucleotide
gcgcugaccggucaucagg

SEQ ID NO: 1086027 - RNA, 19 nt, Artificial Sequence
  Description of Artificial Sequence: Synthetic oligonucleotide
caaguggggauaugcuaca

SEQ ID NO: 1086028 - RNA, 19 nt, Artificial Sequence
  Description of Artificial Sequence: Synthetic oligonucleotide
uugcuaagccccugacgaa

SEQ ID NO: 1086029 - RNA, 19 nt, Artificial Sequence
  Description of Artificial Sequence: Synthetic oligonucleotide
cucuacuggucccacugca

SEQ ID NO: 1086030 - RNA, 19 nt, Artificial Sequence
  Description of Artificial Sequence: Synthetic oligonucleotide
ugcagccuagcgcuucaau

SEQ ID NO: 1086031 - RNA, 19 nt, Artificial Sequence
  Description of Artificial Sequence: Synthetic oligonucleotide
augccugccaaagcuguca

SEQ ID NO: 1086032 - RNA, 19 nt, Artificial Sequence
  Description of Artificial Sequence: Synthetic oligonucleotide
gcgguauucauguagcagu

SEQ ID NO: 1086033 - RNA, 19 nt, Artificial Sequence
  Description of Artificial Sequence: Synthetic oligonucleotide
cuucaggaccaccaggugu

SEQ ID NO: 1086034 - RNA, 19 nt, Artificial Sequence
  Description of Artificial Sequence: Synthetic oligonucleotide
acccaucacgcugaguccu

SEQ ID NO: 1086035 - RNA, 19 nt, Artificial Sequence
  Description of Artificial Sequence: Synthetic oligonucleotide
uggcucgacgcgcucgggu

SEQ ID NO: 1086036 - RNA, 19 nt, Artificial Sequence
  Description of Artificial Sequence: Synthetic oligonucleotide
gugcaaaauaucagcuguc

SEQ ID NO: 1086037 - RNA, 19 nt, Artificial Sequence
  Description of Artificial Sequence: Synthetic oligonucleotide
cuccuagccaggaagggcu

SEQ ID NO: 1086038 - RNA, 19 nt, Artificial Sequence
  Description of Artificial Sequence: Synthetic oligonucleotide
gcaucauaaguguccguca

SEQ ID NO: 1086039 - RNA, 19 nt, Artificial Sequence
  Description of Artificial Sequence: Synthetic oligonucleotide
acauuguaguaaacaacuu

SEQ ID NO: 1086040 - RNA, 19 nt, Artificial Sequence
  Description of Artificial Sequence: Synthetic oligonucleotide
aucugacaaggaaccugcg

SEQ ID NO: 1086041 - RNA, 19 nt, Artificial Sequence
  Description of Artificial Sequence: Synthetic oligonucleotide
cugggccgucuucaggacc

SEQ ID NO: 1086042 - RNA, 19 nt, Artificial Sequence
  Description of Artificial Sequence: Synthetic oligonucleotide
cgcuucaauaucacuacug

SEQ ID NO: 1086043 - RNA, 19 nt, Artificial Sequence
  Description of Artificial Sequence: Synthetic oligonucleotide
ccauagagcugucgcaggc

SEQ ID NO: 1086044 - RNA, 19 nt, Artificial Sequence
  Description of Artificial Sequence: Synthetic oligonucleotide
caucaugcuccugggucag

SEQ ID NO: 1086045 - RNA, 19 nt, Artificial Sequence
  Description of Artificial Sequence: Synthetic oligonucleotide
gguauucauguagcagugc

SEQ ID NO: 1086046 - RNA, 19 nt, Artificial Sequence
  Description of Artificial Sequence: Synthetic oligonucleotide
ggggauaugcuacaggcau

SEQ ID NO: 1086047 - RNA, 19 nt, Artificial Sequence
  Description of Artificial Sequence: Synthetic oligonucleotide
gagggcgccucucugucaa

SEQ ID NO: 1086048 - RNA, 19 nt, Artificial Sequence
  Description of Artificial Sequence: Synthetic oligonucleotide
gacuccguguaaacaaucu

SEQ ID NO: 1086049 - RNA, 19 nt, Artificial Sequence
  Description of Artificial Sequence: Synthetic oligonucleotide
cucugacauaggagacagc

SEQ ID NO: 1086050 - RNA, 19 nt, Artificial Sequence
  Description of Artificial Sequence: Synthetic oligonucleotide
agggcacggcgaugccugc

SEQ ID NO: 1086051 - RNA, 19 nt, Artificial Sequence
  Description of Artificial Sequence: Synthetic oligonucleotide
cuggugggaccgcuuugcc

SEQ ID NO: 1086052 - RNA, 19 nt, Artificial Sequence
  Description of Artificial Sequence: Synthetic oligonucleotide
gcuuucuuaucucuacucu

SEQ ID NO: 1086053 - RNA, 19 nt, Artificial Sequence
  Description of Artificial Sequence: Synthetic oligonucleotide
uccuacuggagggguucag

SEQ ID NO: 1086054 - RNA, 19 nt, Artificial Sequence
  Description of Artificial Sequence: Synthetic oligonucleotide
guuuaaauggcgacacaau

SEQ ID NO: 1086055 - RNA, 19 nt, Artificial Sequence
  Description of Artificial Sequence: Synthetic oligonucleotide
uugcucgguccagaaaguc

SEQ ID NO: 1086056 - RNA, 19 nt, Artificial Sequence
  Description of Artificial Sequence: Synthetic oligonucleotide
gucuggcucgacgcgcucg

SEQ ID NO: 1086057 - RNA, 19 nt, Artificial Sequence
  Description of Artificial Sequence: Synthetic oligonucleotide
gcuauggggugauggcugc

SEQ ID NO: 1086058 - RNA, 19 nt, Artificial Sequence
  Description of Artificial Sequence: Synthetic oligonucleotide
caagaucaugcggucccac

SEQ ID NO: 1086059 - RNA, 19 nt, Artificial Sequence
  Description of Artificial Sequence: Synthetic oligonucleotide
cacgcugaguccuggucca

SEQ ID NO: 1086060 - RNA, 19 nt, Artificial Sequence
  Description of Artificial Sequence: Synthetic oligonucleotide
ugaugauaccacggccauc

SEQ ID NO: 1086061 - RNA, 19 nt, Artificial Sequence
  Description of Artificial Sequence: Synthetic oligonucleotide
caucuuucacgccaauggu

SEQ ID NO: 1086062 - RNA, 19 nt, Artificial Sequence
  Description of Artificial Sequence: Synthetic oligonucleotide
ccuaaggaucauguccucc

SEQ ID NO: 1086063 - RNA, 19 nt, Artificial Sequence
  Description of Artificial Sequence: Synthetic oligonucleotide
gaccaggcaacaugccucu

SEQ ID NO: 1086064 - RNA, 19 nt, Artificial Sequence
  Description of Artificial Sequence: Synthetic oligonucleotide
gcucggguaaugccaacac

SEQ ID NO: 1086065 - RNA, 19 nt, Artificial Sequence
  Description of Artificial Sequence: Synthetic oligonucleotide
cagagggcgccucucuguc

SEQ ID NO: 1086066 - RNA, 19 nt, Artificial Sequence
  Description of Artificial Sequence: Synthetic oligonucleotide
ggcgaugccugccaaagcu

SEQ ID NO: 1086067 - RNA, 19 nt, Artificial Sequence
  Description of Artificial Sequence: Synthetic oligonucleotide
gcuguguaagacaagugua

SEQ ID NO: 1086068 - RNA, 19 nt, Artificial Sequence
  Description of Artificial Sequence: Synthetic oligonucleotide
cccauagagcugucgcagg

SEQ ID NO: 1086069 - RNA, 19 nt, Artificial Sequence
  Description of Artificial Sequence: Synthetic oligonucleotide
ccuagcgcuucaauaucac

SEQ ID NO: 1086070 - RNA, 19 nt, Artificial Sequence
  Description of Artificial Sequence: Synthetic oligonucleotide
cagcuugacguuguaggca

SEQ ID NO: 1086071 - RNA, 19 nt, Artificial Sequence
  Description of Artificial Sequence: Synthetic oligonucleotide
gaugccugccaaagcuguc

SEQ ID NO: 1086072 - RNA, 19 nt, Artificial Sequence
  Description of Artificial Sequence: Synthetic oligonucleotide
cacaacccaucacgcugag

SEQ ID NO: 1086073 - RNA, 19 nt, Artificial Sequence
  Description of Artificial Sequence: Synthetic oligonucleotide
cuaaauacuucaccuccuu

SEQ ID NO: 1086074 - RNA, 19 nt, Artificial Sequence
  Description of Artificial Sequence: Synthetic oligonucleotide
cccauugcgguauucaugu

SEQ ID NO: 1086075 - RNA, 19 nt, Artificial Sequence
  Description of Artificial Sequence: Synthetic oligonucleotide
caccuuuguggaagaguca

SEQ ID NO: 1086076 - RNA, 19 nt, Artificial Sequence
  Description of Artificial Sequence: Synthetic oligonucleotide
cgaccuugcucucuguggc

SEQ ID NO: 1086077 - RNA, 19 nt, Artificial Sequence
  Description of Artificial Sequence: Synthetic oligonucleotide
ccuacuggagggguucagg

SEQ ID NO: 1086078 - RNA, 19 nt, Artificial Sequence
  Description of Artificial Sequence: Synthetic oligonucleotide
gcggcuguccccauagagc

SEQ ID NO: 1086079 - RNA, 19 nt, Artificial Sequence
  Description of Artificial Sequence: Synthetic oligonucleotide
caucauaaguguccgucau

SEQ ID NO: 1086080 - RNA, 19 nt, Artificial Sequence
  Description of Artificial Sequence: Synthetic oligonucleotide
gguagccagguauggaugu

SEQ ID NO: 1086081 - RNA, 19 nt, Artificial Sequence
  Description of Artificial Sequence: Synthetic oligonucleotide
ggcgaccuugcucucugug

SEQ ID NO: 1086082 - RNA, 19 nt, Artificial Sequence
  Description of Artificial Sequence: Synthetic oligonucleotide
ccccauugcgguauucaug

SEQ ID NO: 1086083 - RNA, 19 nt, Artificial Sequence
  Description of Artificial Sequence: Synthetic oligonucleotide
ggaaccugcgcugaggccu

SEQ ID NO: 1086084 - RNA, 19 nt, Artificial Sequence
  Description of Artificial Sequence: Synthetic oligonucleotide
gcagccuagcgcuucaaua

SEQ ID NO: 1086085 - RNA, 19 nt, Artificial Sequence
  Description of Artificial Sequence: Synthetic oligonucleotide
gaccggucaucagggcugc

SEQ ID NO: 1086086 - RNA, 19 nt, Artificial Sequence
  Description of Artificial Sequence: Synthetic oligonucleotide
caaggguggcagcccuccc

SEQ ID NO: 1086087 - RNA, 19 nt, Artificial Sequence
  Description of Artificial Sequence: Synthetic oligonucleotide
cugggucagguguccagga

SEQ ID NO: 1086088 - RNA, 19 nt, Artificial Sequence
  Description of Artificial Sequence: Synthetic oligonucleotide
cuagcgcuucaauaucacu

SEQ ID NO: 1086089 - RNA, 19 nt, Artificial Sequence
  Description of Artificial Sequence: Synthetic oligonucleotide
ugccucuacuggucccacu

SEQ ID NO: 1086090 - RNA, 19 nt, Artificial Sequence
  Description of Artificial Sequence: Synthetic oligonucleotide
agccccugacgaagaggcc

SEQ ID NO: 1086091 - RNA, 19 nt, Artificial Sequence
  Description of Artificial Sequence: Synthetic oligonucleotide
acgcgcucggguaaugcca

SEQ ID NO: 1086092 - RNA, 19 nt, Artificial Sequence
  Description of Artificial Sequence: Synthetic oligonucleotide
ccacggccaucuuucacgc

SEQ ID NO: 1086093 - RNA, 19 nt, Artificial Sequence
  Description of Artificial Sequence: Synthetic oligonucleotide
gcuccuagccaggaagggc

SEQ ID NO: 1086094 - RNA, 19 nt, Artificial Sequence
  Description of Artificial Sequence: Synthetic oligonucleotide
cgguauucauguagcagug

SEQ ID NO: 1086095 - RNA, 19 nt, Artificial Sequence
  Description of Artificial Sequence: Synthetic oligonucleotide
uugcggcuguccccauaga

SEQ ID NO: 1086096 - RNA, 19 nt, Artificial Sequence
  Description of Artificial Sequence: Synthetic oligonucleotide
guagaggaccuggccacca

SEQ ID NO: 1086097 - RNA, 19 nt, Artificial Sequence
  Description of Artificial Sequence: Synthetic oligonucleotide
guacguagcgugagcaugu

SEQ ID NO: 1086098 - RNA, 19 nt, Artificial Sequence
  Description of Artificial Sequence: Synthetic oligonucleotide
agggcgccucucugucaac

SEQ ID NO: 1086099 - RNA, 19 nt, Artificial Sequence
  Description of Artificial Sequence: Synthetic oligonucleotide
gcauugcuaagccccugac

SEQ ID NO: 1086100 - RNA, 19 nt, Artificial Sequence
  Description of Artificial Sequence: Synthetic oligonucleotide
ggugggaccgcuuugccuu

SEQ ID NO: 1086101 - RNA, 19 nt, Artificial Sequence
  Description of Artificial Sequence: Synthetic oligonucleotide
cugaccggucaucagggcu

SEQ ID NO: 1086102 - RNA, 19 nt, Artificial Sequence
  Description of Artificial Sequence: Synthetic oligonucleotide
ccuguguuagggcacaugu

SEQ ID NO: 1086103 - RNA, 19 nt, Artificial Sequence
  Description of Artificial Sequence: Synthetic oligonucleotide
guuagggcacauguccugu

SEQ ID NO: 1086104 - RNA, 19 nt, Artificial Sequence
  Description of Artificial Sequence: Synthetic oligonucleotide
gaggccucuagaacuuucu

SEQ ID NO: 1086105 - RNA, 19 nt, Artificial Sequence
  Description of Artificial Sequence: Synthetic oligonucleotide
cccucccuagcuccuagcc

SEQ ID NO: 1086106 - RNA, 19 nt, Artificial Sequence
  Description of Artificial Sequence: Synthetic oligonucleotide
ucccucggaaggcgcugac

SEQ ID NO: 1086107 - RNA, 19 nt, Artificial Sequence
  Description of Artificial Sequence: Synthetic oligonucleotide
ugucuggcucgacgcgcuc

SEQ ID NO: 1086108 - RNA, 19 nt, Artificial Sequence
  Description of Artificial Sequence: Synthetic oligonucleotide
gaaccugcgcugaggccuc

SEQ ID NO: 1086109 - RNA, 19 nt, Artificial Sequence
  Description of Artificial Sequence: Synthetic oligonucleotide
gugggaccgcuuugccuug

SEQ ID NO: 1086110 - RNA, 19 nt, Artificial Sequence
  Description of Artificial Sequence: Synthetic oligonucleotide
ccuccaggccagcuugacg

SEQ ID NO: 1086111 - RNA, 19 nt, Artificial Sequence
  Description of Artificial Sequence: Synthetic oligonucleotide
ugcggcgaccuugcucucu

SEQ ID NO: 1086112 - RNA, 19 nt, Artificial Sequence
  Description of Artificial Sequence: Synthetic oligonucleotide
ccucuacuggucccacugc

SEQ ID NO: 1086113 - RNA, 19 nt, Artificial Sequence
  Description of Artificial Sequence: Synthetic oligonucleotide
ggcgcugaccggucaucag

SEQ ID NO: 1086114 - RNA, 19 nt, Artificial Sequence
  Description of Artificial Sequence: Synthetic oligonucleotide
aggcauugcuaagccccug

SEQ ID NO: 1086115 - RNA, 19 nt, Artificial Sequence
  Description of Artificial Sequence: Synthetic oligonucleotide
uacguagcgugagcaugua

SEQ ID NO: 1086116 - RNA, 19 nt, Artificial Sequence
  Description of Artificial Sequence: Synthetic oligonucleotide
ggcacccuaaggaucaugu

SEQ ID NO: 1086117 - RNA, 19 nt, Artificial Sequence
  Description of Artificial Sequence: Synthetic oligonucleotide
cguagcgugagcauguagu

SEQ ID NO: 1086118 - RNA, 19 nt, Artificial Sequence
  Description of Artificial Sequence: Synthetic oligonucleotide
agcagucugucuggcucga

SEQ ID NO: 1086119 - RNA, 19 nt, Artificial Sequence
  Description of Artificial Sequence: Synthetic oligonucleotide
gccuagcgcuucaauauca

SEQ ID NO: 1086120 - RNA, 19 nt, Artificial Sequence
  Description of Artificial Sequence: Synthetic oligonucleotide
gcugucgcaggcugauaca

SEQ ID NO: 1086121 - RNA, 19 nt, Artificial Sequence
  Description of Artificial Sequence: Synthetic oligonucleotide
acaacccaucacgcugagu

SEQ ID NO: 1086122 - RNA, 19 nt, Artificial Sequence
  Description of Artificial Sequence: Synthetic oligonucleotide
gcacccuaaggaucauguc

SEQ ID NO: 1086123 - RNA, 19 nt, Artificial Sequence
  Description of Artificial Sequence: Synthetic oligonucleotide
gcgaugccugccaaagcug

SEQ ID NO: 1086124 - RNA, 19 nt, Artificial Sequence
  Description of Artificial Sequence: Synthetic oligonucleotide
cagcgaugucauggauggg

SEQ ID NO: 1086125 - RNA, 19 nt, Artificial Sequence
  Description of Artificial Sequence: Synthetic oligonucleotide
gcggcgaccuugcucucug

SEQ ID NO: 1086126 - RNA, 19 nt, Artificial Sequence
  Description of Artificial Sequence: Synthetic oligonucleotide
cagcgacagguggugggug

SEQ ID NO: 1086127 - RNA, 19 nt, Artificial Sequence
  Description of Artificial Sequence: Synthetic oligonucleotide
ccuuuuaggaauacucguu

SEQ ID NO: 1086128 - RNA, 19 nt, Artificial Sequence
  Description of Artificial Sequence: Synthetic oligonucleotide
gcgacaggugguggguggg

SEQ ID NO: 1086129 - RNA, 19 nt, Artificial Sequence
  Description of Artificial Sequence: Synthetic oligonucleotide
agucgaugguugacuccgu

SEQ ID NO: 1086130 - RNA, 19 nt, Artificial Sequence
  Description of Artificial Sequence: Synthetic oligonucleotide
cccaaguggggauaugcua

SEQ ID NO: 1086131 - RNA, 19 nt, Artificial Sequence
  Description of Artificial Sequence: Synthetic oligonucleotide
gcuaagccccugacgaaga

SEQ ID NO: 1086132 - RNA, 19 nt, Artificial Sequence
  Description of Artificial Sequence: Synthetic oligonucleotide
ggccccauugcgguauuca

SEQ ID NO: 1086133 - RNA, 19 nt, Artificial Sequence
  Description of Artificial Sequence: Synthetic oligonucleotide
cgcaggcugauacagaacu

SEQ ID NO: 1086134 - RNA, 19 nt, Artificial Sequence
  Description of Artificial Sequence: Synthetic oligonucleotide
cuggcucgacgcgcucggg

SEQ ID NO: 1086135 - RNA, 19 nt, Artificial Sequence
  Description of Artificial Sequence: Synthetic oligonucleotide
ggauguuaacugaccuaaa

SEQ ID NO: 1086136 - RNA, 19 nt, Artificial Sequence
  Description of Artificial Sequence: Synthetic oligonucleotide
cugucuggcucgacgcgcu

SEQ ID NO: 1086137 - RNA, 19 nt, Artificial Sequence
  Description of Artificial Sequence: Synthetic oligonucleotide
gucgcucagcagucugucu

SEQ ID NO: 1086138 - RNA, 19 nt, Artificial Sequence
  Description of Artificial Sequence: Synthetic oligonucleotide
ggcucgacgcgcucgggua

SEQ ID NO: 1086139 - RNA, 19 nt, Artificial Sequence
  Description of Artificial Sequence: Synthetic oligonucleotide
cgaugguugacuccgugua

SEQ ID NO: 1086140 - RNA, 19 nt, Artificial Sequence
  Description of Artificial Sequence: Synthetic oligonucleotide
cacggcgaugccugccaaa

SEQ ID NO: 1086141 - RNA, 19 nt, Artificial Sequence
  Description of Artificial Sequence: Synthetic oligonucleotide
cgcuuugccuugucuauga

SEQ ID NO: 1086142 - RNA, 19 nt, Artificial Sequence
  Description of Artificial Sequence: Synthetic oligonucleotide
caucacgcugaguccuggu

SEQ ID NO: 1086143 - RNA, 19 nt, Artificial Sequence
  Description of Artificial Sequence: Synthetic oligonucleotide
aaccugcgcugaggccucu

SEQ ID NO: 1086144 - RNA, 19 nt, Artificial Sequence
  Description of Artificial Sequence: Synthetic oligonucleotide
cgugagcauguaguccugc

SEQ ID NO: 1086145 - RNA, 19 nt, Artificial Sequence
  Description of Artificial Sequence: Synthetic oligonucleotide
ggaccgcuuugccuugucu

SEQ ID NO: 1086146 - RNA, 19 nt, Artificial Sequence
  Description of Artificial Sequence: Synthetic oligonucleotide
guacgcugucacaacccau

SEQ ID NO: 1086147 - RNA, 19 nt, Artificial Sequence
  Description of Artificial Sequence: Synthetic oligonucleotide
gcgcuucaauaucacuacu

SEQ ID NO: 1086148 - RNA, 19 nt, Artificial Sequence
  Description of Artificial Sequence: Synthetic oligonucleotide
cacucucgcugacagucuu

SEQ ID NO: 1086149 - RNA, 19 nt, Artificial Sequence
  Description of Artificial Sequence: Synthetic oligonucleotide
gcucgacgcgcucggguaa

SEQ ID NO: 1086150 - RNA, 19 nt, Artificial Sequence
  Description of Artificial Sequence: Synthetic oligonucleotide
gcgugagcauguaguccug

SEQ ID NO: 1086151 - RNA, 19 nt, Artificial Sequence
  Description of Artificial Sequence: Synthetic oligonucleotide
ggaggccccaucaaauauu

SEQ ID NO: 1086152 - RNA, 19 nt, Artificial Sequence
  Description of Artificial Sequence: Synthetic oligonucleotide
cugcggcgaccuugcucuc

SEQ ID NO: 1086153 - RNA, 19 nt, Artificial Sequence
  Description of Artificial Sequence: Synthetic oligonucleotide
augcaggauuucaguccua

SEQ ID NO: 1086154 - RNA, 19 nt, Artificial Sequence
  Description of Artificial Sequence: Synthetic oligonucleotide
caguccuacuggagggguu

SEQ ID NO: 1086155 - RNA, 19 nt, Artificial Sequence
  Description of Artificial Sequence: Synthetic oligonucleotide
gagcugucgcaggcugaua

SEQ ID NO: 1086156 - RNA, 19 nt, Artificial Sequence
  Description of Artificial Sequence: Synthetic oligonucleotide
cggcgaugccugccaaagc

SEQ ID NO: 1086157 - RNA, 19 nt, Artificial Sequence
  Description of Artificial Sequence: Synthetic oligonucleotide
cgacgcgcucggguaaugc

SEQ ID NO: 1086158 - RNA, 19 nt, Artificial Sequence
  Description of Artificial Sequence: Synthetic oligonucleotide
gcagcgacagguggugggu

SEQ ID NO: 1086159 - RNA, 19 nt, Artificial Sequence
  Description of Artificial Sequence: Synthetic oligonucleotide
gcgcucggguaaugccaac

SEQ ID NO: 1086160 - RNA, 19 nt, Artificial Sequence
  Description of Artificial Sequence: Synthetic oligonucleotide
gcucacucucgcugacagu

SEQ ID NO: 1086161 - RNA, 19 nt, Artificial Sequence
  Description of Artificial Sequence: Synthetic oligonucleotide
cggaaggcgcugaccgguc

SEQ ID NO: 1086162 - RNA, 19 nt, Artificial Sequence
  Description of Artificial Sequence: Synthetic oligonucleotide
gggcgccucucugucaacu

SEQ ID NO: 1086163 - RNA, 19 nt, Artificial Sequence
  Description of Artificial Sequence: Synthetic oligonucleotide
cgcucggguaaugccaaca

SEQ ID NO: 1086164 - RNA, 19 nt, Artificial Sequence
  Description of Artificial Sequence: Synthetic oligonucleotide
accugcgcugaggccucua

SEQ ID NO: 1086165 - RNA, 19 nt, Artificial Sequence
  Description of Artificial Sequence: Synthetic oligonucleotide
gcacggcgaugccugccaa

SEQ ID NO: 1086166 - RNA, 19 nt, Artificial Sequence
  Description of Artificial Sequence: Synthetic oligonucleotide
ggcgccucucugucaacuu

SEQ ID NO: 1086167 - RNA, 19 nt, Artificial Sequence
  Description of Artificial Sequence: Synthetic oligonucleotide
cgcgcucggguaaugccaa

SEQ ID NO: 1086168 - RNA, 19 nt, Artificial Sequence
  Description of Artificial Sequence: Synthetic oligonucleotide
gccugccaaagcugucagu

SEQ ID NO: 1086169 - RNA, 19 nt, Artificial Sequence
  Description of Artificial Sequence: Synthetic oligonucleotide
cugcagccuagcgcuucaa

SEQ ID NO: 1086170 - RNA, 19 nt, Artificial Sequence
  Description of Artificial Sequence: Synthetic oligonucleotide
cccugacgaagaggcccag

SEQ ID NO: 1086171 - RNA, 19 nt, Artificial Sequence
  Description of Artificial Sequence: Synthetic oligonucleotide
ccauugcgguauucaugua

SEQ ID NO: 1086172 - RNA, 19 nt, Artificial Sequence
  Description of Artificial Sequence: Synthetic oligonucleotide
cucgacgcgcucggguaau

SEQ ID NO: 1086173 - RNA, 19 nt, Artificial Sequence
  Description of Artificial Sequence: Synthetic oligonucleotide
gcccuccccaaguggggau

SEQ ID NO: 1086174 - RNA, 19 nt, Artificial Sequence
  Description of Artificial Sequence: Synthetic oligonucleotide
cuggguccugggccgucuu

SEQ ID NO: 1086175 - RNA, 19 nt, Artificial Sequence
  Description of Artificial Sequence: Synthetic oligonucleotide
ccuccccaaguggggauau

SEQ ID NO: 1086176 - RNA, 19 nt, Artificial Sequence
  Description of Artificial Sequence: Synthetic oligonucleotide
aagauauaaacuuugagga

SEQ ID NO: 1086177 - RNA, 19 nt, Artificial Sequence
  Description of Artificial Sequence: Synthetic oligonucleotide
aauaaguuccacuugcugg

SEQ ID NO: 1086178 - RNA, 19 nt, Artificial Sequence
  Description of Artificial Sequence: Synthetic oligonucleotide
aagaaaaucaguugugaac

SEQ ID NO: 1086179 - RNA, 19 nt, Artificial Sequence
  Description of Artificial Sequence: Synthetic oligonucleotide
acaaauaaguuccacuugc

SEQ ID NO: 1086180 - RNA, 19 nt, Artificial Sequence
  Description of Artificial Sequence: Synthetic oligonucleotide
uucucauaagccaaaacgg

SEQ ID NO: 1086181 - RNA, 19 nt, Artificial Sequence
  Description of Artificial Sequence: Synthetic oligonucleotide
aacagcguuccauacaagc

SEQ ID NO: 1086182 - RNA, 19 nt, Artificial Sequence
  Description of Artificial Sequence: Synthetic oligonucleotide
cuugacaaccucuugaucg

SEQ ID NO: 1086183 - RNA, 19 nt, Artificial Sequence
  Description of Artificial Sequence: Synthetic oligonucleotide
uuuaauauaugcuuaugca

SEQ ID NO: 1086184 - RNA, 19 nt, Artificial Sequence
  Description of Artificial Sequence: Synthetic oligonucleotide
aagugcaacucucaaauuc

SEQ ID NO: 1086185 - RNA, 19 nt, Artificial Sequence
  Description of Artificial Sequence: Synthetic oligonucleotide
cauuuuguagucaaguggg

SEQ ID NO: 1086186 - RNA, 19 nt, Artificial Sequence
  Description of Artificial Sequence: Synthetic oligonucleotide
aaaacuguaucaaaauagg

SEQ ID NO: 1086187 - RNA, 19 nt, Artificial Sequence
  Description of Artificial Sequence: Synthetic oligonucleotide
uaacauaagaaaccagagg

SEQ ID NO: 1086188 - RNA, 19 nt, Artificial Sequence
  Description of Artificial Sequence: Synthetic oligonucleotide
ucaacauucagcagcagcc

SEQ ID NO: 1086189 - RNA, 19 nt, Artificial Sequence
  Description of Artificial Sequence: Synthetic oligonucleotide
uuaugcauaucccugauaa

SEQ ID NO: 1086190 - RNA, 19 nt, Artificial Sequence
  Description of Artificial Sequence: Synthetic oligonucleotide
uaucauauucaucugucag

SEQ ID NO: 1086191 - RNA, 19 nt, Artificial Sequence
  Description of Artificial Sequence: Synthetic oligonucleotide
aacucucaaauucaaaacu

SEQ ID NO: 1086192 - RNA, 19 nt, Artificial Sequence
  Description of Artificial Sequence: Synthetic oligonucleotide
aaauauguuaaauccagua

SEQ ID NO: 1086193 - RNA, 19 nt, Artificial Sequence
  Description of Artificial Sequence: Synthetic oligonucleotide
uuuugcauaaaacaugcau

SEQ ID NO: 1086194 - RNA, 19 nt, Artificial Sequence
  Description of Artificial Sequence: Synthetic oligonucleotide
aacugggcagcauacgccc

SEQ ID NO: 1086195 - RNA, 19 nt, Artificial Sequence
  Description of Artificial Sequence: Synthetic oligonucleotide
aucaguugugaacagguac

SEQ ID NO: 1086196 - RNA, 19 nt, Artificial Sequence
  Description of Artificial Sequence: Synthetic oligonucleotide
aacauuuuguagucaagug

SEQ ID NO: 1086197 - RNA, 19 nt, Artificial Sequence
  Description of Artificial Sequence: Synthetic oligonucleotide
ucugguuaaguagagagcc

SEQ ID NO: 1086198 - RNA, 19 nt, Artificial Sequence
  Description of Artificial Sequence: Synthetic oligonucleotide
uuagacaagcccuucagca

SEQ ID NO: 1086199 - RNA, 19 nt, Artificial Sequence
  Description of Artificial Sequence: Synthetic oligonucleotide
uuuggugacugccaacugg

SEQ ID NO: 1086200 - RNA, 19 nt, Artificial Sequence
  Description of Artificial Sequence: Synthetic oligonucleotide
agauauaaacuuugaggac

SEQ ID NO: 1086201 - RNA, 19 nt, Artificial Sequence
  Description of Artificial Sequence: Synthetic oligonucleotide
aguaguaauuucuacaaaa

SEQ ID NO: 1086202 - RNA, 19 nt, Artificial Sequence
  Description of Artificial Sequence: Synthetic oligonucleotide
aaggcuugcuuccucaauc

SEQ ID NO: 1086203 - RNA, 19 nt, Artificial Sequence
  Description of Artificial Sequence: Synthetic oligonucleotide
caugcauuaauaucaacug

SEQ ID NO: 1086204 - RNA, 19 nt, Artificial Sequence
  Description of Artificial Sequence: Synthetic oligonucleotide
aaacuuugaggacaugaug

SEQ ID NO: 1086205 - RNA, 19 nt, Artificial Sequence
  Description of Artificial Sequence: Synthetic oligonucleotide
aaaguaacuaguaucacau

SEQ ID NO: 1086206 - RNA, 19 nt, Artificial Sequence
  Description of Artificial Sequence: Synthetic oligonucleotide
uuacaaaugcaguauaauc

SEQ ID NO: 1086207 - RNA, 19 nt, Artificial Sequence
  Description of Artificial Sequence: Synthetic oligonucleotide
uuugcauaaaacaugcauu

SEQ ID NO: 1086208 - RNA, 19 nt, Artificial Sequence
  Description of Artificial Sequence: Synthetic oligonucleotide
ucuucagauagucuuuaag

SEQ ID NO: 1086209 - RNA, 19 nt, Artificial Sequence
  Description of Artificial Sequence: Synthetic oligonucleotide
uuggguguuaucuugguga

SEQ ID NO: 1086210 - RNA, 19 nt, Artificial Sequence
  Description of Artificial Sequence: Synthetic oligonucleotide
cauuacaguacuaaagcug

SEQ ID NO: 1086211 - RNA, 19 nt, Artificial Sequence
  Description of Artificial Sequence: Synthetic oligonucleotide
gauauaaacuuugaggaca

SEQ ID NO: 1086212 - RNA, 19 nt, Artificial Sequence
  Description of Artificial Sequence: Synthetic oligonucleotide
agaaaaucaguugugaaca

SEQ ID NO: 1086213 - RNA, 19 nt, Artificial Sequence
  Description of Artificial Sequence: Synthetic oligonucleotide
aaaacgguaucauauucau

SEQ ID NO: 1086214 - RNA, 19 nt, Artificial Sequence
  Description of Artificial Sequence: Synthetic oligonucleotide
uguuaaauccaguaguaau

SEQ ID NO: 1086215 - RNA, 19 nt, Artificial Sequence
  Description of Artificial Sequence: Synthetic oligonucleotide
gugaccuccauuuucaggc

SEQ ID NO: 1086216 - RNA, 19 nt, Artificial Sequence
  Description of Artificial Sequence: Synthetic oligonucleotide
ugucuaagugccaaaagaa

SEQ ID NO: 1086217 - RNA, 19 nt, Artificial Sequence
  Description of Artificial Sequence: Synthetic oligonucleotide
uuuacaaacugcuuggcuu

SEQ ID NO: 1086218 - RNA, 19 nt, Artificial Sequence
  Description of Artificial Sequence: Synthetic oligonucleotide
acaguacuaaagcugaugu

SEQ ID NO: 1086219 - RNA, 19 nt, Artificial Sequence
  Description of Artificial Sequence: Synthetic oligonucleotide
uagucuuuaaguucagucu

SEQ ID NO: 1086220 - RNA, 19 nt, Artificial Sequence
  Description of Artificial Sequence: Synthetic oligonucleotide
uucaggggccaauaggugg

SEQ ID NO: 1086221 - RNA, 19 nt, Artificial Sequence
  Description of Artificial Sequence: Synthetic oligonucleotide
ucucucuuaacaaccgugc

SEQ ID NO: 1086222 - RNA, 19 nt, Artificial Sequence
  Description of Artificial Sequence: Synthetic oligonucleotide
aguaacuaguaucacauuu

SEQ ID NO: 1086223 - RNA, 19 nt, Artificial Sequence
  Description of Artificial Sequence: Synthetic oligonucleotide
ucuaguucuccauacauuu

SEQ ID NO: 1086224 - RNA, 19 nt, Artificial Sequence
  Description of Artificial Sequence: Synthetic oligonucleotide
agauacuuuggugacugcc

SEQ ID NO: 1086225 - RNA, 19 nt, Artificial Sequence
  Description of Artificial Sequence: Synthetic oligonucleotide
ugauaacauaagaaaccag

SEQ ID NO: 1086226 - RNA, 19 nt, Artificial Sequence
  Description of Artificial Sequence: Synthetic oligonucleotide
aaccaagugugacacaggu

SEQ ID NO: 1086227 - RNA, 19 nt, Artificial Sequence
  Description of Artificial Sequence: Synthetic oligonucleotide
uauugaacacugucuggcg

SEQ ID NO: 1086228 - RNA, 19 nt, Artificial Sequence
  Description of Artificial Sequence: Synthetic oligonucleotide
uuacaaacugcuuggcuug

SEQ ID NO: 1086229 - RNA, 19 nt, Artificial Sequence
  Description of Artificial Sequence: Synthetic oligonucleotide
ucauaagccaaaacgguau

SEQ ID NO: 1086230 - RNA, 19 nt, Artificial Sequence
  Description of Artificial Sequence: Synthetic oligonucleotide
acuauugaacacugucugg

SEQ ID NO: 1086231 - RNA, 19 nt, Artificial Sequence
  Description of Artificial Sequence: Synthetic oligonucleotide
gaucuggucauuuuaggca

SEQ ID NO: 1086232 - RNA, 19 nt, Artificial Sequence
  Description of Artificial Sequence: Synthetic oligonucleotide
uacgagaaagaaaaucagu

SEQ ID NO: 1086233 - RNA, 19 nt, Artificial Sequence
  Description of Artificial Sequence: Synthetic oligonucleotide
uuccugaaaaguaacuagu

SEQ ID NO: 1086234 - RNA, 19 nt, Artificial Sequence
  Description of Artificial Sequence: Synthetic oligonucleotide
auaaguuccacuugcugga

SEQ ID NO: 1086235 - RNA, 19 nt, Artificial Sequence
  Description of Artificial Sequence: Synthetic oligonucleotide
aacaaccgugccuucauca

SEQ ID NO: 1086236 - RNA, 19 nt, Artificial Sequence
  Description of Artificial Sequence: Synthetic oligonucleotide
cuagcugcaguaauacugc

SEQ ID NO: 1086237 - RNA, 19 nt, Artificial Sequence
  Description of Artificial Sequence: Synthetic oligonucleotide
uugcauaaaacaugcauua

SEQ ID NO: 1086238 - RNA, 19 nt, Artificial Sequence
  Description of Artificial Sequence: Synthetic oligonucleotide
uguacauacaaugccagaa

SEQ ID NO: 1086239 - RNA, 19 nt, Artificial Sequence
  Description of Artificial Sequence: Synthetic oligonucleotide
acaugcauuaauaucaacu

SEQ ID NO: 1086240 - RNA, 19 nt, Artificial Sequence
  Description of Artificial Sequence: Synthetic oligonucleotide
uuuuaggcagcagcaaagg

SEQ ID NO: 1086241 - RNA, 19 nt, Artificial Sequence
  Description of Artificial Sequence: Synthetic oligonucleotide
uaucccugauaacauaaga

SEQ ID NO: 1086242 - RNA, 19 nt, Artificial Sequence
  Description of Artificial Sequence: Synthetic oligonucleotide
cuacgagaaagaaaaucag

SEQ ID NO: 1086243 - RNA, 19 nt, Artificial Sequence
  Description of Artificial Sequence: Synthetic oligonucleotide
gagcauuacaguacuaaag

SEQ ID NO: 1086244 - RNA, 19 nt, Artificial Sequence
  Description of Artificial Sequence: Synthetic oligonucleotide
aguuccacuugcuggacuc

SEQ ID NO: 1086245 - RNA, 19 nt, Artificial Sequence
  Description of Artificial Sequence: Synthetic oligonucleotide
acaagaaagaacagcguuc

SEQ ID NO: 1086246 - RNA, 19 nt, Artificial Sequence
  Description of Artificial Sequence: Synthetic oligonucleotide
ugagucaaccucccugagg

SEQ ID NO: 1086247 - RNA, 19 nt, Artificial Sequence
  Description of Artificial Sequence: Synthetic oligonucleotide
acuugcuggacucuguuca

SEQ ID NO: 1086248 - RNA, 19 nt, Artificial Sequence
  Description of Artificial Sequence: Synthetic oligonucleotide
auauggguggauucccugg

SEQ ID NO: 1086249 - RNA, 19 nt, Artificial Sequence
  Description of Artificial Sequence: Synthetic oligonucleotide
ucugaccugccacaggcag

SEQ ID NO: 1086250 - RNA, 19 nt, Artificial Sequence
  Description of Artificial Sequence: Synthetic oligonucleotide
uuguauucacaaauaaguu

SEQ ID NO: 1086251 - RNA, 19 nt, Artificial Sequence
  Description of Artificial Sequence: Synthetic oligonucleotide
aaaccugauugaaauaugu

SEQ ID NO: 1086252 - RNA, 19 nt, Artificial Sequence
  Description of Artificial Sequence: Synthetic oligonucleotide
uucugguuaaguagagagc

SEQ ID NO: 1086253 - RNA, 19 nt, Artificial Sequence
  Description of Artificial Sequence: Synthetic oligonucleotide
auaugcuuaugcauauccc

SEQ ID NO: 1086254 - RNA, 19 nt, Artificial Sequence
  Description of Artificial Sequence: Synthetic oligonucleotide
cacuauugaacacugucug

SEQ ID NO: 1086255 - RNA, 19 nt, Artificial Sequence
  Description of Artificial Sequence: Synthetic oligonucleotide
uggacucuguucaugcugc

SEQ ID NO: 1086256 - RNA, 19 nt, Artificial Sequence
  Description of Artificial Sequence: Synthetic oligonucleotide
uucagcagauacuuuggug

SEQ ID NO: 1086257 - RNA, 19 nt, Artificial Sequence
  Description of Artificial Sequence: Synthetic oligonucleotide
ugcucacuaacgcugcugc

SEQ ID NO: 1086258 - RNA, 19 nt, Artificial Sequence
  Description of Artificial Sequence: Synthetic oligonucleotide
ugaauguccucucucuuaa

SEQ ID NO: 1086259 - RNA, 19 nt, Artificial Sequence
  Description of Artificial Sequence: Synthetic oligonucleotide
aggcuugcuuccucaaucc

SEQ ID NO: 1086260 - RNA, 19 nt, Artificial Sequence
  Description of Artificial Sequence: Synthetic oligonucleotide
caaagggauucagauaugg

SEQ ID NO: 1086261 - RNA, 19 nt, Artificial Sequence
  Description of Artificial Sequence: Synthetic oligonucleotide
cuguaucaaaauagguccg

SEQ ID NO: 1086262 - RNA, 19 nt, Artificial Sequence
  Description of Artificial Sequence: Synthetic oligonucleotide
caggcagacuuucaguucg

SEQ ID NO: 1086263 - RNA, 19 nt, Artificial Sequence
  Description of Artificial Sequence: Synthetic oligonucleotide
aaguagagagccuuucuua

SEQ ID NO: 1086264 - RNA, 19 nt, Artificial Sequence
  Description of Artificial Sequence: Synthetic oligonucleotide
ggaagauauaaacuuugag

SEQ ID NO: 1086265 - RNA, 19 nt, Artificial Sequence
  Description of Artificial Sequence: Synthetic oligonucleotide
ucagauauggguggauucc

SEQ ID NO: 1086266 - RNA, 19 nt, Artificial Sequence
  Description of Artificial Sequence: Synthetic oligonucleotide
cucaauccugccaugaguc

SEQ ID NO: 1086267 - RNA, 19 nt, Artificial Sequence
  Description of Artificial Sequence: Synthetic oligonucleotide
gaacaggacaucuaguucu

SEQ ID NO: 1086268 - RNA, 19 nt, Artificial Sequence
  Description of Artificial Sequence: Synthetic oligonucleotide
gugacugccaacugggcag

SEQ ID NO: 1086269 - RNA, 19 nt, Artificial Sequence
  Description of Artificial Sequence: Synthetic oligonucleotide
aacacugucuggcggucag

SEQ ID NO: 1086270 - RNA, 19 nt, Artificial Sequence
  Description of Artificial Sequence: Synthetic oligonucleotide
gaaagcacccauggggugg

SEQ ID NO: 1086271 - RNA, 19 nt, Artificial Sequence
  Description of Artificial Sequence: Synthetic oligonucleotide
agcaugggcaucuguauug

SEQ ID NO: 1086272 - RNA, 19 nt, Artificial Sequence
  Description of Artificial Sequence: Synthetic oligonucleotide
ugcaguaauacugcagccc

SEQ ID NO: 1086273 - RNA, 19 nt, Artificial Sequence
  Description of Artificial Sequence: Synthetic oligonucleotide
cuggcggucagacucagag

SEQ ID NO: 1086274 - RNA, 19 nt, Artificial Sequence
  Description of Artificial Sequence: Synthetic oligonucleotide
aauggcaccgagaugccug

SEQ ID NO: 1086275 - RNA, 19 nt, Artificial Sequence
  Description of Artificial Sequence: Synthetic oligonucleotide
cauuucaugcucuggaaca

SEQ ID NO: 1086276 - RNA, 19 nt, Artificial Sequence
  Description of Artificial Sequence: Synthetic oligonucleotide
ggucccuucuaucagacgc

SEQ ID NO: 1086277 - RNA, 19 nt, Artificial Sequence
  Description of Artificial Sequence: Synthetic oligonucleotide
uuuuguagucaagugggac

SEQ ID NO: 1086278 - RNA, 19 nt, Artificial Sequence
  Description of Artificial Sequence: Synthetic oligonucleotide
uucagauauggguggauuc

SEQ ID NO: 1086279 - RNA, 19 nt, Artificial Sequence
  Description of Artificial Sequence: Synthetic oligonucleotide
gauauggguggauucccug

SEQ ID NO: 1086280 - RNA, 19 nt, Artificial Sequence
  Description of Artificial Sequence: Synthetic oligonucleotide
aaauccccacucuccgggg

SEQ ID NO: 1086281 - RNA, 19 nt, Artificial Sequence
  Description of Artificial Sequence: Synthetic oligonucleotide
uacaguacuaaagcugaug

SEQ ID NO: 1086282 - RNA, 19 nt, Artificial Sequence
  Description of Artificial Sequence: Synthetic oligonucleotide
uucuaucagacgccugugc

SEQ ID NO: 1086283 - RNA, 19 nt, Artificial Sequence
  Description of Artificial Sequence: Synthetic oligonucleotide
uccugaaaaguaacuagua

SEQ ID NO: 1086284 - RNA, 19 nt, Artificial Sequence
  Description of Artificial Sequence: Synthetic oligonucleotide
cauggaaagugcaacucuc

SEQ ID NO: 1086285 - RNA, 19 nt, Artificial Sequence
  Description of Artificial Sequence: Synthetic oligonucleotide
cucacuaacgcugcugccg

SEQ ID NO: 1086286 - RNA, 19 nt, Artificial Sequence
  Description of Artificial Sequence: Synthetic oligonucleotide
aggaacauuuuguagucaa

SEQ ID NO: 1086287 - RNA, 19 nt, Artificial Sequence
  Description of Artificial Sequence: Synthetic oligonucleotide
gaaaccagaggacucugga

SEQ ID NO: 1086288 - RNA, 19 nt, Artificial Sequence
  Description of Artificial Sequence: Synthetic oligonucleotide
caaaacgguaucauauuca

SEQ ID NO: 1086289 - RNA, 19 nt, Artificial Sequence
  Description of Artificial Sequence: Synthetic oligonucleotide
uuuucaggcuugacaaccu

SEQ ID NO: 1086290 - RNA, 19 nt, Artificial Sequence
  Description of Artificial Sequence: Synthetic oligonucleotide
cacaaauaaguuccacuug

SEQ ID NO: 1086291 - RNA, 19 nt, Artificial Sequence
  Description of Artificial Sequence: Synthetic oligonucleotide
uauggguggauucccugga

SEQ ID NO: 1086292 - RNA, 19 nt, Artificial Sequence
  Description of Artificial Sequence: Synthetic oligonucleotide
aguucaggggccaauaggu

SEQ ID NO: 1086293 - RNA, 19 nt, Artificial Sequence
  Description of Artificial Sequence: Synthetic oligonucleotide
uggguggauucccuggaag

SEQ ID NO: 1086294 - RNA, 19 nt, Artificial Sequence
  Description of Artificial Sequence: Synthetic oligonucleotide
ugcugcgccaguucagggg

SEQ ID NO: 1086295 - RNA, 19 nt, Artificial Sequence
  Description of Artificial Sequence: Synthetic oligonucleotide
gauacuuuggugacugcca

SEQ ID NO: 1086296 - RNA, 19 nt, Artificial Sequence
  Description of Artificial Sequence: Synthetic oligonucleotide
acaaccgugccuucaucag

SEQ ID NO: 1086297 - RNA, 19 nt, Artificial Sequence
  Description of Artificial Sequence: Synthetic oligonucleotide
guaauacugcagcccaucc

SEQ ID NO: 1086298 - RNA, 19 nt, Artificial Sequence
  Description of Artificial Sequence: Synthetic oligonucleotide
ugcugaauguccucucucu

SEQ ID NO: 1086299 - RNA, 19 nt, Artificial Sequence
  Description of Artificial Sequence: Synthetic oligonucleotide
ucaacugccacagguuggc

SEQ ID NO: 1086300 - RNA, 19 nt, Artificial Sequence
  Description of Artificial Sequence: Synthetic oligonucleotide
gccagcauucauuucaugc

SEQ ID NO: 1086301 - RNA, 19 nt, Artificial Sequence
  Description of Artificial Sequence: Synthetic oligonucleotide
aaacgguaucauauucauc

SEQ ID NO: 1086302 - RNA, 19 nt, Artificial Sequence
  Description of Artificial Sequence: Synthetic oligonucleotide
gaaaccugauugaaauaug

SEQ ID NO: 1086303 - RNA, 19 nt, Artificial Sequence
  Description of Artificial Sequence: Synthetic oligonucleotide
acuaacgcugcugccgagc

SEQ ID NO: 1086304 - RNA, 19 nt, Artificial Sequence
  Description of Artificial Sequence: Synthetic oligonucleotide
uccucaauccugccaugag

SEQ ID NO: 1086305 - RNA, 19 nt, Artificial Sequence
  Description of Artificial Sequence: Synthetic oligonucleotide
aagggucccuucuaucaga

SEQ ID NO: 1086306 - RNA, 19 nt, Artificial Sequence
  Description of Artificial Sequence: Synthetic oligonucleotide
aaagcacccaugggguggg

SEQ ID NO: 1086307 - RNA, 19 nt, Artificial Sequence
  Description of Artificial Sequence: Synthetic oligonucleotide
cuaucagacgccugugcac

SEQ ID NO: 1086308 - RNA, 19 nt, Artificial Sequence
  Description of Artificial Sequence: Synthetic oligonucleotide
uaugcauaucccugauaac

SEQ ID NO: 1086309 - RNA, 19 nt, Artificial Sequence
  Description of Artificial Sequence: Synthetic oligonucleotide
aggucucuuacaaaugcag

SEQ ID NO: 1086310 - RNA, 19 nt, Artificial Sequence
  Description of Artificial Sequence: Synthetic oligonucleotide
uacgcccacaagaaagaac

SEQ ID NO: 1086311 - RNA, 19 nt, Artificial Sequence
  Description of Artificial Sequence: Synthetic oligonucleotide
cuuuguucucauaagccaa

SEQ ID NO: 1086312 - RNA, 19 nt, Artificial Sequence
  Description of Artificial Sequence: Synthetic oligonucleotide
uaucagacgccugugcacu

SEQ ID NO: 1086313 - RNA, 19 nt, Artificial Sequence
  Description of Artificial Sequence: Synthetic oligonucleotide
augccagaauuccugaaaa

SEQ ID NO: 1086314 - RNA, 19 nt, Artificial Sequence
  Description of Artificial Sequence: Synthetic oligonucleotide
acgccugugcacucuugcc

SEQ ID NO: 1086315 - RNA, 19 nt, Artificial Sequence
  Description of Artificial Sequence: Synthetic oligonucleotide
caugagucaaccucccuga

SEQ ID NO: 1086316 - RNA, 19 nt, Artificial Sequence
  Description of Artificial Sequence: Synthetic oligonucleotide
cccugauaacauaagaaac

SEQ ID NO: 1086317 - RNA, 19 nt, Artificial Sequence
  Description of Artificial Sequence: Synthetic oligonucleotide
cugcaguaauacugcagcc

SEQ ID NO: 1086318 - RNA, 19 nt, Artificial Sequence
  Description of Artificial Sequence: Synthetic oligonucleotide
aagccaaaacgguaucaua

SEQ ID NO: 1086319 - RNA, 19 nt, Artificial Sequence
  Description of Artificial Sequence: Synthetic oligonucleotide
ucaauccugccaugaguca

SEQ ID NO: 1086320 - RNA, 19 nt, Artificial Sequence
  Description of Artificial Sequence: Synthetic oligonucleotide
gucucuuacaaaugcagua

SEQ ID NO: 1086321 - RNA, 19 nt, Artificial Sequence
  Description of Artificial Sequence: Synthetic oligonucleotide
uggguguuaucuuggugac

SEQ ID NO: 1086322 - RNA, 19 nt, Artificial Sequence
  Description of Artificial Sequence: Synthetic oligonucleotide
cuaacgcugcugccgagcc

SEQ ID NO: 1086323 - RNA, 19 nt, Artificial Sequence
  Description of Artificial Sequence: Synthetic oligonucleotide
uccauacaagccuggcaca

SEQ ID NO: 1086324 - RNA, 19 nt, Artificial Sequence
  Description of Artificial Sequence: Synthetic oligonucleotide
gcauacgcccacaagaaag

SEQ ID NO: 1086325 - RNA, 19 nt, Artificial Sequence
  Description of Artificial Sequence: Synthetic oligonucleotide
gacgccugugcacucuugc

SEQ ID NO: 1086326 - RNA, 19 nt, Artificial Sequence
  Description of Artificial Sequence: Synthetic oligonucleotide
gcagcauacgcccacaaga

SEQ ID NO: 1086327 - RNA, 19 nt, Artificial Sequence
  Description of Artificial Sequence: Synthetic oligonucleotide
aaggucucuuacaaaugca

SEQ ID NO: 1086328 - RNA, 19 nt, Artificial Sequence
  Description of Artificial Sequence: Synthetic oligonucleotide
ucuggucauuuuaggcagc

SEQ ID NO: 1086329 - RNA, 19 nt, Artificial Sequence
  Description of Artificial Sequence: Synthetic oligonucleotide
aaguaacuaguaucacauu

SEQ ID NO: 1086330 - RNA, 19 nt, Artificial Sequence
  Description of Artificial Sequence: Synthetic oligonucleotide
auaaggucucuuacaaaug

SEQ ID NO: 1086331 - RNA, 19 nt, Artificial Sequence
  Description of Artificial Sequence: Synthetic oligonucleotide
ugcacaacuugcugcgcca

SEQ ID NO: 1086332 - RNA, 19 nt, Artificial Sequence
  Description of Artificial Sequence: Synthetic oligonucleotide
auacuuuggugacugccaa

SEQ ID NO: 1086333 - RNA, 19 nt, Artificial Sequence
  Description of Artificial Sequence: Synthetic oligonucleotide
ccugauugaaauauguuaa

SEQ ID NO: 1086334 - RNA, 19 nt, Artificial Sequence
  Description of Artificial Sequence: Synthetic oligonucleotide
aucccugauaacauaagaa

SEQ ID NO: 1086335 - RNA, 19 nt, Artificial Sequence
  Description of Artificial Sequence: Synthetic oligonucleotide
aucaacugccacagguugg

SEQ ID NO: 1086336 - RNA, 19 nt, Artificial Sequence
  Description of Artificial Sequence: Synthetic oligonucleotide
augcuuaugcauaucccug

SEQ ID NO: 1086337 - RNA, 19 nt, Artificial Sequence
  Description of Artificial Sequence: Synthetic oligonucleotide
guuaaguagagagccuuuc

SEQ ID NO: 1086338 - RNA, 19 nt, Artificial Sequence
  Description of Artificial Sequence: Synthetic oligonucleotide
ugccaaaagaauggggcaa

SEQ ID NO: 1086339 - RNA, 19 nt, Artificial Sequence
  Description of Artificial Sequence: Synthetic oligonucleotide
ugcauaaaacaugcauuaa

SEQ ID NO: 1086340 - RNA, 19 nt, Artificial Sequence
  Description of Artificial Sequence: Synthetic oligonucleotide
gaaccaagugugacacagg

SEQ ID NO: 1086341 - RNA, 19 nt, Artificial Sequence
  Description of Artificial Sequence: Synthetic oligonucleotide
uugaucgcccaugccauca

SEQ ID NO: 1086342 - RNA, 19 nt, Artificial Sequence
  Description of Artificial Sequence: Synthetic oligonucleotide
aguucagucuucaaaucau

SEQ ID NO: 1086343 - RNA, 19 nt, Artificial Sequence
  Description of Artificial Sequence: Synthetic oligonucleotide
acgguaucauauucaucug

SEQ ID NO: 1086344 - RNA, 19 nt, Artificial Sequence
  Description of Artificial Sequence: Synthetic oligonucleotide
cauacgcccacaagaaaga

SEQ ID NO: 1086345 - RNA, 19 nt, Artificial Sequence
  Description of Artificial Sequence: Synthetic oligonucleotide
acaaccucuugaucgccca

SEQ ID NO: 1086346 - RNA, 19 nt, Artificial Sequence
  Description of Artificial Sequence: Synthetic oligonucleotide
ugacacaggucucuuuauu

SEQ ID NO: 1086347 - RNA, 19 nt, Artificial Sequence
  Description of Artificial Sequence: Synthetic oligonucleotide
cucauaagccaaaacggua

SEQ ID NO: 1086348 - RNA, 19 nt, Artificial Sequence
  Description of Artificial Sequence: Synthetic oligonucleotide
cagaccacacacugaauca

SEQ ID NO: 1086349 - RNA, 19 nt, Artificial Sequence
  Description of Artificial Sequence: Synthetic oligonucleotide
cauuuuaggcagcagcaaa

SEQ ID NO: 1086350 - RNA, 19 nt, Artificial Sequence
  Description of Artificial Sequence: Synthetic oligonucleotide
caacauucagcagcagccc

SEQ ID NO: 1086351 - RNA, 19 nt, Artificial Sequence
  Description of Artificial Sequence: Synthetic oligonucleotide
cauaagaaaccagaggacu

SEQ ID NO: 1086352 - RNA, 19 nt, Artificial Sequence
  Description of Artificial Sequence: Synthetic oligonucleotide
uuaucuuggugaccuccau

SEQ ID NO: 1086353 - RNA, 19 nt, Artificial Sequence
  Description of Artificial Sequence: Synthetic oligonucleotide
cagauauggguggauuccc

SEQ ID NO: 1086354 - RNA, 19 nt, Artificial Sequence
  Description of Artificial Sequence: Synthetic oligonucleotide
agaauggggcaaaauuuca

SEQ ID NO: 1086355 - RNA, 19 nt, Artificial Sequence
  Description of Artificial Sequence: Synthetic oligonucleotide
auaucccugauaacauaag

SEQ ID NO: 1086356 - RNA, 19 nt, Artificial Sequence
  Description of Artificial Sequence: Synthetic oligonucleotide
caaccgugccuucaucagc

SEQ ID NO: 1086357 - RNA, 19 nt, Artificial Sequence
  Description of Artificial Sequence: Synthetic oligonucleotide
gugcacaacuugcugcgcc

SEQ ID NO: 1086358 - RNA, 19 nt, Artificial Sequence
  Description of Artificial Sequence: Synthetic oligonucleotide
ucaaccucccugaggccac

SEQ ID NO: 1086359 - RNA, 19 nt, Artificial Sequence
  Description of Artificial Sequence: Synthetic oligonucleotide
agucuuggcaggugcacaa

SEQ ID NO: 1086360 - RNA, 19 nt, Artificial Sequence
  Description of Artificial Sequence: Synthetic oligonucleotide
ggcccaaaccaucucuacg

SEQ ID NO: 1086361 - RNA, 19 nt, Artificial Sequence
  Description of Artificial Sequence: Synthetic oligonucleotide
gugccaaaagaauggggca

SEQ ID NO: 1086362 - RNA, 19 nt, Artificial Sequence
  Description of Artificial Sequence: Synthetic oligonucleotide
ugucuggcggucagacuca

SEQ ID NO: 1086363 - RNA, 19 nt, Artificial Sequence
  Description of Artificial Sequence: Synthetic oligonucleotide
ggcacgacggcucacucug

SEQ ID NO: 1086364 - RNA, 19 nt, Artificial Sequence
  Description of Artificial Sequence: Synthetic oligonucleotide
uugcugcgccaguucaggg

SEQ ID NO: 1086365 - RNA, 19 nt, Artificial Sequence
  Description of Artificial Sequence: Synthetic oligonucleotide
gacaaccucuugaucgccc

SEQ ID NO: 1086366 - RNA, 19 nt, Artificial Sequence
  Description of Artificial Sequence: Synthetic oligonucleotide
cagacuuucaguucgguuu

SEQ ID NO: 1086367 - RNA, 19 nt, Artificial Sequence
  Description of Artificial Sequence: Synthetic oligonucleotide
uacuuuggugacugccaac

SEQ ID NO: 1086368 - RNA, 19 nt, Artificial Sequence
  Description of Artificial Sequence: Synthetic oligonucleotide
caucucuacgagaaagaaa

SEQ ID NO: 1086369 - RNA, 19 nt, Artificial Sequence
  Description of Artificial Sequence: Synthetic oligonucleotide
ugcugccgagccaugguuc

SEQ ID NO: 1086370 - RNA, 19 nt, Artificial Sequence
  Description of Artificial Sequence: Synthetic oligonucleotide
ucgcccaugccaucaacau

SEQ ID NO: 1086371 - RNA, 19 nt, Artificial Sequence
  Description of Artificial Sequence: Synthetic oligonucleotide
ccaaaacgguaucauauuc

SEQ ID NO: 1086372 - RNA, 19 nt, Artificial Sequence
  Description of Artificial Sequence: Synthetic oligonucleotide
uucugaccugccacaggca

SEQ ID NO: 1086373 - RNA, 19 nt, Artificial Sequence
  Description of Artificial Sequence: Synthetic oligonucleotide
ccaacugggcagcauacgc

SEQ ID NO: 1086374 - RNA, 19 nt, Artificial Sequence
  Description of Artificial Sequence: Synthetic oligonucleotide
gucaggauaaggucucuua

SEQ ID NO: 1086375 - RNA, 19 nt, Artificial Sequence
  Description of Artificial Sequence: Synthetic oligonucleotide
auucagauauggguggauu

SEQ ID NO: 1086376 - RNA, 19 nt, Artificial Sequence
  Description of Artificial Sequence: Synthetic oligonucleotide
aucagacgccugugcacuc

SEQ ID NO: 1086377 - RNA, 19 nt, Artificial Sequence
  Description of Artificial Sequence: Synthetic oligonucleotide
agggucccuucuaucagac

SEQ ID NO: 1086378 - RNA, 19 nt, Artificial Sequence
  Description of Artificial Sequence: Synthetic oligonucleotide
ugacaaccucuugaucgcc

SEQ ID NO: 1086379 - RNA, 19 nt, Artificial Sequence
  Description of Artificial Sequence: Synthetic oligonucleotide
guuaucuuggugaccucca

SEQ ID NO: 1086380 - RNA, 19 nt, Artificial Sequence
  Description of Artificial Sequence: Synthetic oligonucleotide
ccugggagcauuacaguac

SEQ ID NO: 1086381 - RNA, 19 nt, Artificial Sequence
  Description of Artificial Sequence: Synthetic oligonucleotide
uggcggucagacucagagc

SEQ ID NO: 1086382 - RNA, 19 nt, Artificial Sequence
  Description of Artificial Sequence: Synthetic oligonucleotide
ggaacauuuuguagucaag

SEQ ID NO: 1086383 - RNA, 19 nt, Artificial Sequence
  Description of Artificial Sequence: Synthetic oligonucleotide
agcauacgcccacaagaaa

SEQ ID NO: 1086384 - RNA, 19 nt, Artificial Sequence
  Description of Artificial Sequence: Synthetic oligonucleotide
ggagcauuacaguacuaaa

SEQ ID NO: 1086385 - RNA, 19 nt, Artificial Sequence
  Description of Artificial Sequence: Synthetic oligonucleotide
agcguuccauacaagccug

SEQ ID NO: 1086386 - RNA, 19 nt, Artificial Sequence
  Description of Artificial Sequence: Synthetic oligonucleotide
cuucuaucagacgccugug

SEQ ID NO: 1086387 - RNA, 19 nt, Artificial Sequence
  Description of Artificial Sequence: Synthetic oligonucleotide
ucuuaacaaccgugccuuc

SEQ ID NO: 1086388 - RNA, 19 nt, Artificial Sequence
  Description of Artificial Sequence: Synthetic oligonucleotide
cagcauacgcccacaagaa

SEQ ID NO: 1086389 - RNA, 19 nt, Artificial Sequence
  Description of Artificial Sequence: Synthetic oligonucleotide
cagauacuuuggugacugc

SEQ ID NO: 1086390 - RNA, 19 nt, Artificial Sequence
  Description of Artificial Sequence: Synthetic oligonucleotide
gucccuucuaucagacgcc

SEQ ID NO: 1086391 - RNA, 19 nt, Artificial Sequence
  Description of Artificial Sequence: Synthetic oligonucleotide
ucccuucuaucagacgccu

SEQ ID NO: 1086392 - RNA, 19 nt, Artificial Sequence
  Description of Artificial Sequence: Synthetic oligonucleotide
gaucgcccaugccaucaac

SEQ ID NO: 1086393 - RNA, 19 nt, Artificial Sequence
  Description of Artificial Sequence: Synthetic oligonucleotide
gcauucauuucaugcucug

SEQ ID NO: 1086394 - RNA, 19 nt, Artificial Sequence
  Description of Artificial Sequence: Synthetic oligonucleotide
cauuaaagggucccuucua

SEQ ID NO: 1086395 - RNA, 19 nt, Artificial Sequence
  Description of Artificial Sequence: Synthetic oligonucleotide
uaacgcugcugccgagcca

SEQ ID NO: 1086396 - RNA, 19 nt, Artificial Sequence
  Description of Artificial Sequence: Synthetic oligonucleotide
agauauggguggauucccu

SEQ ID NO: 1086397 - RNA, 19 nt, Artificial Sequence
  Description of Artificial Sequence: Synthetic oligonucleotide
guaacuaguaucacauuuu

SEQ ID NO: 1086398 - RNA, 19 nt, Artificial Sequence
  Description of Artificial Sequence: Synthetic oligonucleotide
ugccgagccaugguucuga

SEQ ID NO: 1086399 - RNA, 19 nt, Artificial Sequence
  Description of Artificial Sequence: Synthetic oligonucleotide
cagcaaaucucuucagaua

SEQ ID NO: 1086400 - RNA, 19 nt, Artificial Sequence
  Description of Artificial Sequence: Synthetic oligonucleotide
ugaucgcccaugccaucaa

SEQ ID NO: 1086401 - RNA, 19 nt, Artificial Sequence
  Description of Artificial Sequence: Synthetic oligonucleotide
ggaaagcacccauggggug

SEQ ID NO: 1086402 - RNA, 19 nt, Artificial Sequence
  Description of Artificial Sequence: Synthetic oligonucleotide
caucuaguucuccauacau

SEQ ID NO: 1086403 - RNA, 19 nt, Artificial Sequence
  Description of Artificial Sequence: Synthetic oligonucleotide
acugucuggcggucagacu

SEQ ID NO: 1086404 - RNA, 19 nt, Artificial Sequence
  Description of Artificial Sequence: Synthetic oligonucleotide
caggcuugacaaccucuug

SEQ ID NO: 1086405 - RNA, 19 nt, Artificial Sequence
  Description of Artificial Sequence: Synthetic oligonucleotide
aucgcccaugccaucaaca

SEQ ID NO: 1086406 - RNA, 19 nt, Artificial Sequence
  Description of Artificial Sequence: Synthetic oligonucleotide
ugaacacugucuggcgguc

SEQ ID NO: 1086407 - RNA, 19 nt, Artificial Sequence
  Description of Artificial Sequence: Synthetic oligonucleotide
acgacggcucacucugcug

SEQ ID NO: 1086408 - RNA, 19 nt, Artificial Sequence
  Description of Artificial Sequence: Synthetic oligonucleotide
ggcagcauacgcccacaag

SEQ ID NO: 1086409 - RNA, 19 nt, Artificial Sequence
  Description of Artificial Sequence: Synthetic oligonucleotide
caguaguaauuucuacaaa

SEQ ID NO: 1086410 - RNA, 19 nt, Artificial Sequence
  Description of Artificial Sequence: Synthetic oligonucleotide
cuugaucgcccaugccauc

SEQ ID NO: 1086411 - RNA, 19 nt, Artificial Sequence
  Description of Artificial Sequence: Synthetic oligonucleotide
guacuaaagcugaugucua

SEQ ID NO: 1086412 - RNA, 19 nt, Artificial Sequence
  Description of Artificial Sequence: Synthetic oligonucleotide
ggacggaaagggaaccaag

SEQ ID NO: 1086413 - RNA, 19 nt, Artificial Sequence
  Description of Artificial Sequence: Synthetic oligonucleotide
caagugggacaccugggaa

SEQ ID NO: 1086414 - RNA, 19 nt, Artificial Sequence
  Description of Artificial Sequence: Synthetic oligonucleotide
cagcguuccauacaagccu

SEQ ID NO: 1086415 - RNA, 19 nt, Artificial Sequence
  Description of Artificial Sequence: Synthetic oligonucleotide
aguugugaacagguacaaa

SEQ ID NO: 1086416 - RNA, 19 nt, Artificial Sequence
  Description of Artificial Sequence: Synthetic oligonucleotide
acaccugggaagauauaaa

SEQ ID NO: 1086417 - RNA, 19 nt, Artificial Sequence
  Description of Artificial Sequence: Synthetic oligonucleotide
ggggccaauagguggcagc

SEQ ID NO: 1086418 - RNA, 19 nt, Artificial Sequence
  Description of Artificial Sequence: Synthetic oligonucleotide
cuuaugcauaucccugaua

SEQ ID NO: 1086419 - RNA, 19 nt, Artificial Sequence
  Description of Artificial Sequence: Synthetic oligonucleotide
gggagcauuacaguacuaa

SEQ ID NO: 1086420 - RNA, 19 nt, Artificial Sequence
  Description of Artificial Sequence: Synthetic oligonucleotide
cugcucacuaacgcugcug

SEQ ID NO: 1086421 - RNA, 19 nt, Artificial Sequence
  Description of Artificial Sequence: Synthetic oligonucleotide
guauugcugcugcucacua

SEQ ID NO: 1086422 - RNA, 19 nt, Artificial Sequence
  Description of Artificial Sequence: Synthetic oligonucleotide
ccacagguuggcccaaacc

SEQ ID NO: 1086423 - RNA, 19 nt, Artificial Sequence
  Description of Artificial Sequence: Synthetic oligonucleotide
cucuuaacaaccgugccuu

SEQ ID NO: 1086424 - RNA, 19 nt, Artificial Sequence
  Description of Artificial Sequence: Synthetic oligonucleotide
ugggagcauuacaguacua

SEQ ID NO: 1086425 - RNA, 19 nt, Artificial Sequence
  Description of Artificial Sequence: Synthetic oligonucleotide
auacgcccacaagaaagaa

SEQ ID NO: 1086426 - RNA, 19 nt, Artificial Sequence
  Description of Artificial Sequence: Synthetic oligonucleotide
aggcagacuuucaguucgg

SEQ ID NO: 1086427 - RNA, 19 nt, Artificial Sequence
  Description of Artificial Sequence: Synthetic oligonucleotide
auccacucuccuucucuuu

SEQ ID NO: 1086428 - RNA, 19 nt, Artificial Sequence
  Description of Artificial Sequence: Synthetic oligonucleotide
caaaggcuugcuuccucaa

SEQ ID NO: 1086429 - RNA, 19 nt, Artificial Sequence
  Description of Artificial Sequence: Synthetic oligonucleotide
cacuaacgcugcugccgag

SEQ ID NO: 1086430 - RNA, 19 nt, Artificial Sequence
  Description of Artificial Sequence: Synthetic oligonucleotide
uccccucuagcugcaguaa

SEQ ID NO: 1086431 - RNA, 19 nt, Artificial Sequence
  Description of Artificial Sequence: Synthetic oligonucleotide
cugucaggaacaggacauc

SEQ ID NO: 1086432 - RNA, 19 nt, Artificial Sequence
  Description of Artificial Sequence: Synthetic oligonucleotide
gcaugggcaucuguauugc

SEQ ID NO: 1086433 - RNA, 19 nt, Artificial Sequence
  Description of Artificial Sequence: Synthetic oligonucleotide
gggucccuucuaucagacg

SEQ ID NO: 1086434 - RNA, 19 nt, Artificial Sequence
  Description of Artificial Sequence: Synthetic oligonucleotide
ggacaucuaguucuccaua

SEQ ID NO: 1086435 - RNA, 19 nt, Artificial Sequence
  Description of Artificial Sequence: Synthetic oligonucleotide
gccaacugggcagcauacg

SEQ ID NO: 1086436 - RNA, 19 nt, Artificial Sequence
  Description of Artificial Sequence: Synthetic oligonucleotide
gauucagauauggguggau

SEQ ID NO: 1086437 - RNA, 19 nt, Artificial Sequence
  Description of Artificial Sequence: Synthetic oligonucleotide
cugguuaaguagagagccu

SEQ ID NO: 1086438 - RNA, 19 nt, Artificial Sequence
  Description of Artificial Sequence: Synthetic oligonucleotide
cuggcacgacggcucacuc

SEQ ID NO: 1086439 - RNA, 19 nt, Artificial Sequence
  Description of Artificial Sequence: Synthetic oligonucleotide
gggccaauagguggcagca

SEQ ID NO: 1086440 - RNA, 19 nt, Artificial Sequence
  Description of Artificial Sequence: Synthetic oligonucleotide
aggggccaauagguggcag

SEQ ID NO: 1086441 - RNA, 19 nt, Artificial Sequence
  Description of Artificial Sequence: Synthetic oligonucleotide
ccuucuaucagacgccugu

SEQ ID NO: 1086442 - RNA, 19 nt, Artificial Sequence
  Description of Artificial Sequence: Synthetic oligonucleotide
ggcuugacaaccucuugau

SEQ ID NO: 1086443 - RNA, 19 nt, Artificial Sequence
  Description of Artificial Sequence: Synthetic oligonucleotide
ccugaaaaguaacuaguau

SEQ ID NO: 1086444 - RNA, 19 nt, Artificial Sequence
  Description of Artificial Sequence: Synthetic oligonucleotide
ggauucagauaugggugga

SEQ ID NO: 1086445 - RNA, 19 nt, Artificial Sequence
  Description of Artificial Sequence: Synthetic oligonucleotide
ggucucuuacaaaugcagu

SEQ ID NO: 1086446 - RNA, 19 nt, Artificial Sequence
  Description of Artificial Sequence: Synthetic oligonucleotide
gucuuggcaggugcacaac

SEQ ID NO: 1086447 - RNA, 19 nt, Artificial Sequence
  Description of Artificial Sequence: Synthetic oligonucleotide
gcaaagggauucagauaug

SEQ ID NO: 1086448 - RNA, 19 nt, Artificial Sequence
  Description of Artificial Sequence: Synthetic oligonucleotide
gguuggcccaaaccaucuc

SEQ ID NO: 1086449 - RNA, 19 nt, Artificial Sequence
  Description of Artificial Sequence: Synthetic oligonucleotide
ggguguuaucuuggugacc

SEQ ID NO: 1086450 - RNA, 19 nt, Artificial Sequence
  Description of Artificial Sequence: Synthetic oligonucleotide
gaauggcaccgagaugccu

SEQ ID NO: 1086451 - RNA, 19 nt, Artificial Sequence
  Description of Artificial Sequence: Synthetic oligonucleotide
agcuggcacgacggcucac

SEQ ID NO: 1086452 - RNA, 19 nt, Artificial Sequence
  Description of Artificial Sequence: Synthetic oligonucleotide
gcacaacuugcugcgccag

SEQ ID NO: 1086453 - RNA, 19 nt, Artificial Sequence
  Description of Artificial Sequence: Synthetic oligonucleotide
ccucuugaucgcccaugcc

SEQ ID NO: 1086454 - RNA, 19 nt, Artificial Sequence
  Description of Artificial Sequence: Synthetic oligonucleotide
ggugcacaacuugcugcgc

SEQ ID NO: 1086455 - RNA, 19 nt, Artificial Sequence
  Description of Artificial Sequence: Synthetic oligonucleotide
agcacccauggggugggau

SEQ ID NO: 1086456 - RNA, 19 nt, Artificial Sequence
  Description of Artificial Sequence: Synthetic oligonucleotide
accgugccuucaucagcaa

SEQ ID NO: 1086457 - RNA, 19 nt, Artificial Sequence
  Description of Artificial Sequence: Synthetic oligonucleotide
cguuccauacaagccuggc

SEQ ID NO: 1086458 - RNA, 19 nt, Artificial Sequence
  Description of Artificial Sequence: Synthetic oligonucleotide
agacgccugugcacucuug

SEQ ID NO: 1086459 - RNA, 19 nt, Artificial Sequence
  Description of Artificial Sequence: Synthetic oligonucleotide
ccaucucuacgagaaagaa

SEQ ID NO: 1086460 - RNA, 19 nt, Artificial Sequence
  Description of Artificial Sequence: Synthetic oligonucleotide
caugggcaucuguauugcu

SEQ ID NO: 1086461 - RNA, 19 nt, Artificial Sequence
  Description of Artificial Sequence: Synthetic oligonucleotide
cccugggagcauuacagua

SEQ ID NO: 1086462 - RNA, 19 nt, Artificial Sequence
  Description of Artificial Sequence: Synthetic oligonucleotide
gcuuaugcauaucccugau

SEQ ID NO: 1086463 - RNA, 19 nt, Artificial Sequence
  Description of Artificial Sequence: Synthetic oligonucleotide
cgagaugccugccauggaa

SEQ ID NO: 1086464 - RNA, 19 nt, Artificial Sequence
  Description of Artificial Sequence: Synthetic oligonucleotide
gggacaccugggaagauau

SEQ ID NO: 1086465 - RNA, 19 nt, Artificial Sequence
  Description of Artificial Sequence: Synthetic oligonucleotide
guccauuaaagggucccuu

SEQ ID NO: 1086466 - RNA, 19 nt, Artificial Sequence
  Description of Artificial Sequence: Synthetic oligonucleotide
gggcaaaauuucacuuuaa

SEQ ID NO: 1086467 - RNA, 19 nt, Artificial Sequence
  Description of Artificial Sequence: Synthetic oligonucleotide
cacgacggcucacucugcu

SEQ ID NO: 1086468 - RNA, 19 nt, Artificial Sequence
  Description of Artificial Sequence: Synthetic oligonucleotide
gggaaccaagugugacaca

SEQ ID NO: 1086469 - RNA, 19 nt, Artificial Sequence
  Description of Artificial Sequence: Synthetic oligonucleotide
cccuucuaucagacgccug

SEQ ID NO: 1086470 - RNA, 19 nt, Artificial Sequence
  Description of Artificial Sequence: Synthetic oligonucleotide
gcagacuuucaguucgguu

SEQ ID NO: 1086471 - RNA, 19 nt, Artificial Sequence
  Description of Artificial Sequence: Synthetic oligonucleotide
gcugccgagccaugguucu

SEQ ID NO: 1086472 - RNA, 19 nt, Artificial Sequence
  Description of Artificial Sequence: Synthetic oligonucleotide
cgcccacaagaaagaacag

SEQ ID NO: 1086473 - RNA, 19 nt, Artificial Sequence
  Description of Artificial Sequence: Synthetic oligonucleotide
cagcaugggcaucuguauu

SEQ ID NO: 1086474 - RNA, 19 nt, Artificial Sequence
  Description of Artificial Sequence: Synthetic oligonucleotide
ggcaggugcacaacuugcu

SEQ ID NO: 1086475 - RNA, 19 nt, Artificial Sequence
  Description of Artificial Sequence: Synthetic oligonucleotide
gugugacacaggucucuuu

SEQ ID NO: 1086476 - RNA, 19 nt, Artificial Sequence
  Description of Artificial Sequence: Synthetic oligonucleotide
gugcacucuugccuuuguu

SEQ ID NO: 1086477 - RNA, 19 nt, Artificial Sequence
  Description of Artificial Sequence: Synthetic oligonucleotide
cgguaucauauucaucugu

SEQ ID NO: 1086478 - RNA, 19 nt, Artificial Sequence
  Description of Artificial Sequence: Synthetic oligonucleotide
caggggccaauagguggca

SEQ ID NO: 1086479 - RNA, 19 nt, Artificial Sequence
  Description of Artificial Sequence: Synthetic oligonucleotide
gccugugcacucuugccuu

SEQ ID NO: 1086480 - RNA, 19 nt, Artificial Sequence
  Description of Artificial Sequence: Synthetic oligonucleotide
gggcagcauacgcccacaa

SEQ ID NO: 1086481 - RNA, 19 nt, Artificial Sequence
  Description of Artificial Sequence: Synthetic oligonucleotide
cugcugccgagccaugguu

SEQ ID NO: 1086482 - RNA, 19 nt, Artificial Sequence
  Description of Artificial Sequence: Synthetic oligonucleotide
caaccucuugaucgcccau

SEQ ID NO: 1086483 - RNA, 19 nt, Artificial Sequence
  Description of Artificial Sequence: Synthetic oligonucleotide
cccauccacucuccuucuc

SEQ ID NO: 1086484 - RNA, 19 nt, Artificial Sequence
  Description of Artificial Sequence: Synthetic oligonucleotide
caaccucccugaggccaca

SEQ ID NO: 1086485 - RNA, 19 nt, Artificial Sequence
  Description of Artificial Sequence: Synthetic oligonucleotide
ccgugccuucaucagcaaa

SEQ ID NO: 1086486 - RNA, 19 nt, Artificial Sequence
  Description of Artificial Sequence: Synthetic oligonucleotide
ggucaggauaaggucucuu

SEQ ID NO: 1086487 - RNA, 19 nt, Artificial Sequence
  Description of Artificial Sequence: Synthetic oligonucleotide
gcccauccacucuccuucu

SEQ ID NO: 1086488 - RNA, 19 nt, Artificial Sequence
  Description of Artificial Sequence: Synthetic oligonucleotide
ccgagaugccugccaugga

SEQ ID NO: 1086489 - RNA, 19 nt, Artificial Sequence
  Description of Artificial Sequence: Synthetic oligonucleotide
gggucaggauaaggucucu

SEQ ID NO: 1086490 - RNA, 19 nt, Artificial Sequence
  Description of Artificial Sequence: Synthetic oligonucleotide
gccuggcacaccaucucuu

SEQ ID NO: 1086491 - RNA, 19 nt, Artificial Sequence
  Description of Artificial Sequence: Synthetic oligonucleotide
gcgccaguucaggggccaa

SEQ ID NO: 1086492 - RNA, 19 nt, Artificial Sequence
  Description of Artificial Sequence: Synthetic oligonucleotide
ggggugggaucuggucauu

SEQ ID NO: 1086493 - RNA, 19 nt, Artificial Sequence
  Description of Artificial Sequence: Synthetic oligonucleotide
aaugcuagaggacugaucc

SEQ ID NO: 1086494 - RNA, 19 nt, Artificial Sequence
  Description of Artificial Sequence: Synthetic oligonucleotide
aacugagucaguaaaaucc

SEQ ID NO: 1086495 - RNA, 19 nt, Artificial Sequence
  Description of Artificial Sequence: Synthetic oligonucleotide
aagcaauuauuuuauuucc

SEQ ID NO: 1086496 - RNA, 19 nt, Artificial Sequence
  Description of Artificial Sequence: Synthetic oligonucleotide
uuuaaugccauccaaacaa

SEQ ID NO: 1086497 - RNA, 19 nt, Artificial Sequence
  Description of Artificial Sequence: Synthetic oligonucleotide
cagaaaauagucuuccucg

SEQ ID NO: 1086498 - RNA, 19 nt, Artificial Sequence
  Description of Artificial Sequence: Synthetic oligonucleotide
aaacuaacgauugagcuug

SEQ ID NO: 1086499 - RNA, 19 nt, Artificial Sequence
  Description of Artificial Sequence: Synthetic oligonucleotide
aacccuauuucccaagagg

SEQ ID NO: 1086500 - RNA, 19 nt, Artificial Sequence
  Description of Artificial Sequence: Synthetic oligonucleotide
uguaaucuagcuuaccuug

SEQ ID NO: 1086501 - RNA, 19 nt, Artificial Sequence
  Description of Artificial Sequence: Synthetic oligonucleotide
uacaugagaaaguggaagg

SEQ ID NO: 1086502 - RNA, 19 nt, Artificial Sequence
  Description of Artificial Sequence: Synthetic oligonucleotide
aauaguguuguugacgaag

SEQ ID NO: 1086503 - RNA, 19 nt, Artificial Sequence
  Description of Artificial Sequence: Synthetic oligonucleotide
gacgaagaagaauaaggcg

SEQ ID NO: 1086504 - RNA, 19 nt, Artificial Sequence
  Description of Artificial Sequence: Synthetic oligonucleotide
cuaaaugaaacugagucag

SEQ ID NO: 1086505 - RNA, 19 nt, Artificial Sequence
  Description of Artificial Sequence: Synthetic oligonucleotide
uuuuccgauauucgaaggg

SEQ ID NO: 1086506 - RNA, 19 nt, Artificial Sequence
  Description of Artificial Sequence: Synthetic oligonucleotide
gaugaauugaaauggcaug

SEQ ID NO: 1086507 - RNA, 19 nt, Artificial Sequence
  Description of Artificial Sequence: Synthetic oligonucleotide
aaccuuaucacaaucgcuc

SEQ ID NO: 1086508 - RNA, 19 nt, Artificial Sequence
  Description of Artificial Sequence: Synthetic oligonucleotide
guagagaugaauugaaaug

SEQ ID NO: 1086509 - RNA, 19 nt, Artificial Sequence
  Description of Artificial Sequence: Synthetic oligonucleotide
aaaucggguggcuuuuccc

SEQ ID NO: 1086510 - RNA, 19 nt, Artificial Sequence
  Description of Artificial Sequence: Synthetic oligonucleotide
uuagguuaagcaauuauuu

SEQ ID NO: 1086511 - RNA, 19 nt, Artificial Sequence
  Description of Artificial Sequence: Synthetic oligonucleotide
ucgugaaauucuaaggugc

SEQ ID NO: 1086512 - RNA, 19 nt, Artificial Sequence
  Description of Artificial Sequence: Synthetic oligonucleotide
gauuaagaaguagaacugg

SEQ ID NO: 1086513 - RNA, 19 nt, Artificial Sequence
  Description of Artificial Sequence: Synthetic oligonucleotide
aauaaggcguccucagguc

SEQ ID NO: 1086514 - RNA, 19 nt, Artificial Sequence
  Description of Artificial Sequence: Synthetic oligonucleotide
aagaauaaggcguccucag

SEQ ID NO: 1086515 - RNA, 19 nt, Artificial Sequence
  Description of Artificial Sequence: Synthetic oligonucleotide
agguaaagaaaucgggugg

SEQ ID NO: 1086516 - RNA, 19 nt, Artificial Sequence
  Description of Artificial Sequence: Synthetic oligonucleotide
uuuagguuaagcaauuauu

SEQ ID NO: 1086517 - RNA, 19 nt, Artificial Sequence
  Description of Artificial Sequence: Synthetic oligonucleotide
ucaaccuuaucacaaucgc

SEQ ID NO: 1086518 - RNA, 19 nt, Artificial Sequence
  Description of Artificial Sequence: Synthetic oligonucleotide
uguagagaugaauugaaau

SEQ ID NO: 1086519 - RNA, 19 nt, Artificial Sequence
  Description of Artificial Sequence: Synthetic oligonucleotide
auuaagaaguagaacuggc

SEQ ID NO: 1086520 - RNA, 19 nt, Artificial Sequence
  Description of Artificial Sequence: Synthetic oligonucleotide
uaccuuguaacccggaccc

SEQ ID NO: 1086521 - RNA, 19 nt, Artificial Sequence
  Description of Artificial Sequence: Synthetic oligonucleotide
uuuauacuggaacuucaug

SEQ ID NO: 1086522 - RNA, 19 nt, Artificial Sequence
  Description of Artificial Sequence: Synthetic oligonucleotide
ucuaaggugcuuaagggau

SEQ ID NO: 1086523 - RNA, 19 nt, Artificial Sequence
  Description of Artificial Sequence: Synthetic oligonucleotide
augccauccaaacaacugg

SEQ ID NO: 1086524 - RNA, 19 nt, Artificial Sequence
  Description of Artificial Sequence: Synthetic oligonucleotide
ucaagccaacacaagaucu

SEQ ID NO: 1086525 - RNA, 19 nt, Artificial Sequence
  Description of Artificial Sequence: Synthetic oligonucleotide
uaacgauugagcuugugaa

SEQ ID NO: 1086526 - RNA, 19 nt, Artificial Sequence
  Description of Artificial Sequence: Synthetic oligonucleotide
ugcggugugauguuuuccg

SEQ ID NO: 1086527 - RNA, 19 nt, Artificial Sequence
  Description of Artificial Sequence: Synthetic oligonucleotide
uuaccuuguaacccggacc

SEQ ID NO: 1086528 - RNA, 19 nt, Artificial Sequence
  Description of Artificial Sequence: Synthetic oligonucleotide
uauuucccuggccugacag

SEQ ID NO: 1086529 - RNA, 19 nt, Artificial Sequence
  Description of Artificial Sequence: Synthetic oligonucleotide
ugcguggaagaaaaggacc

SEQ ID NO: 1086530 - RNA, 19 nt, Artificial Sequence
  Description of Artificial Sequence: Synthetic oligonucleotide
aaccucugcccaaagagac

SEQ ID NO: 1086531 - RNA, 19 nt, Artificial Sequence
  Description of Artificial Sequence: Synthetic oligonucleotide
agcaauuauuuuauuuccc

SEQ ID NO: 1086532 - RNA, 19 nt, Artificial Sequence
  Description of Artificial Sequence: Synthetic oligonucleotide
uauagccccuaaaugaaac

SEQ ID NO: 1086533 - RNA, 19 nt, Artificial Sequence
  Description of Artificial Sequence: Synthetic oligonucleotide
ucaggucucagguggaucc

SEQ ID NO: 1086534 - RNA, 19 nt, Artificial Sequence
  Description of Artificial Sequence: Synthetic oligonucleotide
uagcuuaccuuguaacccg

SEQ ID NO: 1086535 - RNA, 19 nt, Artificial Sequence
  Description of Artificial Sequence: Synthetic oligonucleotide
gaaugcaguuccuauuccc

SEQ ID NO: 1086536 - RNA, 19 nt, Artificial Sequence
  Description of Artificial Sequence: Synthetic oligonucleotide
uucuaaggugcuuaaggga

SEQ ID NO: 1086537 - RNA, 19 nt, Artificial Sequence
  Description of Artificial Sequence: Synthetic oligonucleotide
aaccgucugaugaaacugc

SEQ ID NO: 1086538 - RNA, 19 nt, Artificial Sequence
  Description of Artificial Sequence: Synthetic oligonucleotide
aaucggguggcuuuuccca

SEQ ID NO: 1086539 - RNA, 19 nt, Artificial Sequence
  Description of Artificial Sequence: Synthetic oligonucleotide
aaucguagccacauucccg

SEQ ID NO: 1086540 - RNA, 19 nt, Artificial Sequence
  Description of Artificial Sequence: Synthetic oligonucleotide
gaauuggagacagagguca

SEQ ID NO: 1086541 - RNA, 19 nt, Artificial Sequence
  Description of Artificial Sequence: Synthetic oligonucleotide
aaacaacuggcaaucguag

SEQ ID NO: 1086542 - RNA, 19 nt, Artificial Sequence
  Description of Artificial Sequence: Synthetic oligonucleotide
agguuaagcaauuauuuua

SEQ ID NO: 1086543 - RNA, 19 nt, Artificial Sequence
  Description of Artificial Sequence: Synthetic oligonucleotide
cuagcuuaccuuguaaccc

SEQ ID NO: 1086544 - RNA, 19 nt, Artificial Sequence
  Description of Artificial Sequence: Synthetic oligonucleotide
gaaaauagucuuccucgug

SEQ ID NO: 1086545 - RNA, 19 nt, Artificial Sequence
  Description of Artificial Sequence: Synthetic oligonucleotide
ugcgucucgcuucuggccg

SEQ ID NO: 1086546 - RNA, 19 nt, Artificial Sequence
  Description of Artificial Sequence: Synthetic oligonucleotide
uccucuuccggauuaagaa

SEQ ID NO: 1086547 - RNA, 19 nt, Artificial Sequence
  Description of Artificial Sequence: Synthetic oligonucleotide
agaauaaggcguccucagg

SEQ ID NO: 1086548 - RNA, 19 nt, Artificial Sequence
  Description of Artificial Sequence: Synthetic oligonucleotide
agcagagaaaacuaacgau

SEQ ID NO: 1086549 - RNA, 19 nt, Artificial Sequence
  Description of Artificial Sequence: Synthetic oligonucleotide
ugaaauucuaaggugcuua

SEQ ID NO: 1086550 - RNA, 19 nt, Artificial Sequence
  Description of Artificial Sequence: Synthetic oligonucleotide
uccaguguguaugagacuc

SEQ ID NO: 1086551 - RNA, 19 nt, Artificial Sequence
  Description of Artificial Sequence: Synthetic oligonucleotide
cucgugaaauucuaaggug

SEQ ID NO: 1086552 - RNA, 19 nt, Artificial Sequence
  Description of Artificial Sequence: Synthetic oligonucleotide
uuaaugccauccaaacaac

SEQ ID NO: 1086553 - RNA, 19 nt, Artificial Sequence
  Description of Artificial Sequence: Synthetic oligonucleotide
ggaaaauucagagcaaagc

SEQ ID NO: 1086554 - RNA, 19 nt, Artificial Sequence
  Description of Artificial Sequence: Synthetic oligonucleotide
uccgauauucgaagggaug

SEQ ID NO: 1086555 - RNA, 19 nt, Artificial Sequence
  Description of Artificial Sequence: Synthetic oligonucleotide
uucccauagacacuuucgu

SEQ ID NO: 1086556 - RNA, 19 nt, Artificial Sequence
  Description of Artificial Sequence: Synthetic oligonucleotide
ugaaugcaguuccuauucc

SEQ ID NO: 1086557 - RNA, 19 nt, Artificial Sequence
  Description of Artificial Sequence: Synthetic oligonucleotide
aacgauugagcuugugaaa

SEQ ID NO: 1086558 - RNA, 19 nt, Artificial Sequence
  Description of Artificial Sequence: Synthetic oligonucleotide
ccucauuucccauagacac

SEQ ID NO: 1086559 - RNA, 19 nt, Artificial Sequence
  Description of Artificial Sequence: Synthetic oligonucleotide
cccuaaaugaaacugaguc

SEQ ID NO: 1086560 - RNA, 19 nt, Artificial Sequence
  Description of Artificial Sequence: Synthetic oligonucleotide
uauucgaagggaugguccu

SEQ ID NO: 1086561 - RNA, 19 nt, Artificial Sequence
  Description of Artificial Sequence: Synthetic oligonucleotide
aaaugcuagaggacugauc

SEQ ID NO: 1086562 - RNA, 19 nt, Artificial Sequence
  Description of Artificial Sequence: Synthetic oligonucleotide
uuuccgauauucgaaggga

SEQ ID NO: 1086563 - RNA, 19 nt, Artificial Sequence
  Description of Artificial Sequence: Synthetic oligonucleotide
guaugagacucaaggaggg

SEQ ID NO: 1086564 - RNA, 19 nt, Artificial Sequence
  Description of Artificial Sequence: Synthetic oligonucleotide
cuuaucacaaucgcuccgc

SEQ ID NO: 1086565 - RNA, 19 nt, Artificial Sequence
  Description of Artificial Sequence: Synthetic oligonucleotide
aacgccgggguccucgauc

SEQ ID NO: 1086566 - RNA, 19 nt, Artificial Sequence
  Description of Artificial Sequence: Synthetic oligonucleotide
uuaggagccuucuccacga

SEQ ID NO: 1086567 - RNA, 19 nt, Artificial Sequence
  Description of Artificial Sequence: Synthetic oligonucleotide
caacauuccaguguguaug

SEQ ID NO: 1086568 - RNA, 19 nt, Artificial Sequence
  Description of Artificial Sequence: Synthetic oligonucleotide
acaagcaccccaccccuac

SEQ ID NO: 1086569 - RNA, 19 nt, Artificial Sequence
  Description of Artificial Sequence: Synthetic oligonucleotide
ggaauaguguuguugacga

SEQ ID NO: 1086570 - RNA, 19 nt, Artificial Sequence
  Description of Artificial Sequence: Synthetic oligonucleotide
ugcuagaggacugauccug

SEQ ID NO: 1086571 - RNA, 19 nt, Artificial Sequence
  Description of Artificial Sequence: Synthetic oligonucleotide
aggcucgugaaauucuaag

SEQ ID NO: 1086572 - RNA, 19 nt, Artificial Sequence
  Description of Artificial Sequence: Synthetic oligonucleotide
agaggacuccaucuaaaca

SEQ ID NO: 1086573 - RNA, 19 nt, Artificial Sequence
  Description of Artificial Sequence: Synthetic oligonucleotide
aagaagaauaaggcguccu

SEQ ID NO: 1086574 - RNA, 19 nt, Artificial Sequence
  Description of Artificial Sequence: Synthetic oligonucleotide
ccaucuaaacaucugugcg

SEQ ID NO: 1086575 - RNA, 19 nt, Artificial Sequence
  Description of Artificial Sequence: Synthetic oligonucleotide
caaucguagccacauuccc

SEQ ID NO: 1086576 - RNA, 19 nt, Artificial Sequence
  Description of Artificial Sequence: Synthetic oligonucleotide
cucgugguuguccucauac

SEQ ID NO: 1086577 - RNA, 19 nt, Artificial Sequence
  Description of Artificial Sequence: Synthetic oligonucleotide
ggcucgugaaauucuaagg

SEQ ID NO: 1086578 - RNA, 19 nt, Artificial Sequence
  Description of Artificial Sequence: Synthetic oligonucleotide
agaugaauugaaauggcau

SEQ ID NO: 1086579 - RNA, 19 nt, Artificial Sequence
  Description of Artificial Sequence: Synthetic oligonucleotide
cuaacgauugagcuuguga

SEQ ID NO: 1086580 - RNA, 19 nt, Artificial Sequence
  Description of Artificial Sequence: Synthetic oligonucleotide
caaagcaucagaaccugca

SEQ ID NO: 1086581 - RNA, 19 nt, Artificial Sequence
  Description of Artificial Sequence: Synthetic oligonucleotide
uuaucacaaucgcuccgcc

SEQ ID NO: 1086582 - RNA, 19 nt, Artificial Sequence
  Description of Artificial Sequence: Synthetic oligonucleotide
cuccaucuaaacaucugug

SEQ ID NO: 1086583 - RNA, 19 nt, Artificial Sequence
  Description of Artificial Sequence: Synthetic oligonucleotide
guugacgaagaagaauaag

SEQ ID NO: 1086584 - RNA, 19 nt, Artificial Sequence
  Description of Artificial Sequence: Synthetic oligonucleotide
gaauaaggcguccucaggu

SEQ ID NO: 1086585 - RNA, 19 nt, Artificial Sequence
  Description of Artificial Sequence: Synthetic oligonucleotide
aauuaaaccucugcccaaa

SEQ ID NO: 1086586 - RNA, 19 nt, Artificial Sequence
  Description of Artificial Sequence: Synthetic oligonucleotide
augaccggcacccgguccg

SEQ ID NO: 1086587 - RNA, 19 nt, Artificial Sequence
  Description of Artificial Sequence: Synthetic oligonucleotide
uguauuccucucgaguggc

SEQ ID NO: 1086588 - RNA, 19 nt, Artificial Sequence
  Description of Artificial Sequence: Synthetic oligonucleotide
auaaguggcaaguguguaa

SEQ ID NO: 1086589 - RNA, 19 nt, Artificial Sequence
  Description of Artificial Sequence: Synthetic oligonucleotide
aguggcaaguguguaaucu

SEQ ID NO: 1086590 - RNA, 19 nt, Artificial Sequence
  Description of Artificial Sequence: Synthetic oligonucleotide
ggcuuuaggagccuucucc

SEQ ID NO: 1086591 - RNA, 19 nt, Artificial Sequence
  Description of Artificial Sequence: Synthetic oligonucleotide
aauccccacaaaacgccgg

SEQ ID NO: 1086592 - RNA, 19 nt, Artificial Sequence
  Description of Artificial Sequence: Synthetic oligonucleotide
cuuguaacccggacccucc

SEQ ID NO: 1086593 - RNA, 19 nt, Artificial Sequence
  Description of Artificial Sequence: Synthetic oligonucleotide
uaucacaaucgcuccgccc

SEQ ID NO: 1086594 - RNA, 19 nt, Artificial Sequence
  Description of Artificial Sequence: Synthetic oligonucleotide
aggugcuuaagggaugagg

SEQ ID NO: 1086595 - RNA, 19 nt, Artificial Sequence
  Description of Artificial Sequence: Synthetic oligonucleotide
ucucgaguggccaccugcc

SEQ ID NO: 1086596 - RNA, 19 nt, Artificial Sequence
  Description of Artificial Sequence: Synthetic oligonucleotide
uagccccuaaaugaaacug

SEQ ID NO: 1086597 - RNA, 19 nt, Artificial Sequence
  Description of Artificial Sequence: Synthetic oligonucleotide
cuuaccuuguaacccggac

SEQ ID NO: 1086598 - RNA, 19 nt, Artificial Sequence
  Description of Artificial Sequence: Synthetic oligonucleotide
caucuaaacaucugugcga

SEQ ID NO: 1086599 - RNA, 19 nt, Artificial Sequence
  Description of Artificial Sequence: Synthetic oligonucleotide
uaaguggcaaguguguaau

SEQ ID NO: 1086600 - RNA, 19 nt, Artificial Sequence
  Description of Artificial Sequence: Synthetic oligonucleotide
uaugagacucaaggagggg

SEQ ID NO: 1086601 - RNA, 19 nt, Artificial Sequence
  Description of Artificial Sequence: Synthetic oligonucleotide
gaaggauaaguggcaagug

SEQ ID NO: 1086602 - RNA, 19 nt, Artificial Sequence
  Description of Artificial Sequence: Synthetic oligonucleotide
gaaauucuaaggugcuuaa

SEQ ID NO: 1086603 - RNA, 19 nt, Artificial Sequence
  Description of Artificial Sequence: Synthetic oligonucleotide
ucccgcacaacccuauuuc

SEQ ID NO: 1086604 - RNA, 19 nt, Artificial Sequence
  Description of Artificial Sequence: Synthetic oligonucleotide
auaaggcguccucaggucu

SEQ ID NO: 1086605 - RNA, 19 nt, Artificial Sequence
  Description of Artificial Sequence: Synthetic oligonucleotide
acgccgggguccucgaucc

SEQ ID NO: 1086606 - RNA, 19 nt, Artificial Sequence
  Description of Artificial Sequence: Synthetic oligonucleotide
gagaugaauugaaauggca

SEQ ID NO: 1086607 - RNA, 19 nt, Artificial Sequence
  Description of Artificial Sequence: Synthetic oligonucleotide
ccauauagccccuaaauga

SEQ ID NO: 1086608 - RNA, 19 nt, Artificial Sequence
  Description of Artificial Sequence: Synthetic oligonucleotide
uaaggugcuuaagggauga

SEQ ID NO: 1086609 - RNA, 19 nt, Artificial Sequence
  Description of Artificial Sequence: Synthetic oligonucleotide
auagccccuaaaugaaacu

SEQ ID NO: 1086610 - RNA, 19 nt, Artificial Sequence
  Description of Artificial Sequence: Synthetic oligonucleotide
ugcuucaaugacaguggga

SEQ ID NO: 1086611 - RNA, 19 nt, Artificial Sequence
  Description of Artificial Sequence: Synthetic oligonucleotide
auccccacaaaacgccggg

SEQ ID NO: 1086612 - RNA, 19 nt, Artificial Sequence
  Description of Artificial Sequence: Synthetic oligonucleotide
uugaaauggcaugugugaa

SEQ ID NO: 1086613 - RNA, 19 nt, Artificial Sequence
  Description of Artificial Sequence: Synthetic oligonucleotide
aguguguaaucuagcuuac

SEQ ID NO: 1086614 - RNA, 19 nt, Artificial Sequence
  Description of Artificial Sequence: Synthetic oligonucleotide
caaacaacuggcaaucgua

SEQ ID NO: 1086615 - RNA, 19 nt, Artificial Sequence
  Description of Artificial Sequence: Synthetic oligonucleotide
ugcgaauguccacugccac

SEQ ID NO: 1086616 - RNA, 19 nt, Artificial Sequence
  Description of Artificial Sequence: Synthetic oligonucleotide
acaacauuccaguguguau

SEQ ID NO: 1086617 - RNA, 19 nt, Artificial Sequence
  Description of Artificial Sequence: Synthetic oligonucleotide
acccuauuucccaagagga

SEQ ID NO: 1086618 - RNA, 19 nt, Artificial Sequence
  Description of Artificial Sequence: Synthetic oligonucleotide
cuaaggugcuuaagggaug

SEQ ID NO: 1086619 - RNA, 19 nt, Artificial Sequence
  Description of Artificial Sequence: Synthetic oligonucleotide
auagacaccuugucccugu

SEQ ID NO: 1086620 - RNA, 19 nt, Artificial Sequence
  Description of Artificial Sequence: Synthetic oligonucleotide
gagaugcucaacccugaac

SEQ ID NO: 1086621 - RNA, 19 nt, Artificial Sequence
  Description of Artificial Sequence: Synthetic oligonucleotide
uuccgauauucgaagggau

SEQ ID NO: 1086622 - RNA, 19 nt, Artificial Sequence
  Description of Artificial Sequence: Synthetic oligonucleotide
aucuaaacaucugugcgaa

SEQ ID NO: 1086623 - RNA, 19 nt, Artificial Sequence
  Description of Artificial Sequence: Synthetic oligonucleotide
acucgugggaggaauagug

SEQ ID NO: 1086624 - RNA, 19 nt, Artificial Sequence
  Description of Artificial Sequence: Synthetic oligonucleotide
gguaaagaaaucggguggc

SEQ ID NO: 1086625 - RNA, 19 nt, Artificial Sequence
  Description of Artificial Sequence: Synthetic oligonucleotide
augagacucaaggagggga

SEQ ID NO: 1086626 - RNA, 19 nt, Artificial Sequence
  Description of Artificial Sequence: Synthetic oligonucleotide
auaguguuguugacgaaga

SEQ ID NO: 1086627 - RNA, 19 nt, Artificial Sequence
  Description of Artificial Sequence: Synthetic oligonucleotide
acaaaguacccacccugcu

SEQ ID NO: 1086628 - RNA, 19 nt, Artificial Sequence
  Description of Artificial Sequence: Synthetic oligonucleotide
ucgaguggccaccugcccu

SEQ ID NO: 1086629 - RNA, 19 nt, Artificial Sequence
  Description of Artificial Sequence: Synthetic oligonucleotide
gacgcucuucauuuguaga

SEQ ID NO: 1086630 - RNA, 19 nt, Artificial Sequence
  Description of Artificial Sequence: Synthetic oligonucleotide
gaggaauaguguuguugac

SEQ ID NO: 1086631 - RNA, 19 nt, Artificial Sequence
  Description of Artificial Sequence: Synthetic oligonucleotide
cuuagguaugguccccuac

SEQ ID NO: 1086632 - RNA, 19 nt, Artificial Sequence
  Description of Artificial Sequence: Synthetic oligonucleotide
ugugccgccugcguggaag

SEQ ID NO: 1086633 - RNA, 19 nt, Artificial Sequence
  Description of Artificial Sequence: Synthetic oligonucleotide
ggucacaaugcuucaauga

SEQ ID NO: 1086634 - RNA, 19 nt, Artificial Sequence
  Description of Artificial Sequence: Synthetic oligonucleotide
caugguagcacucguggga

SEQ ID NO: 1086635 - RNA, 19 nt, Artificial Sequence
  Description of Artificial Sequence: Synthetic oligonucleotide
acuccaguuuaaugccauc

SEQ ID NO: 1086636 - RNA, 19 nt, Artificial Sequence
  Description of Artificial Sequence: Synthetic oligonucleotide
ucaccuugcgucuccucca

SEQ ID NO: 1086637 - RNA, 19 nt, Artificial Sequence
  Description of Artificial Sequence: Synthetic oligonucleotide
ugauccugaggcucgugaa

SEQ ID NO: 1086638 - RNA, 19 nt, Artificial Sequence
  Description of Artificial Sequence: Synthetic oligonucleotide
agucccacaagcaccccac

SEQ ID NO: 1086639 - RNA, 19 nt, Artificial Sequence
  Description of Artificial Sequence: Synthetic oligonucleotide
ggugcuuaagggaugagga

SEQ ID NO: 1086640 - RNA, 19 nt, Artificial Sequence
  Description of Artificial Sequence: Synthetic oligonucleotide
agguaugguccccuacuug

SEQ ID NO: 1086641 - RNA, 19 nt, Artificial Sequence
  Description of Artificial Sequence: Synthetic oligonucleotide
augguagcacucgugggag

SEQ ID NO: 1086642 - RNA, 19 nt, Artificial Sequence
  Description of Artificial Sequence: Synthetic oligonucleotide
ugaggcucgugaaauucua

SEQ ID NO: 1086643 - RNA, 19 nt, Artificial Sequence
  Description of Artificial Sequence: Synthetic oligonucleotide
ggcaaucguagccacauuc

SEQ ID NO: 1086644 - RNA, 19 nt, Artificial Sequence
  Description of Artificial Sequence: Synthetic oligonucleotide
caacccuauuucccaagag

SEQ ID NO: 1086645 - RNA, 19 nt, Artificial Sequence
  Description of Artificial Sequence: Synthetic oligonucleotide
ccgauauucgaagggaugg

SEQ ID NO: 1086646 - RNA, 19 nt, Artificial Sequence
  Description of Artificial Sequence: Synthetic oligonucleotide
agagcaaagcugugaguaa

SEQ ID NO: 1086647 - RNA, 19 nt, Artificial Sequence
  Description of Artificial Sequence: Synthetic oligonucleotide
gaugaccggcacccggucc

SEQ ID NO: 1086648 - RNA, 19 nt, Artificial Sequence
  Description of Artificial Sequence: Synthetic oligonucleotide
uuccuaaucuuuucaccuu

SEQ ID NO: 1086649 - RNA, 19 nt, Artificial Sequence
  Description of Artificial Sequence: Synthetic oligonucleotide
uaaggcguccucaggucuc

SEQ ID NO: 1086650 - RNA, 19 nt, Artificial Sequence
  Description of Artificial Sequence: Synthetic oligonucleotide
ccuugcgucuccuccaugg

SEQ ID NO: 1086651 - RNA, 19 nt, Artificial Sequence
  Description of Artificial Sequence: Synthetic oligonucleotide
ucgugggaggaauaguguu

SEQ ID NO: 1086652 - RNA, 19 nt, Artificial Sequence
  Description of Artificial Sequence: Synthetic oligonucleotide
ucacaaucgcuccgcccgc

SEQ ID NO: 1086653 - RNA, 19 nt, Artificial Sequence
  Description of Artificial Sequence: Synthetic oligonucleotide
ucgugguuguccucauaca

SEQ ID NO: 1086654 - RNA, 19 nt, Artificial Sequence
  Description of Artificial Sequence: Synthetic oligonucleotide
ccuaaaugaaacugaguca

SEQ ID NO: 1086655 - RNA, 19 nt, Artificial Sequence
  Description of Artificial Sequence: Synthetic oligonucleotide
acguccaagagagggaccu

SEQ ID NO: 1086656 - RNA, 19 nt, Artificial Sequence
  Description of Artificial Sequence: Synthetic oligonucleotide
uagguaugguccccuacuu

SEQ ID NO: 1086657 - RNA, 19 nt, Artificial Sequence
  Description of Artificial Sequence: Synthetic oligonucleotide
uaacccggacccuccacac

SEQ ID NO: 1086658 - RNA, 19 nt, Artificial Sequence
  Description of Artificial Sequence: Synthetic oligonucleotide
ugugcggugugauguuuuc

SEQ ID NO: 1086659 - RNA, 19 nt, Artificial Sequence
  Description of Artificial Sequence: Synthetic oligonucleotide
aagaaaucggguggcuuuu

SEQ ID NO: 1086660 - RNA, 19 nt, Artificial Sequence
  Description of Artificial Sequence: Synthetic oligonucleotide
cccauauagccccuaaaug

SEQ ID NO: 1086661 - RNA, 19 nt, Artificial Sequence
  Description of Artificial Sequence: Synthetic oligonucleotide
augguugggagcccucccu

SEQ ID NO: 1086662 - RNA, 19 nt, Artificial Sequence
  Description of Artificial Sequence: Synthetic oligonucleotide
uccccgagucccacaagca

SEQ ID NO: 1086663 - RNA, 19 nt, Artificial Sequence
  Description of Artificial Sequence: Synthetic oligonucleotide
auucgaagggaugguccuc

SEQ ID NO: 1086664 - RNA, 19 nt, Artificial Sequence
  Description of Artificial Sequence: Synthetic oligonucleotide
caugguugggagcccuccc

SEQ ID NO: 1086665 - RNA, 19 nt, Artificial Sequence
  Description of Artificial Sequence: Synthetic oligonucleotide
ggacgcucuucauuuguag

SEQ ID NO: 1086666 - RNA, 19 nt, Artificial Sequence
  Description of Artificial Sequence: Synthetic oligonucleotide
ucacaacauuccagugugu

SEQ ID NO: 1086667 - RNA, 19 nt, Artificial Sequence
  Description of Artificial Sequence: Synthetic oligonucleotide
cccuacuugugcaaaugcc

SEQ ID NO: 1086668 - RNA, 19 nt, Artificial Sequence
  Description of Artificial Sequence: Synthetic oligonucleotide
gccugcguggaagaaaagg

SEQ ID NO: 1086669 - RNA, 19 nt, Artificial Sequence
  Description of Artificial Sequence: Synthetic oligonucleotide
uucccgcacaacccuauuu

SEQ ID NO: 1086670 - RNA, 19 nt, Artificial Sequence
  Description of Artificial Sequence: Synthetic oligonucleotide
ccugaacuccaguuuaaug

SEQ ID NO: 1086671 - RNA, 19 nt, Artificial Sequence
  Description of Artificial Sequence: Synthetic oligonucleotide
ccuuaucacaaucgcuccg

SEQ ID NO: 1086672 - RNA, 19 nt, Artificial Sequence
  Description of Artificial Sequence: Synthetic oligonucleotide
gcaaucguagccacauucc

SEQ ID NO: 1086673 - RNA, 19 nt, Artificial Sequence
  Description of Artificial Sequence: Synthetic oligonucleotide
gaccuggggaucuccccgc

SEQ ID NO: 1086674 - RNA, 19 nt, Artificial Sequence
  Description of Artificial Sequence: Synthetic oligonucleotide
acccggacccuccacacau

SEQ ID NO: 1086675 - RNA, 19 nt, Artificial Sequence
  Description of Artificial Sequence: Synthetic oligonucleotide
agccccuaaaugaaacuga

SEQ ID NO: 1086676 - RNA, 19 nt, Artificial Sequence
  Description of Artificial Sequence: Synthetic oligonucleotide
ggguccucgauccaucuuc

SEQ ID NO: 1086677 - RNA, 19 nt, Artificial Sequence
  Description of Artificial Sequence: Synthetic oligonucleotide
gcucgugaaauucuaaggu

SEQ ID NO: 1086678 - RNA, 19 nt, Artificial Sequence
  Description of Artificial Sequence: Synthetic oligonucleotide
guugggagcccucccucug

SEQ ID NO: 1086679 - RNA, 19 nt, Artificial Sequence
  Description of Artificial Sequence: Synthetic oligonucleotide
aguguguaugagacucaag

SEQ ID NO: 1086680 - RNA, 19 nt, Artificial Sequence
  Description of Artificial Sequence: Synthetic oligonucleotide
ccugcguggaagaaaagga

SEQ ID NO: 1086681 - RNA, 19 nt, Artificial Sequence
  Description of Artificial Sequence: Synthetic oligonucleotide
uccccacaaaacgccgggg

SEQ ID NO: 1086682 - RNA, 19 nt, Artificial Sequence
  Description of Artificial Sequence: Synthetic oligonucleotide
ggugacugcgucucgcuuc

SEQ ID NO: 1086683 - RNA, 19 nt, Artificial Sequence
  Description of Artificial Sequence: Synthetic oligonucleotide
gaauaguguuguugacgaa

SEQ ID NO: 1086684 - RNA, 19 nt, Artificial Sequence
  Description of Artificial Sequence: Synthetic oligonucleotide
caccgcacuacguggccag

SEQ ID NO: 1086685 - RNA, 19 nt, Artificial Sequence
  Description of Artificial Sequence: Synthetic oligonucleotide
ucuaaacaucugugcgaau

SEQ ID NO: 1086686 - RNA, 19 nt, Artificial Sequence
  Description of Artificial Sequence: Synthetic oligonucleotide
acaaugcuucaaugacagu

SEQ ID NO: 1086687 - RNA, 19 nt, Artificial Sequence
  Description of Artificial Sequence: Synthetic oligonucleotide
cuugucccuguacaugaga

SEQ ID NO: 1086688 - RNA, 19 nt, Artificial Sequence
  Description of Artificial Sequence: Synthetic oligonucleotide
acgcccgucaccgcacuac

SEQ ID NO: 1086689 - RNA, 19 nt, Artificial Sequence
  Description of Artificial Sequence: Synthetic oligonucleotide
cacuacguggccagacguc

SEQ ID NO: 1086690 - RNA, 19 nt, Artificial Sequence
  Description of Artificial Sequence: Synthetic oligonucleotide
aaggugcuuaagggaugag

SEQ ID NO: 1086691 - RNA, 19 nt, Artificial Sequence
  Description of Artificial Sequence: Synthetic oligonucleotide
cucgaguggccaccugccc

SEQ ID NO: 1086692 - RNA, 19 nt, Artificial Sequence
  Description of Artificial Sequence: Synthetic oligonucleotide
caaccuuaucacaaucgcu

SEQ ID NO: 1086693 - RNA, 19 nt, Artificial Sequence
  Description of Artificial Sequence: Synthetic oligonucleotide
guacccacccugcucucac

SEQ ID NO: 1086694 - RNA, 19 nt, Artificial Sequence
  Description of Artificial Sequence: Synthetic oligonucleotide
gucaccgcacuacguggcc

SEQ ID NO: 1086695 - RNA, 19 nt, Artificial Sequence
  Description of Artificial Sequence: Synthetic oligonucleotide
acuaacgauugagcuugug

SEQ ID NO: 1086696 - RNA, 19 nt, Artificial Sequence
  Description of Artificial Sequence: Synthetic oligonucleotide
gcuuaagggaugaggagca

SEQ ID NO: 1086697 - RNA, 19 nt, Artificial Sequence
  Description of Artificial Sequence: Synthetic oligonucleotide
gacagugugugcgguguga

SEQ ID NO: 1086698 - RNA, 19 nt, Artificial Sequence
  Description of Artificial Sequence: Synthetic oligonucleotide
guggcaaguguguaaucua

SEQ ID NO: 1086699 - RNA, 19 nt, Artificial Sequence
  Description of Artificial Sequence: Synthetic oligonucleotide
agggaugguccucuuuaua

SEQ ID NO: 1086700 - RNA, 19 nt, Artificial Sequence
  Description of Artificial Sequence: Synthetic oligonucleotide
ccacaaaacgccggggucc

SEQ ID NO: 1086701 - RNA, 19 nt, Artificial Sequence
  Description of Artificial Sequence: Synthetic oligonucleotide
gaggacgcucuucauuugu

SEQ ID NO: 1086702 - RNA, 19 nt, Artificial Sequence
  Description of Artificial Sequence: Synthetic oligonucleotide
ugcucccaucugcugggcu

SEQ ID NO: 1086703 - RNA, 19 nt, Artificial Sequence
  Description of Artificial Sequence: Synthetic oligonucleotide
ccgaagguaaaggaccacc

SEQ ID NO: 1086704 - RNA, 19 nt, Artificial Sequence
  Description of Artificial Sequence: Synthetic oligonucleotide
gccccuaaaugaaacugag

SEQ ID NO: 1086705 - RNA, 19 nt, Artificial Sequence
  Description of Artificial Sequence: Synthetic oligonucleotide
ucaccgcacuacguggcca

SEQ ID NO: 1086706 - RNA, 19 nt, Artificial Sequence
  Description of Artificial Sequence: Synthetic oligonucleotide
ccucccaaccgucugauga

SEQ ID NO: 1086707 - RNA, 19 nt, Artificial Sequence
  Description of Artificial Sequence: Synthetic oligonucleotide
cagagaugcucaacccuga

SEQ ID NO: 1086708 - RNA, 19 nt, Artificial Sequence
  Description of Artificial Sequence: Synthetic oligonucleotide
cagugugugcggugugaug

SEQ ID NO: 1086709 - RNA, 19 nt, Artificial Sequence
  Description of Artificial Sequence: Synthetic oligonucleotide
aggucagaagggacaaggu

SEQ ID NO: 1086710 - RNA, 19 nt, Artificial Sequence
  Description of Artificial Sequence: Synthetic oligonucleotide
gacguccaagagagggacc

SEQ ID NO: 1086711 - RNA, 19 nt, Artificial Sequence
  Description of Artificial Sequence: Synthetic oligonucleotide
ccgcacaacccuauuuccc

SEQ ID NO: 1086712 - RNA, 19 nt, Artificial Sequence
  Description of Artificial Sequence: Synthetic oligonucleotide
caaagagacaggaguugcu

SEQ ID NO: 1086713 - RNA, 19 nt, Artificial Sequence
  Description of Artificial Sequence: Synthetic oligonucleotide
gggacaagguacuuucucu

SEQ ID NO: 1086714 - RNA, 19 nt, Artificial Sequence
  Description of Artificial Sequence: Synthetic oligonucleotide
cccuauuucccaagaggac

SEQ ID NO: 1086715 - RNA, 19 nt, Artificial Sequence
  Description of Artificial Sequence: Synthetic oligonucleotide
ucguagccacauucccgca

SEQ ID NO: 1086716 - RNA, 19 nt, Artificial Sequence
  Description of Artificial Sequence: Synthetic oligonucleotide
acaaucgcuccgcccgcgu

SEQ ID NO: 1086717 - RNA, 19 nt, Artificial Sequence
  Description of Artificial Sequence: Synthetic oligonucleotide
cccgcacaacccuauuucc

SEQ ID NO: 1086718 - RNA, 19 nt, Artificial Sequence
  Description of Artificial Sequence: Synthetic oligonucleotide
accgucugaugaaacugca

SEQ ID NO: 1086719 - RNA, 19 nt, Artificial Sequence
  Description of Artificial Sequence: Synthetic oligonucleotide
gcagagaaaacuaacgauu

SEQ ID NO: 1086720 - RNA, 19 nt, Artificial Sequence
  Description of Artificial Sequence: Synthetic oligonucleotide
cucauuucccauagacacu

SEQ ID NO: 1086721 - RNA, 19 nt, Artificial Sequence
  Description of Artificial Sequence: Synthetic oligonucleotide
gacggggccugcugcgcgc

SEQ ID NO: 1086722 - RNA, 19 nt, Artificial Sequence
  Description of Artificial Sequence: Synthetic oligonucleotide
guaaucuagcuuaccuugu

SEQ ID NO: 1086723 - RNA, 19 nt, Artificial Sequence
  Description of Artificial Sequence: Synthetic oligonucleotide
ccccuacuugugcaaaugc

SEQ ID NO: 1086724 - RNA, 19 nt, Artificial Sequence
  Description of Artificial Sequence: Synthetic oligonucleotide
ccgucaccgcacuacgugg

SEQ ID NO: 1086725 - RNA, 19 nt, Artificial Sequence
  Description of Artificial Sequence: Synthetic oligonucleotide
ccccgggucaaugucaacc

SEQ ID NO: 1086726 - RNA, 19 nt, Artificial Sequence
  Description of Artificial Sequence: Synthetic oligonucleotide
ucccaaccgucugaugaaa

SEQ ID NO: 1086727 - RNA, 19 nt, Artificial Sequence
  Description of Artificial Sequence: Synthetic oligonucleotide
cacaaucgcuccgcccgcg

SEQ ID NO: 1086728 - RNA, 19 nt, Artificial Sequence
  Description of Artificial Sequence: Synthetic oligonucleotide
cagggacccuggcuuuagg

SEQ ID NO: 1086729 - RNA, 19 nt, Artificial Sequence
  Description of Artificial Sequence: Synthetic oligonucleotide
ugugugcggugugauguuu

SEQ ID NO: 1086730 - RNA, 19 nt, Artificial Sequence
  Description of Artificial Sequence: Synthetic oligonucleotide
uccucccaaccgucugaug

SEQ ID NO: 1086731 - RNA, 19 nt, Artificial Sequence
  Description of Artificial Sequence: Synthetic oligonucleotide
acgaugaccggcacccggu

SEQ ID NO: 1086732 - RNA, 19 nt, Artificial Sequence
  Description of Artificial Sequence: Synthetic oligonucleotide
ugcugcgcgcgcuggugac

SEQ ID NO: 1086733 - RNA, 19 nt, Artificial Sequence
  Description of Artificial Sequence: Synthetic oligonucleotide
gaaaugcuagaggacugau

SEQ ID NO: 1086734 - RNA, 19 nt, Artificial Sequence
  Description of Artificial Sequence: Synthetic oligonucleotide
gcaaggagggaaacagcug

SEQ ID NO: 1086735 - RNA, 19 nt, Artificial Sequence
  Description of Artificial Sequence: Synthetic oligonucleotide
aacuaacgauugagcuugu

SEQ ID NO: 1086736 - RNA, 19 nt, Artificial Sequence
  Description of Artificial Sequence: Synthetic oligonucleotide
uagacaccuugucccugua

SEQ ID NO: 1086737 - RNA, 19 nt, Artificial Sequence
  Description of Artificial Sequence: Synthetic oligonucleotide
gguagcacucgugggagga

SEQ ID NO: 1086738 - RNA, 19 nt, Artificial Sequence
  Description of Artificial Sequence: Synthetic oligonucleotide
guuccccgagucccacaag

SEQ ID NO: 1086739 - RNA, 19 nt, Artificial Sequence
  Description of Artificial Sequence: Synthetic oligonucleotide
ugaccggcacccgguccgg

SEQ ID NO: 1086740 - RNA, 19 nt, Artificial Sequence
  Description of Artificial Sequence: Synthetic oligonucleotide
aaacgccgggguccucgau

SEQ ID NO: 1086741 - RNA, 19 nt, Artificial Sequence
  Description of Artificial Sequence: Synthetic oligonucleotide
agagggaccuggggaucuc

SEQ ID NO: 1086742 - RNA, 19 nt, Artificial Sequence
  Description of Artificial Sequence: Synthetic oligonucleotide
cugaggcucgugaaauucu

SEQ ID NO: 1086743 - RNA, 19 nt, Artificial Sequence
  Description of Artificial Sequence: Synthetic oligonucleotide
ccgucugaugaaacugcag

SEQ ID NO: 1086744 - RNA, 19 nt, Artificial Sequence
  Description of Artificial Sequence: Synthetic oligonucleotide
gcacucgugggaggaauag

SEQ ID NO: 1086745 - RNA, 19 nt, Artificial Sequence
  Description of Artificial Sequence: Synthetic oligonucleotide
ccauccaaacaacuggcaa

SEQ ID NO: 1086746 - RNA, 19 nt, Artificial Sequence
  Description of Artificial Sequence: Synthetic oligonucleotide
ggacggggccugcugcgcg

SEQ ID NO: 1086747 - RNA, 19 nt, Artificial Sequence
  Description of Artificial Sequence: Synthetic oligonucleotide
gugacugcgucucgcuucu

SEQ ID NO: 1086748 - RNA, 19 nt, Artificial Sequence
  Description of Artificial Sequence: Synthetic oligonucleotide
auucccgcacaacccuauu

SEQ ID NO: 1086749 - RNA, 19 nt, Artificial Sequence
  Description of Artificial Sequence: Synthetic oligonucleotide
cgaagguaaaggaccacca

SEQ ID NO: 1086750 - RNA, 19 nt, Artificial Sequence
  Description of Artificial Sequence: Synthetic oligonucleotide
uggcaaucguagccacauu

SEQ ID NO: 1086751 - RNA, 19 nt, Artificial Sequence
  Description of Artificial Sequence: Synthetic oligonucleotide
accuugcgucuccuccaug

SEQ ID NO: 1086752 - RNA, 19 nt, Artificial Sequence
  Description of Artificial Sequence: Synthetic oligonucleotide
aucgcuccgcccgcgucag

SEQ ID NO: 1086753 - RNA, 19 nt, Artificial Sequence
  Description of Artificial Sequence: Synthetic oligonucleotide
gggaucuccccgcccgaag

SEQ ID NO: 1086754 - RNA, 19 nt, Artificial Sequence
  Description of Artificial Sequence: Synthetic oligonucleotide
gguuccccgagucccacaa

SEQ ID NO: 1086755 - RNA, 19 nt, Artificial Sequence
  Description of Artificial Sequence: Synthetic oligonucleotide
ccuauuucccaagaggacu

SEQ ID NO: 1086756 - RNA, 19 nt, Artificial Sequence
  Description of Artificial Sequence: Synthetic oligonucleotide
ccgaugucuucaccuugcg

SEQ ID NO: 1086757 - RNA, 19 nt, Artificial Sequence
  Description of Artificial Sequence: Synthetic oligonucleotide
cccaaccgucugaugaaac

SEQ ID NO: 1086758 - RNA, 19 nt, Artificial Sequence
  Description of Artificial Sequence: Synthetic oligonucleotide
uccucgugguuguccucau

SEQ ID NO: 1086759 - RNA, 19 nt, Artificial Sequence
  Description of Artificial Sequence: Synthetic oligonucleotide
ggacaagguacuuucucuu

SEQ ID NO: 1086760 - RNA, 19 nt, Artificial Sequence
  Description of Artificial Sequence: Synthetic oligonucleotide
ccuuguaacccggacccuc

SEQ ID NO: 1086761 - RNA, 19 nt, Artificial Sequence
  Description of Artificial Sequence: Synthetic oligonucleotide
cugcgcgcgcuggugacug

SEQ ID NO: 1086762 - RNA, 19 nt, Artificial Sequence
  Description of Artificial Sequence: Synthetic oligonucleotide
gcagacauacagacugcuc

SEQ ID NO: 1086763 - RNA, 19 nt, Artificial Sequence
  Description of Artificial Sequence: Synthetic oligonucleotide
aggggucacaaugcuucaa

SEQ ID NO: 1086764 - RNA, 19 nt, Artificial Sequence
  Description of Artificial Sequence: Synthetic oligonucleotide
guccggguauuucuuccua

SEQ ID NO: 1086765 - RNA, 19 nt, Artificial Sequence
  Description of Artificial Sequence: Synthetic oligonucleotide
acacgcccgucaccgcacu

SEQ ID NO: 1086766 - RNA, 19 nt, Artificial Sequence
  Description of Artificial Sequence: Synthetic oligonucleotide
aggacgcucuucauuugua

SEQ ID NO: 1086767 - RNA, 19 nt, Artificial Sequence
  Description of Artificial Sequence: Synthetic oligonucleotide
gcguggaagaaaaggaccu

SEQ ID NO: 1086768 - RNA, 19 nt, Artificial Sequence
  Description of Artificial Sequence: Synthetic oligonucleotide
cgucaccgcacuacguggc

SEQ ID NO: 1086769 - RNA, 19 nt, Artificial Sequence
  Description of Artificial Sequence: Synthetic oligonucleotide
gcuagaggacugauccuga

SEQ ID NO: 1086770 - RNA, 19 nt, Artificial Sequence
  Description of Artificial Sequence: Synthetic oligonucleotide
agacugcucccaacaggga

SEQ ID NO: 1086771 - RNA, 19 nt, Artificial Sequence
  Description of Artificial Sequence: Synthetic oligonucleotide
ccccgagucccacaagcac

SEQ ID NO: 1086772 - RNA, 19 nt, Artificial Sequence
  Description of Artificial Sequence: Synthetic oligonucleotide
ccaugguugggagcccucc

SEQ ID NO: 1086773 - RNA, 19 nt, Artificial Sequence
  Description of Artificial Sequence: Synthetic oligonucleotide
gcggugugauguuuuccga

SEQ ID NO: 1086774 - RNA, 19 nt, Artificial Sequence
  Description of Artificial Sequence: Synthetic oligonucleotide
acauucccgcacaacccua

SEQ ID NO: 1086775 - RNA, 19 nt, Artificial Sequence
  Description of Artificial Sequence: Synthetic oligonucleotide
cguagccacauucccgcac

SEQ ID NO: 1086776 - RNA, 19 nt, Artificial Sequence
  Description of Artificial Sequence: Synthetic oligonucleotide
cauucccgcacaacccuau

SEQ ID NO: 1086777 - RNA, 19 nt, Artificial Sequence
  Description of Artificial Sequence: Synthetic oligonucleotide
agcacucgugggaggaaua

SEQ ID NO: 1086778 - RNA, 19 nt, Artificial Sequence
  Description of Artificial Sequence: Synthetic oligonucleotide
gugccgccugcguggaaga

SEQ ID NO: 1086779 - RNA, 19 nt, Artificial Sequence
  Description of Artificial Sequence: Synthetic oligonucleotide
ccggacggggccugcugcg

SEQ ID NO: 1086780 - RNA, 19 nt, Artificial Sequence
  Description of Artificial Sequence: Synthetic oligonucleotide
cccgcccgaagguaaagga

SEQ ID NO: 1086781 - RNA, 19 nt, Artificial Sequence
  Description of Artificial Sequence: Synthetic oligonucleotide
ccaacagggaggacgcucu

SEQ ID NO: 1086782 - RNA, 19 nt, Artificial Sequence
  Description of Artificial Sequence: Synthetic oligonucleotide
cgugaaauucuaaggugcu

SEQ ID NO: 1086783 - RNA, 19 nt, Artificial Sequence
  Description of Artificial Sequence: Synthetic oligonucleotide
ccccauauagccccuaaau

SEQ ID NO: 1086784 - RNA, 19 nt, Artificial Sequence
  Description of Artificial Sequence: Synthetic oligonucleotide
cacaaaacgccgggguccu

SEQ ID NO: 1086785 - RNA, 19 nt, Artificial Sequence
  Description of Artificial Sequence: Synthetic oligonucleotide
cccggacggggccugcugc

SEQ ID NO: 1086786 - RNA, 19 nt, Artificial Sequence
  Description of Artificial Sequence: Synthetic oligonucleotide
gcccaugguagcacucgug

SEQ ID NO: 1086787 - RNA, 19 nt, Artificial Sequence
  Description of Artificial Sequence: Synthetic oligonucleotide
cgaguggccaccugcccuc

SEQ ID NO: 1086788 - RNA, 19 nt, Artificial Sequence
  Description of Artificial Sequence: Synthetic oligonucleotide
ugacugcgucucgcuucug

SEQ ID NO: 1086789 - RNA, 19 nt, Artificial Sequence
  Description of Artificial Sequence: Synthetic oligonucleotide
guccccuacuugugcaaau

SEQ ID NO: 1086790 - RNA, 19 nt, Artificial Sequence
  Description of Artificial Sequence: Synthetic oligonucleotide
gcgcgcgcuggugacugcg

SEQ ID NO: 1086791 - RNA, 19 nt, Artificial Sequence
  Description of Artificial Sequence: Synthetic oligonucleotide
gcuuaccuuguaacccgga

SEQ ID NO: 1086792 - RNA, 19 nt, Artificial Sequence
  Description of Artificial Sequence: Synthetic oligonucleotide
ccccgcccgaagguaaagg

SEQ ID NO: 1086793 - RNA, 19 nt, Artificial Sequence
  Description of Artificial Sequence: Synthetic oligonucleotide
accgcacuacguggccaga

SEQ ID NO: 1086794 - RNA, 19 nt, Artificial Sequence
  Description of Artificial Sequence: Synthetic oligonucleotide
gguccccuacuugugcaaa

SEQ ID NO: 1086795 - RNA, 19 nt, Artificial Sequence
  Description of Artificial Sequence: Synthetic oligonucleotide
cgcccgucaccgcacuacg

SEQ ID NO: 1086796 - RNA, 19 nt, Artificial Sequence
  Description of Artificial Sequence: Synthetic oligonucleotide
ccacacgcccgucaccgca

SEQ ID NO: 1086797 - RNA, 19 nt, Artificial Sequence
  Description of Artificial Sequence: Synthetic oligonucleotide
cacucgugggaggaauagu

SEQ ID NO: 1086798 - RNA, 19 nt, Artificial Sequence
  Description of Artificial Sequence: Synthetic oligonucleotide
uccccggacggggccugcu

SEQ ID NO: 1086799 - RNA, 19 nt, Artificial Sequence
  Description of Artificial Sequence: Synthetic oligonucleotide
gugugugcggugugauguu

SEQ ID NO: 1086800 - RNA, 19 nt, Artificial Sequence
  Description of Artificial Sequence: Synthetic oligonucleotide
gguccucgauccaucuucu

SEQ ID NO: 1086801 - RNA, 19 nt, Artificial Sequence
  Description of Artificial Sequence: Synthetic oligonucleotide
ccccuaaaugaaacugagu

SEQ ID NO: 1086802 - RNA, 19 nt, Artificial Sequence
  Description of Artificial Sequence: Synthetic oligonucleotide
ccgcacuacguggccagac

SEQ ID NO: 1086803 - RNA, 19 nt, Artificial Sequence
  Description of Artificial Sequence: Synthetic oligonucleotide
gcgcgcuggugacugcguc

SEQ ID NO: 1086804 - RNA, 19 nt, Artificial Sequence
  Description of Artificial Sequence: Synthetic oligonucleotide
cccacacgcccgucaccgc

SEQ ID NO: 1086805 - RNA, 19 nt, Artificial Sequence
  Description of Artificial Sequence: Synthetic oligonucleotide
gugugcggugugauguuuu

SEQ ID NO: 1086806 - RNA, 19 nt, Artificial Sequence
  Description of Artificial Sequence: Synthetic oligonucleotide
ggcccaugguagcacucgu

SEQ ID NO: 1086807 - RNA, 19 nt, Artificial Sequence
  Description of Artificial Sequence: Synthetic oligonucleotide
ccccacaaaacgccggggu

SEQ ID NO: 1086808 - RNA, 19 nt, Artificial Sequence
  Description of Artificial Sequence: Synthetic oligonucleotide
ccuuagguaugguccccua

SEQ ID NO: 1086809 - RNA, 19 nt, Artificial Sequence
  Description of Artificial Sequence: Synthetic oligonucleotide
caccuugcgucuccuccau

SEQ ID NO: 1086810 - RNA, 19 nt, Artificial Sequence
  Description of Artificial Sequence: Synthetic oligonucleotide
ccggguauuucuuccuaau

SEQ ID NO: 1086811 - RNA, 19 nt, Artificial Sequence
  Description of Artificial Sequence: Synthetic oligonucleotide
caaugacagugggaauuuu

SEQ ID NO: 1086812 - RNA, 19 nt, Artificial Sequence
  Description of Artificial Sequence: Synthetic oligonucleotide
caggucucagguggauccu

SEQ ID NO: 1086813 - RNA, 19 nt, Artificial Sequence
  Description of Artificial Sequence: Synthetic oligonucleotide
cgaugaccggcacccgguc

SEQ ID NO: 1086814 - RNA, 19 nt, Artificial Sequence
  Description of Artificial Sequence: Synthetic oligonucleotide
cuccucccaaccgucugau

SEQ ID NO: 1086815 - RNA, 19 nt, Artificial Sequence
  Description of Artificial Sequence: Synthetic oligonucleotide
cguccaagagagggaccug

SEQ ID NO: 1086816 - RNA, 19 nt, Artificial Sequence
  Description of Artificial Sequence: Synthetic oligonucleotide
cgccugcguggaagaaaag

SEQ ID NO: 1086817 - RNA, 19 nt, Artificial Sequence
  Description of Artificial Sequence: Synthetic oligonucleotide
ggggaucuccccgcccgaa

SEQ ID NO: 1086818 - RNA, 19 nt, Artificial Sequence
  Description of Artificial Sequence: Synthetic oligonucleotide
cggguggcuuuucccaaga

SEQ ID NO: 1086819 - RNA, 19 nt, Artificial Sequence
  Description of Artificial Sequence: Synthetic oligonucleotide
caacagggaggacgcucuu

SEQ ID NO: 1086820 - RNA, 19 nt, Artificial Sequence
  Description of Artificial Sequence: Synthetic oligonucleotide
cacgcccgucaccgcacua

SEQ ID NO: 1086821 - RNA, 19 nt, Artificial Sequence
  Description of Artificial Sequence: Synthetic oligonucleotide
cggugugauguuuuccgau

SEQ ID NO: 1086822 - RNA, 19 nt, Artificial Sequence
  Description of Artificial Sequence: Synthetic oligonucleotide
cgauauucgaagggauggu

SEQ ID NO: 1086823 - RNA, 19 nt, Artificial Sequence
  Description of Artificial Sequence: Synthetic oligonucleotide
cccuuagguaugguccccu

SEQ ID NO: 1086824 - RNA, 19 nt, Artificial Sequence
  Description of Artificial Sequence: Synthetic oligonucleotide
cgcgcuggugacugcgucu

SEQ ID NO: 1086825 - RNA, 19 nt, Artificial Sequence
  Description of Artificial Sequence: Synthetic oligonucleotide
gcccgucaccgcacuacgu

SEQ ID NO: 1086826 - RNA, 19 nt, Artificial Sequence
  Description of Artificial Sequence: Synthetic oligonucleotide
ccgggucaaugucaaccuu

SEQ ID NO: 1086827 - RNA, 19 nt, Artificial Sequence
  Description of Artificial Sequence: Synthetic oligonucleotide
cugccacaacuggggcggu

SEQ ID NO: 1086828 - RNA, 19 nt, Artificial Sequence
  Description of Artificial Sequence: Synthetic oligonucleotide
cgcgcgcuggugacugcgu

SEQ ID NO: 1086829 - RNA, 19 nt, Artificial Sequence
  Description of Artificial Sequence: Synthetic oligonucleotide
cgccgggguccucgaucca

SEQ ID NO: 1086830 - RNA, 19 nt, Artificial Sequence
  Description of Artificial Sequence: Synthetic oligonucleotide
aaaaucaagacuugguucc

SEQ ID NO: 1086831 - RNA, 19 nt, Artificial Sequence
  Description of Artificial Sequence: Synthetic oligonucleotide
aaaacaaccauaaaagugc

SEQ ID NO: 1086832 - RNA, 19 nt, Artificial Sequence
  Description of Artificial Sequence: Synthetic oligonucleotide
ucuaauuuaauacugaagu

SEQ ID NO: 1086833 - RNA, 19 nt, Artificial Sequence
  Description of Artificial Sequence: Synthetic oligonucleotide
ucuauaaagaaacaccagg

SEQ ID NO: 1086834 - RNA, 19 nt, Artificial Sequence
  Description of Artificial Sequence: Synthetic oligonucleotide
aauuauuacagguuguaag

SEQ ID NO: 1086835 - RNA, 19 nt, Artificial Sequence
  Description of Artificial Sequence: Synthetic oligonucleotide
ucuguagauauauagagag

SEQ ID NO: 1086836 - RNA, 19 nt, Artificial Sequence
  Description of Artificial Sequence: Synthetic oligonucleotide
aauuuaauacugaaguacc

SEQ ID NO: 1086837 - RNA, 19 nt, Artificial Sequence
  Description of Artificial Sequence: Synthetic oligonucleotide
aaucccacaauauguauac

SEQ ID NO: 1086838 - RNA, 19 nt, Artificial Sequence
  Description of Artificial Sequence: Synthetic oligonucleotide
auauagauuagauacauga

SEQ ID NO: 1086839 - RNA, 19 nt, Artificial Sequence
  Description of Artificial Sequence: Synthetic oligonucleotide
uguucaauaacauaagggu

SEQ ID NO: 1086840 - RNA, 19 nt, Artificial Sequence
  Description of Artificial Sequence: Synthetic oligonucleotide
uauugcuuuaauuuuaccc

SEQ ID NO: 1086841 - RNA, 19 nt, Artificial Sequence
  Description of Artificial Sequence: Synthetic oligonucleotide
aauaacauaaggguaagug

SEQ ID NO: 1086842 - RNA, 19 nt, Artificial Sequence
  Description of Artificial Sequence: Synthetic oligonucleotide
ugagauauuauaaaaugcu

SEQ ID NO: 1086843 - RNA, 19 nt, Artificial Sequence
  Description of Artificial Sequence: Synthetic oligonucleotide
aauugaaggucuuaguucu

SEQ ID NO: 1086844 - RNA, 19 nt, Artificial Sequence
  Description of Artificial Sequence: Synthetic oligonucleotide
aauauaucuaccuuugcau

SEQ ID NO: 1086845 - RNA, 19 nt, Artificial Sequence
  Description of Artificial Sequence: Synthetic oligonucleotide
cuauaaagaaacaccaggg

SEQ ID NO: 1086846 - RNA, 19 nt, Artificial Sequence
  Description of Artificial Sequence: Synthetic oligonucleotide
uuucaauuauuacagguug

SEQ ID NO: 1086847 - RNA, 19 nt, Artificial Sequence
  Description of Artificial Sequence: Synthetic oligonucleotide
acaaucuguagauauauag

SEQ ID NO: 1086848 - RNA, 19 nt, Artificial Sequence
  Description of Artificial Sequence: Synthetic oligonucleotide
auaaagaaacaccagggag

SEQ ID NO: 1086849 - RNA, 19 nt, Artificial Sequence
  Description of Artificial Sequence: Synthetic oligonucleotide
uauguaggaauauacaaga

SEQ ID NO: 1086850 - RNA, 19 nt, Artificial Sequence
  Description of Artificial Sequence: Synthetic oligonucleotide
uguaaauuuagauaagaaa

SEQ ID NO: 1086851 - RNA, 19 nt, Artificial Sequence
  Description of Artificial Sequence: Synthetic oligonucleotide
caauuaauggcuuaaguug

SEQ ID NO: 1086852 - RNA, 19 nt, Artificial Sequence
  Description of Artificial Sequence: Synthetic oligonucleotide
uucuaauuaaaaugaagcc

SEQ ID NO: 1086853 - RNA, 19 nt, Artificial Sequence
  Description of Artificial Sequence: Synthetic oligonucleotide
uguuugaagaaauggauca

SEQ ID NO: 1086854 - RNA, 19 nt, Artificial Sequence
  Description of Artificial Sequence: Synthetic oligonucleotide
agaaagaauguauaucagg

SEQ ID NO: 1086855 - RNA, 19 nt, Artificial Sequence
  Description of Artificial Sequence: Synthetic oligonucleotide
uguaauaaucuuuucauau

SEQ ID NO: 1086856 - RNA, 19 nt, Artificial Sequence
  Description of Artificial Sequence: Synthetic oligonucleotide
aaccauaguuaauauauug

SEQ ID NO: 1086857 - RNA, 19 nt, Artificial Sequence
  Description of Artificial Sequence: Synthetic oligonucleotide
aacaaaaggucucaagucu

SEQ ID NO: 1086858 - RNA, 19 nt, Artificial Sequence
  Description of Artificial Sequence: Synthetic oligonucleotide
uauaaaaucaagacuuggu

SEQ ID NO: 1086859 - RNA, 19 nt, Artificial Sequence
  Description of Artificial Sequence: Synthetic oligonucleotide
cuguucaauaacauaaggg

SEQ ID NO: 1086860 - RNA, 19 nt, Artificial Sequence
  Description of Artificial Sequence: Synthetic oligonucleotide
agacacaugaacugguggc

SEQ ID NO: 1086861 - RNA, 19 nt, Artificial Sequence
  Description of Artificial Sequence: Synthetic oligonucleotide
uugauuguguaucuuuggg

SEQ ID NO: 1086862 - RNA, 19 nt, Artificial Sequence
  Description of Artificial Sequence: Synthetic oligonucleotide
auuauuacagguuguaaga

SEQ ID NO: 1086863 - RNA, 19 nt, Artificial Sequence
  Description of Artificial Sequence: Synthetic oligonucleotide
uagagagauacaaauauaa

SEQ ID NO: 1086864 - RNA, 19 nt, Artificial Sequence
  Description of Artificial Sequence: Synthetic oligonucleotide
uuuagauaagaaagaaugu

SEQ ID NO: 1086865 - RNA, 19 nt, Artificial Sequence
  Description of Artificial Sequence: Synthetic oligonucleotide
ugauucaugagcagaaucu

SEQ ID NO: 1086866 - RNA, 19 nt, Artificial Sequence
  Description of Artificial Sequence: Synthetic oligonucleotide
uauauuuccacaaucugua

SEQ ID NO: 1086867 - RNA, 19 nt, Artificial Sequence
  Description of Artificial Sequence: Synthetic oligonucleotide
aauuguacacaauucacua

SEQ ID NO: 1086868 - RNA, 19 nt, Artificial Sequence
  Description of Artificial Sequence: Synthetic oligonucleotide
auauguauaccucacaaaa

SEQ ID NO: 1086869 - RNA, 19 nt, Artificial Sequence
  Description of Artificial Sequence: Synthetic oligonucleotide
aacaauuaauggcuuaagu

SEQ ID NO: 1086870 - RNA, 19 nt, Artificial Sequence
  Description of Artificial Sequence: Synthetic oligonucleotide
aaccugaaacacuguaagc

SEQ ID NO: 1086871 - RNA, 19 nt, Artificial Sequence
  Description of Artificial Sequence: Synthetic oligonucleotide
aagugcgcugcuuaguaac

SEQ ID NO: 1086872 - RNA, 19 nt, Artificial Sequence
  Description of Artificial Sequence: Synthetic oligonucleotide
cuauguaggaauauacaag

SEQ ID NO: 1086873 - RNA, 19 nt, Artificial Sequence
  Description of Artificial Sequence: Synthetic oligonucleotide
ucuauauuuccacaaucug

SEQ ID NO: 1086874 - RNA, 19 nt, Artificial Sequence
  Description of Artificial Sequence: Synthetic oligonucleotide
uucacaccaacaauuaaug

SEQ ID NO: 1086875 - RNA, 19 nt, Artificial Sequence
  Description of Artificial Sequence: Synthetic oligonucleotide
uauaauacauuggacagcu

SEQ ID NO: 1086876 - RNA, 19 nt, Artificial Sequence
  Description of Artificial Sequence: Synthetic oligonucleotide
agcauacuaccauacaaac

SEQ ID NO: 1086877 - RNA, 19 nt, Artificial Sequence
  Description of Artificial Sequence: Synthetic oligonucleotide
gaaagcuuuggcuaaugag

SEQ ID NO: 1086878 - RNA, 19 nt, Artificial Sequence
  Description of Artificial Sequence: Synthetic oligonucleotide
auaguuaauauauugcuuu

SEQ ID NO: 1086879 - RNA, 19 nt, Artificial Sequence
  Description of Artificial Sequence: Synthetic oligonucleotide
aaauaggguaguuuauaug

SEQ ID NO: 1086880 - RNA, 19 nt, Artificial Sequence
  Description of Artificial Sequence: Synthetic oligonucleotide
acauuggacagcuauguag

SEQ ID NO: 1086881 - RNA, 19 nt, Artificial Sequence
  Description of Artificial Sequence: Synthetic oligonucleotide
uaacauaaggguaagugau

SEQ ID NO: 1086882 - RNA, 19 nt, Artificial Sequence
  Description of Artificial Sequence: Synthetic oligonucleotide
aauuuuacccuuguaauaa

SEQ ID NO: 1086883 - RNA, 19 nt, Artificial Sequence
  Description of Artificial Sequence: Synthetic oligonucleotide
cauuggacagcuauguagg

SEQ ID NO: 1086884 - RNA, 19 nt, Artificial Sequence
  Description of Artificial Sequence: Synthetic oligonucleotide
ucaaaauugauuguguauc

SEQ ID NO: 1086885 - RNA, 19 nt, Artificial Sequence
  Description of Artificial Sequence: Synthetic oligonucleotide
uuagacaucaaaagguuau

SEQ ID NO: 1086886 - RNA, 19 nt, Artificial Sequence
  Description of Artificial Sequence: Synthetic oligonucleotide
ugucacacccauaugaacu

SEQ ID NO: 1086887 - RNA, 19 nt, Artificial Sequence
  Description of Artificial Sequence: Synthetic oligonucleotide
accauaguuaauauauugc

SEQ ID NO: 1086888 - RNA, 19 nt, Artificial Sequence
  Description of Artificial Sequence: Synthetic oligonucleotide
auaacauaaggguaaguga

SEQ ID NO: 1086889 - RNA, 19 nt, Artificial Sequence
  Description of Artificial Sequence: Synthetic oligonucleotide
aacgcauagucuuucuaag

SEQ ID NO: 1086890 - RNA, 19 nt, Artificial Sequence
  Description of Artificial Sequence: Synthetic oligonucleotide
aucugaucaaggcauuggc

SEQ ID NO: 1086891 - RNA, 19 nt, Artificial Sequence
  Description of Artificial Sequence: Synthetic oligonucleotide
uacacauaucucaggauag

SEQ ID NO: 1086892 - RNA, 19 nt, Artificial Sequence
  Description of Artificial Sequence: Synthetic oligonucleotide
cugcauaucauauagauua

SEQ ID NO: 1086893 - RNA, 19 nt, Artificial Sequence
  Description of Artificial Sequence: Synthetic oligonucleotide
auuaugcuagguuuuagca

SEQ ID NO: 1086894 - RNA, 19 nt, Artificial Sequence
  Description of Artificial Sequence: Synthetic oligonucleotide
ucucaaaguggaaagagau

SEQ ID NO: 1086895 - RNA, 19 nt, Artificial Sequence
  Description of Artificial Sequence: Synthetic oligonucleotide
ugcuuaguaacgcauaguc

SEQ ID NO: 1086896 - RNA, 19 nt, Artificial Sequence
  Description of Artificial Sequence: Synthetic oligonucleotide
uuugcguucaaucccacaa

SEQ ID NO: 1086897 - RNA, 19 nt, Artificial Sequence
  Description of Artificial Sequence: Synthetic oligonucleotide
ucucaagucuacaaaucag

SEQ ID NO: 1086898 - RNA, 19 nt, Artificial Sequence
  Description of Artificial Sequence: Synthetic oligonucleotide
acaccuuuaggagacaucg

SEQ ID NO: 1086899 - RNA, 19 nt, Artificial Sequence
  Description of Artificial Sequence: Synthetic oligonucleotide
acaauagcauuauuuaaca

SEQ ID NO: 1086900 - RNA, 19 nt, Artificial Sequence
  Description of Artificial Sequence: Synthetic oligonucleotide
auugauuguguaucuuugg

SEQ ID NO: 1086901 - RNA, 19 nt, Artificial Sequence
  Description of Artificial Sequence: Synthetic oligonucleotide
agacuugguuccuacagcg

SEQ ID NO: 1086902 - RNA, 19 nt, Artificial Sequence
  Description of Artificial Sequence: Synthetic oligonucleotide
gaauugaaggucuuaguuc

SEQ ID NO: 1086903 - RNA, 19 nt, Artificial Sequence
  Description of Artificial Sequence: Synthetic oligonucleotide
auauaauacauuggacagc

SEQ ID NO: 1086904 - RNA, 19 nt, Artificial Sequence
  Description of Artificial Sequence: Synthetic oligonucleotide
aaggcauuaugcuagguuu

SEQ ID NO: 1086905 - RNA, 19 nt, Artificial Sequence
  Description of Artificial Sequence: Synthetic oligonucleotide
augauucaugagcagaauc

SEQ ID NO: 1086906 - RNA, 19 nt, Artificial Sequence
  Description of Artificial Sequence: Synthetic oligonucleotide
uagcaaacuuccaugagga

SEQ ID NO: 1086907 - RNA, 19 nt, Artificial Sequence
  Description of Artificial Sequence: Synthetic oligonucleotide
cugaucaaggcauuggcag

SEQ ID NO: 1086908 - RNA, 19 nt, Artificial Sequence
  Description of Artificial Sequence: Synthetic oligonucleotide
aaaacgucucuguuccuag

SEQ ID NO: 1086909 - RNA, 19 nt, Artificial Sequence
  Description of Artificial Sequence: Synthetic oligonucleotide
gauacaugauucaugagca

SEQ ID NO: 1086910 - RNA, 19 nt, Artificial Sequence
  Description of Artificial Sequence: Synthetic oligonucleotide
ucugaauauaucuaccuuu

SEQ ID NO: 1086911 - RNA, 19 nt, Artificial Sequence
  Description of Artificial Sequence: Synthetic oligonucleotide
auaaaaucaagacuugguu

SEQ ID NO: 1086912 - RNA, 19 nt, Artificial Sequence
  Description of Artificial Sequence: Synthetic oligonucleotide
ucuuaggcagcauacuacc

SEQ ID NO: 1086913 - RNA, 19 nt, Artificial Sequence
  Description of Artificial Sequence: Synthetic oligonucleotide
aaaucagaucugaucaagg

SEQ ID NO: 1086914 - RNA, 19 nt, Artificial Sequence
  Description of Artificial Sequence: Synthetic oligonucleotide
ugagcagaaucucaaggug

SEQ ID NO: 1086915 - RNA, 19 nt, Artificial Sequence
  Description of Artificial Sequence: Synthetic oligonucleotide
ugaugaugcacuuauucaa

SEQ ID NO: 1086916 - RNA, 19 nt, Artificial Sequence
  Description of Artificial Sequence: Synthetic oligonucleotide
auauugcuuuaauuuuacc

SEQ ID NO: 1086917 - RNA, 19 nt, Artificial Sequence
  Description of Artificial Sequence: Synthetic oligonucleotide
ucuaagguuuauuaagaaa

SEQ ID NO: 1086918 - RNA, 19 nt, Artificial Sequence
  Description of Artificial Sequence: Synthetic oligonucleotide
gaaacugacacagugggca

SEQ ID NO: 1086919 - RNA, 19 nt, Artificial Sequence
  Description of Artificial Sequence: Synthetic oligonucleotide
uuuagcacggagcaacacu

SEQ ID NO: 1086920 - RNA, 19 nt, Artificial Sequence
  Description of Artificial Sequence: Synthetic oligonucleotide
cugaauauaucuaccuuug

SEQ ID NO: 1086921 - RNA, 19 nt, Artificial Sequence
  Description of Artificial Sequence: Synthetic oligonucleotide
cauuaugcuagguuuuagc

SEQ ID NO: 1086922 - RNA, 19 nt, Artificial Sequence
  Description of Artificial Sequence: Synthetic oligonucleotide
augaacaucuaauuuaaua

SEQ ID NO: 1086923 - RNA, 19 nt, Artificial Sequence
  Description of Artificial Sequence: Synthetic oligonucleotide
uguauaucagggguugagg

SEQ ID NO: 1086924 - RNA, 19 nt, Artificial Sequence
  Description of Artificial Sequence: Synthetic oligonucleotide
agaaauggaucaucaucac

SEQ ID NO: 1086925 - RNA, 19 nt, Artificial Sequence
  Description of Artificial Sequence: Synthetic oligonucleotide
uucaaaauugauuguguau

SEQ ID NO: 1086926 - RNA, 19 nt, Artificial Sequence
  Description of Artificial Sequence: Synthetic oligonucleotide
agaauugaaggucuuaguu

SEQ ID NO: 1086927 - RNA, 19 nt, Artificial Sequence
  Description of Artificial Sequence: Synthetic oligonucleotide
uuguacacaauucacuaua

SEQ ID NO: 1086928 - RNA, 19 nt, Artificial Sequence
  Description of Artificial Sequence: Synthetic oligonucleotide
uuauuacagguuguaagag

SEQ ID NO: 1086929 - RNA, 19 nt, Artificial Sequence
  Description of Artificial Sequence: Synthetic oligonucleotide
aaacaaccauaaaagugcg

SEQ ID NO: 1086930 - RNA, 19 nt, Artificial Sequence
  Description of Artificial Sequence: Synthetic oligonucleotide
gagugcuuugcucuuaggc

SEQ ID NO: 1086931 - RNA, 19 nt, Artificial Sequence
  Description of Artificial Sequence: Synthetic oligonucleotide
ucucugaauauaucuaccu

SEQ ID NO: 1086932 - RNA, 19 nt, Artificial Sequence
  Description of Artificial Sequence: Synthetic oligonucleotide
uauaucuaccuuugcauaa

SEQ ID NO: 1086933 - RNA, 19 nt, Artificial Sequence
  Description of Artificial Sequence: Synthetic oligonucleotide
uguaagagauacacgugga

SEQ ID NO: 1086934 - RNA, 19 nt, Artificial Sequence
  Description of Artificial Sequence: Synthetic oligonucleotide
uaugcuagguuuuagcauu

SEQ ID NO: 1086935 - RNA, 19 nt, Artificial Sequence
  Description of Artificial Sequence: Synthetic oligonucleotide
uuaccauuugucuuugggu

SEQ ID NO: 1086936 - RNA, 19 nt, Artificial Sequence
  Description of Artificial Sequence: Synthetic oligonucleotide
ugcaucuuaaacugcaaaa

SEQ ID NO: 1086937 - RNA, 19 nt, Artificial Sequence
  Description of Artificial Sequence: Synthetic oligonucleotide
uauaaauaggguaguuuau

SEQ ID NO: 1086938 - RNA, 19 nt, Artificial Sequence
  Description of Artificial Sequence: Synthetic oligonucleotide
ggaaagagauaucaaaaug

SEQ ID NO: 1086939 - RNA, 19 nt, Artificial Sequence
  Description of Artificial Sequence: Synthetic oligonucleotide
agcaauaguaacuugcaua

SEQ ID NO: 1086940 - RNA, 19 nt, Artificial Sequence
  Description of Artificial Sequence: Synthetic oligonucleotide
cuacaaaucagaucugauc

SEQ ID NO: 1086941 - RNA, 19 nt, Artificial Sequence
  Description of Artificial Sequence: Synthetic oligonucleotide
auaaggguaagugaugaug

SEQ ID NO: 1086942 - RNA, 19 nt, Artificial Sequence
  Description of Artificial Sequence: Synthetic oligonucleotide
agucuauaaagaaacacca

SEQ ID NO: 1086943 - RNA, 19 nt, Artificial Sequence
  Description of Artificial Sequence: Synthetic oligonucleotide
aaggucuuaguucugggua

SEQ ID NO: 1086944 - RNA, 19 nt, Artificial Sequence
  Description of Artificial Sequence: Synthetic oligonucleotide
uaccauuugucuuuggguc

SEQ ID NO: 1086945 - RNA, 19 nt, Artificial Sequence
  Description of Artificial Sequence: Synthetic oligonucleotide
ugaauauaucuaccuuugc

SEQ ID NO: 1086946 - RNA, 19 nt, Artificial Sequence
  Description of Artificial Sequence: Synthetic oligonucleotide
uuuaauacugaaguaccuc

SEQ ID NO: 1086947 - RNA, 19 nt, Artificial Sequence
  Description of Artificial Sequence: Synthetic oligonucleotide
ugauuguguaucuuugggu

SEQ ID NO: 1086948 - RNA, 19 nt, Artificial Sequence
  Description of Artificial Sequence: Synthetic oligonucleotide
uacacguggagccuugggc

SEQ ID NO: 1086949 - RNA, 19 nt, Artificial Sequence
  Description of Artificial Sequence: Synthetic oligonucleotide
uugggcagacacaugaacu

SEQ ID NO: 1086950 - RNA, 19 nt, Artificial Sequence
  Description of Artificial Sequence: Synthetic oligonucleotide
uguaucuuuggguucugca

SEQ ID NO: 1086951 - RNA, 19 nt, Artificial Sequence
  Description of Artificial Sequence: Synthetic oligonucleotide
uuaguucuggguacugcag

SEQ ID NO: 1086952 - RNA, 19 nt, Artificial Sequence
  Description of Artificial Sequence: Synthetic oligonucleotide
acaaacaucaaugcagaug

SEQ ID NO: 1086953 - RNA, 19 nt, Artificial Sequence
  Description of Artificial Sequence: Synthetic oligonucleotide
uguauaccucacaaaauua

SEQ ID NO: 1086954 - RNA, 19 nt, Artificial Sequence
  Description of Artificial Sequence: Synthetic oligonucleotide
aggucuuaguucuggguac

SEQ ID NO: 1086955 - RNA, 19 nt, Artificial Sequence
  Description of Artificial Sequence: Synthetic oligonucleotide
caagacuugguuccuacag

SEQ ID NO: 1086956 - RNA, 19 nt, Artificial Sequence
  Description of Artificial Sequence: Synthetic oligonucleotide
ugcauaucauauagauuag

SEQ ID NO: 1086957 - RNA, 19 nt, Artificial Sequence
  Description of Artificial Sequence: Synthetic oligonucleotide
aaaagugcgcugcuuagua

SEQ ID NO: 1086958 - RNA, 19 nt, Artificial Sequence
  Description of Artificial Sequence: Synthetic oligonucleotide
auaucauauagauuagaua

SEQ ID NO: 1086959 - RNA, 19 nt, Artificial Sequence
  Description of Artificial Sequence: Synthetic oligonucleotide
cuagguuuuagcauuuuga

SEQ ID NO: 1086960 - RNA, 19 nt, Artificial Sequence
  Description of Artificial Sequence: Synthetic oligonucleotide
uucuuuagcacggagcaac

SEQ ID NO: 1086961 - RNA, 19 nt, Artificial Sequence
  Description of Artificial Sequence: Synthetic oligonucleotide
uaacgcauagucuuucuaa

SEQ ID NO: 1086962 - RNA, 19 nt, Artificial Sequence
  Description of Artificial Sequence: Synthetic oligonucleotide
gaauguauaucagggguug

SEQ ID NO: 1086963 - RNA, 19 nt, Artificial Sequence
  Description of Artificial Sequence: Synthetic oligonucleotide
auuagauacaugauucaug

SEQ ID NO: 1086964 - RNA, 19 nt, Artificial Sequence
  Description of Artificial Sequence: Synthetic oligonucleotide
uccuagaaagcuuuggcua

SEQ ID NO: 1086965 - RNA, 19 nt, Artificial Sequence
  Description of Artificial Sequence: Synthetic oligonucleotide
uuccuagaaagcuuuggcu

SEQ ID NO: 1086966 - RNA, 19 nt, Artificial Sequence
  Description of Artificial Sequence: Synthetic oligonucleotide
auaaacugcucacacuaga

SEQ ID NO: 1086967 - RNA, 19 nt, Artificial Sequence
  Description of Artificial Sequence: Synthetic oligonucleotide
accugaaacacuguaagcu

SEQ ID NO: 1086968 - RNA, 19 nt, Artificial Sequence
  Description of Artificial Sequence: Synthetic oligonucleotide
accuuuaggagacaucgcu

SEQ ID NO: 1086969 - RNA, 19 nt, Artificial Sequence
  Description of Artificial Sequence: Synthetic oligonucleotide
ucuaaggcauuaugcuagg

SEQ ID NO: 1086970 - RNA, 19 nt, Artificial Sequence
  Description of Artificial Sequence: Synthetic oligonucleotide
uuuuacccuuguaauaauc

SEQ ID NO: 1086971 - RNA, 19 nt, Artificial Sequence
  Description of Artificial Sequence: Synthetic oligonucleotide
cacaauauguauaccucac

SEQ ID NO: 1086972 - RNA, 19 nt, Artificial Sequence
  Description of Artificial Sequence: Synthetic oligonucleotide
aaggucucaagucuacaaa

SEQ ID NO: 1086973 - RNA, 19 nt, Artificial Sequence
  Description of Artificial Sequence: Synthetic oligonucleotide
aucuaauuuaauacugaag

SEQ ID NO: 1086974 - RNA, 19 nt, Artificial Sequence
  Description of Artificial Sequence: Synthetic oligonucleotide
uuaugcuagguuuuagcau

SEQ ID NO: 1086975 - RNA, 19 nt, Artificial Sequence
  Description of Artificial Sequence: Synthetic oligonucleotide
uucaaucccacaauaugua

SEQ ID NO: 1086976 - RNA, 19 nt, Artificial Sequence
  Description of Artificial Sequence: Synthetic oligonucleotide
acaccaacaauuaauggcu

SEQ ID NO: 1086977 - RNA, 19 nt, Artificial Sequence
  Description of Artificial Sequence: Synthetic oligonucleotide
agauuagauacaugauuca

SEQ ID NO: 1086978 - RNA, 19 nt, Artificial Sequence
  Description of Artificial Sequence: Synthetic oligonucleotide
agcaaauagcaucagcaaa

SEQ ID NO: 1086979 - RNA, 19 nt, Artificial Sequence
  Description of Artificial Sequence: Synthetic oligonucleotide
gaugaacaaagugauguuc

SEQ ID NO: 1086980 - RNA, 19 nt, Artificial Sequence
  Description of Artificial Sequence: Synthetic oligonucleotide
ugcuuucaauuauuacagg

SEQ ID NO: 1086981 - RNA, 19 nt, Artificial Sequence
  Description of Artificial Sequence: Synthetic oligonucleotide
aagaaccauaguuaauaua

SEQ ID NO: 1086982 - RNA, 19 nt, Artificial Sequence
  Description of Artificial Sequence: Synthetic oligonucleotide
uuugcucuuaggcagcaua

SEQ ID NO: 1086983 - RNA, 19 nt, Artificial Sequence
  Description of Artificial Sequence: Synthetic oligonucleotide
uuagcacggagcaacacuu

SEQ ID NO: 1086984 - RNA, 19 nt, Artificial Sequence
  Description of Artificial Sequence: Synthetic oligonucleotide
acuguaagcuuucuccuga

SEQ ID NO: 1086985 - RNA, 19 nt, Artificial Sequence
  Description of Artificial Sequence: Synthetic oligonucleotide
ggagacaucgcuaugaaca

SEQ ID NO: 1086986 - RNA, 19 nt, Artificial Sequence
  Description of Artificial Sequence: Synthetic oligonucleotide
ugugucacacccauaugaa

SEQ ID NO: 1086987 - RNA, 19 nt, Artificial Sequence
  Description of Artificial Sequence: Synthetic oligonucleotide
acgcauagucuuucuaagg

SEQ ID NO: 1086988 - RNA, 19 nt, Artificial Sequence
  Description of Artificial Sequence: Synthetic oligonucleotide
uacuaccauacaaacacua

SEQ ID NO: 1086989 - RNA, 19 nt, Artificial Sequence
  Description of Artificial Sequence: Synthetic oligonucleotide
augcagaugaacaaaguga

SEQ ID NO: 1086990 - RNA, 19 nt, Artificial Sequence
  Description of Artificial Sequence: Synthetic oligonucleotide
cagcuauguaggaauauac

SEQ ID NO: 1086991 - RNA, 19 nt, Artificial Sequence
  Description of Artificial Sequence: Synthetic oligonucleotide
auauaucuaccuuugcaua

SEQ ID NO: 1086992 - RNA, 19 nt, Artificial Sequence
  Description of Artificial Sequence: Synthetic oligonucleotide
uaacaucaaauaagcaaau

SEQ ID NO: 1086993 - RNA, 19 nt, Artificial Sequence
  Description of Artificial Sequence: Synthetic oligonucleotide
cuaugaacaucuaauuuaa

SEQ ID NO: 1086994 - RNA, 19 nt, Artificial Sequence
  Description of Artificial Sequence: Synthetic oligonucleotide
guauaucagggguugagga

SEQ ID NO: 1086995 - RNA, 19 nt, Artificial Sequence
  Description of Artificial Sequence: Synthetic oligonucleotide
agaaucucaagguguagaa

SEQ ID NO: 1086996 - RNA, 19 nt, Artificial Sequence
  Description of Artificial Sequence: Synthetic oligonucleotide
gguuguaagagauacacgu

SEQ ID NO: 1086997 - RNA, 19 nt, Artificial Sequence
  Description of Artificial Sequence: Synthetic oligonucleotide
uuuaggagacaucgcuaug

SEQ ID NO: 1086998 - RNA, 19 nt, Artificial Sequence
  Description of Artificial Sequence: Synthetic oligonucleotide
cucuuaggcagcauacuac

SEQ ID NO: 1086999 - RNA, 19 nt, Artificial Sequence
  Description of Artificial Sequence: Synthetic oligonucleotide
acaauauguauaccucaca

SEQ ID NO: 1087000 - RNA, 19 nt, Artificial Sequence
  Description of Artificial Sequence: Synthetic oligonucleotide
acacauaucucaggauagc

SEQ ID NO: 1087001 - RNA, 19 nt, Artificial Sequence
  Description of Artificial Sequence: Synthetic oligonucleotide
cagacacaugaacuggugg

SEQ ID NO: 1087002 - RNA, 19 nt, Artificial Sequence
  Description of Artificial Sequence: Synthetic oligonucleotide
aacauaaggguaagugaug

SEQ ID NO: 1087003 - RNA, 19 nt, Artificial Sequence
  Description of Artificial Sequence: Synthetic oligonucleotide
gugaugaugcacuuauuca

SEQ ID NO: 1087004 - RNA, 19 nt, Artificial Sequence
  Description of Artificial Sequence: Synthetic oligonucleotide
uaauacugaaguaccucau

SEQ ID NO: 1087005 - RNA, 19 nt, Artificial Sequence
  Description of Artificial Sequence: Synthetic oligonucleotide
auacauuggacagcuaugu

SEQ ID NO: 1087006 - RNA, 19 nt, Artificial Sequence
  Description of Artificial Sequence: Synthetic oligonucleotide
cacccugccaggaauaaac

SEQ ID NO: 1087007 - RNA, 19 nt, Artificial Sequence
  Description of Artificial Sequence: Synthetic oligonucleotide
uugcaucuuaaacugcaaa

SEQ ID NO: 1087008 - RNA, 19 nt, Artificial Sequence
  Description of Artificial Sequence: Synthetic oligonucleotide
auaucucaggauagcaaac

SEQ ID NO: 1087009 - RNA, 19 nt, Artificial Sequence
  Description of Artificial Sequence: Synthetic oligonucleotide
uacccuuguaauaaucuuu

SEQ ID NO: 1087010 - RNA, 19 nt, Artificial Sequence
  Description of Artificial Sequence: Synthetic oligonucleotide
agccacuacaguaauuuuc

SEQ ID NO: 1087011 - RNA, 19 nt, Artificial Sequence
  Description of Artificial Sequence: Synthetic oligonucleotide
cauaugaacuccauuuuaa

SEQ ID NO: 1087012 - RNA, 19 nt, Artificial Sequence
  Description of Artificial Sequence: Synthetic oligonucleotide
cauaaacugcucacacuag

SEQ ID NO: 1087013 - RNA, 19 nt, Artificial Sequence
  Description of Artificial Sequence: Synthetic oligonucleotide
acauaaggguaagugauga

SEQ ID NO: 1087014 - RNA, 19 nt, Artificial Sequence
  Description of Artificial Sequence: Synthetic oligonucleotide
aacgucucuguuccuagaa

SEQ ID NO: 1087015 - RNA, 19 nt, Artificial Sequence
  Description of Artificial Sequence: Synthetic oligonucleotide
aaucacaaccugaaacacu

SEQ ID NO: 1087016 - RNA, 19 nt, Artificial Sequence
  Description of Artificial Sequence: Synthetic oligonucleotide
ugcauaaacugcucacacu

SEQ ID NO: 1087017 - RNA, 19 nt, Artificial Sequence
  Description of Artificial Sequence: Synthetic oligonucleotide
gaagugcuguuccuuggcc

SEQ ID NO: 1087018 - RNA, 19 nt, Artificial Sequence
  Description of Artificial Sequence: Synthetic oligonucleotide
aggagacaucgcuaugaac

SEQ ID NO: 1087019 - RNA, 19 nt, Artificial Sequence
  Description of Artificial Sequence: Synthetic oligonucleotide
aucgcuaugaacaucuaau

SEQ ID NO: 1087020 - RNA, 19 nt, Artificial Sequence
  Description of Artificial Sequence: Synthetic oligonucleotide
cuuaguaacgcauagucuu

SEQ ID NO: 1087021 - RNA, 19 nt, Artificial Sequence
  Description of Artificial Sequence: Synthetic oligonucleotide
acacuguaagcuuucuccu

SEQ ID NO: 1087022 - RNA, 19 nt, Artificial Sequence
  Description of Artificial Sequence: Synthetic oligonucleotide
auacaugauucaugagcag

SEQ ID NO: 1087023 - RNA, 19 nt, Artificial Sequence
  Description of Artificial Sequence: Synthetic oligonucleotide
cuuaguucuggguacugca

SEQ ID NO: 1087024 - RNA, 19 nt, Artificial Sequence
  Description of Artificial Sequence: Synthetic oligonucleotide
cuaauuuaauacugaagua

SEQ ID NO: 1087025 - RNA, 19 nt, Artificial Sequence
  Description of Artificial Sequence: Synthetic oligonucleotide
gauuguguaucuuuggguu

SEQ ID NO: 1087026 - RNA, 19 nt, Artificial Sequence
  Description of Artificial Sequence: Synthetic oligonucleotide
acacguggagccuugggca

SEQ ID NO: 1087027 - RNA, 19 nt, Artificial Sequence
  Description of Artificial Sequence: Synthetic oligonucleotide
gacacaugaacugguggcc

SEQ ID NO: 1087028 - RNA, 19 nt, Artificial Sequence
  Description of Artificial Sequence: Synthetic oligonucleotide
acuaccauacaaacacuag

SEQ ID NO: 1087029 - RNA, 19 nt, Artificial Sequence
  Description of Artificial Sequence: Synthetic oligonucleotide
aggucucaagucuacaaau

SEQ ID NO: 1087030 - RNA, 19 nt, Artificial Sequence
  Description of Artificial Sequence: Synthetic oligonucleotide
auguaggaauauacaagac

SEQ ID NO: 1087031 - RNA, 19 nt, Artificial Sequence
  Description of Artificial Sequence: Synthetic oligonucleotide
ucuuuagcacggagcaaca

SEQ ID NO: 1087032 - RNA, 19 nt, Artificial Sequence
  Description of Artificial Sequence: Synthetic oligonucleotide
aggaacuguacaaauaaaa

SEQ ID NO: 1087033 - RNA, 19 nt, Artificial Sequence
  Description of Artificial Sequence: Synthetic oligonucleotide
uuaguaacgcauagucuuu

SEQ ID NO: 1087034 - RNA, 19 nt, Artificial Sequence
  Description of Artificial Sequence: Synthetic oligonucleotide
auuuaauacugaaguaccu

SEQ ID NO: 1087035 - RNA, 19 nt, Artificial Sequence
  Description of Artificial Sequence: Synthetic oligonucleotide
auaaauaggguaguuuaua

SEQ ID NO: 1087036 - RNA, 19 nt, Artificial Sequence
  Description of Artificial Sequence: Synthetic oligonucleotide
ucuuaguucuggguacugc

SEQ ID NO: 1087037 - RNA, 19 nt, Artificial Sequence
  Description of Artificial Sequence: Synthetic oligonucleotide
auguauaucagggguugag

SEQ ID NO: 1087038 - RNA, 19 nt, Artificial Sequence
  Description of Artificial Sequence: Synthetic oligonucleotide
aaaauugauuguguaucuu

SEQ ID NO: 1087039 - RNA, 19 nt, Artificial Sequence
  Description of Artificial Sequence: Synthetic oligonucleotide
uaggguaguuuauauguuu

SEQ ID NO: 1087040 - RNA, 19 nt, Artificial Sequence
  Description of Artificial Sequence: Synthetic oligonucleotide
caguuguucugaaacugac

SEQ ID NO: 1087041 - RNA, 19 nt, Artificial Sequence
  Description of Artificial Sequence: Synthetic oligonucleotide
accauuugucuuuggguca

SEQ ID NO: 1087042 - RNA, 19 nt, Artificial Sequence
  Description of Artificial Sequence: Synthetic oligonucleotide
ugcguucaaucccacaaua

SEQ ID NO: 1087043 - RNA, 19 nt, Artificial Sequence
  Description of Artificial Sequence: Synthetic oligonucleotide
agcaaagcaauaguaacuu

SEQ ID NO: 1087044 - RNA, 19 nt, Artificial Sequence
  Description of Artificial Sequence: Synthetic oligonucleotide
ugggucauaucucuuucua

SEQ ID NO: 1087045 - RNA, 19 nt, Artificial Sequence
  Description of Artificial Sequence: Synthetic oligonucleotide
aacaucaaauaagcaaaua

SEQ ID NO: 1087046 - RNA, 19 nt, Artificial Sequence
  Description of Artificial Sequence: Synthetic oligonucleotide
gcuaaugagauauuauaaa

SEQ ID NO: 1087047 - RNA, 19 nt, Artificial Sequence
  Description of Artificial Sequence: Synthetic oligonucleotide
aaagugcgcugcuuaguaa

SEQ ID NO: 1087048 - RNA, 19 nt, Artificial Sequence
  Description of Artificial Sequence: Synthetic oligonucleotide
auacacguggagccuuggg

SEQ ID NO: 1087049 - RNA, 19 nt, Artificial Sequence
  Description of Artificial Sequence: Synthetic oligonucleotide
guaucuuuggguucugcaa

SEQ ID NO: 1087050 - RNA, 19 nt, Artificial Sequence
  Description of Artificial Sequence: Synthetic oligonucleotide
aaacugacacagugggcaa

SEQ ID NO: 1087051 - RNA, 19 nt, Artificial Sequence
  Description of Artificial Sequence: Synthetic oligonucleotide
agauauauagagagauaca

SEQ ID NO: 1087052 - RNA, 19 nt, Artificial Sequence
  Description of Artificial Sequence: Synthetic oligonucleotide
aguaacgcauagucuuucu

SEQ ID NO: 1087053 - RNA, 19 nt, Artificial Sequence
  Description of Artificial Sequence: Synthetic oligonucleotide
uccacaaucuguagauaua

SEQ ID NO: 1087054 - RNA, 19 nt, Artificial Sequence
  Description of Artificial Sequence: Synthetic oligonucleotide
aaaucaagacuugguuccu

SEQ ID NO: 1087055 - RNA, 19 nt, Artificial Sequence
  Description of Artificial Sequence: Synthetic oligonucleotide
gcggcugcauaucauauag

SEQ ID NO: 1087056 - RNA, 19 nt, Artificial Sequence
  Description of Artificial Sequence: Synthetic oligonucleotide
aucaaugcagaugaacaaa

SEQ ID NO: 1087057 - RNA, 19 nt, Artificial Sequence
  Description of Artificial Sequence: Synthetic oligonucleotide
caaccauaaaagugcgcug

SEQ ID NO: 1087058 - RNA, 19 nt, Artificial Sequence
  Description of Artificial Sequence: Synthetic oligonucleotide
uuuugcguucaaucccaca

SEQ ID NO: 1087059 - RNA, 19 nt, Artificial Sequence
  Description of Artificial Sequence: Synthetic oligonucleotide
aauguauaucagggguuga

SEQ ID NO: 1087060 - RNA, 19 nt, Artificial Sequence
  Description of Artificial Sequence: Synthetic oligonucleotide
cauaaaagugcgcugcuua

SEQ ID NO: 1087061 - RNA, 19 nt, Artificial Sequence
  Description of Artificial Sequence: Synthetic oligonucleotide
uuugucuuugggucauauc

SEQ ID NO: 1087062 - RNA, 19 nt, Artificial Sequence
  Description of Artificial Sequence: Synthetic oligonucleotide
agaugaacaaagugauguu

SEQ ID NO: 1087063 - RNA, 19 nt, Artificial Sequence
  Description of Artificial Sequence: Synthetic oligonucleotide
ucgcuaugaacaucuaauu

SEQ ID NO: 1087064 - RNA, 19 nt, Artificial Sequence
  Description of Artificial Sequence: Synthetic oligonucleotide
uaaaagugcgcugcuuagu

SEQ ID NO: 1087065 - RNA, 19 nt, Artificial Sequence
  Description of Artificial Sequence: Synthetic oligonucleotide
agcuauguaggaauauaca

SEQ ID NO: 1087066 - RNA, 19 nt, Artificial Sequence
  Description of Artificial Sequence: Synthetic oligonucleotide
auauagagagauacaaaua

SEQ ID NO: 1087067 - RNA, 19 nt, Artificial Sequence
  Description of Artificial Sequence: Synthetic oligonucleotide
uugggucauaucucuuucu

SEQ ID NO: 1087068 - RNA, 19 nt, Artificial Sequence
  Description of Artificial Sequence: Synthetic oligonucleotide
aaacaccuuuaggagacau

SEQ ID NO: 1087069 - RNA, 19 nt, Artificial Sequence
  Description of Artificial Sequence: Synthetic oligonucleotide
gcugcuuaguaacgcauag

SEQ ID NO: 1087070 - RNA, 19 nt, Artificial Sequence
  Description of Artificial Sequence: Synthetic oligonucleotide
agagagauacaaauauaaa

SEQ ID NO: 1087071 - RNA, 19 nt, Artificial Sequence
  Description of Artificial Sequence: Synthetic oligonucleotide
ggauagcaaacuuccauga

SEQ ID NO: 1087072 - RNA, 19 nt, Artificial Sequence
  Description of Artificial Sequence: Synthetic oligonucleotide
agguuguaagagauacacg

SEQ ID NO: 1087073 - RNA, 19 nt, Artificial Sequence
  Description of Artificial Sequence: Synthetic oligonucleotide
accauaaaagugcgcugcu

SEQ ID NO: 1087074 - RNA, 19 nt, Artificial Sequence
  Description of Artificial Sequence: Synthetic oligonucleotide
gcaaacuuccaugaggaac

SEQ ID NO: 1087075 - RNA, 19 nt, Artificial Sequence
  Description of Artificial Sequence: Synthetic oligonucleotide
gucacacccauaugaacuc

SEQ ID NO: 1087076 - RNA, 19 nt, Artificial Sequence
  Description of Artificial Sequence: Synthetic oligonucleotide
cacuguaagcuuucuccug

SEQ ID NO: 1087077 - RNA, 19 nt, Artificial Sequence
  Description of Artificial Sequence: Synthetic oligonucleotide
acaugauucaugagcagaa

SEQ ID NO: 1087078 - RNA, 19 nt, Artificial Sequence
  Description of Artificial Sequence: Synthetic oligonucleotide
agucaacucugcuuugaaa

SEQ ID NO: 1087079 - RNA, 19 nt, Artificial Sequence
  Description of Artificial Sequence: Synthetic oligonucleotide
cagcauacuaccauacaaa

SEQ ID NO: 1087080 - RNA, 19 nt, Artificial Sequence
  Description of Artificial Sequence: Synthetic oligonucleotide
cuuucaauuauuacagguu

SEQ ID NO: 1087081 - RNA, 19 nt, Artificial Sequence
  Description of Artificial Sequence: Synthetic oligonucleotide
gauuagauacaugauucau

SEQ ID NO: 1087082 - RNA, 19 nt, Artificial Sequence
  Description of Artificial Sequence: Synthetic oligonucleotide
uacauuggacagcuaugua

SEQ ID NO: 1087083 - RNA, 19 nt, Artificial Sequence
  Description of Artificial Sequence: Synthetic oligonucleotide
caaaauugauuguguaucu

SEQ ID NO: 1087084 - RNA, 19 nt, Artificial Sequence
  Description of Artificial Sequence: Synthetic oligonucleotide
ggucauaucucuuucuaua

SEQ ID NO: 1087085 - RNA, 19 nt, Artificial Sequence
  Description of Artificial Sequence: Synthetic oligonucleotide
gaagaaccauaguuaauau

SEQ ID NO: 1087086 - RNA, 19 nt, Artificial Sequence
  Description of Artificial Sequence: Synthetic oligonucleotide
cuguagauauauagagaga

SEQ ID NO: 1087087 - RNA, 19 nt, Artificial Sequence
  Description of Artificial Sequence: Synthetic oligonucleotide
aucccacaauauguauacc

SEQ ID NO: 1087088 - RNA, 19 nt, Artificial Sequence
  Description of Artificial Sequence: Synthetic oligonucleotide
uuaauggcuuaaguugcau

SEQ ID NO: 1087089 - RNA, 19 nt, Artificial Sequence
  Description of Artificial Sequence: Synthetic oligonucleotide
auuaauggcuuaaguugca

SEQ ID NO: 1087090 - RNA, 19 nt, Artificial Sequence
  Description of Artificial Sequence: Synthetic oligonucleotide
gauacacguggagccuugg

SEQ ID NO: 1087091 - RNA, 19 nt, Artificial Sequence
  Description of Artificial Sequence: Synthetic oligonucleotide
accaacaauuaauggcuua

SEQ ID NO: 1087092 - RNA, 19 nt, Artificial Sequence
  Description of Artificial Sequence: Synthetic oligonucleotide
agugcgcugcuuaguaacg

SEQ ID NO: 1087093 - RNA, 19 nt, Artificial Sequence
  Description of Artificial Sequence: Synthetic oligonucleotide
auagagagauacaaauaua

SEQ ID NO: 1087094 - RNA, 19 nt, Artificial Sequence
  Description of Artificial Sequence: Synthetic oligonucleotide
agaauguauaucagggguu

SEQ ID NO: 1087095 - RNA, 19 nt, Artificial Sequence
  Description of Artificial Sequence: Synthetic oligonucleotide
gugucacacccauaugaac

SEQ ID NO: 1087096 - RNA, 19 nt, Artificial Sequence
  Description of Artificial Sequence: Synthetic oligonucleotide
gucuacaaaucagaucuga

SEQ ID NO: 1087097 - RNA, 19 nt, Artificial Sequence
  Description of Artificial Sequence: Synthetic oligonucleotide
aagccacuacaguaauuuu

SEQ ID NO: 1087098 - RNA, 19 nt, Artificial Sequence
  Description of Artificial Sequence: Synthetic oligonucleotide
gcuagguuuuagcauuuug

SEQ ID NO: 1087099 - RNA, 19 nt, Artificial Sequence
  Description of Artificial Sequence: Synthetic oligonucleotide
cuggguacugcaguuguuc

SEQ ID NO: 1087100 - RNA, 19 nt, Artificial Sequence
  Description of Artificial Sequence: Synthetic oligonucleotide
caaucccacaauauguaua

SEQ ID NO: 1087101 - RNA, 19 nt, Artificial Sequence
  Description of Artificial Sequence: Synthetic oligonucleotide
ccuguaguaagaaacuuaa

SEQ ID NO: 1087102 - RNA, 19 nt, Artificial Sequence
  Description of Artificial Sequence: Synthetic oligonucleotide
agacaucgcuaugaacauc

SEQ ID NO: 1087103 - RNA, 19 nt, Artificial Sequence
  Description of Artificial Sequence: Synthetic oligonucleotide
cauaguuaauauauugcuu

SEQ ID NO: 1087104 - RNA, 19 nt, Artificial Sequence
  Description of Artificial Sequence: Synthetic oligonucleotide
uaguaacgcauagucuuuc

SEQ ID NO: 1087105 - RNA, 19 nt, Artificial Sequence
  Description of Artificial Sequence: Synthetic oligonucleotide
ucuuugggucauaucucuu

SEQ ID NO: 1087106 - RNA, 19 nt, Artificial Sequence
  Description of Artificial Sequence: Synthetic oligonucleotide
cuuaggcagcauacuacca

SEQ ID NO: 1087107 - RNA, 19 nt, Artificial Sequence
  Description of Artificial Sequence: Synthetic oligonucleotide
cacauaucucaggauagca

SEQ ID NO: 1087108 - RNA, 19 nt, Artificial Sequence
  Description of Artificial Sequence: Synthetic oligonucleotide
cagaaucucaagguguaga

SEQ ID NO: 1087109 - RNA, 19 nt, Artificial Sequence
  Description of Artificial Sequence: Synthetic oligonucleotide
cguucaaucccacaauaug

SEQ ID NO: 1087110 - RNA, 19 nt, Artificial Sequence
  Description of Artificial Sequence: Synthetic oligonucleotide
ugcucuuaggcagcauacu

SEQ ID NO: 1087111 - RNA, 19 nt, Artificial Sequence
  Description of Artificial Sequence: Synthetic oligonucleotide
cccacaauauguauaccuc

SEQ ID NO: 1087112 - RNA, 19 nt, Artificial Sequence
  Description of Artificial Sequence: Synthetic oligonucleotide
cagcaaagcaauaguaacu

SEQ ID NO: 1087113 - RNA, 19 nt, Artificial Sequence
  Description of Artificial Sequence: Synthetic oligonucleotide
gucauaucucuuucuauau

SEQ ID NO: 1087114 - RNA, 19 nt, Artificial Sequence
  Description of Artificial Sequence: Synthetic oligonucleotide
gcaaagcaauaguaacuug

SEQ ID NO: 1087115 - RNA, 19 nt, Artificial Sequence
  Description of Artificial Sequence: Synthetic oligonucleotide
aguggaucugugccuccca

SEQ ID NO: 1087116 - RNA, 19 nt, Artificial Sequence
  Description of Artificial Sequence: Synthetic oligonucleotide
guauaccucacaaaauuau

SEQ ID NO: 1087117 - RNA, 19 nt, Artificial Sequence
  Description of Artificial Sequence: Synthetic oligonucleotide
gcucacacuagaaauacaa

SEQ ID NO: 1087118 - RNA, 19 nt, Artificial Sequence
  Description of Artificial Sequence: Synthetic oligonucleotide
caaauauaaauaggguagu

SEQ ID NO: 1087119 - RNA, 19 nt, Artificial Sequence
  Description of Artificial Sequence: Synthetic oligonucleotide
uagucuuucuaagguuuau

SEQ ID NO: 1087120 - RNA, 19 nt, Artificial Sequence
  Description of Artificial Sequence: Synthetic oligonucleotide
cuuuagcacggagcaacac

SEQ ID NO: 1087121 - RNA, 19 nt, Artificial Sequence
  Description of Artificial Sequence: Synthetic oligonucleotide
accuguaguaagaaacuua

SEQ ID NO: 1087122 - RNA, 19 nt, Artificial Sequence
  Description of Artificial Sequence: Synthetic oligonucleotide
acgucucuguuccuagaaa

SEQ ID NO: 1087123 - RNA, 19 nt, Artificial Sequence
  Description of Artificial Sequence: Synthetic oligonucleotide
aggguaguuuauauguuuu

SEQ ID NO: 1087124 - RNA, 19 nt, Artificial Sequence
  Description of Artificial Sequence: Synthetic oligonucleotide
guaacgcauagucuuucua

SEQ ID NO: 1087125 - RNA, 19 nt, Artificial Sequence
  Description of Artificial Sequence: Synthetic oligonucleotide
agucuuucuaagguuuauu

SEQ ID NO: 1087126 - RNA, 19 nt, Artificial Sequence
  Description of Artificial Sequence: Synthetic oligonucleotide
uucaugugucacacccaua

SEQ ID NO: 1087127 - RNA, 19 nt, Artificial Sequence
  Description of Artificial Sequence: Synthetic oligonucleotide
guucaugugucacacccau

SEQ ID NO: 1087128 - RNA, 19 nt, Artificial Sequence
  Description of Artificial Sequence: Synthetic oligonucleotide
agcaaacuuccaugaggaa

SEQ ID NO: 1087129 - RNA, 19 nt, Artificial Sequence
  Description of Artificial Sequence: Synthetic oligonucleotide
ccacaauauguauaccuca

SEQ ID NO: 1087130 - RNA, 19 nt, Artificial Sequence
  Description of Artificial Sequence: Synthetic oligonucleotide
auaggguaguuuauauguu

SEQ ID NO: 1087131 - RNA, 19 nt, Artificial Sequence
  Description of Artificial Sequence: Synthetic oligonucleotide
auugcaucuuaaacugcaa

SEQ ID NO: 1087132 - RNA, 19 nt, Artificial Sequence
  Description of Artificial Sequence: Synthetic oligonucleotide
gguuauucauucuguaaau

SEQ ID NO: 1087133 - RNA, 19 nt, Artificial Sequence
  Description of Artificial Sequence: Synthetic oligonucleotide
gccaggaauaaacaaauuu

SEQ ID NO: 1087134 - RNA, 19 nt, Artificial Sequence
  Description of Artificial Sequence: Synthetic oligonucleotide
uuugagguucuugcacaua

SEQ ID NO: 1087135 - RNA, 19 nt, Artificial Sequence
  Description of Artificial Sequence: Synthetic oligonucleotide
caggauagcaaacuuccau

SEQ ID NO: 1087136 - RNA, 19 nt, Artificial Sequence
  Description of Artificial Sequence: Synthetic oligonucleotide
auagucuuucuaagguuua

SEQ ID NO: 1087137 - RNA, 19 nt, Artificial Sequence
  Description of Artificial Sequence: Synthetic oligonucleotide
acagguuguaagagauaca

SEQ ID NO: 1087138 - RNA, 19 nt, Artificial Sequence
  Description of Artificial Sequence: Synthetic oligonucleotide
agcggcugcauaucauaua

SEQ ID NO: 1087139 - RNA, 19 nt, Artificial Sequence
  Description of Artificial Sequence: Synthetic oligonucleotide
caaugcagaugaacaaagu

SEQ ID NO: 1087140 - RNA, 19 nt, Artificial Sequence
  Description of Artificial Sequence: Synthetic oligonucleotide
gcauuaugcuagguuuuag

SEQ ID NO: 1087141 - RNA, 19 nt, Artificial Sequence
  Description of Artificial Sequence: Synthetic oligonucleotide
gcauacuaccauacaaaca

SEQ ID NO: 1087142 - RNA, 19 nt, Artificial Sequence
  Description of Artificial Sequence: Synthetic oligonucleotide
cuacagcggcugcauauca

SEQ ID NO: 1087143 - RNA, 19 nt, Artificial Sequence
  Description of Artificial Sequence: Synthetic oligonucleotide
aggagaauugaaggucuua

SEQ ID NO: 1087144 - RNA, 19 nt, Artificial Sequence
  Description of Artificial Sequence: Synthetic oligonucleotide
gcauaucauauagauuaga

SEQ ID NO: 1087145 - RNA, 19 nt, Artificial Sequence
  Description of Artificial Sequence: Synthetic oligonucleotide
cagaugguuuaccauuugu

SEQ ID NO: 1087146 - RNA, 19 nt, Artificial Sequence
  Description of Artificial Sequence: Synthetic oligonucleotide
gucuuaguucuggguacug

SEQ ID NO: 1087147 - RNA, 19 nt, Artificial Sequence
  Description of Artificial Sequence: Synthetic oligonucleotide
gugcgcugcuuaguaacgc

SEQ ID NO: 1087148 - RNA, 19 nt, Artificial Sequence
  Description of Artificial Sequence: Synthetic oligonucleotide
guaagugaugaugcacuua

SEQ ID NO: 1087149 - RNA, 19 nt, Artificial Sequence
  Description of Artificial Sequence: Synthetic oligonucleotide
caucacuguucaauaacau

SEQ ID NO: 1087150 - RNA, 19 nt, Artificial Sequence
  Description of Artificial Sequence: Synthetic oligonucleotide
ggcagcauacuaccauaca

SEQ ID NO: 1087151 - RNA, 19 nt, Artificial Sequence
  Description of Artificial Sequence: Synthetic oligonucleotide
cucugaauauaucuaccuu

SEQ ID NO: 1087152 - RNA, 19 nt, Artificial Sequence
  Description of Artificial Sequence: Synthetic oligonucleotide
uuccuacagcggcugcaua

SEQ ID NO: 1087153 - RNA, 19 nt, Artificial Sequence
  Description of Artificial Sequence: Synthetic oligonucleotide
cugcaguuguucugaaacu

SEQ ID NO: 1087154 - RNA, 19 nt, Artificial Sequence
  Description of Artificial Sequence: Synthetic oligonucleotide
ccaacaauuaauggcuuaa

SEQ ID NO: 1087155 - RNA, 19 nt, Artificial Sequence
  Description of Artificial Sequence: Synthetic oligonucleotide
gacagcuauguaggaauau

SEQ ID NO: 1087156 - RNA, 19 nt, Artificial Sequence
  Description of Artificial Sequence: Synthetic oligonucleotide
ccauaugaacuccauuuua

SEQ ID NO: 1087157 - RNA, 19 nt, Artificial Sequence
  Description of Artificial Sequence: Synthetic oligonucleotide
ugcuagguuuuagcauuuu

SEQ ID NO: 1087158 - RNA, 19 nt, Artificial Sequence
  Description of Artificial Sequence: Synthetic oligonucleotide
cauaaggguaagugaugau

SEQ ID NO: 1087159 - RNA, 19 nt, Artificial Sequence
  Description of Artificial Sequence: Synthetic oligonucleotide
gcuuaguaacgcauagucu

SEQ ID NO: 1087160 - RNA, 19 nt, Artificial Sequence
  Description of Artificial Sequence: Synthetic oligonucleotide
cacugagauuccucucaaa

SEQ ID NO: 1087161 - RNA, 19 nt, Artificial Sequence
  Description of Artificial Sequence: Synthetic oligonucleotide
guacugcaguuguucugaa

SEQ ID NO: 1087162 - RNA, 19 nt, Artificial Sequence
  Description of Artificial Sequence: Synthetic oligonucleotide
caauaacauaaggguaagu

SEQ ID NO: 1087163 - RNA, 19 nt, Artificial Sequence
  Description of Artificial Sequence: Synthetic oligonucleotide
auaauacauuggacagcua

SEQ ID NO: 1087164 - RNA, 19 nt, Artificial Sequence
  Description of Artificial Sequence: Synthetic oligonucleotide
ggcauuaugcuagguuuua

SEQ ID NO: 1087165 - RNA, 19 nt, Artificial Sequence
  Description of Artificial Sequence: Synthetic oligonucleotide
gagauacacguggagccuu

SEQ ID NO: 1087166 - RNA, 19 nt, Artificial Sequence
  Description of Artificial Sequence: Synthetic oligonucleotide
gggucauaucucuuucuau

SEQ ID NO: 1087167 - RNA, 19 nt, Artificial Sequence
  Description of Artificial Sequence: Synthetic oligonucleotide
ccuacagcggcugcauauc

SEQ ID NO: 1087168 - RNA, 19 nt, Artificial Sequence
  Description of Artificial Sequence: Synthetic oligonucleotide
caugauucaugagcagaau

SEQ ID NO: 1087169 - RNA, 19 nt, Artificial Sequence
  Description of Artificial Sequence: Synthetic oligonucleotide
cccugcacugagauuccuc

SEQ ID NO: 1087170 - RNA, 19 nt, Artificial Sequence
  Description of Artificial Sequence: Synthetic oligonucleotide
cugcuuaguaacgcauagu

SEQ ID NO: 1087171 - RNA, 19 nt, Artificial Sequence
  Description of Artificial Sequence: Synthetic oligonucleotide
cugacacagugggcaagga

SEQ ID NO: 1087172 - RNA, 19 nt, Artificial Sequence
  Description of Artificial Sequence: Synthetic oligonucleotide
caccaacaauuaauggcuu

SEQ ID NO: 1087173 - RNA, 19 nt, Artificial Sequence
  Description of Artificial Sequence: Synthetic oligonucleotide
cagcggcugcauaucauau

SEQ ID NO: 1087174 - RNA, 19 nt, Artificial Sequence
  Description of Artificial Sequence: Synthetic oligonucleotide
gaggagaauugaaggucuu

SEQ ID NO: 1087175 - RNA, 19 nt, Artificial Sequence
  Description of Artificial Sequence: Synthetic oligonucleotide
acaucgcuaugaacaucua

SEQ ID NO: 1087176 - RNA, 19 nt, Artificial Sequence
  Description of Artificial Sequence: Synthetic oligonucleotide
cagaucugaucaaggcauu

SEQ ID NO: 1087177 - RNA, 19 nt, Artificial Sequence
  Description of Artificial Sequence: Synthetic oligonucleotide
ggucuuaguucuggguacu

SEQ ID NO: 1087178 - RNA, 19 nt, Artificial Sequence
  Description of Artificial Sequence: Synthetic oligonucleotide
cgcuaugaacaucuaauuu

SEQ ID NO: 1087179 - RNA, 19 nt, Artificial Sequence
  Description of Artificial Sequence: Synthetic oligonucleotide
gcguucaaucccacaauau

SEQ ID NO: 1087180 - RNA, 19 nt, Artificial Sequence
  Description of Artificial Sequence: Synthetic oligonucleotide
cgcugcuuaguaacgcaua

SEQ ID NO: 1087181 - RNA, 19 nt, Artificial Sequence
  Description of Artificial Sequence: Synthetic oligonucleotide
cguggagccuugggcagac

SEQ ID NO: 1087182 - RNA, 19 nt, Artificial Sequence
  Description of Artificial Sequence: Synthetic oligonucleotide
gccacugggaagugcuguu

SEQ ID NO: 1087183 - RNA, 19 nt, Artificial Sequence
  Description of Artificial Sequence: Synthetic oligonucleotide
cggcugcauaucauauaga

SEQ ID NO: 1087184 - RNA, 19 nt, Artificial Sequence
  Description of Artificial Sequence: Synthetic oligonucleotide
ccauaaaagugcgcugcuu

SEQ ID NO: 1087185 - RNA, 19 nt, Artificial Sequence
  Description of Artificial Sequence: Synthetic oligonucleotide
agaaauacaacgcaguggg

SEQ ID NO: 1087186 - RNA, 19 nt, Artificial Sequence
  Description of Artificial Sequence: Synthetic oligonucleotide
uuaaucucagcucuuaccc

SEQ ID NO: 1087187 - RNA, 19 nt, Artificial Sequence
  Description of Artificial Sequence: Synthetic oligonucleotide
acaaaugcaccucugaggg

SEQ ID NO: 1087188 - RNA, 19 nt, Artificial Sequence
  Description of Artificial Sequence: Synthetic oligonucleotide
uuaugcucaacucaguugc

SEQ ID NO: 1087189 - RNA, 19 nt, Artificial Sequence
  Description of Artificial Sequence: Synthetic oligonucleotide
aaaucauccagcaugacug

SEQ ID NO: 1087190 - RNA, 19 nt, Artificial Sequence
  Description of Artificial Sequence: Synthetic oligonucleotide
aagcaauuuaaucucagcu

SEQ ID NO: 1087191 - RNA, 19 nt, Artificial Sequence
  Description of Artificial Sequence: Synthetic oligonucleotide
aauguaaguggccgagugc

SEQ ID NO: 1087192 - RNA, 19 nt, Artificial Sequence
  Description of Artificial Sequence: Synthetic oligonucleotide
aguaaggcaaagcagugac

SEQ ID NO: 1087193 - RNA, 19 nt, Artificial Sequence
  Description of Artificial Sequence: Synthetic oligonucleotide
aaggcgcccauaucgaucc

SEQ ID NO: 1087194 - RNA, 19 nt, Artificial Sequence
  Description of Artificial Sequence: Synthetic oligonucleotide
uuacccagcaaaaugaaac

SEQ ID NO: 1087195 - RNA, 19 nt, Artificial Sequence
  Description of Artificial Sequence: Synthetic oligonucleotide
ucaacuaugcugauggucu

SEQ ID NO: 1087196 - RNA, 19 nt, Artificial Sequence
  Description of Artificial Sequence: Synthetic oligonucleotide
aguguggugaccucuuucc

SEQ ID NO: 1087197 - RNA, 19 nt, Artificial Sequence
  Description of Artificial Sequence: Synthetic oligonucleotide
aagaaauacaacgcagugg

SEQ ID NO: 1087198 - RNA, 19 nt, Artificial Sequence
  Description of Artificial Sequence: Synthetic oligonucleotide
ggggcuaagaaauacaacg

SEQ ID NO: 1087199 - RNA, 19 nt, Artificial Sequence
  Description of Artificial Sequence: Synthetic oligonucleotide
augaaggcuuuucuuaugc

SEQ ID NO: 1087200 - RNA, 19 nt, Artificial Sequence
  Description of Artificial Sequence: Synthetic oligonucleotide
uucaccacaaagaaggggu

SEQ ID NO: 1087201 - RNA, 19 nt, Artificial Sequence
  Description of Artificial Sequence: Synthetic oligonucleotide
auuaaagccauuuguccuc

SEQ ID NO: 1087202 - RNA, 19 nt, Artificial Sequence
  Description of Artificial Sequence: Synthetic oligonucleotide
uuuaaucucagcucuuacc

SEQ ID NO: 1087203 - RNA, 19 nt, Artificial Sequence
  Description of Artificial Sequence: Synthetic oligonucleotide
ucaugugagacacuuuugc

SEQ ID NO: 1087204 - RNA, 19 nt, Artificial Sequence
  Description of Artificial Sequence: Synthetic oligonucleotide
ugugagacacuuuugcaag

SEQ ID NO: 1087205 - RNA, 19 nt, Artificial Sequence
  Description of Artificial Sequence: Synthetic oligonucleotide
aaaugcaccucugagggag

SEQ ID NO: 1087206 - RNA, 19 nt, Artificial Sequence
  Description of Artificial Sequence: Synthetic oligonucleotide
aaaaguuagcugggcaagc

SEQ ID NO: 1087207 - RNA, 19 nt, Artificial Sequence
  Description of Artificial Sequence: Synthetic oligonucleotide
cagcccuucauuaagcugg

SEQ ID NO: 1087208 - RNA, 19 nt, Artificial Sequence
  Description of Artificial Sequence: Synthetic oligonucleotide
ugagucuuccucaaggagu

SEQ ID NO: 1087209 - RNA, 19 nt, Artificial Sequence
  Description of Artificial Sequence: Synthetic oligonucleotide
agugcaauuuaaaaguuag

SEQ ID NO: 1087210 - RNA, 19 nt, Artificial Sequence
  Description of Artificial Sequence: Synthetic oligonucleotide
aagaggaucagcacgacca

SEQ ID NO: 1087211 - RNA, 19 nt, Artificial Sequence
  Description of Artificial Sequence: Synthetic oligonucleotide
aacagaguaaguagggcuc

SEQ ID NO: 1087212 - RNA, 19 nt, Artificial Sequence
  Description of Artificial Sequence: Synthetic oligonucleotide
auuuaaucucagcucuuac

SEQ ID NO: 1087213 - RNA, 19 nt, Artificial Sequence
  Description of Artificial Sequence: Synthetic oligonucleotide
aaguuagcugggcaagcac

SEQ ID NO: 1087214 - RNA, 19 nt, Artificial Sequence
  Description of Artificial Sequence: Synthetic oligonucleotide
uccucaaggagugaggucc

SEQ ID NO: 1087215 - RNA, 19 nt, Artificial Sequence
  Description of Artificial Sequence: Synthetic oligonucleotide
uauggcacaccacuggcgc

SEQ ID NO: 1087216 - RNA, 19 nt, Artificial Sequence
  Description of Artificial Sequence: Synthetic oligonucleotide
aaauacaacgcagugggaa

SEQ ID NO: 1087217 - RNA, 19 nt, Artificial Sequence
  Description of Artificial Sequence: Synthetic oligonucleotide
augagagaaaucauccagc

SEQ ID NO: 1087218 - RNA, 19 nt, Artificial Sequence
  Description of Artificial Sequence: Synthetic oligonucleotide
uuuuccuuucagucaaugc

SEQ ID NO: 1087219 - RNA, 19 nt, Artificial Sequence
  Description of Artificial Sequence: Synthetic oligonucleotide
aauacaacgcagugggaaa

SEQ ID NO: 1087220 - RNA, 19 nt, Artificial Sequence
  Description of Artificial Sequence: Synthetic oligonucleotide
uaaaaguuagcugggcaag

SEQ ID NO: 1087221 - RNA, 19 nt, Artificial Sequence
  Description of Artificial Sequence: Synthetic oligonucleotide
gaauguaaguggccgagug

SEQ ID NO: 1087222 - RNA, 19 nt, Artificial Sequence
  Description of Artificial Sequence: Synthetic oligonucleotide
aacagcgcccaucuaagca

SEQ ID NO: 1087223 - RNA, 19 nt, Artificial Sequence
  Description of Artificial Sequence: Synthetic oligonucleotide
cucucaaccacuccagucc

SEQ ID NO: 1087224 - RNA, 19 nt, Artificial Sequence
  Description of Artificial Sequence: Synthetic oligonucleotide
auggcuauggcacaccacu

SEQ ID NO: 1087225 - RNA, 19 nt, Artificial Sequence
  Description of Artificial Sequence: Synthetic oligonucleotide
uuguuccucagcucguugg

SEQ ID NO: 1087226 - RNA, 19 nt, Artificial Sequence
  Description of Artificial Sequence: Synthetic oligonucleotide
uaggauuugcuucaacuau

SEQ ID NO: 1087227 - RNA, 19 nt, Artificial Sequence
  Description of Artificial Sequence: Synthetic oligonucleotide
aucagcacgaccaacagga

SEQ ID NO: 1087228 - RNA, 19 nt, Artificial Sequence
  Description of Artificial Sequence: Synthetic oligonucleotide
cuuaugcucaacucaguug

SEQ ID NO: 1087229 - RNA, 19 nt, Artificial Sequence
  Description of Artificial Sequence: Synthetic oligonucleotide
aucacuggucaugugagac

SEQ ID NO: 1087230 - RNA, 19 nt, Artificial Sequence
  Description of Artificial Sequence: Synthetic oligonucleotide
auaucgauccgucacucca

SEQ ID NO: 1087231 - RNA, 19 nt, Artificial Sequence
  Description of Artificial Sequence: Synthetic oligonucleotide
ucuaagcagggaaaggauc

SEQ ID NO: 1087232 - RNA, 19 nt, Artificial Sequence
  Description of Artificial Sequence: Synthetic oligonucleotide
uccagaucccacucuaugc

SEQ ID NO: 1087233 - RNA, 19 nt, Artificial Sequence
  Description of Artificial Sequence: Synthetic oligonucleotide
ucaugaaguguuucugagc

SEQ ID NO: 1087234 - RNA, 19 nt, Artificial Sequence
  Description of Artificial Sequence: Synthetic oligonucleotide
caucauugagaaacaaaac

SEQ ID NO: 1087235 - RNA, 19 nt, Artificial Sequence
  Description of Artificial Sequence: Synthetic oligonucleotide
agaggcguguuucugggag

SEQ ID NO: 1087236 - RNA, 19 nt, Artificial Sequence
  Description of Artificial Sequence: Synthetic oligonucleotide
uuagcccugccacaaacac

SEQ ID NO: 1087237 - RNA, 19 nt, Artificial Sequence
  Description of Artificial Sequence: Synthetic oligonucleotide
aauccuugggcaguguuga

SEQ ID NO: 1087238 - RNA, 19 nt, Artificial Sequence
  Description of Artificial Sequence: Synthetic oligonucleotide
acugagugcucuccaacuc

SEQ ID NO: 1087239 - RNA, 19 nt, Artificial Sequence
  Description of Artificial Sequence: Synthetic oligonucleotide
uaaggcaaagcagugacua

SEQ ID NO: 1087240 - RNA, 19 nt, Artificial Sequence
  Description of Artificial Sequence: Synthetic oligonucleotide
ugauccuucaugucccuga

SEQ ID NO: 1087241 - RNA, 19 nt, Artificial Sequence
  Description of Artificial Sequence: Synthetic oligonucleotide
agacugagugcucuccaac

SEQ ID NO: 1087242 - RNA, 19 nt, Artificial Sequence
  Description of Artificial Sequence: Synthetic oligonucleotide
gaucagcacgaccaacagg

SEQ ID NO: 1087243 - RNA, 19 nt, Artificial Sequence
  Description of Artificial Sequence: Synthetic oligonucleotide
cucagcacucccaagcccc

SEQ ID NO: 1087244 - RNA, 19 nt, Artificial Sequence
  Description of Artificial Sequence: Synthetic oligonucleotide
ucuuaugcucaacucaguu

SEQ ID NO: 1087245 - RNA, 19 nt, Artificial Sequence
  Description of Artificial Sequence: Synthetic oligonucleotide
gaaaggaucugagcagagg

SEQ ID NO: 1087246 - RNA, 19 nt, Artificial Sequence
  Description of Artificial Sequence: Synthetic oligonucleotide
caacucaugagagaaauca

SEQ ID NO: 1087247 - RNA, 19 nt, Artificial Sequence
  Description of Artificial Sequence: Synthetic oligonucleotide
acagcgcccaucuaagcag

SEQ ID NO: 1087248 - RNA, 19 nt, Artificial Sequence
  Description of Artificial Sequence: Synthetic oligonucleotide
ucaguugcauccagguuga

SEQ ID NO: 1087249 - RNA, 19 nt, Artificial Sequence
  Description of Artificial Sequence: Synthetic oligonucleotide
ucguuggugguccagucga

SEQ ID NO: 1087250 - RNA, 19 nt, Artificial Sequence
  Description of Artificial Sequence: Synthetic oligonucleotide
aagcuggaccaacacaggu

SEQ ID NO: 1087251 - RNA, 19 nt, Artificial Sequence
  Description of Artificial Sequence: Synthetic oligonucleotide
uaucgauccgucacuccag

SEQ ID NO: 1087252 - RNA, 19 nt, Artificial Sequence
  Description of Artificial Sequence: Synthetic oligonucleotide
gaugaaggcuuuucuuaug

SEQ ID NO: 1087253 - RNA, 19 nt, Artificial Sequence
  Description of Artificial Sequence: Synthetic oligonucleotide
cucuuacccagcaaaauga

SEQ ID NO: 1087254 - RNA, 19 nt, Artificial Sequence
  Description of Artificial Sequence: Synthetic oligonucleotide
gacaacagcgcccaucuaa

SEQ ID NO: 1087255 - RNA, 19 nt, Artificial Sequence
  Description of Artificial Sequence: Synthetic oligonucleotide
uguccaucucugaacaauc

SEQ ID NO: 1087256 - RNA, 19 nt, Artificial Sequence
  Description of Artificial Sequence: Synthetic oligonucleotide
agcaacagaguaaguaggg

SEQ ID NO: 1087257 - RNA, 19 nt, Artificial Sequence
  Description of Artificial Sequence: Synthetic oligonucleotide
uuugccgaguacuugugau

SEQ ID NO: 1087258 - RNA, 19 nt, Artificial Sequence
  Description of Artificial Sequence: Synthetic oligonucleotide
augucccugacaauuugcc

SEQ ID NO: 1087259 - RNA, 19 nt, Artificial Sequence
  Description of Artificial Sequence: Synthetic oligonucleotide
agagagggcugucucagug

SEQ ID NO: 1087260 - RNA, 19 nt, Artificial Sequence
  Description of Artificial Sequence: Synthetic oligonucleotide
gaagaggaucagcacgacc

SEQ ID NO: 1087261 - RNA, 19 nt, Artificial Sequence
  Description of Artificial Sequence: Synthetic oligonucleotide
uuucagucaaugccugcac

SEQ ID NO: 1087262 - RNA, 19 nt, Artificial Sequence
  Description of Artificial Sequence: Synthetic oligonucleotide
cuauggcacaccacuggcg

SEQ ID NO: 1087263 - RNA, 19 nt, Artificial Sequence
  Description of Artificial Sequence: Synthetic oligonucleotide
auguaaguggccgagugcu

SEQ ID NO: 1087264 - RNA, 19 nt, Artificial Sequence
  Description of Artificial Sequence: Synthetic oligonucleotide
auacaacgcagugggaaac

SEQ ID NO: 1087265 - RNA, 19 nt, Artificial Sequence
  Description of Artificial Sequence: Synthetic oligonucleotide
ucucaaccacuccagucca

SEQ ID NO: 1087266 - RNA, 19 nt, Artificial Sequence
  Description of Artificial Sequence: Synthetic oligonucleotide
agcugucccagaaagaaug

SEQ ID NO: 1087267 - RNA, 19 nt, Artificial Sequence
  Description of Artificial Sequence: Synthetic oligonucleotide
uucauuaagcuggaccaac

SEQ ID NO: 1087268 - RNA, 19 nt, Artificial Sequence
  Description of Artificial Sequence: Synthetic oligonucleotide
gcuaagaaauacaacgcag

SEQ ID NO: 1087269 - RNA, 19 nt, Artificial Sequence
  Description of Artificial Sequence: Synthetic oligonucleotide
acccagcaaaaugaaacac

SEQ ID NO: 1087270 - RNA, 19 nt, Artificial Sequence
  Description of Artificial Sequence: Synthetic oligonucleotide
cauuaagcuggaccaacac

SEQ ID NO: 1087271 - RNA, 19 nt, Artificial Sequence
  Description of Artificial Sequence: Synthetic oligonucleotide
uccucagcacucccaagcc

SEQ ID NO: 1087272 - RNA, 19 nt, Artificial Sequence
  Description of Artificial Sequence: Synthetic oligonucleotide
gacaucugauccuucaugu

SEQ ID NO: 1087273 - RNA, 19 nt, Artificial Sequence
  Description of Artificial Sequence: Synthetic oligonucleotide
ucgaucaaggcgcccauau

SEQ ID NO: 1087274 - RNA, 19 nt, Artificial Sequence
  Description of Artificial Sequence: Synthetic oligonucleotide
ucagucagcaggucuggcu

SEQ ID NO: 1087275 - RNA, 19 nt, Artificial Sequence
  Description of Artificial Sequence: Synthetic oligonucleotide
uacaacgcagugggaaacg

SEQ ID NO: 1087276 - RNA, 19 nt, Artificial Sequence
  Description of Artificial Sequence: Synthetic oligonucleotide
ugccgaguacuugugauga

SEQ ID NO: 1087277 - RNA, 19 nt, Artificial Sequence
  Description of Artificial Sequence: Synthetic oligonucleotide
acauuguccagucgagacu

SEQ ID NO: 1087278 - RNA, 19 nt, Artificial Sequence
  Description of Artificial Sequence: Synthetic oligonucleotide
gaugcgcugggacauguuc

SEQ ID NO: 1087279 - RNA, 19 nt, Artificial Sequence
  Description of Artificial Sequence: Synthetic oligonucleotide
cuaagaaauacaacgcagu

SEQ ID NO: 1087280 - RNA, 19 nt, Artificial Sequence
  Description of Artificial Sequence: Synthetic oligonucleotide
agguccaguaaggcaaagc

SEQ ID NO: 1087281 - RNA, 19 nt, Artificial Sequence
  Description of Artificial Sequence: Synthetic oligonucleotide
ucaguggcggagucacacg

SEQ ID NO: 1087282 - RNA, 19 nt, Artificial Sequence
  Description of Artificial Sequence: Synthetic oligonucleotide
guugcauccagguugaauu

SEQ ID NO: 1087283 - RNA, 19 nt, Artificial Sequence
  Description of Artificial Sequence: Synthetic oligonucleotide
aggaauguaaguggccgag

SEQ ID NO: 1087284 - RNA, 19 nt, Artificial Sequence
  Description of Artificial Sequence: Synthetic oligonucleotide
agaccugggcgcccgacgg

SEQ ID NO: 1087285 - RNA, 19 nt, Artificial Sequence
  Description of Artificial Sequence: Synthetic oligonucleotide
caacucaguugcauccagg

SEQ ID NO: 1087286 - RNA, 19 nt, Artificial Sequence
  Description of Artificial Sequence: Synthetic oligonucleotide
ugaccucuuuccucuuccg

SEQ ID NO: 1087287 - RNA, 19 nt, Artificial Sequence
  Description of Artificial Sequence: Synthetic oligonucleotide
uguugacugcuuucuguac

SEQ ID NO: 1087288 - RNA, 19 nt, Artificial Sequence
  Description of Artificial Sequence: Synthetic oligonucleotide
ucacuggucaugugagaca

SEQ ID NO: 1087289 - RNA, 19 nt, Artificial Sequence
  Description of Artificial Sequence: Synthetic oligonucleotide
uguugcucucaaccacucc

SEQ ID NO: 1087290 - RNA, 19 nt, Artificial Sequence
  Description of Artificial Sequence: Synthetic oligonucleotide
aaggagugagguccaguaa

SEQ ID NO: 1087291 - RNA, 19 nt, Artificial Sequence
  Description of Artificial Sequence: Synthetic oligonucleotide
uugccgaguacuugugaug

SEQ ID NO: 1087292 - RNA, 19 nt, Artificial Sequence
  Description of Artificial Sequence: Synthetic oligonucleotide
cagucgauagcucugucca

SEQ ID NO: 1087293 - RNA, 19 nt, Artificial Sequence
  Description of Artificial Sequence: Synthetic oligonucleotide
aauuugccgaguacuugug

SEQ ID NO: 1087294 - RNA, 19 nt, Artificial Sequence
  Description of Artificial Sequence: Synthetic oligonucleotide
auggcacaccacuggcgcc

SEQ ID NO: 1087295 - RNA, 19 nt, Artificial Sequence
  Description of Artificial Sequence: Synthetic oligonucleotide
cauaucgauccgucacucc

SEQ ID NO: 1087296 - RNA, 19 nt, Artificial Sequence
  Description of Artificial Sequence: Synthetic oligonucleotide
uccauggacauggcgcccg

SEQ ID NO: 1087297 - RNA, 19 nt, Artificial Sequence
  Description of Artificial Sequence: Synthetic oligonucleotide
cuguaccucuccuuucacc

SEQ ID NO: 1087298 - RNA, 19 nt, Artificial Sequence
  Description of Artificial Sequence: Synthetic oligonucleotide
uguccagucgagacugagu

SEQ ID NO: 1087299 - RNA, 19 nt, Artificial Sequence
  Description of Artificial Sequence: Synthetic oligonucleotide
caguggcggagucacacgg

SEQ ID NO: 1087300 - RNA, 19 nt, Artificial Sequence
  Description of Artificial Sequence: Synthetic oligonucleotide
agucacacggaggaagcag

SEQ ID NO: 1087301 - RNA, 19 nt, Artificial Sequence
  Description of Artificial Sequence: Synthetic oligonucleotide
uccaguccauuaaagccau

SEQ ID NO: 1087302 - RNA, 19 nt, Artificial Sequence
  Description of Artificial Sequence: Synthetic oligonucleotide
ucgauagcucuguccaucu

SEQ ID NO: 1087303 - RNA, 19 nt, Artificial Sequence
  Description of Artificial Sequence: Synthetic oligonucleotide
aggauuugcuucaacuaug

SEQ ID NO: 1087304 - RNA, 19 nt, Artificial Sequence
  Description of Artificial Sequence: Synthetic oligonucleotide
caugugagacacuuuugca

SEQ ID NO: 1087305 - RNA, 19 nt, Artificial Sequence
  Description of Artificial Sequence: Synthetic oligonucleotide
uucaugucccugacaauuu

SEQ ID NO: 1087306 - RNA, 19 nt, Artificial Sequence
  Description of Artificial Sequence: Synthetic oligonucleotide
cuaagcagggaaaggaucu

SEQ ID NO: 1087307 - RNA, 19 nt, Artificial Sequence
  Description of Artificial Sequence: Synthetic oligonucleotide
gcaauuuaaucucagcucu

SEQ ID NO: 1087308 - RNA, 19 nt, Artificial Sequence
  Description of Artificial Sequence: Synthetic oligonucleotide
agaaugagcaacagaguaa

SEQ ID NO: 1087309 - RNA, 19 nt, Artificial Sequence
  Description of Artificial Sequence: Synthetic oligonucleotide
uccgaccuugcccuuccag

SEQ ID NO: 1087310 - RNA, 19 nt, Artificial Sequence
  Description of Artificial Sequence: Synthetic oligonucleotide
gaagcugacaucugauccu

SEQ ID NO: 1087311 - RNA, 19 nt, Artificial Sequence
  Description of Artificial Sequence: Synthetic oligonucleotide
cucguuggugguccagucg

SEQ ID NO: 1087312 - RNA, 19 nt, Artificial Sequence
  Description of Artificial Sequence: Synthetic oligonucleotide
uggugguccagucgauagc

SEQ ID NO: 1087313 - RNA, 19 nt, Artificial Sequence
  Description of Artificial Sequence: Synthetic oligonucleotide
auuugccgaguacuuguga

SEQ ID NO: 1087314 - RNA, 19 nt, Artificial Sequence
  Description of Artificial Sequence: Synthetic oligonucleotide
uggcacaccacuggcgccg

SEQ ID NO: 1087315 - RNA, 19 nt, Artificial Sequence
  Description of Artificial Sequence: Synthetic oligonucleotide
cucaaugaaaugggaguug

SEQ ID NO: 1087316 - RNA, 19 nt, Artificial Sequence
  Description of Artificial Sequence: Synthetic oligonucleotide
ggcuauggcacaccacugg

SEQ ID NO: 1087317 - RNA, 19 nt, Artificial Sequence
  Description of Artificial Sequence: Synthetic oligonucleotide
aacucaugagagaaaucau

SEQ ID NO: 1087318 - RNA, 19 nt, Artificial Sequence
  Description of Artificial Sequence: Synthetic oligonucleotide
gacaucacagcaccaggaa

SEQ ID NO: 1087319 - RNA, 19 nt, Artificial Sequence
  Description of Artificial Sequence: Synthetic oligonucleotide
uggagacaucaccagcccu

SEQ ID NO: 1087320 - RNA, 19 nt, Artificial Sequence
  Description of Artificial Sequence: Synthetic oligonucleotide
uggcuauggcacaccacug

SEQ ID NO: 1087321 - RNA, 19 nt, Artificial Sequence
  Description of Artificial Sequence: Synthetic oligonucleotide
aucacauuguccagucgag

SEQ ID NO: 1087322 - RNA, 19 nt, Artificial Sequence
  Description of Artificial Sequence: Synthetic oligonucleotide
guaaguggccgagugcuug

SEQ ID NO: 1087323 - RNA, 19 nt, Artificial Sequence
  Description of Artificial Sequence: Synthetic oligonucleotide
gugcgcgcagaccugggcg

SEQ ID NO: 1087324 - RNA, 19 nt, Artificial Sequence
  Description of Artificial Sequence: Synthetic oligonucleotide
uccagucgagacugagugc

SEQ ID NO: 1087325 - RNA, 19 nt, Artificial Sequence
  Description of Artificial Sequence: Synthetic oligonucleotide
aggaucagcacgaccaaca

SEQ ID NO: 1087326 - RNA, 19 nt, Artificial Sequence
  Description of Artificial Sequence: Synthetic oligonucleotide
caacagaguaaguagggcu

SEQ ID NO: 1087327 - RNA, 19 nt, Artificial Sequence
  Description of Artificial Sequence: Synthetic oligonucleotide
gaggaauguaaguggccga

SEQ ID NO: 1087328 - RNA, 19 nt, Artificial Sequence
  Description of Artificial Sequence: Synthetic oligonucleotide
uggcggagucacacggagg

SEQ ID NO: 1087329 - RNA, 19 nt, Artificial Sequence
  Description of Artificial Sequence: Synthetic oligonucleotide
cucaguggcggagucacac

SEQ ID NO: 1087330 - RNA, 19 nt, Artificial Sequence
  Description of Artificial Sequence: Synthetic oligonucleotide
guggcggagucacacggag

SEQ ID NO: 1087331 - RNA, 19 nt, Artificial Sequence
  Description of Artificial Sequence: Synthetic oligonucleotide
ggauuugcuucaacuaugc

SEQ ID NO: 1087332 - RNA, 19 nt, Artificial Sequence
  Description of Artificial Sequence: Synthetic oligonucleotide
caccagcccuucauuaagc

SEQ ID NO: 1087333 - RNA, 19 nt, Artificial Sequence
  Description of Artificial Sequence: Synthetic oligonucleotide
gaaaugggaguuggcuagc

SEQ ID NO: 1087334 - RNA, 19 nt, Artificial Sequence
  Description of Artificial Sequence: Synthetic oligonucleotide
ugcuucaacuaugcugaug

SEQ ID NO: 1087335 - RNA, 19 nt, Artificial Sequence
  Description of Artificial Sequence: Synthetic oligonucleotide
cucucccgaguccaugugc

SEQ ID NO: 1087336 - RNA, 19 nt, Artificial Sequence
  Description of Artificial Sequence: Synthetic oligonucleotide
ucuaugcugcggagguugu

SEQ ID NO: 1087337 - RNA, 19 nt, Artificial Sequence
  Description of Artificial Sequence: Synthetic oligonucleotide
ugacuagcugucccagaaa

SEQ ID NO: 1087338 - RNA, 19 nt, Artificial Sequence
  Description of Artificial Sequence: Synthetic oligonucleotide
aggaucugagcagagggaa

SEQ ID NO: 1087339 - RNA, 19 nt, Artificial Sequence
  Description of Artificial Sequence: Synthetic oligonucleotide
caaggcgcccauaucgauc

SEQ ID NO: 1087340 - RNA, 19 nt, Artificial Sequence
  Description of Artificial Sequence: Synthetic oligonucleotide
guuguuccucagcucguug

SEQ ID NO: 1087341 - RNA, 19 nt, Artificial Sequence
  Description of Artificial Sequence: Synthetic oligonucleotide
gaguaaguagggcucuucu

SEQ ID NO: 1087342 - RNA, 19 nt, Artificial Sequence
  Description of Artificial Sequence: Synthetic oligonucleotide
gcagaggcguguuucuggg

SEQ ID NO: 1087343 - RNA, 19 nt, Artificial Sequence
  Description of Artificial Sequence: Synthetic oligonucleotide
ugcgcgcagaccugggcgc

SEQ ID NO: 1087344 - RNA, 19 nt, Artificial Sequence
  Description of Artificial Sequence: Synthetic oligonucleotide
ugcucucaaccacuccagu

SEQ ID NO: 1087345 - RNA, 19 nt, Artificial Sequence
  Description of Artificial Sequence: Synthetic oligonucleotide
acagaguaaguagggcucu

SEQ ID NO: 1087346 - RNA, 19 nt, Artificial Sequence
  Description of Artificial Sequence: Synthetic oligonucleotide
gcuauggcacaccacuggc

SEQ ID NO: 1087347 - RNA, 19 nt, Artificial Sequence
  Description of Artificial Sequence: Synthetic oligonucleotide
caaggagugagguccagua

SEQ ID NO: 1087348 - RNA, 19 nt, Artificial Sequence
  Description of Artificial Sequence: Synthetic oligonucleotide
gaucacuggucaugugaga

SEQ ID NO: 1087349 - RNA, 19 nt, Artificial Sequence
  Description of Artificial Sequence: Synthetic oligonucleotide
gucaugugagacacuuuug

SEQ ID NO: 1087350 - RNA, 19 nt, Artificial Sequence
  Description of Artificial Sequence: Synthetic oligonucleotide
cuuacccagcaaaaugaaa

SEQ ID NO: 1087351 - RNA, 19 nt, Artificial Sequence
  Description of Artificial Sequence: Synthetic oligonucleotide
gacugagugcucuccaacu

SEQ ID NO: 1087352 - RNA, 19 nt, Artificial Sequence
  Description of Artificial Sequence: Synthetic oligonucleotide
cuuagcccugccacaaaca

SEQ ID NO: 1087353 - RNA, 19 nt, Artificial Sequence
  Description of Artificial Sequence: Synthetic oligonucleotide
ucaaggagugagguccagu

SEQ ID NO: 1087354 - RNA, 19 nt, Artificial Sequence
  Description of Artificial Sequence: Synthetic oligonucleotide
cagcgcccaucuaagcagg

SEQ ID NO: 1087355 - RNA, 19 nt, Artificial Sequence
  Description of Artificial Sequence: Synthetic oligonucleotide
caguauuccaguucuggcu

SEQ ID NO: 1087356 - RNA, 19 nt, Artificial Sequence
  Description of Artificial Sequence: Synthetic oligonucleotide
caacagcgcccaucuaagc

SEQ ID NO: 1087357 - RNA, 19 nt, Artificial Sequence
  Description of Artificial Sequence: Synthetic oligonucleotide
ggcggagucacacggagga

SEQ ID NO: 1087358 - RNA, 19 nt, Artificial Sequence
  Description of Artificial Sequence: Synthetic oligonucleotide
aagcugacaucugauccuu

SEQ ID NO: 1087359 - RNA, 19 nt, Artificial Sequence
  Description of Artificial Sequence: Synthetic oligonucleotide
gaccucuuuccucuuccga

SEQ ID NO: 1087360 - RNA, 19 nt, Artificial Sequence
  Description of Artificial Sequence: Synthetic oligonucleotide
guguugacugcuuucugua

SEQ ID NO: 1087361 - RNA, 19 nt, Artificial Sequence
  Description of Artificial Sequence: Synthetic oligonucleotide
agaggaucagcacgaccaa

SEQ ID NO: 1087362 - RNA, 19 nt, Artificial Sequence
  Description of Artificial Sequence: Synthetic oligonucleotide
agucgagacugagugcucu

SEQ ID NO: 1087363 - RNA, 19 nt, Artificial Sequence
  Description of Artificial Sequence: Synthetic oligonucleotide
aguugcauccagguugaau

SEQ ID NO: 1087364 - RNA, 19 nt, Artificial Sequence
  Description of Artificial Sequence: Synthetic oligonucleotide
gucgauagcucuguccauc

SEQ ID NO: 1087365 - RNA, 19 nt, Artificial Sequence
  Description of Artificial Sequence: Synthetic oligonucleotide
uguaaguggccgagugcuu

SEQ ID NO: 1087366 - RNA, 19 nt, Artificial Sequence
  Description of Artificial Sequence: Synthetic oligonucleotide
ugcgaagaggauggcuaug

SEQ ID NO: 1087367 - RNA, 19 nt, Artificial Sequence
  Description of Artificial Sequence: Synthetic oligonucleotide
gauggcuauggcacaccac

SEQ ID NO: 1087368 - RNA, 19 nt, Artificial Sequence
  Description of Artificial Sequence: Synthetic oligonucleotide
gcccauaucgauccgucac

SEQ ID NO: 1087369 - RNA, 19 nt, Artificial Sequence
  Description of Artificial Sequence: Synthetic oligonucleotide
caacgcagugggaaacguc

SEQ ID NO: 1087370 - RNA, 19 nt, Artificial Sequence
  Description of Artificial Sequence: Synthetic oligonucleotide
ucaaccacuccaguccauu

SEQ ID NO: 1087371 - RNA, 19 nt, Artificial Sequence
  Description of Artificial Sequence: Synthetic oligonucleotide
uacuugugaugaaggcuuu

SEQ ID NO: 1087372 - RNA, 19 nt, Artificial Sequence
  Description of Artificial Sequence: Synthetic oligonucleotide
cagaccugggcgcccgacg

SEQ ID NO: 1087373 - RNA, 19 nt, Artificial Sequence
  Description of Artificial Sequence: Synthetic oligonucleotide
ucucgaucaaggcgcccau

SEQ ID NO: 1087374 - RNA, 19 nt, Artificial Sequence
  Description of Artificial Sequence: Synthetic oligonucleotide
gcaacagaguaaguagggc

SEQ ID NO: 1087375 - RNA, 19 nt, Artificial Sequence
  Description of Artificial Sequence: Synthetic oligonucleotide
gaaauacaacgcaguggga

SEQ ID NO: 1087376 - RNA, 19 nt, Artificial Sequence
  Description of Artificial Sequence: Synthetic oligonucleotide
aucaaggcgcccauaucga

SEQ ID NO: 1087377 - RNA, 19 nt, Artificial Sequence
  Description of Artificial Sequence: Synthetic oligonucleotide
agcucucgaucaaggcgcc

SEQ ID NO: 1087378 - RNA, 19 nt, Artificial Sequence
  Description of Artificial Sequence: Synthetic oligonucleotide
ugcgcugggacauguucuu

SEQ ID NO: 1087379 - RNA, 19 nt, Artificial Sequence
  Description of Artificial Sequence: Synthetic oligonucleotide
acaacgcagugggaaacgu

SEQ ID NO: 1087380 - RNA, 19 nt, Artificial Sequence
  Description of Artificial Sequence: Synthetic oligonucleotide
uggccgagugcuugcuucu

SEQ ID NO: 1087381 - RNA, 19 nt, Artificial Sequence
  Description of Artificial Sequence: Synthetic oligonucleotide
gcuuagcccugccacaaac

SEQ ID NO: 1087382 - RNA, 19 nt, Artificial Sequence
  Description of Artificial Sequence: Synthetic oligonucleotide
acgaccaacaggacugcga

SEQ ID NO: 1087383 - RNA, 19 nt, Artificial Sequence
  Description of Artificial Sequence: Synthetic oligonucleotide
aacaauccuugggcagugu

SEQ ID NO: 1087384 - RNA, 19 nt, Artificial Sequence
  Description of Artificial Sequence: Synthetic oligonucleotide
ccagcgcugggagagaggg

SEQ ID NO: 1087385 - RNA, 19 nt, Artificial Sequence
  Description of Artificial Sequence: Synthetic oligonucleotide
uggcgccgaucacugguca

SEQ ID NO: 1087386 - RNA, 19 nt, Artificial Sequence
  Description of Artificial Sequence: Synthetic oligonucleotide
agucgauagcucuguccau

SEQ ID NO: 1087387 - RNA, 19 nt, Artificial Sequence
  Description of Artificial Sequence: Synthetic oligonucleotide
ucacuccaguauuccaguu

SEQ ID NO: 1087388 - RNA, 19 nt, Artificial Sequence
  Description of Artificial Sequence: Synthetic oligonucleotide
ccgaccuugcccuuccagc

SEQ ID NO: 1087389 - RNA, 19 nt, Artificial Sequence
  Description of Artificial Sequence: Synthetic oligonucleotide
gauccgucacuccaguauu

SEQ ID NO: 1087390 - RNA, 19 nt, Artificial Sequence
  Description of Artificial Sequence: Synthetic oligonucleotide
augcgcugggacauguucu

SEQ ID NO: 1087391 - RNA, 19 nt, Artificial Sequence
  Description of Artificial Sequence: Synthetic oligonucleotide
aggccaucagaaugagcaa

SEQ ID NO: 1087392 - RNA, 19 nt, Artificial Sequence
  Description of Artificial Sequence: Synthetic oligonucleotide
gcucucaaccacuccaguc

SEQ ID NO: 1087393 - RNA, 19 nt, Artificial Sequence
  Description of Artificial Sequence: Synthetic oligonucleotide
ggaaaggaucugagcagag

SEQ ID NO: 1087394 - RNA, 19 nt, Artificial Sequence
  Description of Artificial Sequence: Synthetic oligonucleotide
cagugggaaacguccucuc

SEQ ID NO: 1087395 - RNA, 19 nt, Artificial Sequence
  Description of Artificial Sequence: Synthetic oligonucleotide
cgaccuugcccuuccagcg

SEQ ID NO: 1087396 - RNA, 19 nt, Artificial Sequence
  Description of Artificial Sequence: Synthetic oligonucleotide
ccgacaucacagcaccagg

SEQ ID NO: 1087397 - RNA, 19 nt, Artificial Sequence
  Description of Artificial Sequence: Synthetic oligonucleotide
cuaugcugauggucucauc

SEQ ID NO: 1087398 - RNA, 19 nt, Artificial Sequence
  Description of Artificial Sequence: Synthetic oligonucleotide
uggucaugugagacacuuu

SEQ ID NO: 1087399 - RNA, 19 nt, Artificial Sequence
  Description of Artificial Sequence: Synthetic oligonucleotide
gccgacaucacagcaccag

SEQ ID NO: 1087400 - RNA, 19 nt, Artificial Sequence
  Description of Artificial Sequence: Synthetic oligonucleotide
cacucuaugcugcggaggu

SEQ ID NO: 1087401 - RNA, 19 nt, Artificial Sequence
  Description of Artificial Sequence: Synthetic oligonucleotide
gacaauuugccgaguacuu

SEQ ID NO: 1087402 - RNA, 19 nt, Artificial Sequence
  Description of Artificial Sequence: Synthetic oligonucleotide
ccgaguacuugugaugaag

SEQ ID NO: 1087403 - RNA, 19 nt, Artificial Sequence
  Description of Artificial Sequence: Synthetic oligonucleotide
gagugaccccggagcagcg

SEQ ID NO: 1087404 - RNA, 19 nt, Artificial Sequence
  Description of Artificial Sequence: Synthetic oligonucleotide
ucuuccgaccuugcccuuc

SEQ ID NO: 1087405 - RNA, 19 nt, Artificial Sequence
  Description of Artificial Sequence: Synthetic oligonucleotide
caguaaggcaaagcaguga

SEQ ID NO: 1087406 - RNA, 19 nt, Artificial Sequence
  Description of Artificial Sequence: Synthetic oligonucleotide
caaaugcaccucugaggga

SEQ ID NO: 1087407 - RNA, 19 nt, Artificial Sequence
  Description of Artificial Sequence: Synthetic oligonucleotide
ggaaacguccucuccaaau

SEQ ID NO: 1087408 - RNA, 19 nt, Artificial Sequence
  Description of Artificial Sequence: Synthetic oligonucleotide
gaccccggagcagcggugc

SEQ ID NO: 1087409 - RNA, 19 nt, Artificial Sequence
  Description of Artificial Sequence: Synthetic oligonucleotide
ggauggcuauggcacacca

SEQ ID NO: 1087410 - RNA, 19 nt, Artificial Sequence
  Description of Artificial Sequence: Synthetic oligonucleotide
ccuuucagucaaugccugc

SEQ ID NO: 1087411 - RNA, 19 nt, Artificial Sequence
  Description of Artificial Sequence: Synthetic oligonucleotide
cacgaccaacaggacugcg

SEQ ID NO: 1087412 - RNA, 19 nt, Artificial Sequence
  Description of Artificial Sequence: Synthetic oligonucleotide
gucgagacugagugcucuc

SEQ ID NO: 1087413 - RNA, 19 nt, Artificial Sequence
  Description of Artificial Sequence: Synthetic oligonucleotide
cuguuuccuguugcuuagc

SEQ ID NO: 1087414 - RNA, 19 nt, Artificial Sequence
  Description of Artificial Sequence: Synthetic oligonucleotide
ccgaucacuggucauguga

SEQ ID NO: 1087415 - RNA, 19 nt, Artificial Sequence
  Description of Artificial Sequence: Synthetic oligonucleotide
ucgauccgucacuccagua

SEQ ID NO: 1087416 - RNA, 19 nt, Artificial Sequence
  Description of Artificial Sequence: Synthetic oligonucleotide
ucggccgagugaccccgga

SEQ ID NO: 1087417 - RNA, 19 nt, Artificial Sequence
  Description of Artificial Sequence: Synthetic oligonucleotide
gaccugggcgcccgacggc

SEQ ID NO: 1087418 - RNA, 19 nt, Artificial Sequence
  Description of Artificial Sequence: Synthetic oligonucleotide
agggucucccgcggccagc

SEQ ID NO: 1087419 - RNA, 19 nt, Artificial Sequence
  Description of Artificial Sequence: Synthetic oligonucleotide
uugcuucaacuaugcugau

SEQ ID NO: 1087420 - RNA, 19 nt, Artificial Sequence
  Description of Artificial Sequence: Synthetic oligonucleotide
cacaccacuggcgccgauc

SEQ ID NO: 1087421 - RNA, 19 nt, Artificial Sequence
  Description of Artificial Sequence: Synthetic oligonucleotide
cagucgagacugagugcuc

SEQ ID NO: 1087422 - RNA, 19 nt, Artificial Sequence
  Description of Artificial Sequence: Synthetic oligonucleotide
cacuggcgccgaucacugg

SEQ ID NO: 1087423 - RNA, 19 nt, Artificial Sequence
  Description of Artificial Sequence: Synthetic oligonucleotide
ggacagucagucagucagc

SEQ ID NO: 1087424 - RNA, 19 nt, Artificial Sequence
  Description of Artificial Sequence: Synthetic oligonucleotide
agcgcccaucuaagcaggg

SEQ ID NO: 1087425 - RNA, 19 nt, Artificial Sequence
  Description of Artificial Sequence: Synthetic oligonucleotide
aguggcggagucacacgga

SEQ ID NO: 1087426 - RNA, 19 nt, Artificial Sequence
  Description of Artificial Sequence: Synthetic oligonucleotide
ccacucuaugcugcggagg

SEQ ID NO: 1087427 - RNA, 19 nt, Artificial Sequence
  Description of Artificial Sequence: Synthetic oligonucleotide
ggugcgcgcagaccugggc

SEQ ID NO: 1087428 - RNA, 19 nt, Artificial Sequence
  Description of Artificial Sequence: Synthetic oligonucleotide
aggcgcccauaucgauccg

SEQ ID NO: 1087429 - RNA, 19 nt, Artificial Sequence
  Description of Artificial Sequence: Synthetic oligonucleotide
cagcacgaccaacaggacu

SEQ ID NO: 1087430 - RNA, 19 nt, Artificial Sequence
  Description of Artificial Sequence: Synthetic oligonucleotide
ccacuggcgccgaucacug

SEQ ID NO: 1087431 - RNA, 19 nt, Artificial Sequence
  Description of Artificial Sequence: Synthetic oligonucleotide
cuggucaugugagacacuu

SEQ ID NO: 1087432 - RNA, 19 nt, Artificial Sequence
  Description of Artificial Sequence: Synthetic oligonucleotide
ccauaucgauccgucacuc

SEQ ID NO: 1087433 - RNA, 19 nt, Artificial Sequence
  Description of Artificial Sequence: Synthetic oligonucleotide
acgcagugggaaacguccu

SEQ ID NO: 1087434 - RNA, 19 nt, Artificial Sequence
  Description of Artificial Sequence: Synthetic oligonucleotide
gcaccucugagggagaacu

SEQ ID NO: 1087435 - RNA, 19 nt, Artificial Sequence
  Description of Artificial Sequence: Synthetic oligonucleotide
cggagucacacggaggaag

SEQ ID NO: 1087436 - RNA, 19 nt, Artificial Sequence
  Description of Artificial Sequence: Synthetic oligonucleotide
ccuguugcuuagcccugcc

SEQ ID NO: 1087437 - RNA, 19 nt, Artificial Sequence
  Description of Artificial Sequence: Synthetic oligonucleotide
cagcuccccuccgaugcgc

SEQ ID NO: 1087438 - RNA, 19 nt, Artificial Sequence
  Description of Artificial Sequence: Synthetic oligonucleotide
gccgagugaccccggagca

SEQ ID NO: 1087439 - RNA, 19 nt, Artificial Sequence
  Description of Artificial Sequence: Synthetic oligonucleotide
cuucaacuaugcugauggu

SEQ ID NO: 1087440 - RNA, 19 nt, Artificial Sequence
  Description of Artificial Sequence: Synthetic oligonucleotide
cagcggugcgcgcagaccu

SEQ ID NO: 1087441 - RNA, 19 nt, Artificial Sequence
  Description of Artificial Sequence: Synthetic oligonucleotide
ggcaaagcagugacuagcu

SEQ ID NO: 1087442 - RNA, 19 nt, Artificial Sequence
  Description of Artificial Sequence: Synthetic oligonucleotide
cgagugaccccggagcagc

SEQ ID NO: 1087443 - RNA, 19 nt, Artificial Sequence
  Description of Artificial Sequence: Synthetic oligonucleotide
augcaccucugagggagaa

SEQ ID NO: 1087444 - RNA, 19 nt, Artificial Sequence
  Description of Artificial Sequence: Synthetic oligonucleotide
cagaggcguguuucuggga

SEQ ID NO: 1087445 - RNA, 19 nt, Artificial Sequence
  Description of Artificial Sequence: Synthetic oligonucleotide
gcuccucaaugaaauggga

SEQ ID NO: 1087446 - RNA, 19 nt, Artificial Sequence
  Description of Artificial Sequence: Synthetic oligonucleotide
cgacaucacagcaccagga

SEQ ID NO: 1087447 - RNA, 19 nt, Artificial Sequence
  Description of Artificial Sequence: Synthetic oligonucleotide
cccuccgaugcgcugggac

SEQ ID NO: 1087448 - RNA, 19 nt, Artificial Sequence
  Description of Artificial Sequence: Synthetic oligonucleotide
gcgccgaucacuggucaug

SEQ ID NO: 1087449 - RNA, 19 nt, Artificial Sequence
  Description of Artificial Sequence: Synthetic oligonucleotide
ccagucgagacugagugcu

SEQ ID NO: 1087450 - RNA, 19 nt, Artificial Sequence
  Description of Artificial Sequence: Synthetic oligonucleotide
ggagacaucaccagcccuu

SEQ ID NO: 1087451 - RNA, 19 nt, Artificial Sequence
  Description of Artificial Sequence: Synthetic oligonucleotide
ccucuuccgaccuugcccu

SEQ ID NO: 1087452 - RNA, 19 nt, Artificial Sequence
  Description of Artificial Sequence: Synthetic oligonucleotide
cugcgaagaggauggcuau

SEQ ID NO: 1087453 - RNA, 19 nt, Artificial Sequence
  Description of Artificial Sequence: Synthetic oligonucleotide
cccgaguccaugugcagaa

SEQ ID NO: 1087454 - RNA, 19 nt, Artificial Sequence
  Description of Artificial Sequence: Synthetic oligonucleotide
ccucggccgagugaccccg

SEQ ID NO: 1087455 - RNA, 19 nt, Artificial Sequence
  Description of Artificial Sequence: Synthetic oligonucleotide
agcggugcgcgcagaccug

SEQ ID NO: 1087456 - RNA, 19 nt, Artificial Sequence
  Description of Artificial Sequence: Synthetic oligonucleotide
gcggugcgcgcagaccugg

SEQ ID NO: 1087457 - RNA, 19 nt, Artificial Sequence
  Description of Artificial Sequence: Synthetic oligonucleotide
gggaaacguccucuccaaa

SEQ ID NO: 1087458 - RNA, 19 nt, Artificial Sequence
  Description of Artificial Sequence: Synthetic oligonucleotide
gccgaucacuggucaugug

SEQ ID NO: 1087459 - RNA, 19 nt, Artificial Sequence
  Description of Artificial Sequence: Synthetic oligonucleotide
agcuccccuccgaugcgcu

SEQ ID NO: 1087460 - RNA, 19 nt, Artificial Sequence
  Description of Artificial Sequence: Synthetic oligonucleotide
gcaugacugccuguuccuc

SEQ ID NO: 1087461 - RNA, 19 nt, Artificial Sequence
  Description of Artificial Sequence: Synthetic oligonucleotide
cccauaucgauccgucacu

SEQ ID NO: 1087462 - RNA, 19 nt, Artificial Sequence
  Description of Artificial Sequence: Synthetic oligonucleotide
gcgcccauaucgauccguc

SEQ ID NO: 1087463 - RNA, 19 nt, Artificial Sequence
  Description of Artificial Sequence: Synthetic oligonucleotide
ccgagugaccccggagcag

SEQ ID NO: 1087464 - RNA, 19 nt, Artificial Sequence
  Description of Artificial Sequence: Synthetic oligonucleotide
gcccgagcccuccccugag

SEQ ID NO: 1087465 - RNA, 19 nt, Artificial Sequence
  Description of Artificial Sequence: Synthetic oligonucleotide
ccucaaugaaaugggaguu

SEQ ID NO: 1087466 - RNA, 19 nt, Artificial Sequence
  Description of Artificial Sequence: Synthetic oligonucleotide
cucaaccacuccaguccau

SEQ ID NO: 1087467 - RNA, 19 nt, Artificial Sequence
  Description of Artificial Sequence: Synthetic oligonucleotide
gccgaguacuugugaugaa

SEQ ID NO: 1087468 - RNA, 19 nt, Artificial Sequence
  Description of Artificial Sequence: Synthetic oligonucleotide
cucgaucaaggcgcccaua

SEQ ID NO: 1087469 - RNA, 19 nt, Artificial Sequence
  Description of Artificial Sequence: Synthetic oligonucleotide
gcucucgaucaaggcgccc

SEQ ID NO: 1087470 - RNA, 19 nt, Artificial Sequence
  Description of Artificial Sequence: Synthetic oligonucleotide
cgauccgucacuccaguau

SEQ ID NO: 1087471 - RNA, 19 nt, Artificial Sequence
  Description of Artificial Sequence: Synthetic oligonucleotide
cgccucggccgagugaccc

SEQ ID NO: 1087472 - RNA, 19 nt, Artificial Sequence
  Description of Artificial Sequence: Synthetic oligonucleotide
ccgagugcuugcuucuccu

SEQ ID NO: 1087473 - RNA, 19 nt, Artificial Sequence
  Description of Artificial Sequence: Synthetic oligonucleotide
ggacaacagcgcccaucua

SEQ ID NO: 1087474 - RNA, 19 nt, Artificial Sequence
  Description of Artificial Sequence: Synthetic oligonucleotide
gguuguuccucagcucguu

SEQ ID NO: 1087475 - RNA, 19 nt, Artificial Sequence
  Description of Artificial Sequence: Synthetic oligonucleotide
gccugaggagggccgacau

SEQ ID NO: 1087476 - RNA, 19 nt, Artificial Sequence
  Description of Artificial Sequence: Synthetic oligonucleotide
ggcgcccauaucgauccgu

SEQ ID NO: 1087477 - RNA, 19 nt, Artificial Sequence
  Description of Artificial Sequence: Synthetic oligonucleotide
gcgcgcagaccugggcgcc

SEQ ID NO: 1087478 - RNA, 19 nt, Artificial Sequence
  Description of Artificial Sequence: Synthetic oligonucleotide
ccgacggccgccgguccag

SEQ ID NO: 1087479 - RNA, 19 nt, Artificial Sequence
  Description of Artificial Sequence: Synthetic oligonucleotide
cgcccauaucgauccguca

SEQ ID NO: 1087480 - RNA, 19 nt, Artificial Sequence
  Description of Artificial Sequence: Synthetic oligonucleotide
ggcgccgaucacuggucau

SEQ ID NO: 1087481 - RNA, 19 nt, Artificial Sequence
  Description of Artificial Sequence: Synthetic oligonucleotide
gcggagucacacggaggaa

SEQ ID NO: 1087482 - RNA, 19 nt, Artificial Sequence
  Description of Artificial Sequence: Synthetic oligonucleotide
caguugcauccagguugaa

SEQ ID NO: 1087483 - RNA, 19 nt, Artificial Sequence
  Description of Artificial Sequence: Synthetic oligonucleotide
cccgacggccgccggucca

SEQ ID NO: 1087484 - RNA, 19 nt, Artificial Sequence
  Description of Artificial Sequence: Synthetic oligonucleotide
cgcgcagaccugggcgccc

SEQ ID NO: 1087485 - RNA, 19 nt, Artificial Sequence
  Description of Artificial Sequence: Synthetic oligonucleotide
gcgccucggccgagugacc

SEQ ID NO: 1087486 - RNA, 19 nt, Artificial Sequence
  Description of Artificial Sequence: Synthetic oligonucleotide
cgcccgacggccgccgguc

SEQ ID NO: 1087487 - RNA, 19 nt, Artificial Sequence
  Description of Artificial Sequence: Synthetic oligonucleotide
cgccgaucacuggucaugu

SEQ ID NO: 1087488 - RNA, 19 nt, Artificial Sequence
  Description of Artificial Sequence: Synthetic oligonucleotide
cgacggccgccgguccagc

SEQ ID NO: 1087489 - RNA, 19 nt, Artificial Sequence
  Description of Artificial Sequence: Synthetic oligonucleotide
gcgcccgacggccgccggu

SEQ ID NO: 1087490 - RNA, 19 nt, Artificial Sequence
  Description of Artificial Sequence: Synthetic oligonucleotide
cgaugcgcugggacauguu

SEQ ID NO: 1087491 - RNA, 19 nt, Artificial Sequence
  Description of Artificial Sequence: Synthetic oligonucleotide
aaaggauacaaauuuacac

SEQ ID NO: 1087492 - RNA, 19 nt, Artificial Sequence
  Description of Artificial Sequence: Synthetic oligonucleotide
uaagcaaacacuaaaagag

SEQ ID NO: 1087493 - RNA, 19 nt, Artificial Sequence
  Description of Artificial Sequence: Synthetic oligonucleotide
uuaaguggagcacagauca

SEQ ID NO: 1087494 - RNA, 19 nt, Artificial Sequence
  Description of Artificial Sequence: Synthetic oligonucleotide
aauguuuaguuauagauua

SEQ ID NO: 1087495 - RNA, 19 nt, Artificial Sequence
  Description of Artificial Sequence: Synthetic oligonucleotide
aauuucaguaagcauauca

SEQ ID NO: 1087496 - RNA, 19 nt, Artificial Sequence
  Description of Artificial Sequence: Synthetic oligonucleotide
uuaaaagacacuaaugguc

SEQ ID NO: 1087497 - RNA, 19 nt, Artificial Sequence
  Description of Artificial Sequence: Synthetic oligonucleotide
agguauaugguccuuagcg

SEQ ID NO: 1087498 - RNA, 19 nt, Artificial Sequence
  Description of Artificial Sequence: Synthetic oligonucleotide
uuaguuauagauuaugaaa

SEQ ID NO: 1087499 - RNA, 19 nt, Artificial Sequence
  Description of Artificial Sequence: Synthetic oligonucleotide
gaaucaugaauccuuaaag

SEQ ID NO: 1087500 - RNA, 19 nt, Artificial Sequence
  Description of Artificial Sequence: Synthetic oligonucleotide
ucuaaugccacugaucugg

SEQ ID NO: 1087501 - RNA, 19 nt, Artificial Sequence
  Description of Artificial Sequence: Synthetic oligonucleotide
aaagaggguaacuauauau

SEQ ID NO: 1087502 - RNA, 19 nt, Artificial Sequence
  Description of Artificial Sequence: Synthetic oligonucleotide
aagcauaucagauguacug

SEQ ID NO: 1087503 - RNA, 19 nt, Artificial Sequence
  Description of Artificial Sequence: Synthetic oligonucleotide
uucacaagcauuuuggcac

SEQ ID NO: 1087504 - RNA, 19 nt, Artificial Sequence
  Description of Artificial Sequence: Synthetic oligonucleotide
auuacuacgaacaagggca

SEQ ID NO: 1087505 - RNA, 19 nt, Artificial Sequence
  Description of Artificial Sequence: Synthetic oligonucleotide
cuaauggucccuaagaaac

SEQ ID NO: 1087506 - RNA, 19 nt, Artificial Sequence
  Description of Artificial Sequence: Synthetic oligonucleotide
uaguuauagauuaugaaau

SEQ ID NO: 1087507 - RNA, 19 nt, Artificial Sequence
  Description of Artificial Sequence: Synthetic oligonucleotide
uauagauuaugaaaugaga

SEQ ID NO: 1087508 - RNA, 19 nt, Artificial Sequence
  Description of Artificial Sequence: Synthetic oligonucleotide
auuacaauggcacucgugu

SEQ ID NO: 1087509 - RNA, 19 nt, Artificial Sequence
  Description of Artificial Sequence: Synthetic oligonucleotide
cuguuauugaaauagcgag

SEQ ID NO: 1087510 - RNA, 19 nt, Artificial Sequence
  Description of Artificial Sequence: Synthetic oligonucleotide
auucuaaugccacugaucu

SEQ ID NO: 1087511 - RNA, 19 nt, Artificial Sequence
  Description of Artificial Sequence: Synthetic oligonucleotide
ugauuuauuaaauggacau

SEQ ID NO: 1087512 - RNA, 19 nt, Artificial Sequence
  Description of Artificial Sequence: Synthetic oligonucleotide
gaaguuaagagauacugca

SEQ ID NO: 1087513 - RNA, 19 nt, Artificial Sequence
  Description of Artificial Sequence: Synthetic oligonucleotide
uguaugauauaaaauaauu

SEQ ID NO: 1087514 - RNA, 19 nt, Artificial Sequence
  Description of Artificial Sequence: Synthetic oligonucleotide
uuuaaaagacacuaauggu

SEQ ID NO: 1087515 - RNA, 19 nt, Artificial Sequence
  Description of Artificial Sequence: Synthetic oligonucleotide
aaaguuguguguucuucac

SEQ ID NO: 1087516 - RNA, 19 nt, Artificial Sequence
  Description of Artificial Sequence: Synthetic oligonucleotide
ucuguuauugaaauagcga

SEQ ID NO: 1087517 - RNA, 19 nt, Artificial Sequence
  Description of Artificial Sequence: Synthetic oligonucleotide
aacacuaaaagaggguaac

SEQ ID NO: 1087518 - RNA, 19 nt, Artificial Sequence
  Description of Artificial Sequence: Synthetic oligonucleotide
aaaagacacuaaugguccc

SEQ ID NO: 1087519 - RNA, 19 nt, Artificial Sequence
  Description of Artificial Sequence: Synthetic oligonucleotide
uucuaugccagaaauuuca

SEQ ID NO: 1087520 - RNA, 19 nt, Artificial Sequence
  Description of Artificial Sequence: Synthetic oligonucleotide
acuuaagccauuucgucgg

SEQ ID NO: 1087521 - RNA, 19 nt, Artificial Sequence
  Description of Artificial Sequence: Synthetic oligonucleotide
agaggguaacuauauauuc

SEQ ID NO: 1087522 - RNA, 19 nt, Artificial Sequence
  Description of Artificial Sequence: Synthetic oligonucleotide
uuaaagucagggcuuuggg

SEQ ID NO: 1087523 - RNA, 19 nt, Artificial Sequence
  Description of Artificial Sequence: Synthetic oligonucleotide
ucuacuuaagccauuucgu

SEQ ID NO: 1087524 - RNA, 19 nt, Artificial Sequence
  Description of Artificial Sequence: Synthetic oligonucleotide
aaguaccuaaucuuuugag

SEQ ID NO: 1087525 - RNA, 19 nt, Artificial Sequence
  Description of Artificial Sequence: Synthetic oligonucleotide
aaguguuguauacaagugu

SEQ ID NO: 1087526 - RNA, 19 nt, Artificial Sequence
  Description of Artificial Sequence: Synthetic oligonucleotide
aaaaguuguguguucuuca

SEQ ID NO: 1087527 - RNA, 19 nt, Artificial Sequence
  Description of Artificial Sequence: Synthetic oligonucleotide
aaaucuuacagagucuucu

SEQ ID NO: 1087528 - RNA, 19 nt, Artificial Sequence
  Description of Artificial Sequence: Synthetic oligonucleotide
gacaaggagacuaaaauca

SEQ ID NO: 1087529 - RNA, 19 nt, Artificial Sequence
  Description of Artificial Sequence: Synthetic oligonucleotide
ugaauccuuaaagucaggg

SEQ ID NO: 1087530 - RNA, 19 nt, Artificial Sequence
  Description of Artificial Sequence: Synthetic oligonucleotide
aaugccacugaucugggau

SEQ ID NO: 1087531 - RNA, 19 nt, Artificial Sequence
  Description of Artificial Sequence: Synthetic oligonucleotide
uuguguaaaggauacaaau

SEQ ID NO: 1087532 - RNA, 19 nt, Artificial Sequence
  Description of Artificial Sequence: Synthetic oligonucleotide
uguuauugaaauagcgaga

SEQ ID NO: 1087533 - RNA, 19 nt, Artificial Sequence
  Description of Artificial Sequence: Synthetic oligonucleotide
ugagaaggcauuacuacga

SEQ ID NO: 1087534 - RNA, 19 nt, Artificial Sequence
  Description of Artificial Sequence: Synthetic oligonucleotide
ucucagcacacacacacag

SEQ ID NO: 1087535 - RNA, 19 nt, Artificial Sequence
  Description of Artificial Sequence: Synthetic oligonucleotide
cauacucgaauaaucaaug

SEQ ID NO: 1087536 - RNA, 19 nt, Artificial Sequence
  Description of Artificial Sequence: Synthetic oligonucleotide
uaaaagaggguaacuauau

SEQ ID NO: 1087537 - RNA, 19 nt, Artificial Sequence
  Description of Artificial Sequence: Synthetic oligonucleotide
agcuaucucagcugggacc

SEQ ID NO: 1087538 - RNA, 19 nt, Artificial Sequence
  Description of Artificial Sequence: Synthetic oligonucleotide
cuuaauucccuacaucuac

SEQ ID NO: 1087539 - RNA, 19 nt, Artificial Sequence
  Description of Artificial Sequence: Synthetic oligonucleotide
ugguccuuagcguugagcc

SEQ ID NO: 1087540 - RNA, 19 nt, Artificial Sequence
  Description of Artificial Sequence: Synthetic oligonucleotide
aaggagucaucacacaggu

SEQ ID NO: 1087541 - RNA, 19 nt, Artificial Sequence
  Description of Artificial Sequence: Synthetic oligonucleotide
aguuauagauuaugaaaug

SEQ ID NO: 1087542 - RNA, 19 nt, Artificial Sequence
  Description of Artificial Sequence: Synthetic oligonucleotide
cuaagugggacaaggagac

SEQ ID NO: 1087543 - RNA, 19 nt, Artificial Sequence
  Description of Artificial Sequence: Synthetic oligonucleotide
aauuuaggaaauguuggga

SEQ ID NO: 1087544 - RNA, 19 nt, Artificial Sequence
  Description of Artificial Sequence: Synthetic oligonucleotide
auccuagauaggaagagcc

SEQ ID NO: 1087545 - RNA, 19 nt, Artificial Sequence
  Description of Artificial Sequence: Synthetic oligonucleotide
aagaggauuuccaaucuuc

SEQ ID NO: 1087546 - RNA, 19 nt, Artificial Sequence
  Description of Artificial Sequence: Synthetic oligonucleotide
ucauagcuaccacaggucc

SEQ ID NO: 1087547 - RNA, 19 nt, Artificial Sequence
  Description of Artificial Sequence: Synthetic oligonucleotide
cauuacuacgaacaagggc

SEQ ID NO: 1087548 - RNA, 19 nt, Artificial Sequence
  Description of Artificial Sequence: Synthetic oligonucleotide
uaaauggacauacucgaau

SEQ ID NO: 1087549 - RNA, 19 nt, Artificial Sequence
  Description of Artificial Sequence: Synthetic oligonucleotide
uuucaguaagcauaucaga

SEQ ID NO: 1087550 - RNA, 19 nt, Artificial Sequence
  Description of Artificial Sequence: Synthetic oligonucleotide
gaauccuuaaagucagggc

SEQ ID NO: 1087551 - RNA, 19 nt, Artificial Sequence
  Description of Artificial Sequence: Synthetic oligonucleotide
guaaguagggcucucaguc

SEQ ID NO: 1087552 - RNA, 19 nt, Artificial Sequence
  Description of Artificial Sequence: Synthetic oligonucleotide
ggauaaaacuguuaaauuc

SEQ ID NO: 1087553 - RNA, 19 nt, Artificial Sequence
  Description of Artificial Sequence: Synthetic oligonucleotide
uguuuaguuauagauuaug

SEQ ID NO: 1087554 - RNA, 19 nt, Artificial Sequence
  Description of Artificial Sequence: Synthetic oligonucleotide
aaauggacauacucgaaua

SEQ ID NO: 1087555 - RNA, 19 nt, Artificial Sequence
  Description of Artificial Sequence: Synthetic oligonucleotide
cugagaaggcauuacuacg

SEQ ID NO: 1087556 - RNA, 19 nt, Artificial Sequence
  Description of Artificial Sequence: Synthetic oligonucleotide
ucaaguaccuaaucuuuug

SEQ ID NO: 1087557 - RNA, 19 nt, Artificial Sequence
  Description of Artificial Sequence: Synthetic oligonucleotide
ggcauuacuacgaacaagg

SEQ ID NO: 1087558 - RNA, 19 nt, Artificial Sequence
  Description of Artificial Sequence: Synthetic oligonucleotide
ccuaagaaacauuaagugg

SEQ ID NO: 1087559 - RNA, 19 nt, Artificial Sequence
  Description of Artificial Sequence: Synthetic oligonucleotide
cugaaguuaagagauacug

SEQ ID NO: 1087560 - RNA, 19 nt, Artificial Sequence
  Description of Artificial Sequence: Synthetic oligonucleotide
ugcuacugaaguuaagaga

SEQ ID NO: 1087561 - RNA, 19 nt, Artificial Sequence
  Description of Artificial Sequence: Synthetic oligonucleotide
aguuugaccgagugucugc

SEQ ID NO: 1087562 - RNA, 19 nt, Artificial Sequence
  Description of Artificial Sequence: Synthetic oligonucleotide
agagauacugcauagucua

SEQ ID NO: 1087563 - RNA, 19 nt, Artificial Sequence
  Description of Artificial Sequence: Synthetic oligonucleotide
uacucgaauaaucaaugaa

SEQ ID NO: 1087564 - RNA, 19 nt, Artificial Sequence
  Description of Artificial Sequence: Synthetic oligonucleotide
augcagauuacaauggcac

SEQ ID NO: 1087565 - RNA, 19 nt, Artificial Sequence
  Description of Artificial Sequence: Synthetic oligonucleotide
uagucuaagugggacaagg

SEQ ID NO: 1087566 - RNA, 19 nt, Artificial Sequence
  Description of Artificial Sequence: Synthetic oligonucleotide
uauucuaaugccacugauc

SEQ ID NO: 1087567 - RNA, 19 nt, Artificial Sequence
  Description of Artificial Sequence: Synthetic oligonucleotide
gaauuuguguaaaggauac

SEQ ID NO: 1087568 - RNA, 19 nt, Artificial Sequence
  Description of Artificial Sequence: Synthetic oligonucleotide
aaacauuaaguggagcaca

SEQ ID NO: 1087569 - RNA, 19 nt, Artificial Sequence
  Description of Artificial Sequence: Synthetic oligonucleotide
uauaugguccuuagcguug

SEQ ID NO: 1087570 - RNA, 19 nt, Artificial Sequence
  Description of Artificial Sequence: Synthetic oligonucleotide
auagauuaugaaaugagaa

SEQ ID NO: 1087571 - RNA, 19 nt, Artificial Sequence
  Description of Artificial Sequence: Synthetic oligonucleotide
aucugcgcggagcauacgc

SEQ ID NO: 1087572 - RNA, 19 nt, Artificial Sequence
  Description of Artificial Sequence: Synthetic oligonucleotide
aauggacauacucgaauaa

SEQ ID NO: 1087573 - RNA, 19 nt, Artificial Sequence
  Description of Artificial Sequence: Synthetic oligonucleotide
ggagacuaaaaucagcuac

SEQ ID NO: 1087574 - RNA, 19 nt, Artificial Sequence
  Description of Artificial Sequence: Synthetic oligonucleotide
ucgaauaaucaaugaaaac

SEQ ID NO: 1087575 - RNA, 19 nt, Artificial Sequence
  Description of Artificial Sequence: Synthetic oligonucleotide
aguuguguguucuucacaa

SEQ ID NO: 1087576 - RNA, 19 nt, Artificial Sequence
  Description of Artificial Sequence: Synthetic oligonucleotide
auaauguacuugugcuucg

SEQ ID NO: 1087577 - RNA, 19 nt, Artificial Sequence
  Description of Artificial Sequence: Synthetic oligonucleotide
guaaaggauacaaauuuac

SEQ ID NO: 1087578 - RNA, 19 nt, Artificial Sequence
  Description of Artificial Sequence: Synthetic oligonucleotide
uguagaagaggauuuccaa

SEQ ID NO: 1087579 - RNA, 19 nt, Artificial Sequence
  Description of Artificial Sequence: Synthetic oligonucleotide
uccuaugaaauguuuaguu

SEQ ID NO: 1087580 - RNA, 19 nt, Artificial Sequence
  Description of Artificial Sequence: Synthetic oligonucleotide
gagaugcagauuacaaugg

SEQ ID NO: 1087581 - RNA, 19 nt, Artificial Sequence
  Description of Artificial Sequence: Synthetic oligonucleotide
aauggcacucguguuaucu

SEQ ID NO: 1087582 - RNA, 19 nt, Artificial Sequence
  Description of Artificial Sequence: Synthetic oligonucleotide
aguuaagagauacugcaua

SEQ ID NO: 1087583 - RNA, 19 nt, Artificial Sequence
  Description of Artificial Sequence: Synthetic oligonucleotide
acacacaguuuuccggugc

SEQ ID NO: 1087584 - RNA, 19 nt, Artificial Sequence
  Description of Artificial Sequence: Synthetic oligonucleotide
uuguaaguagggcucucag

SEQ ID NO: 1087585 - RNA, 19 nt, Artificial Sequence
  Description of Artificial Sequence: Synthetic oligonucleotide
gucuaagugggacaaggag

SEQ ID NO: 1087586 - RNA, 19 nt, Artificial Sequence
  Description of Artificial Sequence: Synthetic oligonucleotide
uccaaucuucuucuguccc

SEQ ID NO: 1087587 - RNA, 19 nt, Artificial Sequence
  Description of Artificial Sequence: Synthetic oligonucleotide
ugcuuuuccuaugaaaugu

SEQ ID NO: 1087588 - RNA, 19 nt, Artificial Sequence
  Description of Artificial Sequence: Synthetic oligonucleotide
ucagcacacacacacaguu

SEQ ID NO: 1087589 - RNA, 19 nt, Artificial Sequence
  Description of Artificial Sequence: Synthetic oligonucleotide
uaagcauaucagauguacu

SEQ ID NO: 1087590 - RNA, 19 nt, Artificial Sequence
  Description of Artificial Sequence: Synthetic oligonucleotide
uggaaucauauuccaaagu

SEQ ID NO: 1087591 - RNA, 19 nt, Artificial Sequence
  Description of Artificial Sequence: Synthetic oligonucleotide
auuucgucggugcuucuuc

SEQ ID NO: 1087592 - RNA, 19 nt, Artificial Sequence
  Description of Artificial Sequence: Synthetic oligonucleotide
aacauuaaguggagcacag

SEQ ID NO: 1087593 - RNA, 19 nt, Artificial Sequence
  Description of Artificial Sequence: Synthetic oligonucleotide
gacacuaauggucccuaag

SEQ ID NO: 1087594 - RNA, 19 nt, Artificial Sequence
  Description of Artificial Sequence: Synthetic oligonucleotide
aguuugcuuacuaauuuuc

SEQ ID NO: 1087595 - RNA, 19 nt, Artificial Sequence
  Description of Artificial Sequence: Synthetic oligonucleotide
acacuaauggucccuaaga

SEQ ID NO: 1087596 - RNA, 19 nt, Artificial Sequence
  Description of Artificial Sequence: Synthetic oligonucleotide
auacgcugccuccagcggc

SEQ ID NO: 1087597 - RNA, 19 nt, Artificial Sequence
  Description of Artificial Sequence: Synthetic oligonucleotide
agaguguggacacuugugu

SEQ ID NO: 1087598 - RNA, 19 nt, Artificial Sequence
  Description of Artificial Sequence: Synthetic oligonucleotide
agaaggcauuacuacgaac

SEQ ID NO: 1087599 - RNA, 19 nt, Artificial Sequence
  Description of Artificial Sequence: Synthetic oligonucleotide
ucacuucccaggauaaugu

SEQ ID NO: 1087600 - RNA, 19 nt, Artificial Sequence
  Description of Artificial Sequence: Synthetic oligonucleotide
caaguguuguauacaagug

SEQ ID NO: 1087601 - RNA, 19 nt, Artificial Sequence
  Description of Artificial Sequence: Synthetic oligonucleotide
cacaauuacugugucagag

SEQ ID NO: 1087602 - RNA, 19 nt, Artificial Sequence
  Description of Artificial Sequence: Synthetic oligonucleotide
acagucuggauacucccuc

SEQ ID NO: 1087603 - RNA, 19 nt, Artificial Sequence
  Description of Artificial Sequence: Synthetic oligonucleotide
caaggagacuaaaaucagc

SEQ ID NO: 1087604 - RNA, 19 nt, Artificial Sequence
  Description of Artificial Sequence: Synthetic oligonucleotide
guggaaucauauuccaaag

SEQ ID NO: 1087605 - RNA, 19 nt, Artificial Sequence
  Description of Artificial Sequence: Synthetic oligonucleotide
acuugugucugguucaggu

SEQ ID NO: 1087606 - RNA, 19 nt, Artificial Sequence
  Description of Artificial Sequence: Synthetic oligonucleotide
ucgcauccuagauaggaag

SEQ ID NO: 1087607 - RNA, 19 nt, Artificial Sequence
  Description of Artificial Sequence: Synthetic oligonucleotide
ugggacaauuuucuucaag

SEQ ID NO: 1087608 - RNA, 19 nt, Artificial Sequence
  Description of Artificial Sequence: Synthetic oligonucleotide
guaagcauaucagauguac

SEQ ID NO: 1087609 - RNA, 19 nt, Artificial Sequence
  Description of Artificial Sequence: Synthetic oligonucleotide
acucguguuaucugcgcgg

SEQ ID NO: 1087610 - RNA, 19 nt, Artificial Sequence
  Description of Artificial Sequence: Synthetic oligonucleotide
ugauugucugcuccuggag

SEQ ID NO: 1087611 - RNA, 19 nt, Artificial Sequence
  Description of Artificial Sequence: Synthetic oligonucleotide
agcaacuuaauucccuaca

SEQ ID NO: 1087612 - RNA, 19 nt, Artificial Sequence
  Description of Artificial Sequence: Synthetic oligonucleotide
uuacuacgaacaagggcag

SEQ ID NO: 1087613 - RNA, 19 nt, Artificial Sequence
  Description of Artificial Sequence: Synthetic oligonucleotide
uccuagauaggaagagccc

SEQ ID NO: 1087614 - RNA, 19 nt, Artificial Sequence
  Description of Artificial Sequence: Synthetic oligonucleotide
aucuuuugaggucaucacu

SEQ ID NO: 1087615 - RNA, 19 nt, Artificial Sequence
  Description of Artificial Sequence: Synthetic oligonucleotide
auuaaguggagcacagauc

SEQ ID NO: 1087616 - RNA, 19 nt, Artificial Sequence
  Description of Artificial Sequence: Synthetic oligonucleotide
uuagucaaagaaucaugaa

SEQ ID NO: 1087617 - RNA, 19 nt, Artificial Sequence
  Description of Artificial Sequence: Synthetic oligonucleotide
acuauauauucuaaugcca

SEQ ID NO: 1087618 - RNA, 19 nt, Artificial Sequence
  Description of Artificial Sequence: Synthetic oligonucleotide
acuaauggucccuaagaaa

SEQ ID NO: 1087619 - RNA, 19 nt, Artificial Sequence
  Description of Artificial Sequence: Synthetic oligonucleotide
aaguacaaggccaggauaa

SEQ ID NO: 1087620 - RNA, 19 nt, Artificial Sequence
  Description of Artificial Sequence: Synthetic oligonucleotide
aagagauacugcauagucu

SEQ ID NO: 1087621 - RNA, 19 nt, Artificial Sequence
  Description of Artificial Sequence: Synthetic oligonucleotide
uuaaauggacauacucgaa

SEQ ID NO: 1087622 - RNA, 19 nt, Artificial Sequence
  Description of Artificial Sequence: Synthetic oligonucleotide
uuuauaauacaggcaagua

SEQ ID NO: 1087623 - RNA, 19 nt, Artificial Sequence
  Description of Artificial Sequence: Synthetic oligonucleotide
acucccucgagcuaucuca

SEQ ID NO: 1087624 - RNA, 19 nt, Artificial Sequence
  Description of Artificial Sequence: Synthetic oligonucleotide
acaauuacugugucagagu

SEQ ID NO: 1087625 - RNA, 19 nt, Artificial Sequence
  Description of Artificial Sequence: Synthetic oligonucleotide
uaaaacuguuaaauuccaa

SEQ ID NO: 1087626 - RNA, 19 nt, Artificial Sequence
  Description of Artificial Sequence: Synthetic oligonucleotide
auacugcauagucuaagug

SEQ ID NO: 1087627 - RNA, 19 nt, Artificial Sequence
  Description of Artificial Sequence: Synthetic oligonucleotide
uggucccuaagaaacauua

SEQ ID NO: 1087628 - RNA, 19 nt, Artificial Sequence
  Description of Artificial Sequence: Synthetic oligonucleotide
cucgaauaaucaaugaaaa

SEQ ID NO: 1087629 - RNA, 19 nt, Artificial Sequence
  Description of Artificial Sequence: Synthetic oligonucleotide
cuacuuaagccauuucguc

SEQ ID NO: 1087630 - RNA, 19 nt, Artificial Sequence
  Description of Artificial Sequence: Synthetic oligonucleotide
cucgagcuaucucagcugg

SEQ ID NO: 1087631 - RNA, 19 nt, Artificial Sequence
  Description of Artificial Sequence: Synthetic oligonucleotide
gacaggguauuagucaaag

SEQ ID NO: 1087632 - RNA, 19 nt, Artificial Sequence
  Description of Artificial Sequence: Synthetic oligonucleotide
aaggcauuacuacgaacaa

SEQ ID NO: 1087633 - RNA, 19 nt, Artificial Sequence
  Description of Artificial Sequence: Synthetic oligonucleotide
aaguggagcacagaucacu

SEQ ID NO: 1087634 - RNA, 19 nt, Artificial Sequence
  Description of Artificial Sequence: Synthetic oligonucleotide
aucagcuacguuagcaugg

SEQ ID NO: 1087635 - RNA, 19 nt, Artificial Sequence
  Description of Artificial Sequence: Synthetic oligonucleotide
aaagacacuaauggucccu

SEQ ID NO: 1087636 - RNA, 19 nt, Artificial Sequence
  Description of Artificial Sequence: Synthetic oligonucleotide
uaugaggcaaacacaccuc

SEQ ID NO: 1087637 - RNA, 19 nt, Artificial Sequence
  Description of Artificial Sequence: Synthetic oligonucleotide
uggucaguuugaccgagug

SEQ ID NO: 1087638 - RNA, 19 nt, Artificial Sequence
  Description of Artificial Sequence: Synthetic oligonucleotide
cagauuacaauggcacucg

SEQ ID NO: 1087639 - RNA, 19 nt, Artificial Sequence
  Description of Artificial Sequence: Synthetic oligonucleotide
aggguaacuauauauucua

SEQ ID NO: 1087640 - RNA, 19 nt, Artificial Sequence
  Description of Artificial Sequence: Synthetic oligonucleotide
agcuacguuagcauggcuc

SEQ ID NO: 1087641 - RNA, 19 nt, Artificial Sequence
  Description of Artificial Sequence: Synthetic oligonucleotide
uaauacaggcaaguacaag

SEQ ID NO: 1087642 - RNA, 19 nt, Artificial Sequence
  Description of Artificial Sequence: Synthetic oligonucleotide
ggauuguccaugcucaccc

SEQ ID NO: 1087643 - RNA, 19 nt, Artificial Sequence
  Description of Artificial Sequence: Synthetic oligonucleotide
guuagcauggcucaaugcu

SEQ ID NO: 1087644 - RNA, 19 nt, Artificial Sequence
  Description of Artificial Sequence: Synthetic oligonucleotide
ugugucagaguaagagacu

SEQ ID NO: 1087645 - RNA, 19 nt, Artificial Sequence
  Description of Artificial Sequence: Synthetic oligonucleotide
cuagauaggaagagcccac

SEQ ID NO: 1087646 - RNA, 19 nt, Artificial Sequence
  Description of Artificial Sequence: Synthetic oligonucleotide
uccaguuugcuuacuaauu

SEQ ID NO: 1087647 - RNA, 19 nt, Artificial Sequence
  Description of Artificial Sequence: Synthetic oligonucleotide
guaccuaaucuuuugaggu

SEQ ID NO: 1087648 - RNA, 19 nt, Artificial Sequence
  Description of Artificial Sequence: Synthetic oligonucleotide
uuagcauggcucaaugcuu

SEQ ID NO: 1087649 - RNA, 19 nt, Artificial Sequence
  Description of Artificial Sequence: Synthetic oligonucleotide
uucagaaagagcucaucuu

SEQ ID NO: 1087650 - RNA, 19 nt, Artificial Sequence
  Description of Artificial Sequence: Synthetic oligonucleotide
auacucgaauaaucaauga

SEQ ID NO: 1087651 - RNA, 19 nt, Artificial Sequence
  Description of Artificial Sequence: Synthetic oligonucleotide
cuacaucuacaaaauucac

SEQ ID NO: 1087652 - RNA, 19 nt, Artificial Sequence
  Description of Artificial Sequence: Synthetic oligonucleotide
uuaucugcgcggagcauac

SEQ ID NO: 1087653 - RNA, 19 nt, Artificial Sequence
  Description of Artificial Sequence: Synthetic oligonucleotide
uuaagagauacugcauagu

SEQ ID NO: 1087654 - RNA, 19 nt, Artificial Sequence
  Description of Artificial Sequence: Synthetic oligonucleotide
uuucuuggcuguuguaagu

SEQ ID NO: 1087655 - RNA, 19 nt, Artificial Sequence
  Description of Artificial Sequence: Synthetic oligonucleotide
cccuaagaaacauuaagug

SEQ ID NO: 1087656 - RNA, 19 nt, Artificial Sequence
  Description of Artificial Sequence: Synthetic oligonucleotide
ugucacaauuacuguguca

SEQ ID NO: 1087657 - RNA, 19 nt, Artificial Sequence
  Description of Artificial Sequence: Synthetic oligonucleotide
agcacacacacacaguuuu

SEQ ID NO: 1087658 - RNA, 19 nt, Artificial Sequence
  Description of Artificial Sequence: Synthetic oligonucleotide
ugcagauuacaauggcacu

SEQ ID NO: 1087659 - RNA, 19 nt, Artificial Sequence
  Description of Artificial Sequence: Synthetic oligonucleotide
auauucuaaugccacugau

SEQ ID NO: 1087660 - RNA, 19 nt, Artificial Sequence
  Description of Artificial Sequence: Synthetic oligonucleotide
aagaggguaacuauauauu

SEQ ID NO: 1087661 - RNA, 19 nt, Artificial Sequence
  Description of Artificial Sequence: Synthetic oligonucleotide
aaaaugcuacugaaguuaa

SEQ ID NO: 1087662 - RNA, 19 nt, Artificial Sequence
  Description of Artificial Sequence: Synthetic oligonucleotide
aucuuacagagucuucuga

SEQ ID NO: 1087663 - RNA, 19 nt, Artificial Sequence
  Description of Artificial Sequence: Synthetic oligonucleotide
aauggucccuaagaaacau

SEQ ID NO: 1087664 - RNA, 19 nt, Artificial Sequence
  Description of Artificial Sequence: Synthetic oligonucleotide
uggucuuggcacauggaaa

SEQ ID NO: 1087665 - RNA, 19 nt, Artificial Sequence
  Description of Artificial Sequence: Synthetic oligonucleotide
cuuuugaggucaucacuac

SEQ ID NO: 1087666 - RNA, 19 nt, Artificial Sequence
  Description of Artificial Sequence: Synthetic oligonucleotide
uccccugauugucugcucc

SEQ ID NO: 1087667 - RNA, 19 nt, Artificial Sequence
  Description of Artificial Sequence: Synthetic oligonucleotide
guguauaauaagcauuuua

SEQ ID NO: 1087668 - RNA, 19 nt, Artificial Sequence
  Description of Artificial Sequence: Synthetic oligonucleotide
aaagcccucgcauccuaga

SEQ ID NO: 1087669 - RNA, 19 nt, Artificial Sequence
  Description of Artificial Sequence: Synthetic oligonucleotide
aaacacuaaaagaggguaa

SEQ ID NO: 1087670 - RNA, 19 nt, Artificial Sequence
  Description of Artificial Sequence: Synthetic oligonucleotide
gauuacaauggcacucgug

SEQ ID NO: 1087671 - RNA, 19 nt, Artificial Sequence
  Description of Artificial Sequence: Synthetic oligonucleotide
uuaggaaauguugggaauu

SEQ ID NO: 1087672 - RNA, 19 nt, Artificial Sequence
  Description of Artificial Sequence: Synthetic oligonucleotide
aaauuucaguaagcauauc

SEQ ID NO: 1087673 - RNA, 19 nt, Artificial Sequence
  Description of Artificial Sequence: Synthetic oligonucleotide
gucuacgccgcauugguca

SEQ ID NO: 1087674 - RNA, 19 nt, Artificial Sequence
  Description of Artificial Sequence: Synthetic oligonucleotide
guccccugagucuacgccg

SEQ ID NO: 1087675 - RNA, 19 nt, Artificial Sequence
  Description of Artificial Sequence: Synthetic oligonucleotide
acauacucgaauaaucaau

SEQ ID NO: 1087676 - RNA, 19 nt, Artificial Sequence
  Description of Artificial Sequence: Synthetic oligonucleotide
uuuccggugcugcuguaga

SEQ ID NO: 1087677 - RNA, 19 nt, Artificial Sequence
  Description of Artificial Sequence: Synthetic oligonucleotide
ucacaagcauuuuggcaca

SEQ ID NO: 1087678 - RNA, 19 nt, Artificial Sequence
  Description of Artificial Sequence: Synthetic oligonucleotide
caggcaaguacaaggccag

SEQ ID NO: 1087679 - RNA, 19 nt, Artificial Sequence
  Description of Artificial Sequence: Synthetic oligonucleotide
accuaaucuuuugagguca

SEQ ID NO: 1087680 - RNA, 19 nt, Artificial Sequence
  Description of Artificial Sequence: Synthetic oligonucleotide
cccuacaucuacaaaauuc

SEQ ID NO: 1087681 - RNA, 19 nt, Artificial Sequence
  Description of Artificial Sequence: Synthetic oligonucleotide
agcauacgcugccuccagc

SEQ ID NO: 1087682 - RNA, 19 nt, Artificial Sequence
  Description of Artificial Sequence: Synthetic oligonucleotide
uaccuaaucuuuugagguc

SEQ ID NO: 1087683 - RNA, 19 nt, Artificial Sequence
  Description of Artificial Sequence: Synthetic oligonucleotide
acuacgaacaagggcaggu

SEQ ID NO: 1087684 - RNA, 19 nt, Artificial Sequence
  Description of Artificial Sequence: Synthetic oligonucleotide
cacacacacacaguuuucc

SEQ ID NO: 1087685 - RNA, 19 nt, Artificial Sequence
  Description of Artificial Sequence: Synthetic oligonucleotide
guuugaccgagugucugcg

SEQ ID NO: 1087686 - RNA, 19 nt, Artificial Sequence
  Description of Artificial Sequence: Synthetic oligonucleotide
ucaguuugaccgagugucu

SEQ ID NO: 1087687 - RNA, 19 nt, Artificial Sequence
  Description of Artificial Sequence: Synthetic oligonucleotide
caacuuaauucccuacauc

SEQ ID NO: 1087688 - RNA, 19 nt, Artificial Sequence
  Description of Artificial Sequence: Synthetic oligonucleotide
ggaaauguugggaauuagc

SEQ ID NO: 1087689 - RNA, 19 nt, Artificial Sequence
  Description of Artificial Sequence: Synthetic oligonucleotide
cuucuaugccagaaauuuc

SEQ ID NO: 1087690 - RNA, 19 nt, Artificial Sequence
  Description of Artificial Sequence: Synthetic oligonucleotide
cuaaugccacugaucuggg

SEQ ID NO: 1087691 - RNA, 19 nt, Artificial Sequence
  Description of Artificial Sequence: Synthetic oligonucleotide
ggguauuagucaaagaauc

SEQ ID NO: 1087692 - RNA, 19 nt, Artificial Sequence
  Description of Artificial Sequence: Synthetic oligonucleotide
uucccaacugacaggguau

SEQ ID NO: 1087693 - RNA, 19 nt, Artificial Sequence
  Description of Artificial Sequence: Synthetic oligonucleotide
agaaagagcucaucuucau

SEQ ID NO: 1087694 - RNA, 19 nt, Artificial Sequence
  Description of Artificial Sequence: Synthetic oligonucleotide
uucuaaugccacugaucug

SEQ ID NO: 1087695 - RNA, 19 nt, Artificial Sequence
  Description of Artificial Sequence: Synthetic oligonucleotide
uuucgucggugcuucuucc

SEQ ID NO: 1087696 - RNA, 19 nt, Artificial Sequence
  Description of Artificial Sequence: Synthetic oligonucleotide
aaaugcuacugaaguuaag

SEQ ID NO: 1087697 - RNA, 19 nt, Artificial Sequence
  Description of Artificial Sequence: Synthetic oligonucleotide
cacucguguuaucugcgcg

SEQ ID NO: 1087698 - RNA, 19 nt, Artificial Sequence
  Description of Artificial Sequence: Synthetic oligonucleotide
ucuucacaaguguuguaua

SEQ ID NO: 1087699 - RNA, 19 nt, Artificial Sequence
  Description of Artificial Sequence: Synthetic oligonucleotide
aaguuaagagauacugcau

SEQ ID NO: 1087700 - RNA, 19 nt, Artificial Sequence
  Description of Artificial Sequence: Synthetic oligonucleotide
acguuagcauggcucaaug

SEQ ID NO: 1087701 - RNA, 19 nt, Artificial Sequence
  Description of Artificial Sequence: Synthetic oligonucleotide
aagccauuucgucggugcu

SEQ ID NO: 1087702 - RNA, 19 nt, Artificial Sequence
  Description of Artificial Sequence: Synthetic oligonucleotide
cuucauuggugaaguuccc

SEQ ID NO: 1087703 - RNA, 19 nt, Artificial Sequence
  Description of Artificial Sequence: Synthetic oligonucleotide
uguccaugcucacccauua

SEQ ID NO: 1087704 - RNA, 19 nt, Artificial Sequence
  Description of Artificial Sequence: Synthetic oligonucleotide
guuguguguucuucacaag

SEQ ID NO: 1087705 - RNA, 19 nt, Artificial Sequence
  Description of Artificial Sequence: Synthetic oligonucleotide
uuuuccggugcugcuguag

SEQ ID NO: 1087706 - RNA, 19 nt, Artificial Sequence
  Description of Artificial Sequence: Synthetic oligonucleotide
aggguauuagucaaagaau

SEQ ID NO: 1087707 - RNA, 19 nt, Artificial Sequence
  Description of Artificial Sequence: Synthetic oligonucleotide
ucagcuacguuagcauggc

SEQ ID NO: 1087708 - RNA, 19 nt, Artificial Sequence
  Description of Artificial Sequence: Synthetic oligonucleotide
ucgagcuaucucagcuggg

SEQ ID NO: 1087709 - RNA, 19 nt, Artificial Sequence
  Description of Artificial Sequence: Synthetic oligonucleotide
ucuacgccgcauuggucag

SEQ ID NO: 1087710 - RNA, 19 nt, Artificial Sequence
  Description of Artificial Sequence: Synthetic oligonucleotide
uaucagauguacuguucua

SEQ ID NO: 1087711 - RNA, 19 nt, Artificial Sequence
  Description of Artificial Sequence: Synthetic oligonucleotide
gcauacgcugccuccagcg

SEQ ID NO: 1087712 - RNA, 19 nt, Artificial Sequence
  Description of Artificial Sequence: Synthetic oligonucleotide
aacucaccacugaagaaau

SEQ ID NO: 1087713 - RNA, 19 nt, Artificial Sequence
  Description of Artificial Sequence: Synthetic oligonucleotide
ucugcgcggagcauacgcu

SEQ ID NO: 1087714 - RNA, 19 nt, Artificial Sequence
  Description of Artificial Sequence: Synthetic oligonucleotide
agacuaaaaucagcuacgu

SEQ ID NO: 1087715 - RNA, 19 nt, Artificial Sequence
  Description of Artificial Sequence: Synthetic oligonucleotide
cuuagcguugagccuuggc

SEQ ID NO: 1087716 - RNA, 19 nt, Artificial Sequence
  Description of Artificial Sequence: Synthetic oligonucleotide
uguggacacuugugucugg

SEQ ID NO: 1087717 - RNA, 19 nt, Artificial Sequence
  Description of Artificial Sequence: Synthetic oligonucleotide
ucgucggugcuucuuccca

SEQ ID NO: 1087718 - RNA, 19 nt, Artificial Sequence
  Description of Artificial Sequence: Synthetic oligonucleotide
gcccucgcauccuagauag

SEQ ID NO: 1087719 - RNA, 19 nt, Artificial Sequence
  Description of Artificial Sequence: Synthetic oligonucleotide
aggcauuacuacgaacaag

SEQ ID NO: 1087720 - RNA, 19 nt, Artificial Sequence
  Description of Artificial Sequence: Synthetic oligonucleotide
ggcaucuugagguggaauc

SEQ ID NO: 1087721 - RNA, 19 nt, Artificial Sequence
  Description of Artificial Sequence: Synthetic oligonucleotide
auggcacucguguuaucug

SEQ ID NO: 1087722 - RNA, 19 nt, Artificial Sequence
  Description of Artificial Sequence: Synthetic oligonucleotide
cauacgcugccuccagcgg

SEQ ID NO: 1087723 - RNA, 19 nt, Artificial Sequence
  Description of Artificial Sequence: Synthetic oligonucleotide
cauuaaguggagcacagau

SEQ ID NO: 1087724 - RNA, 19 nt, Artificial Sequence
  Description of Artificial Sequence: Synthetic oligonucleotide
uccccugagucuacgccgc

SEQ ID NO: 1087725 - RNA, 19 nt, Artificial Sequence
  Description of Artificial Sequence: Synthetic oligonucleotide
uaaguggagcacagaucac

SEQ ID NO: 1087726 - RNA, 19 nt, Artificial Sequence
  Description of Artificial Sequence: Synthetic oligonucleotide
uuacaauggcacucguguu

SEQ ID NO: 1087727 - RNA, 19 nt, Artificial Sequence
  Description of Artificial Sequence: Synthetic oligonucleotide
caggauaaaacuguuaaau

SEQ ID NO: 1087728 - RNA, 19 nt, Artificial Sequence
  Description of Artificial Sequence: Synthetic oligonucleotide
uucgucggugcuucuuccc

SEQ ID NO: 1087729 - RNA, 19 nt, Artificial Sequence
  Description of Artificial Sequence: Synthetic oligonucleotide
aggaaauguugggaauuag

SEQ ID NO: 1087730 - RNA, 19 nt, Artificial Sequence
  Description of Artificial Sequence: Synthetic oligonucleotide
cugacaggguauuagucaa

SEQ ID NO: 1087731 - RNA, 19 nt, Artificial Sequence
  Description of Artificial Sequence: Synthetic oligonucleotide
uacuacgaacaagggcagg

SEQ ID NO: 1087732 - RNA, 19 nt, Artificial Sequence
  Description of Artificial Sequence: Synthetic oligonucleotide
gagagaugcagauuacaau

SEQ ID NO: 1087733 - RNA, 19 nt, Artificial Sequence
  Description of Artificial Sequence: Synthetic oligonucleotide
cagguauaugguccuuagc

SEQ ID NO: 1087734 - RNA, 19 nt, Artificial Sequence
  Description of Artificial Sequence: Synthetic oligonucleotide
caaguguauaauaagcauu

SEQ ID NO: 1087735 - RNA, 19 nt, Artificial Sequence
  Description of Artificial Sequence: Synthetic oligonucleotide
gcuacguuagcauggcuca

SEQ ID NO: 1087736 - RNA, 19 nt, Artificial Sequence
  Description of Artificial Sequence: Synthetic oligonucleotide
gaccgagugucugcgcugg

SEQ ID NO: 1087737 - RNA, 19 nt, Artificial Sequence
  Description of Artificial Sequence: Synthetic oligonucleotide
ggacauacucgaauaauca

SEQ ID NO: 1087738 - RNA, 19 nt, Artificial Sequence
  Description of Artificial Sequence: Synthetic oligonucleotide
cauagucuaagugggacaa

SEQ ID NO: 1087739 - RNA, 19 nt, Artificial Sequence
  Description of Artificial Sequence: Synthetic oligonucleotide
auggacauacucgaauaau

SEQ ID NO: 1087740 - RNA, 19 nt, Artificial Sequence
  Description of Artificial Sequence: Synthetic oligonucleotide
gcuacugaaguuaagagau

SEQ ID NO: 1087741 - RNA, 19 nt, Artificial Sequence
  Description of Artificial Sequence: Synthetic oligonucleotide
cacuaauggucccuaagaa

SEQ ID NO: 1087742 - RNA, 19 nt, Artificial Sequence
  Description of Artificial Sequence: Synthetic oligonucleotide
guagaagaggauuuccaau

SEQ ID NO: 1087743 - RNA, 19 nt, Artificial Sequence
  Description of Artificial Sequence: Synthetic oligonucleotide
ugaccgagugucugcgcug

SEQ ID NO: 1087744 - RNA, 19 nt, Artificial Sequence
  Description of Artificial Sequence: Synthetic oligonucleotide
gacuugacuggagguguag

SEQ ID NO: 1087745 - RNA, 19 nt, Artificial Sequence
  Description of Artificial Sequence: Synthetic oligonucleotide
guguuaucugcgcggagca

SEQ ID NO: 1087746 - RNA, 19 nt, Artificial Sequence
  Description of Artificial Sequence: Synthetic oligonucleotide
guauuagucaaagaaucau

SEQ ID NO: 1087747 - RNA, 19 nt, Artificial Sequence
  Description of Artificial Sequence: Synthetic oligonucleotide
uagauaggaagagcccacu

SEQ ID NO: 1087748 - RNA, 19 nt, Artificial Sequence
  Description of Artificial Sequence: Synthetic oligonucleotide
cucugagaaggcauuacua

SEQ ID NO: 1087749 - RNA, 19 nt, Artificial Sequence
  Description of Artificial Sequence: Synthetic oligonucleotide
cuuggggaaggagucauca

SEQ ID NO: 1087750 - RNA, 19 nt, Artificial Sequence
  Description of Artificial Sequence: Synthetic oligonucleotide
gagaaggcauuacuacgaa

SEQ ID NO: 1087751 - RNA, 19 nt, Artificial Sequence
  Description of Artificial Sequence: Synthetic oligonucleotide
cauagcuaccacaggucca

SEQ ID NO: 1087752 - RNA, 19 nt, Artificial Sequence
  Description of Artificial Sequence: Synthetic oligonucleotide
uuggugaaguuccccugau

SEQ ID NO: 1087753 - RNA, 19 nt, Artificial Sequence
  Description of Artificial Sequence: Synthetic oligonucleotide
gagcauacgcugccuccag

SEQ ID NO: 1087754 - RNA, 19 nt, Artificial Sequence
  Description of Artificial Sequence: Synthetic oligonucleotide
cuguaugauauaaaauaau

SEQ ID NO: 1087755 - RNA, 19 nt, Artificial Sequence
  Description of Artificial Sequence: Synthetic oligonucleotide
uggcuguuguaaguagggc

SEQ ID NO: 1087756 - RNA, 19 nt, Artificial Sequence
  Description of Artificial Sequence: Synthetic oligonucleotide
ucguguuaucugcgcggag

SEQ ID NO: 1087757 - RNA, 19 nt, Artificial Sequence
  Description of Artificial Sequence: Synthetic oligonucleotide
cgaauaaucaaugaaaacu

SEQ ID NO: 1087758 - RNA, 19 nt, Artificial Sequence
  Description of Artificial Sequence: Synthetic oligonucleotide
cacuaaaagaggguaacua

SEQ ID NO: 1087759 - RNA, 19 nt, Artificial Sequence
  Description of Artificial Sequence: Synthetic oligonucleotide
gguaacuauauauucuaau

SEQ ID NO: 1087760 - RNA, 19 nt, Artificial Sequence
  Description of Artificial Sequence: Synthetic oligonucleotide
uaugguccuuagcguugag

SEQ ID NO: 1087761 - RNA, 19 nt, Artificial Sequence
  Description of Artificial Sequence: Synthetic oligonucleotide
cuggagagaugcagauuac

SEQ ID NO: 1087762 - RNA, 19 nt, Artificial Sequence
  Description of Artificial Sequence: Synthetic oligonucleotide
ggagacucgaagccugggc

SEQ ID NO: 1087763 - RNA, 19 nt, Artificial Sequence
  Description of Artificial Sequence: Synthetic oligonucleotide
cucccucgagcuaucucag

SEQ ID NO: 1087764 - RNA, 19 nt, Artificial Sequence
  Description of Artificial Sequence: Synthetic oligonucleotide
gcagauuacaauggcacuc

SEQ ID NO: 1087765 - RNA, 19 nt, Artificial Sequence
  Description of Artificial Sequence: Synthetic oligonucleotide
auuagcccuguugucacaa

SEQ ID NO: 1087766 - RNA, 19 nt, Artificial Sequence
  Description of Artificial Sequence: Synthetic oligonucleotide
gggucaagaguguggacac

SEQ ID NO: 1087767 - RNA, 19 nt, Artificial Sequence
  Description of Artificial Sequence: Synthetic oligonucleotide
guauaugguccuuagcguu

SEQ ID NO: 1087768 - RNA, 19 nt, Artificial Sequence
  Description of Artificial Sequence: Synthetic oligonucleotide
auagucuaagugggacaag

SEQ ID NO: 1087769 - RNA, 19 nt, Artificial Sequence
  Description of Artificial Sequence: Synthetic oligonucleotide
accaucuguuauugaaaua

SEQ ID NO: 1087770 - RNA, 19 nt, Artificial Sequence
  Description of Artificial Sequence: Synthetic oligonucleotide
gcuguuguaaguagggcuc

SEQ ID NO: 1087771 - RNA, 19 nt, Artificial Sequence
  Description of Artificial Sequence: Synthetic oligonucleotide
auaugguccuuagcguuga

SEQ ID NO: 1087772 - RNA, 19 nt, Artificial Sequence
  Description of Artificial Sequence: Synthetic oligonucleotide
uacguuagcauggcucaau

SEQ ID NO: 1087773 - RNA, 19 nt, Artificial Sequence
  Description of Artificial Sequence: Synthetic oligonucleotide
cuucaaguaccuaaucuuu

SEQ ID NO: 1087774 - RNA, 19 nt, Artificial Sequence
  Description of Artificial Sequence: Synthetic oligonucleotide
gguauaugguccuuagcgu

SEQ ID NO: 1087775 - RNA, 19 nt, Artificial Sequence
  Description of Artificial Sequence: Synthetic oligonucleotide
gacucgaagccugggcccc

SEQ ID NO: 1087776 - RNA, 19 nt, Artificial Sequence
  Description of Artificial Sequence: Synthetic oligonucleotide
agucuaagugggacaagga

SEQ ID NO: 1087777 - RNA, 19 nt, Artificial Sequence
  Description of Artificial Sequence: Synthetic oligonucleotide
guuguaaguagggcucuca

SEQ ID NO: 1087778 - RNA, 19 nt, Artificial Sequence
  Description of Artificial Sequence: Synthetic oligonucleotide
caguuugaccgagugucug

SEQ ID NO: 1087779 - RNA, 19 nt, Artificial Sequence
  Description of Artificial Sequence: Synthetic oligonucleotide
agcguugagccuuggccaa

SEQ ID NO: 1087780 - RNA, 19 nt, Artificial Sequence
  Description of Artificial Sequence: Synthetic oligonucleotide
cugcgcggagcauacgcug

SEQ ID NO: 1087781 - RNA, 19 nt, Artificial Sequence
  Description of Artificial Sequence: Synthetic oligonucleotide
ugggaauuagcagcaccau

SEQ ID NO: 1087782 - RNA, 19 nt, Artificial Sequence
  Description of Artificial Sequence: Synthetic oligonucleotide
ugacuugacuggaggugua

SEQ ID NO: 1087783 - RNA, 19 nt, Artificial Sequence
  Description of Artificial Sequence: Synthetic oligonucleotide
cacuacagucuggauacuc

SEQ ID NO: 1087784 - RNA, 19 nt, Artificial Sequence
  Description of Artificial Sequence: Synthetic oligonucleotide
guuaucugcgcggagcaua

SEQ ID NO: 1087785 - RNA, 19 nt, Artificial Sequence
  Description of Artificial Sequence: Synthetic oligonucleotide
acauuaaguggagcacaga

SEQ ID NO: 1087786 - RNA, 19 nt, Artificial Sequence
  Description of Artificial Sequence: Synthetic oligonucleotide
uccagcggccaagggcucg

SEQ ID NO: 1087787 - RNA, 19 nt, Artificial Sequence
  Description of Artificial Sequence: Synthetic oligonucleotide
aguguauaauaagcauuuu

SEQ ID NO: 1087788 - RNA, 19 nt, Artificial Sequence
  Description of Artificial Sequence: Synthetic oligonucleotide
ggcuguuguaaguagggcu

SEQ ID NO: 1087789 - RNA, 19 nt, Artificial Sequence
  Description of Artificial Sequence: Synthetic oligonucleotide
ucuucccaacugacagggu

SEQ ID NO: 1087790 - RNA, 19 nt, Artificial Sequence
  Description of Artificial Sequence: Synthetic oligonucleotide
aucauauuccaaaguccau

SEQ ID NO: 1087791 - RNA, 19 nt, Artificial Sequence
  Description of Artificial Sequence: Synthetic oligonucleotide
aguagggcucucagucagg

SEQ ID NO: 1087792 - RNA, 19 nt, Artificial Sequence
  Description of Artificial Sequence: Synthetic oligonucleotide
gccagaaauuucaguaagc

SEQ ID NO: 1087793 - RNA, 19 nt, Artificial Sequence
  Description of Artificial Sequence: Synthetic oligonucleotide
uguuguaaguagggcucuc

SEQ ID NO: 1087794 - RNA, 19 nt, Artificial Sequence
  Description of Artificial Sequence: Synthetic oligonucleotide
ggcacucguguuaucugcg

SEQ ID NO: 1087795 - RNA, 19 nt, Artificial Sequence
  Description of Artificial Sequence: Synthetic oligonucleotide
cuaaucuuuugaggucauc

SEQ ID NO: 1087796 - RNA, 19 nt, Artificial Sequence
  Description of Artificial Sequence: Synthetic oligonucleotide
cucgcauccuagauaggaa

SEQ ID NO: 1087797 - RNA, 19 nt, Artificial Sequence
  Description of Artificial Sequence: Synthetic oligonucleotide
agacacuaauggucccuaa

SEQ ID NO: 1087798 - RNA, 19 nt, Artificial Sequence
  Description of Artificial Sequence: Synthetic oligonucleotide
uuccggugcugcuguagaa

SEQ ID NO: 1087799 - RNA, 19 nt, Artificial Sequence
  Description of Artificial Sequence: Synthetic oligonucleotide
ugggccccacuacuucuac

SEQ ID NO: 1087800 - RNA, 19 nt, Artificial Sequence
  Description of Artificial Sequence: Synthetic oligonucleotide
ucccucgagcuaucucagc

SEQ ID NO: 1087801 - RNA, 19 nt, Artificial Sequence
  Description of Artificial Sequence: Synthetic oligonucleotide
aguggagcacagaucacua

SEQ ID NO: 1087802 - RNA, 19 nt, Artificial Sequence
  Description of Artificial Sequence: Synthetic oligonucleotide
gaagaggauuuccaaucuu

SEQ ID NO: 1087803 - RNA, 19 nt, Artificial Sequence
  Description of Artificial Sequence: Synthetic oligonucleotide
uaucugcgcggagcauacg

SEQ ID NO: 1087804 - RNA, 19 nt, Artificial Sequence
  Description of Artificial Sequence: Synthetic oligonucleotide
auguuuaguuauagauuau

SEQ ID NO: 1087805 - RNA, 19 nt, Artificial Sequence
  Description of Artificial Sequence: Synthetic oligonucleotide
gucuuggcacauggaaaug

SEQ ID NO: 1087806 - RNA, 19 nt, Artificial Sequence
  Description of Artificial Sequence: Synthetic oligonucleotide
ccuagauaggaagagccca

SEQ ID NO: 1087807 - RNA, 19 nt, Artificial Sequence
  Description of Artificial Sequence: Synthetic oligonucleotide
agcccucgcauccuagaua

SEQ ID NO: 1087808 - RNA, 19 nt, Artificial Sequence
  Description of Artificial Sequence: Synthetic oligonucleotide
gauacucccucgagcuauc

SEQ ID NO: 1087809 - RNA, 19 nt, Artificial Sequence
  Description of Artificial Sequence: Synthetic oligonucleotide
cacugaucugggauggugu

SEQ ID NO: 1087810 - RNA, 19 nt, Artificial Sequence
  Description of Artificial Sequence: Synthetic oligonucleotide
cguguuaucugcgcggagc

SEQ ID NO: 1087811 - RNA, 19 nt, Artificial Sequence
  Description of Artificial Sequence: Synthetic oligonucleotide
ggcucaaugcuuuuccuau

SEQ ID NO: 1087812 - RNA, 19 nt, Artificial Sequence
  Description of Artificial Sequence: Synthetic oligonucleotide
uguuaucugcgcggagcau

SEQ ID NO: 1087813 - RNA, 19 nt, Artificial Sequence
  Description of Artificial Sequence: Synthetic oligonucleotide
gcaucuugagguggaauca

SEQ ID NO: 1087814 - RNA, 19 nt, Artificial Sequence
  Description of Artificial Sequence: Synthetic oligonucleotide
cguuagcauggcucaaugc

SEQ ID NO: 1087815 - RNA, 19 nt, Artificial Sequence
  Description of Artificial Sequence: Synthetic oligonucleotide
aguaagcauaucagaugua

SEQ ID NO: 1087816 - RNA, 19 nt, Artificial Sequence
  Description of Artificial Sequence: Synthetic oligonucleotide
ggcccaucucagcacacac

SEQ ID NO: 1087817 - RNA, 19 nt, Artificial Sequence
  Description of Artificial Sequence: Synthetic oligonucleotide
gcaacuuaauucccuacau

SEQ ID NO: 1087818 - RNA, 19 nt, Artificial Sequence
  Description of Artificial Sequence: Synthetic oligonucleotide
aucucagcacacacacaca

SEQ ID NO: 1087819 - RNA, 19 nt, Artificial Sequence
  Description of Artificial Sequence: Synthetic oligonucleotide
gcacucguguuaucugcgc

SEQ ID NO: 1087820 - RNA, 19 nt, Artificial Sequence
  Description of Artificial Sequence: Synthetic oligonucleotide
cacccagucgcucuugcua

SEQ ID NO: 1087821 - RNA, 19 nt, Artificial Sequence
  Description of Artificial Sequence: Synthetic oligonucleotide
uacgccgcauuggucaguu

SEQ ID NO: 1087822 - RNA, 19 nt, Artificial Sequence
  Description of Artificial Sequence: Synthetic oligonucleotide
cucguguuaucugcgcgga

SEQ ID NO: 1087823 - RNA, 19 nt, Artificial Sequence
  Description of Artificial Sequence: Synthetic oligonucleotide
cauuagcccuguugucaca

SEQ ID NO: 1087824 - RNA, 19 nt, Artificial Sequence
  Description of Artificial Sequence: Synthetic oligonucleotide
gcggccaagggcucgguuc

SEQ ID NO: 1087825 - RNA, 19 nt, Artificial Sequence
  Description of Artificial Sequence: Synthetic oligonucleotide
ucccaacugacaggguauu

SEQ ID NO: 1087826 - RNA, 19 nt, Artificial Sequence
  Description of Artificial Sequence: Synthetic oligonucleotide
gucaagaguguggacacuu

SEQ ID NO: 1087827 - RNA, 19 nt, Artificial Sequence
  Description of Artificial Sequence: Synthetic oligonucleotide
ggagcauacgcugccucca

SEQ ID NO: 1087828 - RNA, 19 nt, Artificial Sequence
  Description of Artificial Sequence: Synthetic oligonucleotide
auacucccucgagcuaucu

SEQ ID NO: 1087829 - RNA, 19 nt, Artificial Sequence
  Description of Artificial Sequence: Synthetic oligonucleotide
gggagacucgaagccuggg

SEQ ID NO: 1087830 - RNA, 19 nt, Artificial Sequence
  Description of Artificial Sequence: Synthetic oligonucleotide
aggcccaucucagcacaca

SEQ ID NO: 1087831 - RNA, 19 nt, Artificial Sequence
  Description of Artificial Sequence: Synthetic oligonucleotide
cucagcacacacacacagu

SEQ ID NO: 1087832 - RNA, 19 nt, Artificial Sequence
  Description of Artificial Sequence: Synthetic oligonucleotide
agggcucgguucacaagca

SEQ ID NO: 1087833 - RNA, 19 nt, Artificial Sequence
  Description of Artificial Sequence: Synthetic oligonucleotide
ggguaacuauauauucuaa

SEQ ID NO: 1087834 - RNA, 19 nt, Artificial Sequence
  Description of Artificial Sequence: Synthetic oligonucleotide
guagggcucucagucaggu

SEQ ID NO: 1087835 - RNA, 19 nt, Artificial Sequence
  Description of Artificial Sequence: Synthetic oligonucleotide
uagggcucucagucagguu

SEQ ID NO: 1087836 - RNA, 19 nt, Artificial Sequence
  Description of Artificial Sequence: Synthetic oligonucleotide
guccaugcucacccauuaa

SEQ ID NO: 1087837 - RNA, 19 nt, Artificial Sequence
  Description of Artificial Sequence: Synthetic oligonucleotide
cggagcauacgcugccucc

SEQ ID NO: 1087838 - RNA, 19 nt, Artificial Sequence
  Description of Artificial Sequence: Synthetic oligonucleotide
ggucaguuugaccgagugu

SEQ ID NO: 1087839 - RNA, 19 nt, Artificial Sequence
  Description of Artificial Sequence: Synthetic oligonucleotide
auggucccuaagaaacauu

SEQ ID NO: 1087840 - RNA, 19 nt, Artificial Sequence
  Description of Artificial Sequence: Synthetic oligonucleotide
cuuaagccauuucgucggu

SEQ ID NO: 1087841 - RNA, 19 nt, Artificial Sequence
  Description of Artificial Sequence: Synthetic oligonucleotide
gguccuuagcguugagccu

SEQ ID NO: 1087842 - RNA, 19 nt, Artificial Sequence
  Description of Artificial Sequence: Synthetic oligonucleotide
gugggacaaggagacuaaa

SEQ ID NO: 1087843 - RNA, 19 nt, Artificial Sequence
  Description of Artificial Sequence: Synthetic oligonucleotide
cuguuguaaguagggcucu

SEQ ID NO: 1087844 - RNA, 19 nt, Artificial Sequence
  Description of Artificial Sequence: Synthetic oligonucleotide
caucuugagguggaaucau

SEQ ID NO: 1087845 - RNA, 19 nt, Artificial Sequence
  Description of Artificial Sequence: Synthetic oligonucleotide
agcggccaagggcucgguu

SEQ ID NO: 1087846 - RNA, 19 nt, Artificial Sequence
  Description of Artificial Sequence: Synthetic oligonucleotide
gcacacacacacaguuuuc

SEQ ID NO: 1087847 - RNA, 19 nt, Artificial Sequence
  Description of Artificial Sequence: Synthetic oligonucleotide
gcggagcauacgcugccuc

SEQ ID NO: 1087848 - RNA, 19 nt, Artificial Sequence
  Description of Artificial Sequence: Synthetic oligonucleotide
cuacguuagcauggcucaa

SEQ ID NO: 1087849 - RNA, 19 nt, Artificial Sequence
  Description of Artificial Sequence: Synthetic oligonucleotide
cuaucucagcugggaccuc

SEQ ID NO: 1087850 - RNA, 19 nt, Artificial Sequence
  Description of Artificial Sequence: Synthetic oligonucleotide
cccucgagcuaucucagcu

SEQ ID NO: 1087851 - RNA, 19 nt, Artificial Sequence
  Description of Artificial Sequence: Synthetic oligonucleotide
cagcacacacacacaguuu

SEQ ID NO: 1087852 - RNA, 19 nt, Artificial Sequence
  Description of Artificial Sequence: Synthetic oligonucleotide
ccgcauuggucaguuugac

SEQ ID NO: 1087853 - RNA, 19 nt, Artificial Sequence
  Description of Artificial Sequence: Synthetic oligonucleotide
cgagcuaucucagcuggga

SEQ ID NO: 1087854 - RNA, 19 nt, Artificial Sequence
  Description of Artificial Sequence: Synthetic oligonucleotide
cccucgcauccuagauagg

SEQ ID NO: 1087855 - RNA, 19 nt, Artificial Sequence
  Description of Artificial Sequence: Synthetic oligonucleotide
gcguugagccuuggccaag

SEQ ID NO: 1087856 - RNA, 19 nt, Artificial Sequence
  Description of Artificial Sequence: Synthetic oligonucleotide
cauuucgucggugcuucuu

SEQ ID NO: 1087857 - RNA, 19 nt, Artificial Sequence
  Description of Artificial Sequence: Synthetic oligonucleotide
gccccacuacuucuacuua

SEQ ID NO: 1087858 - RNA, 19 nt, Artificial Sequence
  Description of Artificial Sequence: Synthetic oligonucleotide
ccuuagcguugagccuugg

SEQ ID NO: 1087859 - RNA, 19 nt, Artificial Sequence
  Description of Artificial Sequence: Synthetic oligonucleotide
cagcuacguuagcauggcu

SEQ ID NO: 1087860 - RNA, 19 nt, Artificial Sequence
  Description of Artificial Sequence: Synthetic oligonucleotide
ggucaagaguguggacacu

SEQ ID NO: 1087861 - RNA, 19 nt, Artificial Sequence
  Description of Artificial Sequence: Synthetic oligonucleotide
gcacaggauuguccaugcu

SEQ ID NO: 1087862 - RNA, 19 nt, Artificial Sequence
  Description of Artificial Sequence: Synthetic oligonucleotide
ccgagugucugcgcuggga

SEQ ID NO: 1087863 - RNA, 19 nt, Artificial Sequence
  Description of Artificial Sequence: Synthetic oligonucleotide
gugucugcgcugggaugcu

SEQ ID NO: 1087864 - RNA, 19 nt, Artificial Sequence
  Description of Artificial Sequence: Synthetic oligonucleotide
cgucggugcuucuucccaa

SEQ ID NO: 1087865 - RNA, 19 nt, Artificial Sequence
  Description of Artificial Sequence: Synthetic oligonucleotide
cgagugucugcgcugggau

SEQ ID NO: 1087866 - RNA, 19 nt, Artificial Sequence
  Description of Artificial Sequence: Synthetic oligonucleotide
gccacugaucugggauggu

SEQ ID NO: 1087867 - RNA, 19 nt, Artificial Sequence
  Description of Artificial Sequence: Synthetic oligonucleotide
ccauuucgucggugcuucu

SEQ ID NO: 1087868 - RNA, 19 nt, Artificial Sequence
  Description of Artificial Sequence: Synthetic oligonucleotide
gggcagguauaugguccuu

SEQ ID NO: 1087869 - RNA, 19 nt, Artificial Sequence
  Description of Artificial Sequence: Synthetic oligonucleotide
cgcggagcauacgcugccu

SEQ ID NO: 1087870 - RNA, 19 nt, Artificial Sequence
  Description of Artificial Sequence: Synthetic oligonucleotide
uguacuuuuacaaugaacu

SEQ ID NO: 1087871 - RNA, 19 nt, Artificial Sequence
  Description of Artificial Sequence: Synthetic oligonucleotide
uguaguaucgauuggaggg

SEQ ID NO: 1087872 - RNA, 19 nt, Artificial Sequence
  Description of Artificial Sequence: Synthetic oligonucleotide
ucaauuaacaccauguuga

SEQ ID NO: 1087873 - RNA, 19 nt, Artificial Sequence
  Description of Artificial Sequence: Synthetic oligonucleotide
aaagcuauaguuguuacuc

SEQ ID NO: 1087874 - RNA, 19 nt, Artificial Sequence
  Description of Artificial Sequence: Synthetic oligonucleotide
ucuaugucuacacauacag

SEQ ID NO: 1087875 - RNA, 19 nt, Artificial Sequence
  Description of Artificial Sequence: Synthetic oligonucleotide
ucuacuuuaacauucccag

SEQ ID NO: 1087876 - RNA, 19 nt, Artificial Sequence
  Description of Artificial Sequence: Synthetic oligonucleotide
ucuuaaagcuauauuaucc

SEQ ID NO: 1087877 - RNA, 19 nt, Artificial Sequence
  Description of Artificial Sequence: Synthetic oligonucleotide
uugacauuaaucuucauac

SEQ ID NO: 1087878 - RNA, 19 nt, Artificial Sequence
  Description of Artificial Sequence: Synthetic oligonucleotide
auauucaauguauaacacc

SEQ ID NO: 1087879 - RNA, 19 nt, Artificial Sequence
  Description of Artificial Sequence: Synthetic oligonucleotide
uacgaguacagauaggcgg

SEQ ID NO: 1087880 - RNA, 19 nt, Artificial Sequence
  Description of Artificial Sequence: Synthetic oligonucleotide
uuaacauggaagcuucagg

SEQ ID NO: 1087881 - RNA, 19 nt, Artificial Sequence
  Description of Artificial Sequence: Synthetic oligonucleotide
aggucacucgcauauaucc

SEQ ID NO: 1087882 - RNA, 19 nt, Artificial Sequence
  Description of Artificial Sequence: Synthetic oligonucleotide
uauauuauccccaaagcua

SEQ ID NO: 1087883 - RNA, 19 nt, Artificial Sequence
  Description of Artificial Sequence: Synthetic oligonucleotide
uucauacgaguacagauag

SEQ ID NO: 1087884 - RNA, 19 nt, Artificial Sequence
  Description of Artificial Sequence: Synthetic oligonucleotide
uuuuacaaugaacuugcag

SEQ ID NO: 1087885 - RNA, 19 nt, Artificial Sequence
  Description of Artificial Sequence: Synthetic oligonucleotide
agcaguaccccauuugugc

SEQ ID NO: 1087886 - RNA, 19 nt, Artificial Sequence
  Description of Artificial Sequence: Synthetic oligonucleotide
agcagcuauagucacagcg

SEQ ID NO: 1087887 - RNA, 19 nt, Artificial Sequence
  Description of Artificial Sequence: Synthetic oligonucleotide
uuuaacauucccagaacca

SEQ ID NO: 1087888 - RNA, 19 nt, Artificial Sequence
  Description of Artificial Sequence: Synthetic oligonucleotide
aagcuauaguuguuacucc

SEQ ID NO: 1087889 - RNA, 19 nt, Artificial Sequence
  Description of Artificial Sequence: Synthetic oligonucleotide
ugcauauacuucauuguag

SEQ ID NO: 1087890 - RNA, 19 nt, Artificial Sequence
  Description of Artificial Sequence: Synthetic oligonucleotide
cuuagggaaacgaauauuc

SEQ ID NO: 1087891 - RNA, 19 nt, Artificial Sequence
  Description of Artificial Sequence: Synthetic oligonucleotide
auguauaacaccaucgggg

SEQ ID NO: 1087892 - RNA, 19 nt, Artificial Sequence
  Description of Artificial Sequence: Synthetic oligonucleotide
uaaagcuauauuaucccca

SEQ ID NO: 1087893 - RNA, 19 nt, Artificial Sequence
  Description of Artificial Sequence: Synthetic oligonucleotide
caauguauaacaccaucgg

SEQ ID NO: 1087894 - RNA, 19 nt, Artificial Sequence
  Description of Artificial Sequence: Synthetic oligonucleotide
aguuguugcucccguaugc

SEQ ID NO: 1087895 - RNA, 19 nt, Artificial Sequence
  Description of Artificial Sequence: Synthetic oligonucleotide
cauacgaguacagauaggc

SEQ ID NO: 1087896 - RNA, 19 nt, Artificial Sequence
  Description of Artificial Sequence: Synthetic oligonucleotide
uuugcaucugccaaaaguu

SEQ ID NO: 1087897 - RNA, 19 nt, Artificial Sequence
  Description of Artificial Sequence: Synthetic oligonucleotide
uguauaacaccaucgggga

SEQ ID NO: 1087898 - RNA, 19 nt, Artificial Sequence
  Description of Artificial Sequence: Synthetic oligonucleotide
auugcaccgaccuccgucc

SEQ ID NO: 1087899 - RNA, 19 nt, Artificial Sequence
  Description of Artificial Sequence: Synthetic oligonucleotide
uuacaaugaacuugcagcu

SEQ ID NO: 1087900 - RNA, 19 nt, Artificial Sequence
  Description of Artificial Sequence: Synthetic oligonucleotide
aaacccuuucuacuuuaac

SEQ ID NO: 1087901 - RNA, 19 nt, Artificial Sequence
  Description of Artificial Sequence: Synthetic oligonucleotide
cacaggagagcucacaacg

SEQ ID NO: 1087902 - RNA, 19 nt, Artificial Sequence
  Description of Artificial Sequence: Synthetic oligonucleotide
uagucaucgaugaauguga

SEQ ID NO: 1087903 - RNA, 19 nt, Artificial Sequence
  Description of Artificial Sequence: Synthetic oligonucleotide
auaguuguuacuccucaag

SEQ ID NO: 1087904 - RNA, 19 nt, Artificial Sequence
  Description of Artificial Sequence: Synthetic oligonucleotide
ugacauuaaucuucauacg

SEQ ID NO: 1087905 - RNA, 19 nt, Artificial Sequence
  Description of Artificial Sequence: Synthetic oligonucleotide
ugaguugacauugacauua

SEQ ID NO: 1087906 - RNA, 19 nt, Artificial Sequence
  Description of Artificial Sequence: Synthetic oligonucleotide
gucaauuaacaccauguug

SEQ ID NO: 1087907 - RNA, 19 nt, Artificial Sequence
  Description of Artificial Sequence: Synthetic oligonucleotide
aacaacaguugaccucggc

SEQ ID NO: 1087908 - RNA, 19 nt, Artificial Sequence
  Description of Artificial Sequence: Synthetic oligonucleotide
uacagauaggcggugaucc

SEQ ID NO: 1087909 - RNA, 19 nt, Artificial Sequence
  Description of Artificial Sequence: Synthetic oligonucleotide
aaaguugucuuaaagcuau

SEQ ID NO: 1087910 - RNA, 19 nt, Artificial Sequence
  Description of Artificial Sequence: Synthetic oligonucleotide
uagggaaacgaauauucug

SEQ ID NO: 1087911 - RNA, 19 nt, Artificial Sequence
  Description of Artificial Sequence: Synthetic oligonucleotide
ugcccuaaaaugaugccug

SEQ ID NO: 1087912 - RNA, 19 nt, Artificial Sequence
  Description of Artificial Sequence: Synthetic oligonucleotide
aaucacaugcucuccuuca

SEQ ID NO: 1087913 - RNA, 19 nt, Artificial Sequence
  Description of Artificial Sequence: Synthetic oligonucleotide
auugacauuaaucuucaua

SEQ ID NO: 1087914 - RNA, 19 nt, Artificial Sequence
  Description of Artificial Sequence: Synthetic oligonucleotide
uuggaauugccugagcucc

SEQ ID NO: 1087915 - RNA, 19 nt, Artificial Sequence
  Description of Artificial Sequence: Synthetic oligonucleotide
agguccaauccacaggugg

SEQ ID NO: 1087916 - RNA, 19 nt, Artificial Sequence
  Description of Artificial Sequence: Synthetic oligonucleotide
uacuagauuuggcaaaccu

SEQ ID NO: 1087917 - RNA, 19 nt, Artificial Sequence
  Description of Artificial Sequence: Synthetic oligonucleotide
agagcucacaacgugugcc

SEQ ID NO: 1087918 - RNA, 19 nt, Artificial Sequence
  Description of Artificial Sequence: Synthetic oligonucleotide
agugcaugacaucucaucu

SEQ ID NO: 1087919 - RNA, 19 nt, Artificial Sequence
  Description of Artificial Sequence: Synthetic oligonucleotide
uguaacgaaucacaugcuc

SEQ ID NO: 1087920 - RNA, 19 nt, Artificial Sequence
  Description of Artificial Sequence: Synthetic oligonucleotide
uaucccuuugcucccggcg

SEQ ID NO: 1087921 - RNA, 19 nt, Artificial Sequence
  Description of Artificial Sequence: Synthetic oligonucleotide
agaaucuuuuaccacggga

SEQ ID NO: 1087922 - RNA, 19 nt, Artificial Sequence
  Description of Artificial Sequence: Synthetic oligonucleotide
gaaacgaauauucugcccu

SEQ ID NO: 1087923 - RNA, 19 nt, Artificial Sequence
  Description of Artificial Sequence: Synthetic oligonucleotide
gacaacggaucuugggugg

SEQ ID NO: 1087924 - RNA, 19 nt, Artificial Sequence
  Description of Artificial Sequence: Synthetic oligonucleotide
agggaagugagaaccaggc

SEQ ID NO: 1087925 - RNA, 19 nt, Artificial Sequence
  Description of Artificial Sequence: Synthetic oligonucleotide
guugacauugacauuaauc

SEQ ID NO: 1087926 - RNA, 19 nt, Artificial Sequence
  Description of Artificial Sequence: Synthetic oligonucleotide
guugaaguaggaacgagug

SEQ ID NO: 1087927 - RNA, 19 nt, Artificial Sequence
  Description of Artificial Sequence: Synthetic oligonucleotide
uggaucuaugucuacacau

SEQ ID NO: 1087928 - RNA, 19 nt, Artificial Sequence
  Description of Artificial Sequence: Synthetic oligonucleotide
acuagauuuggcaaaccuc

SEQ ID NO: 1087929 - RNA, 19 nt, Artificial Sequence
  Description of Artificial Sequence: Synthetic oligonucleotide
aauuggacagcgucucacu

SEQ ID NO: 1087930 - RNA, 19 nt, Artificial Sequence
  Description of Artificial Sequence: Synthetic oligonucleotide
gagagagcaccucuuuggg

SEQ ID NO: 1087931 - RNA, 19 nt, Artificial Sequence
  Description of Artificial Sequence: Synthetic oligonucleotide
agcguucccggucaauacc

SEQ ID NO: 1087932 - RNA, 19 nt, Artificial Sequence
  Description of Artificial Sequence: Synthetic oligonucleotide
ucgcauauaucccuuugcu

SEQ ID NO: 1087933 - RNA, 19 nt, Artificial Sequence
  Description of Artificial Sequence: Synthetic oligonucleotide
gaggacaacggaucuuggg

SEQ ID NO: 1087934 - RNA, 19 nt, Artificial Sequence
  Description of Artificial Sequence: Synthetic oligonucleotide
aggacaacggaucuugggu

SEQ ID NO: 1087935 - RNA, 19 nt, Artificial Sequence
  Description of Artificial Sequence: Synthetic oligonucleotide
agugguauucacagguggc

SEQ ID NO: 1087936 - RNA, 19 nt, Artificial Sequence
  Description of Artificial Sequence: Synthetic oligonucleotide
gaggcguuggaauugccug

SEQ ID NO: 1087937 - RNA, 19 nt, Artificial Sequence
  Description of Artificial Sequence: Synthetic oligonucleotide
aauuuccuccccuggguga

SEQ ID NO: 1087938 - RNA, 19 nt, Artificial Sequence
  Description of Artificial Sequence: Synthetic oligonucleotide
gagagcaccucuuuggguc

SEQ ID NO: 1087939 - RNA, 19 nt, Artificial Sequence
  Description of Artificial Sequence: Synthetic oligonucleotide
guagucaucgaugaaugug

SEQ ID NO: 1087940 - RNA, 19 nt, Artificial Sequence
  Description of Artificial Sequence: Synthetic oligonucleotide
aaucagucgaaagccccgg

SEQ ID NO: 1087941 - RNA, 19 nt, Artificial Sequence
  Description of Artificial Sequence: Synthetic oligonucleotide
aacauucccagaaccagug

SEQ ID NO: 1087942 - RNA, 19 nt, Artificial Sequence
  Description of Artificial Sequence: Synthetic oligonucleotide
auauucugcccuaaaauga

SEQ ID NO: 1087943 - RNA, 19 nt, Artificial Sequence
  Description of Artificial Sequence: Synthetic oligonucleotide
ugcauuuuguaguaucgau

SEQ ID NO: 1087944 - RNA, 19 nt, Artificial Sequence
  Description of Artificial Sequence: Synthetic oligonucleotide
aguuguuacuccucaagaa

SEQ ID NO: 1087945 - RNA, 19 nt, Artificial Sequence
  Description of Artificial Sequence: Synthetic oligonucleotide
ucauacgaguacagauagg

SEQ ID NO: 1087946 - RNA, 19 nt, Artificial Sequence
  Description of Artificial Sequence: Synthetic oligonucleotide
uccaaucagucgaaagccc

SEQ ID NO: 1087947 - RNA, 19 nt, Artificial Sequence
  Description of Artificial Sequence: Synthetic oligonucleotide
ugggauguuugcaucugcc

SEQ ID NO: 1087948 - RNA, 19 nt, Artificial Sequence
  Description of Artificial Sequence: Synthetic oligonucleotide
uguacuagauuuggcaaac

SEQ ID NO: 1087949 - RNA, 19 nt, Artificial Sequence
  Description of Artificial Sequence: Synthetic oligonucleotide
cuuucaucuggaugguagc

SEQ ID NO: 1087950 - RNA, 19 nt, Artificial Sequence
  Description of Artificial Sequence: Synthetic oligonucleotide
ggaagugagaaccaggcuc

SEQ ID NO: 1087951 - RNA, 19 nt, Artificial Sequence
  Description of Artificial Sequence: Synthetic oligonucleotide
uaacauucccagaaccagu

SEQ ID NO: 1087952 - RNA, 19 nt, Artificial Sequence
  Description of Artificial Sequence: Synthetic oligonucleotide
gcauauacuucauuguagc

SEQ ID NO: 1087953 - RNA, 19 nt, Artificial Sequence
  Description of Artificial Sequence: Synthetic oligonucleotide
caaucagucgaaagccccg

SEQ ID NO: 1087954 - RNA, 19 nt, Artificial Sequence
  Description of Artificial Sequence: Synthetic oligonucleotide
ccauccuuaacauggaagc

SEQ ID NO: 1087955 - RNA, 19 nt, Artificial Sequence
  Description of Artificial Sequence: Synthetic oligonucleotide
aucuuuuaccacgggaggg

SEQ ID NO: 1087956 - RNA, 19 nt, Artificial Sequence
  Description of Artificial Sequence: Synthetic oligonucleotide
uaggcaguguaacgaauca

SEQ ID NO: 1087957 - RNA, 19 nt, Artificial Sequence
  Description of Artificial Sequence: Synthetic oligonucleotide
ucguccgucuuccaugcag

SEQ ID NO: 1087958 - RNA, 19 nt, Artificial Sequence
  Description of Artificial Sequence: Synthetic oligonucleotide
gcuauauuauccccaaagc

SEQ ID NO: 1087959 - RNA, 19 nt, Artificial Sequence
  Description of Artificial Sequence: Synthetic oligonucleotide
agcuauaguuguuacuccu

SEQ ID NO: 1087960 - RNA, 19 nt, Artificial Sequence
  Description of Artificial Sequence: Synthetic oligonucleotide
gauucugguaacacugccc

SEQ ID NO: 1087961 - RNA, 19 nt, Artificial Sequence
  Description of Artificial Sequence: Synthetic oligonucleotide
caguuccagaccaacgccg

SEQ ID NO: 1087962 - RNA, 19 nt, Artificial Sequence
  Description of Artificial Sequence: Synthetic oligonucleotide
gaaguaggaacgagugagg

SEQ ID NO: 1087963 - RNA, 19 nt, Artificial Sequence
  Description of Artificial Sequence: Synthetic oligonucleotide
auaggcggugauccugacc

SEQ ID NO: 1087964 - RNA, 19 nt, Artificial Sequence
  Description of Artificial Sequence: Synthetic oligonucleotide
ucuuggguggaucuauguc

SEQ ID NO: 1087965 - RNA, 19 nt, Artificial Sequence
  Description of Artificial Sequence: Synthetic oligonucleotide
uauccccaaagcuauaguu

SEQ ID NO: 1087966 - RNA, 19 nt, Artificial Sequence
  Description of Artificial Sequence: Synthetic oligonucleotide
auaggcaguguaacgaauc

SEQ ID NO: 1087967 - RNA, 19 nt, Artificial Sequence
  Description of Artificial Sequence: Synthetic oligonucleotide
ugguguuaggaagagcagc

SEQ ID NO: 1087968 - RNA, 19 nt, Artificial Sequence
  Description of Artificial Sequence: Synthetic oligonucleotide
ugcccucgcguucauaacc

SEQ ID NO: 1087969 - RNA, 19 nt, Artificial Sequence
  Description of Artificial Sequence: Synthetic oligonucleotide
cagcuauagucacagcggg

SEQ ID NO: 1087970 - RNA, 19 nt, Artificial Sequence
  Description of Artificial Sequence: Synthetic oligonucleotide
cuugguaguccagggagcg

SEQ ID NO: 1087971 - RNA, 19 nt, Artificial Sequence
  Description of Artificial Sequence: Synthetic oligonucleotide
ugagacuaugaggagucgc

SEQ ID NO: 1087972 - RNA, 19 nt, Artificial Sequence
  Description of Artificial Sequence: Synthetic oligonucleotide
cacagcgggaaucaagcag

SEQ ID NO: 1087973 - RNA, 19 nt, Artificial Sequence
  Description of Artificial Sequence: Synthetic oligonucleotide
gaaagccccggucacagga

SEQ ID NO: 1087974 - RNA, 19 nt, Artificial Sequence
  Description of Artificial Sequence: Synthetic oligonucleotide
cucggccacacccugaggc

SEQ ID NO: 1087975 - RNA, 19 nt, Artificial Sequence
  Description of Artificial Sequence: Synthetic oligonucleotide
ugaggcguuggaauugccu

SEQ ID NO: 1087976 - RNA, 19 nt, Artificial Sequence
  Description of Artificial Sequence: Synthetic oligonucleotide
aucaccuucuaggugguag

SEQ ID NO: 1087977 - RNA, 19 nt, Artificial Sequence
  Description of Artificial Sequence: Synthetic oligonucleotide
agcucaauaauggucacau

SEQ ID NO: 1087978 - RNA, 19 nt, Artificial Sequence
  Description of Artificial Sequence: Synthetic oligonucleotide
uuuaccacgggaggguccc

SEQ ID NO: 1087979 - RNA, 19 nt, Artificial Sequence
  Description of Artificial Sequence: Synthetic oligonucleotide
ucuaggugguagccacugg

SEQ ID NO: 1087980 - RNA, 19 nt, Artificial Sequence
  Description of Artificial Sequence: Synthetic oligonucleotide
cacuagugaugaauggcag

SEQ ID NO: 1087981 - RNA, 19 nt, Artificial Sequence
  Description of Artificial Sequence: Synthetic oligonucleotide
gucacagcgggaaucaagc

SEQ ID NO: 1087982 - RNA, 19 nt, Artificial Sequence
  Description of Artificial Sequence: Synthetic oligonucleotide
agauacggcugcgaucacc

SEQ ID NO: 1087983 - RNA, 19 nt, Artificial Sequence
  Description of Artificial Sequence: Synthetic oligonucleotide
auaucugcauuuuguagua

SEQ ID NO: 1087984 - RNA, 19 nt, Artificial Sequence
  Description of Artificial Sequence: Synthetic oligonucleotide
auggcagugcaugacaucu

SEQ ID NO: 1087985 - RNA, 19 nt, Artificial Sequence
  Description of Artificial Sequence: Synthetic oligonucleotide
uuauccccaaagcuauagu

SEQ ID NO: 1087986 - RNA, 19 nt, Artificial Sequence
  Description of Artificial Sequence: Synthetic oligonucleotide
ucuuuuaccacgggagggu

SEQ ID NO: 1087987 - RNA, 19 nt, Artificial Sequence
  Description of Artificial Sequence: Synthetic oligonucleotide
aaacgaauauucugcccua

SEQ ID NO: 1087988 - RNA, 19 nt, Artificial Sequence
  Description of Artificial Sequence: Synthetic oligonucleotide
ccaacaacaguugaccucg

SEQ ID NO: 1087989 - RNA, 19 nt, Artificial Sequence
  Description of Artificial Sequence: Synthetic oligonucleotide
gcgggaaucaagcaguacc

SEQ ID NO: 1087990 - RNA, 19 nt, Artificial Sequence
  Description of Artificial Sequence: Synthetic oligonucleotide
ucccaguauacucgagcag

SEQ ID NO: 1087991 - RNA, 19 nt, Artificial Sequence
  Description of Artificial Sequence: Synthetic oligonucleotide
accuccguccaaucagucg

SEQ ID NO: 1087992 - RNA, 19 nt, Artificial Sequence
  Description of Artificial Sequence: Synthetic oligonucleotide
guuggaauugccugagcuc

SEQ ID NO: 1087993 - RNA, 19 nt, Artificial Sequence
  Description of Artificial Sequence: Synthetic oligonucleotide
ugcgaucaccuucuaggug

SEQ ID NO: 1087994 - RNA, 19 nt, Artificial Sequence
  Description of Artificial Sequence: Synthetic oligonucleotide
cauaccauguuggugucac

SEQ ID NO: 1087995 - RNA, 19 nt, Artificial Sequence
  Description of Artificial Sequence: Synthetic oligonucleotide
auaucccuuugcucccggc

SEQ ID NO: 1087996 - RNA, 19 nt, Artificial Sequence
  Description of Artificial Sequence: Synthetic oligonucleotide
gucuacacauacaggcucg

SEQ ID NO: 1087997 - RNA, 19 nt, Artificial Sequence
  Description of Artificial Sequence: Synthetic oligonucleotide
ccgucuuccaugcagauac

SEQ ID NO: 1087998 - RNA, 19 nt, Artificial Sequence
  Description of Artificial Sequence: Synthetic oligonucleotide
ugcaguaggcaguuccaga

SEQ ID NO: 1087999 - RNA, 19 nt, Artificial Sequence
  Description of Artificial Sequence: Synthetic oligonucleotide
caacgugugccuaggcugc

SEQ ID NO: 1088000 - RNA, 19 nt, Artificial Sequence
  Description of Artificial Sequence: Synthetic oligonucleotide
caguguaacgaaucacaug

SEQ ID NO: 1088001 - RNA, 19 nt, Artificial Sequence
  Description of Artificial Sequence: Synthetic oligonucleotide
auacgaguacagauaggcg

SEQ ID NO: 1088002 - RNA, 19 nt, Artificial Sequence
  Description of Artificial Sequence: Synthetic oligonucleotide
gugaguagcauguggcuuc

SEQ ID NO: 1088003 - RNA, 19 nt, Artificial Sequence
  Description of Artificial Sequence: Synthetic oligonucleotide
uauacucgagcaguuaguu

SEQ ID NO: 1088004 - RNA, 19 nt, Artificial Sequence
  Description of Artificial Sequence: Synthetic oligonucleotide
ucccguaugcgucccaccu

SEQ ID NO: 1088005 - RNA, 19 nt, Artificial Sequence
  Description of Artificial Sequence: Synthetic oligonucleotide
cacgugagugaggacaacg

SEQ ID NO: 1088006 - RNA, 19 nt, Artificial Sequence
  Description of Artificial Sequence: Synthetic oligonucleotide
acucgcauauaucccuuug

SEQ ID NO: 1088007 - RNA, 19 nt, Artificial Sequence
  Description of Artificial Sequence: Synthetic oligonucleotide
ucagucgaaagccccgguc

SEQ ID NO: 1088008 - RNA, 19 nt, Artificial Sequence
  Description of Artificial Sequence: Synthetic oligonucleotide
gucauaggcaguguaacga

SEQ ID NO: 1088009 - RNA, 19 nt, Artificial Sequence
  Description of Artificial Sequence: Synthetic oligonucleotide
cuggauauucaauguauaa

SEQ ID NO: 1088010 - RNA, 19 nt, Artificial Sequence
  Description of Artificial Sequence: Synthetic oligonucleotide
acgagugaggcguuggaau

SEQ ID NO: 1088011 - RNA, 19 nt, Artificial Sequence
  Description of Artificial Sequence: Synthetic oligonucleotide
caucguccgucuuccaugc

SEQ ID NO: 1088012 - RNA, 19 nt, Artificial Sequence
  Description of Artificial Sequence: Synthetic oligonucleotide
aaucaagcaguaccccauu

SEQ ID NO: 1088013 - RNA, 19 nt, Artificial Sequence
  Description of Artificial Sequence: Synthetic oligonucleotide
cuucauacgaguacagaua

SEQ ID NO: 1088014 - RNA, 19 nt, Artificial Sequence
  Description of Artificial Sequence: Synthetic oligonucleotide
gcagcuauagucacagcgg

SEQ ID NO: 1088015 - RNA, 19 nt, Artificial Sequence
  Description of Artificial Sequence: Synthetic oligonucleotide
guaucgauuggagggauca

SEQ ID NO: 1088016 - RNA, 19 nt, Artificial Sequence
  Description of Artificial Sequence: Synthetic oligonucleotide
cuuggguggaucuaugucu

SEQ ID NO: 1088017 - RNA, 19 nt, Artificial Sequence
  Description of Artificial Sequence: Synthetic oligonucleotide
gcugaguugacauugacau

SEQ ID NO: 1088018 - RNA, 19 nt, Artificial Sequence
  Description of Artificial Sequence: Synthetic oligonucleotide
cauugcaccgaccuccguc

SEQ ID NO: 1088019 - RNA, 19 nt, Artificial Sequence
  Description of Artificial Sequence: Synthetic oligonucleotide
agguagucaucgaugaaug

SEQ ID NO: 1088020 - RNA, 19 nt, Artificial Sequence
  Description of Artificial Sequence: Synthetic oligonucleotide
acaccaucggggaacuugg

SEQ ID NO: 1088021 - RNA, 19 nt, Artificial Sequence
  Description of Artificial Sequence: Synthetic oligonucleotide
aguacagauaggcggugau

SEQ ID NO: 1088022 - RNA, 19 nt, Artificial Sequence
  Description of Artificial Sequence: Synthetic oligonucleotide
uguuugcaucugccaaaag

SEQ ID NO: 1088023 - RNA, 19 nt, Artificial Sequence
  Description of Artificial Sequence: Synthetic oligonucleotide
ugcucaacagguagucauc

SEQ ID NO: 1088024 - RNA, 19 nt, Artificial Sequence
  Description of Artificial Sequence: Synthetic oligonucleotide
uuucagaauuggacagcgu

SEQ ID NO: 1088025 - RNA, 19 nt, Artificial Sequence
  Description of Artificial Sequence: Synthetic oligonucleotide
cugguguuaggaagagcag

SEQ ID NO: 1088026 - RNA, 19 nt, Artificial Sequence
  Description of Artificial Sequence: Synthetic oligonucleotide
gaacuguacuagauuuggc

SEQ ID NO: 1088027 - RNA, 19 nt, Artificial Sequence
  Description of Artificial Sequence: Synthetic oligonucleotide
guaggaacgagugaggcgu

SEQ ID NO: 1088028 - RNA, 19 nt, Artificial Sequence
  Description of Artificial Sequence: Synthetic oligonucleotide
uacccugcuugucaauuaa

SEQ ID NO: 1088029 - RNA, 19 nt, Artificial Sequence
  Description of Artificial Sequence: Synthetic oligonucleotide
gucgacuugacuggcagac

SEQ ID NO: 1088030 - RNA, 19 nt, Artificial Sequence
  Description of Artificial Sequence: Synthetic oligonucleotide
aguuccagaccaacgccgg

SEQ ID NO: 1088031 - RNA, 19 nt, Artificial Sequence
  Description of Artificial Sequence: Synthetic oligonucleotide
ugugccuaggcugcuguga

SEQ ID NO: 1088032 - RNA, 19 nt, Artificial Sequence
  Description of Artificial Sequence: Synthetic oligonucleotide
ggacaacggaucuugggug

SEQ ID NO: 1088033 - RNA, 19 nt, Artificial Sequence
  Description of Artificial Sequence: Synthetic oligonucleotide
aguugucuuaaagcuauau

SEQ ID NO: 1088034 - RNA, 19 nt, Artificial Sequence
  Description of Artificial Sequence: Synthetic oligonucleotide
agagagcaccucuuugggu

SEQ ID NO: 1088035 - RNA, 19 nt, Artificial Sequence
  Description of Artificial Sequence: Synthetic oligonucleotide
acggaucuuggguggaucu

SEQ ID NO: 1088036 - RNA, 19 nt, Artificial Sequence
  Description of Artificial Sequence: Synthetic oligonucleotide
ccaaucagucgaaagcccc

SEQ ID NO: 1088037 - RNA, 19 nt, Artificial Sequence
  Description of Artificial Sequence: Synthetic oligonucleotide
ugcagauacggcugcgauc

SEQ ID NO: 1088038 - RNA, 19 nt, Artificial Sequence
  Description of Artificial Sequence: Synthetic oligonucleotide
gaugccugggaacuguacu

SEQ ID NO: 1088039 - RNA, 19 nt, Artificial Sequence
  Description of Artificial Sequence: Synthetic oligonucleotide
gucaguugaccagccaucc

SEQ ID NO: 1088040 - RNA, 19 nt, Artificial Sequence
  Description of Artificial Sequence: Synthetic oligonucleotide
ugccaucuucucacgugag

SEQ ID NO: 1088041 - RNA, 19 nt, Artificial Sequence
  Description of Artificial Sequence: Synthetic oligonucleotide
ggucccaguauacucgagc

SEQ ID NO: 1088042 - RNA, 19 nt, Artificial Sequence
  Description of Artificial Sequence: Synthetic oligonucleotide
gauccugaccacugucgac

SEQ ID NO: 1088043 - RNA, 19 nt, Artificial Sequence
  Description of Artificial Sequence: Synthetic oligonucleotide
ucaguugaccagccauccu

SEQ ID NO: 1088044 - RNA, 19 nt, Artificial Sequence
  Description of Artificial Sequence: Synthetic oligonucleotide
gcagauacggcugcgauca

SEQ ID NO: 1088045 - RNA, 19 nt, Artificial Sequence
  Description of Artificial Sequence: Synthetic oligonucleotide
gcaguaggcaguuccagac

SEQ ID NO: 1088046 - RNA, 19 nt, Artificial Sequence
  Description of Artificial Sequence: Synthetic oligonucleotide
ucuacacauacaggcucgc

SEQ ID NO: 1088047 - RNA, 19 nt, Artificial Sequence
  Description of Artificial Sequence: Synthetic oligonucleotide
cucacaacgugugccuagg

SEQ ID NO: 1088048 - RNA, 19 nt, Artificial Sequence
  Description of Artificial Sequence: Synthetic oligonucleotide
guaggcacggucauaggca

SEQ ID NO: 1088049 - RNA, 19 nt, Artificial Sequence
  Description of Artificial Sequence: Synthetic oligonucleotide
cagaauuggacagcgucuc

SEQ ID NO: 1088050 - RNA, 19 nt, Artificial Sequence
  Description of Artificial Sequence: Synthetic oligonucleotide
uuguugcucccguaugcgu

SEQ ID NO: 1088051 - RNA, 19 nt, Artificial Sequence
  Description of Artificial Sequence: Synthetic oligonucleotide
ucacagcgggaaucaagca

SEQ ID NO: 1088052 - RNA, 19 nt, Artificial Sequence
  Description of Artificial Sequence: Synthetic oligonucleotide
ggaaucaagcaguacccca

SEQ ID NO: 1088053 - RNA, 19 nt, Artificial Sequence
  Description of Artificial Sequence: Synthetic oligonucleotide
acacccugaggcaagguca

SEQ ID NO: 1088054 - RNA, 19 nt, Artificial Sequence
  Description of Artificial Sequence: Synthetic oligonucleotide
ucacaacgugugccuaggc

SEQ ID NO: 1088055 - RNA, 19 nt, Artificial Sequence
  Description of Artificial Sequence: Synthetic oligonucleotide
agcagugagagagcaccuc

SEQ ID NO: 1088056 - RNA, 19 nt, Artificial Sequence
  Description of Artificial Sequence: Synthetic oligonucleotide
cguccaaucagucgaaagc

SEQ ID NO: 1088057 - RNA, 19 nt, Artificial Sequence
  Description of Artificial Sequence: Synthetic oligonucleotide
uaggugccacuagugauga

SEQ ID NO: 1088058 - RNA, 19 nt, Artificial Sequence
  Description of Artificial Sequence: Synthetic oligonucleotide
aacgagugaggcguuggaa

SEQ ID NO: 1088059 - RNA, 19 nt, Artificial Sequence
  Description of Artificial Sequence: Synthetic oligonucleotide
uagcguucccggucaauac

SEQ ID NO: 1088060 - RNA, 19 nt, Artificial Sequence
  Description of Artificial Sequence: Synthetic oligonucleotide
cuguacuagauuuggcaaa

SEQ ID NO: 1088061 - RNA, 19 nt, Artificial Sequence
  Description of Artificial Sequence: Synthetic oligonucleotide
guaacgaaucacaugcucu

SEQ ID NO: 1088062 - RNA, 19 nt, Artificial Sequence
  Description of Artificial Sequence: Synthetic oligonucleotide
guaguaucgauuggaggga

SEQ ID NO: 1088063 - RNA, 19 nt, Artificial Sequence
  Description of Artificial Sequence: Synthetic oligonucleotide
accaucacagugguauuca

SEQ ID NO: 1088064 - RNA, 19 nt, Artificial Sequence
  Description of Artificial Sequence: Synthetic oligonucleotide
aucuucauacgaguacaga

SEQ ID NO: 1088065 - RNA, 19 nt, Artificial Sequence
  Description of Artificial Sequence: Synthetic oligonucleotide
ugucgacuugacuggcaga

SEQ ID NO: 1088066 - RNA, 19 nt, Artificial Sequence
  Description of Artificial Sequence: Synthetic oligonucleotide
acgaguacagauaggcggu

SEQ ID NO: 1088067 - RNA, 19 nt, Artificial Sequence
  Description of Artificial Sequence: Synthetic oligonucleotide
agucgcuguuucucaaaga

SEQ ID NO: 1088068 - RNA, 19 nt, Artificial Sequence
  Description of Artificial Sequence: Synthetic oligonucleotide
cagaccaacgccggcuugg

SEQ ID NO: 1088069 - RNA, 19 nt, Artificial Sequence
  Description of Artificial Sequence: Synthetic oligonucleotide
agcugaguugacauugaca

SEQ ID NO: 1088070 - RNA, 19 nt, Artificial Sequence
  Description of Artificial Sequence: Synthetic oligonucleotide
cauguagcguucccgguca

SEQ ID NO: 1088071 - RNA, 19 nt, Artificial Sequence
  Description of Artificial Sequence: Synthetic oligonucleotide
gcucaacagguagucaucg

SEQ ID NO: 1088072 - RNA, 19 nt, Artificial Sequence
  Description of Artificial Sequence: Synthetic oligonucleotide
cacauacaggcucgccucc

SEQ ID NO: 1088073 - RNA, 19 nt, Artificial Sequence
  Description of Artificial Sequence: Synthetic oligonucleotide
uggaauugccugagcuccu

SEQ ID NO: 1088074 - RNA, 19 nt, Artificial Sequence
  Description of Artificial Sequence: Synthetic oligonucleotide
aucuaugucuacacauaca

SEQ ID NO: 1088075 - RNA, 19 nt, Artificial Sequence
  Description of Artificial Sequence: Synthetic oligonucleotide
aggcguuggaauugccuga

SEQ ID NO: 1088076 - RNA, 19 nt, Artificial Sequence
  Description of Artificial Sequence: Synthetic oligonucleotide
ggauguuugcaucugccaa

SEQ ID NO: 1088077 - RNA, 19 nt, Artificial Sequence
  Description of Artificial Sequence: Synthetic oligonucleotide
caauuaacaccauguugaa

SEQ ID NO: 1088078 - RNA, 19 nt, Artificial Sequence
  Description of Artificial Sequence: Synthetic oligonucleotide
gguguuaggaagagcagca

SEQ ID NO: 1088079 - RNA, 19 nt, Artificial Sequence
  Description of Artificial Sequence: Synthetic oligonucleotide
gauacggcugcgaucaccu

SEQ ID NO: 1088080 - RNA, 19 nt, Artificial Sequence
  Description of Artificial Sequence: Synthetic oligonucleotide
gcguucauaaccaccauca

SEQ ID NO: 1088081 - RNA, 19 nt, Artificial Sequence
  Description of Artificial Sequence: Synthetic oligonucleotide
cagucgaaagccccgguca

SEQ ID NO: 1088082 - RNA, 19 nt, Artificial Sequence
  Description of Artificial Sequence: Synthetic oligonucleotide
cacacccugaggcaagguc

SEQ ID NO: 1088083 - RNA, 19 nt, Artificial Sequence
  Description of Artificial Sequence: Synthetic oligonucleotide
augcagauacggcugcgau

SEQ ID NO: 1088084 - RNA, 19 nt, Artificial Sequence
  Description of Artificial Sequence: Synthetic oligonucleotide
uccgggauucugguaacac

SEQ ID NO: 1088085 - RNA, 19 nt, Artificial Sequence
  Description of Artificial Sequence: Synthetic oligonucleotide
ugguaacacugcccagaug

SEQ ID NO: 1088086 - RNA, 19 nt, Artificial Sequence
  Description of Artificial Sequence: Synthetic oligonucleotide
aguaucgauuggagggauc

SEQ ID NO: 1088087 - RNA, 19 nt, Artificial Sequence
  Description of Artificial Sequence: Synthetic oligonucleotide
agaccaacgccggcuuggc

SEQ ID NO: 1088088 - RNA, 19 nt, Artificial Sequence
  Description of Artificial Sequence: Synthetic oligonucleotide
gaucuuggguggaucuaug

SEQ ID NO: 1088089 - RNA, 19 nt, Artificial Sequence
  Description of Artificial Sequence: Synthetic oligonucleotide
gucacucgcauauaucccu

SEQ ID NO: 1088090 - RNA, 19 nt, Artificial Sequence
  Description of Artificial Sequence: Synthetic oligonucleotide
cagauaggcggugauccug

SEQ ID NO: 1088091 - RNA, 19 nt, Artificial Sequence
  Description of Artificial Sequence: Synthetic oligonucleotide
caguuguugcucccguaug

SEQ ID NO: 1088092 - RNA, 19 nt, Artificial Sequence
  Description of Artificial Sequence: Synthetic oligonucleotide
ucacucgcauauaucccuu

SEQ ID NO: 1088093 - RNA, 19 nt, Artificial Sequence
  Description of Artificial Sequence: Synthetic oligonucleotide
ugcccagauguugggaugu

SEQ ID NO: 1088094 - RNA, 19 nt, Artificial Sequence
  Description of Artificial Sequence: Synthetic oligonucleotide
auacucgagcaguuaguuu

SEQ ID NO: 1088095 - RNA, 19 nt, Artificial Sequence
  Description of Artificial Sequence: Synthetic oligonucleotide
ucccggucaauacccugcu

SEQ ID NO: 1088096 - RNA, 19 nt, Artificial Sequence
  Description of Artificial Sequence: Synthetic oligonucleotide
guggaucuaugucuacaca

SEQ ID NO: 1088097 - RNA, 19 nt, Artificial Sequence
  Description of Artificial Sequence: Synthetic oligonucleotide
ccggucaauacccugcuug

SEQ ID NO: 1088098 - RNA, 19 nt, Artificial Sequence
  Description of Artificial Sequence: Synthetic oligonucleotide
ggagggucccaguauacuc

SEQ ID NO: 1088099 - RNA, 19 nt, Artificial Sequence
  Description of Artificial Sequence: Synthetic oligonucleotide
gagacuaugaggagucgcu

SEQ ID NO: 1088100 - RNA, 19 nt, Artificial Sequence
  Description of Artificial Sequence: Synthetic oligonucleotide
guucccggucaauacccug

SEQ ID NO: 1088101 - RNA, 19 nt, Artificial Sequence
  Description of Artificial Sequence: Synthetic oligonucleotide
caagcauugcaccgaccuc

SEQ ID NO: 1088102 - RNA, 19 nt, Artificial Sequence
  Description of Artificial Sequence: Synthetic oligonucleotide
gccacuagugaugaauggc

SEQ ID NO: 1088103 - RNA, 19 nt, Artificial Sequence
  Description of Artificial Sequence: Synthetic oligonucleotide
ugggucaguugaccagcca

SEQ ID NO: 1088104 - RNA, 19 nt, Artificial Sequence
  Description of Artificial Sequence: Synthetic oligonucleotide
guaugcgucccaccuccug

SEQ ID NO: 1088105 - RNA, 19 nt, Artificial Sequence
  Description of Artificial Sequence: Synthetic oligonucleotide
auacccugcuugucaauua

SEQ ID NO: 1088106 - RNA, 19 nt, Artificial Sequence
  Description of Artificial Sequence: Synthetic oligonucleotide
agauaggcggugauccuga

SEQ ID NO: 1088107 - RNA, 19 nt, Artificial Sequence
  Description of Artificial Sequence: Synthetic oligonucleotide
ggaccucuucugcauauac

SEQ ID NO: 1088108 - RNA, 19 nt, Artificial Sequence
  Description of Artificial Sequence: Synthetic oligonucleotide
aucggggaacuugguaguc

SEQ ID NO: 1088109 - RNA, 19 nt, Artificial Sequence
  Description of Artificial Sequence: Synthetic oligonucleotide
ggaacgagugaggcguugg

SEQ ID NO: 1088110 - RNA, 19 nt, Artificial Sequence
  Description of Artificial Sequence: Synthetic oligonucleotide
cucugggccccgaaguguc

SEQ ID NO: 1088111 - RNA, 19 nt, Artificial Sequence
  Description of Artificial Sequence: Synthetic oligonucleotide
accaucggggaacuuggua

SEQ ID NO: 1088112 - RNA, 19 nt, Artificial Sequence
  Description of Artificial Sequence: Synthetic oligonucleotide
acccugcuugucaauuaac

SEQ ID NO: 1088113 - RNA, 19 nt, Artificial Sequence
  Description of Artificial Sequence: Synthetic oligonucleotide
gaaucaagcaguaccccau

SEQ ID NO: 1088114 - RNA, 19 nt, Artificial Sequence
  Description of Artificial Sequence: Synthetic oligonucleotide
gcuauagucacagcgggaa

SEQ ID NO: 1088115 - RNA, 19 nt, Artificial Sequence
  Description of Artificial Sequence: Synthetic oligonucleotide
caaagcuauaguuguuacu

SEQ ID NO: 1088116 - RNA, 19 nt, Artificial Sequence
  Description of Artificial Sequence: Synthetic oligonucleotide
gcaagcauugcaccgaccu

SEQ ID NO: 1088117 - RNA, 19 nt, Artificial Sequence
  Description of Artificial Sequence: Synthetic oligonucleotide
aucagucgaaagccccggu

SEQ ID NO: 1088118 - RNA, 19 nt, Artificial Sequence
  Description of Artificial Sequence: Synthetic oligonucleotide
gauaggcggugauccugac

SEQ ID NO: 1088119 - RNA, 19 nt, Artificial Sequence
  Description of Artificial Sequence: Synthetic oligonucleotide
ggugauccugaccacuguc

SEQ ID NO: 1088120 - RNA, 19 nt, Artificial Sequence
  Description of Artificial Sequence: Synthetic oligonucleotide
uggcccgguuguaggcacg

SEQ ID NO: 1088121 - RNA, 19 nt, Artificial Sequence
  Description of Artificial Sequence: Synthetic oligonucleotide
uaguaucgauuggagggau

SEQ ID NO: 1088122 - RNA, 19 nt, Artificial Sequence
  Description of Artificial Sequence: Synthetic oligonucleotide
uaccccauuugugcaggug

SEQ ID NO: 1088123 - RNA, 19 nt, Artificial Sequence
  Description of Artificial Sequence: Synthetic oligonucleotide
guuccagaccaacgccggc

SEQ ID NO: 1088124 - RNA, 19 nt, Artificial Sequence
  Description of Artificial Sequence: Synthetic oligonucleotide
ggaugguagccugagccug

SEQ ID NO: 1088125 - RNA, 19 nt, Artificial Sequence
  Description of Artificial Sequence: Synthetic oligonucleotide
gcccuaaaaugaugccugg

SEQ ID NO: 1088126 - RNA, 19 nt, Artificial Sequence
  Description of Artificial Sequence: Synthetic oligonucleotide
ccguaugcgucccaccucc

SEQ ID NO: 1088127 - RNA, 19 nt, Artificial Sequence
  Description of Artificial Sequence: Synthetic oligonucleotide
ccaucguccgucuuccaug

SEQ ID NO: 1088128 - RNA, 19 nt, Artificial Sequence
  Description of Artificial Sequence: Synthetic oligonucleotide
ggucacucgcauauauccc

SEQ ID NO: 1088129 - RNA, 19 nt, Artificial Sequence
  Description of Artificial Sequence: Synthetic oligonucleotide
gcucacaacgugugccuag

SEQ ID NO: 1088130 - RNA, 19 nt, Artificial Sequence
  Description of Artificial Sequence: Synthetic oligonucleotide
guacagauaggcggugauc

SEQ ID NO: 1088131 - RNA, 19 nt, Artificial Sequence
  Description of Artificial Sequence: Synthetic oligonucleotide
caccaucacagugguauuc

SEQ ID NO: 1088132 - RNA, 19 nt, Artificial Sequence
  Description of Artificial Sequence: Synthetic oligonucleotide
gaagugucacccuggugau

SEQ ID NO: 1088133 - RNA, 19 nt, Artificial Sequence
  Description of Artificial Sequence: Synthetic oligonucleotide
acgggagggucccaguaua

SEQ ID NO: 1088134 - RNA, 19 nt, Artificial Sequence
  Description of Artificial Sequence: Synthetic oligonucleotide
aggcggugauccugaccac

SEQ ID NO: 1088135 - RNA, 19 nt, Artificial Sequence
  Description of Artificial Sequence: Synthetic oligonucleotide
cugcauuuuguaguaucga

SEQ ID NO: 1088136 - RNA, 19 nt, Artificial Sequence
  Description of Artificial Sequence: Synthetic oligonucleotide
uggguggaucuaugucuac

SEQ ID NO: 1088137 - RNA, 19 nt, Artificial Sequence
  Description of Artificial Sequence: Synthetic oligonucleotide
cuggauggggugcccucgc

SEQ ID NO: 1088138 - RNA, 19 nt, Artificial Sequence
  Description of Artificial Sequence: Synthetic oligonucleotide
uaucugcauuuuguaguau

SEQ ID NO: 1088139 - RNA, 19 nt, Artificial Sequence
  Description of Artificial Sequence: Synthetic oligonucleotide
cucccguaugcgucccacc

SEQ ID NO: 1088140 - RNA, 19 nt, Artificial Sequence
  Description of Artificial Sequence: Synthetic oligonucleotide
aacgccggcuuggcaagca

SEQ ID NO: 1088141 - RNA, 19 nt, Artificial Sequence
  Description of Artificial Sequence: Synthetic oligonucleotide
gcaguaccccauuugugca

SEQ ID NO: 1088142 - RNA, 19 nt, Artificial Sequence
  Description of Artificial Sequence: Synthetic oligonucleotide
uggggugcccucgcguuca

SEQ ID NO: 1088143 - RNA, 19 nt, Artificial Sequence
  Description of Artificial Sequence: Synthetic oligonucleotide
ucgccuccacuccaucguc

SEQ ID NO: 1088144 - RNA, 19 nt, Artificial Sequence
  Description of Artificial Sequence: Synthetic oligonucleotide
guagcguucccggucaaua

SEQ ID NO: 1088145 - RNA, 19 nt, Artificial Sequence
  Description of Artificial Sequence: Synthetic oligonucleotide
gguagccugagccugcaua

SEQ ID NO: 1088146 - RNA, 19 nt, Artificial Sequence
  Description of Artificial Sequence: Synthetic oligonucleotide
ucgacuugacuggcagacu

SEQ ID NO: 1088147 - RNA, 19 nt, Artificial Sequence
  Description of Artificial Sequence: Synthetic oligonucleotide
ccuccguccaaucagucga

SEQ ID NO: 1088148 - RNA, 19 nt, Artificial Sequence
  Description of Artificial Sequence: Synthetic oligonucleotide
ugcaccgaccuccguccaa

SEQ ID NO: 1088149 - RNA, 19 nt, Artificial Sequence
  Description of Artificial Sequence: Synthetic oligonucleotide
agcuauagucacagcggga

SEQ ID NO: 1088150 - RNA, 19 nt, Artificial Sequence
  Description of Artificial Sequence: Synthetic oligonucleotide
ccguccaaucagucgaaag

SEQ ID NO: 1088151 - RNA, 19 nt, Artificial Sequence
  Description of Artificial Sequence: Synthetic oligonucleotide
acggucauaggcaguguaa

SEQ ID NO: 1088152 - RNA, 19 nt, Artificial Sequence
  Description of Artificial Sequence: Synthetic oligonucleotide
gcuauaguuguuacuccuc

SEQ ID NO: 1088153 - RNA, 19 nt, Artificial Sequence
  Description of Artificial Sequence: Synthetic oligonucleotide
ugggccccgaagugucacc

SEQ ID NO: 1088154 - RNA, 19 nt, Artificial Sequence
  Description of Artificial Sequence: Synthetic oligonucleotide
agugaggacaacggaucuu

SEQ ID NO: 1088155 - RNA, 19 nt, Artificial Sequence
  Description of Artificial Sequence: Synthetic oligonucleotide
acaacggaucuugggugga

SEQ ID NO: 1088156 - RNA, 19 nt, Artificial Sequence
  Description of Artificial Sequence: Synthetic oligonucleotide
uugcaccgaccuccgucca

SEQ ID NO: 1088157 - RNA, 19 nt, Artificial Sequence
  Description of Artificial Sequence: Synthetic oligonucleotide
ggcguuggaauugccugag

SEQ ID NO: 1088158 - RNA, 19 nt, Artificial Sequence
  Description of Artificial Sequence: Synthetic oligonucleotide
ggcugcgaucaccuucuag

SEQ ID NO: 1088159 - RNA, 19 nt, Artificial Sequence
  Description of Artificial Sequence: Synthetic oligonucleotide
aacgugugccuaggcugcu

SEQ ID NO: 1088160 - RNA, 19 nt, Artificial Sequence
  Description of Artificial Sequence: Synthetic oligonucleotide
guauacucgagcaguuagu

SEQ ID NO: 1088161 - RNA, 19 nt, Artificial Sequence
  Description of Artificial Sequence: Synthetic oligonucleotide
gcucaauaauggucacaug

SEQ ID NO: 1088162 - RNA, 19 nt, Artificial Sequence
  Description of Artificial Sequence: Synthetic oligonucleotide
acaguugaccucggccaca

SEQ ID NO: 1088163 - RNA, 19 nt, Artificial Sequence
  Description of Artificial Sequence: Synthetic oligonucleotide
caaggucacucgcauauau

SEQ ID NO: 1088164 - RNA, 19 nt, Artificial Sequence
  Description of Artificial Sequence: Synthetic oligonucleotide
aggaacgagugaggcguug

SEQ ID NO: 1088165 - RNA, 19 nt, Artificial Sequence
  Description of Artificial Sequence: Synthetic oligonucleotide
gguccaauccacaggugga

SEQ ID NO: 1088166 - RNA, 19 nt, Artificial Sequence
  Description of Artificial Sequence: Synthetic oligonucleotide
caugcagauacggcugcga

SEQ ID NO: 1088167 - RNA, 19 nt, Artificial Sequence
  Description of Artificial Sequence: Synthetic oligonucleotide
gccuccgggauucugguaa

SEQ ID NO: 1088168 - RNA, 19 nt, Artificial Sequence
  Description of Artificial Sequence: Synthetic oligonucleotide
uguagcguucccggucaau

SEQ ID NO: 1088169 - RNA, 19 nt, Artificial Sequence
  Description of Artificial Sequence: Synthetic oligonucleotide
gaguccgggcucccaacaa

SEQ ID NO: 1088170 - RNA, 19 nt, Artificial Sequence
  Description of Artificial Sequence: Synthetic oligonucleotide
gcucccaacaacaguugac

SEQ ID NO: 1088171 - RNA, 19 nt, Artificial Sequence
  Description of Artificial Sequence: Synthetic oligonucleotide
uaggaacgagugaggcguu

SEQ ID NO: 1088172 - RNA, 19 nt, Artificial Sequence
  Description of Artificial Sequence: Synthetic oligonucleotide
gugugccuaggcugcugug

SEQ ID NO: 1088173 - RNA, 19 nt, Artificial Sequence
  Description of Artificial Sequence: Synthetic oligonucleotide
guccgggcucccaacaaca

SEQ ID NO: 1088174 - RNA, 19 nt, Artificial Sequence
  Description of Artificial Sequence: Synthetic oligonucleotide
gcguugugccagcuccugg

SEQ ID NO: 1088175 - RNA, 19 nt, Artificial Sequence
  Description of Artificial Sequence: Synthetic oligonucleotide
caguugaccagccauccuu

SEQ ID NO: 1088176 - RNA, 19 nt, Artificial Sequence
  Description of Artificial Sequence: Synthetic oligonucleotide
agcgucucacuuguacuuu

SEQ ID NO: 1088177 - RNA, 19 nt, Artificial Sequence
  Description of Artificial Sequence: Synthetic oligonucleotide
cauaggcaguguaacgaau

SEQ ID NO: 1088178 - RNA, 19 nt, Artificial Sequence
  Description of Artificial Sequence: Synthetic oligonucleotide
uccguccaaucagucgaaa

SEQ ID NO: 1088179 - RNA, 19 nt, Artificial Sequence
  Description of Artificial Sequence: Synthetic oligonucleotide
ucacgugagugaggacaac

SEQ ID NO: 1088180 - RNA, 19 nt, Artificial Sequence
  Description of Artificial Sequence: Synthetic oligonucleotide
ccaacgccggcuuggcaag

SEQ ID NO: 1088181 - RNA, 19 nt, Artificial Sequence
  Description of Artificial Sequence: Synthetic oligonucleotide
aggcaagaauaggggaaaa

SEQ ID NO: 1088182 - RNA, 19 nt, Artificial Sequence
  Description of Artificial Sequence: Synthetic oligonucleotide
ggugccacuagugaugaau

SEQ ID NO: 1088183 - RNA, 19 nt, Artificial Sequence
  Description of Artificial Sequence: Synthetic oligonucleotide
gccuaggcugcugugauaa

SEQ ID NO: 1088184 - RNA, 19 nt, Artificial Sequence
  Description of Artificial Sequence: Synthetic oligonucleotide
cauccuuaacauggaagcu

SEQ ID NO: 1088185 - RNA, 19 nt, Artificial Sequence
  Description of Artificial Sequence: Synthetic oligonucleotide
cacggucauaggcagugua

SEQ ID NO: 1088186 - RNA, 19 nt, Artificial Sequence
  Description of Artificial Sequence: Synthetic oligonucleotide
gugcccucgcguucauaac

SEQ ID NO: 1088187 - RNA, 19 nt, Artificial Sequence
  Description of Artificial Sequence: Synthetic oligonucleotide
ggguggaucuaugucuaca

SEQ ID NO: 1088188 - RNA, 19 nt, Artificial Sequence
  Description of Artificial Sequence: Synthetic oligonucleotide
ugcucccguaugcguccca

SEQ ID NO: 1088189 - RNA, 19 nt, Artificial Sequence
  Description of Artificial Sequence: Synthetic oligonucleotide
cgauuggagggaucaggag

SEQ ID NO: 1088190 - RNA, 19 nt, Artificial Sequence
  Description of Artificial Sequence: Synthetic oligonucleotide
ugccuaggcugcugugaua

SEQ ID NO: 1088191 - RNA, 19 nt, Artificial Sequence
  Description of Artificial Sequence: Synthetic oligonucleotide
gccccgaagugucacccug

SEQ ID NO: 1088192 - RNA, 19 nt, Artificial Sequence
  Description of Artificial Sequence: Synthetic oligonucleotide
gaccuccguccaaucaguc

SEQ ID NO: 1088193 - RNA, 19 nt, Artificial Sequence
  Description of Artificial Sequence: Synthetic oligonucleotide
uugcucccguaugcguccc

SEQ ID NO: 1088194 - RNA, 19 nt, Artificial Sequence
  Description of Artificial Sequence: Synthetic oligonucleotide
aggcaaggucacucgcaua

SEQ ID NO: 1088195 - RNA, 19 nt, Artificial Sequence
  Description of Artificial Sequence: Synthetic oligonucleotide
ccccgaagugucacccugg

SEQ ID NO: 1088196 - RNA, 19 nt, Artificial Sequence
  Description of Artificial Sequence: Synthetic oligonucleotide
gcggugauccugaccacug

SEQ ID NO: 1088197 - RNA, 19 nt, Artificial Sequence
  Description of Artificial Sequence: Synthetic oligonucleotide
ugcucccggcguugugcca

SEQ ID NO: 1088198 - RNA, 19 nt, Artificial Sequence
  Description of Artificial Sequence: Synthetic oligonucleotide
aucguccgucuuccaugca

SEQ ID NO: 1088199 - RNA, 19 nt, Artificial Sequence
  Description of Artificial Sequence: Synthetic oligonucleotide
gugaggcguuggaauugcc

SEQ ID NO: 1088200 - RNA, 19 nt, Artificial Sequence
  Description of Artificial Sequence: Synthetic oligonucleotide
cucccggcguugugccagc

SEQ ID NO: 1088201 - RNA, 19 nt, Artificial Sequence
  Description of Artificial Sequence: Synthetic oligonucleotide
acgugugccuaggcugcug

SEQ ID NO: 1088202 - RNA, 19 nt, Artificial Sequence
  Description of Artificial Sequence: Synthetic oligonucleotide
auguagcguucccggucaa

SEQ ID NO: 1088203 - RNA, 19 nt, Artificial Sequence
  Description of Artificial Sequence: Synthetic oligonucleotide
cuauagucacagcgggaau

SEQ ID NO: 1088204 - RNA, 19 nt, Artificial Sequence
  Description of Artificial Sequence: Synthetic oligonucleotide
guguaacgaaucacaugcu

SEQ ID NO: 1088205 - RNA, 19 nt, Artificial Sequence
  Description of Artificial Sequence: Synthetic oligonucleotide
cuccguccaaucagucgaa

SEQ ID NO: 1088206 - RNA, 19 nt, Artificial Sequence
  Description of Artificial Sequence: Synthetic oligonucleotide
gggaagugagaaccaggcu

SEQ ID NO: 1088207 - RNA, 19 nt, Artificial Sequence
  Description of Artificial Sequence: Synthetic oligonucleotide
ggggaacuugguaguccag

SEQ ID NO: 1088208 - RNA, 19 nt, Artificial Sequence
  Description of Artificial Sequence: Synthetic oligonucleotide
auacggcugcgaucaccuu

SEQ ID NO: 1088209 - RNA, 19 nt, Artificial Sequence
  Description of Artificial Sequence: Synthetic oligonucleotide
uuaccacgggaggguccca

SEQ ID NO: 1088210 - RNA, 19 nt, Artificial Sequence
  Description of Artificial Sequence: Synthetic oligonucleotide
aacuugcagcuggcccggu

SEQ ID NO: 1088211 - RNA, 19 nt, Artificial Sequence
  Description of Artificial Sequence: Synthetic oligonucleotide
cgcguucauaaccaccauc

SEQ ID NO: 1088212 - RNA, 19 nt, Artificial Sequence
  Description of Artificial Sequence: Synthetic oligonucleotide
caccgaccuccguccaauc

SEQ ID NO: 1088213 - RNA, 19 nt, Artificial Sequence
  Description of Artificial Sequence: Synthetic oligonucleotide
acgccggcuuggcaagcau

SEQ ID NO: 1088214 - RNA, 19 nt, Artificial Sequence
  Description of Artificial Sequence: Synthetic oligonucleotide
cagauacggcugcgaucac

SEQ ID NO: 1088215 - RNA, 19 nt, Artificial Sequence
  Description of Artificial Sequence: Synthetic oligonucleotide
gcguuggaauugccugagc

SEQ ID NO: 1088216 - RNA, 19 nt, Artificial Sequence
  Description of Artificial Sequence: Synthetic oligonucleotide
cccaguauacucgagcagu

SEQ ID NO: 1088217 - RNA, 19 nt, Artificial Sequence
  Description of Artificial Sequence: Synthetic oligonucleotide
cguuggaauugccugagcu

SEQ ID NO: 1088218 - RNA, 19 nt, Artificial Sequence
  Description of Artificial Sequence: Synthetic oligonucleotide
caacgccggcuuggcaagc

SEQ ID NO: 1088219 - RNA, 19 nt, Artificial Sequence
  Description of Artificial Sequence: Synthetic oligonucleotide
gcaguguaacgaaucacau

SEQ ID NO: 1088220 - RNA, 19 nt, Artificial Sequence
  Description of Artificial Sequence: Synthetic oligonucleotide
ggaucuuggguggaucuau

SEQ ID NO: 1088221 - RNA, 19 nt, Artificial Sequence
  Description of Artificial Sequence: Synthetic oligonucleotide
guccaauccacagguggau

SEQ ID NO: 1088222 - RNA, 19 nt, Artificial Sequence
  Description of Artificial Sequence: Synthetic oligonucleotide
cagcgggaaucaagcagua

SEQ ID NO: 1088223 - RNA, 19 nt, Artificial Sequence
  Description of Artificial Sequence: Synthetic oligonucleotide
gcccucgcguucauaacca

SEQ ID NO: 1088224 - RNA, 19 nt, Artificial Sequence
  Description of Artificial Sequence: Synthetic oligonucleotide
gcuuagggaaacgaauauu

SEQ ID NO: 1088225 - RNA, 19 nt, Artificial Sequence
  Description of Artificial Sequence: Synthetic oligonucleotide
aggugccacuagugaugaa

SEQ ID NO: 1088226 - RNA, 19 nt, Artificial Sequence
  Description of Artificial Sequence: Synthetic oligonucleotide
cuccgggauucugguaaca

SEQ ID NO: 1088227 - RNA, 19 nt, Artificial Sequence
  Description of Artificial Sequence: Synthetic oligonucleotide
cccguaugcgucccaccuc

SEQ ID NO: 1088228 - RNA, 19 nt, Artificial Sequence
  Description of Artificial Sequence: Synthetic oligonucleotide
gggucccaguauacucgag

SEQ ID NO: 1088229 - RNA, 19 nt, Artificial Sequence
  Description of Artificial Sequence: Synthetic oligonucleotide
ccagaccaacgccggcuug

SEQ ID NO: 1088230 - RNA, 19 nt, Artificial Sequence
  Description of Artificial Sequence: Synthetic oligonucleotide
cccucgcguucauaaccac

SEQ ID NO: 1088231 - RNA, 19 nt, Artificial Sequence
  Description of Artificial Sequence: Synthetic oligonucleotide
gcauaccauguugguguca

SEQ ID NO: 1088232 - RNA, 19 nt, Artificial Sequence
  Description of Artificial Sequence: Synthetic oligonucleotide
ccggcuuggcaagcauugc

SEQ ID NO: 1088233 - RNA, 19 nt, Artificial Sequence
  Description of Artificial Sequence: Synthetic oligonucleotide
ccgggauucugguaacacu

SEQ ID NO: 1088234 - RNA, 19 nt, Artificial Sequence
  Description of Artificial Sequence: Synthetic oligonucleotide
cacucgcauauaucccuuu

SEQ ID NO: 1088235 - RNA, 19 nt, Artificial Sequence
  Description of Artificial Sequence: Synthetic oligonucleotide
ggcggugauccugaccacu

SEQ ID NO: 1088236 - RNA, 19 nt, Artificial Sequence
  Description of Artificial Sequence: Synthetic oligonucleotide
gcauggauaucugcauuuu

SEQ ID NO: 1088237 - RNA, 19 nt, Artificial Sequence
  Description of Artificial Sequence: Synthetic oligonucleotide
caccaucggggaacuuggu

SEQ ID NO: 1088238 - RNA, 19 nt, Artificial Sequence
  Description of Artificial Sequence: Synthetic oligonucleotide
gcaaggucacucgcauaua

SEQ ID NO: 1088239 - RNA, 19 nt, Artificial Sequence
  Description of Artificial Sequence: Synthetic oligonucleotide
cggucaauacccugcuugu

SEQ ID NO: 1088240 - RNA, 19 nt, Artificial Sequence
  Description of Artificial Sequence: Synthetic oligonucleotide
gcgucucacuuguacuuuu

SEQ ID NO: 1088241 - RNA, 19 nt, Artificial Sequence
  Description of Artificial Sequence: Synthetic oligonucleotide
cgucucacuuguacuuuua

SEQ ID NO: 1088242 - RNA, 19 nt, Artificial Sequence
  Description of Artificial Sequence: Synthetic oligonucleotide
cgagugaggcguuggaauu

SEQ ID NO: 1088243 - RNA, 19 nt, Artificial Sequence
  Description of Artificial Sequence: Synthetic oligonucleotide
gcagugcaugacaucucau

SEQ ID NO: 1088244 - RNA, 19 nt, Artificial Sequence
  Description of Artificial Sequence: Synthetic oligonucleotide
gcaccgaccuccguccaau

SEQ ID NO: 1088245 - RNA, 19 nt, Artificial Sequence
  Description of Artificial Sequence: Synthetic oligonucleotide
gcauugcaccgaccuccgu

SEQ ID NO: 1088246 - RNA, 19 nt, Artificial Sequence
  Description of Artificial Sequence: Synthetic oligonucleotide
cguucccggucaauacccu

SEQ ID NO: 1088247 - RNA, 19 nt, Artificial Sequence
  Description of Artificial Sequence: Synthetic oligonucleotide
ggacagcgucucacuugua

SEQ ID NO: 1088248 - RNA, 19 nt, Artificial Sequence
  Description of Artificial Sequence: Synthetic oligonucleotide
ccuuugcucccggcguugu

SEQ ID NO: 1088249 - RNA, 19 nt, Artificial Sequence
  Description of Artificial Sequence: Synthetic oligonucleotide
cgguuguaggcacggucau

SEQ ID NO: 1088250 - RNA, 19 nt, Artificial Sequence
  Description of Artificial Sequence: Synthetic oligonucleotide
cggugauccugaccacugu

SEQ ID NO: 1088251 - RNA, 19 nt, Artificial Sequence
  Description of Artificial Sequence: Synthetic oligonucleotide
cguaugcgucccaccuccu

SEQ ID NO: 1088252 - RNA, 19 nt, Artificial Sequence
  Description of Artificial Sequence: Synthetic oligonucleotide
cggcguugugccagcuccu

SEQ ID NO: 1088253 - RNA, 19 nt, Artificial Sequence
  Description of Artificial Sequence: Synthetic oligonucleotide
cccggucaauacccugcuu

SEQ ID NO: 1088254 - RNA, 19 nt, Artificial Sequence
  Description of Artificial Sequence: Synthetic oligonucleotide
  modified_base (5)..(5): a, c, u, g, unknown or other
aaaunugacacauauauuc

SEQ ID NO: 1088255 - RNA, 19 nt, Artificial Sequence
  Description of Artificial Sequence: Synthetic oligonucleotide
aaaacuguaauucucaaac

SEQ ID NO: 1088256 - RNA, 19 nt, Artificial Sequence
  Description of Artificial Sequence: Synthetic oligonucleotide
  modified_base (7)..(7): a, c, u, g, unknown or other
uaaaaunugacacauauau

SEQ ID NO: 1088257 - RNA, 19 nt, Artificial Sequence
  Description of Artificial Sequence: Synthetic oligonucleotide
aauucgaaccuuuagagga

SEQ ID NO: 1088258 - RNA, 19 nt, Artificial Sequence
  Description of Artificial Sequence: Synthetic oligonucleotide
uauuaugcuauuuugauaa

SEQ ID NO: 1088259 - RNA, 19 nt, Artificial Sequence
  Description of Artificial Sequence: Synthetic oligonucleotide
acauauauucauugaaugc

SEQ ID NO: 1088260 - RNA, 19 nt, Artificial Sequence
  Description of Artificial Sequence: Synthetic oligonucleotide
aaauugagccauugcagcc

SEQ ID NO: 1088261 - RNA, 19 nt, Artificial Sequence
  Description of Artificial Sequence: Synthetic oligonucleotide
ucucuuagcaaacaaaaug

SEQ ID NO: 1088262 - RNA, 19 nt, Artificial Sequence
  Description of Artificial Sequence: Synthetic oligonucleotide
aaacauaagaggcuugcuc

SEQ ID NO: 1088263 - RNA, 19 nt, Artificial Sequence
  Description of Artificial Sequence: Synthetic oligonucleotide
uguaugaugguaaaacuug

SEQ ID NO: 1088264 - RNA, 19 nt, Artificial Sequence
  Description of Artificial Sequence: Synthetic oligonucleotide
agagguaucggucaaauug

SEQ ID NO: 1088265 - RNA, 19 nt, Artificial Sequence
  Description of Artificial Sequence: Synthetic oligonucleotide
agugaguugaccaugaacg

SEQ ID NO: 1088266 - RNA, 19 nt, Artificial Sequence
  Description of Artificial Sequence: Synthetic oligonucleotide
aaucgugugaugcuagaac

SEQ ID NO: 1088267 - RNA, 19 nt, Artificial Sequence
  Description of Artificial Sequence: Synthetic oligonucleotide
accucaaucucauacaagg

SEQ ID NO: 1088268 - RNA, 19 nt, Artificial Sequence
  Description of Artificial Sequence: Synthetic oligonucleotide
acuuguauaagacaggccu

SEQ ID NO: 1088269 - RNA, 19 nt, Artificial Sequence
  Description of Artificial Sequence: Synthetic oligonucleotide
ucccacauaccucagaggg

SEQ ID NO: 1088270 - RNA, 19 nt, Artificial Sequence
  Description of Artificial Sequence: Synthetic oligonucleotide
ucaaauugagccauugcag

SEQ ID NO: 1088271 - RNA, 19 nt, Artificial Sequence
  Description of Artificial Sequence: Synthetic oligonucleotide
uacuuguucaauucgaacc

SEQ ID NO: 1088272 - RNA, 19 nt, Artificial Sequence
  Description of Artificial Sequence: Synthetic oligonucleotide
aacauaagaggcuugcuca

SEQ ID NO: 1088273 - RNA, 19 nt, Artificial Sequence
  Description of Artificial Sequence: Synthetic oligonucleotide
uagaggacgacacacaccc

SEQ ID NO: 1088274 - RNA, 19 nt, Artificial Sequence
  Description of Artificial Sequence: Synthetic oligonucleotide
aucgugugaugcuagaacc

SEQ ID NO: 1088275 - RNA, 19 nt, Artificial Sequence
  Description of Artificial Sequence: Synthetic oligonucleotide
  modified_base (18)..(18): a, c, u, g, unknown or other
ugcuauuuugauaaaaunu

SEQ ID NO: 1088276 - RNA, 19 nt, Artificial Sequence
  Description of Artificial Sequence: Synthetic oligonucleotide
uauacuuguauaagacagg

SEQ ID NO: 1088277 - RNA, 19 nt, Artificial Sequence
  Description of Artificial Sequence: Synthetic oligonucleotide
aaauugcuggcugauaccg

SEQ ID NO: 1088278 - RNA, 19 nt, Artificial Sequence
  Description of Artificial Sequence: Synthetic oligonucleotide
uuuacucgcaugaagacuc

SEQ ID NO: 1088279 - RNA, 19 nt, Artificial Sequence
  Description of Artificial Sequence: Synthetic oligonucleotide
uauaagacaggccuguccu

SEQ ID NO: 1088280 - RNA, 19 nt, Artificial Sequence
  Description of Artificial Sequence: Synthetic oligonucleotide
auacuuguauaagacaggc

SEQ ID NO: 1088281 - RNA, 19 nt, Artificial Sequence
  Description of Artificial Sequence: Synthetic oligonucleotide
aacaacaguacuucgccug

SEQ ID NO: 1088282 - RNA, 19 nt, Artificial Sequence
  Description of Artificial Sequence: Synthetic oligonucleotide
ucaucuaagguauacuugu

SEQ ID NO: 1088283 - RNA, 19 nt, Artificial Sequence
  Description of Artificial Sequence: Synthetic oligonucleotide
gauuguaugaugguaaaac

SEQ ID NO: 1088284 - RNA, 19 nt, Artificial Sequence
  Description of Artificial Sequence: Synthetic oligonucleotide
  modified_base (9)..(9): a, c, u, g, unknown or other
gauaaaaunugacacauau

SEQ ID NO: 1088285 - RNA, 19 nt, Artificial Sequence
  Description of Artificial Sequence: Synthetic oligonucleotide
uuucaaugggucuaggugu

SEQ ID NO: 1088286 - RNA, 19 nt, Artificial Sequence
  Description of Artificial Sequence: Synthetic oligonucleotide
aagguauacuuguauaaga

SEQ ID NO: 1088287 - RNA, 19 nt, Artificial Sequence
  Description of Artificial Sequence: Synthetic oligonucleotide
ugaacaagcgaacauugcu

SEQ ID NO: 1088288 - RNA, 19 nt, Artificial Sequence
  Description of Artificial Sequence: Synthetic oligonucleotide
aaugcauuucaaugggucu

SEQ ID NO: 1088289 - RNA, 19 nt, Artificial Sequence
  Description of Artificial Sequence: Synthetic oligonucleotide
auaagccguuucuugaagc

SEQ ID NO: 1088290 - RNA, 19 nt, Artificial Sequence
  Description of Artificial Sequence: Synthetic oligonucleotide
uaacacggcagacacauca

SEQ ID NO: 1088291 - RNA, 19 nt, Artificial Sequence
  Description of Artificial Sequence: Synthetic oligonucleotide
uguauuaugcuauuuugau

SEQ ID NO: 1088292 - RNA, 19 nt, Artificial Sequence
  Description of Artificial Sequence: Synthetic oligonucleotide
ucauugaaugcuaugcaga

SEQ ID NO: 1088293 - RNA, 19 nt, Artificial Sequence
  Description of Artificial Sequence: Synthetic oligonucleotide
uaccguacacauuuggagg

SEQ ID NO: 1088294 - RNA, 19 nt, Artificial Sequence
  Description of Artificial Sequence: Synthetic oligonucleotide
cugagaaugaaagaaacug

SEQ ID NO: 1088295 - RNA, 19 nt, Artificial Sequence
  Description of Artificial Sequence: Synthetic oligonucleotide
  modified_base (4)..(4): a, c, u, g, unknown or other
aaunugacacauauauuca

SEQ ID NO: 1088296 - RNA, 19 nt, Artificial Sequence
  Description of Artificial Sequence: Synthetic oligonucleotide
ucggugaauucaaacagag

SEQ ID NO: 1088297 - RNA, 19 nt, Artificial Sequence
  Description of Artificial Sequence: Synthetic oligonucleotide
caaauugagccauugcagc

SEQ ID NO: 1088298 - RNA, 19 nt, Artificial Sequence
  Description of Artificial Sequence: Synthetic oligonucleotide
acauugcuagacucaagcc

SEQ ID NO: 1088299 - RNA, 19 nt, Artificial Sequence
  Description of Artificial Sequence: Synthetic oligonucleotide
auaccguacacauuuggag

SEQ ID NO: 1088300 - RNA, 19 nt, Artificial Sequence
  Description of Artificial Sequence: Synthetic oligonucleotide
uaaagaacccugcucaggu

SEQ ID NO: 1088301 - RNA, 19 nt, Artificial Sequence
  Description of Artificial Sequence: Synthetic oligonucleotide
aaaucagauaacaaggaaa

SEQ ID NO: 1088302 - RNA, 19 nt, Artificial Sequence
  Description of Artificial Sequence: Synthetic oligonucleotide
ugauaccguacacauuugg

SEQ ID NO: 1088303 - RNA, 19 nt, Artificial Sequence
  Description of Artificial Sequence: Synthetic oligonucleotide
uuauaagaguguccaaaug

SEQ ID NO: 1088304 - RNA, 19 nt, Artificial Sequence
  Description of Artificial Sequence: Synthetic oligonucleotide
uuuagaggacgacacacac

SEQ ID NO: 1088305 - RNA, 19 nt, Artificial Sequence
  Description of Artificial Sequence: Synthetic oligonucleotide
gaguugaccaugaacgugg

SEQ ID NO: 1088306 - RNA, 19 nt, Artificial Sequence
  Description of Artificial Sequence: Synthetic oligonucleotide
acuugaggagauuagaaau

SEQ ID NO: 1088307 - RNA, 19 nt, Artificial Sequence
  Description of Artificial Sequence: Synthetic oligonucleotide
aaccuuuagaggacgacac

SEQ ID NO: 1088308 - RNA, 19 nt, Artificial Sequence
  Description of Artificial Sequence: Synthetic oligonucleotide
aacuugaggagauuagaaa

SEQ ID NO: 1088309 - RNA, 19 nt, Artificial Sequence
  Description of Artificial Sequence: Synthetic oligonucleotide
uguccaucaguuuacucgc

SEQ ID NO: 1088310 - RNA, 19 nt, Artificial Sequence
  Description of Artificial Sequence: Synthetic oligonucleotide
cauugaaugcuaugcagag

SEQ ID NO: 1088311 - RNA, 19 nt, Artificial Sequence
  Description of Artificial Sequence: Synthetic oligonucleotide
  modified_base (11)..(11): a, c, u, g, unknown or other
uugauaaaaunugacacau

SEQ ID NO: 1088312 - RNA, 19 nt, Artificial Sequence
  Description of Artificial Sequence: Synthetic oligonucleotide
gucaaauugagccauugca

SEQ ID NO: 1088313 - RNA, 19 nt, Artificial Sequence
  Description of Artificial Sequence: Synthetic oligonucleotide
guauuguagauguagcuca

SEQ ID NO: 1088314 - RNA, 19 nt, Artificial Sequence
  Description of Artificial Sequence: Synthetic oligonucleotide
acuuguucaauucgaaccu

SEQ ID NO: 1088315 - RNA, 19 nt, Artificial Sequence
  Description of Artificial Sequence: Synthetic oligonucleotide
guagauguagcucaagcca

SEQ ID NO: 1088316 - RNA, 19 nt, Artificial Sequence
  Description of Artificial Sequence: Synthetic oligonucleotide
ugauucagggcagaacugg

SEQ ID NO: 1088317 - RNA, 19 nt, Artificial Sequence
  Description of Artificial Sequence: Synthetic oligonucleotide
ugaugcuagaaccucccgc

SEQ ID NO: 1088318 - RNA, 19 nt, Artificial Sequence
  Description of Artificial Sequence: Synthetic oligonucleotide
agguauacuuguauaagac

SEQ ID NO: 1088319 - RNA, 19 nt, Artificial Sequence
  Description of Artificial Sequence: Synthetic oligonucleotide
acaguauuguagauguagc

SEQ ID NO: 1088320 - RNA, 19 nt, Artificial Sequence
  Description of Artificial Sequence: Synthetic oligonucleotide
caauucgaaccuuuagagg

SEQ ID NO: 1088321 - RNA, 19 nt, Artificial Sequence
  Description of Artificial Sequence: Synthetic oligonucleotide
gaguuaacacggcagacac

SEQ ID NO: 1088322 - RNA, 19 nt, Artificial Sequence
  Description of Artificial Sequence: Synthetic oligonucleotide
ucauacaaggaaaacugua

SEQ ID NO: 1088323 - RNA, 19 nt, Artificial Sequence
  Description of Artificial Sequence: Synthetic oligonucleotide
acaacugaagaaucgugug

SEQ ID NO: 1088324 - RNA, 19 nt, Artificial Sequence
  Description of Artificial Sequence: Synthetic oligonucleotide
ucuaagacacacgacaaaa

SEQ ID NO: 1088325 - RNA, 19 nt, Artificial Sequence
  Description of Artificial Sequence: Synthetic oligonucleotide
aauaaagacucagauuaaa

SEQ ID NO: 1088326 - RNA, 19 nt, Artificial Sequence
  Description of Artificial Sequence: Synthetic oligonucleotide
ucuaagguauacuuguaua

SEQ ID NO: 1088327 - RNA, 19 nt, Artificial Sequence
  Description of Artificial Sequence: Synthetic oligonucleotide
uucacuuugcgcccaucgg

SEQ ID NO: 1088328 - RNA, 19 nt, Artificial Sequence
  Description of Artificial Sequence: Synthetic oligonucleotide
cucgcaugaagacucaagc

SEQ ID NO: 1088329 - RNA, 19 nt, Artificial Sequence
  Description of Artificial Sequence: Synthetic oligonucleotide
gaggaucuaagacacacga

SEQ ID NO: 1088330 - RNA, 19 nt, Artificial Sequence
  Description of Artificial Sequence: Synthetic oligonucleotide
aacauaaguuccugccuug

SEQ ID NO: 1088331 - RNA, 19 nt, Artificial Sequence
  Description of Artificial Sequence: Synthetic oligonucleotide
gaugcuagaaccucccgca

SEQ ID NO: 1088332 - RNA, 19 nt, Artificial Sequence
  Description of Artificial Sequence: Synthetic oligonucleotide
agcgaacauugcuagacuc

SEQ ID NO: 1088333 - RNA, 19 nt, Artificial Sequence
  Description of Artificial Sequence: Synthetic oligonucleotide
agauguuccuucucagagg

SEQ ID NO: 1088334 - RNA, 19 nt, Artificial Sequence
  Description of Artificial Sequence: Synthetic oligonucleotide
aacccaaaccacccuugac

SEQ ID NO: 1088335 - RNA, 19 nt, Artificial Sequence
  Description of Artificial Sequence: Synthetic oligonucleotide
guaugcauugacuggauuc

SEQ ID NO: 1088336 - RNA, 19 nt, Artificial Sequence
  Description of Artificial Sequence: Synthetic oligonucleotide
uccaagaucggguggcggg

SEQ ID NO: 1088337 - RNA, 19 nt, Artificial Sequence
  Description of Artificial Sequence: Synthetic oligonucleotide
uaugcauugacuggauuca

SEQ ID NO: 1088338 - RNA, 19 nt, Artificial Sequence
  Description of Artificial Sequence: Synthetic oligonucleotide
uauguugcuguacaguauu

SEQ ID NO: 1088339 - RNA, 19 nt, Artificial Sequence
  Description of Artificial Sequence: Synthetic oligonucleotide
caaaccacccuugacauug

SEQ ID NO: 1088340 - RNA, 19 nt, Artificial Sequence
  Description of Artificial Sequence: Synthetic oligonucleotide
uaaauugcuggcugauacc

SEQ ID NO: 1088341 - RNA, 19 nt, Artificial Sequence
  Description of Artificial Sequence: Synthetic oligonucleotide
aucauguacagugaguuga

SEQ ID NO: 1088342 - RNA, 19 nt, Artificial Sequence
  Description of Artificial Sequence: Synthetic oligonucleotide
acacgacaaaaccugcacg

SEQ ID NO: 1088343 - RNA, 19 nt, Artificial Sequence
  Description of Artificial Sequence: Synthetic oligonucleotide
  modified_base (2)..(2): a, c, u, g, unknown or other
unugacacauauauucauu

SEQ ID NO: 1088344 - RNA, 19 nt, Artificial Sequence
  Description of Artificial Sequence: Synthetic oligonucleotide
agcaaguauuacuuguuca

SEQ ID NO: 1088345 - RNA, 19 nt, Artificial Sequence
  Description of Artificial Sequence: Synthetic oligonucleotide
ccaauacugauuuaucucc

SEQ ID NO: 1088346 - RNA, 19 nt, Artificial Sequence
  Description of Artificial Sequence: Synthetic oligonucleotide
uuaagagagcuuccagaug

SEQ ID NO: 1088347 - RNA, 19 nt, Artificial Sequence
  Description of Artificial Sequence: Synthetic oligonucleotide
caaaacauaagaggcuugc

SEQ ID NO: 1088348 - RNA, 19 nt, Artificial Sequence
  Description of Artificial Sequence: Synthetic oligonucleotide
aaaugcuaagugcaucaau

SEQ ID NO: 1088349 - RNA, 19 nt, Artificial Sequence
  Description of Artificial Sequence: Synthetic oligonucleotide
uugccaggcagcaauaauc

SEQ ID NO: 1088350 - RNA, 19 nt, Artificial Sequence
  Description of Artificial Sequence: Synthetic oligonucleotide
ggaucuaagacacacgaca

SEQ ID NO: 1088351 - RNA, 19 nt, Artificial Sequence
  Description of Artificial Sequence: Synthetic oligonucleotide
acgaacaacaguacuucgc

SEQ ID NO: 1088352 - RNA, 19 nt, Artificial Sequence
  Description of Artificial Sequence: Synthetic oligonucleotide
ugcucauuuauaagagugu

SEQ ID NO: 1088353 - RNA, 19 nt, Artificial Sequence
  Description of Artificial Sequence: Synthetic oligonucleotide
aauugucgucaguagagua

SEQ ID NO: 1088354 - RNA, 19 nt, Artificial Sequence
  Description of Artificial Sequence: Synthetic oligonucleotide
acaacauaaguuccugccu

SEQ ID NO: 1088355 - RNA, 19 nt, Artificial Sequence
  Description of Artificial Sequence: Synthetic oligonucleotide
  modified_base (10)..(10): a, c, u, g, unknown or other
ugauaaaaunugacacaua

SEQ ID NO: 1088356 - RNA, 19 nt, Artificial Sequence
  Description of Artificial Sequence: Synthetic oligonucleotide
cuuguauaagacaggccug

SEQ ID NO: 1088357 - RNA, 19 nt, Artificial Sequence
  Description of Artificial Sequence: Synthetic oligonucleotide
uagguguaccuccuggccc

SEQ ID NO: 1088358 - RNA, 19 nt, Artificial Sequence
  Description of Artificial Sequence: Synthetic oligonucleotide
guauaagacaggccugucc

SEQ ID NO: 1088359 - RNA, 19 nt, Artificial Sequence
  Description of Artificial Sequence: Synthetic oligonucleotide
  modified_base (3)..(3): a, c, u, g, unknown or other
aunugacacauauauucau

SEQ ID NO: 1088360 - RNA, 19 nt, Artificial Sequence
  Description of Artificial Sequence: Synthetic oligonucleotide
cuaagacacacgacaaaac

SEQ ID NO: 1088361 - RNA, 19 nt, Artificial Sequence
  Description of Artificial Sequence: Synthetic oligonucleotide
uguguaggaugcucucugg

SEQ ID NO: 1088362 - RNA, 19 nt, Artificial Sequence
  Description of Artificial Sequence: Synthetic oligonucleotide
aaccugcacgaagucagcc

SEQ ID NO: 1088363 - RNA, 19 nt, Artificial Sequence
  Description of Artificial Sequence: Synthetic oligonucleotide
ucacuuugcgcccaucggu

SEQ ID NO: 1088364 - RNA, 19 nt, Artificial Sequence
  Description of Artificial Sequence: Synthetic oligonucleotide
uacuuguauaagacaggcc

SEQ ID NO: 1088365 - RNA, 19 nt, Artificial Sequence
  Description of Artificial Sequence: Synthetic oligonucleotide
uacaaggaaaacuguaauu

SEQ ID NO: 1088366 - RNA, 19 nt, Artificial Sequence
  Description of Artificial Sequence: Synthetic oligonucleotide
aagaacccugcucagguuu

SEQ ID NO: 1088367 - RNA, 19 nt, Artificial Sequence
  Description of Artificial Sequence: Synthetic oligonucleotide
cuaagguauacuuguauaa

SEQ ID NO: 1088368 - RNA, 19 nt, Artificial Sequence
  Description of Artificial Sequence: Synthetic oligonucleotide
aacgaugccacugauugua

SEQ ID NO: 1088369 - RNA, 19 nt, Artificial Sequence
  Description of Artificial Sequence: Synthetic oligonucleotide
cauugcuagacucaagcca

SEQ ID NO: 1088370 - RNA, 19 nt, Artificial Sequence
  Description of Artificial Sequence: Synthetic oligonucleotide
aagaucggguggcgggagc

SEQ ID NO: 1088371 - RNA, 19 nt, Artificial Sequence
  Description of Artificial Sequence: Synthetic oligonucleotide
uuaugcuauuuugauaaaa

SEQ ID NO: 1088372 - RNA, 19 nt, Artificial Sequence
  Description of Artificial Sequence: Synthetic oligonucleotide
gaggcuugcucauuuauaa

SEQ ID NO: 1088373 - RNA, 19 nt, Artificial Sequence
  Description of Artificial Sequence: Synthetic oligonucleotide
auugucgucaguagaguag

SEQ ID NO: 1088374 - RNA, 19 nt, Artificial Sequence
  Description of Artificial Sequence: Synthetic oligonucleotide
cugccgagcauccaagggg

SEQ ID NO: 1088375 - RNA, 19 nt, Artificial Sequence
  Description of Artificial Sequence: Synthetic oligonucleotide
acggcagacacaucacagg

SEQ ID NO: 1088376 - RNA, 19 nt, Artificial Sequence
  Description of Artificial Sequence: Synthetic oligonucleotide
aaaacauaagaggcuugcu

SEQ ID NO: 1088377 - RNA, 19 nt, Artificial Sequence
  Description of Artificial Sequence: Synthetic oligonucleotide
aucuaagguauacuuguau

SEQ ID NO: 1088378 - RNA, 19 nt, Artificial Sequence
  Description of Artificial Sequence: Synthetic oligonucleotide
ugaguugaccaugaacgug

SEQ ID NO: 1088379 - RNA, 19 nt, Artificial Sequence
  Description of Artificial Sequence: Synthetic oligonucleotide
  modified_base (6)..(6): a, c, u, g, unknown or other
aaaaunugacacauauauu

SEQ ID NO: 1088380 - RNA, 19 nt, Artificial Sequence
  Description of Artificial Sequence: Synthetic oligonucleotide
uucgaaccuuuagaggacg

SEQ ID NO: 1088381 - RNA, 19 nt, Artificial Sequence
  Description of Artificial Sequence: Synthetic oligonucleotide
aagaaucgugugaugcuag

SEQ ID NO: 1088382 - RNA, 19 nt, Artificial Sequence
  Description of Artificial Sequence: Synthetic oligonucleotide
ucauguacagugaguugac

SEQ ID NO: 1088383 - RNA, 19 nt, Artificial Sequence
  Description of Artificial Sequence: Synthetic oligonucleotide
uguaggaugcucucuggau

SEQ ID NO: 1088384 - RNA, 19 nt, Artificial Sequence
  Description of Artificial Sequence: Synthetic oligonucleotide
caauaaacccacgaacaac

SEQ ID NO: 1088385 - RNA, 19 nt, Artificial Sequence
  Description of Artificial Sequence: Synthetic oligonucleotide
accguacacauuuggagga

SEQ ID NO: 1088386 - RNA, 19 nt, Artificial Sequence
  Description of Artificial Sequence: Synthetic oligonucleotide
ucgcaugaagacucaagcu

SEQ ID NO: 1088387 - RNA, 19 nt, Artificial Sequence
  Description of Artificial Sequence: Synthetic oligonucleotide
aagcgaacauugcuagacu

SEQ ID NO: 1088388 - RNA, 19 nt, Artificial Sequence
  Description of Artificial Sequence: Synthetic oligonucleotide
cuaaagaacccugcucagg

SEQ ID NO: 1088389 - RNA, 19 nt, Artificial Sequence
  Description of Artificial Sequence: Synthetic oligonucleotide
uacaugcuuuaagagagcu

SEQ ID NO: 1088390 - RNA, 19 nt, Artificial Sequence
  Description of Artificial Sequence: Synthetic oligonucleotide
aacucgagucaaaacauaa

SEQ ID NO: 1088391 - RNA, 19 nt, Artificial Sequence
  Description of Artificial Sequence: Synthetic oligonucleotide
ucgguagacugcuuuacaa

SEQ ID NO: 1088392 - RNA, 19 nt, Artificial Sequence
  Description of Artificial Sequence: Synthetic oligonucleotide
uguucaauucgaaccuuua

SEQ ID NO: 1088393 - RNA, 19 nt, Artificial Sequence
  Description of Artificial Sequence: Synthetic oligonucleotide
acugauuguaugaugguaa

SEQ ID NO: 1088394 - RNA, 19 nt, Artificial Sequence
  Description of Artificial Sequence: Synthetic oligonucleotide
agccaacucgagucaaaac

SEQ ID NO: 1088395 - RNA, 19 nt, Artificial Sequence
  Description of Artificial Sequence: Synthetic oligonucleotide
uucgguagacugcuuuaca

SEQ ID NO: 1088396 - RNA, 19 nt, Artificial Sequence
  Description of Artificial Sequence: Synthetic oligonucleotide
ugccgagcauccaagggga

SEQ ID NO: 1088397 - RNA, 19 nt, Artificial Sequence
  Description of Artificial Sequence: Synthetic oligonucleotide
ucgugugaugcuagaaccu

SEQ ID NO: 1088398 - RNA, 19 nt, Artificial Sequence
  Description of Artificial Sequence: Synthetic oligonucleotide
cacgaacaacaguacuucg

SEQ ID NO: 1088399 - RNA, 19 nt, Artificial Sequence
  Description of Artificial Sequence: Synthetic oligonucleotide
cacgacaaaaccugcacga

SEQ ID NO: 1088400 - RNA, 19 nt, Artificial Sequence
  Description of Artificial Sequence: Synthetic oligonucleotide
auaagaggcuugcucauuu

SEQ ID NO: 1088401 - RNA, 19 nt, Artificial Sequence
  Description of Artificial Sequence: Synthetic oligonucleotide
gaggacgacacacacccuc

SEQ ID NO: 1088402 - RNA, 19 nt, Artificial Sequence
  Description of Artificial Sequence: Synthetic oligonucleotide
cauaagccguuucuugaag

SEQ ID NO: 1088403 - RNA, 19 nt, Artificial Sequence
  Description of Artificial Sequence: Synthetic oligonucleotide
gauaccguacacauuugga

SEQ ID NO: 1088404 - RNA, 19 nt, Artificial Sequence
  Description of Artificial Sequence: Synthetic oligonucleotide
cacacgacaaaaccugcac

SEQ ID NO: 1088405 - RNA, 19 nt, Artificial Sequence
  Description of Artificial Sequence: Synthetic oligonucleotide
auugcuagacucaagccaa

SEQ ID NO: 1088406 - RNA, 19 nt, Artificial Sequence
  Description of Artificial Sequence: Synthetic oligonucleotide
auaaagacucagauuaaaa

SEQ ID NO: 1088407 - RNA, 19 nt, Artificial Sequence
  Description of Artificial Sequence: Synthetic oligonucleotide
aaauaaagacucagauuaa

SEQ ID NO: 1088408 - RNA, 19 nt, Artificial Sequence
  Description of Artificial Sequence: Synthetic oligonucleotide
cagaaauaguuuaauauau

SEQ ID NO: 1088409 - RNA, 19 nt, Artificial Sequence
  Description of Artificial Sequence: Synthetic oligonucleotide
uggguccaagaucgggugg

SEQ ID NO: 1088410 - RNA, 19 nt, Artificial Sequence
  Description of Artificial Sequence: Synthetic oligonucleotide
gaaccuuuagaggacgaca

SEQ ID NO: 1088411 - RNA, 19 nt, Artificial Sequence
  Description of Artificial Sequence: Synthetic oligonucleotide
uaaguuccugccuuguauu

SEQ ID NO: 1088412 - RNA, 19 nt, Artificial Sequence
  Description of Artificial Sequence: Synthetic oligonucleotide
gagguaucggucaaauuga

SEQ ID NO: 1088413 - RNA, 19 nt, Artificial Sequence
  Description of Artificial Sequence: Synthetic oligonucleotide
gguauacuuguauaagaca

SEQ ID NO: 1088414 - RNA, 19 nt, Artificial Sequence
  Description of Artificial Sequence: Synthetic oligonucleotide
auucgaaccuuuagaggac

SEQ ID NO: 1088415 - RNA, 19 nt, Artificial Sequence
  Description of Artificial Sequence: Synthetic oligonucleotide
cacagaaucuagguugggc

SEQ ID NO: 1088416 - RNA, 19 nt, Artificial Sequence
  Description of Artificial Sequence: Synthetic oligonucleotide
uugaggagauuagaaauuu

SEQ ID NO: 1088417 - RNA, 19 nt, Artificial Sequence
  Description of Artificial Sequence: Synthetic oligonucleotide
uguugcuguacaguauugu

SEQ ID NO: 1088418 - RNA, 19 nt, Artificial Sequence
  Description of Artificial Sequence: Synthetic oligonucleotide
uuugcgcccaucgguaaag

SEQ ID NO: 1088419 - RNA, 19 nt, Artificial Sequence
  Description of Artificial Sequence: Synthetic oligonucleotide
gcugugccuaaauugcugg

SEQ ID NO: 1088420 - RNA, 19 nt, Artificial Sequence
  Description of Artificial Sequence: Synthetic oligonucleotide
cuguguaggaugcucucug

SEQ ID NO: 1088421 - RNA, 19 nt, Artificial Sequence
  Description of Artificial Sequence: Synthetic oligonucleotide
guaaaacuugaggagauua

SEQ ID NO: 1088422 - RNA, 19 nt, Artificial Sequence
  Description of Artificial Sequence: Synthetic oligonucleotide
ugaaugcuaugcagaggca

SEQ ID NO: 1088423 - RNA, 19 nt, Artificial Sequence
  Description of Artificial Sequence: Synthetic oligonucleotide
aaaaugcuaagugcaucaa

SEQ ID NO: 1088424 - RNA, 19 nt, Artificial Sequence
  Description of Artificial Sequence: Synthetic oligonucleotide
ugccgccaagaucaucagg

SEQ ID NO: 1088425 - RNA, 19 nt, Artificial Sequence
  Description of Artificial Sequence: Synthetic oligonucleotide
aucuuuguaugcauugacu

SEQ ID NO: 1088426 - RNA, 19 nt, Artificial Sequence
  Description of Artificial Sequence: Synthetic oligonucleotide
gaucuaagacacacgacaa

SEQ ID NO: 1088427 - RNA, 19 nt, Artificial Sequence
  Description of Artificial Sequence: Synthetic oligonucleotide
gacaaaaccugcacgaagu

SEQ ID NO: 1088428 - RNA, 19 nt, Artificial Sequence
  Description of Artificial Sequence: Synthetic oligonucleotide
auaccucagagggucgugg

SEQ ID NO: 1088429 - RNA, 19 nt, Artificial Sequence
  Description of Artificial Sequence: Synthetic oligonucleotide
agaggaucuaagacacacg

SEQ ID NO: 1088430 - RNA, 19 nt, Artificial Sequence
  Description of Artificial Sequence: Synthetic oligonucleotide
agcucaagccaacucgagu

SEQ ID NO: 1088431 - RNA, 19 nt, Artificial Sequence
  Description of Artificial Sequence: Synthetic oligonucleotide
ugaacguggccaugucagc

SEQ ID NO: 1088432 - RNA, 19 nt, Artificial Sequence
  Description of Artificial Sequence: Synthetic oligonucleotide
auugcuggcugauaccgua

SEQ ID NO: 1088433 - RNA, 19 nt, Artificial Sequence
  Description of Artificial Sequence: Synthetic oligonucleotide
uagaaccucccgcagcaaa

SEQ ID NO: 1088434 - RNA, 19 nt, Artificial Sequence
  Description of Artificial Sequence: Synthetic oligonucleotide
aaccucccgcagcaaagug

SEQ ID NO: 1088435 - RNA, 19 nt, Artificial Sequence
  Description of Artificial Sequence: Synthetic oligonucleotide
aggaucuaagacacacgac

SEQ ID NO: 1088436 - RNA, 19 nt, Artificial Sequence
  Description of Artificial Sequence: Synthetic oligonucleotide
aaguuccugccuuguauua

SEQ ID NO: 1088437 - RNA, 19 nt, Artificial Sequence
  Description of Artificial Sequence: Synthetic oligonucleotide
cuucacuugcucaggcgac

SEQ ID NO: 1088438 - RNA, 19 nt, Artificial Sequence
  Description of Artificial Sequence: Synthetic oligonucleotide
aaacugaccucaaucucau

SEQ ID NO: 1088439 - RNA, 19 nt, Artificial Sequence
  Description of Artificial Sequence: Synthetic oligonucleotide
gcucaagccaacucgaguc

SEQ ID NO: 1088440 - RNA, 19 nt, Artificial Sequence
  Description of Artificial Sequence: Synthetic oligonucleotide
aaaccacccuugacauugc

SEQ ID NO: 1088441 - RNA, 19 nt, Artificial Sequence
  Description of Artificial Sequence: Synthetic oligonucleotide
acauaagaggcuugcucau

SEQ ID NO: 1088442 - RNA, 19 nt, Artificial Sequence
  Description of Artificial Sequence: Synthetic oligonucleotide
aaaugccgccaagaucauc

SEQ ID NO: 1088443 - RNA, 19 nt, Artificial Sequence
  Description of Artificial Sequence: Synthetic oligonucleotide
agaaucgugugaugcuaga

SEQ ID NO: 1088444 - RNA, 19 nt, Artificial Sequence
  Description of Artificial Sequence: Synthetic oligonucleotide
ugauuguaugaugguaaaa

SEQ ID NO: 1088445 - RNA, 19 nt, Artificial Sequence
  Description of Artificial Sequence: Synthetic oligonucleotide
gaacaagcgaacauugcua

SEQ ID NO: 1088446 - RNA, 19 nt, Artificial Sequence
  Description of Artificial Sequence: Synthetic oligonucleotide
auuacuuguucaauucgaa

SEQ ID NO: 1088447 - RNA, 19 nt, Artificial Sequence
  Description of Artificial Sequence: Synthetic oligonucleotide
aaagaacccugcucagguu

SEQ ID NO: 1088448 - RNA, 19 nt, Artificial Sequence
  Description of Artificial Sequence: Synthetic oligonucleotide
gaggcaguagcuugaugga

SEQ ID NO: 1088449 - RNA, 19 nt, Artificial Sequence
  Description of Artificial Sequence: Synthetic oligonucleotide
gaaucuagguugggcaaac

SEQ ID NO: 1088450 - RNA, 19 nt, Artificial Sequence
  Description of Artificial Sequence: Synthetic oligonucleotide
gacaacugaagaaucgugu

SEQ ID NO: 1088451 - RNA, 19 nt, Artificial Sequence
  Description of Artificial Sequence: Synthetic oligonucleotide
uuuggaggagaggaucuaa

SEQ ID NO: 1088452 - RNA, 19 nt, Artificial Sequence
  Description of Artificial Sequence: Synthetic oligonucleotide
ucgaaccuuuagaggacga

SEQ ID NO: 1088453 - RNA, 19 nt, Artificial Sequence
  Description of Artificial Sequence: Synthetic oligonucleotide
agguguaccuccuggcccu

SEQ ID NO: 1088454 - RNA, 19 nt, Artificial Sequence
  Description of Artificial Sequence: Synthetic oligonucleotide
auuaugcuauuuugauaaa

SEQ ID NO: 1088455 - RNA, 19 nt, Artificial Sequence
  Description of Artificial Sequence: Synthetic oligonucleotide
gugaugcuagaaccucccg

SEQ ID NO: 1088456 - RNA, 19 nt, Artificial Sequence
  Description of Artificial Sequence: Synthetic oligonucleotide
ggucaaauugagccauugc

SEQ ID NO: 1088457 - RNA, 19 nt, Artificial Sequence
  Description of Artificial Sequence: Synthetic oligonucleotide
agaaccucccgcagcaaag

SEQ ID NO: 1088458 - RNA, 19 nt, Artificial Sequence
  Description of Artificial Sequence: Synthetic oligonucleotide
uuacucgcaugaagacuca

SEQ ID NO: 1088459 - RNA, 19 nt, Artificial Sequence
  Description of Artificial Sequence: Synthetic oligonucleotide
  modified_base (8)..(8): a, c, u, g, unknown or other
auaaaaunugacacauaua

SEQ ID NO: 1088460 - RNA, 19 nt, Artificial Sequence
  Description of Artificial Sequence: Synthetic oligonucleotide
accaguucgguagacugcu

SEQ ID NO: 1088461 - RNA, 19 nt, Artificial Sequence
  Description of Artificial Sequence: Synthetic oligonucleotide
cucaagcuauugaagaaua

SEQ ID NO: 1088462 - RNA, 19 nt, Artificial Sequence
  Description of Artificial Sequence: Synthetic oligonucleotide
cugugccuaaauugcuggc

SEQ ID NO: 1088463 - RNA, 19 nt, Artificial Sequence
  Description of Artificial Sequence: Synthetic oligonucleotide
cgaacaacaguacuucgcc

SEQ ID NO: 1088464 - RNA, 19 nt, Artificial Sequence
  Description of Artificial Sequence: Synthetic oligonucleotide
gaagaaucgugugaugcua

SEQ ID NO: 1088465 - RNA, 19 nt, Artificial Sequence
  Description of Artificial Sequence: Synthetic oligonucleotide
aggggacaacugaagaauc

SEQ ID NO: 1088466 - RNA, 19 nt, Artificial Sequence
  Description of Artificial Sequence: Synthetic oligonucleotide
cuggcccuccucuuguaag

SEQ ID NO: 1088467 - RNA, 19 nt, Artificial Sequence
  Description of Artificial Sequence: Synthetic oligonucleotide
agguugggcaaacuggcua

SEQ ID NO: 1088468 - RNA, 19 nt, Artificial Sequence
  Description of Artificial Sequence: Synthetic oligonucleotide
aguucgguagacugcuuua

SEQ ID NO: 1088469 - RNA, 19 nt, Artificial Sequence
  Description of Artificial Sequence: Synthetic oligonucleotide
cacauaccucagagggucg

SEQ ID NO: 1088470 - RNA, 19 nt, Artificial Sequence
  Description of Artificial Sequence: Synthetic oligonucleotide
ucaggcgaccuguguagga

SEQ ID NO: 1088471 - RNA, 19 nt, Artificial Sequence
  Description of Artificial Sequence: Synthetic oligonucleotide
gcugauaccguacacauuu

SEQ ID NO: 1088472 - RNA, 19 nt, Artificial Sequence
  Description of Artificial Sequence: Synthetic oligonucleotide
ggggacaacugaagaaucg

SEQ ID NO: 1088473 - RNA, 19 nt, Artificial Sequence
  Description of Artificial Sequence: Synthetic oligonucleotide
augcuagaaccucccgcag

SEQ ID NO: 1088474 - RNA, 19 nt, Artificial Sequence
  Description of Artificial Sequence: Synthetic oligonucleotide
cugaguuaacacggcagac

SEQ ID NO: 1088475 - RNA, 19 nt, Artificial Sequence
  Description of Artificial Sequence: Synthetic oligonucleotide
uggcccuccucuuguaaga

SEQ ID NO: 1088476 - RNA, 19 nt, Artificial Sequence
  Description of Artificial Sequence: Synthetic oligonucleotide
uacuucgccuggcgguucc

SEQ ID NO: 1088477 - RNA, 19 nt, Artificial Sequence
  Description of Artificial Sequence: Synthetic oligonucleotide
aauugcuggcugauaccgu

SEQ ID NO: 1088478 - RNA, 19 nt, Artificial Sequence
  Description of Artificial Sequence: Synthetic oligonucleotide
agacucaagccaauacuga

SEQ ID NO: 1088479 - RNA, 19 nt, Artificial Sequence
  Description of Artificial Sequence: Synthetic oligonucleotide
augggucuagguguaccuc

SEQ ID NO: 1088480 - RNA, 19 nt, Artificial Sequence
  Description of Artificial Sequence: Synthetic oligonucleotide
cugauuguaugaugguaaa

SEQ ID NO: 1088481 - RNA, 19 nt, Artificial Sequence
  Description of Artificial Sequence: Synthetic oligonucleotide
ggcagcuaaugaacaagcg

SEQ ID NO: 1088482 - RNA, 19 nt, Artificial Sequence
  Description of Artificial Sequence: Synthetic oligonucleotide
guagcucaagccaacucga

SEQ ID NO: 1088483 - RNA, 19 nt, Artificial Sequence
  Description of Artificial Sequence: Synthetic oligonucleotide
aaucuagguugggcaaacu

SEQ ID NO: 1088484 - RNA, 19 nt, Artificial Sequence
  Description of Artificial Sequence: Synthetic oligonucleotide
agagucugauucagggcag

SEQ ID NO: 1088485 - RNA, 19 nt, Artificial Sequence
  Description of Artificial Sequence: Synthetic oligonucleotide
cugauaccguacacauuug

SEQ ID NO: 1088486 - RNA, 19 nt, Artificial Sequence
  Description of Artificial Sequence: Synthetic oligonucleotide
uaagaggcuugcucauuua

SEQ ID NO: 1088487 - RNA, 19 nt, Artificial Sequence
  Description of Artificial Sequence: Synthetic oligonucleotide
uguauaagacaggccuguc

SEQ ID NO: 1088488 - RNA, 19 nt, Artificial Sequence
  Description of Artificial Sequence: Synthetic oligonucleotide
cucauaggcucugcagacc

SEQ ID NO: 1088489 - RNA, 19 nt, Artificial Sequence
  Description of Artificial Sequence: Synthetic oligonucleotide
agaaucuagguugggcaaa

SEQ ID NO: 1088490 - RNA, 19 nt, Artificial Sequence
  Description of Artificial Sequence: Synthetic oligonucleotide
uggcgguuccaaauucauc

SEQ ID NO: 1088491 - RNA, 19 nt, Artificial Sequence
  Description of Artificial Sequence: Synthetic oligonucleotide
acauaaguuccugccuugu

SEQ ID NO: 1088492 - RNA, 19 nt, Artificial Sequence
  Description of Artificial Sequence: Synthetic oligonucleotide
cuggggcugagagguaucg

SEQ ID NO: 1088493 - RNA, 19 nt, Artificial Sequence
  Description of Artificial Sequence: Synthetic oligonucleotide
ucgugggaaugcauuucaa

SEQ ID NO: 1088494 - RNA, 19 nt, Artificial Sequence
  Description of Artificial Sequence: Synthetic oligonucleotide
ccugucggugaauucaaac

SEQ ID NO: 1088495 - RNA, 19 nt, Artificial Sequence
  Description of Artificial Sequence: Synthetic oligonucleotide
agguaucggucaaauugag

SEQ ID NO: 1088496 - RNA, 19 nt, Artificial Sequence
  Description of Artificial Sequence: Synthetic oligonucleotide
cagaaucuagguugggcaa

SEQ ID NO: 1088497 - RNA, 19 nt, Artificial Sequence
  Description of Artificial Sequence: Synthetic oligonucleotide
gaaucgugugaugcuagaa

SEQ ID NO: 1088498 - RNA, 19 nt, Artificial Sequence
  Description of Artificial Sequence: Synthetic oligonucleotide
cauguuagcugagaaugaa

SEQ ID NO: 1088499 - RNA, 19 nt, Artificial Sequence
  Description of Artificial Sequence: Synthetic oligonucleotide
cuugaggagauuagaaauu

SEQ ID NO: 1088500 - RNA, 19 nt, Artificial Sequence
  Description of Artificial Sequence: Synthetic oligonucleotide
ggacaacugaagaaucgug

SEQ ID NO: 1088501 - RNA, 19 nt, Artificial Sequence
  Description of Artificial Sequence: Synthetic oligonucleotide
aggcgaccuguguaggaug

SEQ ID NO: 1088502 - RNA, 19 nt, Artificial Sequence
  Description of Artificial Sequence: Synthetic oligonucleotide
ucgccuggcgguuccaaau

SEQ ID NO: 1088503 - RNA, 19 nt, Artificial Sequence
  Description of Artificial Sequence: Synthetic oligonucleotide
aucaggagaguagugucuu

SEQ ID NO: 1088504 - RNA, 19 nt, Artificial Sequence
  Description of Artificial Sequence: Synthetic oligonucleotide
uuaacacggcagacacauc

SEQ ID NO: 1088505 - RNA, 19 nt, Artificial Sequence
  Description of Artificial Sequence: Synthetic oligonucleotide
gguaucggucaaauugagc

SEQ ID NO: 1088506 - RNA, 19 nt, Artificial Sequence
  Description of Artificial Sequence: Synthetic oligonucleotide
guuuacucgcaugaagacu

SEQ ID NO: 1088507 - RNA, 19 nt, Artificial Sequence
  Description of Artificial Sequence: Synthetic oligonucleotide
caagccaauacugauuuau

SEQ ID NO: 1088508 - RNA, 19 nt, Artificial Sequence
  Description of Artificial Sequence: Synthetic oligonucleotide
ucaagccaauacugauuua

SEQ ID NO: 1088509 - RNA, 19 nt, Artificial Sequence
  Description of Artificial Sequence: Synthetic oligonucleotide
auguugcuguacaguauug

SEQ ID NO: 1088510 - RNA, 19 nt, Artificial Sequence
  Description of Artificial Sequence: Synthetic oligonucleotide
cuggcugauaccguacaca

SEQ ID NO: 1088511 - RNA, 19 nt, Artificial Sequence
  Description of Artificial Sequence: Synthetic oligonucleotide
augccgccaagaucaucag

SEQ ID NO: 1088512 - RNA, 19 nt, Artificial Sequence
  Description of Artificial Sequence: Synthetic oligonucleotide
acuuugcgcccaucgguaa

SEQ ID NO: 1088513 - RNA, 19 nt, Artificial Sequence
  Description of Artificial Sequence: Synthetic oligonucleotide
gccugaguuaacacggcag

SEQ ID NO: 1088514 - RNA, 19 nt, Artificial Sequence
  Description of Artificial Sequence: Synthetic oligonucleotide
cacacccucagugauaugu

SEQ ID NO: 1088515 - RNA, 19 nt, Artificial Sequence
  Description of Artificial Sequence: Synthetic oligonucleotide
acuguagcacugaguagga

SEQ ID NO: 1088516 - RNA, 19 nt, Artificial Sequence
  Description of Artificial Sequence: Synthetic oligonucleotide
acauaccucagagggucgu

SEQ ID NO: 1088517 - RNA, 19 nt, Artificial Sequence
  Description of Artificial Sequence: Synthetic oligonucleotide
cucaggcgaccuguguagg

SEQ ID NO: 1088518 - RNA, 19 nt, Artificial Sequence
  Description of Artificial Sequence: Synthetic oligonucleotide
uugcuagacucaagccaau

SEQ ID NO: 1088519 - RNA, 19 nt, Artificial Sequence
  Description of Artificial Sequence: Synthetic oligonucleotide
gugaguugaccaugaacgu

SEQ ID NO: 1088520 - RNA, 19 nt, Artificial Sequence
  Description of Artificial Sequence: Synthetic oligonucleotide
gguugggcaaacuggcuaa

SEQ ID NO: 1088521 - RNA, 19 nt, Artificial Sequence
  Description of Artificial Sequence: Synthetic oligonucleotide
ugcuagacucaagccaaua

SEQ ID NO: 1088522 - RNA, 19 nt, Artificial Sequence
  Description of Artificial Sequence: Synthetic oligonucleotide
ucaaugggucuagguguac

SEQ ID NO: 1088523 - RNA, 19 nt, Artificial Sequence
  Description of Artificial Sequence: Synthetic oligonucleotide
caacaguacuucgccuggc

SEQ ID NO: 1088524 - RNA, 19 nt, Artificial Sequence
  Description of Artificial Sequence: Synthetic oligonucleotide
aguugagcuguggcaucag

SEQ ID NO: 1088525 - RNA, 19 nt, Artificial Sequence
  Description of Artificial Sequence: Synthetic oligonucleotide
agaucggguggcgggagcu

SEQ ID NO: 1088526 - RNA, 19 nt, Artificial Sequence
  Description of Artificial Sequence: Synthetic oligonucleotide
cauaccucagagggucgug

SEQ ID NO: 1088527 - RNA, 19 nt, Artificial Sequence
  Description of Artificial Sequence: Synthetic oligonucleotide
uucgccuggcgguuccaaa

SEQ ID NO: 1088528 - RNA, 19 nt, Artificial Sequence
  Description of Artificial Sequence: Synthetic oligonucleotide
auccaaggggacaacugaa

SEQ ID NO: 1088529 - RNA, 19 nt, Artificial Sequence
  Description of Artificial Sequence: Synthetic oligonucleotide
caucuaagguauacuugua

SEQ ID NO: 1088530 - RNA, 19 nt, Artificial Sequence
  Description of Artificial Sequence: Synthetic oligonucleotide
ccugaguuaacacggcaga

SEQ ID NO: 1088531 - RNA, 19 nt, Artificial Sequence
  Description of Artificial Sequence: Synthetic oligonucleotide
caagaucggguggcgggag

SEQ ID NO: 1088532 - RNA, 19 nt, Artificial Sequence
  Description of Artificial Sequence: Synthetic oligonucleotide
caacucgagucaaaacaua

SEQ ID NO: 1088533 - RNA, 19 nt, Artificial Sequence
  Description of Artificial Sequence: Synthetic oligonucleotide
cacuuugcgcccaucggua

SEQ ID NO: 1088534 - RNA, 19 nt, Artificial Sequence
  Description of Artificial Sequence: Synthetic oligonucleotide
cgacaaaaccugcacgaag

SEQ ID NO: 1088535 - RNA, 19 nt, Artificial Sequence
  Description of Artificial Sequence: Synthetic oligonucleotide
cacugauuguaugauggua

SEQ ID NO: 1088536 - RNA, 19 nt, Artificial Sequence
  Description of Artificial Sequence: Synthetic oligonucleotide
ccacgaacaacaguacuuc

SEQ ID NO: 1088537 - RNA, 19 nt, Artificial Sequence
  Description of Artificial Sequence: Synthetic oligonucleotide
ucaacacccugugcaguua

SEQ ID NO: 1088538 - RNA, 19 nt, Artificial Sequence
  Description of Artificial Sequence: Synthetic oligonucleotide
gcacugaguaggaaguuga

SEQ ID NO: 1088539 - RNA, 19 nt, Artificial Sequence
  Description of Artificial Sequence: Synthetic oligonucleotide
ggacgacacacacccucag

SEQ ID NO: 1088540 - RNA, 19 nt, Artificial Sequence
  Description of Artificial Sequence: Synthetic oligonucleotide
caguacuucgccuggcggu

SEQ ID NO: 1088541 - RNA, 19 nt, Artificial Sequence
  Description of Artificial Sequence: Synthetic oligonucleotide
uccaggcgccugucgguga

SEQ ID NO: 1088542 - RNA, 19 nt, Artificial Sequence
  Description of Artificial Sequence: Synthetic oligonucleotide
ccaaggggacaacugaaga

SEQ ID NO: 1088543 - RNA, 19 nt, Artificial Sequence
  Description of Artificial Sequence: Synthetic oligonucleotide
agggucgugggaaugcauu

SEQ ID NO: 1088544 - RNA, 19 nt, Artificial Sequence
  Description of Artificial Sequence: Synthetic oligonucleotide
caucgguaaagucuuucau

SEQ ID NO: 1088545 - RNA, 19 nt, Artificial Sequence
  Description of Artificial Sequence: Synthetic oligonucleotide
ggcgaccuguguaggaugc

SEQ ID NO: 1088546 - RNA, 19 nt, Artificial Sequence
  Description of Artificial Sequence: Synthetic oligonucleotide
caagccaacucgagucaaa

SEQ ID NO: 1088547 - RNA, 19 nt, Artificial Sequence
  Description of Artificial Sequence: Synthetic oligonucleotide
gaccuguguaggaugcucu

SEQ ID NO: 1088548 - RNA, 19 nt, Artificial Sequence
  Description of Artificial Sequence: Synthetic oligonucleotide
caaguauuacuuguucaau

SEQ ID NO: 1088549 - RNA, 19 nt, Artificial Sequence
  Description of Artificial Sequence: Synthetic oligonucleotide
ccucaaucucauacaagga

SEQ ID NO: 1088550 - RNA, 19 nt, Artificial Sequence
  Description of Artificial Sequence: Synthetic oligonucleotide
aucggguggcgggagcuca

SEQ ID NO: 1088551 - RNA, 19 nt, Artificial Sequence
  Description of Artificial Sequence: Synthetic oligonucleotide
ccauguuagcugagaauga

SEQ ID NO: 1088552 - RNA, 19 nt, Artificial Sequence
  Description of Artificial Sequence: Synthetic oligonucleotide
cuuugcgcccaucgguaaa

SEQ ID NO: 1088553 - RNA, 19 nt, Artificial Sequence
  Description of Artificial Sequence: Synthetic oligonucleotide
ggucuagguguaccuccug

SEQ ID NO: 1088554 - RNA, 19 nt, Artificial Sequence
  Description of Artificial Sequence: Synthetic oligonucleotide
ggccugaguuaacacggca

SEQ ID NO: 1088555 - RNA, 19 nt, Artificial Sequence
  Description of Artificial Sequence: Synthetic oligonucleotide
gccaggcagcaauaaucug

SEQ ID NO: 1088556 - RNA, 19 nt, Artificial Sequence
  Description of Artificial Sequence: Synthetic oligonucleotide
agaacccugcucagguuua

SEQ ID NO: 1088557 - RNA, 19 nt, Artificial Sequence
  Description of Artificial Sequence: Synthetic oligonucleotide
caauugucgucaguagagu

SEQ ID NO: 1088558 - RNA, 19 nt, Artificial Sequence
  Description of Artificial Sequence: Synthetic oligonucleotide
ccgccaagaucaucaggag

SEQ ID NO: 1088559 - RNA, 19 nt, Artificial Sequence
  Description of Artificial Sequence: Synthetic oligonucleotide
gagagguaucggucaaauu

SEQ ID NO: 1088560 - RNA, 19 nt, Artificial Sequence
  Description of Artificial Sequence: Synthetic oligonucleotide
gggacaacugaagaaucgu

SEQ ID NO: 1088561 - RNA, 19 nt, Artificial Sequence
  Description of Artificial Sequence: Synthetic oligonucleotide
cauucacuuugcgcccauc

SEQ ID NO: 1088562 - RNA, 19 nt, Artificial Sequence
  Description of Artificial Sequence: Synthetic oligonucleotide
cugugcaguuacaugcuuu

SEQ ID NO: 1088563 - RNA, 19 nt, Artificial Sequence
  Description of Artificial Sequence: Synthetic oligonucleotide
gaucggguggcgggagcuc

SEQ ID NO: 1088564 - RNA, 19 nt, Artificial Sequence
  Description of Artificial Sequence: Synthetic oligonucleotide
caugaagacucaagcuauu

SEQ ID NO: 1088565 - RNA, 19 nt, Artificial Sequence
  Description of Artificial Sequence: Synthetic oligonucleotide
cagccugccgagcauccaa

SEQ ID NO: 1088566 - RNA, 19 nt, Artificial Sequence
  Description of Artificial Sequence: Synthetic oligonucleotide
gcgccugucggugaauuca

SEQ ID NO: 1088567 - RNA, 19 nt, Artificial Sequence
  Description of Artificial Sequence: Synthetic oligonucleotide
cccagguucagcaaguauu

SEQ ID NO: 1088568 - RNA, 19 nt, Artificial Sequence
  Description of Artificial Sequence: Synthetic oligonucleotide
ccuggcgguuccaaauuca

SEQ ID NO: 1088569 - RNA, 19 nt, Artificial Sequence
  Description of Artificial Sequence: Synthetic oligonucleotide
cuggcgguuccaaauucau

SEQ ID NO: 1088570 - RNA, 19 nt, Artificial Sequence
  Description of Artificial Sequence: Synthetic oligonucleotide
caugucagcugugccuaaa

SEQ ID NO: 1088571 - RNA, 19 nt, Artificial Sequence
  Description of Artificial Sequence: Synthetic oligonucleotide
acgaugccacugauuguau

SEQ ID NO: 1088572 - RNA, 19 nt, Artificial Sequence
  Description of Artificial Sequence: Synthetic oligonucleotide
gccuggcgguuccaaauuc

SEQ ID NO: 1088573 - RNA, 19 nt, Artificial Sequence
  Description of Artificial Sequence: Synthetic oligonucleotide
caacgaugccacugauugu

SEQ ID NO: 1088574 - RNA, 19 nt, Artificial Sequence
  Description of Artificial Sequence: Synthetic oligonucleotide
cccaucgguaaagucuuuc

SEQ ID NO: 1088575 - RNA, 19 nt, Artificial Sequence
  Description of Artificial Sequence: Synthetic oligonucleotide
gcgcccaucgguaaagucu

SEQ ID NO: 1088576 - RNA, 19 nt, Artificial Sequence
  Description of Artificial Sequence: Synthetic oligonucleotide
caguucgguagacugcuuu

SEQ ID NO: 1088577 - RNA, 19 nt, Artificial Sequence
  Description of Artificial Sequence: Synthetic oligonucleotide
agaggacgacacacacccu

SEQ ID NO: 1088578 - RNA, 19 nt, Artificial Sequence
  Description of Artificial Sequence: Synthetic oligonucleotide
cgaaccuuuagaggacgac

SEQ ID NO: 1088579 - RNA, 19 nt, Artificial Sequence
  Description of Artificial Sequence: Synthetic oligonucleotide
ccguacacauuuggaggag

SEQ ID NO: 1088580 - RNA, 19 nt, Artificial Sequence
  Description of Artificial Sequence: Synthetic oligonucleotide
ccaugaacguggccauguc

SEQ ID NO: 1088581 - RNA, 19 nt, Artificial Sequence
  Description of Artificial Sequence: Synthetic oligonucleotide
guggcgggagcucaaccuu

SEQ ID NO: 1088582 - RNA, 19 nt, Artificial Sequence
  Description of Artificial Sequence: Synthetic oligonucleotide
guacuucgccuggcgguuc

SEQ ID NO: 1088583 - RNA, 19 nt, Artificial Sequence
  Description of Artificial Sequence: Synthetic oligonucleotide
ggcgccugucggugaauuc

SEQ ID NO: 1088584 - RNA, 19 nt, Artificial Sequence
  Description of Artificial Sequence: Synthetic oligonucleotide
ggagaggaucuaagacaca

SEQ ID NO: 1088585 - RNA, 19 nt, Artificial Sequence
  Description of Artificial Sequence: Synthetic oligonucleotide
aggcgccugucggugaauu

SEQ ID NO: 1088586 - RNA, 19 nt, Artificial Sequence
  Description of Artificial Sequence: Synthetic oligonucleotide
acuucgccuggcgguucca

SEQ ID NO: 1088587 - RNA, 19 nt, Artificial Sequence
  Description of Artificial Sequence: Synthetic oligonucleotide
cuagaaccucccgcagcaa

SEQ ID NO: 1088588 - RNA, 19 nt, Artificial Sequence
  Description of Artificial Sequence: Synthetic oligonucleotide
gguaaaacuugaggagauu

SEQ ID NO: 1088589 - RNA, 19 nt, Artificial Sequence
  Description of Artificial Sequence: Synthetic oligonucleotide
ccaagaucggguggcggga

SEQ ID NO: 1088590 - RNA, 19 nt, Artificial Sequence
  Description of Artificial Sequence: Synthetic oligonucleotide
cuucgccuggcgguuccaa

SEQ ID NO: 1088591 - RNA, 19 nt, Artificial Sequence
  Description of Artificial Sequence: Synthetic oligonucleotide
ggagcucaaccuuguccau

SEQ ID NO: 1088592 - RNA, 19 nt, Artificial Sequence
  Description of Artificial Sequence: Synthetic oligonucleotide
gcgggagcucaaccuuguc

SEQ ID NO: 1088593 - RNA, 19 nt, Artificial Sequence
  Description of Artificial Sequence: Synthetic oligonucleotide
gccgagcauccaaggggac

SEQ ID NO: 1088594 - RNA, 19 nt, Artificial Sequence
  Description of Artificial Sequence: Synthetic oligonucleotide
ccaagaucaucaggagagu

SEQ ID NO: 1088595 - RNA, 19 nt, Artificial Sequence
  Description of Artificial Sequence: Synthetic oligonucleotide
ggcgggagcucaaccuugu

SEQ ID NO: 1088596 - RNA, 19 nt, Artificial Sequence
  Description of Artificial Sequence: Synthetic oligonucleotide
cgccugucggugaauucaa

SEQ ID NO: 1088597 - RNA, 19 nt, Artificial Sequence
  Description of Artificial Sequence: Synthetic oligonucleotide
ccaggcgccugucggugaa

SEQ ID NO: 1088598 - RNA, 19 nt, Artificial Sequence
  Description of Artificial Sequence: Synthetic oligonucleotide
gccugucggugaauucaaa

SEQ ID NO: 1088599 - RNA, 19 nt, Artificial Sequence
  Description of Artificial Sequence: Synthetic oligonucleotide
cgcccaucgguaaagucuu

SEQ ID NO: 1088600 - RNA, 19 nt, Artificial Sequence
  Description of Artificial Sequence: Synthetic oligonucleotide
gcgaccuguguaggaugcu

SEQ ID NO: 1088601 - RNA, 19 nt, Artificial Sequence
  Description of Artificial Sequence: Synthetic oligonucleotide
ccaguucgguagacugcuu

SEQ ID NO: 1088602 - RNA, 19 nt, Artificial Sequence
  Description of Artificial Sequence: Synthetic oligonucleotide
caggcgccugucggugaau

SEQ ID NO: 1088603 - RNA, 19 nt, Artificial Sequence
  Description of Artificial Sequence: Synthetic oligonucleotide
gcccaucgguaaagucuuu

SEQ ID NO: 1088604 - RNA, 19 nt, Artificial Sequence
  Description of Artificial Sequence: Synthetic oligonucleotide
ugucacaucauucugaggg

SEQ ID NO: 1088605 - RNA, 19 nt, Artificial Sequence
  Description of Artificial Sequence: Synthetic oligonucleotide
aagucuagcguccugauac

SEQ ID NO: 1088606 - RNA, 19 nt, Artificial Sequence
  Description of Artificial Sequence: Synthetic oligonucleotide
auugacuucacguuugugc

SEQ ID NO: 1088607 - RNA, 19 nt, Artificial Sequence
  Description of Artificial Sequence: Synthetic oligonucleotide
aauauuaucuuguugagua

SEQ ID NO: 1088608 - RNA, 19 nt, Artificial Sequence
  Description of Artificial Sequence: Synthetic oligonucleotide
uuuagauugauuuauuuuc

SEQ ID NO: 1088609 - RNA, 19 nt, Artificial Sequence
  Description of Artificial Sequence: Synthetic oligonucleotide
uucaagauaaccauccaug

SEQ ID NO: 1088610 - RNA, 19 nt, Artificial Sequence
  Description of Artificial Sequence: Synthetic oligonucleotide
uuguugaguauucaaagcc

SEQ ID NO: 1088611 - RNA, 19 nt, Artificial Sequence
  Description of Artificial Sequence: Synthetic oligonucleotide
ugauacauugaucucaugu

SEQ ID NO: 1088612 - RNA, 19 nt, Artificial Sequence
  Description of Artificial Sequence: Synthetic oligonucleotide
auacauuagcuucuuuucc

SEQ ID NO: 1088613 - RNA, 19 nt, Artificial Sequence
  Description of Artificial Sequence: Synthetic oligonucleotide
guuguaucaucccagaacc

SEQ ID NO: 1088614 - RNA, 19 nt, Artificial Sequence
  Description of Artificial Sequence: Synthetic oligonucleotide
uuuaucaaggucaggguca

SEQ ID NO: 1088615 - RNA, 19 nt, Artificial Sequence
  Description of Artificial Sequence: Synthetic oligonucleotide
ucccuaacagucaugacag

SEQ ID NO: 1088616 - RNA, 19 nt, Artificial Sequence
  Description of Artificial Sequence: Synthetic oligonucleotide
aaucauugacguuagcaca

SEQ ID NO: 1088617 - RNA, 19 nt, Artificial Sequence
  Description of Artificial Sequence: Synthetic oligonucleotide
ugcuaugucuuccuuaugc

SEQ ID NO: 1088618 - RNA, 19 nt, Artificial Sequence
  Description of Artificial Sequence: Synthetic oligonucleotide
uauauuuugauugcucugc

SEQ ID NO: 1088619 - RNA, 19 nt, Artificial Sequence
  Description of Artificial Sequence: Synthetic oligonucleotide
uuagauugauuuauuuuca

SEQ ID NO: 1088620 - RNA, 19 nt, Artificial Sequence
  Description of Artificial Sequence: Synthetic oligonucleotide
uccguaacaaacucgaaga

SEQ ID NO: 1088621 - RNA, 19 nt, Artificial Sequence
  Description of Artificial Sequence: Synthetic oligonucleotide
ucugguauagaauauuauc

SEQ ID NO: 1088622 - RNA, 19 nt, Artificial Sequence
  Description of Artificial Sequence: Synthetic oligonucleotide
uuuacggugacuuuauuua

SEQ ID NO: 1088623 - RNA, 19 nt, Artificial Sequence
  Description of Artificial Sequence: Synthetic oligonucleotide
ugucaauuggaguagacau

SEQ ID NO: 1088624 - RNA, 19 nt, Artificial Sequence
  Description of Artificial Sequence: Synthetic oligonucleotide
uuuuaaguaggauaucguc

SEQ ID NO: 1088625 - RNA, 19 nt, Artificial Sequence
  Description of Artificial Sequence: Synthetic oligonucleotide
aaggauccguaacaaacuc

SEQ ID NO: 1088626 - RNA, 19 nt, Artificial Sequence
  Description of Artificial Sequence: Synthetic oligonucleotide
aguauucaaagccaugucu

SEQ ID NO: 1088627 - RNA, 19 nt, Artificial Sequence
  Description of Artificial Sequence: Synthetic oligonucleotide
uuaugacagaaucaguaac

SEQ ID NO: 1088628 - RNA, 19 nt, Artificial Sequence
  Description of Artificial Sequence: Synthetic oligonucleotide
uaggauaucgucuuuugcu

SEQ ID NO: 1088629 - RNA, 19 nt, Artificial Sequence
  Description of Artificial Sequence: Synthetic oligonucleotide
uccaaaaccuguucuacag

SEQ ID NO: 1088630 - RNA, 19 nt, Artificial Sequence
  Description of Artificial Sequence: Synthetic oligonucleotide
uucaaccucaucauuauau

SEQ ID NO: 1088631 - RNA, 19 nt, Artificial Sequence
  Description of Artificial Sequence: Synthetic oligonucleotide
uugguuuuggacaugguau

SEQ ID NO: 1088632 - RNA, 19 nt, Artificial Sequence
  Description of Artificial Sequence: Synthetic oligonucleotide
uguugaguauucaaagcca

SEQ ID NO: 1088633 - RNA, 19 nt, Artificial Sequence
  Description of Artificial Sequence: Synthetic oligonucleotide
uagcauaguauacauuagc

SEQ ID NO: 1088634 - RNA, 19 nt, Artificial Sequence
  Description of Artificial Sequence: Synthetic oligonucleotide
uugucuagauuuuacggug

SEQ ID NO: 1088635 - RNA, 19 nt, Artificial Sequence
  Description of Artificial Sequence: Synthetic oligonucleotide
uuuaacucgauacgauucu

SEQ ID NO: 1088636 - RNA, 19 nt, Artificial Sequence
  Description of Artificial Sequence: Synthetic oligonucleotide
uuuuccgguuguaucaucc

SEQ ID NO: 1088637 - RNA, 19 nt, Artificial Sequence
  Description of Artificial Sequence: Synthetic oligonucleotide
ucuuuuccagugcuaaugc

SEQ ID NO: 1088638 - RNA, 19 nt, Artificial Sequence
  Description of Artificial Sequence: Synthetic oligonucleotide
augauguacacaucuccac

SEQ ID NO: 1088639 - RNA, 19 nt, Artificial Sequence
  Description of Artificial Sequence: Synthetic oligonucleotide
uuuaugacagaaucaguaa

SEQ ID NO: 1088640 - RNA, 19 nt, Artificial Sequence
  Description of Artificial Sequence: Synthetic oligonucleotide
gaaaucauugacguuagca

SEQ ID NO: 1088641 - RNA, 19 nt, Artificial Sequence
  Description of Artificial Sequence: Synthetic oligonucleotide
cuuuaacucgauacgauuc

SEQ ID NO: 1088642 - RNA, 19 nt, Artificial Sequence
  Description of Artificial Sequence: Synthetic oligonucleotide
cucgauacgauucugcuuc

SEQ ID NO: 1088643 - RNA, 19 nt, Artificial Sequence
  Description of Artificial Sequence: Synthetic oligonucleotide
caaugauguacacaucucc

SEQ ID NO: 1088644 - RNA, 19 nt, Artificial Sequence
  Description of Artificial Sequence: Synthetic oligonucleotide
accgcgaccauccuauccc

SEQ ID NO: 1088645 - RNA, 19 nt, Artificial Sequence
  Description of Artificial Sequence: Synthetic oligonucleotide
ggaguagacauuuugguug

SEQ ID NO: 1088646 - RNA, 19 nt, Artificial Sequence
  Description of Artificial Sequence: Synthetic oligonucleotide
uccuuaugcaacauuuuga

SEQ ID NO: 1088647 - RNA, 19 nt, Artificial Sequence
  Description of Artificial Sequence: Synthetic oligonucleotide
auccguaacaaacucgaag

SEQ ID NO: 1088648 - RNA, 19 nt, Artificial Sequence
  Description of Artificial Sequence: Synthetic oligonucleotide
ucagccuuaucuuuaacuc

SEQ ID NO: 1088649 - RNA, 19 nt, Artificial Sequence
  Description of Artificial Sequence: Synthetic oligonucleotide
ucaagauaaccauccaugu

SEQ ID NO: 1088650 - RNA, 19 nt, Artificial Sequence
  Description of Artificial Sequence: Synthetic oligonucleotide
uucccuuacaauagccacg

SEQ ID NO: 1088651 - RNA, 19 nt, Artificial Sequence
  Description of Artificial Sequence: Synthetic oligonucleotide
uugguugaacugcaguuag

SEQ ID NO: 1088652 - RNA, 19 nt, Artificial Sequence
  Description of Artificial Sequence: Synthetic oligonucleotide
ugaguauucaaagccaugu

SEQ ID NO: 1088653 - RNA, 19 nt, Artificial Sequence
  Description of Artificial Sequence: Synthetic oligonucleotide
cugagagacaucaaugaug

SEQ ID NO: 1088654 - RNA, 19 nt, Artificial Sequence
  Description of Artificial Sequence: Synthetic oligonucleotide
caguuacauacuuaucucg

SEQ ID NO: 1088655 - RNA, 19 nt, Artificial Sequence
  Description of Artificial Sequence: Synthetic oligonucleotide
aaugcagccaugaauuucu

SEQ ID NO: 1088656 - RNA, 19 nt, Artificial Sequence
  Description of Artificial Sequence: Synthetic oligonucleotide
ucgucuuuugcuugaauug

SEQ ID NO: 1088657 - RNA, 19 nt, Artificial Sequence
  Description of Artificial Sequence: Synthetic oligonucleotide
auguuuagggauuuuauuu

SEQ ID NO: 1088658 - RNA, 19 nt, Artificial Sequence
  Description of Artificial Sequence: Synthetic oligonucleotide
aucucgaucuuugaauacc

SEQ ID NO: 1088659 - RNA, 19 nt, Artificial Sequence
  Description of Artificial Sequence: Synthetic oligonucleotide
ucauuauauccacaucucu

SEQ ID NO: 1088660 - RNA, 19 nt, Artificial Sequence
  Description of Artificial Sequence: Synthetic oligonucleotide
aacucgauacgauucugcu

SEQ ID NO: 1088661 - RNA, 19 nt, Artificial Sequence
  Description of Artificial Sequence: Synthetic oligonucleotide
ugaacugcaguuagaaguc

SEQ ID NO: 1088662 - RNA, 19 nt, Artificial Sequence
  Description of Artificial Sequence: Synthetic oligonucleotide
cuagcguccugauacauug

SEQ ID NO: 1088663 - RNA, 19 nt, Artificial Sequence
  Description of Artificial Sequence: Synthetic oligonucleotide
uuucaagauaaccauccau

SEQ ID NO: 1088664 - RNA, 19 nt, Artificial Sequence
  Description of Artificial Sequence: Synthetic oligonucleotide
uuuggacaugguauguuug

SEQ ID NO: 1088665 - RNA, 19 nt, Artificial Sequence
  Description of Artificial Sequence: Synthetic oligonucleotide
aaugauguacacaucucca

SEQ ID NO: 1088666 - RNA, 19 nt, Artificial Sequence
  Description of Artificial Sequence: Synthetic oligonucleotide
uaucuuuaacucgauacga

SEQ ID NO: 1088667 - RNA, 19 nt, Artificial Sequence
  Description of Artificial Sequence: Synthetic oligonucleotide
uacauugaucucauguacu

SEQ ID NO: 1088668 - RNA, 19 nt, Artificial Sequence
  Description of Artificial Sequence: Synthetic oligonucleotide
auguucucaggagugaugg

SEQ ID NO: 1088669 - RNA, 19 nt, Artificial Sequence
  Description of Artificial Sequence: Synthetic oligonucleotide
ucaaaagcggugcaggcau

SEQ ID NO: 1088670 - RNA, 19 nt, Artificial Sequence
  Description of Artificial Sequence: Synthetic oligonucleotide
gauggaaggauccguaaca

SEQ ID NO: 1088671 - RNA, 19 nt, Artificial Sequence
  Description of Artificial Sequence: Synthetic oligonucleotide
gauacauugaucucaugua

SEQ ID NO: 1088672 - RNA, 19 nt, Artificial Sequence
  Description of Artificial Sequence: Synthetic oligonucleotide
auugaucucauguacugaa

SEQ ID NO: 1088673 - RNA, 19 nt, Artificial Sequence
  Description of Artificial Sequence: Synthetic oligonucleotide
guauguuugcuguucuuag

SEQ ID NO: 1088674 - RNA, 19 nt, Artificial Sequence
  Description of Artificial Sequence: Synthetic oligonucleotide
cacggcgaaaucuaaauuc

SEQ ID NO: 1088675 - RNA, 19 nt, Artificial Sequence
  Description of Artificial Sequence: Synthetic oligonucleotide
gguauagaauauuaucuug

SEQ ID NO: 1088676 - RNA, 19 nt, Artificial Sequence
  Description of Artificial Sequence: Synthetic oligonucleotide
uauuuaugacagaaucagu

SEQ ID NO: 1088677 - RNA, 19 nt, Artificial Sequence
  Description of Artificial Sequence: Synthetic oligonucleotide
uuuuacggugacuuuauuu

SEQ ID NO: 1088678 - RNA, 19 nt, Artificial Sequence
  Description of Artificial Sequence: Synthetic oligonucleotide
uguuuagggauuuuauuuu

SEQ ID NO: 1088679 - RNA, 19 nt, Artificial Sequence
  Description of Artificial Sequence: Synthetic oligonucleotide
ugcuugaauugacuucacg

SEQ ID NO: 1088680 - RNA, 19 nt, Artificial Sequence
  Description of Artificial Sequence: Synthetic oligonucleotide
guacacaucuccaccaugg

SEQ ID NO: 1088681 - RNA, 19 nt, Artificial Sequence
  Description of Artificial Sequence: Synthetic oligonucleotide
uuaucucgaucuuugaaua

SEQ ID NO: 1088682 - RNA, 19 nt, Artificial Sequence
  Description of Artificial Sequence: Synthetic oligonucleotide
ucccuuacaauagccacgg

SEQ ID NO: 1088683 - RNA, 19 nt, Artificial Sequence
  Description of Artificial Sequence: Synthetic oligonucleotide
uugaauugacuucacguuu

SEQ ID NO: 1088684 - RNA, 19 nt, Artificial Sequence
  Description of Artificial Sequence: Synthetic oligonucleotide
ugugguagcauaguauaca

SEQ ID NO: 1088685 - RNA, 19 nt, Artificial Sequence
  Description of Artificial Sequence: Synthetic oligonucleotide
uuggcuagucuuuuccucc

SEQ ID NO: 1088686 - RNA, 19 nt, Artificial Sequence
  Description of Artificial Sequence: Synthetic oligonucleotide
agcauguugaauucacuga

SEQ ID NO: 1088687 - RNA, 19 nt, Artificial Sequence
  Description of Artificial Sequence: Synthetic oligonucleotide
auuuaugacagaaucagua

SEQ ID NO: 1088688 - RNA, 19 nt, Artificial Sequence
  Description of Artificial Sequence: Synthetic oligonucleotide
guauauuuugauugcucug

SEQ ID NO: 1088689 - RNA, 19 nt, Artificial Sequence
  Description of Artificial Sequence: Synthetic oligonucleotide
uuuucaagauaaccaucca

SEQ ID NO: 1088690 - RNA, 19 nt, Artificial Sequence
  Description of Artificial Sequence: Synthetic oligonucleotide
uaacuucacuuucuaggag

SEQ ID NO: 1088691 - RNA, 19 nt, Artificial Sequence
  Description of Artificial Sequence: Synthetic oligonucleotide
ucucgaucuuugaauacca

SEQ ID NO: 1088692 - RNA, 19 nt, Artificial Sequence
  Description of Artificial Sequence: Synthetic oligonucleotide
uccgguuguaucaucccag

SEQ ID NO: 1088693 - RNA, 19 nt, Artificial Sequence
  Description of Artificial Sequence: Synthetic oligonucleotide
uauguuugcuguucuuagc

SEQ ID NO: 1088694 - RNA, 19 nt, Artificial Sequence
  Description of Artificial Sequence: Synthetic oligonucleotide
uguuugaacaccucuucau

SEQ ID NO: 1088695 - RNA, 19 nt, Artificial Sequence
  Description of Artificial Sequence: Synthetic oligonucleotide
uuucgcaaggacuugucaa

SEQ ID NO: 1088696 - RNA, 19 nt, Artificial Sequence
  Description of Artificial Sequence: Synthetic oligonucleotide
cacguuugugcuuucacug

SEQ ID NO: 1088697 - RNA, 19 nt, Artificial Sequence
  Description of Artificial Sequence: Synthetic oligonucleotide
auuaucuuguugaguauuc

SEQ ID NO: 1088698 - RNA, 19 nt, Artificial Sequence
  Description of Artificial Sequence: Synthetic oligonucleotide
uccugauacauugaucuca

SEQ ID NO: 1088699 - RNA, 19 nt, Artificial Sequence
  Description of Artificial Sequence: Synthetic oligonucleotide
gguagcauaguauacauua

SEQ ID NO: 1088700 - RNA, 19 nt, Artificial Sequence
  Description of Artificial Sequence: Synthetic oligonucleotide
ugguauagaauauuaucuu

SEQ ID NO: 1088701 - RNA, 19 nt, Artificial Sequence
  Description of Artificial Sequence: Synthetic oligonucleotide
gaguuuuccgguuguauca

SEQ ID NO: 1088702 - RNA, 19 nt, Artificial Sequence
  Description of Artificial Sequence: Synthetic oligonucleotide
ucaauuggaguagacauuu

SEQ ID NO: 1088703 - RNA, 19 nt, Artificial Sequence
  Description of Artificial Sequence: Synthetic oligonucleotide
gaaaucuaaauucuccagu

SEQ ID NO: 1088704 - RNA, 19 nt, Artificial Sequence
  Description of Artificial Sequence: Synthetic oligonucleotide
aguaggauaucgucuuuug

SEQ ID NO: 1088705 - RNA, 19 nt, Artificial Sequence
  Description of Artificial Sequence: Synthetic oligonucleotide
ugguuuuggacaugguaug

SEQ ID NO: 1088706 - RNA, 19 nt, Artificial Sequence
  Description of Artificial Sequence: Synthetic oligonucleotide
uucgacucugacaacugga

SEQ ID NO: 1088707 - RNA, 19 nt, Artificial Sequence
  Description of Artificial Sequence: Synthetic oligonucleotide
aaaagaaaucauugacguu

SEQ ID NO: 1088708 - RNA, 19 nt, Artificial Sequence
  Description of Artificial Sequence: Synthetic oligonucleotide
ugauggaaggauccguaac

SEQ ID NO: 1088709 - RNA, 19 nt, Artificial Sequence
  Description of Artificial Sequence: Synthetic oligonucleotide
gagugcagggaccuucugg

SEQ ID NO: 1088710 - RNA, 19 nt, Artificial Sequence
  Description of Artificial Sequence: Synthetic oligonucleotide
aaucuaaauucuccaguua

SEQ ID NO: 1088711 - RNA, 19 nt, Artificial Sequence
  Description of Artificial Sequence: Synthetic oligonucleotide
uuuucgcaaggacuuguca

SEQ ID NO: 1088712 - RNA, 19 nt, Artificial Sequence
  Description of Artificial Sequence: Synthetic oligonucleotide
uacggugacuuuauuuaug

SEQ ID NO: 1088713 - RNA, 19 nt, Artificial Sequence
  Description of Artificial Sequence: Synthetic oligonucleotide
uuuucuaggguuucccuua

SEQ ID NO: 1088714 - RNA, 19 nt, Artificial Sequence
  Description of Artificial Sequence: Synthetic oligonucleotide
agauugauuuauuuucaaa

SEQ ID NO: 1088715 - RNA, 19 nt, Artificial Sequence
  Description of Artificial Sequence: Synthetic oligonucleotide
uccggcauugucuuccugc

SEQ ID NO: 1088716 - RNA, 19 nt, Artificial Sequence
  Description of Artificial Sequence: Synthetic oligonucleotide
aauuuucgcaaggacuugu

SEQ ID NO: 1088717 - RNA, 19 nt, Artificial Sequence
  Description of Artificial Sequence: Synthetic oligonucleotide
acucccgugccuucgacuc

SEQ ID NO: 1088718 - RNA, 19 nt, Artificial Sequence
  Description of Artificial Sequence: Synthetic oligonucleotide
uugaguauucaaagccaug

SEQ ID NO: 1088719 - RNA, 19 nt, Artificial Sequence
  Description of Artificial Sequence: Synthetic oligonucleotide
cugguauagaauauuaucu

SEQ ID NO: 1088720 - RNA, 19 nt, Artificial Sequence
  Description of Artificial Sequence: Synthetic oligonucleotide
ucgaucuuugaauaccaaa

SEQ ID NO: 1088721 - RNA, 19 nt, Artificial Sequence
  Description of Artificial Sequence: Synthetic oligonucleotide
guaacaaacucgaagagcu

SEQ ID NO: 1088722 - RNA, 19 nt, Artificial Sequence
  Description of Artificial Sequence: Synthetic oligonucleotide
ucaaccucaucauuauauc

SEQ ID NO: 1088723 - RNA, 19 nt, Artificial Sequence
  Description of Artificial Sequence: Synthetic oligonucleotide
ucuuuaacucgauacgauu

SEQ ID NO: 1088724 - RNA, 19 nt, Artificial Sequence
  Description of Artificial Sequence: Synthetic oligonucleotide
ggauaaguuccucauuucc

SEQ ID NO: 1088725 - RNA, 19 nt, Artificial Sequence
  Description of Artificial Sequence: Synthetic oligonucleotide
agcauaguauacauuagcu

SEQ ID NO: 1088726 - RNA, 19 nt, Artificial Sequence
  Description of Artificial Sequence: Synthetic oligonucleotide
ccuuacaauagccacggcg

SEQ ID NO: 1088727 - RNA, 19 nt, Artificial Sequence
  Description of Artificial Sequence: Synthetic oligonucleotide
uuugggaugcuauuuccau

SEQ ID NO: 1088728 - RNA, 19 nt, Artificial Sequence
  Description of Artificial Sequence: Synthetic oligonucleotide
ugaggaguccgcgucgucg

SEQ ID NO: 1088729 - RNA, 19 nt, Artificial Sequence
  Description of Artificial Sequence: Synthetic oligonucleotide
uccgcauggacaagucuag

SEQ ID NO: 1088730 - RNA, 19 nt, Artificial Sequence
  Description of Artificial Sequence: Synthetic oligonucleotide
uuuaaccugauugguuuug

SEQ ID NO: 1088731 - RNA, 19 nt, Artificial Sequence
  Description of Artificial Sequence: Synthetic oligonucleotide
uugucaauuggaguagaca

SEQ ID NO: 1088732 - RNA, 19 nt, Artificial Sequence
  Description of Artificial Sequence: Synthetic oligonucleotide
ugauugcucugcuuucucc

SEQ ID NO: 1088733 - RNA, 19 nt, Artificial Sequence
  Description of Artificial Sequence: Synthetic oligonucleotide
acucgaagagcucccuaac

SEQ ID NO: 1088734 - RNA, 19 nt, Artificial Sequence
  Description of Artificial Sequence: Synthetic oligonucleotide
gauaucgucuuuugcuuga

SEQ ID NO: 1088735 - RNA, 19 nt, Artificial Sequence
  Description of Artificial Sequence: Synthetic oligonucleotide
gguuguaucaucccagaac

SEQ ID NO: 1088736 - RNA, 19 nt, Artificial Sequence
  Description of Artificial Sequence: Synthetic oligonucleotide
uuuuggacaugguauguuu

SEQ ID NO: 1088737 - RNA, 19 nt, Artificial Sequence
  Description of Artificial Sequence: Synthetic oligonucleotide
guuacugccuccauuccag

SEQ ID NO: 1088738 - RNA, 19 nt, Artificial Sequence
  Description of Artificial Sequence: Synthetic oligonucleotide
gugaucgugcuccacagac

SEQ ID NO: 1088739 - RNA, 19 nt, Artificial Sequence
  Description of Artificial Sequence: Synthetic oligonucleotide
ucgacucugacaacuggac

SEQ ID NO: 1088740 - RNA, 19 nt, Artificial Sequence
  Description of Artificial Sequence: Synthetic oligonucleotide
ucacguuugugcuuucacu

SEQ ID NO: 1088741 - RNA, 19 nt, Artificial Sequence
  Description of Artificial Sequence: Synthetic oligonucleotide
uucacguuugugcuuucac

SEQ ID NO: 1088742 - RNA, 19 nt, Artificial Sequence
  Description of Artificial Sequence: Synthetic oligonucleotide
aggacuugucaauuggagu

SEQ ID NO: 1088743 - RNA, 19 nt, Artificial Sequence
  Description of Artificial Sequence: Synthetic oligonucleotide
gaugcuauuuccauggccu

SEQ ID NO: 1088744 - RNA, 19 nt, Artificial Sequence
  Description of Artificial Sequence: Synthetic oligonucleotide
auaguauacauuagcuucu

SEQ ID NO: 1088745 - RNA, 19 nt, Artificial Sequence
  Description of Artificial Sequence: Synthetic oligonucleotide
acugcaguccaugacaggu

SEQ ID NO: 1088746 - RNA, 19 nt, Artificial Sequence
  Description of Artificial Sequence: Synthetic oligonucleotide
guaggauaucgucuuuugc

SEQ ID NO: 1088747 - RNA, 19 nt, Artificial Sequence
  Description of Artificial Sequence: Synthetic oligonucleotide
agaaucaguaacauucagu

SEQ ID NO: 1088748 - RNA, 19 nt, Artificial Sequence
  Description of Artificial Sequence: Synthetic oligonucleotide
ugcagguacaacucccgug

SEQ ID NO: 1088749 - RNA, 19 nt, Artificial Sequence
  Description of Artificial Sequence: Synthetic oligonucleotide
uagauugauuuauuuucaa

SEQ ID NO: 1088750 - RNA, 19 nt, Artificial Sequence
  Description of Artificial Sequence: Synthetic oligonucleotide
cucccuaacagucaugaca

SEQ ID NO: 1088751 - RNA, 19 nt, Artificial Sequence
  Description of Artificial Sequence: Synthetic oligonucleotide
auggacaagucuagcgucc

SEQ ID NO: 1088752 - RNA, 19 nt, Artificial Sequence
  Description of Artificial Sequence: Synthetic oligonucleotide
aaauuuucgcaaggacuug

SEQ ID NO: 1088753 - RNA, 19 nt, Artificial Sequence
  Description of Artificial Sequence: Synthetic oligonucleotide
aacuccaacgcgugugggu

SEQ ID NO: 1088754 - RNA, 19 nt, Artificial Sequence
  Description of Artificial Sequence: Synthetic oligonucleotide
uucuacauguuuagggauu

SEQ ID NO: 1088755 - RNA, 19 nt, Artificial Sequence
  Description of Artificial Sequence: Synthetic oligonucleotide
uugggaugcuauuuccaug

SEQ ID NO: 1088756 - RNA, 19 nt, Artificial Sequence
  Description of Artificial Sequence: Synthetic oligonucleotide
gugccuucgacucugacaa

SEQ ID NO: 1088757 - RNA, 19 nt, Artificial Sequence
  Description of Artificial Sequence: Synthetic oligonucleotide
cauggacaagucuagcguc

SEQ ID NO: 1088758 - RNA, 19 nt, Artificial Sequence
  Description of Artificial Sequence: Synthetic oligonucleotide
gaagagcucccuaacaguc

SEQ ID NO: 1088759 - RNA, 19 nt, Artificial Sequence
  Description of Artificial Sequence: Synthetic oligonucleotide
aguuacauacuuaucucga

SEQ ID NO: 1088760 - RNA, 19 nt, Artificial Sequence
  Description of Artificial Sequence: Synthetic oligonucleotide
ggaaggauccguaacaaac

SEQ ID NO: 1088761 - RNA, 19 nt, Artificial Sequence
  Description of Artificial Sequence: Synthetic oligonucleotide
acugagagacaucaaugau

SEQ ID NO: 1088762 - RNA, 19 nt, Artificial Sequence
  Description of Artificial Sequence: Synthetic oligonucleotide
uuaucaaggucagggucag

SEQ ID NO: 1088763 - RNA, 19 nt, Artificial Sequence
  Description of Artificial Sequence: Synthetic oligonucleotide
uuuagucccgugaccgucu

SEQ ID NO: 1088764 - RNA, 19 nt, Artificial Sequence
  Description of Artificial Sequence: Synthetic oligonucleotide
uuccgguuguaucauccca

SEQ ID NO: 1088765 - RNA, 19 nt, Artificial Sequence
  Description of Artificial Sequence: Synthetic oligonucleotide
uggaguagacauuuugguu

SEQ ID NO: 1088766 - RNA, 19 nt, Artificial Sequence
  Description of Artificial Sequence: Synthetic oligonucleotide
gaccauccuaucccgacug

SEQ ID NO: 1088767 - RNA, 19 nt, Artificial Sequence
  Description of Artificial Sequence: Synthetic oligonucleotide
uuaucuuguugaguauuca

SEQ ID NO: 1088768 - RNA, 19 nt, Artificial Sequence
  Description of Artificial Sequence: Synthetic oligonucleotide
gacuugucaauuggaguag

SEQ ID NO: 1088769 - RNA, 19 nt, Artificial Sequence
  Description of Artificial Sequence: Synthetic oligonucleotide
accuguucuacaguugcuc

SEQ ID NO: 1088770 - RNA, 19 nt, Artificial Sequence
  Description of Artificial Sequence: Synthetic oligonucleotide
uuaacucgauacgauucug

SEQ ID NO: 1088771 - RNA, 19 nt, Artificial Sequence
  Description of Artificial Sequence: Synthetic oligonucleotide
cuucgacucugacaacugg

SEQ ID NO: 1088772 - RNA, 19 nt, Artificial Sequence
  Description of Artificial Sequence: Synthetic oligonucleotide
cuugucaauuggaguagac

SEQ ID NO: 1088773 - RNA, 19 nt, Artificial Sequence
  Description of Artificial Sequence: Synthetic oligonucleotide
ucgugcuccacagacugag

SEQ ID NO: 1088774 - RNA, 19 nt, Artificial Sequence
  Description of Artificial Sequence: Synthetic oligonucleotide
ugucugaggaguccgcguc

SEQ ID NO: 1088775 - RNA, 19 nt, Artificial Sequence
  Description of Artificial Sequence: Synthetic oligonucleotide
cagaaucaguaacauucag

SEQ ID NO: 1088776 - RNA, 19 nt, Artificial Sequence
  Description of Artificial Sequence: Synthetic oligonucleotide
aggauaucgucuuuugcuu

SEQ ID NO: 1088777 - RNA, 19 nt, Artificial Sequence
  Description of Artificial Sequence: Synthetic oligonucleotide
auauuaucuuguugaguau

SEQ ID NO: 1088778 - RNA, 19 nt, Artificial Sequence
  Description of Artificial Sequence: Synthetic oligonucleotide
auugacguuagcacagucu

SEQ ID NO: 1088779 - RNA, 19 nt, Artificial Sequence
  Description of Artificial Sequence: Synthetic oligonucleotide
cuggggauuugccugccgg

SEQ ID NO: 1088780 - RNA, 19 nt, Artificial Sequence
  Description of Artificial Sequence: Synthetic oligonucleotide
uuacggugacuuuauuuau

SEQ ID NO: 1088781 - RNA, 19 nt, Artificial Sequence
  Description of Artificial Sequence: Synthetic oligonucleotide
cuguucuuagccuggauaa

SEQ ID NO: 1088782 - RNA, 19 nt, Artificial Sequence
  Description of Artificial Sequence: Synthetic oligonucleotide
uguucuuagccuggauaag

SEQ ID NO: 1088783 - RNA, 19 nt, Artificial Sequence
  Description of Artificial Sequence: Synthetic oligonucleotide
auacgauucugcuucuuuu

SEQ ID NO: 1088784 - RNA, 19 nt, Artificial Sequence
  Description of Artificial Sequence: Synthetic oligonucleotide
cuuaucucgaucuuugaau

SEQ ID NO: 1088785 - RNA, 19 nt, Artificial Sequence
  Description of Artificial Sequence: Synthetic oligonucleotide
guauagaauauuaucuugu

SEQ ID NO: 1088786 - RNA, 19 nt, Artificial Sequence
  Description of Artificial Sequence: Synthetic oligonucleotide
uaaugcagccaugaauuuc

SEQ ID NO: 1088787 - RNA, 19 nt, Artificial Sequence
  Description of Artificial Sequence: Synthetic oligonucleotide
aaaagcggugcaggcaugu

SEQ ID NO: 1088788 - RNA, 19 nt, Artificial Sequence
  Description of Artificial Sequence: Synthetic oligonucleotide
ggcgaaaucuaaauucucc

SEQ ID NO: 1088789 - RNA, 19 nt, Artificial Sequence
  Description of Artificial Sequence: Synthetic oligonucleotide
accauccuaucccgacugc

SEQ ID NO: 1088790 - RNA, 19 nt, Artificial Sequence
  Description of Artificial Sequence: Synthetic oligonucleotide
aggauccguaacaaacucg

SEQ ID NO: 1088791 - RNA, 19 nt, Artificial Sequence
  Description of Artificial Sequence: Synthetic oligonucleotide
gauaaguuccucauuuccu

SEQ ID NO: 1088792 - RNA, 19 nt, Artificial Sequence
  Description of Artificial Sequence: Synthetic oligonucleotide
uuucuaggguuucccuuac

SEQ ID NO: 1088793 - RNA, 19 nt, Artificial Sequence
  Description of Artificial Sequence: Synthetic oligonucleotide
uuuuagucccgugaccguc

SEQ ID NO: 1088794 - RNA, 19 nt, Artificial Sequence
  Description of Artificial Sequence: Synthetic oligonucleotide
caacgcgugugggugaucg

SEQ ID NO: 1088795 - RNA, 19 nt, Artificial Sequence
  Description of Artificial Sequence: Synthetic oligonucleotide
uacuuaucucgaucuuuga

SEQ ID NO: 1088796 - RNA, 19 nt, Artificial Sequence
  Description of Artificial Sequence: Synthetic oligonucleotide
acaugaucuuggcuagucu

SEQ ID NO: 1088797 - RNA, 19 nt, Artificial Sequence
  Description of Artificial Sequence: Synthetic oligonucleotide
caugguauguuugcuguuc

SEQ ID NO: 1088798 - RNA, 19 nt, Artificial Sequence
  Description of Artificial Sequence: Synthetic oligonucleotide
caguccaugacaggugggg

SEQ ID NO: 1088799 - RNA, 19 nt, Artificial Sequence
  Description of Artificial Sequence: Synthetic oligonucleotide
ugacuuuauuuaugacaga

SEQ ID NO: 1088800 - RNA, 19 nt, Artificial Sequence
  Description of Artificial Sequence: Synthetic oligonucleotide
ugguccuuugggaugcuau

SEQ ID NO: 1088801 - RNA, 19 nt, Artificial Sequence
  Description of Artificial Sequence: Synthetic oligonucleotide
ugagaagaacaugacuuuu

SEQ ID NO: 1088802 - RNA, 19 nt, Artificial Sequence
  Description of Artificial Sequence: Synthetic oligonucleotide
ggacuugucaauuggagua

SEQ ID NO: 1088803 - RNA, 19 nt, Artificial Sequence
  Description of Artificial Sequence: Synthetic oligonucleotide
uucugcuaugucuuccuua

SEQ ID NO: 1088804 - RNA, 19 nt, Artificial Sequence
  Description of Artificial Sequence: Synthetic oligonucleotide
ugaccgucugguauagaau

SEQ ID NO: 1088805 - RNA, 19 nt, Artificial Sequence
  Description of Artificial Sequence: Synthetic oligonucleotide
caaucucaccuucacucug

SEQ ID NO: 1088806 - RNA, 19 nt, Artificial Sequence
  Description of Artificial Sequence: Synthetic oligonucleotide
gacaagucuagcguccuga

SEQ ID NO: 1088807 - RNA, 19 nt, Artificial Sequence
  Description of Artificial Sequence: Synthetic oligonucleotide
auuuucgcaaggacuuguc

SEQ ID NO: 1088808 - RNA, 19 nt, Artificial Sequence
  Description of Artificial Sequence: Synthetic oligonucleotide
ucgucgaacugcccgggga

SEQ ID NO: 1088809 - RNA, 19 nt, Artificial Sequence
  Description of Artificial Sequence: Synthetic oligonucleotide
uugauugcucugcuuucuc

SEQ ID NO: 1088810 - RNA, 19 nt, Artificial Sequence
  Description of Artificial Sequence: Synthetic oligonucleotide
gguacagcauguugaauuc

SEQ ID NO: 1088811 - RNA, 19 nt, Artificial Sequence
  Description of Artificial Sequence: Synthetic oligonucleotide
augacagaaucaguaacau

SEQ ID NO: 1088812 - RNA, 19 nt, Artificial Sequence
  Description of Artificial Sequence: Synthetic oligonucleotide
ucuacauguuuagggauuu

SEQ ID NO: 1088813 - RNA, 19 nt, Artificial Sequence
  Description of Artificial Sequence: Synthetic oligonucleotide
uccugggauccaaaaccug

SEQ ID NO: 1088814 - RNA, 19 nt, Artificial Sequence
  Description of Artificial Sequence: Synthetic oligonucleotide
agaacucuuggugaguuuu

SEQ ID NO: 1088815 - RNA, 19 nt, Artificial Sequence
  Description of Artificial Sequence: Synthetic oligonucleotide
ggaugcuauuuccauggcc

SEQ ID NO: 1088816 - RNA, 19 nt, Artificial Sequence
  Description of Artificial Sequence: Synthetic oligonucleotide
gugaccgucugguauagaa

SEQ ID NO: 1088817 - RNA, 19 nt, Artificial Sequence
  Description of Artificial Sequence: Synthetic oligonucleotide
ucuagcguccugauacauu

SEQ ID NO: 1088818 - RNA, 19 nt, Artificial Sequence
  Description of Artificial Sequence: Synthetic oligonucleotide
cugccuccauuccagguag

SEQ ID NO: 1088819 - RNA, 19 nt, Artificial Sequence
  Description of Artificial Sequence: Synthetic oligonucleotide
aaacucgaagagcucccua

SEQ ID NO: 1088820 - RNA, 19 nt, Artificial Sequence
  Description of Artificial Sequence: Synthetic oligonucleotide
gcuugaauugacuucacgu

SEQ ID NO: 1088821 - RNA, 19 nt, Artificial Sequence
  Description of Artificial Sequence: Synthetic oligonucleotide
guagacauuuugguugaac

SEQ ID NO: 1088822 - RNA, 19 nt, Artificial Sequence
  Description of Artificial Sequence: Synthetic oligonucleotide
ugguugaacugcaguuaga

SEQ ID NO: 1088823 - RNA, 19 nt, Artificial Sequence
  Description of Artificial Sequence: Synthetic oligonucleotide
auccuaucccgacugcagu

SEQ ID NO: 1088824 - RNA, 19 nt, Artificial Sequence
  Description of Artificial Sequence: Synthetic oligonucleotide
acggcgaaaucuaaauucu

SEQ ID NO: 1088825 - RNA, 19 nt, Artificial Sequence
  Description of Artificial Sequence: Synthetic oligonucleotide
aaagcggugcaggcauguc

SEQ ID NO: 1088826 - RNA, 19 nt, Artificial Sequence
  Description of Artificial Sequence: Synthetic oligonucleotide
acauguuuagggauuuuau

SEQ ID NO: 1088827 - RNA, 19 nt, Artificial Sequence
  Description of Artificial Sequence: Synthetic oligonucleotide
gucugaggaguccgcgucg

SEQ ID NO: 1088828 - RNA, 19 nt, Artificial Sequence
  Description of Artificial Sequence: Synthetic oligonucleotide
acguuagcacagucuuuuc

SEQ ID NO: 1088829 - RNA, 19 nt, Artificial Sequence
  Description of Artificial Sequence: Synthetic oligonucleotide
gcgaaaucuaaauucucca

SEQ ID NO: 1088830 - RNA, 19 nt, Artificial Sequence
  Description of Artificial Sequence: Synthetic oligonucleotide
ucuggacuccugacaaauc

SEQ ID NO: 1088831 - RNA, 19 nt, Artificial Sequence
  Description of Artificial Sequence: Synthetic oligonucleotide
gaauauuaucuuguugagu

SEQ ID NO: 1088832 - RNA, 19 nt, Artificial Sequence
  Description of Artificial Sequence: Synthetic oligonucleotide
agcguccugauacauugau

SEQ ID NO: 1088833 - RNA, 19 nt, Artificial Sequence
  Description of Artificial Sequence: Synthetic oligonucleotide
uccuaucccgacugcaguc

SEQ ID NO: 1088834 - RNA, 19 nt, Artificial Sequence
  Description of Artificial Sequence: Synthetic oligonucleotide
ucccgugaccgucugguau

SEQ ID NO: 1088835 - RNA, 19 nt, Artificial Sequence
  Description of Artificial Sequence: Synthetic oligonucleotide
ugacagaaucaguaacauu

SEQ ID NO: 1088836 - RNA, 19 nt, Artificial Sequence
  Description of Artificial Sequence: Synthetic oligonucleotide
cuaugucuuccuuaugcaa

SEQ ID NO: 1088837 - RNA, 19 nt, Artificial Sequence
  Description of Artificial Sequence: Synthetic oligonucleotide
cuugaauugacuucacguu

SEQ ID NO: 1088838 - RNA, 19 nt, Artificial Sequence
  Description of Artificial Sequence: Synthetic oligonucleotide
gaaggauccguaacaaacu

SEQ ID NO: 1088839 - RNA, 19 nt, Artificial Sequence
  Description of Artificial Sequence: Synthetic oligonucleotide
uuagucccgugaccgucug

SEQ ID NO: 1088840 - RNA, 19 nt, Artificial Sequence
  Description of Artificial Sequence: Synthetic oligonucleotide
ggauccguaacaaacucga

SEQ ID NO: 1088841 - RNA, 19 nt, Artificial Sequence
  Description of Artificial Sequence: Synthetic oligonucleotide
agguacaacucccgugccu

SEQ ID NO: 1088842 - RNA, 19 nt, Artificial Sequence
  Description of Artificial Sequence: Synthetic oligonucleotide
cucauguacugaaucaccu

SEQ ID NO: 1088843 - RNA, 19 nt, Artificial Sequence
  Description of Artificial Sequence: Synthetic oligonucleotide
gaucuuggcuagucuuuuc

SEQ ID NO: 1088844 - RNA, 19 nt, Artificial Sequence
  Description of Artificial Sequence: Synthetic oligonucleotide
acucgauacgauucugcuu

SEQ ID NO: 1088845 - RNA, 19 nt, Artificial Sequence
  Description of Artificial Sequence: Synthetic oligonucleotide
aucuuuaacucgauacgau

SEQ ID NO: 1088846 - RNA, 19 nt, Artificial Sequence
  Description of Artificial Sequence: Synthetic oligonucleotide
uggggauuugccugccggu

SEQ ID NO: 1088847 - RNA, 19 nt, Artificial Sequence
  Description of Artificial Sequence: Synthetic oligonucleotide
agucccgugaccgucuggu

SEQ ID NO: 1088848 - RNA, 19 nt, Artificial Sequence
  Description of Artificial Sequence: Synthetic oligonucleotide
agucuagcguccugauaca

SEQ ID NO: 1088849 - RNA, 19 nt, Artificial Sequence
  Description of Artificial Sequence: Synthetic oligonucleotide
uaucgucuuuugcuugaau

SEQ ID NO: 1088850 - RNA, 19 nt, Artificial Sequence
  Description of Artificial Sequence: Synthetic oligonucleotide
uggcuagucuuuuccuccu

SEQ ID NO: 1088851 - RNA, 19 nt, Artificial Sequence
  Description of Artificial Sequence: Synthetic oligonucleotide
acaagucuagcguccugau

SEQ ID NO: 1088852 - RNA, 19 nt, Artificial Sequence
  Description of Artificial Sequence: Synthetic oligonucleotide
uugcauccggcauugucuu

SEQ ID NO: 1088853 - RNA, 19 nt, Artificial Sequence
  Description of Artificial Sequence: Synthetic oligonucleotide
ccuuaacuucacuuucuag

SEQ ID NO: 1088854 - RNA, 19 nt, Artificial Sequence
  Description of Artificial Sequence: Synthetic oligonucleotide
ccuuaugcaacauuuugaa

SEQ ID NO: 1088855 - RNA, 19 nt, Artificial Sequence
  Description of Artificial Sequence: Synthetic oligonucleotide
cauugacguuagcacaguc

SEQ ID NO: 1088856 - RNA, 19 nt, Artificial Sequence
  Description of Artificial Sequence: Synthetic oligonucleotide
agauccgcauggacaaguc

SEQ ID NO: 1088857 - RNA, 19 nt, Artificial Sequence
  Description of Artificial Sequence: Synthetic oligonucleotide
ugaucuuggcuagucuuuu

SEQ ID NO: 1088858 - RNA, 19 nt, Artificial Sequence
  Description of Artificial Sequence: Synthetic oligonucleotide
ugaagcccaugagaagaac

SEQ ID NO: 1088859 - RNA, 19 nt, Artificial Sequence
  Description of Artificial Sequence: Synthetic oligonucleotide
ucauugacguuagcacagu

SEQ ID NO: 1088860 - RNA, 19 nt, Artificial Sequence
  Description of Artificial Sequence: Synthetic oligonucleotide
gguugaacugcaguuagaa

SEQ ID NO: 1088861 - RNA, 19 nt, Artificial Sequence
  Description of Artificial Sequence: Synthetic oligonucleotide
ccaugguacagcauguuga

SEQ ID NO: 1088862 - RNA, 19 nt, Artificial Sequence
  Description of Artificial Sequence: Synthetic oligonucleotide
caccgcgaccauccuaucc

SEQ ID NO: 1088863 - RNA, 19 nt, Artificial Sequence
  Description of Artificial Sequence: Synthetic oligonucleotide
gcuagucuuuuccuccuug

SEQ ID NO: 1088864 - RNA, 19 nt, Artificial Sequence
  Description of Artificial Sequence: Synthetic oligonucleotide
gccacagcaugcuugaaaa

SEQ ID NO: 1088865 - RNA, 19 nt, Artificial Sequence
  Description of Artificial Sequence: Synthetic oligonucleotide
guuacauacuuaucucgau

SEQ ID NO: 1088866 - RNA, 19 nt, Artificial Sequence
  Description of Artificial Sequence: Synthetic oligonucleotide
uagucccgugaccgucugg

SEQ ID NO: 1088867 - RNA, 19 nt, Artificial Sequence
  Description of Artificial Sequence: Synthetic oligonucleotide
gggugaucgugcuccacag

SEQ ID NO: 1088868 - RNA, 19 nt, Artificial Sequence
  Description of Artificial Sequence: Synthetic oligonucleotide
gguuacugccuccauucca

SEQ ID NO: 1088869 - RNA, 19 nt, Artificial Sequence
  Description of Artificial Sequence: Synthetic oligonucleotide
cgaucuuugaauaccaaaa

SEQ ID NO: 1088870 - RNA, 19 nt, Artificial Sequence
  Description of Artificial Sequence: Synthetic oligonucleotide
uggacaagucuagcguccu

SEQ ID NO: 1088871 - RNA, 19 nt, Artificial Sequence
  Description of Artificial Sequence: Synthetic oligonucleotide
ucgauacgauucugcuucu

SEQ ID NO: 1088872 - RNA, 19 nt, Artificial Sequence
  Description of Artificial Sequence: Synthetic oligonucleotide
uucaagguucugggaauau

SEQ ID NO: 1088873 - RNA, 19 nt, Artificial Sequence
  Description of Artificial Sequence: Synthetic oligonucleotide
cugcccggggaccaccgcg

SEQ ID NO: 1088874 - RNA, 19 nt, Artificial Sequence
  Description of Artificial Sequence: Synthetic oligonucleotide
uagcguccugauacauuga

SEQ ID NO: 1088875 - RNA, 19 nt, Artificial Sequence
  Description of Artificial Sequence: Synthetic oligonucleotide
ccgguuacugccuccauuc

SEQ ID NO: 1088876 - RNA, 19 nt, Artificial Sequence
  Description of Artificial Sequence: Synthetic oligonucleotide
gcccaugagaagaacauga

SEQ ID NO: 1088877 - RNA, 19 nt, Artificial Sequence
  Description of Artificial Sequence: Synthetic oligonucleotide
gacguuagcacagucuuuu

SEQ ID NO: 1088878 - RNA, 19 nt, Artificial Sequence
  Description of Artificial Sequence: Synthetic oligonucleotide
gugauggaaggauccguaa

SEQ ID NO: 1088879 - RNA, 19 nt, Artificial Sequence
  Description of Artificial Sequence: Synthetic oligonucleotide
aguuuuccgguuguaucau

SEQ ID NO: 1088880 - RNA, 19 nt, Artificial Sequence
  Description of Artificial Sequence: Synthetic oligonucleotide
accaccgcgaccauccuau

SEQ ID NO: 1088881 - RNA, 19 nt, Artificial Sequence
  Description of Artificial Sequence: Synthetic oligonucleotide
aacgcgugugggugaucgu

SEQ ID NO: 1088882 - RNA, 19 nt, Artificial Sequence
  Description of Artificial Sequence: Synthetic oligonucleotide
uaguauacauuagcuucuu

SEQ ID NO: 1088883 - RNA, 19 nt, Artificial Sequence
  Description of Artificial Sequence: Synthetic oligonucleotide
acaacucccgugccuucga

SEQ ID NO: 1088884 - RNA, 19 nt, Artificial Sequence
  Description of Artificial Sequence: Synthetic oligonucleotide
ggauuugccugccgguuac

SEQ ID NO: 1088885 - RNA, 19 nt, Artificial Sequence
  Description of Artificial Sequence: Synthetic oligonucleotide
guucuuagccuggauaagu

SEQ ID NO: 1088886 - RNA, 19 nt, Artificial Sequence
  Description of Artificial Sequence: Synthetic oligonucleotide
cugauacauugaucucaug

SEQ ID NO: 1088887 - RNA, 19 nt, Artificial Sequence
  Description of Artificial Sequence: Synthetic oligonucleotide
caaaagcggugcaggcaug

SEQ ID NO: 1088888 - RNA, 19 nt, Artificial Sequence
  Description of Artificial Sequence: Synthetic oligonucleotide
cagguacaacucccgugcc

SEQ ID NO: 1088889 - RNA, 19 nt, Artificial Sequence
  Description of Artificial Sequence: Synthetic oligonucleotide
guccugauacauugaucuc

SEQ ID NO: 1088890 - RNA, 19 nt, Artificial Sequence
  Description of Artificial Sequence: Synthetic oligonucleotide
guucugggaauauaugcuu

SEQ ID NO: 1088891 - RNA, 19 nt, Artificial Sequence
  Description of Artificial Sequence: Synthetic oligonucleotide
ccguaacaaacucgaagag

SEQ ID NO: 1088892 - RNA, 19 nt, Artificial Sequence
  Description of Artificial Sequence: Synthetic oligonucleotide
acgcgugugggugaucgug

SEQ ID NO: 1088893 - RNA, 19 nt, Artificial Sequence
  Description of Artificial Sequence: Synthetic oligonucleotide
gcauccggcauugucuucc

SEQ ID NO: 1088894 - RNA, 19 nt, Artificial Sequence
  Description of Artificial Sequence: Synthetic oligonucleotide
guuuuccgguuguaucauc

SEQ ID NO: 1088895 - RNA, 19 nt, Artificial Sequence
  Description of Artificial Sequence: Synthetic oligonucleotide
augaucuuggcuagucuuu

SEQ ID NO: 1088896 - RNA, 19 nt, Artificial Sequence
  Description of Artificial Sequence: Synthetic oligonucleotide
ucccgacugcaguccauga

SEQ ID NO: 1088897 - RNA, 19 nt, Artificial Sequence
  Description of Artificial Sequence: Synthetic oligonucleotide
ggguuucccuuacaauagc

SEQ ID NO: 1088898 - RNA, 19 nt, Artificial Sequence
  Description of Artificial Sequence: Synthetic oligonucleotide
uagaacucuuggugaguuu

SEQ ID NO: 1088899 - RNA, 19 nt, Artificial Sequence
  Description of Artificial Sequence: Synthetic oligonucleotide
augcuauuuccauggccuu

SEQ ID NO: 1088900 - RNA, 19 nt, Artificial Sequence
  Description of Artificial Sequence: Synthetic oligonucleotide
ugcccaugucuucaccauu

SEQ ID NO: 1088901 - RNA, 19 nt, Artificial Sequence
  Description of Artificial Sequence: Synthetic oligonucleotide
uagccacggcgaaaucuaa

SEQ ID NO: 1088902 - RNA, 19 nt, Artificial Sequence
  Description of Artificial Sequence: Synthetic oligonucleotide
gauccgcauggacaagucu

SEQ ID NO: 1088903 - RNA, 19 nt, Artificial Sequence
  Description of Artificial Sequence: Synthetic oligonucleotide
gucacaucauucugagggu

SEQ ID NO: 1088904 - RNA, 19 nt, Artificial Sequence
  Description of Artificial Sequence: Synthetic oligonucleotide
cuauuuccauggccuuuuc

SEQ ID NO: 1088905 - RNA, 19 nt, Artificial Sequence
  Description of Artificial Sequence: Synthetic oligonucleotide
gcgucgucgaacugcccgg

SEQ ID NO: 1088906 - RNA, 19 nt, Artificial Sequence
  Description of Artificial Sequence: Synthetic oligonucleotide
gcauggacaagucuagcgu

SEQ ID NO: 1088907 - RNA, 19 nt, Artificial Sequence
  Description of Artificial Sequence: Synthetic oligonucleotide
gaguccgcgucgucgaacu

SEQ ID NO: 1088908 - RNA, 19 nt, Artificial Sequence
  Description of Artificial Sequence: Synthetic oligonucleotide
cucgaucuuugaauaccaa

SEQ ID NO: 1088909 - RNA, 19 nt, Artificial Sequence
  Description of Artificial Sequence: Synthetic oligonucleotide
gagugauggaaggauccgu

SEQ ID NO: 1088910 - RNA, 19 nt, Artificial Sequence
  Description of Artificial Sequence: Synthetic oligonucleotide
cugucagccuuaucuuuaa

SEQ ID NO: 1088911 - RNA, 19 nt, Artificial Sequence
  Description of Artificial Sequence: Synthetic oligonucleotide
ccuucgacucugacaacug

SEQ ID NO: 1088912 - RNA, 19 nt, Artificial Sequence
  Description of Artificial Sequence: Synthetic oligonucleotide
auaucgucuuuugcuugaa

SEQ ID NO: 1088913 - RNA, 19 nt, Artificial Sequence
  Description of Artificial Sequence: Synthetic oligonucleotide
gcgaccauccuaucccgac

SEQ ID NO: 1088914 - RNA, 19 nt, Artificial Sequence
  Description of Artificial Sequence: Synthetic oligonucleotide
gauccguaacaaacucgaa

SEQ ID NO: 1088915 - RNA, 19 nt, Artificial Sequence
  Description of Artificial Sequence: Synthetic oligonucleotide
cgcgucgucgaacugcccg

SEQ ID NO: 1088916 - RNA, 19 nt, Artificial Sequence
  Description of Artificial Sequence: Synthetic oligonucleotide
guacaacucccgugccuuc

SEQ ID NO: 1088917 - RNA, 19 nt, Artificial Sequence
  Description of Artificial Sequence: Synthetic oligonucleotide
gugcagggaccuucuggac

SEQ ID NO: 1088918 - RNA, 19 nt, Artificial Sequence
  Description of Artificial Sequence: Synthetic oligonucleotide
ugcauccggcauugucuuc

SEQ ID NO: 1088919 - RNA, 19 nt, Artificial Sequence
  Description of Artificial Sequence: Synthetic oligonucleotide
accgucugguauagaauau

SEQ ID NO: 1088920 - RNA, 19 nt, Artificial Sequence
  Description of Artificial Sequence: Synthetic oligonucleotide
ugccuccauuccagguaga

SEQ ID NO: 1088921 - RNA, 19 nt, Artificial Sequence
  Description of Artificial Sequence: Synthetic oligonucleotide
gggaugcuauuuccauggc

SEQ ID NO: 1088922 - RNA, 19 nt, Artificial Sequence
  Description of Artificial Sequence: Synthetic oligonucleotide
cgacugcaguccaugacag

SEQ ID NO: 1088923 - RNA, 19 nt, Artificial Sequence
  Description of Artificial Sequence: Synthetic oligonucleotide
caacucccgugccuucgac

SEQ ID NO: 1088924 - RNA, 19 nt, Artificial Sequence
  Description of Artificial Sequence: Synthetic oligonucleotide
guagaacucuuggugaguu

SEQ ID NO: 1088925 - RNA, 19 nt, Artificial Sequence
  Description of Artificial Sequence: Synthetic oligonucleotide
uccaacgcgugugggugau

SEQ ID NO: 1088926 - RNA, 19 nt, Artificial Sequence
  Description of Artificial Sequence: Synthetic oligonucleotide
ggacaagucuagcguccug

SEQ ID NO: 1088927 - RNA, 19 nt, Artificial Sequence
  Description of Artificial Sequence: Synthetic oligonucleotide
guaucaucccagaaccaau

SEQ ID NO: 1088928 - RNA, 19 nt, Artificial Sequence
  Description of Artificial Sequence: Synthetic oligonucleotide
auccggcauugucuuccug

SEQ ID NO: 1088929 - RNA, 19 nt, Artificial Sequence
  Description of Artificial Sequence: Synthetic oligonucleotide
gaacugcaguuagaagucu

SEQ ID NO: 1088930 - RNA, 19 nt, Artificial Sequence
  Description of Artificial Sequence: Synthetic oligonucleotide
aguccgcgucgucgaacug

SEQ ID NO: 1088931 - RNA, 19 nt, Artificial Sequence
  Description of Artificial Sequence: Synthetic oligonucleotide
caagucuagcguccugaua

SEQ ID NO: 1088932 - RNA, 19 nt, Artificial Sequence
  Description of Artificial Sequence: Synthetic oligonucleotide
ugccuucgacucugacaac

SEQ ID NO: 1088933 - RNA, 19 nt, Artificial Sequence
  Description of Artificial Sequence: Synthetic oligonucleotide
gucaauuggaguagacauu

SEQ ID NO: 1088934 - RNA, 19 nt, Artificial Sequence
  Description of Artificial Sequence: Synthetic oligonucleotide
guuuuggacaugguauguu

SEQ ID NO: 1088935 - RNA, 19 nt, Artificial Sequence
  Description of Artificial Sequence: Synthetic oligonucleotide
aguugcucugucagccuua

SEQ ID NO: 1088936 - RNA, 19 nt, Artificial Sequence
  Description of Artificial Sequence: Synthetic oligonucleotide
ggugaucgugcuccacaga

SEQ ID NO: 1088937 - RNA, 19 nt, Artificial Sequence
  Description of Artificial Sequence: Synthetic oligonucleotide
ugccgguuacugccuccau

SEQ ID NO: 1088938 - RNA, 19 nt, Artificial Sequence
  Description of Artificial Sequence: Synthetic oligonucleotide
cuccaacgcguguggguga

SEQ ID NO: 1088939 - RNA, 19 nt, Artificial Sequence
  Description of Artificial Sequence: Synthetic oligonucleotide
uugguccuuugggaugcua

SEQ ID NO: 1088940 - RNA, 19 nt, Artificial Sequence
  Description of Artificial Sequence: Synthetic oligonucleotide
gccacggcgaaaucuaaau

SEQ ID NO: 1088941 - RNA, 19 nt, Artificial Sequence
  Description of Artificial Sequence: Synthetic oligonucleotide
agccacggcgaaaucuaaa

SEQ ID NO: 1088942 - RNA, 19 nt, Artificial Sequence
  Description of Artificial Sequence: Synthetic oligonucleotide
cugggauccaaaaccuguu

SEQ ID NO: 1088943 - RNA, 19 nt, Artificial Sequence
  Description of Artificial Sequence: Synthetic oligonucleotide
ccgcgaccauccuaucccg

SEQ ID NO: 1088944 - RNA, 19 nt, Artificial Sequence
  Description of Artificial Sequence: Synthetic oligonucleotide
cccgacugcaguccaugac

SEQ ID NO: 1088945 - RNA, 19 nt, Artificial Sequence
  Description of Artificial Sequence: Synthetic oligonucleotide
cgcgugugggugaucgugc

SEQ ID NO: 1088946 - RNA, 19 nt, Artificial Sequence
  Description of Artificial Sequence: Synthetic oligonucleotide
cugaggaguccgcgucguc

SEQ ID NO: 1088947 - RNA, 19 nt, Artificial Sequence
  Description of Artificial Sequence: Synthetic oligonucleotide
aggaguccgcgucgucgaa

SEQ ID NO: 1088948 - RNA, 19 nt, Artificial Sequence
  Description of Artificial Sequence: Synthetic oligonucleotide
ccugccgguuacugccucc

SEQ ID NO: 1088949 - RNA, 19 nt, Artificial Sequence
  Description of Artificial Sequence: Synthetic oligonucleotide
cgucugguauagaauauua

SEQ ID NO: 1088950 - RNA, 19 nt, Artificial Sequence
  Description of Artificial Sequence: Synthetic oligonucleotide
cgucuuuugcuugaauuga

SEQ ID NO: 1088951 - RNA, 19 nt, Artificial Sequence
  Description of Artificial Sequence: Synthetic oligonucleotide
gguacaacucccgugccuu

SEQ ID NO: 1088952 - RNA, 19 nt, Artificial Sequence
  Description of Artificial Sequence: Synthetic oligonucleotide
ccuguucuacaguugcucu

SEQ ID NO: 1088953 - RNA, 19 nt, Artificial Sequence
  Description of Artificial Sequence: Synthetic oligonucleotide
cgucgaacugcccggggac

SEQ ID NO: 1088954 - RNA, 19 nt, Artificial Sequence
  Description of Artificial Sequence: Synthetic oligonucleotide
ccugauacauugaucucau

SEQ ID NO: 1088955 - RNA, 19 nt, Artificial Sequence
  Description of Artificial Sequence: Synthetic oligonucleotide
caaacucgaagagcucccu

SEQ ID NO: 1088956 - RNA, 19 nt, Artificial Sequence
  Description of Artificial Sequence: Synthetic oligonucleotide
gccuucgacucugacaacu

SEQ ID NO: 1088957 - RNA, 19 nt, Artificial Sequence
  Description of Artificial Sequence: Synthetic oligonucleotide
ggaguccgcgucgucgaac

SEQ ID NO: 1088958 - RNA, 19 nt, Artificial Sequence
  Description of Artificial Sequence: Synthetic oligonucleotide
gcguccugauacauugauc

SEQ ID NO: 1088959 - RNA, 19 nt, Artificial Sequence
  Description of Artificial Sequence: Synthetic oligonucleotide
cggcgaaaucuaaauucuc

SEQ ID NO: 1088960 - RNA, 19 nt, Artificial Sequence
  Description of Artificial Sequence: Synthetic oligonucleotide
cugcagguacaacucccgu

SEQ ID NO: 1088961 - RNA, 19 nt, Artificial Sequence
  Description of Artificial Sequence: Synthetic oligonucleotide
ccacagacugagagacauc

SEQ ID NO: 1088962 - RNA, 19 nt, Artificial Sequence
  Description of Artificial Sequence: Synthetic oligonucleotide
gguccuuugggaugcuauu

SEQ ID NO: 1088963 - RNA, 19 nt, Artificial Sequence
  Description of Artificial Sequence: Synthetic oligonucleotide
ggacuccugacaaaucuuu

SEQ ID NO: 1088964 - RNA, 19 nt, Artificial Sequence
  Description of Artificial Sequence: Synthetic oligonucleotide
cgguuacugccuccauucc

SEQ ID NO: 1088965 - RNA, 19 nt, Artificial Sequence
  Description of Artificial Sequence: Synthetic oligonucleotide
ccauccuaucccgacugca

SEQ ID NO: 1088966 - RNA, 19 nt, Artificial Sequence
  Description of Artificial Sequence: Synthetic oligonucleotide
caguugcucugucagccuu

SEQ ID NO: 1088967 - RNA, 19 nt, Artificial Sequence
  Description of Artificial Sequence: Synthetic oligonucleotide
gucuagcguccugauacau

SEQ ID NO: 1088968 - RNA, 19 nt, Artificial Sequence
  Description of Artificial Sequence: Synthetic oligonucleotide
ccgcauggacaagucuagc

SEQ ID NO: 1088969 - RNA, 19 nt, Artificial Sequence
  Description of Artificial Sequence: Synthetic oligonucleotide
ggugaguuuuccgguugua

SEQ ID NO: 1088970 - RNA, 19 nt, Artificial Sequence
  Description of Artificial Sequence: Synthetic oligonucleotide
cauccggcauugucuuccu

SEQ ID NO: 1088971 - RNA, 19 nt, Artificial Sequence
  Description of Artificial Sequence: Synthetic oligonucleotide
cguuagcacagucuuuucu

SEQ ID NO: 1088972 - RNA, 19 nt, Artificial Sequence
  Description of Artificial Sequence: Synthetic oligonucleotide
gucccgugaccgucuggua

SEQ ID NO: 1088973 - RNA, 19 nt, Artificial Sequence
  Description of Artificial Sequence: Synthetic oligonucleotide
ccagugcuaaugcagccau

SEQ ID NO: 1088974 - RNA, 19 nt, Artificial Sequence
  Description of Artificial Sequence: Synthetic oligonucleotide
ccgugaccgucugguauag

SEQ ID NO: 1088975 - RNA, 19 nt, Artificial Sequence
  Description of Artificial Sequence: Synthetic oligonucleotide
ccaccaugguacagcaugu

SEQ ID NO: 1088976 - RNA, 19 nt, Artificial Sequence
  Description of Artificial Sequence: Synthetic oligonucleotide
cgucgucgaacugcccggg

SEQ ID NO: 1088977 - RNA, 19 nt, Artificial Sequence
  Description of Artificial Sequence: Synthetic oligonucleotide
cuacauguuuagggauuuu

SEQ ID NO: 1088978 - RNA, 19 nt, Artificial Sequence
  Description of Artificial Sequence: Synthetic oligonucleotide
ccgugccuucgacucugac

SEQ ID NO: 1088979 - RNA, 19 nt, Artificial Sequence
  Description of Artificial Sequence: Synthetic oligonucleotide
cucccgugccuucgacucu

SEQ ID NO: 1088980 - RNA, 19 nt, Artificial Sequence
  Description of Artificial Sequence: Synthetic oligonucleotide
gccgguuacugccuccauu

SEQ ID NO: 1088981 - RNA, 19 nt, Artificial Sequence
  Description of Artificial Sequence: Synthetic oligonucleotide
ccauggccuuuucaagaua

SEQ ID NO: 1088982 - RNA, 19 nt, Artificial Sequence
  Description of Artificial Sequence: Synthetic oligonucleotide
ccuggauaaguuccucauu

SEQ ID NO: 1088983 - RNA, 19 nt, Artificial Sequence
  Description of Artificial Sequence: Synthetic oligonucleotide
ggggauuugccugccgguu

SEQ ID NO: 1088984 - RNA, 19 nt, Artificial Sequence
  Description of Artificial Sequence: Synthetic oligonucleotide
cgguuguaucaucccagaa

SEQ ID NO: 1088985 - RNA, 19 nt, Artificial Sequence
  Description of Artificial Sequence: Synthetic oligonucleotide
cucugacaacuggacguuu

SEQ ID NO: 1088986 - RNA, 19 nt, Artificial Sequence
  Description of Artificial Sequence: Synthetic oligonucleotide
ggcuagucuuuuccuccuu

SEQ ID NO: 1088987 - RNA, 19 nt, Artificial Sequence
  Description of Artificial Sequence: Synthetic oligonucleotide
ccacggcgaaaucuaaauu

SEQ ID NO: 1088988 - RNA, 19 nt, Artificial Sequence
  Description of Artificial Sequence: Synthetic oligonucleotide
cgugcuccacagacugaga

SEQ ID NO: 1088989 - RNA, 19 nt, Artificial Sequence
  Description of Artificial Sequence: Synthetic oligonucleotide
ccaccgcgaccauccuauc

SEQ ID NO: 1088990 - RNA, 19 nt, Artificial Sequence
  Description of Artificial Sequence: Synthetic oligonucleotide
ccgcgucgucgaacugccc

SEQ ID NO: 1088991 - RNA, 19 nt, Artificial Sequence
  Description of Artificial Sequence: Synthetic oligonucleotide
gccuuaucuuuaacucgau

SEQ ID NO: 1088992 - RNA, 19 nt, Artificial Sequence
  Description of Artificial Sequence: Synthetic oligonucleotide
cgaacugcccggggaccac

SEQ ID NO: 1088993 - RNA, 19 nt, Artificial Sequence
  Description of Artificial Sequence: Synthetic oligonucleotide
cgcgaccauccuaucccga

SEQ ID NO: 1088994 - RNA, 19 nt, Artificial Sequence
  Description of Artificial Sequence: Synthetic oligonucleotide
ccgucugguauagaauauu

SEQ ID NO: 1088995 - RNA, 19 nt, Artificial Sequence
  Description of Artificial Sequence: Synthetic oligonucleotide
cagggucagcagugugcuu

SEQ ID NO: 1088996 - RNA, 19 nt, Artificial Sequence
  Description of Artificial Sequence: Synthetic oligonucleotide
ccaacgcgugugggugauc

SEQ ID NO: 1088997 - RNA, 19 nt, Artificial Sequence
  Description of Artificial Sequence: Synthetic oligonucleotide
cgugaccgucugguauaga

SEQ ID NO: 1088998 - RNA, 19 nt, Artificial Sequence
  Description of Artificial Sequence: Synthetic oligonucleotide
cgauacgauucugcuucuu

SEQ ID NO: 1088999 - RNA, 19 nt, Artificial Sequence
  Description of Artificial Sequence: Synthetic oligonucleotide
uuuuacuucuccuugaccg

SEQ ID NO: 1089000 - RNA, 19 nt, Artificial Sequence
  Description of Artificial Sequence: Synthetic oligonucleotide
aauacggggaaauugauau

SEQ ID NO: 1089001 - RNA, 19 nt, Artificial Sequence
  Description of Artificial Sequence: Synthetic oligonucleotide
uaaguugagcauaaugugg

SEQ ID NO: 1089002 - RNA, 19 nt, Artificial Sequence
  Description of Artificial Sequence: Synthetic oligonucleotide
aaacuuauugugucacugc

SEQ ID NO: 1089003 - RNA, 19 nt, Artificial Sequence
  Description of Artificial Sequence: Synthetic oligonucleotide
aauugcauggcauauuugu

SEQ ID NO: 1089004 - RNA, 19 nt, Artificial Sequence
  Description of Artificial Sequence: Synthetic oligonucleotide
agcuaugucaucccgacgc

SEQ ID NO: 1089005 - RNA, 19 nt, Artificial Sequence
  Description of Artificial Sequence: Synthetic oligonucleotide
aauguacaggggcauaucg

SEQ ID NO: 1089006 - RNA, 19 nt, Artificial Sequence
  Description of Artificial Sequence: Synthetic oligonucleotide
auugguaggcacuaugagc

SEQ ID NO: 1089007 - RNA, 19 nt, Artificial Sequence
  Description of Artificial Sequence: Synthetic oligonucleotide
uuugaaugcagcaugccug

SEQ ID NO: 1089008 - RNA, 19 nt, Artificial Sequence
  Description of Artificial Sequence: Synthetic oligonucleotide
aguuuaaccaaagaccagc

SEQ ID NO: 1089009 - RNA, 19 nt, Artificial Sequence
  Description of Artificial Sequence: Synthetic oligonucleotide
ucaaauacggggaaauuga

SEQ ID NO: 1089010 - RNA, 19 nt, Artificial Sequence
  Description of Artificial Sequence: Synthetic oligonucleotide
acuguauacucgaagagcc

SEQ ID NO: 1089011 - RNA, 19 nt, Artificial Sequence
  Description of Artificial Sequence: Synthetic oligonucleotide
ucauaaguugagcauaaug

SEQ ID NO: 1089012 - RNA, 19 nt, Artificial Sequence
  Description of Artificial Sequence: Synthetic oligonucleotide
ucaugguguaauuaugagg

SEQ ID NO: 1089013 - RNA, 19 nt, Artificial Sequence
  Description of Artificial Sequence: Synthetic oligonucleotide
cuuuugggcaauuugaaug

SEQ ID NO: 1089014 - RNA, 19 nt, Artificial Sequence
  Description of Artificial Sequence: Synthetic oligonucleotide
guaauuaugaggcaaguuc

SEQ ID NO: 1089015 - RNA, 19 nt, Artificial Sequence
  Description of Artificial Sequence: Synthetic oligonucleotide
agcauaaugugguuuuagc

SEQ ID NO: 1089016 - RNA, 19 nt, Artificial Sequence
  Description of Artificial Sequence: Synthetic oligonucleotide
acuaucuguugauuggccc

SEQ ID NO: 1089017 - RNA, 19 nt, Artificial Sequence
  Description of Artificial Sequence: Synthetic oligonucleotide
auaaguugagcauaaugug

SEQ ID NO: 1089018 - RNA, 19 nt, Artificial Sequence
  Description of Artificial Sequence: Synthetic oligonucleotide
uaugaaaguuguaagacuu

SEQ ID NO: 1089019 - RNA, 19 nt, Artificial Sequence
  Description of Artificial Sequence: Synthetic oligonucleotide
aaaacuuauugugucacug

SEQ ID NO: 1089020 - RNA, 19 nt, Artificial Sequence
  Description of Artificial Sequence: Synthetic oligonucleotide
ugcccugagaugaagacag

SEQ ID NO: 1089021 - RNA, 19 nt, Artificial Sequence
  Description of Artificial Sequence: Synthetic oligonucleotide
aacgcugacuccuuugguc

SEQ ID NO: 1089022 - RNA, 19 nt, Artificial Sequence
  Description of Artificial Sequence: Synthetic oligonucleotide
uuaacgcugacuccuuugg

SEQ ID NO: 1089023 - RNA, 19 nt, Artificial Sequence
  Description of Artificial Sequence: Synthetic oligonucleotide
uacggggaaauugauaugg

SEQ ID NO: 1089024 - RNA, 19 nt, Artificial Sequence
  Description of Artificial Sequence: Synthetic oligonucleotide
caaacucaaagcuaaacuc

SEQ ID NO: 1089025 - RNA, 19 nt, Artificial Sequence
  Description of Artificial Sequence: Synthetic oligonucleotide
cuaguuuaaccaaagacca

SEQ ID NO: 1089026 - RNA, 19 nt, Artificial Sequence
  Description of Artificial Sequence: Synthetic oligonucleotide
ccuaguuuaaccaaagacc

SEQ ID NO: 1089027 - RNA, 19 nt, Artificial Sequence
  Description of Artificial Sequence: Synthetic oligonucleotide
aacuuauugugucacugcu

SEQ ID NO: 1089028 - RNA, 19 nt, Artificial Sequence
  Description of Artificial Sequence: Synthetic oligonucleotide
cauaagauaguuugucccc

SEQ ID NO: 1089029 - RNA, 19 nt, Artificial Sequence
  Description of Artificial Sequence: Synthetic oligonucleotide
acacuucuaaccaaaacac

SEQ ID NO: 1089030 - RNA, 19 nt, Artificial Sequence
  Description of Artificial Sequence: Synthetic oligonucleotide
cauguugacuguauacucg

SEQ ID NO: 1089031 - RNA, 19 nt, Artificial Sequence
  Description of Artificial Sequence: Synthetic oligonucleotide
guaaaagucauaguuagca

SEQ ID NO: 1089032 - RNA, 19 nt, Artificial Sequence
  Description of Artificial Sequence: Synthetic oligonucleotide
aaguucgauugguaggcac

SEQ ID NO: 1089033 - RNA, 19 nt, Artificial Sequence
  Description of Artificial Sequence: Synthetic oligonucleotide
cuagaaaacuuauuguguc

SEQ ID NO: 1089034 - RNA, 19 nt, Artificial Sequence
  Description of Artificial Sequence: Synthetic oligonucleotide
aaauaauagaacaauuauu

SEQ ID NO: 1089035 - RNA, 19 nt, Artificial Sequence
  Description of Artificial Sequence: Synthetic oligonucleotide
auaguuuguccccggaacg

SEQ ID NO: 1089036 - RNA, 19 nt, Artificial Sequence
  Description of Artificial Sequence: Synthetic oligonucleotide
uauuaucugcaaaggagca

SEQ ID NO: 1089037 - RNA, 19 nt, Artificial Sequence
  Description of Artificial Sequence: Synthetic oligonucleotide
uggguaagaggccuuuugg

SEQ ID NO: 1089038 - RNA, 19 nt, Artificial Sequence
  Description of Artificial Sequence: Synthetic oligonucleotide
acuugaauggcuagaaaac

SEQ ID NO: 1089039 - RNA, 19 nt, Artificial Sequence
  Description of Artificial Sequence: Synthetic oligonucleotide
aaaacaagguccccucuca

SEQ ID NO: 1089040 - RNA, 19 nt, Artificial Sequence
  Description of Artificial Sequence: Synthetic oligonucleotide
auaauagaacaauuauugu

SEQ ID NO: 1089041 - RNA, 19 nt, Artificial Sequence
  Description of Artificial Sequence: Synthetic oligonucleotide
uguucagggcuuuuaacgc

SEQ ID NO: 1089042 - RNA, 19 nt, Artificial Sequence
  Description of Artificial Sequence: Synthetic oligonucleotide
auaaugugguuuuagcccu

SEQ ID NO: 1089043 - RNA, 19 nt, Artificial Sequence
  Description of Artificial Sequence: Synthetic oligonucleotide
ugcuccaaaauuuguagca

SEQ ID NO: 1089044 - RNA, 19 nt, Artificial Sequence
  Description of Artificial Sequence: Synthetic oligonucleotide
uuaggaggaaaacaagguc

SEQ ID NO: 1089045 - RNA, 19 nt, Artificial Sequence
  Description of Artificial Sequence: Synthetic oligonucleotide
ugacuguauacucgaagag

SEQ ID NO: 1089046 - RNA, 19 nt, Artificial Sequence
  Description of Artificial Sequence: Synthetic oligonucleotide
gauuggcccaaacucaaag

SEQ ID NO: 1089047 - RNA, 19 nt, Artificial Sequence
  Description of Artificial Sequence: Synthetic oligonucleotide
aaaauuuguagcaguccuc

SEQ ID NO: 1089048 - RNA, 19 nt, Artificial Sequence
  Description of Artificial Sequence: Synthetic oligonucleotide
cauggcauauuugugaaag

SEQ ID NO: 1089049 - RNA, 19 nt, Artificial Sequence
  Description of Artificial Sequence: Synthetic oligonucleotide
ugaaauuuguguacacagu

SEQ ID NO: 1089050 - RNA, 19 nt, Artificial Sequence
  Description of Artificial Sequence: Synthetic oligonucleotide
acaugaaucuccgaccucg

SEQ ID NO: 1089051 - RNA, 19 nt, Artificial Sequence
  Description of Artificial Sequence: Synthetic oligonucleotide
ugggagauauucaacugug

SEQ ID NO: 1089052 - RNA, 19 nt, Artificial Sequence
  Description of Artificial Sequence: Synthetic oligonucleotide
cauaaguugagcauaaugu

SEQ ID NO: 1089053 - RNA, 19 nt, Artificial Sequence
  Description of Artificial Sequence: Synthetic oligonucleotide
auaugcauaaggaaaucuc

SEQ ID NO: 1089054 - RNA, 19 nt, Artificial Sequence
  Description of Artificial Sequence: Synthetic oligonucleotide
acgcugacuccuuuggucc

SEQ ID NO: 1089055 - RNA, 19 nt, Artificial Sequence
  Description of Artificial Sequence: Synthetic oligonucleotide
auuugaaugcagcaugccu

SEQ ID NO: 1089056 - RNA, 19 nt, Artificial Sequence
  Description of Artificial Sequence: Synthetic oligonucleotide
uguacaggggcauaucgcu

SEQ ID NO: 1089057 - RNA, 19 nt, Artificial Sequence
  Description of Artificial Sequence: Synthetic oligonucleotide
ucuaaccaaaacacauuug

SEQ ID NO: 1089058 - RNA, 19 nt, Artificial Sequence
  Description of Artificial Sequence: Synthetic oligonucleotide
aacuaucuguugauuggcc

SEQ ID NO: 1089059 - RNA, 19 nt, Artificial Sequence
  Description of Artificial Sequence: Synthetic oligonucleotide
caccuuguaacucauuagc

SEQ ID NO: 1089060 - RNA, 19 nt, Artificial Sequence
  Description of Artificial Sequence: Synthetic oligonucleotide
uugaccgugaacuuccgga

SEQ ID NO: 1089061 - RNA, 19 nt, Artificial Sequence
  Description of Artificial Sequence: Synthetic oligonucleotide
ugggcaauuugaaugcagc

SEQ ID NO: 1089062 - RNA, 19 nt, Artificial Sequence
  Description of Artificial Sequence: Synthetic oligonucleotide
caauuugaaugcagcaugc

SEQ ID NO: 1089063 - RNA, 19 nt, Artificial Sequence
  Description of Artificial Sequence: Synthetic oligonucleotide
aagguccccucucagucac

SEQ ID NO: 1089064 - RNA, 19 nt, Artificial Sequence
  Description of Artificial Sequence: Synthetic oligonucleotide
uuuaacgcugacuccuuug

SEQ ID NO: 1089065 - RNA, 19 nt, Artificial Sequence
  Description of Artificial Sequence: Synthetic oligonucleotide
aaguugagcauaauguggu

SEQ ID NO: 1089066 - RNA, 19 nt, Artificial Sequence
  Description of Artificial Sequence: Synthetic oligonucleotide
uguauacucgaagagccug

SEQ ID NO: 1089067 - RNA, 19 nt, Artificial Sequence
  Description of Artificial Sequence: Synthetic oligonucleotide
auaagauaguuuguccccg

SEQ ID NO: 1089068 - RNA, 19 nt, Artificial Sequence
  Description of Artificial Sequence: Synthetic oligonucleotide
ucaaagcuaaacucaggcu

SEQ ID NO: 1089069 - RNA, 19 nt, Artificial Sequence
  Description of Artificial Sequence: Synthetic oligonucleotide
agcccuguugguccaaacc

SEQ ID NO: 1089070 - RNA, 19 nt, Artificial Sequence
  Description of Artificial Sequence: Synthetic oligonucleotide
uaagauaguuuguccccgg

SEQ ID NO: 1089071 - RNA, 19 nt, Artificial Sequence
  Description of Artificial Sequence: Synthetic oligonucleotide
ucuagcuaugucaucccga

SEQ ID NO: 1089072 - RNA, 19 nt, Artificial Sequence
  Description of Artificial Sequence: Synthetic oligonucleotide
ucgagagucuucauacuca

SEQ ID NO: 1089073 - RNA, 19 nt, Artificial Sequence
  Description of Artificial Sequence: Synthetic oligonucleotide
gacuguauacucgaagagc

SEQ ID NO: 1089074 - RNA, 19 nt, Artificial Sequence
  Description of Artificial Sequence: Synthetic oligonucleotide
gagcacaugaaucuccgac

SEQ ID NO: 1089075 - RNA, 19 nt, Artificial Sequence
  Description of Artificial Sequence: Synthetic oligonucleotide
aaacaagguccccucucag

SEQ ID NO: 1089076 - RNA, 19 nt, Artificial Sequence
  Description of Artificial Sequence: Synthetic oligonucleotide
uaacucauuagcugcacau

SEQ ID NO: 1089077 - RNA, 19 nt, Artificial Sequence
  Description of Artificial Sequence: Synthetic oligonucleotide
cagauuuuacuucuccuug

SEQ ID NO: 1089078 - RNA, 19 nt, Artificial Sequence
  Description of Artificial Sequence: Synthetic oligonucleotide
uaguuuaaccaaagaccag

SEQ ID NO: 1089079 - RNA, 19 nt, Artificial Sequence
  Description of Artificial Sequence: Synthetic oligonucleotide
gcauaagauaguuuguccc

SEQ ID NO: 1089080 - RNA, 19 nt, Artificial Sequence
  Description of Artificial Sequence: Synthetic oligonucleotide
uguugguccaaaccgguau

SEQ ID NO: 1089081 - RNA, 19 nt, Artificial Sequence
  Description of Artificial Sequence: Synthetic oligonucleotide
cuagcuaugucaucccgac

SEQ ID NO: 1089082 - RNA, 19 nt, Artificial Sequence
  Description of Artificial Sequence: Synthetic oligonucleotide
ugugucuaagucuccuuca

SEQ ID NO: 1089083 - RNA, 19 nt, Artificial Sequence
  Description of Artificial Sequence: Synthetic oligonucleotide
uuggguaagaggccuuuug

SEQ ID NO: 1089084 - RNA, 19 nt, Artificial Sequence
  Description of Artificial Sequence: Synthetic oligonucleotide
ucgauugguaggcacuaug

SEQ ID NO: 1089085 - RNA, 19 nt, Artificial Sequence
  Description of Artificial Sequence: Synthetic oligonucleotide
uugcuccaaaauuuguagc

SEQ ID NO: 1089086 - RNA, 19 nt, Artificial Sequence
  Description of Artificial Sequence: Synthetic oligonucleotide
agguaccuaaacuaucugu

SEQ ID NO: 1089087 - RNA, 19 nt, Artificial Sequence
  Description of Artificial Sequence: Synthetic oligonucleotide
acuucuaaccaaaacacau

SEQ ID NO: 1089088 - RNA, 19 nt, Artificial Sequence
  Description of Artificial Sequence: Synthetic oligonucleotide
uagcauguugacuguauac

SEQ ID NO: 1089089 - RNA, 19 nt, Artificial Sequence
  Description of Artificial Sequence: Synthetic oligonucleotide
aaagcucuagcuaugucau

SEQ ID NO: 1089090 - RNA, 19 nt, Artificial Sequence
  Description of Artificial Sequence: Synthetic oligonucleotide
agauuuuacuucuccuuga

SEQ ID NO: 1089091 - RNA, 19 nt, Artificial Sequence
  Description of Artificial Sequence: Synthetic oligonucleotide
aggcauaagauaguuuguc

SEQ ID NO: 1089092 - RNA, 19 nt, Artificial Sequence
  Description of Artificial Sequence: Synthetic oligonucleotide
cugagcacaugaaucuccg

SEQ ID NO: 1089093 - RNA, 19 nt, Artificial Sequence
  Description of Artificial Sequence: Synthetic oligonucleotide
uucagggcuuuuaacgcug

SEQ ID NO: 1089094 - RNA, 19 nt, Artificial Sequence
  Description of Artificial Sequence: Synthetic oligonucleotide
aggcaaguucgauugguag

SEQ ID NO: 1089095 - RNA, 19 nt, Artificial Sequence
  Description of Artificial Sequence: Synthetic oligonucleotide
ggggaaauugauauggucc

SEQ ID NO: 1089096 - RNA, 19 nt, Artificial Sequence
  Description of Artificial Sequence: Synthetic oligonucleotide
uggguaaaauacuggacau

SEQ ID NO: 1089097 - RNA, 19 nt, Artificial Sequence
  Description of Artificial Sequence: Synthetic oligonucleotide
auauucaacuguggaugcc

SEQ ID NO: 1089098 - RNA, 19 nt, Artificial Sequence
  Description of Artificial Sequence: Synthetic oligonucleotide
uacuuggcucaaauacggg

SEQ ID NO: 1089099 - RNA, 19 nt, Artificial Sequence
  Description of Artificial Sequence: Synthetic oligonucleotide
gguaugaaaguuguaagac

SEQ ID NO: 1089100 - RNA, 19 nt, Artificial Sequence
  Description of Artificial Sequence: Synthetic oligonucleotide
auagguaccuaaacuaucu

SEQ ID NO: 1089101 - RNA, 19 nt, Artificial Sequence
  Description of Artificial Sequence: Synthetic oligonucleotide
uugauuggcccaaacucaa

SEQ ID NO: 1089102 - RNA, 19 nt, Artificial Sequence
  Description of Artificial Sequence: Synthetic oligonucleotide
uugagcauaaugugguuuu

SEQ ID NO: 1089103 - RNA, 19 nt, Artificial Sequence
  Description of Artificial Sequence: Synthetic oligonucleotide
ggcauaucgcuguucaggg

SEQ ID NO: 1089104 - RNA, 19 nt, Artificial Sequence
  Description of Artificial Sequence: Synthetic oligonucleotide
uuagcagccuugauaucga

SEQ ID NO: 1089105 - RNA, 19 nt, Artificial Sequence
  Description of Artificial Sequence: Synthetic oligonucleotide
gaaaguuguaagacuuggc

SEQ ID NO: 1089106 - RNA, 19 nt, Artificial Sequence
  Description of Artificial Sequence: Synthetic oligonucleotide
agucacauaugcauaagga

SEQ ID NO: 1089107 - RNA, 19 nt, Artificial Sequence
  Description of Artificial Sequence: Synthetic oligonucleotide
auacucgaagagccugagc

SEQ ID NO: 1089108 - RNA, 19 nt, Artificial Sequence
  Description of Artificial Sequence: Synthetic oligonucleotide
ggcaaguucgauugguagg

SEQ ID NO: 1089109 - RNA, 19 nt, Artificial Sequence
  Description of Artificial Sequence: Synthetic oligonucleotide
auguacaggggcauaucgc

SEQ ID NO: 1089110 - RNA, 19 nt, Artificial Sequence
  Description of Artificial Sequence: Synthetic oligonucleotide
aucuccgaccucgagaguc

SEQ ID NO: 1089111 - RNA, 19 nt, Artificial Sequence
  Description of Artificial Sequence: Synthetic oligonucleotide
accgugaacuuccggauug

SEQ ID NO: 1089112 - RNA, 19 nt, Artificial Sequence
  Description of Artificial Sequence: Synthetic oligonucleotide
ucuagcauguugacuguau

SEQ ID NO: 1089113 - RNA, 19 nt, Artificial Sequence
  Description of Artificial Sequence: Synthetic oligonucleotide
aagauaguuuguccccgga

SEQ ID NO: 1089114 - RNA, 19 nt, Artificial Sequence
  Description of Artificial Sequence: Synthetic oligonucleotide
ucguguaauugcauggcau

SEQ ID NO: 1089115 - RNA, 19 nt, Artificial Sequence
  Description of Artificial Sequence: Synthetic oligonucleotide
aaggggucgucucgaggcg

SEQ ID NO: 1089116 - RNA, 19 nt, Artificial Sequence
  Description of Artificial Sequence: Synthetic oligonucleotide
gccuaguuuaaccaaagac

SEQ ID NO: 1089117 - RNA, 19 nt, Artificial Sequence
  Description of Artificial Sequence: Synthetic oligonucleotide
uuaugaggcaaguucgauu

SEQ ID NO: 1089118 - RNA, 19 nt, Artificial Sequence
  Description of Artificial Sequence: Synthetic oligonucleotide
gucacauaugcauaaggaa

SEQ ID NO: 1089119 - RNA, 19 nt, Artificial Sequence
  Description of Artificial Sequence: Synthetic oligonucleotide
ccaggaauagcuuuauuug

SEQ ID NO: 1089120 - RNA, 19 nt, Artificial Sequence
  Description of Artificial Sequence: Synthetic oligonucleotide
uggaguacuuggcucaaau

SEQ ID NO: 1089121 - RNA, 19 nt, Artificial Sequence
  Description of Artificial Sequence: Synthetic oligonucleotide
cuuggcucaaauacgggga

SEQ ID NO: 1089122 - RNA, 19 nt, Artificial Sequence
  Description of Artificial Sequence: Synthetic oligonucleotide
acauaugcauaaggaaauc

SEQ ID NO: 1089123 - RNA, 19 nt, Artificial Sequence
  Description of Artificial Sequence: Synthetic oligonucleotide
gauagguaccuaaacuauc

SEQ ID NO: 1089124 - RNA, 19 nt, Artificial Sequence
  Description of Artificial Sequence: Synthetic oligonucleotide
ggcauaagauaguuugucc

SEQ ID NO: 1089125 - RNA, 19 nt, Artificial Sequence
  Description of Artificial Sequence: Synthetic oligonucleotide
ggguaagaggccuuuuggg

SEQ ID NO: 1089126 - RNA, 19 nt, Artificial Sequence
  Description of Artificial Sequence: Synthetic oligonucleotide
uggccauugcuccaaaauu

SEQ ID NO: 1089127 - RNA, 19 nt, Artificial Sequence
  Description of Artificial Sequence: Synthetic oligonucleotide
ugguguaauuaugaggcaa

SEQ ID NO: 1089128 - RNA, 19 nt, Artificial Sequence
  Description of Artificial Sequence: Synthetic oligonucleotide
cucgagagucuucauacuc

SEQ ID NO: 1089129 - RNA, 19 nt, Artificial Sequence
  Description of Artificial Sequence: Synthetic oligonucleotide
ucggcuauugugguagagc

SEQ ID NO: 1089130 - RNA, 19 nt, Artificial Sequence
  Description of Artificial Sequence: Synthetic oligonucleotide
cugucaugguguaauuaug

SEQ ID NO: 1089131 - RNA, 19 nt, Artificial Sequence
  Description of Artificial Sequence: Synthetic oligonucleotide
uguaauuaugaggcaaguu

SEQ ID NO: 1089132 - RNA, 19 nt, Artificial Sequence
  Description of Artificial Sequence: Synthetic oligonucleotide
gggcuuuuaacgcugacuc

SEQ ID NO: 1089133 - RNA, 19 nt, Artificial Sequence
  Description of Artificial Sequence: Synthetic oligonucleotide
gagugaaauuuguguacac

SEQ ID NO: 1089134 - RNA, 19 nt, Artificial Sequence
  Description of Artificial Sequence: Synthetic oligonucleotide
uggguuugagguucuuucu

SEQ ID NO: 1089135 - RNA, 19 nt, Artificial Sequence
  Description of Artificial Sequence: Synthetic oligonucleotide
caggacuccccgaagcacc

SEQ ID NO: 1089136 - RNA, 19 nt, Artificial Sequence
  Description of Artificial Sequence: Synthetic oligonucleotide
uccaaaccgguaugaaagu

SEQ ID NO: 1089137 - RNA, 19 nt, Artificial Sequence
  Description of Artificial Sequence: Synthetic oligonucleotide
gcccuguugguccaaaccg

SEQ ID NO: 1089138 - RNA, 19 nt, Artificial Sequence
  Description of Artificial Sequence: Synthetic oligonucleotide
uguagcaguccucguguaa

SEQ ID NO: 1089139 - RNA, 19 nt, Artificial Sequence
  Description of Artificial Sequence: Synthetic oligonucleotide
guaugaaaguuguaagacu

SEQ ID NO: 1089140 - RNA, 19 nt, Artificial Sequence
  Description of Artificial Sequence: Synthetic oligonucleotide
gauucuuauggacugucau

SEQ ID NO: 1089141 - RNA, 19 nt, Artificial Sequence
  Description of Artificial Sequence: Synthetic oligonucleotide
aaauacggggaaauugaua

SEQ ID NO: 1089142 - RNA, 19 nt, Artificial Sequence
  Description of Artificial Sequence: Synthetic oligonucleotide
ugggccuaguuuaaccaaa

SEQ ID NO: 1089143 - RNA, 19 nt, Artificial Sequence
  Description of Artificial Sequence: Synthetic oligonucleotide
guugguccaaaccgguaug

SEQ ID NO: 1089144 - RNA, 19 nt, Artificial Sequence
  Description of Artificial Sequence: Synthetic oligonucleotide
ugaggcaaguucgauuggu

SEQ ID NO: 1089145 - RNA, 19 nt, Artificial Sequence
  Description of Artificial Sequence: Synthetic oligonucleotide
ucccaugacaacugcacuu

SEQ ID NO: 1089146 - RNA, 19 nt, Artificial Sequence
  Description of Artificial Sequence: Synthetic oligonucleotide
accaaguuuggucucuuuu

SEQ ID NO: 1089147 - RNA, 19 nt, Artificial Sequence
  Description of Artificial Sequence: Synthetic oligonucleotide
uccucgucccaugacaacu

SEQ ID NO: 1089148 - RNA, 19 nt, Artificial Sequence
  Description of Artificial Sequence: Synthetic oligonucleotide
uccuaucagccucugguuu

SEQ ID NO: 1089149 - RNA, 19 nt, Artificial Sequence
  Description of Artificial Sequence: Synthetic oligonucleotide
uaggcacuaugagccaugg

SEQ ID NO: 1089150 - RNA, 19 nt, Artificial Sequence
  Description of Artificial Sequence: Synthetic oligonucleotide
aauggcuagaaaacuuauu

SEQ ID NO: 1089151 - RNA, 19 nt, Artificial Sequence
  Description of Artificial Sequence: Synthetic oligonucleotide
caugacaacugcacuucuc

SEQ ID NO: 1089152 - RNA, 19 nt, Artificial Sequence
  Description of Artificial Sequence: Synthetic oligonucleotide
auacggggaaauugauaug

SEQ ID NO: 1089153 - RNA, 19 nt, Artificial Sequence
  Description of Artificial Sequence: Synthetic oligonucleotide
uguaacucauuagcugcac

SEQ ID NO: 1089154 - RNA, 19 nt, Artificial Sequence
  Description of Artificial Sequence: Synthetic oligonucleotide
guuguaagacuuggcuggg

SEQ ID NO: 1089155 - RNA, 19 nt, Artificial Sequence
  Description of Artificial Sequence: Synthetic oligonucleotide
uugauaucgaaggggucgu

SEQ ID NO: 1089156 - RNA, 19 nt, Artificial Sequence
  Description of Artificial Sequence: Synthetic oligonucleotide
ucucgaggcgccuguuucc

SEQ ID NO: 1089157 - RNA, 19 nt, Artificial Sequence
  Description of Artificial Sequence: Synthetic oligonucleotide
cagccuugauaucgaaggg

SEQ ID NO: 1089158 - RNA, 19 nt, Artificial Sequence
  Description of Artificial Sequence: Synthetic oligonucleotide
gcaaguucgauugguaggc

SEQ ID NO: 1089159 - RNA, 19 nt, Artificial Sequence
  Description of Artificial Sequence: Synthetic oligonucleotide
augaggcaaguucgauugg

SEQ ID NO: 1089160 - RNA, 19 nt, Artificial Sequence
  Description of Artificial Sequence: Synthetic oligonucleotide
ucaaccaaguuuggucucu

SEQ ID NO: 1089161 - RNA, 19 nt, Artificial Sequence
  Description of Artificial Sequence: Synthetic oligonucleotide
guccucguguaauugcaug

SEQ ID NO: 1089162 - RNA, 19 nt, Artificial Sequence
  Description of Artificial Sequence: Synthetic oligonucleotide
agccucauaaguugagcau

SEQ ID NO: 1089163 - RNA, 19 nt, Artificial Sequence
  Description of Artificial Sequence: Synthetic oligonucleotide
ugaccgugaacuuccggau

SEQ ID NO: 1089164 - RNA, 19 nt, Artificial Sequence
  Description of Artificial Sequence: Synthetic oligonucleotide
uaguuuguccccggaacga

SEQ ID NO: 1089165 - RNA, 19 nt, Artificial Sequence
  Description of Artificial Sequence: Synthetic oligonucleotide
cuugaccgugaacuuccgg

SEQ ID NO: 1089166 - RNA, 19 nt, Artificial Sequence
  Description of Artificial Sequence: Synthetic oligonucleotide
uuuuaacgcugacuccuuu

SEQ ID NO: 1089167 - RNA, 19 nt, Artificial Sequence
  Description of Artificial Sequence: Synthetic oligonucleotide
uaacgcugacuccuuuggu

SEQ ID NO: 1089168 - RNA, 19 nt, Artificial Sequence
  Description of Artificial Sequence: Synthetic oligonucleotide
gcuauugugguagagcaca

SEQ ID NO: 1089169 - RNA, 19 nt, Artificial Sequence
  Description of Artificial Sequence: Synthetic oligonucleotide
aacucauuagcugcacauu

SEQ ID NO: 1089170 - RNA, 19 nt, Artificial Sequence
  Description of Artificial Sequence: Synthetic oligonucleotide
cauaucgcuguucagggcu

SEQ ID NO: 1089171 - RNA, 19 nt, Artificial Sequence
  Description of Artificial Sequence: Synthetic oligonucleotide
aguucgauugguaggcacu

SEQ ID NO: 1089172 - RNA, 19 nt, Artificial Sequence
  Description of Artificial Sequence: Synthetic oligonucleotide
gaaaacuuauugugucacu

SEQ ID NO: 1089173 - RNA, 19 nt, Artificial Sequence
  Description of Artificial Sequence: Synthetic oligonucleotide
ucgucccaugacaacugca

SEQ ID NO: 1089174 - RNA, 19 nt, Artificial Sequence
  Description of Artificial Sequence: Synthetic oligonucleotide
uugguccaaaccgguauga

SEQ ID NO: 1089175 - RNA, 19 nt, Artificial Sequence
  Description of Artificial Sequence: Synthetic oligonucleotide
ucuccgaccucgagagucu

SEQ ID NO: 1089176 - RNA, 19 nt, Artificial Sequence
  Description of Artificial Sequence: Synthetic oligonucleotide
ugccugggagauauucaac

SEQ ID NO: 1089177 - RNA, 19 nt, Artificial Sequence
  Description of Artificial Sequence: Synthetic oligonucleotide
guaacucauuagcugcaca

SEQ ID NO: 1089178 - RNA, 19 nt, Artificial Sequence
  Description of Artificial Sequence: Synthetic oligonucleotide
ugggacuugaauggcuaga

SEQ ID NO: 1089179 - RNA, 19 nt, Artificial Sequence
  Description of Artificial Sequence: Synthetic oligonucleotide
ugguccaauuuuccacaac

SEQ ID NO: 1089180 - RNA, 19 nt, Artificial Sequence
  Description of Artificial Sequence: Synthetic oligonucleotide
agggcuuuuaacgcugacu

SEQ ID NO: 1089181 - RNA, 19 nt, Artificial Sequence
  Description of Artificial Sequence: Synthetic oligonucleotide
uaucuguugauuggcccaa

SEQ ID NO: 1089182 - RNA, 19 nt, Artificial Sequence
  Description of Artificial Sequence: Synthetic oligonucleotide
gcaccuuguaacucauuag

SEQ ID NO: 1089183 - RNA, 19 nt, Artificial Sequence
  Description of Artificial Sequence: Synthetic oligonucleotide
augccugccgaucaaccaa

SEQ ID NO: 1089184 - RNA, 19 nt, Artificial Sequence
  Description of Artificial Sequence: Synthetic oligonucleotide
ccgguaugaaaguuguaag

SEQ ID NO: 1089185 - RNA, 19 nt, Artificial Sequence
  Description of Artificial Sequence: Synthetic oligonucleotide
cuggauagguaccuaaacu

SEQ ID NO: 1089186 - RNA, 19 nt, Artificial Sequence
  Description of Artificial Sequence: Synthetic oligonucleotide
ccaaaauuuguagcagucc

SEQ ID NO: 1089187 - RNA, 19 nt, Artificial Sequence
  Description of Artificial Sequence: Synthetic oligonucleotide
agcgggcucggcuauugug

SEQ ID NO: 1089188 - RNA, 19 nt, Artificial Sequence
  Description of Artificial Sequence: Synthetic oligonucleotide
gcauguugacuguauacuc

SEQ ID NO: 1089189 - RNA, 19 nt, Artificial Sequence
  Description of Artificial Sequence: Synthetic oligonucleotide
uaaugugguuuuagcccuc

SEQ ID NO: 1089190 - RNA, 19 nt, Artificial Sequence
  Description of Artificial Sequence: Synthetic oligonucleotide
ugauuggcccaaacucaaa

SEQ ID NO: 1089191 - RNA, 19 nt, Artificial Sequence
  Description of Artificial Sequence: Synthetic oligonucleotide
gaacgaagcccuguugguc

SEQ ID NO: 1089192 - RNA, 19 nt, Artificial Sequence
  Description of Artificial Sequence: Synthetic oligonucleotide
augcauaaggaaaucucaa

SEQ ID NO: 1089193 - RNA, 19 nt, Artificial Sequence
  Description of Artificial Sequence: Synthetic oligonucleotide
gguaaaagucauaguuagc

SEQ ID NO: 1089194 - RNA, 19 nt, Artificial Sequence
  Description of Artificial Sequence: Synthetic oligonucleotide
aacauccgcuccagucugg

SEQ ID NO: 1089195 - RNA, 19 nt, Artificial Sequence
  Description of Artificial Sequence: Synthetic oligonucleotide
uguguacacagugcugguc

SEQ ID NO: 1089196 - RNA, 19 nt, Artificial Sequence
  Description of Artificial Sequence: Synthetic oligonucleotide
aggccaucaggugggagag

SEQ ID NO: 1089197 - RNA, 19 nt, Artificial Sequence
  Description of Artificial Sequence: Synthetic oligonucleotide
cgaucaaccaaguuugguc

SEQ ID NO: 1089198 - RNA, 19 nt, Artificial Sequence
  Description of Artificial Sequence: Synthetic oligonucleotide
ugguagagcacaggagggu

SEQ ID NO: 1089199 - RNA, 19 nt, Artificial Sequence
  Description of Artificial Sequence: Synthetic oligonucleotide
cuugaauggcuagaaaacu

SEQ ID NO: 1089200 - RNA, 19 nt, Artificial Sequence
  Description of Artificial Sequence: Synthetic oligonucleotide
uuggcugggccuaguuuaa

SEQ ID NO: 1089201 - RNA, 19 nt, Artificial Sequence
  Description of Artificial Sequence: Synthetic oligonucleotide
ggcucggcuauugugguag

SEQ ID NO: 1089202 - RNA, 19 nt, Artificial Sequence
  Description of Artificial Sequence: Synthetic oligonucleotide
ucgaaggggucgucucgag

SEQ ID NO: 1089203 - RNA, 19 nt, Artificial Sequence
  Description of Artificial Sequence: Synthetic oligonucleotide
aaccaaguuuggucucuuu

SEQ ID NO: 1089204 - RNA, 19 nt, Artificial Sequence
  Description of Artificial Sequence: Synthetic oligonucleotide
gucucgaggcgccuguuuc

SEQ ID NO: 1089205 - RNA, 19 nt, Artificial Sequence
  Description of Artificial Sequence: Synthetic oligonucleotide
gcaguccucguguaauugc

SEQ ID NO: 1089206 - RNA, 19 nt, Artificial Sequence
  Description of Artificial Sequence: Synthetic oligonucleotide
cucgucccaugacaacugc

SEQ ID NO: 1089207 - RNA, 19 nt, Artificial Sequence
  Description of Artificial Sequence: Synthetic oligonucleotide
gggagauauucaacugugg

SEQ ID NO: 1089208 - RNA, 19 nt, Artificial Sequence
  Description of Artificial Sequence: Synthetic oligonucleotide
aggcacuaugagccauggg

SEQ ID NO: 1089209 - RNA, 19 nt, Artificial Sequence
  Description of Artificial Sequence: Synthetic oligonucleotide
ggcuuuuaacgcugacucc

SEQ ID NO: 1089210 - RNA, 19 nt, Artificial Sequence
  Description of Artificial Sequence: Synthetic oligonucleotide
ggagugaaauuuguguaca

SEQ ID NO: 1089211 - RNA, 19 nt, Artificial Sequence
  Description of Artificial Sequence: Synthetic oligonucleotide
aaucuccgaccucgagagu

SEQ ID NO: 1089212 - RNA, 19 nt, Artificial Sequence
  Description of Artificial Sequence: Synthetic oligonucleotide
gguuuuagcccucugcccu

SEQ ID NO: 1089213 - RNA, 19 nt, Artificial Sequence
  Description of Artificial Sequence: Synthetic oligonucleotide
cucguguaauugcauggca

SEQ ID NO: 1089214 - RNA, 19 nt, Artificial Sequence
  Description of Artificial Sequence: Synthetic oligonucleotide
ugguugaaccuguggcauc

SEQ ID NO: 1089215 - RNA, 19 nt, Artificial Sequence
  Description of Artificial Sequence: Synthetic oligonucleotide
cauaugcauaaggaaaucu

SEQ ID NO: 1089216 - RNA, 19 nt, Artificial Sequence
  Description of Artificial Sequence: Synthetic oligonucleotide
cacuaugagccauggguaa

SEQ ID NO: 1089217 - RNA, 19 nt, Artificial Sequence
  Description of Artificial Sequence: Synthetic oligonucleotide
guauacucgaagagccuga

SEQ ID NO: 1089218 - RNA, 19 nt, Artificial Sequence
  Description of Artificial Sequence: Synthetic oligonucleotide
cggaacgaagcccuguugg

SEQ ID NO: 1089219 - RNA, 19 nt, Artificial Sequence
  Description of Artificial Sequence: Synthetic oligonucleotide
uccgguggggcaggagacg

SEQ ID NO: 1089220 - RNA, 19 nt, Artificial Sequence
  Description of Artificial Sequence: Synthetic oligonucleotide
augguccaauuuuccacaa

SEQ ID NO: 1089221 - RNA, 19 nt, Artificial Sequence
  Description of Artificial Sequence: Synthetic oligonucleotide
ugagcauaaugugguuuua

SEQ ID NO: 1089222 - RNA, 19 nt, Artificial Sequence
  Description of Artificial Sequence: Synthetic oligonucleotide
acuaugagccauggguaaa

SEQ ID NO: 1089223 - RNA, 19 nt, Artificial Sequence
  Description of Artificial Sequence: Synthetic oligonucleotide
ugucaggcccugagcacau

SEQ ID NO: 1089224 - RNA, 19 nt, Artificial Sequence
  Description of Artificial Sequence: Synthetic oligonucleotide
guacaggggcauaucgcug

SEQ ID NO: 1089225 - RNA, 19 nt, Artificial Sequence
  Description of Artificial Sequence: Synthetic oligonucleotide
gguccaaaccgguaugaaa

SEQ ID NO: 1089226 - RNA, 19 nt, Artificial Sequence
  Description of Artificial Sequence: Synthetic oligonucleotide
aucgaaggggucgucucga

SEQ ID NO: 1089227 - RNA, 19 nt, Artificial Sequence
  Description of Artificial Sequence: Synthetic oligonucleotide
gcuagaaaacuuauugugu

SEQ ID NO: 1089228 - RNA, 19 nt, Artificial Sequence
  Description of Artificial Sequence: Synthetic oligonucleotide
gcuaugucaucccgacgcc

SEQ ID NO: 1089229 - RNA, 19 nt, Artificial Sequence
  Description of Artificial Sequence: Synthetic oligonucleotide
gucagucaaacuccucucu

SEQ ID NO: 1089230 - RNA, 19 nt, Artificial Sequence
  Description of Artificial Sequence: Synthetic oligonucleotide
uuguagcaguccucgugua

SEQ ID NO: 1089231 - RNA, 19 nt, Artificial Sequence
  Description of Artificial Sequence: Synthetic oligonucleotide
cuagcauguugacuguaua

SEQ ID NO: 1089232 - RNA, 19 nt, Artificial Sequence
  Description of Artificial Sequence: Synthetic oligonucleotide
cugccgaucaaccaaguuu

SEQ ID NO: 1089233 - RNA, 19 nt, Artificial Sequence
  Description of Artificial Sequence: Synthetic oligonucleotide
cuguugauuggcccaaacu

SEQ ID NO: 1089234 - RNA, 19 nt, Artificial Sequence
  Description of Artificial Sequence: Synthetic oligonucleotide
gcuuuuaacgcugacuccu

SEQ ID NO: 1089235 - RNA, 19 nt, Artificial Sequence
  Description of Artificial Sequence: Synthetic oligonucleotide
gcgggcucggcuauugugg

SEQ ID NO: 1089236 - RNA, 19 nt, Artificial Sequence
  Description of Artificial Sequence: Synthetic oligonucleotide
cacaugaaucuccgaccuc

SEQ ID NO: 1089237 - RNA, 19 nt, Artificial Sequence
  Description of Artificial Sequence: Synthetic oligonucleotide
uugguccacuucccaucac

SEQ ID NO: 1089238 - RNA, 19 nt, Artificial Sequence
  Description of Artificial Sequence: Synthetic oligonucleotide
cagcucuaguccugaugac

SEQ ID NO: 1089239 - RNA, 19 nt, Artificial Sequence
  Description of Artificial Sequence: Synthetic oligonucleotide
cugggccuaguuuaaccaa

SEQ ID NO: 1089240 - RNA, 19 nt, Artificial Sequence
  Description of Artificial Sequence: Synthetic oligonucleotide
agccauggguaaaagcuuu

SEQ ID NO: 1089241 - RNA, 19 nt, Artificial Sequence
  Description of Artificial Sequence: Synthetic oligonucleotide
gcauaucgcuguucagggc

SEQ ID NO: 1089242 - RNA, 19 nt, Artificial Sequence
  Description of Artificial Sequence: Synthetic oligonucleotide
uccgaccucgagagucuuc

SEQ ID NO: 1089243 - RNA, 19 nt, Artificial Sequence
  Description of Artificial Sequence: Synthetic oligonucleotide
ccucguguaauugcauggc

SEQ ID NO: 1089244 - RNA, 19 nt, Artificial Sequence
  Description of Artificial Sequence: Synthetic oligonucleotide
uucgauugguaggcacuau

SEQ ID NO: 1089245 - RNA, 19 nt, Artificial Sequence
  Description of Artificial Sequence: Synthetic oligonucleotide
guucgauugguaggcacua

SEQ ID NO: 1089246 - RNA, 19 nt, Artificial Sequence
  Description of Artificial Sequence: Synthetic oligonucleotide
gaggcaaguucgauuggua

SEQ ID NO: 1089247 - RNA, 19 nt, Artificial Sequence
  Description of Artificial Sequence: Synthetic oligonucleotide
gcuuucaggacuccccgaa

SEQ ID NO: 1089248 - RNA, 19 nt, Artificial Sequence
  Description of Artificial Sequence: Synthetic oligonucleotide
gguaaggagugaaauuugu

SEQ ID NO: 1089249 - RNA, 19 nt, Artificial Sequence
  Description of Artificial Sequence: Synthetic oligonucleotide
ugauaucgaaggggucguc

SEQ ID NO: 1089250 - RNA, 19 nt, Artificial Sequence
  Description of Artificial Sequence: Synthetic oligonucleotide
acggggaaauugauauggu

SEQ ID NO: 1089251 - RNA, 19 nt, Artificial Sequence
  Description of Artificial Sequence: Synthetic oligonucleotide
ggccuaguuuaaccaaaga

SEQ ID NO: 1089252 - RNA, 19 nt, Artificial Sequence
  Description of Artificial Sequence: Synthetic oligonucleotide
cgauugguaggcacuauga

SEQ ID NO: 1089253 - RNA, 19 nt, Artificial Sequence
  Description of Artificial Sequence: Synthetic oligonucleotide
cuguauacucgaagagccu

SEQ ID NO: 1089254 - RNA, 19 nt, Artificial Sequence
  Description of Artificial Sequence: Synthetic oligonucleotide
cgaagcaccuuguaacuca

SEQ ID NO: 1089255 - RNA, 19 nt, Artificial Sequence
  Description of Artificial Sequence: Synthetic oligonucleotide
ccucauaaguugagcauaa

SEQ ID NO: 1089256 - RNA, 19 nt, Artificial Sequence
  Description of Artificial Sequence: Synthetic oligonucleotide
ggauagguaccuaaacuau

SEQ ID NO: 1089257 - RNA, 19 nt, Artificial Sequence
  Description of Artificial Sequence: Synthetic oligonucleotide
ccucgucccaugacaacug

SEQ ID NO: 1089258 - RNA, 19 nt, Artificial Sequence
  Description of Artificial Sequence: Synthetic oligonucleotide
uccccggaacgaagcccug

SEQ ID NO: 1089259 - RNA, 19 nt, Artificial Sequence
  Description of Artificial Sequence: Synthetic oligonucleotide
ucgcuguucagggcuuuua

SEQ ID NO: 1089260 - RNA, 19 nt, Artificial Sequence
  Description of Artificial Sequence: Synthetic oligonucleotide
aguccucguguaauugcau

SEQ ID NO: 1089261 - RNA, 19 nt, Artificial Sequence
  Description of Artificial Sequence: Synthetic oligonucleotide
cggggaaauugauaugguc

SEQ ID NO: 1089262 - RNA, 19 nt, Artificial Sequence
  Description of Artificial Sequence: Synthetic oligonucleotide
ggaacgaagcccuguuggu

SEQ ID NO: 1089263 - RNA, 19 nt, Artificial Sequence
  Description of Artificial Sequence: Synthetic oligonucleotide
ggcuauugugguagagcac

SEQ ID NO: 1089264 - RNA, 19 nt, Artificial Sequence
  Description of Artificial Sequence: Synthetic oligonucleotide
gccucauaaguugagcaua

SEQ ID NO: 1089265 - RNA, 19 nt, Artificial Sequence
  Description of Artificial Sequence: Synthetic oligonucleotide
caaguucgauugguaggca

SEQ ID NO: 1089266 - RNA, 19 nt, Artificial Sequence
  Description of Artificial Sequence: Synthetic oligonucleotide
auaucgcuguucagggcuu

SEQ ID NO: 1089267 - RNA, 19 nt, Artificial Sequence
  Description of Artificial Sequence: Synthetic oligonucleotide
gaagcaccuuguaacucau

SEQ ID NO: 1089268 - RNA, 19 nt, Artificial Sequence
  Description of Artificial Sequence: Synthetic oligonucleotide
gagcacaggaggguuccua

SEQ ID NO: 1089269 - RNA, 19 nt, Artificial Sequence
  Description of Artificial Sequence: Synthetic oligonucleotide
cuuuuaacgcugacuccuu

SEQ ID NO: 1089270 - RNA, 19 nt, Artificial Sequence
  Description of Artificial Sequence: Synthetic oligonucleotide
gccgaucaaccaaguuugg

SEQ ID NO: 1089271 - RNA, 19 nt, Artificial Sequence
  Description of Artificial Sequence: Synthetic oligonucleotide
uaucgcuguucagggcuuu

SEQ ID NO: 1089272 - RNA, 19 nt, Artificial Sequence
  Description of Artificial Sequence: Synthetic oligonucleotide
gaguccgguggggcaggag

SEQ ID NO: 1089273 - RNA, 19 nt, Artificial Sequence
  Description of Artificial Sequence: Synthetic oligonucleotide
ggcccucuagcauguugac

SEQ ID NO: 1089274 - RNA, 19 nt, Artificial Sequence
  Description of Artificial Sequence: Synthetic oligonucleotide
gaccgugaacuuccggauu

SEQ ID NO: 1089275 - RNA, 19 nt, Artificial Sequence
  Description of Artificial Sequence: Synthetic oligonucleotide
ggcgccuguuuccuuccac

SEQ ID NO: 1089276 - RNA, 19 nt, Artificial Sequence
  Description of Artificial Sequence: Synthetic oligonucleotide
aagcaccuuguaacucauu

SEQ ID NO: 1089277 - RNA, 19 nt, Artificial Sequence
  Description of Artificial Sequence: Synthetic oligonucleotide
acuccccgaagcaccuugu

SEQ ID NO: 1089278 - RNA, 19 nt, Artificial Sequence
  Description of Artificial Sequence: Synthetic oligonucleotide
ggccauugcuccaaaauuu

SEQ ID NO: 1089279 - RNA, 19 nt, Artificial Sequence
  Description of Artificial Sequence: Synthetic oligonucleotide
ggagcgggcucggcuauug

SEQ ID NO: 1089280 - RNA, 19 nt, Artificial Sequence
  Description of Artificial Sequence: Synthetic oligonucleotide
ugaguccgguggggcagga

SEQ ID NO: 1089281 - RNA, 19 nt, Artificial Sequence
  Description of Artificial Sequence: Synthetic oligonucleotide
aggcgccuguuuccuucca

SEQ ID NO: 1089282 - RNA, 19 nt, Artificial Sequence
  Description of Artificial Sequence: Synthetic oligonucleotide
ucgaggcgccuguuuccuu

SEQ ID NO: 1089283 - RNA, 19 nt, Artificial Sequence
  Description of Artificial Sequence: Synthetic oligonucleotide
gucgucucgaggcgccugu

SEQ ID NO: 1089284 - RNA, 19 nt, Artificial Sequence
  Description of Artificial Sequence: Synthetic oligonucleotide
ccggaacgaagcccuguug

SEQ ID NO: 1089285 - RNA, 19 nt, Artificial Sequence
  Description of Artificial Sequence: Synthetic oligonucleotide
cucuagcauguugacugua

SEQ ID NO: 1089286 - RNA, 19 nt, Artificial Sequence
  Description of Artificial Sequence: Synthetic oligonucleotide
ccgaccucgagagucuuca

SEQ ID NO: 1089287 - RNA, 19 nt, Artificial Sequence
  Description of Artificial Sequence: Synthetic oligonucleotide
cgagagucuucauacucaa

SEQ ID NO: 1089288 - RNA, 19 nt, Artificial Sequence
  Description of Artificial Sequence: Synthetic oligonucleotide
aucgcuguucagggcuuuu

SEQ ID NO: 1089289 - RNA, 19 nt, Artificial Sequence
  Description of Artificial Sequence: Synthetic oligonucleotide
caguggagcgggcucggcu

SEQ ID NO: 1089290 - RNA, 19 nt, Artificial Sequence
  Description of Artificial Sequence: Synthetic oligonucleotide
gccuuccucgucccaugac

SEQ ID NO: 1089291 - RNA, 19 nt, Artificial Sequence
  Description of Artificial Sequence: Synthetic oligonucleotide
ccuuuugggcaauuugaau

SEQ ID NO: 1089292 - RNA, 19 nt, Artificial Sequence
  Description of Artificial Sequence: Synthetic oligonucleotide
ccgacgccuuccucguccc

SEQ ID NO: 1089293 - RNA, 19 nt, Artificial Sequence
  Description of Artificial Sequence: Synthetic oligonucleotide
ggucgucucgaggcgccug

SEQ ID NO: 1089294 - RNA, 19 nt, Artificial Sequence
  Description of Artificial Sequence: Synthetic oligonucleotide
ccuguugguccaaaccggu

SEQ ID NO: 1089295 - RNA, 19 nt, Artificial Sequence
  Description of Artificial Sequence: Synthetic oligonucleotide
gcaggagacgguucauuuu

SEQ ID NO: 1089296 - RNA, 19 nt, Artificial Sequence
  Description of Artificial Sequence: Synthetic oligonucleotide
cucgaggcgccuguuuccu

SEQ ID NO: 1089297 - RNA, 19 nt, Artificial Sequence
  Description of Artificial Sequence: Synthetic oligonucleotide
cucauaaguugagcauaau

SEQ ID NO: 1089298 - RNA, 19 nt, Artificial Sequence
  Description of Artificial Sequence: Synthetic oligonucleotide
ucgucucgaggcgccuguu

SEQ ID NO: 1089299 - RNA, 19 nt, Artificial Sequence
  Description of Artificial Sequence: Synthetic oligonucleotide
gagcgggcucggcuauugu

SEQ ID NO: 1089300 - RNA, 19 nt, Artificial Sequence
  Description of Artificial Sequence: Synthetic oligonucleotide
ccuaaacuaucuguugauu

SEQ ID NO: 1089301 - RNA, 19 nt, Artificial Sequence
  Description of Artificial Sequence: Synthetic oligonucleotide
cgcuguucagggcuuuuaa

SEQ ID NO: 1089302 - RNA, 19 nt, Artificial Sequence
  Description of Artificial Sequence: Synthetic oligonucleotide
gguccccucucagucacau

SEQ ID NO: 1089303 - RNA, 19 nt, Artificial Sequence
  Description of Artificial Sequence: Synthetic oligonucleotide
ccaugacaacugcacuucu

SEQ ID NO: 1089304 - RNA, 19 nt, Artificial Sequence
  Description of Artificial Sequence: Synthetic oligonucleotide
ccgaucaaccaaguuuggu

SEQ ID NO: 1089305 - RNA, 19 nt, Artificial Sequence
  Description of Artificial Sequence: Synthetic oligonucleotide
caaccaaguuuggucucuu

SEQ ID NO: 1089306 - RNA, 19 nt, Artificial Sequence
  Description of Artificial Sequence: Synthetic oligonucleotide
gcccucuagcauguugacu

SEQ ID NO: 1089307 - RNA, 19 nt, Artificial Sequence
  Description of Artificial Sequence: Synthetic oligonucleotide
ccaaaccgguaugaaaguu

SEQ ID NO: 1089308 - RNA, 19 nt, Artificial Sequence
  Description of Artificial Sequence: Synthetic oligonucleotide
cgccuuccucgucccauga

SEQ ID NO: 1089309 - RNA, 19 nt, Artificial Sequence
  Description of Artificial Sequence: Synthetic oligonucleotide
cuccgaccucgagagucuu

SEQ ID NO: 1089310 - RNA, 19 nt, Artificial Sequence
  Description of Artificial Sequence: Synthetic oligonucleotide
ccgugaacuuccggauugu

SEQ ID NO: 1089311 - RNA, 19 nt, Artificial Sequence
  Description of Artificial Sequence: Synthetic oligonucleotide
gggucgucucgaggcgccu

SEQ ID NO: 1089312 - RNA, 19 nt, Artificial Sequence
  Description of Artificial Sequence: Synthetic oligonucleotide
ccccggaacgaagcccugu

SEQ ID NO: 1089313 - RNA, 19 nt, Artificial Sequence
  Description of Artificial Sequence: Synthetic oligonucleotide
ggacuccccgaagcaccuu

SEQ ID NO: 1089314 - RNA, 19 nt, Artificial Sequence
  Description of Artificial Sequence: Synthetic oligonucleotide
cgucucgaggcgccuguuu

SEQ ID NO: 1089315 - RNA, 19 nt, Artificial Sequence
  Description of Artificial Sequence: Synthetic oligonucleotide
ccgcuccagucugggacuu

SEQ ID NO: 1089316 - RNA, 19 nt, Artificial Sequence
  Description of Artificial Sequence: Synthetic oligonucleotide
uaaguuaacacuuauuugg

SEQ ID NO: 1089317 - RNA, 19 nt, Artificial Sequence
  Description of Artificial Sequence: Synthetic oligonucleotide
uguaucuucagcuacaucc

SEQ ID NO: 1089318 - RNA, 19 nt, Artificial Sequence
  Description of Artificial Sequence: Synthetic oligonucleotide
aagauugugggacuguggc

SEQ ID NO: 1089319 - RNA, 19 nt, Artificial Sequence
  Description of Artificial Sequence: Synthetic oligonucleotide
agugcaauccagcacaugg

SEQ ID NO: 1089320 - RNA, 19 nt, Artificial Sequence
  Description of Artificial Sequence: Synthetic oligonucleotide
auuacuccacuguugaagc

SEQ ID NO: 1089321 - RNA, 19 nt, Artificial Sequence
  Description of Artificial Sequence: Synthetic oligonucleotide
gauaacagcaccuggcagg

SEQ ID NO: 1089322 - RNA, 19 nt, Artificial Sequence
  Description of Artificial Sequence: Synthetic oligonucleotide
ucugauguuggucuuauac

SEQ ID NO: 1089323 - RNA, 19 nt, Artificial Sequence
  Description of Artificial Sequence: Synthetic oligonucleotide
uaguagaaggcgcacaccg

SEQ ID NO: 1089324 - RNA, 19 nt, Artificial Sequence
  Description of Artificial Sequence: Synthetic oligonucleotide
cuuguuaaagcccugacuc

SEQ ID NO: 1089325 - RNA, 19 nt, Artificial Sequence
  Description of Artificial Sequence: Synthetic oligonucleotide
uguaguagguccccgagcc

SEQ ID NO: 1089326 - RNA, 19 nt, Artificial Sequence
  Description of Artificial Sequence: Synthetic oligonucleotide
ugaaugauccgcaggaucu

SEQ ID NO: 1089327 - RNA, 19 nt, Artificial Sequence
  Description of Artificial Sequence: Synthetic oligonucleotide
guaacaagaacaucuggag

SEQ ID NO: 1089328 - RNA, 19 nt, Artificial Sequence
  Description of Artificial Sequence: Synthetic oligonucleotide
auagggguguugcaguucc

SEQ ID NO: 1089329 - RNA, 19 nt, Artificial Sequence
  Description of Artificial Sequence: Synthetic oligonucleotide
ugggcuacuuguuaaagcc

SEQ ID NO: 1089330 - RNA, 19 nt, Artificial Sequence
  Description of Artificial Sequence: Synthetic oligonucleotide
uuauacuucaggucaaggu

SEQ ID NO: 1089331 - RNA, 19 nt, Artificial Sequence
  Description of Artificial Sequence: Synthetic oligonucleotide
cuuauuuggucuagcaaag

SEQ ID NO: 1089332 - RNA, 19 nt, Artificial Sequence
  Description of Artificial Sequence: Synthetic oligonucleotide
cuaaguuaacacuuauuug

SEQ ID NO: 1089333 - RNA, 19 nt, Artificial Sequence
  Description of Artificial Sequence: Synthetic oligonucleotide
auacuucaggucaaggucc

SEQ ID NO: 1089334 - RNA, 19 nt, Artificial Sequence
  Description of Artificial Sequence: Synthetic oligonucleotide
ucaagguccagcugaauga

SEQ ID NO: 1089335 - RNA, 19 nt, Artificial Sequence
  Description of Artificial Sequence: Synthetic oligonucleotide
uguaaagcggggacuggcg

SEQ ID NO: 1089336 - RNA, 19 nt, Artificial Sequence
  Description of Artificial Sequence: Synthetic oligonucleotide
ucuagguucagcagcauua

SEQ ID NO: 1089337 - RNA, 19 nt, Artificial Sequence
  Description of Artificial Sequence: Synthetic oligonucleotide
ugcauggcaaccgagagga

SEQ ID NO: 1089338 - RNA, 19 nt, Artificial Sequence
  Description of Artificial Sequence: Synthetic oligonucleotide
agugugagcgcaccgcgcc

SEQ ID NO: 1089339 - RNA, 19 nt, Artificial Sequence
  Description of Artificial Sequence: Synthetic oligonucleotide
uuuggauggccacuggaca

SEQ ID NO: 1089340 - RNA, 19 nt, Artificial Sequence
  Description of Artificial Sequence: Synthetic oligonucleotide
gauggagucgcuguaguag

SEQ ID NO: 1089341 - RNA, 19 nt, Artificial Sequence
  Description of Artificial Sequence: Synthetic oligonucleotide
aguuaacacuuauuugguc

SEQ ID NO: 1089342 - RNA, 19 nt, Artificial Sequence
  Description of Artificial Sequence: Synthetic oligonucleotide
ucggccuuggugaacauca

SEQ ID NO: 1089343 - RNA, 19 nt, Artificial Sequence
  Description of Artificial Sequence: Synthetic oligonucleotide
uggacuguaacaagaacau

SEQ ID NO: 1089344 - RNA, 19 nt, Artificial Sequence
  Description of Artificial Sequence: Synthetic oligonucleotide
guuggucuuauacuucagg

SEQ ID NO: 1089345 - RNA, 19 nt, Artificial Sequence
  Description of Artificial Sequence: Synthetic oligonucleotide
gaacaucaucagcaggugg

SEQ ID NO: 1089346 - RNA, 19 nt, Artificial Sequence
  Description of Artificial Sequence: Synthetic oligonucleotide
gaaaguaugccuggaagac

SEQ ID NO: 1089347 - RNA, 19 nt, Artificial Sequence
  Description of Artificial Sequence: Synthetic oligonucleotide
uggaagacaucgcuguagc

SEQ ID NO: 1089348 - RNA, 19 nt, Artificial Sequence
  Description of Artificial Sequence: Synthetic oligonucleotide
uaugccgauaacagcaccu

SEQ ID NO: 1089349 - RNA, 19 nt, Artificial Sequence
  Description of Artificial Sequence: Synthetic oligonucleotide
cauuacuccacuguugaag

SEQ ID NO: 1089350 - RNA, 19 nt, Artificial Sequence
  Description of Artificial Sequence: Synthetic oligonucleotide
cuggacuguaacaagaaca

SEQ ID NO: 1089351 - RNA, 19 nt, Artificial Sequence
  Description of Artificial Sequence: Synthetic oligonucleotide
agcugaaugauccgcagga

SEQ ID NO: 1089352 - RNA, 19 nt, Artificial Sequence
  Description of Artificial Sequence: Synthetic oligonucleotide
ugugugccuguacacaggc

SEQ ID NO: 1089353 - RNA, 19 nt, Artificial Sequence
  Description of Artificial Sequence: Synthetic oligonucleotide
caucucucuggcuaugccg

SEQ ID NO: 1089354 - RNA, 19 nt, Artificial Sequence
  Description of Artificial Sequence: Synthetic oligonucleotide
uugugcucggccuugguga

SEQ ID NO: 1089355 - RNA, 19 nt, Artificial Sequence
  Description of Artificial Sequence: Synthetic oligonucleotide
auggagucgcuguaguagg

SEQ ID NO: 1089356 - RNA, 19 nt, Artificial Sequence
  Description of Artificial Sequence: Synthetic oligonucleotide
ugcgccucgaacuuggcga

SEQ ID NO: 1089357 - RNA, 19 nt, Artificial Sequence
  Description of Artificial Sequence: Synthetic oligonucleotide
ucacagugaaaguaugccu

SEQ ID NO: 1089358 - RNA, 19 nt, Artificial Sequence
  Description of Artificial Sequence: Synthetic oligonucleotide
uuggauggccacuggacag

SEQ ID NO: 1089359 - RNA, 19 nt, Artificial Sequence
  Description of Artificial Sequence: Synthetic oligonucleotide
acuuguuaaagcccugacu

SEQ ID NO: 1089360 - RNA, 19 nt, Artificial Sequence
  Description of Artificial Sequence: Synthetic oligonucleotide
gguguugcaguucccaugg

SEQ ID NO: 1089361 - RNA, 19 nt, Artificial Sequence
  Description of Artificial Sequence: Synthetic oligonucleotide
agcuaagcuucuuuggaug

SEQ ID NO: 1089362 - RNA, 19 nt, Artificial Sequence
  Description of Artificial Sequence: Synthetic oligonucleotide
agguucagcagcauuacuc

SEQ ID NO: 1089363 - RNA, 19 nt, Artificial Sequence
  Description of Artificial Sequence: Synthetic oligonucleotide
ucuggcuaugccgauaaca

SEQ ID NO: 1089364 - RNA, 19 nt, Artificial Sequence
  Description of Artificial Sequence: Synthetic oligonucleotide
guaugccuggaagacaucg

SEQ ID NO: 1089365 - RNA, 19 nt, Artificial Sequence
  Description of Artificial Sequence: Synthetic oligonucleotide
cuuuggauggccacuggac

SEQ ID NO: 1089366 - RNA, 19 nt, Artificial Sequence
  Description of Artificial Sequence: Synthetic oligonucleotide
ugagcuggacuguaacaag

SEQ ID NO: 1089367 - RNA, 19 nt, Artificial Sequence
  Description of Artificial Sequence: Synthetic oligonucleotide
cuugcagagucacuccucc

SEQ ID NO: 1089368 - RNA, 19 nt, Artificial Sequence
  Description of Artificial Sequence: Synthetic oligonucleotide
uugggcaagaucuggugca

SEQ ID NO: 1089369 - RNA, 19 nt, Artificial Sequence
  Description of Artificial Sequence: Synthetic oligonucleotide
aaguuaacacuuauuuggu

SEQ ID NO: 1089370 - RNA, 19 nt, Artificial Sequence
  Description of Artificial Sequence: Synthetic oligonucleotide
guagaaggcgcacaccgcc

SEQ ID NO: 1089371 - RNA, 19 nt, Artificial Sequence
  Description of Artificial Sequence: Synthetic oligonucleotide
cugggaaagauugugggac

SEQ ID NO: 1089372 - RNA, 19 nt, Artificial Sequence
  Description of Artificial Sequence: Synthetic oligonucleotide
uccaagugcaauccagcac

SEQ ID NO: 1089373 - RNA, 19 nt, Artificial Sequence
  Description of Artificial Sequence: Synthetic oligonucleotide
guagugugagcgcaccgcg

SEQ ID NO: 1089374 - RNA, 19 nt, Artificial Sequence
  Description of Artificial Sequence: Synthetic oligonucleotide
agcagcauuacuccacugu

SEQ ID NO: 1089375 - RNA, 19 nt, Artificial Sequence
  Description of Artificial Sequence: Synthetic oligonucleotide
uggucuuauacuucagguc

SEQ ID NO: 1089376 - RNA, 19 nt, Artificial Sequence
  Description of Artificial Sequence: Synthetic oligonucleotide
acacuuauuuggucuagca

SEQ ID NO: 1089377 - RNA, 19 nt, Artificial Sequence
  Description of Artificial Sequence: Synthetic oligonucleotide
ucggaggagguccaugcgc

SEQ ID NO: 1089378 - RNA, 19 nt, Artificial Sequence
  Description of Artificial Sequence: Synthetic oligonucleotide
aaaguaugccuggaagaca

SEQ ID NO: 1089379 - RNA, 19 nt, Artificial Sequence
  Description of Artificial Sequence: Synthetic oligonucleotide
ugccgauaacagcaccugg

SEQ ID NO: 1089380 - RNA, 19 nt, Artificial Sequence
  Description of Artificial Sequence: Synthetic oligonucleotide
uaaagcccugacucacugg

SEQ ID NO: 1089381 - RNA, 19 nt, Artificial Sequence
  Description of Artificial Sequence: Synthetic oligonucleotide
uuggcgaggcgcagcagcg

SEQ ID NO: 1089382 - RNA, 19 nt, Artificial Sequence
  Description of Artificial Sequence: Synthetic oligonucleotide
agcaacaucguggaagaug

SEQ ID NO: 1089383 - RNA, 19 nt, Artificial Sequence
  Description of Artificial Sequence: Synthetic oligonucleotide
cugggcuacuuguuaaagc

SEQ ID NO: 1089384 - RNA, 19 nt, Artificial Sequence
  Description of Artificial Sequence: Synthetic oligonucleotide
uguuggucuuauacuucag

SEQ ID NO: 1089385 - RNA, 19 nt, Artificial Sequence
  Description of Artificial Sequence: Synthetic oligonucleotide
ucguggaagaugaccuugc

SEQ ID NO: 1089386 - RNA, 19 nt, Artificial Sequence
  Description of Artificial Sequence: Synthetic oligonucleotide
ucucuggcuaugccgauaa

SEQ ID NO: 1089387 - RNA, 19 nt, Artificial Sequence
  Description of Artificial Sequence: Synthetic oligonucleotide
ggaacugccagaaugugug

SEQ ID NO: 1089388 - RNA, 19 nt, Artificial Sequence
  Description of Artificial Sequence: Synthetic oligonucleotide
uucggaggcuuaaacucug

SEQ ID NO: 1089389 - RNA, 19 nt, Artificial Sequence
  Description of Artificial Sequence: Synthetic oligonucleotide
cugaagggaaacaaccuga

SEQ ID NO: 1089390 - RNA, 19 nt, Artificial Sequence
  Description of Artificial Sequence: Synthetic oligonucleotide
aacuuggcgaggcgcagca

SEQ ID NO: 1089391 - RNA, 19 nt, Artificial Sequence
  Description of Artificial Sequence: Synthetic oligonucleotide
uaguagguccccgagccag

SEQ ID NO: 1089392 - RNA, 19 nt, Artificial Sequence
  Description of Artificial Sequence: Synthetic oligonucleotide
auguccgggagccccauag

SEQ ID NO: 1089393 - RNA, 19 nt, Artificial Sequence
  Description of Artificial Sequence: Synthetic oligonucleotide
ucgaacuuggcgaggcgca

SEQ ID NO: 1089394 - RNA, 19 nt, Artificial Sequence
  Description of Artificial Sequence: Synthetic oligonucleotide
acuguaacaagaacaucug

SEQ ID NO: 1089395 - RNA, 19 nt, Artificial Sequence
  Description of Artificial Sequence: Synthetic oligonucleotide
aggguccccaacucuaguc

SEQ ID NO: 1089396 - RNA, 19 nt, Artificial Sequence
  Description of Artificial Sequence: Synthetic oligonucleotide
ucgugcgccucgaacuugg

SEQ ID NO: 1089397 - RNA, 19 nt, Artificial Sequence
  Description of Artificial Sequence: Synthetic oligonucleotide
aaggcgcacaccgccagcg

SEQ ID NO: 1089398 - RNA, 19 nt, Artificial Sequence
  Description of Artificial Sequence: Synthetic oligonucleotide
guucccaugguagaucuug

SEQ ID NO: 1089399 - RNA, 19 nt, Artificial Sequence
  Description of Artificial Sequence: Synthetic oligonucleotide
cacaauggggaagagcuug

SEQ ID NO: 1089400 - RNA, 19 nt, Artificial Sequence
  Description of Artificial Sequence: Synthetic oligonucleotide
uacuccacuguugaagcca

SEQ ID NO: 1089401 - RNA, 19 nt, Artificial Sequence
  Description of Artificial Sequence: Synthetic oligonucleotide
cauggcaaccgagaggaag

SEQ ID NO: 1089402 - RNA, 19 nt, Artificial Sequence
  Description of Artificial Sequence: Synthetic oligonucleotide
gugcacaacugccuguucc

SEQ ID NO: 1089403 - RNA, 19 nt, Artificial Sequence
  Description of Artificial Sequence: Synthetic oligonucleotide
ggugaacaucaucagcagg

SEQ ID NO: 1089404 - RNA, 19 nt, Artificial Sequence
  Description of Artificial Sequence: Synthetic oligonucleotide
ggaggcuuaaacucugggc

SEQ ID NO: 1089405 - RNA, 19 nt, Artificial Sequence
  Description of Artificial Sequence: Synthetic oligonucleotide
aguagaaggcgcacaccgc

SEQ ID NO: 1089406 - RNA, 19 nt, Artificial Sequence
  Description of Artificial Sequence: Synthetic oligonucleotide
ucgcucacgaaguggaggu

SEQ ID NO: 1089407 - RNA, 19 nt, Artificial Sequence
  Description of Artificial Sequence: Synthetic oligonucleotide
aacgcgggcggcgugggcg

SEQ ID NO: 1089408 - RNA, 19 nt, Artificial Sequence
  Description of Artificial Sequence: Synthetic oligonucleotide
ucuggugcauggcaaccga

SEQ ID NO: 1089409 - RNA, 19 nt, Artificial Sequence
  Description of Artificial Sequence: Synthetic oligonucleotide
aacucugggcuacuuguua

SEQ ID NO: 1089410 - RNA, 19 nt, Artificial Sequence
  Description of Artificial Sequence: Synthetic oligonucleotide
cacgacuuguucuucucac

SEQ ID NO: 1089411 - RNA, 19 nt, Artificial Sequence
  Description of Artificial Sequence: Synthetic oligonucleotide
cauccuugcagagucacuc

SEQ ID NO: 1089412 - RNA, 19 nt, Artificial Sequence
  Description of Artificial Sequence: Synthetic oligonucleotide
guaaagcggggacuggcgc

SEQ ID NO: 1089413 - RNA, 19 nt, Artificial Sequence
  Description of Artificial Sequence: Synthetic oligonucleotide
ggaagugguacuugucugc

SEQ ID NO: 1089414 - RNA, 19 nt, Artificial Sequence
  Description of Artificial Sequence: Synthetic oligonucleotide
cuaguccucugggauaggg

SEQ ID NO: 1089415 - RNA, 19 nt, Artificial Sequence
  Description of Artificial Sequence: Synthetic oligonucleotide
ucggaggcuuaaacucugg

SEQ ID NO: 1089416 - RNA, 19 nt, Artificial Sequence
  Description of Artificial Sequence: Synthetic oligonucleotide
cacagcaccgcucccgcgg

SEQ ID NO: 1089417 - RNA, 19 nt, Artificial Sequence
  Description of Artificial Sequence: Synthetic oligonucleotide
uggcuaugccgauaacagc

SEQ ID NO: 1089418 - RNA, 19 nt, Artificial Sequence
  Description of Artificial Sequence: Synthetic oligonucleotide
gaagagcuugucugucagc

SEQ ID NO: 1089419 - RNA, 19 nt, Artificial Sequence
  Description of Artificial Sequence: Synthetic oligonucleotide
gaaugugugccuguacaca

SEQ ID NO: 1089420 - RNA, 19 nt, Artificial Sequence
  Description of Artificial Sequence: Synthetic oligonucleotide
uggauggccacuggacagg

SEQ ID NO: 1089421 - RNA, 19 nt, Artificial Sequence
  Description of Artificial Sequence: Synthetic oligonucleotide
ugggaaagauugugggacu

SEQ ID NO: 1089422 - RNA, 19 nt, Artificial Sequence
  Description of Artificial Sequence: Synthetic oligonucleotide
ggugcauggcaaccgagag

SEQ ID NO: 1089423 - RNA, 19 nt, Artificial Sequence
  Description of Artificial Sequence: Synthetic oligonucleotide
agauugugggacuguggca

SEQ ID NO: 1089424 - RNA, 19 nt, Artificial Sequence
  Description of Artificial Sequence: Synthetic oligonucleotide
cuaugccgauaacagcacc

SEQ ID NO: 1089425 - RNA, 19 nt, Artificial Sequence
  Description of Artificial Sequence: Synthetic oligonucleotide
agucgcuguaguagguccc

SEQ ID NO: 1089426 - RNA, 19 nt, Artificial Sequence
  Description of Artificial Sequence: Synthetic oligonucleotide
aagaucuggugcauggcaa

SEQ ID NO: 1089427 - RNA, 19 nt, Artificial Sequence
  Description of Artificial Sequence: Synthetic oligonucleotide
uccccaacucuagucuugg

SEQ ID NO: 1089428 - RNA, 19 nt, Artificial Sequence
  Description of Artificial Sequence: Synthetic oligonucleotide
agcagcgcgcaguagugug

SEQ ID NO: 1089429 - RNA, 19 nt, Artificial Sequence
  Description of Artificial Sequence: Synthetic oligonucleotide
uagaaggcgcacaccgcca

SEQ ID NO: 1089430 - RNA, 19 nt, Artificial Sequence
  Description of Artificial Sequence: Synthetic oligonucleotide
ccuucggaggcuuaaacuc

SEQ ID NO: 1089431 - RNA, 19 nt, Artificial Sequence
  Description of Artificial Sequence: Synthetic oligonucleotide
cagcugaaugauccgcagg

SEQ ID NO: 1089432 - RNA, 19 nt, Artificial Sequence
  Description of Artificial Sequence: Synthetic oligonucleotide
caagaucuggugcauggca

SEQ ID NO: 1089433 - RNA, 19 nt, Artificial Sequence
  Description of Artificial Sequence: Synthetic oligonucleotide
cccaacucuagucuugggg

SEQ ID NO: 1089434 - RNA, 19 nt, Artificial Sequence
  Description of Artificial Sequence: Synthetic oligonucleotide
cuguaaagcggggacuggc

SEQ ID NO: 1089435 - RNA, 19 nt, Artificial Sequence
  Description of Artificial Sequence: Synthetic oligonucleotide
ggcuaugccgauaacagca

SEQ ID NO: 1089436 - RNA, 19 nt, Artificial Sequence
  Description of Artificial Sequence: Synthetic oligonucleotide
uggucuagcaaagccaguu

SEQ ID NO: 1089437 - RNA, 19 nt, Artificial Sequence
  Description of Artificial Sequence: Synthetic oligonucleotide
cucgaacuuggcgaggcgc

SEQ ID NO: 1089438 - RNA, 19 nt, Artificial Sequence
  Description of Artificial Sequence: Synthetic oligonucleotide
uagugugagcgcaccgcgc

SEQ ID NO: 1089439 - RNA, 19 nt, Artificial Sequence
  Description of Artificial Sequence: Synthetic oligonucleotide
cuagguucagcagcauuac

SEQ ID NO: 1089440 - RNA, 19 nt, Artificial Sequence
  Description of Artificial Sequence: Synthetic oligonucleotide
acgacuuguucuucucaca

SEQ ID NO: 1089441 - RNA, 19 nt, Artificial Sequence
  Description of Artificial Sequence: Synthetic oligonucleotide
cugacucacuggcucagug

SEQ ID NO: 1089442 - RNA, 19 nt, Artificial Sequence
  Description of Artificial Sequence: Synthetic oligonucleotide
auggcaaccgagaggaaga

SEQ ID NO: 1089443 - RNA, 19 nt, Artificial Sequence
  Description of Artificial Sequence: Synthetic oligonucleotide
gauugugggacuguggcau

SEQ ID NO: 1089444 - RNA, 19 nt, Artificial Sequence
  Description of Artificial Sequence: Synthetic oligonucleotide
gcucacugggacuacagca

SEQ ID NO: 1089445 - RNA, 19 nt, Artificial Sequence
  Description of Artificial Sequence: Synthetic oligonucleotide
ucccaugguagaucuugac

SEQ ID NO: 1089446 - RNA, 19 nt, Artificial Sequence
  Description of Artificial Sequence: Synthetic oligonucleotide
ugcucggccuuggugaaca

SEQ ID NO: 1089447 - RNA, 19 nt, Artificial Sequence
  Description of Artificial Sequence: Synthetic oligonucleotide
ugcaagcugcuguacccgu

SEQ ID NO: 1089448 - RNA, 19 nt, Artificial Sequence
  Description of Artificial Sequence: Synthetic oligonucleotide
caguagugugagcgcaccg

SEQ ID NO: 1089449 - RNA, 19 nt, Artificial Sequence
  Description of Artificial Sequence: Synthetic oligonucleotide
guucuuguaucuucagcua

SEQ ID NO: 1089450 - RNA, 19 nt, Artificial Sequence
  Description of Artificial Sequence: Synthetic oligonucleotide
guaguagaaggcgcacacc

SEQ ID NO: 1089451 - RNA, 19 nt, Artificial Sequence
  Description of Artificial Sequence: Synthetic oligonucleotide
ucucugauguuggucuuau

SEQ ID NO: 1089452 - RNA, 19 nt, Artificial Sequence
  Description of Artificial Sequence: Synthetic oligonucleotide
cuggugcauggcaaccgag

SEQ ID NO: 1089453 - RNA, 19 nt, Artificial Sequence
  Description of Artificial Sequence: Synthetic oligonucleotide
auggcccgagcgcacgcgg

SEQ ID NO: 1089454 - RNA, 19 nt, Artificial Sequence
  Description of Artificial Sequence: Synthetic oligonucleotide
aagugcaauccagcacaug

SEQ ID NO: 1089455 - RNA, 19 nt, Artificial Sequence
  Description of Artificial Sequence: Synthetic oligonucleotide
aggcuuaaacucugggcua

SEQ ID NO: 1089456 - RNA, 19 nt, Artificial Sequence
  Description of Artificial Sequence: Synthetic oligonucleotide
ucacagcaccgcucccgcg

SEQ ID NO: 1089457 - RNA, 19 nt, Artificial Sequence
  Description of Artificial Sequence: Synthetic oligonucleotide
accggcaccgccgcgccgc

SEQ ID NO: 1089458 - RNA, 19 nt, Artificial Sequence
  Description of Artificial Sequence: Synthetic oligonucleotide
agcaccgcucccgcggccc

SEQ ID NO: 1089459 - RNA, 19 nt, Artificial Sequence
  Description of Artificial Sequence: Synthetic oligonucleotide
gcgcgcaguagugugagcg

SEQ ID NO: 1089460 - RNA, 19 nt, Artificial Sequence
  Description of Artificial Sequence: Synthetic oligonucleotide
agauggagucgcuguagua

SEQ ID NO: 1089461 - RNA, 19 nt, Artificial Sequence
  Description of Artificial Sequence: Synthetic oligonucleotide
gauagggguguugcaguuc

SEQ ID NO: 1089462 - RNA, 19 nt, Artificial Sequence
  Description of Artificial Sequence: Synthetic oligonucleotide
gaacuuggcgaggcgcagc

SEQ ID NO: 1089463 - RNA, 19 nt, Artificial Sequence
  Description of Artificial Sequence: Synthetic oligonucleotide
ccuguuccaagugcaaucc

SEQ ID NO: 1089464 - RNA, 19 nt, Artificial Sequence
  Description of Artificial Sequence: Synthetic oligonucleotide
gccgauaacagcaccuggc

SEQ ID NO: 1089465 - RNA, 19 nt, Artificial Sequence
  Description of Artificial Sequence: Synthetic oligonucleotide
gacuacagcagcacgacuu

SEQ ID NO: 1089466 - RNA, 19 nt, Artificial Sequence
  Description of Artificial Sequence: Synthetic oligonucleotide
agccugccuaucuaaguua

SEQ ID NO: 1089467 - RNA, 19 nt, Artificial Sequence
  Description of Artificial Sequence: Synthetic oligonucleotide
aggcauagugggugagcug

SEQ ID NO: 1089468 - RNA, 19 nt, Artificial Sequence
  Description of Artificial Sequence: Synthetic oligonucleotide
cugucagcacagcaacauc

SEQ ID NO: 1089469 - RNA, 19 nt, Artificial Sequence
  Description of Artificial Sequence: Synthetic oligonucleotide
ucccaagggcauccuugca

SEQ ID NO: 1089470 - RNA, 19 nt, Artificial Sequence
  Description of Artificial Sequence: Synthetic oligonucleotide
agguaguagaaggcgcaca

SEQ ID NO: 1089471 - RNA, 19 nt, Artificial Sequence
  Description of Artificial Sequence: Synthetic oligonucleotide
uugcagagucacuccuccu

SEQ ID NO: 1089472 - RNA, 19 nt, Artificial Sequence
  Description of Artificial Sequence: Synthetic oligonucleotide
aggcggaggguccccaacu

SEQ ID NO: 1089473 - RNA, 19 nt, Artificial Sequence
  Description of Artificial Sequence: Synthetic oligonucleotide
aaacucugggcuacuuguu

SEQ ID NO: 1089474 - RNA, 19 nt, Artificial Sequence
  Description of Artificial Sequence: Synthetic oligonucleotide
gggugcuccaugccgauca

SEQ ID NO: 1089475 - RNA, 19 nt, Artificial Sequence
  Description of Artificial Sequence: Synthetic oligonucleotide
caacugccuguuccaagug

SEQ ID NO: 1089476 - RNA, 19 nt, Artificial Sequence
  Description of Artificial Sequence: Synthetic oligonucleotide
ucgcuguaguagguccccg

SEQ ID NO: 1089477 - RNA, 19 nt, Artificial Sequence
  Description of Artificial Sequence: Synthetic oligonucleotide
ccgaucauggugaagaagu

SEQ ID NO: 1089478 - RNA, 19 nt, Artificial Sequence
  Description of Artificial Sequence: Synthetic oligonucleotide
gcaauccagcacauggaag

SEQ ID NO: 1089479 - RNA, 19 nt, Artificial Sequence
  Description of Artificial Sequence: Synthetic oligonucleotide
uagggguguugcaguuccc

SEQ ID NO: 1089480 - RNA, 19 nt, Artificial Sequence
  Description of Artificial Sequence: Synthetic oligonucleotide
ggcuguaaagcggggacug

SEQ ID NO: 1089481 - RNA, 19 nt, Artificial Sequence
  Description of Artificial Sequence: Synthetic oligonucleotide
cuucggaggcuuaaacucu

SEQ ID NO: 1089482 - RNA, 19 nt, Artificial Sequence
  Description of Artificial Sequence: Synthetic oligonucleotide
gccuaucuaaguuaacacu

SEQ ID NO: 1089483 - RNA, 19 nt, Artificial Sequence
  Description of Artificial Sequence: Synthetic oligonucleotide
gccagcucgaacgcgggcg

SEQ ID NO: 1089484 - RNA, 19 nt, Artificial Sequence
  Description of Artificial Sequence: Synthetic oligonucleotide
ugucugcaagcugcuguac

SEQ ID NO: 1089485 - RNA, 19 nt, Artificial Sequence
  Description of Artificial Sequence: Synthetic oligonucleotide
cugaggacaugagcuggac

SEQ ID NO: 1089486 - RNA, 19 nt, Artificial Sequence
  Description of Artificial Sequence: Synthetic oligonucleotide
gcgcauggccucuagguuc

SEQ ID NO: 1089487 - RNA, 19 nt, Artificial Sequence
  Description of Artificial Sequence: Synthetic oligonucleotide
caacaucguggaagaugac

SEQ ID NO: 1089488 - RNA, 19 nt, Artificial Sequence
  Description of Artificial Sequence: Synthetic oligonucleotide
ggcuuaaacucugggcuac

SEQ ID NO: 1089489 - RNA, 19 nt, Artificial Sequence
  Description of Artificial Sequence: Synthetic oligonucleotide
cagcagugcucagcuaagc

SEQ ID NO: 1089490 - RNA, 19 nt, Artificial Sequence
  Description of Artificial Sequence: Synthetic oligonucleotide
cuacauccuggaagacauc

SEQ ID NO: 1089491 - RNA, 19 nt, Artificial Sequence
  Description of Artificial Sequence: Synthetic oligonucleotide
caaugcccugaagggaaac

SEQ ID NO: 1089492 - RNA, 19 nt, Artificial Sequence
  Description of Artificial Sequence: Synthetic oligonucleotide
caugccgaucauggugaag

SEQ ID NO: 1089493 - RNA, 19 nt, Artificial Sequence
  Description of Artificial Sequence: Synthetic oligonucleotide
agcgccgcguugugcucgg

SEQ ID NO: 1089494 - RNA, 19 nt, Artificial Sequence
  Description of Artificial Sequence: Synthetic oligonucleotide
gggcuacuuguuaaagccc

SEQ ID NO: 1089495 - RNA, 19 nt, Artificial Sequence
  Description of Artificial Sequence: Synthetic oligonucleotide
guaguagguccccgagcca

SEQ ID NO: 1089496 - RNA, 19 nt, Artificial Sequence
  Description of Artificial Sequence: Synthetic oligonucleotide
agcuggguccuaguccucu

SEQ ID NO: 1089497 - RNA, 19 nt, Artificial Sequence
  Description of Artificial Sequence: Synthetic oligonucleotide
cauggcggaacugccagaa

SEQ ID NO: 1089498 - RNA, 19 nt, Artificial Sequence
  Description of Artificial Sequence: Synthetic oligonucleotide
cagcgcgcaguagugugag

SEQ ID NO: 1089499 - RNA, 19 nt, Artificial Sequence
  Description of Artificial Sequence: Synthetic oligonucleotide
gugugagcgcaccgcgccc

SEQ ID NO: 1089500 - RNA, 19 nt, Artificial Sequence
  Description of Artificial Sequence: Synthetic oligonucleotide
cccaugguagaucuugaca

SEQ ID NO: 1089501 - RNA, 19 nt, Artificial Sequence
  Description of Artificial Sequence: Synthetic oligonucleotide
gggacuacagcagcacgac

SEQ ID NO: 1089502 - RNA, 19 nt, Artificial Sequence
  Description of Artificial Sequence: Synthetic oligonucleotide
caauggggaagagcuuguc

SEQ ID NO: 1089503 - RNA, 19 nt, Artificial Sequence
  Description of Artificial Sequence: Synthetic oligonucleotide
uggcaaccgagaggaagaa

SEQ ID NO: 1089504 - RNA, 19 nt, Artificial Sequence
  Description of Artificial Sequence: Synthetic oligonucleotide
ccaagggcauccuugcaga

SEQ ID NO: 1089505 - RNA, 19 nt, Artificial Sequence
  Description of Artificial Sequence: Synthetic oligonucleotide
gccuuggcgcccgaggccg

SEQ ID NO: 1089506 - RNA, 19 nt, Artificial Sequence
  Description of Artificial Sequence: Synthetic oligonucleotide
gccgaucauggugaagaag

SEQ ID NO: 1089507 - RNA, 19 nt, Artificial Sequence
  Description of Artificial Sequence: Synthetic oligonucleotide
cggaagugguacuugucug

SEQ ID NO: 1089508 - RNA, 19 nt, Artificial Sequence
  Description of Artificial Sequence: Synthetic oligonucleotide
gggacuggcgcauggccuc

SEQ ID NO: 1089509 - RNA, 19 nt, Artificial Sequence
  Description of Artificial Sequence: Synthetic oligonucleotide
gcucacgaaguggagguuc

SEQ ID NO: 1089510 - RNA, 19 nt, Artificial Sequence
  Description of Artificial Sequence: Synthetic oligonucleotide
gggcucacucacagcaccg

SEQ ID NO: 1089511 - RNA, 19 nt, Artificial Sequence
  Description of Artificial Sequence: Synthetic oligonucleotide
cucagugcucacugggacu

SEQ ID NO: 1089512 - RNA, 19 nt, Artificial Sequence
  Description of Artificial Sequence: Synthetic oligonucleotide
caggcggaggguccccaac

SEQ ID NO: 1089513 - RNA, 19 nt, Artificial Sequence
  Description of Artificial Sequence: Synthetic oligonucleotide
ccgauaacagcaccuggca

SEQ ID NO: 1089514 - RNA, 19 nt, Artificial Sequence
  Description of Artificial Sequence: Synthetic oligonucleotide
gcuacuuguuaaagcccug

SEQ ID NO: 1089515 - RNA, 19 nt, Artificial Sequence
  Description of Artificial Sequence: Synthetic oligonucleotide
gguccuaguccucugggau

SEQ ID NO: 1089516 - RNA, 19 nt, Artificial Sequence
  Description of Artificial Sequence: Synthetic oligonucleotide
uguacccgugcaggcucca

SEQ ID NO: 1089517 - RNA, 19 nt, Artificial Sequence
  Description of Artificial Sequence: Synthetic oligonucleotide
cagcuaagcuucuuuggau

SEQ ID NO: 1089518 - RNA, 19 nt, Artificial Sequence
  Description of Artificial Sequence: Synthetic oligonucleotide
uuggcgcccgaggccggcg

SEQ ID NO: 1089519 - RNA, 19 nt, Artificial Sequence
  Description of Artificial Sequence: Synthetic oligonucleotide
gcacgacuuguucuucuca

SEQ ID NO: 1089520 - RNA, 19 nt, Artificial Sequence
  Description of Artificial Sequence: Synthetic oligonucleotide
ggcaaccgagaggaagaag

SEQ ID NO: 1089521 - RNA, 19 nt, Artificial Sequence
  Description of Artificial Sequence: Synthetic oligonucleotide
ggacuguaacaagaacauc

SEQ ID NO: 1089522 - RNA, 19 nt, Artificial Sequence
  Description of Artificial Sequence: Synthetic oligonucleotide
ggaaacaaccugagcucca

SEQ ID NO: 1089523 - RNA, 19 nt, Artificial Sequence
  Description of Artificial Sequence: Synthetic oligonucleotide
gucugucagcacagcaaca

SEQ ID NO: 1089524 - RNA, 19 nt, Artificial Sequence
  Description of Artificial Sequence: Synthetic oligonucleotide
auggcggaacugccagaau

SEQ ID NO: 1089525 - RNA, 19 nt, Artificial Sequence
  Description of Artificial Sequence: Synthetic oligonucleotide
uggaucccaagggcauccu

SEQ ID NO: 1089526 - RNA, 19 nt, Artificial Sequence
  Description of Artificial Sequence: Synthetic oligonucleotide
ggagucgcuguaguagguc

SEQ ID NO: 1089527 - RNA, 19 nt, Artificial Sequence
  Description of Artificial Sequence: Synthetic oligonucleotide
gcucagggugcuccaugcc

SEQ ID NO: 1089528 - RNA, 19 nt, Artificial Sequence
  Description of Artificial Sequence: Synthetic oligonucleotide
cucuggcuaugccgauaac

SEQ ID NO: 1089529 - RNA, 19 nt, Artificial Sequence
  Description of Artificial Sequence: Synthetic oligonucleotide
acuuggcgaggcgcagcag

SEQ ID NO: 1089530 - RNA, 19 nt, Artificial Sequence
  Description of Artificial Sequence: Synthetic oligonucleotide
cgaggcgcagcagcgagcg

SEQ ID NO: 1089531 - RNA, 19 nt, Artificial Sequence
  Description of Artificial Sequence: Synthetic oligonucleotide
gaacgcgggcggcgugggc

SEQ ID NO: 1089532 - RNA, 19 nt, Artificial Sequence
  Description of Artificial Sequence: Synthetic oligonucleotide
gaggguccccaacucuagu

SEQ ID NO: 1089533 - RNA, 19 nt, Artificial Sequence
  Description of Artificial Sequence: Synthetic oligonucleotide
ccugccuaucuaaguuaac

SEQ ID NO: 1089534 - RNA, 19 nt, Artificial Sequence
  Description of Artificial Sequence: Synthetic oligonucleotide
ggguccccaacucuagucu

SEQ ID NO: 1089535 - RNA, 19 nt, Artificial Sequence
  Description of Artificial Sequence: Synthetic oligonucleotide
gagcgcacgcggccccggc

SEQ ID NO: 1089536 - RNA, 19 nt, Artificial Sequence
  Description of Artificial Sequence: Synthetic oligonucleotide
cucgaacgcgggcggcgug

SEQ ID NO: 1089537 - RNA, 19 nt, Artificial Sequence
  Description of Artificial Sequence: Synthetic oligonucleotide
agacaucgcuguagccaug

SEQ ID NO: 1089538 - RNA, 19 nt, Artificial Sequence
  Description of Artificial Sequence: Synthetic oligonucleotide
uggcgaggcgcagcagcga

SEQ ID NO: 1089539 - RNA, 19 nt, Artificial Sequence
  Description of Artificial Sequence: Synthetic oligonucleotide
ccucgaacuuggcgaggcg

SEQ ID NO: 1089540 - RNA, 19 nt, Artificial Sequence
  Description of Artificial Sequence: Synthetic oligonucleotide
cagcuacauccuggaagac

SEQ ID NO: 1089541 - RNA, 19 nt, Artificial Sequence
  Description of Artificial Sequence: Synthetic oligonucleotide
gcggaacugccagaaugug

SEQ ID NO: 1089542 - RNA, 19 nt, Artificial Sequence
  Description of Artificial Sequence: Synthetic oligonucleotide
gcaccuggcaggaaguugu

SEQ ID NO: 1089543 - RNA, 19 nt, Artificial Sequence
  Description of Artificial Sequence: Synthetic oligonucleotide
ggcggaggguccccaacuc

SEQ ID NO: 1089544 - RNA, 19 nt, Artificial Sequence
  Description of Artificial Sequence: Synthetic oligonucleotide
gcauuacuccacuguugaa

SEQ ID NO: 1089545 - RNA, 19 nt, Artificial Sequence
  Description of Artificial Sequence: Synthetic oligonucleotide
caagugcaauccagcacau

SEQ ID NO: 1089546 - RNA, 19 nt, Artificial Sequence
  Description of Artificial Sequence: Synthetic oligonucleotide
cgcgcaguagugugagcgc

SEQ ID NO: 1089547 - RNA, 19 nt, Artificial Sequence
  Description of Artificial Sequence: Synthetic oligonucleotide
gcgcgccauggcccgagcg

SEQ ID NO: 1089548 - RNA, 19 nt, Artificial Sequence
  Description of Artificial Sequence: Synthetic oligonucleotide
gccugccuaucuaaguuaa

SEQ ID NO: 1089549 - RNA, 19 nt, Artificial Sequence
  Description of Artificial Sequence: Synthetic oligonucleotide
ccccaacucuagucuuggg

SEQ ID NO: 1089550 - RNA, 19 nt, Artificial Sequence
  Description of Artificial Sequence: Synthetic oligonucleotide
cccgagcccagguaguaga

SEQ ID NO: 1089551 - RNA, 19 nt, Artificial Sequence
  Description of Artificial Sequence: Synthetic oligonucleotide
ggucucccggcccgagccc

SEQ ID NO: 1089552 - RNA, 19 nt, Artificial Sequence
  Description of Artificial Sequence: Synthetic oligonucleotide
cucucugauguuggucuua

SEQ ID NO: 1089553 - RNA, 19 nt, Artificial Sequence
  Description of Artificial Sequence: Synthetic oligonucleotide
aggcgcgccauggcccgag

SEQ ID NO: 1089554 - RNA, 19 nt, Artificial Sequence
  Description of Artificial Sequence: Synthetic oligonucleotide
ggcucggaggagguccaug

SEQ ID NO: 1089555 - RNA, 19 nt, Artificial Sequence
  Description of Artificial Sequence: Synthetic oligonucleotide
gcgcaguagugugagcgca

SEQ ID NO: 1089556 - RNA, 19 nt, Artificial Sequence
  Description of Artificial Sequence: Synthetic oligonucleotide
cauagugggugagcugggu

SEQ ID NO: 1089557 - RNA, 19 nt, Artificial Sequence
  Description of Artificial Sequence: Synthetic oligonucleotide
gucucccggcccgagccca

SEQ ID NO: 1089558 - RNA, 19 nt, Artificial Sequence
  Description of Artificial Sequence: Synthetic oligonucleotide
gcgcuggagaaggucuccc

SEQ ID NO: 1089559 - RNA, 19 nt, Artificial Sequence
  Description of Artificial Sequence: Synthetic oligonucleotide
cagcagccgggcucacuca

SEQ ID NO: 1089560 - RNA, 19 nt, Artificial Sequence
  Description of Artificial Sequence: Synthetic oligonucleotide
ccaugcgccggagccggcg

SEQ ID NO: 1089561 - RNA, 19 nt, Artificial Sequence
  Description of Artificial Sequence: Synthetic oligonucleotide
aguucccaugguagaucuu

SEQ ID NO: 1089562 - RNA, 19 nt, Artificial Sequence
  Description of Artificial Sequence: Synthetic oligonucleotide
cucuagucuugggguucuc

SEQ ID NO: 1089563 - RNA, 19 nt, Artificial Sequence
  Description of Artificial Sequence: Synthetic oligonucleotide
ggacuacagcagcacgacu

SEQ ID NO: 1089564 - RNA, 19 nt, Artificial Sequence
  Description of Artificial Sequence: Synthetic oligonucleotide
cucucuggcuaugccgaua

SEQ ID NO: 1089565 - RNA, 19 nt, Artificial Sequence
  Description of Artificial Sequence: Synthetic oligonucleotide
caccggcaccgccgcgccg

SEQ ID NO: 1089566 - RNA, 19 nt, Artificial Sequence
  Description of Artificial Sequence: Synthetic oligonucleotide
gcguugugcucggccuugg

SEQ ID NO: 1089567 - RNA, 19 nt, Artificial Sequence
  Description of Artificial Sequence: Synthetic oligonucleotide
gccgcguugugcucggccu

SEQ ID NO: 1089568 - RNA, 19 nt, Artificial Sequence
  Description of Artificial Sequence: Synthetic oligonucleotide
agggagccccucaggcgga

SEQ ID NO: 1089569 - RNA, 19 nt, Artificial Sequence
  Description of Artificial Sequence: Synthetic oligonucleotide
gguccccaacucuagucuu

SEQ ID NO: 1089570 - RNA, 19 nt, Artificial Sequence
  Description of Artificial Sequence: Synthetic oligonucleotide
ggcgcauggccucuagguu

SEQ ID NO: 1089571 - RNA, 19 nt, Artificial Sequence
  Description of Artificial Sequence: Synthetic oligonucleotide
gccaccucgcggcuggccu

SEQ ID NO: 1089572 - RNA, 19 nt, Artificial Sequence
  Description of Artificial Sequence: Synthetic oligonucleotide
ggggacuggcgcauggccu

SEQ ID NO: 1089573 - RNA, 19 nt, Artificial Sequence
  Description of Artificial Sequence: Synthetic oligonucleotide
ccuuggcgcccgaggccgg

SEQ ID NO: 1089574 - RNA, 19 nt, Artificial Sequence
  Description of Artificial Sequence: Synthetic oligonucleotide
cccggcgcgggccuccuuc

SEQ ID NO: 1089575 - RNA, 19 nt, Artificial Sequence
  Description of Artificial Sequence: Synthetic oligonucleotide
gcggaggguccccaacucu

SEQ ID NO: 1089576 - RNA, 19 nt, Artificial Sequence
  Description of Artificial Sequence: Synthetic oligonucleotide
cgccgcguugugcucggcc

SEQ ID NO: 1089577 - RNA, 19 nt, Artificial Sequence
  Description of Artificial Sequence: Synthetic oligonucleotide
ccaccucgcggcuggccuc

SEQ ID NO: 1089578 - RNA, 19 nt, Artificial Sequence
  Description of Artificial Sequence: Synthetic oligonucleotide
cgcuguaguagguccccga

SEQ ID NO: 1089579 - RNA, 19 nt, Artificial Sequence
  Description of Artificial Sequence: Synthetic oligonucleotide
gggagccccucaggcggag

SEQ ID NO: 1089580 - RNA, 19 nt, Artificial Sequence
  Description of Artificial Sequence: Synthetic oligonucleotide
ggaucccaagggcauccuu

SEQ ID NO: 1089581 - RNA, 19 nt, Artificial Sequence
  Description of Artificial Sequence: Synthetic oligonucleotide
cgugcgccucgaacuuggc

SEQ ID NO: 1089582 - RNA, 19 nt, Artificial Sequence
  Description of Artificial Sequence: Synthetic oligonucleotide
gggcauccuugcagaguca

SEQ ID NO: 1089583 - RNA, 19 nt, Artificial Sequence
  Description of Artificial Sequence: Synthetic oligonucleotide
cgcacgcggccccggcucg

SEQ ID NO: 1089584 - RNA, 19 nt, Artificial Sequence
  Description of Artificial Sequence: Synthetic oligonucleotide
cgcguugugcucggccuug

SEQ ID NO: 1089585 - RNA, 19 nt, Artificial Sequence
  Description of Artificial Sequence: Synthetic oligonucleotide
cgaacgcgggcggcguggg

SEQ ID NO: 1089586 - RNA, 19 nt, Artificial Sequence
  Description of Artificial Sequence: Synthetic oligonucleotide
gcgggcggcaggagcuccc

SEQ ID NO: 1089587 - RNA, 19 nt, Artificial Sequence
  Description of Artificial Sequence: Synthetic oligonucleotide
ccggcucggaggaggucca

SEQ ID NO: 1089588 - RNA, 19 nt, Artificial Sequence
  Description of Artificial Sequence: Synthetic oligonucleotide
ccaugccgaucauggugaa

SEQ ID NO: 1089589 - RNA, 19 nt, Artificial Sequence
  Description of Artificial Sequence: Synthetic oligonucleotide
gcacgcggccccggcucgg

SEQ ID NO: 1089590 - RNA, 19 nt, Artificial Sequence
  Description of Artificial Sequence: Synthetic oligonucleotide
gcgugggcgcggcggcccc

SEQ ID NO: 1089591 - RNA, 19 nt, Artificial Sequence
  Description of Artificial Sequence: Synthetic oligonucleotide
ccgagcgcacgcggccccg

SEQ ID NO: 1089592 - RNA, 19 nt, Artificial Sequence
  Description of Artificial Sequence: Synthetic oligonucleotide
cgcagcgccacucgggccu

SEQ ID NO: 1089593 - RNA, 19 nt, Artificial Sequence
  Description of Artificial Sequence: Synthetic oligonucleotide
gcgggcggcgugggcgcgg

SEQ ID NO: 1089594 - RNA, 19 nt, Artificial Sequence
  Description of Artificial Sequence: Synthetic oligonucleotide
cgggcggcaggagcucccg

SEQ ID NO: 1089595 - RNA, 19 nt, Artificial Sequence
  Description of Artificial Sequence: Synthetic oligonucleotide
gcucgaacgcgggcggcgu

SEQ ID NO: 1089596 - RNA, 19 nt, Artificial Sequence
  Description of Artificial Sequence: Synthetic oligonucleotide
ggacuggcgcauggccucu

SEQ ID NO: 1089597 - RNA, 19 nt, Artificial Sequence
  Description of Artificial Sequence: Synthetic oligonucleotide
ccucgugcgccucgaacuu

SEQ ID NO: 1089598 - RNA, 19 nt, Artificial Sequence
  Description of Artificial Sequence: Synthetic oligonucleotide
cgagcgcacgcggccccgg

SEQ ID NO: 1089599 - RNA, 19 nt, Artificial Sequence
  Description of Artificial Sequence: Synthetic oligonucleotide
ccucgcggcuggccuccuc

SEQ ID NO: 1089600 - RNA, 19 nt, Artificial Sequence
  Description of Artificial Sequence: Synthetic oligonucleotide
caggcgcgccauggcccga

SEQ ID NO: 1089601 - RNA, 19 nt, Artificial Sequence
  Description of Artificial Sequence: Synthetic oligonucleotide
ccccggcucggaggagguc

SEQ ID NO: 1089602 - RNA, 19 nt, Artificial Sequence
  Description of Artificial Sequence: Synthetic oligonucleotide
gcgccgcguugugcucggc

SEQ ID NO: 1089603 - RNA, 19 nt, Artificial Sequence
  Description of Artificial Sequence: Synthetic oligonucleotide
ccgcguugugcucggccuu

SEQ ID NO: 1089604 - RNA, 19 nt, Artificial Sequence
  Description of Artificial Sequence: Synthetic oligonucleotide
cgcucacgaaguggagguu

SEQ ID NO: 1089605 - RNA, 19 nt, Artificial Sequence
  Description of Artificial Sequence: Synthetic oligonucleotide
ccccggcgcgggccuccuu

SEQ ID NO: 1089606 - RNA, 19 nt, Artificial Sequence
  Description of Artificial Sequence: Synthetic oligonucleotide
auucauuuaacuuuccgcc

SEQ ID NO: 1089607 - RNA, 19 nt, Artificial Sequence
  Description of Artificial Sequence: Synthetic oligonucleotide
aaguauucaauuuuauuag

SEQ ID NO: 1089608 - RNA, 19 nt, Artificial Sequence
  Description of Artificial Sequence: Synthetic oligonucleotide
aagaaguauagccaccagc

SEQ ID NO: 1089609 - RNA, 19 nt, Artificial Sequence
  Description of Artificial Sequence: Synthetic oligonucleotide
gucaacuccauacauaggg

SEQ ID NO: 1089610 - RNA, 19 nt, Artificial Sequence
  Description of Artificial Sequence: Synthetic oligonucleotide
ucuuagacuaggaaaaucu

SEQ ID NO: 1089611 - RNA, 19 nt, Artificial Sequence
  Description of Artificial Sequence: Synthetic oligonucleotide
aguauucaauuuuauuagc

SEQ ID NO: 1089612 - RNA, 19 nt, Artificial Sequence
  Description of Artificial Sequence: Synthetic oligonucleotide
uuaugcugagccaagagca

SEQ ID NO: 1089613 - RNA, 19 nt, Artificial Sequence
  Description of Artificial Sequence: Synthetic oligonucleotide
uuaacuuuccgccauaaau

SEQ ID NO: 1089614 - RNA, 19 nt, Artificial Sequence
  Description of Artificial Sequence: Synthetic oligonucleotide
uggaguaccacacucagga

SEQ ID NO: 1089615 - RNA, 19 nt, Artificial Sequence
  Description of Artificial Sequence: Synthetic oligonucleotide
aaugcuucaaucccugucu

SEQ ID NO: 1089616 - RNA, 19 nt, Artificial Sequence
  Description of Artificial Sequence: Synthetic oligonucleotide
uaaugaaaucuguugaccc

SEQ ID NO: 1089617 - RNA, 19 nt, Artificial Sequence
  Description of Artificial Sequence: Synthetic oligonucleotide
uguugacccauuuuaaugc

SEQ ID NO: 1089618 - RNA, 19 nt, Artificial Sequence
  Description of Artificial Sequence: Synthetic oligonucleotide
aguuucuuacugcugaggg

SEQ ID NO: 1089619 - RNA, 19 nt, Artificial Sequence
  Description of Artificial Sequence: Synthetic oligonucleotide
aaacuaagcaaaaucauga

SEQ ID NO: 1089620 - RNA, 19 nt, Artificial Sequence
  Description of Artificial Sequence: Synthetic oligonucleotide
auaaauuaguauuucuugu

SEQ ID NO: 1089621 - RNA, 19 nt, Artificial Sequence
  Description of Artificial Sequence: Synthetic oligonucleotide
aaguagaaaauaaagcucu

SEQ ID NO: 1089622 - RNA, 19 nt, Artificial Sequence
  Description of Artificial Sequence: Synthetic oligonucleotide
aacgucacuggcuucgugg

SEQ ID NO: 1089623 - RNA, 19 nt, Artificial Sequence
  Description of Artificial Sequence: Synthetic oligonucleotide
ucauuauacucucuuagac

SEQ ID NO: 1089624 - RNA, 19 nt, Artificial Sequence
  Description of Artificial Sequence: Synthetic oligonucleotide
uaguauccuauccacaucc

SEQ ID NO: 1089625 - RNA, 19 nt, Artificial Sequence
  Description of Artificial Sequence: Synthetic oligonucleotide
uuagguuugccucacuuug

SEQ ID NO: 1089626 - RNA, 19 nt, Artificial Sequence
  Description of Artificial Sequence: Synthetic oligonucleotide
aacuauguuccucauucag

SEQ ID NO: 1089627 - RNA, 19 nt, Artificial Sequence
  Description of Artificial Sequence: Synthetic oligonucleotide
accauauuagguuugccuc

SEQ ID NO: 1089628 - RNA, 19 nt, Artificial Sequence
  Description of Artificial Sequence: Synthetic oligonucleotide
aaccauauuagguuugccu

SEQ ID NO: 1089629 - RNA, 19 nt, Artificial Sequence
  Description of Artificial Sequence: Synthetic oligonucleotide
ugcuaaugaaaucuguuga

SEQ ID NO: 1089630 - RNA, 19 nt, Artificial Sequence
  Description of Artificial Sequence: Synthetic oligonucleotide
aacuaagcaaaaucaugag

SEQ ID NO: 1089631 - RNA, 19 nt, Artificial Sequence
  Description of Artificial Sequence: Synthetic oligonucleotide
gaugcuauggguaguaucc

SEQ ID NO: 1089632 - RNA, 19 nt, Artificial Sequence
  Description of Artificial Sequence: Synthetic oligonucleotide
ucagacuguaauaaacacc

SEQ ID NO: 1089633 - RNA, 19 nt, Artificial Sequence
  Description of Artificial Sequence: Synthetic oligonucleotide
aacagacucacacaaggcu

SEQ ID NO: 1089634 - RNA, 19 nt, Artificial Sequence
  Description of Artificial Sequence: Synthetic oligonucleotide
uuuguaggaacagucuucg

SEQ ID NO: 1089635 - RNA, 19 nt, Artificial Sequence
  Description of Artificial Sequence: Synthetic oligonucleotide
cagucuacaauuuaugcac

SEQ ID NO: 1089636 - RNA, 19 nt, Artificial Sequence
  Description of Artificial Sequence: Synthetic oligonucleotide
auuauacucucuuagacua

SEQ ID NO: 1089637 - RNA, 19 nt, Artificial Sequence
  Description of Artificial Sequence: Synthetic oligonucleotide
aacuacaucagucuacaau

SEQ ID NO: 1089638 - RNA, 19 nt, Artificial Sequence
  Description of Artificial Sequence: Synthetic oligonucleotide
uucauagagagcuucuuca

SEQ ID NO: 1089639 - RNA, 19 nt, Artificial Sequence
  Description of Artificial Sequence: Synthetic oligonucleotide
aguacaauaaagccacuug

SEQ ID NO: 1089640 - RNA, 19 nt, Artificial Sequence
  Description of Artificial Sequence: Synthetic oligonucleotide
ucagucuacaauuuaugca

SEQ ID NO: 1089641 - RNA, 19 nt, Artificial Sequence
  Description of Artificial Sequence: Synthetic oligonucleotide
cauuaaagcgggcuaaugc

SEQ ID NO: 1089642 - RNA, 19 nt, Artificial Sequence
  Description of Artificial Sequence: Synthetic oligonucleotide
aaauugaagacaauuuccu

SEQ ID NO: 1089643 - RNA, 19 nt, Artificial Sequence
  Description of Artificial Sequence: Synthetic oligonucleotide
uuuaucaugagugggacuc

SEQ ID NO: 1089644 - RNA, 19 nt, Artificial Sequence
  Description of Artificial Sequence: Synthetic oligonucleotide
auuucacuuaaguggugcc

SEQ ID NO: 1089645 - RNA, 19 nt, Artificial Sequence
  Description of Artificial Sequence: Synthetic oligonucleotide
augagugggacucacagcu

SEQ ID NO: 1089646 - RNA, 19 nt, Artificial Sequence
  Description of Artificial Sequence: Synthetic oligonucleotide
aaaucuuauaaaugagaaa

SEQ ID NO: 1089647 - RNA, 19 nt, Artificial Sequence
  Description of Artificial Sequence: Synthetic oligonucleotide
uauuugguggucuuacacc

SEQ ID NO: 1089648 - RNA, 19 nt, Artificial Sequence
  Description of Artificial Sequence: Synthetic oligonucleotide
aauaaacaccugaacacag

SEQ ID NO: 1089649 - RNA, 19 nt, Artificial Sequence
  Description of Artificial Sequence: Synthetic oligonucleotide
ucggacgugguuuaaauac

SEQ ID NO: 1089650 - RNA, 19 nt, Artificial Sequence
  Description of Artificial Sequence: Synthetic oligonucleotide
aguguguccgcacacguuc

SEQ ID NO: 1089651 - RNA, 19 nt, Artificial Sequence
  Description of Artificial Sequence: Synthetic oligonucleotide
agauuugauagacagcccu

SEQ ID NO: 1089652 - RNA, 19 nt, Artificial Sequence
  Description of Artificial Sequence: Synthetic oligonucleotide
auuaguauuucuuguggca

SEQ ID NO: 1089653 - RNA, 19 nt, Artificial Sequence
  Description of Artificial Sequence: Synthetic oligonucleotide
uuauuagccuccuucuuug

SEQ ID NO: 1089654 - RNA, 19 nt, Artificial Sequence
  Description of Artificial Sequence: Synthetic oligonucleotide
ucauaaaaugagcucacau

SEQ ID NO: 1089655 - RNA, 19 nt, Artificial Sequence
  Description of Artificial Sequence: Synthetic oligonucleotide
cucacauuggcagugaaag

SEQ ID NO: 1089656 - RNA, 19 nt, Artificial Sequence
  Description of Artificial Sequence: Synthetic oligonucleotide
ugucguucuacuuccaaug

SEQ ID NO: 1089657 - RNA, 19 nt, Artificial Sequence
  Description of Artificial Sequence: Synthetic oligonucleotide
guaggaacagucuucguug

SEQ ID NO: 1089658 - RNA, 19 nt, Artificial Sequence
  Description of Artificial Sequence: Synthetic oligonucleotide
gaaggguuccgguauuugg

SEQ ID NO: 1089659 - RNA, 19 nt, Artificial Sequence
  Description of Artificial Sequence: Synthetic oligonucleotide
uuggucaaauugaagacaa

SEQ ID NO: 1089660 - RNA, 19 nt, Artificial Sequence
  Description of Artificial Sequence: Synthetic oligonucleotide
uccgccauaaauuaguauu

SEQ ID NO: 1089661 - RNA, 19 nt, Artificial Sequence
  Description of Artificial Sequence: Synthetic oligonucleotide
uauacucucuuagacuagg

SEQ ID NO: 1089662 - RNA, 19 nt, Artificial Sequence
  Description of Artificial Sequence: Synthetic oligonucleotide
acgaacaguaaguccacac

SEQ ID NO: 1089663 - RNA, 19 nt, Artificial Sequence
  Description of Artificial Sequence: Synthetic oligonucleotide
uaauaaacaccugaacaca

SEQ ID NO: 1089664 - RNA, 19 nt, Artificial Sequence
  Description of Artificial Sequence: Synthetic oligonucleotide
acuaagcaaaaucaugagu

SEQ ID NO: 1089665 - RNA, 19 nt, Artificial Sequence
  Description of Artificial Sequence: Synthetic oligonucleotide
uuuuguaggaacagucuuc

SEQ ID NO: 1089666 - RNA, 19 nt, Artificial Sequence
  Description of Artificial Sequence: Synthetic oligonucleotide
uaaagcgggcuaaugcuag

SEQ ID NO: 1089667 - RNA, 19 nt, Artificial Sequence
  Description of Artificial Sequence: Synthetic oligonucleotide
uucagacuguaauaaacac

SEQ ID NO: 1089668 - RNA, 19 nt, Artificial Sequence
  Description of Artificial Sequence: Synthetic oligonucleotide
ucaaccuccuugucaacgg

SEQ ID NO: 1089669 - RNA, 19 nt, Artificial Sequence
  Description of Artificial Sequence: Synthetic oligonucleotide
gcagagauuugauagacag

SEQ ID NO: 1089670 - RNA, 19 nt, Artificial Sequence
  Description of Artificial Sequence: Synthetic oligonucleotide
uuaaguggugccuuuucca

SEQ ID NO: 1089671 - RNA, 19 nt, Artificial Sequence
  Description of Artificial Sequence: Synthetic oligonucleotide
ugcacagagaaauuucacu

SEQ ID NO: 1089672 - RNA, 19 nt, Artificial Sequence
  Description of Artificial Sequence: Synthetic oligonucleotide
gguucuaugcaacagacuc

SEQ ID NO: 1089673 - RNA, 19 nt, Artificial Sequence
  Description of Artificial Sequence: Synthetic oligonucleotide
aucucaucauaaaaugagc

SEQ ID NO: 1089674 - RNA, 19 nt, Artificial Sequence
  Description of Artificial Sequence: Synthetic oligonucleotide
cuaaugaaaucuguugacc

SEQ ID NO: 1089675 - RNA, 19 nt, Artificial Sequence
  Description of Artificial Sequence: Synthetic oligonucleotide
cucacgaacaguaagucca

SEQ ID NO: 1089676 - RNA, 19 nt, Artificial Sequence
  Description of Artificial Sequence: Synthetic oligonucleotide
uuaaugccgguggaaaacg

SEQ ID NO: 1089677 - RNA, 19 nt, Artificial Sequence
  Description of Artificial Sequence: Synthetic oligonucleotide
uuugucauuaaagcgggcu

SEQ ID NO: 1089678 - RNA, 19 nt, Artificial Sequence
  Description of Artificial Sequence: Synthetic oligonucleotide
aguggugccuuuuccaguc

SEQ ID NO: 1089679 - RNA, 19 nt, Artificial Sequence
  Description of Artificial Sequence: Synthetic oligonucleotide
ugguuuaucaugaguggga

SEQ ID NO: 1089680 - RNA, 19 nt, Artificial Sequence
  Description of Artificial Sequence: Synthetic oligonucleotide
uucacaaaucucuuuacuu

SEQ ID NO: 1089681 - RNA, 19 nt, Artificial Sequence
  Description of Artificial Sequence: Synthetic oligonucleotide
aauacccaagucuuccuaa

SEQ ID NO: 1089682 - RNA, 19 nt, Artificial Sequence
  Description of Artificial Sequence: Synthetic oligonucleotide
uugacccauuuuaaugccg

SEQ ID NO: 1089683 - RNA, 19 nt, Artificial Sequence
  Description of Artificial Sequence: Synthetic oligonucleotide
uggucuuacaccuggggca

SEQ ID NO: 1089684 - RNA, 19 nt, Artificial Sequence
  Description of Artificial Sequence: Synthetic oligonucleotide
acucucuuagacuaggaaa

SEQ ID NO: 1089685 - RNA, 19 nt, Artificial Sequence
  Description of Artificial Sequence: Synthetic oligonucleotide
uucauuuaacuuuccgcca

SEQ ID NO: 1089686 - RNA, 19 nt, Artificial Sequence
  Description of Artificial Sequence: Synthetic oligonucleotide
agaaguggcgcagucuugc

SEQ ID NO: 1089687 - RNA, 19 nt, Artificial Sequence
  Description of Artificial Sequence: Synthetic oligonucleotide
cuguugacccauuuuaaug

SEQ ID NO: 1089688 - RNA, 19 nt, Artificial Sequence
  Description of Artificial Sequence: Synthetic oligonucleotide
uccucucacgaacaguaag

SEQ ID NO: 1089689 - RNA, 19 nt, Artificial Sequence
  Description of Artificial Sequence: Synthetic oligonucleotide
aguggaguaccacacucag

SEQ ID NO: 1089690 - RNA, 19 nt, Artificial Sequence
  Description of Artificial Sequence: Synthetic oligonucleotide
uuuaaugccgguggaaaac

SEQ ID NO: 1089691 - RNA, 19 nt, Artificial Sequence
  Description of Artificial Sequence: Synthetic oligonucleotide
uuuuggauuggugcuaaug

SEQ ID NO: 1089692 - RNA, 19 nt, Artificial Sequence
  Description of Artificial Sequence: Synthetic oligonucleotide
uuugauagacagcccuuca

SEQ ID NO: 1089693 - RNA, 19 nt, Artificial Sequence
  Description of Artificial Sequence: Synthetic oligonucleotide
uuauacucucuuagacuag

SEQ ID NO: 1089694 - RNA, 19 nt, Artificial Sequence
  Description of Artificial Sequence: Synthetic oligonucleotide
ugguuuaaauacccaaguc

SEQ ID NO: 1089695 - RNA, 19 nt, Artificial Sequence
  Description of Artificial Sequence: Synthetic oligonucleotide
ucauuuaacuuuccgccau

SEQ ID NO: 1089696 - RNA, 19 nt, Artificial Sequence
  Description of Artificial Sequence: Synthetic oligonucleotide
acuauguuccucauucagg

SEQ ID NO: 1089697 - RNA, 19 nt, Artificial Sequence
  Description of Artificial Sequence: Synthetic oligonucleotide
uuugccucacuuugcacug

SEQ ID NO: 1089698 - RNA, 19 nt, Artificial Sequence
  Description of Artificial Sequence: Synthetic oligonucleotide
aacaucucuagcucaggaa

SEQ ID NO: 1089699 - RNA, 19 nt, Artificial Sequence
  Description of Artificial Sequence: Synthetic oligonucleotide
auacccaagucuuccuaac

SEQ ID NO: 1089700 - RNA, 19 nt, Artificial Sequence
  Description of Artificial Sequence: Synthetic oligonucleotide
ucaagcuuuuggauuggug

SEQ ID NO: 1089701 - RNA, 19 nt, Artificial Sequence
  Description of Artificial Sequence: Synthetic oligonucleotide
ucugguggaaaacuacauc

SEQ ID NO: 1089702 - RNA, 19 nt, Artificial Sequence
  Description of Artificial Sequence: Synthetic oligonucleotide
augcaacacauuucucagc

SEQ ID NO: 1089703 - RNA, 19 nt, Artificial Sequence
  Description of Artificial Sequence: Synthetic oligonucleotide
cagacuguaauaaacaccu

SEQ ID NO: 1089704 - RNA, 19 nt, Artificial Sequence
  Description of Artificial Sequence: Synthetic oligonucleotide
uucuaugcaacagacucac

SEQ ID NO: 1089705 - RNA, 19 nt, Artificial Sequence
  Description of Artificial Sequence: Synthetic oligonucleotide
ucucacgaacaguaagucc

SEQ ID NO: 1089706 - RNA, 19 nt, Artificial Sequence
  Description of Artificial Sequence: Synthetic oligonucleotide
guauuugguggucuuacac

SEQ ID NO: 1089707 - RNA, 19 nt, Artificial Sequence
  Description of Artificial Sequence: Synthetic oligonucleotide
ucaguggaguaccacacuc

SEQ ID NO: 1089708 - RNA, 19 nt, Artificial Sequence
  Description of Artificial Sequence: Synthetic oligonucleotide
uaugcugagccaagagcag

SEQ ID NO: 1089709 - RNA, 19 nt, Artificial Sequence
  Description of Artificial Sequence: Synthetic oligonucleotide
auuugauagacagcccuuc

SEQ ID NO: 1089710 - RNA, 19 nt, Artificial Sequence
  Description of Artificial Sequence: Synthetic oligonucleotide
aaagagcuguacccugaag

SEQ ID NO: 1089711 - RNA, 19 nt, Artificial Sequence
  Description of Artificial Sequence: Synthetic oligonucleotide
uaucugggcugccagaaaa

SEQ ID NO: 1089712 - RNA, 19 nt, Artificial Sequence
  Description of Artificial Sequence: Synthetic oligonucleotide
gggucaacuccauacauag

SEQ ID NO: 1089713 - RNA, 19 nt, Artificial Sequence
  Description of Artificial Sequence: Synthetic oligonucleotide
aaacuauguuccucauuca

SEQ ID NO: 1089714 - RNA, 19 nt, Artificial Sequence
  Description of Artificial Sequence: Synthetic oligonucleotide
uauuagguuugccucacuu

SEQ ID NO: 1089715 - RNA, 19 nt, Artificial Sequence
  Description of Artificial Sequence: Synthetic oligonucleotide
aaagcgggcuaaugcuagg

SEQ ID NO: 1089716 - RNA, 19 nt, Artificial Sequence
  Description of Artificial Sequence: Synthetic oligonucleotide
cuuuaugcugagccaagag

SEQ ID NO: 1089717 - RNA, 19 nt, Artificial Sequence
  Description of Artificial Sequence: Synthetic oligonucleotide
uuuuaaugccgguggaaaa

SEQ ID NO: 1089718 - RNA, 19 nt, Artificial Sequence
  Description of Artificial Sequence: Synthetic oligonucleotide
ggugcaaugcuucaauccc

SEQ ID NO: 1089719 - RNA, 19 nt, Artificial Sequence
  Description of Artificial Sequence: Synthetic oligonucleotide
cagacucacacaaggcugg

SEQ ID NO: 1089720 - RNA, 19 nt, Artificial Sequence
  Description of Artificial Sequence: Synthetic oligonucleotide
gaguaccacacucaggaca

SEQ ID NO: 1089721 - RNA, 19 nt, Artificial Sequence
  Description of Artificial Sequence: Synthetic oligonucleotide
aguucugguggaaaacuac

SEQ ID NO: 1089722 - RNA, 19 nt, Artificial Sequence
  Description of Artificial Sequence: Synthetic oligonucleotide
aucucaaccuccuugucaa

SEQ ID NO: 1089723 - RNA, 19 nt, Artificial Sequence
  Description of Artificial Sequence: Synthetic oligonucleotide
aucagcuucaacgaagggu

SEQ ID NO: 1089724 - RNA, 19 nt, Artificial Sequence
  Description of Artificial Sequence: Synthetic oligonucleotide
uuccugucguucuacuucc

SEQ ID NO: 1089725 - RNA, 19 nt, Artificial Sequence
  Description of Artificial Sequence: Synthetic oligonucleotide
uuaaagcgggcuaaugcua

SEQ ID NO: 1089726 - RNA, 19 nt, Artificial Sequence
  Description of Artificial Sequence: Synthetic oligonucleotide
cucucuuagacuaggaaaa

SEQ ID NO: 1089727 - RNA, 19 nt, Artificial Sequence
  Description of Artificial Sequence: Synthetic oligonucleotide
aaugccgguggaaaacguc

SEQ ID NO: 1089728 - RNA, 19 nt, Artificial Sequence
  Description of Artificial Sequence: Synthetic oligonucleotide
uuccuaacaucucuagcuc

SEQ ID NO: 1089729 - RNA, 19 nt, Artificial Sequence
  Description of Artificial Sequence: Synthetic oligonucleotide
agaucugucuuuaugcuga

SEQ ID NO: 1089730 - RNA, 19 nt, Artificial Sequence
  Description of Artificial Sequence: Synthetic oligonucleotide
agcugggaaccauauuagg

SEQ ID NO: 1089731 - RNA, 19 nt, Artificial Sequence
  Description of Artificial Sequence: Synthetic oligonucleotide
agcuucaacgaaggguucc

SEQ ID NO: 1089732 - RNA, 19 nt, Artificial Sequence
  Description of Artificial Sequence: Synthetic oligonucleotide
gaagaaguauagccaccag

SEQ ID NO: 1089733 - RNA, 19 nt, Artificial Sequence
  Description of Artificial Sequence: Synthetic oligonucleotide
agugaaaggugccauugaa

SEQ ID NO: 1089734 - RNA, 19 nt, Artificial Sequence
  Description of Artificial Sequence: Synthetic oligonucleotide
uccauacauagggaaauca

SEQ ID NO: 1089735 - RNA, 19 nt, Artificial Sequence
  Description of Artificial Sequence: Synthetic oligonucleotide
guugacccauuuuaaugcc

SEQ ID NO: 1089736 - RNA, 19 nt, Artificial Sequence
  Description of Artificial Sequence: Synthetic oligonucleotide
agaagaaguauagccacca

SEQ ID NO: 1089737 - RNA, 19 nt, Artificial Sequence
  Description of Artificial Sequence: Synthetic oligonucleotide
aggguucuaugcaacagac

SEQ ID NO: 1089738 - RNA, 19 nt, Artificial Sequence
  Description of Artificial Sequence: Synthetic oligonucleotide
uggaucugggcuucucuag

SEQ ID NO: 1089739 - RNA, 19 nt, Artificial Sequence
  Description of Artificial Sequence: Synthetic oligonucleotide
gucuacaauuuaugcacag

SEQ ID NO: 1089740 - RNA, 19 nt, Artificial Sequence
  Description of Artificial Sequence: Synthetic oligonucleotide
uccuaacaucucuagcuca

SEQ ID NO: 1089741 - RNA, 19 nt, Artificial Sequence
  Description of Artificial Sequence: Synthetic oligonucleotide
gguuuaaauacccaagucu

SEQ ID NO: 1089742 - RNA, 19 nt, Artificial Sequence
  Description of Artificial Sequence: Synthetic oligonucleotide
auacauagggaaaucauuu

SEQ ID NO: 1089743 - RNA, 19 nt, Artificial Sequence
  Description of Artificial Sequence: Synthetic oligonucleotide
ugaggugcaaugcuucaau

SEQ ID NO: 1089744 - RNA, 19 nt, Artificial Sequence
  Description of Artificial Sequence: Synthetic oligonucleotide
guggucuuacaccuggggc

SEQ ID NO: 1089745 - RNA, 19 nt, Artificial Sequence
  Description of Artificial Sequence: Synthetic oligonucleotide
cagagauuugauagacagc

SEQ ID NO: 1089746 - RNA, 19 nt, Artificial Sequence
  Description of Artificial Sequence: Synthetic oligonucleotide
uagguuugccucacuuugc

SEQ ID NO: 1089747 - RNA, 19 nt, Artificial Sequence
  Description of Artificial Sequence: Synthetic oligonucleotide
cccauuuuaaugccggugg

SEQ ID NO: 1089748 - RNA, 19 nt, Artificial Sequence
  Description of Artificial Sequence: Synthetic oligonucleotide
agaugaggugcaaugcuuc

SEQ ID NO: 1089749 - RNA, 19 nt, Artificial Sequence
  Description of Artificial Sequence: Synthetic oligonucleotide
ucaacgaaggguuccggua

SEQ ID NO: 1089750 - RNA, 19 nt, Artificial Sequence
  Description of Artificial Sequence: Synthetic oligonucleotide
cucaaccuccuugucaacg

SEQ ID NO: 1089751 - RNA, 19 nt, Artificial Sequence
  Description of Artificial Sequence: Synthetic oligonucleotide
uucaacgaaggguuccggu

SEQ ID NO: 1089752 - RNA, 19 nt, Artificial Sequence
  Description of Artificial Sequence: Synthetic oligonucleotide
acagacucacacaaggcug

SEQ ID NO: 1089753 - RNA, 19 nt, Artificial Sequence
  Description of Artificial Sequence: Synthetic oligonucleotide
ucauuaaagcgggcuaaug

SEQ ID NO: 1089754 - RNA, 19 nt, Artificial Sequence
  Description of Artificial Sequence: Synthetic oligonucleotide
aaggguuccgguauuuggu

SEQ ID NO: 1089755 - RNA, 19 nt, Artificial Sequence
  Description of Artificial Sequence: Synthetic oligonucleotide
gguggaaaacgucacuggc

SEQ ID NO: 1089756 - RNA, 19 nt, Artificial Sequence
  Description of Artificial Sequence: Synthetic oligonucleotide
gcuaaugaaaucuguugac

SEQ ID NO: 1089757 - RNA, 19 nt, Artificial Sequence
  Description of Artificial Sequence: Synthetic oligonucleotide
uacccaagucuuccuaaca

SEQ ID NO: 1089758 - RNA, 19 nt, Artificial Sequence
  Description of Artificial Sequence: Synthetic oligonucleotide
caaugcuucaaucccuguc

SEQ ID NO: 1089759 - RNA, 19 nt, Artificial Sequence
  Description of Artificial Sequence: Synthetic oligonucleotide
ggaaucuacaugcaacaca

SEQ ID NO: 1089760 - RNA, 19 nt, Artificial Sequence
  Description of Artificial Sequence: Synthetic oligonucleotide
accaucagcuucaacgaag

SEQ ID NO: 1089761 - RNA, 19 nt, Artificial Sequence
  Description of Artificial Sequence: Synthetic oligonucleotide
gguucagacuguaauaaac

SEQ ID NO: 1089762 - RNA, 19 nt, Artificial Sequence
  Description of Artificial Sequence: Synthetic oligonucleotide
cagcugggaaccauauuag

SEQ ID NO: 1089763 - RNA, 19 nt, Artificial Sequence
  Description of Artificial Sequence: Synthetic oligonucleotide
ugggaaccauauuagguuu

SEQ ID NO: 1089764 - RNA, 19 nt, Artificial Sequence
  Description of Artificial Sequence: Synthetic oligonucleotide
agcuagaaguggcgcaguc

SEQ ID NO: 1089765 - RNA, 19 nt, Artificial Sequence
  Description of Artificial Sequence: Synthetic oligonucleotide
uuacaccuggggcagcccu

SEQ ID NO: 1089766 - RNA, 19 nt, Artificial Sequence
  Description of Artificial Sequence: Synthetic oligonucleotide
ugguccacaggucucuauc

SEQ ID NO: 1089767 - RNA, 19 nt, Artificial Sequence
  Description of Artificial Sequence: Synthetic oligonucleotide
ucacgaacaguaaguccac

SEQ ID NO: 1089768 - RNA, 19 nt, Artificial Sequence
  Description of Artificial Sequence: Synthetic oligonucleotide
uggcagagauuugauagac

SEQ ID NO: 1089769 - RNA, 19 nt, Artificial Sequence
  Description of Artificial Sequence: Synthetic oligonucleotide
agcucucacacagagugug

SEQ ID NO: 1089770 - RNA, 19 nt, Artificial Sequence
  Description of Artificial Sequence: Synthetic oligonucleotide
uccacauuguuggucaaau

SEQ ID NO: 1089771 - RNA, 19 nt, Artificial Sequence
  Description of Artificial Sequence: Synthetic oligonucleotide
acccaagucuuccuaacau

SEQ ID NO: 1089772 - RNA, 19 nt, Artificial Sequence
  Description of Artificial Sequence: Synthetic oligonucleotide
cacauccaaacuaagcaaa

SEQ ID NO: 1089773 - RNA, 19 nt, Artificial Sequence
  Description of Artificial Sequence: Synthetic oligonucleotide
aggguuccgguauuuggug

SEQ ID NO: 1089774 - RNA, 19 nt, Artificial Sequence
  Description of Artificial Sequence: Synthetic oligonucleotide
agguuugccucacuuugca

SEQ ID NO: 1089775 - RNA, 19 nt, Artificial Sequence
  Description of Artificial Sequence: Synthetic oligonucleotide
uuuccgccauaaauuagua

SEQ ID NO: 1089776 - RNA, 19 nt, Artificial Sequence
  Description of Artificial Sequence: Synthetic oligonucleotide
gaucugucuuuaugcugag

SEQ ID NO: 1089777 - RNA, 19 nt, Artificial Sequence
  Description of Artificial Sequence: Synthetic oligonucleotide
gcccugaucguccauggcg

SEQ ID NO: 1089778 - RNA, 19 nt, Artificial Sequence
  Description of Artificial Sequence: Synthetic oligonucleotide
cauaaaaugagcucacauu

SEQ ID NO: 1089779 - RNA, 19 nt, Artificial Sequence
  Description of Artificial Sequence: Synthetic oligonucleotide
uauagccaccagcaagguc

SEQ ID NO: 1089780 - RNA, 19 nt, Artificial Sequence
  Description of Artificial Sequence: Synthetic oligonucleotide
agcagcuagaaguggcgca

SEQ ID NO: 1089781 - RNA, 19 nt, Artificial Sequence
  Description of Artificial Sequence: Synthetic oligonucleotide
guuugccucacuuugcacu

SEQ ID NO: 1089782 - RNA, 19 nt, Artificial Sequence
  Description of Artificial Sequence: Synthetic oligonucleotide
cauauuagguuugccucac

SEQ ID NO: 1089783 - RNA, 19 nt, Artificial Sequence
  Description of Artificial Sequence: Synthetic oligonucleotide
gguggucuuacaccugggg

SEQ ID NO: 1089784 - RNA, 19 nt, Artificial Sequence
  Description of Artificial Sequence: Synthetic oligonucleotide
cuugguucagacuguaaua

SEQ ID NO: 1089785 - RNA, 19 nt, Artificial Sequence
  Description of Artificial Sequence: Synthetic oligonucleotide
cuauggguaguauccuauc

SEQ ID NO: 1089786 - RNA, 19 nt, Artificial Sequence
  Description of Artificial Sequence: Synthetic oligonucleotide
ccaaaucuuauaaaugaga

SEQ ID NO: 1089787 - RNA, 19 nt, Artificial Sequence
  Description of Artificial Sequence: Synthetic oligonucleotide
aaacuacaucagucuacaa

SEQ ID NO: 1089788 - RNA, 19 nt, Artificial Sequence
  Description of Artificial Sequence: Synthetic oligonucleotide
cuuuccgccauaaauuagu

SEQ ID NO: 1089789 - RNA, 19 nt, Artificial Sequence
  Description of Artificial Sequence: Synthetic oligonucleotide
ugguucagacuguaauaaa

SEQ ID NO: 1089790 - RNA, 19 nt, Artificial Sequence
  Description of Artificial Sequence: Synthetic oligonucleotide
gaaguauagccaccagcaa

SEQ ID NO: 1089791 - RNA, 19 nt, Artificial Sequence
  Description of Artificial Sequence: Synthetic oligonucleotide
gaaccauauuagguuugcc

SEQ ID NO: 1089792 - RNA, 19 nt, Artificial Sequence
  Description of Artificial Sequence: Synthetic oligonucleotide
gcugggaugcuauggguag

SEQ ID NO: 1089793 - RNA, 19 nt, Artificial Sequence
  Description of Artificial Sequence: Synthetic oligonucleotide
cucuuagacuaggaaaauc

SEQ ID NO: 1089794 - RNA, 19 nt, Artificial Sequence
  Description of Artificial Sequence: Synthetic oligonucleotide
gaggugcaaugcuucaauc

SEQ ID NO: 1089795 - RNA, 19 nt, Artificial Sequence
  Description of Artificial Sequence: Synthetic oligonucleotide
augagcucacauuggcagu

SEQ ID NO: 1089796 - RNA, 19 nt, Artificial Sequence
  Description of Artificial Sequence: Synthetic oligonucleotide
acccauuuuaaugccggug

SEQ ID NO: 1089797 - RNA, 19 nt, Artificial Sequence
  Description of Artificial Sequence: Synthetic oligonucleotide
ucacacagaguguguccgc

SEQ ID NO: 1089798 - RNA, 19 nt, Artificial Sequence
  Description of Artificial Sequence: Synthetic oligonucleotide
ggguagaucugucuuuaug

SEQ ID NO: 1089799 - RNA, 19 nt, Artificial Sequence
  Description of Artificial Sequence: Synthetic oligonucleotide
guagaucugucuuuaugcu

SEQ ID NO: 1089800 - RNA, 19 nt, Artificial Sequence
  Description of Artificial Sequence: Synthetic oligonucleotide
guaguauccuauccacauc

SEQ ID NO: 1089801 - RNA, 19 nt, Artificial Sequence
  Description of Artificial Sequence: Synthetic oligonucleotide
ugccucacuuugcacugca

SEQ ID NO: 1089802 - RNA, 19 nt, Artificial Sequence
  Description of Artificial Sequence: Synthetic oligonucleotide
cgugguuuaaauacccaag

SEQ ID NO: 1089803 - RNA, 19 nt, Artificial Sequence
  Description of Artificial Sequence: Synthetic oligonucleotide
uuaucaugagugggacuca

SEQ ID NO: 1089804 - RNA, 19 nt, Artificial Sequence
  Description of Artificial Sequence: Synthetic oligonucleotide
ugaguacaauaaagccacu

SEQ ID NO: 1089805 - RNA, 19 nt, Artificial Sequence
  Description of Artificial Sequence: Synthetic oligonucleotide
agcuggguagaucugucuu

SEQ ID NO: 1089806 - RNA, 19 nt, Artificial Sequence
  Description of Artificial Sequence: Synthetic oligonucleotide
ucuaugcaacagacucaca

SEQ ID NO: 1089807 - RNA, 19 nt, Artificial Sequence
  Description of Artificial Sequence: Synthetic oligonucleotide
cucucacgaacaguaaguc

SEQ ID NO: 1089808 - RNA, 19 nt, Artificial Sequence
  Description of Artificial Sequence: Synthetic oligonucleotide
ugcuauggguaguauccua

SEQ ID NO: 1089809 - RNA, 19 nt, Artificial Sequence
  Description of Artificial Sequence: Synthetic oligonucleotide
acgucacuggcuucgugga

SEQ ID NO: 1089810 - RNA, 19 nt, Artificial Sequence
  Description of Artificial Sequence: Synthetic oligonucleotide
acuuuccgccauaaauuag

SEQ ID NO: 1089811 - RNA, 19 nt, Artificial Sequence
  Description of Artificial Sequence: Synthetic oligonucleotide
cuugcagcugugugugcug

SEQ ID NO: 1089812 - RNA, 19 nt, Artificial Sequence
  Description of Artificial Sequence: Synthetic oligonucleotide
aacgaaggguuccgguauu

SEQ ID NO: 1089813 - RNA, 19 nt, Artificial Sequence
  Description of Artificial Sequence: Synthetic oligonucleotide
ucucuuagacuaggaaaau

SEQ ID NO: 1089814 - RNA, 19 nt, Artificial Sequence
  Description of Artificial Sequence: Synthetic oligonucleotide
uuccgccauaaauuaguau

SEQ ID NO: 1089815 - RNA, 19 nt, Artificial Sequence
  Description of Artificial Sequence: Synthetic oligonucleotide
aaaacgucacuggcuucgu

SEQ ID NO: 1089816 - RNA, 19 nt, Artificial Sequence
  Description of Artificial Sequence: Synthetic oligonucleotide
gguuuaucaugagugggac

SEQ ID NO: 1089817 - RNA, 19 nt, Artificial Sequence
  Description of Artificial Sequence: Synthetic oligonucleotide
acggugggaucuucaaaga

SEQ ID NO: 1089818 - RNA, 19 nt, Artificial Sequence
  Description of Artificial Sequence: Synthetic oligonucleotide
guucuaugcaacagacuca

SEQ ID NO: 1089819 - RNA, 19 nt, Artificial Sequence
  Description of Artificial Sequence: Synthetic oligonucleotide
caaucccugucugaagaac

SEQ ID NO: 1089820 - RNA, 19 nt, Artificial Sequence
  Description of Artificial Sequence: Synthetic oligonucleotide
gguaguauccuauccacau

SEQ ID NO: 1089821 - RNA, 19 nt, Artificial Sequence
  Description of Artificial Sequence: Synthetic oligonucleotide
cagaguguguccgcacacg

SEQ ID NO: 1089822 - RNA, 19 nt, Artificial Sequence
  Description of Artificial Sequence: Synthetic oligonucleotide
ggguuccgguauuuggugg

SEQ ID NO: 1089823 - RNA, 19 nt, Artificial Sequence
  Description of Artificial Sequence: Synthetic oligonucleotide
ggacucacagcugggaacc

SEQ ID NO: 1089824 - RNA, 19 nt, Artificial Sequence
  Description of Artificial Sequence: Synthetic oligonucleotide
cugucuuuaugcugagcca

SEQ ID NO: 1089825 - RNA, 19 nt, Artificial Sequence
  Description of Artificial Sequence: Synthetic oligonucleotide
ggaucugggcuucucuagc

SEQ ID NO: 1089826 - RNA, 19 nt, Artificial Sequence
  Description of Artificial Sequence: Synthetic oligonucleotide
cuucaacgaaggguuccgg

SEQ ID NO: 1089827 - RNA, 19 nt, Artificial Sequence
  Description of Artificial Sequence: Synthetic oligonucleotide
uguauaucuucagcacuuu

SEQ ID NO: 1089828 - RNA, 19 nt, Artificial Sequence
  Description of Artificial Sequence: Synthetic oligonucleotide
ggcccugaguuucuuacug

SEQ ID NO: 1089829 - RNA, 19 nt, Artificial Sequence
  Description of Artificial Sequence: Synthetic oligonucleotide
aaaagcccacugaaugcau

SEQ ID NO: 1089830 - RNA, 19 nt, Artificial Sequence
  Description of Artificial Sequence: Synthetic oligonucleotide
ccgaaucucaaccuccuug

SEQ ID NO: 1089831 - RNA, 19 nt, Artificial Sequence
  Description of Artificial Sequence: Synthetic oligonucleotide
ggacgugguuuaaauaccc

SEQ ID NO: 1089832 - RNA, 19 nt, Artificial Sequence
  Description of Artificial Sequence: Synthetic oligonucleotide
ugaucguccauggcgucuc

SEQ ID NO: 1089833 - RNA, 19 nt, Artificial Sequence
  Description of Artificial Sequence: Synthetic oligonucleotide
auauuagguuugccucacu

SEQ ID NO: 1089834 - RNA, 19 nt, Artificial Sequence
  Description of Artificial Sequence: Synthetic oligonucleotide
guggaguaccacacucagg

SEQ ID NO: 1089835 - RNA, 19 nt, Artificial Sequence
  Description of Artificial Sequence: Synthetic oligonucleotide
uucccgagucaguuuuaac

SEQ ID NO: 1089836 - RNA, 19 nt, Artificial Sequence
  Description of Artificial Sequence: Synthetic oligonucleotide
guuucuuacugcugagggu

SEQ ID NO: 1089837 - RNA, 19 nt, Artificial Sequence
  Description of Artificial Sequence: Synthetic oligonucleotide
gcuucaacgaaggguuccg

SEQ ID NO: 1089838 - RNA, 19 nt, Artificial Sequence
  Description of Artificial Sequence: Synthetic oligonucleotide
ugguauucauagagagcuu

SEQ ID NO: 1089839 - RNA, 19 nt, Artificial Sequence
  Description of Artificial Sequence: Synthetic oligonucleotide
ggugccauugaaguauuca

SEQ ID NO: 1089840 - RNA, 19 nt, Artificial Sequence
  Description of Artificial Sequence: Synthetic oligonucleotide
agagcgacagggaggucag

SEQ ID NO: 1089841 - RNA, 19 nt, Artificial Sequence
  Description of Artificial Sequence: Synthetic oligonucleotide
gacgugguuuaaauaccca

SEQ ID NO: 1089842 - RNA, 19 nt, Artificial Sequence
  Description of Artificial Sequence: Synthetic oligonucleotide
cagagcgacagggagguca

SEQ ID NO: 1089843 - RNA, 19 nt, Artificial Sequence
  Description of Artificial Sequence: Synthetic oligonucleotide
caguggaguaccacacuca

SEQ ID NO: 1089844 - RNA, 19 nt, Artificial Sequence
  Description of Artificial Sequence: Synthetic oligonucleotide
uccuguucccgagucaguu

SEQ ID NO: 1089845 - RNA, 19 nt, Artificial Sequence
  Description of Artificial Sequence: Synthetic oligonucleotide
uggcgucuccucuguuuag

SEQ ID NO: 1089846 - RNA, 19 nt, Artificial Sequence
  Description of Artificial Sequence: Synthetic oligonucleotide
gaaguggcgcagucuugca

SEQ ID NO: 1089847 - RNA, 19 nt, Artificial Sequence
  Description of Artificial Sequence: Synthetic oligonucleotide
gcugguauucauagagagc

SEQ ID NO: 1089848 - RNA, 19 nt, Artificial Sequence
  Description of Artificial Sequence: Synthetic oligonucleotide
gucucagcaucucaucaua

SEQ ID NO: 1089849 - RNA, 19 nt, Artificial Sequence
  Description of Artificial Sequence: Synthetic oligonucleotide
cauuuuaaugccgguggaa

SEQ ID NO: 1089850 - RNA, 19 nt, Artificial Sequence
  Description of Artificial Sequence: Synthetic oligonucleotide
acaccugaacacagcagcu

SEQ ID NO: 1089851 - RNA, 19 nt, Artificial Sequence
  Description of Artificial Sequence: Synthetic oligonucleotide
ccucauucaggguucuaug

SEQ ID NO: 1089852 - RNA, 19 nt, Artificial Sequence
  Description of Artificial Sequence: Synthetic oligonucleotide
uuccgguauuugguggucu

SEQ ID NO: 1089853 - RNA, 19 nt, Artificial Sequence
  Description of Artificial Sequence: Synthetic oligonucleotide
aguauccuauccacaucca

SEQ ID NO: 1089854 - RNA, 19 nt, Artificial Sequence
  Description of Artificial Sequence: Synthetic oligonucleotide
uccgguauuugguggucuu

SEQ ID NO: 1089855 - RNA, 19 nt, Artificial Sequence
  Description of Artificial Sequence: Synthetic oligonucleotide
cacagaguguguccgcaca

SEQ ID NO: 1089856 - RNA, 19 nt, Artificial Sequence
  Description of Artificial Sequence: Synthetic oligonucleotide
cuagaaguggcgcagucuu

SEQ ID NO: 1089857 - RNA, 19 nt, Artificial Sequence
  Description of Artificial Sequence: Synthetic oligonucleotide
gcagcuagaaguggcgcag

SEQ ID NO: 1089858 - RNA, 19 nt, Artificial Sequence
  Description of Artificial Sequence: Synthetic oligonucleotide
ugggaugcuauggguagua

SEQ ID NO: 1089859 - RNA, 19 nt, Artificial Sequence
  Description of Artificial Sequence: Synthetic oligonucleotide
gguauuugguggucuuaca

SEQ ID NO: 1089860 - RNA, 19 nt, Artificial Sequence
  Description of Artificial Sequence: Synthetic oligonucleotide
augcuauggguaguauccu

SEQ ID NO: 1089861 - RNA, 19 nt, Artificial Sequence
  Description of Artificial Sequence: Synthetic oligonucleotide
aggcccugaguuucuuacu

SEQ ID NO: 1089862 - RNA, 19 nt, Artificial Sequence
  Description of Artificial Sequence: Synthetic oligonucleotide
cuccauacauagggaaauc

SEQ ID NO: 1089863 - RNA, 19 nt, Artificial Sequence
  Description of Artificial Sequence: Synthetic oligonucleotide
ugcuggcauuucacaaauc

SEQ ID NO: 1089864 - RNA, 19 nt, Artificial Sequence
  Description of Artificial Sequence: Synthetic oligonucleotide
uguucccgagucaguuuua

SEQ ID NO: 1089865 - RNA, 19 nt, Artificial Sequence
  Description of Artificial Sequence: Synthetic oligonucleotide
guuuaucaugagugggacu

SEQ ID NO: 1089866 - RNA, 19 nt, Artificial Sequence
  Description of Artificial Sequence: Synthetic oligonucleotide
cacaaaacaggcccugagu

SEQ ID NO: 1089867 - RNA, 19 nt, Artificial Sequence
  Description of Artificial Sequence: Synthetic oligonucleotide
cugcacaaaacaggcccug

SEQ ID NO: 1089868 - RNA, 19 nt, Artificial Sequence
  Description of Artificial Sequence: Synthetic oligonucleotide
ggcgucuccucuguuuagg

SEQ ID NO: 1089869 - RNA, 19 nt, Artificial Sequence
  Description of Artificial Sequence: Synthetic oligonucleotide
guauucauagagagcuucu

SEQ ID NO: 1089870 - RNA, 19 nt, Artificial Sequence
  Description of Artificial Sequence: Synthetic oligonucleotide
ggucaacuccauacauagg

SEQ ID NO: 1089871 - RNA, 19 nt, Artificial Sequence
  Description of Artificial Sequence: Synthetic oligonucleotide
agacuguaauaaacaccug

SEQ ID NO: 1089872 - RNA, 19 nt, Artificial Sequence
  Description of Artificial Sequence: Synthetic oligonucleotide
gaucguccauggcgucucc

SEQ ID NO: 1089873 - RNA, 19 nt, Artificial Sequence
  Description of Artificial Sequence: Synthetic oligonucleotide
gaguacaauaaagccacuu

SEQ ID NO: 1089874 - RNA, 19 nt, Artificial Sequence
  Description of Artificial Sequence: Synthetic oligonucleotide
ggucaaauugaagacaauu

SEQ ID NO: 1089875 - RNA, 19 nt, Artificial Sequence
  Description of Artificial Sequence: Synthetic oligonucleotide
cccaagucuuccuaacauc

SEQ ID NO: 1089876 - RNA, 19 nt, Artificial Sequence
  Description of Artificial Sequence: Synthetic oligonucleotide
gauuugauagacagcccuu

SEQ ID NO: 1089877 - RNA, 19 nt, Artificial Sequence
  Description of Artificial Sequence: Synthetic oligonucleotide
augaggugcaaugcuucaa

SEQ ID NO: 1089878 - RNA, 19 nt, Artificial Sequence
  Description of Artificial Sequence: Synthetic oligonucleotide
agcuuuuggauuggugcua

SEQ ID NO: 1089879 - RNA, 19 nt, Artificial Sequence
  Description of Artificial Sequence: Synthetic oligonucleotide
gcuugguucagacuguaau

SEQ ID NO: 1089880 - RNA, 19 nt, Artificial Sequence
  Description of Artificial Sequence: Synthetic oligonucleotide
gggaaccauauuagguuug

SEQ ID NO: 1089881 - RNA, 19 nt, Artificial Sequence
  Description of Artificial Sequence: Synthetic oligonucleotide
agucuuccuaacaucucua

SEQ ID NO: 1089882 - RNA, 19 nt, Artificial Sequence
  Description of Artificial Sequence: Synthetic oligonucleotide
gguuugccucacuuugcac

SEQ ID NO: 1089883 - RNA, 19 nt, Artificial Sequence
  Description of Artificial Sequence: Synthetic oligonucleotide
aggaacagucuucguuguu

SEQ ID NO: 1089884 - RNA, 19 nt, Artificial Sequence
  Description of Artificial Sequence: Synthetic oligonucleotide
cggacgugguuuaaauacc

SEQ ID NO: 1089885 - RNA, 19 nt, Artificial Sequence
  Description of Artificial Sequence: Synthetic oligonucleotide
agggucaacuccauacaua

SEQ ID NO: 1089886 - RNA, 19 nt, Artificial Sequence
  Description of Artificial Sequence: Synthetic oligonucleotide
cgguggaaaacgucacugg

SEQ ID NO: 1089887 - RNA, 19 nt, Artificial Sequence
  Description of Artificial Sequence: Synthetic oligonucleotide
ggcuucguggaucugggcu

SEQ ID NO: 1089888 - RNA, 19 nt, Artificial Sequence
  Description of Artificial Sequence: Synthetic oligonucleotide
gcgggcuaaugcuaggcuc

SEQ ID NO: 1089889 - RNA, 19 nt, Artificial Sequence
  Description of Artificial Sequence: Synthetic oligonucleotide
cuucguggaucugggcuuc

SEQ ID NO: 1089890 - RNA, 19 nt, Artificial Sequence
  Description of Artificial Sequence: Synthetic oligonucleotide
gucaacggugggaucuuca

SEQ ID NO: 1089891 - RNA, 19 nt, Artificial Sequence
  Description of Artificial Sequence: Synthetic oligonucleotide
ggaaaacgucacuggcuuc

SEQ ID NO: 1089892 - RNA, 19 nt, Artificial Sequence
  Description of Artificial Sequence: Synthetic oligonucleotide
cucggacgugguuuaaaua

SEQ ID NO: 1089893 - RNA, 19 nt, Artificial Sequence
  Description of Artificial Sequence: Synthetic oligonucleotide
ggaguaccacacucaggac

SEQ ID NO: 1089894 - RNA, 19 nt, Artificial Sequence
  Description of Artificial Sequence: Synthetic oligonucleotide
ccgguggaaaacgucacug

SEQ ID NO: 1089895 - RNA, 19 nt, Artificial Sequence
  Description of Artificial Sequence: Synthetic oligonucleotide
gacucacacaaggcuggga

SEQ ID NO: 1089896 - RNA, 19 nt, Artificial Sequence
  Description of Artificial Sequence: Synthetic oligonucleotide
cuaggcucugguuuaucau

SEQ ID NO: 1089897 - RNA, 19 nt, Artificial Sequence
  Description of Artificial Sequence: Synthetic oligonucleotide
gcuccucucacgaacagua

SEQ ID NO: 1089898 - RNA, 19 nt, Artificial Sequence
  Description of Artificial Sequence: Synthetic oligonucleotide
caacggugggaucuucaaa

SEQ ID NO: 1089899 - RNA, 19 nt, Artificial Sequence
  Description of Artificial Sequence: Synthetic oligonucleotide
ugucaacggugggaucuuc

SEQ ID NO: 1089900 - RNA, 19 nt, Artificial Sequence
  Description of Artificial Sequence: Synthetic oligonucleotide
gacccauuuuaaugccggu

SEQ ID NO: 1089901 - RNA, 19 nt, Artificial Sequence
  Description of Artificial Sequence: Synthetic oligonucleotide
cugucguucuacuuccaau

SEQ ID NO: 1089902 - RNA, 19 nt, Artificial Sequence
  Description of Artificial Sequence: Synthetic oligonucleotide
aggugccauugaaguauuc

SEQ ID NO: 1089903 - RNA, 19 nt, Artificial Sequence
  Description of Artificial Sequence: Synthetic oligonucleotide
caacgaaggguuccgguau

SEQ ID NO: 1089904 - RNA, 19 nt, Artificial Sequence
  Description of Artificial Sequence: Synthetic oligonucleotide
cuucguuguucacuuuccu

SEQ ID NO: 1089905 - RNA, 19 nt, Artificial Sequence
  Description of Artificial Sequence: Synthetic oligonucleotide
ggcuaaugcuaggcucugg

SEQ ID NO: 1089906 - RNA, 19 nt, Artificial Sequence
  Description of Artificial Sequence: Synthetic oligonucleotide
uugucaacggugggaucuu

SEQ ID NO: 1089907 - RNA, 19 nt, Artificial Sequence
  Description of Artificial Sequence: Synthetic oligonucleotide
cagaugaggugcaaugcuu

SEQ ID NO: 1089908 - RNA, 19 nt, Artificial Sequence
  Description of Artificial Sequence: Synthetic oligonucleotide
gcagcccugaucguccaug

SEQ ID NO: 1089909 - RNA, 19 nt, Artificial Sequence
  Description of Artificial Sequence: Synthetic oligonucleotide
cacaaggcugggaugcuau

SEQ ID NO: 1089910 - RNA, 19 nt, Artificial Sequence
  Description of Artificial Sequence: Synthetic oligonucleotide
ucccagcuccucucacgaa

SEQ ID NO: 1089911 - RNA, 19 nt, Artificial Sequence
  Description of Artificial Sequence: Synthetic oligonucleotide
ggcgcagucuugcagcugu

SEQ ID NO: 1089912 - RNA, 19 nt, Artificial Sequence
  Description of Artificial Sequence: Synthetic oligonucleotide
ugcuaggcucugguuuauc

SEQ ID NO: 1089913 - RNA, 19 nt, Artificial Sequence
  Description of Artificial Sequence: Synthetic oligonucleotide
ccuguagugcucugugaca

SEQ ID NO: 1089914 - RNA, 19 nt, Artificial Sequence
  Description of Artificial Sequence: Synthetic oligonucleotide
ccauuuuaaugccggugga

SEQ ID NO: 1089915 - RNA, 19 nt, Artificial Sequence
  Description of Artificial Sequence: Synthetic oligonucleotide
cuaaugcuaggcucugguu

SEQ ID NO: 1089916 - RNA, 19 nt, Artificial Sequence
  Description of Artificial Sequence: Synthetic oligonucleotide
ggguaguauccuauccaca

SEQ ID NO: 1089917 - RNA, 19 nt, Artificial Sequence
  Description of Artificial Sequence: Synthetic oligonucleotide
agcucggacgugguuuaaa

SEQ ID NO: 1089918 - RNA, 19 nt, Artificial Sequence
  Description of Artificial Sequence: Synthetic oligonucleotide
ggcagagauuugauagaca

SEQ ID NO: 1089919 - RNA, 19 nt, Artificial Sequence
  Description of Artificial Sequence: Synthetic oligonucleotide
ccucucacgaacaguaagu

SEQ ID NO: 1089920 - RNA, 19 nt, Artificial Sequence
  Description of Artificial Sequence: Synthetic oligonucleotide
cuccucucacgaacaguaa

SEQ ID NO: 1089921 - RNA, 19 nt, Artificial Sequence
  Description of Artificial Sequence: Synthetic oligonucleotide
ccauacauagggaaaucau

SEQ ID NO: 1089922 - RNA, 19 nt, Artificial Sequence
  Description of Artificial Sequence: Synthetic oligonucleotide
ccagcuggguagaucuguc

SEQ ID NO: 1089923 - RNA, 19 nt, Artificial Sequence
  Description of Artificial Sequence: Synthetic oligonucleotide
acgaaggguuccgguauuu

SEQ ID NO: 1089924 - RNA, 19 nt, Artificial Sequence
  Description of Artificial Sequence: Synthetic oligonucleotide
cauggcgucuccucuguuu

SEQ ID NO: 1089925 - RNA, 19 nt, Artificial Sequence
  Description of Artificial Sequence: Synthetic oligonucleotide
guguguccgcacacguuca

SEQ ID NO: 1089926 - RNA, 19 nt, Artificial Sequence
  Description of Artificial Sequence: Synthetic oligonucleotide
uggcgcagucuugcagcug

SEQ ID NO: 1089927 - RNA, 19 nt, Artificial Sequence
  Description of Artificial Sequence: Synthetic oligonucleotide
gacucacagcugggaacca

SEQ ID NO: 1089928 - RNA, 19 nt, Artificial Sequence
  Description of Artificial Sequence: Synthetic oligonucleotide
gucauuaaagcgggcuaau

SEQ ID NO: 1089929 - RNA, 19 nt, Artificial Sequence
  Description of Artificial Sequence: Synthetic oligonucleotide
cacgaacaguaaguccaca

SEQ ID NO: 1089930 - RNA, 19 nt, Artificial Sequence
  Description of Artificial Sequence: Synthetic oligonucleotide
ccagcuccucucacgaaca

SEQ ID NO: 1089931 - RNA, 19 nt, Artificial Sequence
  Description of Artificial Sequence: Synthetic oligonucleotide
ccugaacacagcagcuaga

SEQ ID NO: 1089932 - RNA, 19 nt, Artificial Sequence
  Description of Artificial Sequence: Synthetic oligonucleotide
gggcugguauucauagaga

SEQ ID NO: 1089933 - RNA, 19 nt, Artificial Sequence
  Description of Artificial Sequence: Synthetic oligonucleotide
caccugaacacagcagcua

SEQ ID NO: 1089934 - RNA, 19 nt, Artificial Sequence
  Description of Artificial Sequence: Synthetic oligonucleotide
gcuauggguaguauccuau

SEQ ID NO: 1089935 - RNA, 19 nt, Artificial Sequence
  Description of Artificial Sequence: Synthetic oligonucleotide
guauagccaccagcaaggu

SEQ ID NO: 1089936 - RNA, 19 nt, Artificial Sequence
  Description of Artificial Sequence: Synthetic oligonucleotide
augcuaggcucugguuuau

SEQ ID NO: 1089937 - RNA, 19 nt, Artificial Sequence
  Description of Artificial Sequence: Synthetic oligonucleotide
cgccauaaauuaguauuuc

SEQ ID NO: 1089938 - RNA, 19 nt, Artificial Sequence
  Description of Artificial Sequence: Synthetic oligonucleotide
caaccuccuugucaacggu

SEQ ID NO: 1089939 - RNA, 19 nt, Artificial Sequence
  Description of Artificial Sequence: Synthetic oligonucleotide
accccuugguuuggcucca

SEQ ID NO: 1089940 - RNA, 19 nt, Artificial Sequence
  Description of Artificial Sequence: Synthetic oligonucleotide
gcucggacgugguuuaaau

SEQ ID NO: 1089941 - RNA, 19 nt, Artificial Sequence
  Description of Artificial Sequence: Synthetic oligonucleotide
gcuucguggaucugggcuu

SEQ ID NO: 1089942 - RNA, 19 nt, Artificial Sequence
  Description of Artificial Sequence: Synthetic oligonucleotide
gcagcucggacgugguuua

SEQ ID NO: 1089943 - RNA, 19 nt, Artificial Sequence
  Description of Artificial Sequence: Synthetic oligonucleotide
ccgagucaguuuuaacuua

SEQ ID NO: 1089944 - RNA, 19 nt, Artificial Sequence
  Description of Artificial Sequence: Synthetic oligonucleotide
ccugaucguccauggcguc

SEQ ID NO: 1089945 - RNA, 19 nt, Artificial Sequence
  Description of Artificial Sequence: Synthetic oligonucleotide
cugaucguccauggcgucu

SEQ ID NO: 1089946 - RNA, 19 nt, Artificial Sequence
  Description of Artificial Sequence: Synthetic oligonucleotide
cccugaucguccauggcgu

SEQ ID NO: 1089947 - RNA, 19 nt, Artificial Sequence
  Description of Artificial Sequence: Synthetic oligonucleotide
gaguguguccgcacacguu

SEQ ID NO: 1089948 - RNA, 19 nt, Artificial Sequence
  Description of Artificial Sequence: Synthetic oligonucleotide
ccgccauaaauuaguauuu

SEQ ID NO: 1089949 - RNA, 19 nt, Artificial Sequence
  Description of Artificial Sequence: Synthetic oligonucleotide
gugguccacaggucucuau

SEQ ID NO: 1089950 - RNA, 19 nt, Artificial Sequence
  Description of Artificial Sequence: Synthetic oligonucleotide
cgaaggguuccgguauuug

SEQ ID NO: 1089951 - RNA, 19 nt, Artificial Sequence
  Description of Artificial Sequence: Synthetic oligonucleotide
ggguucuaugcaacagacu

SEQ ID NO: 1089952 - RNA, 19 nt, Artificial Sequence
  Description of Artificial Sequence: Synthetic oligonucleotide
gccgguggaaaacgucacu

SEQ ID NO: 1089953 - RNA, 19 nt, Artificial Sequence
  Description of Artificial Sequence: Synthetic oligonucleotide
cgggcuaaugcuaggcucu

SEQ ID NO: 1089954 - RNA, 19 nt, Artificial Sequence
  Description of Artificial Sequence: Synthetic oligonucleotide
cugggaugcuauggguagu

SEQ ID NO: 1089955 - RNA, 19 nt, Artificial Sequence
  Description of Artificial Sequence: Synthetic oligonucleotide
cagcuagaaguggcgcagu

SEQ ID NO: 1089956 - RNA, 19 nt, Artificial Sequence
  Description of Artificial Sequence: Synthetic oligonucleotide
gcgcagucuugcagcugug

SEQ ID NO: 1089957 - RNA, 19 nt, Artificial Sequence
  Description of Artificial Sequence: Synthetic oligonucleotide
ccgguauuugguggucuua

SEQ ID NO: 1089958 - RNA, 19 nt, Artificial Sequence
  Description of Artificial Sequence: Synthetic oligonucleotide
cagcucggacgugguuuaa

SEQ ID NO: 1089959 - RNA, 19 nt, Artificial Sequence
  Description of Artificial Sequence: Synthetic oligonucleotide
gcagagcgacagggagguc

SEQ ID NO: 1089960 - RNA, 19 nt, Artificial Sequence
  Description of Artificial Sequence: Synthetic oligonucleotide
uacaagaacacaaagacug

SEQ ID NO: 1089961 - RNA, 19 nt, Artificial Sequence
  Description of Artificial Sequence: Synthetic oligonucleotide
uuuaguauaccuaauaagu

SEQ ID NO: 1089962 - RNA, 19 nt, Artificial Sequence
  Description of Artificial Sequence: Synthetic oligonucleotide
uuauuagaaacaauaaugc

SEQ ID NO: 1089963 - RNA, 19 nt, Artificial Sequence
  Description of Artificial Sequence: Synthetic oligonucleotide
aauaaagucgaucauggga

SEQ ID NO: 1089964 - RNA, 19 nt, Artificial Sequence
  Description of Artificial Sequence: Synthetic oligonucleotide
auaaguaucaucucauaac

SEQ ID NO: 1089965 - RNA, 19 nt, Artificial Sequence
  Description of Artificial Sequence: Synthetic oligonucleotide
agaguagucaccuaugagg

SEQ ID NO: 1089966 - RNA, 19 nt, Artificial Sequence
  Description of Artificial Sequence: Synthetic oligonucleotide
uuaguaacccucuaaacag

SEQ ID NO: 1089967 - RNA, 19 nt, Artificial Sequence
  Description of Artificial Sequence: Synthetic oligonucleotide
aaaccaagcauuuccuccc

SEQ ID NO: 1089968 - RNA, 19 nt, Artificial Sequence
  Description of Artificial Sequence: Synthetic oligonucleotide
aaggauaugaugcauagaa

SEQ ID NO: 1089969 - RNA, 19 nt, Artificial Sequence
  Description of Artificial Sequence: Synthetic oligonucleotide
uuagcaugaacaaggauag

SEQ ID NO: 1089970 - RNA, 19 nt, Artificial Sequence
  Description of Artificial Sequence: Synthetic oligonucleotide
uuuauauagaaaagcagca

SEQ ID NO: 1089971 - RNA, 19 nt, Artificial Sequence
  Description of Artificial Sequence: Synthetic oligonucleotide
uuuuaguauaccuaauaag

SEQ ID NO: 1089972 - RNA, 19 nt, Artificial Sequence
  Description of Artificial Sequence: Synthetic oligonucleotide
uaaugaauacaccucaggc

SEQ ID NO: 1089973 - RNA, 19 nt, Artificial Sequence
  Description of Artificial Sequence: Synthetic oligonucleotide
uuaaauccgccacaggugg

SEQ ID NO: 1089974 - RNA, 19 nt, Artificial Sequence
  Description of Artificial Sequence: Synthetic oligonucleotide
auuaugauaugacauaacu

SEQ ID NO: 1089975 - RNA, 19 nt, Artificial Sequence
  Description of Artificial Sequence: Synthetic oligonucleotide
uuuagaagguaacuuagug

SEQ ID NO: 1089976 - RNA, 19 nt, Artificial Sequence
  Description of Artificial Sequence: Synthetic oligonucleotide
aacaagccaagccuuaagg

SEQ ID NO: 1089977 - RNA, 19 nt, Artificial Sequence
  Description of Artificial Sequence: Synthetic oligonucleotide
cauaacaggauccugaaug

SEQ ID NO: 1089978 - RNA, 19 nt, Artificial Sequence
  Description of Artificial Sequence: Synthetic oligonucleotide
aaagacugcaaaugugacg

SEQ ID NO: 1089979 - RNA, 19 nt, Artificial Sequence
  Description of Artificial Sequence: Synthetic oligonucleotide
ugugacguagaacugugcg

SEQ ID NO: 1089980 - RNA, 19 nt, Artificial Sequence
  Description of Artificial Sequence: Synthetic oligonucleotide
aauaaguaucaucucauaa

SEQ ID NO: 1089981 - RNA, 19 nt, Artificial Sequence
  Description of Artificial Sequence: Synthetic oligonucleotide
ugaauggauaaccaaaagu

SEQ ID NO: 1089982 - RNA, 19 nt, Artificial Sequence
  Description of Artificial Sequence: Synthetic oligonucleotide
aacuuagugaaauuacugu

SEQ ID NO: 1089983 - RNA, 19 nt, Artificial Sequence
  Description of Artificial Sequence: Synthetic oligonucleotide
aauuuaugcaaucaagguu

SEQ ID NO: 1089984 - RNA, 19 nt, Artificial Sequence
  Description of Artificial Sequence: Synthetic oligonucleotide
ucaauguuaaacucaggag

SEQ ID NO: 1089985 - RNA, 19 nt, Artificial Sequence
  Description of Artificial Sequence: Synthetic oligonucleotide
auaccuaauaaguacagca

SEQ ID NO: 1089986 - RNA, 19 nt, Artificial Sequence
  Description of Artificial Sequence: Synthetic oligonucleotide
cacaauaucaauguuaaac

SEQ ID NO: 1089987 - RNA, 19 nt, Artificial Sequence
  Description of Artificial Sequence: Synthetic oligonucleotide
agccuuaaggauaugaugc

SEQ ID NO: 1089988 - RNA, 19 nt, Artificial Sequence
  Description of Artificial Sequence: Synthetic oligonucleotide
uaauaaguacagcagguca

SEQ ID NO: 1089989 - RNA, 19 nt, Artificial Sequence
  Description of Artificial Sequence: Synthetic oligonucleotide
uuaaggauaugaugcauag

SEQ ID NO: 1089990 - RNA, 19 nt, Artificial Sequence
  Description of Artificial Sequence: Synthetic oligonucleotide
acaauaaugcuucucaaga

SEQ ID NO: 1089991 - RNA, 19 nt, Artificial Sequence
  Description of Artificial Sequence: Synthetic oligonucleotide
uagaagguaacuuagugaa

SEQ ID NO: 1089992 - RNA, 19 nt, Artificial Sequence
  Description of Artificial Sequence: Synthetic oligonucleotide
uaacuuagugaaauuacug

SEQ ID NO: 1089993 - RNA, 19 nt, Artificial Sequence
  Description of Artificial Sequence: Synthetic oligonucleotide
aauaucaauguuaaacuca

SEQ ID NO: 1089994 - RNA, 19 nt, Artificial Sequence
  Description of Artificial Sequence: Synthetic oligonucleotide
aagacugcaaaugugacgu

SEQ ID NO: 1089995 - RNA, 19 nt, Artificial Sequence
  Description of Artificial Sequence: Synthetic oligonucleotide
aguacgaaugaauauuaag

SEQ ID NO: 1089996 - RNA, 19 nt, Artificial Sequence
  Description of Artificial Sequence: Synthetic oligonucleotide
auaaugaauacaccucagg

SEQ ID NO: 1089997 - RNA, 19 nt, Artificial Sequence
  Description of Artificial Sequence: Synthetic oligonucleotide
aaagaaugcaugauucaac

SEQ ID NO: 1089998 - RNA, 19 nt, Artificial Sequence
  Description of Artificial Sequence: Synthetic oligonucleotide
aacaguaguguauauucca

SEQ ID NO: 1089999 - RNA, 19 nt, Artificial Sequence
  Description of Artificial Sequence: Synthetic oligonucleotide
aucaugggaaguuuucggc

SEQ ID NO: 1090000 - RNA, 19 nt, Artificial Sequence
  Description of Artificial Sequence: Synthetic oligonucleotide
ucuaaacagggucuggaag

SEQ ID NO: 1090001 - RNA, 19 nt, Artificial Sequence
  Description of Artificial Sequence: Synthetic oligonucleotide
uuagaagguaacuuaguga

SEQ ID NO: 1090002 - RNA, 19 nt, Artificial Sequence
  Description of Artificial Sequence: Synthetic oligonucleotide
cacauugacaucuggaggc

SEQ ID NO: 1090003 - RNA, 19 nt, Artificial Sequence
  Description of Artificial Sequence: Synthetic oligonucleotide
accuaauaaguacagcagg

SEQ ID NO: 1090004 - RNA, 19 nt, Artificial Sequence
  Description of Artificial Sequence: Synthetic oligonucleotide
ucaaguuggccaauaauac

SEQ ID NO: 1090005 - RNA, 19 nt, Artificial Sequence
  Description of Artificial Sequence: Synthetic oligonucleotide
uaguauaccuaauaaguac

SEQ ID NO: 1090006 - RNA, 19 nt, Artificial Sequence
  Description of Artificial Sequence: Synthetic oligonucleotide
uaguguauauuccaaacuc

SEQ ID NO: 1090007 - RNA, 19 nt, Artificial Sequence
  Description of Artificial Sequence: Synthetic oligonucleotide
auggauaaccaaaaguagc

SEQ ID NO: 1090008 - RNA, 19 nt, Artificial Sequence
  Description of Artificial Sequence: Synthetic oligonucleotide
aaagcuauugugggaaccg

SEQ ID NO: 1090009 - RNA, 19 nt, Artificial Sequence
  Description of Artificial Sequence: Synthetic oligonucleotide
ggauaugaugcauagaagc

SEQ ID NO: 1090010 - RNA, 19 nt, Artificial Sequence
  Description of Artificial Sequence: Synthetic oligonucleotide
uuaacucuacacauguuac

SEQ ID NO: 1090011 - RNA, 19 nt, Artificial Sequence
  Description of Artificial Sequence: Synthetic oligonucleotide
agaguaauaauaaagucga

SEQ ID NO: 1090012 - RNA, 19 nt, Artificial Sequence
  Description of Artificial Sequence: Synthetic oligonucleotide
aaacaguaguguauauucc

SEQ ID NO: 1090013 - RNA, 19 nt, Artificial Sequence
  Description of Artificial Sequence: Synthetic oligonucleotide
ucucauaacaggauccuga

SEQ ID NO: 1090014 - RNA, 19 nt, Artificial Sequence
  Description of Artificial Sequence: Synthetic oligonucleotide
ugaacugcauuuauuuuca

SEQ ID NO: 1090015 - RNA, 19 nt, Artificial Sequence
  Description of Artificial Sequence: Synthetic oligonucleotide
uaccuaauaaguacagcag

SEQ ID NO: 1090016 - RNA, 19 nt, Artificial Sequence
  Description of Artificial Sequence: Synthetic oligonucleotide
aacuuuaggaggacaauuc

SEQ ID NO: 1090017 - RNA, 19 nt, Artificial Sequence
  Description of Artificial Sequence: Synthetic oligonucleotide
gaucaugggaaguuuucgg

SEQ ID NO: 1090018 - RNA, 19 nt, Artificial Sequence
  Description of Artificial Sequence: Synthetic oligonucleotide
ugucuuauugucaccaacu

SEQ ID NO: 1090019 - RNA, 19 nt, Artificial Sequence
  Description of Artificial Sequence: Synthetic oligonucleotide
ucccauacuagucacagaa

SEQ ID NO: 1090020 - RNA, 19 nt, Artificial Sequence
  Description of Artificial Sequence: Synthetic oligonucleotide
uuuucggcuaucccgguag

SEQ ID NO: 1090021 - RNA, 19 nt, Artificial Sequence
  Description of Artificial Sequence: Synthetic oligonucleotide
augaaagaaugcaugauuc

SEQ ID NO: 1090022 - RNA, 19 nt, Artificial Sequence
  Description of Artificial Sequence: Synthetic oligonucleotide
uaacaugaacaauauucag

SEQ ID NO: 1090023 - RNA, 19 nt, Artificial Sequence
  Description of Artificial Sequence: Synthetic oligonucleotide
uuaguauaccuaauaagua

SEQ ID NO: 1090024 - RNA, 19 nt, Artificial Sequence
  Description of Artificial Sequence: Synthetic oligonucleotide
uccuaagacaauuuuagua

SEQ ID NO: 1090025 - RNA, 19 nt, Artificial Sequence
  Description of Artificial Sequence: Synthetic oligonucleotide
uaacauagcaagcccaaga

SEQ ID NO: 1090026 - RNA, 19 nt, Artificial Sequence
  Description of Artificial Sequence: Synthetic oligonucleotide
uauaaagcuauugugggaa

SEQ ID NO: 1090027 - RNA, 19 nt, Artificial Sequence
  Description of Artificial Sequence: Synthetic oligonucleotide
caucuauaaagcuauugug

SEQ ID NO: 1090028 - RNA, 19 nt, Artificial Sequence
  Description of Artificial Sequence: Synthetic oligonucleotide
cuuagcaugaacaaggaua

SEQ ID NO: 1090029 - RNA, 19 nt, Artificial Sequence
  Description of Artificial Sequence: Synthetic oligonucleotide
aagaguagucaccuaugag

SEQ ID NO: 1090030 - RNA, 19 nt, Artificial Sequence
  Description of Artificial Sequence: Synthetic oligonucleotide
cuucauugacuaaauaaug

SEQ ID NO: 1090031 - RNA, 19 nt, Artificial Sequence
  Description of Artificial Sequence: Synthetic oligonucleotide
uaugcaaucaagguuuucu

SEQ ID NO: 1090032 - RNA, 19 nt, Artificial Sequence
  Description of Artificial Sequence: Synthetic oligonucleotide
caauguuaaacucaggaga

SEQ ID NO: 1090033 - RNA, 19 nt, Artificial Sequence
  Description of Artificial Sequence: Synthetic oligonucleotide
gaacucaccaaccauaaaa

SEQ ID NO: 1090034 - RNA, 19 nt, Artificial Sequence
  Description of Artificial Sequence: Synthetic oligonucleotide
acacauugacaucuggagg

SEQ ID NO: 1090035 - RNA, 19 nt, Artificial Sequence
  Description of Artificial Sequence: Synthetic oligonucleotide
guaacugucuuauugucac

SEQ ID NO: 1090036 - RNA, 19 nt, Artificial Sequence
  Description of Artificial Sequence: Synthetic oligonucleotide
ucaaacuuacauguaaaac

SEQ ID NO: 1090037 - RNA, 19 nt, Artificial Sequence
  Description of Artificial Sequence: Synthetic oligonucleotide
ugaagguuuaugguaaggc

SEQ ID NO: 1090038 - RNA, 19 nt, Artificial Sequence
  Description of Artificial Sequence: Synthetic oligonucleotide
guauagcacacauucauac

SEQ ID NO: 1090039 - RNA, 19 nt, Artificial Sequence
  Description of Artificial Sequence: Synthetic oligonucleotide
uguacacaaaccaagcauu

SEQ ID NO: 1090040 - RNA, 19 nt, Artificial Sequence
  Description of Artificial Sequence: Synthetic oligonucleotide
uagaguuaacucuacacau

SEQ ID NO: 1090041 - RNA, 19 nt, Artificial Sequence
  Description of Artificial Sequence: Synthetic oligonucleotide
agcauaauuccuuagucau

SEQ ID NO: 1090042 - RNA, 19 nt, Artificial Sequence
  Description of Artificial Sequence: Synthetic oligonucleotide
aauaaugaauacaccucag

SEQ ID NO: 1090043 - RNA, 19 nt, Artificial Sequence
  Description of Artificial Sequence: Synthetic oligonucleotide
uaauaaagucgaucauggg

SEQ ID NO: 1090044 - RNA, 19 nt, Artificial Sequence
  Description of Artificial Sequence: Synthetic oligonucleotide
auuuaugcaaucaagguuu

SEQ ID NO: 1090045 - RNA, 19 nt, Artificial Sequence
  Description of Artificial Sequence: Synthetic oligonucleotide
uucuaacauagcaagccca

SEQ ID NO: 1090046 - RNA, 19 nt, Artificial Sequence
  Description of Artificial Sequence: Synthetic oligonucleotide
guagucaccuaugaggacg

SEQ ID NO: 1090047 - RNA, 19 nt, Artificial Sequence
  Description of Artificial Sequence: Synthetic oligonucleotide
uuaagguguaaacauuuua

SEQ ID NO: 1090048 - RNA, 19 nt, Artificial Sequence
  Description of Artificial Sequence: Synthetic oligonucleotide
uaaccgacaaggcucaagu

SEQ ID NO: 1090049 - RNA, 19 nt, Artificial Sequence
  Description of Artificial Sequence: Synthetic oligonucleotide
aaacaagccaagccuuaag

SEQ ID NO: 1090050 - RNA, 19 nt, Artificial Sequence
  Description of Artificial Sequence: Synthetic oligonucleotide
uauauuccccacuuaauua

SEQ ID NO: 1090051 - RNA, 19 nt, Artificial Sequence
  Description of Artificial Sequence: Synthetic oligonucleotide
guacgaaugaauauuaaga

SEQ ID NO: 1090052 - RNA, 19 nt, Artificial Sequence
  Description of Artificial Sequence: Synthetic oligonucleotide
uggccaauaauacuguguc

SEQ ID NO: 1090053 - RNA, 19 nt, Artificial Sequence
  Description of Artificial Sequence: Synthetic oligonucleotide
uuugauggacuaugcaagc

SEQ ID NO: 1090054 - RNA, 19 nt, Artificial Sequence
  Description of Artificial Sequence: Synthetic oligonucleotide
cuguuaaccgacaaggcuc

SEQ ID NO: 1090055 - RNA, 19 nt, Artificial Sequence
  Description of Artificial Sequence: Synthetic oligonucleotide
aggacaauucacuugaauu

SEQ ID NO: 1090056 - RNA, 19 nt, Artificial Sequence
  Description of Artificial Sequence: Synthetic oligonucleotide
uauugucaccaacuuuagg

SEQ ID NO: 1090057 - RNA, 19 nt, Artificial Sequence
  Description of Artificial Sequence: Synthetic oligonucleotide
aaaguaucauauucagaaa

SEQ ID NO: 1090058 - RNA, 19 nt, Artificial Sequence
  Description of Artificial Sequence: Synthetic oligonucleotide
aggaggacaauucacuuga

SEQ ID NO: 1090059 - RNA, 19 nt, Artificial Sequence
  Description of Artificial Sequence: Synthetic oligonucleotide
uaguaacccucuaaacagg

SEQ ID NO: 1090060 - RNA, 19 nt, Artificial Sequence
  Description of Artificial Sequence: Synthetic oligonucleotide
acuuaauuacauuccagaa

SEQ ID NO: 1090061 - RNA, 19 nt, Artificial Sequence
  Description of Artificial Sequence: Synthetic oligonucleotide
uaacccucuaaacaggguc

SEQ ID NO: 1090062 - RNA, 19 nt, Artificial Sequence
  Description of Artificial Sequence: Synthetic oligonucleotide
cuccuguuaaccgacaagg

SEQ ID NO: 1090063 - RNA, 19 nt, Artificial Sequence
  Description of Artificial Sequence: Synthetic oligonucleotide
uauuaugauaugacauaac

SEQ ID NO: 1090064 - RNA, 19 nt, Artificial Sequence
  Description of Artificial Sequence: Synthetic oligonucleotide
cuugaugaagccgagcggc

SEQ ID NO: 1090065 - RNA, 19 nt, Artificial Sequence
  Description of Artificial Sequence: Synthetic oligonucleotide
aaaugugacguagaacugu

SEQ ID NO: 1090066 - RNA, 19 nt, Artificial Sequence
  Description of Artificial Sequence: Synthetic oligonucleotide
accgacaaggcucaaguug

SEQ ID NO: 1090067 - RNA, 19 nt, Artificial Sequence
  Description of Artificial Sequence: Synthetic oligonucleotide
ugaaguacgaaugaauauu

SEQ ID NO: 1090068 - RNA, 19 nt, Artificial Sequence
  Description of Artificial Sequence: Synthetic oligonucleotide
ucuaacauagcaagcccaa

SEQ ID NO: 1090069 - RNA, 19 nt, Artificial Sequence
  Description of Artificial Sequence: Synthetic oligonucleotide
guaucauauucagaaagcc

SEQ ID NO: 1090070 - RNA, 19 nt, Artificial Sequence
  Description of Artificial Sequence: Synthetic oligonucleotide
auuacauuccagaaggggu

SEQ ID NO: 1090071 - RNA, 19 nt, Artificial Sequence
  Description of Artificial Sequence: Synthetic oligonucleotide
uguaagagcuuuagcccag

SEQ ID NO: 1090072 - RNA, 19 nt, Artificial Sequence
  Description of Artificial Sequence: Synthetic oligonucleotide
uguuaaccgacaaggcuca

SEQ ID NO: 1090073 - RNA, 19 nt, Artificial Sequence
  Description of Artificial Sequence: Synthetic oligonucleotide
agguguaaacauuuuagaa

SEQ ID NO: 1090074 - RNA, 19 nt, Artificial Sequence
  Description of Artificial Sequence: Synthetic oligonucleotide
auaacaggauccugaaugu

SEQ ID NO: 1090075 - RNA, 19 nt, Artificial Sequence
  Description of Artificial Sequence: Synthetic oligonucleotide
gauaugaugcauagaagca

SEQ ID NO: 1090076 - RNA, 19 nt, Artificial Sequence
  Description of Artificial Sequence: Synthetic oligonucleotide
gaaguguagaguuaacucu

SEQ ID NO: 1090077 - RNA, 19 nt, Artificial Sequence
  Description of Artificial Sequence: Synthetic oligonucleotide
auaaagucgaucaugggaa

SEQ ID NO: 1090078 - RNA, 19 nt, Artificial Sequence
  Description of Artificial Sequence: Synthetic oligonucleotide
auaaagcuauugugggaac

SEQ ID NO: 1090079 - RNA, 19 nt, Artificial Sequence
  Description of Artificial Sequence: Synthetic oligonucleotide
uuggccaauaauacugugu

SEQ ID NO: 1090080 - RNA, 19 nt, Artificial Sequence
  Description of Artificial Sequence: Synthetic oligonucleotide
auagcaaagaagcaucauu

SEQ ID NO: 1090081 - RNA, 19 nt, Artificial Sequence
  Description of Artificial Sequence: Synthetic oligonucleotide
gaucccauacuagucacag

SEQ ID NO: 1090082 - RNA, 19 nt, Artificial Sequence
  Description of Artificial Sequence: Synthetic oligonucleotide
gauacauugagggauccca

SEQ ID NO: 1090083 - RNA, 19 nt, Artificial Sequence
  Description of Artificial Sequence: Synthetic oligonucleotide
acuuagugaaauuacuguu

SEQ ID NO: 1090084 - RNA, 19 nt, Artificial Sequence
  Description of Artificial Sequence: Synthetic oligonucleotide
guuaacucuacacauguua

SEQ ID NO: 1090085 - RNA, 19 nt, Artificial Sequence
  Description of Artificial Sequence: Synthetic oligonucleotide
auaugacauaacuuuucug

SEQ ID NO: 1090086 - RNA, 19 nt, Artificial Sequence
  Description of Artificial Sequence: Synthetic oligonucleotide
acuucauugacuaaauaau

SEQ ID NO: 1090087 - RNA, 19 nt, Artificial Sequence
  Description of Artificial Sequence: Synthetic oligonucleotide
uccccacuuaauuacauuc

SEQ ID NO: 1090088 - RNA, 19 nt, Artificial Sequence
  Description of Artificial Sequence: Synthetic oligonucleotide
acgaaugaauauuaagaaa

SEQ ID NO: 1090089 - RNA, 19 nt, Artificial Sequence
  Description of Artificial Sequence: Synthetic oligonucleotide
augagcauaauuccuuagu

SEQ ID NO: 1090090 - RNA, 19 nt, Artificial Sequence
  Description of Artificial Sequence: Synthetic oligonucleotide
auaucuguaagagcuuuag

SEQ ID NO: 1090091 - RNA, 19 nt, Artificial Sequence
  Description of Artificial Sequence: Synthetic oligonucleotide
ugacguagaacugugcgga

SEQ ID NO: 1090092 - RNA, 19 nt, Artificial Sequence
  Description of Artificial Sequence: Synthetic oligonucleotide
aaugugacguagaacugug

SEQ ID NO: 1090093 - RNA, 19 nt, Artificial Sequence
  Description of Artificial Sequence: Synthetic oligonucleotide
aguauaccuaauaaguaca

SEQ ID NO: 1090094 - RNA, 19 nt, Artificial Sequence
  Description of Artificial Sequence: Synthetic oligonucleotide
aagcccaagaaaccaccag

SEQ ID NO: 1090095 - RNA, 19 nt, Artificial Sequence
  Description of Artificial Sequence: Synthetic oligonucleotide
cauuugauggacuaugcaa

SEQ ID NO: 1090096 - RNA, 19 nt, Artificial Sequence
  Description of Artificial Sequence: Synthetic oligonucleotide
cacuuaauuacauuccaga

SEQ ID NO: 1090097 - RNA, 19 nt, Artificial Sequence
  Description of Artificial Sequence: Synthetic oligonucleotide
acuuuaggaggacaauuca

SEQ ID NO: 1090098 - RNA, 19 nt, Artificial Sequence
  Description of Artificial Sequence: Synthetic oligonucleotide
uccugaauguucaaacuua

SEQ ID NO: 1090099 - RNA, 19 nt, Artificial Sequence
  Description of Artificial Sequence: Synthetic oligonucleotide
ugaugcauagaagcaaaca

SEQ ID NO: 1090100 - RNA, 19 nt, Artificial Sequence
  Description of Artificial Sequence: Synthetic oligonucleotide
uuccuauauuaugauauga

SEQ ID NO: 1090101 - RNA, 19 nt, Artificial Sequence
  Description of Artificial Sequence: Synthetic oligonucleotide
ugagaaugcccacaucuau

SEQ ID NO: 1090102 - RNA, 19 nt, Artificial Sequence
  Description of Artificial Sequence: Synthetic oligonucleotide
uguccgguagcuauuuuaa

SEQ ID NO: 1090103 - RNA, 19 nt, Artificial Sequence
  Description of Artificial Sequence: Synthetic oligonucleotide
uucuuagcaugaacaagga

SEQ ID NO: 1090104 - RNA, 19 nt, Artificial Sequence
  Description of Artificial Sequence: Synthetic oligonucleotide
uaaagucgaucaugggaag

SEQ ID NO: 1090105 - RNA, 19 nt, Artificial Sequence
  Description of Artificial Sequence: Synthetic oligonucleotide
uccgguagcuauuuuaaua

SEQ ID NO: 1090106 - RNA, 19 nt, Artificial Sequence
  Description of Artificial Sequence: Synthetic oligonucleotide
uaaagcuauugugggaacc

SEQ ID NO: 1090107 - RNA, 19 nt, Artificial Sequence
  Description of Artificial Sequence: Synthetic oligonucleotide
aguaacccucuaaacaggg

SEQ ID NO: 1090108 - RNA, 19 nt, Artificial Sequence
  Description of Artificial Sequence: Synthetic oligonucleotide
ccauacuagucacagaacc

SEQ ID NO: 1090109 - RNA, 19 nt, Artificial Sequence
  Description of Artificial Sequence: Synthetic oligonucleotide
agcauuuccuccccaaagu

SEQ ID NO: 1090110 - RNA, 19 nt, Artificial Sequence
  Description of Artificial Sequence: Synthetic oligonucleotide
aguagucaccuaugaggac

SEQ ID NO: 1090111 - RNA, 19 nt, Artificial Sequence
  Description of Artificial Sequence: Synthetic oligonucleotide
uguauauuccaaacucauu

SEQ ID NO: 1090112 - RNA, 19 nt, Artificial Sequence
  Description of Artificial Sequence: Synthetic oligonucleotide
uccuguuaaccgacaaggc

SEQ ID NO: 1090113 - RNA, 19 nt, Artificial Sequence
  Description of Artificial Sequence: Synthetic oligonucleotide
guauaccuaauaaguacag

SEQ ID NO: 1090114 - RNA, 19 nt, Artificial Sequence
  Description of Artificial Sequence: Synthetic oligonucleotide
gacaauuuuaguauaccua

SEQ ID NO: 1090115 - RNA, 19 nt, Artificial Sequence
  Description of Artificial Sequence: Synthetic oligonucleotide
acuuacauguaaaaccaca

SEQ ID NO: 1090116 - RNA, 19 nt, Artificial Sequence
  Description of Artificial Sequence: Synthetic oligonucleotide
caguacaagaacacaaaga

SEQ ID NO: 1090117 - RNA, 19 nt, Artificial Sequence
  Description of Artificial Sequence: Synthetic oligonucleotide
gaguagucaccuaugagga

SEQ ID NO: 1090118 - RNA, 19 nt, Artificial Sequence
  Description of Artificial Sequence: Synthetic oligonucleotide
ugcuccuaagacaauuuua

SEQ ID NO: 1090119 - RNA, 19 nt, Artificial Sequence
  Description of Artificial Sequence: Synthetic oligonucleotide
cuuacuggguuccuuuaug

SEQ ID NO: 1090120 - RNA, 19 nt, Artificial Sequence
  Description of Artificial Sequence: Synthetic oligonucleotide
gacuaugcaagcuggucuc

SEQ ID NO: 1090121 - RNA, 19 nt, Artificial Sequence
  Description of Artificial Sequence: Synthetic oligonucleotide
auugagggaucccauacua

SEQ ID NO: 1090122 - RNA, 19 nt, Artificial Sequence
  Description of Artificial Sequence: Synthetic oligonucleotide
guaucaucucauaacagga

SEQ ID NO: 1090123 - RNA, 19 nt, Artificial Sequence
  Description of Artificial Sequence: Synthetic oligonucleotide
agaaugcaugauucaaccu

SEQ ID NO: 1090124 - RNA, 19 nt, Artificial Sequence
  Description of Artificial Sequence: Synthetic oligonucleotide
agauacauugagggauccc

SEQ ID NO: 1090125 - RNA, 19 nt, Artificial Sequence
  Description of Artificial Sequence: Synthetic oligonucleotide
aacugugcggaagaagagu

SEQ ID NO: 1090126 - RNA, 19 nt, Artificial Sequence
  Description of Artificial Sequence: Synthetic oligonucleotide
gcuccuaagacaauuuuag

SEQ ID NO: 1090127 - RNA, 19 nt, Artificial Sequence
  Description of Artificial Sequence: Synthetic oligonucleotide
cuucucaagauguuggcaa

SEQ ID NO: 1090128 - RNA, 19 nt, Artificial Sequence
  Description of Artificial Sequence: Synthetic oligonucleotide
auauuccaaacucauucuu

SEQ ID NO: 1090129 - RNA, 19 nt, Artificial Sequence
  Description of Artificial Sequence: Synthetic oligonucleotide
cauacuagucacagaacca

SEQ ID NO: 1090130 - RNA, 19 nt, Artificial Sequence
  Description of Artificial Sequence: Synthetic oligonucleotide
cuaauaaguacagcagguc

SEQ ID NO: 1090131 - RNA, 19 nt, Artificial Sequence
  Description of Artificial Sequence: Synthetic oligonucleotide
uuaaccgacaaggcucaag

SEQ ID NO: 1090132 - RNA, 19 nt, Artificial Sequence
  Description of Artificial Sequence: Synthetic oligonucleotide
ucgaucaugggaaguuuuc

SEQ ID NO: 1090133 - RNA, 19 nt, Artificial Sequence
  Description of Artificial Sequence: Synthetic oligonucleotide
ugugcggaagaagaguagu

SEQ ID NO: 1090134 - RNA, 19 nt, Artificial Sequence
  Description of Artificial Sequence: Synthetic oligonucleotide
uucucaagauguuggcaac

SEQ ID NO: 1090135 - RNA, 19 nt, Artificial Sequence
  Description of Artificial Sequence: Synthetic oligonucleotide
gauucaaccugaauggaua

SEQ ID NO: 1090136 - RNA, 19 nt, Artificial Sequence
  Description of Artificial Sequence: Synthetic oligonucleotide
aaagucgaucaugggaagu

SEQ ID NO: 1090137 - RNA, 19 nt, Artificial Sequence
  Description of Artificial Sequence: Synthetic oligonucleotide
aagguaacuuagugaaauu

SEQ ID NO: 1090138 - RNA, 19 nt, Artificial Sequence
  Description of Artificial Sequence: Synthetic oligonucleotide
aaguguagaguuaacucua

SEQ ID NO: 1090139 - RNA, 19 nt, Artificial Sequence
  Description of Artificial Sequence: Synthetic oligonucleotide
auacuagucacagaaccaa

SEQ ID NO: 1090140 - RNA, 19 nt, Artificial Sequence
  Description of Artificial Sequence: Synthetic oligonucleotide
uaagagcuuuagcccaggc

SEQ ID NO: 1090141 - RNA, 19 nt, Artificial Sequence
  Description of Artificial Sequence: Synthetic oligonucleotide
uuccuuagucauccuuuug

SEQ ID NO: 1090142 - RNA, 19 nt, Artificial Sequence
  Description of Artificial Sequence: Synthetic oligonucleotide
aguguagaguuaacucuac

SEQ ID NO: 1090143 - RNA, 19 nt, Artificial Sequence
  Description of Artificial Sequence: Synthetic oligonucleotide
uuuugcccuuaaauccgcc

SEQ ID NO: 1090144 - RNA, 19 nt, Artificial Sequence
  Description of Artificial Sequence: Synthetic oligonucleotide
cuauaaagcuauuguggga

SEQ ID NO: 1090145 - RNA, 19 nt, Artificial Sequence
  Description of Artificial Sequence: Synthetic oligonucleotide
gaaguacgaaugaauauua

SEQ ID NO: 1090146 - RNA, 19 nt, Artificial Sequence
  Description of Artificial Sequence: Synthetic oligonucleotide
ccgacaaggcucaaguugg

SEQ ID NO: 1090147 - RNA, 19 nt, Artificial Sequence
  Description of Artificial Sequence: Synthetic oligonucleotide
ugaauacaccucaggcaac

SEQ ID NO: 1090148 - RNA, 19 nt, Artificial Sequence
  Description of Artificial Sequence: Synthetic oligonucleotide
ugcaaaugugacguagaac

SEQ ID NO: 1090149 - RNA, 19 nt, Artificial Sequence
  Description of Artificial Sequence: Synthetic oligonucleotide
agaguuaacucuacacaug

SEQ ID NO: 1090150 - RNA, 19 nt, Artificial Sequence
  Description of Artificial Sequence: Synthetic oligonucleotide
aaauccgccacagguggca

SEQ ID NO: 1090151 - RNA, 19 nt, Artificial Sequence
  Description of Artificial Sequence: Synthetic oligonucleotide
cugucuuauugucaccaac

SEQ ID NO: 1090152 - RNA, 19 nt, Artificial Sequence
  Description of Artificial Sequence: Synthetic oligonucleotide
agcuauuuuaauaucugua

SEQ ID NO: 1090153 - RNA, 19 nt, Artificial Sequence
  Description of Artificial Sequence: Synthetic oligonucleotide
uuuacaucucauguuucua

SEQ ID NO: 1090154 - RNA, 19 nt, Artificial Sequence
  Description of Artificial Sequence: Synthetic oligonucleotide
gcuauugugggaaccgugg

SEQ ID NO: 1090155 - RNA, 19 nt, Artificial Sequence
  Description of Artificial Sequence: Synthetic oligonucleotide
ggaaccgugguuucuaaca

SEQ ID NO: 1090156 - RNA, 19 nt, Artificial Sequence
  Description of Artificial Sequence: Synthetic oligonucleotide
ccuauauuaugauaugaca

SEQ ID NO: 1090157 - RNA, 19 nt, Artificial Sequence
  Description of Artificial Sequence: Synthetic oligonucleotide
aggauaugaugcauagaag

SEQ ID NO: 1090158 - RNA, 19 nt, Artificial Sequence
  Description of Artificial Sequence: Synthetic oligonucleotide
aagucgaucaugggaaguu

SEQ ID NO: 1090159 - RNA, 19 nt, Artificial Sequence
  Description of Artificial Sequence: Synthetic oligonucleotide
uaacugucuuauugucacc

SEQ ID NO: 1090160 - RNA, 19 nt, Artificial Sequence
  Description of Artificial Sequence: Synthetic oligonucleotide
gaauacaccucaggcaaca

SEQ ID NO: 1090161 - RNA, 19 nt, Artificial Sequence
  Description of Artificial Sequence: Synthetic oligonucleotide
uaaauccgccacagguggc

SEQ ID NO: 1090162 - RNA, 19 nt, Artificial Sequence
  Description of Artificial Sequence: Synthetic oligonucleotide
ugcaugauucaaccugaau

SEQ ID NO: 1090163 - RNA, 19 nt, Artificial Sequence
  Description of Artificial Sequence: Synthetic oligonucleotide
uuccaaacucauucuuccu

SEQ ID NO: 1090164 - RNA, 19 nt, Artificial Sequence
  Description of Artificial Sequence: Synthetic oligonucleotide
acgcauuugauggacuaug

SEQ ID NO: 1090165 - RNA, 19 nt, Artificial Sequence
  Description of Artificial Sequence: Synthetic oligonucleotide
ugacgcauuugauggacua

SEQ ID NO: 1090166 - RNA, 19 nt, Artificial Sequence
  Description of Artificial Sequence: Synthetic oligonucleotide
guuggccaauaauacugug

SEQ ID NO: 1090167 - RNA, 19 nt, Artificial Sequence
  Description of Artificial Sequence: Synthetic oligonucleotide
uaaggauaugaugcauaga

SEQ ID NO: 1090168 - RNA, 19 nt, Artificial Sequence
  Description of Artificial Sequence: Synthetic oligonucleotide
auauacccagucuucucaa

SEQ ID NO: 1090169 - RNA, 19 nt, Artificial Sequence
  Description of Artificial Sequence: Synthetic oligonucleotide
gucaccaacuuuaggagga

SEQ ID NO: 1090170 - RNA, 19 nt, Artificial Sequence
  Description of Artificial Sequence: Synthetic oligonucleotide
uacauugagggaucccaua

SEQ ID NO: 1090171 - RNA, 19 nt, Artificial Sequence
  Description of Artificial Sequence: Synthetic oligonucleotide
cuugagcgggcugagguug

SEQ ID NO: 1090172 - RNA, 19 nt, Artificial Sequence
  Description of Artificial Sequence: Synthetic oligonucleotide
cuaacauagcaagcccaag

SEQ ID NO: 1090173 - RNA, 19 nt, Artificial Sequence
  Description of Artificial Sequence: Synthetic oligonucleotide
auaaccaaaaguagcugua

SEQ ID NO: 1090174 - RNA, 19 nt, Artificial Sequence
  Description of Artificial Sequence: Synthetic oligonucleotide
aguauauuccccacuuaau

SEQ ID NO: 1090175 - RNA, 19 nt, Artificial Sequence
  Description of Artificial Sequence: Synthetic oligonucleotide
guaacuuagugaaauuacu

SEQ ID NO: 1090176 - RNA, 19 nt, Artificial Sequence
  Description of Artificial Sequence: Synthetic oligonucleotide
aaguacgaaugaauauuaa

SEQ ID NO: 1090177 - RNA, 19 nt, Artificial Sequence
  Description of Artificial Sequence: Synthetic oligonucleotide
gaggcggaugaaagaaugc

SEQ ID NO: 1090178 - RNA, 19 nt, Artificial Sequence
  Description of Artificial Sequence: Synthetic oligonucleotide
acucuacacauguuacaau

SEQ ID NO: 1090179 - RNA, 19 nt, Artificial Sequence
  Description of Artificial Sequence: Synthetic oligonucleotide
ccugaauguucaaacuuac

SEQ ID NO: 1090180 - RNA, 19 nt, Artificial Sequence
  Description of Artificial Sequence: Synthetic oligonucleotide
cugaauguucaaacuuaca

SEQ ID NO: 1090181 - RNA, 19 nt, Artificial Sequence
  Description of Artificial Sequence: Synthetic oligonucleotide
caagaacacaaagacugca

SEQ ID NO: 1090182 - RNA, 19 nt, Artificial Sequence
  Description of Artificial Sequence: Synthetic oligonucleotide
augugacguagaacugugc

SEQ ID NO: 1090183 - RNA, 19 nt, Artificial Sequence
  Description of Artificial Sequence: Synthetic oligonucleotide
gugguuucuaacauagcaa

SEQ ID NO: 1090184 - RNA, 19 nt, Artificial Sequence
  Description of Artificial Sequence: Synthetic oligonucleotide
cacagaaccaaagugacau

SEQ ID NO: 1090185 - RNA, 19 nt, Artificial Sequence
  Description of Artificial Sequence: Synthetic oligonucleotide
augauucaaccugaaugga

SEQ ID NO: 1090186 - RNA, 19 nt, Artificial Sequence
  Description of Artificial Sequence: Synthetic oligonucleotide
uauacccagucuucucaau

SEQ ID NO: 1090187 - RNA, 19 nt, Artificial Sequence
  Description of Artificial Sequence: Synthetic oligonucleotide
acguagaacugugcggaag

SEQ ID NO: 1090188 - RNA, 19 nt, Artificial Sequence
  Description of Artificial Sequence: Synthetic oligonucleotide
acguggucuucccacuuca

SEQ ID NO: 1090189 - RNA, 19 nt, Artificial Sequence
  Description of Artificial Sequence: Synthetic oligonucleotide
aucucauaacaggauccug

SEQ ID NO: 1090190 - RNA, 19 nt, Artificial Sequence
  Description of Artificial Sequence: Synthetic oligonucleotide
guuuugcccuuaaauccgc

SEQ ID NO: 1090191 - RNA, 19 nt, Artificial Sequence
  Description of Artificial Sequence: Synthetic oligonucleotide
uuucggcuaucccgguaga

SEQ ID NO: 1090192 - RNA, 19 nt, Artificial Sequence
  Description of Artificial Sequence: Synthetic oligonucleotide
aguuggccaauaauacugu

SEQ ID NO: 1090193 - RNA, 19 nt, Artificial Sequence
  Description of Artificial Sequence: Synthetic oligonucleotide
auaaguacagcaggucauu

SEQ ID NO: 1090194 - RNA, 19 nt, Artificial Sequence
  Description of Artificial Sequence: Synthetic oligonucleotide
ccccacuuaauuacauucc

SEQ ID NO: 1090195 - RNA, 19 nt, Artificial Sequence
  Description of Artificial Sequence: Synthetic oligonucleotide
ggacaauucacuugaauuu

SEQ ID NO: 1090196 - RNA, 19 nt, Artificial Sequence
  Description of Artificial Sequence: Synthetic oligonucleotide
gugaaguacgaaugaauau

SEQ ID NO: 1090197 - RNA, 19 nt, Artificial Sequence
  Description of Artificial Sequence: Synthetic oligonucleotide
cucuacacauguuacaauu

SEQ ID NO: 1090198 - RNA, 19 nt, Artificial Sequence
  Description of Artificial Sequence: Synthetic oligonucleotide
cagauacauugagggaucc

SEQ ID NO: 1090199 - RNA, 19 nt, Artificial Sequence
  Description of Artificial Sequence: Synthetic oligonucleotide
acaguauauuccccacuua

SEQ ID NO: 1090200 - RNA, 19 nt, Artificial Sequence
  Description of Artificial Sequence: Synthetic oligonucleotide
gcggaagaagaguagucac

SEQ ID NO: 1090201 - RNA, 19 nt, Artificial Sequence
  Description of Artificial Sequence: Synthetic oligonucleotide
ggccaauaauacugugucc

SEQ ID NO: 1090202 - RNA, 19 nt, Artificial Sequence
  Description of Artificial Sequence: Synthetic oligonucleotide
gagaaugcccacaucuaua

SEQ ID NO: 1090203 - RNA, 19 nt, Artificial Sequence
  Description of Artificial Sequence: Synthetic oligonucleotide
ugguaaggcuuaaggugua

SEQ ID NO: 1090204 - RNA, 19 nt, Artificial Sequence
  Description of Artificial Sequence: Synthetic oligonucleotide
gacguggucuucccacuuc

SEQ ID NO: 1090205 - RNA, 19 nt, Artificial Sequence
  Description of Artificial Sequence: Synthetic oligonucleotide
cgugguuucuaacauagca

SEQ ID NO: 1090206 - RNA, 19 nt, Artificial Sequence
  Description of Artificial Sequence: Synthetic oligonucleotide
ugugggaaccgugguuucu

SEQ ID NO: 1090207 - RNA, 19 nt, Artificial Sequence
  Description of Artificial Sequence: Synthetic oligonucleotide
uugagcgggcugagguuga

SEQ ID NO: 1090208 - RNA, 19 nt, Artificial Sequence
  Description of Artificial Sequence: Synthetic oligonucleotide
aguuuucggcuaucccggu

SEQ ID NO: 1090209 - RNA, 19 nt, Artificial Sequence
  Description of Artificial Sequence: Synthetic oligonucleotide
gaaccgugguuucuaacau

SEQ ID NO: 1090210 - RNA, 19 nt, Artificial Sequence
  Description of Artificial Sequence: Synthetic oligonucleotide
gaggacaauucacuugaau

SEQ ID NO: 1090211 - RNA, 19 nt, Artificial Sequence
  Description of Artificial Sequence: Synthetic oligonucleotide
guguccgguagcuauuuua

SEQ ID NO: 1090212 - RNA, 19 nt, Artificial Sequence
  Description of Artificial Sequence: Synthetic oligonucleotide
ccuuaaauccgccacaggu

SEQ ID NO: 1090213 - RNA, 19 nt, Artificial Sequence
  Description of Artificial Sequence: Synthetic oligonucleotide
agccgagcggcuccuugag

SEQ ID NO: 1090214 - RNA, 19 nt, Artificial Sequence
  Description of Artificial Sequence: Synthetic oligonucleotide
agcugacgcauuugaugga

SEQ ID NO: 1090215 - RNA, 19 nt, Artificial Sequence
  Description of Artificial Sequence: Synthetic oligonucleotide
caagccuuaaggauaugau

SEQ ID NO: 1090216 - RNA, 19 nt, Artificial Sequence
  Description of Artificial Sequence: Synthetic oligonucleotide
uuucaaguccuugcuccua

SEQ ID NO: 1090217 - RNA, 19 nt, Artificial Sequence
  Description of Artificial Sequence: Synthetic oligonucleotide
aucccauacuagucacaga

SEQ ID NO: 1090218 - RNA, 19 nt, Artificial Sequence
  Description of Artificial Sequence: Synthetic oligonucleotide
ggacuaugcaagcuggucu

SEQ ID NO: 1090219 - RNA, 19 nt, Artificial Sequence
  Description of Artificial Sequence: Synthetic oligonucleotide
ccugaauggauaaccaaaa

SEQ ID NO: 1090220 - RNA, 19 nt, Artificial Sequence
  Description of Artificial Sequence: Synthetic oligonucleotide
uccgccacagguggcaaaa

SEQ ID NO: 1090221 - RNA, 19 nt, Artificial Sequence
  Description of Artificial Sequence: Synthetic oligonucleotide
cacuucacaucacacacau

SEQ ID NO: 1090222 - RNA, 19 nt, Artificial Sequence
  Description of Artificial Sequence: Synthetic oligonucleotide
auacauugagggaucccau

SEQ ID NO: 1090223 - RNA, 19 nt, Artificial Sequence
  Description of Artificial Sequence: Synthetic oligonucleotide
guguauauuccaaacucau

SEQ ID NO: 1090224 - RNA, 19 nt, Artificial Sequence
  Description of Artificial Sequence: Synthetic oligonucleotide
uugugggaaccgugguuuc

SEQ ID NO: 1090225 - RNA, 19 nt, Artificial Sequence
  Description of Artificial Sequence: Synthetic oligonucleotide
uggcaacaaggcacaguau

SEQ ID NO: 1090226 - RNA, 19 nt, Artificial Sequence
  Description of Artificial Sequence: Synthetic oligonucleotide
gcaagcccaagaaaccacc

SEQ ID NO: 1090227 - RNA, 19 nt, Artificial Sequence
  Description of Artificial Sequence: Synthetic oligonucleotide
agcuuuagcccaggccgag

SEQ ID NO: 1090228 - RNA, 19 nt, Artificial Sequence
  Description of Artificial Sequence: Synthetic oligonucleotide
ccuaauaaguacagcaggu

SEQ ID NO: 1090229 - RNA, 19 nt, Artificial Sequence
  Description of Artificial Sequence: Synthetic oligonucleotide
gccuuaaggauaugaugca

SEQ ID NO: 1090230 - RNA, 19 nt, Artificial Sequence
  Description of Artificial Sequence: Synthetic oligonucleotide
ggccgaggaacucaccaac

SEQ ID NO: 1090231 - RNA, 19 nt, Artificial Sequence
  Description of Artificial Sequence: Synthetic oligonucleotide
caccucaggcaacagaagu

SEQ ID NO: 1090232 - RNA, 19 nt, Artificial Sequence
  Description of Artificial Sequence: Synthetic oligonucleotide
cuuaagguguaaacauuuu

SEQ ID NO: 1090233 - RNA, 19 nt, Artificial Sequence
  Description of Artificial Sequence: Synthetic oligonucleotide
uguguccgguagcuauuuu

SEQ ID NO: 1090234 - RNA, 19 nt, Artificial Sequence
  Description of Artificial Sequence: Synthetic oligonucleotide
gacguagaacugugcggaa

SEQ ID NO: 1090235 - RNA, 19 nt, Artificial Sequence
  Description of Artificial Sequence: Synthetic oligonucleotide
gcugacgcauuugauggac

SEQ ID NO: 1090236 - RNA, 19 nt, Artificial Sequence
  Description of Artificial Sequence: Synthetic oligonucleotide
agucgaucaugggaaguuu

SEQ ID NO: 1090237 - RNA, 19 nt, Artificial Sequence
  Description of Artificial Sequence: Synthetic oligonucleotide
cuccuaagacaauuuuagu

SEQ ID NO: 1090238 - RNA, 19 nt, Artificial Sequence
  Description of Artificial Sequence: Synthetic oligonucleotide
aauccgccacagguggcaa

SEQ ID NO: 1090239 - RNA, 19 nt, Artificial Sequence
  Description of Artificial Sequence: Synthetic oligonucleotide
caauaauacuguguccggu

SEQ ID NO: 1090240 - RNA, 19 nt, Artificial Sequence
  Description of Artificial Sequence: Synthetic oligonucleotide
ggcacaguauagcacacau

SEQ ID NO: 1090241 - RNA, 19 nt, Artificial Sequence
  Description of Artificial Sequence: Synthetic oligonucleotide
cuauugugggaaccguggu

SEQ ID NO: 1090242 - RNA, 19 nt, Artificial Sequence
  Description of Artificial Sequence: Synthetic oligonucleotide
aggcacaguauagcacaca

SEQ ID NO: 1090243 - RNA, 19 nt, Artificial Sequence
  Description of Artificial Sequence: Synthetic oligonucleotide
acagcuuacuggguuccuu

SEQ ID NO: 1090244 - RNA, 19 nt, Artificial Sequence
  Description of Artificial Sequence: Synthetic oligonucleotide
guuuucggcuaucccggua

SEQ ID NO: 1090245 - RNA, 19 nt, Artificial Sequence
  Description of Artificial Sequence: Synthetic oligonucleotide
ugggaaguuuucggcuauc

SEQ ID NO: 1090246 - RNA, 19 nt, Artificial Sequence
  Description of Artificial Sequence: Synthetic oligonucleotide
caucucauaacaggauccu

SEQ ID NO: 1090247 - RNA, 19 nt, Artificial Sequence
  Description of Artificial Sequence: Synthetic oligonucleotide
caacuuuaggaggacaauu

SEQ ID NO: 1090248 - RNA, 19 nt, Artificial Sequence
  Description of Artificial Sequence: Synthetic oligonucleotide
ccuguuaaccgacaaggcu

SEQ ID NO: 1090249 - RNA, 19 nt, Artificial Sequence
  Description of Artificial Sequence: Synthetic oligonucleotide
gggaaccgugguuucuaac

SEQ ID NO: 1090250 - RNA, 19 nt, Artificial Sequence
  Description of Artificial Sequence: Synthetic oligonucleotide
cuaugaggacguggucuuc

SEQ ID NO: 1090251 - RNA, 19 nt, Artificial Sequence
  Description of Artificial Sequence: Synthetic oligonucleotide
ggguugggaugccuccuug

SEQ ID NO: 1090252 - RNA, 19 nt, Artificial Sequence
  Description of Artificial Sequence: Synthetic oligonucleotide
gcuuaagguguaaacauuu

SEQ ID NO: 1090253 - RNA, 19 nt, Artificial Sequence
  Description of Artificial Sequence: Synthetic oligonucleotide
ccgguagcuauuuuaauau

SEQ ID NO: 1090254 - RNA, 19 nt, Artificial Sequence
  Description of Artificial Sequence: Synthetic oligonucleotide
gaguaauaauaaagucgau

SEQ ID NO: 1090255 - RNA, 19 nt, Artificial Sequence
  Description of Artificial Sequence: Synthetic oligonucleotide
gcuuuagcccaggccgagg

SEQ ID NO: 1090256 - RNA, 19 nt, Artificial Sequence
  Description of Artificial Sequence: Synthetic oligonucleotide
caccaacuuuaggaggaca

SEQ ID NO: 1090257 - RNA, 19 nt, Artificial Sequence
  Description of Artificial Sequence: Synthetic oligonucleotide
ggcucaaguuggccaauaa

SEQ ID NO: 1090258 - RNA, 19 nt, Artificial Sequence
  Description of Artificial Sequence: Synthetic oligonucleotide
ggaacucaccaaccauaaa

SEQ ID NO: 1090259 - RNA, 19 nt, Artificial Sequence
  Description of Artificial Sequence: Synthetic oligonucleotide
guaacccucuaaacagggu

SEQ ID NO: 1090260 - RNA, 19 nt, Artificial Sequence
  Description of Artificial Sequence: Synthetic oligonucleotide
gcucaaguuggccaauaau

SEQ ID NO: 1090261 - RNA, 19 nt, Artificial Sequence
  Description of Artificial Sequence: Synthetic oligonucleotide
auccgccacagguggcaaa

SEQ ID NO: 1090262 - RNA, 19 nt, Artificial Sequence
  Description of Artificial Sequence: Synthetic oligonucleotide
ccgugguuucuaacauagc

SEQ ID NO: 1090263 - RNA, 19 nt, Artificial Sequence
  Description of Artificial Sequence: Synthetic oligonucleotide
gcaaacaguaguguauauu

SEQ ID NO: 1090264 - RNA, 19 nt, Artificial Sequence
  Description of Artificial Sequence: Synthetic oligonucleotide
cuaugcaagcuggucuccu

SEQ ID NO: 1090265 - RNA, 19 nt, Artificial Sequence
  Description of Artificial Sequence: Synthetic oligonucleotide
gagcgggcugagguugauc

SEQ ID NO: 1090266 - RNA, 19 nt, Artificial Sequence
  Description of Artificial Sequence: Synthetic oligonucleotide
gucgaucaugggaaguuuu

SEQ ID NO: 1090267 - RNA, 19 nt, Artificial Sequence
  Description of Artificial Sequence: Synthetic oligonucleotide
ugagcgggcugagguugau

SEQ ID NO: 1090268 - RNA, 19 nt, Artificial Sequence
  Description of Artificial Sequence: Synthetic oligonucleotide
gguaaggcuuaagguguaa

SEQ ID NO: 1090269 - RNA, 19 nt, Artificial Sequence
  Description of Artificial Sequence: Synthetic oligonucleotide
gcuccuugagcgggcugag

SEQ ID NO: 1090270 - RNA, 19 nt, Artificial Sequence
  Description of Artificial Sequence: Synthetic oligonucleotide
gcaagcuggucuccuugua

SEQ ID NO: 1090271 - RNA, 19 nt, Artificial Sequence
  Description of Artificial Sequence: Synthetic oligonucleotide
ggcuuaagguguaaacauu

SEQ ID NO: 1090272 - RNA, 19 nt, Artificial Sequence
  Description of Artificial Sequence: Synthetic oligonucleotide
guuaaccgacaaggcucaa

SEQ ID NO: 1090273 - RNA, 19 nt, Artificial Sequence
  Description of Artificial Sequence: Synthetic oligonucleotide
ccuaugaggacguggucuu

SEQ ID NO: 1090274 - RNA, 19 nt, Artificial Sequence
  Description of Artificial Sequence: Synthetic oligonucleotide
ccaacuuuaggaggacaau

SEQ ID NO: 1090275 - RNA, 19 nt, Artificial Sequence
  Description of Artificial Sequence: Synthetic oligonucleotide
gccaagccuuaaggauaug

SEQ ID NO: 1090276 - RNA, 19 nt, Artificial Sequence
  Description of Artificial Sequence: Synthetic oligonucleotide
ccuugagcgggcugagguu

SEQ ID NO: 1090277 - RNA, 19 nt, Artificial Sequence
  Description of Artificial Sequence: Synthetic oligonucleotide
aaaucuacaguucuaugac

SEQ ID NO: 1090278 - RNA, 19 nt, Artificial Sequence
  Description of Artificial Sequence: Synthetic oligonucleotide
agaauaugaacacaagagc

SEQ ID NO: 1090279 - RNA, 19 nt, Artificial Sequence
  Description of Artificial Sequence: Synthetic oligonucleotide
ucaaaguguaaucagaacu

SEQ ID NO: 1090280 - RNA, 19 nt, Artificial Sequence
  Description of Artificial Sequence: Synthetic oligonucleotide
aaaaccaacuuuccccucc

SEQ ID NO: 1090281 - RNA, 19 nt, Artificial Sequence
  Description of Artificial Sequence: Synthetic oligonucleotide
uuugcuaguauccacaagu

SEQ ID NO: 1090282 - RNA, 19 nt, Artificial Sequence
  Description of Artificial Sequence: Synthetic oligonucleotide
uaaaguugagucuagugag

SEQ ID NO: 1090283 - RNA, 19 nt, Artificial Sequence
  Description of Artificial Sequence: Synthetic oligonucleotide
ugagauuacaaagaaaacc

SEQ ID NO: 1090284 - RNA, 19 nt, Artificial Sequence
  Description of Artificial Sequence: Synthetic oligonucleotide
aaacccuaggccaacaugc

SEQ ID NO: 1090285 - RNA, 19 nt, Artificial Sequence
  Description of Artificial Sequence: Synthetic oligonucleotide
gagaauaugaacacaagag

SEQ ID NO: 1090286 - RNA, 19 nt, Artificial Sequence
  Description of Artificial Sequence: Synthetic oligonucleotide
aaggcgaaggcaccgaagc

SEQ ID NO: 1090287 - RNA, 19 nt, Artificial Sequence
  Description of Artificial Sequence: Synthetic oligonucleotide
aaugagaggcucauggucc

SEQ ID NO: 1090288 - RNA, 19 nt, Artificial Sequence
  Description of Artificial Sequence: Synthetic oligonucleotide
gagauuaauagcuaggaga

SEQ ID NO: 1090289 - RNA, 19 nt, Artificial Sequence
  Description of Artificial Sequence: Synthetic oligonucleotide
acacauugagauuaauagc

SEQ ID NO: 1090290 - RNA, 19 nt, Artificial Sequence
  Description of Artificial Sequence: Synthetic oligonucleotide
agagaaaccagcuccgcgc

SEQ ID NO: 1090291 - RNA, 19 nt, Artificial Sequence
  Description of Artificial Sequence: Synthetic oligonucleotide
acuuaaguaacuccauugg

SEQ ID NO: 1090292 - RNA, 19 nt, Artificial Sequence
  Description of Artificial Sequence: Synthetic oligonucleotide
uccauugguaaacaagggg

SEQ ID NO: 1090293 - RNA, 19 nt, Artificial Sequence
  Description of Artificial Sequence: Synthetic oligonucleotide
agcuaggagaucuaggaac

SEQ ID NO: 1090294 - RNA, 19 nt, Artificial Sequence
  Description of Artificial Sequence: Synthetic oligonucleotide
aggacuugcaauuugcuag

SEQ ID NO: 1090295 - RNA, 19 nt, Artificial Sequence
  Description of Artificial Sequence: Synthetic oligonucleotide
aggaacugcgacuaagugc

SEQ ID NO: 1090296 - RNA, 19 nt, Artificial Sequence
  Description of Artificial Sequence: Synthetic oligonucleotide
aaucuacaguucuaugacg

SEQ ID NO: 1090297 - RNA, 19 nt, Artificial Sequence
  Description of Artificial Sequence: Synthetic oligonucleotide
acagagaccaauaggaagc

SEQ ID NO: 1090298 - RNA, 19 nt, Artificial Sequence
  Description of Artificial Sequence: Synthetic oligonucleotide
cuaacagagaccaauagga

SEQ ID NO: 1090299 - RNA, 19 nt, Artificial Sequence
  Description of Artificial Sequence: Synthetic oligonucleotide
uaggaagcugcuaacauga

SEQ ID NO: 1090300 - RNA, 19 nt, Artificial Sequence
  Description of Artificial Sequence: Synthetic oligonucleotide
uguaaacacauugagauua

SEQ ID NO: 1090301 - RNA, 19 nt, Artificial Sequence
  Description of Artificial Sequence: Synthetic oligonucleotide
ucuaagauccgccucugcc

SEQ ID NO: 1090302 - RNA, 19 nt, Artificial Sequence
  Description of Artificial Sequence: Synthetic oligonucleotide
ugaagaaagauuccuucca

SEQ ID NO: 1090303 - RNA, 19 nt, Artificial Sequence
  Description of Artificial Sequence: Synthetic oligonucleotide
uucuaugacgccuugagau

SEQ ID NO: 1090304 - RNA, 19 nt, Artificial Sequence
  Description of Artificial Sequence: Synthetic oligonucleotide
caaaguguaaucagaacug

SEQ ID NO: 1090305 - RNA, 19 nt, Artificial Sequence
  Description of Artificial Sequence: Synthetic oligonucleotide
uuaaguaacuccauuggua

SEQ ID NO: 1090306 - RNA, 19 nt, Artificial Sequence
  Description of Artificial Sequence: Synthetic oligonucleotide
uucgauagagcuaacuuaa

SEQ ID NO: 1090307 - RNA, 19 nt, Artificial Sequence
  Description of Artificial Sequence: Synthetic oligonucleotide
ugagauuaauagcuaggag

SEQ ID NO: 1090308 - RNA, 19 nt, Artificial Sequence
  Description of Artificial Sequence: Synthetic oligonucleotide
agagcgauccuucuccagc

SEQ ID NO: 1090309 - RNA, 19 nt, Artificial Sequence
  Description of Artificial Sequence: Synthetic oligonucleotide
uguaaggauauggagagga

SEQ ID NO: 1090310 - RNA, 19 nt, Artificial Sequence
  Description of Artificial Sequence: Synthetic oligonucleotide
aucagaacugaucuguaag

SEQ ID NO: 1090311 - RNA, 19 nt, Artificial Sequence
  Description of Artificial Sequence: Synthetic oligonucleotide
auagcuaggagaucuagga

SEQ ID NO: 1090312 - RNA, 19 nt, Artificial Sequence
  Description of Artificial Sequence: Synthetic oligonucleotide
gaucuguaaggauauggag

SEQ ID NO: 1090313 - RNA, 19 nt, Artificial Sequence
  Description of Artificial Sequence: Synthetic oligonucleotide
uaaguaacuccauugguaa

SEQ ID NO: 1090314 - RNA, 19 nt, Artificial Sequence
  Description of Artificial Sequence: Synthetic oligonucleotide
aaauccuacgccgacagca

SEQ ID NO: 1090315 - RNA, 19 nt, Artificial Sequence
  Description of Artificial Sequence: Synthetic oligonucleotide
ugaucuguaaggauaugga

SEQ ID NO: 1090316 - RNA, 19 nt, Artificial Sequence
  Description of Artificial Sequence: Synthetic oligonucleotide
uugcaauuugcuaguaucc

SEQ ID NO: 1090317 - RNA, 19 nt, Artificial Sequence
  Description of Artificial Sequence: Synthetic oligonucleotide
aucuacaguucuaugacgc

SEQ ID NO: 1090318 - RNA, 19 nt, Artificial Sequence
  Description of Artificial Sequence: Synthetic oligonucleotide
aauaggaagcugcuaacau

SEQ ID NO: 1090319 - RNA, 19 nt, Artificial Sequence
  Description of Artificial Sequence: Synthetic oligonucleotide
agacuuccgucuaagaucc

SEQ ID NO: 1090320 - RNA, 19 nt, Artificial Sequence
  Description of Artificial Sequence: Synthetic oligonucleotide
acuccauugguaaacaagg

SEQ ID NO: 1090321 - RNA, 19 nt, Artificial Sequence
  Description of Artificial Sequence: Synthetic oligonucleotide
cuugcaauuugcuaguauc

SEQ ID NO: 1090322 - RNA, 19 nt, Artificial Sequence
  Description of Artificial Sequence: Synthetic oligonucleotide
aaggaaccggguuuuaaug

SEQ ID NO: 1090323 - RNA, 19 nt, Artificial Sequence
  Description of Artificial Sequence: Synthetic oligonucleotide
gauagagcuaacuuaagua

SEQ ID NO: 1090324 - RNA, 19 nt, Artificial Sequence
  Description of Artificial Sequence: Synthetic oligonucleotide
auagagcuaacuuaaguaa

SEQ ID NO: 1090325 - RNA, 19 nt, Artificial Sequence
  Description of Artificial Sequence: Synthetic oligonucleotide
aagcucuccagguagagaa

SEQ ID NO: 1090326 - RNA, 19 nt, Artificial Sequence
  Description of Artificial Sequence: Synthetic oligonucleotide
ucccacugaagaaagauuc

SEQ ID NO: 1090327 - RNA, 19 nt, Artificial Sequence
  Description of Artificial Sequence: Synthetic oligonucleotide
gacguggccaucucaaccg

SEQ ID NO: 1090328 - RNA, 19 nt, Artificial Sequence
  Description of Artificial Sequence: Synthetic oligonucleotide
cauugagauuaauagcuag

SEQ ID NO: 1090329 - RNA, 19 nt, Artificial Sequence
  Description of Artificial Sequence: Synthetic oligonucleotide
ucucuauccggauggagag

SEQ ID NO: 1090330 - RNA, 19 nt, Artificial Sequence
  Description of Artificial Sequence: Synthetic oligonucleotide
cuagccgaggcccacaucc

SEQ ID NO: 1090331 - RNA, 19 nt, Artificial Sequence
  Description of Artificial Sequence: Synthetic oligonucleotide
uagagaaaccagcuccgcg

SEQ ID NO: 1090332 - RNA, 19 nt, Artificial Sequence
  Description of Artificial Sequence: Synthetic oligonucleotide
ucuggaacguuguguaagg

SEQ ID NO: 1090333 - RNA, 19 nt, Artificial Sequence
  Description of Artificial Sequence: Synthetic oligonucleotide
acgccuugagauuacaaag

SEQ ID NO: 1090334 - RNA, 19 nt, Artificial Sequence
  Description of Artificial Sequence: Synthetic oligonucleotide
auugagauuaauagcuagg

SEQ ID NO: 1090335 - RNA, 19 nt, Artificial Sequence
  Description of Artificial Sequence: Synthetic oligonucleotide
uugagauuaauagcuagga

SEQ ID NO: 1090336 - RNA, 19 nt, Artificial Sequence
  Description of Artificial Sequence: Synthetic oligonucleotide
uggcuguaaacacauugag

SEQ ID NO: 1090337 - RNA, 19 nt, Artificial Sequence
  Description of Artificial Sequence: Synthetic oligonucleotide
uagagcuaacuuaaguaac

SEQ ID NO: 1090338 - RNA, 19 nt, Artificial Sequence
  Description of Artificial Sequence: Synthetic oligonucleotide
uguuggaacuagccgaggc

SEQ ID NO: 1090339 - RNA, 19 nt, Artificial Sequence
  Description of Artificial Sequence: Synthetic oligonucleotide
aaaggaaccggguuuuaau

SEQ ID NO: 1090340 - RNA, 19 nt, Artificial Sequence
  Description of Artificial Sequence: Synthetic oligonucleotide
ugcuaacagagaccaauag

SEQ ID NO: 1090341 - RNA, 19 nt, Artificial Sequence
  Description of Artificial Sequence: Synthetic oligonucleotide
aucaccacgaaucccagga

SEQ ID NO: 1090342 - RNA, 19 nt, Artificial Sequence
  Description of Artificial Sequence: Synthetic oligonucleotide
uguucuugugacccuacca

SEQ ID NO: 1090343 - RNA, 19 nt, Artificial Sequence
  Description of Artificial Sequence: Synthetic oligonucleotide
cuaagauccgccucugccc

SEQ ID NO: 1090344 - RNA, 19 nt, Artificial Sequence
  Description of Artificial Sequence: Synthetic oligonucleotide
uucccguugccacugaucu

SEQ ID NO: 1090345 - RNA, 19 nt, Artificial Sequence
  Description of Artificial Sequence: Synthetic oligonucleotide
uagggguuggccuugacaa

SEQ ID NO: 1090346 - RNA, 19 nt, Artificial Sequence
  Description of Artificial Sequence: Synthetic oligonucleotide
ucguccaugaccacguaga

SEQ ID NO: 1090347 - RNA, 19 nt, Artificial Sequence
  Description of Artificial Sequence: Synthetic oligonucleotide
aauuugcuaguauccacaa

SEQ ID NO: 1090348 - RNA, 19 nt, Artificial Sequence
  Description of Artificial Sequence: Synthetic oligonucleotide
ucuugugacccuaccaaga

SEQ ID NO: 1090349 - RNA, 19 nt, Artificial Sequence
  Description of Artificial Sequence: Synthetic oligonucleotide
cugaucuguaaggauaugg

SEQ ID NO: 1090350 - RNA, 19 nt, Artificial Sequence
  Description of Artificial Sequence: Synthetic oligonucleotide
accaauaggaagcugcuaa

SEQ ID NO: 1090351 - RNA, 19 nt, Artificial Sequence
  Description of Artificial Sequence: Synthetic oligonucleotide
agaucuaggaacugcgacu

SEQ ID NO: 1090352 - RNA, 19 nt, Artificial Sequence
  Description of Artificial Sequence: Synthetic oligonucleotide
aaccacggacgcuguagcc

SEQ ID NO: 1090353 - RNA, 19 nt, Artificial Sequence
  Description of Artificial Sequence: Synthetic oligonucleotide
agauuaauagcuaggagau

SEQ ID NO: 1090354 - RNA, 19 nt, Artificial Sequence
  Description of Artificial Sequence: Synthetic oligonucleotide
gcuaacagagaccaauagg

SEQ ID NO: 1090355 - RNA, 19 nt, Artificial Sequence
  Description of Artificial Sequence: Synthetic oligonucleotide
gaggagcuaaaguugaguc

SEQ ID NO: 1090356 - RNA, 19 nt, Artificial Sequence
  Description of Artificial Sequence: Synthetic oligonucleotide
agaagggccacggugaaag

SEQ ID NO: 1090357 - RNA, 19 nt, Artificial Sequence
  Description of Artificial Sequence: Synthetic oligonucleotide
agcauuggggagcagacgu

SEQ ID NO: 1090358 - RNA, 19 nt, Artificial Sequence
  Description of Artificial Sequence: Synthetic oligonucleotide
gaugucguccaugaccacg

SEQ ID NO: 1090359 - RNA, 19 nt, Artificial Sequence
  Description of Artificial Sequence: Synthetic oligonucleotide
ugcagucuuuucuacagcu

SEQ ID NO: 1090360 - RNA, 19 nt, Artificial Sequence
  Description of Artificial Sequence: Synthetic oligonucleotide
cagacuuccgucuaagauc

SEQ ID NO: 1090361 - RNA, 19 nt, Artificial Sequence
  Description of Artificial Sequence: Synthetic oligonucleotide
cacucagugguccaaacac

SEQ ID NO: 1090362 - RNA, 19 nt, Artificial Sequence
  Description of Artificial Sequence: Synthetic oligonucleotide
aaucagaacugaucuguaa

SEQ ID NO: 1090363 - RNA, 19 nt, Artificial Sequence
  Description of Artificial Sequence: Synthetic oligonucleotide
agcaccaggggcucugacc

SEQ ID NO: 1090364 - RNA, 19 nt, Artificial Sequence
  Description of Artificial Sequence: Synthetic oligonucleotide
uggaacguuguguaaggug

SEQ ID NO: 1090365 - RNA, 19 nt, Artificial Sequence
  Description of Artificial Sequence: Synthetic oligonucleotide
auucgauagagcuaacuua

SEQ ID NO: 1090366 - RNA, 19 nt, Artificial Sequence
  Description of Artificial Sequence: Synthetic oligonucleotide
caugcuggauacaguaggg

SEQ ID NO: 1090367 - RNA, 19 nt, Artificial Sequence
  Description of Artificial Sequence: Synthetic oligonucleotide
agagacaucaucaccacga

SEQ ID NO: 1090368 - RNA, 19 nt, Artificial Sequence
  Description of Artificial Sequence: Synthetic oligonucleotide
gagaucuaggaacugcgac

SEQ ID NO: 1090369 - RNA, 19 nt, Artificial Sequence
  Description of Artificial Sequence: Synthetic oligonucleotide
acgucuguguucaugaauc

SEQ ID NO: 1090370 - RNA, 19 nt, Artificial Sequence
  Description of Artificial Sequence: Synthetic oligonucleotide
ugcucuguucuugugaccc

SEQ ID NO: 1090371 - RNA, 19 nt, Artificial Sequence
  Description of Artificial Sequence: Synthetic oligonucleotide
ucuaggaacugcgacuaag

SEQ ID NO: 1090372 - RNA, 19 nt, Artificial Sequence
  Description of Artificial Sequence: Synthetic oligonucleotide
uucuugugacccuaccaag

SEQ ID NO: 1090373 - RNA, 19 nt, Artificial Sequence
  Description of Artificial Sequence: Synthetic oligonucleotide
gaaacccuaggccaacaug

SEQ ID NO: 1090374 - RNA, 19 nt, Artificial Sequence
  Description of Artificial Sequence: Synthetic oligonucleotide
uguguaaggugauggccag

SEQ ID NO: 1090375 - RNA, 19 nt, Artificial Sequence
  Description of Artificial Sequence: Synthetic oligonucleotide
ugaccaccggcucugaaac

SEQ ID NO: 1090376 - RNA, 19 nt, Artificial Sequence
  Description of Artificial Sequence: Synthetic oligonucleotide
agagcugacuucuggaggu

SEQ ID NO: 1090377 - RNA, 19 nt, Artificial Sequence
  Description of Artificial Sequence: Synthetic oligonucleotide
uaagauccgccucugccca

SEQ ID NO: 1090378 - RNA, 19 nt, Artificial Sequence
  Description of Artificial Sequence: Synthetic oligonucleotide
gacagcaagacccucugga

SEQ ID NO: 1090379 - RNA, 19 nt, Artificial Sequence
  Description of Artificial Sequence: Synthetic oligonucleotide
gcuaacaugaccccugcag

SEQ ID NO: 1090380 - RNA, 19 nt, Artificial Sequence
  Description of Artificial Sequence: Synthetic oligonucleotide
uaggaacugcgacuaagug

SEQ ID NO: 1090381 - RNA, 19 nt, Artificial Sequence
  Description of Artificial Sequence: Synthetic oligonucleotide
auaccagaaagcucuccag

SEQ ID NO: 1090382 - RNA, 19 nt, Artificial Sequence
  Description of Artificial Sequence: Synthetic oligonucleotide
acuuccgucuaagauccgc

SEQ ID NO: 1090383 - RNA, 19 nt, Artificial Sequence
  Description of Artificial Sequence: Synthetic oligonucleotide
ugcuaguauccacaagucu

SEQ ID NO: 1090384 - RNA, 19 nt, Artificial Sequence
  Description of Artificial Sequence: Synthetic oligonucleotide
ucuacaguucuaugacgcc

SEQ ID NO: 1090385 - RNA, 19 nt, Artificial Sequence
  Description of Artificial Sequence: Synthetic oligonucleotide
cuugugacccuaccaagag

SEQ ID NO: 1090386 - RNA, 19 nt, Artificial Sequence
  Description of Artificial Sequence: Synthetic oligonucleotide
acaaaucuacaguucuaug

SEQ ID NO: 1090387 - RNA, 19 nt, Artificial Sequence
  Description of Artificial Sequence: Synthetic oligonucleotide
agagaaaggaaccggguuu

SEQ ID NO: 1090388 - RNA, 19 nt, Artificial Sequence
  Description of Artificial Sequence: Synthetic oligonucleotide
acguuguguaaggugaugg

SEQ ID NO: 1090389 - RNA, 19 nt, Artificial Sequence
  Description of Artificial Sequence: Synthetic oligonucleotide
uuggaacuagccgaggccc

SEQ ID NO: 1090390 - RNA, 19 nt, Artificial Sequence
  Description of Artificial Sequence: Synthetic oligonucleotide
acggugaaagagcaccagg

SEQ ID NO: 1090391 - RNA, 19 nt, Artificial Sequence
  Description of Artificial Sequence: Synthetic oligonucleotide
aaccggguuuuaaugagag

SEQ ID NO: 1090392 - RNA, 19 nt, Artificial Sequence
  Description of Artificial Sequence: Synthetic oligonucleotide
uucuagguggcagaagggc

SEQ ID NO: 1090393 - RNA, 19 nt, Artificial Sequence
  Description of Artificial Sequence: Synthetic oligonucleotide
aacaugcucaggucuugug

SEQ ID NO: 1090394 - RNA, 19 nt, Artificial Sequence
  Description of Artificial Sequence: Synthetic oligonucleotide
guuguguaaggugauggcc

SEQ ID NO: 1090395 - RNA, 19 nt, Artificial Sequence
  Description of Artificial Sequence: Synthetic oligonucleotide
guguaaucagaacugaucu

SEQ ID NO: 1090396 - RNA, 19 nt, Artificial Sequence
  Description of Artificial Sequence: Synthetic oligonucleotide
cuggaucccaauuccaaug

SEQ ID NO: 1090397 - RNA, 19 nt, Artificial Sequence
  Description of Artificial Sequence: Synthetic oligonucleotide
ggagaauaugaacacaaga

SEQ ID NO: 1090398 - RNA, 19 nt, Artificial Sequence
  Description of Artificial Sequence: Synthetic oligonucleotide
gguuguuggaacuagccga

SEQ ID NO: 1090399 - RNA, 19 nt, Artificial Sequence
  Description of Artificial Sequence: Synthetic oligonucleotide
uaacuuaaguaacuccauu

SEQ ID NO: 1090400 - RNA, 19 nt, Artificial Sequence
  Description of Artificial Sequence: Synthetic oligonucleotide
ugugguggggcccucggga

SEQ ID NO: 1090401 - RNA, 19 nt, Artificial Sequence
  Description of Artificial Sequence: Synthetic oligonucleotide
caauuugcuaguauccaca

SEQ ID NO: 1090402 - RNA, 19 nt, Artificial Sequence
  Description of Artificial Sequence: Synthetic oligonucleotide
augaacacaagagcugcuc

SEQ ID NO: 1090403 - RNA, 19 nt, Artificial Sequence
  Description of Artificial Sequence: Synthetic oligonucleotide
ucgggaucagacuucuucu

SEQ ID NO: 1090404 - RNA, 19 nt, Artificial Sequence
  Description of Artificial Sequence: Synthetic oligonucleotide
ugacuucuggaggugaccc

SEQ ID NO: 1090405 - RNA, 19 nt, Artificial Sequence
  Description of Artificial Sequence: Synthetic oligonucleotide
aggagcuaaaguugagucu

SEQ ID NO: 1090406 - RNA, 19 nt, Artificial Sequence
  Description of Artificial Sequence: Synthetic oligonucleotide
aggaaccggguuuuaauga

SEQ ID NO: 1090407 - RNA, 19 nt, Artificial Sequence
  Description of Artificial Sequence: Synthetic oligonucleotide
agugguccaaacacaaauc

SEQ ID NO: 1090408 - RNA, 19 nt, Artificial Sequence
  Description of Artificial Sequence: Synthetic oligonucleotide
cuuccgucuaagauccgcc

SEQ ID NO: 1090409 - RNA, 19 nt, Artificial Sequence
  Description of Artificial Sequence: Synthetic oligonucleotide
ugaggacuugcaauuugcu

SEQ ID NO: 1090410 - RNA, 19 nt, Artificial Sequence
  Description of Artificial Sequence: Synthetic oligonucleotide
aaaccaacuuuccccucca

SEQ ID NO: 1090411 - RNA, 19 nt, Artificial Sequence
  Description of Artificial Sequence: Synthetic oligonucleotide
ucgauagagcuaacuuaag

SEQ ID NO: 1090412 - RNA, 19 nt, Artificial Sequence
  Description of Artificial Sequence: Synthetic oligonucleotide
uaggagaucuaggaacugc

SEQ ID NO: 1090413 - RNA, 19 nt, Artificial Sequence
  Description of Artificial Sequence: Synthetic oligonucleotide
aggagaucuaggaacugcg

SEQ ID NO: 1090414 - RNA, 19 nt, Artificial Sequence
  Description of Artificial Sequence: Synthetic oligonucleotide
uggagaguucccucucagg

SEQ ID NO: 1090415 - RNA, 19 nt, Artificial Sequence
  Description of Artificial Sequence: Synthetic oligonucleotide
gguccaaacacaaaucuac

SEQ ID NO: 1090416 - RNA, 19 nt, Artificial Sequence
  Description of Artificial Sequence: Synthetic oligonucleotide
cucgggaucagacuucuuc

SEQ ID NO: 1090417 - RNA, 19 nt, Artificial Sequence
  Description of Artificial Sequence: Synthetic oligonucleotide
uaugaacacaagagcugcu

SEQ ID NO: 1090418 - RNA, 19 nt, Artificial Sequence
  Description of Artificial Sequence: Synthetic oligonucleotide
aagggccacggugaaagag

SEQ ID NO: 1090419 - RNA, 19 nt, Artificial Sequence
  Description of Artificial Sequence: Synthetic oligonucleotide
gcuaaaguugagucuagug

SEQ ID NO: 1090420 - RNA, 19 nt, Artificial Sequence
  Description of Artificial Sequence: Synthetic oligonucleotide
cuucaucaaugcagggucc

SEQ ID NO: 1090421 - RNA, 19 nt, Artificial Sequence
  Description of Artificial Sequence: Synthetic oligonucleotide
gacgccuugagauuacaaa

SEQ ID NO: 1090422 - RNA, 19 nt, Artificial Sequence
  Description of Artificial Sequence: Synthetic oligonucleotide
aggcgaaggcaccgaagcc

SEQ ID NO: 1090423 - RNA, 19 nt, Artificial Sequence
  Description of Artificial Sequence: Synthetic oligonucleotide
agggccacggugaaagagc

SEQ ID NO: 1090424 - RNA, 19 nt, Artificial Sequence
  Description of Artificial Sequence: Synthetic oligonucleotide
agagcuaacuuaaguaacu

SEQ ID NO: 1090425 - RNA, 19 nt, Artificial Sequence
  Description of Artificial Sequence: Synthetic oligonucleotide
guucuugugacccuaccaa

SEQ ID NO: 1090426 - RNA, 19 nt, Artificial Sequence
  Description of Artificial Sequence: Synthetic oligonucleotide
guuguuggaacuagccgag

SEQ ID NO: 1090427 - RNA, 19 nt, Artificial Sequence
  Description of Artificial Sequence: Synthetic oligonucleotide
ccggguuuuaaugagaggc

SEQ ID NO: 1090428 - RNA, 19 nt, Artificial Sequence
  Description of Artificial Sequence: Synthetic oligonucleotide
gaccacguagaccauggca

SEQ ID NO: 1090429 - RNA, 19 nt, Artificial Sequence
  Description of Artificial Sequence: Synthetic oligonucleotide
agaugcagucuuuucuaca

SEQ ID NO: 1090430 - RNA, 19 nt, Artificial Sequence
  Description of Artificial Sequence: Synthetic oligonucleotide
cauaccagaaagcucucca

SEQ ID NO: 1090431 - RNA, 19 nt, Artificial Sequence
  Description of Artificial Sequence: Synthetic oligonucleotide
uuaauagcuaggagaucua

SEQ ID NO: 1090432 - RNA, 19 nt, Artificial Sequence
  Description of Artificial Sequence: Synthetic oligonucleotide
guaaucagaacugaucugu

SEQ ID NO: 1090433 - RNA, 19 nt, Artificial Sequence
  Description of Artificial Sequence: Synthetic oligonucleotide
ucauucgauagagcuaacu

SEQ ID NO: 1090434 - RNA, 19 nt, Artificial Sequence
  Description of Artificial Sequence: Synthetic oligonucleotide
uccuacgccgacagcaaga

SEQ ID NO: 1090435 - RNA, 19 nt, Artificial Sequence
  Description of Artificial Sequence: Synthetic oligonucleotide
ugucccaagagcugacuuc

SEQ ID NO: 1090436 - RNA, 19 nt, Artificial Sequence
  Description of Artificial Sequence: Synthetic oligonucleotide
agucaaaguguaaucagaa

SEQ ID NO: 1090437 - RNA, 19 nt, Artificial Sequence
  Description of Artificial Sequence: Synthetic oligonucleotide
cuaccaagagcccucccug

SEQ ID NO: 1090438 - RNA, 19 nt, Artificial Sequence
  Description of Artificial Sequence: Synthetic oligonucleotide
ggaaccggguuuuaaugag

SEQ ID NO: 1090439 - RNA, 19 nt, Artificial Sequence
  Description of Artificial Sequence: Synthetic oligonucleotide
uacaguucuaugacgccuu

SEQ ID NO: 1090440 - RNA, 19 nt, Artificial Sequence
  Description of Artificial Sequence: Synthetic oligonucleotide
ugcauagggcaggacaggc

SEQ ID NO: 1090441 - RNA, 19 nt, Artificial Sequence
  Description of Artificial Sequence: Synthetic oligonucleotide
ucuaugacgccuugagauu

SEQ ID NO: 1090442 - RNA, 19 nt, Artificial Sequence
  Description of Artificial Sequence: Synthetic oligonucleotide
gcuaguauccacaagucuc

SEQ ID NO: 1090443 - RNA, 19 nt, Artificial Sequence
  Description of Artificial Sequence: Synthetic oligonucleotide
acgaaucccaggauggaag

SEQ ID NO: 1090444 - RNA, 19 nt, Artificial Sequence
  Description of Artificial Sequence: Synthetic oligonucleotide
ucuauccggauggagaguu

SEQ ID NO: 1090445 - RNA, 19 nt, Artificial Sequence
  Description of Artificial Sequence: Synthetic oligonucleotide
uagcuaggagaucuaggaa

SEQ ID NO: 1090446 - RNA, 19 nt, Artificial Sequence
  Description of Artificial Sequence: Synthetic oligonucleotide
uucaucaaugcagggucca

SEQ ID NO: 1090447 - RNA, 19 nt, Artificial Sequence
  Description of Artificial Sequence: Synthetic oligonucleotide
ggaacguuguguaagguga

SEQ ID NO: 1090448 - RNA, 19 nt, Artificial Sequence
  Description of Artificial Sequence: Synthetic oligonucleotide
aacugcgacuaagugcucu

SEQ ID NO: 1090449 - RNA, 19 nt, Artificial Sequence
  Description of Artificial Sequence: Synthetic oligonucleotide
acugcgacuaagugcucug

SEQ ID NO: 1090450 - RNA, 19 nt, Artificial Sequence
  Description of Artificial Sequence: Synthetic oligonucleotide
aacguuguguaaggugaug

SEQ ID NO: 1090451 - RNA, 19 nt, Artificial Sequence
  Description of Artificial Sequence: Synthetic oligonucleotide
aaccgcuggugcuaacaga

SEQ ID NO: 1090452 - RNA, 19 nt, Artificial Sequence
  Description of Artificial Sequence: Synthetic oligonucleotide
ucuguucuugugacccuac

SEQ ID NO: 1090453 - RNA, 19 nt, Artificial Sequence
  Description of Artificial Sequence: Synthetic oligonucleotide
cagaagcccagcacuuucc

SEQ ID NO: 1090454 - RNA, 19 nt, Artificial Sequence
  Description of Artificial Sequence: Synthetic oligonucleotide
augagcagagcgauccuuc

SEQ ID NO: 1090455 - RNA, 19 nt, Artificial Sequence
  Description of Artificial Sequence: Synthetic oligonucleotide
ugucccaagguuguuggaa

SEQ ID NO: 1090456 - RNA, 19 nt, Artificial Sequence
  Description of Artificial Sequence: Synthetic oligonucleotide
gugaggacuugcaauuugc

SEQ ID NO: 1090457 - RNA, 19 nt, Artificial Sequence
  Description of Artificial Sequence: Synthetic oligonucleotide
aagauccgccucugcccac

SEQ ID NO: 1090458 - RNA, 19 nt, Artificial Sequence
  Description of Artificial Sequence: Synthetic oligonucleotide
uaugacgccuugagauuac

SEQ ID NO: 1090459 - RNA, 19 nt, Artificial Sequence
  Description of Artificial Sequence: Synthetic oligonucleotide
ugaaacccuaggccaacau

SEQ ID NO: 1090460 - RNA, 19 nt, Artificial Sequence
  Description of Artificial Sequence: Synthetic oligonucleotide
acguggccaucucaaccgc

SEQ ID NO: 1090461 - RNA, 19 nt, Artificial Sequence
  Description of Artificial Sequence: Synthetic oligonucleotide
guaaggauauggagaggag

SEQ ID NO: 1090462 - RNA, 19 nt, Artificial Sequence
  Description of Artificial Sequence: Synthetic oligonucleotide
agugugguggggcccucgg

SEQ ID NO: 1090463 - RNA, 19 nt, Artificial Sequence
  Description of Artificial Sequence: Synthetic oligonucleotide
aagacccucuggaacguug

SEQ ID NO: 1090464 - RNA, 19 nt, Artificial Sequence
  Description of Artificial Sequence: Synthetic oligonucleotide
uccgucuaagauccgccuc

SEQ ID NO: 1090465 - RNA, 19 nt, Artificial Sequence
  Description of Artificial Sequence: Synthetic oligonucleotide
gauggagaguucccucuca

SEQ ID NO: 1090466 - RNA, 19 nt, Artificial Sequence
  Description of Artificial Sequence: Synthetic oligonucleotide
gaucuaggaacugcgacua

SEQ ID NO: 1090467 - RNA, 19 nt, Artificial Sequence
  Description of Artificial Sequence: Synthetic oligonucleotide
caccacgaaucccaggaug

SEQ ID NO: 1090468 - RNA, 19 nt, Artificial Sequence
  Description of Artificial Sequence: Synthetic oligonucleotide
ggaacugcgacuaagugcu

SEQ ID NO: 1090469 - RNA, 19 nt, Artificial Sequence
  Description of Artificial Sequence: Synthetic oligonucleotide
gucguccaugaccacguag

SEQ ID NO: 1090470 - RNA, 19 nt, Artificial Sequence
  Description of Artificial Sequence: Synthetic oligonucleotide
gcaauuugcuaguauccac

SEQ ID NO: 1090471 - RNA, 19 nt, Artificial Sequence
  Description of Artificial Sequence: Synthetic oligonucleotide
gaggacuugcaauuugcua

SEQ ID NO: 1090472 - RNA, 19 nt, Artificial Sequence
  Description of Artificial Sequence: Synthetic oligonucleotide
uuccgucuaagauccgccu

SEQ ID NO: 1090473 - RNA, 19 nt, Artificial Sequence
  Description of Artificial Sequence: Synthetic oligonucleotide
gagcuaacuuaaguaacuc

SEQ ID NO: 1090474 - RNA, 19 nt, Artificial Sequence
  Description of Artificial Sequence: Synthetic oligonucleotide
cuuaaguaacuccauuggu

SEQ ID NO: 1090475 - RNA, 19 nt, Artificial Sequence
  Description of Artificial Sequence: Synthetic oligonucleotide
gccagguagacaaaagcag

SEQ ID NO: 1090476 - RNA, 19 nt, Artificial Sequence
  Description of Artificial Sequence: Synthetic oligonucleotide
gucccaagguuguuggaac

SEQ ID NO: 1090477 - RNA, 19 nt, Artificial Sequence
  Description of Artificial Sequence: Synthetic oligonucleotide
ucccaagguuguuggaacu

SEQ ID NO: 1090478 - RNA, 19 nt, Artificial Sequence
  Description of Artificial Sequence: Synthetic oligonucleotide
aacuagccgaggcccacau

SEQ ID NO: 1090479 - RNA, 19 nt, Artificial Sequence
  Description of Artificial Sequence: Synthetic oligonucleotide
ugacgccuugagauuacaa

SEQ ID NO: 1090480 - RNA, 19 nt, Artificial Sequence
  Description of Artificial Sequence: Synthetic oligonucleotide
cuaguauccacaagucucu

SEQ ID NO: 1090481 - RNA, 19 nt, Artificial Sequence
  Description of Artificial Sequence: Synthetic oligonucleotide
cugaggagcuaaaguugag

SEQ ID NO: 1090482 - RNA, 19 nt, Artificial Sequence
  Description of Artificial Sequence: Synthetic oligonucleotide
ugacccuaccaagagcccu

SEQ ID NO: 1090483 - RNA, 19 nt, Artificial Sequence
  Description of Artificial Sequence: Synthetic oligonucleotide
caugaccccugcagcaaag

SEQ ID NO: 1090484 - RNA, 19 nt, Artificial Sequence
  Description of Artificial Sequence: Synthetic oligonucleotide
guagggguuggccuugaca

SEQ ID NO: 1090485 - RNA, 19 nt, Artificial Sequence
  Description of Artificial Sequence: Synthetic oligonucleotide
ggacguggccaucucaacc

SEQ ID NO: 1090486 - RNA, 19 nt, Artificial Sequence
  Description of Artificial Sequence: Synthetic oligonucleotide
uggccaaauuccuggcacu

SEQ ID NO: 1090487 - RNA, 19 nt, Artificial Sequence
  Description of Artificial Sequence: Synthetic oligonucleotide
agcccucccuggaagaaac

SEQ ID NO: 1090488 - RNA, 19 nt, Artificial Sequence
  Description of Artificial Sequence: Synthetic oligonucleotide
guucuaugacgccuugaga

SEQ ID NO: 1090489 - RNA, 19 nt, Artificial Sequence
  Description of Artificial Sequence: Synthetic oligonucleotide
uuguuggaacuagccgagg

SEQ ID NO: 1090490 - RNA, 19 nt, Artificial Sequence
  Description of Artificial Sequence: Synthetic oligonucleotide
ggugaggacuugcaauuug

SEQ ID NO: 1090491 - RNA, 19 nt, Artificial Sequence
  Description of Artificial Sequence: Synthetic oligonucleotide
gagcagacgucuguguuca

SEQ ID NO: 1090492 - RNA, 19 nt, Artificial Sequence
  Description of Artificial Sequence: Synthetic oligonucleotide
cuguucuugugacccuacc

SEQ ID NO: 1090493 - RNA, 19 nt, Artificial Sequence
  Description of Artificial Sequence: Synthetic oligonucleotide
ccaaauccuacgccgacag

SEQ ID NO: 1090494 - RNA, 19 nt, Artificial Sequence
  Description of Artificial Sequence: Synthetic oligonucleotide
cagguagagaaaccagcuc

SEQ ID NO: 1090495 - RNA, 19 nt, Artificial Sequence
  Description of Artificial Sequence: Synthetic oligonucleotide
acaguucuaugacgccuug

SEQ ID NO: 1090496 - RNA, 19 nt, Artificial Sequence
  Description of Artificial Sequence: Synthetic oligonucleotide
uccacucagugguccaaac

SEQ ID NO: 1090497 - RNA, 19 nt, Artificial Sequence
  Description of Artificial Sequence: Synthetic oligonucleotide
gccacggugaaagagcacc

SEQ ID NO: 1090498 - RNA, 19 nt, Artificial Sequence
  Description of Artificial Sequence: Synthetic oligonucleotide
caauaggaagcugcuaaca

SEQ ID NO: 1090499 - RNA, 19 nt, Artificial Sequence
  Description of Artificial Sequence: Synthetic oligonucleotide
agccaaggguuccaccaug

SEQ ID NO: 1090500 - RNA, 19 nt, Artificial Sequence
  Description of Artificial Sequence: Synthetic oligonucleotide
aagaaggcgaaggcaccga

SEQ ID NO: 1090501 - RNA, 19 nt, Artificial Sequence
  Description of Artificial Sequence: Synthetic oligonucleotide
ugcuaacaugaccccugca

SEQ ID NO: 1090502 - RNA, 19 nt, Artificial Sequence
  Description of Artificial Sequence: Synthetic oligonucleotide
ugcucaggucuuguguccc

SEQ ID NO: 1090503 - RNA, 19 nt, Artificial Sequence
  Description of Artificial Sequence: Synthetic oligonucleotide
cugcuaacaugaccccugc

SEQ ID NO: 1090504 - RNA, 19 nt, Artificial Sequence
  Description of Artificial Sequence: Synthetic oligonucleotide
ugcgacuaagugcucuguu

SEQ ID NO: 1090505 - RNA, 19 nt, Artificial Sequence
  Description of Artificial Sequence: Synthetic oligonucleotide
cuucccguugccacugauc

SEQ ID NO: 1090506 - RNA, 19 nt, Artificial Sequence
  Description of Artificial Sequence: Synthetic oligonucleotide
auccuacgccgacagcaag

SEQ ID NO: 1090507 - RNA, 19 nt, Artificial Sequence
  Description of Artificial Sequence: Synthetic oligonucleotide
aauccuacgccgacagcaa

SEQ ID NO: 1090508 - RNA, 19 nt, Artificial Sequence
  Description of Artificial Sequence: Synthetic oligonucleotide
cagcuccaaauccuacgcc

SEQ ID NO: 1090509 - RNA, 19 nt, Artificial Sequence
  Description of Artificial Sequence: Synthetic oligonucleotide
ggaaccacggacgcuguag

SEQ ID NO: 1090510 - RNA, 19 nt, Artificial Sequence
  Description of Artificial Sequence: Synthetic oligonucleotide
ggagcuaaaguugagucua

SEQ ID NO: 1090511 - RNA, 19 nt, Artificial Sequence
  Description of Artificial Sequence: Synthetic oligonucleotide
auccggauggagaguuccc

SEQ ID NO: 1090512 - RNA, 19 nt, Artificial Sequence
  Description of Artificial Sequence: Synthetic oligonucleotide
uugugucccaagagcugac

SEQ ID NO: 1090513 - RNA, 19 nt, Artificial Sequence
  Description of Artificial Sequence: Synthetic oligonucleotide
agaccaauaggaagcugcu

SEQ ID NO: 1090514 - RNA, 19 nt, Artificial Sequence
  Description of Artificial Sequence: Synthetic oligonucleotide
cugacuucuggaggugacc

SEQ ID NO: 1090515 - RNA, 19 nt, Artificial Sequence
  Description of Artificial Sequence: Synthetic oligonucleotide
cauucgauagagcuaacuu

SEQ ID NO: 1090516 - RNA, 19 nt, Artificial Sequence
  Description of Artificial Sequence: Synthetic oligonucleotide
ggcgaaggcaccgaagccc

SEQ ID NO: 1090517 - RNA, 19 nt, Artificial Sequence
  Description of Artificial Sequence: Synthetic oligonucleotide
cacaagucucucaggaaaa

SEQ ID NO: 1090518 - RNA, 19 nt, Artificial Sequence
  Description of Artificial Sequence: Synthetic oligonucleotide
aacccuaggccaacaugcu

SEQ ID NO: 1090519 - RNA, 19 nt, Artificial Sequence
  Description of Artificial Sequence: Synthetic oligonucleotide
ggacgcuguagccuuggag

SEQ ID NO: 1090520 - RNA, 19 nt, Artificial Sequence
  Description of Artificial Sequence: Synthetic oligonucleotide
cuguaaggauauggagagg

SEQ ID NO: 1090521 - RNA, 19 nt, Artificial Sequence
  Description of Artificial Sequence: Synthetic oligonucleotide
acuagccgaggcccacauc

SEQ ID NO: 1090522 - RNA, 19 nt, Artificial Sequence
  Description of Artificial Sequence: Synthetic oligonucleotide
augucguccaugaccacgu

SEQ ID NO: 1090523 - RNA, 19 nt, Artificial Sequence
  Description of Artificial Sequence: Synthetic oligonucleotide
cuaacuuaaguaacuccau

SEQ ID NO: 1090524 - RNA, 19 nt, Artificial Sequence
  Description of Artificial Sequence: Synthetic oligonucleotide
ucaccacgaaucccaggau

SEQ ID NO: 1090525 - RNA, 19 nt, Artificial Sequence
  Description of Artificial Sequence: Synthetic oligonucleotide
guccaaacacaaaucuaca

SEQ ID NO: 1090526 - RNA, 19 nt, Artificial Sequence
  Description of Artificial Sequence: Synthetic oligonucleotide
uccauaccagaaagcucuc

SEQ ID NO: 1090527 - RNA, 19 nt, Artificial Sequence
  Description of Artificial Sequence: Synthetic oligonucleotide
gaaccggguuuuaaugaga

SEQ ID NO: 1090528 - RNA, 19 nt, Artificial Sequence
  Description of Artificial Sequence: Synthetic oligonucleotide
gguuuuaaugagaggcuca

SEQ ID NO: 1090529 - RNA, 19 nt, Artificial Sequence
  Description of Artificial Sequence: Synthetic oligonucleotide
uggcagaugcagucuuuuc

SEQ ID NO: 1090530 - RNA, 19 nt, Artificial Sequence
  Description of Artificial Sequence: Synthetic oligonucleotide
cagagcgauccuucuccag

SEQ ID NO: 1090531 - RNA, 19 nt, Artificial Sequence
  Description of Artificial Sequence: Synthetic oligonucleotide
acauugagauuaauagcua

SEQ ID NO: 1090532 - RNA, 19 nt, Artificial Sequence
  Description of Artificial Sequence: Synthetic oligonucleotide
gucuaagauccgccucugc

SEQ ID NO: 1090533 - RNA, 19 nt, Artificial Sequence
  Description of Artificial Sequence: Synthetic oligonucleotide
agcuaaaguugagucuagu

SEQ ID NO: 1090534 - RNA, 19 nt, Artificial Sequence
  Description of Artificial Sequence: Synthetic oligonucleotide
gaggacguggccaucucaa

SEQ ID NO: 1090535 - RNA, 19 nt, Artificial Sequence
  Description of Artificial Sequence: Synthetic oligonucleotide
gagcagagcgauccuucuc

SEQ ID NO: 1090536 - RNA, 19 nt, Artificial Sequence
  Description of Artificial Sequence: Synthetic oligonucleotide
gcugcuaacaugaccccug

SEQ ID NO: 1090537 - RNA, 19 nt, Artificial Sequence
  Description of Artificial Sequence: Synthetic oligonucleotide
gggaucagacuucuucuuc

SEQ ID NO: 1090538 - RNA, 19 nt, Artificial Sequence
  Description of Artificial Sequence: Synthetic oligonucleotide
cagugguccaaacacaaau

SEQ ID NO: 1090539 - RNA, 19 nt, Artificial Sequence
  Description of Artificial Sequence: Synthetic oligonucleotide
uucagugccagggccgguc

SEQ ID NO: 1090540 - RNA, 19 nt, Artificial Sequence
  Description of Artificial Sequence: Synthetic oligonucleotide
acccucuggaacguugugu

SEQ ID NO: 1090541 - RNA, 19 nt, Artificial Sequence
  Description of Artificial Sequence: Synthetic oligonucleotide
uagccgaggcccacaucca

SEQ ID NO: 1090542 - RNA, 19 nt, Artificial Sequence
  Description of Artificial Sequence: Synthetic oligonucleotide
cacggugaaagagcaccag

SEQ ID NO: 1090543 - RNA, 19 nt, Artificial Sequence
  Description of Artificial Sequence: Synthetic oligonucleotide
agagaccaauaggaagcug

SEQ ID NO: 1090544 - RNA, 19 nt, Artificial Sequence
  Description of Artificial Sequence: Synthetic oligonucleotide
gacccucuggaacguugug

SEQ ID NO: 1090545 - RNA, 19 nt, Artificial Sequence
  Description of Artificial Sequence: Synthetic oligonucleotide
cucugaaacccuaggccaa

SEQ ID NO: 1090546 - RNA, 19 nt, Artificial Sequence
  Description of Artificial Sequence: Synthetic oligonucleotide
gcgacuaagugcucuguuc

SEQ ID NO: 1090547 - RNA, 19 nt, Artificial Sequence
  Description of Artificial Sequence: Synthetic oligonucleotide
gaccaccggcucugaaacc

SEQ ID NO: 1090548 - RNA, 19 nt, Artificial Sequence
  Description of Artificial Sequence: Synthetic oligonucleotide
gucuagugagggagacugg

SEQ ID NO: 1090549 - RNA, 19 nt, Artificial Sequence
  Description of Artificial Sequence: Synthetic oligonucleotide
ggguuuuaaugagaggcuc

SEQ ID NO: 1090550 - RNA, 19 nt, Artificial Sequence
  Description of Artificial Sequence: Synthetic oligonucleotide
ugacgggacagugcccucu

SEQ ID NO: 1090551 - RNA, 19 nt, Artificial Sequence
  Description of Artificial Sequence: Synthetic oligonucleotide
cuaugacgccuugagauua

SEQ ID NO: 1090552 - RNA, 19 nt, Artificial Sequence
  Description of Artificial Sequence: Synthetic oligonucleotide
caggaugccagcuucccgu

SEQ ID NO: 1090553 - RNA, 19 nt, Artificial Sequence
  Description of Artificial Sequence: Synthetic oligonucleotide
caccaugccgcucagcugu

SEQ ID NO: 1090554 - RNA, 19 nt, Artificial Sequence
  Description of Artificial Sequence: Synthetic oligonucleotide
ggcuguaaacacauugaga

SEQ ID NO: 1090555 - RNA, 19 nt, Artificial Sequence
  Description of Artificial Sequence: Synthetic oligonucleotide
gugugguggggcccucggg

SEQ ID NO: 1090556 - RNA, 19 nt, Artificial Sequence
  Description of Artificial Sequence: Synthetic oligonucleotide
ucccguugccacugaucug

SEQ ID NO: 1090557 - RNA, 19 nt, Artificial Sequence
  Description of Artificial Sequence: Synthetic oligonucleotide
gggacaguagggguuggcc

SEQ ID NO: 1090558 - RNA, 19 nt, Artificial Sequence
  Description of Artificial Sequence: Synthetic oligonucleotide
gcacucucgaagguggcag

SEQ ID NO: 1090559 - RNA, 19 nt, Artificial Sequence
  Description of Artificial Sequence: Synthetic oligonucleotide
gccacugggaagaaggcga

SEQ ID NO: 1090560 - RNA, 19 nt, Artificial Sequence
  Description of Artificial Sequence: Synthetic oligonucleotide
cuauccggauggagaguuc

SEQ ID NO: 1090561 - RNA, 19 nt, Artificial Sequence
  Description of Artificial Sequence: Synthetic oligonucleotide
cugcccacuggagaauaug

SEQ ID NO: 1090562 - RNA, 19 nt, Artificial Sequence
  Description of Artificial Sequence: Synthetic oligonucleotide
cuacgccgacagcaagacc

SEQ ID NO: 1090563 - RNA, 19 nt, Artificial Sequence
  Description of Artificial Sequence: Synthetic oligonucleotide
ugggacaguagggguuggc

SEQ ID NO: 1090564 - RNA, 19 nt, Artificial Sequence
  Description of Artificial Sequence: Synthetic oligonucleotide
cacaaaucuacaguucuau

SEQ ID NO: 1090565 - RNA, 19 nt, Artificial Sequence
  Description of Artificial Sequence: Synthetic oligonucleotide
acggacgcuguagccuugg

SEQ ID NO: 1090566 - RNA, 19 nt, Artificial Sequence
  Description of Artificial Sequence: Synthetic oligonucleotide
uuccacucagugguccaaa

SEQ ID NO: 1090567 - RNA, 19 nt, Artificial Sequence
  Description of Artificial Sequence: Synthetic oligonucleotide
guagaccauggcaccagca

SEQ ID NO: 1090568 - RNA, 19 nt, Artificial Sequence
  Description of Artificial Sequence: Synthetic oligonucleotide
cuacaguucuaugacgccu

SEQ ID NO: 1090569 - RNA, 19 nt, Artificial Sequence
  Description of Artificial Sequence: Synthetic oligonucleotide
ucucaaccgcuggugcuaa

SEQ ID NO: 1090570 - RNA, 19 nt, Artificial Sequence
  Description of Artificial Sequence: Synthetic oligonucleotide
agacccucuggaacguugu

SEQ ID NO: 1090571 - RNA, 19 nt, Artificial Sequence
  Description of Artificial Sequence: Synthetic oligonucleotide
gaagggccacggugaaaga

SEQ ID NO: 1090572 - RNA, 19 nt, Artificial Sequence
  Description of Artificial Sequence: Synthetic oligonucleotide
aucuaggaacugcgacuaa

SEQ ID NO: 1090573 - RNA, 19 nt, Artificial Sequence
  Description of Artificial Sequence: Synthetic oligonucleotide
cuaggccaacaugcucagg

SEQ ID NO: 1090574 - RNA, 19 nt, Artificial Sequence
  Description of Artificial Sequence: Synthetic oligonucleotide
ccgaggcccacauccagag

SEQ ID NO: 1090575 - RNA, 19 nt, Artificial Sequence
  Description of Artificial Sequence: Synthetic oligonucleotide
ggauggagaguucccucuc

SEQ ID NO: 1090576 - RNA, 19 nt, Artificial Sequence
  Description of Artificial Sequence: Synthetic oligonucleotide
gccaucucaaccgcuggug

SEQ ID NO: 1090577 - RNA, 19 nt, Artificial Sequence
  Description of Artificial Sequence: Synthetic oligonucleotide
uggugcuaacagagaccaa

SEQ ID NO: 1090578 - RNA, 19 nt, Artificial Sequence
  Description of Artificial Sequence: Synthetic oligonucleotide
uggauacaguagggugccc

SEQ ID NO: 1090579 - RNA, 19 nt, Artificial Sequence
  Description of Artificial Sequence: Synthetic oligonucleotide
gugacccuaccaagagccc

SEQ ID NO: 1090580 - RNA, 19 nt, Artificial Sequence
  Description of Artificial Sequence: Synthetic oligonucleotide
agauccgccucugcccacu

SEQ ID NO: 1090581 - RNA, 19 nt, Artificial Sequence
  Description of Artificial Sequence: Synthetic oligonucleotide
gcgaaggcaccgaagcccc

SEQ ID NO: 1090582 - RNA, 19 nt, Artificial Sequence
  Description of Artificial Sequence: Synthetic oligonucleotide
gacuuccgucuaagauccg

SEQ ID NO: 1090583 - RNA, 19 nt, Artificial Sequence
  Description of Artificial Sequence: Synthetic oligonucleotide
cagcuccgcgcagagggag

SEQ ID NO: 1090584 - RNA, 19 nt, Artificial Sequence
  Description of Artificial Sequence: Synthetic oligonucleotide
gaacuagccgaggcccaca

SEQ ID NO: 1090585 - RNA, 19 nt, Artificial Sequence
  Description of Artificial Sequence: Synthetic oligonucleotide
augacgccuugagauuaca

SEQ ID NO: 1090586 - RNA, 19 nt, Artificial Sequence
  Description of Artificial Sequence: Synthetic oligonucleotide
gacuaagugcucuguucuu

SEQ ID NO: 1090587 - RNA, 19 nt, Artificial Sequence
  Description of Artificial Sequence: Synthetic oligonucleotide
agcuccgcgcagagggagg

SEQ ID NO: 1090588 - RNA, 19 nt, Artificial Sequence
  Description of Artificial Sequence: Synthetic oligonucleotide
gcuaggagaucuaggaacu

SEQ ID NO: 1090589 - RNA, 19 nt, Artificial Sequence
  Description of Artificial Sequence: Synthetic oligonucleotide
gaccaauaggaagcugcua

SEQ ID NO: 1090590 - RNA, 19 nt, Artificial Sequence
  Description of Artificial Sequence: Synthetic oligonucleotide
cacgaaucccaggauggaa

SEQ ID NO: 1090591 - RNA, 19 nt, Artificial Sequence
  Description of Artificial Sequence: Synthetic oligonucleotide
cacguagaccauggcacca

SEQ ID NO: 1090592 - RNA, 19 nt, Artificial Sequence
  Description of Artificial Sequence: Synthetic oligonucleotide
ugccgcucagcuguccaua

SEQ ID NO: 1090593 - RNA, 19 nt, Artificial Sequence
  Description of Artificial Sequence: Synthetic oligonucleotide
ccuacgccgacagcaagac

SEQ ID NO: 1090594 - RNA, 19 nt, Artificial Sequence
  Description of Artificial Sequence: Synthetic oligonucleotide
agaaaggaaccggguuuua

SEQ ID NO: 1090595 - RNA, 19 nt, Artificial Sequence
  Description of Artificial Sequence: Synthetic oligonucleotide
ccauaccagaaagcucucc

SEQ ID NO: 1090596 - RNA, 19 nt, Artificial Sequence
  Description of Artificial Sequence: Synthetic oligonucleotide
cucaaccgcuggugcuaac

SEQ ID NO: 1090597 - RNA, 19 nt, Artificial Sequence
  Description of Artificial Sequence: Synthetic oligonucleotide
gacuugcaauuugcuagua

SEQ ID NO: 1090598 - RNA, 19 nt, Artificial Sequence
  Description of Artificial Sequence: Synthetic oligonucleotide
cugaaacccuaggccaaca

SEQ ID NO: 1090599 - RNA, 19 nt, Artificial Sequence
  Description of Artificial Sequence: Synthetic oligonucleotide
gaacguuguguaaggugau

SEQ ID NO: 1090600 - RNA, 19 nt, Artificial Sequence
  Description of Artificial Sequence: Synthetic oligonucleotide
ggauacaguagggugcccu

SEQ ID NO: 1090601 - RNA, 19 nt, Artificial Sequence
  Description of Artificial Sequence: Synthetic oligonucleotide
cacccaagugaggcaucag

SEQ ID NO: 1090602 - RNA, 19 nt, Artificial Sequence
  Description of Artificial Sequence: Synthetic oligonucleotide
cacggacgcuguagccuug

SEQ ID NO: 1090603 - RNA, 19 nt, Artificial Sequence
  Description of Artificial Sequence: Synthetic oligonucleotide
cugacgggacagugcccuc

SEQ ID NO: 1090604 - RNA, 19 nt, Artificial Sequence
  Description of Artificial Sequence: Synthetic oligonucleotide
cucuguucuugugacccua

SEQ ID NO: 1090605 - RNA, 19 nt, Artificial Sequence
  Description of Artificial Sequence: Synthetic oligonucleotide
gcagagcgauccuucucca

SEQ ID NO: 1090606 - RNA, 19 nt, Artificial Sequence
  Description of Artificial Sequence: Synthetic oligonucleotide
cgcucagcuguccauacca

SEQ ID NO: 1090607 - RNA, 19 nt, Artificial Sequence
  Description of Artificial Sequence: Synthetic oligonucleotide
agcuucccguugccacuga

SEQ ID NO: 1090608 - RNA, 19 nt, Artificial Sequence
  Description of Artificial Sequence: Synthetic oligonucleotide
ccagacuuccgucuaagau

SEQ ID NO: 1090609 - RNA, 19 nt, Artificial Sequence
  Description of Artificial Sequence: Synthetic oligonucleotide
acgccgacagcaagacccu

SEQ ID NO: 1090610 - RNA, 19 nt, Artificial Sequence
  Description of Artificial Sequence: Synthetic oligonucleotide
ccaacaugcucaggucuug

SEQ ID NO: 1090611 - RNA, 19 nt, Artificial Sequence
  Description of Artificial Sequence: Synthetic oligonucleotide
ccacucagugguccaaaca

SEQ ID NO: 1090612 - RNA, 19 nt, Artificial Sequence
  Description of Artificial Sequence: Synthetic oligonucleotide
cgauagagcuaacuuaagu

SEQ ID NO: 1090613 - RNA, 19 nt, Artificial Sequence
  Description of Artificial Sequence: Synthetic oligonucleotide
ccuaccaagagcccucccu

SEQ ID NO: 1090614 - RNA, 19 nt, Artificial Sequence
  Description of Artificial Sequence: Synthetic oligonucleotide
ggcccugacgggacagugc

SEQ ID NO: 1090615 - RNA, 19 nt, Artificial Sequence
  Description of Artificial Sequence: Synthetic oligonucleotide
gaacugcgacuaagugcuc

SEQ ID NO: 1090616 - RNA, 19 nt, Artificial Sequence
  Description of Artificial Sequence: Synthetic oligonucleotide
ccacggugaaagagcacca

SEQ ID NO: 1090617 - RNA, 19 nt, Artificial Sequence
  Description of Artificial Sequence: Synthetic oligonucleotide
ggugacccugaggagcuaa

SEQ ID NO: 1090618 - RNA, 19 nt, Artificial Sequence
  Description of Artificial Sequence: Synthetic oligonucleotide
cgacuaagugcucuguucu

SEQ ID NO: 1090619 - RNA, 19 nt, Artificial Sequence
  Description of Artificial Sequence: Synthetic oligonucleotide
agcagacgucuguguucau

SEQ ID NO: 1090620 - RNA, 19 nt, Artificial Sequence
  Description of Artificial Sequence: Synthetic oligonucleotide
ggucguucugcagcaccca

SEQ ID NO: 1090621 - RNA, 19 nt, Artificial Sequence
  Description of Artificial Sequence: Synthetic oligonucleotide
gcauuggggagcagacguc

SEQ ID NO: 1090622 - RNA, 19 nt, Artificial Sequence
  Description of Artificial Sequence: Synthetic oligonucleotide
cuggaacguuguguaaggu

SEQ ID NO: 1090623 - RNA, 19 nt, Artificial Sequence
  Description of Artificial Sequence: Synthetic oligonucleotide
ccgucuaagauccgccucu

SEQ ID NO: 1090624 - RNA, 19 nt, Artificial Sequence
  Description of Artificial Sequence: Synthetic oligonucleotide
ggcccucgggaucagacuu

SEQ ID NO: 1090625 - RNA, 19 nt, Artificial Sequence
  Description of Artificial Sequence: Synthetic oligonucleotide
cccagacuuccgucuaaga

SEQ ID NO: 1090626 - RNA, 19 nt, Artificial Sequence
  Description of Artificial Sequence: Synthetic oligonucleotide
caccggcucugaaacccua

SEQ ID NO: 1090627 - RNA, 19 nt, Artificial Sequence
  Description of Artificial Sequence: Synthetic oligonucleotide
ggggagcagacgucugugu

SEQ ID NO: 1090628 - RNA, 19 nt, Artificial Sequence
  Description of Artificial Sequence: Synthetic oligonucleotide
cagcacccaagugaggcau

SEQ ID NO: 1090629 - RNA, 19 nt, Artificial Sequence
  Description of Artificial Sequence: Synthetic oligonucleotide
cggguuuuaaugagaggcu

SEQ ID NO: 1090630 - RNA, 19 nt, Artificial Sequence
  Description of Artificial Sequence: Synthetic oligonucleotide
cucuauccggauggagagu

SEQ ID NO: 1090631 - RNA, 19 nt, Artificial Sequence
  Description of Artificial Sequence: Synthetic oligonucleotide
gccgaggcccacauccaga

SEQ ID NO: 1090632 - RNA, 19 nt, Artificial Sequence
  Description of Artificial Sequence: Synthetic oligonucleotide
cgucuaagauccgccucug

SEQ ID NO: 1090633 - RNA, 19 nt, Artificial Sequence
  Description of Artificial Sequence: Synthetic oligonucleotide
cugcgacuaagugcucugu

SEQ ID NO: 1090634 - RNA, 19 nt, Artificial Sequence
  Description of Artificial Sequence: Synthetic oligonucleotide
caguagggguuggccuuga

SEQ ID NO: 1090635 - RNA, 19 nt, Artificial Sequence
  Description of Artificial Sequence: Synthetic oligonucleotide
ccacgaaucccaggaugga

SEQ ID NO: 1090636 - RNA, 19 nt, Artificial Sequence
  Description of Artificial Sequence: Synthetic oligonucleotide
gcgcagagggaggcugaca

SEQ ID NO: 1090637 - RNA, 19 nt, Artificial Sequence
  Description of Artificial Sequence: Synthetic oligonucleotide
gguggcagaugcagucuuu

SEQ ID NO: 1090638 - RNA, 19 nt, Artificial Sequence
  Description of Artificial Sequence: Synthetic oligonucleotide
gucugcccuggguucccuu

SEQ ID NO: 1090639 - RNA, 19 nt, Artificial Sequence
  Description of Artificial Sequence: Synthetic oligonucleotide
gcuucccguugccacugau

SEQ ID NO: 1090640 - RNA, 19 nt, Artificial Sequence
  Description of Artificial Sequence: Synthetic oligonucleotide
ccaccggcucugaaacccu

SEQ ID NO: 1090641 - RNA, 19 nt, Artificial Sequence
  Description of Artificial Sequence: Synthetic oligonucleotide
cccucgggaucagacuucu

SEQ ID NO: 1090642 - RNA, 19 nt, Artificial Sequence
  Description of Artificial Sequence: Synthetic oligonucleotide
cuccgcgcagagggaggcu

SEQ ID NO: 1090643 - RNA, 19 nt, Artificial Sequence
  Description of Artificial Sequence: Synthetic oligonucleotide
cggacgcuguagccuugga

SEQ ID NO: 1090644 - RNA, 19 nt, Artificial Sequence
  Description of Artificial Sequence: Synthetic oligonucleotide
cgcuguagccuuggagcau

SEQ ID NO: 1090645 - RNA, 19 nt, Artificial Sequence
  Description of Artificial Sequence: Synthetic oligonucleotide
ccucgggaucagacuucuu

SEQ ID NO: 1090646 - RNA, 19 nt, Artificial Sequence
  Description of Artificial Sequence: Synthetic oligonucleotide
aauacuauuguuuacauac

SEQ ID NO: 1090647 - RNA, 19 nt, Artificial Sequence
  Description of Artificial Sequence: Synthetic oligonucleotide
aauauaaugcuaccaaugc

SEQ ID NO: 1090648 - RNA, 19 nt, Artificial Sequence
  Description of Artificial Sequence: Synthetic oligonucleotide
aauauugaagcuguaagac

SEQ ID NO: 1090649 - RNA, 19 nt, Artificial Sequence
  Description of Artificial Sequence: Synthetic oligonucleotide
ucauauuauacuauuaagc

SEQ ID NO: 1090650 - RNA, 19 nt, Artificial Sequence
  Description of Artificial Sequence: Synthetic oligonucleotide
aaugaaacgcauuugaagu

SEQ ID NO: 1090651 - RNA, 19 nt, Artificial Sequence
  Description of Artificial Sequence: Synthetic oligonucleotide
uuacauaccauauagguug

SEQ ID NO: 1090652 - RNA, 19 nt, Artificial Sequence
  Description of Artificial Sequence: Synthetic oligonucleotide
uaugcaguaaagcacaaag

SEQ ID NO: 1090653 - RNA, 19 nt, Artificial Sequence
  Description of Artificial Sequence: Synthetic oligonucleotide
uaauuuuaugacuacacag

SEQ ID NO: 1090654 - RNA, 19 nt, Artificial Sequence
  Description of Artificial Sequence: Synthetic oligonucleotide
aauucuaugaguaagacua

SEQ ID NO: 1090655 - RNA, 19 nt, Artificial Sequence
  Description of Artificial Sequence: Synthetic oligonucleotide
auagccaaugauuauauuc

SEQ ID NO: 1090656 - RNA, 19 nt, Artificial Sequence
  Description of Artificial Sequence: Synthetic oligonucleotide
aaauccaacacuucguaag

SEQ ID NO: 1090657 - RNA, 19 nt, Artificial Sequence
  Description of Artificial Sequence: Synthetic oligonucleotide
agauagucuaaacagcugc

SEQ ID NO: 1090658 - RNA, 19 nt, Artificial Sequence
  Description of Artificial Sequence: Synthetic oligonucleotide
caagguaauauuuaauugg

SEQ ID NO: 1090659 - RNA, 19 nt, Artificial Sequence
  Description of Artificial Sequence: Synthetic oligonucleotide
aauaucagaaauaugaaau

SEQ ID NO: 1090660 - RNA, 19 nt, Artificial Sequence
  Description of Artificial Sequence: Synthetic oligonucleotide
uauaauuuuaugacuacac

SEQ ID NO: 1090661 - RNA, 19 nt, Artificial Sequence
  Description of Artificial Sequence: Synthetic oligonucleotide
uuaacagcauucuaugagg

SEQ ID NO: 1090662 - RNA, 19 nt, Artificial Sequence
  Description of Artificial Sequence: Synthetic oligonucleotide
aaagccacuggauaucacg

SEQ ID NO: 1090663 - RNA, 19 nt, Artificial Sequence
  Description of Artificial Sequence: Synthetic oligonucleotide
uauuauacuauuaagcauu

SEQ ID NO: 1090664 - RNA, 19 nt, Artificial Sequence
  Description of Artificial Sequence: Synthetic oligonucleotide
caacuaauaacauacuccc

SEQ ID NO: 1090665 - RNA, 19 nt, Artificial Sequence
  Description of Artificial Sequence: Synthetic oligonucleotide
uucauauuauacuauuaag

SEQ ID NO: 1090666 - RNA, 19 nt, Artificial Sequence
  Description of Artificial Sequence: Synthetic oligonucleotide
uuaaaacucaaucucacau

SEQ ID NO: 1090667 - RNA, 19 nt, Artificial Sequence
  Description of Artificial Sequence: Synthetic oligonucleotide
aguaagacuaacaauacag

SEQ ID NO: 1090668 - RNA, 19 nt, Artificial Sequence
  Description of Artificial Sequence: Synthetic oligonucleotide
uacacuauuggcacuaugc

SEQ ID NO: 1090669 - RNA, 19 nt, Artificial Sequence
  Description of Artificial Sequence: Synthetic oligonucleotide
uuuaaagcaaucuguaccu

SEQ ID NO: 1090670 - RNA, 19 nt, Artificial Sequence
  Description of Artificial Sequence: Synthetic oligonucleotide
agucgaucugaacauagcc

SEQ ID NO: 1090671 - RNA, 19 nt, Artificial Sequence
  Description of Artificial Sequence: Synthetic oligonucleotide
aauaagacaagguaauauu

SEQ ID NO: 1090672 - RNA, 19 nt, Artificial Sequence
  Description of Artificial Sequence: Synthetic oligonucleotide
accaauaucagaaauauga

SEQ ID NO: 1090673 - RNA, 19 nt, Artificial Sequence
  Description of Artificial Sequence: Synthetic oligonucleotide
auauagguugucuuacagc

SEQ ID NO: 1090674 - RNA, 19 nt, Artificial Sequence
  Description of Artificial Sequence: Synthetic oligonucleotide
uaguguucaagaaauauaa

SEQ ID NO: 1090675 - RNA, 19 nt, Artificial Sequence
  Description of Artificial Sequence: Synthetic oligonucleotide
uaacauacucccaaauuag

SEQ ID NO: 1090676 - RNA, 19 nt, Artificial Sequence
  Description of Artificial Sequence: Synthetic oligonucleotide
cuugucaagcuucaggugg

SEQ ID NO: 1090677 - RNA, 19 nt, Artificial Sequence
  Description of Artificial Sequence: Synthetic oligonucleotide
uucuaugaggcacuaauga

SEQ ID NO: 1090678 - RNA, 19 nt, Artificial Sequence
  Description of Artificial Sequence: Synthetic oligonucleotide
uguuuacauaccauauagg

SEQ ID NO: 1090679 - RNA, 19 nt, Artificial Sequence
  Description of Artificial Sequence: Synthetic oligonucleotide
agaaagauuuucuuggaca

SEQ ID NO: 1090680 - RNA, 19 nt, Artificial Sequence
  Description of Artificial Sequence: Synthetic oligonucleotide
agucuaaacagcugcaauc

SEQ ID NO: 1090681 - RNA, 19 nt, Artificial Sequence
  Description of Artificial Sequence: Synthetic oligonucleotide
aaauuaguucugugccucc

SEQ ID NO: 1090682 - RNA, 19 nt, Artificial Sequence
  Description of Artificial Sequence: Synthetic oligonucleotide
cuucgaguccuuaagaggc

SEQ ID NO: 1090683 - RNA, 19 nt, Artificial Sequence
  Description of Artificial Sequence: Synthetic oligonucleotide
uaaagggcgcucuaggccg

SEQ ID NO: 1090684 - RNA, 19 nt, Artificial Sequence
  Description of Artificial Sequence: Synthetic oligonucleotide
agaaauauaaugcuaccaa

SEQ ID NO: 1090685 - RNA, 19 nt, Artificial Sequence
  Description of Artificial Sequence: Synthetic oligonucleotide
aacucaaucucacauucga

SEQ ID NO: 1090686 - RNA, 19 nt, Artificial Sequence
  Description of Artificial Sequence: Synthetic oligonucleotide
aaugcuaccaaugcaugag

SEQ ID NO: 1090687 - RNA, 19 nt, Artificial Sequence
  Description of Artificial Sequence: Synthetic oligonucleotide
acuaauaacauacucccaa

SEQ ID NO: 1090688 - RNA, 19 nt, Artificial Sequence
  Description of Artificial Sequence: Synthetic oligonucleotide
auaucagaaauaugaaaug

SEQ ID NO: 1090689 - RNA, 19 nt, Artificial Sequence
  Description of Artificial Sequence: Synthetic oligonucleotide
aaugacccaacuaauaaca

SEQ ID NO: 1090690 - RNA, 19 nt, Artificial Sequence
  Description of Artificial Sequence: Synthetic oligonucleotide
ucuaugaggcacuaaugag

SEQ ID NO: 1090691 - RNA, 19 nt, Artificial Sequence
  Description of Artificial Sequence: Synthetic oligonucleotide
ucaaugacccaacuaauaa

SEQ ID NO: 1090692 - RNA, 19 nt, Artificial Sequence
  Description of Artificial Sequence: Synthetic oligonucleotide
uuaaagggcgcucuaggcc

SEQ ID NO: 1090693 - RNA, 19 nt, Artificial Sequence
  Description of Artificial Sequence: Synthetic oligonucleotide
uuuaauuggacaguacaca

SEQ ID NO: 1090694 - RNA, 19 nt, Artificial Sequence
  Description of Artificial Sequence: Synthetic oligonucleotide
aauccugcacaccagccag

SEQ ID NO: 1090695 - RNA, 19 nt, Artificial Sequence
  Description of Artificial Sequence: Synthetic oligonucleotide
uccaaauagccaaugauua

SEQ ID NO: 1090696 - RNA, 19 nt, Artificial Sequence
  Description of Artificial Sequence: Synthetic oligonucleotide
ucuaugaguaagacuaaca

SEQ ID NO: 1090697 - RNA, 19 nt, Artificial Sequence
  Description of Artificial Sequence: Synthetic oligonucleotide
augcaugagggccauaaac

SEQ ID NO: 1090698 - RNA, 19 nt, Artificial Sequence
  Description of Artificial Sequence: Synthetic oligonucleotide
uaagacuaacaauacagaa

SEQ ID NO: 1090699 - RNA, 19 nt, Artificial Sequence
  Description of Artificial Sequence: Synthetic oligonucleotide
uauuguuuacauaccauau

SEQ ID NO: 1090700 - RNA, 19 nt, Artificial Sequence
  Description of Artificial Sequence: Synthetic oligonucleotide
aagaaauauaaugcuacca

SEQ ID NO: 1090701 - RNA, 19 nt, Artificial Sequence
  Description of Artificial Sequence: Synthetic oligonucleotide
guuuauugcacacacauua

SEQ ID NO: 1090702 - RNA, 19 nt, Artificial Sequence
  Description of Artificial Sequence: Synthetic oligonucleotide
ucuaccaugggucccgaag

SEQ ID NO: 1090703 - RNA, 19 nt, Artificial Sequence
  Description of Artificial Sequence: Synthetic oligonucleotide
aauuaguucugugccuccc

SEQ ID NO: 1090704 - RNA, 19 nt, Artificial Sequence
  Description of Artificial Sequence: Synthetic oligonucleotide
aaaauccugcacaccagcc

SEQ ID NO: 1090705 - RNA, 19 nt, Artificial Sequence
  Description of Artificial Sequence: Synthetic oligonucleotide
uuuaaagggcgcucuaggc

SEQ ID NO: 1090706 - RNA, 19 nt, Artificial Sequence
  Description of Artificial Sequence: Synthetic oligonucleotide
aucuuuccaaucugaagac

SEQ ID NO: 1090707 - RNA, 19 nt, Artificial Sequence
  Description of Artificial Sequence: Synthetic oligonucleotide
uccuuaagaggcaaggccu

SEQ ID NO: 1090708 - RNA, 19 nt, Artificial Sequence
  Description of Artificial Sequence: Synthetic oligonucleotide
gguaauauuuaauuggaca

SEQ ID NO: 1090709 - RNA, 19 nt, Artificial Sequence
  Description of Artificial Sequence: Synthetic oligonucleotide
ugaagacuccaacuuauac

SEQ ID NO: 1090710 - RNA, 19 nt, Artificial Sequence
  Description of Artificial Sequence: Synthetic oligonucleotide
gugaaugcuaaguugcugc

SEQ ID NO: 1090711 - RNA, 19 nt, Artificial Sequence
  Description of Artificial Sequence: Synthetic oligonucleotide
ucgaucugaacauagccac

SEQ ID NO: 1090712 - RNA, 19 nt, Artificial Sequence
  Description of Artificial Sequence: Synthetic oligonucleotide
aauccaacacuucguaaga

SEQ ID NO: 1090713 - RNA, 19 nt, Artificial Sequence
  Description of Artificial Sequence: Synthetic oligonucleotide
uuaauuggacaguacacau

SEQ ID NO: 1090714 - RNA, 19 nt, Artificial Sequence
  Description of Artificial Sequence: Synthetic oligonucleotide
ugcucaagaauacuauugu

SEQ ID NO: 1090715 - RNA, 19 nt, Artificial Sequence
  Description of Artificial Sequence: Synthetic oligonucleotide
ugcuaccaaugcaugaggg

SEQ ID NO: 1090716 - RNA, 19 nt, Artificial Sequence
  Description of Artificial Sequence: Synthetic oligonucleotide
aagguaauauuuaauugga

SEQ ID NO: 1090717 - RNA, 19 nt, Artificial Sequence
  Description of Artificial Sequence: Synthetic oligonucleotide
agggccauaaacaaggaag

SEQ ID NO: 1090718 - RNA, 19 nt, Artificial Sequence
  Description of Artificial Sequence: Synthetic oligonucleotide
augaaacgcauuugaaguc

SEQ ID NO: 1090719 - RNA, 19 nt, Artificial Sequence
  Description of Artificial Sequence: Synthetic oligonucleotide
gacgccaugauaccgccgg

SEQ ID NO: 1090720 - RNA, 19 nt, Artificial Sequence
  Description of Artificial Sequence: Synthetic oligonucleotide
uuuauugcacacacauuac

SEQ ID NO: 1090721 - RNA, 19 nt, Artificial Sequence
  Description of Artificial Sequence: Synthetic oligonucleotide
uaaccaauaucagaaauau

SEQ ID NO: 1090722 - RNA, 19 nt, Artificial Sequence
  Description of Artificial Sequence: Synthetic oligonucleotide
uucaacucucuuccagucg

SEQ ID NO: 1090723 - RNA, 19 nt, Artificial Sequence
  Description of Artificial Sequence: Synthetic oligonucleotide
ugcauuugcaauuguccag

SEQ ID NO: 1090724 - RNA, 19 nt, Artificial Sequence
  Description of Artificial Sequence: Synthetic oligonucleotide
aacacuuuaaagggcgcuc

SEQ ID NO: 1090725 - RNA, 19 nt, Artificial Sequence
  Description of Artificial Sequence: Synthetic oligonucleotide
uaacagcauucuaugaggc

SEQ ID NO: 1090726 - RNA, 19 nt, Artificial Sequence
  Description of Artificial Sequence: Synthetic oligonucleotide
aacuuauacuguucugcug

SEQ ID NO: 1090727 - RNA, 19 nt, Artificial Sequence
  Description of Artificial Sequence: Synthetic oligonucleotide
aaauccugcacaccagcca

SEQ ID NO: 1090728 - RNA, 19 nt, Artificial Sequence
  Description of Artificial Sequence: Synthetic oligonucleotide
agugaacugaccuaguguu

SEQ ID NO: 1090729 - RNA, 19 nt, Artificial Sequence
  Description of Artificial Sequence: Synthetic oligonucleotide
aauacucgauuccaccagu

SEQ ID NO: 1090730 - RNA, 19 nt, Artificial Sequence
  Description of Artificial Sequence: Synthetic oligonucleotide
ugaaacgcauuugaagucc

SEQ ID NO: 1090731 - RNA, 19 nt, Artificial Sequence
  Description of Artificial Sequence: Synthetic oligonucleotide
agaaaaucacaguucuuca

SEQ ID NO: 1090732 - RNA, 19 nt, Artificial Sequence
  Description of Artificial Sequence: Synthetic oligonucleotide
auacucccaaauuaguucu

SEQ ID NO: 1090733 - RNA, 19 nt, Artificial Sequence
  Description of Artificial Sequence: Synthetic oligonucleotide
uuuucuaccaugggucccg

SEQ ID NO: 1090734 - RNA, 19 nt, Artificial Sequence
  Description of Artificial Sequence: Synthetic oligonucleotide
acuacacagaaaaucacag

SEQ ID NO: 1090735 - RNA, 19 nt, Artificial Sequence
  Description of Artificial Sequence: Synthetic oligonucleotide
cauauagguugucuuacag

SEQ ID NO: 1090736 - RNA, 19 nt, Artificial Sequence
  Description of Artificial Sequence: Synthetic oligonucleotide
cuaccaaugcaugagggcc

SEQ ID NO: 1090737 - RNA, 19 nt, Artificial Sequence
  Description of Artificial Sequence: Synthetic oligonucleotide
uaauauuuaauuggacagu

SEQ ID NO: 1090738 - RNA, 19 nt, Artificial Sequence
  Description of Artificial Sequence: Synthetic oligonucleotide
uguaucaaugacccaacua

SEQ ID NO: 1090739 - RNA, 19 nt, Artificial Sequence
  Description of Artificial Sequence: Synthetic oligonucleotide
aggccaaaauuauaauuag

SEQ ID NO: 1090740 - RNA, 19 nt, Artificial Sequence
  Description of Artificial Sequence: Synthetic oligonucleotide
agaaaguaugaugcuggcc

SEQ ID NO: 1090741 - RNA, 19 nt, Artificial Sequence
  Description of Artificial Sequence: Synthetic oligonucleotide
uacucgauuccaccagugg

SEQ ID NO: 1090742 - RNA, 19 nt, Artificial Sequence
  Description of Artificial Sequence: Synthetic oligonucleotide
aguaaaagcacagaauuua

SEQ ID NO: 1090743 - RNA, 19 nt, Artificial Sequence
  Description of Artificial Sequence: Synthetic oligonucleotide
aagucuauggucucucuuu

SEQ ID NO: 1090744 - RNA, 19 nt, Artificial Sequence
  Description of Artificial Sequence: Synthetic oligonucleotide
aggagauagucuaaacagc

SEQ ID NO: 1090745 - RNA, 19 nt, Artificial Sequence
  Description of Artificial Sequence: Synthetic oligonucleotide
uaagaggcaaggccuagca

SEQ ID NO: 1090746 - RNA, 19 nt, Artificial Sequence
  Description of Artificial Sequence: Synthetic oligonucleotide
acuauuggcacuaugcagu

SEQ ID NO: 1090747 - RNA, 19 nt, Artificial Sequence
  Description of Artificial Sequence: Synthetic oligonucleotide
aaaguaugaugcuggcccu

SEQ ID NO: 1090748 - RNA, 19 nt, Artificial Sequence
  Description of Artificial Sequence: Synthetic oligonucleotide
gaagaggccaaaauuauaa

SEQ ID NO: 1090749 - RNA, 19 nt, Artificial Sequence
  Description of Artificial Sequence: Synthetic oligonucleotide
accauauagguugucuuac

SEQ ID NO: 1090750 - RNA, 19 nt, Artificial Sequence
  Description of Artificial Sequence: Synthetic oligonucleotide
cuuccagucgaucugaaca

SEQ ID NO: 1090751 - RNA, 19 nt, Artificial Sequence
  Description of Artificial Sequence: Synthetic oligonucleotide
uuccgggacgccaugauac

SEQ ID NO: 1090752 - RNA, 19 nt, Artificial Sequence
  Description of Artificial Sequence: Synthetic oligonucleotide
aguucuucagacaauaaau

SEQ ID NO: 1090753 - RNA, 19 nt, Artificial Sequence
  Description of Artificial Sequence: Synthetic oligonucleotide
gagauuguccuacugccac

SEQ ID NO: 1090754 - RNA, 19 nt, Artificial Sequence
  Description of Artificial Sequence: Synthetic oligonucleotide
aaucacaguucuucagaca

SEQ ID NO: 1090755 - RNA, 19 nt, Artificial Sequence
  Description of Artificial Sequence: Synthetic oligonucleotide
aacaaggaagcaauuacau

SEQ ID NO: 1090756 - RNA, 19 nt, Artificial Sequence
  Description of Artificial Sequence: Synthetic oligonucleotide
agauuguccuacugccacc

SEQ ID NO: 1090757 - RNA, 19 nt, Artificial Sequence
  Description of Artificial Sequence: Synthetic oligonucleotide
ugaacugaccuaguguuca

SEQ ID NO: 1090758 - RNA, 19 nt, Artificial Sequence
  Description of Artificial Sequence: Synthetic oligonucleotide
guaccuuuuggugaagagg

SEQ ID NO: 1090759 - RNA, 19 nt, Artificial Sequence
  Description of Artificial Sequence: Synthetic oligonucleotide
caugguuugcucaagaaua

SEQ ID NO: 1090760 - RNA, 19 nt, Artificial Sequence
  Description of Artificial Sequence: Synthetic oligonucleotide
auuggcacuaugcaguaaa

SEQ ID NO: 1090761 - RNA, 19 nt, Artificial Sequence
  Description of Artificial Sequence: Synthetic oligonucleotide
auacuauuguuuacauacc

SEQ ID NO: 1090762 - RNA, 19 nt, Artificial Sequence
  Description of Artificial Sequence: Synthetic oligonucleotide
cuaugaggcacuaaugaga

SEQ ID NO: 1090763 - RNA, 19 nt, Artificial Sequence
  Description of Artificial Sequence: Synthetic oligonucleotide
aaacaagugaacugaccua

SEQ ID NO: 1090764 - RNA, 19 nt, Artificial Sequence
  Description of Artificial Sequence: Synthetic oligonucleotide
agggguaauacaauucuuc

SEQ ID NO: 1090765 - RNA, 19 nt, Artificial Sequence
  Description of Artificial Sequence: Synthetic oligonucleotide
ugaaguccauaaaauguau

SEQ ID NO: 1090766 - RNA, 19 nt, Artificial Sequence
  Description of Artificial Sequence: Synthetic oligonucleotide
gugacucgcaaccugcagg

SEQ ID NO: 1090767 - RNA, 19 nt, Artificial Sequence
  Description of Artificial Sequence: Synthetic oligonucleotide
caacacuucguaagauucg

SEQ ID NO: 1090768 - RNA, 19 nt, Artificial Sequence
  Description of Artificial Sequence: Synthetic oligonucleotide
uugcaauuguccagcuggg

SEQ ID NO: 1090769 - RNA, 19 nt, Artificial Sequence
  Description of Artificial Sequence: Synthetic oligonucleotide
auaggcugguuucuaaaca

SEQ ID NO: 1090770 - RNA, 19 nt, Artificial Sequence
  Description of Artificial Sequence: Synthetic oligonucleotide
gaguccuuaagaggcaagg

SEQ ID NO: 1090771 - RNA, 19 nt, Artificial Sequence
  Description of Artificial Sequence: Synthetic oligonucleotide
uuauaaccaauaucagaaa

SEQ ID NO: 1090772 - RNA, 19 nt, Artificial Sequence
  Description of Artificial Sequence: Synthetic oligonucleotide
auuauauucauaggcuggu

SEQ ID NO: 1090773 - RNA, 19 nt, Artificial Sequence
  Description of Artificial Sequence: Synthetic oligonucleotide
ugggcguugguuacccugg

SEQ ID NO: 1090774 - RNA, 19 nt, Artificial Sequence
  Description of Artificial Sequence: Synthetic oligonucleotide
aaacucaaucucacauucg

SEQ ID NO: 1090775 - RNA, 19 nt, Artificial Sequence
  Description of Artificial Sequence: Synthetic oligonucleotide
aacacuucguaagauucgu

SEQ ID NO: 1090776 - RNA, 19 nt, Artificial Sequence
  Description of Artificial Sequence: Synthetic oligonucleotide
guggugaaugcuaaguugc

SEQ ID NO: 1090777 - RNA, 19 nt, Artificial Sequence
  Description of Artificial Sequence: Synthetic oligonucleotide
acugugacucgcaaccugc

SEQ ID NO: 1090778 - RNA, 19 nt, Artificial Sequence
  Description of Artificial Sequence: Synthetic oligonucleotide
gaggccaaaauuauaauua

SEQ ID NO: 1090779 - RNA, 19 nt, Artificial Sequence
  Description of Artificial Sequence: Synthetic oligonucleotide
ugcucguuucuuaauuugu

SEQ ID NO: 1090780 - RNA, 19 nt, Artificial Sequence
  Description of Artificial Sequence: Synthetic oligonucleotide
uggugaagaggccaaaauu

SEQ ID NO: 1090781 - RNA, 19 nt, Artificial Sequence
  Description of Artificial Sequence: Synthetic oligonucleotide
auuguuuacauaccauaua

SEQ ID NO: 1090782 - RNA, 19 nt, Artificial Sequence
  Description of Artificial Sequence: Synthetic oligonucleotide
ggacaguacacauaacagc

SEQ ID NO: 1090783 - RNA, 19 nt, Artificial Sequence
  Description of Artificial Sequence: Synthetic oligonucleotide
aaguguggccaaauacucg

SEQ ID NO: 1090784 - RNA, 19 nt, Artificial Sequence
  Description of Artificial Sequence: Synthetic oligonucleotide
cucgauuccaccaguggug

SEQ ID NO: 1090785 - RNA, 19 nt, Artificial Sequence
  Description of Artificial Sequence: Synthetic oligonucleotide
acccauuacaaucugggua

SEQ ID NO: 1090786 - RNA, 19 nt, Artificial Sequence
  Description of Artificial Sequence: Synthetic oligonucleotide
uaagauucgucaucgcuuu

SEQ ID NO: 1090787 - RNA, 19 nt, Artificial Sequence
  Description of Artificial Sequence: Synthetic oligonucleotide
ugacucgcaaccugcagga

SEQ ID NO: 1090788 - RNA, 19 nt, Artificial Sequence
  Description of Artificial Sequence: Synthetic oligonucleotide
gacaguacacauaacagcu

SEQ ID NO: 1090789 - RNA, 19 nt, Artificial Sequence
  Description of Artificial Sequence: Synthetic oligonucleotide
cccauuacaaucuggguag

SEQ ID NO: 1090790 - RNA, 19 nt, Artificial Sequence
  Description of Artificial Sequence: Synthetic oligonucleotide
uugguuacccuggagacuc

SEQ ID NO: 1090791 - RNA, 19 nt, Artificial Sequence
  Description of Artificial Sequence: Synthetic oligonucleotide
uuguccuacugccaccagc

SEQ ID NO: 1090792 - RNA, 19 nt, Artificial Sequence
  Description of Artificial Sequence: Synthetic oligonucleotide
acuggauaucacgauguuc

SEQ ID NO: 1090793 - RNA, 19 nt, Artificial Sequence
  Description of Artificial Sequence: Synthetic oligonucleotide
augcuaccaaugcaugagg

SEQ ID NO: 1090794 - RNA, 19 nt, Artificial Sequence
  Description of Artificial Sequence: Synthetic oligonucleotide
cccaaauuaguucugugcc

SEQ ID NO: 1090795 - RNA, 19 nt, Artificial Sequence
  Description of Artificial Sequence: Synthetic oligonucleotide
ugugacucgcaaccugcag

SEQ ID NO: 1090796 - RNA, 19 nt, Artificial Sequence
  Description of Artificial Sequence: Synthetic oligonucleotide
acgcauuugaaguccauaa

SEQ ID NO: 1090797 - RNA, 19 nt, Artificial Sequence
  Description of Artificial Sequence: Synthetic oligonucleotide
ucgggugcugcuuuauuug

SEQ ID NO: 1090798 - RNA, 19 nt, Artificial Sequence
  Description of Artificial Sequence: Synthetic oligonucleotide
cacuaugcaguaaagcaca

SEQ ID NO: 1090799 - RNA, 19 nt, Artificial Sequence
  Description of Artificial Sequence: Synthetic oligonucleotide
cauugagagauuguccuac

SEQ ID NO: 1090800 - RNA, 19 nt, Artificial Sequence
  Description of Artificial Sequence: Synthetic oligonucleotide
agaauauaucccaggagcu

SEQ ID NO: 1090801 - RNA, 19 nt, Artificial Sequence
  Description of Artificial Sequence: Synthetic oligonucleotide
uuggcacuaugcaguaaag

SEQ ID NO: 1090802 - RNA, 19 nt, Artificial Sequence
  Description of Artificial Sequence: Synthetic oligonucleotide
cuuccuaucacaaggagau

SEQ ID NO: 1090803 - RNA, 19 nt, Artificial Sequence
  Description of Artificial Sequence: Synthetic oligonucleotide
gaaguguggccaaauacuc

SEQ ID NO: 1090804 - RNA, 19 nt, Artificial Sequence
  Description of Artificial Sequence: Synthetic oligonucleotide
aggaagcaauuacauuuag

SEQ ID NO: 1090805 - RNA, 19 nt, Artificial Sequence
  Description of Artificial Sequence: Synthetic oligonucleotide
cacuucguaagauucguca

SEQ ID NO: 1090806 - RNA, 19 nt, Artificial Sequence
  Description of Artificial Sequence: Synthetic oligonucleotide
caaauuaguucugugccuc

SEQ ID NO: 1090807 - RNA, 19 nt, Artificial Sequence
  Description of Artificial Sequence: Synthetic oligonucleotide
aaguugcugcauuugcaau

SEQ ID NO: 1090808 - RNA, 19 nt, Artificial Sequence
  Description of Artificial Sequence: Synthetic oligonucleotide
uucagguggugaaugcuaa

SEQ ID NO: 1090809 - RNA, 19 nt, Artificial Sequence
  Description of Artificial Sequence: Synthetic oligonucleotide
uguugauuucgggugcugc

SEQ ID NO: 1090810 - RNA, 19 nt, Artificial Sequence
  Description of Artificial Sequence: Synthetic oligonucleotide
uaccauauagguugucuua

SEQ ID NO: 1090811 - RNA, 19 nt, Artificial Sequence
  Description of Artificial Sequence: Synthetic oligonucleotide
auaccauauagguugucuu

SEQ ID NO: 1090812 - RNA, 19 nt, Artificial Sequence
  Description of Artificial Sequence: Synthetic oligonucleotide
aagauucgucaucgcuuuc

SEQ ID NO: 1090813 - RNA, 19 nt, Artificial Sequence
  Description of Artificial Sequence: Synthetic oligonucleotide
aaagcaaucuguaccuuuu

SEQ ID NO: 1090814 - RNA, 19 nt, Artificial Sequence
  Description of Artificial Sequence: Synthetic oligonucleotide
uuaugacuacacagaaaau

SEQ ID NO: 1090815 - RNA, 19 nt, Artificial Sequence
  Description of Artificial Sequence: Synthetic oligonucleotide
gaauucuaugaguaagacu

SEQ ID NO: 1090816 - RNA, 19 nt, Artificial Sequence
  Description of Artificial Sequence: Synthetic oligonucleotide
uugucaagcuucagguggu

SEQ ID NO: 1090817 - RNA, 19 nt, Artificial Sequence
  Description of Artificial Sequence: Synthetic oligonucleotide
acuucguaagauucgucau

SEQ ID NO: 1090818 - RNA, 19 nt, Artificial Sequence
  Description of Artificial Sequence: Synthetic oligonucleotide
cuucguaagauucgucauc

SEQ ID NO: 1090819 - RNA, 19 nt, Artificial Sequence
  Description of Artificial Sequence: Synthetic oligonucleotide
ucuaggccgaggaggaagu

SEQ ID NO: 1090820 - RNA, 19 nt, Artificial Sequence
  Description of Artificial Sequence: Synthetic oligonucleotide
aguugcugcauuugcaauu

SEQ ID NO: 1090821 - RNA, 19 nt, Artificial Sequence
  Description of Artificial Sequence: Synthetic oligonucleotide
gggcaugagccauugagag

SEQ ID NO: 1090822 - RNA, 19 nt, Artificial Sequence
  Description of Artificial Sequence: Synthetic oligonucleotide
ugacccaacuaauaacaua

SEQ ID NO: 1090823 - RNA, 19 nt, Artificial Sequence
  Description of Artificial Sequence: Synthetic oligonucleotide
guaagacuaacaauacaga

SEQ ID NO: 1090824 - RNA, 19 nt, Artificial Sequence
  Description of Artificial Sequence: Synthetic oligonucleotide
caugauaccgccggcggcc

SEQ ID NO: 1090825 - RNA, 19 nt, Artificial Sequence
  Description of Artificial Sequence: Synthetic oligonucleotide
acuaagacagugccuucga

SEQ ID NO: 1090826 - RNA, 19 nt, Artificial Sequence
  Description of Artificial Sequence: Synthetic oligonucleotide
aggaggaagucuauggucu

SEQ ID NO: 1090827 - RNA, 19 nt, Artificial Sequence
  Description of Artificial Sequence: Synthetic oligonucleotide
cacuaagacagugccuucg

SEQ ID NO: 1090828 - RNA, 19 nt, Artificial Sequence
  Description of Artificial Sequence: Synthetic oligonucleotide
aacuaauaacauacuccca

SEQ ID NO: 1090829 - RNA, 19 nt, Artificial Sequence
  Description of Artificial Sequence: Synthetic oligonucleotide
gagauagucuaaacagcug

SEQ ID NO: 1090830 - RNA, 19 nt, Artificial Sequence
  Description of Artificial Sequence: Synthetic oligonucleotide
aacugaccuaguguucaag

SEQ ID NO: 1090831 - RNA, 19 nt, Artificial Sequence
  Description of Artificial Sequence: Synthetic oligonucleotide
ccacccauuacaaucuggg

SEQ ID NO: 1090832 - RNA, 19 nt, Artificial Sequence
  Description of Artificial Sequence: Synthetic oligonucleotide
auaaugcuaccaaugcaug

SEQ ID NO: 1090833 - RNA, 19 nt, Artificial Sequence
  Description of Artificial Sequence: Synthetic oligonucleotide
ugccuucgaguccuuaaga

SEQ ID NO: 1090834 - RNA, 19 nt, Artificial Sequence
  Description of Artificial Sequence: Synthetic oligonucleotide
ggaagcaauuacauuuagg

SEQ ID NO: 1090835 - RNA, 19 nt, Artificial Sequence
  Description of Artificial Sequence: Synthetic oligonucleotide
auucuaugaggcacuaaug

SEQ ID NO: 1090836 - RNA, 19 nt, Artificial Sequence
  Description of Artificial Sequence: Synthetic oligonucleotide
uuaagaggcaaggccuagc

SEQ ID NO: 1090837 - RNA, 19 nt, Artificial Sequence
  Description of Artificial Sequence: Synthetic oligonucleotide
uggcacuaugcaguaaagc

SEQ ID NO: 1090838 - RNA, 19 nt, Artificial Sequence
  Description of Artificial Sequence: Synthetic oligonucleotide
gaauacuauuguuuacaua

SEQ ID NO: 1090839 - RNA, 19 nt, Artificial Sequence
  Description of Artificial Sequence: Synthetic oligonucleotide
uucgaguccuuaagaggca

SEQ ID NO: 1090840 - RNA, 19 nt, Artificial Sequence
  Description of Artificial Sequence: Synthetic oligonucleotide
uaccaugggucccgaagug

SEQ ID NO: 1090841 - RNA, 19 nt, Artificial Sequence
  Description of Artificial Sequence: Synthetic oligonucleotide
gcauuugaaguccauaaaa

SEQ ID NO: 1090842 - RNA, 19 nt, Artificial Sequence
  Description of Artificial Sequence: Synthetic oligonucleotide
augggucccgaaguguggc

SEQ ID NO: 1090843 - RNA, 19 nt, Artificial Sequence
  Description of Artificial Sequence: Synthetic oligonucleotide
ucgcuuucauagucuuggg

SEQ ID NO: 1090844 - RNA, 19 nt, Artificial Sequence
  Description of Artificial Sequence: Synthetic oligonucleotide
cuaagacagugccuucgag

SEQ ID NO: 1090845 - RNA, 19 nt, Artificial Sequence
  Description of Artificial Sequence: Synthetic oligonucleotide
ccuucgaguccuuaagagg

SEQ ID NO: 1090846 - RNA, 19 nt, Artificial Sequence
  Description of Artificial Sequence: Synthetic oligonucleotide
uauuugcucguuucuuaau

SEQ ID NO: 1090847 - RNA, 19 nt, Artificial Sequence
  Description of Artificial Sequence: Synthetic oligonucleotide
cagucgaucugaacauagc

SEQ ID NO: 1090848 - RNA, 19 nt, Artificial Sequence
  Description of Artificial Sequence: Synthetic oligonucleotide
agauucgucaucgcuuuca

SEQ ID NO: 1090849 - RNA, 19 nt, Artificial Sequence
  Description of Artificial Sequence: Synthetic oligonucleotide
acacuaagacagugccuuc

SEQ ID NO: 1090850 - RNA, 19 nt, Artificial Sequence
  Description of Artificial Sequence: Synthetic oligonucleotide
caugggucccgaagugugg

SEQ ID NO: 1090851 - RNA, 19 nt, Artificial Sequence
  Description of Artificial Sequence: Synthetic oligonucleotide
ugcuaaguugcugcauuug

SEQ ID NO: 1090852 - RNA, 19 nt, Artificial Sequence
  Description of Artificial Sequence: Synthetic oligonucleotide
gagccauugagagauuguc

SEQ ID NO: 1090853 - RNA, 19 nt, Artificial Sequence
  Description of Artificial Sequence: Synthetic oligonucleotide
ggccaaaauuauaauuagg

SEQ ID NO: 1090854 - RNA, 19 nt, Artificial Sequence
  Description of Artificial Sequence: Synthetic oligonucleotide
cauuugaaguccauaaaau

SEQ ID NO: 1090855 - RNA, 19 nt, Artificial Sequence
  Description of Artificial Sequence: Synthetic oligonucleotide
uguggccaaauacucgauu

SEQ ID NO: 1090856 - RNA, 19 nt, Artificial Sequence
  Description of Artificial Sequence: Synthetic oligonucleotide
accuagaauucuaugagua

SEQ ID NO: 1090857 - RNA, 19 nt, Artificial Sequence
  Description of Artificial Sequence: Synthetic oligonucleotide
gggguaauacaauucuuca

SEQ ID NO: 1090858 - RNA, 19 nt, Artificial Sequence
  Description of Artificial Sequence: Synthetic oligonucleotide
caaauagccaaugauuaua

SEQ ID NO: 1090859 - RNA, 19 nt, Artificial Sequence
  Description of Artificial Sequence: Synthetic oligonucleotide
gugccuucgaguccuuaag

SEQ ID NO: 1090860 - RNA, 19 nt, Artificial Sequence
  Description of Artificial Sequence: Synthetic oligonucleotide
cauucuaugaggcacuaau

SEQ ID NO: 1090861 - RNA, 19 nt, Artificial Sequence
  Description of Artificial Sequence: Synthetic oligonucleotide
ucuuccagucgaucugaac

SEQ ID NO: 1090862 - RNA, 19 nt, Artificial Sequence
  Description of Artificial Sequence: Synthetic oligonucleotide
gucgaucugaacauagcca

SEQ ID NO: 1090863 - RNA, 19 nt, Artificial Sequence
  Description of Artificial Sequence: Synthetic oligonucleotide
gauuguccuacugccacca

SEQ ID NO: 1090864 - RNA, 19 nt, Artificial Sequence
  Description of Artificial Sequence: Synthetic oligonucleotide
uucagacaauaaauucaua

SEQ ID NO: 1090865 - RNA, 19 nt, Artificial Sequence
  Description of Artificial Sequence: Synthetic oligonucleotide
uggguagcuacugaguauu

SEQ ID NO: 1090866 - RNA, 19 nt, Artificial Sequence
  Description of Artificial Sequence: Synthetic oligonucleotide
aaguaugaugcuggcccug

SEQ ID NO: 1090867 - RNA, 19 nt, Artificial Sequence
  Description of Artificial Sequence: Synthetic oligonucleotide
aacgcauuugaaguccaua

SEQ ID NO: 1090868 - RNA, 19 nt, Artificial Sequence
  Description of Artificial Sequence: Synthetic oligonucleotide
gacaagggagguucugaga

SEQ ID NO: 1090869 - RNA, 19 nt, Artificial Sequence
  Description of Artificial Sequence: Synthetic oligonucleotide
caaucugaagacuccaacu

SEQ ID NO: 1090870 - RNA, 19 nt, Artificial Sequence
  Description of Artificial Sequence: Synthetic oligonucleotide
gacacuaagacagugccuu

SEQ ID NO: 1090871 - RNA, 19 nt, Artificial Sequence
  Description of Artificial Sequence: Synthetic oligonucleotide
gcuaccaaugcaugagggc

SEQ ID NO: 1090872 - RNA, 19 nt, Artificial Sequence
  Description of Artificial Sequence: Synthetic oligonucleotide
cugggcguugguuacccug

SEQ ID NO: 1090873 - RNA, 19 nt, Artificial Sequence
  Description of Artificial Sequence: Synthetic oligonucleotide
auagucuaaacagcugcaa

SEQ ID NO: 1090874 - RNA, 19 nt, Artificial Sequence
  Description of Artificial Sequence: Synthetic oligonucleotide
gccuucgaguccuuaagag

SEQ ID NO: 1090875 - RNA, 19 nt, Artificial Sequence
  Description of Artificial Sequence: Synthetic oligonucleotide
cucuaggccgaggaggaag

SEQ ID NO: 1090876 - RNA, 19 nt, Artificial Sequence
  Description of Artificial Sequence: Synthetic oligonucleotide
cugcaaucuuuccaaucug

SEQ ID NO: 1090877 - RNA, 19 nt, Artificial Sequence
  Description of Artificial Sequence: Synthetic oligonucleotide
ucgauuccaccaguggugu

SEQ ID NO: 1090878 - RNA, 19 nt, Artificial Sequence
  Description of Artificial Sequence: Synthetic oligonucleotide
augcaguaaagcacaaaga

SEQ ID NO: 1090879 - RNA, 19 nt, Artificial Sequence
  Description of Artificial Sequence: Synthetic oligonucleotide
acacuuuaaagggcgcucu

SEQ ID NO: 1090880 - RNA, 19 nt, Artificial Sequence
  Description of Artificial Sequence: Synthetic oligonucleotide
guuacccuggagacucugg

SEQ ID NO: 1090881 - RNA, 19 nt, Artificial Sequence
  Description of Artificial Sequence: Synthetic oligonucleotide
ggacaagggagguucugag

SEQ ID NO: 1090882 - RNA, 19 nt, Artificial Sequence
  Description of Artificial Sequence: Synthetic oligonucleotide
acauacucccaaauuaguu

SEQ ID NO: 1090883 - RNA, 19 nt, Artificial Sequence
  Description of Artificial Sequence: Synthetic oligonucleotide
aucugaacauagccacugu

SEQ ID NO: 1090884 - RNA, 19 nt, Artificial Sequence
  Description of Artificial Sequence: Synthetic oligonucleotide
ugcaauuguccagcugggc

SEQ ID NO: 1090885 - RNA, 19 nt, Artificial Sequence
  Description of Artificial Sequence: Synthetic oligonucleotide
ggcacuaaugagaauaaaa

SEQ ID NO: 1090886 - RNA, 19 nt, Artificial Sequence
  Description of Artificial Sequence: Synthetic oligonucleotide
ucguaagauucgucaucgc

SEQ ID NO: 1090887 - RNA, 19 nt, Artificial Sequence
  Description of Artificial Sequence: Synthetic oligonucleotide
gggccauaaacaaggaagc

SEQ ID NO: 1090888 - RNA, 19 nt, Artificial Sequence
  Description of Artificial Sequence: Synthetic oligonucleotide
auagguugucuuacagcag

SEQ ID NO: 1090889 - RNA, 19 nt, Artificial Sequence
  Description of Artificial Sequence: Synthetic oligonucleotide
ugccaaccuagaauucuau

SEQ ID NO: 1090890 - RNA, 19 nt, Artificial Sequence
  Description of Artificial Sequence: Synthetic oligonucleotide
gaccuaguguucaagaaau

SEQ ID NO: 1090891 - RNA, 19 nt, Artificial Sequence
  Description of Artificial Sequence: Synthetic oligonucleotide
agguugucuuacagcagac

SEQ ID NO: 1090892 - RNA, 19 nt, Artificial Sequence
  Description of Artificial Sequence: Synthetic oligonucleotide
accgccggcggccaguuca

SEQ ID NO: 1090893 - RNA, 19 nt, Artificial Sequence
  Description of Artificial Sequence: Synthetic oligonucleotide
cuuuuggugaagaggccaa

SEQ ID NO: 1090894 - RNA, 19 nt, Artificial Sequence
  Description of Artificial Sequence: Synthetic oligonucleotide
agacaagguaauauuuaau

SEQ ID NO: 1090895 - RNA, 19 nt, Artificial Sequence
  Description of Artificial Sequence: Synthetic oligonucleotide
aucaaugacccaacuaaua

SEQ ID NO: 1090896 - RNA, 19 nt, Artificial Sequence
  Description of Artificial Sequence: Synthetic oligonucleotide
ccagucgaucugaacauag

SEQ ID NO: 1090897 - RNA, 19 nt, Artificial Sequence
  Description of Artificial Sequence: Synthetic oligonucleotide
gaaacgcauuugaagucca

SEQ ID NO: 1090898 - RNA, 19 nt, Artificial Sequence
  Description of Artificial Sequence: Synthetic oligonucleotide
uccgggacgccaugauacc

SEQ ID NO: 1090899 - RNA, 19 nt, Artificial Sequence
  Description of Artificial Sequence: Synthetic oligonucleotide
cacugugacucgcaaccug

SEQ ID NO: 1090900 - RNA, 19 nt, Artificial Sequence
  Description of Artificial Sequence: Synthetic oligonucleotide
acuagcuugucaagcuuca

SEQ ID NO: 1090901 - RNA, 19 nt, Artificial Sequence
  Description of Artificial Sequence: Synthetic oligonucleotide
gccaugauaccgccggcgg

SEQ ID NO: 1090902 - RNA, 19 nt, Artificial Sequence
  Description of Artificial Sequence: Synthetic oligonucleotide
cacaaagccacuggauauc

SEQ ID NO: 1090903 - RNA, 19 nt, Artificial Sequence
  Description of Artificial Sequence: Synthetic oligonucleotide
acgccaugauaccgccggc

SEQ ID NO: 1090904 - RNA, 19 nt, Artificial Sequence
  Description of Artificial Sequence: Synthetic oligonucleotide
cucguuucuuaauuugucu

SEQ ID NO: 1090905 - RNA, 19 nt, Artificial Sequence
  Description of Artificial Sequence: Synthetic oligonucleotide
ccgaaguguggccaaauac

SEQ ID NO: 1090906 - RNA, 19 nt, Artificial Sequence
  Description of Artificial Sequence: Synthetic oligonucleotide
uuaaagcaaucuguaccuu

SEQ ID NO: 1090907 - RNA, 19 nt, Artificial Sequence
  Description of Artificial Sequence: Synthetic oligonucleotide
guugauuucgggugcugcu

SEQ ID NO: 1090908 - RNA, 19 nt, Artificial Sequence
  Description of Artificial Sequence: Synthetic oligonucleotide
auacucgauuccaccagug

SEQ ID NO: 1090909 - RNA, 19 nt, Artificial Sequence
  Description of Artificial Sequence: Synthetic oligonucleotide
ggagauagucuaaacagcu

SEQ ID NO: 1090910 - RNA, 19 nt, Artificial Sequence
  Description of Artificial Sequence: Synthetic oligonucleotide
augcuaaguugcugcauuu

SEQ ID NO: 1090911 - RNA, 19 nt, Artificial Sequence
  Description of Artificial Sequence: Synthetic oligonucleotide
gagaagaaagccaccgccu

SEQ ID NO: 1090912 - RNA, 19 nt, Artificial Sequence
  Description of Artificial Sequence: Synthetic oligonucleotide
uuuuggugaagaggccaaa

SEQ ID NO: 1090913 - RNA, 19 nt, Artificial Sequence
  Description of Artificial Sequence: Synthetic oligonucleotide
acauaccauauagguuguc

SEQ ID NO: 1090914 - RNA, 19 nt, Artificial Sequence
  Description of Artificial Sequence: Synthetic oligonucleotide
gaggcacuaaugagaauaa

SEQ ID NO: 1090915 - RNA, 19 nt, Artificial Sequence
  Description of Artificial Sequence: Synthetic oligonucleotide
agguucugagaaaguauga

SEQ ID NO: 1090916 - RNA, 19 nt, Artificial Sequence
  Description of Artificial Sequence: Synthetic oligonucleotide
uuauacuauuaagcauuuu

SEQ ID NO: 1090917 - RNA, 19 nt, Artificial Sequence
  Description of Artificial Sequence: Synthetic oligonucleotide
uuguugauuucgggugcug

SEQ ID NO: 1090918 - RNA, 19 nt, Artificial Sequence
  Description of Artificial Sequence: Synthetic oligonucleotide
uuucgggugcugcuuuauu

SEQ ID NO: 1090919 - RNA, 19 nt, Artificial Sequence
  Description of Artificial Sequence: Synthetic oligonucleotide
uuuacacuauuggcacuau

SEQ ID NO: 1090920 - RNA, 19 nt, Artificial Sequence
  Description of Artificial Sequence: Synthetic oligonucleotide
gcguugguuacccuggaga

SEQ ID NO: 1090921 - RNA, 19 nt, Artificial Sequence
  Description of Artificial Sequence: Synthetic oligonucleotide
ugucaagcuucagguggug

SEQ ID NO: 1090922 - RNA, 19 nt, Artificial Sequence
  Description of Artificial Sequence: Synthetic oligonucleotide
cuucuugcauacucaguua

SEQ ID NO: 1090923 - RNA, 19 nt, Artificial Sequence
  Description of Artificial Sequence: Synthetic oligonucleotide
agccacuggauaucacgau

SEQ ID NO: 1090924 - RNA, 19 nt, Artificial Sequence
  Description of Artificial Sequence: Synthetic oligonucleotide
gcaaucuguaccuuuuggu

SEQ ID NO: 1090925 - RNA, 19 nt, Artificial Sequence
  Description of Artificial Sequence: Synthetic oligonucleotide
gguuugcucaagaauacua

SEQ ID NO: 1090926 - RNA, 19 nt, Artificial Sequence
  Description of Artificial Sequence: Synthetic oligonucleotide
aaacgcauuugaaguccau

SEQ ID NO: 1090927 - RNA, 19 nt, Artificial Sequence
  Description of Artificial Sequence: Synthetic oligonucleotide
ccaacacuuuaaagggcgc

SEQ ID NO: 1090928 - RNA, 19 nt, Artificial Sequence
  Description of Artificial Sequence: Synthetic oligonucleotide
auaucacgauguucugcuu

SEQ ID NO: 1090929 - RNA, 19 nt, Artificial Sequence
  Description of Artificial Sequence: Synthetic oligonucleotide
augacccaacuaauaacau

SEQ ID NO: 1090930 - RNA, 19 nt, Artificial Sequence
  Description of Artificial Sequence: Synthetic oligonucleotide
gauucgucaucgcuuucau

SEQ ID NO: 1090931 - RNA, 19 nt, Artificial Sequence
  Description of Artificial Sequence: Synthetic oligonucleotide
accaugggucccgaagugu

SEQ ID NO: 1090932 - RNA, 19 nt, Artificial Sequence
  Description of Artificial Sequence: Synthetic oligonucleotide
uauuggcacuaugcaguaa

SEQ ID NO: 1090933 - RNA, 19 nt, Artificial Sequence
  Description of Artificial Sequence: Synthetic oligonucleotide
gugaacugaccuaguguuc

SEQ ID NO: 1090934 - RNA, 19 nt, Artificial Sequence
  Description of Artificial Sequence: Synthetic oligonucleotide
gcgcucuaggccgaggagg

SEQ ID NO: 1090935 - RNA, 19 nt, Artificial Sequence
  Description of Artificial Sequence: Synthetic oligonucleotide
ugauaccgccggcggccag

SEQ ID NO: 1090936 - RNA, 19 nt, Artificial Sequence
  Description of Artificial Sequence: Synthetic oligonucleotide
acaagugaacugaccuagu

SEQ ID NO: 1090937 - RNA, 19 nt, Artificial Sequence
  Description of Artificial Sequence: Synthetic oligonucleotide
gauuucgggugcugcuuua

SEQ ID NO: 1090938 - RNA, 19 nt, Artificial Sequence
  Description of Artificial Sequence: Synthetic oligonucleotide
acccaacuaauaacauacu

SEQ ID NO: 1090939 - RNA, 19 nt, Artificial Sequence
  Description of Artificial Sequence: Synthetic oligonucleotide
caguacacauaacagcuuu

SEQ ID NO: 1090940 - RNA, 19 nt, Artificial Sequence
  Description of Artificial Sequence: Synthetic oligonucleotide
cagccagucacaccaccca

SEQ ID NO: 1090941 - RNA, 19 nt, Artificial Sequence
  Description of Artificial Sequence: Synthetic oligonucleotide
uuucuaccaugggucccga

SEQ ID NO: 1090942 - RNA, 19 nt, Artificial Sequence
  Description of Artificial Sequence: Synthetic oligonucleotide
ggaggaagucuauggucuc

SEQ ID NO: 1090943 - RNA, 19 nt, Artificial Sequence
  Description of Artificial Sequence: Synthetic oligonucleotide
auuucgggugcugcuuuau

SEQ ID NO: 1090944 - RNA, 19 nt, Artificial Sequence
  Description of Artificial Sequence: Synthetic oligonucleotide
caccacccauuacaaucug

SEQ ID NO: 1090945 - RNA, 19 nt, Artificial Sequence
  Description of Artificial Sequence: Synthetic oligonucleotide
cugugacucgcaaccugca

SEQ ID NO: 1090946 - RNA, 19 nt, Artificial Sequence
  Description of Artificial Sequence: Synthetic oligonucleotide
ugguuacccuggagacucu

SEQ ID NO: 1090947 - RNA, 19 nt, Artificial Sequence
  Description of Artificial Sequence: Synthetic oligonucleotide
gacucgcaaccugcaggag

SEQ ID NO: 1090948 - RNA, 19 nt, Artificial Sequence
  Description of Artificial Sequence: Synthetic oligonucleotide
gccggcggccaguucaggg

SEQ ID NO: 1090949 - RNA, 19 nt, Artificial Sequence
  Description of Artificial Sequence: Synthetic oligonucleotide
aggcacuaaugagaauaaa

SEQ ID NO: 1090950 - RNA, 19 nt, Artificial Sequence
  Description of Artificial Sequence: Synthetic oligonucleotide
cacgauguucugcuugaua

SEQ ID NO: 1090951 - RNA, 19 nt, Artificial Sequence
  Description of Artificial Sequence: Synthetic oligonucleotide
cuaugcaguaaagcacaaa

SEQ ID NO: 1090952 - RNA, 19 nt, Artificial Sequence
  Description of Artificial Sequence: Synthetic oligonucleotide
uucuaccaugggucccgaa

SEQ ID NO: 1090953 - RNA, 19 nt, Artificial Sequence
  Description of Artificial Sequence: Synthetic oligonucleotide
agcauucuaugaggcacua

SEQ ID NO: 1090954 - RNA, 19 nt, Artificial Sequence
  Description of Artificial Sequence: Synthetic oligonucleotide
ccaugauaccgccggcggc

SEQ ID NO: 1090955 - RNA, 19 nt, Artificial Sequence
  Description of Artificial Sequence: Synthetic oligonucleotide
guuccgggacgccaugaua

SEQ ID NO: 1090956 - RNA, 19 nt, Artificial Sequence
  Description of Artificial Sequence: Synthetic oligonucleotide
guugguuacccuggagacu

SEQ ID NO: 1090957 - RNA, 19 nt, Artificial Sequence
  Description of Artificial Sequence: Synthetic oligonucleotide
cagcauucuaugaggcacu

SEQ ID NO: 1090958 - RNA, 19 nt, Artificial Sequence
  Description of Artificial Sequence: Synthetic oligonucleotide
ucacgauguucugcuugau

SEQ ID NO: 1090959 - RNA, 19 nt, Artificial Sequence
  Description of Artificial Sequence: Synthetic oligonucleotide
ucccgaaguguggccaaau

SEQ ID NO: 1090960 - RNA, 19 nt, Artificial Sequence
  Description of Artificial Sequence: Synthetic oligonucleotide
gguuacccuggagacucug

SEQ ID NO: 1090961 - RNA, 19 nt, Artificial Sequence
  Description of Artificial Sequence: Synthetic oligonucleotide
cacccauuacaaucugggu

SEQ ID NO: 1090962 - RNA, 19 nt, Artificial Sequence
  Description of Artificial Sequence: Synthetic oligonucleotide
cacuuuaaagggcgcucua

SEQ ID NO: 1090963 - RNA, 19 nt, Artificial Sequence
  Description of Artificial Sequence: Synthetic oligonucleotide
ccaaauuaguucugugccu

SEQ ID NO: 1090964 - RNA, 19 nt, Artificial Sequence
  Description of Artificial Sequence: Synthetic oligonucleotide
cgggugcugcuuuauuugc

SEQ ID NO: 1090965 - RNA, 19 nt, Artificial Sequence
  Description of Artificial Sequence: Synthetic oligonucleotide
cuuggacaagggagguucu

SEQ ID NO: 1090966 - RNA, 19 nt, Artificial Sequence
  Description of Artificial Sequence: Synthetic oligonucleotide
accuaguguucaagaaaua

SEQ ID NO: 1090967 - RNA, 19 nt, Artificial Sequence
  Description of Artificial Sequence: Synthetic oligonucleotide
gcucaagaauacuauuguu

SEQ ID NO: 1090968 - RNA, 19 nt, Artificial Sequence
  Description of Artificial Sequence: Synthetic oligonucleotide
cuaggccgaggaggaaguc

SEQ ID NO: 1090969 - RNA, 19 nt, Artificial Sequence
  Description of Artificial Sequence: Synthetic oligonucleotide
cguaagauucgucaucgcu

SEQ ID NO: 1090970 - RNA, 19 nt, Artificial Sequence
  Description of Artificial Sequence: Synthetic oligonucleotide
ccauuacaaucuggguagc

SEQ ID NO: 1090971 - RNA, 19 nt, Artificial Sequence
  Description of Artificial Sequence: Synthetic oligonucleotide
cgaguccuuaagaggcaag

SEQ ID NO: 1090972 - RNA, 19 nt, Artificial Sequence
  Description of Artificial Sequence: Synthetic oligonucleotide
gccgaggaggaagucuaug

SEQ ID NO: 1090973 - RNA, 19 nt, Artificial Sequence
  Description of Artificial Sequence: Synthetic oligonucleotide
ccgggacgccaugauaccg

SEQ ID NO: 1090974 - RNA, 19 nt, Artificial Sequence
  Description of Artificial Sequence: Synthetic oligonucleotide
accgccuacugcaguugcu

SEQ ID NO: 1090975 - RNA, 19 nt, Artificial Sequence
  Description of Artificial Sequence: Synthetic oligonucleotide
gauaccgccggcggccagu

SEQ ID NO: 1090976 - RNA, 19 nt, Artificial Sequence
  Description of Artificial Sequence: Synthetic oligonucleotide
ccuaucacaaggagauagu

SEQ ID NO: 1090977 - RNA, 19 nt, Artificial Sequence
  Description of Artificial Sequence: Synthetic oligonucleotide
ggcggccaguucagggugg

SEQ ID NO: 1090978 - RNA, 19 nt, Artificial Sequence
  Description of Artificial Sequence: Synthetic oligonucleotide
gcugcaaguuuuccaacuu

SEQ ID NO: 1090979 - RNA, 19 nt, Artificial Sequence
  Description of Artificial Sequence: Synthetic oligonucleotide
ccaugguuugcucaagaau

SEQ ID NO: 1090980 - RNA, 19 nt, Artificial Sequence
  Description of Artificial Sequence: Synthetic oligonucleotide
cgccaugauaccgccggcg

SEQ ID NO: 1090981 - RNA, 19 nt, Artificial Sequence
  Description of Artificial Sequence: Synthetic oligonucleotide
ccauugagagauuguccua

SEQ ID NO: 1090982 - RNA, 19 nt, Artificial Sequence
  Description of Artificial Sequence: Synthetic oligonucleotide
ggucccgaaguguggccaa

SEQ ID NO: 1090983 - RNA, 19 nt, Artificial Sequence
  Description of Artificial Sequence: Synthetic oligonucleotide
cgcucuaggccgaggagga

SEQ ID NO: 1090984 - RNA, 19 nt, Artificial Sequence
  Description of Artificial Sequence: Synthetic oligonucleotide
ccauaauauugaagcugua

SEQ ID NO: 1090985 - RNA, 19 nt, Artificial Sequence
  Description of Artificial Sequence: Synthetic oligonucleotide
cacuggauaucacgauguu

SEQ ID NO: 1090986 - RNA, 19 nt, Artificial Sequence
  Description of Artificial Sequence: Synthetic oligonucleotide
auaccgccggcggccaguu

SEQ ID NO: 1090987 - RNA, 19 nt, Artificial Sequence
  Description of Artificial Sequence: Synthetic oligonucleotide
caacucucuuccagucgau

SEQ ID NO: 1090988 - RNA, 19 nt, Artificial Sequence
  Description of Artificial Sequence: Synthetic oligonucleotide
caguggugucuucuugcau

SEQ ID NO: 1090989 - RNA, 19 nt, Artificial Sequence
  Description of Artificial Sequence: Synthetic oligonucleotide
gcauucuaugaggcacuaa

SEQ ID NO: 1090990 - RNA, 19 nt, Artificial Sequence
  Description of Artificial Sequence: Synthetic oligonucleotide
caauuacauuuagguuaua

SEQ ID NO: 1090991 - RNA, 19 nt, Artificial Sequence
  Description of Artificial Sequence: Synthetic oligonucleotide
uaccgccggcggccaguuc

SEQ ID NO: 1090992 - RNA, 19 nt, Artificial Sequence
  Description of Artificial Sequence: Synthetic oligonucleotide
cgaggaggaagucuauggu

SEQ ID NO: 1090993 - RNA, 19 nt, Artificial Sequence
  Description of Artificial Sequence: Synthetic oligonucleotide
gucccgaaguguggccaaa

SEQ ID NO: 1090994 - RNA, 19 nt, Artificial Sequence
  Description of Artificial Sequence: Synthetic oligonucleotide
cccgaaguguggccaaaua

SEQ ID NO: 1090995 - RNA, 19 nt, Artificial Sequence
  Description of Artificial Sequence: Synthetic oligonucleotide
ccgccggcggccaguucag

SEQ ID NO: 1090996 - RNA, 19 nt, Artificial Sequence
  Description of Artificial Sequence: Synthetic oligonucleotide
cgaucugaacauagccacu

SEQ ID NO: 1090997 - RNA, 19 nt, Artificial Sequence
  Description of Artificial Sequence: Synthetic oligonucleotide
gcugggcguugguuacccu

SEQ ID NO: 1090998 - RNA, 19 nt, Artificial Sequence
  Description of Artificial Sequence: Synthetic oligonucleotide
gcggccaguucaggguggu

SEQ ID NO: 1090999 - RNA, 19 nt, Artificial Sequence
  Description of Artificial Sequence: Synthetic oligonucleotide
ccaaugcaugagggccaua

SEQ ID NO: 1091000 - RNA, 19 nt, Artificial Sequence
  Description of Artificial Sequence: Synthetic oligonucleotide
ucuauuuacacccaaaggg

SEQ ID NO: 1091001 - RNA, 19 nt, Artificial Sequence
  Description of Artificial Sequence: Synthetic oligonucleotide
auaacaaucuauuuacacc

SEQ ID NO: 1091002 - RNA, 19 nt, Artificial Sequence
  Description of Artificial Sequence: Synthetic oligonucleotide
uaacaaucuauuuacaccc

SEQ ID NO: 1091003 - RNA, 19 nt, Artificial Sequence
  Description of Artificial Sequence: Synthetic oligonucleotide
ucaucgaagaagcugugcg

SEQ ID NO: 1091004 - RNA, 19 nt, Artificial Sequence
  Description of Artificial Sequence: Synthetic oligonucleotide
uuuacaagggacacgggag

SEQ ID NO: 1091005 - RNA, 19 nt, Artificial Sequence
  Description of Artificial Sequence: Synthetic oligonucleotide
gauagggauaaucagcuug

SEQ ID NO: 1091006 - RNA, 19 nt, Artificial Sequence
  Description of Artificial Sequence: Synthetic oligonucleotide
ucaguuaaagcuugugagg

SEQ ID NO: 1091007 - RNA, 19 nt, Artificial Sequence
  Description of Artificial Sequence: Synthetic oligonucleotide
cuauuuacacccaaagggc

SEQ ID NO: 1091008 - RNA, 19 nt, Artificial Sequence
  Description of Artificial Sequence: Synthetic oligonucleotide
cucaguuaaagcuugugag

SEQ ID NO: 1091009 - RNA, 19 nt, Artificial Sequence
  Description of Artificial Sequence: Synthetic oligonucleotide
agugucgggguccacaagc

SEQ ID NO: 1091010 - RNA, 19 nt, Artificial Sequence
  Description of Artificial Sequence: Synthetic oligonucleotide
gagaauggcauugagagac

SEQ ID NO: 1091011 - RNA, 19 nt, Artificial Sequence
  Description of Artificial Sequence: Synthetic oligonucleotide
uauuuacacccaaagggcc

SEQ ID NO: 1091012 - RNA, 19 nt, Artificial Sequence
  Description of Artificial Sequence: Synthetic oligonucleotide
ugagggaggggcuagaugu

SEQ ID NO: 1091013 - RNA, 19 nt, Artificial Sequence
  Description of Artificial Sequence: Synthetic oligonucleotide
aaaaguaccgcagccucac

SEQ ID NO: 1091014 - RNA, 19 nt, Artificial Sequence
  Description of Artificial Sequence: Synthetic oligonucleotide
aaucgcagagcuugaggac

SEQ ID NO: 1091015 - RNA, 19 nt, Artificial Sequence
  Description of Artificial Sequence: Synthetic oligonucleotide
gaaccuuuuguccugaaga

SEQ ID NO: 1091016 - RNA, 19 nt, Artificial Sequence
  Description of Artificial Sequence: Synthetic oligonucleotide
cuuugcacugccgaaaucg

SEQ ID NO: 1091017 - RNA, 19 nt, Artificial Sequence
  Description of Artificial Sequence: Synthetic oligonucleotide
uuacaagggacacgggagg

SEQ ID NO: 1091018 - RNA, 19 nt, Artificial Sequence
  Description of Artificial Sequence: Synthetic oligonucleotide
ucucaguuaaagcuuguga

SEQ ID NO: 1091019 - RNA, 19 nt, Artificial Sequence
  Description of Artificial Sequence: Synthetic oligonucleotide
ugguacacgacuccaaaug

SEQ ID NO: 1091020 - RNA, 19 nt, Artificial Sequence
  Description of Artificial Sequence: Synthetic oligonucleotide
uuacgcauaaucugcagcu

SEQ ID NO: 1091021 - RNA, 19 nt, Artificial Sequence
  Description of Artificial Sequence: Synthetic oligonucleotide
agaugauagggauaaucag

SEQ ID NO: 1091022 - RNA, 19 nt, Artificial Sequence
  Description of Artificial Sequence: Synthetic oligonucleotide
gaaaucgcagagcuugagg

SEQ ID NO: 1091023 - RNA, 19 nt, Artificial Sequence
  Description of Artificial Sequence: Synthetic oligonucleotide
ucugcccucucguauaggg

SEQ ID NO: 1091024 - RNA, 19 nt, Artificial Sequence
  Description of Artificial Sequence: Synthetic oligonucleotide
ugugaggacgaggugaggg

SEQ ID NO: 1091025 - RNA, 19 nt, Artificial Sequence
  Description of Artificial Sequence: Synthetic oligonucleotide
ucuguacacaggcaaaccu

SEQ ID NO: 1091026 - RNA, 19 nt, Artificial Sequence
  Description of Artificial Sequence: Synthetic oligonucleotide
uacacgacuccaaaugagc

SEQ ID NO: 1091027 - RNA, 19 nt, Artificial Sequence
  Description of Artificial Sequence: Synthetic oligonucleotide
gucaaaauccucuuuaaaa

SEQ ID NO: 1091028 - RNA, 19 nt, Artificial Sequence
  Description of Artificial Sequence: Synthetic oligonucleotide
ugcacugccgaaaucgcag

SEQ ID NO: 1091029 - RNA, 19 nt, Artificial Sequence
  Description of Artificial Sequence: Synthetic oligonucleotide
cacgauauugcaguggucc

SEQ ID NO: 1091030 - RNA, 19 nt, Artificial Sequence
  Description of Artificial Sequence: Synthetic oligonucleotide
agaagaguuagccagggua

SEQ ID NO: 1091031 - RNA, 19 nt, Artificial Sequence
  Description of Artificial Sequence: Synthetic oligonucleotide
auaggaguucauuucccuc

SEQ ID NO: 1091032 - RNA, 19 nt, Artificial Sequence
  Description of Artificial Sequence: Synthetic oligonucleotide
guagguguggcaucaggcg

SEQ ID NO: 1091033 - RNA, 19 nt, Artificial Sequence
  Description of Artificial Sequence: Synthetic oligonucleotide
uaggguuucaugccaauaa

SEQ ID NO: 1091034 - RNA, 19 nt, Artificial Sequence
  Description of Artificial Sequence: Synthetic oligonucleotide
uccucuuaccccaaacccc

SEQ ID NO: 1091035 - RNA, 19 nt, Artificial Sequence
  Description of Artificial Sequence: Synthetic oligonucleotide
ugagguguaaucuguggcu

SEQ ID NO: 1091036 - RNA, 19 nt, Artificial Sequence
  Description of Artificial Sequence: Synthetic oligonucleotide
aacggaggucuguacacag

SEQ ID NO: 1091037 - RNA, 19 nt, Artificial Sequence
  Description of Artificial Sequence: Synthetic oligonucleotide
cuuacgcauaaucugcagc

SEQ ID NO: 1091038 - RNA, 19 nt, Artificial Sequence
  Description of Artificial Sequence: Synthetic oligonucleotide
gagacaccgcaguucaucg

SEQ ID NO: 1091039 - RNA, 19 nt, Artificial Sequence
  Description of Artificial Sequence: Synthetic oligonucleotide
acaucgauggaugaggugu

SEQ ID NO: 1091040 - RNA, 19 nt, Artificial Sequence
  Description of Artificial Sequence: Synthetic oligonucleotide
aacugcuuugcacugccga

SEQ ID NO: 1091041 - RNA, 19 nt, Artificial Sequence
  Description of Artificial Sequence: Synthetic oligonucleotide
auagggauaaucagcuugg

SEQ ID NO: 1091042 - RNA, 19 nt, Artificial Sequence
  Description of Artificial Sequence: Synthetic oligonucleotide
uugaacaccuuuguccagg

SEQ ID NO: 1091043 - RNA, 19 nt, Artificial Sequence
  Description of Artificial Sequence: Synthetic oligonucleotide
uugaacggaggucuguaca

SEQ ID NO: 1091044 - RNA, 19 nt, Artificial Sequence
  Description of Artificial Sequence: Synthetic oligonucleotide
uuuauugaacggaggucug

SEQ ID NO: 1091045 - RNA, 19 nt, Artificial Sequence
  Description of Artificial Sequence: Synthetic oligonucleotide
acaggcaaaccuuacugug

SEQ ID NO: 1091046 - RNA, 19 nt, Artificial Sequence
  Description of Artificial Sequence: Synthetic oligonucleotide
auugaacggaggucuguac

SEQ ID NO: 1091047 - RNA, 19 nt, Artificial Sequence
  Description of Artificial Sequence: Synthetic oligonucleotide
cagguuuaaauacagcuca

SEQ ID NO: 1091048 - RNA, 19 nt, Artificial Sequence
  Description of Artificial Sequence: Synthetic oligonucleotide
caaaccuuacuguggaaac

SEQ ID NO: 1091049 - RNA, 19 nt, Artificial Sequence
  Description of Artificial Sequence: Synthetic oligonucleotide
gauggagaguucaccaggg

SEQ ID NO: 1091050 - RNA, 19 nt, Artificial Sequence
  Description of Artificial Sequence: Synthetic oligonucleotide
aguucaucgaagaagcugu

SEQ ID NO: 1091051 - RNA, 19 nt, Artificial Sequence
  Description of Artificial Sequence: Synthetic oligonucleotide
cagcuuacgcauaaucugc

SEQ ID NO: 1091052 - RNA, 19 nt, Artificial Sequence
  Description of Artificial Sequence: Synthetic oligonucleotide
uuugcacugccgaaaucgc

SEQ ID NO: 1091053 - RNA, 19 nt, Artificial Sequence
  Description of Artificial Sequence: Synthetic oligonucleotide
agaagguccucuuacccca

SEQ ID NO: 1091054 - RNA, 19 nt, Artificial Sequence
  Description of Artificial Sequence: Synthetic oligonucleotide
uggauguaggccaggcucc

SEQ ID NO: 1091055 - RNA, 19 nt, Artificial Sequence
  Description of Artificial Sequence: Synthetic oligonucleotide
uccgagacaccgcaguuca

SEQ ID NO: 1091056 - RNA, 19 nt, Artificial Sequence
  Description of Artificial Sequence: Synthetic oligonucleotide
acacgacuccaaaugagcc

SEQ ID NO: 1091057 - RNA, 19 nt, Artificial Sequence
  Description of Artificial Sequence: Synthetic oligonucleotide
cugguucuauuuacaaggg

SEQ ID NO: 1091058 - RNA, 19 nt, Artificial Sequence
  Description of Artificial Sequence: Synthetic oligonucleotide
cacacaucgauggaugagg

SEQ ID NO: 1091059 - RNA, 19 nt, Artificial Sequence
  Description of Artificial Sequence: Synthetic oligonucleotide
ucgagcacagcgcaauggc

SEQ ID NO: 1091060 - RNA, 19 nt, Artificial Sequence
  Description of Artificial Sequence: Synthetic oligonucleotide
uucuauuuacaagggacac

SEQ ID NO: 1091061 - RNA, 19 nt, Artificial Sequence
  Description of Artificial Sequence: Synthetic oligonucleotide
ugaacggaggucuguacac

SEQ ID NO: 1091062 - RNA, 19 nt, Artificial Sequence
  Description of Artificial Sequence: Synthetic oligonucleotide
uauuuacaagggacacggg

SEQ ID NO: 1091063 - RNA, 19 nt, Artificial Sequence
  Description of Artificial Sequence: Synthetic oligonucleotide
caggcaaaccuuacugugg

SEQ ID NO: 1091064 - RNA, 19 nt, Artificial Sequence
  Description of Artificial Sequence: Synthetic oligonucleotide
gguucuauuuacaagggac

SEQ ID NO: 1091065 - RNA, 19 nt, Artificial Sequence
  Description of Artificial Sequence: Synthetic oligonucleotide
gauauugcagugguccagc

SEQ ID NO: 1091066 - RNA, 19 nt, Artificial Sequence
  Description of Artificial Sequence: Synthetic oligonucleotide
guccucuuaccccaaaccc

SEQ ID NO: 1091067 - RNA, 19 nt, Artificial Sequence
  Description of Artificial Sequence: Synthetic oligonucleotide
ggaaacuaagacaccaggg

SEQ ID NO: 1091068 - RNA, 19 nt, Artificial Sequence
  Description of Artificial Sequence: Synthetic oligonucleotide
agccucacgauauugcagu

SEQ ID NO: 1091069 - RNA, 19 nt, Artificial Sequence
  Description of Artificial Sequence: Synthetic oligonucleotide
ucucggaucuguucccggg

SEQ ID NO: 1091070 - RNA, 19 nt, Artificial Sequence
  Description of Artificial Sequence: Synthetic oligonucleotide
uuuuaggguuucaugccaa

SEQ ID NO: 1091071 - RNA, 19 nt, Artificial Sequence
  Description of Artificial Sequence: Synthetic oligonucleotide
uugaucugugggaacuuga

SEQ ID NO: 1091072 - RNA, 19 nt, Artificial Sequence
  Description of Artificial Sequence: Synthetic oligonucleotide
gaauggcauugagagacgg

SEQ ID NO: 1091073 - RNA, 19 nt, Artificial Sequence
  Description of Artificial Sequence: Synthetic oligonucleotide
cccauaaccagucaaaauc

SEQ ID NO: 1091074 - RNA, 19 nt, Artificial Sequence
  Description of Artificial Sequence: Synthetic oligonucleotide
ucguauagggacccagcca

SEQ ID NO: 1091075 - RNA, 19 nt, Artificial Sequence
  Description of Artificial Sequence: Synthetic oligonucleotide
ugguucuauuuacaaggga

SEQ ID NO: 1091076 - RNA, 19 nt, Artificial Sequence
  Description of Artificial Sequence: Synthetic oligonucleotide
cucguauagggacccagcc

SEQ ID NO: 1091077 - RNA, 19 nt, Artificial Sequence
  Description of Artificial Sequence: Synthetic oligonucleotide
aguuagccaggguaggugu

SEQ ID NO: 1091078 - RNA, 19 nt, Artificial Sequence
  Description of Artificial Sequence: Synthetic oligonucleotide
gaggguaggagccuuggga

SEQ ID NO: 1091079 - RNA, 19 nt, Artificial Sequence
  Description of Artificial Sequence: Synthetic oligonucleotide
aaaccuuacuguggaaacu

SEQ ID NO: 1091080 - RNA, 19 nt, Artificial Sequence
  Description of Artificial Sequence: Synthetic oligonucleotide
uguggcuccgaagaugagc

SEQ ID NO: 1091081 - RNA, 19 nt, Artificial Sequence
  Description of Artificial Sequence: Synthetic oligonucleotide
ugcccucucguauagggac

SEQ ID NO: 1091082 - RNA, 19 nt, Artificial Sequence
  Description of Artificial Sequence: Synthetic oligonucleotide
ggcauugagagacgguugg

SEQ ID NO: 1091083 - RNA, 19 nt, Artificial Sequence
  Description of Artificial Sequence: Synthetic oligonucleotide
uuugaacaccuuuguccag

SEQ ID NO: 1091084 - RNA, 19 nt, Artificial Sequence
  Description of Artificial Sequence: Synthetic oligonucleotide
ucuggggcacgguaguacc

SEQ ID NO: 1091085 - RNA, 19 nt, Artificial Sequence
  Description of Artificial Sequence: Synthetic oligonucleotide
cuugaugggcuauggcccc

SEQ ID NO: 1091086 - RNA, 19 nt, Artificial Sequence
  Description of Artificial Sequence: Synthetic oligonucleotide
agguuggauggugugaauc

SEQ ID NO: 1091087 - RNA, 19 nt, Artificial Sequence
  Description of Artificial Sequence: Synthetic oligonucleotide
caagaagaguuagccaggg

SEQ ID NO: 1091088 - RNA, 19 nt, Artificial Sequence
  Description of Artificial Sequence: Synthetic oligonucleotide
gggaccucaagugaggagg

SEQ ID NO: 1091089 - RNA, 19 nt, Artificial Sequence
  Description of Artificial Sequence: Synthetic oligonucleotide
uuugaucugugggaacuug

SEQ ID NO: 1091090 - RNA, 19 nt, Artificial Sequence
  Description of Artificial Sequence: Synthetic oligonucleotide
uggcauugagagacgguug

SEQ ID NO: 1091091 - RNA, 19 nt, Artificial Sequence
  Description of Artificial Sequence: Synthetic oligonucleotide
gauggauguggaggggugg

SEQ ID NO: 1091092 - RNA, 19 nt, Artificial Sequence
  Description of Artificial Sequence: Synthetic oligonucleotide
uguaaucuguggcuccgaa

SEQ ID NO: 1091093 - RNA, 19 nt, Artificial Sequence
  Description of Artificial Sequence: Synthetic oligonucleotide
gugaggacgaggugagggg

SEQ ID NO: 1091094 - RNA, 19 nt, Artificial Sequence
  Description of Artificial Sequence: Synthetic oligonucleotide
gaggucuguacacaggcaa

SEQ ID NO: 1091095 - RNA, 19 nt, Artificial Sequence
  Description of Artificial Sequence: Synthetic oligonucleotide
gaagcgggcgguuguuggg

SEQ ID NO: 1091096 - RNA, 19 nt, Artificial Sequence
  Description of Artificial Sequence: Synthetic oligonucleotide
aggcaaaccuuacugugga

SEQ ID NO: 1091097 - RNA, 19 nt, Artificial Sequence
  Description of Artificial Sequence: Synthetic oligonucleotide
uggggauaggaguucauuu

SEQ ID NO: 1091098 - RNA, 19 nt, Artificial Sequence
  Description of Artificial Sequence: Synthetic oligonucleotide
gggauaggaguucauuucc

SEQ ID NO: 1091099 - RNA, 19 nt, Artificial Sequence
  Description of Artificial Sequence: Synthetic oligonucleotide
ggaacuugaacucugugua

SEQ ID NO: 1091100 - RNA, 19 nt, Artificial Sequence
  Description of Artificial Sequence: Synthetic oligonucleotide
acgcauaaucugcagcucu

SEQ ID NO: 1091101 - RNA, 19 nt, Artificial Sequence
  Description of Artificial Sequence: Synthetic oligonucleotide
aaccuuacuguggaaacua

SEQ ID NO: 1091102 - RNA, 19 nt, Artificial Sequence
  Description of Artificial Sequence: Synthetic oligonucleotide
gacggaguguacuccagca

SEQ ID NO: 1091103 - RNA, 19 nt, Artificial Sequence
  Description of Artificial Sequence: Synthetic oligonucleotide
ucgggcacauacuccagca

SEQ ID NO: 1091104 - RNA, 19 nt, Artificial Sequence
  Description of Artificial Sequence: Synthetic oligonucleotide
ucgccacuggaguagaaaa

SEQ ID NO: 1091105 - RNA, 19 nt, Artificial Sequence
  Description of Artificial Sequence: Synthetic oligonucleotide
gagucucaguuaaagcuug

SEQ ID NO: 1091106 - RNA, 19 nt, Artificial Sequence
  Description of Artificial Sequence: Synthetic oligonucleotide
uucaugccaauaauuuauu

SEQ ID NO: 1091107 - RNA, 19 nt, Artificial Sequence
  Description of Artificial Sequence: Synthetic oligonucleotide
cuagauguuggggauagga

SEQ ID NO: 1091108 - RNA, 19 nt, Artificial Sequence
  Description of Artificial Sequence: Synthetic oligonucleotide
uugaggacggaguguacuc

SEQ ID NO: 1091109 - RNA, 19 nt, Artificial Sequence
  Description of Artificial Sequence: Synthetic oligonucleotide
guuucaugccaauaauuua

SEQ ID NO: 1091110 - RNA, 19 nt, Artificial Sequence
  Description of Artificial Sequence: Synthetic oligonucleotide
gauggaugagguguaaucu

SEQ ID NO: 1091111 - RNA, 19 nt, Artificial Sequence
  Description of Artificial Sequence: Synthetic oligonucleotide
caguuaaagcuugugagga

SEQ ID NO: 1091112 - RNA, 19 nt, Artificial Sequence
  Description of Artificial Sequence: Synthetic oligonucleotide
guacacgacuccaaaugag

SEQ ID NO: 1091113 - RNA, 19 nt, Artificial Sequence
  Description of Artificial Sequence: Synthetic oligonucleotide
cuugaacucuguguaguug

SEQ ID NO: 1091114 - RNA, 19 nt, Artificial Sequence
  Description of Artificial Sequence: Synthetic oligonucleotide
cagggaugagcuuugaucu

SEQ ID NO: 1091115 - RNA, 19 nt, Artificial Sequence
  Description of Artificial Sequence: Synthetic oligonucleotide
acggaguguacuccagcag

SEQ ID NO: 1091116 - RNA, 19 nt, Artificial Sequence
  Description of Artificial Sequence: Synthetic oligonucleotide
ccagcuuacgcauaaucug

SEQ ID NO: 1091117 - RNA, 19 nt, Artificial Sequence
  Description of Artificial Sequence: Synthetic oligonucleotide
uugcacugccgaaaucgca

SEQ ID NO: 1091118 - RNA, 19 nt, Artificial Sequence
  Description of Artificial Sequence: Synthetic oligonucleotide
uuguuggggagcuggguuc

SEQ ID NO: 1091119 - RNA, 19 nt, Artificial Sequence
  Description of Artificial Sequence: Synthetic oligonucleotide
cacaccuugggaguggaug

SEQ ID NO: 1091120 - RNA, 19 nt, Artificial Sequence
  Description of Artificial Sequence: Synthetic oligonucleotide
ugaggacggaguguacucc

SEQ ID NO: 1091121 - RNA, 19 nt, Artificial Sequence
  Description of Artificial Sequence: Synthetic oligonucleotide
gacaccgcaguucaucgaa

SEQ ID NO: 1091122 - RNA, 19 nt, Artificial Sequence
  Description of Artificial Sequence: Synthetic oligonucleotide
cucuucccuccccauaacc

SEQ ID NO: 1091123 - RNA, 19 nt, Artificial Sequence
  Description of Artificial Sequence: Synthetic oligonucleotide
auuuacacccaaagggcca

SEQ ID NO: 1091124 - RNA, 19 nt, Artificial Sequence
  Description of Artificial Sequence: Synthetic oligonucleotide
acgauauugcaguggucca

SEQ ID NO: 1091125 - RNA, 19 nt, Artificial Sequence
  Description of Artificial Sequence: Synthetic oligonucleotide
aagcgggcgguuguugggg

SEQ ID NO: 1091126 - RNA, 19 nt, Artificial Sequence
  Description of Artificial Sequence: Synthetic oligonucleotide
aggaguucauuucccucug

SEQ ID NO: 1091127 - RNA, 19 nt, Artificial Sequence
  Description of Artificial Sequence: Synthetic oligonucleotide
agagcuugaggacggcagu

SEQ ID NO: 1091128 - RNA, 19 nt, Artificial Sequence
  Description of Artificial Sequence: Synthetic oligonucleotide
cguauagggacccagccag

SEQ ID NO: 1091129 - RNA, 19 nt, Artificial Sequence
  Description of Artificial Sequence: Synthetic oligonucleotide
aauggcauugagagacggu

SEQ ID NO: 1091130 - RNA, 19 nt, Artificial Sequence
  Description of Artificial Sequence: Synthetic oligonucleotide
uuuaggguuucaugccaau

SEQ ID NO: 1091131 - RNA, 19 nt, Artificial Sequence
  Description of Artificial Sequence: Synthetic oligonucleotide
uauugaacggaggucugua

SEQ ID NO: 1091132 - RNA, 19 nt, Artificial Sequence
  Description of Artificial Sequence: Synthetic oligonucleotide
auggcauugagagacgguu

SEQ ID NO: 1091133 - RNA, 19 nt, Artificial Sequence
  Description of Artificial Sequence: Synthetic oligonucleotide
caccagguuuaaauacagc

SEQ ID NO: 1091134 - RNA, 19 nt, Artificial Sequence
  Description of Artificial Sequence: Synthetic oligonucleotide
ccagggaugagcuuugauc

SEQ ID NO: 1091135 - RNA, 19 nt, Artificial Sequence
  Description of Artificial Sequence: Synthetic oligonucleotide
guggaaacuaagacaccag

SEQ ID NO: 1091136 - RNA, 19 nt, Artificial Sequence
  Description of Artificial Sequence: Synthetic oligonucleotide
cuggggaccucaagugagg

SEQ ID NO: 1091137 - RNA, 19 nt, Artificial Sequence
  Description of Artificial Sequence: Synthetic oligonucleotide
aguaccgcagccucacgau

SEQ ID NO: 1091138 - RNA, 19 nt, Artificial Sequence
  Description of Artificial Sequence: Synthetic oligonucleotide
gguacacgacuccaaauga

SEQ ID NO: 1091139 - RNA, 19 nt, Artificial Sequence
  Description of Artificial Sequence: Synthetic oligonucleotide
cucgagcacagcgcaaugg

SEQ ID NO: 1091140 - RNA, 19 nt, Artificial Sequence
  Description of Artificial Sequence: Synthetic oligonucleotide
ugagagacgguuggaugga

SEQ ID NO: 1091141 - RNA, 19 nt, Artificial Sequence
  Description of Artificial Sequence: Synthetic oligonucleotide
caaucuauuuacacccaaa

SEQ ID NO: 1091142 - RNA, 19 nt, Artificial Sequence
  Description of Artificial Sequence: Synthetic oligonucleotide
uccuaguaccuugaugauc

SEQ ID NO: 1091143 - RNA, 19 nt, Artificial Sequence
  Description of Artificial Sequence: Synthetic oligonucleotide
acaagggacacgggagggg

SEQ ID NO: 1091144 - RNA, 19 nt, Artificial Sequence
  Description of Artificial Sequence: Synthetic oligonucleotide
ugaggauugugaggacgag

SEQ ID NO: 1091145 - RNA, 19 nt, Artificial Sequence
  Description of Artificial Sequence: Synthetic oligonucleotide
agggaugagcuuugaucug

SEQ ID NO: 1091146 - RNA, 19 nt, Artificial Sequence
  Description of Artificial Sequence: Synthetic oligonucleotide
gcuggguuccgagacaccg

SEQ ID NO: 1091147 - RNA, 19 nt, Artificial Sequence
  Description of Artificial Sequence: Synthetic oligonucleotide
ggaagcgggcgguuguugg

SEQ ID NO: 1091148 - RNA, 19 nt, Artificial Sequence
  Description of Artificial Sequence: Synthetic oligonucleotide
cccucaagaagaguuagcc

SEQ ID NO: 1091149 - RNA, 19 nt, Artificial Sequence
  Description of Artificial Sequence: Synthetic oligonucleotide
gugcgcacaggccuccagg

SEQ ID NO: 1091150 - RNA, 19 nt, Artificial Sequence
  Description of Artificial Sequence: Synthetic oligonucleotide
gucgguggggcccucaaga

SEQ ID NO: 1091151 - RNA, 19 nt, Artificial Sequence
  Description of Artificial Sequence: Synthetic oligonucleotide
ggggauaggaguucauuuc

SEQ ID NO: 1091152 - RNA, 19 nt, Artificial Sequence
  Description of Artificial Sequence: Synthetic oligonucleotide
gaggacggaguguacucca

SEQ ID NO: 1091153 - RNA, 19 nt, Artificial Sequence
  Description of Artificial Sequence: Synthetic oligonucleotide
agaauggcauugagagacg

SEQ ID NO: 1091154 - RNA, 19 nt, Artificial Sequence
  Description of Artificial Sequence: Synthetic oligonucleotide
ucgaagaagcugugcgcac

SEQ ID NO: 1091155 - RNA, 19 nt, Artificial Sequence
  Description of Artificial Sequence: Synthetic oligonucleotide
gguguaaucuguggcuccg

SEQ ID NO: 1091156 - RNA, 19 nt, Artificial Sequence
  Description of Artificial Sequence: Synthetic oligonucleotide
acgacuccaaaugagccau

SEQ ID NO: 1091157 - RNA, 19 nt, Artificial Sequence
  Description of Artificial Sequence: Synthetic oligonucleotide
auauugcagugguccagcu

SEQ ID NO: 1091158 - RNA, 19 nt, Artificial Sequence
  Description of Artificial Sequence: Synthetic oligonucleotide
ggggagagccuugaggacg

SEQ ID NO: 1091159 - RNA, 19 nt, Artificial Sequence
  Description of Artificial Sequence: Synthetic oligonucleotide
uaguucccuugucucugcc

SEQ ID NO: 1091160 - RNA, 19 nt, Artificial Sequence
  Description of Artificial Sequence: Synthetic oligonucleotide
ggugacacacaccuuggga

SEQ ID NO: 1091161 - RNA, 19 nt, Artificial Sequence
  Description of Artificial Sequence: Synthetic oligonucleotide
ugggaguucccagauggau

SEQ ID NO: 1091162 - RNA, 19 nt, Artificial Sequence
  Description of Artificial Sequence: Synthetic oligonucleotide
auggugugaaucgacguuu

SEQ ID NO: 1091163 - RNA, 19 nt, Artificial Sequence
  Description of Artificial Sequence: Synthetic oligonucleotide
cuggggcacgguaguaccg

SEQ ID NO: 1091164 - RNA, 19 nt, Artificial Sequence
  Description of Artificial Sequence: Synthetic oligonucleotide
ucagguggcguccgggauu

SEQ ID NO: 1091165 - RNA, 19 nt, Artificial Sequence
  Description of Artificial Sequence: Synthetic oligonucleotide
cacgacuccaaaugagcca

SEQ ID NO: 1091166 - RNA, 19 nt, Artificial Sequence
  Description of Artificial Sequence: Synthetic oligonucleotide
guaguagggccugcugggg

SEQ ID NO: 1091167 - RNA, 19 nt, Artificial Sequence
  Description of Artificial Sequence: Synthetic oligonucleotide
gucucaguuaaagcuugug

SEQ ID NO: 1091168 - RNA, 19 nt, Artificial Sequence
  Description of Artificial Sequence: Synthetic oligonucleotide
cucucguauagggacccag

SEQ ID NO: 1091169 - RNA, 19 nt, Artificial Sequence
  Description of Artificial Sequence: Synthetic oligonucleotide
guagguuggauggugugaa

SEQ ID NO: 1091170 - RNA, 19 nt, Artificial Sequence
  Description of Artificial Sequence: Synthetic oligonucleotide
gauggugugaaucgacguu

SEQ ID NO: 1091171 - RNA, 19 nt, Artificial Sequence
  Description of Artificial Sequence: Synthetic oligonucleotide
ugauagggauaaucagcuu

SEQ ID NO: 1091172 - RNA, 19 nt, Artificial Sequence
  Description of Artificial Sequence: Synthetic oligonucleotide
ggcuagauguuggggauag

SEQ ID NO: 1091173 - RNA, 19 nt, Artificial Sequence
  Description of Artificial Sequence: Synthetic oligonucleotide
acccaaagggccagggaag

SEQ ID NO: 1091174 - RNA, 19 nt, Artificial Sequence
  Description of Artificial Sequence: Synthetic oligonucleotide
uccagggaugagcuuugau

SEQ ID NO: 1091175 - RNA, 19 nt, Artificial Sequence
  Description of Artificial Sequence: Synthetic oligonucleotide
guaccuugaugaucuccac

SEQ ID NO: 1091176 - RNA, 19 nt, Artificial Sequence
  Description of Artificial Sequence: Synthetic oligonucleotide
accuugggaguggauguag

SEQ ID NO: 1091177 - RNA, 19 nt, Artificial Sequence
  Description of Artificial Sequence: Synthetic oligonucleotide
guaaagugccgggccaccc

SEQ ID NO: 1091178 - RNA, 19 nt, Artificial Sequence
  Description of Artificial Sequence: Synthetic oligonucleotide
caacugcuuugcacugccg

SEQ ID NO: 1091179 - RNA, 19 nt, Artificial Sequence
  Description of Artificial Sequence: Synthetic oligonucleotide
gguuuaaauacagcucauc

SEQ ID NO: 1091180 - RNA, 19 nt, Artificial Sequence
  Description of Artificial Sequence: Synthetic oligonucleotide
cacugccgaaaucgcagag

SEQ ID NO: 1091181 - RNA, 19 nt, Artificial Sequence
  Description of Artificial Sequence: Synthetic oligonucleotide
gcuuacgcauaaucugcag

SEQ ID NO: 1091182 - RNA, 19 nt, Artificial Sequence
  Description of Artificial Sequence: Synthetic oligonucleotide
uggugugaaucgacguuuu

SEQ ID NO: 1091183 - RNA, 19 nt, Artificial Sequence
  Description of Artificial Sequence: Synthetic oligonucleotide
agauggauguggaggggug

SEQ ID NO: 1091184 - RNA, 19 nt, Artificial Sequence
  Description of Artificial Sequence: Synthetic oligonucleotide
ggguagguguggcaucagg

SEQ ID NO: 1091185 - RNA, 19 nt, Artificial Sequence
  Description of Artificial Sequence: Synthetic oligonucleotide
gcgccugccagucugggcc

SEQ ID NO: 1091186 - RNA, 19 nt, Artificial Sequence
  Description of Artificial Sequence: Synthetic oligonucleotide
uacgcauaaucugcagcuc

SEQ ID NO: 1091187 - RNA, 19 nt, Artificial Sequence
  Description of Artificial Sequence: Synthetic oligonucleotide
gacgguuggauggagaguu

SEQ ID NO: 1091188 - RNA, 19 nt, Artificial Sequence
  Description of Artificial Sequence: Synthetic oligonucleotide
guauagggacccagccagg

SEQ ID NO: 1091189 - RNA, 19 nt, Artificial Sequence
  Description of Artificial Sequence: Synthetic oligonucleotide
accucaagugaggagggau

SEQ ID NO: 1091190 - RNA, 19 nt, Artificial Sequence
  Description of Artificial Sequence: Synthetic oligonucleotide
aggacgaggugagggguag

SEQ ID NO: 1091191 - RNA, 19 nt, Artificial Sequence
  Description of Artificial Sequence: Synthetic oligonucleotide
uggggcacgguaguaccga

SEQ ID NO: 1091192 - RNA, 19 nt, Artificial Sequence
  Description of Artificial Sequence: Synthetic oligonucleotide
agcuuacgcauaaucugca

SEQ ID NO: 1091193 - RNA, 19 nt, Artificial Sequence
  Description of Artificial Sequence: Synthetic oligonucleotide
acgaggugagggguaguag

SEQ ID NO: 1091194 - RNA, 19 nt, Artificial Sequence
  Description of Artificial Sequence: Synthetic oligonucleotide
gguggggcccucaagaaga

SEQ ID NO: 1091195 - RNA, 19 nt, Artificial Sequence
  Description of Artificial Sequence: Synthetic oligonucleotide
acacaucgauggaugaggu

SEQ ID NO: 1091196 - RNA, 19 nt, Artificial Sequence
  Description of Artificial Sequence: Synthetic oligonucleotide
ggccuugguaaagugccgg

SEQ ID NO: 1091197 - RNA, 19 nt, Artificial Sequence
  Description of Artificial Sequence: Synthetic oligonucleotide
gaacggaggucuguacaca

SEQ ID NO: 1091198 - RNA, 19 nt, Artificial Sequence
  Description of Artificial Sequence: Synthetic oligonucleotide
ggcacgguaguaccgagaa

SEQ ID NO: 1091199 - RNA, 19 nt, Artificial Sequence
  Description of Artificial Sequence: Synthetic oligonucleotide
gcgguuguuggggagcugg

SEQ ID NO: 1091200 - RNA, 19 nt, Artificial Sequence
  Description of Artificial Sequence: Synthetic oligonucleotide
aagguccucuuaccccaaa

SEQ ID NO: 1091201 - RNA, 19 nt, Artificial Sequence
  Description of Artificial Sequence: Synthetic oligonucleotide
acggaggucuguacacagg

SEQ ID NO: 1091202 - RNA, 19 nt, Artificial Sequence
  Description of Artificial Sequence: Synthetic oligonucleotide
ucgauggaugagguguaau

SEQ ID NO: 1091203 - RNA, 19 nt, Artificial Sequence
  Description of Artificial Sequence: Synthetic oligonucleotide
auggauguggagggguggu

SEQ ID NO: 1091204 - RNA, 19 nt, Artificial Sequence
  Description of Artificial Sequence: Synthetic oligonucleotide
ggcguccgggauuugaaca

SEQ ID NO: 1091205 - RNA, 19 nt, Artificial Sequence
  Description of Artificial Sequence: Synthetic oligonucleotide
uuuguccagggaugagcuu

SEQ ID NO: 1091206 - RNA, 19 nt, Artificial Sequence
  Description of Artificial Sequence: Synthetic oligonucleotide
uugaaccuuuuguccugaa

SEQ ID NO: 1091207 - RNA, 19 nt, Artificial Sequence
  Description of Artificial Sequence: Synthetic oligonucleotide
gucgggguccacaagcaga

SEQ ID NO: 1091208 - RNA, 19 nt, Artificial Sequence
  Description of Artificial Sequence: Synthetic oligonucleotide
gguuucaugccaauaauuu

SEQ ID NO: 1091209 - RNA, 19 nt, Artificial Sequence
  Description of Artificial Sequence: Synthetic oligonucleotide
guggcuccgaagaugagcu

SEQ ID NO: 1091210 - RNA, 19 nt, Artificial Sequence
  Description of Artificial Sequence: Synthetic oligonucleotide
ggacggaguguacuccagc

SEQ ID NO: 1091211 - RNA, 19 nt, Artificial Sequence
  Description of Artificial Sequence: Synthetic oligonucleotide
cgauggaugagguguaauc

SEQ ID NO: 1091212 - RNA, 19 nt, Artificial Sequence
  Description of Artificial Sequence: Synthetic oligonucleotide
caggcucgagcacagcgca

SEQ ID NO: 1091213 - RNA, 19 nt, Artificial Sequence
  Description of Artificial Sequence: Synthetic oligonucleotide
ccacuaguucccuugucuc

SEQ ID NO: 1091214 - RNA, 19 nt, Artificial Sequence
  Description of Artificial Sequence: Synthetic oligonucleotide
guucccggguugguguucc

SEQ ID NO: 1091215 - RNA, 19 nt, Artificial Sequence
  Description of Artificial Sequence: Synthetic oligonucleotide
agguuuaaauacagcucau

SEQ ID NO: 1091216 - RNA, 19 nt, Artificial Sequence
  Description of Artificial Sequence: Synthetic oligonucleotide
uacaccgucucgggcacau

SEQ ID NO: 1091217 - RNA, 19 nt, Artificial Sequence
  Description of Artificial Sequence: Synthetic oligonucleotide
agacgguuggauggagagu

SEQ ID NO: 1091218 - RNA, 19 nt, Artificial Sequence
  Description of Artificial Sequence: Synthetic oligonucleotide
ggggaccucaagugaggag

SEQ ID NO: 1091219 - RNA, 19 nt, Artificial Sequence
  Description of Artificial Sequence: Synthetic oligonucleotide
ccucacgauauugcagugg

SEQ ID NO: 1091220 - RNA, 19 nt, Artificial Sequence
  Description of Artificial Sequence: Synthetic oligonucleotide
gcguccgggauuugaacac

SEQ ID NO: 1091221 - RNA, 19 nt, Artificial Sequence
  Description of Artificial Sequence: Synthetic oligonucleotide
cuugaggacggaguguacu

SEQ ID NO: 1091222 - RNA, 19 nt, Artificial Sequence
  Description of Artificial Sequence: Synthetic oligonucleotide
aggacggaguguacuccag

SEQ ID NO: 1091223 - RNA, 19 nt, Artificial Sequence
  Description of Artificial Sequence: Synthetic oligonucleotide
agcuggguuccgagacacc

SEQ ID NO: 1091224 - RNA, 19 nt, Artificial Sequence
  Description of Artificial Sequence: Synthetic oligonucleotide
cccggguugguguuccuag

SEQ ID NO: 1091225 - RNA, 19 nt, Artificial Sequence
  Description of Artificial Sequence: Synthetic oligonucleotide
caucgauggaugaggugua

SEQ ID NO: 1091226 - RNA, 19 nt, Artificial Sequence
  Description of Artificial Sequence: Synthetic oligonucleotide
ccucaagaagaguuagcca

SEQ ID NO: 1091227 - RNA, 19 nt, Artificial Sequence
  Description of Artificial Sequence: Synthetic oligonucleotide
ggauggugugaaucgacgu

SEQ ID NO: 1091228 - RNA, 19 nt, Artificial Sequence
  Description of Artificial Sequence: Synthetic oligonucleotide
uggccucagguggcguccg

SEQ ID NO: 1091229 - RNA, 19 nt, Artificial Sequence
  Description of Artificial Sequence: Synthetic oligonucleotide
ccccgaaccaacugcuuug

SEQ ID NO: 1091230 - RNA, 19 nt, Artificial Sequence
  Description of Artificial Sequence: Synthetic oligonucleotide
agucucaguuaaagcuugu

SEQ ID NO: 1091231 - RNA, 19 nt, Artificial Sequence
  Description of Artificial Sequence: Synthetic oligonucleotide
acgguuggauggagaguuc

SEQ ID NO: 1091232 - RNA, 19 nt, Artificial Sequence
  Description of Artificial Sequence: Synthetic oligonucleotide
gccacuaguucccuugucu

SEQ ID NO: 1091233 - RNA, 19 nt, Artificial Sequence
  Description of Artificial Sequence: Synthetic oligonucleotide
cugcccucucguauaggga

SEQ ID NO: 1091234 - RNA, 19 nt, Artificial Sequence
  Description of Artificial Sequence: Synthetic oligonucleotide
agcgggcgguuguugggga

SEQ ID NO: 1091235 - RNA, 19 nt, Artificial Sequence
  Description of Artificial Sequence: Synthetic oligonucleotide
ugggccgcucugagucuca

SEQ ID NO: 1091236 - RNA, 19 nt, Artificial Sequence
  Description of Artificial Sequence: Synthetic oligonucleotide
cccuacuccuuccuuccag

SEQ ID NO: 1091237 - RNA, 19 nt, Artificial Sequence
  Description of Artificial Sequence: Synthetic oligonucleotide
ccgagaagcagcucagcca

SEQ ID NO: 1091238 - RNA, 19 nt, Artificial Sequence
  Description of Artificial Sequence: Synthetic oligonucleotide
cagugucgggguccacaag

SEQ ID NO: 1091239 - RNA, 19 nt, Artificial Sequence
  Description of Artificial Sequence: Synthetic oligonucleotide
gguuccgagacaccgcagu

SEQ ID NO: 1091240 - RNA, 19 nt, Artificial Sequence
  Description of Artificial Sequence: Synthetic oligonucleotide
gcaggcucgagcacagcgc

SEQ ID NO: 1091241 - RNA, 19 nt, Artificial Sequence
  Description of Artificial Sequence: Synthetic oligonucleotide
caggggcucuucccuacuc

SEQ ID NO: 1091242 - RNA, 19 nt, Artificial Sequence
  Description of Artificial Sequence: Synthetic oligonucleotide
gggcugguucuauuuacaa

SEQ ID NO: 1091243 - RNA, 19 nt, Artificial Sequence
  Description of Artificial Sequence: Synthetic oligonucleotide
cauugagagacgguuggau

SEQ ID NO: 1091244 - RNA, 19 nt, Artificial Sequence
  Description of Artificial Sequence: Synthetic oligonucleotide
cccgguacaccgucucggg

SEQ ID NO: 1091245 - RNA, 19 nt, Artificial Sequence
  Description of Artificial Sequence: Synthetic oligonucleotide
uguucccggguugguguuc

SEQ ID NO: 1091246 - RNA, 19 nt, Artificial Sequence
  Description of Artificial Sequence: Synthetic oligonucleotide
ccgggcugguucuauuuac

SEQ ID NO: 1091247 - RNA, 19 nt, Artificial Sequence
  Description of Artificial Sequence: Synthetic oligonucleotide
gugucgggguccacaagca

SEQ ID NO: 1091248 - RNA, 19 nt, Artificial Sequence
  Description of Artificial Sequence: Synthetic oligonucleotide
gccucacgauauugcagug

SEQ ID NO: 1091249 - RNA, 19 nt, Artificial Sequence
  Description of Artificial Sequence: Synthetic oligonucleotide
uggcuccgaagaugagcuc

SEQ ID NO: 1091250 - RNA, 19 nt, Artificial Sequence
  Description of Artificial Sequence: Synthetic oligonucleotide
ccgucucgggcacauacuc

SEQ ID NO: 1091251 - RNA, 19 nt, Artificial Sequence
  Description of Artificial Sequence: Synthetic oligonucleotide
cucgccacuggaguagaaa

SEQ ID NO: 1091252 - RNA, 19 nt, Artificial Sequence
  Description of Artificial Sequence: Synthetic oligonucleotide
ggggcacgguaguaccgag

SEQ ID NO: 1091253 - RNA, 19 nt, Artificial Sequence
  Description of Artificial Sequence: Synthetic oligonucleotide
aggguagguguggcaucag

SEQ ID NO: 1091254 - RNA, 19 nt, Artificial Sequence
  Description of Artificial Sequence: Synthetic oligonucleotide
gggcaggagcuugaugggc

SEQ ID NO: 1091255 - RNA, 19 nt, Artificial Sequence
  Description of Artificial Sequence: Synthetic oligonucleotide
gcagugucgggguccacaa

SEQ ID NO: 1091256 - RNA, 19 nt, Artificial Sequence
  Description of Artificial Sequence: Synthetic oligonucleotide
gaggacgaggugaggggua

SEQ ID NO: 1091257 - RNA, 19 nt, Artificial Sequence
  Description of Artificial Sequence: Synthetic oligonucleotide
cgucucgggcacauacucc

SEQ ID NO: 1091258 - RNA, 19 nt, Artificial Sequence
  Description of Artificial Sequence: Synthetic oligonucleotide
uggggcccucaagaagagu

SEQ ID NO: 1091259 - RNA, 19 nt, Artificial Sequence
  Description of Artificial Sequence: Synthetic oligonucleotide
gcucgagcacagcgcaaug

SEQ ID NO: 1091260 - RNA, 19 nt, Artificial Sequence
  Description of Artificial Sequence: Synthetic oligonucleotide
ggcuccgaagaugagcucu

SEQ ID NO: 1091261 - RNA, 19 nt, Artificial Sequence
  Description of Artificial Sequence: Synthetic oligonucleotide
gcuagauguuggggauagg

SEQ ID NO: 1091262 - RNA, 19 nt, Artificial Sequence
  Description of Artificial Sequence: Synthetic oligonucleotide
acggcagugucggggucca

SEQ ID NO: 1091263 - RNA, 19 nt, Artificial Sequence
  Description of Artificial Sequence: Synthetic oligonucleotide
gaagguccucuuaccccaa

SEQ ID NO: 1091264 - RNA, 19 nt, Artificial Sequence
  Description of Artificial Sequence: Synthetic oligonucleotide
gggaugagcuuugaucugu

SEQ ID NO: 1091265 - RNA, 19 nt, Artificial Sequence
  Description of Artificial Sequence: Synthetic oligonucleotide
cccucucguauagggaccc

SEQ ID NO: 1091266 - RNA, 19 nt, Artificial Sequence
  Description of Artificial Sequence: Synthetic oligonucleotide
gcacugccgaaaucgcaga

SEQ ID NO: 1091267 - RNA, 19 nt, Artificial Sequence
  Description of Artificial Sequence: Synthetic oligonucleotide
guggcguccgggauuugaa

SEQ ID NO: 1091268 - RNA, 19 nt, Artificial Sequence
  Description of Artificial Sequence: Synthetic oligonucleotide
ucccggguugguguuccua

SEQ ID NO: 1091269 - RNA, 19 nt, Artificial Sequence
  Description of Artificial Sequence: Synthetic oligonucleotide
gcccucaagaagaguuagc

SEQ ID NO: 1091270 - RNA, 19 nt, Artificial Sequence
  Description of Artificial Sequence: Synthetic oligonucleotide
ccacuugggaguucccaga

SEQ ID NO: 1091271 - RNA, 19 nt, Artificial Sequence
  Description of Artificial Sequence: Synthetic oligonucleotide
cacacaccuugggagugga

SEQ ID NO: 1091272 - RNA, 19 nt, Artificial Sequence
  Description of Artificial Sequence: Synthetic oligonucleotide
ggcgccugccagucugggc

SEQ ID NO: 1091273 - RNA, 19 nt, Artificial Sequence
  Description of Artificial Sequence: Synthetic oligonucleotide
cgguacaccgucucgggca

SEQ ID NO: 1091274 - RNA, 19 nt, Artificial Sequence
  Description of Artificial Sequence: Synthetic oligonucleotide
ccgguacaccgucucgggc

SEQ ID NO: 1091275 - RNA, 19 nt, Artificial Sequence
  Description of Artificial Sequence: Synthetic oligonucleotide
gauggccacuaguucccuu

SEQ ID NO: 1091276 - RNA, 19 nt, Artificial Sequence
  Description of Artificial Sequence: Synthetic oligonucleotide
uucccggguugguguuccu

SEQ ID NO: 1091277 - RNA, 19 nt, Artificial Sequence
  Description of Artificial Sequence: Synthetic oligonucleotide
gggaagcgggcgguuguug

SEQ ID NO: 1091278 - RNA, 19 nt, Artificial Sequence
  Description of Artificial Sequence: Synthetic oligonucleotide
ggguuucaugccaauaauu

SEQ ID NO: 1091279 - RNA, 19 nt, Artificial Sequence
  Description of Artificial Sequence: Synthetic oligonucleotide
ggccacuaguucccuuguc

SEQ ID NO: 1091280 - RNA, 19 nt, Artificial Sequence
  Description of Artificial Sequence: Synthetic oligonucleotide
guccgggauuugaacaccu

SEQ ID NO: 1091281 - RNA, 19 nt, Artificial Sequence
  Description of Artificial Sequence: Synthetic oligonucleotide
ugggccgggcugguucuau

SEQ ID NO: 1091282 - RNA, 19 nt, Artificial Sequence
  Description of Artificial Sequence: Synthetic oligonucleotide
ggggcccucaagaagaguu

SEQ ID NO: 1091283 - RNA, 19 nt, Artificial Sequence
  Description of Artificial Sequence: Synthetic oligonucleotide
ccgaaaucgcagagcuuga

SEQ ID NO: 1091284 - RNA, 19 nt, Artificial Sequence
  Description of Artificial Sequence: Synthetic oligonucleotide
ggguuccgagacaccgcag

SEQ ID NO: 1091285 - RNA, 19 nt, Artificial Sequence
  Description of Artificial Sequence: Synthetic oligonucleotide
ccucagguggcguccggga

SEQ ID NO: 1091286 - RNA, 19 nt, Artificial Sequence
  Description of Artificial Sequence: Synthetic oligonucleotide
gcaggagcuugaugggcua

SEQ ID NO: 1091287 - RNA, 19 nt, Artificial Sequence
  Description of Artificial Sequence: Synthetic oligonucleotide
cucgguucuugaaccuuuu

SEQ ID NO: 1091288 - RNA, 19 nt, Artificial Sequence
  Description of Artificial Sequence: Synthetic oligonucleotide
cguccgggauuugaacacc

SEQ ID NO: 1091289 - RNA, 19 nt, Artificial Sequence
  Description of Artificial Sequence: Synthetic oligonucleotide
cucagguggcguccgggau

SEQ ID NO: 1091290 - RNA, 19 nt, Artificial Sequence
  Description of Artificial Sequence: Synthetic oligonucleotide
gcaucaggcgccugccagu

SEQ ID NO: 1091291 - RNA, 19 nt, Artificial Sequence
  Description of Artificial Sequence: Synthetic oligonucleotide
acacaccuugggaguggau

SEQ ID NO: 1091292 - RNA, 19 nt, Artificial Sequence
  Description of Artificial Sequence: Synthetic oligonucleotide
gccgggcugguucuauuua

SEQ ID NO: 1091293 - RNA, 19 nt, Artificial Sequence
  Description of Artificial Sequence: Synthetic oligonucleotide
guuggggauaggaguucau

SEQ ID NO: 1091294 - RNA, 19 nt, Artificial Sequence
  Description of Artificial Sequence: Synthetic oligonucleotide
gggcacgguaguaccgaga

SEQ ID NO: 1091295 - RNA, 19 nt, Artificial Sequence
  Description of Artificial Sequence: Synthetic oligonucleotide
ccccauaaccagucaaaau

SEQ ID NO: 1091296 - RNA, 19 nt, Artificial Sequence
  Description of Artificial Sequence: Synthetic oligonucleotide
ggcucgagcacagcgcaau

SEQ ID NO: 1091297 - RNA, 19 nt, Artificial Sequence
  Description of Artificial Sequence: Synthetic oligonucleotide
aggcucgagcacagcgcaa

SEQ ID NO: 1091298 - RNA, 19 nt, Artificial Sequence
  Description of Artificial Sequence: Synthetic oligonucleotide
gggccgcucugagucucag

SEQ ID NO: 1091299 - RNA, 19 nt, Artificial Sequence
  Description of Artificial Sequence: Synthetic oligonucleotide
cgguuggauggagaguuca

SEQ ID NO: 1091300 - RNA, 19 nt, Artificial Sequence
  Description of Artificial Sequence: Synthetic oligonucleotide
ccgaaccaacugcuuugca

SEQ ID NO: 1091301 - RNA, 19 nt, Artificial Sequence
  Description of Artificial Sequence: Synthetic oligonucleotide
ccccacuugggaguuccca

SEQ ID NO: 1091302 - RNA, 19 nt, Artificial Sequence
  Description of Artificial Sequence: Synthetic oligonucleotide
cagguggcguccgggauuu

SEQ ID NO: 1091303 - RNA, 19 nt, Artificial Sequence
  Description of Artificial Sequence: Synthetic oligonucleotide
ggugagggaggggcuagau

SEQ ID NO: 1091304 - RNA, 19 nt, Artificial Sequence
  Description of Artificial Sequence: Synthetic oligonucleotide
cugugcgcacaggccucca

SEQ ID NO: 1091305 - RNA, 19 nt, Artificial Sequence
  Description of Artificial Sequence: Synthetic oligonucleotide
gguguggcaucaggcgccu

SEQ ID NO: 1091306 - RNA, 19 nt, Artificial Sequence
  Description of Artificial Sequence: Synthetic oligonucleotide
ggcuggccgagaagcagcu

SEQ ID NO: 1091307 - RNA, 19 nt, Artificial Sequence
  Description of Artificial Sequence: Synthetic oligonucleotide
ccgugccugguacacgacu

SEQ ID NO: 1091308 - RNA, 19 nt, Artificial Sequence
  Description of Artificial Sequence: Synthetic oligonucleotide
ccaccacaaaggugaggcu

SEQ ID NO: 1091309 - RNA, 19 nt, Artificial Sequence
  Description of Artificial Sequence: Synthetic oligonucleotide
gccugccagucugggccgc

SEQ ID NO: 1091310 - RNA, 19 nt, Artificial Sequence
  Description of Artificial Sequence: Synthetic oligonucleotide
gccgugccugguacacgac

SEQ ID NO: 1091311 - RNA, 19 nt, Artificial Sequence
  Description of Artificial Sequence: Synthetic oligonucleotide
gccccacuugggaguuccc

SEQ ID NO: 1091312 - RNA, 19 nt, Artificial Sequence
  Description of Artificial Sequence: Synthetic oligonucleotide
ccggguugguguuccuagu

SEQ ID NO: 1091313 - RNA, 19 nt, Artificial Sequence
  Description of Artificial Sequence: Synthetic oligonucleotide
gguccagcuuacgcauaau

SEQ ID NO: 1091314 - RNA, 19 nt, Artificial Sequence
  Description of Artificial Sequence: Synthetic oligonucleotide
ccucucguauagggaccca

SEQ ID NO: 1091315 - RNA, 19 nt, Artificial Sequence
  Description of Artificial Sequence: Synthetic oligonucleotide
ggacgaggugagggguagu

SEQ ID NO: 1091316 - RNA, 19 nt, Artificial Sequence
  Description of Artificial Sequence: Synthetic oligonucleotide
ccacaaaggugaggcuggu

SEQ ID NO: 1091317 - RNA, 19 nt, Artificial Sequence
  Description of Artificial Sequence: Synthetic oligonucleotide
ggggaagcgggcgguuguu

SEQ ID NO: 1091318 - RNA, 19 nt, Artificial Sequence
  Description of Artificial Sequence: Synthetic oligonucleotide
ccgagacaccgcaguucau

SEQ ID NO: 1091319 - RNA, 19 nt, Artificial Sequence
  Description of Artificial Sequence: Synthetic oligonucleotide
aaaguagauacuuuguggc

SEQ ID NO: 1091320 - RNA, 19 nt, Artificial Sequence
  Description of Artificial Sequence: Synthetic oligonucleotide
acaacuuugaguuacauuc

SEQ ID NO: 1091321 - RNA, 19 nt, Artificial Sequence
  Description of Artificial Sequence: Synthetic oligonucleotide
uugaaauauaguuagaugc

SEQ ID NO: 1091322 - RNA, 19 nt, Artificial Sequence
  Description of Artificial Sequence: Synthetic oligonucleotide
uauaguuagaugcuaaacg

SEQ ID NO: 1091323 - RNA, 19 nt, Artificial Sequence
  Description of Artificial Sequence: Synthetic oligonucleotide
ugcugauacaaaauaaugg

SEQ ID NO: 1091324 - RNA, 19 nt, Artificial Sequence
  Description of Artificial Sequence: Synthetic oligonucleotide
auaauggcuauauuuaagg

SEQ ID NO: 1091325 - RNA, 19 nt, Artificial Sequence
  Description of Artificial Sequence: Synthetic oligonucleotide
aaacuuaaugccuacucuc

SEQ ID NO: 1091326 - RNA, 19 nt, Artificial Sequence
  Description of Artificial Sequence: Synthetic oligonucleotide
uuuacauauacuuauugga

SEQ ID NO: 1091327 - RNA, 19 nt, Artificial Sequence
  Description of Artificial Sequence: Synthetic oligonucleotide
uccuaauaaaacuuaaugc

SEQ ID NO: 1091328 - RNA, 19 nt, Artificial Sequence
  Description of Artificial Sequence: Synthetic oligonucleotide
acuaagugauuauaguugc

SEQ ID NO: 1091329 - RNA, 19 nt, Artificial Sequence
  Description of Artificial Sequence: Synthetic oligonucleotide
acuaguuaccguuuuaaac

SEQ ID NO: 1091330 - RNA, 19 nt, Artificial Sequence
  Description of Artificial Sequence: Synthetic oligonucleotide
acuggguuaaucuacacag

SEQ ID NO: 1091331 - RNA, 19 nt, Artificial Sequence
  Description of Artificial Sequence: Synthetic oligonucleotide
uacgaguucauuauuagca

SEQ ID NO: 1091332 - RNA, 19 nt, Artificial Sequence
  Description of Artificial Sequence: Synthetic oligonucleotide
  modified_base (17)..(17): a, c, u, g, unknown or other
auaguuaucacaccaangu

SEQ ID NO: 1091333 - RNA, 19 nt, Artificial Sequence
  Description of Artificial Sequence: Synthetic oligonucleotide
uccacuaacucuaugagac

SEQ ID NO: 1091334 - RNA, 19 nt, Artificial Sequence
  Description of Artificial Sequence: Synthetic oligonucleotide
augucuaacauuuugacaa

SEQ ID NO: 1091335 - RNA, 19 nt, Artificial Sequence
  Description of Artificial Sequence: Synthetic oligonucleotide
aacuacaucagcauagcac

SEQ ID NO: 1091336 - RNA, 19 nt, Artificial Sequence
  Description of Artificial Sequence: Synthetic oligonucleotide
uuauucaacuacaucagca

SEQ ID NO: 1091337 - RNA, 19 nt, Artificial Sequence
  Description of Artificial Sequence: Synthetic oligonucleotide
cauguaagcaaauacugcc

SEQ ID NO: 1091338 - RNA, 19 nt, Artificial Sequence
  Description of Artificial Sequence: Synthetic oligonucleotide
uauuggaaaauuauaggac

SEQ ID NO: 1091339 - RNA, 19 nt, Artificial Sequence
  Description of Artificial Sequence: Synthetic oligonucleotide
aagaaagugaaagucuacg

SEQ ID NO: 1091340 - RNA, 19 nt, Artificial Sequence
  Description of Artificial Sequence: Synthetic oligonucleotide
gaucaguacagauacuagg

SEQ ID NO: 1091341 - RNA, 19 nt, Artificial Sequence
  Description of Artificial Sequence: Synthetic oligonucleotide
uuugaaauauaguuagaug

SEQ ID NO: 1091342 - RNA, 19 nt, Artificial Sequence
  Description of Artificial Sequence: Synthetic oligonucleotide
cuugcaagagaccucaugg

SEQ ID NO: 1091343 - RNA, 19 nt, Artificial Sequence
  Description of Artificial Sequence: Synthetic oligonucleotide
aaaacuuaaugccuacucu

SEQ ID NO: 1091344 - RNA, 19 nt, Artificial Sequence
  Description of Artificial Sequence: Synthetic oligonucleotide
aaggagacauuaauuaagc

SEQ ID NO: 1091345 - RNA, 19 nt, Artificial Sequence
  Description of Artificial Sequence: Synthetic oligonucleotide
uugaguuacauucacaaua

SEQ ID NO: 1091346 - RNA, 19 nt, Artificial Sequence
  Description of Artificial Sequence: Synthetic oligonucleotide
agauacuagguugaggucc

SEQ ID NO: 1091347 - RNA, 19 nt, Artificial Sequence
  Description of Artificial Sequence: Synthetic oligonucleotide
ucagcgauccaucauauac

SEQ ID NO: 1091348 - RNA, 19 nt, Artificial Sequence
  Description of Artificial Sequence: Synthetic oligonucleotide
agguccuagaauuuguuac

SEQ ID NO: 1091349 - RNA, 19 nt, Artificial Sequence
  Description of Artificial Sequence: Synthetic oligonucleotide
ugcuauuaggauuugauau

SEQ ID NO: 1091350 - RNA, 19 nt, Artificial Sequence
  Description of Artificial Sequence: Synthetic oligonucleotide
uauuacuauccauauaaga

SEQ ID NO: 1091351 - RNA, 19 nt, Artificial Sequence
  Description of Artificial Sequence: Synthetic oligonucleotide
auaguuagaugcuaaacga

SEQ ID NO: 1091352 - RNA, 19 nt, Artificial Sequence
  Description of Artificial Sequence: Synthetic oligonucleotide
ugucauguaagcaaauacu

SEQ ID NO: 1091353 - RNA, 19 nt, Artificial Sequence
  Description of Artificial Sequence: Synthetic oligonucleotide
ucacuuauccugcuguacg

SEQ ID NO: 1091354 - RNA, 19 nt, Artificial Sequence
  Description of Artificial Sequence: Synthetic oligonucleotide
uauauauguggucaauucu

SEQ ID NO: 1091355 - RNA, 19 nt, Artificial Sequence
  Description of Artificial Sequence: Synthetic oligonucleotide
acuacaucagcauagcaca

SEQ ID NO: 1091356 - RNA, 19 nt, Artificial Sequence
  Description of Artificial Sequence: Synthetic oligonucleotide
uccagcuuuugaaauauag

SEQ ID NO: 1091357 - RNA, 19 nt, Artificial Sequence
  Description of Artificial Sequence: Synthetic oligonucleotide
aauuaagcaaagaaaguga

SEQ ID NO: 1091358 - RNA, 19 nt, Artificial Sequence
  Description of Artificial Sequence: Synthetic oligonucleotide
uaaaacuuaaugccuacuc

SEQ ID NO: 1091359 - RNA, 19 nt, Artificial Sequence
  Description of Artificial Sequence: Synthetic oligonucleotide
cuaguuaccguuuuaaaca

SEQ ID NO: 1091360 - RNA, 19 nt, Artificial Sequence
  Description of Artificial Sequence: Synthetic oligonucleotide
ucauguaagcaaauacugc

SEQ ID NO: 1091361 - RNA, 19 nt, Artificial Sequence
  Description of Artificial Sequence: Synthetic oligonucleotide
uauccauauaagaacaaau

SEQ ID NO: 1091362 - RNA, 19 nt, Artificial Sequence
  Description of Artificial Sequence: Synthetic oligonucleotide
aagggaacuggguuaaucu

SEQ ID NO: 1091363 - RNA, 19 nt, Artificial Sequence
  Description of Artificial Sequence: Synthetic oligonucleotide
auugaagugcccaggaagc

SEQ ID NO: 1091364 - RNA, 19 nt, Artificial Sequence
  Description of Artificial Sequence: Synthetic oligonucleotide
auuacuauccauauaagaa

SEQ ID NO: 1091365 - RNA, 19 nt, Artificial Sequence
  Description of Artificial Sequence: Synthetic oligonucleotide
gcugauacaaaauaauggc

SEQ ID NO: 1091366 - RNA, 19 nt, Artificial Sequence
  Description of Artificial Sequence: Synthetic oligonucleotide
uauuuaaggcuuacuaagu

SEQ ID NO: 1091367 - RNA, 19 nt, Artificial Sequence
  Description of Artificial Sequence: Synthetic oligonucleotide
ucuacgaguucauuauuag

SEQ ID NO: 1091368 - RNA, 19 nt, Artificial Sequence
  Description of Artificial Sequence: Synthetic oligonucleotide
acuagcuuuguuccuaguc

SEQ ID NO: 1091369 - RNA, 19 nt, Artificial Sequence
  Description of Artificial Sequence: Synthetic oligonucleotide
uuuaagagagggcacaguu

SEQ ID NO: 1091370 - RNA, 19 nt, Artificial Sequence
  Description of Artificial Sequence: Synthetic oligonucleotide
aauuuguuacacggagggc

SEQ ID NO: 1091371 - RNA, 19 nt, Artificial Sequence
  Description of Artificial Sequence: Synthetic oligonucleotide
gaggaguagagguacuccg

SEQ ID NO: 1091372 - RNA, 19 nt, Artificial Sequence
  Description of Artificial Sequence: Synthetic oligonucleotide
aguugaaacagacccaccu

SEQ ID NO: 1091373 - RNA, 19 nt, Artificial Sequence
  Description of Artificial Sequence: Synthetic oligonucleotide
uguccacuaacucuaugag

SEQ ID NO: 1091374 - RNA, 19 nt, Artificial Sequence
  Description of Artificial Sequence: Synthetic oligonucleotide
aagucuacgaguucauuau

SEQ ID NO: 1091375 - RNA, 19 nt, Artificial Sequence
  Description of Artificial Sequence: Synthetic oligonucleotide
aaugccuacucucuccuga

SEQ ID NO: 1091376 - RNA, 19 nt, Artificial Sequence
  Description of Artificial Sequence: Synthetic oligonucleotide
gauuacauccccauccugc

SEQ ID NO: 1091377 - RNA, 19 nt, Artificial Sequence
  Description of Artificial Sequence: Synthetic oligonucleotide
caaaaguagauacuuugug

SEQ ID NO: 1091378 - RNA, 19 nt, Artificial Sequence
  Description of Artificial Sequence: Synthetic oligonucleotide
ugaucaguacagauacuag

SEQ ID NO: 1091379 - RNA, 19 nt, Artificial Sequence
  Description of Artificial Sequence: Synthetic oligonucleotide
uaccguuuuaaacaacaca

SEQ ID NO: 1091380 - RNA, 19 nt, Artificial Sequence
  Description of Artificial Sequence: Synthetic oligonucleotide
cuugaauccagaagaugcc

SEQ ID NO: 1091381 - RNA, 19 nt, Artificial Sequence
  Description of Artificial Sequence: Synthetic oligonucleotide
aaucauaaaucaaggguca

SEQ ID NO: 1091382 - RNA, 19 nt, Artificial Sequence
  Description of Artificial Sequence: Synthetic oligonucleotide
auuuguuacacggagggcu

SEQ ID NO: 1091383 - RNA, 19 nt, Artificial Sequence
  Description of Artificial Sequence: Synthetic oligonucleotide
acucggaacugccuggccc

SEQ ID NO: 1091384 - RNA, 19 nt, Artificial Sequence
  Description of Artificial Sequence: Synthetic oligonucleotide
aaguagauacuuuguggca

SEQ ID NO: 1091385 - RNA, 19 nt, Artificial Sequence
  Description of Artificial Sequence: Synthetic oligonucleotide
caguuacuagcuuuguucc

SEQ ID NO: 1091386 - RNA, 19 nt, Artificial Sequence
  Description of Artificial Sequence: Synthetic oligonucleotide
agagggcacaguuugguag

SEQ ID NO: 1091387 - RNA, 19 nt, Artificial Sequence
  Description of Artificial Sequence: Synthetic oligonucleotide
ucuggagugaccuggcaug

SEQ ID NO: 1091388 - RNA, 19 nt, Artificial Sequence
  Description of Artificial Sequence: Synthetic oligonucleotide
uacuuauuggaaaauuaua

SEQ ID NO: 1091389 - RNA, 19 nt, Artificial Sequence
  Description of Artificial Sequence: Synthetic oligonucleotide
gacaauuugugcaugucac

SEQ ID NO: 1091390 - RNA, 19 nt, Artificial Sequence
  Description of Artificial Sequence: Synthetic oligonucleotide
cugcugauacaaaauaaug

SEQ ID NO: 1091391 - RNA, 19 nt, Artificial Sequence
  Description of Artificial Sequence: Synthetic oligonucleotide
auacuuuguggcauauucc

SEQ ID NO: 1091392 - RNA, 19 nt, Artificial Sequence
  Description of Artificial Sequence: Synthetic oligonucleotide
  modified_base (12)..(12): a, c, u, g, unknown or other
uaucacaccaanguuuaca

SEQ ID NO: 1091393 - RNA, 19 nt, Artificial Sequence
  Description of Artificial Sequence: Synthetic oligonucleotide
uuauccugcuguacgggag

SEQ ID NO: 1091394 - RNA, 19 nt, Artificial Sequence
  Description of Artificial Sequence: Synthetic oligonucleotide
uuuugugcugcugauacaa

SEQ ID NO: 1091395 - RNA, 19 nt, Artificial Sequence
  Description of Artificial Sequence: Synthetic oligonucleotide
  modified_base (16)..(16): a, c, u, g, unknown or other
uaguuaucacaccaanguu

SEQ ID NO: 1091396 - RNA, 19 nt, Artificial Sequence
  Description of Artificial Sequence: Synthetic oligonucleotide
uggcaugugcauaacaguc

SEQ ID NO: 1091397 - RNA, 19 nt, Artificial Sequence
  Description of Artificial Sequence: Synthetic oligonucleotide
accguuuuaaacaacacaa

SEQ ID NO: 1091398 - RNA, 19 nt, Artificial Sequence
  Description of Artificial Sequence: Synthetic oligonucleotide
uuguuccuaguccauguug

SEQ ID NO: 1091399 - RNA, 19 nt, Artificial Sequence
  Description of Artificial Sequence: Synthetic oligonucleotide
ugauuuguucuucccauau

SEQ ID NO: 1091400 - RNA, 19 nt, Artificial Sequence
  Description of Artificial Sequence: Synthetic oligonucleotide
acaauagucuauuuccaaa

SEQ ID NO: 1091401 - RNA, 19 nt, Artificial Sequence
  Description of Artificial Sequence: Synthetic oligonucleotide
ucagcauagcacacaaggu

SEQ ID NO: 1091402 - RNA, 19 nt, Artificial Sequence
  Description of Artificial Sequence: Synthetic oligonucleotide
cagucaaugauuaaggacu

SEQ ID NO: 1091403 - RNA, 19 nt, Artificial Sequence
  Description of Artificial Sequence: Synthetic oligonucleotide
uugauuacauccccauccu

SEQ ID NO: 1091404 - RNA, 19 nt, Artificial Sequence
  Description of Artificial Sequence: Synthetic oligonucleotide
cuacgaguucauuauuagc

SEQ ID NO: 1091405 - RNA, 19 nt, Artificial Sequence
  Description of Artificial Sequence: Synthetic oligonucleotide
aaggcuuacuaagugauua

SEQ ID NO: 1091406 - RNA, 19 nt, Artificial Sequence
  Description of Artificial Sequence: Synthetic oligonucleotide
caaugauuaaggacuuuug

SEQ ID NO: 1091407 - RNA, 19 nt, Artificial Sequence
  Description of Artificial Sequence: Synthetic oligonucleotide
uaguuagaugcuaaacgaa

SEQ ID NO: 1091408 - RNA, 19 nt, Artificial Sequence
  Description of Artificial Sequence: Synthetic oligonucleotide
uugaaacagacccaccuuu

SEQ ID NO: 1091409 - RNA, 19 nt, Artificial Sequence
  Description of Artificial Sequence: Synthetic oligonucleotide
cacaaguuccgacauaguc

SEQ ID NO: 1091410 - RNA, 19 nt, Artificial Sequence
  Description of Artificial Sequence: Synthetic oligonucleotide
uaagcaaauacugccucug

SEQ ID NO: 1091411 - RNA, 19 nt, Artificial Sequence
  Description of Artificial Sequence: Synthetic oligonucleotide
agugaaagucuacgaguuc

SEQ ID NO: 1091412 - RNA, 19 nt, Artificial Sequence
  Description of Artificial Sequence: Synthetic oligonucleotide
  modified_base (7)..(7): a, c, u, g, unknown or other
caccaanguuuacauauac

SEQ ID NO: 1091413 - RNA, 19 nt, Artificial Sequence
  Description of Artificial Sequence: Synthetic oligonucleotide
ugggcguaccacucaagcg

SEQ ID NO: 1091414 - RNA, 19 nt, Artificial Sequence
  Description of Artificial Sequence: Synthetic oligonucleotide
uuaccguuuuaaacaacac

SEQ ID NO: 1091415 - RNA, 19 nt, Artificial Sequence
  Description of Artificial Sequence: Synthetic oligonucleotide
auuacauccccauccugca

SEQ ID NO: 1091416 - RNA, 19 nt, Artificial Sequence
  Description of Artificial Sequence: Synthetic oligonucleotide
aacuuaaugccuacucucu

SEQ ID NO: 1091417 - RNA, 19 nt, Artificial Sequence
  Description of Artificial Sequence: Synthetic oligonucleotide
gauuauaguugcccugaac

SEQ ID NO: 1091418 - RNA, 19 nt, Artificial Sequence
  Description of Artificial Sequence: Synthetic oligonucleotide
cuaagugauuauaguugcc

SEQ ID NO: 1091419 - RNA, 19 nt, Artificial Sequence
  Description of Artificial Sequence: Synthetic oligonucleotide
agcgauccaucauauacca

SEQ ID NO: 1091420 - RNA, 19 nt, Artificial Sequence
  Description of Artificial Sequence: Synthetic oligonucleotide
ccuguguucaguuacuagc

SEQ ID NO: 1091421 - RNA, 19 nt, Artificial Sequence
  Description of Artificial Sequence: Synthetic oligonucleotide
gguuaaucuacacaguuaa

SEQ ID NO: 1091422 - RNA, 19 nt, Artificial Sequence
  Description of Artificial Sequence: Synthetic oligonucleotide
aucauauaccacaucacca

SEQ ID NO: 1091423 - RNA, 19 nt, Artificial Sequence
  Description of Artificial Sequence: Synthetic oligonucleotide
uuacuagcuuuguuccuag

SEQ ID NO: 1091424 - RNA, 19 nt, Artificial Sequence
  Description of Artificial Sequence: Synthetic oligonucleotide
guuaccguuuuaaacaaca

SEQ ID NO: 1091425 - RNA, 19 nt, Artificial Sequence
  Description of Artificial Sequence: Synthetic oligonucleotide
aucaguacagauacuaggu

SEQ ID NO: 1091426 - RNA, 19 nt, Artificial Sequence
  Description of Artificial Sequence: Synthetic oligonucleotide
uacacggagggcuaaacuu

SEQ ID NO: 1091427 - RNA, 19 nt, Artificial Sequence
  Description of Artificial Sequence: Synthetic oligonucleotide
cagcgauccaucauauacc

SEQ ID NO: 1091428 - RNA, 19 nt, Artificial Sequence
  Description of Artificial Sequence: Synthetic oligonucleotide
aucgcccagagacuugugg

SEQ ID NO: 1091429 - RNA, 19 nt, Artificial Sequence
  Description of Artificial Sequence: Synthetic oligonucleotide
uaguuaccguuuuaaacaa

SEQ ID NO: 1091430 - RNA, 19 nt, Artificial Sequence
  Description of Artificial Sequence: Synthetic oligonucleotide
uuacacggagggcuaaacu

SEQ ID NO: 1091431 - RNA, 19 nt, Artificial Sequence
  Description of Artificial Sequence: Synthetic oligonucleotide
uuugaguuacauucacaau

SEQ ID NO: 1091432 - RNA, 19 nt, Artificial Sequence
  Description of Artificial Sequence: Synthetic oligonucleotide
auaaaacagucaaugauua

SEQ ID NO: 1091433 - RNA, 19 nt, Artificial Sequence
  Description of Artificial Sequence: Synthetic oligonucleotide
aguacagauacuagguuga

SEQ ID NO: 1091434 - RNA, 19 nt, Artificial Sequence
  Description of Artificial Sequence: Synthetic oligonucleotide
cacucaagcgcggacaugc

SEQ ID NO: 1091435 - RNA, 19 nt, Artificial Sequence
  Description of Artificial Sequence: Synthetic oligonucleotide
auuaagcaaagaaagugaa

SEQ ID NO: 1091436 - RNA, 19 nt, Artificial Sequence
  Description of Artificial Sequence: Synthetic oligonucleotide
guaauugaagugcccagga

SEQ ID NO: 1091437 - RNA, 19 nt, Artificial Sequence
  Description of Artificial Sequence: Synthetic oligonucleotide
uacauucacaauagucuau

SEQ ID NO: 1091438 - RNA, 19 nt, Artificial Sequence
  Description of Artificial Sequence: Synthetic oligonucleotide
ugauuacauccccauccug

SEQ ID NO: 1091439 - RNA, 19 nt, Artificial Sequence
  Description of Artificial Sequence: Synthetic oligonucleotide
ugccugacucguagaagcg

SEQ ID NO: 1091440 - RNA, 19 nt, Artificial Sequence
  Description of Artificial Sequence: Synthetic oligonucleotide
cauuauuagcaauauaaau

SEQ ID NO: 1091441 - RNA, 19 nt, Artificial Sequence
  Description of Artificial Sequence: Synthetic oligonucleotide
  modified_base (15)..(15): a, c, u, g, unknown or other
aguuaucacaccaanguuu

SEQ ID NO: 1091442 - RNA, 19 nt, Artificial Sequence
  Description of Artificial Sequence: Synthetic oligonucleotide
ugcauaacagucagcuguc

SEQ ID NO: 1091443 - RNA, 19 nt, Artificial Sequence
  Description of Artificial Sequence: Synthetic oligonucleotide
uugaauccagaagaugcca

SEQ ID NO: 1091444 - RNA, 19 nt, Artificial Sequence
  Description of Artificial Sequence: Synthetic oligonucleotide
aagugaaagucuacgaguu

SEQ ID NO: 1091445 - RNA, 19 nt, Artificial Sequence
  Description of Artificial Sequence: Synthetic oligonucleotide
  modified_base (14)..(14): a, c, u, g, unknown or other
guuaucacaccaanguuua

SEQ ID NO: 1091446 - RNA, 19 nt, Artificial Sequence
  Description of Artificial Sequence: Synthetic oligonucleotide
ucaguacagauacuagguu

SEQ ID NO: 1091447 - RNA, 19 nt, Artificial Sequence
  Description of Artificial Sequence: Synthetic oligonucleotide
ucuccugaucuuaaacaaa

SEQ ID NO: 1091448 - RNA, 19 nt, Artificial Sequence
  Description of Artificial Sequence: Synthetic oligonucleotide
  modified_base (9)..(9): a, c, u, g, unknown or other
cacaccaanguuuacauau

SEQ ID NO: 1091449 - RNA, 19 nt, Artificial Sequence
  Description of Artificial Sequence: Synthetic oligonucleotide
auagucacuuauccugcug

SEQ ID NO: 1091450 - RNA, 19 nt, Artificial Sequence
  Description of Artificial Sequence: Synthetic oligonucleotide
ugugcauaacagucagcug

SEQ ID NO: 1091451 - RNA, 19 nt, Artificial Sequence
  Description of Artificial Sequence: Synthetic oligonucleotide
cagaaugagggucggcugc

SEQ ID NO: 1091452 - RNA, 19 nt, Artificial Sequence
  Description of Artificial Sequence: Synthetic oligonucleotide
acguucacaaguuccgaca

SEQ ID NO: 1091453 - RNA, 19 nt, Artificial Sequence
  Description of Artificial Sequence: Synthetic oligonucleotide
uuuguuacacggagggcua

SEQ ID NO: 1091454 - RNA, 19 nt, Artificial Sequence
  Description of Artificial Sequence: Synthetic oligonucleotide
aagaccuuucagcaccaaa

SEQ ID NO: 1091455 - RNA, 19 nt, Artificial Sequence
  Description of Artificial Sequence: Synthetic oligonucleotide
auuaaggacuuuuggcuuu

SEQ ID NO: 1091456 - RNA, 19 nt, Artificial Sequence
  Description of Artificial Sequence: Synthetic oligonucleotide
uagcacacaagguuucagu

SEQ ID NO: 1091457 - RNA, 19 nt, Artificial Sequence
  Description of Artificial Sequence: Synthetic oligonucleotide
uccgacauagucacuuauc

SEQ ID NO: 1091458 - RNA, 19 nt, Artificial Sequence
  Description of Artificial Sequence: Synthetic oligonucleotide
gaauccagaagaugccauc

SEQ ID NO: 1091459 - RNA, 19 nt, Artificial Sequence
  Description of Artificial Sequence: Synthetic oligonucleotide
auaaaucaagggucacugu

SEQ ID NO: 1091460 - RNA, 19 nt, Artificial Sequence
  Description of Artificial Sequence: Synthetic oligonucleotide
aguuagaugcuaaacgaaa

SEQ ID NO: 1091461 - RNA, 19 nt, Artificial Sequence
  Description of Artificial Sequence: Synthetic oligonucleotide
gcuuacuaagugauuauag

SEQ ID NO: 1091462 - RNA, 19 nt, Artificial Sequence
  Description of Artificial Sequence: Synthetic oligonucleotide
agacuugugggcguaccac

SEQ ID NO: 1091463 - RNA, 19 nt, Artificial Sequence
  Description of Artificial Sequence: Synthetic oligonucleotide
gaagugcccaggaagcacc

SEQ ID NO: 1091464 - RNA, 19 nt, Artificial Sequence
  Description of Artificial Sequence: Synthetic oligonucleotide
gacguucacaaguuccgac

SEQ ID NO: 1091465 - RNA, 19 nt, Artificial Sequence
  Description of Artificial Sequence: Synthetic oligonucleotide
cuagaauuuguuacacgga

SEQ ID NO: 1091466 - RNA, 19 nt, Artificial Sequence
  Description of Artificial Sequence: Synthetic oligonucleotide
cucaguacugugucaucag

SEQ ID NO: 1091467 - RNA, 19 nt, Artificial Sequence
  Description of Artificial Sequence: Synthetic oligonucleotide
accuguguucaguuacuag

SEQ ID NO: 1091468 - RNA, 19 nt, Artificial Sequence
  Description of Artificial Sequence: Synthetic oligonucleotide
aguucauuauuagcaauau

SEQ ID NO: 1091469 - RNA, 19 nt, Artificial Sequence
  Description of Artificial Sequence: Synthetic oligonucleotide
acuuauccugcuguacggg

SEQ ID NO: 1091470 - RNA, 19 nt, Artificial Sequence
  Description of Artificial Sequence: Synthetic oligonucleotide
uuugugcaugucacauuca

SEQ ID NO: 1091471 - RNA, 19 nt, Artificial Sequence
  Description of Artificial Sequence: Synthetic oligonucleotide
acgaguucauuauuagcaa

SEQ ID NO: 1091472 - RNA, 19 nt, Artificial Sequence
  Description of Artificial Sequence: Synthetic oligonucleotide
cuaaacuugcaagagaccu

SEQ ID NO: 1091473 - RNA, 19 nt, Artificial Sequence
  Description of Artificial Sequence: Synthetic oligonucleotide
acugucagggugaaaauau

SEQ ID NO: 1091474 - RNA, 19 nt, Artificial Sequence
  Description of Artificial Sequence: Synthetic oligonucleotide
uguguccacuaacucuaug

SEQ ID NO: 1091475 - RNA, 19 nt, Artificial Sequence
  Description of Artificial Sequence: Synthetic oligonucleotide
agucaaucagcgauccauc

SEQ ID NO: 1091476 - RNA, 19 nt, Artificial Sequence
  Description of Artificial Sequence: Synthetic oligonucleotide
uucaguuacuagcuuuguu

SEQ ID NO: 1091477 - RNA, 19 nt, Artificial Sequence
  Description of Artificial Sequence: Synthetic oligonucleotide
gggcguaccacucaagcgc

SEQ ID NO: 1091478 - RNA, 19 nt, Artificial Sequence
  Description of Artificial Sequence: Synthetic oligonucleotide
  modified_base (13)..(13): a, c, u, g, unknown or other
uuaucacaccaanguuuac

SEQ ID NO: 1091479 - RNA, 19 nt, Artificial Sequence
  Description of Artificial Sequence: Synthetic oligonucleotide
acaacacaagggaacuggg

SEQ ID NO: 1091480 - RNA, 19 nt, Artificial Sequence
  Description of Artificial Sequence: Synthetic oligonucleotide
gugggcguaccacucaagc

SEQ ID NO: 1091481 - RNA, 19 nt, Artificial Sequence
  Description of Artificial Sequence: Synthetic oligonucleotide
acgucuugcucggagccgc

SEQ ID NO: 1091482 - RNA, 19 nt, Artificial Sequence
  Description of Artificial Sequence: Synthetic oligonucleotide
agguugauuacauccccau

SEQ ID NO: 1091483 - RNA, 19 nt, Artificial Sequence
  Description of Artificial Sequence: Synthetic oligonucleotide
uacgggagccagucaauca

SEQ ID NO: 1091484 - RNA, 19 nt, Artificial Sequence
  Description of Artificial Sequence: Synthetic oligonucleotide
ugucugucgccaagguuga

SEQ ID NO: 1091485 - RNA, 19 nt, Artificial Sequence
  Description of Artificial Sequence: Synthetic oligonucleotide
augcucacuaguuaccguu

SEQ ID NO: 1091486 - RNA, 19 nt, Artificial Sequence
  Description of Artificial Sequence: Synthetic oligonucleotide
aguuccgacauagucacuu

SEQ ID NO: 1091487 - RNA, 19 nt, Artificial Sequence
  Description of Artificial Sequence: Synthetic oligonucleotide
ucuugcucggagccgcgca

SEQ ID NO: 1091488 - RNA, 19 nt, Artificial Sequence
  Description of Artificial Sequence: Synthetic oligonucleotide
gauuugauauuguuugauu

SEQ ID NO: 1091489 - RNA, 19 nt, Artificial Sequence
  Description of Artificial Sequence: Synthetic oligonucleotide
cacggagggcuaaacuugc

SEQ ID NO: 1091490 - RNA, 19 nt, Artificial Sequence
  Description of Artificial Sequence: Synthetic oligonucleotide
guuagaugcuaaacgaaaa

SEQ ID NO: 1091491 - RNA, 19 nt, Artificial Sequence
  Description of Artificial Sequence: Synthetic oligonucleotide
auguaagcaaauacugccu

SEQ ID NO: 1091492 - RNA, 19 nt, Artificial Sequence
  Description of Artificial Sequence: Synthetic oligonucleotide
ugaagugcccaggaagcac

SEQ ID NO: 1091493 - RNA, 19 nt, Artificial Sequence
  Description of Artificial Sequence: Synthetic oligonucleotide
acacaagggaacuggguua

SEQ ID NO: 1091494 - RNA, 19 nt, Artificial Sequence
  Description of Artificial Sequence: Synthetic oligonucleotide
  modified_base (10)..(10): a, c, u, g, unknown or other
ucacaccaanguuuacaua

SEQ ID NO: 1091495 - RNA, 19 nt, Artificial Sequence
  Description of Artificial Sequence: Synthetic oligonucleotide
gcauauuccagcuuuugaa

SEQ ID NO: 1091496 - RNA, 19 nt, Artificial Sequence
  Description of Artificial Sequence: Synthetic oligonucleotide
uuuguuccuaguccauguu

SEQ ID NO: 1091497 - RNA, 19 nt, Artificial Sequence
  Description of Artificial Sequence: Synthetic oligonucleotide
  modified_base (6)..(6): a, c, u, g, unknown or other
accaanguuuacauauacu

SEQ ID NO: 1091498 - RNA, 19 nt, Artificial Sequence
  Description of Artificial Sequence: Synthetic oligonucleotide
uguguucaguuacuagcuu

SEQ ID NO: 1091499 - RNA, 19 nt, Artificial Sequence
  Description of Artificial Sequence: Synthetic oligonucleotide
  modified_base (2)..(2): a, c, u, g, unknown or other
anguuuacauauacuuauu

SEQ ID NO: 1091500 - RNA, 19 nt, Artificial Sequence
  Description of Artificial Sequence: Synthetic oligonucleotide
aaucagcgauccaucauau

SEQ ID NO: 1091501 - RNA, 19 nt, Artificial Sequence
  Description of Artificial Sequence: Synthetic oligonucleotide
cuacaucagcauagcacac

SEQ ID NO: 1091502 - RNA, 19 nt, Artificial Sequence
  Description of Artificial Sequence: Synthetic oligonucleotide
aguuaccguuuuaaacaac

SEQ ID NO: 1091503 - RNA, 19 nt, Artificial Sequence
  Description of Artificial Sequence: Synthetic oligonucleotide
agcaccaaagguaauugaa

SEQ ID NO: 1091504 - RNA, 19 nt, Artificial Sequence
  Description of Artificial Sequence: Synthetic oligonucleotide
uuccgacauagucacuuau

SEQ ID NO: 1091505 - RNA, 19 nt, Artificial Sequence
  Description of Artificial Sequence: Synthetic oligonucleotide
ucgccaagguugauuacau

SEQ ID NO: 1091506 - RNA, 19 nt, Artificial Sequence
  Description of Artificial Sequence: Synthetic oligonucleotide
ugugggcguaccacucaag

SEQ ID NO: 1091507 - RNA, 19 nt, Artificial Sequence
  Description of Artificial Sequence: Synthetic oligonucleotide
ugcacugccugcacucgga

SEQ ID NO: 1091508 - RNA, 19 nt, Artificial Sequence
  Description of Artificial Sequence: Synthetic oligonucleotide
uccugaucuuaaacaaaua

SEQ ID NO: 1091509 - RNA, 19 nt, Artificial Sequence
  Description of Artificial Sequence: Synthetic oligonucleotide
caacuuugaguuacauuca

SEQ ID NO: 1091510 - RNA, 19 nt, Artificial Sequence
  Description of Artificial Sequence: Synthetic oligonucleotide
gaagcgcucuugaauccag

SEQ ID NO: 1091511 - RNA, 19 nt, Artificial Sequence
  Description of Artificial Sequence: Synthetic oligonucleotide
caaucagcgauccaucaua

SEQ ID NO: 1091512 - RNA, 19 nt, Artificial Sequence
  Description of Artificial Sequence: Synthetic oligonucleotide
uaaggcuuacuaagugauu

SEQ ID NO: 1091513 - RNA, 19 nt, Artificial Sequence
  Description of Artificial Sequence: Synthetic oligonucleotide
agcauagcacacaagguuu

SEQ ID NO: 1091514 - RNA, 19 nt, Artificial Sequence
  Description of Artificial Sequence: Synthetic oligonucleotide
guccacuaacucuaugaga

SEQ ID NO: 1091515 - RNA, 19 nt, Artificial Sequence
  Description of Artificial Sequence: Synthetic oligonucleotide
cuuauccugcuguacggga

SEQ ID NO: 1091516 - RNA, 19 nt, Artificial Sequence
  Description of Artificial Sequence: Synthetic oligonucleotide
acacggagggcuaaacuug

SEQ ID NO: 1091517 - RNA, 19 nt, Artificial Sequence
  Description of Artificial Sequence: Synthetic oligonucleotide
uaccacucaagcgcggaca

SEQ ID NO: 1091518 - RNA, 19 nt, Artificial Sequence
  Description of Artificial Sequence: Synthetic oligonucleotide
agaccuguguccacuaacu

SEQ ID NO: 1091519 - RNA, 19 nt, Artificial Sequence
  Description of Artificial Sequence: Synthetic oligonucleotide
uguacgggagccagucaau

SEQ ID NO: 1091520 - RNA, 19 nt, Artificial Sequence
  Description of Artificial Sequence: Synthetic oligonucleotide
gagacuugugggcguacca

SEQ ID NO: 1091521 - RNA, 19 nt, Artificial Sequence
  Description of Artificial Sequence: Synthetic oligonucleotide
agggaacuggguuaaucua

SEQ ID NO: 1091522 - RNA, 19 nt, Artificial Sequence
  Description of Artificial Sequence: Synthetic oligonucleotide
ugacucguagaagcgcucu

SEQ ID NO: 1091523 - RNA, 19 nt, Artificial Sequence
  Description of Artificial Sequence: Synthetic oligonucleotide
uuccuaguccauguuguau

SEQ ID NO: 1091524 - RNA, 19 nt, Artificial Sequence
  Description of Artificial Sequence: Synthetic oligonucleotide
cagauacuagguugagguc

SEQ ID NO: 1091525 - RNA, 19 nt, Artificial Sequence
  Description of Artificial Sequence: Synthetic oligonucleotide
gagguccuagaauuuguua

SEQ ID NO: 1091526 - RNA, 19 nt, Artificial Sequence
  Description of Artificial Sequence: Synthetic oligonucleotide
cucggagccgcgcaccagc

SEQ ID NO: 1091527 - RNA, 19 nt, Artificial Sequence
  Description of Artificial Sequence: Synthetic oligonucleotide
aggcuuacuaagugauuau

SEQ ID NO: 1091528 - RNA, 19 nt, Artificial Sequence
  Description of Artificial Sequence: Synthetic oligonucleotide
ugcucacuaguuaccguuu

SEQ ID NO: 1091529 - RNA, 19 nt, Artificial Sequence
  Description of Artificial Sequence: Synthetic oligonucleotide
ugcuguacgggagccaguc

SEQ ID NO: 1091530 - RNA, 19 nt, Artificial Sequence
  Description of Artificial Sequence: Synthetic oligonucleotide
gaccuguguccacuaacuc

SEQ ID NO: 1091531 - RNA, 19 nt, Artificial Sequence
  Description of Artificial Sequence: Synthetic oligonucleotide
ucguagaagcgcucuugaa

SEQ ID NO: 1091532 - RNA, 19 nt, Artificial Sequence
  Description of Artificial Sequence: Synthetic oligonucleotide
cuuuguuccuaguccaugu

SEQ ID NO: 1091533 - RNA, 19 nt, Artificial Sequence
  Description of Artificial Sequence: Synthetic oligonucleotide
gucgccaagguugauuaca

SEQ ID NO: 1091534 - RNA, 19 nt, Artificial Sequence
  Description of Artificial Sequence: Synthetic oligonucleotide
cauguuguauacugaaaau

SEQ ID NO: 1091535 - RNA, 19 nt, Artificial Sequence
  Description of Artificial Sequence: Synthetic oligonucleotide
ucugucgccaagguugauu

SEQ ID NO: 1091536 - RNA, 19 nt, Artificial Sequence
  Description of Artificial Sequence: Synthetic oligonucleotide
cuccugaucuuaaacaaau

SEQ ID NO: 1091537 - RNA, 19 nt, Artificial Sequence
  Description of Artificial Sequence: Synthetic oligonucleotide
gucacuuauccugcuguac

SEQ ID NO: 1091538 - RNA, 19 nt, Artificial Sequence
  Description of Artificial Sequence: Synthetic oligonucleotide
ugacaacuuugaguuacau

SEQ ID NO: 1091539 - RNA, 19 nt, Artificial Sequence
  Description of Artificial Sequence: Synthetic oligonucleotide
agucuacgaguucauuauu

SEQ ID NO: 1091540 - RNA, 19 nt, Artificial Sequence
  Description of Artificial Sequence: Synthetic oligonucleotide
ccggucuuugucauguaag

SEQ ID NO: 1091541 - RNA, 19 nt, Artificial Sequence
  Description of Artificial Sequence: Synthetic oligonucleotide
agucacuuauccugcugua

SEQ ID NO: 1091542 - RNA, 19 nt, Artificial Sequence
  Description of Artificial Sequence: Synthetic oligonucleotide
gggaacuggguuaaucuac

SEQ ID NO: 1091543 - RNA, 19 nt, Artificial Sequence
  Description of Artificial Sequence: Synthetic oligonucleotide
accacucaagcgcggacau

SEQ ID NO: 1091544 - RNA, 19 nt, Artificial Sequence
  Description of Artificial Sequence: Synthetic oligonucleotide
ggagccgcgcaccagccag

SEQ ID NO: 1091545 - RNA, 19 nt, Artificial Sequence
  Description of Artificial Sequence: Synthetic oligonucleotide
guuacacggagggcuaaac

SEQ ID NO: 1091546 - RNA, 19 nt, Artificial Sequence
  Description of Artificial Sequence: Synthetic oligonucleotide
gacaacuuugaguuacauu

SEQ ID NO: 1091547 - RNA, 19 nt, Artificial Sequence
  Description of Artificial Sequence: Synthetic oligonucleotide
auaugacauguuggaaagu

SEQ ID NO: 1091548 - RNA, 19 nt, Artificial Sequence
  Description of Artificial Sequence: Synthetic oligonucleotide
cuguacgggagccagucaa

SEQ ID NO: 1091549 - RNA, 19 nt, Artificial Sequence
  Description of Artificial Sequence: Synthetic oligonucleotide
gauacuagguugagguccu

SEQ ID NO: 1091550 - RNA, 19 nt, Artificial Sequence
  Description of Artificial Sequence: Synthetic oligonucleotide
agaaugagggucggcugca

SEQ ID NO: 1091551 - RNA, 19 nt, Artificial Sequence
  Description of Artificial Sequence: Synthetic oligonucleotide
cugucgccaagguugauua

SEQ ID NO: 1091552 - RNA, 19 nt, Artificial Sequence
  Description of Artificial Sequence: Synthetic oligonucleotide
uuucagcaccaaagguaau

SEQ ID NO: 1091553 - RNA, 19 nt, Artificial Sequence
  Description of Artificial Sequence: Synthetic oligonucleotide
caccacgucuugcucggag

SEQ ID NO: 1091554 - RNA, 19 nt, Artificial Sequence
  Description of Artificial Sequence: Synthetic oligonucleotide
gucuacgaguucauuauua

SEQ ID NO: 1091555 - RNA, 19 nt, Artificial Sequence
  Description of Artificial Sequence: Synthetic oligonucleotide
cacuaguuaccguuuuaaa

SEQ ID NO: 1091556 - RNA, 19 nt, Artificial Sequence
  Description of Artificial Sequence: Synthetic oligonucleotide
ucggagccgcgcaccagcc

SEQ ID NO: 1091557 - RNA, 19 nt, Artificial Sequence
  Description of Artificial Sequence: Synthetic oligonucleotide
gacuugugggcguaccacu

SEQ ID NO: 1091558 - RNA, 19 nt, Artificial Sequence
  Description of Artificial Sequence: Synthetic oligonucleotide
uacuagcuuuguuccuagu

SEQ ID NO: 1091559 - RNA, 19 nt, Artificial Sequence
  Description of Artificial Sequence: Synthetic oligonucleotide
ucgcugucagggccggcgc

SEQ ID NO: 1091560 - RNA, 19 nt, Artificial Sequence
  Description of Artificial Sequence: Synthetic oligonucleotide
uguuacacggagggcuaaa

SEQ ID NO: 1091561 - RNA, 19 nt, Artificial Sequence
  Description of Artificial Sequence: Synthetic oligonucleotide
gguugauuacauccccauc

SEQ ID NO: 1091562 - RNA, 19 nt, Artificial Sequence
  Description of Artificial Sequence: Synthetic oligonucleotide
gcgcucuugaauccagaag

SEQ ID NO: 1091563 - RNA, 19 nt, Artificial Sequence
  Description of Artificial Sequence: Synthetic oligonucleotide
agacguucacaaguuccga

SEQ ID NO: 1091564 - RNA, 19 nt, Artificial Sequence
  Description of Artificial Sequence: Synthetic oligonucleotide
cacaguuugguagcaggca

SEQ ID NO: 1091565 - RNA, 19 nt, Artificial Sequence
  Description of Artificial Sequence: Synthetic oligonucleotide
ugucgccaagguugauuac

SEQ ID NO: 1091566 - RNA, 19 nt, Artificial Sequence
  Description of Artificial Sequence: Synthetic oligonucleotide
ggcguaccacucaagcgcg

SEQ ID NO: 1091567 - RNA, 19 nt, Artificial Sequence
  Description of Artificial Sequence: Synthetic oligonucleotide
ggcgcgguugccugacucg

SEQ ID NO: 1091568 - RNA, 19 nt, Artificial Sequence
  Description of Artificial Sequence: Synthetic oligonucleotide
augccuacucucuccugau

SEQ ID NO: 1091569 - RNA, 19 nt, Artificial Sequence
  Description of Artificial Sequence: Synthetic oligonucleotide
gcgguugccugacucguag

SEQ ID NO: 1091570 - RNA, 19 nt, Artificial Sequence
  Description of Artificial Sequence: Synthetic oligonucleotide
uggcgcgguugccugacuc

SEQ ID NO: 1091571 - RNA, 19 nt, Artificial Sequence
  Description of Artificial Sequence: Synthetic oligonucleotide
uguuggcgcgguugccuga

SEQ ID NO: 1091572 - RNA, 19 nt, Artificial Sequence
  Description of Artificial Sequence: Synthetic oligonucleotide
cugacucguagaagcgcuc

SEQ ID NO: 1091573 - RNA, 19 nt, Artificial Sequence
  Description of Artificial Sequence: Synthetic oligonucleotide
cacuaacucuaugagacgu

SEQ ID NO: 1091574 - RNA, 19 nt, Artificial Sequence
  Description of Artificial Sequence: Synthetic oligonucleotide
cacgucuugcucggagccg

SEQ ID NO: 1091575 - RNA, 19 nt, Artificial Sequence
  Description of Artificial Sequence: Synthetic oligonucleotide
cagcaccaaagguaauuga

SEQ ID NO: 1091576 - RNA, 19 nt, Artificial Sequence
  Description of Artificial Sequence: Synthetic oligonucleotide
gauguuggcgcgguugccu

SEQ ID NO: 1091577 - RNA, 19 nt, Artificial Sequence
  Description of Artificial Sequence: Synthetic oligonucleotide
ggaacuggguuaaucuaca

SEQ ID NO: 1091578 - RNA, 19 nt, Artificial Sequence
  Description of Artificial Sequence: Synthetic oligonucleotide
cucauggcaaaaguagaua

SEQ ID NO: 1091579 - RNA, 19 nt, Artificial Sequence
  Description of Artificial Sequence: Synthetic oligonucleotide
cagcauagcacacaagguu

SEQ ID NO: 1091580 - RNA, 19 nt, Artificial Sequence
  Description of Artificial Sequence: Synthetic oligonucleotide
gggcuaaacuugcaagaga

SEQ ID NO: 1091581 - RNA, 19 nt, Artificial Sequence
  Description of Artificial Sequence: Synthetic oligonucleotide
caguuugguagcaggcaaa

SEQ ID NO: 1091582 - RNA, 19 nt, Artificial Sequence
  Description of Artificial Sequence: Synthetic oligonucleotide
acuaacucuaugagacguu

SEQ ID NO: 1091583 - RNA, 19 nt, Artificial Sequence
  Description of Artificial Sequence: Synthetic oligonucleotide
gcuauuaggauuugauauu

SEQ ID NO: 1091584 - RNA, 19 nt, Artificial Sequence
  Description of Artificial Sequence: Synthetic oligonucleotide
ugccaucgcccagagacuu

SEQ ID NO: 1091585 - RNA, 19 nt, Artificial Sequence
  Description of Artificial Sequence: Synthetic oligonucleotide
ugcggccgggagagguggg

SEQ ID NO: 1091586 - RNA, 19 nt, Artificial Sequence
  Description of Artificial Sequence: Synthetic oligonucleotide
uggagugaccuggcaugug

SEQ ID NO: 1091587 - RNA, 19 nt, Artificial Sequence
  Description of Artificial Sequence: Synthetic oligonucleotide
aagcgcucuugaauccaga

SEQ ID NO: 1091588 - RNA, 19 nt, Artificial Sequence
  Description of Artificial Sequence: Synthetic oligonucleotide
cacucggaacugccuggcc

SEQ ID NO: 1091589 - RNA, 19 nt, Artificial Sequence
  Description of Artificial Sequence: Synthetic oligonucleotide
uugcucggagccgcgcacc

SEQ ID NO: 1091590 - RNA, 19 nt, Artificial Sequence
  Description of Artificial Sequence: Synthetic oligonucleotide
uuguuacacggagggcuaa

SEQ ID NO: 1091591 - RNA, 19 nt, Artificial Sequence
  Description of Artificial Sequence: Synthetic oligonucleotide
aucagcgauccaucauaua

SEQ ID NO: 1091592 - RNA, 19 nt, Artificial Sequence
  Description of Artificial Sequence: Synthetic oligonucleotide
caacacaagggaacugggu

SEQ ID NO: 1091593 - RNA, 19 nt, Artificial Sequence
  Description of Artificial Sequence: Synthetic oligonucleotide
  modified_base (8)..(8): a, c, u, g, unknown or other
acaccaanguuuacauaua

SEQ ID NO: 1091594 - RNA, 19 nt, Artificial Sequence
  Description of Artificial Sequence: Synthetic oligonucleotide
cugcaagaggccggaggag

SEQ ID NO: 1091595 - RNA, 19 nt, Artificial Sequence
  Description of Artificial Sequence: Synthetic oligonucleotide
cacaagggaacuggguuaa

SEQ ID NO: 1091596 - RNA, 19 nt, Artificial Sequence
  Description of Artificial Sequence: Synthetic oligonucleotide
guuccgacauagucacuua

SEQ ID NO: 1091597 - RNA, 19 nt, Artificial Sequence
  Description of Artificial Sequence: Synthetic oligonucleotide
gccuacucucuccugaucu

SEQ ID NO: 1091598 - RNA, 19 nt, Artificial Sequence
  Description of Artificial Sequence: Synthetic oligonucleotide
ccaccucgcugucagggcc

SEQ ID NO: 1091599 - RNA, 19 nt, Artificial Sequence
  Description of Artificial Sequence: Synthetic oligonucleotide
cuccuuagcccgcaguccu

SEQ ID NO: 1091600 - RNA, 19 nt, Artificial Sequence
  Description of Artificial Sequence: Synthetic oligonucleotide
cuggguuaaucuacacagu

SEQ ID NO: 1091601 - RNA, 19 nt, Artificial Sequence
  Description of Artificial Sequence: Synthetic oligonucleotide
cucggaacugccuggcccu

SEQ ID NO: 1091602 - RNA, 19 nt, Artificial Sequence
  Description of Artificial Sequence: Synthetic oligonucleotide
guuggcgcgguugccugac

SEQ ID NO: 1091603 - RNA, 19 nt, Artificial Sequence
  Description of Artificial Sequence: Synthetic oligonucleotide
ggguuaaucuacacaguua

SEQ ID NO: 1091604 - RNA, 19 nt, Artificial Sequence
  Description of Artificial Sequence: Synthetic oligonucleotide
ggagccagucaaucagcga

SEQ ID NO: 1091605 - RNA, 19 nt, Artificial Sequence
  Description of Artificial Sequence: Synthetic oligonucleotide
aaguuccgacauagucacu

SEQ ID NO: 1091606 - RNA, 19 nt, Artificial Sequence
  Description of Artificial Sequence: Synthetic oligonucleotide
agccagauguuggcgcggu

SEQ ID NO: 1091607 - RNA, 19 nt, Artificial Sequence
  Description of Artificial Sequence: Synthetic oligonucleotide
uaaggacuuuuggcuuuau

SEQ ID NO: 1091608 - RNA, 19 nt, Artificial Sequence
  Description of Artificial Sequence: Synthetic oligonucleotide
caucgcccagagacuugug

SEQ ID NO: 1091609 - RNA, 19 nt, Artificial Sequence
  Description of Artificial Sequence: Synthetic oligonucleotide
cugcagaaugagggucggc

SEQ ID NO: 1091610 - RNA, 19 nt, Artificial Sequence
  Description of Artificial Sequence: Synthetic oligonucleotide
gccugacucguagaagcgc

SEQ ID NO: 1091611 - RNA, 19 nt, Artificial Sequence
  Description of Artificial Sequence: Synthetic oligonucleotide
gcuauauuuaaggcuuacu

SEQ ID NO: 1091612 - RNA, 19 nt, Artificial Sequence
  Description of Artificial Sequence: Synthetic oligonucleotide
ggcuuacuaagugauuaua

SEQ ID NO: 1091613 - RNA, 19 nt, Artificial Sequence
  Description of Artificial Sequence: Synthetic oligonucleotide
augccaucgcccagagacu

SEQ ID NO: 1091614 - RNA, 19 nt, Artificial Sequence
  Description of Artificial Sequence: Synthetic oligonucleotide
cacaagaccuguguccacu

SEQ ID NO: 1091615 - RNA, 19 nt, Artificial Sequence
  Description of Artificial Sequence: Synthetic oligonucleotide
ccuccuuagcccgcagucc

SEQ ID NO: 1091616 - RNA, 19 nt, Artificial Sequence
  Description of Artificial Sequence: Synthetic oligonucleotide
cuuagcccgcaguccugca

SEQ ID NO: 1091617 - RNA, 19 nt, Artificial Sequence
  Description of Artificial Sequence: Synthetic oligonucleotide
ggucaauucuauagauugu

SEQ ID NO: 1091618 - RNA, 19 nt, Artificial Sequence
  Description of Artificial Sequence: Synthetic oligonucleotide
gcaaaccuguguucaguua

SEQ ID NO: 1091619 - RNA, 19 nt, Artificial Sequence
  Description of Artificial Sequence: Synthetic oligonucleotide
uuggcgcgguugccugacu

SEQ ID NO: 1091620 - RNA, 19 nt, Artificial Sequence
  Description of Artificial Sequence: Synthetic oligonucleotide
cagagacuugugggcguac

SEQ ID NO: 1091621 - RNA, 19 nt, Artificial Sequence
  Description of Artificial Sequence: Synthetic oligonucleotide
uuccggucuuugucaugua

SEQ ID NO: 1091622 - RNA, 19 nt, Artificial Sequence
  Description of Artificial Sequence: Synthetic oligonucleotide
gaccuggcaugugcauaac

SEQ ID NO: 1091623 - RNA, 19 nt, Artificial Sequence
  Description of Artificial Sequence: Synthetic oligonucleotide
acucaagcgcggacaugcu

SEQ ID NO: 1091624 - RNA, 19 nt, Artificial Sequence
  Description of Artificial Sequence: Synthetic oligonucleotide
gugugccucccaggggcag

SEQ ID NO: 1091625 - RNA, 19 nt, Artificial Sequence
  Description of Artificial Sequence: Synthetic oligonucleotide
gacucguagaagcgcucuu

SEQ ID NO: 1091626 - RNA, 19 nt, Artificial Sequence
  Description of Artificial Sequence: Synthetic oligonucleotide
gcacucggaacugccuggc

SEQ ID NO: 1091627 - RNA, 19 nt, Artificial Sequence
  Description of Artificial Sequence: Synthetic oligonucleotide
ucgcaccaccucgcuguca

SEQ ID NO: 1091628 - RNA, 19 nt, Artificial Sequence
  Description of Artificial Sequence: Synthetic oligonucleotide
cguagaagcgcucuugaau

SEQ ID NO: 1091629 - RNA, 19 nt, Artificial Sequence
  Description of Artificial Sequence: Synthetic oligonucleotide
gcuguacgggagccaguca

SEQ ID NO: 1091630 - RNA, 19 nt, Artificial Sequence
  Description of Artificial Sequence: Synthetic oligonucleotide
ggugcggccgggagaggug

SEQ ID NO: 1091631 - RNA, 19 nt, Artificial Sequence
  Description of Artificial Sequence: Synthetic oligonucleotide
gcgauccaucauauaccac

SEQ ID NO: 1091632 - RNA, 19 nt, Artificial Sequence
  Description of Artificial Sequence: Synthetic oligonucleotide
gcguaccacucaagcgcgg

SEQ ID NO: 1091633 - RNA, 19 nt, Artificial Sequence
  Description of Artificial Sequence: Synthetic oligonucleotide
agccgcgcaccagccagau

SEQ ID NO: 1091634 - RNA, 19 nt, Artificial Sequence
  Description of Artificial Sequence: Synthetic oligonucleotide
auacuagguugagguccua

SEQ ID NO: 1091635 - RNA, 19 nt, Artificial Sequence
  Description of Artificial Sequence: Synthetic oligonucleotide
gagccgcgcaccagccaga

SEQ ID NO: 1091636 - RNA, 19 nt, Artificial Sequence
  Description of Artificial Sequence: Synthetic oligonucleotide
gccgggagaggugggugug

SEQ ID NO: 1091637 - RNA, 19 nt, Artificial Sequence
  Description of Artificial Sequence: Synthetic oligonucleotide
cgucuugcucggagccgcg

SEQ ID NO: 1091638 - RNA, 19 nt, Artificial Sequence
  Description of Artificial Sequence: Synthetic oligonucleotide
gccaucgcccagagacuug

SEQ ID NO: 1091639 - RNA, 19 nt, Artificial Sequence
  Description of Artificial Sequence: Synthetic oligonucleotide
gcucacuaguuaccguuuu

SEQ ID NO: 1091640 - RNA, 19 nt, Artificial Sequence
  Description of Artificial Sequence: Synthetic oligonucleotide
cuguguccacuaacucuau

SEQ ID NO: 1091641 - RNA, 19 nt, Artificial Sequence
  Description of Artificial Sequence: Synthetic oligonucleotide
gcauaacagucagcugucu

SEQ ID NO: 1091642 - RNA, 19 nt, Artificial Sequence
  Description of Artificial Sequence: Synthetic oligonucleotide
cgcccggcauccuccuuag

SEQ ID NO: 1091643 - RNA, 19 nt, Artificial Sequence
  Description of Artificial Sequence: Synthetic oligonucleotide
cguucacaaguuccgacau

SEQ ID NO: 1091644 - RNA, 19 nt, Artificial Sequence
  Description of Artificial Sequence: Synthetic oligonucleotide
ccacucaagcgcggacaug

SEQ ID NO: 1091645 - RNA, 19 nt, Artificial Sequence
  Description of Artificial Sequence: Synthetic oligonucleotide
gccgcgcaccagccagaug

SEQ ID NO: 1091646 - RNA, 19 nt, Artificial Sequence
  Description of Artificial Sequence: Synthetic oligonucleotide
ccaucgcccagagacuugu

SEQ ID NO: 1091647 - RNA, 19 nt, Artificial Sequence
  Description of Artificial Sequence: Synthetic oligonucleotide
gcccggcauccuccuuagc

SEQ ID NO: 1091648 - RNA, 19 nt, Artificial Sequence
  Description of Artificial Sequence: Synthetic oligonucleotide
ccgugucgaucaccacguc

SEQ ID NO: 1091649 - RNA, 19 nt, Artificial Sequence
  Description of Artificial Sequence: Synthetic oligonucleotide
gcgcgguugccugacucgu

SEQ ID NO: 1091650 - RNA, 19 nt, Artificial Sequence
  Description of Artificial Sequence: Synthetic oligonucleotide
cgguugccugacucguaga

SEQ ID NO: 1091651 - RNA, 19 nt, Artificial Sequence
  Description of Artificial Sequence: Synthetic oligonucleotide
cgcggacaugcugcugcgc

SEQ ID NO: 1091652 - RNA, 19 nt, Artificial Sequence
  Description of Artificial Sequence: Synthetic oligonucleotide
ccggaggaguagagguacu

SEQ ID NO: 1091653 - RNA, 19 nt, Artificial Sequence
  Description of Artificial Sequence: Synthetic oligonucleotide
gucugucgccaagguugau

SEQ ID NO: 1091654 - RNA, 19 nt, Artificial Sequence
  Description of Artificial Sequence: Synthetic oligonucleotide
gcggccgggagaggugggu

SEQ ID NO: 1091655 - RNA, 19 nt, Artificial Sequence
  Description of Artificial Sequence: Synthetic oligonucleotide
cgcgguugccugacucgua

SEQ ID NO: 1091656 - RNA, 19 nt, Artificial Sequence
  Description of Artificial Sequence: Synthetic oligonucleotide
acugcuagcagauacaguc

SEQ ID NO: 1091657 - RNA, 19 nt, Artificial Sequence
  Description of Artificial Sequence: Synthetic oligonucleotide
uuuauuacauagauuagca

SEQ ID NO: 1091658 - RNA, 19 nt, Artificial Sequence
  Description of Artificial Sequence: Synthetic oligonucleotide
aauuccaucaccucguuca

SEQ ID NO: 1091659 - RNA, 19 nt, Artificial Sequence
  Description of Artificial Sequence: Synthetic oligonucleotide
aacucguggacaaagaggc

SEQ ID NO: 1091660 - RNA, 19 nt, Artificial Sequence
  Description of Artificial Sequence: Synthetic oligonucleotide
uuuaauguguucuucgaag

SEQ ID NO: 1091661 - RNA, 19 nt, Artificial Sequence
  Description of Artificial Sequence: Synthetic oligonucleotide
agaaguauuaguguuggcc

SEQ ID NO: 1091662 - RNA, 19 nt, Artificial Sequence
  Description of Artificial Sequence: Synthetic oligonucleotide
aacaauagccacuguuugc

SEQ ID NO: 1091663 - RNA, 19 nt, Artificial Sequence
  Description of Artificial Sequence: Synthetic oligonucleotide
aggaacacgauuuuauuac

SEQ ID NO: 1091664 - RNA, 19 nt, Artificial Sequence
  Description of Artificial Sequence: Synthetic oligonucleotide
agcgugaaaacacaguuac

SEQ ID NO: 1091665 - RNA, 19 nt, Artificial Sequence
  Description of Artificial Sequence: Synthetic oligonucleotide
ugauuuaauguguucuucg

SEQ ID NO: 1091666 - RNA, 19 nt, Artificial Sequence
  Description of Artificial Sequence: Synthetic oligonucleotide
uguguuugauccaaggaag

SEQ ID NO: 1091667 - RNA, 19 nt, Artificial Sequence
  Description of Artificial Sequence: Synthetic oligonucleotide
aaguauuaguguuggcccc

SEQ ID NO: 1091668 - RNA, 19 nt, Artificial Sequence
  Description of Artificial Sequence: Synthetic oligonucleotide
gaaguauuaguguuggccc

SEQ ID NO: 1091669 - RNA, 19 nt, Artificial Sequence
  Description of Artificial Sequence: Synthetic oligonucleotide
aagaaauggccggauaccc

SEQ ID NO: 1091670 - RNA, 19 nt, Artificial Sequence
  Description of Artificial Sequence: Synthetic oligonucleotide
auuugcggcgucuucacgc

SEQ ID NO: 1091671 - RNA, 19 nt, Artificial Sequence
  Description of Artificial Sequence: Synthetic oligonucleotide
uguucuucgaaggagacug

SEQ ID NO: 1091672 - RNA, 19 nt, Artificial Sequence
  Description of Artificial Sequence: Synthetic oligonucleotide
acacgauuuuauuacauag

SEQ ID NO: 1091673 - RNA, 19 nt, Artificial Sequence
  Description of Artificial Sequence: Synthetic oligonucleotide
ugaaaggcuggucacggcg

SEQ ID NO: 1091674 - RNA, 19 nt, Artificial Sequence
  Description of Artificial Sequence: Synthetic oligonucleotide
guguauauugaucugagca

SEQ ID NO: 1091675 - RNA, 19 nt, Artificial Sequence
  Description of Artificial Sequence: Synthetic oligonucleotide
uuugugaaggagaacuuga

SEQ ID NO: 1091676 - RNA, 19 nt, Artificial Sequence
  Description of Artificial Sequence: Synthetic oligonucleotide
aaaacacaguuacggauug

SEQ ID NO: 1091677 - RNA, 19 nt, Artificial Sequence
  Description of Artificial Sequence: Synthetic oligonucleotide
agaccgaugguguauauug

SEQ ID NO: 1091678 - RNA, 19 nt, Artificial Sequence
  Description of Artificial Sequence: Synthetic oligonucleotide
uguuccgggagcucaaugg

SEQ ID NO: 1091679 - RNA, 19 nt, Artificial Sequence
  Description of Artificial Sequence: Synthetic oligonucleotide
uuauuacauagauuagcag

SEQ ID NO: 1091680 - RNA, 19 nt, Artificial Sequence
  Description of Artificial Sequence: Synthetic oligonucleotide
cacaguuacggauuguucc

SEQ ID NO: 1091681 - RNA, 19 nt, Artificial Sequence
  Description of Artificial Sequence: Synthetic oligonucleotide
uugaugacguucagcaggg

SEQ ID NO: 1091682 - RNA, 19 nt, Artificial Sequence
  Description of Artificial Sequence: Synthetic oligonucleotide
uucucaagcgugaaaacac

SEQ ID NO: 1091683 - RNA, 19 nt, Artificial Sequence
  Description of Artificial Sequence: Synthetic oligonucleotide
uguagaagaacucguggac

SEQ ID NO: 1091684 - RNA, 19 nt, Artificial Sequence
  Description of Artificial Sequence: Synthetic oligonucleotide
ucaucguucuuuucguagg

SEQ ID NO: 1091685 - RNA, 19 nt, Artificial Sequence
  Description of Artificial Sequence: Synthetic oligonucleotide
uuagcuucucaacaauagc

SEQ ID NO: 1091686 - RNA, 19 nt, Artificial Sequence
  Description of Artificial Sequence: Synthetic oligonucleotide
uguauauugaucugagcau

SEQ ID NO: 1091687 - RNA, 19 nt, Artificial Sequence
  Description of Artificial Sequence: Synthetic oligonucleotide
acaguuacggauuguuccg

SEQ ID NO: 1091688 - RNA, 19 nt, Artificial Sequence
  Description of Artificial Sequence: Synthetic oligonucleotide
aagaaguauuaguguuggc

SEQ ID NO: 1091689 - RNA, 19 nt, Artificial Sequence
  Description of Artificial Sequence: Synthetic oligonucleotide
agcuuacucagccugauca

SEQ ID NO: 1091690 - RNA, 19 nt, Artificial Sequence
  Description of Artificial Sequence: Synthetic oligonucleotide
acgauuuuauuacauagau

SEQ ID NO: 1091691 - RNA, 19 nt, Artificial Sequence
  Description of Artificial Sequence: Synthetic oligonucleotide
gaaggcgugggcuaauucc

SEQ ID NO: 1091692 - RNA, 19 nt, Artificial Sequence
  Description of Artificial Sequence: Synthetic oligonucleotide
ucaacaauagccacuguuu

SEQ ID NO: 1091693 - RNA, 19 nt, Artificial Sequence
  Description of Artificial Sequence: Synthetic oligonucleotide
guuaagaacgaugaugaug

SEQ ID NO: 1091694 - RNA, 19 nt, Artificial Sequence
  Description of Artificial Sequence: Synthetic oligonucleotide
ucagcaacgaggcaggcau

SEQ ID NO: 1091695 - RNA, 19 nt, Artificial Sequence
  Description of Artificial Sequence: Synthetic oligonucleotide
aaacucaccaggaacacga

SEQ ID NO: 1091696 - RNA, 19 nt, Artificial Sequence
  Description of Artificial Sequence: Synthetic oligonucleotide
uuacggauuguuccgggag

SEQ ID NO: 1091697 - RNA, 19 nt, Artificial Sequence
  Description of Artificial Sequence: Synthetic oligonucleotide
auagauuagcagcaccaag

SEQ ID NO: 1091698 - RNA, 19 nt, Artificial Sequence
  Description of Artificial Sequence: Synthetic oligonucleotide
uacauagauuagcagcacc

SEQ ID NO: 1091699 - RNA, 19 nt, Artificial Sequence
  Description of Artificial Sequence: Synthetic oligonucleotide
uauauugaucugagcauga

SEQ ID NO: 1091700 - RNA, 19 nt, Artificial Sequence
  Description of Artificial Sequence: Synthetic oligonucleotide
ugcagaucgcuacugcuag

SEQ ID NO: 1091701 - RNA, 19 nt, Artificial Sequence
  Description of Artificial Sequence: Synthetic oligonucleotide
ugaccgcucgauaaccucg

SEQ ID NO: 1091702 - RNA, 19 nt, Artificial Sequence
  Description of Artificial Sequence: Synthetic oligonucleotide
cacaaaacucaccaggaac

SEQ ID NO: 1091703 - RNA, 19 nt, Artificial Sequence
  Description of Artificial Sequence: Synthetic oligonucleotide
gaucacaccgaagaucagg

SEQ ID NO: 1091704 - RNA, 19 nt, Artificial Sequence
  Description of Artificial Sequence: Synthetic oligonucleotide
gacucaagagguuggauuc

SEQ ID NO: 1091705 - RNA, 19 nt, Artificial Sequence
  Description of Artificial Sequence: Synthetic oligonucleotide
uaauguguucuucgaagga

SEQ ID NO: 1091706 - RNA, 19 nt, Artificial Sequence
  Description of Artificial Sequence: Synthetic oligonucleotide
agguuaagaacgaugauga

SEQ ID NO: 1091707 - RNA, 19 nt, Artificial Sequence
  Description of Artificial Sequence: Synthetic oligonucleotide
gauuuaauguguucuucga

SEQ ID NO: 1091708 - RNA, 19 nt, Artificial Sequence
  Description of Artificial Sequence: Synthetic oligonucleotide
uugagaauuucuuccuucu

SEQ ID NO: 1091709 - RNA, 19 nt, Artificial Sequence
  Description of Artificial Sequence: Synthetic oligonucleotide
ugaucugagcaugauagac

SEQ ID NO: 1091710 - RNA, 19 nt, Artificial Sequence
  Description of Artificial Sequence: Synthetic oligonucleotide
aauuugcggcgucuucacg

SEQ ID NO: 1091711 - RNA, 19 nt, Artificial Sequence
  Description of Artificial Sequence: Synthetic oligonucleotide
acuugauucuguggguucc

SEQ ID NO: 1091712 - RNA, 19 nt, Artificial Sequence
  Description of Artificial Sequence: Synthetic oligonucleotide
uguugguugcgacacuucu

SEQ ID NO: 1091713 - RNA, 19 nt, Artificial Sequence
  Description of Artificial Sequence: Synthetic oligonucleotide
uuuucguaggggaucugca

SEQ ID NO: 1091714 - RNA, 19 nt, Artificial Sequence
  Description of Artificial Sequence: Synthetic oligonucleotide
uacgccacaugguagagaa

SEQ ID NO: 1091715 - RNA, 19 nt, Artificial Sequence
  Description of Artificial Sequence: Synthetic oligonucleotide
cucaucguucuuuucguag

SEQ ID NO: 1091716 - RNA, 19 nt, Artificial Sequence
  Description of Artificial Sequence: Synthetic oligonucleotide
ucaagcgugaaaacacagu

SEQ ID NO: 1091717 - RNA, 19 nt, Artificial Sequence
  Description of Artificial Sequence: Synthetic oligonucleotide
uuucguaggggaucugcag

SEQ ID NO: 1091718 - RNA, 19 nt, Artificial Sequence
  Description of Artificial Sequence: Synthetic oligonucleotide
cuugagaauuucuuccuuc

SEQ ID NO: 1091719 - RNA, 19 nt, Artificial Sequence
  Description of Artificial Sequence: Synthetic oligonucleotide
uggccggauacccacaggc

SEQ ID NO: 1091720 - RNA, 19 nt, Artificial Sequence
  Description of Artificial Sequence: Synthetic oligonucleotide
guauauugaucugagcaug

SEQ ID NO: 1091721 - RNA, 19 nt, Artificial Sequence
  Description of Artificial Sequence: Synthetic oligonucleotide
gaugguguauauugaucug

SEQ ID NO: 1091722 - RNA, 19 nt, Artificial Sequence
  Description of Artificial Sequence: Synthetic oligonucleotide
ugcuagcagauacagucca

SEQ ID NO: 1091723 - RNA, 19 nt, Artificial Sequence
  Description of Artificial Sequence: Synthetic oligonucleotide
uccgugaucaucugagcca

SEQ ID NO: 1091724 - RNA, 19 nt, Artificial Sequence
  Description of Artificial Sequence: Synthetic oligonucleotide
uucguaggggaucugcaga

SEQ ID NO: 1091725 - RNA, 19 nt, Artificial Sequence
  Description of Artificial Sequence: Synthetic oligonucleotide
ucaauuugcggcgucuuca

SEQ ID NO: 1091726 - RNA, 19 nt, Artificial Sequence
  Description of Artificial Sequence: Synthetic oligonucleotide
aggagucaggaacagguug

SEQ ID NO: 1091727 - RNA, 19 nt, Artificial Sequence
  Description of Artificial Sequence: Synthetic oligonucleotide
gcagauacaguccaggaac

SEQ ID NO: 1091728 - RNA, 19 nt, Artificial Sequence
  Description of Artificial Sequence: Synthetic oligonucleotide
uccugcaccggacucaaga

SEQ ID NO: 1091729 - RNA, 19 nt, Artificial Sequence
  Description of Artificial Sequence: Synthetic oligonucleotide
uucacaugggguguguuug

SEQ ID NO: 1091730 - RNA, 19 nt, Artificial Sequence
  Description of Artificial Sequence: Synthetic oligonucleotide
ucauuugucucuucgccuc

SEQ ID NO: 1091731 - RNA, 19 nt, Artificial Sequence
  Description of Artificial Sequence: Synthetic oligonucleotide
augugcagaucgcuacugc

SEQ ID NO: 1091732 - RNA, 19 nt, Artificial Sequence
  Description of Artificial Sequence: Synthetic oligonucleotide
ucucaagcgugaaaacaca

SEQ ID NO: 1091733 - RNA, 19 nt, Artificial Sequence
  Description of Artificial Sequence: Synthetic oligonucleotide
caaaccaggacguacgcca

SEQ ID NO: 1091734 - RNA, 19 nt, Artificial Sequence
  Description of Artificial Sequence: Synthetic oligonucleotide
aggaugaccgcucgauaac

SEQ ID NO: 1091735 - RNA, 19 nt, Artificial Sequence
  Description of Artificial Sequence: Synthetic oligonucleotide
ucguucuuuucguagggga

SEQ ID NO: 1091736 - RNA, 19 nt, Artificial Sequence
  Description of Artificial Sequence: Synthetic oligonucleotide
ugaaugugccucgauuucc

SEQ ID NO: 1091737 - RNA, 19 nt, Artificial Sequence
  Description of Artificial Sequence: Synthetic oligonucleotide
caacaauagccacuguuug

SEQ ID NO: 1091738 - RNA, 19 nt, Artificial Sequence
  Description of Artificial Sequence: Synthetic oligonucleotide
aaguacaaguaaugccaca

SEQ ID NO: 1091739 - RNA, 19 nt, Artificial Sequence
  Description of Artificial Sequence: Synthetic oligonucleotide
aguuacggauuguuccggg

SEQ ID NO: 1091740 - RNA, 19 nt, Artificial Sequence
  Description of Artificial Sequence: Synthetic oligonucleotide
uugcgagugacgcuuuuga

SEQ ID NO: 1091741 - RNA, 19 nt, Artificial Sequence
  Description of Artificial Sequence: Synthetic oligonucleotide
uacggauuguuccgggagc

SEQ ID NO: 1091742 - RNA, 19 nt, Artificial Sequence
  Description of Artificial Sequence: Synthetic oligonucleotide
cucaagcgugaaaacacag

SEQ ID NO: 1091743 - RNA, 19 nt, Artificial Sequence
  Description of Artificial Sequence: Synthetic oligonucleotide
accuucauugcugacaagu

SEQ ID NO: 1091744 - RNA, 19 nt, Artificial Sequence
  Description of Artificial Sequence: Synthetic oligonucleotide
uaaccucgggugaaugugc

SEQ ID NO: 1091745 - RNA, 19 nt, Artificial Sequence
  Description of Artificial Sequence: Synthetic oligonucleotide
cuccgugaucaucugagcc

SEQ ID NO: 1091746 - RNA, 19 nt, Artificial Sequence
  Description of Artificial Sequence: Synthetic oligonucleotide
uucucaucguucuuuucgu

SEQ ID NO: 1091747 - RNA, 19 nt, Artificial Sequence
  Description of Artificial Sequence: Synthetic oligonucleotide
gcuugagucuucucaagcg

SEQ ID NO: 1091748 - RNA, 19 nt, Artificial Sequence
  Description of Artificial Sequence: Synthetic oligonucleotide
aguacaaguaaugccacau

SEQ ID NO: 1091749 - RNA, 19 nt, Artificial Sequence
  Description of Artificial Sequence: Synthetic oligonucleotide
ugugcagaucgcuacugcu

SEQ ID NO: 1091750 - RNA, 19 nt, Artificial Sequence
  Description of Artificial Sequence: Synthetic oligonucleotide
agugacgcuuuugaugacg

SEQ ID NO: 1091751 - RNA, 19 nt, Artificial Sequence
  Description of Artificial Sequence: Synthetic oligonucleotide
acauagauuagcagcacca

SEQ ID NO: 1091752 - RNA, 19 nt, Artificial Sequence
  Description of Artificial Sequence: Synthetic oligonucleotide
auaaccucgggugaaugug

SEQ ID NO: 1091753 - RNA, 19 nt, Artificial Sequence
  Description of Artificial Sequence: Synthetic oligonucleotide
gacgcuuuugaugacguuc

SEQ ID NO: 1091754 - RNA, 19 nt, Artificial Sequence
  Description of Artificial Sequence: Synthetic oligonucleotide
augaaaggcuggucacggc

SEQ ID NO: 1091755 - RNA, 19 nt, Artificial Sequence
  Description of Artificial Sequence: Synthetic oligonucleotide
cauccgaggaaaccagucc

SEQ ID NO: 1091756 - RNA, 19 nt, Artificial Sequence
  Description of Artificial Sequence: Synthetic oligonucleotide
aacacaguuacggauuguu

SEQ ID NO: 1091757 - RNA, 19 nt, Artificial Sequence
  Description of Artificial Sequence: Synthetic oligonucleotide
caucguucuuuucguaggg

SEQ ID NO: 1091758 - RNA, 19 nt, Artificial Sequence
  Description of Artificial Sequence: Synthetic oligonucleotide
guugcgacacuucuuguuc

SEQ ID NO: 1091759 - RNA, 19 nt, Artificial Sequence
  Description of Artificial Sequence: Synthetic oligonucleotide
gaacagguugagauguuug

SEQ ID NO: 1091760 - RNA, 19 nt, Artificial Sequence
  Description of Artificial Sequence: Synthetic oligonucleotide
aaccucgggugaaugugcc

SEQ ID NO: 1091761 - RNA, 19 nt, Artificial Sequence
  Description of Artificial Sequence: Synthetic oligonucleotide
gaucgcuacugcuagcaga

SEQ ID NO: 1091762 - RNA, 19 nt, Artificial Sequence
  Description of Artificial Sequence: Synthetic oligonucleotide
acgauccgguaguuguugc

SEQ ID NO: 1091763 - RNA, 19 nt, Artificial Sequence
  Description of Artificial Sequence: Synthetic oligonucleotide
ugcaaaccaggacguacgc

SEQ ID NO: 1091764 - RNA, 19 nt, Artificial Sequence
  Description of Artificial Sequence: Synthetic oligonucleotide
aagaccgcggucaggauga

SEQ ID NO: 1091765 - RNA, 19 nt, Artificial Sequence
  Description of Artificial Sequence: Synthetic oligonucleotide
uuagcagcaccaagaagua

SEQ ID NO: 1091766 - RNA, 19 nt, Artificial Sequence
  Description of Artificial Sequence: Synthetic oligonucleotide
uaggggaucugcagaaggu

SEQ ID NO: 1091767 - RNA, 19 nt, Artificial Sequence
  Description of Artificial Sequence: Synthetic oligonucleotide
cuuuucguaggggaucugc

SEQ ID NO: 1091768 - RNA, 19 nt, Artificial Sequence
  Description of Artificial Sequence: Synthetic oligonucleotide
aaaggcuggucacggcgug

SEQ ID NO: 1091769 - RNA, 19 nt, Artificial Sequence
  Description of Artificial Sequence: Synthetic oligonucleotide
uuugcggcgucuucacgcc

SEQ ID NO: 1091770 - RNA, 19 nt, Artificial Sequence
  Description of Artificial Sequence: Synthetic oligonucleotide
cacgauuuuauuacauaga

SEQ ID NO: 1091771 - RNA, 19 nt, Artificial Sequence
  Description of Artificial Sequence: Synthetic oligonucleotide
ucaacccacaacucaguau

SEQ ID NO: 1091772 - RNA, 19 nt, Artificial Sequence
  Description of Artificial Sequence: Synthetic oligonucleotide
augcaaaccaggacguacg

SEQ ID NO: 1091773 - RNA, 19 nt, Artificial Sequence
  Description of Artificial Sequence: Synthetic oligonucleotide
cugagcaugauagacacaa

SEQ ID NO: 1091774 - RNA, 19 nt, Artificial Sequence
  Description of Artificial Sequence: Synthetic oligonucleotide
caugcaaaccaggacguac

SEQ ID NO: 1091775 - RNA, 19 nt, Artificial Sequence
  Description of Artificial Sequence: Synthetic oligonucleotide
uugugaaggagaacuugau

SEQ ID NO: 1091776 - RNA, 19 nt, Artificial Sequence
  Description of Artificial Sequence: Synthetic oligonucleotide
gaaugugccucgauuuccc

SEQ ID NO: 1091777 - RNA, 19 nt, Artificial Sequence
  Description of Artificial Sequence: Synthetic oligonucleotide
ucguuuugcucgcugucac

SEQ ID NO: 1091778 - RNA, 19 nt, Artificial Sequence
  Description of Artificial Sequence: Synthetic oligonucleotide
aagaucagguuaagaacga

SEQ ID NO: 1091779 - RNA, 19 nt, Artificial Sequence
  Description of Artificial Sequence: Synthetic oligonucleotide
aaugugccucgauuuccca

SEQ ID NO: 1091780 - RNA, 19 nt, Artificial Sequence
  Description of Artificial Sequence: Synthetic oligonucleotide
gcaccaagaaguauuagug

SEQ ID NO: 1091781 - RNA, 19 nt, Artificial Sequence
  Description of Artificial Sequence: Synthetic oligonucleotide
acaugggguguguuugauc

SEQ ID NO: 1091782 - RNA, 19 nt, Artificial Sequence
  Description of Artificial Sequence: Synthetic oligonucleotide
cucgauuucccacaaaacu

SEQ ID NO: 1091783 - RNA, 19 nt, Artificial Sequence
  Description of Artificial Sequence: Synthetic oligonucleotide
agaggccgagcaugcaaac

SEQ ID NO: 1091784 - RNA, 19 nt, Artificial Sequence
  Description of Artificial Sequence: Synthetic oligonucleotide
ugaccuucgccaaucucuc

SEQ ID NO: 1091785 - RNA, 19 nt, Artificial Sequence
  Description of Artificial Sequence: Synthetic oligonucleotide
agcaugauagacacaagaa

SEQ ID NO: 1091786 - RNA, 19 nt, Artificial Sequence
  Description of Artificial Sequence: Synthetic oligonucleotide
uuugcucccuccaucucau

SEQ ID NO: 1091787 - RNA, 19 nt, Artificial Sequence
  Description of Artificial Sequence: Synthetic oligonucleotide
ugggacugguguuuuauuu

SEQ ID NO: 1091788 - RNA, 19 nt, Artificial Sequence
  Description of Artificial Sequence: Synthetic oligonucleotide
aaggcgugggcuaauucca

SEQ ID NO: 1091789 - RNA, 19 nt, Artificial Sequence
  Description of Artificial Sequence: Synthetic oligonucleotide
ucucaacccacaacucagu

SEQ ID NO: 1091790 - RNA, 19 nt, Artificial Sequence
  Description of Artificial Sequence: Synthetic oligonucleotide
guuccgggagcucaauggc

SEQ ID NO: 1091791 - RNA, 19 nt, Artificial Sequence
  Description of Artificial Sequence: Synthetic oligonucleotide
guuugcucccuccaucuca

SEQ ID NO: 1091792 - RNA, 19 nt, Artificial Sequence
  Description of Artificial Sequence: Synthetic oligonucleotide
ucuucgccuccuuuggccu

SEQ ID NO: 1091793 - RNA, 19 nt, Artificial Sequence
  Description of Artificial Sequence: Synthetic oligonucleotide
uuguuccgggagcucaaug

SEQ ID NO: 1091794 - RNA, 19 nt, Artificial Sequence
  Description of Artificial Sequence: Synthetic oligonucleotide
uuacauagauuagcagcac

SEQ ID NO: 1091795 - RNA, 19 nt, Artificial Sequence
  Description of Artificial Sequence: Synthetic oligonucleotide
ucguaggggaucugcagaa

SEQ ID NO: 1091796 - RNA, 19 nt, Artificial Sequence
  Description of Artificial Sequence: Synthetic oligonucleotide
ucucguuuugcucgcuguc

SEQ ID NO: 1091797 - RNA, 19 nt, Artificial Sequence
  Description of Artificial Sequence: Synthetic oligonucleotide
cugcaccggacucaagagg

SEQ ID NO: 1091798 - RNA, 19 nt, Artificial Sequence
  Description of Artificial Sequence: Synthetic oligonucleotide
caauuugcggcgucuucac

SEQ ID NO: 1091799 - RNA, 19 nt, Artificial Sequence
  Description of Artificial Sequence: Synthetic oligonucleotide
uggauuccucauuugucuc

SEQ ID NO: 1091800 - RNA, 19 nt, Artificial Sequence
  Description of Artificial Sequence: Synthetic oligonucleotide
agaugugcagaucgcuacu

SEQ ID NO: 1091801 - RNA, 19 nt, Artificial Sequence
  Description of Artificial Sequence: Synthetic oligonucleotide
caagaccgcggucaggaug

SEQ ID NO: 1091802 - RNA, 19 nt, Artificial Sequence
  Description of Artificial Sequence: Synthetic oligonucleotide
aucucguuuugcucgcugu

SEQ ID NO: 1091803 - RNA, 19 nt, Artificial Sequence
  Description of Artificial Sequence: Synthetic oligonucleotide
accgaugguguauauugau

SEQ ID NO: 1091804 - RNA, 19 nt, Artificial Sequence
  Description of Artificial Sequence: Synthetic oligonucleotide
gacguacgccacaugguag

SEQ ID NO: 1091805 - RNA, 19 nt, Artificial Sequence
  Description of Artificial Sequence: Synthetic oligonucleotide
acacaguuacggauuguuc

SEQ ID NO: 1091806 - RNA, 19 nt, Artificial Sequence
  Description of Artificial Sequence: Synthetic oligonucleotide
acguacgccacaugguaga

SEQ ID NO: 1091807 - RNA, 19 nt, Artificial Sequence
  Description of Artificial Sequence: Synthetic oligonucleotide
aucguucuuuucguagggg

SEQ ID NO: 1091808 - RNA, 19 nt, Artificial Sequence
  Description of Artificial Sequence: Synthetic oligonucleotide
cuguguauucugucggguc

SEQ ID NO: 1091809 - RNA, 19 nt, Artificial Sequence
  Description of Artificial Sequence: Synthetic oligonucleotide
cuucucaagcgugaaaaca

SEQ ID NO: 1091810 - RNA, 19 nt, Artificial Sequence
  Description of Artificial Sequence: Synthetic oligonucleotide
ccaagaaguauuaguguug

SEQ ID NO: 1091811 - RNA, 19 nt, Artificial Sequence
  Description of Artificial Sequence: Synthetic oligonucleotide
uguugugcucugauuuaau

SEQ ID NO: 1091812 - RNA, 19 nt, Artificial Sequence
  Description of Artificial Sequence: Synthetic oligonucleotide
uggcaugugaugguucaca

SEQ ID NO: 1091813 - RNA, 19 nt, Artificial Sequence
  Description of Artificial Sequence: Synthetic oligonucleotide
ugcgacacuucuuguucug

SEQ ID NO: 1091814 - RNA, 19 nt, Artificial Sequence
  Description of Artificial Sequence: Synthetic oligonucleotide
guguuugauccaaggaagc

SEQ ID NO: 1091815 - RNA, 19 nt, Artificial Sequence
  Description of Artificial Sequence: Synthetic oligonucleotide
augagagccaagaccgcgg

SEQ ID NO: 1091816 - RNA, 19 nt, Artificial Sequence
  Description of Artificial Sequence: Synthetic oligonucleotide
uugcgacacuucuuguucu

SEQ ID NO: 1091817 - RNA, 19 nt, Artificial Sequence
  Description of Artificial Sequence: Synthetic oligonucleotide
uuccgggagcucaauggcu

SEQ ID NO: 1091818 - RNA, 19 nt, Artificial Sequence
  Description of Artificial Sequence: Synthetic oligonucleotide
agaucgcuacugcuagcag

SEQ ID NO: 1091819 - RNA, 19 nt, Artificial Sequence
  Description of Artificial Sequence: Synthetic oligonucleotide
cucgggugaaugugccucg

SEQ ID NO: 1091820 - RNA, 19 nt, Artificial Sequence
  Description of Artificial Sequence: Synthetic oligonucleotide
ggguguguuugauccaagg

SEQ ID NO: 1091821 - RNA, 19 nt, Artificial Sequence
  Description of Artificial Sequence: Synthetic oligonucleotide
ccucauuugucucuucgcc

SEQ ID NO: 1091822 - RNA, 19 nt, Artificial Sequence
  Description of Artificial Sequence: Synthetic oligonucleotide
gcaugauagacacaagaaa

SEQ ID NO: 1091823 - RNA, 19 nt, Artificial Sequence
  Description of Artificial Sequence: Synthetic oligonucleotide
aguauuaguguuggcccca

SEQ ID NO: 1091824 - RNA, 19 nt, Artificial Sequence
  Description of Artificial Sequence: Synthetic oligonucleotide
cauuugucucuucgccucc

SEQ ID NO: 1091825 - RNA, 19 nt, Artificial Sequence
  Description of Artificial Sequence: Synthetic oligonucleotide
gacacaagaaauggccgga

SEQ ID NO: 1091826 - RNA, 19 nt, Artificial Sequence
  Description of Artificial Sequence: Synthetic oligonucleotide
uacugcuagcagauacagu

SEQ ID NO: 1091827 - RNA, 19 nt, Artificial Sequence
  Description of Artificial Sequence: Synthetic oligonucleotide
gguguauauugaucugagc

SEQ ID NO: 1091828 - RNA, 19 nt, Artificial Sequence
  Description of Artificial Sequence: Synthetic oligonucleotide
gguguguuugauccaagga

SEQ ID NO: 1091829 - RNA, 19 nt, Artificial Sequence
  Description of Artificial Sequence: Synthetic oligonucleotide
auuuucagucuguccacuu

SEQ ID NO: 1091830 - RNA, 19 nt, Artificial Sequence
  Description of Artificial Sequence: Synthetic oligonucleotide
gacauggcccgcauccgag

SEQ ID NO: 1091831 - RNA, 19 nt, Artificial Sequence
  Description of Artificial Sequence: Synthetic oligonucleotide
accaggaacacgauuuuau

SEQ ID NO: 1091832 - RNA, 19 nt, Artificial Sequence
  Description of Artificial Sequence: Synthetic oligonucleotide
uccggaucucguuuugcuc

SEQ ID NO: 1091833 - RNA, 19 nt, Artificial Sequence
  Description of Artificial Sequence: Synthetic oligonucleotide
guucuuuucguaggggauc

SEQ ID NO: 1091834 - RNA, 19 nt, Artificial Sequence
  Description of Artificial Sequence: Synthetic oligonucleotide
caggaugaccgcucgauaa

SEQ ID NO: 1091835 - RNA, 19 nt, Artificial Sequence
  Description of Artificial Sequence: Synthetic oligonucleotide
agcaugcaaaccaggacgu

SEQ ID NO: 1091836 - RNA, 19 nt, Artificial Sequence
  Description of Artificial Sequence: Synthetic oligonucleotide
gaccgcucgauaaccucgg

SEQ ID NO: 1091837 - RNA, 19 nt, Artificial Sequence
  Description of Artificial Sequence: Synthetic oligonucleotide
cuugauucuguggguuccc

SEQ ID NO: 1091838 - RNA, 19 nt, Artificial Sequence
  Description of Artificial Sequence: Synthetic oligonucleotide
aagcgugaaaacacaguua

SEQ ID NO: 1091839 - RNA, 19 nt, Artificial Sequence
  Description of Artificial Sequence: Synthetic oligonucleotide
aagaggccgagcaugcaaa

SEQ ID NO: 1091840 - RNA, 19 nt, Artificial Sequence
  Description of Artificial Sequence: Synthetic oligonucleotide
aucgcuacugcuagcagau

SEQ ID NO: 1091841 - RNA, 19 nt, Artificial Sequence
  Description of Artificial Sequence: Synthetic oligonucleotide
uucuucgaaggagacuguc

SEQ ID NO: 1091842 - RNA, 19 nt, Artificial Sequence
  Description of Artificial Sequence: Synthetic oligonucleotide
ccgaagaucagguuaagaa

SEQ ID NO: 1091843 - RNA, 19 nt, Artificial Sequence
  Description of Artificial Sequence: Synthetic oligonucleotide
acgcuuuugaugacguuca

SEQ ID NO: 1091844 - RNA, 19 nt, Artificial Sequence
  Description of Artificial Sequence: Synthetic oligonucleotide
caguuacggauuguuccgg

SEQ ID NO: 1091845 - RNA, 19 nt, Artificial Sequence
  Description of Artificial Sequence: Synthetic oligonucleotide
cacgcagagcuuacucagc

SEQ ID NO: 1091846 - RNA, 19 nt, Artificial Sequence
  Description of Artificial Sequence: Synthetic oligonucleotide
guuacggauuguuccggga

SEQ ID NO: 1091847 - RNA, 19 nt, Artificial Sequence
  Description of Artificial Sequence: Synthetic oligonucleotide
uaagaacgaugaugaugac

SEQ ID NO: 1091848 - RNA, 19 nt, Artificial Sequence
  Description of Artificial Sequence: Synthetic oligonucleotide
aaacacaguuacggauugu

SEQ ID NO: 1091849 - RNA, 19 nt, Artificial Sequence
  Description of Artificial Sequence: Synthetic oligonucleotide
agguuggauuccucauuug

SEQ ID NO: 1091850 - RNA, 19 nt, Artificial Sequence
  Description of Artificial Sequence: Synthetic oligonucleotide
agcaacgaggcaggcaucu

SEQ ID NO: 1091851 - RNA, 19 nt, Artificial Sequence
  Description of Artificial Sequence: Synthetic oligonucleotide
aacgaggcaggcaucugau

SEQ ID NO: 1091852 - RNA, 19 nt, Artificial Sequence
  Description of Artificial Sequence: Synthetic oligonucleotide
ggaacacgauuuuauuaca

SEQ ID NO: 1091853 - RNA, 19 nt, Artificial Sequence
  Description of Artificial Sequence: Synthetic oligonucleotide
agacccaugguggacucca

SEQ ID NO: 1091854 - RNA, 19 nt, Artificial Sequence
  Description of Artificial Sequence: Synthetic oligonucleotide
uguucugcacgcagagcuu

SEQ ID NO: 1091855 - RNA, 19 nt, Artificial Sequence
  Description of Artificial Sequence: Synthetic oligonucleotide
ugcgagugacgcuuuugau

SEQ ID NO: 1091856 - RNA, 19 nt, Artificial Sequence
  Description of Artificial Sequence: Synthetic oligonucleotide
uguuugcucccuccaucuc

SEQ ID NO: 1091857 - RNA, 19 nt, Artificial Sequence
  Description of Artificial Sequence: Synthetic oligonucleotide
aggagguaccaugggacug

SEQ ID NO: 1091858 - RNA, 19 nt, Artificial Sequence
  Description of Artificial Sequence: Synthetic oligonucleotide
auagaugugcagaucgcua

SEQ ID NO: 1091859 - RNA, 19 nt, Artificial Sequence
  Description of Artificial Sequence: Synthetic oligonucleotide
ugucagugugguggcaugu

SEQ ID NO: 1091860 - RNA, 19 nt, Artificial Sequence
  Description of Artificial Sequence: Synthetic oligonucleotide
accggacucaagagguugg

SEQ ID NO: 1091861 - RNA, 19 nt, Artificial Sequence
  Description of Artificial Sequence: Synthetic oligonucleotide
auauugaucugagcaugau

SEQ ID NO: 1091862 - RNA, 19 nt, Artificial Sequence
  Description of Artificial Sequence: Synthetic oligonucleotide
auggccggauacccacagg

SEQ ID NO: 1091863 - RNA, 19 nt, Artificial Sequence
  Description of Artificial Sequence: Synthetic oligonucleotide
gaggccgagcaugcaaacc

SEQ ID NO: 1091864 - RNA, 19 nt, Artificial Sequence
  Description of Artificial Sequence: Synthetic oligonucleotide
cgagugacgcuuuugauga

SEQ ID NO: 1091865 - RNA, 19 nt, Artificial Sequence
  Description of Artificial Sequence: Synthetic oligonucleotide
caacccacaacucaguauu

SEQ ID NO: 1091866 - RNA, 19 nt, Artificial Sequence
  Description of Artificial Sequence: Synthetic oligonucleotide
augguagagaaaggccaug

SEQ ID NO: 1091867 - RNA, 19 nt, Artificial Sequence
  Description of Artificial Sequence: Synthetic oligonucleotide
cuugagucuucucaagcgu

SEQ ID NO: 1091868 - RNA, 19 nt, Artificial Sequence
  Description of Artificial Sequence: Synthetic oligonucleotide
gagguuggauuccucauuu

SEQ ID NO: 1091869 - RNA, 19 nt, Artificial Sequence
  Description of Artificial Sequence: Synthetic oligonucleotide
guauuaguguuggccccag

SEQ ID NO: 1091870 - RNA, 19 nt, Artificial Sequence
  Description of Artificial Sequence: Synthetic oligonucleotide
cagccugaucaagaucucc

SEQ ID NO: 1091871 - RNA, 19 nt, Artificial Sequence
  Description of Artificial Sequence: Synthetic oligonucleotide
acggauuguuccgggagcu

SEQ ID NO: 1091872 - RNA, 19 nt, Artificial Sequence
  Description of Artificial Sequence: Synthetic oligonucleotide
gaccuucgccaaucucucc

SEQ ID NO: 1091873 - RNA, 19 nt, Artificial Sequence
  Description of Artificial Sequence: Synthetic oligonucleotide
gguuggauuccucauuugu

SEQ ID NO: 1091874 - RNA, 19 nt, Artificial Sequence
  Description of Artificial Sequence: Synthetic oligonucleotide
caacgaggcaggcaucuga

SEQ ID NO: 1091875 - RNA, 19 nt, Artificial Sequence
  Description of Artificial Sequence: Synthetic oligonucleotide
accgaagaucagguuaaga

SEQ ID NO: 1091876 - RNA, 19 nt, Artificial Sequence
  Description of Artificial Sequence: Synthetic oligonucleotide
cagaucgcuacugcuagca

SEQ ID NO: 1091877 - RNA, 19 nt, Artificial Sequence
  Description of Artificial Sequence: Synthetic oligonucleotide
aaauggccggauacccaca

SEQ ID NO: 1091878 - RNA, 19 nt, Artificial Sequence
  Description of Artificial Sequence: Synthetic oligonucleotide
cucauuugucucuucgccu

SEQ ID NO: 1091879 - RNA, 19 nt, Artificial Sequence
  Description of Artificial Sequence: Synthetic oligonucleotide
caccaagaaguauuagugu

SEQ ID NO: 1091880 - RNA, 19 nt, Artificial Sequence
  Description of Artificial Sequence: Synthetic oligonucleotide
cauagauuagcagcaccaa

SEQ ID NO: 1091881 - RNA, 19 nt, Artificial Sequence
  Description of Artificial Sequence: Synthetic oligonucleotide
ggaugaccgcucgauaacc

SEQ ID NO: 1091882 - RNA, 19 nt, Artificial Sequence
  Description of Artificial Sequence: Synthetic oligonucleotide
cugucaccuucauugcuga

SEQ ID NO: 1091883 - RNA, 19 nt, Artificial Sequence
  Description of Artificial Sequence: Synthetic oligonucleotide
acgaggcaggcaucugaug

SEQ ID NO: 1091884 - RNA, 19 nt, Artificial Sequence
  Description of Artificial Sequence: Synthetic oligonucleotide
ugacguucagcagggucuc

SEQ ID NO: 1091885 - RNA, 19 nt, Artificial Sequence
  Description of Artificial Sequence: Synthetic oligonucleotide
caccggacucaagagguug

SEQ ID NO: 1091886 - RNA, 19 nt, Artificial Sequence
  Description of Artificial Sequence: Synthetic oligonucleotide
ugcggcgucuucacgccau

SEQ ID NO: 1091887 - RNA, 19 nt, Artificial Sequence
  Description of Artificial Sequence: Synthetic oligonucleotide
gaacacgauuuuauuacau

SEQ ID NO: 1091888 - RNA, 19 nt, Artificial Sequence
  Description of Artificial Sequence: Synthetic oligonucleotide
ugucaauuugcggcgucuu

SEQ ID NO: 1091889 - RNA, 19 nt, Artificial Sequence
  Description of Artificial Sequence: Synthetic oligonucleotide
gauccgguaguuguugccu

SEQ ID NO: 1091890 - RNA, 19 nt, Artificial Sequence
  Description of Artificial Sequence: Synthetic oligonucleotide
agaucagguuaagaacgau

SEQ ID NO: 1091891 - RNA, 19 nt, Artificial Sequence
  Description of Artificial Sequence: Synthetic oligonucleotide
gcaugugaugguucacaug

SEQ ID NO: 1091892 - RNA, 19 nt, Artificial Sequence
  Description of Artificial Sequence: Synthetic oligonucleotide
gaccgaugguguauauuga

SEQ ID NO: 1091893 - RNA, 19 nt, Artificial Sequence
  Description of Artificial Sequence: Synthetic oligonucleotide
ccugcaccggacucaagag

SEQ ID NO: 1091894 - RNA, 19 nt, Artificial Sequence
  Description of Artificial Sequence: Synthetic oligonucleotide
ucugcacgcagagcuuacu

SEQ ID NO: 1091895 - RNA, 19 nt, Artificial Sequence
  Description of Artificial Sequence: Synthetic oligonucleotide
uguuggccccagaccgaug

SEQ ID NO: 1091896 - RNA, 19 nt, Artificial Sequence
  Description of Artificial Sequence: Synthetic oligonucleotide
augggacugguguuuuauu

SEQ ID NO: 1091897 - RNA, 19 nt, Artificial Sequence
  Description of Artificial Sequence: Synthetic oligonucleotide
uaccaugggacugguguuu

SEQ ID NO: 1091898 - RNA, 19 nt, Artificial Sequence
  Description of Artificial Sequence: Synthetic oligonucleotide
ccgaugguguauauugauc

SEQ ID NO: 1091899 - RNA, 19 nt, Artificial Sequence
  Description of Artificial Sequence: Synthetic oligonucleotide
augguucacauggggugug

SEQ ID NO: 1091900 - RNA, 19 nt, Artificial Sequence
  Description of Artificial Sequence: Synthetic oligonucleotide
cucguuuugcucgcuguca

SEQ ID NO: 1091901 - RNA, 19 nt, Artificial Sequence
  Description of Artificial Sequence: Synthetic oligonucleotide
aggacguacgccacauggu

SEQ ID NO: 1091902 - RNA, 19 nt, Artificial Sequence
  Description of Artificial Sequence: Synthetic oligonucleotide
cuucgccuccuuuggccug

SEQ ID NO: 1091903 - RNA, 19 nt, Artificial Sequence
  Description of Artificial Sequence: Synthetic oligonucleotide
ugguguugguugcgacacu

SEQ ID NO: 1091904 - RNA, 19 nt, Artificial Sequence
  Description of Artificial Sequence: Synthetic oligonucleotide
cagagcuuacucagccuga

SEQ ID NO: 1091905 - RNA, 19 nt, Artificial Sequence
  Description of Artificial Sequence: Synthetic oligonucleotide
ucgauaaccucgggugaau

SEQ ID NO: 1091906 - RNA, 19 nt, Artificial Sequence
  Description of Artificial Sequence: Synthetic oligonucleotide
cuguuugcucccuccaucu

SEQ ID NO: 1091907 - RNA, 19 nt, Artificial Sequence
  Description of Artificial Sequence: Synthetic oligonucleotide
cugguguuuuauuuucagu

SEQ ID NO: 1091908 - RNA, 19 nt, Artificial Sequence
  Description of Artificial Sequence: Synthetic oligonucleotide
ggauuguuccgggagcuca

SEQ ID NO: 1091909 - RNA, 19 nt, Artificial Sequence
  Description of Artificial Sequence: Synthetic oligonucleotide
cauagaugugcagaucgcu

SEQ ID NO: 1091910 - RNA, 19 nt, Artificial Sequence
  Description of Artificial Sequence: Synthetic oligonucleotide
uguugccuuuguugcuguc

SEQ ID NO: 1091911 - RNA, 19 nt, Artificial Sequence
  Description of Artificial Sequence: Synthetic oligonucleotide
cuucuccgugaucaucuga

SEQ ID NO: 1091912 - RNA, 19 nt, Artificial Sequence
  Description of Artificial Sequence: Synthetic oligonucleotide
gagugacgcuuuugaugac

SEQ ID NO: 1091913 - RNA, 19 nt, Artificial Sequence
  Description of Artificial Sequence: Synthetic oligonucleotide
caugguagagaaaggccau

SEQ ID NO: 1091914 - RNA, 19 nt, Artificial Sequence
  Description of Artificial Sequence: Synthetic oligonucleotide
gcucugauuuaauguguuc

SEQ ID NO: 1091915 - RNA, 19 nt, Artificial Sequence
  Description of Artificial Sequence: Synthetic oligonucleotide
gcucuucucaacccacaac

SEQ ID NO: 1091916 - RNA, 19 nt, Artificial Sequence
  Description of Artificial Sequence: Synthetic oligonucleotide
caaggaagcccagccucug

SEQ ID NO: 1091917 - RNA, 19 nt, Artificial Sequence
  Description of Artificial Sequence: Synthetic oligonucleotide
auccgguaguuguugccuu

SEQ ID NO: 1091918 - RNA, 19 nt, Artificial Sequence
  Description of Artificial Sequence: Synthetic oligonucleotide
ugcugucaauuugcggcgu

SEQ ID NO: 1091919 - RNA, 19 nt, Artificial Sequence
  Description of Artificial Sequence: Synthetic oligonucleotide
cgcuacugcuagcagauac

SEQ ID NO: 1091920 - RNA, 19 nt, Artificial Sequence
  Description of Artificial Sequence: Synthetic oligonucleotide
ggacguacgccacauggua

SEQ ID NO: 1091921 - RNA, 19 nt, Artificial Sequence
  Description of Artificial Sequence: Synthetic oligonucleotide
gaaaggcuggucacggcgu

SEQ ID NO: 1091922 - RNA, 19 nt, Artificial Sequence
  Description of Artificial Sequence: Synthetic oligonucleotide
gaacuugauucuguggguu

SEQ ID NO: 1091923 - RNA, 19 nt, Artificial Sequence
  Description of Artificial Sequence: Synthetic oligonucleotide
uugcggcgucuucacgcca

SEQ ID NO: 1091924 - RNA, 19 nt, Artificial Sequence
  Description of Artificial Sequence: Synthetic oligonucleotide
gaugaccgcucgauaaccu

SEQ ID NO: 1091925 - RNA, 19 nt, Artificial Sequence
  Description of Artificial Sequence: Synthetic oligonucleotide
accucgggugaaugugccu

SEQ ID NO: 1091926 - RNA, 19 nt, Artificial Sequence
  Description of Artificial Sequence: Synthetic oligonucleotide
ggacucaagagguuggauu

SEQ ID NO: 1091927 - RNA, 19 nt, Artificial Sequence
  Description of Artificial Sequence: Synthetic oligonucleotide
ugacgcuuuugaugacguu

SEQ ID NO: 1091928 - RNA, 19 nt, Artificial Sequence
  Description of Artificial Sequence: Synthetic oligonucleotide
ggcaggcaucugaugaaag

SEQ ID NO: 1091929 - RNA, 19 nt, Artificial Sequence
  Description of Artificial Sequence: Synthetic oligonucleotide
aguguuggccccagaccga

SEQ ID NO: 1091930 - RNA, 19 nt, Artificial Sequence
  Description of Artificial Sequence: Synthetic oligonucleotide
gagucuucucaagcgugaa

SEQ ID NO: 1091931 - RNA, 19 nt, Artificial Sequence
  Description of Artificial Sequence: Synthetic oligonucleotide
ucgggugaaugugccucga

SEQ ID NO: 1091932 - RNA, 19 nt, Artificial Sequence
  Description of Artificial Sequence: Synthetic oligonucleotide
cucgauaaccucgggugaa

SEQ ID NO: 1091933 - RNA, 19 nt, Artificial Sequence
  Description of Artificial Sequence: Synthetic oligonucleotide
gcucgauaaccucggguga

SEQ ID NO: 1091934 - RNA, 19 nt, Artificial Sequence
  Description of Artificial Sequence: Synthetic oligonucleotide
ggaaggcgugggcuaauuc

SEQ ID NO: 1091935 - RNA, 19 nt, Artificial Sequence
  Description of Artificial Sequence: Synthetic oligonucleotide
gcuuacucagccugaucaa

SEQ ID NO: 1091936 - RNA, 19 nt, Artificial Sequence
  Description of Artificial Sequence: Synthetic oligonucleotide
guucugcacgcagagcuua

SEQ ID NO: 1091937 - RNA, 19 nt, Artificial Sequence
  Description of Artificial Sequence: Synthetic oligonucleotide
auuguuccgggagcucaau

SEQ ID NO: 1091938 - RNA, 19 nt, Artificial Sequence
  Description of Artificial Sequence: Synthetic oligonucleotide
cauugcugacaagugacau

SEQ ID NO: 1091939 - RNA, 19 nt, Artificial Sequence
  Description of Artificial Sequence: Synthetic oligonucleotide
ccgagcaugcaaaccagga

SEQ ID NO: 1091940 - RNA, 19 nt, Artificial Sequence
  Description of Artificial Sequence: Synthetic oligonucleotide
gccgagcaugcaaaccagg

SEQ ID NO: 1091941 - RNA, 19 nt, Artificial Sequence
  Description of Artificial Sequence: Synthetic oligonucleotide
gcauccgaggaaaccaguc

SEQ ID NO: 1091942 - RNA, 19 nt, Artificial Sequence
  Description of Artificial Sequence: Synthetic oligonucleotide
gcagaucgcuacugcuagc

SEQ ID NO: 1091943 - RNA, 19 nt, Artificial Sequence
  Description of Artificial Sequence: Synthetic oligonucleotide
guauucugucggguccuuc

SEQ ID NO: 1091944 - RNA, 19 nt, Artificial Sequence
  Description of Artificial Sequence: Synthetic oligonucleotide
auggcccgcauccgaggaa

SEQ ID NO: 1091945 - RNA, 19 nt, Artificial Sequence
  Description of Artificial Sequence: Synthetic oligonucleotide
gcuggucacggcgugcccc

SEQ ID NO: 1091946 - RNA, 19 nt, Artificial Sequence
  Description of Artificial Sequence: Synthetic oligonucleotide
ccgugaucaucugagccac

SEQ ID NO: 1091947 - RNA, 19 nt, Artificial Sequence
  Description of Artificial Sequence: Synthetic oligonucleotide
caccagacccaugguggac

SEQ ID NO: 1091948 - RNA, 19 nt, Artificial Sequence
  Description of Artificial Sequence: Synthetic oligonucleotide
gugacgcuuuugaugacgu

SEQ ID NO: 1091949 - RNA, 19 nt, Artificial Sequence
  Description of Artificial Sequence: Synthetic oligonucleotide
caucugaugaaaggcuggu

SEQ ID NO: 1091950 - RNA, 19 nt, Artificial Sequence
  Description of Artificial Sequence: Synthetic oligonucleotide
ccucgggugaaugugccuc

SEQ ID NO: 1091951 - RNA, 19 nt, Artificial Sequence
  Description of Artificial Sequence: Synthetic oligonucleotide
uggugucagugugguggca

SEQ ID NO: 1091952 - RNA, 19 nt, Artificial Sequence
  Description of Artificial Sequence: Synthetic oligonucleotide
cgauccgguaguuguugcc

SEQ ID NO: 1091953 - RNA, 19 nt, Artificial Sequence
  Description of Artificial Sequence: Synthetic oligonucleotide
cagcaacgaggcaggcauc

SEQ ID NO: 1091954 - RNA, 19 nt, Artificial Sequence
  Description of Artificial Sequence: Synthetic oligonucleotide
cagacccaugguggacucc

SEQ ID NO: 1091955 - RNA, 19 nt, Artificial Sequence
  Description of Artificial Sequence: Synthetic oligonucleotide
accaugggacugguguuuu

SEQ ID NO: 1091956 - RNA, 19 nt, Artificial Sequence
  Description of Artificial Sequence: Synthetic oligonucleotide
guaccaugggacugguguu

SEQ ID NO: 1091957 - RNA, 19 nt, Artificial Sequence
  Description of Artificial Sequence: Synthetic oligonucleotide
gcgacacuucuuguucugc

SEQ ID NO: 1091958 - RNA, 19 nt, Artificial Sequence
  Description of Artificial Sequence: Synthetic oligonucleotide
ggcgugggcuaauuccauc

SEQ ID NO: 1091959 - RNA, 19 nt, Artificial Sequence
  Description of Artificial Sequence: Synthetic oligonucleotide
gucggguccuucaccuuca

SEQ ID NO: 1091960 - RNA, 19 nt, Artificial Sequence
  Description of Artificial Sequence: Synthetic oligonucleotide
cguuuugcucgcugucacc

SEQ ID NO: 1091961 - RNA, 19 nt, Artificial Sequence
  Description of Artificial Sequence: Synthetic oligonucleotide
gcugucaauuugcggcguc

SEQ ID NO: 1091962 - RNA, 19 nt, Artificial Sequence
  Description of Artificial Sequence: Synthetic oligonucleotide
gguugcgacacuucuuguu

SEQ ID NO: 1091963 - RNA, 19 nt, Artificial Sequence
  Description of Artificial Sequence: Synthetic oligonucleotide
caugggacugguguuuuau

SEQ ID NO: 1091964 - RNA, 19 nt, Artificial Sequence
  Description of Artificial Sequence: Synthetic oligonucleotide
guguucuucgaaggagacu

SEQ ID NO: 1091965 - RNA, 19 nt, Artificial Sequence
  Description of Artificial Sequence: Synthetic oligonucleotide
gccauccugcaccggacuc

SEQ ID NO: 1091966 - RNA, 19 nt, Artificial Sequence
  Description of Artificial Sequence: Synthetic oligonucleotide
cauccugcaccggacucaa

SEQ ID NO: 1091967 - RNA, 19 nt, Artificial Sequence
  Description of Artificial Sequence: Synthetic oligonucleotide
cccagauagcugccucacc

SEQ ID NO: 1091968 - RNA, 19 nt, Artificial Sequence
  Description of Artificial Sequence: Synthetic oligonucleotide
aggaaggcgugggcuaauu

SEQ ID NO: 1091969 - RNA, 19 nt, Artificial Sequence
  Description of Artificial Sequence: Synthetic oligonucleotide
gguuaagaacgaugaugau

SEQ ID NO: 1091970 - RNA, 19 nt, Artificial Sequence
  Description of Artificial Sequence: Synthetic oligonucleotide
cggaucucguuuugcucgc

SEQ ID NO: 1091971 - RNA, 19 nt, Artificial Sequence
  Description of Artificial Sequence: Synthetic oligonucleotide
gggugaaugugccucgauu

SEQ ID NO: 1091972 - RNA, 19 nt, Artificial Sequence
  Description of Artificial Sequence: Synthetic oligonucleotide
cugucaauuugcggcgucu

SEQ ID NO: 1091973 - RNA, 19 nt, Artificial Sequence
  Description of Artificial Sequence: Synthetic oligonucleotide
agguaccaugggacuggug

SEQ ID NO: 1091974 - RNA, 19 nt, Artificial Sequence
  Description of Artificial Sequence: Synthetic oligonucleotide
ccagacccaugguggacuc

SEQ ID NO: 1091975 - RNA, 19 nt, Artificial Sequence
  Description of Artificial Sequence: Synthetic oligonucleotide
gccuuuguugcugucaauu

SEQ ID NO: 1091976 - RNA, 19 nt, Artificial Sequence
  Description of Artificial Sequence: Synthetic oligonucleotide
aggcgugggcuaauuccau

SEQ ID NO: 1091977 - RNA, 19 nt, Artificial Sequence
  Description of Artificial Sequence: Synthetic oligonucleotide
ggccugaccuucgccaauc

SEQ ID NO: 1091978 - RNA, 19 nt, Artificial Sequence
  Description of Artificial Sequence: Synthetic oligonucleotide
gcaacgaggcaggcaucug

SEQ ID NO: 1091979 - RNA, 19 nt, Artificial Sequence
  Description of Artificial Sequence: Synthetic oligonucleotide
ucgcuacugcuagcagaua

SEQ ID NO: 1091980 - RNA, 19 nt, Artificial Sequence
  Description of Artificial Sequence: Synthetic oligonucleotide
cgauaaccucgggugaaug

SEQ ID NO: 1091981 - RNA, 19 nt, Artificial Sequence
  Description of Artificial Sequence: Synthetic oligonucleotide
gccggauacccacaggcuu

SEQ ID NO: 1091982 - RNA, 19 nt, Artificial Sequence
  Description of Artificial Sequence: Synthetic oligonucleotide
caagugacauggcccgcau

SEQ ID NO: 1091983 - RNA, 19 nt, Artificial Sequence
  Description of Artificial Sequence: Synthetic oligonucleotide
ggaacagguugagauguuu

SEQ ID NO: 1091984 - RNA, 19 nt, Artificial Sequence
  Description of Artificial Sequence: Synthetic oligonucleotide
cgccaaucucuccauucuc

SEQ ID NO: 1091985 - RNA, 19 nt, Artificial Sequence
  Description of Artificial Sequence: Synthetic oligonucleotide
ccuuuguugcugucaauuu

SEQ ID NO: 1091986 - RNA, 19 nt, Artificial Sequence
  Description of Artificial Sequence: Synthetic oligonucleotide
cguacgccacaugguagag

SEQ ID NO: 1091987 - RNA, 19 nt, Artificial Sequence
  Description of Artificial Sequence: Synthetic oligonucleotide
auccugcaccggacucaag

SEQ ID NO: 1091988 - RNA, 19 nt, Artificial Sequence
  Description of Artificial Sequence: Synthetic oligonucleotide
ccaggacguacgccacaug

SEQ ID NO: 1091989 - RNA, 19 nt, Artificial Sequence
  Description of Artificial Sequence: Synthetic oligonucleotide
ccgaggaaaccaguccaga

SEQ ID NO: 1091990 - RNA, 19 nt, Artificial Sequence
  Description of Artificial Sequence: Synthetic oligonucleotide
acgccacaugguagagaaa

SEQ ID NO: 1091991 - RNA, 19 nt, Artificial Sequence
  Description of Artificial Sequence: Synthetic oligonucleotide
cagaccgaugguguauauu

SEQ ID NO: 1091992 - RNA, 19 nt, Artificial Sequence
  Description of Artificial Sequence: Synthetic oligonucleotide
gacguucagcagggucucu

SEQ ID NO: 1091993 - RNA, 19 nt, Artificial Sequence
  Description of Artificial Sequence: Synthetic oligonucleotide
ccaggaugaccgcucgaua

SEQ ID NO: 1091994 - RNA, 19 nt, Artificial Sequence
  Description of Artificial Sequence: Synthetic oligonucleotide
ggccggauacccacaggcu

SEQ ID NO: 1091995 - RNA, 19 nt, Artificial Sequence
  Description of Artificial Sequence: Synthetic oligonucleotide
gcaugcaaaccaggacgua

SEQ ID NO: 1091996 - RNA, 19 nt, Artificial Sequence
  Description of Artificial Sequence: Synthetic oligonucleotide
ccggacucaagagguugga

SEQ ID NO: 1091997 - RNA, 19 nt, Artificial Sequence
  Description of Artificial Sequence: Synthetic oligonucleotide
agaccgcggucaggaugau

SEQ ID NO: 1091998 - RNA, 19 nt, Artificial Sequence
  Description of Artificial Sequence: Synthetic oligonucleotide
ccgcucgauaaccucgggu

SEQ ID NO: 1091999 - RNA, 19 nt, Artificial Sequence
  Description of Artificial Sequence: Synthetic oligonucleotide
ggcccgcauccgaggaaac

SEQ ID NO: 1092000 - RNA, 19 nt, Artificial Sequence
  Description of Artificial Sequence: Synthetic oligonucleotide
cggcgucuucacgccaucc

SEQ ID NO: 1092001 - RNA, 19 nt, Artificial Sequence
  Description of Artificial Sequence: Synthetic oligonucleotide
cccagaccgaugguguaua

SEQ ID NO: 1092002 - RNA, 19 nt, Artificial Sequence
  Description of Artificial Sequence: Synthetic oligonucleotide
gcagucgcugguguugguu

SEQ ID NO: 1092003 - RNA, 19 nt, Artificial Sequence
  Description of Artificial Sequence: Synthetic oligonucleotide
ggaucucguuuugcucgcu

SEQ ID NO: 1092004 - RNA, 19 nt, Artificial Sequence
  Description of Artificial Sequence: Synthetic oligonucleotide
cgcauccgaggaaaccagu

SEQ ID NO: 1092005 - RNA, 19 nt, Artificial Sequence
  Description of Artificial Sequence: Synthetic oligonucleotide
caggaaggcgugggcuaau

SEQ ID NO: 1092006 - RNA, 19 nt, Artificial Sequence
  Description of Artificial Sequence: Synthetic oligonucleotide
ccagaccgaugguguauau

SEQ ID NO: 1092007 - RNA, 19 nt, Artificial Sequence
  Description of Artificial Sequence: Synthetic oligonucleotide
ccaagaccgcggucaggau

SEQ ID NO: 1092008 - RNA, 19 nt, Artificial Sequence
  Description of Artificial Sequence: Synthetic oligonucleotide
gcaccggacucaagagguu

SEQ ID NO: 1092009 - RNA, 19 nt, Artificial Sequence
  Description of Artificial Sequence: Synthetic oligonucleotide
ccccagaccgaugguguau

SEQ ID NO: 1092010 - RNA, 19 nt, Artificial Sequence
  Description of Artificial Sequence: Synthetic oligonucleotide
cggacucaagagguuggau

SEQ ID NO: 1092011 - RNA, 19 nt, Artificial Sequence
  Description of Artificial Sequence: Synthetic oligonucleotide
aagaaaguggccucaaagc

SEQ ID NO: 1092012 - RNA, 19 nt, Artificial Sequence
  Description of Artificial Sequence: Synthetic oligonucleotide
uauauuugguacaagagac

SEQ ID NO: 1092013 - RNA, 19 nt, Artificial Sequence
  Description of Artificial Sequence: Synthetic oligonucleotide
agaaaguggccucaaagcc

SEQ ID NO: 1092014 - RNA, 19 nt, Artificial Sequence
  Description of Artificial Sequence: Synthetic oligonucleotide
aaacagagcccauuguggc

SEQ ID NO: 1092015 - RNA, 19 nt, Artificial Sequence
  Description of Artificial Sequence: Synthetic oligonucleotide
ugcuaaauaacccuugggc

SEQ ID NO: 1092016 - RNA, 19 nt, Artificial Sequence
  Description of Artificial Sequence: Synthetic oligonucleotide
ucucauugaacaaagggug

SEQ ID NO: 1092017 - RNA, 19 nt, Artificial Sequence
  Description of Artificial Sequence: Synthetic oligonucleotide
caagagacgaccuucaccc

SEQ ID NO: 1092018 - RNA, 19 nt, Artificial Sequence
  Description of Artificial Sequence: Synthetic oligonucleotide
ucauccauaaagcaaugag

SEQ ID NO: 1092019 - RNA, 19 nt, Artificial Sequence
  Description of Artificial Sequence: Synthetic oligonucleotide
uggguugugaggaagaggc

SEQ ID NO: 1092020 - RNA, 19 nt, Artificial Sequence
  Description of Artificial Sequence: Synthetic oligonucleotide
gaugacacggaucucaccc

SEQ ID NO: 1092021 - RNA, 19 nt, Artificial Sequence
  Description of Artificial Sequence: Synthetic oligonucleotide
cagccuguaacccagaugg

SEQ ID NO: 1092022 - RNA, 19 nt, Artificial Sequence
  Description of Artificial Sequence: Synthetic oligonucleotide
gaagaaaguggccucaaag

SEQ ID NO: 1092023 - RNA, 19 nt, Artificial Sequence
  Description of Artificial Sequence: Synthetic oligonucleotide
guaucaauggccucagugg

SEQ ID NO: 1092024 - RNA, 19 nt, Artificial Sequence
  Description of Artificial Sequence: Synthetic oligonucleotide
guaucaggcaggcagauag

SEQ ID NO: 1092025 - RNA, 19 nt, Artificial Sequence
  Description of Artificial Sequence: Synthetic oligonucleotide
acaagagacgaccuucacc

SEQ ID NO: 1092026 - RNA, 19 nt, Artificial Sequence
  Description of Artificial Sequence: Synthetic oligonucleotide
aguaucaauggccucagug

SEQ ID NO: 1092027 - RNA, 19 nt, Artificial Sequence
  Description of Artificial Sequence: Synthetic oligonucleotide
uuguuaggcaccuugauau

SEQ ID NO: 1092028 - RNA, 19 nt, Artificial Sequence
  Description of Artificial Sequence: Synthetic oligonucleotide
cauccauaaagcaaugagc

SEQ ID NO: 1092029 - RNA, 19 nt, Artificial Sequence
  Description of Artificial Sequence: Synthetic oligonucleotide
ucuacguaguccuuggggc

SEQ ID NO: 1092030 - RNA, 19 nt, Artificial Sequence
  Description of Artificial Sequence: Synthetic oligonucleotide
augaucgcagcccacaguc

SEQ ID NO: 1092031 - RNA, 19 nt, Artificial Sequence
  Description of Artificial Sequence: Synthetic oligonucleotide
caaacagagcccauugugg

SEQ ID NO: 1092032 - RNA, 19 nt, Artificial Sequence
  Description of Artificial Sequence: Synthetic oligonucleotide
acgaccuucacccuaucac

SEQ ID NO: 1092033 - RNA, 19 nt, Artificial Sequence
  Description of Artificial Sequence: Synthetic oligonucleotide
uuugguaaaugaucgcagc

SEQ ID NO: 1092034 - RNA, 19 nt, Artificial Sequence
  Description of Artificial Sequence: Synthetic oligonucleotide
uugguaaaugaucgcagcc

SEQ ID NO: 1092035 - RNA, 19 nt, Artificial Sequence
  Description of Artificial Sequence: Synthetic oligonucleotide
uggguaguggccuggauag

SEQ ID NO: 1092036 - RNA, 19 nt, Artificial Sequence
  Description of Artificial Sequence: Synthetic oligonucleotide
guauauuugguacaagaga

SEQ ID NO: 1092037 - RNA, 19 nt, Artificial Sequence
  Description of Artificial Sequence: Synthetic oligonucleotide
uauuugguacaagagacga

SEQ ID NO: 1092038 - RNA, 19 nt, Artificial Sequence
  Description of Artificial Sequence: Synthetic oligonucleotide
ugucaucaaauccuugccc

SEQ ID NO: 1092039 - RNA, 19 nt, Artificial Sequence
  Description of Artificial Sequence: Synthetic oligonucleotide
agguauauuugguacaaga

SEQ ID NO: 1092040 - RNA, 19 nt, Artificial Sequence
  Description of Artificial Sequence: Synthetic oligonucleotide
uuaucucauugaacaaagg

SEQ ID NO: 1092041 - RNA, 19 nt, Artificial Sequence
  Description of Artificial Sequence: Synthetic oligonucleotide
ucaagcuccagcaacgcaa

SEQ ID NO: 1092042 - RNA, 19 nt, Artificial Sequence
  Description of Artificial Sequence: Synthetic oligonucleotide
uguuugguaaaugaucgca

SEQ ID NO: 1092043 - RNA, 19 nt, Artificial Sequence
  Description of Artificial Sequence: Synthetic oligonucleotide
ucauugaacaaaggguggg

SEQ ID NO: 1092044 - RNA, 19 nt, Artificial Sequence
  Description of Artificial Sequence: Synthetic oligonucleotide
ugauauuccaugugcaguc

SEQ ID NO: 1092045 - RNA, 19 nt, Artificial Sequence
  Description of Artificial Sequence: Synthetic oligonucleotide
aaaugaucgcagcccacag

SEQ ID NO: 1092046 - RNA, 19 nt, Artificial Sequence
  Description of Artificial Sequence: Synthetic oligonucleotide
uucacccuaucacacgagg

SEQ ID NO: 1092047 - RNA, 19 nt, Artificial Sequence
  Description of Artificial Sequence: Synthetic oligonucleotide
gauaggucgcacaacagug

SEQ ID NO: 1092048 - RNA, 19 nt, Artificial Sequence
  Description of Artificial Sequence: Synthetic oligonucleotide
gaaugcaguucacaguuug

SEQ ID NO: 1092049 - RNA, 19 nt, Artificial Sequence
  Description of Artificial Sequence: Synthetic oligonucleotide
aacuacccgagccuguuug

SEQ ID NO: 1092050 - RNA, 19 nt, Artificial Sequence
  Description of Artificial Sequence: Synthetic oligonucleotide
ccuguuugguaaaugaucg

SEQ ID NO: 1092051 - RNA, 19 nt, Artificial Sequence
  Description of Artificial Sequence: Synthetic oligonucleotide
gaugcguuugagcuugugc

SEQ ID NO: 1092052 - RNA, 19 nt, Artificial Sequence
  Description of Artificial Sequence: Synthetic oligonucleotide
uauacgccuggcuuguucc

SEQ ID NO: 1092053 - RNA, 19 nt, Artificial Sequence
  Description of Artificial Sequence: Synthetic oligonucleotide
acgaacugggacuuuucac

SEQ ID NO: 1092054 - RNA, 19 nt, Artificial Sequence
  Description of Artificial Sequence: Synthetic oligonucleotide
gacacuucccauuggaaca

SEQ ID NO: 1092055 - RNA, 19 nt, Artificial Sequence
  Description of Artificial Sequence: Synthetic oligonucleotide
gaggccgcaguaucaaugg

SEQ ID NO: 1092056 - RNA, 19 nt, Artificial Sequence
  Description of Artificial Sequence: Synthetic oligonucleotide
uggacaacgggccaccaga

SEQ ID NO: 1092057 - RNA, 19 nt, Artificial Sequence
  Description of Artificial Sequence: Synthetic oligonucleotide
acagucacaguucuucuca

SEQ ID NO: 1092058 - RNA, 19 nt, Artificial Sequence
  Description of Artificial Sequence: Synthetic oligonucleotide
gacauggguaguaucaggc

SEQ ID NO: 1092059 - RNA, 19 nt, Artificial Sequence
  Description of Artificial Sequence: Synthetic oligonucleotide
gaagauucgcccuucuguc

SEQ ID NO: 1092060 - RNA, 19 nt, Artificial Sequence
  Description of Artificial Sequence: Synthetic oligonucleotide
aaggccguccacuuugugu

SEQ ID NO: 1092061 - RNA, 19 nt, Artificial Sequence
  Description of Artificial Sequence: Synthetic oligonucleotide
agauaggucgcacaacagu

SEQ ID NO: 1092062 - RNA, 19 nt, Artificial Sequence
  Description of Artificial Sequence: Synthetic oligonucleotide
ugguaaaugaucgcagccc

SEQ ID NO: 1092063 - RNA, 19 nt, Artificial Sequence
  Description of Artificial Sequence: Synthetic oligonucleotide
agcuugugcuccuguaccc

SEQ ID NO: 1092064 - RNA, 19 nt, Artificial Sequence
  Description of Artificial Sequence: Synthetic oligonucleotide
aacuccuggccccauuuug

SEQ ID NO: 1092065 - RNA, 19 nt, Artificial Sequence
  Description of Artificial Sequence: Synthetic oligonucleotide
aaugcaguucacaguuugg

SEQ ID NO: 1092066 - RNA, 19 nt, Artificial Sequence
  Description of Artificial Sequence: Synthetic oligonucleotide
acuacaguccuucuuccca

SEQ ID NO: 1092067 - RNA, 19 nt, Artificial Sequence
  Description of Artificial Sequence: Synthetic oligonucleotide
agauucgcccuucugucuc

SEQ ID NO: 1092068 - RNA, 19 nt, Artificial Sequence
  Description of Artificial Sequence: Synthetic oligonucleotide
ucgaagguuaucucauuga

SEQ ID NO: 1092069 - RNA, 19 nt, Artificial Sequence
  Description of Artificial Sequence: Synthetic oligonucleotide
ugagcgaggccccacacaa

SEQ ID NO: 1092070 - RNA, 19 nt, Artificial Sequence
  Description of Artificial Sequence: Synthetic oligonucleotide
uccagguuugcaugugggg

SEQ ID NO: 1092071 - RNA, 19 nt, Artificial Sequence
  Description of Artificial Sequence: Synthetic oligonucleotide
gguauauuugguacaagag

SEQ ID NO: 1092072 - RNA, 19 nt, Artificial Sequence
  Description of Artificial Sequence: Synthetic oligonucleotide
aaugaucgcagcccacagu

SEQ ID NO: 1092073 - RNA, 19 nt, Artificial Sequence
  Description of Artificial Sequence: Synthetic oligonucleotide
uugaagcgcaccuucacau

SEQ ID NO: 1092074 - RNA, 19 nt, Artificial Sequence
  Description of Artificial Sequence: Synthetic oligonucleotide
ucacccuaucacacgaggc

SEQ ID NO: 1092075 - RNA, 19 nt, Artificial Sequence
  Description of Artificial Sequence: Synthetic oligonucleotide
uuccaugugcagucgaugu

SEQ ID NO: 1092076 - RNA, 19 nt, Artificial Sequence
  Description of Artificial Sequence: Synthetic oligonucleotide
gaagccaagggaagaaccc

SEQ ID NO: 1092077 - RNA, 19 nt, Artificial Sequence
  Description of Artificial Sequence: Synthetic oligonucleotide
gauauuccaugugcagucg

SEQ ID NO: 1092078 - RNA, 19 nt, Artificial Sequence
  Description of Artificial Sequence: Synthetic oligonucleotide
augcaguucacaguuuggg

SEQ ID NO: 1092079 - RNA, 19 nt, Artificial Sequence
  Description of Artificial Sequence: Synthetic oligonucleotide
gaguacuugaaauuucugu

SEQ ID NO: 1092080 - RNA, 19 nt, Artificial Sequence
  Description of Artificial Sequence: Synthetic oligonucleotide
uccacgcuggacaacgggc

SEQ ID NO: 1092081 - RNA, 19 nt, Artificial Sequence
  Description of Artificial Sequence: Synthetic oligonucleotide
uggaagcgaacagugaucu

SEQ ID NO: 1092082 - RNA, 19 nt, Artificial Sequence
  Description of Artificial Sequence: Synthetic oligonucleotide
uuugugccaccaacuaccc

SEQ ID NO: 1092083 - RNA, 19 nt, Artificial Sequence
  Description of Artificial Sequence: Synthetic oligonucleotide
aggccguccacuuugugug

SEQ ID NO: 1092084 - RNA, 19 nt, Artificial Sequence
  Description of Artificial Sequence: Synthetic oligonucleotide
ugcuucuauaccccagucu

SEQ ID NO: 1092085 - RNA, 19 nt, Artificial Sequence
  Description of Artificial Sequence: Synthetic oligonucleotide
auaggucgcacaacagugc

SEQ ID NO: 1092086 - RNA, 19 nt, Artificial Sequence
  Description of Artificial Sequence: Synthetic oligonucleotide
cacccuaucacacgaggcc

SEQ ID NO: 1092087 - RNA, 19 nt, Artificial Sequence
  Description of Artificial Sequence: Synthetic oligonucleotide
aggaaggccguccacuuug

SEQ ID NO: 1092088 - RNA, 19 nt, Artificial Sequence
  Description of Artificial Sequence: Synthetic oligonucleotide
cagcaggacaacugcaucc

SEQ ID NO: 1092089 - RNA, 19 nt, Artificial Sequence
  Description of Artificial Sequence: Synthetic oligonucleotide
cugcuaaauaacccuuggg

SEQ ID NO: 1092090 - RNA, 19 nt, Artificial Sequence
  Description of Artificial Sequence: Synthetic oligonucleotide
agucguaggacagguacuc

SEQ ID NO: 1092091 - RNA, 19 nt, Artificial Sequence
  Description of Artificial Sequence: Synthetic oligonucleotide
uagucgaagguuaucucau

SEQ ID NO: 1092092 - RNA, 19 nt, Artificial Sequence
  Description of Artificial Sequence: Synthetic oligonucleotide
cagcgguagguauauuugg

SEQ ID NO: 1092093 - RNA, 19 nt, Artificial Sequence
  Description of Artificial Sequence: Synthetic oligonucleotide
gaagcgcaccuucacauuc

SEQ ID NO: 1092094 - RNA, 19 nt, Artificial Sequence
  Description of Artificial Sequence: Synthetic oligonucleotide
gauguuggguggguagugg

SEQ ID NO: 1092095 - RNA, 19 nt, Artificial Sequence
  Description of Artificial Sequence: Synthetic oligonucleotide
auugaacaaagggugggug

SEQ ID NO: 1092096 - RNA, 19 nt, Artificial Sequence
  Description of Artificial Sequence: Synthetic oligonucleotide
ucguguauacgccuggcuu

SEQ ID NO: 1092097 - RNA, 19 nt, Artificial Sequence
  Description of Artificial Sequence: Synthetic oligonucleotide
uuuggguugugaggaagag

SEQ ID NO: 1092098 - RNA, 19 nt, Artificial Sequence
  Description of Artificial Sequence: Synthetic oligonucleotide
ucgcccuucugucuccacg

SEQ ID NO: 1092099 - RNA, 19 nt, Artificial Sequence
  Description of Artificial Sequence: Synthetic oligonucleotide
ugucauccauaaagcaaug

SEQ ID NO: 1092100 - RNA, 19 nt, Artificial Sequence
  Description of Artificial Sequence: Synthetic oligonucleotide
uguuguuaggcaccuugau

SEQ ID NO: 1092101 - RNA, 19 nt, Artificial Sequence
  Description of Artificial Sequence: Synthetic oligonucleotide
uaggucgcacaacagugcu

SEQ ID NO: 1092102 - RNA, 19 nt, Artificial Sequence
  Description of Artificial Sequence: Synthetic oligonucleotide
ugggugaugaugcguuuga

SEQ ID NO: 1092103 - RNA, 19 nt, Artificial Sequence
  Description of Artificial Sequence: Synthetic oligonucleotide
uucuauaccccagucugcu

SEQ ID NO: 1092104 - RNA, 19 nt, Artificial Sequence
  Description of Artificial Sequence: Synthetic oligonucleotide
gaucgcagcccacagucac

SEQ ID NO: 1092105 - RNA, 19 nt, Artificial Sequence
  Description of Artificial Sequence: Synthetic oligonucleotide
ugauccgaauggaagcgaa

SEQ ID NO: 1092106 - RNA, 19 nt, Artificial Sequence
  Description of Artificial Sequence: Synthetic oligonucleotide
ggugaugaugcguuugagc

SEQ ID NO: 1092107 - RNA, 19 nt, Artificial Sequence
  Description of Artificial Sequence: Synthetic oligonucleotide
uguguaggagugauccgaa

SEQ ID NO: 1092108 - RNA, 19 nt, Artificial Sequence
  Description of Artificial Sequence: Synthetic oligonucleotide
aucgccacaguuguccuuc

SEQ ID NO: 1092109 - RNA, 19 nt, Artificial Sequence
  Description of Artificial Sequence: Synthetic oligonucleotide
auggguaguaucaggcagg

SEQ ID NO: 1092110 - RNA, 19 nt, Artificial Sequence
  Description of Artificial Sequence: Synthetic oligonucleotide
gauaguaggggcugcuaaa

SEQ ID NO: 1092111 - RNA, 19 nt, Artificial Sequence
  Description of Artificial Sequence: Synthetic oligonucleotide
uuggggucuaccagguaga

SEQ ID NO: 1092112 - RNA, 19 nt, Artificial Sequence
  Description of Artificial Sequence: Synthetic oligonucleotide
ugucacaggggcguuggag

SEQ ID NO: 1092113 - RNA, 19 nt, Artificial Sequence
  Description of Artificial Sequence: Synthetic oligonucleotide
gcugcuaaauaacccuugg

SEQ ID NO: 1092114 - RNA, 19 nt, Artificial Sequence
  Description of Artificial Sequence: Synthetic oligonucleotide
cuguuugguaaaugaucgc

SEQ ID NO: 1092115 - RNA, 19 nt, Artificial Sequence
  Description of Artificial Sequence: Synthetic oligonucleotide
aggauggaagccugucauc

SEQ ID NO: 1092116 - RNA, 19 nt, Artificial Sequence
  Description of Artificial Sequence: Synthetic oligonucleotide
cacauuccuguuguuaggc

SEQ ID NO: 1092117 - RNA, 19 nt, Artificial Sequence
  Description of Artificial Sequence: Synthetic oligonucleotide
augcuucuauaccccaguc

SEQ ID NO: 1092118 - RNA, 19 nt, Artificial Sequence
  Description of Artificial Sequence: Synthetic oligonucleotide
acuacccgagccuguuugg

SEQ ID NO: 1092119 - RNA, 19 nt, Artificial Sequence
  Description of Artificial Sequence: Synthetic oligonucleotide
ucacacgaggccucaucag

SEQ ID NO: 1092120 - RNA, 19 nt, Artificial Sequence
  Description of Artificial Sequence: Synthetic oligonucleotide
ugaacaaagggugggugau

SEQ ID NO: 1092121 - RNA, 19 nt, Artificial Sequence
  Description of Artificial Sequence: Synthetic oligonucleotide
ugcaggaucagggcuccgg

SEQ ID NO: 1092122 - RNA, 19 nt, Artificial Sequence
  Description of Artificial Sequence: Synthetic oligonucleotide
agcgaggccccacacaagu

SEQ ID NO: 1092123 - RNA, 19 nt, Artificial Sequence
  Description of Artificial Sequence: Synthetic oligonucleotide
uguaccccaguggagcugc

SEQ ID NO: 1092124 - RNA, 19 nt, Artificial Sequence
  Description of Artificial Sequence: Synthetic oligonucleotide
uaucacacgaggccucauc

SEQ ID NO: 1092125 - RNA, 19 nt, Artificial Sequence
  Description of Artificial Sequence: Synthetic oligonucleotide
aguuuggguugugaggaag

SEQ ID NO: 1092126 - RNA, 19 nt, Artificial Sequence
  Description of Artificial Sequence: Synthetic oligonucleotide
guacucagcgaggaagccg

SEQ ID NO: 1092127 - RNA, 19 nt, Artificial Sequence
  Description of Artificial Sequence: Synthetic oligonucleotide
ugucauagucgaagguuau

SEQ ID NO: 1092128 - RNA, 19 nt, Artificial Sequence
  Description of Artificial Sequence: Synthetic oligonucleotide
uugaaagucucagcaggac

SEQ ID NO: 1092129 - RNA, 19 nt, Artificial Sequence
  Description of Artificial Sequence: Synthetic oligonucleotide
auauuccaugugcagucga

SEQ ID NO: 1092130 - RNA, 19 nt, Artificial Sequence
  Description of Artificial Sequence: Synthetic oligonucleotide
auggaagcgaacagugauc

SEQ ID NO: 1092131 - RNA, 19 nt, Artificial Sequence
  Description of Artificial Sequence: Synthetic oligonucleotide
gguaaaugaucgcagccca

SEQ ID NO: 1092132 - RNA, 19 nt, Artificial Sequence
  Description of Artificial Sequence: Synthetic oligonucleotide
uugugccaccaacuacccg

SEQ ID NO: 1092133 - RNA, 19 nt, Artificial Sequence
  Description of Artificial Sequence: Synthetic oligonucleotide
uacaagagacgaccuucac

SEQ ID NO: 1092134 - RNA, 19 nt, Artificial Sequence
  Description of Artificial Sequence: Synthetic oligonucleotide
agcaacgcaaugucauagu

SEQ ID NO: 1092135 - RNA, 19 nt, Artificial Sequence
  Description of Artificial Sequence: Synthetic oligonucleotide
cacucaaggagccaccaca

SEQ ID NO: 1092136 - RNA, 19 nt, Artificial Sequence
  Description of Artificial Sequence: Synthetic oligonucleotide
uggggugaucugcuguggc

SEQ ID NO: 1092137 - RNA, 19 nt, Artificial Sequence
  Description of Artificial Sequence: Synthetic oligonucleotide
cagauaggucgcacaacag

SEQ ID NO: 1092138 - RNA, 19 nt, Artificial Sequence
  Description of Artificial Sequence: Synthetic oligonucleotide
caccacaguaccucucccc

SEQ ID NO: 1092139 - RNA, 19 nt, Artificial Sequence
  Description of Artificial Sequence: Synthetic oligonucleotide
gcagauaggucgcacaaca

SEQ ID NO: 1092140 - RNA, 19 nt, Artificial Sequence
  Description of Artificial Sequence: Synthetic oligonucleotide
gcuaaauaacccuugggcu

SEQ ID NO: 1092141 - RNA, 19 nt, Artificial Sequence
  Description of Artificial Sequence: Synthetic oligonucleotide
cagcaacgcaaugucauag

SEQ ID NO: 1092142 - RNA, 19 nt, Artificial Sequence
  Description of Artificial Sequence: Synthetic oligonucleotide
aguggccuggauaguaggg

SEQ ID NO: 1092143 - RNA, 19 nt, Artificial Sequence
  Description of Artificial Sequence: Synthetic oligonucleotide
cacuacaguccuucuuccc

SEQ ID NO: 1092144 - RNA, 19 nt, Artificial Sequence
  Description of Artificial Sequence: Synthetic oligonucleotide
uggguaguaucaggcaggc

SEQ ID NO: 1092145 - RNA, 19 nt, Artificial Sequence
  Description of Artificial Sequence: Synthetic oligonucleotide
gauccagucucgaacugca

SEQ ID NO: 1092146 - RNA, 19 nt, Artificial Sequence
  Description of Artificial Sequence: Synthetic oligonucleotide
acauuccuguuguuaggca

SEQ ID NO: 1092147 - RNA, 19 nt, Artificial Sequence
  Description of Artificial Sequence: Synthetic oligonucleotide
uagguauauuugguacaag

SEQ ID NO: 1092148 - RNA, 19 nt, Artificial Sequence
  Description of Artificial Sequence: Synthetic oligonucleotide
ucuccacgcuggacaacgg

SEQ ID NO: 1092149 - RNA, 19 nt, Artificial Sequence
  Description of Artificial Sequence: Synthetic oligonucleotide
gguacaagagacgaccuuc

SEQ ID NO: 1092150 - RNA, 19 nt, Artificial Sequence
  Description of Artificial Sequence: Synthetic oligonucleotide
gccaccaacuacccgagcc

SEQ ID NO: 1092151 - RNA, 19 nt, Artificial Sequence
  Description of Artificial Sequence: Synthetic oligonucleotide
gcucaaacagagcccauug

SEQ ID NO: 1092152 - RNA, 19 nt, Artificial Sequence
  Description of Artificial Sequence: Synthetic oligonucleotide
gauucgcccuucugucucc

SEQ ID NO: 1092153 - RNA, 19 nt, Artificial Sequence
  Description of Artificial Sequence: Synthetic oligonucleotide
agguuaucucauugaacaa

SEQ ID NO: 1092154 - RNA, 19 nt, Artificial Sequence
  Description of Artificial Sequence: Synthetic oligonucleotide
guagguauauuugguacaa

SEQ ID NO: 1092155 - RNA, 19 nt, Artificial Sequence
  Description of Artificial Sequence: Synthetic oligonucleotide
cuaaauaacccuugggcuu

SEQ ID NO: 1092156 - RNA, 19 nt, Artificial Sequence
  Description of Artificial Sequence: Synthetic oligonucleotide
cugucauccauaaagcaau

SEQ ID NO: 1092157 - RNA, 19 nt, Artificial Sequence
  Description of Artificial Sequence: Synthetic oligonucleotide
uggguguucauggcaggcc

SEQ ID NO: 1092158 - RNA, 19 nt, Artificial Sequence
  Description of Artificial Sequence: Synthetic oligonucleotide
ucucaagcuccagcaacgc

SEQ ID NO: 1092159 - RNA, 19 nt, Artificial Sequence
  Description of Artificial Sequence: Synthetic oligonucleotide
ugaucgcagcccacaguca

SEQ ID NO: 1092160 - RNA, 19 nt, Artificial Sequence
  Description of Artificial Sequence: Synthetic oligonucleotide
agugguccuggcaugucuc

SEQ ID NO: 1092161 - RNA, 19 nt, Artificial Sequence
  Description of Artificial Sequence: Synthetic oligonucleotide
ucgcacaacagugcuguac

SEQ ID NO: 1092162 - RNA, 19 nt, Artificial Sequence
  Description of Artificial Sequence: Synthetic oligonucleotide
agcccauuguggcagcggu

SEQ ID NO: 1092163 - RNA, 19 nt, Artificial Sequence
  Description of Artificial Sequence: Synthetic oligonucleotide
augacacggaucucacccu

SEQ ID NO: 1092164 - RNA, 19 nt, Artificial Sequence
  Description of Artificial Sequence: Synthetic oligonucleotide
aggcagauaggucgcacaa

SEQ ID NO: 1092165 - RNA, 19 nt, Artificial Sequence
  Description of Artificial Sequence: Synthetic oligonucleotide
cacgaggccucaucagacc

SEQ ID NO: 1092166 - RNA, 19 nt, Artificial Sequence
  Description of Artificial Sequence: Synthetic oligonucleotide
auaguaggggcugcuaaau

SEQ ID NO: 1092167 - RNA, 19 nt, Artificial Sequence
  Description of Artificial Sequence: Synthetic oligonucleotide
agcugcguuugcucugguc

SEQ ID NO: 1092168 - RNA, 19 nt, Artificial Sequence
  Description of Artificial Sequence: Synthetic oligonucleotide
cuccacgcuggacaacggg

SEQ ID NO: 1092169 - RNA, 19 nt, Artificial Sequence
  Description of Artificial Sequence: Synthetic oligonucleotide
guaggggcugcuaaauaac

SEQ ID NO: 1092170 - RNA, 19 nt, Artificial Sequence
  Description of Artificial Sequence: Synthetic oligonucleotide
ugguacaagagacgaccuu

SEQ ID NO: 1092171 - RNA, 19 nt, Artificial Sequence
  Description of Artificial Sequence: Synthetic oligonucleotide
gggagccucguguauacgc

SEQ ID NO: 1092172 - RNA, 19 nt, Artificial Sequence
  Description of Artificial Sequence: Synthetic oligonucleotide
uaguaggggcugcuaaaua

SEQ ID NO: 1092173 - RNA, 19 nt, Artificial Sequence
  Description of Artificial Sequence: Synthetic oligonucleotide
gaauggaagcgaacaguga

SEQ ID NO: 1092174 - RNA, 19 nt, Artificial Sequence
  Description of Artificial Sequence: Synthetic oligonucleotide
guauacgccuggcuuguuc

SEQ ID NO: 1092175 - RNA, 19 nt, Artificial Sequence
  Description of Artificial Sequence: Synthetic oligonucleotide
agaugagcgaggccccaca

SEQ ID NO: 1092176 - RNA, 19 nt, Artificial Sequence
  Description of Artificial Sequence: Synthetic oligonucleotide
agucguugauguugucaca

SEQ ID NO: 1092177 - RNA, 19 nt, Artificial Sequence
  Description of Artificial Sequence: Synthetic oligonucleotide
ccuggccccauuuuggaag

SEQ ID NO: 1092178 - RNA, 19 nt, Artificial Sequence
  Description of Artificial Sequence: Synthetic oligonucleotide
uccaugugcagucgauguu

SEQ ID NO: 1092179 - RNA, 19 nt, Artificial Sequence
  Description of Artificial Sequence: Synthetic oligonucleotide
ggagacacuucccauugga

SEQ ID NO: 1092180 - RNA, 19 nt, Artificial Sequence
  Description of Artificial Sequence: Synthetic oligonucleotide
uacuccgcuggcuucucaa

SEQ ID NO: 1092181 - RNA, 19 nt, Artificial Sequence
  Description of Artificial Sequence: Synthetic oligonucleotide
gaacaaagggugggugaug

SEQ ID NO: 1092182 - RNA, 19 nt, Artificial Sequence
  Description of Artificial Sequence: Synthetic oligonucleotide
cuacguaguccuuggggca

SEQ ID NO: 1092183 - RNA, 19 nt, Artificial Sequence
  Description of Artificial Sequence: Synthetic oligonucleotide
caaggauggaagccuguca

SEQ ID NO: 1092184 - RNA, 19 nt, Artificial Sequence
  Description of Artificial Sequence: Synthetic oligonucleotide
acagugcuguacuccgcug

SEQ ID NO: 1092185 - RNA, 19 nt, Artificial Sequence
  Description of Artificial Sequence: Synthetic oligonucleotide
gcgaacagugaucuugcug

SEQ ID NO: 1092186 - RNA, 19 nt, Artificial Sequence
  Description of Artificial Sequence: Synthetic oligonucleotide
gguuaucucauugaacaaa

SEQ ID NO: 1092187 - RNA, 19 nt, Artificial Sequence
  Description of Artificial Sequence: Synthetic oligonucleotide
ggauggaagccugucauca

SEQ ID NO: 1092188 - RNA, 19 nt, Artificial Sequence
  Description of Artificial Sequence: Synthetic oligonucleotide
cuguuguuaggcaccuuga

SEQ ID NO: 1092189 - RNA, 19 nt, Artificial Sequence
  Description of Artificial Sequence: Synthetic oligonucleotide
uguuaggcaccuugauauu

SEQ ID NO: 1092190 - RNA, 19 nt, Artificial Sequence
  Description of Artificial Sequence: Synthetic oligonucleotide
agccuggaagauucgcccu

SEQ ID NO: 1092191 - RNA, 19 nt, Artificial Sequence
  Description of Artificial Sequence: Synthetic oligonucleotide
cagggagccucguguauac

SEQ ID NO: 1092192 - RNA, 19 nt, Artificial Sequence
  Description of Artificial Sequence: Synthetic oligonucleotide
agcgguagguauauuuggu

SEQ ID NO: 1092193 - RNA, 19 nt, Artificial Sequence
  Description of Artificial Sequence: Synthetic oligonucleotide
gauccgaauggaagcgaac

SEQ ID NO: 1092194 - RNA, 19 nt, Artificial Sequence
  Description of Artificial Sequence: Synthetic oligonucleotide
gauggaagccugucaucaa

SEQ ID NO: 1092195 - RNA, 19 nt, Artificial Sequence
  Description of Artificial Sequence: Synthetic oligonucleotide
augagcgaggccccacaca

SEQ ID NO: 1092196 - RNA, 19 nt, Artificial Sequence
  Description of Artificial Sequence: Synthetic oligonucleotide
cacacgaggccucaucaga

SEQ ID NO: 1092197 - RNA, 19 nt, Artificial Sequence
  Description of Artificial Sequence: Synthetic oligonucleotide
acccuaucacacgaggccu

SEQ ID NO: 1092198 - RNA, 19 nt, Artificial Sequence
  Description of Artificial Sequence: Synthetic oligonucleotide
cccguugaucucuacguag

SEQ ID NO: 1092199 - RNA, 19 nt, Artificial Sequence
  Description of Artificial Sequence: Synthetic oligonucleotide
cuauaccccagucugcucu

SEQ ID NO: 1092200 - RNA, 19 nt, Artificial Sequence
  Description of Artificial Sequence: Synthetic oligonucleotide
cuucaccccagcucaccac

SEQ ID NO: 1092201 - RNA, 19 nt, Artificial Sequence
  Description of Artificial Sequence: Synthetic oligonucleotide
agggccacucacccucauc

SEQ ID NO: 1092202 - RNA, 19 nt, Artificial Sequence
  Description of Artificial Sequence: Synthetic oligonucleotide
ugaagcgcaccuucacauu

SEQ ID NO: 1092203 - RNA, 19 nt, Artificial Sequence
  Description of Artificial Sequence: Synthetic oligonucleotide
gaggccccacacaaguggc

SEQ ID NO: 1092204 - RNA, 19 nt, Artificial Sequence
  Description of Artificial Sequence: Synthetic oligonucleotide
uacguaguccuuggggcaa

SEQ ID NO: 1092205 - RNA, 19 nt, Artificial Sequence
  Description of Artificial Sequence: Synthetic oligonucleotide
cagcccacagucacaguuc

SEQ ID NO: 1092206 - RNA, 19 nt, Artificial Sequence
  Description of Artificial Sequence: Synthetic oligonucleotide
gaagaggccgcaguaucaa

SEQ ID NO: 1092207 - RNA, 19 nt, Artificial Sequence
  Description of Artificial Sequence: Synthetic oligonucleotide
ugcguuugcucugguccag

SEQ ID NO: 1092208 - RNA, 19 nt, Artificial Sequence
  Description of Artificial Sequence: Synthetic oligonucleotide
guaaaugaucgcagcccac

SEQ ID NO: 1092209 - RNA, 19 nt, Artificial Sequence
  Description of Artificial Sequence: Synthetic oligonucleotide
acaguaccucuccccguug

SEQ ID NO: 1092210 - RNA, 19 nt, Artificial Sequence
  Description of Artificial Sequence: Synthetic oligonucleotide
gcagcgguagguauauuug

SEQ ID NO: 1092211 - RNA, 19 nt, Artificial Sequence
  Description of Artificial Sequence: Synthetic oligonucleotide
cgguagguauauuugguac

SEQ ID NO: 1092212 - RNA, 19 nt, Artificial Sequence
  Description of Artificial Sequence: Synthetic oligonucleotide
gaaggccguccacuuugug

SEQ ID NO: 1092213 - RNA, 19 nt, Artificial Sequence
  Description of Artificial Sequence: Synthetic oligonucleotide
accccagucugcucuuuga

SEQ ID NO: 1092214 - RNA, 19 nt, Artificial Sequence
  Description of Artificial Sequence: Synthetic oligonucleotide
gugggugaugaugcguuug

SEQ ID NO: 1092215 - RNA, 19 nt, Artificial Sequence
  Description of Artificial Sequence: Synthetic oligonucleotide
agcgcaccuucacauuccu

SEQ ID NO: 1092216 - RNA, 19 nt, Artificial Sequence
  Description of Artificial Sequence: Synthetic oligonucleotide
gccuguaacccagauggcc

SEQ ID NO: 1092217 - RNA, 19 nt, Artificial Sequence
  Description of Artificial Sequence: Synthetic oligonucleotide
uauaccccagucugcucuu

SEQ ID NO: 1092218 - RNA, 19 nt, Artificial Sequence
  Description of Artificial Sequence: Synthetic oligonucleotide
auacgccuggcuuguuccu

SEQ ID NO: 1092219 - RNA, 19 nt, Artificial Sequence
  Description of Artificial Sequence: Synthetic oligonucleotide
gccuguuugguaaaugauc

SEQ ID NO: 1092220 - RNA, 19 nt, Artificial Sequence
  Description of Artificial Sequence: Synthetic oligonucleotide
ggauaguaggggcugcuaa

SEQ ID NO: 1092221 - RNA, 19 nt, Artificial Sequence
  Description of Artificial Sequence: Synthetic oligonucleotide
guaacccagauggccuugc

SEQ ID NO: 1092222 - RNA, 19 nt, Artificial Sequence
  Description of Artificial Sequence: Synthetic oligonucleotide
ggccgcaguaucaauggcc

SEQ ID NO: 1092223 - RNA, 19 nt, Artificial Sequence
  Description of Artificial Sequence: Synthetic oligonucleotide
cguguauacgccuggcuug

SEQ ID NO: 1092224 - RNA, 19 nt, Artificial Sequence
  Description of Artificial Sequence: Synthetic oligonucleotide
cccaucgccacaguugucc

SEQ ID NO: 1092225 - RNA, 19 nt, Artificial Sequence
  Description of Artificial Sequence: Synthetic oligonucleotide
cacaggggcguuggagucg

SEQ ID NO: 1092226 - RNA, 19 nt, Artificial Sequence
  Description of Artificial Sequence: Synthetic oligonucleotide
acgcuggacaacgggccac

SEQ ID NO: 1092227 - RNA, 19 nt, Artificial Sequence
  Description of Artificial Sequence: Synthetic oligonucleotide
ugaugcguuugagcuugug

SEQ ID NO: 1092228 - RNA, 19 nt, Artificial Sequence
  Description of Artificial Sequence: Synthetic oligonucleotide
cacaucauccgugggguga

SEQ ID NO: 1092229 - RNA, 19 nt, Artificial Sequence
  Description of Artificial Sequence: Synthetic oligonucleotide
aggaagccggugucugugu

SEQ ID NO: 1092230 - RNA, 19 nt, Artificial Sequence
  Description of Artificial Sequence: Synthetic oligonucleotide
caagggaagaacccugagu

SEQ ID NO: 1092231 - RNA, 19 nt, Artificial Sequence
  Description of Artificial Sequence: Synthetic oligonucleotide
uacccgagccuguuuggua

SEQ ID NO: 1092232 - RNA, 19 nt, Artificial Sequence
  Description of Artificial Sequence: Synthetic oligonucleotide
agcgaacagugaucuugcu

SEQ ID NO: 1092233 - RNA, 19 nt, Artificial Sequence
  Description of Artificial Sequence: Synthetic oligonucleotide
caggcagauaggucgcaca

SEQ ID NO: 1092234 - RNA, 19 nt, Artificial Sequence
  Description of Artificial Sequence: Synthetic oligonucleotide
ggagccucguguauacgcc

SEQ ID NO: 1092235 - RNA, 19 nt, Artificial Sequence
  Description of Artificial Sequence: Synthetic oligonucleotide
agccuguuugguaaaugau

SEQ ID NO: 1092236 - RNA, 19 nt, Artificial Sequence
  Description of Artificial Sequence: Synthetic oligonucleotide
uccugggaaugcaguucac

SEQ ID NO: 1092237 - RNA, 19 nt, Artificial Sequence
  Description of Artificial Sequence: Synthetic oligonucleotide
agacgaccuucacccuauc

SEQ ID NO: 1092238 - RNA, 19 nt, Artificial Sequence
  Description of Artificial Sequence: Synthetic oligonucleotide
caugcuucuauaccccagu

SEQ ID NO: 1092239 - RNA, 19 nt, Artificial Sequence
  Description of Artificial Sequence: Synthetic oligonucleotide
gcguuugagcuugugcucc

SEQ ID NO: 1092240 - RNA, 19 nt, Artificial Sequence
  Description of Artificial Sequence: Synthetic oligonucleotide
cugcguuugcucuggucca

SEQ ID NO: 1092241 - RNA, 19 nt, Artificial Sequence
  Description of Artificial Sequence: Synthetic oligonucleotide
ggguguucauggcaggcca

SEQ ID NO: 1092242 - RNA, 19 nt, Artificial Sequence
  Description of Artificial Sequence: Synthetic oligonucleotide
agugguauguuggggucua

SEQ ID NO: 1092243 - RNA, 19 nt, Artificial Sequence
  Description of Artificial Sequence: Synthetic oligonucleotide
ggcugcuaaauaacccuug

SEQ ID NO: 1092244 - RNA, 19 nt, Artificial Sequence
  Description of Artificial Sequence: Synthetic oligonucleotide
uggauaguaggggcugcua

SEQ ID NO: 1092245 - RNA, 19 nt, Artificial Sequence
  Description of Artificial Sequence: Synthetic oligonucleotide
uggagucguaggacaggua

SEQ ID NO: 1092246 - RNA, 19 nt, Artificial Sequence
  Description of Artificial Sequence: Synthetic oligonucleotide
caaugucauagucgaaggu

SEQ ID NO: 1092247 - RNA, 19 nt, Artificial Sequence
  Description of Artificial Sequence: Synthetic oligonucleotide
ggggcugcuaaauaacccu

SEQ ID NO: 1092248 - RNA, 19 nt, Artificial Sequence
  Description of Artificial Sequence: Synthetic oligonucleotide
ggacagguacucagcgagg

SEQ ID NO: 1092249 - RNA, 19 nt, Artificial Sequence
  Description of Artificial Sequence: Synthetic oligonucleotide
agcgaggaagccggugucu

SEQ ID NO: 1092250 - RNA, 19 nt, Artificial Sequence
  Description of Artificial Sequence: Synthetic oligonucleotide
guaccucuccccguugauc

SEQ ID NO: 1092251 - RNA, 19 nt, Artificial Sequence
  Description of Artificial Sequence: Synthetic oligonucleotide
acaggggcguuggagucgu

SEQ ID NO: 1092252 - RNA, 19 nt, Artificial Sequence
  Description of Artificial Sequence: Synthetic oligonucleotide
cacggaucucacccuucug

SEQ ID NO: 1092253 - RNA, 19 nt, Artificial Sequence
  Description of Artificial Sequence: Synthetic oligonucleotide
gacacggaucucacccuuc

SEQ ID NO: 1092254 - RNA, 19 nt, Artificial Sequence
  Description of Artificial Sequence: Synthetic oligonucleotide
cucagcgaggaagccggug

SEQ ID NO: 1092255 - RNA, 19 nt, Artificial Sequence
  Description of Artificial Sequence: Synthetic oligonucleotide
cagccaguugggagagaug

SEQ ID NO: 1092256 - RNA, 19 nt, Artificial Sequence
  Description of Artificial Sequence: Synthetic oligonucleotide
cccauuggaacacuugaaa

SEQ ID NO: 1092257 - RNA, 19 nt, Artificial Sequence
  Description of Artificial Sequence: Synthetic oligonucleotide
agggagccucguguauacg

SEQ ID NO: 1092258 - RNA, 19 nt, Artificial Sequence
  Description of Artificial Sequence: Synthetic oligonucleotide
gggccacucacccucaucu

SEQ ID NO: 1092259 - RNA, 19 nt, Artificial Sequence
  Description of Artificial Sequence: Synthetic oligonucleotide
ggacaacgggccaccagag

SEQ ID NO: 1092260 - RNA, 19 nt, Artificial Sequence
  Description of Artificial Sequence: Synthetic oligonucleotide
guguucauggcaggccauc

SEQ ID NO: 1092261 - RNA, 19 nt, Artificial Sequence
  Description of Artificial Sequence: Synthetic oligonucleotide
ccacagcugcgcaucuugg

SEQ ID NO: 1092262 - RNA, 19 nt, Artificial Sequence
  Description of Artificial Sequence: Synthetic oligonucleotide
uggggucuaccagguagaa

SEQ ID NO: 1092263 - RNA, 19 nt, Artificial Sequence
  Description of Artificial Sequence: Synthetic oligonucleotide
guuggguggguaguggccu

SEQ ID NO: 1092264 - RNA, 19 nt, Artificial Sequence
  Description of Artificial Sequence: Synthetic oligonucleotide
agccucguguauacgccug

SEQ ID NO: 1092265 - RNA, 19 nt, Artificial Sequence
  Description of Artificial Sequence: Synthetic oligonucleotide
ggggugaucugcuguggca

SEQ ID NO: 1092266 - RNA, 19 nt, Artificial Sequence
  Description of Artificial Sequence: Synthetic oligonucleotide
gagccucguguauacgccu

SEQ ID NO: 1092267 - RNA, 19 nt, Artificial Sequence
  Description of Artificial Sequence: Synthetic oligonucleotide
gagucguaggacagguacu

SEQ ID NO: 1092268 - RNA, 19 nt, Artificial Sequence
  Description of Artificial Sequence: Synthetic oligonucleotide
cauugaacaaagggugggu

SEQ ID NO: 1092269 - RNA, 19 nt, Artificial Sequence
  Description of Artificial Sequence: Synthetic oligonucleotide
gcaccuugauauuccaugu

SEQ ID NO: 1092270 - RNA, 19 nt, Artificial Sequence
  Description of Artificial Sequence: Synthetic oligonucleotide
acguaguccuuggggcaag

SEQ ID NO: 1092271 - RNA, 19 nt, Artificial Sequence
  Description of Artificial Sequence: Synthetic oligonucleotide
caucugcauuugugccacc

SEQ ID NO: 1092272 - RNA, 19 nt, Artificial Sequence
  Description of Artificial Sequence: Synthetic oligonucleotide
caguaccucuccccguuga

SEQ ID NO: 1092273 - RNA, 19 nt, Artificial Sequence
  Description of Artificial Sequence: Synthetic oligonucleotide
cauuguggcagcgguaggu

SEQ ID NO: 1092274 - RNA, 19 nt, Artificial Sequence
  Description of Artificial Sequence: Synthetic oligonucleotide
gguaguggccuggauagua

SEQ ID NO: 1092275 - RNA, 19 nt, Artificial Sequence
  Description of Artificial Sequence: Synthetic oligonucleotide
gagcgaggccccacacaag

SEQ ID NO: 1092276 - RNA, 19 nt, Artificial Sequence
  Description of Artificial Sequence: Synthetic oligonucleotide
aggucgcacaacagugcug

SEQ ID NO: 1092277 - RNA, 19 nt, Artificial Sequence
  Description of Artificial Sequence: Synthetic oligonucleotide
gacaacgggccaccagagu

SEQ ID NO: 1092278 - RNA, 19 nt, Artificial Sequence
  Description of Artificial Sequence: Synthetic oligonucleotide
cuacaguccuucuucccau

SEQ ID NO: 1092279 - RNA, 19 nt, Artificial Sequence
  Description of Artificial Sequence: Synthetic oligonucleotide
gcgguagguauauuuggua

SEQ ID NO: 1092280 - RNA, 19 nt, Artificial Sequence
  Description of Artificial Sequence: Synthetic oligonucleotide
cucugagcgcagccuucac

SEQ ID NO: 1092281 - RNA, 19 nt, Artificial Sequence
  Description of Artificial Sequence: Synthetic oligonucleotide
accaacuacccgagccugu

SEQ ID NO: 1092282 - RNA, 19 nt, Artificial Sequence
  Description of Artificial Sequence: Synthetic oligonucleotide
gcuguacuccgcuggcuuc

SEQ ID NO: 1092283 - RNA, 19 nt, Artificial Sequence
  Description of Artificial Sequence: Synthetic oligonucleotide
uguacuccgcuggcuucuc

SEQ ID NO: 1092284 - RNA, 19 nt, Artificial Sequence
  Description of Artificial Sequence: Synthetic oligonucleotide
acuucccauuggaacacuu

SEQ ID NO: 1092285 - RNA, 19 nt, Artificial Sequence
  Description of Artificial Sequence: Synthetic oligonucleotide
cacgcuggacaacgggcca

SEQ ID NO: 1092286 - RNA, 19 nt, Artificial Sequence
  Description of Artificial Sequence: Synthetic oligonucleotide
cuguaccccaguggagcug

SEQ ID NO: 1092287 - RNA, 19 nt, Artificial Sequence
  Description of Artificial Sequence: Synthetic oligonucleotide
gucguaggacagguacuca

SEQ ID NO: 1092288 - RNA, 19 nt, Artificial Sequence
  Description of Artificial Sequence: Synthetic oligonucleotide
aucgcagcccacagucaca

SEQ ID NO: 1092289 - RNA, 19 nt, Artificial Sequence
  Description of Artificial Sequence: Synthetic oligonucleotide
gagacgaccuucacccuau

SEQ ID NO: 1092290 - RNA, 19 nt, Artificial Sequence
  Description of Artificial Sequence: Synthetic oligonucleotide
ggggucuaccagguagaag

SEQ ID NO: 1092291 - RNA, 19 nt, Artificial Sequence
  Description of Artificial Sequence: Synthetic oligonucleotide
ggcagauaggucgcacaac

SEQ ID NO: 1092292 - RNA, 19 nt, Artificial Sequence
  Description of Artificial Sequence: Synthetic oligonucleotide
uaccccaguggagcugcgu

SEQ ID NO: 1092293 - RNA, 19 nt, Artificial Sequence
  Description of Artificial Sequence: Synthetic oligonucleotide
cgcccuucugucuccacgc

SEQ ID NO: 1092294 - RNA, 19 nt, Artificial Sequence
  Description of Artificial Sequence: Synthetic oligonucleotide
agucgauguugggugggua

SEQ ID NO: 1092295 - RNA, 19 nt, Artificial Sequence
  Description of Artificial Sequence: Synthetic oligonucleotide
ggguugcccuugcucaaac

SEQ ID NO: 1092296 - RNA, 19 nt, Artificial Sequence
  Description of Artificial Sequence: Synthetic oligonucleotide
cucguguauacgccuggcu

SEQ ID NO: 1092297 - RNA, 19 nt, Artificial Sequence
  Description of Artificial Sequence: Synthetic oligonucleotide
cgaccuucacccuaucaca

SEQ ID NO: 1092298 - RNA, 19 nt, Artificial Sequence
  Description of Artificial Sequence: Synthetic oligonucleotide
caagcuccagcaacgcaau

SEQ ID NO: 1092299 - RNA, 19 nt, Artificial Sequence
  Description of Artificial Sequence: Synthetic oligonucleotide
guguauacgccuggcuugu

SEQ ID NO: 1092300 - RNA, 19 nt, Artificial Sequence
  Description of Artificial Sequence: Synthetic oligonucleotide
aagugcccagugguauguu

SEQ ID NO: 1092301 - RNA, 19 nt, Artificial Sequence
  Description of Artificial Sequence: Synthetic oligonucleotide
ccauuguggcagcgguagg

SEQ ID NO: 1092302 - RNA, 19 nt, Artificial Sequence
  Description of Artificial Sequence: Synthetic oligonucleotide
cagggcguggaggcucacc

SEQ ID NO: 1092303 - RNA, 19 nt, Artificial Sequence
  Description of Artificial Sequence: Synthetic oligonucleotide
cagucucgaacugcaggga

SEQ ID NO: 1092304 - RNA, 19 nt, Artificial Sequence
  Description of Artificial Sequence: Synthetic oligonucleotide
guacuccgcuggcuucuca

SEQ ID NO: 1092305 - RNA, 19 nt, Artificial Sequence
  Description of Artificial Sequence: Synthetic oligonucleotide
caggguugcccuugcucaa

SEQ ID NO: 1092306 - RNA, 19 nt, Artificial Sequence
  Description of Artificial Sequence: Synthetic oligonucleotide
aggguugcccuugcucaaa

SEQ ID NO: 1092307 - RNA, 19 nt, Artificial Sequence
  Description of Artificial Sequence: Synthetic oligonucleotide
cccuguggguguucauggc

SEQ ID NO: 1092308 - RNA, 19 nt, Artificial Sequence
  Description of Artificial Sequence: Synthetic oligonucleotide
cccuaucacacgaggccuc

SEQ ID NO: 1092309 - RNA, 19 nt, Artificial Sequence
  Description of Artificial Sequence: Synthetic oligonucleotide
caagugcccagugguaugu

SEQ ID NO: 1092310 - RNA, 19 nt, Artificial Sequence
  Description of Artificial Sequence: Synthetic oligonucleotide
ccuggauaguaggggcugc

SEQ ID NO: 1092311 - RNA, 19 nt, Artificial Sequence
  Description of Artificial Sequence: Synthetic oligonucleotide
uguauacgccuggcuuguu

SEQ ID NO: 1092312 - RNA, 19 nt, Artificial Sequence
  Description of Artificial Sequence: Synthetic oligonucleotide
ggcaugucuccagguuugc

SEQ ID NO: 1092313 - RNA, 19 nt, Artificial Sequence
  Description of Artificial Sequence: Synthetic oligonucleotide
gccauccccgcagucguug

SEQ ID NO: 1092314 - RNA, 19 nt, Artificial Sequence
  Description of Artificial Sequence: Synthetic oligonucleotide
gccgcaguaucaauggccu

SEQ ID NO: 1092315 - RNA, 19 nt, Artificial Sequence
  Description of Artificial Sequence: Synthetic oligonucleotide
cacaguaccucuccccguu

SEQ ID NO: 1092316 - RNA, 19 nt, Artificial Sequence
  Description of Artificial Sequence: Synthetic oligonucleotide
cccagugguauguuggggu

SEQ ID NO: 1092317 - RNA, 19 nt, Artificial Sequence
  Description of Artificial Sequence: Synthetic oligonucleotide
guaccccaguggagcugcg

SEQ ID NO: 1092318 - RNA, 19 nt, Artificial Sequence
  Description of Artificial Sequence: Synthetic oligonucleotide
gcaggcagauaggucgcac

SEQ ID NO: 1092319 - RNA, 19 nt, Artificial Sequence
  Description of Artificial Sequence: Synthetic oligonucleotide
cugcaggaucagggcuccg

SEQ ID NO: 1092320 - RNA, 19 nt, Artificial Sequence
  Description of Artificial Sequence: Synthetic oligonucleotide
gaucagggcuccggugccu

SEQ ID NO: 1092321 - RNA, 19 nt, Artificial Sequence
  Description of Artificial Sequence: Synthetic oligonucleotide
cuggauaguaggggcugcu

SEQ ID NO: 1092322 - RNA, 19 nt, Artificial Sequence
  Description of Artificial Sequence: Synthetic oligonucleotide
acgcaaugucauagucgaa

SEQ ID NO: 1092323 - RNA, 19 nt, Artificial Sequence
  Description of Artificial Sequence: Synthetic oligonucleotide
gcguuugcucugguccagc

SEQ ID NO: 1092324 - RNA, 19 nt, Artificial Sequence
  Description of Artificial Sequence: Synthetic oligonucleotide
auaccccagucugcucuuu

SEQ ID NO: 1092325 - RNA, 19 nt, Artificial Sequence
  Description of Artificial Sequence: Synthetic oligonucleotide
gcccuugcucaaacagagc

SEQ ID NO: 1092326 - RNA, 19 nt, Artificial Sequence
  Description of Artificial Sequence: Synthetic oligonucleotide
cuacccgagccuguuuggu

SEQ ID NO: 1092327 - RNA, 19 nt, Artificial Sequence
  Description of Artificial Sequence: Synthetic oligonucleotide
cgagccuguuugguaaaug

SEQ ID NO: 1092328 - RNA, 19 nt, Artificial Sequence
  Description of Artificial Sequence: Synthetic oligonucleotide
ccgaauggaagcgaacagu

SEQ ID NO: 1092329 - RNA, 19 nt, Artificial Sequence
  Description of Artificial Sequence: Synthetic oligonucleotide
gccccauuuuggaagccaa

SEQ ID NO: 1092330 - RNA, 19 nt, Artificial Sequence
  Description of Artificial Sequence: Synthetic oligonucleotide
ccuaucacacgaggccuca

SEQ ID NO: 1092331 - RNA, 19 nt, Artificial Sequence
  Description of Artificial Sequence: Synthetic oligonucleotide
gcgaggccccacacaagug

SEQ ID NO: 1092332 - RNA, 19 nt, Artificial Sequence
  Description of Artificial Sequence: Synthetic oligonucleotide
cucuccccguugaucucua

SEQ ID NO: 1092333 - RNA, 19 nt, Artificial Sequence
  Description of Artificial Sequence: Synthetic oligonucleotide
gcguggaggcucaccugcc

SEQ ID NO: 1092334 - RNA, 19 nt, Artificial Sequence
  Description of Artificial Sequence: Synthetic oligonucleotide
ccguccacuuugugugguc

SEQ ID NO: 1092335 - RNA, 19 nt, Artificial Sequence
  Description of Artificial Sequence: Synthetic oligonucleotide
ggacaacugcaucccuccu

SEQ ID NO: 1092336 - RNA, 19 nt, Artificial Sequence
  Description of Artificial Sequence: Synthetic oligonucleotide
ccgcaguaucaauggccuc

SEQ ID NO: 1092337 - RNA, 19 nt, Artificial Sequence
  Description of Artificial Sequence: Synthetic oligonucleotide
cacccucaucugcauuugu

SEQ ID NO: 1092338 - RNA, 19 nt, Artificial Sequence
  Description of Artificial Sequence: Synthetic oligonucleotide
ggguaguaucaggcaggca

SEQ ID NO: 1092339 - RNA, 19 nt, Artificial Sequence
  Description of Artificial Sequence: Synthetic oligonucleotide
gcgcaccuucacauuccug

SEQ ID NO: 1092340 - RNA, 19 nt, Artificial Sequence
  Description of Artificial Sequence: Synthetic oligonucleotide
ggugggugaugaugcguuu

SEQ ID NO: 1092341 - RNA, 19 nt, Artificial Sequence
  Description of Artificial Sequence: Synthetic oligonucleotide
cagucgauguugggugggu

SEQ ID NO: 1092342 - RNA, 19 nt, Artificial Sequence
  Description of Artificial Sequence: Synthetic oligonucleotide
gggcugcuaaauaacccuu

SEQ ID NO: 1092343 - RNA, 19 nt, Artificial Sequence
  Description of Artificial Sequence: Synthetic oligonucleotide
caacuacccgagccuguuu

SEQ ID NO: 1092344 - RNA, 19 nt, Artificial Sequence
  Description of Artificial Sequence: Synthetic oligonucleotide
caucccuguggguguucau

SEQ ID NO: 1092345 - RNA, 19 nt, Artificial Sequence
  Description of Artificial Sequence: Synthetic oligonucleotide
ggccacugccacugaaguu

SEQ ID NO: 1092346 - RNA, 19 nt, Artificial Sequence
  Description of Artificial Sequence: Synthetic oligonucleotide
cacuucccauuggaacacu

SEQ ID NO: 1092347 - RNA, 19 nt, Artificial Sequence
  Description of Artificial Sequence: Synthetic oligonucleotide
ggaaggccguccacuuugu

SEQ ID NO: 1092348 - RNA, 19 nt, Artificial Sequence
  Description of Artificial Sequence: Synthetic oligonucleotide
cuaucacacgaggccucau

SEQ ID NO: 1092349 - RNA, 19 nt, Artificial Sequence
  Description of Artificial Sequence: Synthetic oligonucleotide
cccagggcguggaggcuca

SEQ ID NO: 1092350 - RNA, 19 nt, Artificial Sequence
  Description of Artificial Sequence: Synthetic oligonucleotide
cccgagccuguuugguaaa

SEQ ID NO: 1092351 - RNA, 19 nt, Artificial Sequence
  Description of Artificial Sequence: Synthetic oligonucleotide
gcccauuguggcagcggua

SEQ ID NO: 1092352 - RNA, 19 nt, Artificial Sequence
  Description of Artificial Sequence: Synthetic oligonucleotide
ccaacuacccgagccuguu

SEQ ID NO: 1092353 - RNA, 19 nt, Artificial Sequence
  Description of Artificial Sequence: Synthetic oligonucleotide
cguccacuuuguguggucu

SEQ ID NO: 1092354 - RNA, 19 nt, Artificial Sequence
  Description of Artificial Sequence: Synthetic oligonucleotide
caggggcguuggagucgua

SEQ ID NO: 1092355 - RNA, 19 nt, Artificial Sequence
  Description of Artificial Sequence: Synthetic oligonucleotide
ccgagccuguuugguaaau

SEQ ID NO: 1092356 - RNA, 19 nt, Artificial Sequence
  Description of Artificial Sequence: Synthetic oligonucleotide
gggcaucccuguggguguu

SEQ ID NO: 1092357 - RNA, 19 nt, Artificial Sequence
  Description of Artificial Sequence: Synthetic oligonucleotide
cguaguccuuggggcaagu

SEQ ID NO: 1092358 - RNA, 19 nt, Artificial Sequence
  Description of Artificial Sequence: Synthetic oligonucleotide
aauagaauuagcucaaggg

SEQ ID NO: 1092359 - RNA, 19 nt, Artificial Sequence
  Description of Artificial Sequence: Synthetic oligonucleotide
aagauaguaggacagggcc

SEQ ID NO: 1092360 - RNA, 19 nt, Artificial Sequence
  Description of Artificial Sequence: Synthetic oligonucleotide
auagaauuagcucaagggc

SEQ ID NO: 1092361 - RNA, 19 nt, Artificial Sequence
  Description of Artificial Sequence: Synthetic oligonucleotide
agaaauucauuacugacuc

SEQ ID NO: 1092362 - RNA, 19 nt, Artificial Sequence
  Description of Artificial Sequence: Synthetic oligonucleotide
aucgaagaggaucagaucg

SEQ ID NO: 1092363 - RNA, 19 nt, Artificial Sequence
  Description of Artificial Sequence: Synthetic oligonucleotide
aauucauagccuucaggcc

SEQ ID NO: 1092364 - RNA, 19 nt, Artificial Sequence
  Description of Artificial Sequence: Synthetic oligonucleotide
aaauagaauuagcucaagg

SEQ ID NO: 1092365 - RNA, 19 nt, Artificial Sequence
  Description of Artificial Sequence: Synthetic oligonucleotide
ucugguuccacccguaugg

SEQ ID NO: 1092366 - RNA, 19 nt, Artificial Sequence
  Description of Artificial Sequence: Synthetic oligonucleotide
uaauaaacuggguggaggg

SEQ ID NO: 1092367 - RNA, 19 nt, Artificial Sequence
  Description of Artificial Sequence: Synthetic oligonucleotide
uagucuauggaauugauuu

SEQ ID NO: 1092368 - RNA, 19 nt, Artificial Sequence
  Description of Artificial Sequence: Synthetic oligonucleotide
uagaauuagcucaagggcu

SEQ ID NO: 1092369 - RNA, 19 nt, Artificial Sequence
  Description of Artificial Sequence: Synthetic oligonucleotide
uuaauaaacuggguggagg

SEQ ID NO: 1092370 - RNA, 19 nt, Artificial Sequence
  Description of Artificial Sequence: Synthetic oligonucleotide
aagagguugcuuacgagcc

SEQ ID NO: 1092371 - RNA, 19 nt, Artificial Sequence
  Description of Artificial Sequence: Synthetic oligonucleotide
acaggaagaaauucauuac

SEQ ID NO: 1092372 - RNA, 19 nt, Artificial Sequence
  Description of Artificial Sequence: Synthetic oligonucleotide
aguaaaguagucuauggaa

SEQ ID NO: 1092373 - RNA, 19 nt, Artificial Sequence
  Description of Artificial Sequence: Synthetic oligonucleotide
acuacacuacccucggucc

SEQ ID NO: 1092374 - RNA, 19 nt, Artificial Sequence
  Description of Artificial Sequence: Synthetic oligonucleotide
aaguaaaguagucuaugga

SEQ ID NO: 1092375 - RNA, 19 nt, Artificial Sequence
  Description of Artificial Sequence: Synthetic oligonucleotide
ugucgcagagaaaacagcc

SEQ ID NO: 1092376 - RNA, 19 nt, Artificial Sequence
  Description of Artificial Sequence: Synthetic oligonucleotide
uaaucgaagaggaucagau

SEQ ID NO: 1092377 - RNA, 19 nt, Artificial Sequence
  Description of Artificial Sequence: Synthetic oligonucleotide
aaucgaagaggaucagauc

SEQ ID NO: 1092378 - RNA, 19 nt, Artificial Sequence
  Description of Artificial Sequence: Synthetic oligonucleotide
aauucauuacugacucugc

SEQ ID NO: 1092379 - RNA, 19 nt, Artificial Sequence
  Description of Artificial Sequence: Synthetic oligonucleotide
acuaguccugaauucauag

SEQ ID NO: 1092380 - RNA, 19 nt, Artificial Sequence
  Description of Artificial Sequence: Synthetic oligonucleotide
ucggguaccaccacgucgg

SEQ ID NO: 1092381 - RNA, 19 nt, Artificial Sequence
  Description of Artificial Sequence: Synthetic oligonucleotide
ugauaggaaauagaauuag

SEQ ID NO: 1092382 - RNA, 19 nt, Artificial Sequence
  Description of Artificial Sequence: Synthetic oligonucleotide
ugggcuucggaaaagcccc

SEQ ID NO: 1092383 - RNA, 19 nt, Artificial Sequence
  Description of Artificial Sequence: Synthetic oligonucleotide
guugcuuacgagccggucg

SEQ ID NO: 1092384 - RNA, 19 nt, Artificial Sequence
  Description of Artificial Sequence: Synthetic oligonucleotide
augagucagacaaauugcc

SEQ ID NO: 1092385 - RNA, 19 nt, Artificial Sequence
  Description of Artificial Sequence: Synthetic oligonucleotide
uucggauccaaucuccaca

SEQ ID NO: 1092386 - RNA, 19 nt, Artificial Sequence
  Description of Artificial Sequence: Synthetic oligonucleotide
aacucaaaguaaaguaguc

SEQ ID NO: 1092387 - RNA, 19 nt, Artificial Sequence
  Description of Artificial Sequence: Synthetic oligonucleotide
uguaacaacggcucguuau

SEQ ID NO: 1092388 - RNA, 19 nt, Artificial Sequence
  Description of Artificial Sequence: Synthetic oligonucleotide
uuuuagacagcuucgcgau

SEQ ID NO: 1092389 - RNA, 19 nt, Artificial Sequence
  Description of Artificial Sequence: Synthetic oligonucleotide
uagccgugcaccaaacccg

SEQ ID NO: 1092390 - RNA, 19 nt, Artificial Sequence
  Description of Artificial Sequence: Synthetic oligonucleotide
accacuucgagccacgcug

SEQ ID NO: 1092391 - RNA, 19 nt, Artificial Sequence
  Description of Artificial Sequence: Synthetic oligonucleotide
aacgcgugggucccauugc

SEQ ID NO: 1092392 - RNA, 19 nt, Artificial Sequence
  Description of Artificial Sequence: Synthetic oligonucleotide
guagccgugcaccaaaccc

SEQ ID NO: 1092393 - RNA, 19 nt, Artificial Sequence
  Description of Artificial Sequence: Synthetic oligonucleotide
uagagacucccauucgggg

SEQ ID NO: 1092394 - RNA, 19 nt, Artificial Sequence
  Description of Artificial Sequence: Synthetic oligonucleotide
uggaacuacguccgcagcc

SEQ ID NO: 1092395 - RNA, 19 nt, Artificial Sequence
  Description of Artificial Sequence: Synthetic oligonucleotide
caagauaguaggacagggc

SEQ ID NO: 1092396 - RNA, 19 nt, Artificial Sequence
  Description of Artificial Sequence: Synthetic oligonucleotide
ugccauuaaguccccaggc

SEQ ID NO: 1092397 - RNA, 19 nt, Artificial Sequence
  Description of Artificial Sequence: Synthetic oligonucleotide
aguuaucucuccaucgugg

SEQ ID NO: 1092398 - RNA, 19 nt, Artificial Sequence
  Description of Artificial Sequence: Synthetic oligonucleotide
uucuucggauccaaucucc

SEQ ID NO: 1092399 - RNA, 19 nt, Artificial Sequence
  Description of Artificial Sequence: Synthetic oligonucleotide
auaaacuggguggagggag

SEQ ID NO: 1092400 - RNA, 19 nt, Artificial Sequence
  Description of Artificial Sequence: Synthetic oligonucleotide
aaacccgccucauugucca

SEQ ID NO: 1092401 - RNA, 19 nt, Artificial Sequence
  Description of Artificial Sequence: Synthetic oligonucleotide
aacggcucguuauacuugu

SEQ ID NO: 1092402 - RNA, 19 nt, Artificial Sequence
  Description of Artificial Sequence: Synthetic oligonucleotide
ucggagugccauuaagucc

SEQ ID NO: 1092403 - RNA, 19 nt, Artificial Sequence
  Description of Artificial Sequence: Synthetic oligonucleotide
cuacccucgguccagugcg

SEQ ID NO: 1092404 - RNA, 19 nt, Artificial Sequence
  Description of Artificial Sequence: Synthetic oligonucleotide
uuggcgaggaagucaaggc

SEQ ID NO: 1092405 - RNA, 19 nt, Artificial Sequence
  Description of Artificial Sequence: Synthetic oligonucleotide
aaagaccaacgccccuccc

SEQ ID NO: 1092406 - RNA, 19 nt, Artificial Sequence
  Description of Artificial Sequence: Synthetic oligonucleotide
auagcguacacaggcacgg

SEQ ID NO: 1092407 - RNA, 19 nt, Artificial Sequence
  Description of Artificial Sequence: Synthetic oligonucleotide
aguuugcccuuccagaacu

SEQ ID NO: 1092408 - RNA, 19 nt, Artificial Sequence
  Description of Artificial Sequence: Synthetic oligonucleotide
guuggaacuacguccgcag

SEQ ID NO: 1092409 - RNA, 19 nt, Artificial Sequence
  Description of Artificial Sequence: Synthetic oligonucleotide
uacaacuaguccugaauuc

SEQ ID NO: 1092410 - RNA, 19 nt, Artificial Sequence
  Description of Artificial Sequence: Synthetic oligonucleotide
ucgcgaucaggucacuggg

SEQ ID NO: 1092411 - RNA, 19 nt, Artificial Sequence
  Description of Artificial Sequence: Synthetic oligonucleotide
gguccauuguaccaggucc

SEQ ID NO: 1092412 - RNA, 19 nt, Artificial Sequence
  Description of Artificial Sequence: Synthetic oligonucleotide
aggcgcgcaagauaguagg

SEQ ID NO: 1092413 - RNA, 19 nt, Artificial Sequence
  Description of Artificial Sequence: Synthetic oligonucleotide
cauagcguacacaggcacg

SEQ ID NO: 1092414 - RNA, 19 nt, Artificial Sequence
  Description of Artificial Sequence: Synthetic oligonucleotide
ucuuuguccuauccagagc

SEQ ID NO: 1092415 - RNA, 19 nt, Artificial Sequence
  Description of Artificial Sequence: Synthetic oligonucleotide
caccacgucgguuagguug

SEQ ID NO: 1092416 - RNA, 19 nt, Artificial Sequence
  Description of Artificial Sequence: Synthetic oligonucleotide
uuacugacucugcauacaa

SEQ ID NO: 1092417 - RNA, 19 nt, Artificial Sequence
  Description of Artificial Sequence: Synthetic oligonucleotide
uaacgcgugggucccauug

SEQ ID NO: 1092418 - RNA, 19 nt, Artificial Sequence
  Description of Artificial Sequence: Synthetic oligonucleotide
agggagaacacaggaaggg

SEQ ID NO: 1092419 - RNA, 19 nt, Artificial Sequence
  Description of Artificial Sequence: Synthetic oligonucleotide
aaauugccagggucuguag

SEQ ID NO: 1092420 - RNA, 19 nt, Artificial Sequence
  Description of Artificial Sequence: Synthetic oligonucleotide
gcugagguuggucagcucg

SEQ ID NO: 1092421 - RNA, 19 nt, Artificial Sequence
  Description of Artificial Sequence: Synthetic oligonucleotide
cuaguccugaauucauagc

SEQ ID NO: 1092422 - RNA, 19 nt, Artificial Sequence
  Description of Artificial Sequence: Synthetic oligonucleotide
agccggucgaaguuggccg

SEQ ID NO: 1092423 - RNA, 19 nt, Artificial Sequence
  Description of Artificial Sequence: Synthetic oligonucleotide
uuggccgucagguaaucga

SEQ ID NO: 1092424 - RNA, 19 nt, Artificial Sequence
  Description of Artificial Sequence: Synthetic oligonucleotide
cagacaaauugccaggguc

SEQ ID NO: 1092425 - RNA, 19 nt, Artificial Sequence
  Description of Artificial Sequence: Synthetic oligonucleotide
uugcuuacgagccggucga

SEQ ID NO: 1092426 - RNA, 19 nt, Artificial Sequence
  Description of Artificial Sequence: Synthetic oligonucleotide
aaguagucuauggaauuga

SEQ ID NO: 1092427 - RNA, 19 nt, Artificial Sequence
  Description of Artificial Sequence: Synthetic oligonucleotide
agaccaacgccccucccgg

SEQ ID NO: 1092428 - RNA, 19 nt, Artificial Sequence
  Description of Artificial Sequence: Synthetic oligonucleotide
ucagaucgguccauuguac

SEQ ID NO: 1092429 - RNA, 19 nt, Artificial Sequence
  Description of Artificial Sequence: Synthetic oligonucleotide
auagagacucccauucggg

SEQ ID NO: 1092430 - RNA, 19 nt, Artificial Sequence
  Description of Artificial Sequence: Synthetic oligonucleotide
cagguaaucgaagaggauc

SEQ ID NO: 1092431 - RNA, 19 nt, Artificial Sequence
  Description of Artificial Sequence: Synthetic oligonucleotide
ugcaagcugaagagguugc

SEQ ID NO: 1092432 - RNA, 19 nt, Artificial Sequence
  Description of Artificial Sequence: Synthetic oligonucleotide
acaacuaguccugaauuca

SEQ ID NO: 1092433 - RNA, 19 nt, Artificial Sequence
  Description of Artificial Sequence: Synthetic oligonucleotide
auggugauaggaaauagaa

SEQ ID NO: 1092434 - RNA, 19 nt, Artificial Sequence
  Description of Artificial Sequence: Synthetic oligonucleotide
cucggagugccauuaaguc

SEQ ID NO: 1092435 - RNA, 19 nt, Artificial Sequence
  Description of Artificial Sequence: Synthetic oligonucleotide
aacuacguccgcagccucc

SEQ ID NO: 1092436 - RNA, 19 nt, Artificial Sequence
  Description of Artificial Sequence: Synthetic oligonucleotide
ucggauccaaucuccacac

SEQ ID NO: 1092437 - RNA, 19 nt, Artificial Sequence
  Description of Artificial Sequence: Synthetic oligonucleotide
aauaaacuggguggaggga

SEQ ID NO: 1092438 - RNA, 19 nt, Artificial Sequence
  Description of Artificial Sequence: Synthetic oligonucleotide
cagcaggcgcgcaagauag

SEQ ID NO: 1092439 - RNA, 19 nt, Artificial Sequence
  Description of Artificial Sequence: Synthetic oligonucleotide
agaucgguccauuguacca

SEQ ID NO: 1092440 - RNA, 19 nt, Artificial Sequence
  Description of Artificial Sequence: Synthetic oligonucleotide
cucacuacacuacccucgg

SEQ ID NO: 1092441 - RNA, 19 nt, Artificial Sequence
  Description of Artificial Sequence: Synthetic oligonucleotide
uugcaagcugaagagguug

SEQ ID NO: 1092442 - RNA, 19 nt, Artificial Sequence
  Description of Artificial Sequence: Synthetic oligonucleotide
uccuauccagagcuguccc

SEQ ID NO: 1092443 - RNA, 19 nt, Artificial Sequence
  Description of Artificial Sequence: Synthetic oligonucleotide
cucggguaccaccacgucg

SEQ ID NO: 1092444 - RNA, 19 nt, Artificial Sequence
  Description of Artificial Sequence: Synthetic oligonucleotide
gaucgguccauuguaccag

SEQ ID NO: 1092445 - RNA, 19 nt, Artificial Sequence
  Description of Artificial Sequence: Synthetic oligonucleotide
cuucgagccacgcugccgc

SEQ ID NO: 1092446 - RNA, 19 nt, Artificial Sequence
  Description of Artificial Sequence: Synthetic oligonucleotide
uauuuggccuugcagugua

SEQ ID NO: 1092447 - RNA, 19 nt, Artificial Sequence
  Description of Artificial Sequence: Synthetic oligonucleotide
caccaaacccgccucauug

SEQ ID NO: 1092448 - RNA, 19 nt, Artificial Sequence
  Description of Artificial Sequence: Synthetic oligonucleotide
auuaaguccccaggccggc

SEQ ID NO: 1092449 - RNA, 19 nt, Artificial Sequence
  Description of Artificial Sequence: Synthetic oligonucleotide
acugacuguaacaacggcu

SEQ ID NO: 1092450 - RNA, 19 nt, Artificial Sequence
  Description of Artificial Sequence: Synthetic oligonucleotide
ucuucggauccaaucucca

SEQ ID NO: 1092451 - RNA, 19 nt, Artificial Sequence
  Description of Artificial Sequence: Synthetic oligonucleotide
guauggugauaggaaauag

SEQ ID NO: 1092452 - RNA, 19 nt, Artificial Sequence
  Description of Artificial Sequence: Synthetic oligonucleotide
agguaaucgaagaggauca

SEQ ID NO: 1092453 - RNA, 19 nt, Artificial Sequence
  Description of Artificial Sequence: Synthetic oligonucleotide
agggacaaguggguaaaac

SEQ ID NO: 1092454 - RNA, 19 nt, Artificial Sequence
  Description of Artificial Sequence: Synthetic oligonucleotide
ggaguguuacacuuccugc

SEQ ID NO: 1092455 - RNA, 19 nt, Artificial Sequence
  Description of Artificial Sequence: Synthetic oligonucleotide
aucagaucgguccauugua

SEQ ID NO: 1092456 - RNA, 19 nt, Artificial Sequence
  Description of Artificial Sequence: Synthetic oligonucleotide
acgucgguuagguugggca

SEQ ID NO: 1092457 - RNA, 19 nt, Artificial Sequence
  Description of Artificial Sequence: Synthetic oligonucleotide
aaacggaaguuuuccuuuu

SEQ ID NO: 1092458 - RNA, 19 nt, Artificial Sequence
  Description of Artificial Sequence: Synthetic oligonucleotide
caaacccgccucauugucc

SEQ ID NO: 1092459 - RNA, 19 nt, Artificial Sequence
  Description of Artificial Sequence: Synthetic oligonucleotide
aaacgugguucguggcgag

SEQ ID NO: 1092460 - RNA, 19 nt, Artificial Sequence
  Description of Artificial Sequence: Synthetic oligonucleotide
cagaucgguccauuguacc

SEQ ID NO: 1092461 - RNA, 19 nt, Artificial Sequence
  Description of Artificial Sequence: Synthetic oligonucleotide
uccacccguauggugauag

SEQ ID NO: 1092462 - RNA, 19 nt, Artificial Sequence
  Description of Artificial Sequence: Synthetic oligonucleotide
uuggucagcugggagaaac

SEQ ID NO: 1092463 - RNA, 19 nt, Artificial Sequence
  Description of Artificial Sequence: Synthetic oligonucleotide
agcgcgucaggcucacuac

SEQ ID NO: 1092464 - RNA, 19 nt, Artificial Sequence
  Description of Artificial Sequence: Synthetic oligonucleotide
cugucgcagagaaaacagc

SEQ ID NO: 1092465 - RNA, 19 nt, Artificial Sequence
  Description of Artificial Sequence: Synthetic oligonucleotide
ucguggcgaguguagaggc

SEQ ID NO: 1092466 - RNA, 19 nt, Artificial Sequence
  Description of Artificial Sequence: Synthetic oligonucleotide
gcaagauaguaggacaggg

SEQ ID NO: 1092467 - RNA, 19 nt, Artificial Sequence
  Description of Artificial Sequence: Synthetic oligonucleotide
uagcgcggugcauaacgcg

SEQ ID NO: 1092468 - RNA, 19 nt, Artificial Sequence
  Description of Artificial Sequence: Synthetic oligonucleotide
gacaaguggguaaaacaca

SEQ ID NO: 1092469 - RNA, 19 nt, Artificial Sequence
  Description of Artificial Sequence: Synthetic oligonucleotide
gacaaauugccagggucug

SEQ ID NO: 1092470 - RNA, 19 nt, Artificial Sequence
  Description of Artificial Sequence: Synthetic oligonucleotide
aucgguccauuguaccagg

SEQ ID NO: 1092471 - RNA, 19 nt, Artificial Sequence
  Description of Artificial Sequence: Synthetic oligonucleotide
uuggaacuacguccgcagc

SEQ ID NO: 1092472 - RNA, 19 nt, Artificial Sequence
  Description of Artificial Sequence: Synthetic oligonucleotide
cucguuauacuugucccac

SEQ ID NO: 1092473 - RNA, 19 nt, Artificial Sequence
  Description of Artificial Sequence: Synthetic oligonucleotide
caaguggguaaaacacaag

SEQ ID NO: 1092474 - RNA, 19 nt, Artificial Sequence
  Description of Artificial Sequence: Synthetic oligonucleotide
gucaaggcggcgcuguagc

SEQ ID NO: 1092475 - RNA, 19 nt, Artificial Sequence
  Description of Artificial Sequence: Synthetic oligonucleotide
uuacacuuccugcuucgau

SEQ ID NO: 1092476 - RNA, 19 nt, Artificial Sequence
  Description of Artificial Sequence: Synthetic oligonucleotide
uaggcgguuggaacuacgu

SEQ ID NO: 1092477 - RNA, 19 nt, Artificial Sequence
  Description of Artificial Sequence: Synthetic oligonucleotide
cauuguaccagguccacua

SEQ ID NO: 1092478 - RNA, 19 nt, Artificial Sequence
  Description of Artificial Sequence: Synthetic oligonucleotide
acaaguggguaaaacacaa

SEQ ID NO: 1092479 - RNA, 19 nt, Artificial Sequence
  Description of Artificial Sequence: Synthetic oligonucleotide
guucguggcgaguguagag

SEQ ID NO: 1092480 - RNA, 19 nt, Artificial Sequence
  Description of Artificial Sequence: Synthetic oligonucleotide
cuuggaaacgugguucgug

SEQ ID NO: 1092481 - RNA, 19 nt, Artificial Sequence
  Description of Artificial Sequence: Synthetic oligonucleotide
aggcgguuggaacuacguc

SEQ ID NO: 1092482 - RNA, 19 nt, Artificial Sequence
  Description of Artificial Sequence: Synthetic oligonucleotide
gaguguuacacuuccugcu

SEQ ID NO: 1092483 - RNA, 19 nt, Artificial Sequence
  Description of Artificial Sequence: Synthetic oligonucleotide
aggcucacuacacuacccu

SEQ ID NO: 1092484 - RNA, 19 nt, Artificial Sequence
  Description of Artificial Sequence: Synthetic oligonucleotide
ucagguaaucgaagaggau

SEQ ID NO: 1092485 - RNA, 19 nt, Artificial Sequence
  Description of Artificial Sequence: Synthetic oligonucleotide
cggagugccauuaaguccc

SEQ ID NO: 1092486 - RNA, 19 nt, Artificial Sequence
  Description of Artificial Sequence: Synthetic oligonucleotide
gaaacgugguucguggcga

SEQ ID NO: 1092487 - RNA, 19 nt, Artificial Sequence
  Description of Artificial Sequence: Synthetic oligonucleotide
ggcgaggaagucaaggcgg

SEQ ID NO: 1092488 - RNA, 19 nt, Artificial Sequence
  Description of Artificial Sequence: Synthetic oligonucleotide
uggccgguugguccuagcc

SEQ ID NO: 1092489 - RNA, 19 nt, Artificial Sequence
  Description of Artificial Sequence: Synthetic oligonucleotide
ugcauaacgcguggguccc

SEQ ID NO: 1092490 - RNA, 19 nt, Artificial Sequence
  Description of Artificial Sequence: Synthetic oligonucleotide
cuaggcgguuggaacuacg

SEQ ID NO: 1092491 - RNA, 19 nt, Artificial Sequence
  Description of Artificial Sequence: Synthetic oligonucleotide
cuucggauccaaucuccac

SEQ ID NO: 1092492 - RNA, 19 nt, Artificial Sequence
  Description of Artificial Sequence: Synthetic oligonucleotide
caguuaucucuccaucgug

SEQ ID NO: 1092493 - RNA, 19 nt, Artificial Sequence
  Description of Artificial Sequence: Synthetic oligonucleotide
uuuagacagcuucgcgauc

SEQ ID NO: 1092494 - RNA, 19 nt, Artificial Sequence
  Description of Artificial Sequence: Synthetic oligonucleotide
ucgaugaguuugcccuucc

SEQ ID NO: 1092495 - RNA, 19 nt, Artificial Sequence
  Description of Artificial Sequence: Synthetic oligonucleotide
uaacaacggcucguuauac

SEQ ID NO: 1092496 - RNA, 19 nt, Artificial Sequence
  Description of Artificial Sequence: Synthetic oligonucleotide
acaggcacgggugccgucg

SEQ ID NO: 1092497 - RNA, 19 nt, Artificial Sequence
  Description of Artificial Sequence: Synthetic oligonucleotide
aguggguaaaacacaaguu

SEQ ID NO: 1092498 - RNA, 19 nt, Artificial Sequence
  Description of Artificial Sequence: Synthetic oligonucleotide
caacggcucguuauacuug

SEQ ID NO: 1092499 - RNA, 19 nt, Artificial Sequence
  Description of Artificial Sequence: Synthetic oligonucleotide
accaacgccccucccgguc

SEQ ID NO: 1092500 - RNA, 19 nt, Artificial Sequence
  Description of Artificial Sequence: Synthetic oligonucleotide
agauaguaggacagggccu

SEQ ID NO: 1092501 - RNA, 19 nt, Artificial Sequence
  Description of Artificial Sequence: Synthetic oligonucleotide
agcuucgcgaucaggucac

SEQ ID NO: 1092502 - RNA, 19 nt, Artificial Sequence
  Description of Artificial Sequence: Synthetic oligonucleotide
guaacaacggcucguuaua

SEQ ID NO: 1092503 - RNA, 19 nt, Artificial Sequence
  Description of Artificial Sequence: Synthetic oligonucleotide
ucguuauacuugucccaca

SEQ ID NO: 1092504 - RNA, 19 nt, Artificial Sequence
  Description of Artificial Sequence: Synthetic oligonucleotide
gcucacuacacuacccucg

SEQ ID NO: 1092505 - RNA, 19 nt, Artificial Sequence
  Description of Artificial Sequence: Synthetic oligonucleotide
aguccugaauucauagccu

SEQ ID NO: 1092506 - RNA, 19 nt, Artificial Sequence
  Description of Artificial Sequence: Synthetic oligonucleotide
ucguggcgcuggaacaaag

SEQ ID NO: 1092507 - RNA, 19 nt, Artificial Sequence
  Description of Artificial Sequence: Synthetic oligonucleotide
ugguccuagccugucgcag

SEQ ID NO: 1092508 - RNA, 19 nt, Artificial Sequence
  Description of Artificial Sequence: Synthetic oligonucleotide
agccgugcaccaaacccgc

SEQ ID NO: 1092509 - RNA, 19 nt, Artificial Sequence
  Description of Artificial Sequence: Synthetic oligonucleotide
accccgcaccacuucgagc

SEQ ID NO: 1092510 - RNA, 19 nt, Artificial Sequence
  Description of Artificial Sequence: Synthetic oligonucleotide
gugauaggaaauagaauua

SEQ ID NO: 1092511 - RNA, 19 nt, Artificial Sequence
  Description of Artificial Sequence: Synthetic oligonucleotide
ccccgcaccacuucgagcc

SEQ ID NO: 1092512 - RNA, 19 nt, Artificial Sequence
  Description of Artificial Sequence: Synthetic oligonucleotide
acuucgagccacgcugccg

SEQ ID NO: 1092513 - RNA, 19 nt, Artificial Sequence
  Description of Artificial Sequence: Synthetic oligonucleotide
gccuccgcgauccagggcc

SEQ ID NO: 1092514 - RNA, 19 nt, Artificial Sequence
  Description of Artificial Sequence: Synthetic oligonucleotide
uccgcucucggaacacaca

SEQ ID NO: 1092515 - RNA, 19 nt, Artificial Sequence
  Description of Artificial Sequence: Synthetic oligonucleotide
guaaucgaagaggaucaga

SEQ ID NO: 1092516 - RNA, 19 nt, Artificial Sequence
  Description of Artificial Sequence: Synthetic oligonucleotide
uugcucguagcgcggugca

SEQ ID NO: 1092517 - RNA, 19 nt, Artificial Sequence
  Description of Artificial Sequence: Synthetic oligonucleotide
accaccacgucgguuaggu

SEQ ID NO: 1092518 - RNA, 19 nt, Artificial Sequence
  Description of Artificial Sequence: Synthetic oligonucleotide
caggcgcgcaagauaguag

SEQ ID NO: 1092519 - RNA, 19 nt, Artificial Sequence
  Description of Artificial Sequence: Synthetic oligonucleotide
guccuauccagagcugucc

SEQ ID NO: 1092520 - RNA, 19 nt, Artificial Sequence
  Description of Artificial Sequence: Synthetic oligonucleotide
gagccggucgaaguuggcc

SEQ ID NO: 1092521 - RNA, 19 nt, Artificial Sequence
  Description of Artificial Sequence: Synthetic oligonucleotide
ccugcuucgaugaguuugc

SEQ ID NO: 1092522 - RNA, 19 nt, Artificial Sequence
  Description of Artificial Sequence: Synthetic oligonucleotide
ucgguuagguugggcagcc

SEQ ID NO: 1092523 - RNA, 19 nt, Artificial Sequence
  Description of Artificial Sequence: Synthetic oligonucleotide
uugguccuagccugucgca

SEQ ID NO: 1092524 - RNA, 19 nt, Artificial Sequence
  Description of Artificial Sequence: Synthetic oligonucleotide
cguagcgcggugcauaacg

SEQ ID NO: 1092525 - RNA, 19 nt, Artificial Sequence
  Description of Artificial Sequence: Synthetic oligonucleotide
cucugguuccacccguaug

SEQ ID NO: 1092526 - RNA, 19 nt, Artificial Sequence
  Description of Artificial Sequence: Synthetic oligonucleotide
aauuagcucaagggcucaa

SEQ ID NO: 1092527 - RNA, 19 nt, Artificial Sequence
  Description of Artificial Sequence: Synthetic oligonucleotide
ugaugccauagcguacaca

SEQ ID NO: 1092528 - RNA, 19 nt, Artificial Sequence
  Description of Artificial Sequence: Synthetic oligonucleotide
guugcucguagcgcggugc

SEQ ID NO: 1092529 - RNA, 19 nt, Artificial Sequence
  Description of Artificial Sequence: Synthetic oligonucleotide
gcgcagugggcgcagacgg

SEQ ID NO: 1092530 - RNA, 19 nt, Artificial Sequence
  Description of Artificial Sequence: Synthetic oligonucleotide
uagguugggcagccagcgc

SEQ ID NO: 1092531 - RNA, 19 nt, Artificial Sequence
  Description of Artificial Sequence: Synthetic oligonucleotide
ucggcaaagcgggcuaggc

SEQ ID NO: 1092532 - RNA, 19 nt, Artificial Sequence
  Description of Artificial Sequence: Synthetic oligonucleotide
ucccauagagacucccauu

SEQ ID NO: 1092533 - RNA, 19 nt, Artificial Sequence
  Description of Artificial Sequence: Synthetic oligonucleotide
ugaucgccagggcucgggu

SEQ ID NO: 1092534 - RNA, 19 nt, Artificial Sequence
  Description of Artificial Sequence: Synthetic oligonucleotide
gaagaggaucagaucgguc

SEQ ID NO: 1092535 - RNA, 19 nt, Artificial Sequence
  Description of Artificial Sequence: Synthetic oligonucleotide
cagugucgcgcagugggcg

SEQ ID NO: 1092536 - RNA, 19 nt, Artificial Sequence
  Description of Artificial Sequence: Synthetic oligonucleotide
gcgguuggaacuacguccg

SEQ ID NO: 1092537 - RNA, 19 nt, Artificial Sequence
  Description of Artificial Sequence: Synthetic oligonucleotide
caaggcggcgcuguagcag

SEQ ID NO: 1092538 - RNA, 19 nt, Artificial Sequence
  Description of Artificial Sequence: Synthetic oligonucleotide
aguagucuauggaauugau

SEQ ID NO: 1092539 - RNA, 19 nt, Artificial Sequence
  Description of Artificial Sequence: Synthetic oligonucleotide
auaguaggacagggccucg

SEQ ID NO: 1092540 - RNA, 19 nt, Artificial Sequence
  Description of Artificial Sequence: Synthetic oligonucleotide
cuuacgagccggucgaagu

SEQ ID NO: 1092541 - RNA, 19 nt, Artificial Sequence
  Description of Artificial Sequence: Synthetic oligonucleotide
gaauuagcucaagggcuca

SEQ ID NO: 1092542 - RNA, 19 nt, Artificial Sequence
  Description of Artificial Sequence: Synthetic oligonucleotide
agccggcucugguuccacc

SEQ ID NO: 1092543 - RNA, 19 nt, Artificial Sequence
  Description of Artificial Sequence: Synthetic oligonucleotide
ggggcggcgacaagaaugg

SEQ ID NO: 1092544 - RNA, 19 nt, Artificial Sequence
  Description of Artificial Sequence: Synthetic oligonucleotide
uucgaugaguuugcccuuc

SEQ ID NO: 1092545 - RNA, 19 nt, Artificial Sequence
  Description of Artificial Sequence: Synthetic oligonucleotide
cacccgguagccgugcacc

SEQ ID NO: 1092546 - RNA, 19 nt, Artificial Sequence
  Description of Artificial Sequence: Synthetic oligonucleotide
acgugguucguggcgagug

SEQ ID NO: 1092547 - RNA, 19 nt, Artificial Sequence
  Description of Artificial Sequence: Synthetic oligonucleotide
gucgguuagguugggcagc

SEQ ID NO: 1092548 - RNA, 19 nt, Artificial Sequence
  Description of Artificial Sequence: Synthetic oligonucleotide
cgucagguaaucgaagagg

SEQ ID NO: 1092549 - RNA, 19 nt, Artificial Sequence
  Description of Artificial Sequence: Synthetic oligonucleotide
acugagcgccccgagccuc

SEQ ID NO: 1092550 - RNA, 19 nt, Artificial Sequence
  Description of Artificial Sequence: Synthetic oligonucleotide
gcuucggaaaagccccggg

SEQ ID NO: 1092551 - RNA, 19 nt, Artificial Sequence
  Description of Artificial Sequence: Synthetic oligonucleotide
ccacugagcgccccgagcc

SEQ ID NO: 1092552 - RNA, 19 nt, Artificial Sequence
  Description of Artificial Sequence: Synthetic oligonucleotide
gccgguugguccuagccug

SEQ ID NO: 1092553 - RNA, 19 nt, Artificial Sequence
  Description of Artificial Sequence: Synthetic oligonucleotide
guagcgcggugcauaacgc

SEQ ID NO: 1092554 - RNA, 19 nt, Artificial Sequence
  Description of Artificial Sequence: Synthetic oligonucleotide
ucacuacacuacccucggu

SEQ ID NO: 1092555 - RNA, 19 nt, Artificial Sequence
  Description of Artificial Sequence: Synthetic oligonucleotide
auuagcucaagggcucaaa

SEQ ID NO: 1092556 - RNA, 19 nt, Artificial Sequence
  Description of Artificial Sequence: Synthetic oligonucleotide
ucgguccauuguaccaggu

SEQ ID NO: 1092557 - RNA, 19 nt, Artificial Sequence
  Description of Artificial Sequence: Synthetic oligonucleotide
cacuacccgagcaccccgc

SEQ ID NO: 1092558 - RNA, 19 nt, Artificial Sequence
  Description of Artificial Sequence: Synthetic oligonucleotide
ccacaugccggccacccgg

SEQ ID NO: 1092559 - RNA, 19 nt, Artificial Sequence
  Description of Artificial Sequence: Synthetic oligonucleotide
agugccagcggcggcacgu

SEQ ID NO: 1092560 - RNA, 19 nt, Artificial Sequence
  Description of Artificial Sequence: Synthetic oligonucleotide
acgcgugggucccauugca

SEQ ID NO: 1092561 - RNA, 19 nt, Artificial Sequence
  Description of Artificial Sequence: Synthetic oligonucleotide
ggcgacaagaauggacugc

SEQ ID NO: 1092562 - RNA, 19 nt, Artificial Sequence
  Description of Artificial Sequence: Synthetic oligonucleotide
gcgcaagauaguaggacag

SEQ ID NO: 1092563 - RNA, 19 nt, Artificial Sequence
  Description of Artificial Sequence: Synthetic oligonucleotide
acgggugccgucggcaaag

SEQ ID NO: 1092564 - RNA, 19 nt, Artificial Sequence
  Description of Artificial Sequence: Synthetic oligonucleotide
ccauagcguacacaggcac

SEQ ID NO: 1092565 - RNA, 19 nt, Artificial Sequence
  Description of Artificial Sequence: Synthetic oligonucleotide
cugaucgccagggcucggg

SEQ ID NO: 1092566 - RNA, 19 nt, Artificial Sequence
  Description of Artificial Sequence: Synthetic oligonucleotide
ggugcagguugcucguagc

SEQ ID NO: 1092567 - RNA, 19 nt, Artificial Sequence
  Description of Artificial Sequence: Synthetic oligonucleotide
agcgcggugcauaacgcgu

SEQ ID NO: 1092568 - RNA, 19 nt, Artificial Sequence
  Description of Artificial Sequence: Synthetic oligonucleotide
acccguauggugauaggaa

SEQ ID NO: 1092569 - RNA, 19 nt, Artificial Sequence
  Description of Artificial Sequence: Synthetic oligonucleotide
gaacuacguccgcagccuc

SEQ ID NO: 1092570 - RNA, 19 nt, Artificial Sequence
  Description of Artificial Sequence: Synthetic oligonucleotide
gguagccgugcaccaaacc

SEQ ID NO: 1092571 - RNA, 19 nt, Artificial Sequence
  Description of Artificial Sequence: Synthetic oligonucleotide
gguaaucgaagaggaucag

SEQ ID NO: 1092572 - RNA, 19 nt, Artificial Sequence
  Description of Artificial Sequence: Synthetic oligonucleotide
aguuggccgucagguaauc

SEQ ID NO: 1092573 - RNA, 19 nt, Artificial Sequence
  Description of Artificial Sequence: Synthetic oligonucleotide
acgagccggucgaaguugg

SEQ ID NO: 1092574 - RNA, 19 nt, Artificial Sequence
  Description of Artificial Sequence: Synthetic oligonucleotide
acuacccgagcaccccgca

SEQ ID NO: 1092575 - RNA, 19 nt, Artificial Sequence
  Description of Artificial Sequence: Synthetic oligonucleotide
cagggcucggguaccacca

SEQ ID NO: 1092576 - RNA, 19 nt, Artificial Sequence
  Description of Artificial Sequence: Synthetic oligonucleotide
cacguggcgcuggaggccc

SEQ ID NO: 1092577 - RNA, 19 nt, Artificial Sequence
  Description of Artificial Sequence: Synthetic oligonucleotide
aacgugguucguggcgagu

SEQ ID NO: 1092578 - RNA, 19 nt, Artificial Sequence
  Description of Artificial Sequence: Synthetic oligonucleotide
caagggcucaaacggaagu

SEQ ID NO: 1092579 - RNA, 19 nt, Artificial Sequence
  Description of Artificial Sequence: Synthetic oligonucleotide
ccuauccagagcugucccc

SEQ ID NO: 1092580 - RNA, 19 nt, Artificial Sequence
  Description of Artificial Sequence: Synthetic oligonucleotide
cacuucgagccacgcugcc

SEQ ID NO: 1092581 - RNA, 19 nt, Artificial Sequence
  Description of Artificial Sequence: Synthetic oligonucleotide
auugcaagcugaagagguu

SEQ ID NO: 1092582 - RNA, 19 nt, Artificial Sequence
  Description of Artificial Sequence: Synthetic oligonucleotide
cacccguauggugauagga

SEQ ID NO: 1092583 - RNA, 19 nt, Artificial Sequence
  Description of Artificial Sequence: Synthetic oligonucleotide
gccgucagguaaucgaaga

SEQ ID NO: 1092584 - RNA, 19 nt, Artificial Sequence
  Description of Artificial Sequence: Synthetic oligonucleotide
ccgucagguaaucgaagag

SEQ ID NO: 1092585 - RNA, 19 nt, Artificial Sequence
  Description of Artificial Sequence: Synthetic oligonucleotide
uccacggugcagguugcuc

SEQ ID NO: 1092586 - RNA, 19 nt, Artificial Sequence
  Description of Artificial Sequence: Synthetic oligonucleotide
uucgagccacgcugccgcc

SEQ ID NO: 1092587 - RNA, 19 nt, Artificial Sequence
  Description of Artificial Sequence: Synthetic oligonucleotide
gucggcaaagcgggcuagg

SEQ ID NO: 1092588 - RNA, 19 nt, Artificial Sequence
  Description of Artificial Sequence: Synthetic oligonucleotide
cuucgcgaucaggucacug

SEQ ID NO: 1092589 - RNA, 19 nt, Artificial Sequence
  Description of Artificial Sequence: Synthetic oligonucleotide
aggaaaccgucuggcagga

SEQ ID NO: 1092590 - RNA, 19 nt, Artificial Sequence
  Description of Artificial Sequence: Synthetic oligonucleotide
uuccucggagugccauuaa

SEQ ID NO: 1092591 - RNA, 19 nt, Artificial Sequence
  Description of Artificial Sequence: Synthetic oligonucleotide
ugcaccaaacccgccucau

SEQ ID NO: 1092592 - RNA, 19 nt, Artificial Sequence
  Description of Artificial Sequence: Synthetic oligonucleotide
ggcucacuacacuacccuc

SEQ ID NO: 1092593 - RNA, 19 nt, Artificial Sequence
  Description of Artificial Sequence: Synthetic oligonucleotide
ggcggcgacaagaauggac

SEQ ID NO: 1092594 - RNA, 19 nt, Artificial Sequence
  Description of Artificial Sequence: Synthetic oligonucleotide
cuacccgagcaccccgcac

SEQ ID NO: 1092595 - RNA, 19 nt, Artificial Sequence
  Description of Artificial Sequence: Synthetic oligonucleotide
guuacacuuccugcuucga

SEQ ID NO: 1092596 - RNA, 19 nt, Artificial Sequence
  Description of Artificial Sequence: Synthetic oligonucleotide
ccggcggccguauuuggcc

SEQ ID NO: 1092597 - RNA, 19 nt, Artificial Sequence
  Description of Artificial Sequence: Synthetic oligonucleotide
gguuggaacuacguccgca

SEQ ID NO: 1092598 - RNA, 19 nt, Artificial Sequence
  Description of Artificial Sequence: Synthetic oligonucleotide
aaaccccagcagccaguuu

SEQ ID NO: 1092599 - RNA, 19 nt, Artificial Sequence
  Description of Artificial Sequence: Synthetic oligonucleotide
gguugaugccauagcguac

SEQ ID NO: 1092600 - RNA, 19 nt, Artificial Sequence
  Description of Artificial Sequence: Synthetic oligonucleotide
ccgcucucggaacacacac

SEQ ID NO: 1092601 - RNA, 19 nt, Artificial Sequence
  Description of Artificial Sequence: Synthetic oligonucleotide
ucgcgcagugggcgcagac

SEQ ID NO: 1092602 - RNA, 19 nt, Artificial Sequence
  Description of Artificial Sequence: Synthetic oligonucleotide
ccagucccucucuuccucg

SEQ ID NO: 1092603 - RNA, 19 nt, Artificial Sequence
  Description of Artificial Sequence: Synthetic oligonucleotide
acccucgguccagugcgcg

SEQ ID NO: 1092604 - RNA, 19 nt, Artificial Sequence
  Description of Artificial Sequence: Synthetic oligonucleotide
gcgauccagggccacuacc

SEQ ID NO: 1092605 - RNA, 19 nt, Artificial Sequence
  Description of Artificial Sequence: Synthetic oligonucleotide
gcguacacaggcacgggug

SEQ ID NO: 1092606 - RNA, 19 nt, Artificial Sequence
  Description of Artificial Sequence: Synthetic oligonucleotide
cguggcgcuggaacaaagg

SEQ ID NO: 1092607 - RNA, 19 nt, Artificial Sequence
  Description of Artificial Sequence: Synthetic oligonucleotide
ccgucuggcaggaaaagaa

SEQ ID NO: 1092608 - RNA, 19 nt, Artificial Sequence
  Description of Artificial Sequence: Synthetic oligonucleotide
cauuguccagaaagaccaa

SEQ ID NO: 1092609 - RNA, 19 nt, Artificial Sequence
  Description of Artificial Sequence: Synthetic oligonucleotide
gucgcagagaaaacagccu

SEQ ID NO: 1092610 - RNA, 19 nt, Artificial Sequence
  Description of Artificial Sequence: Synthetic oligonucleotide
ccacuucgagccacgcugc

SEQ ID NO: 1092611 - RNA, 19 nt, Artificial Sequence
  Description of Artificial Sequence: Synthetic oligonucleotide
cacuacccucgguccagug

SEQ ID NO: 1092612 - RNA, 19 nt, Artificial Sequence
  Description of Artificial Sequence: Synthetic oligonucleotide
gaucgccagggcucgggua

SEQ ID NO: 1092613 - RNA, 19 nt, Artificial Sequence
  Description of Artificial Sequence: Synthetic oligonucleotide
cgucgguuagguugggcag

SEQ ID NO: 1092614 - RNA, 19 nt, Artificial Sequence
  Description of Artificial Sequence: Synthetic oligonucleotide
ggcucaaacggaaguuuuc

SEQ ID NO: 1092615 - RNA, 19 nt, Artificial Sequence
  Description of Artificial Sequence: Synthetic oligonucleotide
guccgcucucggaacacac

SEQ ID NO: 1092616 - RNA, 19 nt, Artificial Sequence
  Description of Artificial Sequence: Synthetic oligonucleotide
gcuuacgagccggucgaag

SEQ ID NO: 1092617 - RNA, 19 nt, Artificial Sequence
  Description of Artificial Sequence: Synthetic oligonucleotide
ugucgcgcagugggcgcag

SEQ ID NO: 1092618 - RNA, 19 nt, Artificial Sequence
  Description of Artificial Sequence: Synthetic oligonucleotide
guagucuauggaauugauu

SEQ ID NO: 1092619 - RNA, 19 nt, Artificial Sequence
  Description of Artificial Sequence: Synthetic oligonucleotide
aguccgcucucggaacaca

SEQ ID NO: 1092620 - RNA, 19 nt, Artificial Sequence
  Description of Artificial Sequence: Synthetic oligonucleotide
cacgucgguuagguugggc

SEQ ID NO: 1092621 - RNA, 19 nt, Artificial Sequence
  Description of Artificial Sequence: Synthetic oligonucleotide
ccaaacccgccucauuguc

SEQ ID NO: 1092622 - RNA, 19 nt, Artificial Sequence
  Description of Artificial Sequence: Synthetic oligonucleotide
gcauacaacuaguccugaa

SEQ ID NO: 1092623 - RNA, 19 nt, Artificial Sequence
  Description of Artificial Sequence: Synthetic oligonucleotide
ugccgucggcaaagcgggc

SEQ ID NO: 1092624 - RNA, 19 nt, Artificial Sequence
  Description of Artificial Sequence: Synthetic oligonucleotide
gacucuccuugcaguccgc

SEQ ID NO: 1092625 - RNA, 19 nt, Artificial Sequence
  Description of Artificial Sequence: Synthetic oligonucleotide
aggaucagaucgguccauu

SEQ ID NO: 1092626 - RNA, 19 nt, Artificial Sequence
  Description of Artificial Sequence: Synthetic oligonucleotide
cagcgcgucaggcucacua

SEQ ID NO: 1092627 - RNA, 19 nt, Artificial Sequence
  Description of Artificial Sequence: Synthetic oligonucleotide
gcgcuguagcagcugagca

SEQ ID NO: 1092628 - RNA, 19 nt, Artificial Sequence
  Description of Artificial Sequence: Synthetic oligonucleotide
gagcaccccgcaccacuuc

SEQ ID NO: 1092629 - RNA, 19 nt, Artificial Sequence
  Description of Artificial Sequence: Synthetic oligonucleotide
uccgcgauccagggccacu

SEQ ID NO: 1092630 - RNA, 19 nt, Artificial Sequence
  Description of Artificial Sequence: Synthetic oligonucleotide
cccguauggugauaggaaa

SEQ ID NO: 1092631 - RNA, 19 nt, Artificial Sequence
  Description of Artificial Sequence: Synthetic oligonucleotide
uccuagccugucgcagaga

SEQ ID NO: 1092632 - RNA, 19 nt, Artificial Sequence
  Description of Artificial Sequence: Synthetic oligonucleotide
ucgagccacgcugccgccu

SEQ ID NO: 1092633 - RNA, 19 nt, Artificial Sequence
  Description of Artificial Sequence: Synthetic oligonucleotide
gguugcucguagcgcggug

SEQ ID NO: 1092634 - RNA, 19 nt, Artificial Sequence
  Description of Artificial Sequence: Synthetic oligonucleotide
ggccgucagguaaucgaag

SEQ ID NO: 1092635 - RNA, 19 nt, Artificial Sequence
  Description of Artificial Sequence: Synthetic oligonucleotide
gcgaguguagaggcgcagc

SEQ ID NO: 1092636 - RNA, 19 nt, Artificial Sequence
  Description of Artificial Sequence: Synthetic oligonucleotide
agguugcucguagcgcggu

SEQ ID NO: 1092637 - RNA, 19 nt, Artificial Sequence
  Description of Artificial Sequence: Synthetic oligonucleotide
guuggccgguugguccuag

SEQ ID NO: 1092638 - RNA, 19 nt, Artificial Sequence
  Description of Artificial Sequence: Synthetic oligonucleotide
gcgcgcaagauaguaggac

SEQ ID NO: 1092639 - RNA, 19 nt, Artificial Sequence
  Description of Artificial Sequence: Synthetic oligonucleotide
cagacggccgucuucugau

SEQ ID NO: 1092640 - RNA, 19 nt, Artificial Sequence
  Description of Artificial Sequence: Synthetic oligonucleotide
ccaacgccccucccggucc

SEQ ID NO: 1092641 - RNA, 19 nt, Artificial Sequence
  Description of Artificial Sequence: Synthetic oligonucleotide
cgcgcaagauaguaggaca

SEQ ID NO: 1092642 - RNA, 19 nt, Artificial Sequence
  Description of Artificial Sequence: Synthetic oligonucleotide
gcggcgacaagaauggacu

SEQ ID NO: 1092643 - RNA, 19 nt, Artificial Sequence
  Description of Artificial Sequence: Synthetic oligonucleotide
ccagcggcggcacguggcg

SEQ ID NO: 1092644 - RNA, 19 nt, Artificial Sequence
  Description of Artificial Sequence: Synthetic oligonucleotide
caucguggcgcuggaacaa

SEQ ID NO: 1092645 - RNA, 19 nt, Artificial Sequence
  Description of Artificial Sequence: Synthetic oligonucleotide
acggcucguuauacuuguc

SEQ ID NO: 1092646 - RNA, 19 nt, Artificial Sequence
  Description of Artificial Sequence: Synthetic oligonucleotide
cuacguccgcagccuccgc

SEQ ID NO: 1092647 - RNA, 19 nt, Artificial Sequence
  Description of Artificial Sequence: Synthetic oligonucleotide
auaacgcgugggucccauu

SEQ ID NO: 1092648 - RNA, 19 nt, Artificial Sequence
  Description of Artificial Sequence: Synthetic oligonucleotide
ggaacuacguccgcagccu

SEQ ID NO: 1092649 - RNA, 19 nt, Artificial Sequence
  Description of Artificial Sequence: Synthetic oligonucleotide
cggcaaagcgggcuaggcg

SEQ ID NO: 1092650 - RNA, 19 nt, Artificial Sequence
  Description of Artificial Sequence: Synthetic oligonucleotide
gguucguggcgaguguaga

SEQ ID NO: 1092651 - RNA, 19 nt, Artificial Sequence
  Description of Artificial Sequence: Synthetic oligonucleotide
cugccgcgucuugaccucg

SEQ ID NO: 1092652 - RNA, 19 nt, Artificial Sequence
  Description of Artificial Sequence: Synthetic oligonucleotide
agggaguguuacacuuccu

SEQ ID NO: 1092653 - RNA, 19 nt, Artificial Sequence
  Description of Artificial Sequence: Synthetic oligonucleotide
aucguggcgcuggaacaaa

SEQ ID NO: 1092654 - RNA, 19 nt, Artificial Sequence
  Description of Artificial Sequence: Synthetic oligonucleotide
cgggcuaggcgguuggaac

SEQ ID NO: 1092655 - RNA, 19 nt, Artificial Sequence
  Description of Artificial Sequence: Synthetic oligonucleotide
caguccgcucucggaacac

SEQ ID NO: 1092656 - RNA, 19 nt, Artificial Sequence
  Description of Artificial Sequence: Synthetic oligonucleotide
cguggcgaguguagaggcg

SEQ ID NO: 1092657 - RNA, 19 nt, Artificial Sequence
  Description of Artificial Sequence: Synthetic oligonucleotide
gcaguccgcucucggaaca

SEQ ID NO: 1092658 - RNA, 19 nt, Artificial Sequence
  Description of Artificial Sequence: Synthetic oligonucleotide
ccacccguauggugauagg

SEQ ID NO: 1092659 - RNA, 19 nt, Artificial Sequence
  Description of Artificial Sequence: Synthetic oligonucleotide
ggcgaguguagaggcgcag

SEQ ID NO: 1092660 - RNA, 19 nt, Artificial Sequence
  Description of Artificial Sequence: Synthetic oligonucleotide
ugcuuacgagccggucgaa

SEQ ID NO: 1092661 - RNA, 19 nt, Artificial Sequence
  Description of Artificial Sequence: Synthetic oligonucleotide
ucguagcgcggugcauaac

SEQ ID NO: 1092662 - RNA, 19 nt, Artificial Sequence
  Description of Artificial Sequence: Synthetic oligonucleotide
gggcuaggcgguuggaacu

SEQ ID NO: 1092663 - RNA, 19 nt, Artificial Sequence
  Description of Artificial Sequence: Synthetic oligonucleotide
ccuuaaccuucaucauuca

SEQ ID NO: 1092664 - RNA, 19 nt, Artificial Sequence
  Description of Artificial Sequence: Synthetic oligonucleotide
gcggugcauaacgcguggg

SEQ ID NO: 1092665 - RNA, 19 nt, Artificial Sequence
  Description of Artificial Sequence: Synthetic oligonucleotide
ugcucguagcgcggugcau

SEQ ID NO: 1092666 - RNA, 19 nt, Artificial Sequence
  Description of Artificial Sequence: Synthetic oligonucleotide
ccucggagugccauuaagu

SEQ ID NO: 1092667 - RNA, 19 nt, Artificial Sequence
  Description of Artificial Sequence: Synthetic oligonucleotide
cgcgucaggcucacuacac

SEQ ID NO: 1092668 - RNA, 19 nt, Artificial Sequence
  Description of Artificial Sequence: Synthetic oligonucleotide
gcaccugcgcccacugagc

SEQ ID NO: 1092669 - RNA, 19 nt, Artificial Sequence
  Description of Artificial Sequence: Synthetic oligonucleotide
gugguucguggcgagugua

SEQ ID NO: 1092670 - RNA, 19 nt, Artificial Sequence
  Description of Artificial Sequence: Synthetic oligonucleotide
gccgccugggcuucggaaa

SEQ ID NO: 1092671 - RNA, 19 nt, Artificial Sequence
  Description of Artificial Sequence: Synthetic oligonucleotide
cacaggcacgggugccguc

SEQ ID NO: 1092672 - RNA, 19 nt, Artificial Sequence
  Description of Artificial Sequence: Synthetic oligonucleotide
gcugccgcgucuugaccuc

SEQ ID NO: 1092673 - RNA, 19 nt, Artificial Sequence
  Description of Artificial Sequence: Synthetic oligonucleotide
gcgcgucaggcucacuaca

SEQ ID NO: 1092674 - RNA, 19 nt, Artificial Sequence
  Description of Artificial Sequence: Synthetic oligonucleotide
cccaagucacagccggcuc

SEQ ID NO: 1092675 - RNA, 19 nt, Artificial Sequence
  Description of Artificial Sequence: Synthetic oligonucleotide
cgcaccacuucgagccacg

SEQ ID NO: 1092676 - RNA, 19 nt, Artificial Sequence
  Description of Artificial Sequence: Synthetic oligonucleotide
cccacaugccggccacccg

SEQ ID NO: 1092677 - RNA, 19 nt, Artificial Sequence
  Description of Artificial Sequence: Synthetic oligonucleotide
ggccgguugguccuagccu

SEQ ID NO: 1092678 - RNA, 19 nt, Artificial Sequence
  Description of Artificial Sequence: Synthetic oligonucleotide
cgcggugcauaacgcgugg

SEQ ID NO: 1092679 - RNA, 19 nt, Artificial Sequence
  Description of Artificial Sequence: Synthetic oligonucleotide
gaggaucagaucgguccau

SEQ ID NO: 1092680 - RNA, 19 nt, Artificial Sequence
  Description of Artificial Sequence: Synthetic oligonucleotide
ggucacugggugggcguug

SEQ ID NO: 1092681 - RNA, 19 nt, Artificial Sequence
  Description of Artificial Sequence: Synthetic oligonucleotide
gcaggcgcgcaagauagua

SEQ ID NO: 1092682 - RNA, 19 nt, Artificial Sequence
  Description of Artificial Sequence: Synthetic oligonucleotide
cguauggugauaggaaaua

SEQ ID NO: 1092683 - RNA, 19 nt, Artificial Sequence
  Description of Artificial Sequence: Synthetic oligonucleotide
ggcgcgcaagauaguagga

SEQ ID NO: 1092684 - RNA, 19 nt, Artificial Sequence
  Description of Artificial Sequence: Synthetic oligonucleotide
gcgcggugcauaacgcgug

SEQ ID NO: 1092685 - RNA, 19 nt, Artificial Sequence
  Description of Artificial Sequence: Synthetic oligonucleotide
ggugcaguuccaagacucu

SEQ ID NO: 1092686 - RNA, 19 nt, Artificial Sequence
  Description of Artificial Sequence: Synthetic oligonucleotide
agcaggcgcgcaagauagu

SEQ ID NO: 1092687 - RNA, 19 nt, Artificial Sequence
  Description of Artificial Sequence: Synthetic oligonucleotide
ccgcgucuugaccucggug

SEQ ID NO: 1092688 - RNA, 19 nt, Artificial Sequence
  Description of Artificial Sequence: Synthetic oligonucleotide
caccacuucgagccacgcu

SEQ ID NO: 1092689 - RNA, 19 nt, Artificial Sequence
  Description of Artificial Sequence: Synthetic oligonucleotide
ccaagucacagccggcucu

SEQ ID NO: 1092690 - RNA, 19 nt, Artificial Sequence
  Description of Artificial Sequence: Synthetic oligonucleotide
cggcgacaagaauggacug

SEQ ID NO: 1092691 - RNA, 19 nt, Artificial Sequence
  Description of Artificial Sequence: Synthetic oligonucleotide
gcgccccgagccuccaccc

SEQ ID NO: 1092692 - RNA, 19 nt, Artificial Sequence
  Description of Artificial Sequence: Synthetic oligonucleotide
ggugggcguuggccgguug

SEQ ID NO: 1092693 - RNA, 19 nt, Artificial Sequence
  Description of Artificial Sequence: Synthetic oligonucleotide
gcuaggcgguuggaacuac

SEQ ID NO: 1092694 - RNA, 19 nt, Artificial Sequence
  Description of Artificial Sequence: Synthetic oligonucleotide
gcaccacuucgagccacgc

SEQ ID NO: 1092695 - RNA, 19 nt, Artificial Sequence
  Description of Artificial Sequence: Synthetic oligonucleotide
gagcgccccgagccuccac

SEQ ID NO: 1092696 - RNA, 19 nt, Artificial Sequence
  Description of Artificial Sequence: Synthetic oligonucleotide
ccguauggugauaggaaau

SEQ ID NO: 1092697 - RNA, 19 nt, Artificial Sequence
  Description of Artificial Sequence: Synthetic oligonucleotide
agcgggcuaggcgguugga

SEQ ID NO: 1092698 - RNA, 19 nt, Artificial Sequence
  Description of Artificial Sequence: Synthetic oligonucleotide
cguuauacuugucccacau

SEQ ID NO: 1092699 - RNA, 19 nt, Artificial Sequence
  Description of Artificial Sequence: Synthetic oligonucleotide
caacgccccucccggucca

SEQ ID NO: 1092700 - RNA, 19 nt, Artificial Sequence
  Description of Artificial Sequence: Synthetic oligonucleotide
cacgggugccgucggcaaa

SEQ ID NO: 1092701 - RNA, 19 nt, Artificial Sequence
  Description of Artificial Sequence: Synthetic oligonucleotide
cauaacgcgugggucccau

SEQ ID NO: 1092702 - RNA, 19 nt, Artificial Sequence
  Description of Artificial Sequence: Synthetic oligonucleotide
cuccgcgauccagggccac

SEQ ID NO: 1092703 - RNA, 19 nt, Artificial Sequence
  Description of Artificial Sequence: Synthetic oligonucleotide
ggcucggguaccaccacgu

SEQ ID NO: 1092704 - RNA, 19 nt, Artificial Sequence
  Description of Artificial Sequence: Synthetic oligonucleotide
ccacccgguagccgugcac

SEQ ID NO: 1092705 - RNA, 19 nt, Artificial Sequence
  Description of Artificial Sequence: Synthetic oligonucleotide
gcacgggugccgucggcaa

SEQ ID NO: 1092706 - RNA, 19 nt, Artificial Sequence
  Description of Artificial Sequence: Synthetic oligonucleotide
ccgguagccgugcaccaaa

SEQ ID NO: 1092707 - RNA, 19 nt, Artificial Sequence
  Description of Artificial Sequence: Synthetic oligonucleotide
gcguuggccgguugguccu

SEQ ID NO: 1092708 - RNA, 19 nt, Artificial Sequence
  Description of Artificial Sequence: Synthetic oligonucleotide
cgguagccgugcaccaaac

SEQ ID NO: 1092709 - RNA, 19 nt, Artificial Sequence
  Description of Artificial Sequence: Synthetic oligonucleotide
ggacugcaucucccauaga

SEQ ID NO: 1092710 - RNA, 19 nt, Artificial Sequence
  Description of Artificial Sequence: Synthetic oligonucleotide
gggcucaaacggaaguuuu

SEQ ID NO: 1092711 - RNA, 19 nt, Artificial Sequence
  Description of Artificial Sequence: Synthetic oligonucleotide
guuugcccuuccagaacuu

SEQ ID NO: 1092712 - RNA, 19 nt, Artificial Sequence
  Description of Artificial Sequence: Synthetic oligonucleotide
cgagccggucgaaguuggc

SEQ ID NO: 1092713 - RNA, 19 nt, Artificial Sequence
  Description of Artificial Sequence: Synthetic oligonucleotide
gccggucgaaguuggccgu

SEQ ID NO: 1092714 - RNA, 19 nt, Artificial Sequence
  Description of Artificial Sequence: Synthetic oligonucleotide
ggccacccgguagccgugc

SEQ ID NO: 1092715 - RNA, 19 nt, Artificial Sequence
  Description of Artificial Sequence: Synthetic oligonucleotide
cgguuggaacuacguccgc

SEQ ID NO: 1092716 - RNA, 19 nt, Artificial Sequence
  Description of Artificial Sequence: Synthetic oligonucleotide
ccgugcaccaaacccgccu

SEQ ID NO: 1092717 - RNA, 19 nt, Artificial Sequence
  Description of Artificial Sequence: Synthetic oligonucleotide
ggccgucuucugaucgcca

SEQ ID NO: 1092718 - RNA, 19 nt, Artificial Sequence
  Description of Artificial Sequence: Synthetic oligonucleotide
cgcucucggaacacacaca

SEQ ID NO: 1092719 - RNA, 19 nt, Artificial Sequence
  Description of Artificial Sequence: Synthetic oligonucleotide
ccgcaccacuucgagccac

SEQ ID NO: 1092720 - RNA, 19 nt, Artificial Sequence
  Description of Artificial Sequence: Synthetic oligonucleotide
gcaaagcgggcuaggcggu

SEQ ID NO: 1092721 - RNA, 19 nt, Artificial Sequence
  Description of Artificial Sequence: Synthetic oligonucleotide
gccgugcaccaaacccgcc

SEQ ID NO: 1092722 - RNA, 19 nt, Artificial Sequence
  Description of Artificial Sequence: Synthetic oligonucleotide
cgucggcaaagcgggcuag

SEQ ID NO: 1092723 - RNA, 19 nt, Artificial Sequence
  Description of Artificial Sequence: Synthetic oligonucleotide
ccgccugggcuucggaaaa

SEQ ID NO: 1092724 - RNA, 19 nt, Artificial Sequence
  Description of Artificial Sequence: Synthetic oligonucleotide
cgcgauccagggccacuac

SEQ ID NO: 1092725 - RNA, 19 nt, Artificial Sequence
  Description of Artificial Sequence: Synthetic oligonucleotide
ccgagcaccccgcaccacu

SEQ ID NO: 1092726 - RNA, 19 nt, Artificial Sequence
  Description of Artificial Sequence: Synthetic oligonucleotide
gucgcgcagugggcgcaga

SEQ ID NO: 1092727 - RNA, 19 nt, Artificial Sequence
  Description of Artificial Sequence: Synthetic oligonucleotide
gcauaacgcguggguccca

SEQ ID NO: 1092728 - RNA, 19 nt, Artificial Sequence
  Description of Artificial Sequence: Synthetic oligonucleotide
gcggcacguggcgcuggag

SEQ ID NO: 1092729 - RNA, 19 nt, Artificial Sequence
  Description of Artificial Sequence: Synthetic oligonucleotide
cgaagaggaucagaucggu

SEQ ID NO: 1092730 - RNA, 19 nt, Artificial Sequence
  Description of Artificial Sequence: Synthetic oligonucleotide
ccggucgaaguuggccguc

SEQ ID NO: 1092731 - RNA, 19 nt, Artificial Sequence
  Description of Artificial Sequence: Synthetic oligonucleotide
ccuccgcgauccagggcca

SEQ ID NO: 1092732 - RNA, 19 nt, Artificial Sequence
  Description of Artificial Sequence: Synthetic oligonucleotide
ccgucggcaaagcgggcua

SEQ ID NO: 1092733 - RNA, 19 nt, Artificial Sequence
  Description of Artificial Sequence: Synthetic oligonucleotide
cggugcauaacgcgugggu

SEQ ID NO: 1092734 - RNA, 19 nt, Artificial Sequence
  Description of Artificial Sequence: Synthetic oligonucleotide
ggaaaccgucuggcaggaa

SEQ ID NO: 1092735 - RNA, 19 nt, Artificial Sequence
  Description of Artificial Sequence: Synthetic oligonucleotide
cgcgugggucccauugcaa

SEQ ID NO: 1092736 - RNA, 19 nt, Artificial Sequence
  Description of Artificial Sequence: Synthetic oligonucleotide
caaagcgggcuaggcgguu

SEQ ID NO: 1092737 - RNA, 19 nt, Artificial Sequence
  Description of Artificial Sequence: Synthetic oligonucleotide
gggcggcgacaagaaugga

SEQ ID NO: 1092738 - RNA, 19 nt, Artificial Sequence
  Description of Artificial Sequence: Synthetic oligonucleotide
gccgcgucuugaccucggu

SEQ ID NO: 1092739 - RNA, 19 nt, Artificial Sequence
  Description of Artificial Sequence: Synthetic oligonucleotide
ccgguugguccuagccugu

SEQ ID NO: 1092740 - RNA, 19 nt, Artificial Sequence
  Description of Artificial Sequence: Synthetic oligonucleotide
cgugguucguggcgagugu

SEQ ID NO: 1092741 - RNA, 19 nt, Artificial Sequence
  Description of Artificial Sequence: Synthetic oligonucleotide
ccgcgauccagggccacua

SEQ ID NO: 1092742 - RNA, 19 nt, Artificial Sequence
  Description of Artificial Sequence: Synthetic oligonucleotide
ggguaccaccacgucgguu

SEQ ID NO: 1092743 - RNA, 19 nt, Artificial Sequence
  Description of Artificial Sequence: Synthetic oligonucleotide
cccggggcggggaagucuu

SEQ ID NO: 1092744 - RNA, 19 nt, Artificial Sequence
  Description of Artificial Sequence: Synthetic oligonucleotide
gcuucgcgaucaggucacu

SEQ ID NO: 1092745 - RNA, 19 nt, Artificial Sequence
  Description of Artificial Sequence: Synthetic oligonucleotide
cgagcaccccgcaccacuu

SEQ ID NO: 1092746 - RNA, 19 nt, Artificial Sequence
  Description of Artificial Sequence: Synthetic oligonucleotide
gggcgcagacggccgucuu

SEQ ID NO: 1092747 - RNA, 19 nt, Artificial Sequence
  Description of Artificial Sequence: Synthetic oligonucleotide
ccaccacgucgguuagguu

SEQ ID NO: 1092748 - RNA, 19 nt, Artificial Sequence
  Description of Artificial Sequence: Synthetic oligonucleotide
gggugggcguuggccgguu

SEQ ID NO: 1092749 - RNA, 19 nt, Artificial Sequence
  Description of Artificial Sequence: Synthetic oligonucleotide
cggguaccaccacgucggu

SEQ ID NO: 1092750 - RNA, 19 nt, Artificial Sequence
  Description of Artificial Sequence: Synthetic oligonucleotide
ccgguccacggugcagguu

SEQ ID NO: 1092751 - RNA, 19 nt, Artificial Sequence
  Description of Artificial Sequence: Synthetic oligonucleotide
aacauuaagguauaguuac

SEQ ID NO: 1092752 - RNA, 19 nt, Artificial Sequence
  Description of Artificial Sequence: Synthetic oligonucleotide
aaaaucauaguacauuuac

SEQ ID NO: 1092753 - RNA, 19 nt, Artificial Sequence
  Description of Artificial Sequence: Synthetic oligonucleotide
ucuuaaaccuguuagaugc

SEQ ID NO: 1092754 - RNA, 19 nt, Artificial Sequence
  Description of Artificial Sequence: Synthetic oligonucleotide
ugaauugaaaauauuuucc

SEQ ID NO: 1092755 - RNA, 19 nt, Artificial Sequence
  Description of Artificial Sequence: Synthetic oligonucleotide
uuauuggucauuaaggucu

SEQ ID NO: 1092756 - RNA, 19 nt, Artificial Sequence
  Description of Artificial Sequence: Synthetic oligonucleotide
aaggucuuaaaccuguuag

SEQ ID NO: 1092757 - RNA, 19 nt, Artificial Sequence
  Description of Artificial Sequence: Synthetic oligonucleotide
uaagugacaacauuaaggu

SEQ ID NO: 1092758 - RNA, 19 nt, Artificial Sequence
  Description of Artificial Sequence: Synthetic oligonucleotide
guaagugacaacauuaagg

SEQ ID NO: 1092759 - RNA, 19 nt, Artificial Sequence
  Description of Artificial Sequence: Synthetic oligonucleotide
uugauaaaaucauaguaca

SEQ ID NO: 1092760 - RNA, 19 nt, Artificial Sequence
  Description of Artificial Sequence: Synthetic oligonucleotide
auaguaaagguacugcauc

SEQ ID NO: 1092761 - RNA, 19 nt, Artificial Sequence
  Description of Artificial Sequence: Synthetic oligonucleotide
uguacauccagcacaagca

SEQ ID NO: 1092762 - RNA, 19 nt, Artificial Sequence
  Description of Artificial Sequence: Synthetic oligonucleotide
uguuaaugaguguuuauug

SEQ ID NO: 1092763 - RNA, 19 nt, Artificial Sequence
  Description of Artificial Sequence: Synthetic oligonucleotide
uucaguagcagcucgagca

SEQ ID NO: 1092764 - RNA, 19 nt, Artificial Sequence
  Description of Artificial Sequence: Synthetic oligonucleotide
uauuuguagguguugacug

SEQ ID NO: 1092765 - RNA, 19 nt, Artificial Sequence
  Description of Artificial Sequence: Synthetic oligonucleotide
acaacauuaagguauaguu

SEQ ID NO: 1092766 - RNA, 19 nt, Artificial Sequence
  Description of Artificial Sequence: Synthetic oligonucleotide
aagguauaguuacaauauc

SEQ ID NO: 1092767 - RNA, 19 nt, Artificial Sequence
  Description of Artificial Sequence: Synthetic oligonucleotide
ugcacucuaguccugagug

SEQ ID NO: 1092768 - RNA, 19 nt, Artificial Sequence
  Description of Artificial Sequence: Synthetic oligonucleotide
acucuauccagauaugcag

SEQ ID NO: 1092769 - RNA, 19 nt, Artificial Sequence
  Description of Artificial Sequence: Synthetic oligonucleotide
aaugaguguuuauuguuga

SEQ ID NO: 1092770 - RNA, 19 nt, Artificial Sequence
  Description of Artificial Sequence: Synthetic oligonucleotide
uccauaaacaggccagagg

SEQ ID NO: 1092771 - RNA, 19 nt, Artificial Sequence
  Description of Artificial Sequence: Synthetic oligonucleotide
uucagguuugaguuggcgg

SEQ ID NO: 1092772 - RNA, 19 nt, Artificial Sequence
  Description of Artificial Sequence: Synthetic oligonucleotide
auuuguagguguugacugc

SEQ ID NO: 1092773 - RNA, 19 nt, Artificial Sequence
  Description of Artificial Sequence: Synthetic oligonucleotide
uucgcacacccacagauag

SEQ ID NO: 1092774 - RNA, 19 nt, Artificial Sequence
  Description of Artificial Sequence: Synthetic oligonucleotide
ugggaagccaagauugagg

SEQ ID NO: 1092775 - RNA, 19 nt, Artificial Sequence
  Description of Artificial Sequence: Synthetic oligonucleotide
uguucugcguaggugaugg

SEQ ID NO: 1092776 - RNA, 19 nt, Artificial Sequence
  Description of Artificial Sequence: Synthetic oligonucleotide
ugagaaagagguccgcaag

SEQ ID NO: 1092777 - RNA, 19 nt, Artificial Sequence
  Description of Artificial Sequence: Synthetic oligonucleotide
aacagcuuucggucuuucc

SEQ ID NO: 1092778 - RNA, 19 nt, Artificial Sequence
  Description of Artificial Sequence: Synthetic oligonucleotide
acagaauagggccagcucu

SEQ ID NO: 1092779 - RNA, 19 nt, Artificial Sequence
  Description of Artificial Sequence: Synthetic oligonucleotide
accuguuagaugcugucac

SEQ ID NO: 1092780 - RNA, 19 nt, Artificial Sequence
  Description of Artificial Sequence: Synthetic oligonucleotide
guagacagaauguacucgc

SEQ ID NO: 1092781 - RNA, 19 nt, Artificial Sequence
  Description of Artificial Sequence: Synthetic oligonucleotide
uugauagagcugaaguccc

SEQ ID NO: 1092782 - RNA, 19 nt, Artificial Sequence
  Description of Artificial Sequence: Synthetic oligonucleotide
auguccaagagucacagau

SEQ ID NO: 1092783 - RNA, 19 nt, Artificial Sequence
  Description of Artificial Sequence: Synthetic oligonucleotide
agcucgagcauccagccuc

SEQ ID NO: 1092784 - RNA, 19 nt, Artificial Sequence
  Description of Artificial Sequence: Synthetic oligonucleotide
agaagugugcucuugcacu

SEQ ID NO: 1092785 - RNA, 19 nt, Artificial Sequence
  Description of Artificial Sequence: Synthetic oligonucleotide
ucuacuguuaaugaguguu

SEQ ID NO: 1092786 - RNA, 19 nt, Artificial Sequence
  Description of Artificial Sequence: Synthetic oligonucleotide
uuuguagguguugacugcg

SEQ ID NO: 1092787 - RNA, 19 nt, Artificial Sequence
  Description of Artificial Sequence: Synthetic oligonucleotide
aguaccgugacugugagaa

SEQ ID NO: 1092788 - RNA, 19 nt, Artificial Sequence
  Description of Artificial Sequence: Synthetic oligonucleotide
gguugaaucuuucaguagc

SEQ ID NO: 1092789 - RNA, 19 nt, Artificial Sequence
  Description of Artificial Sequence: Synthetic oligonucleotide
ucuaagguagcuguucuug

SEQ ID NO: 1092790 - RNA, 19 nt, Artificial Sequence
  Description of Artificial Sequence: Synthetic oligonucleotide
uuaaugaguguuuauuguu

SEQ ID NO: 1092791 - RNA, 19 nt, Artificial Sequence
  Description of Artificial Sequence: Synthetic oligonucleotide
uccgcaaggacucuaucca

SEQ ID NO: 1092792 - RNA, 19 nt, Artificial Sequence
  Description of Artificial Sequence: Synthetic oligonucleotide
uuuagcagaccuucgcaca

SEQ ID NO: 1092793 - RNA, 19 nt, Artificial Sequence
  Description of Artificial Sequence: Synthetic oligonucleotide
uaguaaagguacugcauca

SEQ ID NO: 1092794 - RNA, 19 nt, Artificial Sequence
  Description of Artificial Sequence: Synthetic oligonucleotide
aaaucauaguacauuuaca

SEQ ID NO: 1092795 - RNA, 19 nt, Artificial Sequence
  Description of Artificial Sequence: Synthetic oligonucleotide
ugcucugauuuauugguca

SEQ ID NO: 1092796 - RNA, 19 nt, Artificial Sequence
  Description of Artificial Sequence: Synthetic oligonucleotide
auaaacaggccagaggaug

SEQ ID NO: 1092797 - RNA, 19 nt, Artificial Sequence
  Description of Artificial Sequence: Synthetic oligonucleotide
auaugcagcuuccagggga

SEQ ID NO: 1092798 - RNA, 19 nt, Artificial Sequence
  Description of Artificial Sequence: Synthetic oligonucleotide
uccauaguaaagguacugc

SEQ ID NO: 1092799 - RNA, 19 nt, Artificial Sequence
  Description of Artificial Sequence: Synthetic oligonucleotide
aagagguccgcaaggacuc

SEQ ID NO: 1092800 - RNA, 19 nt, Artificial Sequence
  Description of Artificial Sequence: Synthetic oligonucleotide
uccggaaggaacugaagca

SEQ ID NO: 1092801 - RNA, 19 nt, Artificial Sequence
  Description of Artificial Sequence: Synthetic oligonucleotide
ucuuuuguacauccagcac

SEQ ID NO: 1092802 - RNA, 19 nt, Artificial Sequence
  Description of Artificial Sequence: Synthetic oligonucleotide
ucuauccagauaugcagcu

SEQ ID NO: 1092803 - RNA, 19 nt, Artificial Sequence
  Description of Artificial Sequence: Synthetic oligonucleotide
gggaagccaagauugaggg

SEQ ID NO: 1092804 - RNA, 19 nt, Artificial Sequence
  Description of Artificial Sequence: Synthetic oligonucleotide
acagugucucugcagggcg

SEQ ID NO: 1092805 - RNA, 19 nt, Artificial Sequence
  Description of Artificial Sequence: Synthetic oligonucleotide
cuuuagcagaccuucgcac

SEQ ID NO: 1092806 - RNA, 19 nt, Artificial Sequence
  Description of Artificial Sequence: Synthetic oligonucleotide
accuugugugcauaaaaca

SEQ ID NO: 1092807 - RNA, 19 nt, Artificial Sequence
  Description of Artificial Sequence: Synthetic oligonucleotide
guaaagguacugcaucagc

SEQ ID NO: 1092808 - RNA, 19 nt, Artificial Sequence
  Description of Artificial Sequence: Synthetic oligonucleotide
agguauaguuacaauauca

SEQ ID NO: 1092809 - RNA, 19 nt, Artificial Sequence
  Description of Artificial Sequence: Synthetic oligonucleotide
ugcaccaccgaguaccgug

SEQ ID NO: 1092810 - RNA, 19 nt, Artificial Sequence
  Description of Artificial Sequence: Synthetic oligonucleotide
auuaagguauaguuacaau

SEQ ID NO: 1092811 - RNA, 19 nt, Artificial Sequence
  Description of Artificial Sequence: Synthetic oligonucleotide
uuagcagaccuucgcacac

SEQ ID NO: 1092812 - RNA, 19 nt, Artificial Sequence
  Description of Artificial Sequence: Synthetic oligonucleotide
gaagcaacauucagguuug

SEQ ID NO: 1092813 - RNA, 19 nt, Artificial Sequence
  Description of Artificial Sequence: Synthetic oligonucleotide
aguguaagggccucccuca

SEQ ID NO: 1092814 - RNA, 19 nt, Artificial Sequence
  Description of Artificial Sequence: Synthetic oligonucleotide
gagagaagugugcucuugc

SEQ ID NO: 1092815 - RNA, 19 nt, Artificial Sequence
  Description of Artificial Sequence: Synthetic oligonucleotide
uguucucccacaguugagc

SEQ ID NO: 1092816 - RNA, 19 nt, Artificial Sequence
  Description of Artificial Sequence: Synthetic oligonucleotide
auaguuucuaagguagcug

SEQ ID NO: 1092817 - RNA, 19 nt, Artificial Sequence
  Description of Artificial Sequence: Synthetic oligonucleotide
ugguugaaucuuucaguag

SEQ ID NO: 1092818 - RNA, 19 nt, Artificial Sequence
  Description of Artificial Sequence: Synthetic oligonucleotide
cacaggaucucacaguguc

SEQ ID NO: 1092819 - RNA, 19 nt, Artificial Sequence
  Description of Artificial Sequence: Synthetic oligonucleotide
uaguccugaguguaagggc

SEQ ID NO: 1092820 - RNA, 19 nt, Artificial Sequence
  Description of Artificial Sequence: Synthetic oligonucleotide
aggugacguagacagaaug

SEQ ID NO: 1092821 - RNA, 19 nt, Artificial Sequence
  Description of Artificial Sequence: Synthetic oligonucleotide
gauaugcagcuuccagggg

SEQ ID NO: 1092822 - RNA, 19 nt, Artificial Sequence
  Description of Artificial Sequence: Synthetic oligonucleotide
ggcguuguggaucuuggcg

SEQ ID NO: 1092823 - RNA, 19 nt, Artificial Sequence
  Description of Artificial Sequence: Synthetic oligonucleotide
guacauccagcacaagcag

SEQ ID NO: 1092824 - RNA, 19 nt, Artificial Sequence
  Description of Artificial Sequence: Synthetic oligonucleotide
gagaagugugcucuugcac

SEQ ID NO: 1092825 - RNA, 19 nt, Artificial Sequence
  Description of Artificial Sequence: Synthetic oligonucleotide
cacguagccaugcucggcg

SEQ ID NO: 1092826 - RNA, 19 nt, Artificial Sequence
  Description of Artificial Sequence: Synthetic oligonucleotide
uguagguguugacugcgcu

SEQ ID NO: 1092827 - RNA, 19 nt, Artificial Sequence
  Description of Artificial Sequence: Synthetic oligonucleotide
ggaugggaagccaagauug

SEQ ID NO: 1092828 - RNA, 19 nt, Artificial Sequence
  Description of Artificial Sequence: Synthetic oligonucleotide
uugacugcgcucuccacac

SEQ ID NO: 1092829 - RNA, 19 nt, Artificial Sequence
  Description of Artificial Sequence: Synthetic oligonucleotide
cugacucacacccgggagg

SEQ ID NO: 1092830 - RNA, 19 nt, Artificial Sequence
  Description of Artificial Sequence: Synthetic oligonucleotide
gaucccagagagaagugug

SEQ ID NO: 1092831 - RNA, 19 nt, Artificial Sequence
  Description of Artificial Sequence: Synthetic oligonucleotide
ccggauaucaccacugucc

SEQ ID NO: 1092832 - RNA, 19 nt, Artificial Sequence
  Description of Artificial Sequence: Synthetic oligonucleotide
caguugagcaugcggaagc

SEQ ID NO: 1092833 - RNA, 19 nt, Artificial Sequence
  Description of Artificial Sequence: Synthetic oligonucleotide
guuaaugaguguuuauugu

SEQ ID NO: 1092834 - RNA, 19 nt, Artificial Sequence
  Description of Artificial Sequence: Synthetic oligonucleotide
agcugaauugaaaauauuu

SEQ ID NO: 1092835 - RNA, 19 nt, Artificial Sequence
  Description of Artificial Sequence: Synthetic oligonucleotide
ugaguguuuauuguugaua

SEQ ID NO: 1092836 - RNA, 19 nt, Artificial Sequence
  Description of Artificial Sequence: Synthetic oligonucleotide
uaugcagcuuccaggggac

SEQ ID NO: 1092837 - RNA, 19 nt, Artificial Sequence
  Description of Artificial Sequence: Synthetic oligonucleotide
acaccuuaggaaguaguag

SEQ ID NO: 1092838 - RNA, 19 nt, Artificial Sequence
  Description of Artificial Sequence: Synthetic oligonucleotide
uucugcguaggugauggcc

SEQ ID NO: 1092839 - RNA, 19 nt, Artificial Sequence
  Description of Artificial Sequence: Synthetic oligonucleotide
uuucccggagucuccgggg

SEQ ID NO: 1092840 - RNA, 19 nt, Artificial Sequence
  Description of Artificial Sequence: Synthetic oligonucleotide
aucuguggacaccuuagga

SEQ ID NO: 1092841 - RNA, 19 nt, Artificial Sequence
  Description of Artificial Sequence: Synthetic oligonucleotide
ugaagggccguucauuguu

SEQ ID NO: 1092842 - RNA, 19 nt, Artificial Sequence
  Description of Artificial Sequence: Synthetic oligonucleotide
agggcguccagcuggaaca

SEQ ID NO: 1092843 - RNA, 19 nt, Artificial Sequence
  Description of Artificial Sequence: Synthetic oligonucleotide
uguacucgcucagccaggg

SEQ ID NO: 1092844 - RNA, 19 nt, Artificial Sequence
  Description of Artificial Sequence: Synthetic oligonucleotide
gaccuugugugcauaaaac

SEQ ID NO: 1092845 - RNA, 19 nt, Artificial Sequence
  Description of Artificial Sequence: Synthetic oligonucleotide
uagguguugacugcgcucu

SEQ ID NO: 1092846 - RNA, 19 nt, Artificial Sequence
  Description of Artificial Sequence: Synthetic oligonucleotide
uguccaagagucacagauc

SEQ ID NO: 1092847 - RNA, 19 nt, Artificial Sequence
  Description of Artificial Sequence: Synthetic oligonucleotide
caccuuaggaaguaguaga

SEQ ID NO: 1092848 - RNA, 19 nt, Artificial Sequence
  Description of Artificial Sequence: Synthetic oligonucleotide
cagaccuucgcacacccac

SEQ ID NO: 1092849 - RNA, 19 nt, Artificial Sequence
  Description of Artificial Sequence: Synthetic oligonucleotide
agagaagugugcucuugca

SEQ ID NO: 1092850 - RNA, 19 nt, Artificial Sequence
  Description of Artificial Sequence: Synthetic oligonucleotide
gcgcucuccacacugaggg

SEQ ID NO: 1092851 - RNA, 19 nt, Artificial Sequence
  Description of Artificial Sequence: Synthetic oligonucleotide
guauaguuacaauaucaua

SEQ ID NO: 1092852 - RNA, 19 nt, Artificial Sequence
  Description of Artificial Sequence: Synthetic oligonucleotide
ugagcaugcggaagcccag

SEQ ID NO: 1092853 - RNA, 19 nt, Artificial Sequence
  Description of Artificial Sequence: Synthetic oligonucleotide
gaauguacucgcucagcca

SEQ ID NO: 1092854 - RNA, 19 nt, Artificial Sequence
  Description of Artificial Sequence: Synthetic oligonucleotide
gaguuggcggggcucacag

SEQ ID NO: 1092855 - RNA, 19 nt, Artificial Sequence
  Description of Artificial Sequence: Synthetic oligonucleotide
auucagguuugaguuggcg

SEQ ID NO: 1092856 - RNA, 19 nt, Artificial Sequence
  Description of Artificial Sequence: Synthetic oligonucleotide
uggcuuuagcagaccuucg

SEQ ID NO: 1092857 - RNA, 19 nt, Artificial Sequence
  Description of Artificial Sequence: Synthetic oligonucleotide
cugccugccggauaucacc

SEQ ID NO: 1092858 - RNA, 19 nt, Artificial Sequence
  Description of Artificial Sequence: Synthetic oligonucleotide
ugcgcucuccacacugagg

SEQ ID NO: 1092859 - RNA, 19 nt, Artificial Sequence
  Description of Artificial Sequence: Synthetic oligonucleotide
ggaaguaguagagugugug

SEQ ID NO: 1092860 - RNA, 19 nt, Artificial Sequence
  Description of Artificial Sequence: Synthetic oligonucleotide
caucuguggacaccuuagg

SEQ ID NO: 1092861 - RNA, 19 nt, Artificial Sequence
  Description of Artificial Sequence: Synthetic oligonucleotide
acuguuaaugaguguuuau

SEQ ID NO: 1092862 - RNA, 19 nt, Artificial Sequence
  Description of Artificial Sequence: Synthetic oligonucleotide
uaagguagcuguucuugau

SEQ ID NO: 1092863 - RNA, 19 nt, Artificial Sequence
  Description of Artificial Sequence: Synthetic oligonucleotide
gacugcgcucuccacacug

SEQ ID NO: 1092864 - RNA, 19 nt, Artificial Sequence
  Description of Artificial Sequence: Synthetic oligonucleotide
aucccagagagaagugugc

SEQ ID NO: 1092865 - RNA, 19 nt, Artificial Sequence
  Description of Artificial Sequence: Synthetic oligonucleotide
gacucuauccagauaugca

SEQ ID NO: 1092866 - RNA, 19 nt, Artificial Sequence
  Description of Artificial Sequence: Synthetic oligonucleotide
ugugguacuugaugucacu

SEQ ID NO: 1092867 - RNA, 19 nt, Artificial Sequence
  Description of Artificial Sequence: Synthetic oligonucleotide
acauuuacaguaagugaca

SEQ ID NO: 1092868 - RNA, 19 nt, Artificial Sequence
  Description of Artificial Sequence: Synthetic oligonucleotide
gaugucagcaguggggauc

SEQ ID NO: 1092869 - RNA, 19 nt, Artificial Sequence
  Description of Artificial Sequence: Synthetic oligonucleotide
acucgcucagccagggugc

SEQ ID NO: 1092870 - RNA, 19 nt, Artificial Sequence
  Description of Artificial Sequence: Synthetic oligonucleotide
cuggcuuuagcagaccuuc

SEQ ID NO: 1092871 - RNA, 19 nt, Artificial Sequence
  Description of Artificial Sequence: Synthetic oligonucleotide
guugacugcgcucuccaca

SEQ ID NO: 1092872 - RNA, 19 nt, Artificial Sequence
  Description of Artificial Sequence: Synthetic oligonucleotide
agcagcugaauugaaaaua

SEQ ID NO: 1092873 - RNA, 19 nt, Artificial Sequence
  Description of Artificial Sequence: Synthetic oligonucleotide
guaguacauggccuccugc

SEQ ID NO: 1092874 - RNA, 19 nt, Artificial Sequence
  Description of Artificial Sequence: Synthetic oligonucleotide
uugcacucuaguccugagu

SEQ ID NO: 1092875 - RNA, 19 nt, Artificial Sequence
  Description of Artificial Sequence: Synthetic oligonucleotide
aagggccguucauuguuca

SEQ ID NO: 1092876 - RNA, 19 nt, Artificial Sequence
  Description of Artificial Sequence: Synthetic oligonucleotide
aguguuuauuguugauaaa

SEQ ID NO: 1092877 - RNA, 19 nt, Artificial Sequence
  Description of Artificial Sequence: Synthetic oligonucleotide
aaggaccuugugugcauaa

SEQ ID NO: 1092878 - RNA, 19 nt, Artificial Sequence
  Description of Artificial Sequence: Synthetic oligonucleotide
acguagccaugcucggcgc

SEQ ID NO: 1092879 - RNA, 19 nt, Artificial Sequence
  Description of Artificial Sequence: Synthetic oligonucleotide
cuuggcguauuuguaggug

SEQ ID NO: 1092880 - RNA, 19 nt, Artificial Sequence
  Description of Artificial Sequence: Synthetic oligonucleotide
cuaagguagcuguucuuga

SEQ ID NO: 1092881 - RNA, 19 nt, Artificial Sequence
  Description of Artificial Sequence: Synthetic oligonucleotide
uucuacuguuaaugagugu

SEQ ID NO: 1092882 - RNA, 19 nt, Artificial Sequence
  Description of Artificial Sequence: Synthetic oligonucleotide
uuggccgcugacagcagcu

SEQ ID NO: 1092883 - RNA, 19 nt, Artificial Sequence
  Description of Artificial Sequence: Synthetic oligonucleotide
ucuuucccggagucuccgg

SEQ ID NO: 1092884 - RNA, 19 nt, Artificial Sequence
  Description of Artificial Sequence: Synthetic oligonucleotide
agguuugaguuggcggggc

SEQ ID NO: 1092885 - RNA, 19 nt, Artificial Sequence
  Description of Artificial Sequence: Synthetic oligonucleotide
ggacuuugcugcuucggcc

SEQ ID NO: 1092886 - RNA, 19 nt, Artificial Sequence
  Description of Artificial Sequence: Synthetic oligonucleotide
auugcaagccccaggggcu

SEQ ID NO: 1092887 - RNA, 19 nt, Artificial Sequence
  Description of Artificial Sequence: Synthetic oligonucleotide
guagguguugacugcgcuc

SEQ ID NO: 1092888 - RNA, 19 nt, Artificial Sequence
  Description of Artificial Sequence: Synthetic oligonucleotide
ugagggugucacugguggc

SEQ ID NO: 1092889 - RNA, 19 nt, Artificial Sequence
  Description of Artificial Sequence: Synthetic oligonucleotide
cugcuucggccauagauga

SEQ ID NO: 1092890 - RNA, 19 nt, Artificial Sequence
  Description of Artificial Sequence: Synthetic oligonucleotide
cugccggauaucaccacug

SEQ ID NO: 1092891 - RNA, 19 nt, Artificial Sequence
  Description of Artificial Sequence: Synthetic oligonucleotide
ucccagagagaagugugcu

SEQ ID NO: 1092892 - RNA, 19 nt, Artificial Sequence
  Description of Artificial Sequence: Synthetic oligonucleotide
guauuuguagguguugacu

SEQ ID NO: 1092893 - RNA, 19 nt, Artificial Sequence
  Description of Artificial Sequence: Synthetic oligonucleotide
gcugccauagcagugugug

SEQ ID NO: 1092894 - RNA, 19 nt, Artificial Sequence
  Description of Artificial Sequence: Synthetic oligonucleotide
cauaguaaagguacugcau

SEQ ID NO: 1092895 - RNA, 19 nt, Artificial Sequence
  Description of Artificial Sequence: Synthetic oligonucleotide
ggaagccaagauugagggg

SEQ ID NO: 1092896 - RNA, 19 nt, Artificial Sequence
  Description of Artificial Sequence: Synthetic oligonucleotide
uuggcggggcucacagucc

SEQ ID NO: 1092897 - RNA, 19 nt, Artificial Sequence
  Description of Artificial Sequence: Synthetic oligonucleotide
cugaguguaagggccuccc

SEQ ID NO: 1092898 - RNA, 19 nt, Artificial Sequence
  Description of Artificial Sequence: Synthetic oligonucleotide
ugcuucggccauagaugag

SEQ ID NO: 1092899 - RNA, 19 nt, Artificial Sequence
  Description of Artificial Sequence: Synthetic oligonucleotide
cuggacuuugcugcuucgg

SEQ ID NO: 1092900 - RNA, 19 nt, Artificial Sequence
  Description of Artificial Sequence: Synthetic oligonucleotide
cauccacccugacucacac

SEQ ID NO: 1092901 - RNA, 19 nt, Artificial Sequence
  Description of Artificial Sequence: Synthetic oligonucleotide
gacaccuuaggaaguagua

SEQ ID NO: 1092902 - RNA, 19 nt, Artificial Sequence
  Description of Artificial Sequence: Synthetic oligonucleotide
accauccacccugacucac

SEQ ID NO: 1092903 - RNA, 19 nt, Artificial Sequence
  Description of Artificial Sequence: Synthetic oligonucleotide
acauuaagguauaguuaca

SEQ ID NO: 1092904 - RNA, 19 nt, Artificial Sequence
  Description of Artificial Sequence: Synthetic oligonucleotide
ccguucauuguucaggguc

SEQ ID NO: 1092905 - RNA, 19 nt, Artificial Sequence
  Description of Artificial Sequence: Synthetic oligonucleotide
uacauggccuccugcgguc

SEQ ID NO: 1092906 - RNA, 19 nt, Artificial Sequence
  Description of Artificial Sequence: Synthetic oligonucleotide
uguugacugcgcucuccac

SEQ ID NO: 1092907 - RNA, 19 nt, Artificial Sequence
  Description of Artificial Sequence: Synthetic oligonucleotide
gcuucggccauagaugagc

SEQ ID NO: 1092908 - RNA, 19 nt, Artificial Sequence
  Description of Artificial Sequence: Synthetic oligonucleotide
cccacaguugagcaugcgg

SEQ ID NO: 1092909 - RNA, 19 nt, Artificial Sequence
  Description of Artificial Sequence: Synthetic oligonucleotide
gugcucuugcacucuaguc

SEQ ID NO: 1092910 - RNA, 19 nt, Artificial Sequence
  Description of Artificial Sequence: Synthetic oligonucleotide
cagguuugaguuggcgggg

SEQ ID NO: 1092911 - RNA, 19 nt, Artificial Sequence
  Description of Artificial Sequence: Synthetic oligonucleotide
guuggccgcugacagcagc

SEQ ID NO: 1092912 - RNA, 19 nt, Artificial Sequence
  Description of Artificial Sequence: Synthetic oligonucleotide
cugcaagccuucugucacc

SEQ ID NO: 1092913 - RNA, 19 nt, Artificial Sequence
  Description of Artificial Sequence: Synthetic oligonucleotide
uggcguauuuguagguguu

SEQ ID NO: 1092914 - RNA, 19 nt, Artificial Sequence
  Description of Artificial Sequence: Synthetic oligonucleotide
agcaugaagggccguucau

SEQ ID NO: 1092915 - RNA, 19 nt, Artificial Sequence
  Description of Artificial Sequence: Synthetic oligonucleotide
gggccguucauuguucagg

SEQ ID NO: 1092916 - RNA, 19 nt, Artificial Sequence
  Description of Artificial Sequence: Synthetic oligonucleotide
aggaucucacagugucucu

SEQ ID NO: 1092917 - RNA, 19 nt, Artificial Sequence
  Description of Artificial Sequence: Synthetic oligonucleotide
agggccguucauuguucag

SEQ ID NO: 1092918 - RNA, 19 nt, Artificial Sequence
  Description of Artificial Sequence: Synthetic oligonucleotide
gucacugguggcuguguuc

SEQ ID NO: 1092919 - RNA, 19 nt, Artificial Sequence
  Description of Artificial Sequence: Synthetic oligonucleotide
ccuguuagaugcugucacc

SEQ ID NO: 1092920 - RNA, 19 nt, Artificial Sequence
  Description of Artificial Sequence: Synthetic oligonucleotide
uggaggacggagucauuuu

SEQ ID NO: 1092921 - RNA, 19 nt, Artificial Sequence
  Description of Artificial Sequence: Synthetic oligonucleotide
cagaucccagagagaagug

SEQ ID NO: 1092922 - RNA, 19 nt, Artificial Sequence
  Description of Artificial Sequence: Synthetic oligonucleotide
accgaguaccgugacugug

SEQ ID NO: 1092923 - RNA, 19 nt, Artificial Sequence
  Description of Artificial Sequence: Synthetic oligonucleotide
cgugacugugagaaagagg

SEQ ID NO: 1092924 - RNA, 19 nt, Artificial Sequence
  Description of Artificial Sequence: Synthetic oligonucleotide
ugcugccauagcagugugu

SEQ ID NO: 1092925 - RNA, 19 nt, Artificial Sequence
  Description of Artificial Sequence: Synthetic oligonucleotide
caccaaaaggaccuugugu

SEQ ID NO: 1092926 - RNA, 19 nt, Artificial Sequence
  Description of Artificial Sequence: Synthetic oligonucleotide
ggaggugacguagacagaa

SEQ ID NO: 1092927 - RNA, 19 nt, Artificial Sequence
  Description of Artificial Sequence: Synthetic oligonucleotide
agauagcagucaccaucca

SEQ ID NO: 1092928 - RNA, 19 nt, Artificial Sequence
  Description of Artificial Sequence: Synthetic oligonucleotide
auguccacguagccaugcu

SEQ ID NO: 1092929 - RNA, 19 nt, Artificial Sequence
  Description of Artificial Sequence: Synthetic oligonucleotide
ggaucucacagugucucug

SEQ ID NO: 1092930 - RNA, 19 nt, Artificial Sequence
  Description of Artificial Sequence: Synthetic oligonucleotide
ugcggcgguguucugcgua

SEQ ID NO: 1092931 - RNA, 19 nt, Artificial Sequence
  Description of Artificial Sequence: Synthetic oligonucleotide
ggaccuugugugcauaaaa

SEQ ID NO: 1092932 - RNA, 19 nt, Artificial Sequence
  Description of Artificial Sequence: Synthetic oligonucleotide
cugugagaaagagguccgc

SEQ ID NO: 1092933 - RNA, 19 nt, Artificial Sequence
  Description of Artificial Sequence: Synthetic oligonucleotide
auguacucgcucagccagg

SEQ ID NO: 1092934 - RNA, 19 nt, Artificial Sequence
  Description of Artificial Sequence: Synthetic oligonucleotide
accaccgaguaccgugacu

SEQ ID NO: 1092935 - RNA, 19 nt, Artificial Sequence
  Description of Artificial Sequence: Synthetic oligonucleotide
cugcguaggugauggccac

SEQ ID NO: 1092936 - RNA, 19 nt, Artificial Sequence
  Description of Artificial Sequence: Synthetic oligonucleotide
guagccaugcucggcgcug

SEQ ID NO: 1092937 - RNA, 19 nt, Artificial Sequence
  Description of Artificial Sequence: Synthetic oligonucleotide
cacaguugagcaugcggaa

SEQ ID NO: 1092938 - RNA, 19 nt, Artificial Sequence
  Description of Artificial Sequence: Synthetic oligonucleotide
cugcgcucuccacacugag

SEQ ID NO: 1092939 - RNA, 19 nt, Artificial Sequence
  Description of Artificial Sequence: Synthetic oligonucleotide
ccaccgaguaccgugacug

SEQ ID NO: 1092940 - RNA, 19 nt, Artificial Sequence
  Description of Artificial Sequence: Synthetic oligonucleotide
agucuccggggaugcuggg

SEQ ID NO: 1092941 - RNA, 19 nt, Artificial Sequence
  Description of Artificial Sequence: Synthetic oligonucleotide
uccugcggucuguucuccc

SEQ ID NO: 1092942 - RNA, 19 nt, Artificial Sequence
  Description of Artificial Sequence: Synthetic oligonucleotide
cucacacccgggaggugac

SEQ ID NO: 1092943 - RNA, 19 nt, Artificial Sequence
  Description of Artificial Sequence: Synthetic oligonucleotide
cccacagauagcagucacc

SEQ ID NO: 1092944 - RNA, 19 nt, Artificial Sequence
  Description of Artificial Sequence: Synthetic oligonucleotide
caaggcccuguccuucaug

SEQ ID NO: 1092945 - RNA, 19 nt, Artificial Sequence
  Description of Artificial Sequence: Synthetic oligonucleotide
acaggaucucacagugucu

SEQ ID NO: 1092946 - RNA, 19 nt, Artificial Sequence
  Description of Artificial Sequence: Synthetic oligonucleotide
guacauggccuccugcggu

SEQ ID NO: 1092947 - RNA, 19 nt, Artificial Sequence
  Description of Artificial Sequence: Synthetic oligonucleotide
uggggcgugcugccauagc

SEQ ID NO: 1092948 - RNA, 19 nt, Artificial Sequence
  Description of Artificial Sequence: Synthetic oligonucleotide
cugcggucuguucucccac

SEQ ID NO: 1092949 - RNA, 19 nt, Artificial Sequence
  Description of Artificial Sequence: Synthetic oligonucleotide
cuuaaaccuguuagaugcu

SEQ ID NO: 1092950 - RNA, 19 nt, Artificial Sequence
  Description of Artificial Sequence: Synthetic oligonucleotide
gguacugcaucagcaucug

SEQ ID NO: 1092951 - RNA, 19 nt, Artificial Sequence
  Description of Artificial Sequence: Synthetic oligonucleotide
ucacacccgggaggugacg

SEQ ID NO: 1092952 - RNA, 19 nt, Artificial Sequence
  Description of Artificial Sequence: Synthetic oligonucleotide
guguaagggccucccucac

SEQ ID NO: 1092953 - RNA, 19 nt, Artificial Sequence
  Description of Artificial Sequence: Synthetic oligonucleotide
ucggucuuucccggagucu

SEQ ID NO: 1092954 - RNA, 19 nt, Artificial Sequence
  Description of Artificial Sequence: Synthetic oligonucleotide
ugcguaggugauggccacc

SEQ ID NO: 1092955 - RNA, 19 nt, Artificial Sequence
  Description of Artificial Sequence: Synthetic oligonucleotide
ggggcguuguggaucuugg

SEQ ID NO: 1092956 - RNA, 19 nt, Artificial Sequence
  Description of Artificial Sequence: Synthetic oligonucleotide
aguuucuaagguagcuguu

SEQ ID NO: 1092957 - RNA, 19 nt, Artificial Sequence
  Description of Artificial Sequence: Synthetic oligonucleotide
ggucuuaaaccuguuagau

SEQ ID NO: 1092958 - RNA, 19 nt, Artificial Sequence
  Description of Artificial Sequence: Synthetic oligonucleotide
ggggcgugcugccauagca

SEQ ID NO: 1092959 - RNA, 19 nt, Artificial Sequence
  Description of Artificial Sequence: Synthetic oligonucleotide
gcaucugaaagauguggua

SEQ ID NO: 1092960 - RNA, 19 nt, Artificial Sequence
  Description of Artificial Sequence: Synthetic oligonucleotide
accgugacugugagaaaga

SEQ ID NO: 1092961 - RNA, 19 nt, Artificial Sequence
  Description of Artificial Sequence: Synthetic oligonucleotide
ggugacguagacagaaugu

SEQ ID NO: 1092962 - RNA, 19 nt, Artificial Sequence
  Description of Artificial Sequence: Synthetic oligonucleotide
ggcguauuuguagguguug

SEQ ID NO: 1092963 - RNA, 19 nt, Artificial Sequence
  Description of Artificial Sequence: Synthetic oligonucleotide
ugacugcgcucuccacacu

SEQ ID NO: 1092964 - RNA, 19 nt, Artificial Sequence
  Description of Artificial Sequence: Synthetic oligonucleotide
agaccuucgcacacccaca

SEQ ID NO: 1092965 - RNA, 19 nt, Artificial Sequence
  Description of Artificial Sequence: Synthetic oligonucleotide
uuguggaucuuggcguauu

SEQ ID NO: 1092966 - RNA, 19 nt, Artificial Sequence
  Description of Artificial Sequence: Synthetic oligonucleotide
gggucaccccuucucuucc

SEQ ID NO: 1092967 - RNA, 19 nt, Artificial Sequence
  Description of Artificial Sequence: Synthetic oligonucleotide
gcguauuuguagguguuga

SEQ ID NO: 1092968 - RNA, 19 nt, Artificial Sequence
  Description of Artificial Sequence: Synthetic oligonucleotide
gaguaccgugacugugaga

SEQ ID NO: 1092969 - RNA, 19 nt, Artificial Sequence
  Description of Artificial Sequence: Synthetic oligonucleotide
guucugcguaggugauggc

SEQ ID NO: 1092970 - RNA, 19 nt, Artificial Sequence
  Description of Artificial Sequence: Synthetic oligonucleotide
cugagggucugggagcaca

SEQ ID NO: 1092971 - RNA, 19 nt, Artificial Sequence
  Description of Artificial Sequence: Synthetic oligonucleotide
cuucgcacacccacagaua

SEQ ID NO: 1092972 - RNA, 19 nt, Artificial Sequence
  Description of Artificial Sequence: Synthetic oligonucleotide
cauguccaagagucacaga

SEQ ID NO: 1092973 - RNA, 19 nt, Artificial Sequence
  Description of Artificial Sequence: Synthetic oligonucleotide
auggggcgugcugccauag

SEQ ID NO: 1092974 - RNA, 19 nt, Artificial Sequence
  Description of Artificial Sequence: Synthetic oligonucleotide
cacaagcagcugaauugaa

SEQ ID NO: 1092975 - RNA, 19 nt, Artificial Sequence
  Description of Artificial Sequence: Synthetic oligonucleotide
guacugcaucagcaucuga

SEQ ID NO: 1092976 - RNA, 19 nt, Artificial Sequence
  Description of Artificial Sequence: Synthetic oligonucleotide
cuucggccauagaugagcu

SEQ ID NO: 1092977 - RNA, 19 nt, Artificial Sequence
  Description of Artificial Sequence: Synthetic oligonucleotide
gcggucuguucucccacag

SEQ ID NO: 1092978 - RNA, 19 nt, Artificial Sequence
  Description of Artificial Sequence: Synthetic oligonucleotide
uggccgcugacagcagcug

SEQ ID NO: 1092979 - RNA, 19 nt, Artificial Sequence
  Description of Artificial Sequence: Synthetic oligonucleotide
ccgcaaggacucuauccag

SEQ ID NO: 1092980 - RNA, 19 nt, Artificial Sequence
  Description of Artificial Sequence: Synthetic oligonucleotide
acugcgcucuccacacuga

SEQ ID NO: 1092981 - RNA, 19 nt, Artificial Sequence
  Description of Artificial Sequence: Synthetic oligonucleotide
cugccauagcaguguguga

SEQ ID NO: 1092982 - RNA, 19 nt, Artificial Sequence
  Description of Artificial Sequence: Synthetic oligonucleotide
gggcgugcugccauagcag

SEQ ID NO: 1092983 - RNA, 19 nt, Artificial Sequence
  Description of Artificial Sequence: Synthetic oligonucleotide
gcggcgguguucugcguag

SEQ ID NO: 1092984 - RNA, 19 nt, Artificial Sequence
  Description of Artificial Sequence: Synthetic oligonucleotide
ucccggagucuccggggau

SEQ ID NO: 1092985 - RNA, 19 nt, Artificial Sequence
  Description of Artificial Sequence: Synthetic oligonucleotide
ccgaguaccgugacuguga

SEQ ID NO: 1092986 - RNA, 19 nt, Artificial Sequence
  Description of Artificial Sequence: Synthetic oligonucleotide
ggggcuucugaugaauaaa

SEQ ID NO: 1092987 - RNA, 19 nt, Artificial Sequence
  Description of Artificial Sequence: Synthetic oligonucleotide
caugcucggcgcuguagua

SEQ ID NO: 1092988 - RNA, 19 nt, Artificial Sequence
  Description of Artificial Sequence: Synthetic oligonucleotide
ccgugacugugagaaagag

SEQ ID NO: 1092989 - RNA, 19 nt, Artificial Sequence
  Description of Artificial Sequence: Synthetic oligonucleotide
cgguguucugcguagguga

SEQ ID NO: 1092990 - RNA, 19 nt, Artificial Sequence
  Description of Artificial Sequence: Synthetic oligonucleotide
ggaucuuggcguauuugua

SEQ ID NO: 1092991 - RNA, 19 nt, Artificial Sequence
  Description of Artificial Sequence: Synthetic oligonucleotide
gggcguuguggaucuuggc

SEQ ID NO: 1092992 - RNA, 19 nt, Artificial Sequence
  Description of Artificial Sequence: Synthetic oligonucleotide
gcggggcucacaguccagg

SEQ ID NO: 1092993 - RNA, 19 nt, Artificial Sequence
  Description of Artificial Sequence: Synthetic oligonucleotide
cagcacaagcagcugaauu

SEQ ID NO: 1092994 - RNA, 19 nt, Artificial Sequence
  Description of Artificial Sequence: Synthetic oligonucleotide
gguccugguugaaucuuuc

SEQ ID NO: 1092995 - RNA, 19 nt, Artificial Sequence
  Description of Artificial Sequence: Synthetic oligonucleotide
uugcaagccccaggggcuu

SEQ ID NO: 1092996 - RNA, 19 nt, Artificial Sequence
  Description of Artificial Sequence: Synthetic oligonucleotide
uugcugcuucggccauaga

SEQ ID NO: 1092997 - RNA, 19 nt, Artificial Sequence
  Description of Artificial Sequence: Synthetic oligonucleotide
ccacccugacucacacccg

SEQ ID NO: 1092998 - RNA, 19 nt, Artificial Sequence
  Description of Artificial Sequence: Synthetic oligonucleotide
cgaguaccgugacugugag

SEQ ID NO: 1092999 - RNA, 19 nt, Artificial Sequence
  Description of Artificial Sequence: Synthetic oligonucleotide
cucgagcauccagccuccg

SEQ ID NO: 1093000 - RNA, 19 nt, Artificial Sequence
  Description of Artificial Sequence: Synthetic oligonucleotide
gacucacacccgggaggug

SEQ ID NO: 1093001 - RNA, 19 nt, Artificial Sequence
  Description of Artificial Sequence: Synthetic oligonucleotide
guagcagcucgagcaucca

SEQ ID NO: 1093002 - RNA, 19 nt, Artificial Sequence
  Description of Artificial Sequence: Synthetic oligonucleotide
gguagcuguucuugaugcu

SEQ ID NO: 1093003 - RNA, 19 nt, Artificial Sequence
  Description of Artificial Sequence: Synthetic oligonucleotide
gguccgcaaggacucuauc

SEQ ID NO: 1093004 - RNA, 19 nt, Artificial Sequence
  Description of Artificial Sequence: Synthetic oligonucleotide
gggcuucugaugaauaaau

SEQ ID NO: 1093005 - RNA, 19 nt, Artificial Sequence
  Description of Artificial Sequence: Synthetic oligonucleotide
ccuucgcacacccacagau

SEQ ID NO: 1093006 - RNA, 19 nt, Artificial Sequence
  Description of Artificial Sequence: Synthetic oligonucleotide
ccaggauugcaagccccag

SEQ ID NO: 1093007 - RNA, 19 nt, Artificial Sequence
  Description of Artificial Sequence: Synthetic oligonucleotide
gccaugcucggcgcuguag

SEQ ID NO: 1093008 - RNA, 19 nt, Artificial Sequence
  Description of Artificial Sequence: Synthetic oligonucleotide
ggcgugcugccauagcagu

SEQ ID NO: 1093009 - RNA, 19 nt, Artificial Sequence
  Description of Artificial Sequence: Synthetic oligonucleotide
cuggaggacggagucauuu

SEQ ID NO: 1093010 - RNA, 19 nt, Artificial Sequence
  Description of Artificial Sequence: Synthetic oligonucleotide
gagguccgcaaggacucua

SEQ ID NO: 1093011 - RNA, 19 nt, Artificial Sequence
  Description of Artificial Sequence: Synthetic oligonucleotide
ccggaaggaacugaagcaa

SEQ ID NO: 1093012 - RNA, 19 nt, Artificial Sequence
  Description of Artificial Sequence: Synthetic oligonucleotide
gaggugacguagacagaau

SEQ ID NO: 1093013 - RNA, 19 nt, Artificial Sequence
  Description of Artificial Sequence: Synthetic oligonucleotide
ggucaccccuucucuucca

SEQ ID NO: 1093014 - RNA, 19 nt, Artificial Sequence
  Description of Artificial Sequence: Synthetic oligonucleotide
cacccgcauccacuccauc

SEQ ID NO: 1093015 - RNA, 19 nt, Artificial Sequence
  Description of Artificial Sequence: Synthetic oligonucleotide
gguuugaguuggcggggcu

SEQ ID NO: 1093016 - RNA, 19 nt, Artificial Sequence
  Description of Artificial Sequence: Synthetic oligonucleotide
ccauccacccugacucaca

SEQ ID NO: 1093017 - RNA, 19 nt, Artificial Sequence
  Description of Artificial Sequence: Synthetic oligonucleotide
ccggagucuccggggaugc

SEQ ID NO: 1093018 - RNA, 19 nt, Artificial Sequence
  Description of Artificial Sequence: Synthetic oligonucleotide
gguuggccgcugacagcag

SEQ ID NO: 1093019 - RNA, 19 nt, Artificial Sequence
  Description of Artificial Sequence: Synthetic oligonucleotide
cccggagucuccggggaug

SEQ ID NO: 1093020 - RNA, 19 nt, Artificial Sequence
  Description of Artificial Sequence: Synthetic oligonucleotide
caccgaguaccgugacugu

SEQ ID NO: 1093021 - RNA, 19 nt, Artificial Sequence
  Description of Artificial Sequence: Synthetic oligonucleotide
cggcgcuguaguacauggc

SEQ ID NO: 1093022 - RNA, 19 nt, Artificial Sequence
  Description of Artificial Sequence: Synthetic oligonucleotide
gcaugaagggccguucauu

SEQ ID NO: 1093023 - RNA, 19 nt, Artificial Sequence
  Description of Artificial Sequence: Synthetic oligonucleotide
ccugccggauaucaccacu

SEQ ID NO: 1093024 - RNA, 19 nt, Artificial Sequence
  Description of Artificial Sequence: Synthetic oligonucleotide
gguguucugcguaggugau

SEQ ID NO: 1093025 - RNA, 19 nt, Artificial Sequence
  Description of Artificial Sequence: Synthetic oligonucleotide
gcagaccuucgcacaccca

SEQ ID NO: 1093026 - RNA, 19 nt, Artificial Sequence
  Description of Artificial Sequence: Synthetic oligonucleotide
gcccugcaccaccgaguac

SEQ ID NO: 1093027 - RNA, 19 nt, Artificial Sequence
  Description of Artificial Sequence: Synthetic oligonucleotide
gcacaggaucucacagugu

SEQ ID NO: 1093028 - RNA, 19 nt, Artificial Sequence
  Description of Artificial Sequence: Synthetic oligonucleotide
cggcgguguucugcguagg

SEQ ID NO: 1093029 - RNA, 19 nt, Artificial Sequence
  Description of Artificial Sequence: Synthetic oligonucleotide
ccgcauccacuccaucagu

SEQ ID NO: 1093030 - RNA, 19 nt, Artificial Sequence
  Description of Artificial Sequence: Synthetic oligonucleotide
cugcaccaccgaguaccgu

SEQ ID NO: 1093031 - RNA, 19 nt, Artificial Sequence
  Description of Artificial Sequence: Synthetic oligonucleotide
cugcggcgguguucugcgu

SEQ ID NO: 1093032 - RNA, 19 nt, Artificial Sequence
  Description of Artificial Sequence: Synthetic oligonucleotide
ccagcacaagcagcugaau

SEQ ID NO: 1093033 - RNA, 19 nt, Artificial Sequence
  Description of Artificial Sequence: Synthetic oligonucleotide
ccgggcugccugccggaua

SEQ ID NO: 1093034 - RNA, 19 nt, Artificial Sequence
  Description of Artificial Sequence: Synthetic oligonucleotide
gcucggcgcuguaguacau

SEQ ID NO: 1093035 - RNA, 19 nt, Artificial Sequence
  Description of Artificial Sequence: Synthetic oligonucleotide
cuggggcguuguggaucuu

SEQ ID NO: 1093036 - RNA, 19 nt, Artificial Sequence
  Description of Artificial Sequence: Synthetic oligonucleotide
acuuuuaaauacuugauag

SEQ ID NO: 1093037 - RNA, 19 nt, Artificial Sequence
  Description of Artificial Sequence: Synthetic oligonucleotide
aaguaagucccgcacaucc

SEQ ID NO: 1093038 - RNA, 19 nt, Artificial Sequence
  Description of Artificial Sequence: Synthetic oligonucleotide
aaagagaacagcugguggg

SEQ ID NO: 1093039 - RNA, 19 nt, Artificial Sequence
  Description of Artificial Sequence: Synthetic oligonucleotide
acuauuggcaggcacaggc

SEQ ID NO: 1093040 - RNA, 19 nt, Artificial Sequence
  Description of Artificial Sequence: Synthetic oligonucleotide
uguguaauauccacgagug

SEQ ID NO: 1093041 - RNA, 19 nt, Artificial Sequence
  Description of Artificial Sequence: Synthetic oligonucleotide
uuaggaaggccacagagug

SEQ ID NO: 1093042 - RNA, 19 nt, Artificial Sequence
  Description of Artificial Sequence: Synthetic oligonucleotide
ucggaaagagaacagcugg

SEQ ID NO: 1093043 - RNA, 19 nt, Artificial Sequence
  Description of Artificial Sequence: Synthetic oligonucleotide
aggaaagugacauuagaag

SEQ ID NO: 1093044 - RNA, 19 nt, Artificial Sequence
  Description of Artificial Sequence: Synthetic oligonucleotide
ucaagagcuacacugggcc

SEQ ID NO: 1093045 - RNA, 19 nt, Artificial Sequence
  Description of Artificial Sequence: Synthetic oligonucleotide
acauuagaagcacagcagg

SEQ ID NO: 1093046 - RNA, 19 nt, Artificial Sequence
  Description of Artificial Sequence: Synthetic oligonucleotide
uaacaggagaccuuggaag

SEQ ID NO: 1093047 - RNA, 19 nt, Artificial Sequence
  Description of Artificial Sequence: Synthetic oligonucleotide
uauaaguccaguucagccc

SEQ ID NO: 1093048 - RNA, 19 nt, Artificial Sequence
  Description of Artificial Sequence: Synthetic oligonucleotide
ugucuauaaguccaguuca

SEQ ID NO: 1093049 - RNA, 19 nt, Artificial Sequence
  Description of Artificial Sequence: Synthetic oligonucleotide
aguucugacagaaaagcgc

SEQ ID NO: 1093050 - RNA, 19 nt, Artificial Sequence
  Description of Artificial Sequence: Synthetic oligonucleotide
ugauguaugagaacacgcc

SEQ ID NO: 1093051 - RNA, 19 nt, Artificial Sequence
  Description of Artificial Sequence: Synthetic oligonucleotide
gauggaguguguaauaucc

SEQ ID NO: 1093052 - RNA, 19 nt, Artificial Sequence
  Description of Artificial Sequence: Synthetic oligonucleotide
ugccauuaggucaaagagg

SEQ ID NO: 1093053 - RNA, 19 nt, Artificial Sequence
  Description of Artificial Sequence: Synthetic oligonucleotide
uaugcuuagcccuugcacc

SEQ ID NO: 1093054 - RNA, 19 nt, Artificial Sequence
  Description of Artificial Sequence: Synthetic oligonucleotide
cuauaaguccaguucagcc

SEQ ID NO: 1093055 - RNA, 19 nt, Artificial Sequence
  Description of Artificial Sequence: Synthetic oligonucleotide
agguucaagagcuacacug

SEQ ID NO: 1093056 - RNA, 19 nt, Artificial Sequence
  Description of Artificial Sequence: Synthetic oligonucleotide
auuagaagcacagcaggcc

SEQ ID NO: 1093057 - RNA, 19 nt, Artificial Sequence
  Description of Artificial Sequence: Synthetic oligonucleotide
ucuagcuacucuaggagcc

SEQ ID NO: 1093058 - RNA, 19 nt, Artificial Sequence
  Description of Artificial Sequence: Synthetic oligonucleotide
uugauguaugagaacacgc

SEQ ID NO: 1093059 - RNA, 19 nt, Artificial Sequence
  Description of Artificial Sequence: Synthetic oligonucleotide
uuuucuagcuacucuagga

SEQ ID NO: 1093060 - RNA, 19 nt, Artificial Sequence
  Description of Artificial Sequence: Synthetic oligonucleotide
aucagguaggcuccaaagc

SEQ ID NO: 1093061 - RNA, 19 nt, Artificial Sequence
  Description of Artificial Sequence: Synthetic oligonucleotide
cuugccgugggcuaaacgc

SEQ ID NO: 1093062 - RNA, 19 nt, Artificial Sequence
  Description of Artificial Sequence: Synthetic oligonucleotide
cauuaggucaaagaggacc

SEQ ID NO: 1093063 - RNA, 19 nt, Artificial Sequence
  Description of Artificial Sequence: Synthetic oligonucleotide
augaaagcaccacaaggac

SEQ ID NO: 1093064 - RNA, 19 nt, Artificial Sequence
  Description of Artificial Sequence: Synthetic oligonucleotide
acuuaagacugccaguguc

SEQ ID NO: 1093065 - RNA, 19 nt, Artificial Sequence
  Description of Artificial Sequence: Synthetic oligonucleotide
agugguacuauuggcaggc

SEQ ID NO: 1093066 - RNA, 19 nt, Artificial Sequence
  Description of Artificial Sequence: Synthetic oligonucleotide
ggaaagugacauuagaagc

SEQ ID NO: 1093067 - RNA, 19 nt, Artificial Sequence
  Description of Artificial Sequence: Synthetic oligonucleotide
uguaugagaacacgccugc

SEQ ID NO: 1093068 - RNA, 19 nt, Artificial Sequence
  Description of Artificial Sequence: Synthetic oligonucleotide
uguaauauccacgagugua

SEQ ID NO: 1093069 - RNA, 19 nt, Artificial Sequence
  Description of Artificial Sequence: Synthetic oligonucleotide
uaggcuccaaagcacaugc

SEQ ID NO: 1093070 - RNA, 19 nt, Artificial Sequence
  Description of Artificial Sequence: Synthetic oligonucleotide
uugacggcagcccaggagc

SEQ ID NO: 1093071 - RNA, 19 nt, Artificial Sequence
  Description of Artificial Sequence: Synthetic oligonucleotide
uuggucagagcauugguga

SEQ ID NO: 1093072 - RNA, 19 nt, Artificial Sequence
  Description of Artificial Sequence: Synthetic oligonucleotide
aauauccacgaguguaucu

SEQ ID NO: 1093073 - RNA, 19 nt, Artificial Sequence
  Description of Artificial Sequence: Synthetic oligonucleotide
agggacuuaagacugccag

SEQ ID NO: 1093074 - RNA, 19 nt, Artificial Sequence
  Description of Artificial Sequence: Synthetic oligonucleotide
cauuguggcaaucuccagg

SEQ ID NO: 1093075 - RNA, 19 nt, Artificial Sequence
  Description of Artificial Sequence: Synthetic oligonucleotide
cagagagguacgaagggcg

SEQ ID NO: 1093076 - RNA, 19 nt, Artificial Sequence
  Description of Artificial Sequence: Synthetic oligonucleotide
aaguucugacagaaaagcg

SEQ ID NO: 1093077 - RNA, 19 nt, Artificial Sequence
  Description of Artificial Sequence: Synthetic oligonucleotide
caagccugcucuuuggucc

SEQ ID NO: 1093078 - RNA, 19 nt, Artificial Sequence
  Description of Artificial Sequence: Synthetic oligonucleotide
cugccauuaggucaaagag

SEQ ID NO: 1093079 - RNA, 19 nt, Artificial Sequence
  Description of Artificial Sequence: Synthetic oligonucleotide
cuauggguaccgauggugg

SEQ ID NO: 1093080 - RNA, 19 nt, Artificial Sequence
  Description of Artificial Sequence: Synthetic oligonucleotide
auacagcccugccagagac

SEQ ID NO: 1093081 - RNA, 19 nt, Artificial Sequence
  Description of Artificial Sequence: Synthetic oligonucleotide
gacauuagaagcacagcag

SEQ ID NO: 1093082 - RNA, 19 nt, Artificial Sequence
  Description of Artificial Sequence: Synthetic oligonucleotide
aggaucgaagcuuuucuag

SEQ ID NO: 1093083 - RNA, 19 nt, Artificial Sequence
  Description of Artificial Sequence: Synthetic oligonucleotide
caguacgacagccaagugg

SEQ ID NO: 1093084 - RNA, 19 nt, Artificial Sequence
  Description of Artificial Sequence: Synthetic oligonucleotide
cuugauguaugagaacacg

SEQ ID NO: 1093085 - RNA, 19 nt, Artificial Sequence
  Description of Artificial Sequence: Synthetic oligonucleotide
acgaguguaucugaguugg

SEQ ID NO: 1093086 - RNA, 19 nt, Artificial Sequence
  Description of Artificial Sequence: Synthetic oligonucleotide
caagugguaggccaggcgc

SEQ ID NO: 1093087 - RNA, 19 nt, Artificial Sequence
  Description of Artificial Sequence: Synthetic oligonucleotide
gaguguguaauauccacga

SEQ ID NO: 1093088 - RNA, 19 nt, Artificial Sequence
  Description of Artificial Sequence: Synthetic oligonucleotide
ugaggugaaguaagucccg

SEQ ID NO: 1093089 - RNA, 19 nt, Artificial Sequence
  Description of Artificial Sequence: Synthetic oligonucleotide
aaacgccagcguuaggaag

SEQ ID NO: 1093090 - RNA, 19 nt, Artificial Sequence
  Description of Artificial Sequence: Synthetic oligonucleotide
agacaccuugaucggaggc

SEQ ID NO: 1093091 - RNA, 19 nt, Artificial Sequence
  Description of Artificial Sequence: Synthetic oligonucleotide
aaacaaacgccagcguuag

SEQ ID NO: 1093092 - RNA, 19 nt, Artificial Sequence
  Description of Artificial Sequence: Synthetic oligonucleotide
ugauagaugcuggugggag

SEQ ID NO: 1093093 - RNA, 19 nt, Artificial Sequence
  Description of Artificial Sequence: Synthetic oligonucleotide
acgaagggcggcuccaacc

SEQ ID NO: 1093094 - RNA, 19 nt, Artificial Sequence
  Description of Artificial Sequence: Synthetic oligonucleotide
uccacucuuccccacguag

SEQ ID NO: 1093095 - RNA, 19 nt, Artificial Sequence
  Description of Artificial Sequence: Synthetic oligonucleotide
ugaucggaggcccaguggu

SEQ ID NO: 1093096 - RNA, 19 nt, Artificial Sequence
  Description of Artificial Sequence: Synthetic oligonucleotide
caggcaggcacucaaggcg

SEQ ID NO: 1093097 - RNA, 19 nt, Artificial Sequence
  Description of Artificial Sequence: Synthetic oligonucleotide
augcccaguauugacagac

SEQ ID NO: 1093098 - RNA, 19 nt, Artificial Sequence
  Description of Artificial Sequence: Synthetic oligonucleotide
aguacgacagccaaguggu

SEQ ID NO: 1093099 - RNA, 19 nt, Artificial Sequence
  Description of Artificial Sequence: Synthetic oligonucleotide
acacaggacccaugaaagc

SEQ ID NO: 1093100 - RNA, 19 nt, Artificial Sequence
  Description of Artificial Sequence: Synthetic oligonucleotide
aacacgccugcacacagga

SEQ ID NO: 1093101 - RNA, 19 nt, Artificial Sequence
  Description of Artificial Sequence: Synthetic oligonucleotide
ucaacacccagaagaaagu

SEQ ID NO: 1093102 - RNA, 19 nt, Artificial Sequence
  Description of Artificial Sequence: Synthetic oligonucleotide
uggaguguguaauauccac

SEQ ID NO: 1093103 - RNA, 19 nt, Artificial Sequence
  Description of Artificial Sequence: Synthetic oligonucleotide
ucugacagaaaagcgcuca

SEQ ID NO: 1093104 - RNA, 19 nt, Artificial Sequence
  Description of Artificial Sequence: Synthetic oligonucleotide
cuaugcuuagcccuugcac

SEQ ID NO: 1093105 - RNA, 19 nt, Artificial Sequence
  Description of Artificial Sequence: Synthetic oligonucleotide
uugacagaccauacagccc

SEQ ID NO: 1093106 - RNA, 19 nt, Artificial Sequence
  Description of Artificial Sequence: Synthetic oligonucleotide
aaagcacaugcccaguauu

SEQ ID NO: 1093107 - RNA, 19 nt, Artificial Sequence
  Description of Artificial Sequence: Synthetic oligonucleotide
acaagugaggugaaguaag

SEQ ID NO: 1093108 - RNA, 19 nt, Artificial Sequence
  Description of Artificial Sequence: Synthetic oligonucleotide
aaaacaaacgccagcguua

SEQ ID NO: 1093109 - RNA, 19 nt, Artificial Sequence
  Description of Artificial Sequence: Synthetic oligonucleotide
uugaucggaggcccagugg

SEQ ID NO: 1093110 - RNA, 19 nt, Artificial Sequence
  Description of Artificial Sequence: Synthetic oligonucleotide
ucuauaaguccaguucagc

SEQ ID NO: 1093111 - RNA, 19 nt, Artificial Sequence
  Description of Artificial Sequence: Synthetic oligonucleotide
ccuugcaccacuuggauag

SEQ ID NO: 1093112 - RNA, 19 nt, Artificial Sequence
  Description of Artificial Sequence: Synthetic oligonucleotide
acgacagccaagugguagg

SEQ ID NO: 1093113 - RNA, 19 nt, Artificial Sequence
  Description of Artificial Sequence: Synthetic oligonucleotide
acaaacgccagcguuagga

SEQ ID NO: 1093114 - RNA, 19 nt, Artificial Sequence
  Description of Artificial Sequence: Synthetic oligonucleotide
aagaggacccucccggaca

SEQ ID NO: 1093115 - RNA, 19 nt, Artificial Sequence
  Description of Artificial Sequence: Synthetic oligonucleotide
auauccacgaguguaucug

SEQ ID NO: 1093116 - RNA, 19 nt, Artificial Sequence
  Description of Artificial Sequence: Synthetic oligonucleotide
ugacagaaaagcgcucagg

SEQ ID NO: 1093117 - RNA, 19 nt, Artificial Sequence
  Description of Artificial Sequence: Synthetic oligonucleotide
aacgccuccacagggucac

SEQ ID NO: 1093118 - RNA, 19 nt, Artificial Sequence
  Description of Artificial Sequence: Synthetic oligonucleotide
uccgggagcucuuucacca

SEQ ID NO: 1093119 - RNA, 19 nt, Artificial Sequence
  Description of Artificial Sequence: Synthetic oligonucleotide
uacgacagccaagugguag

SEQ ID NO: 1093120 - RNA, 19 nt, Artificial Sequence
  Description of Artificial Sequence: Synthetic oligonucleotide
gauccgcucgcccuugccg

SEQ ID NO: 1093121 - RNA, 19 nt, Artificial Sequence
  Description of Artificial Sequence: Synthetic oligonucleotide
ucgaagcuuuucuagcuac

SEQ ID NO: 1093122 - RNA, 19 nt, Artificial Sequence
  Description of Artificial Sequence: Synthetic oligonucleotide
agguuaauaguccacucuu

SEQ ID NO: 1093123 - RNA, 19 nt, Artificial Sequence
  Description of Artificial Sequence: Synthetic oligonucleotide
agaugggucagcaccaguc

SEQ ID NO: 1093124 - RNA, 19 nt, Artificial Sequence
  Description of Artificial Sequence: Synthetic oligonucleotide
agaagaaaguucugacaga

SEQ ID NO: 1093125 - RNA, 19 nt, Artificial Sequence
  Description of Artificial Sequence: Synthetic oligonucleotide
agcaccacaaggaccacac

SEQ ID NO: 1093126 - RNA, 19 nt, Artificial Sequence
  Description of Artificial Sequence: Synthetic oligonucleotide
agaaaagcgcucagggaac

SEQ ID NO: 1093127 - RNA, 19 nt, Artificial Sequence
  Description of Artificial Sequence: Synthetic oligonucleotide
aguguguaauauccacgag

SEQ ID NO: 1093128 - RNA, 19 nt, Artificial Sequence
  Description of Artificial Sequence: Synthetic oligonucleotide
acucacagcugucuauaag

SEQ ID NO: 1093129 - RNA, 19 nt, Artificial Sequence
  Description of Artificial Sequence: Synthetic oligonucleotide
aagucccgcacaucccagg

SEQ ID NO: 1093130 - RNA, 19 nt, Artificial Sequence
  Description of Artificial Sequence: Synthetic oligonucleotide
gauguaugagaacacgccu

SEQ ID NO: 1093131 - RNA, 19 nt, Artificial Sequence
  Description of Artificial Sequence: Synthetic oligonucleotide
uugccgugggcuaaacgcc

SEQ ID NO: 1093132 - RNA, 19 nt, Artificial Sequence
  Description of Artificial Sequence: Synthetic oligonucleotide
acuauggguaccgauggug

SEQ ID NO: 1093133 - RNA, 19 nt, Artificial Sequence
  Description of Artificial Sequence: Synthetic oligonucleotide
aguaagucccgcacauccc

SEQ ID NO: 1093134 - RNA, 19 nt, Artificial Sequence
  Description of Artificial Sequence: Synthetic oligonucleotide
aagccucacggucccacag

SEQ ID NO: 1093135 - RNA, 19 nt, Artificial Sequence
  Description of Artificial Sequence: Synthetic oligonucleotide
acacccagaagaaaguucu

SEQ ID NO: 1093136 - RNA, 19 nt, Artificial Sequence
  Description of Artificial Sequence: Synthetic oligonucleotide
guaccgaugguggggaugg

SEQ ID NO: 1093137 - RNA, 19 nt, Artificial Sequence
  Description of Artificial Sequence: Synthetic oligonucleotide
cuacccgaugcacuggacc

SEQ ID NO: 1093138 - RNA, 19 nt, Artificial Sequence
  Description of Artificial Sequence: Synthetic oligonucleotide
ggcggagcuacccaguacg

SEQ ID NO: 1093139 - RNA, 19 nt, Artificial Sequence
  Description of Artificial Sequence: Synthetic oligonucleotide
gcuaaacgccuccacaggg

SEQ ID NO: 1093140 - RNA, 19 nt, Artificial Sequence
  Description of Artificial Sequence: Synthetic oligonucleotide
aggaagaaggaccguaaaa

SEQ ID NO: 1093141 - RNA, 19 nt, Artificial Sequence
  Description of Artificial Sequence: Synthetic oligonucleotide
guuccuacccgaugcacug

SEQ ID NO: 1093142 - RNA, 19 nt, Artificial Sequence
  Description of Artificial Sequence: Synthetic oligonucleotide
auagggauccgcucgcccu

SEQ ID NO: 1093143 - RNA, 19 nt, Artificial Sequence
  Description of Artificial Sequence: Synthetic oligonucleotide
ggugauagccagcagcccc

SEQ ID NO: 1093144 - RNA, 19 nt, Artificial Sequence
  Description of Artificial Sequence: Synthetic oligonucleotide
gacaccuugaucggaggcc

SEQ ID NO: 1093145 - RNA, 19 nt, Artificial Sequence
  Description of Artificial Sequence: Synthetic oligonucleotide
cagugccaaaacaaacgcc

SEQ ID NO: 1093146 - RNA, 19 nt, Artificial Sequence
  Description of Artificial Sequence: Synthetic oligonucleotide
gauagggauccgcucgccc

SEQ ID NO: 1093147 - RNA, 19 nt, Artificial Sequence
  Description of Artificial Sequence: Synthetic oligonucleotide
ugauggaguguguaauauc

SEQ ID NO: 1093148 - RNA, 19 nt, Artificial Sequence
  Description of Artificial Sequence: Synthetic oligonucleotide
ugguacuauuggcaggcac

SEQ ID NO: 1093149 - RNA, 19 nt, Artificial Sequence
  Description of Artificial Sequence: Synthetic oligonucleotide
aguagacaggcacuucgga

SEQ ID NO: 1093150 - RNA, 19 nt, Artificial Sequence
  Description of Artificial Sequence: Synthetic oligonucleotide
auacuugauagaugcuggu

SEQ ID NO: 1093151 - RNA, 19 nt, Artificial Sequence
  Description of Artificial Sequence: Synthetic oligonucleotide
ucugauggaguguguaaua

SEQ ID NO: 1093152 - RNA, 19 nt, Artificial Sequence
  Description of Artificial Sequence: Synthetic oligonucleotide
auguaugagaacacgccug

SEQ ID NO: 1093153 - RNA, 19 nt, Artificial Sequence
  Description of Artificial Sequence: Synthetic oligonucleotide
caggaaagugacauuagaa

SEQ ID NO: 1093154 - RNA, 19 nt, Artificial Sequence
  Description of Artificial Sequence: Synthetic oligonucleotide
gguucaagagcuacacugg

SEQ ID NO: 1093155 - RNA, 19 nt, Artificial Sequence
  Description of Artificial Sequence: Synthetic oligonucleotide
ggaucgaagcuuuucuagc

SEQ ID NO: 1093156 - RNA, 19 nt, Artificial Sequence
  Description of Artificial Sequence: Synthetic oligonucleotide
uauccacgaguguaucuga

SEQ ID NO: 1093157 - RNA, 19 nt, Artificial Sequence
  Description of Artificial Sequence: Synthetic oligonucleotide
ggaguguguaauauccacg

SEQ ID NO: 1093158 - RNA, 19 nt, Artificial Sequence
  Description of Artificial Sequence: Synthetic oligonucleotide
aacaaacgccagcguuagg

SEQ ID NO: 1093159 - RNA, 19 nt, Artificial Sequence
  Description of Artificial Sequence: Synthetic oligonucleotide
agcguuaggaaggccacag

SEQ ID NO: 1093160 - RNA, 19 nt, Artificial Sequence
  Description of Artificial Sequence: Synthetic oligonucleotide
guaacaggagaccuuggaa

SEQ ID NO: 1093161 - RNA, 19 nt, Artificial Sequence
  Description of Artificial Sequence: Synthetic oligonucleotide
cagcauggaacugaucgcc

SEQ ID NO: 1093162 - RNA, 19 nt, Artificial Sequence
  Description of Artificial Sequence: Synthetic oligonucleotide
ggaacauagcaauggcacc

SEQ ID NO: 1093163 - RNA, 19 nt, Artificial Sequence
  Description of Artificial Sequence: Synthetic oligonucleotide
ggugaaguaagucccgcac

SEQ ID NO: 1093164 - RNA, 19 nt, Artificial Sequence
  Description of Artificial Sequence: Synthetic oligonucleotide
cacuacaggcaguucuacc

SEQ ID NO: 1093165 - RNA, 19 nt, Artificial Sequence
  Description of Artificial Sequence: Synthetic oligonucleotide
cuuggauagggauccgcuc

SEQ ID NO: 1093166 - RNA, 19 nt, Artificial Sequence
  Description of Artificial Sequence: Synthetic oligonucleotide
gaucgaagcuuuucuagcu

SEQ ID NO: 1093167 - RNA, 19 nt, Artificial Sequence
  Description of Artificial Sequence: Synthetic oligonucleotide
cacuucggaaagagaacag

SEQ ID NO: 1093168 - RNA, 19 nt, Artificial Sequence
  Description of Artificial Sequence: Synthetic oligonucleotide
agcccaccuggauagccac

SEQ ID NO: 1093169 - RNA, 19 nt, Artificial Sequence
  Description of Artificial Sequence: Synthetic oligonucleotide
cagugguacuauuggcagg

SEQ ID NO: 1093170 - RNA, 19 nt, Artificial Sequence
  Description of Artificial Sequence: Synthetic oligonucleotide
guaagucccgcacauccca

SEQ ID NO: 1093171 - RNA, 19 nt, Artificial Sequence
  Description of Artificial Sequence: Synthetic oligonucleotide
acuaugcuuagcccuugca

SEQ ID NO: 1093172 - RNA, 19 nt, Artificial Sequence
  Description of Artificial Sequence: Synthetic oligonucleotide
ucacggucccacagagggg

SEQ ID NO: 1093173 - RNA, 19 nt, Artificial Sequence
  Description of Artificial Sequence: Synthetic oligonucleotide
cucacagcugucuauaagu

SEQ ID NO: 1093174 - RNA, 19 nt, Artificial Sequence
  Description of Artificial Sequence: Synthetic oligonucleotide
aggcacuucggaaagagaa

SEQ ID NO: 1093175 - RNA, 19 nt, Artificial Sequence
  Description of Artificial Sequence: Synthetic oligonucleotide
ugcaagcaaugcuggccgg

SEQ ID NO: 1093176 - RNA, 19 nt, Artificial Sequence
  Description of Artificial Sequence: Synthetic oligonucleotide
gccauuaggucaaagagga

SEQ ID NO: 1093177 - RNA, 19 nt, Artificial Sequence
  Description of Artificial Sequence: Synthetic oligonucleotide
uccacgaguguaucugagu

SEQ ID NO: 1093178 - RNA, 19 nt, Artificial Sequence
  Description of Artificial Sequence: Synthetic oligonucleotide
cacgaguguaucugaguug

SEQ ID NO: 1093179 - RNA, 19 nt, Artificial Sequence
  Description of Artificial Sequence: Synthetic oligonucleotide
cuugaucggaggcccagug

SEQ ID NO: 1093180 - RNA, 19 nt, Artificial Sequence
  Description of Artificial Sequence: Synthetic oligonucleotide
ggcaggaaaagcucuguac

SEQ ID NO: 1093181 - RNA, 19 nt, Artificial Sequence
  Description of Artificial Sequence: Synthetic oligonucleotide
gacaagugaggugaaguaa

SEQ ID NO: 1093182 - RNA, 19 nt, Artificial Sequence
  Description of Artificial Sequence: Synthetic oligonucleotide
uaggaucgaagcuuuucua

SEQ ID NO: 1093183 - RNA, 19 nt, Artificial Sequence
  Description of Artificial Sequence: Synthetic oligonucleotide
uccuacccgaugcacugga

SEQ ID NO: 1093184 - RNA, 19 nt, Artificial Sequence
  Description of Artificial Sequence: Synthetic oligonucleotide
cacggucccacagaggggc

SEQ ID NO: 1093185 - RNA, 19 nt, Artificial Sequence
  Description of Artificial Sequence: Synthetic oligonucleotide
aggcgcagguuaauagucc

SEQ ID NO: 1093186 - RNA, 19 nt, Artificial Sequence
  Description of Artificial Sequence: Synthetic oligonucleotide
aucccguugacggcagccc

SEQ ID NO: 1093187 - RNA, 19 nt, Artificial Sequence
  Description of Artificial Sequence: Synthetic oligonucleotide
agagagguacgaagggcgg

SEQ ID NO: 1093188 - RNA, 19 nt, Artificial Sequence
  Description of Artificial Sequence: Synthetic oligonucleotide
gugaaguaagucccgcaca

SEQ ID NO: 1093189 - RNA, 19 nt, Artificial Sequence
  Description of Artificial Sequence: Synthetic oligonucleotide
ugcccacuaugcuuagccc

SEQ ID NO: 1093190 - RNA, 19 nt, Artificial Sequence
  Description of Artificial Sequence: Synthetic oligonucleotide
uucaccacuacaggcaguu

SEQ ID NO: 1093191 - RNA, 19 nt, Artificial Sequence
  Description of Artificial Sequence: Synthetic oligonucleotide
aacugaucgccaccuugau

SEQ ID NO: 1093192 - RNA, 19 nt, Artificial Sequence
  Description of Artificial Sequence: Synthetic oligonucleotide
ggagcuacccaguacgaca

SEQ ID NO: 1093193 - RNA, 19 nt, Artificial Sequence
  Description of Artificial Sequence: Synthetic oligonucleotide
caguucuacccagaucccg

SEQ ID NO: 1093194 - RNA, 19 nt, Artificial Sequence
  Description of Artificial Sequence: Synthetic oligonucleotide
ugcccaguauugacagacc

SEQ ID NO: 1093195 - RNA, 19 nt, Artificial Sequence
  Description of Artificial Sequence: Synthetic oligonucleotide
acgccugcacacaggaccc

SEQ ID NO: 1093196 - RNA, 19 nt, Artificial Sequence
  Description of Artificial Sequence: Synthetic oligonucleotide
gaggugaaguaagucccgc

SEQ ID NO: 1093197 - RNA, 19 nt, Artificial Sequence
  Description of Artificial Sequence: Synthetic oligonucleotide
aguccaguucagccccaac

SEQ ID NO: 1093198 - RNA, 19 nt, Artificial Sequence
  Description of Artificial Sequence: Synthetic oligonucleotide
aagggcggcuccaacccuc

SEQ ID NO: 1093199 - RNA, 19 nt, Artificial Sequence
  Description of Artificial Sequence: Synthetic oligonucleotide
cauagggcaggcaggaaaa

SEQ ID NO: 1093200 - RNA, 19 nt, Artificial Sequence
  Description of Artificial Sequence: Synthetic oligonucleotide
gagacaagugaggugaagu

SEQ ID NO: 1093201 - RNA, 19 nt, Artificial Sequence
  Description of Artificial Sequence: Synthetic oligonucleotide
gagaccuuggaaggcagca

SEQ ID NO: 1093202 - RNA, 19 nt, Artificial Sequence
  Description of Artificial Sequence: Synthetic oligonucleotide
acuuggauagggauccgcu

SEQ ID NO: 1093203 - RNA, 19 nt, Artificial Sequence
  Description of Artificial Sequence: Synthetic oligonucleotide
agcuacccaguacgacagc

SEQ ID NO: 1093204 - RNA, 19 nt, Artificial Sequence
  Description of Artificial Sequence: Synthetic oligonucleotide
cacaugcccaguauugaca

SEQ ID NO: 1093205 - RNA, 19 nt, Artificial Sequence
  Description of Artificial Sequence: Synthetic oligonucleotide
aguucuacccagaucccgu

SEQ ID NO: 1093206 - RNA, 19 nt, Artificial Sequence
  Description of Artificial Sequence: Synthetic oligonucleotide
ggcuaaacgccuccacagg

SEQ ID NO: 1093207 - RNA, 19 nt, Artificial Sequence
  Description of Artificial Sequence: Synthetic oligonucleotide
ugacggcagcccaggagcc

SEQ ID NO: 1093208 - RNA, 19 nt, Artificial Sequence
  Description of Artificial Sequence: Synthetic oligonucleotide
agguggagacaagugaggu

SEQ ID NO: 1093209 - RNA, 19 nt, Artificial Sequence
  Description of Artificial Sequence: Synthetic oligonucleotide
caagcaaugcuggccggcc

SEQ ID NO: 1093210 - RNA, 19 nt, Artificial Sequence
  Description of Artificial Sequence: Synthetic oligonucleotide
gguacuauuggcaggcaca

SEQ ID NO: 1093211 - RNA, 19 nt, Artificial Sequence
  Description of Artificial Sequence: Synthetic oligonucleotide
ggacagggacuuaagacug

SEQ ID NO: 1093212 - RNA, 19 nt, Artificial Sequence
  Description of Artificial Sequence: Synthetic oligonucleotide
uccugcaacggugaggcuu

SEQ ID NO: 1093213 - RNA, 19 nt, Artificial Sequence
  Description of Artificial Sequence: Synthetic oligonucleotide
aggcaggcacucaaggcgg

SEQ ID NO: 1093214 - RNA, 19 nt, Artificial Sequence
  Description of Artificial Sequence: Synthetic oligonucleotide
cguuaggaaggccacagag

SEQ ID NO: 1093215 - RNA, 19 nt, Artificial Sequence
  Description of Artificial Sequence: Synthetic oligonucleotide
ugccgugggcuaaacgccu

SEQ ID NO: 1093216 - RNA, 19 nt, Artificial Sequence
  Description of Artificial Sequence: Synthetic oligonucleotide
ugaagccucacggucccac

SEQ ID NO: 1093217 - RNA, 19 nt, Artificial Sequence
  Description of Artificial Sequence: Synthetic oligonucleotide
ccagggcuagcacacaggg

SEQ ID NO: 1093218 - RNA, 19 nt, Artificial Sequence
  Description of Artificial Sequence: Synthetic oligonucleotide
ucccguugacggcagccca

SEQ ID NO: 1093219 - RNA, 19 nt, Artificial Sequence
  Description of Artificial Sequence: Synthetic oligonucleotide
ucccggacaaggcgcaggu

SEQ ID NO: 1093220 - RNA, 19 nt, Artificial Sequence
  Description of Artificial Sequence: Synthetic oligonucleotide
cagagugggacugcccugc

SEQ ID NO: 1093221 - RNA, 19 nt, Artificial Sequence
  Description of Artificial Sequence: Synthetic oligonucleotide
uccccacguaggaucgaag

SEQ ID NO: 1093222 - RNA, 19 nt, Artificial Sequence
  Description of Artificial Sequence: Synthetic oligonucleotide
gacccaaguuccccagcgc

SEQ ID NO: 1093223 - RNA, 19 nt, Artificial Sequence
  Description of Artificial Sequence: Synthetic oligonucleotide
agucccgcacaucccaggu

SEQ ID NO: 1093224 - RNA, 19 nt, Artificial Sequence
  Description of Artificial Sequence: Synthetic oligonucleotide
gagagguacgaagggcggc

SEQ ID NO: 1093225 - RNA, 19 nt, Artificial Sequence
  Description of Artificial Sequence: Synthetic oligonucleotide
aguugggaggccaccuuag

SEQ ID NO: 1093226 - RNA, 19 nt, Artificial Sequence
  Description of Artificial Sequence: Synthetic oligonucleotide
acuggacccacuaugggua

SEQ ID NO: 1093227 - RNA, 19 nt, Artificial Sequence
  Description of Artificial Sequence: Synthetic oligonucleotide
ggagacaccuugaucggag

SEQ ID NO: 1093228 - RNA, 19 nt, Artificial Sequence
  Description of Artificial Sequence: Synthetic oligonucleotide
cuauuggcaggcacaggca

SEQ ID NO: 1093229 - RNA, 19 nt, Artificial Sequence
  Description of Artificial Sequence: Synthetic oligonucleotide
aguaguaacaggagaccuu

SEQ ID NO: 1093230 - RNA, 19 nt, Artificial Sequence
  Description of Artificial Sequence: Synthetic oligonucleotide
uggguaccgauggugggga

SEQ ID NO: 1093231 - RNA, 19 nt, Artificial Sequence
  Description of Artificial Sequence: Synthetic oligonucleotide
caccuugauguaugagaac

SEQ ID NO: 1093232 - RNA, 19 nt, Artificial Sequence
  Description of Artificial Sequence: Synthetic oligonucleotide
uuaggucaaagaggacccu

SEQ ID NO: 1093233 - RNA, 19 nt, Artificial Sequence
  Description of Artificial Sequence: Synthetic oligonucleotide
gguuggcggagcuacccag

SEQ ID NO: 1093234 - RNA, 19 nt, Artificial Sequence
  Description of Artificial Sequence: Synthetic oligonucleotide
aagcgcucagggaacuuga

SEQ ID NO: 1093235 - RNA, 19 nt, Artificial Sequence
  Description of Artificial Sequence: Synthetic oligonucleotide
uuccuacccgaugcacugg

SEQ ID NO: 1093236 - RNA, 19 nt, Artificial Sequence
  Description of Artificial Sequence: Synthetic oligonucleotide
ggucaaagaggacccuccc

SEQ ID NO: 1093237 - RNA, 19 nt, Artificial Sequence
  Description of Artificial Sequence: Synthetic oligonucleotide
gacagggacuuaagacugc

SEQ ID NO: 1093238 - RNA, 19 nt, Artificial Sequence
  Description of Artificial Sequence: Synthetic oligonucleotide
ccaaccuaucccugguucc

SEQ ID NO: 1093239 - RNA, 19 nt, Artificial Sequence
  Description of Artificial Sequence: Synthetic oligonucleotide
cacuuggauagggauccgc

SEQ ID NO: 1093240 - RNA, 19 nt, Artificial Sequence
  Description of Artificial Sequence: Synthetic oligonucleotide
ggcuccaacccuccgggag

SEQ ID NO: 1093241 - RNA, 19 nt, Artificial Sequence
  Description of Artificial Sequence: Synthetic oligonucleotide
gcaacggugaggcuucuuc

SEQ ID NO: 1093242 - RNA, 19 nt, Artificial Sequence
  Description of Artificial Sequence: Synthetic oligonucleotide
cagggcuagcacacagggc

SEQ ID NO: 1093243 - RNA, 19 nt, Artificial Sequence
  Description of Artificial Sequence: Synthetic oligonucleotide
uuggcggagcuacccagua

SEQ ID NO: 1093244 - RNA, 19 nt, Artificial Sequence
  Description of Artificial Sequence: Synthetic oligonucleotide
agaggacccucccggacaa

SEQ ID NO: 1093245 - RNA, 19 nt, Artificial Sequence
  Description of Artificial Sequence: Synthetic oligonucleotide
ccuugauguaugagaacac

SEQ ID NO: 1093246 - RNA, 19 nt, Artificial Sequence
  Description of Artificial Sequence: Synthetic oligonucleotide
agcgccacaagcacagaga

SEQ ID NO: 1093247 - RNA, 19 nt, Artificial Sequence
  Description of Artificial Sequence: Synthetic oligonucleotide
guaauauccacgaguguau

SEQ ID NO: 1093248 - RNA, 19 nt, Artificial Sequence
  Description of Artificial Sequence: Synthetic oligonucleotide
auggcaacucacagcuguc

SEQ ID NO: 1093249 - RNA, 19 nt, Artificial Sequence
  Description of Artificial Sequence: Synthetic oligonucleotide
ugggacugcccugccacug

SEQ ID NO: 1093250 - RNA, 19 nt, Artificial Sequence
  Description of Artificial Sequence: Synthetic oligonucleotide
ccaagaaagcaggcaaggg

SEQ ID NO: 1093251 - RNA, 19 nt, Artificial Sequence
  Description of Artificial Sequence: Synthetic oligonucleotide
ggacccacuauggguaccg

SEQ ID NO: 1093252 - RNA, 19 nt, Artificial Sequence
  Description of Artificial Sequence: Synthetic oligonucleotide
gagaacacgccugcacaca

SEQ ID NO: 1093253 - RNA, 19 nt, Artificial Sequence
  Description of Artificial Sequence: Synthetic oligonucleotide
gcgcccauagggcaggcag

SEQ ID NO: 1093254 - RNA, 19 nt, Artificial Sequence
  Description of Artificial Sequence: Synthetic oligonucleotide
ccacucuuccccacguagg

SEQ ID NO: 1093255 - RNA, 19 nt, Artificial Sequence
  Description of Artificial Sequence: Synthetic oligonucleotide
cagguuaauaguccacucu

SEQ ID NO: 1093256 - RNA, 19 nt, Artificial Sequence
  Description of Artificial Sequence: Synthetic oligonucleotide
caagagcuacacugggcca

SEQ ID NO: 1093257 - RNA, 19 nt, Artificial Sequence
  Description of Artificial Sequence: Synthetic oligonucleotide
gaguugggaggccaccuua

SEQ ID NO: 1093258 - RNA, 19 nt, Artificial Sequence
  Description of Artificial Sequence: Synthetic oligonucleotide
caccagucggcccagcgga

SEQ ID NO: 1093259 - RNA, 19 nt, Artificial Sequence
  Description of Artificial Sequence: Synthetic oligonucleotide
gaagccucacggucccaca

SEQ ID NO: 1093260 - RNA, 19 nt, Artificial Sequence
  Description of Artificial Sequence: Synthetic oligonucleotide
ggccuuagggucugggcug

SEQ ID NO: 1093261 - RNA, 19 nt, Artificial Sequence
  Description of Artificial Sequence: Synthetic oligonucleotide
uggcggagcuacccaguac

SEQ ID NO: 1093262 - RNA, 19 nt, Artificial Sequence
  Description of Artificial Sequence: Synthetic oligonucleotide
gguuaauaguccacucuuc

SEQ ID NO: 1093263 - RNA, 19 nt, Artificial Sequence
  Description of Artificial Sequence: Synthetic oligonucleotide
gcacuucggaaagagaaca

SEQ ID NO: 1093264 - RNA, 19 nt, Artificial Sequence
  Description of Artificial Sequence: Synthetic oligonucleotide
ccuaucccugguuccaagc

SEQ ID NO: 1093265 - RNA, 19 nt, Artificial Sequence
  Description of Artificial Sequence: Synthetic oligonucleotide
gcggcuccaacccuccggg

SEQ ID NO: 1093266 - RNA, 19 nt, Artificial Sequence
  Description of Artificial Sequence: Synthetic oligonucleotide
gcacuggacccacuauggg

SEQ ID NO: 1093267 - RNA, 19 nt, Artificial Sequence
  Description of Artificial Sequence: Synthetic oligonucleotide
caaacgccagcguuaggaa

SEQ ID NO: 1093268 - RNA, 19 nt, Artificial Sequence
  Description of Artificial Sequence: Synthetic oligonucleotide
caggcacucaaggcggccc

SEQ ID NO: 1093269 - RNA, 19 nt, Artificial Sequence
  Description of Artificial Sequence: Synthetic oligonucleotide
guagcuccugcaacgguga

SEQ ID NO: 1093270 - RNA, 19 nt, Artificial Sequence
  Description of Artificial Sequence: Synthetic oligonucleotide
gcacaugcccaguauugac

SEQ ID NO: 1093271 - RNA, 19 nt, Artificial Sequence
  Description of Artificial Sequence: Synthetic oligonucleotide
acccacuauggguaccgau

SEQ ID NO: 1093272 - RNA, 19 nt, Artificial Sequence
  Description of Artificial Sequence: Synthetic oligonucleotide
cagacccaaguuccccagc

SEQ ID NO: 1093273 - RNA, 19 nt, Artificial Sequence
  Description of Artificial Sequence: Synthetic oligonucleotide
cuugcaccacuuggauagg

SEQ ID NO: 1093274 - RNA, 19 nt, Artificial Sequence
  Description of Artificial Sequence: Synthetic oligonucleotide
caccacuacaggcaguucu

SEQ ID NO: 1093275 - RNA, 19 nt, Artificial Sequence
  Description of Artificial Sequence: Synthetic oligonucleotide
ccaagugguaggccaggcg

SEQ ID NO: 1093276 - RNA, 19 nt, Artificial Sequence
  Description of Artificial Sequence: Synthetic oligonucleotide
cagggaacuugaugggaga

SEQ ID NO: 1093277 - RNA, 19 nt, Artificial Sequence
  Description of Artificial Sequence: Synthetic oligonucleotide
aaccuaucccugguuccaa

SEQ ID NO: 1093278 - RNA, 19 nt, Artificial Sequence
  Description of Artificial Sequence: Synthetic oligonucleotide
gcauuggugauagccagca

SEQ ID NO: 1093279 - RNA, 19 nt, Artificial Sequence
  Description of Artificial Sequence: Synthetic oligonucleotide
aggcacucaaggcggccca

SEQ ID NO: 1093280 - RNA, 19 nt, Artificial Sequence
  Description of Artificial Sequence: Synthetic oligonucleotide
cagaucccguugacggcag

SEQ ID NO: 1093281 - RNA, 19 nt, Artificial Sequence
  Description of Artificial Sequence: Synthetic oligonucleotide
cuaaacgccuccacagggu

SEQ ID NO: 1093282 - RNA, 19 nt, Artificial Sequence
  Description of Artificial Sequence: Synthetic oligonucleotide
agcauggaacugaucgcca

SEQ ID NO: 1093283 - RNA, 19 nt, Artificial Sequence
  Description of Artificial Sequence: Synthetic oligonucleotide
ugugcccacuaugcuuagc

SEQ ID NO: 1093284 - RNA, 19 nt, Artificial Sequence
  Description of Artificial Sequence: Synthetic oligonucleotide
ggcgcagguuaauagucca

SEQ ID NO: 1093285 - RNA, 19 nt, Artificial Sequence
  Description of Artificial Sequence: Synthetic oligonucleotide
gcccaguauugacagacca

SEQ ID NO: 1093286 - RNA, 19 nt, Artificial Sequence
  Description of Artificial Sequence: Synthetic oligonucleotide
gacaaggcgcagguuaaua

SEQ ID NO: 1093287 - RNA, 19 nt, Artificial Sequence
  Description of Artificial Sequence: Synthetic oligonucleotide
cacuggacccacuaugggu

SEQ ID NO: 1093288 - RNA, 19 nt, Artificial Sequence
  Description of Artificial Sequence: Synthetic oligonucleotide
gcccaugccgaagagggcc

SEQ ID NO: 1093289 - RNA, 19 nt, Artificial Sequence
  Description of Artificial Sequence: Synthetic oligonucleotide
ucggaggcccagugguacu

SEQ ID NO: 1093290 - RNA, 19 nt, Artificial Sequence
  Description of Artificial Sequence: Synthetic oligonucleotide
ccaccuuaggccacaggac

SEQ ID NO: 1093291 - RNA, 19 nt, Artificial Sequence
  Description of Artificial Sequence: Synthetic oligonucleotide
gaugcacuggacccacuau

SEQ ID NO: 1093292 - RNA, 19 nt, Artificial Sequence
  Description of Artificial Sequence: Synthetic oligonucleotide
uuccccacguaggaucgaa

SEQ ID NO: 1093293 - RNA, 19 nt, Artificial Sequence
  Description of Artificial Sequence: Synthetic oligonucleotide
uggacccacuauggguacc

SEQ ID NO: 1093294 - RNA, 19 nt, Artificial Sequence
  Description of Artificial Sequence: Synthetic oligonucleotide
ccugcaacggugaggcuuc

SEQ ID NO: 1093295 - RNA, 19 nt, Artificial Sequence
  Description of Artificial Sequence: Synthetic oligonucleotide
ggcacuucggaaagagaac

SEQ ID NO: 1093296 - RNA, 19 nt, Artificial Sequence
  Description of Artificial Sequence: Synthetic oligonucleotide
cagcggaagugcccagaag

SEQ ID NO: 1093297 - RNA, 19 nt, Artificial Sequence
  Description of Artificial Sequence: Synthetic oligonucleotide
caggaagaaggaccguaaa

SEQ ID NO: 1093298 - RNA, 19 nt, Artificial Sequence
  Description of Artificial Sequence: Synthetic oligonucleotide
ccacugaagccucacgguc

SEQ ID NO: 1093299 - RNA, 19 nt, Artificial Sequence
  Description of Artificial Sequence: Synthetic oligonucleotide
gaaaagcgcucagggaacu

SEQ ID NO: 1093300 - RNA, 19 nt, Artificial Sequence
  Description of Artificial Sequence: Synthetic oligonucleotide
uggaacugaucgccaccuu

SEQ ID NO: 1093301 - RNA, 19 nt, Artificial Sequence
  Description of Artificial Sequence: Synthetic oligonucleotide
gguaccgaugguggggaug

SEQ ID NO: 1093302 - RNA, 19 nt, Artificial Sequence
  Description of Artificial Sequence: Synthetic oligonucleotide
cccaaccuaucccugguuc

SEQ ID NO: 1093303 - RNA, 19 nt, Artificial Sequence
  Description of Artificial Sequence: Synthetic oligonucleotide
acccuccgggagcucuuuc

SEQ ID NO: 1093304 - RNA, 19 nt, Artificial Sequence
  Description of Artificial Sequence: Synthetic oligonucleotide
caugccgaagagggccacc

SEQ ID NO: 1093305 - RNA, 19 nt, Artificial Sequence
  Description of Artificial Sequence: Synthetic oligonucleotide
ugaucgccaccuugaugua

SEQ ID NO: 1093306 - RNA, 19 nt, Artificial Sequence
  Description of Artificial Sequence: Synthetic oligonucleotide
gccagcguuaggaaggcca

SEQ ID NO: 1093307 - RNA, 19 nt, Artificial Sequence
  Description of Artificial Sequence: Synthetic oligonucleotide
ggagcucuuucaccacuac

SEQ ID NO: 1093308 - RNA, 19 nt, Artificial Sequence
  Description of Artificial Sequence: Synthetic oligonucleotide
guguaauauccacgagugu

SEQ ID NO: 1093309 - RNA, 19 nt, Artificial Sequence
  Description of Artificial Sequence: Synthetic oligonucleotide
acccaguacgacagccaag

SEQ ID NO: 1093310 - RNA, 19 nt, Artificial Sequence
  Description of Artificial Sequence: Synthetic oligonucleotide
gcgcucagggaacuugaug

SEQ ID NO: 1093311 - RNA, 19 nt, Artificial Sequence
  Description of Artificial Sequence: Synthetic oligonucleotide
acggcagcccaggagccca

SEQ ID NO: 1093312 - RNA, 19 nt, Artificial Sequence
  Description of Artificial Sequence: Synthetic oligonucleotide
ccaagccugcucuuugguc

SEQ ID NO: 1093313 - RNA, 19 nt, Artificial Sequence
  Description of Artificial Sequence: Synthetic oligonucleotide
ccaguauugacagaccaua

SEQ ID NO: 1093314 - RNA, 19 nt, Artificial Sequence
  Description of Artificial Sequence: Synthetic oligonucleotide
caggcgcccauagggcagg

SEQ ID NO: 1093315 - RNA, 19 nt, Artificial Sequence
  Description of Artificial Sequence: Synthetic oligonucleotide
caugcccaguauugacaga

SEQ ID NO: 1093316 - RNA, 19 nt, Artificial Sequence
  Description of Artificial Sequence: Synthetic oligonucleotide
ccguuggucagagcauugg

SEQ ID NO: 1093317 - RNA, 19 nt, Artificial Sequence
  Description of Artificial Sequence: Synthetic oligonucleotide
gggguuggcggagcuaccc

SEQ ID NO: 1093318 - RNA, 19 nt, Artificial Sequence
  Description of Artificial Sequence: Synthetic oligonucleotide
cugauggaguguguaauau

SEQ ID NO: 1093319 - RNA, 19 nt, Artificial Sequence
  Description of Artificial Sequence: Synthetic oligonucleotide
ucgcccuugccgugggcua

SEQ ID NO: 1093320 - RNA, 19 nt, Artificial Sequence
  Description of Artificial Sequence: Synthetic oligonucleotide
ggcaacucacagcugucua

SEQ ID NO: 1093321 - RNA, 19 nt, Artificial Sequence
  Description of Artificial Sequence: Synthetic oligonucleotide
ucaccacuacaggcaguuc

SEQ ID NO: 1093322 - RNA, 19 nt, Artificial Sequence
  Description of Artificial Sequence: Synthetic oligonucleotide
ugguuccaagccugcucuu

SEQ ID NO: 1093323 - RNA, 19 nt, Artificial Sequence
  Description of Artificial Sequence: Synthetic oligonucleotide
ccauuaggucaaagaggac

SEQ ID NO: 1093324 - RNA, 19 nt, Artificial Sequence
  Description of Artificial Sequence: Synthetic oligonucleotide
caaucuccagguggagaca

SEQ ID NO: 1093325 - RNA, 19 nt, Artificial Sequence
  Description of Artificial Sequence: Synthetic oligonucleotide
cacguaggaucgaagcuuu

SEQ ID NO: 1093326 - RNA, 19 nt, Artificial Sequence
  Description of Artificial Sequence: Synthetic oligonucleotide
gccuuagggucugggcugg

SEQ ID NO: 1093327 - RNA, 19 nt, Artificial Sequence
  Description of Artificial Sequence: Synthetic oligonucleotide
gaagggcggcuccaacccu

SEQ ID NO: 1093328 - RNA, 19 nt, Artificial Sequence
  Description of Artificial Sequence: Synthetic oligonucleotide
ccaggaagaaggaccguaa

SEQ ID NO: 1093329 - RNA, 19 nt, Artificial Sequence
  Description of Artificial Sequence: Synthetic oligonucleotide
cguaggaucgaagcuuuuc

SEQ ID NO: 1093330 - RNA, 19 nt, Artificial Sequence
  Description of Artificial Sequence: Synthetic oligonucleotide
cccguugacggcagcccag

SEQ ID NO: 1093331 - RNA, 19 nt, Artificial Sequence
  Description of Artificial Sequence: Synthetic oligonucleotide
gaucggaggcccaguggua

SEQ ID NO: 1093332 - RNA, 19 nt, Artificial Sequence
  Description of Artificial Sequence: Synthetic oligonucleotide
ccggacaaggcgcagguua

SEQ ID NO: 1093333 - RNA, 19 nt, Artificial Sequence
  Description of Artificial Sequence: Synthetic oligonucleotide
ggacccucccggacaaggc

SEQ ID NO: 1093334 - RNA, 19 nt, Artificial Sequence
  Description of Artificial Sequence: Synthetic oligonucleotide
accagucggcccagcggag

SEQ ID NO: 1093335 - RNA, 19 nt, Artificial Sequence
  Description of Artificial Sequence: Synthetic oligonucleotide
gcggaggugcugccauuag

SEQ ID NO: 1093336 - RNA, 19 nt, Artificial Sequence
  Description of Artificial Sequence: Synthetic oligonucleotide
agucggcccagcggaggug

SEQ ID NO: 1093337 - RNA, 19 nt, Artificial Sequence
  Description of Artificial Sequence: Synthetic oligonucleotide
gcaacucacagcugucuau

SEQ ID NO: 1093338 - RNA, 19 nt, Artificial Sequence
  Description of Artificial Sequence: Synthetic oligonucleotide
cucaggcauuguggcaauc

SEQ ID NO: 1093339 - RNA, 19 nt, Artificial Sequence
  Description of Artificial Sequence: Synthetic oligonucleotide
ccagaucccguugacggca

SEQ ID NO: 1093340 - RNA, 19 nt, Artificial Sequence
  Description of Artificial Sequence: Synthetic oligonucleotide
aacccuccgggagcucuuu

SEQ ID NO: 1093341 - RNA, 19 nt, Artificial Sequence
  Description of Artificial Sequence: Synthetic oligonucleotide
gcaccacuuggauagggau

SEQ ID NO: 1093342 - RNA, 19 nt, Artificial Sequence
  Description of Artificial Sequence: Synthetic oligonucleotide
uaccgaugguggggauggc

SEQ ID NO: 1093343 - RNA, 19 nt, Artificial Sequence
  Description of Artificial Sequence: Synthetic oligonucleotide
aggcgcccauagggcaggc

SEQ ID NO: 1093344 - RNA, 19 nt, Artificial Sequence
  Description of Artificial Sequence: Synthetic oligonucleotide
gacccacuauggguaccga

SEQ ID NO: 1093345 - RNA, 19 nt, Artificial Sequence
  Description of Artificial Sequence: Synthetic oligonucleotide
caccuugaucggaggccca

SEQ ID NO: 1093346 - RNA, 19 nt, Artificial Sequence
  Description of Artificial Sequence: Synthetic oligonucleotide
gggcaacagggcacucagg

SEQ ID NO: 1093347 - RNA, 19 nt, Artificial Sequence
  Description of Artificial Sequence: Synthetic oligonucleotide
ccgugggcuaaacgccucc

SEQ ID NO: 1093348 - RNA, 19 nt, Artificial Sequence
  Description of Artificial Sequence: Synthetic oligonucleotide
ccuacccgaugcacuggac

SEQ ID NO: 1093349 - RNA, 19 nt, Artificial Sequence
  Description of Artificial Sequence: Synthetic oligonucleotide
gugguacuauuggcaggca

SEQ ID NO: 1093350 - RNA, 19 nt, Artificial Sequence
  Description of Artificial Sequence: Synthetic oligonucleotide
ccguugacggcagcccagg

SEQ ID NO: 1093351 - RNA, 19 nt, Artificial Sequence
  Description of Artificial Sequence: Synthetic oligonucleotide
gggagacaccuugaucgga

SEQ ID NO: 1093352 - RNA, 19 nt, Artificial Sequence
  Description of Artificial Sequence: Synthetic oligonucleotide
ugcaacggugaggcuucuu

SEQ ID NO: 1093353 - RNA, 19 nt, Artificial Sequence
  Description of Artificial Sequence: Synthetic oligonucleotide
ccaguacgacagccaagug

SEQ ID NO: 1093354 - RNA, 19 nt, Artificial Sequence
  Description of Artificial Sequence: Synthetic oligonucleotide
guuggcggagcuacccagu

SEQ ID NO: 1093355 - RNA, 19 nt, Artificial Sequence
  Description of Artificial Sequence: Synthetic oligonucleotide
gcacucaaggcggcccacc

SEQ ID NO: 1093356 - RNA, 19 nt, Artificial Sequence
  Description of Artificial Sequence: Synthetic oligonucleotide
guacgaagggcggcuccaa

SEQ ID NO: 1093357 - RNA, 19 nt, Artificial Sequence
  Description of Artificial Sequence: Synthetic oligonucleotide
gcguuaggaaggccacaga

SEQ ID NO: 1093358 - RNA, 19 nt, Artificial Sequence
  Description of Artificial Sequence: Synthetic oligonucleotide
gcgcagguuaauaguccac

SEQ ID NO: 1093359 - RNA, 19 nt, Artificial Sequence
  Description of Artificial Sequence: Synthetic oligonucleotide
ccacgaguguaucugaguu

SEQ ID NO: 1093360 - RNA, 19 nt, Artificial Sequence
  Description of Artificial Sequence: Synthetic oligonucleotide
cacuauggguaccgauggu

SEQ ID NO: 1093361 - RNA, 19 nt, Artificial Sequence
  Description of Artificial Sequence: Synthetic oligonucleotide
cagcguuaggaaggccaca

SEQ ID NO: 1093362 - RNA, 19 nt, Artificial Sequence
  Description of Artificial Sequence: Synthetic oligonucleotide
guccacucuuccccacgua

SEQ ID NO: 1093363 - RNA, 19 nt, Artificial Sequence
  Description of Artificial Sequence: Synthetic oligonucleotide
cuuagcccuugcaccacuu

SEQ ID NO: 1093364 - RNA, 19 nt, Artificial Sequence
  Description of Artificial Sequence: Synthetic oligonucleotide
cgacagccaagugguaggc

SEQ ID NO: 1093365 - RNA, 19 nt, Artificial Sequence
  Description of Artificial Sequence: Synthetic oligonucleotide
cgcacaucccagguucaag

SEQ ID NO: 1093366 - RNA, 19 nt, Artificial Sequence
  Description of Artificial Sequence: Synthetic oligonucleotide
cccgaugcacuggacccac

SEQ ID NO: 1093367 - RNA, 19 nt, Artificial Sequence
  Description of Artificial Sequence: Synthetic oligonucleotide
gaggcccagugguacuauu

SEQ ID NO: 1093368 - RNA, 19 nt, Artificial Sequence
  Description of Artificial Sequence: Synthetic oligonucleotide
gaacagcuggugggccuua

SEQ ID NO: 1093369 - RNA, 19 nt, Artificial Sequence
  Description of Artificial Sequence: Synthetic oligonucleotide
ccgggagcucuuucaccac

SEQ ID NO: 1093370 - RNA, 19 nt, Artificial Sequence
  Description of Artificial Sequence: Synthetic oligonucleotide
cagucggcccagcggaggu

SEQ ID NO: 1093371 - RNA, 19 nt, Artificial Sequence
  Description of Artificial Sequence: Synthetic oligonucleotide
ccacuuggauagggauccg

SEQ ID NO: 1093372 - RNA, 19 nt, Artificial Sequence
  Description of Artificial Sequence: Synthetic oligonucleotide
acguaggaucgaagcuuuu

SEQ ID NO: 1093373 - RNA, 19 nt, Artificial Sequence
  Description of Artificial Sequence: Synthetic oligonucleotide
cccaguauugacagaccau

SEQ ID NO: 1093374 - RNA, 19 nt, Artificial Sequence
  Description of Artificial Sequence: Synthetic oligonucleotide
ccaguucagccccaaccua

SEQ ID NO: 1093375 - RNA, 19 nt, Artificial Sequence
  Description of Artificial Sequence: Synthetic oligonucleotide
cuuccccacguaggaucga

SEQ ID NO: 1093376 - RNA, 19 nt, Artificial Sequence
  Description of Artificial Sequence: Synthetic oligonucleotide
ggcacucaaggcggcccac

SEQ ID NO: 1093377 - RNA, 19 nt, Artificial Sequence
  Description of Artificial Sequence: Synthetic oligonucleotide
guacgacagccaaguggua

SEQ ID NO: 1093378 - RNA, 19 nt, Artificial Sequence
  Description of Artificial Sequence: Synthetic oligonucleotide
cuccaacccuccgggagcu

SEQ ID NO: 1093379 - RNA, 19 nt, Artificial Sequence
  Description of Artificial Sequence: Synthetic oligonucleotide
gcggagcuacccaguacga

SEQ ID NO: 1093380 - RNA, 19 nt, Artificial Sequence
  Description of Artificial Sequence: Synthetic oligonucleotide
cggagcuacccaguacgac

SEQ ID NO: 1093381 - RNA, 19 nt, Artificial Sequence
  Description of Artificial Sequence: Synthetic oligonucleotide
cggacaaggcgcagguuaa

SEQ ID NO: 1093382 - RNA, 19 nt, Artificial Sequence
  Description of Artificial Sequence: Synthetic oligonucleotide
gcccuugcaccacuuggau

SEQ ID NO: 1093383 - RNA, 19 nt, Artificial Sequence
  Description of Artificial Sequence: Synthetic oligonucleotide
ccacguaggaucgaagcuu

SEQ ID NO: 1093384 - RNA, 19 nt, Artificial Sequence
  Description of Artificial Sequence: Synthetic oligonucleotide
gccccaaccuaucccuggu

SEQ ID NO: 1093385 - RNA, 19 nt, Artificial Sequence
  Description of Artificial Sequence: Synthetic oligonucleotide
ccaugccgaagagggccac

SEQ ID NO: 1093386 - RNA, 19 nt, Artificial Sequence
  Description of Artificial Sequence: Synthetic oligonucleotide
gccgugggcuaaacgccuc

SEQ ID NO: 1093387 - RNA, 19 nt, Artificial Sequence
  Description of Artificial Sequence: Synthetic oligonucleotide
cagugucaucagguaggcu

SEQ ID NO: 1093388 - RNA, 19 nt, Artificial Sequence
  Description of Artificial Sequence: Synthetic oligonucleotide
caacccuccgggagcucuu

SEQ ID NO: 1093389 - RNA, 19 nt, Artificial Sequence
  Description of Artificial Sequence: Synthetic oligonucleotide
ggucucugauggagugugu

SEQ ID NO: 1093390 - RNA, 19 nt, Artificial Sequence
  Description of Artificial Sequence: Synthetic oligonucleotide
cuccugcaacggugaggcu

SEQ ID NO: 1093391 - RNA, 19 nt, Artificial Sequence
  Description of Artificial Sequence: Synthetic oligonucleotide
ccuugaucggaggcccagu

SEQ ID NO: 1093392 - RNA, 19 nt, Artificial Sequence
  Description of Artificial Sequence: Synthetic oligonucleotide
cccauagggcaggcaggaa

SEQ ID NO: 1093393 - RNA, 19 nt, Artificial Sequence
  Description of Artificial Sequence: Synthetic oligonucleotide
cugcaacggugaggcuucu

SEQ ID NO: 1093394 - RNA, 19 nt, Artificial Sequence
  Description of Artificial Sequence: Synthetic oligonucleotide
ccgaugcacuggacccacu

SEQ ID NO: 1093395 - RNA, 19 nt, Artificial Sequence
  Description of Artificial Sequence: Synthetic oligonucleotide
cccggacaaggcgcagguu

SEQ ID NO: 1093396 - RNA, 19 nt, Artificial Sequence
  Description of Artificial Sequence: Synthetic oligonucleotide
aacgauaacacucagacac

SEQ ID NO: 1093397 - RNA, 19 nt, Artificial Sequence
  Description of Artificial Sequence: Synthetic oligonucleotide
aaaacgauaacacucagac

SEQ ID NO: 1093398 - RNA, 19 nt, Artificial Sequence
  Description of Artificial Sequence: Synthetic oligonucleotide
uagaaugugacacaaagcg

SEQ ID NO: 1093399 - RNA, 19 nt, Artificial Sequence
  Description of Artificial Sequence: Synthetic oligonucleotide
ucugauauaagucagagau

SEQ ID NO: 1093400 - RNA, 19 nt, Artificial Sequence
  Description of Artificial Sequence: Synthetic oligonucleotide
aaagggacagucuugcucc

SEQ ID NO: 1093401 - RNA, 19 nt, Artificial Sequence
  Description of Artificial Sequence: Synthetic oligonucleotide
uuuaauguaaguauucuug

SEQ ID NO: 1093402 - RNA, 19 nt, Artificial Sequence
  Description of Artificial Sequence: Synthetic oligonucleotide
agaauuuaaguuucaaacc

SEQ ID NO: 1093403 - RNA, 19 nt, Artificial Sequence
  Description of Artificial Sequence: Synthetic oligonucleotide
ucuaaaacaacuaaucucu

SEQ ID NO: 1093404 - RNA, 19 nt, Artificial Sequence
  Description of Artificial Sequence: Synthetic oligonucleotide
aacacucagacacuaaagg

SEQ ID NO: 1093405 - RNA, 19 nt, Artificial Sequence
  Description of Artificial Sequence: Synthetic oligonucleotide
uugucuacggggcagaucg

SEQ ID NO: 1093406 - RNA, 19 nt, Artificial Sequence
  Description of Artificial Sequence: Synthetic oligonucleotide
auuaaugugugcgucaugc

SEQ ID NO: 1093407 - RNA, 19 nt, Artificial Sequence
  Description of Artificial Sequence: Synthetic oligonucleotide
uuuaaguuucaaaccaggg

SEQ ID NO: 1093408 - RNA, 19 nt, Artificial Sequence
  Description of Artificial Sequence: Synthetic oligonucleotide
uaucgguuaacauuuacag

SEQ ID NO: 1093409 - RNA, 19 nt, Artificial Sequence
  Description of Artificial Sequence: Synthetic oligonucleotide
ucuaaaaccagaagcaugu

SEQ ID NO: 1093410 - RNA, 19 nt, Artificial Sequence
  Description of Artificial Sequence: Synthetic oligonucleotide
uuaaguuucaaaccagggc

SEQ ID NO: 1093411 - RNA, 19 nt, Artificial Sequence
  Description of Artificial Sequence: Synthetic oligonucleotide
agacauauaaguugaggac

SEQ ID NO: 1093412 - RNA, 19 nt, Artificial Sequence
  Description of Artificial Sequence: Synthetic oligonucleotide
gaaugugacacaaagcggg

SEQ ID NO: 1093413 - RNA, 19 nt, Artificial Sequence
  Description of Artificial Sequence: Synthetic oligonucleotide
agagaaaacgauaacacuc

SEQ ID NO: 1093414 - RNA, 19 nt, Artificial Sequence
  Description of Artificial Sequence: Synthetic oligonucleotide
ucgguuaacauuuacagau

SEQ ID NO: 1093415 - RNA, 19 nt, Artificial Sequence
  Description of Artificial Sequence: Synthetic oligonucleotide
agaggcaauguucaucucc

SEQ ID NO: 1093416 - RNA, 19 nt, Artificial Sequence
  Description of Artificial Sequence: Synthetic oligonucleotide
acacucagacacuaaaggc

SEQ ID NO: 1093417 - RNA, 19 nt, Artificial Sequence
  Description of Artificial Sequence: Synthetic oligonucleotide
ugcgcuuccagccaggcgg

SEQ ID NO: 1093418 - RNA, 19 nt, Artificial Sequence
  Description of Artificial Sequence: Synthetic oligonucleotide
aaaggcaaaaggccgauga

SEQ ID NO: 1093419 - RNA, 19 nt, Artificial Sequence
  Description of Artificial Sequence: Synthetic oligonucleotide
aaacucaccccgcaucacc

SEQ ID NO: 1093420 - RNA, 19 nt, Artificial Sequence
  Description of Artificial Sequence: Synthetic oligonucleotide
caagagaaaacgauaacac

SEQ ID NO: 1093421 - RNA, 19 nt, Artificial Sequence
  Description of Artificial Sequence: Synthetic oligonucleotide
uuaacuauuugcagcagcu

SEQ ID NO: 1093422 - RNA, 19 nt, Artificial Sequence
  Description of Artificial Sequence: Synthetic oligonucleotide
uggcauuacauccaggggc

SEQ ID NO: 1093423 - RNA, 19 nt, Artificial Sequence
  Description of Artificial Sequence: Synthetic oligonucleotide
agugagucaaacucacccc

SEQ ID NO: 1093424 - RNA, 19 nt, Artificial Sequence
  Description of Artificial Sequence: Synthetic oligonucleotide
uacagauccuccaagucag

SEQ ID NO: 1093425 - RNA, 19 nt, Artificial Sequence
  Description of Artificial Sequence: Synthetic oligonucleotide
uuacagauccuccaaguca

SEQ ID NO: 1093426 - RNA, 19 nt, Artificial Sequence
  Description of Artificial Sequence: Synthetic oligonucleotide
uccaaaagcaucaggguca

SEQ ID NO: 1093427 - RNA, 19 nt, Artificial Sequence
  Description of Artificial Sequence: Synthetic oligonucleotide
acuuguugggacaagacac

SEQ ID NO: 1093428 - RNA, 19 nt, Artificial Sequence
  Description of Artificial Sequence: Synthetic oligonucleotide
uauaaguugaggacuuccc

SEQ ID NO: 1093429 - RNA, 19 nt, Artificial Sequence
  Description of Artificial Sequence: Synthetic oligonucleotide
caaguuuuccucgugaucc

SEQ ID NO: 1093430 - RNA, 19 nt, Artificial Sequence
  Description of Artificial Sequence: Synthetic oligonucleotide
uuaucgguuaacauuuaca

SEQ ID NO: 1093431 - RNA, 19 nt, Artificial Sequence
  Description of Artificial Sequence: Synthetic oligonucleotide
aaaaccagaagcauguggu

SEQ ID NO: 1093432 - RNA, 19 nt, Artificial Sequence
  Description of Artificial Sequence: Synthetic oligonucleotide
auauaaguugaggacuucc

SEQ ID NO: 1093433 - RNA, 19 nt, Artificial Sequence
  Description of Artificial Sequence: Synthetic oligonucleotide
aaaggcaccucuccucucg

SEQ ID NO: 1093434 - RNA, 19 nt, Artificial Sequence
  Description of Artificial Sequence: Synthetic oligonucleotide
uuccagaugagcuugccgc

SEQ ID NO: 1093435 - RNA, 19 nt, Artificial Sequence
  Description of Artificial Sequence: Synthetic oligonucleotide
uguucauucaccucaguuc

SEQ ID NO: 1093436 - RNA, 19 nt, Artificial Sequence
  Description of Artificial Sequence: Synthetic oligonucleotide
uucuuaucgguuaacauuu

SEQ ID NO: 1093437 - RNA, 19 nt, Artificial Sequence
  Description of Artificial Sequence: Synthetic oligonucleotide
acaacuaaucucuggucac

SEQ ID NO: 1093438 - RNA, 19 nt, Artificial Sequence
  Description of Artificial Sequence: Synthetic oligonucleotide
ugugcgucaugcuugcugg

SEQ ID NO: 1093439 - RNA, 19 nt, Artificial Sequence
  Description of Artificial Sequence: Synthetic oligonucleotide
uaacacucagacacuaaag

SEQ ID NO: 1093440 - RNA, 19 nt, Artificial Sequence
  Description of Artificial Sequence: Synthetic oligonucleotide
uuucuuaucgguuaacauu

SEQ ID NO: 1093441 - RNA, 19 nt, Artificial Sequence
  Description of Artificial Sequence: Synthetic oligonucleotide
ucuauuuugcugcugguua

SEQ ID NO: 1093442 - RNA, 19 nt, Artificial Sequence
  Description of Artificial Sequence: Synthetic oligonucleotide
ucaguucucggaauagucc

SEQ ID NO: 1093443 - RNA, 19 nt, Artificial Sequence
  Description of Artificial Sequence: Synthetic oligonucleotide
acagcaauauuuuaagaau

SEQ ID NO: 1093444 - RNA, 19 nt, Artificial Sequence
  Description of Artificial Sequence: Synthetic oligonucleotide
ugguuaacuauuugcagca

SEQ ID NO: 1093445 - RNA, 19 nt, Artificial Sequence
  Description of Artificial Sequence: Synthetic oligonucleotide
uauaagucagagaucugcu

SEQ ID NO: 1093446 - RNA, 19 nt, Artificial Sequence
  Description of Artificial Sequence: Synthetic oligonucleotide
aaggcaaaaggccgaugac

SEQ ID NO: 1093447 - RNA, 19 nt, Artificial Sequence
  Description of Artificial Sequence: Synthetic oligonucleotide
uguucuaguuggaaguucu

SEQ ID NO: 1093448 - RNA, 19 nt, Artificial Sequence
  Description of Artificial Sequence: Synthetic oligonucleotide
cagugagucaaacucaccc

SEQ ID NO: 1093449 - RNA, 19 nt, Artificial Sequence
  Description of Artificial Sequence: Synthetic oligonucleotide
uugucgaugugacugguca

SEQ ID NO: 1093450 - RNA, 19 nt, Artificial Sequence
  Description of Artificial Sequence: Synthetic oligonucleotide
aaucgccccagaaucaccc

SEQ ID NO: 1093451 - RNA, 19 nt, Artificial Sequence
  Description of Artificial Sequence: Synthetic oligonucleotide
aguauucuuggaauucucc

SEQ ID NO: 1093452 - RNA, 19 nt, Artificial Sequence
  Description of Artificial Sequence: Synthetic oligonucleotide
uaaaggacagccaccugcc

SEQ ID NO: 1093453 - RNA, 19 nt, Artificial Sequence
  Description of Artificial Sequence: Synthetic oligonucleotide
cucggaauaguccucagac

SEQ ID NO: 1093454 - RNA, 19 nt, Artificial Sequence
  Description of Artificial Sequence: Synthetic oligonucleotide
aggaaacuuccauuccugc

SEQ ID NO: 1093455 - RNA, 19 nt, Artificial Sequence
  Description of Artificial Sequence: Synthetic oligonucleotide
ucacccuggcauuacaucc

SEQ ID NO: 1093456 - RNA, 19 nt, Artificial Sequence
  Description of Artificial Sequence: Synthetic oligonucleotide
gauauuaaugugugcguca

SEQ ID NO: 1093457 - RNA, 19 nt, Artificial Sequence
  Description of Artificial Sequence: Synthetic oligonucleotide
guagacauauaaguugagg

SEQ ID NO: 1093458 - RNA, 19 nt, Artificial Sequence
  Description of Artificial Sequence: Synthetic oligonucleotide
gugagucaaacucaccccg

SEQ ID NO: 1093459 - RNA, 19 nt, Artificial Sequence
  Description of Artificial Sequence: Synthetic oligonucleotide
gaagaugauccuggaaucg

SEQ ID NO: 1093460 - RNA, 19 nt, Artificial Sequence
  Description of Artificial Sequence: Synthetic oligonucleotide
ucauucaccucaguucucg

SEQ ID NO: 1093461 - RNA, 19 nt, Artificial Sequence
  Description of Artificial Sequence: Synthetic oligonucleotide
ucaaucgcuuccaccagag

SEQ ID NO: 1093462 - RNA, 19 nt, Artificial Sequence
  Description of Artificial Sequence: Synthetic oligonucleotide
gcaguaugcacucaggugc

SEQ ID NO: 1093463 - RNA, 19 nt, Artificial Sequence
  Description of Artificial Sequence: Synthetic oligonucleotide
guuaacuauuugcagcagc

SEQ ID NO: 1093464 - RNA, 19 nt, Artificial Sequence
  Description of Artificial Sequence: Synthetic oligonucleotide
agacggacacgacaugccc

SEQ ID NO: 1093465 - RNA, 19 nt, Artificial Sequence
  Description of Artificial Sequence: Synthetic oligonucleotide
uuuucuuaucgguuaacau

SEQ ID NO: 1093466 - RNA, 19 nt, Artificial Sequence
  Description of Artificial Sequence: Synthetic oligonucleotide
gugugaacugcuuaaacuc

SEQ ID NO: 1093467 - RNA, 19 nt, Artificial Sequence
  Description of Artificial Sequence: Synthetic oligonucleotide
uuugcgaggaaacuuccau

SEQ ID NO: 1093468 - RNA, 19 nt, Artificial Sequence
  Description of Artificial Sequence: Synthetic oligonucleotide
uggcuuaaaggacagccac

SEQ ID NO: 1093469 - RNA, 19 nt, Artificial Sequence
  Description of Artificial Sequence: Synthetic oligonucleotide
cuuuguggauauuaaugug

SEQ ID NO: 1093470 - RNA, 19 nt, Artificial Sequence
  Description of Artificial Sequence: Synthetic oligonucleotide
acaaguuuuccucgugauc

SEQ ID NO: 1093471 - RNA, 19 nt, Artificial Sequence
  Description of Artificial Sequence: Synthetic oligonucleotide
aagacggacacgacaugcc

SEQ ID NO: 1093472 - RNA, 19 nt, Artificial Sequence
  Description of Artificial Sequence: Synthetic oligonucleotide
uuguaaucugucaccuucc

SEQ ID NO: 1093473 - RNA, 19 nt, Artificial Sequence
  Description of Artificial Sequence: Synthetic oligonucleotide
auaaguugaggacuucccu

SEQ ID NO: 1093474 - RNA, 19 nt, Artificial Sequence
  Description of Artificial Sequence: Synthetic oligonucleotide
aaacgauaacacucagaca

SEQ ID NO: 1093475 - RNA, 19 nt, Artificial Sequence
  Description of Artificial Sequence: Synthetic oligonucleotide
cugcuuaaacuccuuuucg

SEQ ID NO: 1093476 - RNA, 19 nt, Artificial Sequence
  Description of Artificial Sequence: Synthetic oligonucleotide
uaacagcaauauuuuaaga

SEQ ID NO: 1093477 - RNA, 19 nt, Artificial Sequence
  Description of Artificial Sequence: Synthetic oligonucleotide
uccagacucugauauaagu

SEQ ID NO: 1093478 - RNA, 19 nt, Artificial Sequence
  Description of Artificial Sequence: Synthetic oligonucleotide
acucugauauaagucagag

SEQ ID NO: 1093479 - RNA, 19 nt, Artificial Sequence
  Description of Artificial Sequence: Synthetic oligonucleotide
agaaugugacacaaagcgg

SEQ ID NO: 1093480 - RNA, 19 nt, Artificial Sequence
  Description of Artificial Sequence: Synthetic oligonucleotide
agaaaacgauaacacucag

SEQ ID NO: 1093481 - RNA, 19 nt, Artificial Sequence
  Description of Artificial Sequence: Synthetic oligonucleotide
uucaccucaguucucggaa

SEQ ID NO: 1093482 - RNA, 19 nt, Artificial Sequence
  Description of Artificial Sequence: Synthetic oligonucleotide
gaagacggacacgacaugc

SEQ ID NO: 1093483 - RNA, 19 nt, Artificial Sequence
  Description of Artificial Sequence: Synthetic oligonucleotide
cagggcacggcuuggaagg

SEQ ID NO: 1093484 - RNA, 19 nt, Artificial Sequence
  Description of Artificial Sequence: Synthetic oligonucleotide
uacggcaagguguucauuc

SEQ ID NO: 1093485 - RNA, 19 nt, Artificial Sequence
  Description of Artificial Sequence: Synthetic oligonucleotide
gacuugucgaugugacugg

SEQ ID NO: 1093486 - RNA, 19 nt, Artificial Sequence
  Description of Artificial Sequence: Synthetic oligonucleotide
uuucaaaccagggccagga

SEQ ID NO: 1093487 - RNA, 19 nt, Artificial Sequence
  Description of Artificial Sequence: Synthetic oligonucleotide
gagaaaacgauaacacuca

SEQ ID NO: 1093488 - RNA, 19 nt, Artificial Sequence
  Description of Artificial Sequence: Synthetic oligonucleotide
aaguauucuuggaauucuc

SEQ ID NO: 1093489 - RNA, 19 nt, Artificial Sequence
  Description of Artificial Sequence: Synthetic oligonucleotide
uaaugugugcgucaugcuu

SEQ ID NO: 1093490 - RNA, 19 nt, Artificial Sequence
  Description of Artificial Sequence: Synthetic oligonucleotide
uaguuggaaguucuucucu

SEQ ID NO: 1093491 - RNA, 19 nt, Artificial Sequence
  Description of Artificial Sequence: Synthetic oligonucleotide
acgacaugccccuccacgg

SEQ ID NO: 1093492 - RNA, 19 nt, Artificial Sequence
  Description of Artificial Sequence: Synthetic oligonucleotide
aaguugaggacuucccuuu

SEQ ID NO: 1093493 - RNA, 19 nt, Artificial Sequence
  Description of Artificial Sequence: Synthetic oligonucleotide
uggucucucccucuaaaac

SEQ ID NO: 1093494 - RNA, 19 nt, Artificial Sequence
  Description of Artificial Sequence: Synthetic oligonucleotide
aaaaggccgaugacaaaag

SEQ ID NO: 1093495 - RNA, 19 nt, Artificial Sequence
  Description of Artificial Sequence: Synthetic oligonucleotide
uggacguuugcgaggaaac

SEQ ID NO: 1093496 - RNA, 19 nt, Artificial Sequence
  Description of Artificial Sequence: Synthetic oligonucleotide
cucggaacuggcaguaugc

SEQ ID NO: 1093497 - RNA, 19 nt, Artificial Sequence
  Description of Artificial Sequence: Synthetic oligonucleotide
ucgccuuguaaucugucac

SEQ ID NO: 1093498 - RNA, 19 nt, Artificial Sequence
  Description of Artificial Sequence: Synthetic oligonucleotide
ucucggaacuggcaguaug

SEQ ID NO: 1093499 - RNA, 19 nt, Artificial Sequence
  Description of Artificial Sequence: Synthetic oligonucleotide
  modified_base (10)..(10): a, c, u, g, unknown or other
cagaucggcncuguguucc

SEQ ID NO: 1093500 - RNA, 19 nt, Artificial Sequence
  Description of Artificial Sequence: Synthetic oligonucleotide
ucguucuuauucagcuggg

SEQ ID NO: 1093501 - RNA, 19 nt, Artificial Sequence
  Description of Artificial Sequence: Synthetic oligonucleotide
aacuaaucucuggucacug

SEQ ID NO: 1093502 - RNA, 19 nt, Artificial Sequence
  Description of Artificial Sequence: Synthetic oligonucleotide
ugagucaaacucaccccgc

SEQ ID NO: 1093503 - RNA, 19 nt, Artificial Sequence
  Description of Artificial Sequence: Synthetic oligonucleotide
cuuaucgguuaacauuuac

SEQ ID NO: 1093504 - RNA, 19 nt, Artificial Sequence
  Description of Artificial Sequence: Synthetic oligonucleotide
aucgguuaacauuuacaga

SEQ ID NO: 1093505 - RNA, 19 nt, Artificial Sequence
  Description of Artificial Sequence: Synthetic oligonucleotide
gacuuucugcuucacgcug

SEQ ID NO: 1093506 - RNA, 19 nt, Artificial Sequence
  Description of Artificial Sequence: Synthetic oligonucleotide
cacgacaugccccuccacg

SEQ ID NO: 1093507 - RNA, 19 nt, Artificial Sequence
  Description of Artificial Sequence: Synthetic oligonucleotide
ugcaggucgaaucuauuuu

SEQ ID NO: 1093508 - RNA, 19 nt, Artificial Sequence
  Description of Artificial Sequence: Synthetic oligonucleotide
accacaucccucuugcagu

SEQ ID NO: 1093509 - RNA, 19 nt, Artificial Sequence
  Description of Artificial Sequence: Synthetic oligonucleotide
cucaguucucggaauaguc

SEQ ID NO: 1093510 - RNA, 19 nt, Artificial Sequence
  Description of Artificial Sequence: Synthetic oligonucleotide
gacauauaaguugaggacu

SEQ ID NO: 1093511 - RNA, 19 nt, Artificial Sequence
  Description of Artificial Sequence: Synthetic oligonucleotide
cuaguuggaaguucuucuc

SEQ ID NO: 1093512 - RNA, 19 nt, Artificial Sequence
  Description of Artificial Sequence: Synthetic oligonucleotide
auagugcugaaagggacag

SEQ ID NO: 1093513 - RNA, 19 nt, Artificial Sequence
  Description of Artificial Sequence: Synthetic oligonucleotide
uucgccuuguaaucuguca

SEQ ID NO: 1093514 - RNA, 19 nt, Artificial Sequence
  Description of Artificial Sequence: Synthetic oligonucleotide
uccguucccucagagacag

SEQ ID NO: 1093515 - RNA, 19 nt, Artificial Sequence
  Description of Artificial Sequence: Synthetic oligonucleotide
uuuuccccuugacagugca

SEQ ID NO: 1093516 - RNA, 19 nt, Artificial Sequence
  Description of Artificial Sequence: Synthetic oligonucleotide
uggcaguaugcacucaggu

SEQ ID NO: 1093517 - RNA, 19 nt, Artificial Sequence
  Description of Artificial Sequence: Synthetic oligonucleotide
uauuaaugugugcgucaug

SEQ ID NO: 1093518 - RNA, 19 nt, Artificial Sequence
  Description of Artificial Sequence: Synthetic oligonucleotide
acacaaguuuuccucguga

SEQ ID NO: 1093519 - RNA, 19 nt, Artificial Sequence
  Description of Artificial Sequence: Synthetic oligonucleotide
gaagcauguggucccgcag

SEQ ID NO: 1093520 - RNA, 19 nt, Artificial Sequence
  Description of Artificial Sequence: Synthetic oligonucleotide
aacagggugucaucuuuaa

SEQ ID NO: 1093521 - RNA, 19 nt, Artificial Sequence
  Description of Artificial Sequence: Synthetic oligonucleotide
cuggcauuacauccagggg

SEQ ID NO: 1093522 - RNA, 19 nt, Artificial Sequence
  Description of Artificial Sequence: Synthetic oligonucleotide
cugcaagucagugaccacc

SEQ ID NO: 1093523 - RNA, 19 nt, Artificial Sequence
  Description of Artificial Sequence: Synthetic oligonucleotide
agcuuugaaggucuccaca

SEQ ID NO: 1093524 - RNA, 19 nt, Artificial Sequence
  Description of Artificial Sequence: Synthetic oligonucleotide
ucucccucuaaaacaacua

SEQ ID NO: 1093525 - RNA, 19 nt, Artificial Sequence
  Description of Artificial Sequence: Synthetic oligonucleotide
  modified_base (19)..(19): a, c, u, g, unknown or other
ucuacggggcagaucggcn

SEQ ID NO: 1093526 - RNA, 19 nt, Artificial Sequence
  Description of Artificial Sequence: Synthetic oligonucleotide
uuaaugugugcgucaugcu

SEQ ID NO: 1093527 - RNA, 19 nt, Artificial Sequence
  Description of Artificial Sequence: Synthetic oligonucleotide
uuucgaacuucuucacggu

SEQ ID NO: 1093528 - RNA, 19 nt, Artificial Sequence
  Description of Artificial Sequence: Synthetic oligonucleotide
gucacccucugccugaaug

SEQ ID NO: 1093529 - RNA, 19 nt, Artificial Sequence
  Description of Artificial Sequence: Synthetic oligonucleotide
uggguaugcaggacacaag

SEQ ID NO: 1093530 - RNA, 19 nt, Artificial Sequence
  Description of Artificial Sequence: Synthetic oligonucleotide
gaggaaacuuccauuccug

SEQ ID NO: 1093531 - RNA, 19 nt, Artificial Sequence
  Description of Artificial Sequence: Synthetic oligonucleotide
ggacuugucgaugugacug

SEQ ID NO: 1093532 - RNA, 19 nt, Artificial Sequence
  Description of Artificial Sequence: Synthetic oligonucleotide
ugucgaugugacuggucag

SEQ ID NO: 1093533 - RNA, 19 nt, Artificial Sequence
  Description of Artificial Sequence: Synthetic oligonucleotide
gacaaguggguccccuugc

SEQ ID NO: 1093534 - RNA, 19 nt, Artificial Sequence
  Description of Artificial Sequence: Synthetic oligonucleotide
ggaaacuuccauuccugcc

SEQ ID NO: 1093535 - RNA, 19 nt, Artificial Sequence
  Description of Artificial Sequence: Synthetic oligonucleotide
agacaggaugcagugcugg

SEQ ID NO: 1093536 - RNA, 19 nt, Artificial Sequence
  Description of Artificial Sequence: Synthetic oligonucleotide
acguuugcgaggaaacuuc

SEQ ID NO: 1093537 - RNA, 19 nt, Artificial Sequence
  Description of Artificial Sequence: Synthetic oligonucleotide
gaaaacgauaacacucaga

SEQ ID NO: 1093538 - RNA, 19 nt, Artificial Sequence
  Description of Artificial Sequence: Synthetic oligonucleotide
caccacaucccucuugcag

SEQ ID NO: 1093539 - RNA, 19 nt, Artificial Sequence
  Description of Artificial Sequence: Synthetic oligonucleotide
acuuucaggaacagggugu

SEQ ID NO: 1093540 - RNA, 19 nt, Artificial Sequence
  Description of Artificial Sequence: Synthetic oligonucleotide
gcugguuaacuauuugcag

SEQ ID NO: 1093541 - RNA, 19 nt, Artificial Sequence
  Description of Artificial Sequence: Synthetic oligonucleotide
uuccugccaaacaucugug

SEQ ID NO: 1093542 - RNA, 19 nt, Artificial Sequence
  Description of Artificial Sequence: Synthetic oligonucleotide
ugaagacggacacgacaug

SEQ ID NO: 1093543 - RNA, 19 nt, Artificial Sequence
  Description of Artificial Sequence: Synthetic oligonucleotide
cagagcggugcccacacgc

SEQ ID NO: 1093544 - RNA, 19 nt, Artificial Sequence
  Description of Artificial Sequence: Synthetic oligonucleotide
acacuuguugggacaagac

SEQ ID NO: 1093545 - RNA, 19 nt, Artificial Sequence
  Description of Artificial Sequence: Synthetic oligonucleotide
guagcaggcgcccuccagc

SEQ ID NO: 1093546 - RNA, 19 nt, Artificial Sequence
  Description of Artificial Sequence: Synthetic oligonucleotide
agaaucacccuggcauuac

SEQ ID NO: 1093547 - RNA, 19 nt, Artificial Sequence
  Description of Artificial Sequence: Synthetic oligonucleotide
caugcuugcuggucucucc

SEQ ID NO: 1093548 - RNA, 19 nt, Artificial Sequence
  Description of Artificial Sequence: Synthetic oligonucleotide
gcauguucagucuagaggu

SEQ ID NO: 1093549 - RNA, 19 nt, Artificial Sequence
  Description of Artificial Sequence: Synthetic oligonucleotide
acuaaaggcaaaaggccga

SEQ ID NO: 1093550 - RNA, 19 nt, Artificial Sequence
  Description of Artificial Sequence: Synthetic oligonucleotide
cauagugcugaaagggaca

SEQ ID NO: 1093551 - RNA, 19 nt, Artificial Sequence
  Description of Artificial Sequence: Synthetic oligonucleotide
auauuaaugugugcgucau

SEQ ID NO: 1093552 - RNA, 19 nt, Artificial Sequence
  Description of Artificial Sequence: Synthetic oligonucleotide
aggucgaaucuauuuugcu

SEQ ID NO: 1093553 - RNA, 19 nt, Artificial Sequence
  Description of Artificial Sequence: Synthetic oligonucleotide
ucuucgccuuguaaucugu

SEQ ID NO: 1093554 - RNA, 19 nt, Artificial Sequence
  Description of Artificial Sequence: Synthetic oligonucleotide
gauccaagagaaaacgaua

SEQ ID NO: 1093555 - RNA, 19 nt, Artificial Sequence
  Description of Artificial Sequence: Synthetic oligonucleotide
agauccuuccggagcaugg

SEQ ID NO: 1093556 - RNA, 19 nt, Artificial Sequence
  Description of Artificial Sequence: Synthetic oligonucleotide
caaaaggccgaugacaaaa

SEQ ID NO: 1093557 - RNA, 19 nt, Artificial Sequence
  Description of Artificial Sequence: Synthetic oligonucleotide
ucgaaucuauuuugcugcu

SEQ ID NO: 1093558 - RNA, 19 nt, Artificial Sequence
  Description of Artificial Sequence: Synthetic oligonucleotide
cuucguucuuauucagcug

SEQ ID NO: 1093559 - RNA, 19 nt, Artificial Sequence
  Description of Artificial Sequence: Synthetic oligonucleotide
gacaugccccuccacggcc

SEQ ID NO: 1093560 - RNA, 19 nt, Artificial Sequence
  Description of Artificial Sequence: Synthetic oligonucleotide
uccggagcauggcuucccg

SEQ ID NO: 1093561 - RNA, 19 nt, Artificial Sequence
  Description of Artificial Sequence: Synthetic oligonucleotide
agaagcauguggucccgca

SEQ ID NO: 1093562 - RNA, 19 nt, Artificial Sequence
  Description of Artificial Sequence: Synthetic oligonucleotide
cucagacacuuguugggac

SEQ ID NO: 1093563 - RNA, 19 nt, Artificial Sequence
  Description of Artificial Sequence: Synthetic oligonucleotide
gugugcgucaugcuugcug

SEQ ID NO: 1093564 - RNA, 19 nt, Artificial Sequence
  Description of Artificial Sequence: Synthetic oligonucleotide
agauccuccaagucaguua

SEQ ID NO: 1093565 - RNA, 19 nt, Artificial Sequence
  Description of Artificial Sequence: Synthetic oligonucleotide
ugccaaacaucugugugaa

SEQ ID NO: 1093566 - RNA, 19 nt, Artificial Sequence
  Description of Artificial Sequence: Synthetic oligonucleotide
gcccgaaguuuucuuaucg

SEQ ID NO: 1093567 - RNA, 19 nt, Artificial Sequence
  Description of Artificial Sequence: Synthetic oligonucleotide
aguuucaaaccagggccag

SEQ ID NO: 1093568 - RNA, 19 nt, Artificial Sequence
  Description of Artificial Sequence: Synthetic oligonucleotide
ggcaguaugcacucaggug

SEQ ID NO: 1093569 - RNA, 19 nt, Artificial Sequence
  Description of Artificial Sequence: Synthetic oligonucleotide
cugccaaacaucuguguga

SEQ ID NO: 1093570 - RNA, 19 nt, Artificial Sequence
  Description of Artificial Sequence: Synthetic oligonucleotide
gcaggucgaaucuauuuug

SEQ ID NO: 1093571 - RNA, 19 nt, Artificial Sequence
  Description of Artificial Sequence: Synthetic oligonucleotide
ggucucucccucuaaaaca

SEQ ID NO: 1093572 - RNA, 19 nt, Artificial Sequence
  Description of Artificial Sequence: Synthetic oligonucleotide
cauucaccucaguucucgg

SEQ ID NO: 1093573 - RNA, 19 nt, Artificial Sequence
  Description of Artificial Sequence: Synthetic oligonucleotide
cacuuguugggacaagaca

SEQ ID NO: 1093574 - RNA, 19 nt, Artificial Sequence
  Description of Artificial Sequence: Synthetic oligonucleotide
  modified_base (9)..(9): a, c, u, g, unknown or other
agaucggcncuguguuccg

SEQ ID NO: 1093575 - RNA, 19 nt, Artificial Sequence
  Description of Artificial Sequence: Synthetic oligonucleotide
aggagcaguguugaagaug

SEQ ID NO: 1093576 - RNA, 19 nt, Artificial Sequence
  Description of Artificial Sequence: Synthetic oligonucleotide
acggacacgacaugccccu

SEQ ID NO: 1093577 - RNA, 19 nt, Artificial Sequence
  Description of Artificial Sequence: Synthetic oligonucleotide
aguacagggacaagugggu

SEQ ID NO: 1093578 - RNA, 19 nt, Artificial Sequence
  Description of Artificial Sequence: Synthetic oligonucleotide
caucccucuugcaguaaag

SEQ ID NO: 1093579 - RNA, 19 nt, Artificial Sequence
  Description of Artificial Sequence: Synthetic oligonucleotide
ccagacucugauauaaguc

SEQ ID NO: 1093580 - RNA, 19 nt, Artificial Sequence
  Description of Artificial Sequence: Synthetic oligonucleotide
  modified_base (18)..(18): a, c, u, g, unknown or other
cuacggggcagaucggcnc

SEQ ID NO: 1093581 - RNA, 19 nt, Artificial Sequence
  Description of Artificial Sequence: Synthetic oligonucleotide
gacacuuguugggacaaga

SEQ ID NO: 1093582 - RNA, 19 nt, Artificial Sequence
  Description of Artificial Sequence: Synthetic oligonucleotide
caagucagugaccaccaca

SEQ ID NO: 1093583 - RNA, 19 nt, Artificial Sequence
  Description of Artificial Sequence: Synthetic oligonucleotide
cuugcuccgccucagggca

SEQ ID NO: 1093584 - RNA, 19 nt, Artificial Sequence
  Description of Artificial Sequence: Synthetic oligonucleotide
aacucaccccgcaucacca

SEQ ID NO: 1093585 - RNA, 19 nt, Artificial Sequence
  Description of Artificial Sequence: Synthetic oligonucleotide
gagucaaacucaccccgca

SEQ ID NO: 1093586 - RNA, 19 nt, Artificial Sequence
  Description of Artificial Sequence: Synthetic oligonucleotide
gacggacacgacaugcccc

SEQ ID NO: 1093587 - RNA, 19 nt, Artificial Sequence
  Description of Artificial Sequence: Synthetic oligonucleotide
aguagacauauaaguugag

SEQ ID NO: 1093588 - RNA, 19 nt, Artificial Sequence
  Description of Artificial Sequence: Synthetic oligonucleotide
gucuuugaacaccuccuga

SEQ ID NO: 1093589 - RNA, 19 nt, Artificial Sequence
  Description of Artificial Sequence: Synthetic oligonucleotide
acauauaaguugaggacuu

SEQ ID NO: 1093590 - RNA, 19 nt, Artificial Sequence
  Description of Artificial Sequence: Synthetic oligonucleotide
agagcggugcccacacgcc

SEQ ID NO: 1093591 - RNA, 19 nt, Artificial Sequence
  Description of Artificial Sequence: Synthetic oligonucleotide
ucgccccagaaucacccug

SEQ ID NO: 1093592 - RNA, 19 nt, Artificial Sequence
  Description of Artificial Sequence: Synthetic oligonucleotide
caagguguucauucaccuc

SEQ ID NO: 1093593 - RNA, 19 nt, Artificial Sequence
  Description of Artificial Sequence: Synthetic oligonucleotide
ugucuacggggcagaucgg

SEQ ID NO: 1093594 - RNA, 19 nt, Artificial Sequence
  Description of Artificial Sequence: Synthetic oligonucleotide
cagguaggcccuagcacag

SEQ ID NO: 1093595 - RNA, 19 nt, Artificial Sequence
  Description of Artificial Sequence: Synthetic oligonucleotide
gccacugcaacagugaguc

SEQ ID NO: 1093596 - RNA, 19 nt, Artificial Sequence
  Description of Artificial Sequence: Synthetic oligonucleotide
uucucggaauaguccucag

SEQ ID NO: 1093597 - RNA, 19 nt, Artificial Sequence
  Description of Artificial Sequence: Synthetic oligonucleotide
guaugcacucaggugcucc

SEQ ID NO: 1093598 - RNA, 19 nt, Artificial Sequence
  Description of Artificial Sequence: Synthetic oligonucleotide
agccaggcggacuugucga

SEQ ID NO: 1093599 - RNA, 19 nt, Artificial Sequence
  Description of Artificial Sequence: Synthetic oligonucleotide
agacccguccccauucagg

SEQ ID NO: 1093600 - RNA, 19 nt, Artificial Sequence
  Description of Artificial Sequence: Synthetic oligonucleotide
agucuagaggucuggcuua

SEQ ID NO: 1093601 - RNA, 19 nt, Artificial Sequence
  Description of Artificial Sequence: Synthetic oligonucleotide
guuucaaaccagggccagg

SEQ ID NO: 1093602 - RNA, 19 nt, Artificial Sequence
  Description of Artificial Sequence: Synthetic oligonucleotide
  modified_base (17)..(17): a, c, u, g, unknown or other
uacggggcagaucggcncu

SEQ ID NO: 1093603 - RNA, 19 nt, Artificial Sequence
  Description of Artificial Sequence: Synthetic oligonucleotide
acggcaagguguucauuca

SEQ ID NO: 1093604 - RNA, 19 nt, Artificial Sequence
  Description of Artificial Sequence: Synthetic oligonucleotide
uccccuugacagugcagcc

SEQ ID NO: 1093605 - RNA, 19 nt, Artificial Sequence
  Description of Artificial Sequence: Synthetic oligonucleotide
uugcgaggaaacuuccauu

SEQ ID NO: 1093606 - RNA, 19 nt, Artificial Sequence
  Description of Artificial Sequence: Synthetic oligonucleotide
aguucucggaauaguccuc

SEQ ID NO: 1093607 - RNA, 19 nt, Artificial Sequence
  Description of Artificial Sequence: Synthetic oligonucleotide
uccaggggcguuucuugca

SEQ ID NO: 1093608 - RNA, 19 nt, Artificial Sequence
  Description of Artificial Sequence: Synthetic oligonucleotide
ucuuaucgguuaacauuua

SEQ ID NO: 1093609 - RNA, 19 nt, Artificial Sequence
  Description of Artificial Sequence: Synthetic oligonucleotide
acggcuuggaaggagcagu

SEQ ID NO: 1093610 - RNA, 19 nt, Artificial Sequence
  Description of Artificial Sequence: Synthetic oligonucleotide
gguaggcccuagcacagag

SEQ ID NO: 1093611 - RNA, 19 nt, Artificial Sequence
  Description of Artificial Sequence: Synthetic oligonucleotide
uggccuccuugucuacggg

SEQ ID NO: 1093612 - RNA, 19 nt, Artificial Sequence
  Description of Artificial Sequence: Synthetic oligonucleotide
ggauauuaaugugugcguc

SEQ ID NO: 1093613 - RNA, 19 nt, Artificial Sequence
  Description of Artificial Sequence: Synthetic oligonucleotide
cuggcuuaaaggacagcca

SEQ ID NO: 1093614 - RNA, 19 nt, Artificial Sequence
  Description of Artificial Sequence: Synthetic oligonucleotide
guaaaggcaccucuccucu

SEQ ID NO: 1093615 - RNA, 19 nt, Artificial Sequence
  Description of Artificial Sequence: Synthetic oligonucleotide
gaugcagugcuggcagagc

SEQ ID NO: 1093616 - RNA, 19 nt, Artificial Sequence
  Description of Artificial Sequence: Synthetic oligonucleotide
cucugauauaagucagaga

SEQ ID NO: 1093617 - RNA, 19 nt, Artificial Sequence
  Description of Artificial Sequence: Synthetic oligonucleotide
gcugaagacggacacgaca

SEQ ID NO: 1093618 - RNA, 19 nt, Artificial Sequence
  Description of Artificial Sequence: Synthetic oligonucleotide
uucauucaccucaguucuc

SEQ ID NO: 1093619 - RNA, 19 nt, Artificial Sequence
  Description of Artificial Sequence: Synthetic oligonucleotide
ucggaacuggcaguaugca

SEQ ID NO: 1093620 - RNA, 19 nt, Artificial Sequence
  Description of Artificial Sequence: Synthetic oligonucleotide
uguuccagacucugauaua

SEQ ID NO: 1093621 - RNA, 19 nt, Artificial Sequence
  Description of Artificial Sequence: Synthetic oligonucleotide
acaucccucuugcaguaaa

SEQ ID NO: 1093622 - RNA, 19 nt, Artificial Sequence
  Description of Artificial Sequence: Synthetic oligonucleotide
cuugucgaugugacugguc

SEQ ID NO: 1093623 - RNA, 19 nt, Artificial Sequence
  Description of Artificial Sequence: Synthetic oligonucleotide
aggauccaagagaaaacga

SEQ ID NO: 1093624 - RNA, 19 nt, Artificial Sequence
  Description of Artificial Sequence: Synthetic oligonucleotide
gacucugauauaagucaga

SEQ ID NO: 1093625 - RNA, 19 nt, Artificial Sequence
  Description of Artificial Sequence: Synthetic oligonucleotide
gacacgacaugccccucca

SEQ ID NO: 1093626 - RNA, 19 nt, Artificial Sequence
  Description of Artificial Sequence: Synthetic oligonucleotide
gaaucgccccagaaucacc

SEQ ID NO: 1093627 - RNA, 19 nt, Artificial Sequence
  Description of Artificial Sequence: Synthetic oligonucleotide
gagcggugcccacacgccc

SEQ ID NO: 1093628 - RNA, 19 nt, Artificial Sequence
  Description of Artificial Sequence: Synthetic oligonucleotide
cucccucuaaaacaacuaa

SEQ ID NO: 1093629 - RNA, 19 nt, Artificial Sequence
  Description of Artificial Sequence: Synthetic oligonucleotide
aucuauuuugcugcugguu

SEQ ID NO: 1093630 - RNA, 19 nt, Artificial Sequence
  Description of Artificial Sequence: Synthetic oligonucleotide
gugauccugcaagucagug

SEQ ID NO: 1093631 - RNA, 19 nt, Artificial Sequence
  Description of Artificial Sequence: Synthetic oligonucleotide
cgcaucaccacaaaguaca

SEQ ID NO: 1093632 - RNA, 19 nt, Artificial Sequence
  Description of Artificial Sequence: Synthetic oligonucleotide
cuugccgcuguagcaggcg

SEQ ID NO: 1093633 - RNA, 19 nt, Artificial Sequence
  Description of Artificial Sequence: Synthetic oligonucleotide
  modified_base (2)..(2): a, c, u, g, unknown or other
cncuguguuccguucccuc

SEQ ID NO: 1093634 - RNA, 19 nt, Artificial Sequence
  Description of Artificial Sequence: Synthetic oligonucleotide
gucaaucgcuuccaccaga

SEQ ID NO: 1093635 - RNA, 19 nt, Artificial Sequence
  Description of Artificial Sequence: Synthetic oligonucleotide
uucaaaccagggccaggau

SEQ ID NO: 1093636 - RNA, 19 nt, Artificial Sequence
  Description of Artificial Sequence: Synthetic oligonucleotide
agugaccaccacaucccuc

SEQ ID NO: 1093637 - RNA, 19 nt, Artificial Sequence
  Description of Artificial Sequence: Synthetic oligonucleotide
ggcaagguguucauucacc

SEQ ID NO: 1093638 - RNA, 19 nt, Artificial Sequence
  Description of Artificial Sequence: Synthetic oligonucleotide
caguucucggaauaguccu

SEQ ID NO: 1093639 - RNA, 19 nt, Artificial Sequence
  Description of Artificial Sequence: Synthetic oligonucleotide
cuucgccuuguaaucuguc

SEQ ID NO: 1093640 - RNA, 19 nt, Artificial Sequence
  Description of Artificial Sequence: Synthetic oligonucleotide
cucguuggggcagggcacg

SEQ ID NO: 1093641 - RNA, 19 nt, Artificial Sequence
  Description of Artificial Sequence: Synthetic oligonucleotide
ggacaaguggguccccuug

SEQ ID NO: 1093642 - RNA, 19 nt, Artificial Sequence
  Description of Artificial Sequence: Synthetic oligonucleotide
gucuacggggcagaucggc

SEQ ID NO: 1093643 - RNA, 19 nt, Artificial Sequence
  Description of Artificial Sequence: Synthetic oligonucleotide
  modified_base (7)..(7): a, c, u, g, unknown or other
aucggcncuguguuccguu

SEQ ID NO: 1093644 - RNA, 19 nt, Artificial Sequence
  Description of Artificial Sequence: Synthetic oligonucleotide
cuguucuaguuggaaguuc

SEQ ID NO: 1093645 - RNA, 19 nt, Artificial Sequence
  Description of Artificial Sequence: Synthetic oligonucleotide
  modified_base (4)..(4): a, c, u, g, unknown or other
ggcncuguguuccguuccc

SEQ ID NO: 1093646 - RNA, 19 nt, Artificial Sequence
  Description of Artificial Sequence: Synthetic oligonucleotide
ggcaaaaggccgaugacaa

SEQ ID NO: 1093647 - RNA, 19 nt, Artificial Sequence
  Description of Artificial Sequence: Synthetic oligonucleotide
gacccguccccauucaggu

SEQ ID NO: 1093648 - RNA, 19 nt, Artificial Sequence
  Description of Artificial Sequence: Synthetic oligonucleotide
  modified_base (6)..(6): a, c, u, g, unknown or other
ucggcncuguguuccguuc

SEQ ID NO: 1093649 - RNA, 19 nt, Artificial Sequence
  Description of Artificial Sequence: Synthetic oligonucleotide
ggguaugcaggacacaagu

SEQ ID NO: 1093650 - RNA, 19 nt, Artificial Sequence
  Description of Artificial Sequence: Synthetic oligonucleotide
gcagggcacggcuuggaag

SEQ ID NO: 1093651 - RNA, 19 nt, Artificial Sequence
  Description of Artificial Sequence: Synthetic oligonucleotide
acagagccgguagccacag

SEQ ID NO: 1093652 - RNA, 19 nt, Artificial Sequence
  Description of Artificial Sequence: Synthetic oligonucleotide
guguucauucaccucaguu

SEQ ID NO: 1093653 - RNA, 19 nt, Artificial Sequence
  Description of Artificial Sequence: Synthetic oligonucleotide
cuggucagagccuggacgu

SEQ ID NO: 1093654 - RNA, 19 nt, Artificial Sequence
  Description of Artificial Sequence: Synthetic oligonucleotide
ggcuuaaaggacagccacc

SEQ ID NO: 1093655 - RNA, 19 nt, Artificial Sequence
  Description of Artificial Sequence: Synthetic oligonucleotide
ggacacgacaugccccucc

SEQ ID NO: 1093656 - RNA, 19 nt, Artificial Sequence
  Description of Artificial Sequence: Synthetic oligonucleotide
cuucacgcugucaaucgcu

SEQ ID NO: 1093657 - RNA, 19 nt, Artificial Sequence
  Description of Artificial Sequence: Synthetic oligonucleotide
cacccucugccugaauggc

SEQ ID NO: 1093658 - RNA, 19 nt, Artificial Sequence
  Description of Artificial Sequence: Synthetic oligonucleotide
acuugucgaugugacuggu

SEQ ID NO: 1093659 - RNA, 19 nt, Artificial Sequence
  Description of Artificial Sequence: Synthetic oligonucleotide
gggacagccagaggcaaug

SEQ ID NO: 1093660 - RNA, 19 nt, Artificial Sequence
  Description of Artificial Sequence: Synthetic oligonucleotide
cugcgcuuccagccaggcg

SEQ ID NO: 1093661 - RNA, 19 nt, Artificial Sequence
  Description of Artificial Sequence: Synthetic oligonucleotide
cugcaacagugagucaaac

SEQ ID NO: 1093662 - RNA, 19 nt, Artificial Sequence
  Description of Artificial Sequence: Synthetic oligonucleotide
guuugcgaggaaacuucca

SEQ ID NO: 1093663 - RNA, 19 nt, Artificial Sequence
  Description of Artificial Sequence: Synthetic oligonucleotide
cacacgcccgucgugggug

SEQ ID NO: 1093664 - RNA, 19 nt, Artificial Sequence
  Description of Artificial Sequence: Synthetic oligonucleotide
caguugucuuugaacaccu

SEQ ID NO: 1093665 - RNA, 19 nt, Artificial Sequence
  Description of Artificial Sequence: Synthetic oligonucleotide
ggaaucgccccagaaucac

SEQ ID NO: 1093666 - RNA, 19 nt, Artificial Sequence
  Description of Artificial Sequence: Synthetic oligonucleotide
gacguuugcgaggaaacuu

SEQ ID NO: 1093667 - RNA, 19 nt, Artificial Sequence
  Description of Artificial Sequence: Synthetic oligonucleotide
caaacucaccccgcaucac

SEQ ID NO: 1093668 - RNA, 19 nt, Artificial Sequence
  Description of Artificial Sequence: Synthetic oligonucleotide
gaacagggugucaucuuua

SEQ ID NO: 1093669 - RNA, 19 nt, Artificial Sequence
  Description of Artificial Sequence: Synthetic oligonucleotide
guaggcccuagcacagagc

SEQ ID NO: 1093670 - RNA, 19 nt, Artificial Sequence
  Description of Artificial Sequence: Synthetic oligonucleotide
gcuuaaaggacagccaccu

SEQ ID NO: 1093671 - RNA, 19 nt, Artificial Sequence
  Description of Artificial Sequence: Synthetic oligonucleotide
gggcguuucuugcaguaga

SEQ ID NO: 1093672 - RNA, 19 nt, Artificial Sequence
  Description of Artificial Sequence: Synthetic oligonucleotide
gcggcugguguagaaaggc

SEQ ID NO: 1093673 - RNA, 19 nt, Artificial Sequence
  Description of Artificial Sequence: Synthetic oligonucleotide
aucgccccagaaucacccu

SEQ ID NO: 1093674 - RNA, 19 nt, Artificial Sequence
  Description of Artificial Sequence: Synthetic oligonucleotide
ccgucaggucuucugaaac

SEQ ID NO: 1093675 - RNA, 19 nt, Artificial Sequence
  Description of Artificial Sequence: Synthetic oligonucleotide
cacggcuuggaaggagcag

SEQ ID NO: 1093676 - RNA, 19 nt, Artificial Sequence
  Description of Artificial Sequence: Synthetic oligonucleotide
acaagacacuggguaugca

SEQ ID NO: 1093677 - RNA, 19 nt, Artificial Sequence
  Description of Artificial Sequence: Synthetic oligonucleotide
aacuggcaguaugcacuca

SEQ ID NO: 1093678 - RNA, 19 nt, Artificial Sequence
  Description of Artificial Sequence: Synthetic oligonucleotide
ugcccacacgcccgucgug

SEQ ID NO: 1093679 - RNA, 19 nt, Artificial Sequence
  Description of Artificial Sequence: Synthetic oligonucleotide
acagcggcugguguagaaa

SEQ ID NO: 1093680 - RNA, 19 nt, Artificial Sequence
  Description of Artificial Sequence: Synthetic oligonucleotide
cacaaguuuuccucgugau

SEQ ID NO: 1093681 - RNA, 19 nt, Artificial Sequence
  Description of Artificial Sequence: Synthetic oligonucleotide
ucguuggggcagggcacgg

SEQ ID NO: 1093682 - RNA, 19 nt, Artificial Sequence
  Description of Artificial Sequence: Synthetic oligonucleotide
cguuugcgaggaaacuucc

SEQ ID NO: 1093683 - RNA, 19 nt, Artificial Sequence
  Description of Artificial Sequence: Synthetic oligonucleotide
cuggacguuugcgaggaaa

SEQ ID NO: 1093684 - RNA, 19 nt, Artificial Sequence
  Description of Artificial Sequence: Synthetic oligonucleotide
acuggguaugcaggacaca

SEQ ID NO: 1093685 - RNA, 19 nt, Artificial Sequence
  Description of Artificial Sequence: Synthetic oligonucleotide
ggcagagcggugcccacac

SEQ ID NO: 1093686 - RNA, 19 nt, Artificial Sequence
  Description of Artificial Sequence: Synthetic oligonucleotide
ggcacggcuuggaaggagc

SEQ ID NO: 1093687 - RNA, 19 nt, Artificial Sequence
  Description of Artificial Sequence: Synthetic oligonucleotide
ggcguuucuugcaguagac

SEQ ID NO: 1093688 - RNA, 19 nt, Artificial Sequence
  Description of Artificial Sequence: Synthetic oligonucleotide
aggcccuagcacagagccg

SEQ ID NO: 1093689 - RNA, 19 nt, Artificial Sequence
  Description of Artificial Sequence: Synthetic oligonucleotide
ccgcaucaccacaaaguac

SEQ ID NO: 1093690 - RNA, 19 nt, Artificial Sequence
  Description of Artificial Sequence: Synthetic oligonucleotide
ucuagaggucuggcuuaaa

SEQ ID NO: 1093691 - RNA, 19 nt, Artificial Sequence
  Description of Artificial Sequence: Synthetic oligonucleotide
ggagcauggcuucccggca

SEQ ID NO: 1093692 - RNA, 19 nt, Artificial Sequence
  Description of Artificial Sequence: Synthetic oligonucleotide
ccaggggcguuucuugcag

SEQ ID NO: 1093693 - RNA, 19 nt, Artificial Sequence
  Description of Artificial Sequence: Synthetic oligonucleotide
aggcggacuugucgaugug

SEQ ID NO: 1093694 - RNA, 19 nt, Artificial Sequence
  Description of Artificial Sequence: Synthetic oligonucleotide
gcaccucuccucucggaac

SEQ ID NO: 1093695 - RNA, 19 nt, Artificial Sequence
  Description of Artificial Sequence: Synthetic oligonucleotide
  modified_base (16)..(16): a, c, u, g, unknown or other
acggggcagaucggcncug

SEQ ID NO: 1093696 - RNA, 19 nt, Artificial Sequence
  Description of Artificial Sequence: Synthetic oligonucleotide
cuucuucgccuuguaaucu

SEQ ID NO: 1093697 - RNA, 19 nt, Artificial Sequence
  Description of Artificial Sequence: Synthetic oligonucleotide
cuugcuggucucucccucu

SEQ ID NO: 1093698 - RNA, 19 nt, Artificial Sequence
  Description of Artificial Sequence: Synthetic oligonucleotide
gcggacuugucgaugugac

SEQ ID NO: 1093699 - RNA, 19 nt, Artificial Sequence
  Description of Artificial Sequence: Synthetic oligonucleotide
gccgaugacaaaagcaugu

SEQ ID NO: 1093700 - RNA, 19 nt, Artificial Sequence
  Description of Artificial Sequence: Synthetic oligonucleotide
gcuguagcaggcgcccucc

SEQ ID NO: 1093701 - RNA, 19 nt, Artificial Sequence
  Description of Artificial Sequence: Synthetic oligonucleotide
caggcggacuugucgaugu

SEQ ID NO: 1093702 - RNA, 19 nt, Artificial Sequence
  Description of Artificial Sequence: Synthetic oligonucleotide
ggcaccucuccucucggaa

SEQ ID NO: 1093703 - RNA, 19 nt, Artificial Sequence
  Description of Artificial Sequence: Synthetic oligonucleotide
  modified_base (12)..(12): a, c, u, g, unknown or other
ggcagaucggcncuguguu

SEQ ID NO: 1093704 - RNA, 19 nt, Artificial Sequence
  Description of Artificial Sequence: Synthetic oligonucleotide
cgguuaacauuuacagauc

SEQ ID NO: 1093705 - RNA, 19 nt, Artificial Sequence
  Description of Artificial Sequence: Synthetic oligonucleotide
cauacggcaagguguucau

SEQ ID NO: 1093706 - RNA, 19 nt, Artificial Sequence
  Description of Artificial Sequence: Synthetic oligonucleotide
ggggcguuucuugcaguag

SEQ ID NO: 1093707 - RNA, 19 nt, Artificial Sequence
  Description of Artificial Sequence: Synthetic oligonucleotide
caacuaaucucuggucacu

SEQ ID NO: 1093708 - RNA, 19 nt, Artificial Sequence
  Description of Artificial Sequence: Synthetic oligonucleotide
gcuggucucucccucuaaa

SEQ ID NO: 1093709 - RNA, 19 nt, Artificial Sequence
  Description of Artificial Sequence: Synthetic oligonucleotide
agcucucguuggggcaggg

SEQ ID NO: 1093710 - RNA, 19 nt, Artificial Sequence
  Description of Artificial Sequence: Synthetic oligonucleotide
ugugugcgucaugcuugcu

SEQ ID NO: 1093711 - RNA, 19 nt, Artificial Sequence
  Description of Artificial Sequence: Synthetic oligonucleotide
  modified_base (11)..(11): a, c, u, g, unknown or other
gcagaucggcncuguguuc

SEQ ID NO: 1093712 - RNA, 19 nt, Artificial Sequence
  Description of Artificial Sequence: Synthetic oligonucleotide
cagaaucacccuggcauua

SEQ ID NO: 1093713 - RNA, 19 nt, Artificial Sequence
  Description of Artificial Sequence: Synthetic oligonucleotide
cuccgccucagggcauacg

SEQ ID NO: 1093714 - RNA, 19 nt, Artificial Sequence
  Description of Artificial Sequence: Synthetic oligonucleotide
cguucuuauucagcugggc

SEQ ID NO: 1093715 - RNA, 19 nt, Artificial Sequence
  Description of Artificial Sequence: Synthetic oligonucleotide
gucuagaggucuggcuuaa

SEQ ID NO: 1093716 - RNA, 19 nt, Artificial Sequence
  Description of Artificial Sequence: Synthetic oligonucleotide
cccgcaucaccacaaagua

SEQ ID NO: 1093717 - RNA, 19 nt, Artificial Sequence
  Description of Artificial Sequence: Synthetic oligonucleotide
uugcuccgccucagggcau

SEQ ID NO: 1093718 - RNA, 19 nt, Artificial Sequence
  Description of Artificial Sequence: Synthetic oligonucleotide
ggcggacuugucgauguga

SEQ ID NO: 1093719 - RNA, 19 nt, Artificial Sequence
  Description of Artificial Sequence: Synthetic oligonucleotide
uggcgcaccugcgcuucca

SEQ ID NO: 1093720 - RNA, 19 nt, Artificial Sequence
  Description of Artificial Sequence: Synthetic oligonucleotide
cagcucucguuggggcagg

SEQ ID NO: 1093721 - RNA, 19 nt, Artificial Sequence
  Description of Artificial Sequence: Synthetic oligonucleotide
gcaagucagugaccaccac

SEQ ID NO: 1093722 - RNA, 19 nt, Artificial Sequence
  Description of Artificial Sequence: Synthetic oligonucleotide
auacggcaagguguucauu

SEQ ID NO: 1093723 - RNA, 19 nt, Artificial Sequence
  Description of Artificial Sequence: Synthetic oligonucleotide
gcguuucuugcaguagaca

SEQ ID NO: 1093724 - RNA, 19 nt, Artificial Sequence
  Description of Artificial Sequence: Synthetic oligonucleotide
cuggcgcaccugcgcuucc

SEQ ID NO: 1093725 - RNA, 19 nt, Artificial Sequence
  Description of Artificial Sequence: Synthetic oligonucleotide
gccuuguaaucugucaccu

SEQ ID NO: 1093726 - RNA, 19 nt, Artificial Sequence
  Description of Artificial Sequence: Synthetic oligonucleotide
ugcuccgccucagggcaua

SEQ ID NO: 1093727 - RNA, 19 nt, Artificial Sequence
  Description of Artificial Sequence: Synthetic oligonucleotide
gcgucaugcuugcuggucu

SEQ ID NO: 1093728 - RNA, 19 nt, Artificial Sequence
  Description of Artificial Sequence: Synthetic oligonucleotide
agggcacggcuuggaagga

SEQ ID NO: 1093729 - RNA, 19 nt, Artificial Sequence
  Description of Artificial Sequence: Synthetic oligonucleotide
cgacaugccccuccacggc

SEQ ID NO: 1093730 - RNA, 19 nt, Artificial Sequence
  Description of Artificial Sequence: Synthetic oligonucleotide
ccggcagcucucguugggg

SEQ ID NO: 1093731 - RNA, 19 nt, Artificial Sequence
  Description of Artificial Sequence: Synthetic oligonucleotide
  modified_base (5)..(5): a, c, u, g, unknown or other
cggcncuguguuccguucc

SEQ ID NO: 1093732 - RNA, 19 nt, Artificial Sequence
  Description of Artificial Sequence: Synthetic oligonucleotide
cgaaucuauuuugcugcug

SEQ ID NO: 1093733 - RNA, 19 nt, Artificial Sequence
  Description of Artificial Sequence: Synthetic oligonucleotide
gggcacggcuuggaaggag

SEQ ID NO: 1093734 - RNA, 19 nt, Artificial Sequence
  Description of Artificial Sequence: Synthetic oligonucleotide
cgaggaaacuuccauuccu

SEQ ID NO: 1093735 - RNA, 19 nt, Artificial Sequence
  Description of Artificial Sequence: Synthetic oligonucleotide
  modified_base (13)..(13): a, c, u, g, unknown or other
gggcagaucggcncugugu

SEQ ID NO: 1093736 - RNA, 19 nt, Artificial Sequence
  Description of Artificial Sequence: Synthetic oligonucleotide
  modified_base (8)..(8): a, c, u, g, unknown or other
gaucggcncuguguuccgu

SEQ ID NO: 1093737 - RNA, 19 nt, Artificial Sequence
  Description of Artificial Sequence: Synthetic oligonucleotide
ggacguuugcgaggaaacu

SEQ ID NO: 1093738 - RNA, 19 nt, Artificial Sequence
  Description of Artificial Sequence: Synthetic oligonucleotide
gguaugcaggacacaaguu

SEQ ID NO: 1093739 - RNA, 19 nt, Artificial Sequence
  Description of Artificial Sequence: Synthetic oligonucleotide
gugcccacacgcccgucgu

SEQ ID NO: 1093740 - RNA, 19 nt, Artificial Sequence
  Description of Artificial Sequence: Synthetic oligonucleotide
ccaggcggacuugucgaug

SEQ ID NO: 1093741 - RNA, 19 nt, Artificial Sequence
  Description of Artificial Sequence: Synthetic oligonucleotide
cagauccuccaagucaguu

SEQ ID NO: 1093742 - RNA, 19 nt, Artificial Sequence
  Description of Artificial Sequence: Synthetic oligonucleotide
gcacggcuuggaaggagca

SEQ ID NO: 1093743 - RNA, 19 nt, Artificial Sequence
  Description of Artificial Sequence: Synthetic oligonucleotide
gcggggacagccagaggca

SEQ ID NO: 1093744 - RNA, 19 nt, Artificial Sequence
  Description of Artificial Sequence: Synthetic oligonucleotide
cccgucaggucuucugaaa

SEQ ID NO: 1093745 - RNA, 19 nt, Artificial Sequence
  Description of Artificial Sequence: Synthetic oligonucleotide
gcuguucuaguuggaaguu

SEQ ID NO: 1093746 - RNA, 19 nt, Artificial Sequence
  Description of Artificial Sequence: Synthetic oligonucleotide
cgauaacacucagacacua

SEQ ID NO: 1093747 - RNA, 19 nt, Artificial Sequence
  Description of Artificial Sequence: Synthetic oligonucleotide
caccccgcaucaccacaaa

SEQ ID NO: 1093748 - RNA, 19 nt, Artificial Sequence
  Description of Artificial Sequence: Synthetic oligonucleotide
caggggcguuucuugcagu

SEQ ID NO: 1093749 - RNA, 19 nt, Artificial Sequence
  Description of Artificial Sequence: Synthetic oligonucleotide
cacaucccucuugcaguaa

SEQ ID NO: 1093750 - RNA, 19 nt, Artificial Sequence
  Description of Artificial Sequence: Synthetic oligonucleotide
ggcauacggcaagguguuc

SEQ ID NO: 1093751 - RNA, 19 nt, Artificial Sequence
  Description of Artificial Sequence: Synthetic oligonucleotide
gggcauacggcaagguguu

SEQ ID NO: 1093752 - RNA, 19 nt, Artificial Sequence
  Description of Artificial Sequence: Synthetic oligonucleotide
ccucucggaacuggcagua

SEQ ID NO: 1093753 - RNA, 19 nt, Artificial Sequence
  Description of Artificial Sequence: Synthetic oligonucleotide
cgcuuccaccagagagugc

SEQ ID NO: 1093754 - RNA, 19 nt, Artificial Sequence
  Description of Artificial Sequence: Synthetic oligonucleotide
guggucccgcagggcugcc

SEQ ID NO: 1093755 - RNA, 19 nt, Artificial Sequence
  Description of Artificial Sequence: Synthetic oligonucleotide
ccguucccucagagacagg

SEQ ID NO: 1093756 - RNA, 19 nt, Artificial Sequence
  Description of Artificial Sequence: Synthetic oligonucleotide
ggacagccagaggcaaugu

SEQ ID NO: 1093757 - RNA, 19 nt, Artificial Sequence
  Description of Artificial Sequence: Synthetic oligonucleotide
gcgcuuccagccaggcgga

SEQ ID NO: 1093758 - RNA, 19 nt, Artificial Sequence
  Description of Artificial Sequence: Synthetic oligonucleotide
  modified_base (3)..(3): a, c, u, g, unknown or other
gcncuguguuccguucccu

SEQ ID NO: 1093759 - RNA, 19 nt, Artificial Sequence
  Description of Artificial Sequence: Synthetic oligonucleotide
ccagagagugcaggucgaa

SEQ ID NO: 1093760 - RNA, 19 nt, Artificial Sequence
  Description of Artificial Sequence: Synthetic oligonucleotide
gccgguagccacagcggcu

SEQ ID NO: 1093761 - RNA, 19 nt, Artificial Sequence
  Description of Artificial Sequence: Synthetic oligonucleotide
cucucggaacuggcaguau

SEQ ID NO: 1093762 - RNA, 19 nt, Artificial Sequence
  Description of Artificial Sequence: Synthetic oligonucleotide
ccgaugacaaaagcauguu

SEQ ID NO: 1093763 - RNA, 19 nt, Artificial Sequence
  Description of Artificial Sequence: Synthetic oligonucleotide
gcuccgccucagggcauac

SEQ ID NO: 1093764 - RNA, 19 nt, Artificial Sequence
  Description of Artificial Sequence: Synthetic oligonucleotide
cgugauccugcaagucagu

SEQ ID NO: 1093765 - RNA, 19 nt, Artificial Sequence
  Description of Artificial Sequence: Synthetic oligonucleotide
cggacuugucgaugugacu

SEQ ID NO: 1093766 - RNA, 19 nt, Artificial Sequence
  Description of Artificial Sequence: Synthetic oligonucleotide
cacuggcuuccagcagggu

SEQ ID NO: 1093767 - RNA, 19 nt, Artificial Sequence
  Description of Artificial Sequence: Synthetic oligonucleotide
gcggugcccacacgcccgu

SEQ ID NO: 1093768 - RNA, 19 nt, Artificial Sequence
  Description of Artificial Sequence: Synthetic oligonucleotide
cccauucagguaggcccua

SEQ ID NO: 1093769 - RNA, 19 nt, Artificial Sequence
  Description of Artificial Sequence: Synthetic oligonucleotide
cggacacgacaugccccuc

SEQ ID NO: 1093770 - RNA, 19 nt, Artificial Sequence
  Description of Artificial Sequence: Synthetic oligonucleotide
ccuugucuacggggcagau

SEQ ID NO: 1093771 - RNA, 19 nt, Artificial Sequence
  Description of Artificial Sequence: Synthetic oligonucleotide
uuaugaaccguuuauaucg

SEQ ID NO: 1093772 - RNA, 19 nt, Artificial Sequence
  Description of Artificial Sequence: Synthetic oligonucleotide
auaacaauagccuagcuag

SEQ ID NO: 1093773 - RNA, 19 nt, Artificial Sequence
  Description of Artificial Sequence: Synthetic oligonucleotide
uuaagauucaacacgaggc

SEQ ID NO: 1093774 - RNA, 19 nt, Artificial Sequence
  Description of Artificial Sequence: Synthetic oligonucleotide
aaauguguggcccugguac

SEQ ID NO: 1093775 - RNA, 19 nt, Artificial Sequence
  Description of Artificial Sequence: Synthetic oligonucleotide
ucuuaguccacacaguugg

SEQ ID NO: 1093776 - RNA, 19 nt, Artificial Sequence
  Description of Artificial Sequence: Synthetic oligonucleotide
auagauaguauauacaucu

SEQ ID NO: 1093777 - RNA, 19 nt, Artificial Sequence
  Description of Artificial Sequence: Synthetic oligonucleotide
uuuaagauucaacacgagg

SEQ ID NO: 1093778 - RNA, 19 nt, Artificial Sequence
  Description of Artificial Sequence: Synthetic oligonucleotide
agugauauaaaaccggccg

SEQ ID NO: 1093779 - RNA, 19 nt, Artificial Sequence
  Description of Artificial Sequence: Synthetic oligonucleotide
aaugauuaguaauaacgag

SEQ ID NO: 1093780 - RNA, 19 nt, Artificial Sequence
  Description of Artificial Sequence: Synthetic oligonucleotide
aaaaguguuauaaauaggu

SEQ ID NO: 1093781 - RNA, 19 nt, Artificial Sequence
  Description of Artificial Sequence: Synthetic oligonucleotide
ugagauuuauuuaucguag

SEQ ID NO: 1093782 - RNA, 19 nt, Artificial Sequence
  Description of Artificial Sequence: Synthetic oligonucleotide
ucaauugacagcaauuccc

SEQ ID NO: 1093783 - RNA, 19 nt, Artificial Sequence
  Description of Artificial Sequence: Synthetic oligonucleotide
uucaacacgaggcugacag

SEQ ID NO: 1093784 - RNA, 19 nt, Artificial Sequence
  Description of Artificial Sequence: Synthetic oligonucleotide
ugauuaguaauaacgagga

SEQ ID NO: 1093785 - RNA, 19 nt, Artificial Sequence
  Description of Artificial Sequence: Synthetic oligonucleotide
aaauagguuuuauaaacca

SEQ ID NO: 1093786 - RNA, 19 nt, Artificial Sequence
  Description of Artificial Sequence: Synthetic oligonucleotide
gagucuuagcaucagaagg

SEQ ID NO: 1093787 - RNA, 19 nt, Artificial Sequence
  Description of Artificial Sequence: Synthetic oligonucleotide
ugaguagcaaugcuggacg

SEQ ID NO: 1093788 - RNA, 19 nt, Artificial Sequence
  Description of Artificial Sequence: Synthetic oligonucleotide
augguaaaucuauagcacc

SEQ ID NO: 1093789 - RNA, 19 nt, Artificial Sequence
  Description of Artificial Sequence: Synthetic oligonucleotide
aaggacaugguacaguucu

SEQ ID NO: 1093790 - RNA, 19 nt, Artificial Sequence
  Description of Artificial Sequence: Synthetic oligonucleotide
uaaauagguuuuauaaacc

SEQ ID NO: 1093791 - RNA, 19 nt, Artificial Sequence
  Description of Artificial Sequence: Synthetic oligonucleotide
uuuaucguaguaauaacaa

SEQ ID NO: 1093792 - RNA, 19 nt, Artificial Sequence
  Description of Artificial Sequence: Synthetic oligonucleotide
uguuaauugaguuuccagu

SEQ ID NO: 1093793 - RNA, 19 nt, Artificial Sequence
  Description of Artificial Sequence: Synthetic oligonucleotide
aaguguuauaaauagguuu

SEQ ID NO: 1093794 - RNA, 19 nt, Artificial Sequence
  Description of Artificial Sequence: Synthetic oligonucleotide
ucauaaaacuguuaauuga

SEQ ID NO: 1093795 - RNA, 19 nt, Artificial Sequence
  Description of Artificial Sequence: Synthetic oligonucleotide
agauaguauauacaucuuc

SEQ ID NO: 1093796 - RNA, 19 nt, Artificial Sequence
  Description of Artificial Sequence: Synthetic oligonucleotide
uccagugauauaaaaccgg

SEQ ID NO: 1093797 - RNA, 19 nt, Artificial Sequence
  Description of Artificial Sequence: Synthetic oligonucleotide
uuuggaagaauccagugau

SEQ ID NO: 1093798 - RNA, 19 nt, Artificial Sequence
  Description of Artificial Sequence: Synthetic oligonucleotide
aacaauccuauguacauau

SEQ ID NO: 1093799 - RNA, 19 nt, Artificial Sequence
  Description of Artificial Sequence: Synthetic oligonucleotide
augauuaguaauaacgagg

SEQ ID NO: 1093800 - RNA, 19 nt, Artificial Sequence
  Description of Artificial Sequence: Synthetic oligonucleotide
ugccucaccguguagaugg

SEQ ID NO: 1093801 - RNA, 19 nt, Artificial Sequence
  Description of Artificial Sequence: Synthetic oligonucleotide
acgaaagcgguuaugaacc

SEQ ID NO: 1093802 - RNA, 19 nt, Artificial Sequence
  Description of Artificial Sequence: Synthetic oligonucleotide
agauguaaaguucuuuaag

SEQ ID NO: 1093803 - RNA, 19 nt, Artificial Sequence
  Description of Artificial Sequence: Synthetic oligonucleotide
uuuccguaggaucacguag

SEQ ID NO: 1093804 - RNA, 19 nt, Artificial Sequence
  Description of Artificial Sequence: Synthetic oligonucleotide
aguaauaacaauagccuag

SEQ ID NO: 1093805 - RNA, 19 nt, Artificial Sequence
  Description of Artificial Sequence: Synthetic oligonucleotide
aggaaugguaaaucuauag

SEQ ID NO: 1093806 - RNA, 19 nt, Artificial Sequence
  Description of Artificial Sequence: Synthetic oligonucleotide
cauugacugacgauggugg

SEQ ID NO: 1093807 - RNA, 19 nt, Artificial Sequence
  Description of Artificial Sequence: Synthetic oligonucleotide
uucaacugcguucuguuug

SEQ ID NO: 1093808 - RNA, 19 nt, Artificial Sequence
  Description of Artificial Sequence: Synthetic oligonucleotide
auuaguaauaacgaggaau

SEQ ID NO: 1093809 - RNA, 19 nt, Artificial Sequence
  Description of Artificial Sequence: Synthetic oligonucleotide
aagauacugagcuugguua

SEQ ID NO: 1093810 - RNA, 19 nt, Artificial Sequence
  Description of Artificial Sequence: Synthetic oligonucleotide
uauacaucuacaguuggug

SEQ ID NO: 1093811 - RNA, 19 nt, Artificial Sequence
  Description of Artificial Sequence: Synthetic oligonucleotide
uucaauugacagcaauucc

SEQ ID NO: 1093812 - RNA, 19 nt, Artificial Sequence
  Description of Artificial Sequence: Synthetic oligonucleotide
ucuaccucaugucauaaaa

SEQ ID NO: 1093813 - RNA, 19 nt, Artificial Sequence
  Description of Artificial Sequence: Synthetic oligonucleotide
ugacuuccuauuuaaaugu

SEQ ID NO: 1093814 - RNA, 19 nt, Artificial Sequence
  Description of Artificial Sequence: Synthetic oligonucleotide
auccuauguacauauaugu

SEQ ID NO: 1093815 - RNA, 19 nt, Artificial Sequence
  Description of Artificial Sequence: Synthetic oligonucleotide
cguaguaauaacaauagcc

SEQ ID NO: 1093816 - RNA, 19 nt, Artificial Sequence
  Description of Artificial Sequence: Synthetic oligonucleotide
uaugguguuaagauguaaa

SEQ ID NO: 1093817 - RNA, 19 nt, Artificial Sequence
  Description of Artificial Sequence: Synthetic oligonucleotide
aucuauagcaccauuucac

SEQ ID NO: 1093818 - RNA, 19 nt, Artificial Sequence
  Description of Artificial Sequence: Synthetic oligonucleotide
aacgaggaaugguaaaucu

SEQ ID NO: 1093819 - RNA, 19 nt, Artificial Sequence
  Description of Artificial Sequence: Synthetic oligonucleotide
ucacgcaaagaccagcaag

SEQ ID NO: 1093820 - RNA, 19 nt, Artificial Sequence
  Description of Artificial Sequence: Synthetic oligonucleotide
cuagcuagguacgaaagcg

SEQ ID NO: 1093821 - RNA, 19 nt, Artificial Sequence
  Description of Artificial Sequence: Synthetic oligonucleotide
cuuagcaucagaagggcac

SEQ ID NO: 1093822 - RNA, 19 nt, Artificial Sequence
  Description of Artificial Sequence: Synthetic oligonucleotide
cacgcaaagaccagcaagg

SEQ ID NO: 1093823 - RNA, 19 nt, Artificial Sequence
  Description of Artificial Sequence: Synthetic oligonucleotide
caacggacacucuagaccc

SEQ ID NO: 1093824 - RNA, 19 nt, Artificial Sequence
  Description of Artificial Sequence: Synthetic oligonucleotide
uaugaaccguuuauaucgg

SEQ ID NO: 1093825 - RNA, 19 nt, Artificial Sequence
  Description of Artificial Sequence: Synthetic oligonucleotide
uuuuagaugaaaggggcca

SEQ ID NO: 1093826 - RNA, 19 nt, Artificial Sequence
  Description of Artificial Sequence: Synthetic oligonucleotide
cuuccuauuuaaaugugug

SEQ ID NO: 1093827 - RNA, 19 nt, Artificial Sequence
  Description of Artificial Sequence: Synthetic oligonucleotide
uccuaugagguugaguggg

SEQ ID NO: 1093828 - RNA, 19 nt, Artificial Sequence
  Description of Artificial Sequence: Synthetic oligonucleotide
uacaucuacaguugguggc

SEQ ID NO: 1093829 - RNA, 19 nt, Artificial Sequence
  Description of Artificial Sequence: Synthetic oligonucleotide
uggugcuucgucaagcacc

SEQ ID NO: 1093830 - RNA, 19 nt, Artificial Sequence
  Description of Artificial Sequence: Synthetic oligonucleotide
uguaggcgaagccauagga

SEQ ID NO: 1093831 - RNA, 19 nt, Artificial Sequence
  Description of Artificial Sequence: Synthetic oligonucleotide
ugagugguuuaaaugauua

SEQ ID NO: 1093832 - RNA, 19 nt, Artificial Sequence
  Description of Artificial Sequence: Synthetic oligonucleotide
ucacguuuccguaggauca

SEQ ID NO: 1093833 - RNA, 19 nt, Artificial Sequence
  Description of Artificial Sequence: Synthetic oligonucleotide
aucacguagauaaugccac

SEQ ID NO: 1093834 - RNA, 19 nt, Artificial Sequence
  Description of Artificial Sequence: Synthetic oligonucleotide
uauuuaucguaguaauaac

SEQ ID NO: 1093835 - RNA, 19 nt, Artificial Sequence
  Description of Artificial Sequence: Synthetic oligonucleotide
cugacgaugaguagcaaug

SEQ ID NO: 1093836 - RNA, 19 nt, Artificial Sequence
  Description of Artificial Sequence: Synthetic oligonucleotide
aggaucacguagauaaugc

SEQ ID NO: 1093837 - RNA, 19 nt, Artificial Sequence
  Description of Artificial Sequence: Synthetic oligonucleotide
auuuuagaugaaaggggcc

SEQ ID NO: 1093838 - RNA, 19 nt, Artificial Sequence
  Description of Artificial Sequence: Synthetic oligonucleotide
agccagggaacucacaguc

SEQ ID NO: 1093839 - RNA, 19 nt, Artificial Sequence
  Description of Artificial Sequence: Synthetic oligonucleotide
uugaguuuccagugagugg

SEQ ID NO: 1093840 - RNA, 19 nt, Artificial Sequence
  Description of Artificial Sequence: Synthetic oligonucleotide
uguccauugcccgugagcc

SEQ ID NO: 1093841 - RNA, 19 nt, Artificial Sequence
  Description of Artificial Sequence: Synthetic oligonucleotide
caguugguauaaaauacag

SEQ ID NO: 1093842 - RNA, 19 nt, Artificial Sequence
  Description of Artificial Sequence: Synthetic oligonucleotide
gguaucugauuuuagauga

SEQ ID NO: 1093843 - RNA, 19 nt, Artificial Sequence
  Description of Artificial Sequence: Synthetic oligonucleotide
auugaguuuccagugagug

SEQ ID NO: 1093844 - RNA, 19 nt, Artificial Sequence
  Description of Artificial Sequence: Synthetic oligonucleotide
aauagccuagcuagguacg

SEQ ID NO: 1093845 - RNA, 19 nt, Artificial Sequence
  Description of Artificial Sequence: Synthetic oligonucleotide
aaaccggccgccuuuggug

SEQ ID NO: 1093846 - RNA, 19 nt, Artificial Sequence
  Description of Artificial Sequence: Synthetic oligonucleotide
uagcuagguacgaaagcgg

SEQ ID NO: 1093847 - RNA, 19 nt, Artificial Sequence
  Description of Artificial Sequence: Synthetic oligonucleotide
caauagccuagcuagguac

SEQ ID NO: 1093848 - RNA, 19 nt, Artificial Sequence
  Description of Artificial Sequence: Synthetic oligonucleotide
acaucuacaguugguggcc

SEQ ID NO: 1093849 - RNA, 19 nt, Artificial Sequence
  Description of Artificial Sequence: Synthetic oligonucleotide
aguaauaacgaggaauggu

SEQ ID NO: 1093850 - RNA, 19 nt, Artificial Sequence
  Description of Artificial Sequence: Synthetic oligonucleotide
uaauaacgaggaaugguaa

SEQ ID NO: 1093851 - RNA, 19 nt, Artificial Sequence
  Description of Artificial Sequence: Synthetic oligonucleotide
auuuaucguaguaauaaca

SEQ ID NO: 1093852 - RNA, 19 nt, Artificial Sequence
  Description of Artificial Sequence: Synthetic oligonucleotide
ggacaaguguuccagagcc

SEQ ID NO: 1093853 - RNA, 19 nt, Artificial Sequence
  Description of Artificial Sequence: Synthetic oligonucleotide
aguguuggcaugccacucg

SEQ ID NO: 1093854 - RNA, 19 nt, Artificial Sequence
  Description of Artificial Sequence: Synthetic oligonucleotide
ucguaguaauaacaauagc

SEQ ID NO: 1093855 - RNA, 19 nt, Artificial Sequence
  Description of Artificial Sequence: Synthetic oligonucleotide
cuguuaauugaguuuccag

SEQ ID NO: 1093856 - RNA, 19 nt, Artificial Sequence
  Description of Artificial Sequence: Synthetic oligonucleotide
cuauagcaccauuucacag

SEQ ID NO: 1093857 - RNA, 19 nt, Artificial Sequence
  Description of Artificial Sequence: Synthetic oligonucleotide
aggcacaaacuccagcgcg

SEQ ID NO: 1093858 - RNA, 19 nt, Artificial Sequence
  Description of Artificial Sequence: Synthetic oligonucleotide
uaggcgaagccauaggagu

SEQ ID NO: 1093859 - RNA, 19 nt, Artificial Sequence
  Description of Artificial Sequence: Synthetic oligonucleotide
guuaugaaccguuuauauc

SEQ ID NO: 1093860 - RNA, 19 nt, Artificial Sequence
  Description of Artificial Sequence: Synthetic oligonucleotide
uaguaauaacaauagccua

SEQ ID NO: 1093861 - RNA, 19 nt, Artificial Sequence
  Description of Artificial Sequence: Synthetic oligonucleotide
ucgucaagcaccucauuca

SEQ ID NO: 1093862 - RNA, 19 nt, Artificial Sequence
  Description of Artificial Sequence: Synthetic oligonucleotide
ugaaccguuuauaucgguc

SEQ ID NO: 1093863 - RNA, 19 nt, Artificial Sequence
  Description of Artificial Sequence: Synthetic oligonucleotide
ugguuauccuaugagguug

SEQ ID NO: 1093864 - RNA, 19 nt, Artificial Sequence
  Description of Artificial Sequence: Synthetic oligonucleotide
ugguuaugguguuaagaug

SEQ ID NO: 1093865 - RNA, 19 nt, Artificial Sequence
  Description of Artificial Sequence: Synthetic oligonucleotide
aauuccccauucaacugcg

SEQ ID NO: 1093866 - RNA, 19 nt, Artificial Sequence
  Description of Artificial Sequence: Synthetic oligonucleotide
auaucggucuccauucuac

SEQ ID NO: 1093867 - RNA, 19 nt, Artificial Sequence
  Description of Artificial Sequence: Synthetic oligonucleotide
gaccgggagaaacuguggg

SEQ ID NO: 1093868 - RNA, 19 nt, Artificial Sequence
  Description of Artificial Sequence: Synthetic oligonucleotide
aagauucaacacgaggcug

SEQ ID NO: 1093869 - RNA, 19 nt, Artificial Sequence
  Description of Artificial Sequence: Synthetic oligonucleotide
aguguuauaaauagguuuu

SEQ ID NO: 1093870 - RNA, 19 nt, Artificial Sequence
  Description of Artificial Sequence: Synthetic oligonucleotide
agucguguguccauugccc

SEQ ID NO: 1093871 - RNA, 19 nt, Artificial Sequence
  Description of Artificial Sequence: Synthetic oligonucleotide
uuccguaggaucacguaga

SEQ ID NO: 1093872 - RNA, 19 nt, Artificial Sequence
  Description of Artificial Sequence: Synthetic oligonucleotide
agcacugcgacguggagga

SEQ ID NO: 1093873 - RNA, 19 nt, Artificial Sequence
  Description of Artificial Sequence: Synthetic oligonucleotide
guaguaauaacaauagccu

SEQ ID NO: 1093874 - RNA, 19 nt, Artificial Sequence
  Description of Artificial Sequence: Synthetic oligonucleotide
auccagugauauaaaaccg

SEQ ID NO: 1093875 - RNA, 19 nt, Artificial Sequence
  Description of Artificial Sequence: Synthetic oligonucleotide
uugggcucgggaucggugg

SEQ ID NO: 1093876 - RNA, 19 nt, Artificial Sequence
  Description of Artificial Sequence: Synthetic oligonucleotide
uaggaucacguagauaaug

SEQ ID NO: 1093877 - RNA, 19 nt, Artificial Sequence
  Description of Artificial Sequence: Synthetic oligonucleotide
gauccccaacaacaguagg

SEQ ID NO: 1093878 - RNA, 19 nt, Artificial Sequence
  Description of Artificial Sequence: Synthetic oligonucleotide
gaucacguagauaaugcca

SEQ ID NO: 1093879 - RNA, 19 nt, Artificial Sequence
  Description of Artificial Sequence: Synthetic oligonucleotide
cacacagcaauucggggag

SEQ ID NO: 1093880 - RNA, 19 nt, Artificial Sequence
  Description of Artificial Sequence: Synthetic oligonucleotide
auugccagacaguccuugg

SEQ ID NO: 1093881 - RNA, 19 nt, Artificial Sequence
  Description of Artificial Sequence: Synthetic oligonucleotide
cagugauauaaaaccggcc

SEQ ID NO: 1093882 - RNA, 19 nt, Artificial Sequence
  Description of Artificial Sequence: Synthetic oligonucleotide
ucugccugcaaggacaagu

SEQ ID NO: 1093883 - RNA, 19 nt, Artificial Sequence
  Description of Artificial Sequence: Synthetic oligonucleotide
cuuuaagauucaacacgag

SEQ ID NO: 1093884 - RNA, 19 nt, Artificial Sequence
  Description of Artificial Sequence: Synthetic oligonucleotide
aguagcaaugcuggacggc

SEQ ID NO: 1093885 - RNA, 19 nt, Artificial Sequence
  Description of Artificial Sequence: Synthetic oligonucleotide
cuaccucaugucauaaaac

SEQ ID NO: 1093886 - RNA, 19 nt, Artificial Sequence
  Description of Artificial Sequence: Synthetic oligonucleotide
auccuaugagguugagugg

SEQ ID NO: 1093887 - RNA, 19 nt, Artificial Sequence
  Description of Artificial Sequence: Synthetic oligonucleotide
accguuuauaucggucucc

SEQ ID NO: 1093888 - RNA, 19 nt, Artificial Sequence
  Description of Artificial Sequence: Synthetic oligonucleotide
uuaauguaucuuaguccac

SEQ ID NO: 1093889 - RNA, 19 nt, Artificial Sequence
  Description of Artificial Sequence: Synthetic oligonucleotide
aaaguguuauaaauagguu

SEQ ID NO: 1093890 - RNA, 19 nt, Artificial Sequence
  Description of Artificial Sequence: Synthetic oligonucleotide
ucucagagcagaguggccu

SEQ ID NO: 1093891 - RNA, 19 nt, Artificial Sequence
  Description of Artificial Sequence: Synthetic oligonucleotide
gaguagcaaugcuggacgg

SEQ ID NO: 1093892 - RNA, 19 nt, Artificial Sequence
  Description of Artificial Sequence: Synthetic oligonucleotide
cacucuagacccagcaagc

SEQ ID NO: 1093893 - RNA, 19 nt, Artificial Sequence
  Description of Artificial Sequence: Synthetic oligonucleotide
acucaucacgcaaagacca

SEQ ID NO: 1093894 - RNA, 19 nt, Artificial Sequence
  Description of Artificial Sequence: Synthetic oligonucleotide
agacggauggugcuucguc

SEQ ID NO: 1093895 - RNA, 19 nt, Artificial Sequence
  Description of Artificial Sequence: Synthetic oligonucleotide
guuggcaugccacucgcug

SEQ ID NO: 1093896 - RNA, 19 nt, Artificial Sequence
  Description of Artificial Sequence: Synthetic oligonucleotide
gcacucaucacgcaaagac

SEQ ID NO: 1093897 - RNA, 19 nt, Artificial Sequence
  Description of Artificial Sequence: Synthetic oligonucleotide
auauuccugcuaaaugcac

SEQ ID NO: 1093898 - RNA, 19 nt, Artificial Sequence
  Description of Artificial Sequence: Synthetic oligonucleotide
guaauaacgaggaauggua

SEQ ID NO: 1093899 - RNA, 19 nt, Artificial Sequence
  Description of Artificial Sequence: Synthetic oligonucleotide
cucgcugacgaugaguagc

SEQ ID NO: 1093900 - RNA, 19 nt, Artificial Sequence
  Description of Artificial Sequence: Synthetic oligonucleotide
uuagcaucagaagggcacc

SEQ ID NO: 1093901 - RNA, 19 nt, Artificial Sequence
  Description of Artificial Sequence: Synthetic oligonucleotide
ucagucguguguccauugc

SEQ ID NO: 1093902 - RNA, 19 nt, Artificial Sequence
  Description of Artificial Sequence: Synthetic oligonucleotide
gcaacggacacucuagacc

SEQ ID NO: 1093903 - RNA, 19 nt, Artificial Sequence
  Description of Artificial Sequence: Synthetic oligonucleotide
gacguggaggaacaggauc

SEQ ID NO: 1093904 - RNA, 19 nt, Artificial Sequence
  Description of Artificial Sequence: Synthetic oligonucleotide
ugacugacgaugguggaga

SEQ ID NO: 1093905 - RNA, 19 nt, Artificial Sequence
  Description of Artificial Sequence: Synthetic oligonucleotide
cuagacacuugucccaaug

SEQ ID NO: 1093906 - RNA, 19 nt, Artificial Sequence
  Description of Artificial Sequence: Synthetic oligonucleotide
aaugcuggacggcuccaga

SEQ ID NO: 1093907 - RNA, 19 nt, Artificial Sequence
  Description of Artificial Sequence: Synthetic oligonucleotide
agauacugagcuugguuau

SEQ ID NO: 1093908 - RNA, 19 nt, Artificial Sequence
  Description of Artificial Sequence: Synthetic oligonucleotide
uuuagaugaaaggggccac

SEQ ID NO: 1093909 - RNA, 19 nt, Artificial Sequence
  Description of Artificial Sequence: Synthetic oligonucleotide
uaucugauuuuagaugaaa

SEQ ID NO: 1093910 - RNA, 19 nt, Artificial Sequence
  Description of Artificial Sequence: Synthetic oligonucleotide
uuauaucggucuccauucu

SEQ ID NO: 1093911 - RNA, 19 nt, Artificial Sequence
  Description of Artificial Sequence: Synthetic oligonucleotide
gaaccguuuauaucggucu

SEQ ID NO: 1093912 - RNA, 19 nt, Artificial Sequence
  Description of Artificial Sequence: Synthetic oligonucleotide
acguagauaaugccacuga

SEQ ID NO: 1093913 - RNA, 19 nt, Artificial Sequence
  Description of Artificial Sequence: Synthetic oligonucleotide
acgaacagcaacacuagca

SEQ ID NO: 1093914 - RNA, 19 nt, Artificial Sequence
  Description of Artificial Sequence: Synthetic oligonucleotide
uagcacugcgacguggagg

SEQ ID NO: 1093915 - RNA, 19 nt, Artificial Sequence
  Description of Artificial Sequence: Synthetic oligonucleotide
ucgcugacgaugaguagca

SEQ ID NO: 1093916 - RNA, 19 nt, Artificial Sequence
  Description of Artificial Sequence: Synthetic oligonucleotide
cugucucagagcagagugg

SEQ ID NO: 1093917 - RNA, 19 nt, Artificial Sequence
  Description of Artificial Sequence: Synthetic oligonucleotide
cguaggaucacguagauaa

SEQ ID NO: 1093918 - RNA, 19 nt, Artificial Sequence
  Description of Artificial Sequence: Synthetic oligonucleotide
ggagucuuagcaucagaag

SEQ ID NO: 1093919 - RNA, 19 nt, Artificial Sequence
  Description of Artificial Sequence: Synthetic oligonucleotide
agagccuagacggauggug

SEQ ID NO: 1093920 - RNA, 19 nt, Artificial Sequence
  Description of Artificial Sequence: Synthetic oligonucleotide
cucaccguguagauggcug

SEQ ID NO: 1093921 - RNA, 19 nt, Artificial Sequence
  Description of Artificial Sequence: Synthetic oligonucleotide
auguaggcgaagccauagg

SEQ ID NO: 1093922 - RNA, 19 nt, Artificial Sequence
  Description of Artificial Sequence: Synthetic oligonucleotide
uauaucggucuccauucua

SEQ ID NO: 1093923 - RNA, 19 nt, Artificial Sequence
  Description of Artificial Sequence: Synthetic oligonucleotide
uccccauucaacugcguuc

SEQ ID NO: 1093924 - RNA, 19 nt, Artificial Sequence
  Description of Artificial Sequence: Synthetic oligonucleotide
gucauugccagacaguccu

SEQ ID NO: 1093925 - RNA, 19 nt, Artificial Sequence
  Description of Artificial Sequence: Synthetic oligonucleotide
ucaucacgcaaagaccagc

SEQ ID NO: 1093926 - RNA, 19 nt, Artificial Sequence
  Description of Artificial Sequence: Synthetic oligonucleotide
acgaugaguagcaaugcug

SEQ ID NO: 1093927 - RNA, 19 nt, Artificial Sequence
  Description of Artificial Sequence: Synthetic oligonucleotide
ucgguuuguuuucugguuu

SEQ ID NO: 1093928 - RNA, 19 nt, Artificial Sequence
  Description of Artificial Sequence: Synthetic oligonucleotide
agucauugccagacagucc

SEQ ID NO: 1093929 - RNA, 19 nt, Artificial Sequence
  Description of Artificial Sequence: Synthetic oligonucleotide
ugacgaugaguagcaaugc

SEQ ID NO: 1093930 - RNA, 19 nt, Artificial Sequence
  Description of Artificial Sequence: Synthetic oligonucleotide
ugcaaggacaaguguucca

SEQ ID NO: 1093931 - RNA, 19 nt, Artificial Sequence
  Description of Artificial Sequence: Synthetic oligonucleotide
ggggucuagacacuugucc

SEQ ID NO: 1093932 - RNA, 19 nt, Artificial Sequence
  Description of Artificial Sequence: Synthetic oligonucleotide
guaggcgaagccauaggag

SEQ ID NO: 1093933 - RNA, 19 nt, Artificial Sequence
  Description of Artificial Sequence: Synthetic oligonucleotide
gacgaacagcaacacuagc

SEQ ID NO: 1093934 - RNA, 19 nt, Artificial Sequence
  Description of Artificial Sequence: Synthetic oligonucleotide
cagcaauuccccauucaac

SEQ ID NO: 1093935 - RNA, 19 nt, Artificial Sequence
  Description of Artificial Sequence: Synthetic oligonucleotide
ugcgacguggaggaacagg

SEQ ID NO: 1093936 - RNA, 19 nt, Artificial Sequence
  Description of Artificial Sequence: Synthetic oligonucleotide
aaagcgguuaugaaccguu

SEQ ID NO: 1093937 - RNA, 19 nt, Artificial Sequence
  Description of Artificial Sequence: Synthetic oligonucleotide
uaaaaccggccgccuuugg

SEQ ID NO: 1093938 - RNA, 19 nt, Artificial Sequence
  Description of Artificial Sequence: Synthetic oligonucleotide
guagauaaugccacugaga

SEQ ID NO: 1093939 - RNA, 19 nt, Artificial Sequence
  Description of Artificial Sequence: Synthetic oligonucleotide
cuuagggcuccacacagca

SEQ ID NO: 1093940 - RNA, 19 nt, Artificial Sequence
  Description of Artificial Sequence: Synthetic oligonucleotide
uugccagacaguccuugga

SEQ ID NO: 1093941 - RNA, 19 nt, Artificial Sequence
  Description of Artificial Sequence: Synthetic oligonucleotide
uaacgaggaaugguaaauc

SEQ ID NO: 1093942 - RNA, 19 nt, Artificial Sequence
  Description of Artificial Sequence: Synthetic oligonucleotide
guguuaagauguaaaguuc

SEQ ID NO: 1093943 - RNA, 19 nt, Artificial Sequence
  Description of Artificial Sequence: Synthetic oligonucleotide
uggcaugccacucgcugug

SEQ ID NO: 1093944 - RNA, 19 nt, Artificial Sequence
  Description of Artificial Sequence: Synthetic oligonucleotide
gggucuagacacuuguccc

SEQ ID NO: 1093945 - RNA, 19 nt, Artificial Sequence
  Description of Artificial Sequence: Synthetic oligonucleotide
agauucaacacgaggcuga

SEQ ID NO: 1093946 - RNA, 19 nt, Artificial Sequence
  Description of Artificial Sequence: Synthetic oligonucleotide
cucgcugugccucaccgug

SEQ ID NO: 1093947 - RNA, 19 nt, Artificial Sequence
  Description of Artificial Sequence: Synthetic oligonucleotide
aaacaauccuauguacaua

SEQ ID NO: 1093948 - RNA, 19 nt, Artificial Sequence
  Description of Artificial Sequence: Synthetic oligonucleotide
acuuccuauuuaaaugugu

SEQ ID NO: 1093949 - RNA, 19 nt, Artificial Sequence
  Description of Artificial Sequence: Synthetic oligonucleotide
uucggggaguggauauucc

SEQ ID NO: 1093950 - RNA, 19 nt, Artificial Sequence
  Description of Artificial Sequence: Synthetic oligonucleotide
aucggucuccauucuaccu

SEQ ID NO: 1093951 - RNA, 19 nt, Artificial Sequence
  Description of Artificial Sequence: Synthetic oligonucleotide
acuguuaauugaguuucca

SEQ ID NO: 1093952 - RNA, 19 nt, Artificial Sequence
  Description of Artificial Sequence: Synthetic oligonucleotide
caugguggcugggaguugg

SEQ ID NO: 1093953 - RNA, 19 nt, Artificial Sequence
  Description of Artificial Sequence: Synthetic oligonucleotide
uucgguuuguuuucugguu

SEQ ID NO: 1093954 - RNA, 19 nt, Artificial Sequence
  Description of Artificial Sequence: Synthetic oligonucleotide
gacggauggugcuucguca

SEQ ID NO: 1093955 - RNA, 19 nt, Artificial Sequence
  Description of Artificial Sequence: Synthetic oligonucleotide
uaaauguguggcccuggua

SEQ ID NO: 1093956 - RNA, 19 nt, Artificial Sequence
  Description of Artificial Sequence: Synthetic oligonucleotide
caacacgaggcugacaguc

SEQ ID NO: 1093957 - RNA, 19 nt, Artificial Sequence
  Description of Artificial Sequence: Synthetic oligonucleotide
uuggcaugccacucgcugu

SEQ ID NO: 1093958 - RNA, 19 nt, Artificial Sequence
  Description of Artificial Sequence: Synthetic oligonucleotide
uccagcgcgaucucugggu

SEQ ID NO: 1093959 - RNA, 19 nt, Artificial Sequence
  Description of Artificial Sequence: Synthetic oligonucleotide
agccauugacugacgaugg

SEQ ID NO: 1093960 - RNA, 19 nt, Artificial Sequence
  Description of Artificial Sequence: Synthetic oligonucleotide
ggaucacguagauaaugcc

SEQ ID NO: 1093961 - RNA, 19 nt, Artificial Sequence
  Description of Artificial Sequence: Synthetic oligonucleotide
uuuguucgguuuguuuucu

SEQ ID NO: 1093962 - RNA, 19 nt, Artificial Sequence
  Description of Artificial Sequence: Synthetic oligonucleotide
gagccuagacggauggugc

SEQ ID NO: 1093963 - RNA, 19 nt, Artificial Sequence
  Description of Artificial Sequence: Synthetic oligonucleotide
cugagcuugguuauggugu

SEQ ID NO: 1093964 - RNA, 19 nt, Artificial Sequence
  Description of Artificial Sequence: Synthetic oligonucleotide
uuaugguguuaagauguaa

SEQ ID NO: 1093965 - RNA, 19 nt, Artificial Sequence
  Description of Artificial Sequence: Synthetic oligonucleotide
gauuaguaauaacgaggaa

SEQ ID NO: 1093966 - RNA, 19 nt, Artificial Sequence
  Description of Artificial Sequence: Synthetic oligonucleotide
acaggauccccaacaacag

SEQ ID NO: 1093967 - RNA, 19 nt, Artificial Sequence
  Description of Artificial Sequence: Synthetic oligonucleotide
gguacgaaagcgguuauga

SEQ ID NO: 1093968 - RNA, 19 nt, Artificial Sequence
  Description of Artificial Sequence: Synthetic oligonucleotide
gguuaugguguuaagaugu

SEQ ID NO: 1093969 - RNA, 19 nt, Artificial Sequence
  Description of Artificial Sequence: Synthetic oligonucleotide
cagucguguguccauugcc

SEQ ID NO: 1093970 - RNA, 19 nt, Artificial Sequence
  Description of Artificial Sequence: Synthetic oligonucleotide
aaccggccgccuuugguga

SEQ ID NO: 1093971 - RNA, 19 nt, Artificial Sequence
  Description of Artificial Sequence: Synthetic oligonucleotide
cucaucacgcaaagaccag

SEQ ID NO: 1093972 - RNA, 19 nt, Artificial Sequence
  Description of Artificial Sequence: Synthetic oligonucleotide
ucggggaguggauauuccu

SEQ ID NO: 1093973 - RNA, 19 nt, Artificial Sequence
  Description of Artificial Sequence: Synthetic oligonucleotide
agacgaacagcaacacuag

SEQ ID NO: 1093974 - RNA, 19 nt, Artificial Sequence
  Description of Artificial Sequence: Synthetic oligonucleotide
ugcccgugagccauugacu

SEQ ID NO: 1093975 - RNA, 19 nt, Artificial Sequence
  Description of Artificial Sequence: Synthetic oligonucleotide
cacucgcugugccucaccg

SEQ ID NO: 1093976 - RNA, 19 nt, Artificial Sequence
  Description of Artificial Sequence: Synthetic oligonucleotide
augaaaggggccacacggg

SEQ ID NO: 1093977 - RNA, 19 nt, Artificial Sequence
  Description of Artificial Sequence: Synthetic oligonucleotide
uagcaucagaagggcaccg

SEQ ID NO: 1093978 - RNA, 19 nt, Artificial Sequence
  Description of Artificial Sequence: Synthetic oligonucleotide
uugauuugaguugggguuu

SEQ ID NO: 1093979 - RNA, 19 nt, Artificial Sequence
  Description of Artificial Sequence: Synthetic oligonucleotide
acacuuugguuauccuaug

SEQ ID NO: 1093980 - RNA, 19 nt, Artificial Sequence
  Description of Artificial Sequence: Synthetic oligonucleotide
aucagaagggcaccguaua

SEQ ID NO: 1093981 - RNA, 19 nt, Artificial Sequence
  Description of Artificial Sequence: Synthetic oligonucleotide
caucacgcaaagaccagca

SEQ ID NO: 1093982 - RNA, 19 nt, Artificial Sequence
  Description of Artificial Sequence: Synthetic oligonucleotide
guguccauugcccgugagc

SEQ ID NO: 1093983 - RNA, 19 nt, Artificial Sequence
  Description of Artificial Sequence: Synthetic oligonucleotide
uguguccauugcccgugag

SEQ ID NO: 1093984 - RNA, 19 nt, Artificial Sequence
  Description of Artificial Sequence: Synthetic oligonucleotide
uuccccauucaacugcguu

SEQ ID NO: 1093985 - RNA, 19 nt, Artificial Sequence
  Description of Artificial Sequence: Synthetic oligonucleotide
uuuugucugugagugcuua

SEQ ID NO: 1093986 - RNA, 19 nt, Artificial Sequence
  Description of Artificial Sequence: Synthetic oligonucleotide
aacugcguucuguuugguu

SEQ ID NO: 1093987 - RNA, 19 nt, Artificial Sequence
  Description of Artificial Sequence: Synthetic oligonucleotide
cuagacccagcaagccagg

SEQ ID NO: 1093988 - RNA, 19 nt, Artificial Sequence
  Description of Artificial Sequence: Synthetic oligonucleotide
accgggagaaacuguggga

SEQ ID NO: 1093989 - RNA, 19 nt, Artificial Sequence
  Description of Artificial Sequence: Synthetic oligonucleotide
cuaugagguugagugggag

SEQ ID NO: 1093990 - RNA, 19 nt, Artificial Sequence
  Description of Artificial Sequence: Synthetic oligonucleotide
gcaaggauuuggaagaauc

SEQ ID NO: 1093991 - RNA, 19 nt, Artificial Sequence
  Description of Artificial Sequence: Synthetic oligonucleotide
cuugucccaaugcuccgac

SEQ ID NO: 1093992 - RNA, 19 nt, Artificial Sequence
  Description of Artificial Sequence: Synthetic oligonucleotide
aucuuaguccacacaguug

SEQ ID NO: 1093993 - RNA, 19 nt, Artificial Sequence
  Description of Artificial Sequence: Synthetic oligonucleotide
acgaggcugacagucaaca

SEQ ID NO: 1093994 - RNA, 19 nt, Artificial Sequence
  Description of Artificial Sequence: Synthetic oligonucleotide
gcaacacuagcacugcgac

SEQ ID NO: 1093995 - RNA, 19 nt, Artificial Sequence
  Description of Artificial Sequence: Synthetic oligonucleotide
gagcacucagagccuagac

SEQ ID NO: 1093996 - RNA, 19 nt, Artificial Sequence
  Description of Artificial Sequence: Synthetic oligonucleotide
auaaaaccggccgccuuug

SEQ ID NO: 1093997 - RNA, 19 nt, Artificial Sequence
  Description of Artificial Sequence: Synthetic oligonucleotide
acacgggaguuuucauguc

SEQ ID NO: 1093998 - RNA, 19 nt, Artificial Sequence
  Description of Artificial Sequence: Synthetic oligonucleotide
uucacucgcugacgaugag

SEQ ID NO: 1093999 - RNA, 19 nt, Artificial Sequence
  Description of Artificial Sequence: Synthetic oligonucleotide
agccuagcuagguacgaaa

SEQ ID NO: 1094000 - RNA, 19 nt, Artificial Sequence
  Description of Artificial Sequence: Synthetic oligonucleotide
augaaccguuuauaucggu

SEQ ID NO: 1094001 - RNA, 19 nt, Artificial Sequence
  Description of Artificial Sequence: Synthetic oligonucleotide
cuagguacgaaagcgguua

SEQ ID NO: 1094002 - RNA, 19 nt, Artificial Sequence
  Description of Artificial Sequence: Synthetic oligonucleotide
gcaauuccccauucaacug

SEQ ID NO: 1094003 - RNA, 19 nt, Artificial Sequence
  Description of Artificial Sequence: Synthetic oligonucleotide
aacacgaggcugacaguca

SEQ ID NO: 1094004 - RNA, 19 nt, Artificial Sequence
  Description of Artificial Sequence: Synthetic oligonucleotide
uccguaggaucacguagau

SEQ ID NO: 1094005 - RNA, 19 nt, Artificial Sequence
  Description of Artificial Sequence: Synthetic oligonucleotide
ugcuccgaccgggagaaac

SEQ ID NO: 1094006 - RNA, 19 nt, Artificial Sequence
  Description of Artificial Sequence: Synthetic oligonucleotide
gagugcuuagggcuccaca

SEQ ID NO: 1094007 - RNA, 19 nt, Artificial Sequence
  Description of Artificial Sequence: Synthetic oligonucleotide
agcuagguacgaaagcggu

SEQ ID NO: 1094008 - RNA, 19 nt, Artificial Sequence
  Description of Artificial Sequence: Synthetic oligonucleotide
aguggauauuccugcuaaa

SEQ ID NO: 1094009 - RNA, 19 nt, Artificial Sequence
  Description of Artificial Sequence: Synthetic oligonucleotide
cugcacucaucacgcaaag

SEQ ID NO: 1094010 - RNA, 19 nt, Artificial Sequence
  Description of Artificial Sequence: Synthetic oligonucleotide
ucaacacgaggcugacagu

SEQ ID NO: 1094011 - RNA, 19 nt, Artificial Sequence
  Description of Artificial Sequence: Synthetic oligonucleotide
aggauccccaacaacagua

SEQ ID NO: 1094012 - RNA, 19 nt, Artificial Sequence
  Description of Artificial Sequence: Synthetic oligonucleotide
ccuagcuagguacgaaagc

SEQ ID NO: 1094013 - RNA, 19 nt, Artificial Sequence
  Description of Artificial Sequence: Synthetic oligonucleotide
gguuaugaaccguuuauau

SEQ ID NO: 1094014 - RNA, 19 nt, Artificial Sequence
  Description of Artificial Sequence: Synthetic oligonucleotide
gacgaugaguagcaaugcu

SEQ ID NO: 1094015 - RNA, 19 nt, Artificial Sequence
  Description of Artificial Sequence: Synthetic oligonucleotide
acucgcugacgaugaguag

SEQ ID NO: 1094016 - RNA, 19 nt, Artificial Sequence
  Description of Artificial Sequence: Synthetic oligonucleotide
agcgguuaugaaccguuua

SEQ ID NO: 1094017 - RNA, 19 nt, Artificial Sequence
  Description of Artificial Sequence: Synthetic oligonucleotide
ggcuuugagauuuauuuau

SEQ ID NO: 1094018 - RNA, 19 nt, Artificial Sequence
  Description of Artificial Sequence: Synthetic oligonucleotide
gguggagcggugcuugcag

SEQ ID NO: 1094019 - RNA, 19 nt, Artificial Sequence
  Description of Artificial Sequence: Synthetic oligonucleotide
agccuagacggauggugcu

SEQ ID NO: 1094020 - RNA, 19 nt, Artificial Sequence
  Description of Artificial Sequence: Synthetic oligonucleotide
cugcuaaaugcaccagguc

SEQ ID NO: 1094021 - RNA, 19 nt, Artificial Sequence
  Description of Artificial Sequence: Synthetic oligonucleotide
aguucugccagaggucagu

SEQ ID NO: 1094022 - RNA, 19 nt, Artificial Sequence
  Description of Artificial Sequence: Synthetic oligonucleotide
aucgguggagcggugcuug

SEQ ID NO: 1094023 - RNA, 19 nt, Artificial Sequence
  Description of Artificial Sequence: Synthetic oligonucleotide
uuccugcuaaaugcaccag

SEQ ID NO: 1094024 - RNA, 19 nt, Artificial Sequence
  Description of Artificial Sequence: Synthetic oligonucleotide
gcugacagucaacauaaaa

SEQ ID NO: 1094025 - RNA, 19 nt, Artificial Sequence
  Description of Artificial Sequence: Synthetic oligonucleotide
uccgaccgggagaaacugu

SEQ ID NO: 1094026 - RNA, 19 nt, Artificial Sequence
  Description of Artificial Sequence: Synthetic oligonucleotide
uugucccaaugcuccgacc

SEQ ID NO: 1094027 - RNA, 19 nt, Artificial Sequence
  Description of Artificial Sequence: Synthetic oligonucleotide
cucgggaucgguggagcgg

SEQ ID NO: 1094028 - RNA, 19 nt, Artificial Sequence
  Description of Artificial Sequence: Synthetic oligonucleotide
cauucuaccucaugucaua

SEQ ID NO: 1094029 - RNA, 19 nt, Artificial Sequence
  Description of Artificial Sequence: Synthetic oligonucleotide
ucgggaucgguggagcggu

SEQ ID NO: 1094030 - RNA, 19 nt, Artificial Sequence
  Description of Artificial Sequence: Synthetic oligonucleotide
cguagauaaugccacugag

SEQ ID NO: 1094031 - RNA, 19 nt, Artificial Sequence
  Description of Artificial Sequence: Synthetic oligonucleotide
cacuagcacugcgacgugg

SEQ ID NO: 1094032 - RNA, 19 nt, Artificial Sequence
  Description of Artificial Sequence: Synthetic oligonucleotide
auagccuagcuagguacga

SEQ ID NO: 1094033 - RNA, 19 nt, Artificial Sequence
  Description of Artificial Sequence: Synthetic oligonucleotide
cagaggucagucguguguc

SEQ ID NO: 1094034 - RNA, 19 nt, Artificial Sequence
  Description of Artificial Sequence: Synthetic oligonucleotide
acgggaguuuucaugucug

SEQ ID NO: 1094035 - RNA, 19 nt, Artificial Sequence
  Description of Artificial Sequence: Synthetic oligonucleotide
uguacccuaugagcacuca

SEQ ID NO: 1094036 - RNA, 19 nt, Artificial Sequence
  Description of Artificial Sequence: Synthetic oligonucleotide
acuagcacugcgacgugga

SEQ ID NO: 1094037 - RNA, 19 nt, Artificial Sequence
  Description of Artificial Sequence: Synthetic oligonucleotide
aggcaacggacacucuaga

SEQ ID NO: 1094038 - RNA, 19 nt, Artificial Sequence
  Description of Artificial Sequence: Synthetic oligonucleotide
acugcgacguggaggaaca

SEQ ID NO: 1094039 - RNA, 19 nt, Artificial Sequence
  Description of Artificial Sequence: Synthetic oligonucleotide
ggucuagacacuuguccca

SEQ ID NO: 1094040 - RNA, 19 nt, Artificial Sequence
  Description of Artificial Sequence: Synthetic oligonucleotide
aauucggggaguggauauu

SEQ ID NO: 1094041 - RNA, 19 nt, Artificial Sequence
  Description of Artificial Sequence: Synthetic oligonucleotide
auucuaccucaugucauaa

SEQ ID NO: 1094042 - RNA, 19 nt, Artificial Sequence
  Description of Artificial Sequence: Synthetic oligonucleotide
guacgaaagcgguuaugaa

SEQ ID NO: 1094043 - RNA, 19 nt, Artificial Sequence
  Description of Artificial Sequence: Synthetic oligonucleotide
aucacgcaaagaccagcaa

SEQ ID NO: 1094044 - RNA, 19 nt, Artificial Sequence
  Description of Artificial Sequence: Synthetic oligonucleotide
gacugacgaugguggagac

SEQ ID NO: 1094045 - RNA, 19 nt, Artificial Sequence
  Description of Artificial Sequence: Synthetic oligonucleotide
cagacugcagccauucacu

SEQ ID NO: 1094046 - RNA, 19 nt, Artificial Sequence
  Description of Artificial Sequence: Synthetic oligonucleotide
gagcggugcuugcaguuca

SEQ ID NO: 1094047 - RNA, 19 nt, Artificial Sequence
  Description of Artificial Sequence: Synthetic oligonucleotide
ggacacucuagacccagca

SEQ ID NO: 1094048 - RNA, 19 nt, Artificial Sequence
  Description of Artificial Sequence: Synthetic oligonucleotide
ggauggugcuucgucaagc

SEQ ID NO: 1094049 - RNA, 19 nt, Artificial Sequence
  Description of Artificial Sequence: Synthetic oligonucleotide
gaaggacaugguacaguuc

SEQ ID NO: 1094050 - RNA, 19 nt, Artificial Sequence
  Description of Artificial Sequence: Synthetic oligonucleotide
acguuuccguaggaucacg

SEQ ID NO: 1094051 - RNA, 19 nt, Artificial Sequence
  Description of Artificial Sequence: Synthetic oligonucleotide
guuuccguaggaucacgua

SEQ ID NO: 1094052 - RNA, 19 nt, Artificial Sequence
  Description of Artificial Sequence: Synthetic oligonucleotide
ggcaacggacacucuagac

SEQ ID NO: 1094053 - RNA, 19 nt, Artificial Sequence
  Description of Artificial Sequence: Synthetic oligonucleotide
cuccagcgcgaucucuggg

SEQ ID NO: 1094054 - RNA, 19 nt, Artificial Sequence
  Description of Artificial Sequence: Synthetic oligonucleotide
auguacccuaugagcacuc

SEQ ID NO: 1094055 - RNA, 19 nt, Artificial Sequence
  Description of Artificial Sequence: Synthetic oligonucleotide
cacugcgacguggaggaac

SEQ ID NO: 1094056 - RNA, 19 nt, Artificial Sequence
  Description of Artificial Sequence: Synthetic oligonucleotide
ucuagacacuugucccaau

SEQ ID NO: 1094057 - RNA, 19 nt, Artificial Sequence
  Description of Artificial Sequence: Synthetic oligonucleotide
agggagguaucugauuuua

SEQ ID NO: 1094058 - RNA, 19 nt, Artificial Sequence
  Description of Artificial Sequence: Synthetic oligonucleotide
uggagcggugcuugcaguu

SEQ ID NO: 1094059 - RNA, 19 nt, Artificial Sequence
  Description of Artificial Sequence: Synthetic oligonucleotide
cucuggucaggguguuuug

SEQ ID NO: 1094060 - RNA, 19 nt, Artificial Sequence
  Description of Artificial Sequence: Synthetic oligonucleotide
acgaggaaugguaaaucua

SEQ ID NO: 1094061 - RNA, 19 nt, Artificial Sequence
  Description of Artificial Sequence: Synthetic oligonucleotide
aggggucuagacacuuguc

SEQ ID NO: 1094062 - RNA, 19 nt, Artificial Sequence
  Description of Artificial Sequence: Synthetic oligonucleotide
agguacgaaagcgguuaug

SEQ ID NO: 1094063 - RNA, 19 nt, Artificial Sequence
  Description of Artificial Sequence: Synthetic oligonucleotide
ccgggagaaacugugggag

SEQ ID NO: 1094064 - RNA, 19 nt, Artificial Sequence
  Description of Artificial Sequence: Synthetic oligonucleotide
acggcuccagagaaggaca

SEQ ID NO: 1094065 - RNA, 19 nt, Artificial Sequence
  Description of Artificial Sequence: Synthetic oligonucleotide
agggcaccguauauacauc

SEQ ID NO: 1094066 - RNA, 19 nt, Artificial Sequence
  Description of Artificial Sequence: Synthetic oligonucleotide
gacaaguguuccagagcca

SEQ ID NO: 1094067 - RNA, 19 nt, Artificial Sequence
  Description of Artificial Sequence: Synthetic oligonucleotide
acgcaaagaccagcaagga

SEQ ID NO: 1094068 - RNA, 19 nt, Artificial Sequence
  Description of Artificial Sequence: Synthetic oligonucleotide
cagcaauucggggagugga

SEQ ID NO: 1094069 - RNA, 19 nt, Artificial Sequence
  Description of Artificial Sequence: Synthetic oligonucleotide
gccuagcuagguacgaaag

SEQ ID NO: 1094070 - RNA, 19 nt, Artificial Sequence
  Description of Artificial Sequence: Synthetic oligonucleotide
ucgcugugccucaccgugu

SEQ ID NO: 1094071 - RNA, 19 nt, Artificial Sequence
  Description of Artificial Sequence: Synthetic oligonucleotide
ccacacgggaguuuucaug

SEQ ID NO: 1094072 - RNA, 19 nt, Artificial Sequence
  Description of Artificial Sequence: Synthetic oligonucleotide
cacguuuccguaggaucac

SEQ ID NO: 1094073 - RNA, 19 nt, Artificial Sequence
  Description of Artificial Sequence: Synthetic oligonucleotide
agcaucagaagggcaccgu

SEQ ID NO: 1094074 - RNA, 19 nt, Artificial Sequence
  Description of Artificial Sequence: Synthetic oligonucleotide
accguguagauggcugcug

SEQ ID NO: 1094075 - RNA, 19 nt, Artificial Sequence
  Description of Artificial Sequence: Synthetic oligonucleotide
uagccuagcuagguacgaa

SEQ ID NO: 1094076 - RNA, 19 nt, Artificial Sequence
  Description of Artificial Sequence: Synthetic oligonucleotide
ccgaccgggagaaacugug

SEQ ID NO: 1094077 - RNA, 19 nt, Artificial Sequence
  Description of Artificial Sequence: Synthetic oligonucleotide
uagacggauggugcuucgu

SEQ ID NO: 1094078 - RNA, 19 nt, Artificial Sequence
  Description of Artificial Sequence: Synthetic oligonucleotide
ucauugccagacaguccuu

SEQ ID NO: 1094079 - RNA, 19 nt, Artificial Sequence
  Description of Artificial Sequence: Synthetic oligonucleotide
cuccgaccgggagaaacug

SEQ ID NO: 1094080 - RNA, 19 nt, Artificial Sequence
  Description of Artificial Sequence: Synthetic oligonucleotide
aacggacacucuagaccca

SEQ ID NO: 1094081 - RNA, 19 nt, Artificial Sequence
  Description of Artificial Sequence: Synthetic oligonucleotide
ggaggcaacggacacucua

SEQ ID NO: 1094082 - RNA, 19 nt, Artificial Sequence
  Description of Artificial Sequence: Synthetic oligonucleotide
agcaauucggggaguggau

SEQ ID NO: 1094083 - RNA, 19 nt, Artificial Sequence
  Description of Artificial Sequence: Synthetic oligonucleotide
guaucugauuuuagaugaa

SEQ ID NO: 1094084 - RNA, 19 nt, Artificial Sequence
  Description of Artificial Sequence: Synthetic oligonucleotide
guuaugguguuaagaugua

SEQ ID NO: 1094085 - RNA, 19 nt, Artificial Sequence
  Description of Artificial Sequence: Synthetic oligonucleotide
gaaagcgguuaugaaccgu

SEQ ID NO: 1094086 - RNA, 19 nt, Artificial Sequence
  Description of Artificial Sequence: Synthetic oligonucleotide
gcgacguggaggaacagga

SEQ ID NO: 1094087 - RNA, 19 nt, Artificial Sequence
  Description of Artificial Sequence: Synthetic oligonucleotide
auugcccgugagccauuga

SEQ ID NO: 1094088 - RNA, 19 nt, Artificial Sequence
  Description of Artificial Sequence: Synthetic oligonucleotide
aagcgguuaugaaccguuu

SEQ ID NO: 1094089 - RNA, 19 nt, Artificial Sequence
  Description of Artificial Sequence: Synthetic oligonucleotide
caauucggggaguggauau

SEQ ID NO: 1094090 - RNA, 19 nt, Artificial Sequence
  Description of Artificial Sequence: Synthetic oligonucleotide
ggauuuggaagaauccagu

SEQ ID NO: 1094091 - RNA, 19 nt, Artificial Sequence
  Description of Artificial Sequence: Synthetic oligonucleotide
caucagaagggcaccguau

SEQ ID NO: 1094092 - RNA, 19 nt, Artificial Sequence
  Description of Artificial Sequence: Synthetic oligonucleotide
ugagugcuuagggcuccac

SEQ ID NO: 1094093 - RNA, 19 nt, Artificial Sequence
  Description of Artificial Sequence: Synthetic oligonucleotide
gguuauccuaugagguuga

SEQ ID NO: 1094094 - RNA, 19 nt, Artificial Sequence
  Description of Artificial Sequence: Synthetic oligonucleotide
cagcgcgaucucuggguug

SEQ ID NO: 1094095 - RNA, 19 nt, Artificial Sequence
  Description of Artificial Sequence: Synthetic oligonucleotide
cgaaagcgguuaugaaccg

SEQ ID NO: 1094096 - RNA, 19 nt, Artificial Sequence
  Description of Artificial Sequence: Synthetic oligonucleotide
cacgggaguuuucaugucu

SEQ ID NO: 1094097 - RNA, 19 nt, Artificial Sequence
  Description of Artificial Sequence: Synthetic oligonucleotide
cggugcuugcaguucaaag

SEQ ID NO: 1094098 - RNA, 19 nt, Artificial Sequence
  Description of Artificial Sequence: Synthetic oligonucleotide
ggcgaagccauaggaguac

SEQ ID NO: 1094099 - RNA, 19 nt, Artificial Sequence
  Description of Artificial Sequence: Synthetic oligonucleotide
cauugcccgugagccauug

SEQ ID NO: 1094100 - RNA, 19 nt, Artificial Sequence
  Description of Artificial Sequence: Synthetic oligonucleotide
cauuugggguuugucccca

SEQ ID NO: 1094101 - RNA, 19 nt, Artificial Sequence
  Description of Artificial Sequence: Synthetic oligonucleotide
caggggucuagacacuugu

SEQ ID NO: 1094102 - RNA, 19 nt, Artificial Sequence
  Description of Artificial Sequence: Synthetic oligonucleotide
cagggaacucacaguccca

SEQ ID NO: 1094103 - RNA, 19 nt, Artificial Sequence
  Description of Artificial Sequence: Synthetic oligonucleotide
cauguacccuaugagcacu

SEQ ID NO: 1094104 - RNA, 19 nt, Artificial Sequence
  Description of Artificial Sequence: Synthetic oligonucleotide
accggccgccuuuggugag

SEQ ID NO: 1094105 - RNA, 19 nt, Artificial Sequence
  Description of Artificial Sequence: Synthetic oligonucleotide
aggcgaagccauaggagua

SEQ ID NO: 1094106 - RNA, 19 nt, Artificial Sequence
  Description of Artificial Sequence: Synthetic oligonucleotide
ccugcuaaaugcaccaggu

SEQ ID NO: 1094107 - RNA, 19 nt, Artificial Sequence
  Description of Artificial Sequence: Synthetic oligonucleotide
gcgguuaugaaccguuuau

SEQ ID NO: 1094108 - RNA, 19 nt, Artificial Sequence
  Description of Artificial Sequence: Synthetic oligonucleotide
acaauccuauguacauaua

SEQ ID NO: 1094109 - RNA, 19 nt, Artificial Sequence
  Description of Artificial Sequence: Synthetic oligonucleotide
cuuaguccacacaguuggu

SEQ ID NO: 1094110 - RNA, 19 nt, Artificial Sequence
  Description of Artificial Sequence: Synthetic oligonucleotide
gcugacgaugaguagcaau

SEQ ID NO: 1094111 - RNA, 19 nt, Artificial Sequence
  Description of Artificial Sequence: Synthetic oligonucleotide
caucuucaauugacagcaa

SEQ ID NO: 1094112 - RNA, 19 nt, Artificial Sequence
  Description of Artificial Sequence: Synthetic oligonucleotide
ggugcuucgucaagcaccu

SEQ ID NO: 1094113 - RNA, 19 nt, Artificial Sequence
  Description of Artificial Sequence: Synthetic oligonucleotide
ggagacgaacagcaacacu

SEQ ID NO: 1094114 - RNA, 19 nt, Artificial Sequence
  Description of Artificial Sequence: Synthetic oligonucleotide
cgaggaaugguaaaucuau

SEQ ID NO: 1094115 - RNA, 19 nt, Artificial Sequence
  Description of Artificial Sequence: Synthetic oligonucleotide
ccguauauacaucuacagu

SEQ ID NO: 1094116 - RNA, 19 nt, Artificial Sequence
  Description of Artificial Sequence: Synthetic oligonucleotide
ccuagacggauggugcuuc

SEQ ID NO: 1094117 - RNA, 19 nt, Artificial Sequence
  Description of Artificial Sequence: Synthetic oligonucleotide
cgaccgggagaaacugugg

SEQ ID NO: 1094118 - RNA, 19 nt, Artificial Sequence
  Description of Artificial Sequence: Synthetic oligonucleotide
acacagcaauucggggagu

SEQ ID NO: 1094119 - RNA, 19 nt, Artificial Sequence
  Description of Artificial Sequence: Synthetic oligonucleotide
ggccacacgggaguuuuca

SEQ ID NO: 1094120 - RNA, 19 nt, Artificial Sequence
  Description of Artificial Sequence: Synthetic oligonucleotide
cgguuuguuuucugguuuc

SEQ ID NO: 1094121 - RNA, 19 nt, Artificial Sequence
  Description of Artificial Sequence: Synthetic oligonucleotide
caaagauacugagcuuggu

SEQ ID NO: 1094122 - RNA, 19 nt, Artificial Sequence
  Description of Artificial Sequence: Synthetic oligonucleotide
gggaucgguggagcggugc

SEQ ID NO: 1094123 - RNA, 19 nt, Artificial Sequence
  Description of Artificial Sequence: Synthetic oligonucleotide
gugagugguuuaaaugauu

SEQ ID NO: 1094124 - RNA, 19 nt, Artificial Sequence
  Description of Artificial Sequence: Synthetic oligonucleotide
auuccccauucaacugcgu

SEQ ID NO: 1094125 - RNA, 19 nt, Artificial Sequence
  Description of Artificial Sequence: Synthetic oligonucleotide
ccuaugagguugaguggga

SEQ ID NO: 1094126 - RNA, 19 nt, Artificial Sequence
  Description of Artificial Sequence: Synthetic oligonucleotide
ggagcggugcuugcaguuc

SEQ ID NO: 1094127 - RNA, 19 nt, Artificial Sequence
  Description of Artificial Sequence: Synthetic oligonucleotide
ccguuuauaucggucucca

SEQ ID NO: 1094128 - RNA, 19 nt, Artificial Sequence
  Description of Artificial Sequence: Synthetic oligonucleotide
gcaauucggggaguggaua

SEQ ID NO: 1094129 - RNA, 19 nt, Artificial Sequence
  Description of Artificial Sequence: Synthetic oligonucleotide
cgugagccauugacugacg

SEQ ID NO: 1094130 - RNA, 19 nt, Artificial Sequence
  Description of Artificial Sequence: Synthetic oligonucleotide
guaggaucacguagauaau

SEQ ID NO: 1094131 - RNA, 19 nt, Artificial Sequence
  Description of Artificial Sequence: Synthetic oligonucleotide
ggaucgguggagcggugcu

SEQ ID NO: 1094132 - RNA, 19 nt, Artificial Sequence
  Description of Artificial Sequence: Synthetic oligonucleotide
gaguugggguuuggggcua

SEQ ID NO: 1094133 - RNA, 19 nt, Artificial Sequence
  Description of Artificial Sequence: Synthetic oligonucleotide
cugcgacguggaggaacag

SEQ ID NO: 1094134 - RNA, 19 nt, Artificial Sequence
  Description of Artificial Sequence: Synthetic oligonucleotide
ccagcaagccagggaacuc

SEQ ID NO: 1094135 - RNA, 19 nt, Artificial Sequence
  Description of Artificial Sequence: Synthetic oligonucleotide
agcggugcuugcaguucaa

SEQ ID NO: 1094136 - RNA, 19 nt, Artificial Sequence
  Description of Artificial Sequence: Synthetic oligonucleotide
gaucgguggagcggugcuu

SEQ ID NO: 1094137 - RNA, 19 nt, Artificial Sequence
  Description of Artificial Sequence: Synthetic oligonucleotide
ccccauucaacugcguucu

SEQ ID NO: 1094138 - RNA, 19 nt, Artificial Sequence
  Description of Artificial Sequence: Synthetic oligonucleotide
gcuucgucaagcaccucau

SEQ ID NO: 1094139 - RNA, 19 nt, Artificial Sequence
  Description of Artificial Sequence: Synthetic oligonucleotide
gcaagccagggaacucaca

SEQ ID NO: 1094140 - RNA, 19 nt, Artificial Sequence
  Description of Artificial Sequence: Synthetic oligonucleotide
cuucgucaagcaccucauu

SEQ ID NO: 1094141 - RNA, 19 nt, Artificial Sequence
  Description of Artificial Sequence: Synthetic oligonucleotide
caccguguagauggcugcu

SEQ ID NO: 1094142 - RNA, 19 nt, Artificial Sequence
  Description of Artificial Sequence: Synthetic oligonucleotide
aggggccacacgggaguuu

SEQ ID NO: 1094143 - RNA, 19 nt, Artificial Sequence
  Description of Artificial Sequence: Synthetic oligonucleotide
gcuccgaccgggagaaacu

SEQ ID NO: 1094144 - RNA, 19 nt, Artificial Sequence
  Description of Artificial Sequence: Synthetic oligonucleotide
gccucaccguguagauggc

SEQ ID NO: 1094145 - RNA, 19 nt, Artificial Sequence
  Description of Artificial Sequence: Synthetic oligonucleotide
gcuagguacgaaagcgguu

SEQ ID NO: 1094146 - RNA, 19 nt, Artificial Sequence
  Description of Artificial Sequence: Synthetic oligonucleotide
ccggccgccuuuggugagg

SEQ ID NO: 1094147 - RNA, 19 nt, Artificial Sequence
  Description of Artificial Sequence: Synthetic oligonucleotide
cgguuaugaaccguuuaua

SEQ ID NO: 1094148 - RNA, 19 nt, Artificial Sequence
  Description of Artificial Sequence: Synthetic oligonucleotide
ggucagucguguguccauu

SEQ ID NO: 1094149 - RNA, 19 nt, Artificial Sequence
  Description of Artificial Sequence: Synthetic oligonucleotide
ggggccacacgggaguuuu

SEQ ID NO: 1094150 - RNA, 19 nt, Artificial Sequence
  Description of Artificial Sequence: Synthetic oligonucleotide
gccacucgcugugccucac

SEQ ID NO: 1094151 - RNA, 19 nt, Artificial Sequence
  Description of Artificial Sequence: Synthetic oligonucleotide
gcggugcuugcaguucaaa

SEQ ID NO: 1094152 - RNA, 19 nt, Artificial Sequence
  Description of Artificial Sequence: Synthetic oligonucleotide
gggccacacgggaguuuuc

SEQ ID NO: 1094153 - RNA, 19 nt, Artificial Sequence
  Description of Artificial Sequence: Synthetic oligonucleotide
gccuagacggauggugcuu

SEQ ID NO: 1094154 - RNA, 19 nt, Artificial Sequence
  Description of Artificial Sequence: Synthetic oligonucleotide
augcuccgaccgggagaaa

SEQ ID NO: 1094155 - RNA, 19 nt, Artificial Sequence
  Description of Artificial Sequence: Synthetic oligonucleotide
ccguaggaucacguagaua

SEQ ID NO: 1094156 - RNA, 19 nt, Artificial Sequence
  Description of Artificial Sequence: Synthetic oligonucleotide
cguuuauaucggucuccau

SEQ ID NO: 1094157 - RNA, 19 nt, Artificial Sequence
  Description of Artificial Sequence: Synthetic oligonucleotide
ccagcgcgaucucuggguu

SEQ ID NO: 1094158 - RNA, 19 nt, Artificial Sequence
  Description of Artificial Sequence: Synthetic oligonucleotide
cgggaucgguggagcggug

SEQ ID NO: 1094159 - RNA, 19 nt, Artificial Sequence
  Description of Artificial Sequence: Synthetic oligonucleotide
gcguucuguuugguuugau

SEQ ID NO: 1094160 - RNA, 19 nt, Artificial Sequence
  Description of Artificial Sequence: Synthetic oligonucleotide
cgcugacgaugaguagcaa

SEQ ID NO: 1094161 - RNA, 19 nt, Artificial Sequence
  Description of Artificial Sequence: Synthetic oligonucleotide
ccauugcccgugagccauu

SEQ ID NO: 1094162 - RNA, 19 nt, Artificial Sequence
  Description of Artificial Sequence: Synthetic oligonucleotide
aaacuuuacagcuuggcuc

SEQ ID NO: 1094163 - RNA, 19 nt, Artificial Sequence
  Description of Artificial Sequence: Synthetic oligonucleotide
uguaguacauuguagagag

SEQ ID NO: 1094164 - RNA, 19 nt, Artificial Sequence
  Description of Artificial Sequence: Synthetic oligonucleotide
aagaaaacuugacaucagc

SEQ ID NO: 1094165 - RNA, 19 nt, Artificial Sequence
  Description of Artificial Sequence: Synthetic oligonucleotide
uccacaacgaaauuggugc

SEQ ID NO: 1094166 - RNA, 19 nt, Artificial Sequence
  Description of Artificial Sequence: Synthetic oligonucleotide
ugugauaaggguugggugg

SEQ ID NO: 1094167 - RNA, 19 nt, Artificial Sequence
  Description of Artificial Sequence: Synthetic oligonucleotide
uuuauugugacaggcaggg

SEQ ID NO: 1094168 - RNA, 19 nt, Artificial Sequence
  Description of Artificial Sequence: Synthetic oligonucleotide
aucaugucaaacuuggguc

SEQ ID NO: 1094169 - RNA, 19 nt, Artificial Sequence
  Description of Artificial Sequence: Synthetic oligonucleotide
ugggguaguaccaugauug

SEQ ID NO: 1094170 - RNA, 19 nt, Artificial Sequence
  Description of Artificial Sequence: Synthetic oligonucleotide
aauaccggaguguuuguuc

SEQ ID NO: 1094171 - RNA, 19 nt, Artificial Sequence
  Description of Artificial Sequence: Synthetic oligonucleotide
cuguuugaagucaauaccg

SEQ ID NO: 1094172 - RNA, 19 nt, Artificial Sequence
  Description of Artificial Sequence: Synthetic oligonucleotide
acgguugagauucuggccc

SEQ ID NO: 1094173 - RNA, 19 nt, Artificial Sequence
  Description of Artificial Sequence: Synthetic oligonucleotide
guaacugcugcagagaucg

SEQ ID NO: 1094174 - RNA, 19 nt, Artificial Sequence
  Description of Artificial Sequence: Synthetic oligonucleotide
aaaugucguccauagcggc

SEQ ID NO: 1094175 - RNA, 19 nt, Artificial Sequence
  Description of Artificial Sequence: Synthetic oligonucleotide
aaaauccugagccggggac

SEQ ID NO: 1094176 - RNA, 19 nt, Artificial Sequence
  Description of Artificial Sequence: Synthetic oligonucleotide
auagugaaggggcacauuc

SEQ ID NO: 1094177 - RNA, 19 nt, Artificial Sequence
  Description of Artificial Sequence: Synthetic oligonucleotide
ucauguaguacauuguaga

SEQ ID NO: 1094178 - RNA, 19 nt, Artificial Sequence
  Description of Artificial Sequence: Synthetic oligonucleotide
aaaacuugacaucagccau

SEQ ID NO: 1094179 - RNA, 19 nt, Artificial Sequence
  Description of Artificial Sequence: Synthetic oligonucleotide
uggaauuguaggccgaagg

SEQ ID NO: 1094180 - RNA, 19 nt, Artificial Sequence
  Description of Artificial Sequence: Synthetic oligonucleotide
agaaaacuugacaucagcc

SEQ ID NO: 1094181 - RNA, 19 nt, Artificial Sequence
  Description of Artificial Sequence: Synthetic oligonucleotide
acuuuauugugacaggcag

SEQ ID NO: 1094182 - RNA, 19 nt, Artificial Sequence
  Description of Artificial Sequence: Synthetic oligonucleotide
uuugucaacaggcaucucu

SEQ ID NO: 1094183 - RNA, 19 nt, Artificial Sequence
  Description of Artificial Sequence: Synthetic oligonucleotide
uauugugacaggcagggcu

SEQ ID NO: 1094184 - RNA, 19 nt, Artificial Sequence
  Description of Artificial Sequence: Synthetic oligonucleotide
cuuguuuugacaccucugg

SEQ ID NO: 1094185 - RNA, 19 nt, Artificial Sequence
  Description of Artificial Sequence: Synthetic oligonucleotide
uggaauacgguugagauuc

SEQ ID NO: 1094186 - RNA, 19 nt, Artificial Sequence
  Description of Artificial Sequence: Synthetic oligonucleotide
ucuaguguguguagaaaag

SEQ ID NO: 1094187 - RNA, 19 nt, Artificial Sequence
  Description of Artificial Sequence: Synthetic oligonucleotide
ucgaucauuacacuacggc

SEQ ID NO: 1094188 - RNA, 19 nt, Artificial Sequence
  Description of Artificial Sequence: Synthetic oligonucleotide
uuacacuacggcuauuuag

SEQ ID NO: 1094189 - RNA, 19 nt, Artificial Sequence
  Description of Artificial Sequence: Synthetic oligonucleotide
uguucagggucccauuucg

SEQ ID NO: 1094190 - RNA, 19 nt, Artificial Sequence
  Description of Artificial Sequence: Synthetic oligonucleotide
aaaaugucguccauagcgg

SEQ ID NO: 1094191 - RNA, 19 nt, Artificial Sequence
  Description of Artificial Sequence: Synthetic oligonucleotide
uauggaauacgguugagau

SEQ ID NO: 1094192 - RNA, 19 nt, Artificial Sequence
  Description of Artificial Sequence: Synthetic oligonucleotide
uauuagagaggucagcaaa

SEQ ID NO: 1094193 - RNA, 19 nt, Artificial Sequence
  Description of Artificial Sequence: Synthetic oligonucleotide
acuugggucgcuuugcagg

SEQ ID NO: 1094194 - RNA, 19 nt, Artificial Sequence
  Description of Artificial Sequence: Synthetic oligonucleotide
ucaucgaucauuacacuac

SEQ ID NO: 1094195 - RNA, 19 nt, Artificial Sequence
  Description of Artificial Sequence: Synthetic oligonucleotide
acuacggcuauuuagugca

SEQ ID NO: 1094196 - RNA, 19 nt, Artificial Sequence
  Description of Artificial Sequence: Synthetic oligonucleotide
guacauuguagagagaucc

SEQ ID NO: 1094197 - RNA, 19 nt, Artificial Sequence
  Description of Artificial Sequence: Synthetic oligonucleotide
aauacgguugagauucugg

SEQ ID NO: 1094198 - RNA, 19 nt, Artificial Sequence
  Description of Artificial Sequence: Synthetic oligonucleotide
auacaaaucuucaugagcu

SEQ ID NO: 1094199 - RNA, 19 nt, Artificial Sequence
  Description of Artificial Sequence: Synthetic oligonucleotide
acuuguuacagaugcugac

SEQ ID NO: 1094200 - RNA, 19 nt, Artificial Sequence
  Description of Artificial Sequence: Synthetic oligonucleotide
uccgaucuccauauuagag

SEQ ID NO: 1094201 - RNA, 19 nt, Artificial Sequence
  Description of Artificial Sequence: Synthetic oligonucleotide
uccaggauaggcacaauca

SEQ ID NO: 1094202 - RNA, 19 nt, Artificial Sequence
  Description of Artificial Sequence: Synthetic oligonucleotide
aguaccaugauuggagacg

SEQ ID NO: 1094203 - RNA, 19 nt, Artificial Sequence
  Description of Artificial Sequence: Synthetic oligonucleotide
auugauacgugcuccucuc

SEQ ID NO: 1094204 - RNA, 19 nt, Artificial Sequence
  Description of Artificial Sequence: Synthetic oligonucleotide
aaacaggcauagugaaggg

SEQ ID NO: 1094205 - RNA, 19 nt, Artificial Sequence
  Description of Artificial Sequence: Synthetic oligonucleotide
cauguaguacauuguagag

SEQ ID NO: 1094206 - RNA, 19 nt, Artificial Sequence
  Description of Artificial Sequence: Synthetic oligonucleotide
cuuuauugugacaggcagg

SEQ ID NO: 1094207 - RNA, 19 nt, Artificial Sequence
  Description of Artificial Sequence: Synthetic oligonucleotide
uaccugguggaauuguagg

SEQ ID NO: 1094208 - RNA, 19 nt, Artificial Sequence
  Description of Artificial Sequence: Synthetic oligonucleotide
uccauauuagagaggucag

SEQ ID NO: 1094209 - RNA, 19 nt, Artificial Sequence
  Description of Artificial Sequence: Synthetic oligonucleotide
ucaaccaccgcagagcggc

SEQ ID NO: 1094210 - RNA, 19 nt, Artificial Sequence
  Description of Artificial Sequence: Synthetic oligonucleotide
aauuguaggccgaaggccu

SEQ ID NO: 1094211 - RNA, 19 nt, Artificial Sequence
  Description of Artificial Sequence: Synthetic oligonucleotide
gaaugauucucguugagcu

SEQ ID NO: 1094212 - RNA, 19 nt, Artificial Sequence
  Description of Artificial Sequence: Synthetic oligonucleotide
ugcaugucgagguaugaga

SEQ ID NO: 1094213 - RNA, 19 nt, Artificial Sequence
  Description of Artificial Sequence: Synthetic oligonucleotide
ugaagucaauaccggagug

SEQ ID NO: 1094214 - RNA, 19 nt, Artificial Sequence
  Description of Artificial Sequence: Synthetic oligonucleotide
gaauuguaggccgaaggcc

SEQ ID NO: 1094215 - RNA, 19 nt, Artificial Sequence
  Description of Artificial Sequence: Synthetic oligonucleotide
ucucgugucaccaguuccc

SEQ ID NO: 1094216 - RNA, 19 nt, Artificial Sequence
  Description of Artificial Sequence: Synthetic oligonucleotide
cuuaucccucccauguugg

SEQ ID NO: 1094217 - RNA, 19 nt, Artificial Sequence
  Description of Artificial Sequence: Synthetic oligonucleotide
auucaucacauugauacgu

SEQ ID NO: 1094218 - RNA, 19 nt, Artificial Sequence
  Description of Artificial Sequence: Synthetic oligonucleotide
uucauuccgaucuccauau

SEQ ID NO: 1094219 - RNA, 19 nt, Artificial Sequence
  Description of Artificial Sequence: Synthetic oligonucleotide
cauccagugugugauaagg

SEQ ID NO: 1094220 - RNA, 19 nt, Artificial Sequence
  Description of Artificial Sequence: Synthetic oligonucleotide
cuucuguacgaugucacgg

SEQ ID NO: 1094221 - RNA, 19 nt, Artificial Sequence
  Description of Artificial Sequence: Synthetic oligonucleotide
auacaugcgcccugggcac

SEQ ID NO: 1094222 - RNA, 19 nt, Artificial Sequence
  Description of Artificial Sequence: Synthetic oligonucleotide
gguaguaccaugauuggag

SEQ ID NO: 1094223 - RNA, 19 nt, Artificial Sequence
  Description of Artificial Sequence: Synthetic oligonucleotide
uacgaugucacggugucca

SEQ ID NO: 1094224 - RNA, 19 nt, Artificial Sequence
  Description of Artificial Sequence: Synthetic oligonucleotide
gacaagagccccguuagcc

SEQ ID NO: 1094225 - RNA, 19 nt, Artificial Sequence
  Description of Artificial Sequence: Synthetic oligonucleotide
uugagauucuggcccaucu

SEQ ID NO: 1094226 - RNA, 19 nt, Artificial Sequence
  Description of Artificial Sequence: Synthetic oligonucleotide
uccuacuugucuugcaucu

SEQ ID NO: 1094227 - RNA, 19 nt, Artificial Sequence
  Description of Artificial Sequence: Synthetic oligonucleotide
ugugugauaaggguugggu

SEQ ID NO: 1094228 - RNA, 19 nt, Artificial Sequence
  Description of Artificial Sequence: Synthetic oligonucleotide
caucgaucauuacacuacg

SEQ ID NO: 1094229 - RNA, 19 nt, Artificial Sequence
  Description of Artificial Sequence: Synthetic oligonucleotide
cagugugugauaaggguug

SEQ ID NO: 1094230 - RNA, 19 nt, Artificial Sequence
  Description of Artificial Sequence: Synthetic oligonucleotide
aauccugagccggggacac

SEQ ID NO: 1094231 - RNA, 19 nt, Artificial Sequence
  Description of Artificial Sequence: Synthetic oligonucleotide
ucacauugauacgugcucc

SEQ ID NO: 1094232 - RNA, 19 nt, Artificial Sequence
  Description of Artificial Sequence: Synthetic oligonucleotide
uacgguugagauucuggcc

SEQ ID NO: 1094233 - RNA, 19 nt, Artificial Sequence
  Description of Artificial Sequence: Synthetic oligonucleotide
aguacgagugguccccuuc

SEQ ID NO: 1094234 - RNA, 19 nt, Artificial Sequence
  Description of Artificial Sequence: Synthetic oligonucleotide
cauuucaaccaccgcagag

SEQ ID NO: 1094235 - RNA, 19 nt, Artificial Sequence
  Description of Artificial Sequence: Synthetic oligonucleotide
auuccgaucuccauauuag

SEQ ID NO: 1094236 - RNA, 19 nt, Artificial Sequence
  Description of Artificial Sequence: Synthetic oligonucleotide
guaccaugauuggagacgg

SEQ ID NO: 1094237 - RNA, 19 nt, Artificial Sequence
  Description of Artificial Sequence: Synthetic oligonucleotide
cauacaugcgcccugggca

SEQ ID NO: 1094238 - RNA, 19 nt, Artificial Sequence
  Description of Artificial Sequence: Synthetic oligonucleotide
auacgugcuccucucauga

SEQ ID NO: 1094239 - RNA, 19 nt, Artificial Sequence
  Description of Artificial Sequence: Synthetic oligonucleotide
ggaauuguaggccgaaggc

SEQ ID NO: 1094240 - RNA, 19 nt, Artificial Sequence
  Description of Artificial Sequence: Synthetic oligonucleotide
aacgaaauuggugccuuca

SEQ ID NO: 1094241 - RNA, 19 nt, Artificial Sequence
  Description of Artificial Sequence: Synthetic oligonucleotide
aacuugggucgcuuugcag

SEQ ID NO: 1094242 - RNA, 19 nt, Artificial Sequence
  Description of Artificial Sequence: Synthetic oligonucleotide
ggagacaucauguggcaag

SEQ ID NO: 1094243 - RNA, 19 nt, Artificial Sequence
  Description of Artificial Sequence: Synthetic oligonucleotide
cauauuagagaggucagca

SEQ ID NO: 1094244 - RNA, 19 nt, Artificial Sequence
  Description of Artificial Sequence: Synthetic oligonucleotide
gaaaagccaugccucuugc

SEQ ID NO: 1094245 - RNA, 19 nt, Artificial Sequence
  Description of Artificial Sequence: Synthetic oligonucleotide
aaacuugacaucagccaug

SEQ ID NO: 1094246 - RNA, 19 nt, Artificial Sequence
  Description of Artificial Sequence: Synthetic oligonucleotide
agcauuucaaccaccgcag

SEQ ID NO: 1094247 - RNA, 19 nt, Artificial Sequence
  Description of Artificial Sequence: Synthetic oligonucleotide
caggauaggcacaaucaug

SEQ ID NO: 1094248 - RNA, 19 nt, Artificial Sequence
  Description of Artificial Sequence: Synthetic oligonucleotide
gauacgugcuccucucaug

SEQ ID NO: 1094249 - RNA, 19 nt, Artificial Sequence
  Description of Artificial Sequence: Synthetic oligonucleotide
caugucgagguaugagagg

SEQ ID NO: 1094250 - RNA, 19 nt, Artificial Sequence
  Description of Artificial Sequence: Synthetic oligonucleotide
uuuacagcuuggcucuggu

SEQ ID NO: 1094251 - RNA, 19 nt, Artificial Sequence
  Description of Artificial Sequence: Synthetic oligonucleotide
gugugauaaggguugggug

SEQ ID NO: 1094252 - RNA, 19 nt, Artificial Sequence
  Description of Artificial Sequence: Synthetic oligonucleotide
auaccggaguguuuguuca

SEQ ID NO: 1094253 - RNA, 19 nt, Artificial Sequence
  Description of Artificial Sequence: Synthetic oligonucleotide
uccuagcacuggaagcacg

SEQ ID NO: 1094254 - RNA, 19 nt, Artificial Sequence
  Description of Artificial Sequence: Synthetic oligonucleotide
ucgcuuugcaggaucuuca

SEQ ID NO: 1094255 - RNA, 19 nt, Artificial Sequence
  Description of Artificial Sequence: Synthetic oligonucleotide
auagcggcgucccggacag

SEQ ID NO: 1094256 - RNA, 19 nt, Artificial Sequence
  Description of Artificial Sequence: Synthetic oligonucleotide
aaauaccugguggaauugu

SEQ ID NO: 1094257 - RNA, 19 nt, Artificial Sequence
  Description of Artificial Sequence: Synthetic oligonucleotide
ucguaacugcugcagagau

SEQ ID NO: 1094258 - RNA, 19 nt, Artificial Sequence
  Description of Artificial Sequence: Synthetic oligonucleotide
agaaaauccugagccgggg

SEQ ID NO: 1094259 - RNA, 19 nt, Artificial Sequence
  Description of Artificial Sequence: Synthetic oligonucleotide
auguaguacauuguagaga

SEQ ID NO: 1094260 - RNA, 19 nt, Artificial Sequence
  Description of Artificial Sequence: Synthetic oligonucleotide
aagucaauaccggaguguu

SEQ ID NO: 1094261 - RNA, 19 nt, Artificial Sequence
  Description of Artificial Sequence: Synthetic oligonucleotide
auauuagagaggucagcaa

SEQ ID NO: 1094262 - RNA, 19 nt, Artificial Sequence
  Description of Artificial Sequence: Synthetic oligonucleotide
guuugaagucaauaccgga

SEQ ID NO: 1094263 - RNA, 19 nt, Artificial Sequence
  Description of Artificial Sequence: Synthetic oligonucleotide
guagagagauccauauggc

SEQ ID NO: 1094264 - RNA, 19 nt, Artificial Sequence
  Description of Artificial Sequence: Synthetic oligonucleotide
aagcucucuaaggggugcc

SEQ ID NO: 1094265 - RNA, 19 nt, Artificial Sequence
  Description of Artificial Sequence: Synthetic oligonucleotide
cagcauuucaaccaccgca

SEQ ID NO: 1094266 - RNA, 19 nt, Artificial Sequence
  Description of Artificial Sequence: Synthetic oligonucleotide
acggcuauuuagugcaugu

SEQ ID NO: 1094267 - RNA, 19 nt, Artificial Sequence
  Description of Artificial Sequence: Synthetic oligonucleotide
uuuagugcaugucgaggua

SEQ ID NO: 1094268 - RNA, 19 nt, Artificial Sequence
  Description of Artificial Sequence: Synthetic oligonucleotide
ugauacgugcuccucucau

SEQ ID NO: 1094269 - RNA, 19 nt, Artificial Sequence
  Description of Artificial Sequence: Synthetic oligonucleotide
cucggagaagcucucuaag

SEQ ID NO: 1094270 - RNA, 19 nt, Artificial Sequence
  Description of Artificial Sequence: Synthetic oligonucleotide
gugauaaggguuggguggg

SEQ ID NO: 1094271 - RNA, 19 nt, Artificial Sequence
  Description of Artificial Sequence: Synthetic oligonucleotide
uccuuguauggaauacggu

SEQ ID NO: 1094272 - RNA, 19 nt, Artificial Sequence
  Description of Artificial Sequence: Synthetic oligonucleotide
agccccauaacugggguag

SEQ ID NO: 1094273 - RNA, 19 nt, Artificial Sequence
  Description of Artificial Sequence: Synthetic oligonucleotide
uagugcaugucgagguaug

SEQ ID NO: 1094274 - RNA, 19 nt, Artificial Sequence
  Description of Artificial Sequence: Synthetic oligonucleotide
aaauccugagccggggaca

SEQ ID NO: 1094275 - RNA, 19 nt, Artificial Sequence
  Description of Artificial Sequence: Synthetic oligonucleotide
ccauauggcauccagugug

SEQ ID NO: 1094276 - RNA, 19 nt, Artificial Sequence
  Description of Artificial Sequence: Synthetic oligonucleotide
ugcugagcgucuguuagug

SEQ ID NO: 1094277 - RNA, 19 nt, Artificial Sequence
  Description of Artificial Sequence: Synthetic oligonucleotide
cagucucgaaccuucagca

SEQ ID NO: 1094278 - RNA, 19 nt, Artificial Sequence
  Description of Artificial Sequence: Synthetic oligonucleotide
gacaccucuggagucuggg

SEQ ID NO: 1094279 - RNA, 19 nt, Artificial Sequence
  Description of Artificial Sequence: Synthetic oligonucleotide
ucaugagcuuacacacgug

SEQ ID NO: 1094280 - RNA, 19 nt, Artificial Sequence
  Description of Artificial Sequence: Synthetic oligonucleotide
aucgcagagauggguuugc

SEQ ID NO: 1094281 - RNA, 19 nt, Artificial Sequence
  Description of Artificial Sequence: Synthetic oligonucleotide
gaggcucuaguguguguag

SEQ ID NO: 1094282 - RNA, 19 nt, Artificial Sequence
  Description of Artificial Sequence: Synthetic oligonucleotide
ucggggccgaguacgagug

SEQ ID NO: 1094283 - RNA, 19 nt, Artificial Sequence
  Description of Artificial Sequence: Synthetic oligonucleotide
acuccagucucgaaccuuc

SEQ ID NO: 1094284 - RNA, 19 nt, Artificial Sequence
  Description of Artificial Sequence: Synthetic oligonucleotide
auaccugguggaauuguag

SEQ ID NO: 1094285 - RNA, 19 nt, Artificial Sequence
  Description of Artificial Sequence: Synthetic oligonucleotide
gaaaauccugagccgggga

SEQ ID NO: 1094286 - RNA, 19 nt, Artificial Sequence
  Description of Artificial Sequence: Synthetic oligonucleotide
uguauggaauacgguugag

SEQ ID NO: 1094287 - RNA, 19 nt, Artificial Sequence
  Description of Artificial Sequence: Synthetic oligonucleotide
guuagugucuucaggcuuc

SEQ ID NO: 1094288 - RNA, 19 nt, Artificial Sequence
  Description of Artificial Sequence: Synthetic oligonucleotide
cccacgauucaucacauug

SEQ ID NO: 1094289 - RNA, 19 nt, Artificial Sequence
  Description of Artificial Sequence: Synthetic oligonucleotide
uaacugggguaguaccaug

SEQ ID NO: 1094290 - RNA, 19 nt, Artificial Sequence
  Description of Artificial Sequence: Synthetic oligonucleotide
uugauacgugcuccucuca

SEQ ID NO: 1094291 - RNA, 19 nt, Artificial Sequence
  Description of Artificial Sequence: Synthetic oligonucleotide
uuagugcaugucgagguau

SEQ ID NO: 1094292 - RNA, 19 nt, Artificial Sequence
  Description of Artificial Sequence: Synthetic oligonucleotide
guacgagugguccccuucc

SEQ ID NO: 1094293 - RNA, 19 nt, Artificial Sequence
  Description of Artificial Sequence: Synthetic oligonucleotide
agugugugauaaggguugg

SEQ ID NO: 1094294 - RNA, 19 nt, Artificial Sequence
  Description of Artificial Sequence: Synthetic oligonucleotide
acaagcgcaccgccaccgc

SEQ ID NO: 1094295 - RNA, 19 nt, Artificial Sequence
  Description of Artificial Sequence: Synthetic oligonucleotide
caugucaaacuugggucgc

SEQ ID NO: 1094296 - RNA, 19 nt, Artificial Sequence
  Description of Artificial Sequence: Synthetic oligonucleotide
ggcacaaucaugucaaacu

SEQ ID NO: 1094297 - RNA, 19 nt, Artificial Sequence
  Description of Artificial Sequence: Synthetic oligonucleotide
uucggggccgaguacgagu

SEQ ID NO: 1094298 - RNA, 19 nt, Artificial Sequence
  Description of Artificial Sequence: Synthetic oligonucleotide
aucgaucauuacacuacgg

SEQ ID NO: 1094299 - RNA, 19 nt, Artificial Sequence
  Description of Artificial Sequence: Synthetic oligonucleotide
ccauaacugggguaguacc

SEQ ID NO: 1094300 - RNA, 19 nt, Artificial Sequence
  Description of Artificial Sequence: Synthetic oligonucleotide
auuggagacgggaggcaac

SEQ ID NO: 1094301 - RNA, 19 nt, Artificial Sequence
  Description of Artificial Sequence: Synthetic oligonucleotide
agcacguuuggaugugaga

SEQ ID NO: 1094302 - RNA, 19 nt, Artificial Sequence
  Description of Artificial Sequence: Synthetic oligonucleotide
ucaauaccggaguguuugu

SEQ ID NO: 1094303 - RNA, 19 nt, Artificial Sequence
  Description of Artificial Sequence: Synthetic oligonucleotide
aauaccugguggaauugua

SEQ ID NO: 1094304 - RNA, 19 nt, Artificial Sequence
  Description of Artificial Sequence: Synthetic oligonucleotide
caugcugauucgagcaguc

SEQ ID NO: 1094305 - RNA, 19 nt, Artificial Sequence
  Description of Artificial Sequence: Synthetic oligonucleotide
auuacacuacggcuauuua

SEQ ID NO: 1094306 - RNA, 19 nt, Artificial Sequence
  Description of Artificial Sequence: Synthetic oligonucleotide
uucucugcccguucucgga

SEQ ID NO: 1094307 - RNA, 19 nt, Artificial Sequence
  Description of Artificial Sequence: Synthetic oligonucleotide
uaccaugauuggagacggg

SEQ ID NO: 1094308 - RNA, 19 nt, Artificial Sequence
  Description of Artificial Sequence: Synthetic oligonucleotide
agcaaagggcaccucucgu

SEQ ID NO: 1094309 - RNA, 19 nt, Artificial Sequence
  Description of Artificial Sequence: Synthetic oligonucleotide
ucccggacaggagagugcc

SEQ ID NO: 1094310 - RNA, 19 nt, Artificial Sequence
  Description of Artificial Sequence: Synthetic oligonucleotide
cuuuacagcuuggcucugg

SEQ ID NO: 1094311 - RNA, 19 nt, Artificial Sequence
  Description of Artificial Sequence: Synthetic oligonucleotide
gaucgcagagauggguuug

SEQ ID NO: 1094312 - RNA, 19 nt, Artificial Sequence
  Description of Artificial Sequence: Synthetic oligonucleotide
gcuuaucccucccauguug

SEQ ID NO: 1094313 - RNA, 19 nt, Artificial Sequence
  Description of Artificial Sequence: Synthetic oligonucleotide
guauggaauacgguugaga

SEQ ID NO: 1094314 - RNA, 19 nt, Artificial Sequence
  Description of Artificial Sequence: Synthetic oligonucleotide
gaauacgguugagauucug

SEQ ID NO: 1094315 - RNA, 19 nt, Artificial Sequence
  Description of Artificial Sequence: Synthetic oligonucleotide
gcucguaacugcugcagag

SEQ ID NO: 1094316 - RNA, 19 nt, Artificial Sequence
  Description of Artificial Sequence: Synthetic oligonucleotide
acgagugguccccuuccag

SEQ ID NO: 1094317 - RNA, 19 nt, Artificial Sequence
  Description of Artificial Sequence: Synthetic oligonucleotide
aggcauagugaaggggcac

SEQ ID NO: 1094318 - RNA, 19 nt, Artificial Sequence
  Description of Artificial Sequence: Synthetic oligonucleotide
cacacguguggggaaauac

SEQ ID NO: 1094319 - RNA, 19 nt, Artificial Sequence
  Description of Artificial Sequence: Synthetic oligonucleotide
ugguggaauuguaggccga

SEQ ID NO: 1094320 - RNA, 19 nt, Artificial Sequence
  Description of Artificial Sequence: Synthetic oligonucleotide
uccauagcggcgucccgga

SEQ ID NO: 1094321 - RNA, 19 nt, Artificial Sequence
  Description of Artificial Sequence: Synthetic oligonucleotide
acgaaauuggugccuucau

SEQ ID NO: 1094322 - RNA, 19 nt, Artificial Sequence
  Description of Artificial Sequence: Synthetic oligonucleotide
cauuccgaucuccauauua

SEQ ID NO: 1094323 - RNA, 19 nt, Artificial Sequence
  Description of Artificial Sequence: Synthetic oligonucleotide
uacggcuauuuagugcaug

SEQ ID NO: 1094324 - RNA, 19 nt, Artificial Sequence
  Description of Artificial Sequence: Synthetic oligonucleotide
gcaugucgagguaugagag

SEQ ID NO: 1094325 - RNA, 19 nt, Artificial Sequence
  Description of Artificial Sequence: Synthetic oligonucleotide
uacgagugguccccuucca

SEQ ID NO: 1094326 - RNA, 19 nt, Artificial Sequence
  Description of Artificial Sequence: Synthetic oligonucleotide
cacaagcgcaccgccaccg

SEQ ID NO: 1094327 - RNA, 19 nt, Artificial Sequence
  Description of Artificial Sequence: Synthetic oligonucleotide
uaccggaguguuuguucag

SEQ ID NO: 1094328 - RNA, 19 nt, Artificial Sequence
  Description of Artificial Sequence: Synthetic oligonucleotide
augagcuuacacacgugug

SEQ ID NO: 1094329 - RNA, 19 nt, Artificial Sequence
  Description of Artificial Sequence: Synthetic oligonucleotide
ucgagcagucaugucuuca

SEQ ID NO: 1094330 - RNA, 19 nt, Artificial Sequence
  Description of Artificial Sequence: Synthetic oligonucleotide
ggagacgggaggcaaccag

SEQ ID NO: 1094331 - RNA, 19 nt, Artificial Sequence
  Description of Artificial Sequence: Synthetic oligonucleotide
gcuauuuagugcaugucga

SEQ ID NO: 1094332 - RNA, 19 nt, Artificial Sequence
  Description of Artificial Sequence: Synthetic oligonucleotide
agaucgcagagauggguuu

SEQ ID NO: 1094333 - RNA, 19 nt, Artificial Sequence
  Description of Artificial Sequence: Synthetic oligonucleotide
cuugggucgcuuugcagga

SEQ ID NO: 1094334 - RNA, 19 nt, Artificial Sequence
  Description of Artificial Sequence: Synthetic oligonucleotide
ugccuugaggggacuuccc

SEQ ID NO: 1094335 - RNA, 19 nt, Artificial Sequence
  Description of Artificial Sequence: Synthetic oligonucleotide
gagaagcucucuaaggggu

SEQ ID NO: 1094336 - RNA, 19 nt, Artificial Sequence
  Description of Artificial Sequence: Synthetic oligonucleotide
caugagcuuacacacgugu

SEQ ID NO: 1094337 - RNA, 19 nt, Artificial Sequence
  Description of Artificial Sequence: Synthetic oligonucleotide
uuauugugacaggcagggc

SEQ ID NO: 1094338 - RNA, 19 nt, Artificial Sequence
  Description of Artificial Sequence: Synthetic oligonucleotide
gaagucaauaccggagugu

SEQ ID NO: 1094339 - RNA, 19 nt, Artificial Sequence
  Description of Artificial Sequence: Synthetic oligonucleotide
uuacacacguguggggaaa

SEQ ID NO: 1094340 - RNA, 19 nt, Artificial Sequence
  Description of Artificial Sequence: Synthetic oligonucleotide
gauaaggguugggugggga

SEQ ID NO: 1094341 - RNA, 19 nt, Artificial Sequence
  Description of Artificial Sequence: Synthetic oligonucleotide
agacgggaggcaaccagag

SEQ ID NO: 1094342 - RNA, 19 nt, Artificial Sequence
  Description of Artificial Sequence: Synthetic oligonucleotide
uguaggccgaaggccuucc

SEQ ID NO: 1094343 - RNA, 19 nt, Artificial Sequence
  Description of Artificial Sequence: Synthetic oligonucleotide
acaacgaaauuggugccuu

SEQ ID NO: 1094344 - RNA, 19 nt, Artificial Sequence
  Description of Artificial Sequence: Synthetic oligonucleotide
gcauacaugcgcccugggc

SEQ ID NO: 1094345 - RNA, 19 nt, Artificial Sequence
  Description of Artificial Sequence: Synthetic oligonucleotide
cucuaaggggugccuuggc

SEQ ID NO: 1094346 - RNA, 19 nt, Artificial Sequence
  Description of Artificial Sequence: Synthetic oligonucleotide
gccuugaggggacuucccg

SEQ ID NO: 1094347 - RNA, 19 nt, Artificial Sequence
  Description of Artificial Sequence: Synthetic oligonucleotide
cuuacacacguguggggaa

SEQ ID NO: 1094348 - RNA, 19 nt, Artificial Sequence
  Description of Artificial Sequence: Synthetic oligonucleotide
cauagcggcgucccggaca

SEQ ID NO: 1094349 - RNA, 19 nt, Artificial Sequence
  Description of Artificial Sequence: Synthetic oligonucleotide
gcaggugcauacaugcgcc

SEQ ID NO: 1094350 - RNA, 19 nt, Artificial Sequence
  Description of Artificial Sequence: Synthetic oligonucleotide
gcacguuuggaugugagaa

SEQ ID NO: 1094351 - RNA, 19 nt, Artificial Sequence
  Description of Artificial Sequence: Synthetic oligonucleotide
agugcaugucgagguauga

SEQ ID NO: 1094352 - RNA, 19 nt, Artificial Sequence
  Description of Artificial Sequence: Synthetic oligonucleotide
guggaauuguaggccgaag

SEQ ID NO: 1094353 - RNA, 19 nt, Artificial Sequence
  Description of Artificial Sequence: Synthetic oligonucleotide
cagcucguaacugcugcag

SEQ ID NO: 1094354 - RNA, 19 nt, Artificial Sequence
  Description of Artificial Sequence: Synthetic oligonucleotide
cacguguggggaaauaccu

SEQ ID NO: 1094355 - RNA, 19 nt, Artificial Sequence
  Description of Artificial Sequence: Synthetic oligonucleotide
ccgaucuccauauuagaga

SEQ ID NO: 1094356 - RNA, 19 nt, Artificial Sequence
  Description of Artificial Sequence: Synthetic oligonucleotide
aggggcacauucccaugcu

SEQ ID NO: 1094357 - RNA, 19 nt, Artificial Sequence
  Description of Artificial Sequence: Synthetic oligonucleotide
gauccauauggcauccagu

SEQ ID NO: 1094358 - RNA, 19 nt, Artificial Sequence
  Description of Artificial Sequence: Synthetic oligonucleotide
ccacaacgaaauuggugcc

SEQ ID NO: 1094359 - RNA, 19 nt, Artificial Sequence
  Description of Artificial Sequence: Synthetic oligonucleotide
ggaaauaccugguggaauu

SEQ ID NO: 1094360 - RNA, 19 nt, Artificial Sequence
  Description of Artificial Sequence: Synthetic oligonucleotide
ccauauuagagaggucagc

SEQ ID NO: 1094361 - RNA, 19 nt, Artificial Sequence
  Description of Artificial Sequence: Synthetic oligonucleotide
caacgaaauuggugccuuc

SEQ ID NO: 1094362 - RNA, 19 nt, Artificial Sequence
  Description of Artificial Sequence: Synthetic oligonucleotide
aagcgcaccgccaccgcgu

SEQ ID NO: 1094363 - RNA, 19 nt, Artificial Sequence
  Description of Artificial Sequence: Synthetic oligonucleotide
ucgugucaccaguucccac

SEQ ID NO: 1094364 - RNA, 19 nt, Artificial Sequence
  Description of Artificial Sequence: Synthetic oligonucleotide
acguguggggaaauaccug

SEQ ID NO: 1094365 - RNA, 19 nt, Artificial Sequence
  Description of Artificial Sequence: Synthetic oligonucleotide
gcuccuagcacuggaagca

SEQ ID NO: 1094366 - RNA, 19 nt, Artificial Sequence
  Description of Artificial Sequence: Synthetic oligonucleotide
ucccauguugggagacauc

SEQ ID NO: 1094367 - RNA, 19 nt, Artificial Sequence
  Description of Artificial Sequence: Synthetic oligonucleotide
gaagcacguuuggauguga

SEQ ID NO: 1094368 - RNA, 19 nt, Artificial Sequence
  Description of Artificial Sequence: Synthetic oligonucleotide
gccacaagcgcaccgccac

SEQ ID NO: 1094369 - RNA, 19 nt, Artificial Sequence
  Description of Artificial Sequence: Synthetic oligonucleotide
cucguaacugcugcagaga

SEQ ID NO: 1094370 - RNA, 19 nt, Artificial Sequence
  Description of Artificial Sequence: Synthetic oligonucleotide
uacgugcuccucucaugau

SEQ ID NO: 1094371 - RNA, 19 nt, Artificial Sequence
  Description of Artificial Sequence: Synthetic oligonucleotide
aggcucuaguguguguaga

SEQ ID NO: 1094372 - RNA, 19 nt, Artificial Sequence
  Description of Artificial Sequence: Synthetic oligonucleotide
caaugucauugcucugcca

SEQ ID NO: 1094373 - RNA, 19 nt, Artificial Sequence
  Description of Artificial Sequence: Synthetic oligonucleotide
acgguguccaugacuggcu

SEQ ID NO: 1094374 - RNA, 19 nt, Artificial Sequence
  Description of Artificial Sequence: Synthetic oligonucleotide
ucauuccgaucuccauauu

SEQ ID NO: 1094375 - RNA, 19 nt, Artificial Sequence
  Description of Artificial Sequence: Synthetic oligonucleotide
cacauugauacgugcuccu

SEQ ID NO: 1094376 - RNA, 19 nt, Artificial Sequence
  Description of Artificial Sequence: Synthetic oligonucleotide
cuguacgaugucacggugu

SEQ ID NO: 1094377 - RNA, 19 nt, Artificial Sequence
  Description of Artificial Sequence: Synthetic oligonucleotide
gggcacauucccaugcuca

SEQ ID NO: 1094378 - RNA, 19 nt, Artificial Sequence
  Description of Artificial Sequence: Synthetic oligonucleotide
uacacacguguggggaaau

SEQ ID NO: 1094379 - RNA, 19 nt, Artificial Sequence
  Description of Artificial Sequence: Synthetic oligonucleotide
ggcucuaguguguguagaa

SEQ ID NO: 1094380 - RNA, 19 nt, Artificial Sequence
  Description of Artificial Sequence: Synthetic oligonucleotide
ucccucccauguugggaga

SEQ ID NO: 1094381 - RNA, 19 nt, Artificial Sequence
  Description of Artificial Sequence: Synthetic oligonucleotide
cauuacacuacggcuauuu

SEQ ID NO: 1094382 - RNA, 19 nt, Artificial Sequence
  Description of Artificial Sequence: Synthetic oligonucleotide
ggcuacagugguagggaug

SEQ ID NO: 1094383 - RNA, 19 nt, Artificial Sequence
  Description of Artificial Sequence: Synthetic oligonucleotide
ccgcagagcggccuucucg

SEQ ID NO: 1094384 - RNA, 19 nt, Artificial Sequence
  Description of Artificial Sequence: Synthetic oligonucleotide
cuuguacuccagucucgaa

SEQ ID NO: 1094385 - RNA, 19 nt, Artificial Sequence
  Description of Artificial Sequence: Synthetic oligonucleotide
cagagcggccuucucggca

SEQ ID NO: 1094386 - RNA, 19 nt, Artificial Sequence
  Description of Artificial Sequence: Synthetic oligonucleotide
cccauaacugggguaguac

SEQ ID NO: 1094387 - RNA, 19 nt, Artificial Sequence
  Description of Artificial Sequence: Synthetic oligonucleotide
gagcggccuucucggcagg

SEQ ID NO: 1094388 - RNA, 19 nt, Artificial Sequence
  Description of Artificial Sequence: Synthetic oligonucleotide
agcucucuaaggggugccu

SEQ ID NO: 1094389 - RNA, 19 nt, Artificial Sequence
  Description of Artificial Sequence: Synthetic oligonucleotide
caguccuacuugucuugca

SEQ ID NO: 1094390 - RNA, 19 nt, Artificial Sequence
  Description of Artificial Sequence: Synthetic oligonucleotide
gucccggacaggagagugc

SEQ ID NO: 1094391 - RNA, 19 nt, Artificial Sequence
  Description of Artificial Sequence: Synthetic oligonucleotide
ccgaguacgaguggucccc

SEQ ID NO: 1094392 - RNA, 19 nt, Artificial Sequence
  Description of Artificial Sequence: Synthetic oligonucleotide
acgauucaucacauugaua

SEQ ID NO: 1094393 - RNA, 19 nt, Artificial Sequence
  Description of Artificial Sequence: Synthetic oligonucleotide
guaguacauuguagagaga

SEQ ID NO: 1094394 - RNA, 19 nt, Artificial Sequence
  Description of Artificial Sequence: Synthetic oligonucleotide
acgaugucacgguguccau

SEQ ID NO: 1094395 - RNA, 19 nt, Artificial Sequence
  Description of Artificial Sequence: Synthetic oligonucleotide
caggaccuuccaguccuac

SEQ ID NO: 1094396 - RNA, 19 nt, Artificial Sequence
  Description of Artificial Sequence: Synthetic oligonucleotide
cgaucauuacacuacggcu

SEQ ID NO: 1094397 - RNA, 19 nt, Artificial Sequence
  Description of Artificial Sequence: Synthetic oligonucleotide
gcggccuuuccauagcucu

SEQ ID NO: 1094398 - RNA, 19 nt, Artificial Sequence
  Description of Artificial Sequence: Synthetic oligonucleotide
cucgugucaccaguuccca

SEQ ID NO: 1094399 - RNA, 19 nt, Artificial Sequence
  Description of Artificial Sequence: Synthetic oligonucleotide
uacaugcgcccugggcacu

SEQ ID NO: 1094400 - RNA, 19 nt, Artificial Sequence
  Description of Artificial Sequence: Synthetic oligonucleotide
gugacaggcagggcuuauc

SEQ ID NO: 1094401 - RNA, 19 nt, Artificial Sequence
  Description of Artificial Sequence: Synthetic oligonucleotide
acaugcgcccugggcacug

SEQ ID NO: 1094402 - RNA, 19 nt, Artificial Sequence
  Description of Artificial Sequence: Synthetic oligonucleotide
ggcgucccggacaggagag

SEQ ID NO: 1094403 - RNA, 19 nt, Artificial Sequence
  Description of Artificial Sequence: Synthetic oligonucleotide
cacaacgaaauuggugccu

SEQ ID NO: 1094404 - RNA, 19 nt, Artificial Sequence
  Description of Artificial Sequence: Synthetic oligonucleotide
gcauuucaaccaccgcaga

SEQ ID NO: 1094405 - RNA, 19 nt, Artificial Sequence
  Description of Artificial Sequence: Synthetic oligonucleotide
ucauuacacuacggcuauu

SEQ ID NO: 1094406 - RNA, 19 nt, Artificial Sequence
  Description of Artificial Sequence: Synthetic oligonucleotide
ugcugacaagagccccguu

SEQ ID NO: 1094407 - RNA, 19 nt, Artificial Sequence
  Description of Artificial Sequence: Synthetic oligonucleotide
ccggcucccagcucguaac

SEQ ID NO: 1094408 - RNA, 19 nt, Artificial Sequence
  Description of Artificial Sequence: Synthetic oligonucleotide
guaggccgaaggccuucca

SEQ ID NO: 1094409 - RNA, 19 nt, Artificial Sequence
  Description of Artificial Sequence: Synthetic oligonucleotide
gguggaauuguaggccgaa

SEQ ID NO: 1094410 - RNA, 19 nt, Artificial Sequence
  Description of Artificial Sequence: Synthetic oligonucleotide
cauugaagucccugcuuuu

SEQ ID NO: 1094411 - RNA, 19 nt, Artificial Sequence
  Description of Artificial Sequence: Synthetic oligonucleotide
gccccuuuuggggcuacag

SEQ ID NO: 1094412 - RNA, 19 nt, Artificial Sequence
  Description of Artificial Sequence: Synthetic oligonucleotide
caugcgcccugggcacugg

SEQ ID NO: 1094413 - RNA, 19 nt, Artificial Sequence
  Description of Artificial Sequence: Synthetic oligonucleotide
caugcucauucacugcauu

SEQ ID NO: 1094414 - RNA, 19 nt, Artificial Sequence
  Description of Artificial Sequence: Synthetic oligonucleotide
augcgcccugggcacugga

SEQ ID NO: 1094415 - RNA, 19 nt, Artificial Sequence
  Description of Artificial Sequence: Synthetic oligonucleotide
acacacguguggggaaaua

SEQ ID NO: 1094416 - RNA, 19 nt, Artificial Sequence
  Description of Artificial Sequence: Synthetic oligonucleotide
cuguguuguccagccacaa

SEQ ID NO: 1094417 - RNA, 19 nt, Artificial Sequence
  Description of Artificial Sequence: Synthetic oligonucleotide
ccauuucggggccgaguac

SEQ ID NO: 1094418 - RNA, 19 nt, Artificial Sequence
  Description of Artificial Sequence: Synthetic oligonucleotide
cccauuucggggccgagua

SEQ ID NO: 1094419 - RNA, 19 nt, Artificial Sequence
  Description of Artificial Sequence: Synthetic oligonucleotide
ccuuguacuccagucucga

SEQ ID NO: 1094420 - RNA, 19 nt, Artificial Sequence
  Description of Artificial Sequence: Synthetic oligonucleotide
gcagggcuuaucccuccca

SEQ ID NO: 1094421 - RNA, 19 nt, Artificial Sequence
  Description of Artificial Sequence: Synthetic oligonucleotide
ccacaagcgcaccgccacc

SEQ ID NO: 1094422 - RNA, 19 nt, Artificial Sequence
  Description of Artificial Sequence: Synthetic oligonucleotide
gggaaauaccugguggaau

SEQ ID NO: 1094423 - RNA, 19 nt, Artificial Sequence
  Description of Artificial Sequence: Synthetic oligonucleotide
cugcugagcgucuguuagu

SEQ ID NO: 1094424 - RNA, 19 nt, Artificial Sequence
  Description of Artificial Sequence: Synthetic oligonucleotide
caccgccaccgcguugccc

SEQ ID NO: 1094425 - RNA, 19 nt, Artificial Sequence
  Description of Artificial Sequence: Synthetic oligonucleotide
gggagacaucauguggcaa

SEQ ID NO: 1094426 - RNA, 19 nt, Artificial Sequence
  Description of Artificial Sequence: Synthetic oligonucleotide
cgucccggacaggagagug

SEQ ID NO: 1094427 - RNA, 19 nt, Artificial Sequence
  Description of Artificial Sequence: Synthetic oligonucleotide
caauaccggaguguuuguu

SEQ ID NO: 1094428 - RNA, 19 nt, Artificial Sequence
  Description of Artificial Sequence: Synthetic oligonucleotide
gaguacgagugguccccuu

SEQ ID NO: 1094429 - RNA, 19 nt, Artificial Sequence
  Description of Artificial Sequence: Synthetic oligonucleotide
cgaugucacgguguccaug

SEQ ID NO: 1094430 - RNA, 19 nt, Artificial Sequence
  Description of Artificial Sequence: Synthetic oligonucleotide
cgcguugcccucccggcac

SEQ ID NO: 1094431 - RNA, 19 nt, Artificial Sequence
  Description of Artificial Sequence: Synthetic oligonucleotide
gguccacaacgaaauuggu

SEQ ID NO: 1094432 - RNA, 19 nt, Artificial Sequence
  Description of Artificial Sequence: Synthetic oligonucleotide
uagcggcgucccggacagg

SEQ ID NO: 1094433 - RNA, 19 nt, Artificial Sequence
  Description of Artificial Sequence: Synthetic oligonucleotide
cuacggcuauuuagugcau

SEQ ID NO: 1094434 - RNA, 19 nt, Artificial Sequence
  Description of Artificial Sequence: Synthetic oligonucleotide
cauagugaaggggcacauu

SEQ ID NO: 1094435 - RNA, 19 nt, Artificial Sequence
  Description of Artificial Sequence: Synthetic oligonucleotide
agccccuuuuggggcuaca

SEQ ID NO: 1094436 - RNA, 19 nt, Artificial Sequence
  Description of Artificial Sequence: Synthetic oligonucleotide
gggguaucauccccacgau

SEQ ID NO: 1094437 - RNA, 19 nt, Artificial Sequence
  Description of Artificial Sequence: Synthetic oligonucleotide
ggggccgaguacgaguggu

SEQ ID NO: 1094438 - RNA, 19 nt, Artificial Sequence
  Description of Artificial Sequence: Synthetic oligonucleotide
gccccguuagccaccaggu

SEQ ID NO: 1094439 - RNA, 19 nt, Artificial Sequence
  Description of Artificial Sequence: Synthetic oligonucleotide
gcugagcgucuguuagugu

SEQ ID NO: 1094440 - RNA, 19 nt, Artificial Sequence
  Description of Artificial Sequence: Synthetic oligonucleotide
gggccgaguacgagugguc

SEQ ID NO: 1094441 - RNA, 19 nt, Artificial Sequence
  Description of Artificial Sequence: Synthetic oligonucleotide
ccauagcggcgucccggac

SEQ ID NO: 1094442 - RNA, 19 nt, Artificial Sequence
  Description of Artificial Sequence: Synthetic oligonucleotide
cuagcacuggaagcacguu

SEQ ID NO: 1094443 - RNA, 19 nt, Artificial Sequence
  Description of Artificial Sequence: Synthetic oligonucleotide
gggucgcuuugcaggaucu

SEQ ID NO: 1094444 - RNA, 19 nt, Artificial Sequence
  Description of Artificial Sequence: Synthetic oligonucleotide
gagugccuugaggggacuu

SEQ ID NO: 1094445 - RNA, 19 nt, Artificial Sequence
  Description of Artificial Sequence: Synthetic oligonucleotide
ccaugcugauucgagcagu

SEQ ID NO: 1094446 - RNA, 19 nt, Artificial Sequence
  Description of Artificial Sequence: Synthetic oligonucleotide
ggaauacgguugagauucu

SEQ ID NO: 1094447 - RNA, 19 nt, Artificial Sequence
  Description of Artificial Sequence: Synthetic oligonucleotide
ccccuuuuggggcuacagu

SEQ ID NO: 1094448 - RNA, 19 nt, Artificial Sequence
  Description of Artificial Sequence: Synthetic oligonucleotide
cccggcucccagcucguaa

SEQ ID NO: 1094449 - RNA, 19 nt, Artificial Sequence
  Description of Artificial Sequence: Synthetic oligonucleotide
cggggccgaguacgagugg

SEQ ID NO: 1094450 - RNA, 19 nt, Artificial Sequence
  Description of Artificial Sequence: Synthetic oligonucleotide
cggcgucccggacaggaga

SEQ ID NO: 1094451 - RNA, 19 nt, Artificial Sequence
  Description of Artificial Sequence: Synthetic oligonucleotide
gcucucuaaggggugccuu

SEQ ID NO: 1094452 - RNA, 19 nt, Artificial Sequence
  Description of Artificial Sequence: Synthetic oligonucleotide
ccgcguugcccucccggca

SEQ ID NO: 1094453 - RNA, 19 nt, Artificial Sequence
  Description of Artificial Sequence: Synthetic oligonucleotide
gcgcaccgccaccgcguug

SEQ ID NO: 1094454 - RNA, 19 nt, Artificial Sequence
  Description of Artificial Sequence: Synthetic oligonucleotide
caccgcagagcggccuucu

SEQ ID NO: 1094455 - RNA, 19 nt, Artificial Sequence
  Description of Artificial Sequence: Synthetic oligonucleotide
ccggacaggagagugccuu

SEQ ID NO: 1094456 - RNA, 19 nt, Artificial Sequence
  Description of Artificial Sequence: Synthetic oligonucleotide
ggucgcuuugcaggaucuu

SEQ ID NO: 1094457 - RNA, 19 nt, Artificial Sequence
  Description of Artificial Sequence: Synthetic oligonucleotide
ccugagccggggacacucu

SEQ ID NO: 1094458 - RNA, 19 nt, Artificial Sequence
  Description of Artificial Sequence: Synthetic oligonucleotide
ccacccaggcaggugcaua

SEQ ID NO: 1094459 - RNA, 19 nt, Artificial Sequence
  Description of Artificial Sequence: Synthetic oligonucleotide
cguugcccucccggcacug

SEQ ID NO: 1094460 - RNA, 19 nt, Artificial Sequence
  Description of Artificial Sequence: Synthetic oligonucleotide
gcguugcccucccggcacu

SEQ ID NO: 1094461 - RNA, 19 nt, Artificial Sequence
  Description of Artificial Sequence: Synthetic oligonucleotide
ccuacuugucuugcaucuu

SEQ ID NO: 1094462 - RNA, 19 nt, Artificial Sequence
  Description of Artificial Sequence: Synthetic oligonucleotide
cguuagccaccagguccuc

SEQ ID NO: 1094463 - RNA, 19 nt, Artificial Sequence
  Description of Artificial Sequence: Synthetic oligonucleotide
ccgccaccgcguugcccuc

SEQ ID NO: 1094464 - RNA, 19 nt, Artificial Sequence
  Description of Artificial Sequence: Synthetic oligonucleotide
cccggacaggagagugccu

SEQ ID NO: 1094465 - RNA, 19 nt, Artificial Sequence
  Description of Artificial Sequence: Synthetic oligonucleotide
gcgucccggacaggagagu

SEQ ID NO: 1094466 - RNA, 19 nt, Artificial Sequence
  Description of Artificial Sequence: Synthetic oligonucleotide
cggcucccagcucguaacu

SEQ ID NO: 1094467 - RNA, 19 nt, Artificial Sequence
  Description of Artificial Sequence: Synthetic oligonucleotide
uauaauucccacaagaaga

SEQ ID NO: 1094468 - RNA, 19 nt, Artificial Sequence
  Description of Artificial Sequence: Synthetic oligonucleotide
aguacgaacacuaacacgc

SEQ ID NO: 1094469 - RNA, 19 nt, Artificial Sequence
  Description of Artificial Sequence: Synthetic oligonucleotide
aaacauugcacaucucucc

SEQ ID NO: 1094470 - RNA, 19 nt, Artificial Sequence
  Description of Artificial Sequence: Synthetic oligonucleotide
uuuguaagcaguuaggcac

SEQ ID NO: 1094471 - RNA, 19 nt, Artificial Sequence
  Description of Artificial Sequence: Synthetic oligonucleotide
aaauaaucccaaccuaaac

SEQ ID NO: 1094472 - RNA, 19 nt, Artificial Sequence
  Description of Artificial Sequence: Synthetic oligonucleotide
aaagacuacuuacuagugg

SEQ ID NO: 1094473 - RNA, 19 nt, Artificial Sequence
  Description of Artificial Sequence: Synthetic oligonucleotide
gaugguauaaaauccacac

SEQ ID NO: 1094474 - RNA, 19 nt, Artificial Sequence
  Description of Artificial Sequence: Synthetic oligonucleotide
acuaacacgcuucuuaggg

SEQ ID NO: 1094475 - RNA, 19 nt, Artificial Sequence
  Description of Artificial Sequence: Synthetic oligonucleotide
uuuaguaaauuuuaauuaa

SEQ ID NO: 1094476 - RNA, 19 nt, Artificial Sequence
  Description of Artificial Sequence: Synthetic oligonucleotide
aagggagcaauaaagcugc

SEQ ID NO: 1094477 - RNA, 19 nt, Artificial Sequence
  Description of Artificial Sequence: Synthetic oligonucleotide
aucaugaaaacaaacuacc

SEQ ID NO: 1094478 - RNA, 19 nt, Artificial Sequence
  Description of Artificial Sequence: Synthetic oligonucleotide
aaacaaacuaccccuagcu

SEQ ID NO: 1094479 - RNA, 19 nt, Artificial Sequence
  Description of Artificial Sequence: Synthetic oligonucleotide
aagacuacuuacuagugga

SEQ ID NO: 1094480 - RNA, 19 nt, Artificial Sequence
  Description of Artificial Sequence: Synthetic oligonucleotide
ucuacugccgaaaugagaa

SEQ ID NO: 1094481 - RNA, 19 nt, Artificial Sequence
  Description of Artificial Sequence: Synthetic oligonucleotide
aaucugaaucaugugaaac

SEQ ID NO: 1094482 - RNA, 19 nt, Artificial Sequence
  Description of Artificial Sequence: Synthetic oligonucleotide
uugaccauaggagugaggg

SEQ ID NO: 1094483 - RNA, 19 nt, Artificial Sequence
  Description of Artificial Sequence: Synthetic oligonucleotide
ucucacuacaacuuuaucu

SEQ ID NO: 1094484 - RNA, 19 nt, Artificial Sequence
  Description of Artificial Sequence: Synthetic oligonucleotide
aacacauuaucucacuaca

SEQ ID NO: 1094485 - RNA, 19 nt, Artificial Sequence
  Description of Artificial Sequence: Synthetic oligonucleotide
uaaagaaugaugccaaauc

SEQ ID NO: 1094486 - RNA, 19 nt, Artificial Sequence
  Description of Artificial Sequence: Synthetic oligonucleotide
aaagaccacucacaguacg

SEQ ID NO: 1094487 - RNA, 19 nt, Artificial Sequence
  Description of Artificial Sequence: Synthetic oligonucleotide
aacgcugggcugcuaaucc

SEQ ID NO: 1094488 - RNA, 19 nt, Artificial Sequence
  Description of Artificial Sequence: Synthetic oligonucleotide
cuuacuaguggauucaaug

SEQ ID NO: 1094489 - RNA, 19 nt, Artificial Sequence
  Description of Artificial Sequence: Synthetic oligonucleotide
aucgauauugcaaugcagc

SEQ ID NO: 1094490 - RNA, 19 nt, Artificial Sequence
  Description of Artificial Sequence: Synthetic oligonucleotide
ugucaaccuagcaagaagc

SEQ ID NO: 1094491 - RNA, 19 nt, Artificial Sequence
  Description of Artificial Sequence: Synthetic oligonucleotide
gauacagugaaaguuauga

SEQ ID NO: 1094492 - RNA, 19 nt, Artificial Sequence
  Description of Artificial Sequence: Synthetic oligonucleotide
gggauguauacacagaugg

SEQ ID NO: 1094493 - RNA, 19 nt, Artificial Sequence
  Description of Artificial Sequence: Synthetic oligonucleotide
aauggcguuuauaauuccc

SEQ ID NO: 1094494 - RNA, 19 nt, Artificial Sequence
  Description of Artificial Sequence: Synthetic oligonucleotide
uagacaauaagagaagaca

SEQ ID NO: 1094495 - RNA, 19 nt, Artificial Sequence
  Description of Artificial Sequence: Synthetic oligonucleotide
ugaucaaccuacaggagug

SEQ ID NO: 1094496 - RNA, 19 nt, Artificial Sequence
  Description of Artificial Sequence: Synthetic oligonucleotide
aaagugugauggcuaacuc

SEQ ID NO: 1094497 - RNA, 19 nt, Artificial Sequence
  Description of Artificial Sequence: Synthetic oligonucleotide
aaccucucaaaaguguggc

SEQ ID NO: 1094498 - RNA, 19 nt, Artificial Sequence
  Description of Artificial Sequence: Synthetic oligonucleotide
gaguaugaaacgucuaggc

SEQ ID NO: 1094499 - RNA, 19 nt, Artificial Sequence
  Description of Artificial Sequence: Synthetic oligonucleotide
cuaaauuuacacacuauca

SEQ ID NO: 1094500 - RNA, 19 nt, Artificial Sequence
  Description of Artificial Sequence: Synthetic oligonucleotide
acuagguagacaauaagag

SEQ ID NO: 1094501 - RNA, 19 nt, Artificial Sequence
  Description of Artificial Sequence: Synthetic oligonucleotide
aauagaaccaaugcuugca

SEQ ID NO: 1094502 - RNA, 19 nt, Artificial Sequence
  Description of Artificial Sequence: Synthetic oligonucleotide
ucuuagggauuccagauaa

SEQ ID NO: 1094503 - RNA, 19 nt, Artificial Sequence
  Description of Artificial Sequence: Synthetic oligonucleotide
caguauaugugccaaagac

SEQ ID NO: 1094504 - RNA, 19 nt, Artificial Sequence
  Description of Artificial Sequence: Synthetic oligonucleotide
ugcaugaacaauuaauuuu

SEQ ID NO: 1094505 - RNA, 19 nt, Artificial Sequence
  Description of Artificial Sequence: Synthetic oligonucleotide
auacagugaaaguuaugac

SEQ ID NO: 1094506 - RNA, 19 nt, Artificial Sequence
  Description of Artificial Sequence: Synthetic oligonucleotide
ugcuuuguaagcaguuagg

SEQ ID NO: 1094507 - RNA, 19 nt, Artificial Sequence
  Description of Artificial Sequence: Synthetic oligonucleotide
ucgaucguaugccugaaug

SEQ ID NO: 1094508 - RNA, 19 nt, Artificial Sequence
  Description of Artificial Sequence: Synthetic oligonucleotide
acauuaucucacuacaacu

SEQ ID NO: 1094509 - RNA, 19 nt, Artificial Sequence
  Description of Artificial Sequence: Synthetic oligonucleotide
ucaauggcguuuauaauuc

SEQ ID NO: 1094510 - RNA, 19 nt, Artificial Sequence
  Description of Artificial Sequence: Synthetic oligonucleotide
ugaggaauaaggcaagaua

SEQ ID NO: 1094511 - RNA, 19 nt, Artificial Sequence
  Description of Artificial Sequence: Synthetic oligonucleotide
uuggcaucuaacccaagcc

SEQ ID NO: 1094512 - RNA, 19 nt, Artificial Sequence
  Description of Artificial Sequence: Synthetic oligonucleotide
auagaaccaaugcuugcac

SEQ ID NO: 1094513 - RNA, 19 nt, Artificial Sequence
  Description of Artificial Sequence: Synthetic oligonucleotide
uaacuagguagacaauaag

SEQ ID NO: 1094514 - RNA, 19 nt, Artificial Sequence
  Description of Artificial Sequence: Synthetic oligonucleotide
aagccauacgaggaaagac

SEQ ID NO: 1094515 - RNA, 19 nt, Artificial Sequence
  Description of Artificial Sequence: Synthetic oligonucleotide
uuaucuuccuuagaugugc

SEQ ID NO: 1094516 - RNA, 19 nt, Artificial Sequence
  Description of Artificial Sequence: Synthetic oligonucleotide
uucaaaagacuacuuacua

SEQ ID NO: 1094517 - RNA, 19 nt, Artificial Sequence
  Description of Artificial Sequence: Synthetic oligonucleotide
cuuugaaguccacuggacg

SEQ ID NO: 1094518 - RNA, 19 nt, Artificial Sequence
  Description of Artificial Sequence: Synthetic oligonucleotide
ucguaugccugaaugagga

SEQ ID NO: 1094519 - RNA, 19 nt, Artificial Sequence
  Description of Artificial Sequence: Synthetic oligonucleotide
acacuucacacauaacuag

SEQ ID NO: 1094520 - RNA, 19 nt, Artificial Sequence
  Description of Artificial Sequence: Synthetic oligonucleotide
augagaaaacuucaaacaa

SEQ ID NO: 1094521 - RNA, 19 nt, Artificial Sequence
  Description of Artificial Sequence: Synthetic oligonucleotide
aagugugauggcuaacucu

SEQ ID NO: 1094522 - RNA, 19 nt, Artificial Sequence
  Description of Artificial Sequence: Synthetic oligonucleotide
gaagggagcaauaaagcug

SEQ ID NO: 1094523 - RNA, 19 nt, Artificial Sequence
  Description of Artificial Sequence: Synthetic oligonucleotide
aacucugcuuuguaagcag

SEQ ID NO: 1094524 - RNA, 19 nt, Artificial Sequence
  Description of Artificial Sequence: Synthetic oligonucleotide
uguuaugagaacagcccug

SEQ ID NO: 1094525 - RNA, 19 nt, Artificial Sequence
  Description of Artificial Sequence: Synthetic oligonucleotide
ugaucgauauugcaaugca

SEQ ID NO: 1094526 - RNA, 19 nt, Artificial Sequence
  Description of Artificial Sequence: Synthetic oligonucleotide
acgaggaaagaccacucac

SEQ ID NO: 1094527 - RNA, 19 nt, Artificial Sequence
  Description of Artificial Sequence: Synthetic oligonucleotide
ucaaagugaucgauauugc

SEQ ID NO: 1094528 - RNA, 19 nt, Artificial Sequence
  Description of Artificial Sequence: Synthetic oligonucleotide
aguaugaaacgucuaggcu

SEQ ID NO: 1094529 - RNA, 19 nt, Artificial Sequence
  Description of Artificial Sequence: Synthetic oligonucleotide
gacccuuugaccauaggag

SEQ ID NO: 1094530 - RNA, 19 nt, Artificial Sequence
  Description of Artificial Sequence: Synthetic oligonucleotide
cugaguaugaaacgucuag

SEQ ID NO: 1094531 - RNA, 19 nt, Artificial Sequence
  Description of Artificial Sequence: Synthetic oligonucleotide
ucacucauuggugacaccc

SEQ ID NO: 1094532 - RNA, 19 nt, Artificial Sequence
  Description of Artificial Sequence: Synthetic oligonucleotide
cacauaacuagguagacaa

SEQ ID NO: 1094533 - RNA, 19 nt, Artificial Sequence
  Description of Artificial Sequence: Synthetic oligonucleotide
uaagcaguuaggcaccuuc

SEQ ID NO: 1094534 - RNA, 19 nt, Artificial Sequence
  Description of Artificial Sequence: Synthetic oligonucleotide
uaaagugugauggcuaacu

SEQ ID NO: 1094535 - RNA, 19 nt, Artificial Sequence
  Description of Artificial Sequence: Synthetic oligonucleotide
cacauuaucucacuacaac

SEQ ID NO: 1094536 - RNA, 19 nt, Artificial Sequence
  Description of Artificial Sequence: Synthetic oligonucleotide
agugucacucauuggugac

SEQ ID NO: 1094537 - RNA, 19 nt, Artificial Sequence
  Description of Artificial Sequence: Synthetic oligonucleotide
caaaaggucaugguggcgc

SEQ ID NO: 1094538 - RNA, 19 nt, Artificial Sequence
  Description of Artificial Sequence: Synthetic oligonucleotide
ugcaagucaugcuagcaga

SEQ ID NO: 1094539 - RNA, 19 nt, Artificial Sequence
  Description of Artificial Sequence: Synthetic oligonucleotide
ucgauauugcaaugcagca

SEQ ID NO: 1094540 - RNA, 19 nt, Artificial Sequence
  Description of Artificial Sequence: Synthetic oligonucleotide
ggagcaauaaagcugcaug

SEQ ID NO: 1094541 - RNA, 19 nt, Artificial Sequence
  Description of Artificial Sequence: Synthetic oligonucleotide
agacccuuugaccauagga

SEQ ID NO: 1094542 - RNA, 19 nt, Artificial Sequence
  Description of Artificial Sequence: Synthetic oligonucleotide
acuaguggauucaauggcg

SEQ ID NO: 1094543 - RNA, 19 nt, Artificial Sequence
  Description of Artificial Sequence: Synthetic oligonucleotide
gagggugucgaucguaugc

SEQ ID NO: 1094544 - RNA, 19 nt, Artificial Sequence
  Description of Artificial Sequence: Synthetic oligonucleotide
aaacgucuaggcuucccug

SEQ ID NO: 1094545 - RNA, 19 nt, Artificial Sequence
  Description of Artificial Sequence: Synthetic oligonucleotide
cacaguacgaacacuaaca

SEQ ID NO: 1094546 - RNA, 19 nt, Artificial Sequence
  Description of Artificial Sequence: Synthetic oligonucleotide
ugcaugguuucaaaagacu

SEQ ID NO: 1094547 - RNA, 19 nt, Artificial Sequence
  Description of Artificial Sequence: Synthetic oligonucleotide
aaaucugaaucaugugaaa

SEQ ID NO: 1094548 - RNA, 19 nt, Artificial Sequence
  Description of Artificial Sequence: Synthetic oligonucleotide
uuccuuccggguuaaagug

SEQ ID NO: 1094549 - RNA, 19 nt, Artificial Sequence
  Description of Artificial Sequence: Synthetic oligonucleotide
ggaaagaccacucacagua

SEQ ID NO: 1094550 - RNA, 19 nt, Artificial Sequence
  Description of Artificial Sequence: Synthetic oligonucleotide
augcaagucaugcuagcag

SEQ ID NO: 1094551 - RNA, 19 nt, Artificial Sequence
  Description of Artificial Sequence: Synthetic oligonucleotide
uuccagauaaaagggaaac

SEQ ID NO: 1094552 - RNA, 19 nt, Artificial Sequence
  Description of Artificial Sequence: Synthetic oligonucleotide
aaaauaaucccaaccuaaa

SEQ ID NO: 1094553 - RNA, 19 nt, Artificial Sequence
  Description of Artificial Sequence: Synthetic oligonucleotide
auccauuugaagaauauaa

SEQ ID NO: 1094554 - RNA, 19 nt, Artificial Sequence
  Description of Artificial Sequence: Synthetic oligonucleotide
auaguauuacaauggcagu

SEQ ID NO: 1094555 - RNA, 19 nt, Artificial Sequence
  Description of Artificial Sequence: Synthetic oligonucleotide
agugugauggcuaacucug

SEQ ID NO: 1094556 - RNA, 19 nt, Artificial Sequence
  Description of Artificial Sequence: Synthetic oligonucleotide
cauguugagaucagcauga

SEQ ID NO: 1094557 - RNA, 19 nt, Artificial Sequence
  Description of Artificial Sequence: Synthetic oligonucleotide
acacgcuguauuccaaacg

SEQ ID NO: 1094558 - RNA, 19 nt, Artificial Sequence
  Description of Artificial Sequence: Synthetic oligonucleotide
gcuaaauuuacacacuauc

SEQ ID NO: 1094559 - RNA, 19 nt, Artificial Sequence
  Description of Artificial Sequence: Synthetic oligonucleotide
gaagauucaggccacaaau

SEQ ID NO: 1094560 - RNA, 19 nt, Artificial Sequence
  Description of Artificial Sequence: Synthetic oligonucleotide
uguugagaucagcaugagc

SEQ ID NO: 1094561 - RNA, 19 nt, Artificial Sequence
  Description of Artificial Sequence: Synthetic oligonucleotide
agaaugaugccaaaucuga

SEQ ID NO: 1094562 - RNA, 19 nt, Artificial Sequence
  Description of Artificial Sequence: Synthetic oligonucleotide
cacgaaggagccgagaacc

SEQ ID NO: 1094563 - RNA, 19 nt, Artificial Sequence
  Description of Artificial Sequence: Synthetic oligonucleotide
augggauguauacacagau

SEQ ID NO: 1094564 - RNA, 19 nt, Artificial Sequence
  Description of Artificial Sequence: Synthetic oligonucleotide
gucagcaacacauuaucuc

SEQ ID NO: 1094565 - RNA, 19 nt, Artificial Sequence
  Description of Artificial Sequence: Synthetic oligonucleotide
uggacgguguuccacucag

SEQ ID NO: 1094566 - RNA, 19 nt, Artificial Sequence
  Description of Artificial Sequence: Synthetic oligonucleotide
aguauaugugccaaagaca

SEQ ID NO: 1094567 - RNA, 19 nt, Artificial Sequence
  Description of Artificial Sequence: Synthetic oligonucleotide
ggagccgagaaccugauac

SEQ ID NO: 1094568 - RNA, 19 nt, Artificial Sequence
  Description of Artificial Sequence: Synthetic oligonucleotide
cuaaaccccagcaggcucc

SEQ ID NO: 1094569 - RNA, 19 nt, Artificial Sequence
  Description of Artificial Sequence: Synthetic oligonucleotide
caguacgaacacuaacacg

SEQ ID NO: 1094570 - RNA, 19 nt, Artificial Sequence
  Description of Artificial Sequence: Synthetic oligonucleotide
acuaaaacuuugguuuuag

SEQ ID NO: 1094571 - RNA, 19 nt, Artificial Sequence
  Description of Artificial Sequence: Synthetic oligonucleotide
aucuaacccaagccugggc

SEQ ID NO: 1094572 - RNA, 19 nt, Artificial Sequence
  Description of Artificial Sequence: Synthetic oligonucleotide
ugguugcuaaauuuacaca

SEQ ID NO: 1094573 - RNA, 19 nt, Artificial Sequence
  Description of Artificial Sequence: Synthetic oligonucleotide
ugggauguauacacagaug

SEQ ID NO: 1094574 - RNA, 19 nt, Artificial Sequence
  Description of Artificial Sequence: Synthetic oligonucleotide
gaggggaugggauguauac

SEQ ID NO: 1094575 - RNA, 19 nt, Artificial Sequence
  Description of Artificial Sequence: Synthetic oligonucleotide
ugagaccacaccccgguac

SEQ ID NO: 1094576 - RNA, 19 nt, Artificial Sequence
  Description of Artificial Sequence: Synthetic oligonucleotide
ugauggcuaacucugcuuu

SEQ ID NO: 1094577 - RNA, 19 nt, Artificial Sequence
  Description of Artificial Sequence: Synthetic oligonucleotide
cuagguagacaauaagaga

SEQ ID NO: 1094578 - RNA, 19 nt, Artificial Sequence
  Description of Artificial Sequence: Synthetic oligonucleotide
aaaaggucaugguggcgca

SEQ ID NO: 1094579 - RNA, 19 nt, Artificial Sequence
  Description of Artificial Sequence: Synthetic oligonucleotide
agggugucgaucguaugcc

SEQ ID NO: 1094580 - RNA, 19 nt, Artificial Sequence
  Description of Artificial Sequence: Synthetic oligonucleotide
gaucgauauugcaaugcag

SEQ ID NO: 1094581 - RNA, 19 nt, Artificial Sequence
  Description of Artificial Sequence: Synthetic oligonucleotide
acgaacacuaacacgcuuc

SEQ ID NO: 1094582 - RNA, 19 nt, Artificial Sequence
  Description of Artificial Sequence: Synthetic oligonucleotide
gauauugcaaugcagcauu

SEQ ID NO: 1094583 - RNA, 19 nt, Artificial Sequence
  Description of Artificial Sequence: Synthetic oligonucleotide
ugaccauaggagugagggg

SEQ ID NO: 1094584 - RNA, 19 nt, Artificial Sequence
  Description of Artificial Sequence: Synthetic oligonucleotide
uaacacgcuucuuagggau

SEQ ID NO: 1094585 - RNA, 19 nt, Artificial Sequence
  Description of Artificial Sequence: Synthetic oligonucleotide
uguauuccaaacgcugggc

SEQ ID NO: 1094586 - RNA, 19 nt, Artificial Sequence
  Description of Artificial Sequence: Synthetic oligonucleotide
ggaugggauguauacacag

SEQ ID NO: 1094587 - RNA, 19 nt, Artificial Sequence
  Description of Artificial Sequence: Synthetic oligonucleotide
ucauuggcaucuaacccaa

SEQ ID NO: 1094588 - RNA, 19 nt, Artificial Sequence
  Description of Artificial Sequence: Synthetic oligonucleotide
cacaguauaugugccaaag

SEQ ID NO: 1094589 - RNA, 19 nt, Artificial Sequence
  Description of Artificial Sequence: Synthetic oligonucleotide
aaacgcugggcugcuaauc

SEQ ID NO: 1094590 - RNA, 19 nt, Artificial Sequence
  Description of Artificial Sequence: Synthetic oligonucleotide
uggcauugcgcucauggaa

SEQ ID NO: 1094591 - RNA, 19 nt, Artificial Sequence
  Description of Artificial Sequence: Synthetic oligonucleotide
uugcauugauaguauuaca

SEQ ID NO: 1094592 - RNA, 19 nt, Artificial Sequence
  Description of Artificial Sequence: Synthetic oligonucleotide
uacgaggaaagaccacuca

SEQ ID NO: 1094593 - RNA, 19 nt, Artificial Sequence
  Description of Artificial Sequence: Synthetic oligonucleotide
gcgcucauggaacaaaagg

SEQ ID NO: 1094594 - RNA, 19 nt, Artificial Sequence
  Description of Artificial Sequence: Synthetic oligonucleotide
uccuuagaugugcaugaac

SEQ ID NO: 1094595 - RNA, 19 nt, Artificial Sequence
  Description of Artificial Sequence: Synthetic oligonucleotide
aggaauaaggcaagauauc

SEQ ID NO: 1094596 - RNA, 19 nt, Artificial Sequence
  Description of Artificial Sequence: Synthetic oligonucleotide
gaggaauaaggcaagauau

SEQ ID NO: 1094597 - RNA, 19 nt, Artificial Sequence
  Description of Artificial Sequence: Synthetic oligonucleotide
caaagacacuguaaacaug

SEQ ID NO: 1094598 - RNA, 19 nt, Artificial Sequence
  Description of Artificial Sequence: Synthetic oligonucleotide
acugccgaaaugagaaaac

SEQ ID NO: 1094599 - RNA, 19 nt, Artificial Sequence
  Description of Artificial Sequence: Synthetic oligonucleotide
guagacaauaagagaagac

SEQ ID NO: 1094600 - RNA, 19 nt, Artificial Sequence
  Description of Artificial Sequence: Synthetic oligonucleotide
cagaguggccuaaaugcag

SEQ ID NO: 1094601 - RNA, 19 nt, Artificial Sequence
  Description of Artificial Sequence: Synthetic oligonucleotide
acccuuugaccauaggagu

SEQ ID NO: 1094602 - RNA, 19 nt, Artificial Sequence
  Description of Artificial Sequence: Synthetic oligonucleotide
guuauggccucuacugccg

SEQ ID NO: 1094603 - RNA, 19 nt, Artificial Sequence
  Description of Artificial Sequence: Synthetic oligonucleotide
guuaaagugugauggcuaa

SEQ ID NO: 1094604 - RNA, 19 nt, Artificial Sequence
  Description of Artificial Sequence: Synthetic oligonucleotide
gugaucgauauugcaaugc

SEQ ID NO: 1094605 - RNA, 19 nt, Artificial Sequence
  Description of Artificial Sequence: Synthetic oligonucleotide
ugcgcucauggaacaaaag

SEQ ID NO: 1094606 - RNA, 19 nt, Artificial Sequence
  Description of Artificial Sequence: Synthetic oligonucleotide
ugccgaaaugagaaaacuu

SEQ ID NO: 1094607 - RNA, 19 nt, Artificial Sequence
  Description of Artificial Sequence: Synthetic oligonucleotide
ggcugcuaaucccagaccc

SEQ ID NO: 1094608 - RNA, 19 nt, Artificial Sequence
  Description of Artificial Sequence: Synthetic oligonucleotide
ccggguuaaagugugaugg

SEQ ID NO: 1094609 - RNA, 19 nt, Artificial Sequence
  Description of Artificial Sequence: Synthetic oligonucleotide
uaucuuccuuagaugugca

SEQ ID NO: 1094610 - RNA, 19 nt, Artificial Sequence
  Description of Artificial Sequence: Synthetic oligonucleotide
aguauuacaauggcaguua

SEQ ID NO: 1094611 - RNA, 19 nt, Artificial Sequence
  Description of Artificial Sequence: Synthetic oligonucleotide
cacaugcaaaaucugguca

SEQ ID NO: 1094612 - RNA, 19 nt, Artificial Sequence
  Description of Artificial Sequence: Synthetic oligonucleotide
agcaacacauuaucucacu

SEQ ID NO: 1094613 - RNA, 19 nt, Artificial Sequence
  Description of Artificial Sequence: Synthetic oligonucleotide
gguacugaucaaccuacag

SEQ ID NO: 1094614 - RNA, 19 nt, Artificial Sequence
  Description of Artificial Sequence: Synthetic oligonucleotide
cacuaacacgcuucuuagg

SEQ ID NO: 1094615 - RNA, 19 nt, Artificial Sequence
  Description of Artificial Sequence: Synthetic oligonucleotide
gacacgcuguauuccaaac

SEQ ID NO: 1094616 - RNA, 19 nt, Artificial Sequence
  Description of Artificial Sequence: Synthetic oligonucleotide
uccggguuaaagugugaug

SEQ ID NO: 1094617 - RNA, 19 nt, Artificial Sequence
  Description of Artificial Sequence: Synthetic oligonucleotide
cuaccugucagcaacacau

SEQ ID NO: 1094618 - RNA, 19 nt, Artificial Sequence
  Description of Artificial Sequence: Synthetic oligonucleotide
agcaauaaagcugcauggu

SEQ ID NO: 1094619 - RNA, 19 nt, Artificial Sequence
  Description of Artificial Sequence: Synthetic oligonucleotide
uggccuaaaugcagucucc

SEQ ID NO: 1094620 - RNA, 19 nt, Artificial Sequence
  Description of Artificial Sequence: Synthetic oligonucleotide
uacugccgaaaugagaaaa

SEQ ID NO: 1094621 - RNA, 19 nt, Artificial Sequence
  Description of Artificial Sequence: Synthetic oligonucleotide
uggcguuuauaauucccac

SEQ ID NO: 1094622 - RNA, 19 nt, Artificial Sequence
  Description of Artificial Sequence: Synthetic oligonucleotide
caauaagagaagacacuga

SEQ ID NO: 1094623 - RNA, 19 nt, Artificial Sequence
  Description of Artificial Sequence: Synthetic oligonucleotide
aacuaccccuagcugagua

SEQ ID NO: 1094624 - RNA, 19 nt, Artificial Sequence
  Description of Artificial Sequence: Synthetic oligonucleotide
cauaacuagguagacaaua

SEQ ID NO: 1094625 - RNA, 19 nt, Artificial Sequence
  Description of Artificial Sequence: Synthetic oligonucleotide
acgcugggcugcuaauccc

SEQ ID NO: 1094626 - RNA, 19 nt, Artificial Sequence
  Description of Artificial Sequence: Synthetic oligonucleotide
guggccuaaaugcagucuc

SEQ ID NO: 1094627 - RNA, 19 nt, Artificial Sequence
  Description of Artificial Sequence: Synthetic oligonucleotide
agguuaaugagguggcauu

SEQ ID NO: 1094628 - RNA, 19 nt, Artificial Sequence
  Description of Artificial Sequence: Synthetic oligonucleotide
cacacuucacacauaacua

SEQ ID NO: 1094629 - RNA, 19 nt, Artificial Sequence
  Description of Artificial Sequence: Synthetic oligonucleotide
auacgaggaaagaccacuc

SEQ ID NO: 1094630 - RNA, 19 nt, Artificial Sequence
  Description of Artificial Sequence: Synthetic oligonucleotide
ugaccccucaguccuugcc

SEQ ID NO: 1094631 - RNA, 19 nt, Artificial Sequence
  Description of Artificial Sequence: Synthetic oligonucleotide
acacugaacugagaagcag

SEQ ID NO: 1094632 - RNA, 19 nt, Artificial Sequence
  Description of Artificial Sequence: Synthetic oligonucleotide
caauggcguuuauaauucc

SEQ ID NO: 1094633 - RNA, 19 nt, Artificial Sequence
  Description of Artificial Sequence: Synthetic oligonucleotide
ucaaccuagcaagaagcau

SEQ ID NO: 1094634 - RNA, 19 nt, Artificial Sequence
  Description of Artificial Sequence: Synthetic oligonucleotide
acuggacgguguuccacuc

SEQ ID NO: 1094635 - RNA, 19 nt, Artificial Sequence
  Description of Artificial Sequence: Synthetic oligonucleotide
gcuuuguaagcaguuaggc

SEQ ID NO: 1094636 - RNA, 19 nt, Artificial Sequence
  Description of Artificial Sequence: Synthetic oligonucleotide
uugcgcucauggaacaaaa

SEQ ID NO: 1094637 - RNA, 19 nt, Artificial Sequence
  Description of Artificial Sequence: Synthetic oligonucleotide
ugguuucaaaagacuacuu

SEQ ID NO: 1094638 - RNA, 19 nt, Artificial Sequence
  Description of Artificial Sequence: Synthetic oligonucleotide
acacauaacuagguagaca

SEQ ID NO: 1094639 - RNA, 19 nt, Artificial Sequence
  Description of Artificial Sequence: Synthetic oligonucleotide
gcguuuauaauucccacaa

SEQ ID NO: 1094640 - RNA, 19 nt, Artificial Sequence
  Description of Artificial Sequence: Synthetic oligonucleotide
agccgagaaccugauacag

SEQ ID NO: 1094641 - RNA, 19 nt, Artificial Sequence
  Description of Artificial Sequence: Synthetic oligonucleotide
auggcguuuauaauuccca

SEQ ID NO: 1094642 - RNA, 19 nt, Artificial Sequence
  Description of Artificial Sequence: Synthetic oligonucleotide
aagauucaggccacaaaua

SEQ ID NO: 1094643 - RNA, 19 nt, Artificial Sequence
  Description of Artificial Sequence: Synthetic oligonucleotide
gccgaaaugagaaaacuuc

SEQ ID NO: 1094644 - RNA, 19 nt, Artificial Sequence
  Description of Artificial Sequence: Synthetic oligonucleotide
gagcagugucacucauugg

SEQ ID NO: 1094645 - RNA, 19 nt, Artificial Sequence
  Description of Artificial Sequence: Synthetic oligonucleotide
accccgguacugaucaacc

SEQ ID NO: 1094646 - RNA, 19 nt, Artificial Sequence
  Description of Artificial Sequence: Synthetic oligonucleotide
uuaaagugugauggcuaac

SEQ ID NO: 1094647 - RNA, 19 nt, Artificial Sequence
  Description of Artificial Sequence: Synthetic oligonucleotide
ugaaacgucuaggcuuccc

SEQ ID NO: 1094648 - RNA, 19 nt, Artificial Sequence
  Description of Artificial Sequence: Synthetic oligonucleotide
gccuugaucagcuggggug

SEQ ID NO: 1094649 - RNA, 19 nt, Artificial Sequence
  Description of Artificial Sequence: Synthetic oligonucleotide
cauuggugacaccccagac

SEQ ID NO: 1094650 - RNA, 19 nt, Artificial Sequence
  Description of Artificial Sequence: Synthetic oligonucleotide
gaaacgucuaggcuucccu

SEQ ID NO: 1094651 - RNA, 19 nt, Artificial Sequence
  Description of Artificial Sequence: Synthetic oligonucleotide
aguuaggcaccuucaguuu

SEQ ID NO: 1094652 - RNA, 19 nt, Artificial Sequence
  Description of Artificial Sequence: Synthetic oligonucleotide
cuaacacgcuucuuaggga

SEQ ID NO: 1094653 - RNA, 19 nt, Artificial Sequence
  Description of Artificial Sequence: Synthetic oligonucleotide
uacgaacacuaacacgcuu

SEQ ID NO: 1094654 - RNA, 19 nt, Artificial Sequence
  Description of Artificial Sequence: Synthetic oligonucleotide
aaacacaacuuugcauuuu

SEQ ID NO: 1094655 - RNA, 19 nt, Artificial Sequence
  Description of Artificial Sequence: Synthetic oligonucleotide
gggaagggagcaauaaagc

SEQ ID NO: 1094656 - RNA, 19 nt, Artificial Sequence
  Description of Artificial Sequence: Synthetic oligonucleotide
uuccagcaaagacacugua

SEQ ID NO: 1094657 - RNA, 19 nt, Artificial Sequence
  Description of Artificial Sequence: Synthetic oligonucleotide
ugaaguccacuggacggug

SEQ ID NO: 1094658 - RNA, 19 nt, Artificial Sequence
  Description of Artificial Sequence: Synthetic oligonucleotide
gguauaaaauccacaccac

SEQ ID NO: 1094659 - RNA, 19 nt, Artificial Sequence
  Description of Artificial Sequence: Synthetic oligonucleotide
uccacucagucccgagggc

SEQ ID NO: 1094660 - RNA, 19 nt, Artificial Sequence
  Description of Artificial Sequence: Synthetic oligonucleotide
cacacauaacuagguagac

SEQ ID NO: 1094661 - RNA, 19 nt, Artificial Sequence
  Description of Artificial Sequence: Synthetic oligonucleotide
uaccccuagcugaguauga

SEQ ID NO: 1094662 - RNA, 19 nt, Artificial Sequence
  Description of Artificial Sequence: Synthetic oligonucleotide
gguuaaugagguggcauug

SEQ ID NO: 1094663 - RNA, 19 nt, Artificial Sequence
  Description of Artificial Sequence: Synthetic oligonucleotide
caucuaacccaagccuggg

SEQ ID NO: 1094664 - RNA, 19 nt, Artificial Sequence
  Description of Artificial Sequence: Synthetic oligonucleotide
cuuugaccauaggagugag

SEQ ID NO: 1094665 - RNA, 19 nt, Artificial Sequence
  Description of Artificial Sequence: Synthetic oligonucleotide
cuaccccuagcugaguaug

SEQ ID NO: 1094666 - RNA, 19 nt, Artificial Sequence
  Description of Artificial Sequence: Synthetic oligonucleotide
gugaaaguuaugacagcca

SEQ ID NO: 1094667 - RNA, 19 nt, Artificial Sequence
  Description of Artificial Sequence: Synthetic oligonucleotide
gagccgagaaccugauaca

SEQ ID NO: 1094668 - RNA, 19 nt, Artificial Sequence
  Description of Artificial Sequence: Synthetic oligonucleotide
augaccccucaguccuugc

SEQ ID NO: 1094669 - RNA, 19 nt, Artificial Sequence
  Description of Artificial Sequence: Synthetic oligonucleotide
gaccccucaguccuugcca

SEQ ID NO: 1094670 - RNA, 19 nt, Artificial Sequence
  Description of Artificial Sequence: Synthetic oligonucleotide
cagugucacucauugguga

SEQ ID NO: 1094671 - RNA, 19 nt, Artificial Sequence
  Description of Artificial Sequence: Synthetic oligonucleotide
cucuacugccgaaaugaga

SEQ ID NO: 1094672 - RNA, 19 nt, Artificial Sequence
  Description of Artificial Sequence: Synthetic oligonucleotide
ggcaucuaacccaagccug

SEQ ID NO: 1094673 - RNA, 19 nt, Artificial Sequence
  Description of Artificial Sequence: Synthetic oligonucleotide
acuaccccuagcugaguau

SEQ ID NO: 1094674 - RNA, 19 nt, Artificial Sequence
  Description of Artificial Sequence: Synthetic oligonucleotide
aguggccuaaaugcagucu

SEQ ID NO: 1094675 - RNA, 19 nt, Artificial Sequence
  Description of Artificial Sequence: Synthetic oligonucleotide
agagggugucgaucguaug

SEQ ID NO: 1094676 - RNA, 19 nt, Artificial Sequence
  Description of Artificial Sequence: Synthetic oligonucleotide
ggcguuuauaauucccaca

SEQ ID NO: 1094677 - RNA, 19 nt, Artificial Sequence
  Description of Artificial Sequence: Synthetic oligonucleotide
gcaucuaacccaagccugg

SEQ ID NO: 1094678 - RNA, 19 nt, Artificial Sequence
  Description of Artificial Sequence: Synthetic oligonucleotide
ccuccuaccugucagcaac

SEQ ID NO: 1094679 - RNA, 19 nt, Artificial Sequence
  Description of Artificial Sequence: Synthetic oligonucleotide
gcucauggaacaaaagguc

SEQ ID NO: 1094680 - RNA, 19 nt, Artificial Sequence
  Description of Artificial Sequence: Synthetic oligonucleotide
uacuuacuaguggauucaa

SEQ ID NO: 1094681 - RNA, 19 nt, Artificial Sequence
  Description of Artificial Sequence: Synthetic oligonucleotide
gaguggccuaaaugcaguc

SEQ ID NO: 1094682 - RNA, 19 nt, Artificial Sequence
  Description of Artificial Sequence: Synthetic oligonucleotide
gaugccaaaucugaaucau

SEQ ID NO: 1094683 - RNA, 19 nt, Artificial Sequence
  Description of Artificial Sequence: Synthetic oligonucleotide
auugcgcucauggaacaaa

SEQ ID NO: 1094684 - RNA, 19 nt, Artificial Sequence
  Description of Artificial Sequence: Synthetic oligonucleotide
ggugacuaaaacuuugguu

SEQ ID NO: 1094685 - RNA, 19 nt, Artificial Sequence
  Description of Artificial Sequence: Synthetic oligonucleotide
ggugugcauccauuugaag

SEQ ID NO: 1094686 - RNA, 19 nt, Artificial Sequence
  Description of Artificial Sequence: Synthetic oligonucleotide
gucaaccuagcaagaagca

SEQ ID NO: 1094687 - RNA, 19 nt, Artificial Sequence
  Description of Artificial Sequence: Synthetic oligonucleotide
ccgaaaugagaaaacuuca

SEQ ID NO: 1094688 - RNA, 19 nt, Artificial Sequence
  Description of Artificial Sequence: Synthetic oligonucleotide
ggcauugcgcucauggaac

SEQ ID NO: 1094689 - RNA, 19 nt, Artificial Sequence
  Description of Artificial Sequence: Synthetic oligonucleotide
guuaugagaacagcccugu

SEQ ID NO: 1094690 - RNA, 19 nt, Artificial Sequence
  Description of Artificial Sequence: Synthetic oligonucleotide
caguuaggcaccuucaguu

SEQ ID NO: 1094691 - RNA, 19 nt, Artificial Sequence
  Description of Artificial Sequence: Synthetic oligonucleotide
agaugugcaugaacaauua

SEQ ID NO: 1094692 - RNA, 19 nt, Artificial Sequence
  Description of Artificial Sequence: Synthetic oligonucleotide
cuaguggauucaauggcgu

SEQ ID NO: 1094693 - RNA, 19 nt, Artificial Sequence
  Description of Artificial Sequence: Synthetic oligonucleotide
ugcuaaucccagacccuuu

SEQ ID NO: 1094694 - RNA, 19 nt, Artificial Sequence
  Description of Artificial Sequence: Synthetic oligonucleotide
ccuuugaaguccacuggac

SEQ ID NO: 1094695 - RNA, 19 nt, Artificial Sequence
  Description of Artificial Sequence: Synthetic oligonucleotide
uggcaguuauggccucuac

SEQ ID NO: 1094696 - RNA, 19 nt, Artificial Sequence
  Description of Artificial Sequence: Synthetic oligonucleotide
aggggaugggauguauaca

SEQ ID NO: 1094697 - RNA, 19 nt, Artificial Sequence
  Description of Artificial Sequence: Synthetic oligonucleotide
gcaagucaugcuagcagag

SEQ ID NO: 1094698 - RNA, 19 nt, Artificial Sequence
  Description of Artificial Sequence: Synthetic oligonucleotide
uggccucuacugccgaaau

SEQ ID NO: 1094699 - RNA, 19 nt, Artificial Sequence
  Description of Artificial Sequence: Synthetic oligonucleotide
aucccaaccuaaaccccag

SEQ ID NO: 1094700 - RNA, 19 nt, Artificial Sequence
  Description of Artificial Sequence: Synthetic oligonucleotide
acgucuaggcuucccugaa

SEQ ID NO: 1094701 - RNA, 19 nt, Artificial Sequence
  Description of Artificial Sequence: Synthetic oligonucleotide
gagaccacaccccgguacu

SEQ ID NO: 1094702 - RNA, 19 nt, Artificial Sequence
  Description of Artificial Sequence: Synthetic oligonucleotide
guaugccugaaugaggaau

SEQ ID NO: 1094703 - RNA, 19 nt, Artificial Sequence
  Description of Artificial Sequence: Synthetic oligonucleotide
cgcuguauuccaaacgcug

SEQ ID NO: 1094704 - RNA, 19 nt, Artificial Sequence
  Description of Artificial Sequence: Synthetic oligonucleotide
acuuacuaguggauucaau

SEQ ID NO: 1094705 - RNA, 19 nt, Artificial Sequence
  Description of Artificial Sequence: Synthetic oligonucleotide
uccuaccugucagcaacac

SEQ ID NO: 1094706 - RNA, 19 nt, Artificial Sequence
  Description of Artificial Sequence: Synthetic oligonucleotide
gguuaaagugugauggcua

SEQ ID NO: 1094707 - RNA, 19 nt, Artificial Sequence
  Description of Artificial Sequence: Synthetic oligonucleotide
ggcaagauauccacugaga

SEQ ID NO: 1094708 - RNA, 19 nt, Artificial Sequence
  Description of Artificial Sequence: Synthetic oligonucleotide
gccuaaaugcagucuccug

SEQ ID NO: 1094709 - RNA, 19 nt, Artificial Sequence
  Description of Artificial Sequence: Synthetic oligonucleotide
cagacccuuugaccauagg

SEQ ID NO: 1094710 - RNA, 19 nt, Artificial Sequence
  Description of Artificial Sequence: Synthetic oligonucleotide
cauuggcaucuaacccaag

SEQ ID NO: 1094711 - RNA, 19 nt, Artificial Sequence
  Description of Artificial Sequence: Synthetic oligonucleotide
caugaccccucaguccuug

SEQ ID NO: 1094712 - RNA, 19 nt, Artificial Sequence
  Description of Artificial Sequence: Synthetic oligonucleotide
ggugucgaucguaugccug

SEQ ID NO: 1094713 - RNA, 19 nt, Artificial Sequence
  Description of Artificial Sequence: Synthetic oligonucleotide
gcagugucacucauuggug

SEQ ID NO: 1094714 - RNA, 19 nt, Artificial Sequence
  Description of Artificial Sequence: Synthetic oligonucleotide
agacuacuuacuaguggau

SEQ ID NO: 1094715 - RNA, 19 nt, Artificial Sequence
  Description of Artificial Sequence: Synthetic oligonucleotide
aacccaagccugggccaag

SEQ ID NO: 1094716 - RNA, 19 nt, Artificial Sequence
  Description of Artificial Sequence: Synthetic oligonucleotide
ucccagacccuuugaccau

SEQ ID NO: 1094717 - RNA, 19 nt, Artificial Sequence
  Description of Artificial Sequence: Synthetic oligonucleotide
gacuacuuacuaguggauu

SEQ ID NO: 1094718 - RNA, 19 nt, Artificial Sequence
  Description of Artificial Sequence: Synthetic oligonucleotide
caccccgguacugaucaac

SEQ ID NO: 1094719 - RNA, 19 nt, Artificial Sequence
  Description of Artificial Sequence: Synthetic oligonucleotide
aucaaccuacaggaguguu

SEQ ID NO: 1094720 - RNA, 19 nt, Artificial Sequence
  Description of Artificial Sequence: Synthetic oligonucleotide
agcagagggugucgaucgu

SEQ ID NO: 1094721 - RNA, 19 nt, Artificial Sequence
  Description of Artificial Sequence: Synthetic oligonucleotide
ccuaaaccccagcaggcuc

SEQ ID NO: 1094722 - RNA, 19 nt, Artificial Sequence
  Description of Artificial Sequence: Synthetic oligonucleotide
gugucacucauuggugaca

SEQ ID NO: 1094723 - RNA, 19 nt, Artificial Sequence
  Description of Artificial Sequence: Synthetic oligonucleotide
acgcuguauuccaaacgcu

SEQ ID NO: 1094724 - RNA, 19 nt, Artificial Sequence
  Description of Artificial Sequence: Synthetic oligonucleotide
ggaaaccucucaaaagugu

SEQ ID NO: 1094725 - RNA, 19 nt, Artificial Sequence
  Description of Artificial Sequence: Synthetic oligonucleotide
cguuuauaauucccacaag

SEQ ID NO: 1094726 - RNA, 19 nt, Artificial Sequence
  Description of Artificial Sequence: Synthetic oligonucleotide
caucucuccugcugaaacu

SEQ ID NO: 1094727 - RNA, 19 nt, Artificial Sequence
  Description of Artificial Sequence: Synthetic oligonucleotide
acgaaggagccgagaaccu

SEQ ID NO: 1094728 - RNA, 19 nt, Artificial Sequence
  Description of Artificial Sequence: Synthetic oligonucleotide
cgaggaaagaccacucaca

SEQ ID NO: 1094729 - RNA, 19 nt, Artificial Sequence
  Description of Artificial Sequence: Synthetic oligonucleotide
cuacugccgaaaugagaaa

SEQ ID NO: 1094730 - RNA, 19 nt, Artificial Sequence
  Description of Artificial Sequence: Synthetic oligonucleotide
cuccuaccugucagcaaca

SEQ ID NO: 1094731 - RNA, 19 nt, Artificial Sequence
  Description of Artificial Sequence: Synthetic oligonucleotide
cugccgaaaugagaaaacu

SEQ ID NO: 1094732 - RNA, 19 nt, Artificial Sequence
  Description of Artificial Sequence: Synthetic oligonucleotide
gaucaaccuacaggagugu

SEQ ID NO: 1094733 - RNA, 19 nt, Artificial Sequence
  Description of Artificial Sequence: Synthetic oligonucleotide
ccugugguuccuuguacca

SEQ ID NO: 1094734 - RNA, 19 nt, Artificial Sequence
  Description of Artificial Sequence: Synthetic oligonucleotide
accccuagcugaguaugaa

SEQ ID NO: 1094735 - RNA, 19 nt, Artificial Sequence
  Description of Artificial Sequence: Synthetic oligonucleotide
gcaguuaggcaccuucagu

SEQ ID NO: 1094736 - RNA, 19 nt, Artificial Sequence
  Description of Artificial Sequence: Synthetic oligonucleotide
gcauugcgcucauggaaca

SEQ ID NO: 1094737 - RNA, 19 nt, Artificial Sequence
  Description of Artificial Sequence: Synthetic oligonucleotide
ggguuaaagugugauggcu

SEQ ID NO: 1094738 - RNA, 19 nt, Artificial Sequence
  Description of Artificial Sequence: Synthetic oligonucleotide
cgcagggcuucucauuucc

SEQ ID NO: 1094739 - RNA, 19 nt, Artificial Sequence
  Description of Artificial Sequence: Synthetic oligonucleotide
cgaucguaugccugaauga

SEQ ID NO: 1094740 - RNA, 19 nt, Artificial Sequence
  Description of Artificial Sequence: Synthetic oligonucleotide
ccagacccuuugaccauag

SEQ ID NO: 1094741 - RNA, 19 nt, Artificial Sequence
  Description of Artificial Sequence: Synthetic oligonucleotide
cagagggugucgaucguau

SEQ ID NO: 1094742 - RNA, 19 nt, Artificial Sequence
  Description of Artificial Sequence: Synthetic oligonucleotide
guacgaacacuaacacgcu

SEQ ID NO: 1094743 - RNA, 19 nt, Artificial Sequence
  Description of Artificial Sequence: Synthetic oligonucleotide
ccaaugcuugcacaugcaa

SEQ ID NO: 1094744 - RNA, 19 nt, Artificial Sequence
  Description of Artificial Sequence: Synthetic oligonucleotide
cucagucccgagggcuuug

SEQ ID NO: 1094745 - RNA, 19 nt, Artificial Sequence
  Description of Artificial Sequence: Synthetic oligonucleotide
gggaugggauguauacaca

SEQ ID NO: 1094746 - RNA, 19 nt, Artificial Sequence
  Description of Artificial Sequence: Synthetic oligonucleotide
cauugcgcucauggaacaa

SEQ ID NO: 1094747 - RNA, 19 nt, Artificial Sequence
  Description of Artificial Sequence: Synthetic oligonucleotide
ccaaacgcugggcugcuaa

SEQ ID NO: 1094748 - RNA, 19 nt, Artificial Sequence
  Description of Artificial Sequence: Synthetic oligonucleotide
ccuaccugucagcaacaca

SEQ ID NO: 1094749 - RNA, 19 nt, Artificial Sequence
  Description of Artificial Sequence: Synthetic oligonucleotide
gggccugaaggaaaccaaa

SEQ ID NO: 1094750 - RNA, 19 nt, Artificial Sequence
  Description of Artificial Sequence: Synthetic oligonucleotide
cccgguacugaucaaccua

SEQ ID NO: 1094751 - RNA, 19 nt, Artificial Sequence
  Description of Artificial Sequence: Synthetic oligonucleotide
acaccccgguacugaucaa

SEQ ID NO: 1094752 - RNA, 19 nt, Artificial Sequence
  Description of Artificial Sequence: Synthetic oligonucleotide
gaacacuaacacgcuucuu

SEQ ID NO: 1094753 - RNA, 19 nt, Artificial Sequence
  Description of Artificial Sequence: Synthetic oligonucleotide
ggccuaaaugcagucuccu

SEQ ID NO: 1094754 - RNA, 19 nt, Artificial Sequence
  Description of Artificial Sequence: Synthetic oligonucleotide
cugagaccacaccccggua

SEQ ID NO: 1094755 - RNA, 19 nt, Artificial Sequence
  Description of Artificial Sequence: Synthetic oligonucleotide
cacucagucccgagggcuu

SEQ ID NO: 1094756 - RNA, 19 nt, Artificial Sequence
  Description of Artificial Sequence: Synthetic oligonucleotide
gggugucgaucguaugccu

SEQ ID NO: 1094757 - RNA, 19 nt, Artificial Sequence
  Description of Artificial Sequence: Synthetic oligonucleotide
ccacaccccgguacugauc

SEQ ID NO: 1094758 - RNA, 19 nt, Artificial Sequence
  Description of Artificial Sequence: Synthetic oligonucleotide
gggagcaauaaagcugcau

SEQ ID NO: 1094759 - RNA, 19 nt, Artificial Sequence
  Description of Artificial Sequence: Synthetic oligonucleotide
gcagagggugucgaucgua

SEQ ID NO: 1094760 - RNA, 19 nt, Artificial Sequence
  Description of Artificial Sequence: Synthetic oligonucleotide
ccuugaucagcuggggugu

SEQ ID NO: 1094761 - RNA, 19 nt, Artificial Sequence
  Description of Artificial Sequence: Synthetic oligonucleotide
cgguacugaucaaccuaca

SEQ ID NO: 1094762 - RNA, 19 nt, Artificial Sequence
  Description of Artificial Sequence: Synthetic oligonucleotide
gugacaccccagacacgcu

SEQ ID NO: 1094763 - RNA, 19 nt, Artificial Sequence
  Description of Artificial Sequence: Synthetic oligonucleotide
cguaugccugaaugaggaa

SEQ ID NO: 1094764 - RNA, 19 nt, Artificial Sequence
  Description of Artificial Sequence: Synthetic oligonucleotide
ccacucagucccgagggcu

SEQ ID NO: 1094765 - RNA, 19 nt, Artificial Sequence
  Description of Artificial Sequence: Synthetic oligonucleotide
ccccgguacugaucaaccu

SEQ ID NO: 1094766 - RNA, 19 nt, Artificial Sequence
  Description of Artificial Sequence: Synthetic oligonucleotide
cgucuaggcuucccugaau

SEQ ID NO: 1094767 - RNA, 19 nt, Artificial Sequence
  Description of Artificial Sequence: Synthetic oligonucleotide
gauagagucauccaggagg

SEQ ID NO: 1094768 - RNA, 19 nt, Artificial Sequence
  Description of Artificial Sequence: Synthetic oligonucleotide
agaaagaucggcuacaauc

SEQ ID NO: 1094769 - RNA, 19 nt, Artificial Sequence
  Description of Artificial Sequence: Synthetic oligonucleotide
auauaggguaacuugaccc

SEQ ID NO: 1094770 - RNA, 19 nt, Artificial Sequence
  Description of Artificial Sequence: Synthetic oligonucleotide
uuuguugaaggaaggaugg

SEQ ID NO: 1094771 - RNA, 19 nt, Artificial Sequence
  Description of Artificial Sequence: Synthetic oligonucleotide
aagauugauccacuggccc

SEQ ID NO: 1094772 - RNA, 19 nt, Artificial Sequence
  Description of Artificial Sequence: Synthetic oligonucleotide
uuauugugcucauauaggg

SEQ ID NO: 1094773 - RNA, 19 nt, Artificial Sequence
  Description of Artificial Sequence: Synthetic oligonucleotide
guauuguugucucagaaag

SEQ ID NO: 1094774 - RNA, 19 nt, Artificial Sequence
  Description of Artificial Sequence: Synthetic oligonucleotide
uaacuugaccccuaggagg

SEQ ID NO: 1094775 - RNA, 19 nt, Artificial Sequence
  Description of Artificial Sequence: Synthetic oligonucleotide
gaaucuacaagcucccggg

SEQ ID NO: 1094776 - RNA, 19 nt, Artificial Sequence
  Description of Artificial Sequence: Synthetic oligonucleotide
gaaagaucggcuacaaucg

SEQ ID NO: 1094777 - RNA, 19 nt, Artificial Sequence
  Description of Artificial Sequence: Synthetic oligonucleotide
ucgacagagagucagggcc

SEQ ID NO: 1094778 - RNA, 19 nt, Artificial Sequence
  Description of Artificial Sequence: Synthetic oligonucleotide
aaaaggcccacaucacgcc

SEQ ID NO: 1094779 - RNA, 19 nt, Artificial Sequence
  Description of Artificial Sequence: Synthetic oligonucleotide
auaauaccugggcacagcc

SEQ ID NO: 1094780 - RNA, 19 nt, Artificial Sequence
  Description of Artificial Sequence: Synthetic oligonucleotide
accaauuaguuacuugggc

SEQ ID NO: 1094781 - RNA, 19 nt, Artificial Sequence
  Description of Artificial Sequence: Synthetic oligonucleotide
aaagcguggaaacugggca

SEQ ID NO: 1094782 - RNA, 19 nt, Artificial Sequence
  Description of Artificial Sequence: Synthetic oligonucleotide
uguguuucgaguucgaaaa

SEQ ID NO: 1094783 - RNA, 19 nt, Artificial Sequence
  Description of Artificial Sequence: Synthetic oligonucleotide
aaucgauucccaucuggac

SEQ ID NO: 1094784 - RNA, 19 nt, Artificial Sequence
  Description of Artificial Sequence: Synthetic oligonucleotide
ugucucaguaaauaguggc

SEQ ID NO: 1094785 - RNA, 19 nt, Artificial Sequence
  Description of Artificial Sequence: Synthetic oligonucleotide
ugagauaauaccugggcac

SEQ ID NO: 1094786 - RNA, 19 nt, Artificial Sequence
  Description of Artificial Sequence: Synthetic oligonucleotide
ggaacuauagugcugcugg

SEQ ID NO: 1094787 - RNA, 19 nt, Artificial Sequence
  Description of Artificial Sequence: Synthetic oligonucleotide
aagacccgcaagcagcagc

SEQ ID NO: 1094788 - RNA, 19 nt, Artificial Sequence
  Description of Artificial Sequence: Synthetic oligonucleotide
gauuacgggauucccaucc

SEQ ID NO: 1094789 - RNA, 19 nt, Artificial Sequence
  Description of Artificial Sequence: Synthetic oligonucleotide
augagaauacagcucuggc

SEQ ID NO: 1094790 - RNA, 19 nt, Artificial Sequence
  Description of Artificial Sequence: Synthetic oligonucleotide
uaggcgaugcuucagggag

SEQ ID NO: 1094791 - RNA, 19 nt, Artificial Sequence
  Description of Artificial Sequence: Synthetic oligonucleotide
aacuugaccccuaggaggc

SEQ ID NO: 1094792 - RNA, 19 nt, Artificial Sequence
  Description of Artificial Sequence: Synthetic oligonucleotide
ugagaauacagcucuggca

SEQ ID NO: 1094793 - RNA, 19 nt, Artificial Sequence
  Description of Artificial Sequence: Synthetic oligonucleotide
ucacgccaaacauugaugc

SEQ ID NO: 1094794 - RNA, 19 nt, Artificial Sequence
  Description of Artificial Sequence: Synthetic oligonucleotide
acagcaaucgauucccauc

SEQ ID NO: 1094795 - RNA, 19 nt, Artificial Sequence
  Description of Artificial Sequence: Synthetic oligonucleotide
aguucucguaccauggucc

SEQ ID NO: 1094796 - RNA, 19 nt, Artificial Sequence
  Description of Artificial Sequence: Synthetic oligonucleotide
agugaacagcaaucgauuc

SEQ ID NO: 1094797 - RNA, 19 nt, Artificial Sequence
  Description of Artificial Sequence: Synthetic oligonucleotide
aucguugcugacuuugcac

SEQ ID NO: 1094798 - RNA, 19 nt, Artificial Sequence
  Description of Artificial Sequence: Synthetic oligonucleotide
cucgaaagacagcugaagg

SEQ ID NO: 1094799 - RNA, 19 nt, Artificial Sequence
  Description of Artificial Sequence: Synthetic oligonucleotide
gaugagaauacagcucugg

SEQ ID NO: 1094800 - RNA, 19 nt, Artificial Sequence
  Description of Artificial Sequence: Synthetic oligonucleotide
cauggaauggaccucuccc

SEQ ID NO: 1094801 - RNA, 19 nt, Artificial Sequence
  Description of Artificial Sequence: Synthetic oligonucleotide
ucgaaagacagcugaagga

SEQ ID NO: 1094802 - RNA, 19 nt, Artificial Sequence
  Description of Artificial Sequence: Synthetic oligonucleotide
uuggugaugucucaguaaa

SEQ ID NO: 1094803 - RNA, 19 nt, Artificial Sequence
  Description of Artificial Sequence: Synthetic oligonucleotide
agugcugcuggcauuauac

SEQ ID NO: 1094804 - RNA, 19 nt, Artificial Sequence
  Description of Artificial Sequence: Synthetic oligonucleotide
uuuuaggggauccuugguc

SEQ ID NO: 1094805 - RNA, 19 nt, Artificial Sequence
  Description of Artificial Sequence: Synthetic oligonucleotide
auuuacaagugagagugag

SEQ ID NO: 1094806 - RNA, 19 nt, Artificial Sequence
  Description of Artificial Sequence: Synthetic oligonucleotide
guaacuugaccccuaggag

SEQ ID NO: 1094807 - RNA, 19 nt, Artificial Sequence
  Description of Artificial Sequence: Synthetic oligonucleotide
aacacagguguguuucgag

SEQ ID NO: 1094808 - RNA, 19 nt, Artificial Sequence
  Description of Artificial Sequence: Synthetic oligonucleotide
caugcgaagacccgcaagc

SEQ ID NO: 1094809 - RNA, 19 nt, Artificial Sequence
  Description of Artificial Sequence: Synthetic oligonucleotide
ucauauaggguaacuugac

SEQ ID NO: 1094810 - RNA, 19 nt, Artificial Sequence
  Description of Artificial Sequence: Synthetic oligonucleotide
acguucaccacuagggucc

SEQ ID NO: 1094811 - RNA, 19 nt, Artificial Sequence
  Description of Artificial Sequence: Synthetic oligonucleotide
ucguugcugacuuugcacc

SEQ ID NO: 1094812 - RNA, 19 nt, Artificial Sequence
  Description of Artificial Sequence: Synthetic oligonucleotide
cauauaggguaacuugacc

SEQ ID NO: 1094813 - RNA, 19 nt, Artificial Sequence
  Description of Artificial Sequence: Synthetic oligonucleotide
ccaauuaguuacuugggcg

SEQ ID NO: 1094814 - RNA, 19 nt, Artificial Sequence
  Description of Artificial Sequence: Synthetic oligonucleotide
agcaaauugguaacucccc

SEQ ID NO: 1094815 - RNA, 19 nt, Artificial Sequence
  Description of Artificial Sequence: Synthetic oligonucleotide
ugccacauuucgcuguagg

SEQ ID NO: 1094816 - RNA, 19 nt, Artificial Sequence
  Description of Artificial Sequence: Synthetic oligonucleotide
acgccaaacauugaugcac

SEQ ID NO: 1094817 - RNA, 19 nt, Artificial Sequence
  Description of Artificial Sequence: Synthetic oligonucleotide
agaagacuuuauuuacaag

SEQ ID NO: 1094818 - RNA, 19 nt, Artificial Sequence
  Description of Artificial Sequence: Synthetic oligonucleotide
agacucgaaagacagcuga

SEQ ID NO: 1094819 - RNA, 19 nt, Artificial Sequence
  Description of Artificial Sequence: Synthetic oligonucleotide
ugggcuaaagcguggaaac

SEQ ID NO: 1094820 - RNA, 19 nt, Artificial Sequence
  Description of Artificial Sequence: Synthetic oligonucleotide
auagagucauccaggaggg

SEQ ID NO: 1094821 - RNA, 19 nt, Artificial Sequence
  Description of Artificial Sequence: Synthetic oligonucleotide
uccccuaguacagugaaca

SEQ ID NO: 1094822 - RNA, 19 nt, Artificial Sequence
  Description of Artificial Sequence: Synthetic oligonucleotide
aaucguugcugacuuugca

SEQ ID NO: 1094823 - RNA, 19 nt, Artificial Sequence
  Description of Artificial Sequence: Synthetic oligonucleotide
guuacuugggcgaauucag

SEQ ID NO: 1094824 - RNA, 19 nt, Artificial Sequence
  Description of Artificial Sequence: Synthetic oligonucleotide
cagaauagcagcaucuaca

SEQ ID NO: 1094825 - RNA, 19 nt, Artificial Sequence
  Description of Artificial Sequence: Synthetic oligonucleotide
gauugauccacuggccccg

SEQ ID NO: 1094826 - RNA, 19 nt, Artificial Sequence
  Description of Artificial Sequence: Synthetic oligonucleotide
aaagaucggcuacaaucgu

SEQ ID NO: 1094827 - RNA, 19 nt, Artificial Sequence
  Description of Artificial Sequence: Synthetic oligonucleotide
cucauauaggguaacuuga

SEQ ID NO: 1094828 - RNA, 19 nt, Artificial Sequence
  Description of Artificial Sequence: Synthetic oligonucleotide
uaaauuagugcuuccccua

SEQ ID NO: 1094829 - RNA, 19 nt, Artificial Sequence
  Description of Artificial Sequence: Synthetic oligonucleotide
ucggcuacaaucguugcug

SEQ ID NO: 1094830 - RNA, 19 nt, Artificial Sequence
  Description of Artificial Sequence: Synthetic oligonucleotide
cacggauagagucauccag

SEQ ID NO: 1094831 - RNA, 19 nt, Artificial Sequence
  Description of Artificial Sequence: Synthetic oligonucleotide
ggaaucuacaagcucccgg

SEQ ID NO: 1094832 - RNA, 19 nt, Artificial Sequence
  Description of Artificial Sequence: Synthetic oligonucleotide
gguaacuugaccccuagga

SEQ ID NO: 1094833 - RNA, 19 nt, Artificial Sequence
  Description of Artificial Sequence: Synthetic oligonucleotide
ccugaauaaugccacaggg

SEQ ID NO: 1094834 - RNA, 19 nt, Artificial Sequence
  Description of Artificial Sequence: Synthetic oligonucleotide
uaguacagugaacagcaau

SEQ ID NO: 1094835 - RNA, 19 nt, Artificial Sequence
  Description of Artificial Sequence: Synthetic oligonucleotide
uaugagggugccaugcgaa

SEQ ID NO: 1094836 - RNA, 19 nt, Artificial Sequence
  Description of Artificial Sequence: Synthetic oligonucleotide
cuaaagcguggaaacuggg

SEQ ID NO: 1094837 - RNA, 19 nt, Artificial Sequence
  Description of Artificial Sequence: Synthetic oligonucleotide
gaagauugauccacuggcc

SEQ ID NO: 1094838 - RNA, 19 nt, Artificial Sequence
  Description of Artificial Sequence: Synthetic oligonucleotide
aauuagugcuuccccuagu

SEQ ID NO: 1094839 - RNA, 19 nt, Artificial Sequence
  Description of Artificial Sequence: Synthetic oligonucleotide
ugcgaagacccgcaagcag

SEQ ID NO: 1094840 - RNA, 19 nt, Artificial Sequence
  Description of Artificial Sequence: Synthetic oligonucleotide
acaaucguugcugacuuug

SEQ ID NO: 1094841 - RNA, 19 nt, Artificial Sequence
  Description of Artificial Sequence: Synthetic oligonucleotide
agcaaggccccuuuguuga

SEQ ID NO: 1094842 - RNA, 19 nt, Artificial Sequence
  Description of Artificial Sequence: Synthetic oligonucleotide
uuacuugggcgaauucagc

SEQ ID NO: 1094843 - RNA, 19 nt, Artificial Sequence
  Description of Artificial Sequence: Synthetic oligonucleotide
auuucgcuguaggcgaugc

SEQ ID NO: 1094844 - RNA, 19 nt, Artificial Sequence
  Description of Artificial Sequence: Synthetic oligonucleotide
ucccggugauggaugaagg

SEQ ID NO: 1094845 - RNA, 19 nt, Artificial Sequence
  Description of Artificial Sequence: Synthetic oligonucleotide
gcgucuggaaucuacaagc

SEQ ID NO: 1094846 - RNA, 19 nt, Artificial Sequence
  Description of Artificial Sequence: Synthetic oligonucleotide
aggauuacgggauucccau

SEQ ID NO: 1094847 - RNA, 19 nt, Artificial Sequence
  Description of Artificial Sequence: Synthetic oligonucleotide
aaucagaucuucacuccug

SEQ ID NO: 1094848 - RNA, 19 nt, Artificial Sequence
  Description of Artificial Sequence: Synthetic oligonucleotide
aacuauagugcugcuggca

SEQ ID NO: 1094849 - RNA, 19 nt, Artificial Sequence
  Description of Artificial Sequence: Synthetic oligonucleotide
ucagggagggaacuauagu

SEQ ID NO: 1094850 - RNA, 19 nt, Artificial Sequence
  Description of Artificial Sequence: Synthetic oligonucleotide
aaucuacaagcucccgggu

SEQ ID NO: 1094851 - RNA, 19 nt, Artificial Sequence
  Description of Artificial Sequence: Synthetic oligonucleotide
acggauagagucauccagg

SEQ ID NO: 1094852 - RNA, 19 nt, Artificial Sequence
  Description of Artificial Sequence: Synthetic oligonucleotide
aaaggcccacaucacgcca

SEQ ID NO: 1094853 - RNA, 19 nt, Artificial Sequence
  Description of Artificial Sequence: Synthetic oligonucleotide
gugagauaauaccugggca

SEQ ID NO: 1094854 - RNA, 19 nt, Artificial Sequence
  Description of Artificial Sequence: Synthetic oligonucleotide
cucggaaccagggaagggg

SEQ ID NO: 1094855 - RNA, 19 nt, Artificial Sequence
  Description of Artificial Sequence: Synthetic oligonucleotide
cguuauugugcucauauag

SEQ ID NO: 1094856 - RNA, 19 nt, Artificial Sequence
  Description of Artificial Sequence: Synthetic oligonucleotide
ucucguaccaugguccagc

SEQ ID NO: 1094857 - RNA, 19 nt, Artificial Sequence
  Description of Artificial Sequence: Synthetic oligonucleotide
auucccauccuguacccgu

SEQ ID NO: 1094858 - RNA, 19 nt, Artificial Sequence
  Description of Artificial Sequence: Synthetic oligonucleotide
gacguucaccacuaggguc

SEQ ID NO: 1094859 - RNA, 19 nt, Artificial Sequence
  Description of Artificial Sequence: Synthetic oligonucleotide
cugaauaaugccacaggga

SEQ ID NO: 1094860 - RNA, 19 nt, Artificial Sequence
  Description of Artificial Sequence: Synthetic oligonucleotide
aguaguagccaggacuuug

SEQ ID NO: 1094861 - RNA, 19 nt, Artificial Sequence
  Description of Artificial Sequence: Synthetic oligonucleotide
gagagauaggugugggaac

SEQ ID NO: 1094862 - RNA, 19 nt, Artificial Sequence
  Description of Artificial Sequence: Synthetic oligonucleotide
uaauaccugggcacagcca

SEQ ID NO: 1094863 - RNA, 19 nt, Artificial Sequence
  Description of Artificial Sequence: Synthetic oligonucleotide
agagauaggugugggaaca

SEQ ID NO: 1094864 - RNA, 19 nt, Artificial Sequence
  Description of Artificial Sequence: Synthetic oligonucleotide
ucacuccugagagauaggu

SEQ ID NO: 1094865 - RNA, 19 nt, Artificial Sequence
  Description of Artificial Sequence: Synthetic oligonucleotide
gaacuauagugcugcuggc

SEQ ID NO: 1094866 - RNA, 19 nt, Artificial Sequence
  Description of Artificial Sequence: Synthetic oligonucleotide
ucccaaaccauggaaugga

SEQ ID NO: 1094867 - RNA, 19 nt, Artificial Sequence
  Description of Artificial Sequence: Synthetic oligonucleotide
caucccauaccagaauagc

SEQ ID NO: 1094868 - RNA, 19 nt, Artificial Sequence
  Description of Artificial Sequence: Synthetic oligonucleotide
acuuugcugccaucugggg

SEQ ID NO: 1094869 - RNA, 19 nt, Artificial Sequence
  Description of Artificial Sequence: Synthetic oligonucleotide
uuacgggauucccauccug

SEQ ID NO: 1094870 - RNA, 19 nt, Artificial Sequence
  Description of Artificial Sequence: Synthetic oligonucleotide
agaucggcuacaaucguug

SEQ ID NO: 1094871 - RNA, 19 nt, Artificial Sequence
  Description of Artificial Sequence: Synthetic oligonucleotide
cacauuucgcuguaggcga

SEQ ID NO: 1094872 - RNA, 19 nt, Artificial Sequence
  Description of Artificial Sequence: Synthetic oligonucleotide
ucaguaaauaguggcacuu

SEQ ID NO: 1094873 - RNA, 19 nt, Artificial Sequence
  Description of Artificial Sequence: Synthetic oligonucleotide
uauagugcugcuggcauua

SEQ ID NO: 1094874 - RNA, 19 nt, Artificial Sequence
  Description of Artificial Sequence: Synthetic oligonucleotide
agcagcuagaccaauuagu

SEQ ID NO: 1094875 - RNA, 19 nt, Artificial Sequence
  Description of Artificial Sequence: Synthetic oligonucleotide
uggggaccacagcaaauug

SEQ ID NO: 1094876 - RNA, 19 nt, Artificial Sequence
  Description of Artificial Sequence: Synthetic oligonucleotide
cagaagacuuuauuuacaa

SEQ ID NO: 1094877 - RNA, 19 nt, Artificial Sequence
  Description of Artificial Sequence: Synthetic oligonucleotide
cuugccaguccggagggcg

SEQ ID NO: 1094878 - RNA, 19 nt, Artificial Sequence
  Description of Artificial Sequence: Synthetic oligonucleotide
caaucguugcugacuuugc

SEQ ID NO: 1094879 - RNA, 19 nt, Artificial Sequence
  Description of Artificial Sequence: Synthetic oligonucleotide
agacguucaccacuagggu

SEQ ID NO: 1094880 - RNA, 19 nt, Artificial Sequence
  Description of Artificial Sequence: Synthetic oligonucleotide
uugugcucauauaggguaa

SEQ ID NO: 1094881 - RNA, 19 nt, Artificial Sequence
  Description of Artificial Sequence: Synthetic oligonucleotide
cagaugagaauacagcucu

SEQ ID NO: 1094882 - RNA, 19 nt, Artificial Sequence
  Description of Artificial Sequence: Synthetic oligonucleotide
caaucgauucccaucugga

SEQ ID NO: 1094883 - RNA, 19 nt, Artificial Sequence
  Description of Artificial Sequence: Synthetic oligonucleotide
gaucggcuacaaucguugc

SEQ ID NO: 1094884 - RNA, 19 nt, Artificial Sequence
  Description of Artificial Sequence: Synthetic oligonucleotide
acuugggcgaauucagcaa

SEQ ID NO: 1094885 - RNA, 19 nt, Artificial Sequence
  Description of Artificial Sequence: Synthetic oligonucleotide
aucggcuacaaucguugcu

SEQ ID NO: 1094886 - RNA, 19 nt, Artificial Sequence
  Description of Artificial Sequence: Synthetic oligonucleotide
ggucccaaaccauggaaug

SEQ ID NO: 1094887 - RNA, 19 nt, Artificial Sequence
  Description of Artificial Sequence: Synthetic oligonucleotide
guaguagccaggacuuugc

SEQ ID NO: 1094888 - RNA, 19 nt, Artificial Sequence
  Description of Artificial Sequence: Synthetic oligonucleotide
agcacacacugagcaaggc

SEQ ID NO: 1094889 - RNA, 19 nt, Artificial Sequence
  Description of Artificial Sequence: Synthetic oligonucleotide
acccgcaagcagcagcuag

SEQ ID NO: 1094890 - RNA, 19 nt, Artificial Sequence
  Description of Artificial Sequence: Synthetic oligonucleotide
gcuaaagcguggaaacugg

SEQ ID NO: 1094891 - RNA, 19 nt, Artificial Sequence
  Description of Artificial Sequence: Synthetic oligonucleotide
agucugacagcgcccugag

SEQ ID NO: 1094892 - RNA, 19 nt, Artificial Sequence
  Description of Artificial Sequence: Synthetic oligonucleotide
gguaugagggugccaugcg

SEQ ID NO: 1094893 - RNA, 19 nt, Artificial Sequence
  Description of Artificial Sequence: Synthetic oligonucleotide
ccacauuucgcuguaggcg

SEQ ID NO: 1094894 - RNA, 19 nt, Artificial Sequence
  Description of Artificial Sequence: Synthetic oligonucleotide
caggaagauugauccacug

SEQ ID NO: 1094895 - RNA, 19 nt, Artificial Sequence
  Description of Artificial Sequence: Synthetic oligonucleotide
ugaccgguguguguccagg

SEQ ID NO: 1094896 - RNA, 19 nt, Artificial Sequence
  Description of Artificial Sequence: Synthetic oligonucleotide
auacagcucuggcaggcca

SEQ ID NO: 1094897 - RNA, 19 nt, Artificial Sequence
  Description of Artificial Sequence: Synthetic oligonucleotide
gaggcugagaguagccgcc

SEQ ID NO: 1094898 - RNA, 19 nt, Artificial Sequence
  Description of Artificial Sequence: Synthetic oligonucleotide
auuacgggauucccauccu

SEQ ID NO: 1094899 - RNA, 19 nt, Artificial Sequence
  Description of Artificial Sequence: Synthetic oligonucleotide
ugccaugcgaagacccgca

SEQ ID NO: 1094900 - RNA, 19 nt, Artificial Sequence
  Description of Artificial Sequence: Synthetic oligonucleotide
cuccucggaaccagggaag

SEQ ID NO: 1094901 - RNA, 19 nt, Artificial Sequence
  Description of Artificial Sequence: Synthetic oligonucleotide
gaccgguguguguccaggg

SEQ ID NO: 1094902 - RNA, 19 nt, Artificial Sequence
  Description of Artificial Sequence: Synthetic oligonucleotide
aggacuuugcugccaucug

SEQ ID NO: 1094903 - RNA, 19 nt, Artificial Sequence
  Description of Artificial Sequence: Synthetic oligonucleotide
auacacacggauagaguca

SEQ ID NO: 1094904 - RNA, 19 nt, Artificial Sequence
  Description of Artificial Sequence: Synthetic oligonucleotide
uucgcuguaggcgaugcuu

SEQ ID NO: 1094905 - RNA, 19 nt, Artificial Sequence
  Description of Artificial Sequence: Synthetic oligonucleotide
ugcucauauaggguaacuu

SEQ ID NO: 1094906 - RNA, 19 nt, Artificial Sequence
  Description of Artificial Sequence: Synthetic oligonucleotide
uucccauccuguacccgug

SEQ ID NO: 1094907 - RNA, 19 nt, Artificial Sequence
  Description of Artificial Sequence: Synthetic oligonucleotide
ggcgucuggaaucuacaag

SEQ ID NO: 1094908 - RNA, 19 nt, Artificial Sequence
  Description of Artificial Sequence: Synthetic oligonucleotide
acacggauagagucaucca

SEQ ID NO: 1094909 - RNA, 19 nt, Artificial Sequence
  Description of Artificial Sequence: Synthetic oligonucleotide
ggcgaauucagcaaucaga

SEQ ID NO: 1094910 - RNA, 19 nt, Artificial Sequence
  Description of Artificial Sequence: Synthetic oligonucleotide
ugggcgaauucagcaauca

SEQ ID NO: 1094911 - RNA, 19 nt, Artificial Sequence
  Description of Artificial Sequence: Synthetic oligonucleotide
cuugaccccuaggaggcgg

SEQ ID NO: 1094912 - RNA, 19 nt, Artificial Sequence
  Description of Artificial Sequence: Synthetic oligonucleotide
aauucggccuguggaccag

SEQ ID NO: 1094913 - RNA, 19 nt, Artificial Sequence
  Description of Artificial Sequence: Synthetic oligonucleotide
ggcuaaagcguggaaacug

SEQ ID NO: 1094914 - RNA, 19 nt, Artificial Sequence
  Description of Artificial Sequence: Synthetic oligonucleotide
caguucucguaccaugguc

SEQ ID NO: 1094915 - RNA, 19 nt, Artificial Sequence
  Description of Artificial Sequence: Synthetic oligonucleotide
uugggcgaauucagcaauc

SEQ ID NO: 1094916 - RNA, 19 nt, Artificial Sequence
  Description of Artificial Sequence: Synthetic oligonucleotide
ugugcucauauaggguaac

SEQ ID NO: 1094917 - RNA, 19 nt, Artificial Sequence
  Description of Artificial Sequence: Synthetic oligonucleotide
ccaaaccauggaauggacc

SEQ ID NO: 1094918 - RNA, 19 nt, Artificial Sequence
  Description of Artificial Sequence: Synthetic oligonucleotide
cccauaccagaauagcagc

SEQ ID NO: 1094919 - RNA, 19 nt, Artificial Sequence
  Description of Artificial Sequence: Synthetic oligonucleotide
guaugagggugccaugcga

SEQ ID NO: 1094920 - RNA, 19 nt, Artificial Sequence
  Description of Artificial Sequence: Synthetic oligonucleotide
ucguuauugugcucauaua

SEQ ID NO: 1094921 - RNA, 19 nt, Artificial Sequence
  Description of Artificial Sequence: Synthetic oligonucleotide
aguuggccaccucucacaa

SEQ ID NO: 1094922 - RNA, 19 nt, Artificial Sequence
  Description of Artificial Sequence: Synthetic oligonucleotide
cucguuauugugcucauau

SEQ ID NO: 1094923 - RNA, 19 nt, Artificial Sequence
  Description of Artificial Sequence: Synthetic oligonucleotide
aggagggccacugcaaacu

SEQ ID NO: 1094924 - RNA, 19 nt, Artificial Sequence
  Description of Artificial Sequence: Synthetic oligonucleotide
ggcaauucggccuguggac

SEQ ID NO: 1094925 - RNA, 19 nt, Artificial Sequence
  Description of Artificial Sequence: Synthetic oligonucleotide
gagauaggugugggaacag

SEQ ID NO: 1094926 - RNA, 19 nt, Artificial Sequence
  Description of Artificial Sequence: Synthetic oligonucleotide
caugucccuucuccguucc

SEQ ID NO: 1094927 - RNA, 19 nt, Artificial Sequence
  Description of Artificial Sequence: Synthetic oligonucleotide
caccacuagggucccaaac

SEQ ID NO: 1094928 - RNA, 19 nt, Artificial Sequence
  Description of Artificial Sequence: Synthetic oligonucleotide
gagaguuggccaccucuca

SEQ ID NO: 1094929 - RNA, 19 nt, Artificial Sequence
  Description of Artificial Sequence: Synthetic oligonucleotide
gcaucuacaggggaggcug

SEQ ID NO: 1094930 - RNA, 19 nt, Artificial Sequence
  Description of Artificial Sequence: Synthetic oligonucleotide
ggaaugacaaggaauaaau

SEQ ID NO: 1094931 - RNA, 19 nt, Artificial Sequence
  Description of Artificial Sequence: Synthetic oligonucleotide
aagaucggcuacaaucguu

SEQ ID NO: 1094932 - RNA, 19 nt, Artificial Sequence
  Description of Artificial Sequence: Synthetic oligonucleotide
gccacauuucgcuguaggc

SEQ ID NO: 1094933 - RNA, 19 nt, Artificial Sequence
  Description of Artificial Sequence: Synthetic oligonucleotide
cucguaccaugguccagcc

SEQ ID NO: 1094934 - RNA, 19 nt, Artificial Sequence
  Description of Artificial Sequence: Synthetic oligonucleotide
uguccagggugagauaaua

SEQ ID NO: 1094935 - RNA, 19 nt, Artificial Sequence
  Description of Artificial Sequence: Synthetic oligonucleotide
ggcccaucgacagagaguc

SEQ ID NO: 1094936 - RNA, 19 nt, Artificial Sequence
  Description of Artificial Sequence: Synthetic oligonucleotide
ggggaccacagcaaauugg

SEQ ID NO: 1094937 - RNA, 19 nt, Artificial Sequence
  Description of Artificial Sequence: Synthetic oligonucleotide
uggugaugucucaguaaau

SEQ ID NO: 1094938 - RNA, 19 nt, Artificial Sequence
  Description of Artificial Sequence: Synthetic oligonucleotide
uccggagggcgucuggaau

SEQ ID NO: 1094939 - RNA, 19 nt, Artificial Sequence
  Description of Artificial Sequence: Synthetic oligonucleotide
gaagucgggaggcgggcuc

SEQ ID NO: 1094940 - RNA, 19 nt, Artificial Sequence
  Description of Artificial Sequence: Synthetic oligonucleotide
uuucgcuguaggcgaugcu

SEQ ID NO: 1094941 - RNA, 19 nt, Artificial Sequence
  Description of Artificial Sequence: Synthetic oligonucleotide
ccagacguucaccacuagg

SEQ ID NO: 1094942 - RNA, 19 nt, Artificial Sequence
  Description of Artificial Sequence: Synthetic oligonucleotide
acaggaagauugauccacu

SEQ ID NO: 1094943 - RNA, 19 nt, Artificial Sequence
  Description of Artificial Sequence: Synthetic oligonucleotide
cucagaaagaucggcuaca

SEQ ID NO: 1094944 - RNA, 19 nt, Artificial Sequence
  Description of Artificial Sequence: Synthetic oligonucleotide
ccaucuggugucuguauug

SEQ ID NO: 1094945 - RNA, 19 nt, Artificial Sequence
  Description of Artificial Sequence: Synthetic oligonucleotide
cauagcuguugccggucac

SEQ ID NO: 1094946 - RNA, 19 nt, Artificial Sequence
  Description of Artificial Sequence: Synthetic oligonucleotide
uucucguaccaugguccag

SEQ ID NO: 1094947 - RNA, 19 nt, Artificial Sequence
  Description of Artificial Sequence: Synthetic oligonucleotide
cagcaaucgauucccaucu

SEQ ID NO: 1094948 - RNA, 19 nt, Artificial Sequence
  Description of Artificial Sequence: Synthetic oligonucleotide
gagggcgucuggaaucuac

SEQ ID NO: 1094949 - RNA, 19 nt, Artificial Sequence
  Description of Artificial Sequence: Synthetic oligonucleotide
gaaagacagcugaaggagu

SEQ ID NO: 1094950 - RNA, 19 nt, Artificial Sequence
  Description of Artificial Sequence: Synthetic oligonucleotide
gcgaagacccgcaagcagc

SEQ ID NO: 1094951 - RNA, 19 nt, Artificial Sequence
  Description of Artificial Sequence: Synthetic oligonucleotide
cuuccccuaguacagugaa

SEQ ID NO: 1094952 - RNA, 19 nt, Artificial Sequence
  Description of Artificial Sequence: Synthetic oligonucleotide
auuaguuacuugggcgaau

SEQ ID NO: 1094953 - RNA, 19 nt, Artificial Sequence
  Description of Artificial Sequence: Synthetic oligonucleotide
caauucggccuguggacca

SEQ ID NO: 1094954 - RNA, 19 nt, Artificial Sequence
  Description of Artificial Sequence: Synthetic oligonucleotide
agacccgcaagcagcagcu

SEQ ID NO: 1094955 - RNA, 19 nt, Artificial Sequence
  Description of Artificial Sequence: Synthetic oligonucleotide
auucggccuguggaccagc

SEQ ID NO: 1094956 - RNA, 19 nt, Artificial Sequence
  Description of Artificial Sequence: Synthetic oligonucleotide
uacccguggguuuccuuuc

SEQ ID NO: 1094957 - RNA, 19 nt, Artificial Sequence
  Description of Artificial Sequence: Synthetic oligonucleotide
uggugaccggugugugucc

SEQ ID NO: 1094958 - RNA, 19 nt, Artificial Sequence
  Description of Artificial Sequence: Synthetic oligonucleotide
cuggugucuguauuguugu

SEQ ID NO: 1094959 - RNA, 19 nt, Artificial Sequence
  Description of Artificial Sequence: Synthetic oligonucleotide
ugagagaguuggccaccuc

SEQ ID NO: 1094960 - RNA, 19 nt, Artificial Sequence
  Description of Artificial Sequence: Synthetic oligonucleotide
gggcgaauucagcaaucag

SEQ ID NO: 1094961 - RNA, 19 nt, Artificial Sequence
  Description of Artificial Sequence: Synthetic oligonucleotide
ggugccaugcgaagacccg

SEQ ID NO: 1094962 - RNA, 19 nt, Artificial Sequence
  Description of Artificial Sequence: Synthetic oligonucleotide
auugauccacuggccccgg

SEQ ID NO: 1094963 - RNA, 19 nt, Artificial Sequence
  Description of Artificial Sequence: Synthetic oligonucleotide
gaaugacaaggaauaaauu

SEQ ID NO: 1094964 - RNA, 19 nt, Artificial Sequence
  Description of Artificial Sequence: Synthetic oligonucleotide
agcaucuacaggggaggcu

SEQ ID NO: 1094965 - RNA, 19 nt, Artificial Sequence
  Description of Artificial Sequence: Synthetic oligonucleotide
aagucgggaggcgggcucu

SEQ ID NO: 1094966 - RNA, 19 nt, Artificial Sequence
  Description of Artificial Sequence: Synthetic oligonucleotide
cacgccaaacauugaugca

SEQ ID NO: 1094967 - RNA, 19 nt, Artificial Sequence
  Description of Artificial Sequence: Synthetic oligonucleotide
ucguaccaugguccagccu

SEQ ID NO: 1094968 - RNA, 19 nt, Artificial Sequence
  Description of Artificial Sequence: Synthetic oligonucleotide
gucuuguggauaaggaggu

SEQ ID NO: 1094969 - RNA, 19 nt, Artificial Sequence
  Description of Artificial Sequence: Synthetic oligonucleotide
gugccaugcgaagacccgc

SEQ ID NO: 1094970 - RNA, 19 nt, Artificial Sequence
  Description of Artificial Sequence: Synthetic oligonucleotide
gggaaugacaaggaauaaa

SEQ ID NO: 1094971 - RNA, 19 nt, Artificial Sequence
  Description of Artificial Sequence: Synthetic oligonucleotide
gcaauucggccuguggacc

SEQ ID NO: 1094972 - RNA, 19 nt, Artificial Sequence
  Description of Artificial Sequence: Synthetic oligonucleotide
caaucagaucuucacuccu

SEQ ID NO: 1094973 - RNA, 19 nt, Artificial Sequence
  Description of Artificial Sequence: Synthetic oligonucleotide
gacucgaaagacagcugaa

SEQ ID NO: 1094974 - RNA, 19 nt, Artificial Sequence
  Description of Artificial Sequence: Synthetic oligonucleotide
cugggcuaaagcguggaaa

SEQ ID NO: 1094975 - RNA, 19 nt, Artificial Sequence
  Description of Artificial Sequence: Synthetic oligonucleotide
augcgaagacccgcaagca

SEQ ID NO: 1094976 - RNA, 19 nt, Artificial Sequence
  Description of Artificial Sequence: Synthetic oligonucleotide
acugggcuaaagcguggaa

SEQ ID NO: 1094977 - RNA, 19 nt, Artificial Sequence
  Description of Artificial Sequence: Synthetic oligonucleotide
gaagacccgcaagcagcag

SEQ ID NO: 1094978 - RNA, 19 nt, Artificial Sequence
  Description of Artificial Sequence: Synthetic oligonucleotide
acuugaccccuaggaggcg

SEQ ID NO: 1094979 - RNA, 19 nt, Artificial Sequence
  Description of Artificial Sequence: Synthetic oligonucleotide
cugacagcgcccugagaga

SEQ ID NO: 1094980 - RNA, 19 nt, Artificial Sequence
  Description of Artificial Sequence: Synthetic oligonucleotide
gggaacuauagugcugcug

SEQ ID NO: 1094981 - RNA, 19 nt, Artificial Sequence
  Description of Artificial Sequence: Synthetic oligonucleotide
acacugggcuaaagcgugg

SEQ ID NO: 1094982 - RNA, 19 nt, Artificial Sequence
  Description of Artificial Sequence: Synthetic oligonucleotide
gcucucccugaauaaugcc

SEQ ID NO: 1094983 - RNA, 19 nt, Artificial Sequence
  Description of Artificial Sequence: Synthetic oligonucleotide
cuacaaucguugcugacuu

SEQ ID NO: 1094984 - RNA, 19 nt, Artificial Sequence
  Description of Artificial Sequence: Synthetic oligonucleotide
ucaccacuagggucccaaa

SEQ ID NO: 1094985 - RNA, 19 nt, Artificial Sequence
  Description of Artificial Sequence: Synthetic oligonucleotide
uacaaucguugcugacuuu

SEQ ID NO: 1094986 - RNA, 19 nt, Artificial Sequence
  Description of Artificial Sequence: Synthetic oligonucleotide
ccauggaauggaccucucc

SEQ ID NO: 1094987 - RNA, 19 nt, Artificial Sequence
  Description of Artificial Sequence: Synthetic oligonucleotide
ggaaagugaugagcugagc

SEQ ID NO: 1094988 - RNA, 19 nt, Artificial Sequence
  Description of Artificial Sequence: Synthetic oligonucleotide
uugauccacuggccccgga

SEQ ID NO: 1094989 - RNA, 19 nt, Artificial Sequence
  Description of Artificial Sequence: Synthetic oligonucleotide
uguacccguggguuuccuu

SEQ ID NO: 1094990 - RNA, 19 nt, Artificial Sequence
  Description of Artificial Sequence: Synthetic oligonucleotide
cgccaaacauugaugcacc

SEQ ID NO: 1094991 - RNA, 19 nt, Artificial Sequence
  Description of Artificial Sequence: Synthetic oligonucleotide
gugaccgguguguguccag

SEQ ID NO: 1094992 - RNA, 19 nt, Artificial Sequence
  Description of Artificial Sequence: Synthetic oligonucleotide
acagcgcccugagagaguu

SEQ ID NO: 1094993 - RNA, 19 nt, Artificial Sequence
  Description of Artificial Sequence: Synthetic oligonucleotide
cagugaacagcaaucgauu

SEQ ID NO: 1094994 - RNA, 19 nt, Artificial Sequence
  Description of Artificial Sequence: Synthetic oligonucleotide
gcuacaaucguugcugacu

SEQ ID NO: 1094995 - RNA, 19 nt, Artificial Sequence
  Description of Artificial Sequence: Synthetic oligonucleotide
ccauaccagaauagcagca

SEQ ID NO: 1094996 - RNA, 19 nt, Artificial Sequence
  Description of Artificial Sequence: Synthetic oligonucleotide
acccguggguuuccuuuca

SEQ ID NO: 1094997 - RNA, 19 nt, Artificial Sequence
  Description of Artificial Sequence: Synthetic oligonucleotide
ucgggaggcgggcucucau

SEQ ID NO: 1094998 - RNA, 19 nt, Artificial Sequence
  Description of Artificial Sequence: Synthetic oligonucleotide
cuugggcgaauucagcaau

SEQ ID NO: 1094999 - RNA, 19 nt, Artificial Sequence
  Description of Artificial Sequence: Synthetic oligonucleotide
agggcgucuggaaucuaca

SEQ ID NO: 1095000 - RNA, 19 nt, Artificial Sequence
  Description of Artificial Sequence: Synthetic oligonucleotide
gggugccaugcgaagaccc

SEQ ID NO: 1095001 - RNA, 19 nt, Artificial Sequence
  Description of Artificial Sequence: Synthetic oligonucleotide
aguccggagggcgucugga

SEQ ID NO: 1095002 - RNA, 19 nt, Artificial Sequence
  Description of Artificial Sequence: Synthetic oligonucleotide
uguugccggucaccagcuc

SEQ ID NO: 1095003 - RNA, 19 nt, Artificial Sequence
  Description of Artificial Sequence: Synthetic oligonucleotide
aggcccaucgacagagagu

SEQ ID NO: 1095004 - RNA, 19 nt, Artificial Sequence
  Description of Artificial Sequence: Synthetic oligonucleotide
gggguugagcagguuguag

SEQ ID NO: 1095005 - RNA, 19 nt, Artificial Sequence
  Description of Artificial Sequence: Synthetic oligonucleotide
accauggaauggaccucuc

SEQ ID NO: 1095006 - RNA, 19 nt, Artificial Sequence
  Description of Artificial Sequence: Synthetic oligonucleotide
ggcuacaaucguugcugac

SEQ ID NO: 1095007 - RNA, 19 nt, Artificial Sequence
  Description of Artificial Sequence: Synthetic oligonucleotide
uaccaugguccagccuccc

SEQ ID NO: 1095008 - RNA, 19 nt, Artificial Sequence
  Description of Artificial Sequence: Synthetic oligonucleotide
ucuugccaguccggagggc

SEQ ID NO: 1095009 - RNA, 19 nt, Artificial Sequence
  Description of Artificial Sequence: Synthetic oligonucleotide
cucccugaauaaugccaca

SEQ ID NO: 1095010 - RNA, 19 nt, Artificial Sequence
  Description of Artificial Sequence: Synthetic oligonucleotide
ccaugcgaagacccgcaag

SEQ ID NO: 1095011 - RNA, 19 nt, Artificial Sequence
  Description of Artificial Sequence: Synthetic oligonucleotide
guacccguggguuuccuuu

SEQ ID NO: 1095012 - RNA, 19 nt, Artificial Sequence
  Description of Artificial Sequence: Synthetic oligonucleotide
ccggaagucgggaggcggg

SEQ ID NO: 1095013 - RNA, 19 nt, Artificial Sequence
  Description of Artificial Sequence: Synthetic oligonucleotide
agcguggaaacugggcauu

SEQ ID NO: 1095014 - RNA, 19 nt, Artificial Sequence
  Description of Artificial Sequence: Synthetic oligonucleotide
caguccggagggcgucugg

SEQ ID NO: 1095015 - RNA, 19 nt, Artificial Sequence
  Description of Artificial Sequence: Synthetic oligonucleotide
cauaccagaauagcagcau

SEQ ID NO: 1095016 - RNA, 19 nt, Artificial Sequence
  Description of Artificial Sequence: Synthetic oligonucleotide
ccacuagggucccaaacca

SEQ ID NO: 1095017 - RNA, 19 nt, Artificial Sequence
  Description of Artificial Sequence: Synthetic oligonucleotide
ccuuggucagguguaggac

SEQ ID NO: 1095018 - RNA, 19 nt, Artificial Sequence
  Description of Artificial Sequence: Synthetic oligonucleotide
ccccuaguacagugaacag

SEQ ID NO: 1095019 - RNA, 19 nt, Artificial Sequence
  Description of Artificial Sequence: Synthetic oligonucleotide
gaugcaccucuuccacacu

SEQ ID NO: 1095020 - RNA, 19 nt, Artificial Sequence
  Description of Artificial Sequence: Synthetic oligonucleotide
agccagacguucaccacua

SEQ ID NO: 1095021 - RNA, 19 nt, Artificial Sequence
  Description of Artificial Sequence: Synthetic oligonucleotide
ccaagccaaacuggugacc

SEQ ID NO: 1095022 - RNA, 19 nt, Artificial Sequence
  Description of Artificial Sequence: Synthetic oligonucleotide
cacugcaaacuuguuggua

SEQ ID NO: 1095023 - RNA, 19 nt, Artificial Sequence
  Description of Artificial Sequence: Synthetic oligonucleotide
ccguggguuuccuuucaug

SEQ ID NO: 1095024 - RNA, 19 nt, Artificial Sequence
  Description of Artificial Sequence: Synthetic oligonucleotide
ccggagggcgucuggaauc

SEQ ID NO: 1095025 - RNA, 19 nt, Artificial Sequence
  Description of Artificial Sequence: Synthetic oligonucleotide
agucgggaggcgggcucuc

SEQ ID NO: 1095026 - RNA, 19 nt, Artificial Sequence
  Description of Artificial Sequence: Synthetic oligonucleotide
cacugggcuaaagcgugga

SEQ ID NO: 1095027 - RNA, 19 nt, Artificial Sequence
  Description of Artificial Sequence: Synthetic oligonucleotide
ccuccucggaaccagggaa

SEQ ID NO: 1095028 - RNA, 19 nt, Artificial Sequence
  Description of Artificial Sequence: Synthetic oligonucleotide
cgggauucccauccuguac

SEQ ID NO: 1095029 - RNA, 19 nt, Artificial Sequence
  Description of Artificial Sequence: Synthetic oligonucleotide
gggcgucuggaaucuacaa

SEQ ID NO: 1095030 - RNA, 19 nt, Artificial Sequence
  Description of Artificial Sequence: Synthetic oligonucleotide
auagugcugcuggcauuau

SEQ ID NO: 1095031 - RNA, 19 nt, Artificial Sequence
  Description of Artificial Sequence: Synthetic oligonucleotide
aggcgggcucucauagcug

SEQ ID NO: 1095032 - RNA, 19 nt, Artificial Sequence
  Description of Artificial Sequence: Synthetic oligonucleotide
ccucggaaccagggaaggg

SEQ ID NO: 1095033 - RNA, 19 nt, Artificial Sequence
  Description of Artificial Sequence: Synthetic oligonucleotide
caccucucacaaguccaca

SEQ ID NO: 1095034 - RNA, 19 nt, Artificial Sequence
  Description of Artificial Sequence: Synthetic oligonucleotide
gugcucauauaggguaacu

SEQ ID NO: 1095035 - RNA, 19 nt, Artificial Sequence
  Description of Artificial Sequence: Synthetic oligonucleotide
ccggguguggacugcgcuc

SEQ ID NO: 1095036 - RNA, 19 nt, Artificial Sequence
  Description of Artificial Sequence: Synthetic oligonucleotide
cacuagggucccaaaccau

SEQ ID NO: 1095037 - RNA, 19 nt, Artificial Sequence
  Description of Artificial Sequence: Synthetic oligonucleotide
gugaggggagugggguuga

SEQ ID NO: 1095038 - RNA, 19 nt, Artificial Sequence
  Description of Artificial Sequence: Synthetic oligonucleotide
cgaagacccgcaagcagca

SEQ ID NO: 1095039 - RNA, 19 nt, Artificial Sequence
  Description of Artificial Sequence: Synthetic oligonucleotide
ccgcaagcagcagcuagac

SEQ ID NO: 1095040 - RNA, 19 nt, Artificial Sequence
  Description of Artificial Sequence: Synthetic oligonucleotide
ggugaccggugugugucca

SEQ ID NO: 1095041 - RNA, 19 nt, Artificial Sequence
  Description of Artificial Sequence: Synthetic oligonucleotide
ccuuuguugaaggaaggau

SEQ ID NO: 1095042 - RNA, 19 nt, Artificial Sequence
  Description of Artificial Sequence: Synthetic oligonucleotide
guguguccagggugagaua

SEQ ID NO: 1095043 - RNA, 19 nt, Artificial Sequence
  Description of Artificial Sequence: Synthetic oligonucleotide
ggguguggacugcgcuccc

SEQ ID NO: 1095044 - RNA, 19 nt, Artificial Sequence
  Description of Artificial Sequence: Synthetic oligonucleotide
cagccaagacagaggcacu

SEQ ID NO: 1095045 - RNA, 19 nt, Artificial Sequence
  Description of Artificial Sequence: Synthetic oligonucleotide
ugccggucaccagcucguu

SEQ ID NO: 1095046 - RNA, 19 nt, Artificial Sequence
  Description of Artificial Sequence: Synthetic oligonucleotide
ccagucugacagcgcccug

SEQ ID NO: 1095047 - RNA, 19 nt, Artificial Sequence
  Description of Artificial Sequence: Synthetic oligonucleotide
ccggccaaacacugggcua

SEQ ID NO: 1095048 - RNA, 19 nt, Artificial Sequence
  Description of Artificial Sequence: Synthetic oligonucleotide
cguucaccacuaggguccc

SEQ ID NO: 1095049 - RNA, 19 nt, Artificial Sequence
  Description of Artificial Sequence: Synthetic oligonucleotide
gacccgcaagcagcagcua

SEQ ID NO: 1095050 - RNA, 19 nt, Artificial Sequence
  Description of Artificial Sequence: Synthetic oligonucleotide
cccggccaaacacugggcu

SEQ ID NO: 1095051 - RNA, 19 nt, Artificial Sequence
  Description of Artificial Sequence: Synthetic oligonucleotide
cguugcugacuuugcaccu

SEQ ID NO: 1095052 - RNA, 19 nt, Artificial Sequence
  Description of Artificial Sequence: Synthetic oligonucleotide
gccggucaccagcucguua

SEQ ID NO: 1095053 - RNA, 19 nt, Artificial Sequence
  Description of Artificial Sequence: Synthetic oligonucleotide
cggcuacaaucguugcuga

SEQ ID NO: 1095054 - RNA, 19 nt, Artificial Sequence
  Description of Artificial Sequence: Synthetic oligonucleotide
cccaagccucuccucucca

SEQ ID NO: 1095055 - RNA, 19 nt, Artificial Sequence
  Description of Artificial Sequence: Synthetic oligonucleotide
ccaguccggagggcgucug

SEQ ID NO: 1095056 - RNA, 19 nt, Artificial Sequence
  Description of Artificial Sequence: Synthetic oligonucleotide
ggccaaacacugggcuaaa

SEQ ID NO: 1095057 - RNA, 19 nt, Artificial Sequence
  Description of Artificial Sequence: Synthetic oligonucleotide
cuguacccguggguuuccu

SEQ ID NO: 1095058 - RNA, 19 nt, Artificial Sequence
  Description of Artificial Sequence: Synthetic oligonucleotide
cccggguguggacugcgcu

SEQ ID NO: 1095059 - RNA, 19 nt, Artificial Sequence
  Description of Artificial Sequence: Synthetic oligonucleotide
gcccaucgacagagaguca

SEQ ID NO: 1095060 - RNA, 19 nt, Artificial Sequence
  Description of Artificial Sequence: Synthetic oligonucleotide
ggagggcgucuggaaucua

SEQ ID NO: 1095061 - RNA, 19 nt, Artificial Sequence
  Description of Artificial Sequence: Synthetic oligonucleotide
gccaguccggagggcgucu

SEQ ID NO: 1095062 - RNA, 19 nt, Artificial Sequence
  Description of Artificial Sequence: Synthetic oligonucleotide
cccguggguuuccuuucau

SEQ ID NO: 1095063 - RNA, 19 nt, Artificial Sequence
  Description of Artificial Sequence: Synthetic oligonucleotide
cggagggcgucuggaaucu

SEQ ID NO: 1095064 - RNA, 19 nt, Artificial Sequence
  Description of Artificial Sequence: Synthetic oligonucleotide
gaauguaagacccagauag

SEQ ID NO: 1095065 - RNA, 19 nt, Artificial Sequence
  Description of Artificial Sequence: Synthetic oligonucleotide
aaguaaugaauguaagacc

SEQ ID NO: 1095066 - RNA, 19 nt, Artificial Sequence
  Description of Artificial Sequence: Synthetic oligonucleotide
auagcugacauuccgaacc

SEQ ID NO: 1095067 - RNA, 19 nt, Artificial Sequence
  Description of Artificial Sequence: Synthetic oligonucleotide
cucaguaccuuuaagaagg

SEQ ID NO: 1095068 - RNA, 19 nt, Artificial Sequence
  Description of Artificial Sequence: Synthetic oligonucleotide
gaaccaagaggcuagaaag

SEQ ID NO: 1095069 - RNA, 19 nt, Artificial Sequence
  Description of Artificial Sequence: Synthetic oligonucleotide
gaaacuggcucacagacag

SEQ ID NO: 1095070 - RNA, 19 nt, Artificial Sequence
  Description of Artificial Sequence: Synthetic oligonucleotide
gaaguaaugaauguaagac

SEQ ID NO: 1095071 - RNA, 19 nt, Artificial Sequence
  Description of Artificial Sequence: Synthetic oligonucleotide
agguccacuauucuuaggc

SEQ ID NO: 1095072 - RNA, 19 nt, Artificial Sequence
  Description of Artificial Sequence: Synthetic oligonucleotide
agaaucauaaacaagugcu

SEQ ID NO: 1095073 - RNA, 19 nt, Artificial Sequence
  Description of Artificial Sequence: Synthetic oligonucleotide
ucaaugaacugauuccggg

SEQ ID NO: 1095074 - RNA, 19 nt, Artificial Sequence
  Description of Artificial Sequence: Synthetic oligonucleotide
aaucagauccugcagugug

SEQ ID NO: 1095075 - RNA, 19 nt, Artificial Sequence
  Description of Artificial Sequence: Synthetic oligonucleotide
gacauuccgaaccaagagg

SEQ ID NO: 1095076 - RNA, 19 nt, Artificial Sequence
  Description of Artificial Sequence: Synthetic oligonucleotide
aaggggaucucauagcuga

SEQ ID NO: 1095077 - RNA, 19 nt, Artificial Sequence
  Description of Artificial Sequence: Synthetic oligonucleotide
aaacaagugcugcauucgg

SEQ ID NO: 1095078 - RNA, 19 nt, Artificial Sequence
  Description of Artificial Sequence: Synthetic oligonucleotide
aggguauucaagaagaguc

SEQ ID NO: 1095079 - RNA, 19 nt, Artificial Sequence
  Description of Artificial Sequence: Synthetic oligonucleotide
uauucuuaggcaguggaag

SEQ ID NO: 1095080 - RNA, 19 nt, Artificial Sequence
  Description of Artificial Sequence: Synthetic oligonucleotide
acauuccgaaccaagaggc

SEQ ID NO: 1095081 - RNA, 19 nt, Artificial Sequence
  Description of Artificial Sequence: Synthetic oligonucleotide
uuaagaagguccacuauuc

SEQ ID NO: 1095082 - RNA, 19 nt, Artificial Sequence
  Description of Artificial Sequence: Synthetic oligonucleotide
ugacauuccgaaccaagag

SEQ ID NO: 1095083 - RNA, 19 nt, Artificial Sequence
  Description of Artificial Sequence: Synthetic oligonucleotide
ugucacucgguccacauac

SEQ ID NO: 1095084 - RNA, 19 nt, Artificial Sequence
  Description of Artificial Sequence: Synthetic oligonucleotide
uccgcugugaagaguaccg

SEQ ID NO: 1095085 - RNA, 19 nt, Artificial Sequence
  Description of Artificial Sequence: Synthetic oligonucleotide
agaaguccccaucagguuc

SEQ ID NO: 1095086 - RNA, 19 nt, Artificial Sequence
  Description of Artificial Sequence: Synthetic oligonucleotide
agcaacgcccucuggagcc

SEQ ID NO: 1095087 - RNA, 19 nt, Artificial Sequence
  Description of Artificial Sequence: Synthetic oligonucleotide
gaugggcacgugcugaugg

SEQ ID NO: 1095088 - RNA, 19 nt, Artificial Sequence
  Description of Artificial Sequence: Synthetic oligonucleotide
uccacuagccaaucgagca

SEQ ID NO: 1095089 - RNA, 19 nt, Artificial Sequence
  Description of Artificial Sequence: Synthetic oligonucleotide
auucauacaccguugaguu

SEQ ID NO: 1095090 - RNA, 19 nt, Artificial Sequence
  Description of Artificial Sequence: Synthetic oligonucleotide
caucaaugaacugauuccg

SEQ ID NO: 1095091 - RNA, 19 nt, Artificial Sequence
  Description of Artificial Sequence: Synthetic oligonucleotide
acuauucuuaggcagugga

SEQ ID NO: 1095092 - RNA, 19 nt, Artificial Sequence
  Description of Artificial Sequence: Synthetic oligonucleotide
aagaguaccggccgaaaau

SEQ ID NO: 1095093 - RNA, 19 nt, Artificial Sequence
  Description of Artificial Sequence: Synthetic oligonucleotide
uagaaaguuccacuaagua

SEQ ID NO: 1095094 - RNA, 19 nt, Artificial Sequence
  Description of Artificial Sequence: Synthetic oligonucleotide
ucauacaccguugaguuuc

SEQ ID NO: 1095095 - RNA, 19 nt, Artificial Sequence
  Description of Artificial Sequence: Synthetic oligonucleotide
auucggagauuggugagcc

SEQ ID NO: 1095096 - RNA, 19 nt, Artificial Sequence
  Description of Artificial Sequence: Synthetic oligonucleotide
ugcacguaccgcagcaugg

SEQ ID NO: 1095097 - RNA, 19 nt, Artificial Sequence
  Description of Artificial Sequence: Synthetic oligonucleotide
uuagguugcagugucgucu

SEQ ID NO: 1095098 - RNA, 19 nt, Artificial Sequence
  Description of Artificial Sequence: Synthetic oligonucleotide
ucggagauuggugagccgg

SEQ ID NO: 1095099 - RNA, 19 nt, Artificial Sequence
  Description of Artificial Sequence: Synthetic oligonucleotide
ugaguuucccugcuucugc

SEQ ID NO: 1095100 - RNA, 19 nt, Artificial Sequence
  Description of Artificial Sequence: Synthetic oligonucleotide
uuucagcuagcugacuugg

SEQ ID NO: 1095101 - RNA, 19 nt, Artificial Sequence
  Description of Artificial Sequence: Synthetic oligonucleotide
aagaagguccacuauucuu

SEQ ID NO: 1095102 - RNA, 19 nt, Artificial Sequence
  Description of Artificial Sequence: Synthetic oligonucleotide
uuccgaaccaagaggcuag

SEQ ID NO: 1095103 - RNA, 19 nt, Artificial Sequence
  Description of Artificial Sequence: Synthetic oligonucleotide
cugauuccgggucucaggg

SEQ ID NO: 1095104 - RNA, 19 nt, Artificial Sequence
  Description of Artificial Sequence: Synthetic oligonucleotide
auacaggccuaugaucucc

SEQ ID NO: 1095105 - RNA, 19 nt, Artificial Sequence
  Description of Artificial Sequence: Synthetic oligonucleotide
agggcuaggagcucucuuc

SEQ ID NO: 1095106 - RNA, 19 nt, Artificial Sequence
  Description of Artificial Sequence: Synthetic oligonucleotide
uccacuauucuuaggcagu

SEQ ID NO: 1095107 - RNA, 19 nt, Artificial Sequence
  Description of Artificial Sequence: Synthetic oligonucleotide
uaucccaccuccaccuggg

SEQ ID NO: 1095108 - RNA, 19 nt, Artificial Sequence
  Description of Artificial Sequence: Synthetic oligonucleotide
uuugcaugagugguaaaac

SEQ ID NO: 1095109 - RNA, 19 nt, Artificial Sequence
  Description of Artificial Sequence: Synthetic oligonucleotide
acaccguugaguuucccug

SEQ ID NO: 1095110 - RNA, 19 nt, Artificial Sequence
  Description of Artificial Sequence: Synthetic oligonucleotide
ugaagcaacucugucacuc

SEQ ID NO: 1095111 - RNA, 19 nt, Artificial Sequence
  Description of Artificial Sequence: Synthetic oligonucleotide
uccauucauacaccguuga

SEQ ID NO: 1095112 - RNA, 19 nt, Artificial Sequence
  Description of Artificial Sequence: Synthetic oligonucleotide
ucauccgcugugaagagua

SEQ ID NO: 1095113 - RNA, 19 nt, Artificial Sequence
  Description of Artificial Sequence: Synthetic oligonucleotide
gaagguccacuauucuuag

SEQ ID NO: 1095114 - RNA, 19 nt, Artificial Sequence
  Description of Artificial Sequence: Synthetic oligonucleotide
guacuguuugcaugagugg

SEQ ID NO: 1095115 - RNA, 19 nt, Artificial Sequence
  Description of Artificial Sequence: Synthetic oligonucleotide
cuuugacucugauuccagg

SEQ ID NO: 1095116 - RNA, 19 nt, Artificial Sequence
  Description of Artificial Sequence: Synthetic oligonucleotide
uuuuagguugcagugucgu

SEQ ID NO: 1095117 - RNA, 19 nt, Artificial Sequence
  Description of Artificial Sequence: Synthetic oligonucleotide
ucauagcugacauuccgaa

SEQ ID NO: 1095118 - RNA, 19 nt, Artificial Sequence
  Description of Artificial Sequence: Synthetic oligonucleotide
cuugcggcuguauucuugc

SEQ ID NO: 1095119 - RNA, 19 nt, Artificial Sequence
  Description of Artificial Sequence: Synthetic oligonucleotide
agaggcuagaaaguuccac

SEQ ID NO: 1095120 - RNA, 19 nt, Artificial Sequence
  Description of Artificial Sequence: Synthetic oligonucleotide
cuagcaacgcccucuggag

SEQ ID NO: 1095121 - RNA, 19 nt, Artificial Sequence
  Description of Artificial Sequence: Synthetic oligonucleotide
aaagucgccccagucgauc

SEQ ID NO: 1095122 - RNA, 19 nt, Artificial Sequence
  Description of Artificial Sequence: Synthetic oligonucleotide
gaagcagcgaugucgucac

SEQ ID NO: 1095123 - RNA, 19 nt, Artificial Sequence
  Description of Artificial Sequence: Synthetic oligonucleotide
ucgucuguccacuagccaa

SEQ ID NO: 1095124 - RNA, 19 nt, Artificial Sequence
  Description of Artificial Sequence: Synthetic oligonucleotide
ugaucuccgaagcagcgau

SEQ ID NO: 1095125 - RNA, 19 nt, Artificial Sequence
  Description of Artificial Sequence: Synthetic oligonucleotide
ugucgucuguccacuagcc

SEQ ID NO: 1095126 - RNA, 19 nt, Artificial Sequence
  Description of Artificial Sequence: Synthetic oligonucleotide
cuccgaagcagcgaugucg

SEQ ID NO: 1095127 - RNA, 19 nt, Artificial Sequence
  Description of Artificial Sequence: Synthetic oligonucleotide
uggugagccggccaaucag

SEQ ID NO: 1095128 - RNA, 19 nt, Artificial Sequence
  Description of Artificial Sequence: Synthetic oligonucleotide
ugaauguaagacccagaua

SEQ ID NO: 1095129 - RNA, 19 nt, Artificial Sequence
  Description of Artificial Sequence: Synthetic oligonucleotide
ucggaaauggccucugcuc

SEQ ID NO: 1095130 - RNA, 19 nt, Artificial Sequence
  Description of Artificial Sequence: Synthetic oligonucleotide
ugcggcuguauucuugcug

SEQ ID NO: 1095131 - RNA, 19 nt, Artificial Sequence
  Description of Artificial Sequence: Synthetic oligonucleotide
ugccguacuguuugcauga

SEQ ID NO: 1095132 - RNA, 19 nt, Artificial Sequence
  Description of Artificial Sequence: Synthetic oligonucleotide
aggaugucggccuccucac

SEQ ID NO: 1095133 - RNA, 19 nt, Artificial Sequence
  Description of Artificial Sequence: Synthetic oligonucleotide
guugcagugucgucugucc

SEQ ID NO: 1095134 - RNA, 19 nt, Artificial Sequence
  Description of Artificial Sequence: Synthetic oligonucleotide
cagcaaggggaucucauag

SEQ ID NO: 1095135 - RNA, 19 nt, Artificial Sequence
  Description of Artificial Sequence: Synthetic oligonucleotide
uccgaagcagcgaugucgu

SEQ ID NO: 1095136 - RNA, 19 nt, Artificial Sequence
  Description of Artificial Sequence: Synthetic oligonucleotide
uccuucauccgcugugaag

SEQ ID NO: 1095137 - RNA, 19 nt, Artificial Sequence
  Description of Artificial Sequence: Synthetic oligonucleotide
aucaaugaacugauuccgg

SEQ ID NO: 1095138 - RNA, 19 nt, Artificial Sequence
  Description of Artificial Sequence: Synthetic oligonucleotide
acauggagggagcacguca

SEQ ID NO: 1095139 - RNA, 19 nt, Artificial Sequence
  Description of Artificial Sequence: Synthetic oligonucleotide
agugucgucuguccacuag

SEQ ID NO: 1095140 - RNA, 19 nt, Artificial Sequence
  Description of Artificial Sequence: Synthetic oligonucleotide
aguuccugucuccagcaca

SEQ ID NO: 1095141 - RNA, 19 nt, Artificial Sequence
  Description of Artificial Sequence: Synthetic oligonucleotide
uacaccguugaguuucccu

SEQ ID NO: 1095142 - RNA, 19 nt, Artificial Sequence
  Description of Artificial Sequence: Synthetic oligonucleotide
cuugggcuaucccaccucc

SEQ ID NO: 1095143 - RNA, 19 nt, Artificial Sequence
  Description of Artificial Sequence: Synthetic oligonucleotide
gaugucgucaccccagucu

SEQ ID NO: 1095144 - RNA, 19 nt, Artificial Sequence
  Description of Artificial Sequence: Synthetic oligonucleotide
ucgaucucaucuucuugca

SEQ ID NO: 1095145 - RNA, 19 nt, Artificial Sequence
  Description of Artificial Sequence: Synthetic oligonucleotide
guccacauaccuuggcgag

SEQ ID NO: 1095146 - RNA, 19 nt, Artificial Sequence
  Description of Artificial Sequence: Synthetic oligonucleotide
agugaucuccgaagcagcg

SEQ ID NO: 1095147 - RNA, 19 nt, Artificial Sequence
  Description of Artificial Sequence: Synthetic oligonucleotide
cauggagggagcacgucac

SEQ ID NO: 1095148 - RNA, 19 nt, Artificial Sequence
  Description of Artificial Sequence: Synthetic oligonucleotide
augaacugauuccgggucu

SEQ ID NO: 1095149 - RNA, 19 nt, Artificial Sequence
  Description of Artificial Sequence: Synthetic oligonucleotide
agguucacgggacggccac

SEQ ID NO: 1095150 - RNA, 19 nt, Artificial Sequence
  Description of Artificial Sequence: Synthetic oligonucleotide
uagcugacauuccgaacca

SEQ ID NO: 1095151 - RNA, 19 nt, Artificial Sequence
  Description of Artificial Sequence: Synthetic oligonucleotide
cuggaugucgaugggcacg

SEQ ID NO: 1095152 - RNA, 19 nt, Artificial Sequence
  Description of Artificial Sequence: Synthetic oligonucleotide
auccgcugugaagaguacc

SEQ ID NO: 1095153 - RNA, 19 nt, Artificial Sequence
  Description of Artificial Sequence: Synthetic oligonucleotide
cauagcugacauuccgaac

SEQ ID NO: 1095154 - RNA, 19 nt, Artificial Sequence
  Description of Artificial Sequence: Synthetic oligonucleotide
augccguacuguuugcaug

SEQ ID NO: 1095155 - RNA, 19 nt, Artificial Sequence
  Description of Artificial Sequence: Synthetic oligonucleotide
guggaaguaaugaauguaa

SEQ ID NO: 1095156 - RNA, 19 nt, Artificial Sequence
  Description of Artificial Sequence: Synthetic oligonucleotide
agccaaucgagcagcuugc

SEQ ID NO: 1095157 - RNA, 19 nt, Artificial Sequence
  Description of Artificial Sequence: Synthetic oligonucleotide
ugggcuaucccaccuccac

SEQ ID NO: 1095158 - RNA, 19 nt, Artificial Sequence
  Description of Artificial Sequence: Synthetic oligonucleotide
aacaagugcugcauucgga

SEQ ID NO: 1095159 - RNA, 19 nt, Artificial Sequence
  Description of Artificial Sequence: Synthetic oligonucleotide
uccacauaccuuggcgagg

SEQ ID NO: 1095160 - RNA, 19 nt, Artificial Sequence
  Description of Artificial Sequence: Synthetic oligonucleotide
aguggaaguaaugaaugua

SEQ ID NO: 1095161 - RNA, 19 nt, Artificial Sequence
  Description of Artificial Sequence: Synthetic oligonucleotide
aaaguuccacuaaguaggu

SEQ ID NO: 1095162 - RNA, 19 nt, Artificial Sequence
  Description of Artificial Sequence: Synthetic oligonucleotide
aagucgccccagucgaucu

SEQ ID NO: 1095163 - RNA, 19 nt, Artificial Sequence
  Description of Artificial Sequence: Synthetic oligonucleotide
ucuuaggcaguggaaguaa

SEQ ID NO: 1095164 - RNA, 19 nt, Artificial Sequence
  Description of Artificial Sequence: Synthetic oligonucleotide
agggagaugccccagucua

SEQ ID NO: 1095165 - RNA, 19 nt, Artificial Sequence
  Description of Artificial Sequence: Synthetic oligonucleotide
auuuuagguugcagugucg

SEQ ID NO: 1095166 - RNA, 19 nt, Artificial Sequence
  Description of Artificial Sequence: Synthetic oligonucleotide
gagcacgucacagagaagu

SEQ ID NO: 1095167 - RNA, 19 nt, Artificial Sequence
  Description of Artificial Sequence: Synthetic oligonucleotide
augagugguaaaacugcuc

SEQ ID NO: 1095168 - RNA, 19 nt, Artificial Sequence
  Description of Artificial Sequence: Synthetic oligonucleotide
ucagguucacgggacggcc

SEQ ID NO: 1095169 - RNA, 19 nt, Artificial Sequence
  Description of Artificial Sequence: Synthetic oligonucleotide
ugccccagucuauuccagg

SEQ ID NO: 1095170 - RNA, 19 nt, Artificial Sequence
  Description of Artificial Sequence: Synthetic oligonucleotide
cuccauucauacaccguug

SEQ ID NO: 1095171 - RNA, 19 nt, Artificial Sequence
  Description of Artificial Sequence: Synthetic oligonucleotide
uuuagguugcagugucguc

SEQ ID NO: 1095172 - RNA, 19 nt, Artificial Sequence
  Description of Artificial Sequence: Synthetic oligonucleotide
guuugcaugagugguaaaa

SEQ ID NO: 1095173 - RNA, 19 nt, Artificial Sequence
  Description of Artificial Sequence: Synthetic oligonucleotide
agauuggugagccggccaa

SEQ ID NO: 1095174 - RNA, 19 nt, Artificial Sequence
  Description of Artificial Sequence: Synthetic oligonucleotide
gaagaguaccggccgaaaa

SEQ ID NO: 1095175 - RNA, 19 nt, Artificial Sequence
  Description of Artificial Sequence: Synthetic oligonucleotide
cuucggacauugucucccg

SEQ ID NO: 1095176 - RNA, 19 nt, Artificial Sequence
  Description of Artificial Sequence: Synthetic oligonucleotide
gucagagcgucugagcccc

SEQ ID NO: 1095177 - RNA, 19 nt, Artificial Sequence
  Description of Artificial Sequence: Synthetic oligonucleotide
acgggacggccacuguacc

SEQ ID NO: 1095178 - RNA, 19 nt, Artificial Sequence
  Description of Artificial Sequence: Synthetic oligonucleotide
cauucggagauuggugagc

SEQ ID NO: 1095179 - RNA, 19 nt, Artificial Sequence
  Description of Artificial Sequence: Synthetic oligonucleotide
uccuccauucauacaccgu

SEQ ID NO: 1095180 - RNA, 19 nt, Artificial Sequence
  Description of Artificial Sequence: Synthetic oligonucleotide
cacuagccaaucgagcagc

SEQ ID NO: 1095181 - RNA, 19 nt, Artificial Sequence
  Description of Artificial Sequence: Synthetic oligonucleotide
uugcuggucuggaugucga

SEQ ID NO: 1095182 - RNA, 19 nt, Artificial Sequence
  Description of Artificial Sequence: Synthetic oligonucleotide
agcgucugagccccuagca

SEQ ID NO: 1095183 - RNA, 19 nt, Artificial Sequence
  Description of Artificial Sequence: Synthetic oligonucleotide
gcggcuguauucuugcugc

SEQ ID NO: 1095184 - RNA, 19 nt, Artificial Sequence
  Description of Artificial Sequence: Synthetic oligonucleotide
uguggccgcuccaccacag

SEQ ID NO: 1095185 - RNA, 19 nt, Artificial Sequence
  Description of Artificial Sequence: Synthetic oligonucleotide
ugaugguccugcauccuuu

SEQ ID NO: 1095186 - RNA, 19 nt, Artificial Sequence
  Description of Artificial Sequence: Synthetic oligonucleotide
gccagaaucauaaacaagu

SEQ ID NO: 1095187 - RNA, 19 nt, Artificial Sequence
  Description of Artificial Sequence: Synthetic oligonucleotide
aggcuagaaaguuccacua

SEQ ID NO: 1095188 - RNA, 19 nt, Artificial Sequence
  Description of Artificial Sequence: Synthetic oligonucleotide
uucggagauuggugagccg

SEQ ID NO: 1095189 - RNA, 19 nt, Artificial Sequence
  Description of Artificial Sequence: Synthetic oligonucleotide
aucuccgaagcagcgaugu

SEQ ID NO: 1095190 - RNA, 19 nt, Artificial Sequence
  Description of Artificial Sequence: Synthetic oligonucleotide
cauacaccguugaguuucc

SEQ ID NO: 1095191 - RNA, 19 nt, Artificial Sequence
  Description of Artificial Sequence: Synthetic oligonucleotide
caccguugaguuucccugc

SEQ ID NO: 1095192 - RNA, 19 nt, Artificial Sequence
  Description of Artificial Sequence: Synthetic oligonucleotide
cuucauccgcugugaagag

SEQ ID NO: 1095193 - RNA, 19 nt, Artificial Sequence
  Description of Artificial Sequence: Synthetic oligonucleotide
gccgcuccaccacagaggg

SEQ ID NO: 1095194 - RNA, 19 nt, Artificial Sequence
  Description of Artificial Sequence: Synthetic oligonucleotide
ucuauuccaggggucucca

SEQ ID NO: 1095195 - RNA, 19 nt, Artificial Sequence
  Description of Artificial Sequence: Synthetic oligonucleotide
cuagaaaguuccacuaagu

SEQ ID NO: 1095196 - RNA, 19 nt, Artificial Sequence
  Description of Artificial Sequence: Synthetic oligonucleotide
ggccucaguaccuuuaaga

SEQ ID NO: 1095197 - RNA, 19 nt, Artificial Sequence
  Description of Artificial Sequence: Synthetic oligonucleotide
cacgggacggccacuguac

SEQ ID NO: 1095198 - RNA, 19 nt, Artificial Sequence
  Description of Artificial Sequence: Synthetic oligonucleotide
cucucuucggacauugucu

SEQ ID NO: 1095199 - RNA, 19 nt, Artificial Sequence
  Description of Artificial Sequence: Synthetic oligonucleotide
gggagcacgucacagagaa

SEQ ID NO: 1095200 - RNA, 19 nt, Artificial Sequence
  Description of Artificial Sequence: Synthetic oligonucleotide
agagcgucugagccccuag

SEQ ID NO: 1095201 - RNA, 19 nt, Artificial Sequence
  Description of Artificial Sequence: Synthetic oligonucleotide
augucgucaccccagucua

SEQ ID NO: 1095202 - RNA, 19 nt, Artificial Sequence
  Description of Artificial Sequence: Synthetic oligonucleotide
acauaccuuggcgaggcca

SEQ ID NO: 1095203 - RNA, 19 nt, Artificial Sequence
  Description of Artificial Sequence: Synthetic oligonucleotide
uguggacaccagacugagc

SEQ ID NO: 1095204 - RNA, 19 nt, Artificial Sequence
  Description of Artificial Sequence: Synthetic oligonucleotide
gagauuggugagccggcca

SEQ ID NO: 1095205 - RNA, 19 nt, Artificial Sequence
  Description of Artificial Sequence: Synthetic oligonucleotide
auuccgaaccaagaggcua

SEQ ID NO: 1095206 - RNA, 19 nt, Artificial Sequence
  Description of Artificial Sequence: Synthetic oligonucleotide
gaaguccccaucagguuca

SEQ ID NO: 1095207 - RNA, 19 nt, Artificial Sequence
  Description of Artificial Sequence: Synthetic oligonucleotide
gggcuaggagcucucuucg

SEQ ID NO: 1095208 - RNA, 19 nt, Artificial Sequence
  Description of Artificial Sequence: Synthetic oligonucleotide
cauucauacaccguugagu

SEQ ID NO: 1095209 - RNA, 19 nt, Artificial Sequence
  Description of Artificial Sequence: Synthetic oligonucleotide
cucgguccacauaccuugg

SEQ ID NO: 1095210 - RNA, 19 nt, Artificial Sequence
  Description of Artificial Sequence: Synthetic oligonucleotide
agcgaugucgucaccccag

SEQ ID NO: 1095211 - RNA, 19 nt, Artificial Sequence
  Description of Artificial Sequence: Synthetic oligonucleotide
aguguggacaccagacuga

SEQ ID NO: 1095212 - RNA, 19 nt, Artificial Sequence
  Description of Artificial Sequence: Synthetic oligonucleotide
gucuauuccaggggucucc

SEQ ID NO: 1095213 - RNA, 19 nt, Artificial Sequence
  Description of Artificial Sequence: Synthetic oligonucleotide
agucuauuccaggggucuc

SEQ ID NO: 1095214 - RNA, 19 nt, Artificial Sequence
  Description of Artificial Sequence: Synthetic oligonucleotide
agaguaccggccgaaaaua

SEQ ID NO: 1095215 - RNA, 19 nt, Artificial Sequence
  Description of Artificial Sequence: Synthetic oligonucleotide
cacuauucuuaggcagugg

SEQ ID NO: 1095216 - RNA, 19 nt, Artificial Sequence
  Description of Artificial Sequence: Synthetic oligonucleotide
aagaagagucagagcgucu

SEQ ID NO: 1095217 - RNA, 19 nt, Artificial Sequence
  Description of Artificial Sequence: Synthetic oligonucleotide
ugaugccguacuguuugca

SEQ ID NO: 1095218 - RNA, 19 nt, Artificial Sequence
  Description of Artificial Sequence: Synthetic oligonucleotide
ucacgggacggccacugua

SEQ ID NO: 1095219 - RNA, 19 nt, Artificial Sequence
  Description of Artificial Sequence: Synthetic oligonucleotide
ccacagagggcucugugcc

SEQ ID NO: 1095220 - RNA, 19 nt, Artificial Sequence
  Description of Artificial Sequence: Synthetic oligonucleotide
ucuuuggucuggcccugaa

SEQ ID NO: 1095221 - RNA, 19 nt, Artificial Sequence
  Description of Artificial Sequence: Synthetic oligonucleotide
ggagccccgcuucagaaac

SEQ ID NO: 1095222 - RNA, 19 nt, Artificial Sequence
  Description of Artificial Sequence: Synthetic oligonucleotide
uugggcuaucccaccucca

SEQ ID NO: 1095223 - RNA, 19 nt, Artificial Sequence
  Description of Artificial Sequence: Synthetic oligonucleotide
accguugaguuucccugcu

SEQ ID NO: 1095224 - RNA, 19 nt, Artificial Sequence
  Description of Artificial Sequence: Synthetic oligonucleotide
gagaugccccagucuauuc

SEQ ID NO: 1095225 - RNA, 19 nt, Artificial Sequence
  Description of Artificial Sequence: Synthetic oligonucleotide
ugcuccgauuucagcuagc

SEQ ID NO: 1095226 - RNA, 19 nt, Artificial Sequence
  Description of Artificial Sequence: Synthetic oligonucleotide
uucauacaccguugaguuu

SEQ ID NO: 1095227 - RNA, 19 nt, Artificial Sequence
  Description of Artificial Sequence: Synthetic oligonucleotide
gcauucggagauuggugag

SEQ ID NO: 1095228 - RNA, 19 nt, Artificial Sequence
  Description of Artificial Sequence: Synthetic oligonucleotide
caagaccccggcccggccc

SEQ ID NO: 1095229 - RNA, 19 nt, Artificial Sequence
  Description of Artificial Sequence: Synthetic oligonucleotide
caauccugagccggcgugc

SEQ ID NO: 1095230 - RNA, 19 nt, Artificial Sequence
  Description of Artificial Sequence: Synthetic oligonucleotide
cugcuccgauuucagcuag

SEQ ID NO: 1095231 - RNA, 19 nt, Artificial Sequence
  Description of Artificial Sequence: Synthetic oligonucleotide
auacaccguugaguuuccc

SEQ ID NO: 1095232 - RNA, 19 nt, Artificial Sequence
  Description of Artificial Sequence: Synthetic oligonucleotide
caugagugguaaaacugcu

SEQ ID NO: 1095233 - RNA, 19 nt, Artificial Sequence
  Description of Artificial Sequence: Synthetic oligonucleotide
caaugaacugauuccgggu

SEQ ID NO: 1095234 - RNA, 19 nt, Artificial Sequence
  Description of Artificial Sequence: Synthetic oligonucleotide
ugaagaguaccggccgaaa

SEQ ID NO: 1095235 - RNA, 19 nt, Artificial Sequence
  Description of Artificial Sequence: Synthetic oligonucleotide
gagggcucugugcccgucc

SEQ ID NO: 1095236 - RNA, 19 nt, Artificial Sequence
  Description of Artificial Sequence: Synthetic oligonucleotide
gaugccguacuguuugcau

SEQ ID NO: 1095237 - RNA, 19 nt, Artificial Sequence
  Description of Artificial Sequence: Synthetic oligonucleotide
gacucugauuccagggaga

SEQ ID NO: 1095238 - RNA, 19 nt, Artificial Sequence
  Description of Artificial Sequence: Synthetic oligonucleotide
agagucggaaauggccucu

SEQ ID NO: 1095239 - RNA, 19 nt, Artificial Sequence
  Description of Artificial Sequence: Synthetic oligonucleotide
uguuugcaugagugguaaa

SEQ ID NO: 1095240 - RNA, 19 nt, Artificial Sequence
  Description of Artificial Sequence: Synthetic oligonucleotide
agucgccccagucgaucuc

SEQ ID NO: 1095241 - RNA, 19 nt, Artificial Sequence
  Description of Artificial Sequence: Synthetic oligonucleotide
uaccuuuaagaagguccac

SEQ ID NO: 1095242 - RNA, 19 nt, Artificial Sequence
  Description of Artificial Sequence: Synthetic oligonucleotide
aagaggcuagaaaguucca

SEQ ID NO: 1095243 - RNA, 19 nt, Artificial Sequence
  Description of Artificial Sequence: Synthetic oligonucleotide
cacguaccgcagcaugggc

SEQ ID NO: 1095244 - RNA, 19 nt, Artificial Sequence
  Description of Artificial Sequence: Synthetic oligonucleotide
accaauccugagccggcgu

SEQ ID NO: 1095245 - RNA, 19 nt, Artificial Sequence
  Description of Artificial Sequence: Synthetic oligonucleotide
uaccggccgaaaauauuuu

SEQ ID NO: 1095246 - RNA, 19 nt, Artificial Sequence
  Description of Artificial Sequence: Synthetic oligonucleotide
ugcccguccuccauucaua

SEQ ID NO: 1095247 - RNA, 19 nt, Artificial Sequence
  Description of Artificial Sequence: Synthetic oligonucleotide
guucacgggacggccacug

SEQ ID NO: 1095248 - RNA, 19 nt, Artificial Sequence
  Description of Artificial Sequence: Synthetic oligonucleotide
cacgugcugaugguccugc

SEQ ID NO: 1095249 - RNA, 19 nt, Artificial Sequence
  Description of Artificial Sequence: Synthetic oligonucleotide
gcaacucugucacucgguc

SEQ ID NO: 1095250 - RNA, 19 nt, Artificial Sequence
  Description of Artificial Sequence: Synthetic oligonucleotide
augggcacgugcugauggu

SEQ ID NO: 1095251 - RNA, 19 nt, Artificial Sequence
  Description of Artificial Sequence: Synthetic oligonucleotide
ucccgugaugccguacugu

SEQ ID NO: 1095252 - RNA, 19 nt, Artificial Sequence
  Description of Artificial Sequence: Synthetic oligonucleotide
agcaugggcaacaccugcu

SEQ ID NO: 1095253 - RNA, 19 nt, Artificial Sequence
  Description of Artificial Sequence: Synthetic oligonucleotide
ucccgcaucucagcagccc

SEQ ID NO: 1095254 - RNA, 19 nt, Artificial Sequence
  Description of Artificial Sequence: Synthetic oligonucleotide
acguaccgcagcaugggca

SEQ ID NO: 1095255 - RNA, 19 nt, Artificial Sequence
  Description of Artificial Sequence: Synthetic oligonucleotide
ggcuaggagcucucuucgg

SEQ ID NO: 1095256 - RNA, 19 nt, Artificial Sequence
  Description of Artificial Sequence: Synthetic oligonucleotide
gaucuccgaagcagcgaug

SEQ ID NO: 1095257 - RNA, 19 nt, Artificial Sequence
  Description of Artificial Sequence: Synthetic oligonucleotide
ccauucauacaccguugag

SEQ ID NO: 1095258 - RNA, 19 nt, Artificial Sequence
  Description of Artificial Sequence: Synthetic oligonucleotide
cagugacaccagcuugggc

SEQ ID NO: 1095259 - RNA, 19 nt, Artificial Sequence
  Description of Artificial Sequence: Synthetic oligonucleotide
ccgauuucagcuagcugac

SEQ ID NO: 1095260 - RNA, 19 nt, Artificial Sequence
  Description of Artificial Sequence: Synthetic oligonucleotide
cuauuccaggggucuccac

SEQ ID NO: 1095261 - RNA, 19 nt, Artificial Sequence
  Description of Artificial Sequence: Synthetic oligonucleotide
uucacgggacggccacugu

SEQ ID NO: 1095262 - RNA, 19 nt, Artificial Sequence
  Description of Artificial Sequence: Synthetic oligonucleotide
ggcgaggccagaaucauaa

SEQ ID NO: 1095263 - RNA, 19 nt, Artificial Sequence
  Description of Artificial Sequence: Synthetic oligonucleotide
gcagcgaugucgucacccc

SEQ ID NO: 1095264 - RNA, 19 nt, Artificial Sequence
  Description of Artificial Sequence: Synthetic oligonucleotide
gagucggaaauggccucug

SEQ ID NO: 1095265 - RNA, 19 nt, Artificial Sequence
  Description of Artificial Sequence: Synthetic oligonucleotide
caccaauccugagccggcg

SEQ ID NO: 1095266 - RNA, 19 nt, Artificial Sequence
  Description of Artificial Sequence: Synthetic oligonucleotide
gucgucuguccacuagcca

SEQ ID NO: 1095267 - RNA, 19 nt, Artificial Sequence
  Description of Artificial Sequence: Synthetic oligonucleotide
agcaacucugucacucggu

SEQ ID NO: 1095268 - RNA, 19 nt, Artificial Sequence
  Description of Artificial Sequence: Synthetic oligonucleotide
ccacauaccuuggcgaggc

SEQ ID NO: 1095269 - RNA, 19 nt, Artificial Sequence
  Description of Artificial Sequence: Synthetic oligonucleotide
cauccgcugugaagaguac

SEQ ID NO: 1095270 - RNA, 19 nt, Artificial Sequence
  Description of Artificial Sequence: Synthetic oligonucleotide
ugucgucaccccagucuau

SEQ ID NO: 1095271 - RNA, 19 nt, Artificial Sequence
  Description of Artificial Sequence: Synthetic oligonucleotide
uuccggccaagaccccggc

SEQ ID NO: 1095272 - RNA, 19 nt, Artificial Sequence
  Description of Artificial Sequence: Synthetic oligonucleotide
cugugcccguccuccauuc

SEQ ID NO: 1095273 - RNA, 19 nt, Artificial Sequence
  Description of Artificial Sequence: Synthetic oligonucleotide
aguaccggccgaaaauauu

SEQ ID NO: 1095274 - RNA, 19 nt, Artificial Sequence
  Description of Artificial Sequence: Synthetic oligonucleotide
ccaaagucgccccagucga

SEQ ID NO: 1095275 - RNA, 19 nt, Artificial Sequence
  Description of Artificial Sequence: Synthetic oligonucleotide
ccuagcaacgcccucugga

SEQ ID NO: 1095276 - RNA, 19 nt, Artificial Sequence
  Description of Artificial Sequence: Synthetic oligonucleotide
ccacuagccaaucgagcag

SEQ ID NO: 1095277 - RNA, 19 nt, Artificial Sequence
  Description of Artificial Sequence: Synthetic oligonucleotide
agacauggagggagcacgu

SEQ ID NO: 1095278 - RNA, 19 nt, Artificial Sequence
  Description of Artificial Sequence: Synthetic oligonucleotide
agagccgccugcuccugaa

SEQ ID NO: 1095279 - RNA, 19 nt, Artificial Sequence
  Description of Artificial Sequence: Synthetic oligonucleotide
gugcugcauucggagauug

SEQ ID NO: 1095280 - RNA, 19 nt, Artificial Sequence
  Description of Artificial Sequence: Synthetic oligonucleotide
ggcuagaaaguuccacuaa

SEQ ID NO: 1095281 - RNA, 19 nt, Artificial Sequence
  Description of Artificial Sequence: Synthetic oligonucleotide
cagacaggaugucggccuc

SEQ ID NO: 1095282 - RNA, 19 nt, Artificial Sequence
  Description of Artificial Sequence: Synthetic oligonucleotide
cccggcaccaauccugagc

SEQ ID NO: 1095283 - RNA, 19 nt, Artificial Sequence
  Description of Artificial Sequence: Synthetic oligonucleotide
uugcggcuguauucuugcu

SEQ ID NO: 1095284 - RNA, 19 nt, Artificial Sequence
  Description of Artificial Sequence: Synthetic oligonucleotide
gcacguaccgcagcauggg

SEQ ID NO: 1095285 - RNA, 19 nt, Artificial Sequence
  Description of Artificial Sequence: Synthetic oligonucleotide
uccgaaccaagaggcuaga

SEQ ID NO: 1095286 - RNA, 19 nt, Artificial Sequence
  Description of Artificial Sequence: Synthetic oligonucleotide
cccaucagguucacgggac

SEQ ID NO: 1095287 - RNA, 19 nt, Artificial Sequence
  Description of Artificial Sequence: Synthetic oligonucleotide
guaccggccgaaaauauuu

SEQ ID NO: 1095288 - RNA, 19 nt, Artificial Sequence
  Description of Artificial Sequence: Synthetic oligonucleotide
gacaccagacugagcaucu

SEQ ID NO: 1095289 - RNA, 19 nt, Artificial Sequence
  Description of Artificial Sequence: Synthetic oligonucleotide
gucacucgguccacauacc

SEQ ID NO: 1095290 - RNA, 19 nt, Artificial Sequence
  Description of Artificial Sequence: Synthetic oligonucleotide
agccccuagcaacgcccuc

SEQ ID NO: 1095291 - RNA, 19 nt, Artificial Sequence
  Description of Artificial Sequence: Synthetic oligonucleotide
accuuggcgaggccagaau

SEQ ID NO: 1095292 - RNA, 19 nt, Artificial Sequence
  Description of Artificial Sequence: Synthetic oligonucleotide
gacauggagggagcacguc

SEQ ID NO: 1095293 - RNA, 19 nt, Artificial Sequence
  Description of Artificial Sequence: Synthetic oligonucleotide
gggucucaggguauucaag

SEQ ID NO: 1095294 - RNA, 19 nt, Artificial Sequence
  Description of Artificial Sequence: Synthetic oligonucleotide
ggagauuggugagccggcc

SEQ ID NO: 1095295 - RNA, 19 nt, Artificial Sequence
  Description of Artificial Sequence: Synthetic oligonucleotide
ccuuggcgaggccagaauc

SEQ ID NO: 1095296 - RNA, 19 nt, Artificial Sequence
  Description of Artificial Sequence: Synthetic oligonucleotide
aucgagcagcuugcugguc

SEQ ID NO: 1095297 - RNA, 19 nt, Artificial Sequence
  Description of Artificial Sequence: Synthetic oligonucleotide
gugaucuccgaagcagcga

SEQ ID NO: 1095298 - RNA, 19 nt, Artificial Sequence
  Description of Artificial Sequence: Synthetic oligonucleotide
ggagguuccuccaguugug

SEQ ID NO: 1095299 - RNA, 19 nt, Artificial Sequence
  Description of Artificial Sequence: Synthetic oligonucleotide
gcaggagccagcugaaacu

SEQ ID NO: 1095300 - RNA, 19 nt, Artificial Sequence
  Description of Artificial Sequence: Synthetic oligonucleotide
ccuugcggcuguauucuug

SEQ ID NO: 1095301 - RNA, 19 nt, Artificial Sequence
  Description of Artificial Sequence: Synthetic oligonucleotide
cacauaccuuggcgaggcc

SEQ ID NO: 1095302 - RNA, 19 nt, Artificial Sequence
  Description of Artificial Sequence: Synthetic oligonucleotide
ccaaucgagcagcuugcug

SEQ ID NO: 1095303 - RNA, 19 nt, Artificial Sequence
  Description of Artificial Sequence: Synthetic oligonucleotide
ccaauccugagccggcgug

SEQ ID NO: 1095304 - RNA, 19 nt, Artificial Sequence
  Description of Artificial Sequence: Synthetic oligonucleotide
caggguauucaagaagagu

SEQ ID NO: 1095305 - RNA, 19 nt, Artificial Sequence
  Description of Artificial Sequence: Synthetic oligonucleotide
gugaagaguaccggccgaa

SEQ ID NO: 1095306 - RNA, 19 nt, Artificial Sequence
  Description of Artificial Sequence: Synthetic oligonucleotide
agccccgcuucagaaacaa

SEQ ID NO: 1095307 - RNA, 19 nt, Artificial Sequence
  Description of Artificial Sequence: Synthetic oligonucleotide
cccgcaucucagcagcccc

SEQ ID NO: 1095308 - RNA, 19 nt, Artificial Sequence
  Description of Artificial Sequence: Synthetic oligonucleotide
cagguucacgggacggcca

SEQ ID NO: 1095309 - RNA, 19 nt, Artificial Sequence
  Description of Artificial Sequence: Synthetic oligonucleotide
augccccagucuauuccag

SEQ ID NO: 1095310 - RNA, 19 nt, Artificial Sequence
  Description of Artificial Sequence: Synthetic oligonucleotide
gguugcagugucgucuguc

SEQ ID NO: 1095311 - RNA, 19 nt, Artificial Sequence
  Description of Artificial Sequence: Synthetic oligonucleotide
cuuaggcaguggaaguaau

SEQ ID NO: 1095312 - RNA, 19 nt, Artificial Sequence
  Description of Artificial Sequence: Synthetic oligonucleotide
gggacggccacuguaccuc

SEQ ID NO: 1095313 - RNA, 19 nt, Artificial Sequence
  Description of Artificial Sequence: Synthetic oligonucleotide
ggugagccggccaaucaga

SEQ ID NO: 1095314 - RNA, 19 nt, Artificial Sequence
  Description of Artificial Sequence: Synthetic oligonucleotide
cgaaccaagaggcuagaaa

SEQ ID NO: 1095315 - RNA, 19 nt, Artificial Sequence
  Description of Artificial Sequence: Synthetic oligonucleotide
gacaccagcuugggcuauc

SEQ ID NO: 1095316 - RNA, 19 nt, Artificial Sequence
  Description of Artificial Sequence: Synthetic oligonucleotide
gucuauccugucacuccca

SEQ ID NO: 1095317 - RNA, 19 nt, Artificial Sequence
  Description of Artificial Sequence: Synthetic oligonucleotide
uccuugcggcuguauucuu

SEQ ID NO: 1095318 - RNA, 19 nt, Artificial Sequence
  Description of Artificial Sequence: Synthetic oligonucleotide
ggccugguacaggucaaug

SEQ ID NO: 1095319 - RNA, 19 nt, Artificial Sequence
  Description of Artificial Sequence: Synthetic oligonucleotide
ucagagcgucugagccccu

SEQ ID NO: 1095320 - RNA, 19 nt, Artificial Sequence
  Description of Artificial Sequence: Synthetic oligonucleotide
cagcgaugucgucacccca

SEQ ID NO: 1095321 - RNA, 19 nt, Artificial Sequence
  Description of Artificial Sequence: Synthetic oligonucleotide
gaguaccggccgaaaauau

SEQ ID NO: 1095322 - RNA, 19 nt, Artificial Sequence
  Description of Artificial Sequence: Synthetic oligonucleotide
agcugacauuccgaaccaa

SEQ ID NO: 1095323 - RNA, 19 nt, Artificial Sequence
  Description of Artificial Sequence: Synthetic oligonucleotide
cuccuugcggcuguauucu

SEQ ID NO: 1095324 - RNA, 19 nt, Artificial Sequence
  Description of Artificial Sequence: Synthetic oligonucleotide
gcaccaauccugagccggc

SEQ ID NO: 1095325 - RNA, 19 nt, Artificial Sequence
  Description of Artificial Sequence: Synthetic oligonucleotide
cggagauuggugagccggc

SEQ ID NO: 1095326 - RNA, 19 nt, Artificial Sequence
  Description of Artificial Sequence: Synthetic oligonucleotide
gcgucugagccccuagcaa

SEQ ID NO: 1095327 - RNA, 19 nt, Artificial Sequence
  Description of Artificial Sequence: Synthetic oligonucleotide
ucgccccagucgaucucau

SEQ ID NO: 1095328 - RNA, 19 nt, Artificial Sequence
  Description of Artificial Sequence: Synthetic oligonucleotide
ccgcugugaagaguaccgg

SEQ ID NO: 1095329 - RNA, 19 nt, Artificial Sequence
  Description of Artificial Sequence: Synthetic oligonucleotide
cgaagcagcgaugucguca

SEQ ID NO: 1095330 - RNA, 19 nt, Artificial Sequence
  Description of Artificial Sequence: Synthetic oligonucleotide
ccuccauucauacaccguu

SEQ ID NO: 1095331 - RNA, 19 nt, Artificial Sequence
  Description of Artificial Sequence: Synthetic oligonucleotide
cugagccggcgugcgggag

SEQ ID NO: 1095332 - RNA, 19 nt, Artificial Sequence
  Description of Artificial Sequence: Synthetic oligonucleotide
cugaugguccugcauccuu

SEQ ID NO: 1095333 - RNA, 19 nt, Artificial Sequence
  Description of Artificial Sequence: Synthetic oligonucleotide
ccugcuccgauuucagcua

SEQ ID NO: 1095334 - RNA, 19 nt, Artificial Sequence
  Description of Artificial Sequence: Synthetic oligonucleotide
aggccugguacaggucaau

SEQ ID NO: 1095335 - RNA, 19 nt, Artificial Sequence
  Description of Artificial Sequence: Synthetic oligonucleotide
gagccccgcuucagaaaca

SEQ ID NO: 1095336 - RNA, 19 nt, Artificial Sequence
  Description of Artificial Sequence: Synthetic oligonucleotide
cacucgguccacauaccuu

SEQ ID NO: 1095337 - RNA, 19 nt, Artificial Sequence
  Description of Artificial Sequence: Synthetic oligonucleotide
cggacauugucucccguga

SEQ ID NO: 1095338 - RNA, 19 nt, Artificial Sequence
  Description of Artificial Sequence: Synthetic oligonucleotide
gauuggugagccggccaau

SEQ ID NO: 1095339 - RNA, 19 nt, Artificial Sequence
  Description of Artificial Sequence: Synthetic oligonucleotide
cccggcccggcaccaaucc

SEQ ID NO: 1095340 - RNA, 19 nt, Artificial Sequence
  Description of Artificial Sequence: Synthetic oligonucleotide
cugaagcaacucugucacu

SEQ ID NO: 1095341 - RNA, 19 nt, Artificial Sequence
  Description of Artificial Sequence: Synthetic oligonucleotide
cggccacuguaccucuugg

SEQ ID NO: 1095342 - RNA, 19 nt, Artificial Sequence
  Description of Artificial Sequence: Synthetic oligonucleotide
ggacauugucucccgugau

SEQ ID NO: 1095343 - RNA, 19 nt, Artificial Sequence
  Description of Artificial Sequence: Synthetic oligonucleotide
gagccccuagcaacgcccu

SEQ ID NO: 1095344 - RNA, 19 nt, Artificial Sequence
  Description of Artificial Sequence: Synthetic oligonucleotide
caacgcccucuggagccuc

SEQ ID NO: 1095345 - RNA, 19 nt, Artificial Sequence
  Description of Artificial Sequence: Synthetic oligonucleotide
gccaagaccccggcccggc

SEQ ID NO: 1095346 - RNA, 19 nt, Artificial Sequence
  Description of Artificial Sequence: Synthetic oligonucleotide
caaagucgccccagucgau

SEQ ID NO: 1095347 - RNA, 19 nt, Artificial Sequence
  Description of Artificial Sequence: Synthetic oligonucleotide
cgugcgggagccccgcuuc

SEQ ID NO: 1095348 - RNA, 19 nt, Artificial Sequence
  Description of Artificial Sequence: Synthetic oligonucleotide
gcacgugcugaugguccug

SEQ ID NO: 1095349 - RNA, 19 nt, Artificial Sequence
  Description of Artificial Sequence: Synthetic oligonucleotide
gccggcgugcgggagcccc

SEQ ID NO: 1095350 - RNA, 19 nt, Artificial Sequence
  Description of Artificial Sequence: Synthetic oligonucleotide
ggagaugccccagucuauu

SEQ ID NO: 1095351 - RNA, 19 nt, Artificial Sequence
  Description of Artificial Sequence: Synthetic oligonucleotide
ggcccggcaccaauccuga

SEQ ID NO: 1095352 - RNA, 19 nt, Artificial Sequence
  Description of Artificial Sequence: Synthetic oligonucleotide
agccggcgugcgggagccc

SEQ ID NO: 1095353 - RNA, 19 nt, Artificial Sequence
  Description of Artificial Sequence: Synthetic oligonucleotide
gccggccaaucagauccug

SEQ ID NO: 1095354 - RNA, 19 nt, Artificial Sequence
  Description of Artificial Sequence: Synthetic oligonucleotide
ccgcaucucagcagcccca

SEQ ID NO: 1095355 - RNA, 19 nt, Artificial Sequence
  Description of Artificial Sequence: Synthetic oligonucleotide
ccggcgugcgggagccccg

SEQ ID NO: 1095356 - RNA, 19 nt, Artificial Sequence
  Description of Artificial Sequence: Synthetic oligonucleotide
gcgaggccagaaucauaaa

SEQ ID NO: 1095357 - RNA, 19 nt, Artificial Sequence
  Description of Artificial Sequence: Synthetic oligonucleotide
cgucacagagaagucccca

SEQ ID NO: 1095358 - RNA, 19 nt, Artificial Sequence
  Description of Artificial Sequence: Synthetic oligonucleotide
ccgggucucaggguauuca

SEQ ID NO: 1095359 - RNA, 19 nt, Artificial Sequence
  Description of Artificial Sequence: Synthetic oligonucleotide
ggacggccacuguaccucu

SEQ ID NO: 1095360 - RNA, 19 nt, Artificial Sequence
  Description of Artificial Sequence: Synthetic oligonucleotide
cgaugucgucaccccaguc

SEQ ID NO: 1095361 - RNA, 19 nt, Artificial Sequence
  Description of Artificial Sequence: Synthetic oligonucleotide
gccccuagcaacgcccucu

SEQ ID NO: 1095362 - RNA, 19 nt, Artificial Sequence
  Description of Artificial Sequence: Synthetic oligonucleotide
cccguccuccauucauaca

SEQ ID NO: 1095363 - RNA, 19 nt, Artificial Sequence
  Description of Artificial Sequence: Synthetic oligonucleotide
gcccggcaccaauccugag

SEQ ID NO: 1095364 - RNA, 19 nt, Artificial Sequence
  Description of Artificial Sequence: Synthetic oligonucleotide
gcgaugucgucaccccagu

SEQ ID NO: 1095365 - RNA, 19 nt, Artificial Sequence
  Description of Artificial Sequence: Synthetic oligonucleotide
gcaccagacuuugccauuu

SEQ ID NO: 1095366 - RNA, 19 nt, Artificial Sequence
  Description of Artificial Sequence: Synthetic oligonucleotide
ccguacuguuugcaugagu

SEQ ID NO: 1095367 - RNA, 19 nt, Artificial Sequence
  Description of Artificial Sequence: Synthetic oligonucleotide
gccaaucgagcagcuugcu

SEQ ID NO: 1095368 - RNA, 19 nt, Artificial Sequence
  Description of Artificial Sequence: Synthetic oligonucleotide
cgucuguccacuagccaau

SEQ ID NO: 1095369 - RNA, 19 nt, Artificial Sequence
  Description of Artificial Sequence: Synthetic oligonucleotide
ccgaaccaagaggcuagaa

SEQ ID NO: 1095370 - RNA, 19 nt, Artificial Sequence
  Description of Artificial Sequence: Synthetic oligonucleotide
gacggccacuguaccucuu

SEQ ID NO: 1095371 - RNA, 19 nt, Artificial Sequence
  Description of Artificial Sequence: Synthetic oligonucleotide
cgccccagucgaucucauc

SEQ ID NO: 1095372 - RNA, 19 nt, Artificial Sequence
  Description of Artificial Sequence: Synthetic oligonucleotide
gcccggcccggcaccaauc

SEQ ID NO: 1095373 - RNA, 19 nt, Artificial Sequence
  Description of Artificial Sequence: Synthetic oligonucleotide
gccccgcuucagaaacaaa

SEQ ID NO: 1095374 - RNA, 19 nt, Artificial Sequence
  Description of Artificial Sequence: Synthetic oligonucleotide
cgggacggccacuguaccu

SEQ ID NO: 1095375 - RNA, 19 nt, Artificial Sequence
  Description of Artificial Sequence: Synthetic oligonucleotide
gcgugcgggagccccgcuu

SEQ ID NO: 1095376 - RNA, 19 nt, Artificial Sequence
  Description of Artificial Sequence: Synthetic oligonucleotide
cggcgugcgggagccccgc

SEQ ID NO: 1095377 - RNA, 19 nt, Artificial Sequence
  Description of Artificial Sequence: Synthetic oligonucleotide
cgauuucagcuagcugacu

SEQ ID NO: 1095378 - RNA, 19 nt, Artificial Sequence
  Description of Artificial Sequence: Synthetic oligonucleotide
ggcgugcgggagccccgcu

SEQ ID NO: 1095379 - RNA, 19 nt, Artificial Sequence
  Description of Artificial Sequence: Synthetic oligonucleotide
aaauaugcuacuguguacc

SEQ ID NO: 1095380 - RNA, 19 nt, Artificial Sequence
  Description of Artificial Sequence: Synthetic oligonucleotide
aauagauugccacuaagca

SEQ ID NO: 1095381 - RNA, 19 nt, Artificial Sequence
  Description of Artificial Sequence: Synthetic oligonucleotide
uuauguauaaguucagcag

SEQ ID NO: 1095382 - RNA, 19 nt, Artificial Sequence
  Description of Artificial Sequence: Synthetic oligonucleotide
aaaauaugcuacuguguac

SEQ ID NO: 1095383 - RNA, 19 nt, Artificial Sequence
  Description of Artificial Sequence: Synthetic oligonucleotide
aauggugagccauagauaa

SEQ ID NO: 1095384 - RNA, 19 nt, Artificial Sequence
  Description of Artificial Sequence: Synthetic oligonucleotide
aacuguucaguuucggugg

SEQ ID NO: 1095385 - RNA, 19 nt, Artificial Sequence
  Description of Artificial Sequence: Synthetic oligonucleotide
ugagccauagauaaggcga

SEQ ID NO: 1095386 - RNA, 19 nt, Artificial Sequence
  Description of Artificial Sequence: Synthetic oligonucleotide
caaacaacacccaaucugg

SEQ ID NO: 1095387 - RNA, 19 nt, Artificial Sequence
  Description of Artificial Sequence: Synthetic oligonucleotide
uauggauguaacaugaaaa

SEQ ID NO: 1095388 - RNA, 19 nt, Artificial Sequence
  Description of Artificial Sequence: Synthetic oligonucleotide
auaaauacagauauggaug

SEQ ID NO: 1095389 - RNA, 19 nt, Artificial Sequence
  Description of Artificial Sequence: Synthetic oligonucleotide
aauccuagcacauuauuaa

SEQ ID NO: 1095390 - RNA, 19 nt, Artificial Sequence
  Description of Artificial Sequence: Synthetic oligonucleotide
uggaaggugaaacaaauaa

SEQ ID NO: 1095391 - RNA, 19 nt, Artificial Sequence
  Description of Artificial Sequence: Synthetic oligonucleotide
guugucauaacccugcagc

SEQ ID NO: 1095392 - RNA, 19 nt, Artificial Sequence
  Description of Artificial Sequence: Synthetic oligonucleotide
uauaaguucagcagcuuca

SEQ ID NO: 1095393 - RNA, 19 nt, Artificial Sequence
  Description of Artificial Sequence: Synthetic oligonucleotide
gauggagcuucucagaggc

SEQ ID NO: 1095394 - RNA, 19 nt, Artificial Sequence
  Description of Artificial Sequence: Synthetic oligonucleotide
ugcgugugaacuauuuugg

SEQ ID NO: 1095395 - RNA, 19 nt, Artificial Sequence
  Description of Artificial Sequence: Synthetic oligonucleotide
uaugcuacuguguaccaag

SEQ ID NO: 1095396 - RNA, 19 nt, Artificial Sequence
  Description of Artificial Sequence: Synthetic oligonucleotide
auugccacuaagcaaaaca

SEQ ID NO: 1095397 - RNA, 19 nt, Artificial Sequence
  Description of Artificial Sequence: Synthetic oligonucleotide
ugaacuauuuugguggcgg

SEQ ID NO: 1095398 - RNA, 19 nt, Artificial Sequence
  Description of Artificial Sequence: Synthetic oligonucleotide
ucugagagcgcgcugacgc

SEQ ID NO: 1095399 - RNA, 19 nt, Artificial Sequence
  Description of Artificial Sequence: Synthetic oligonucleotide
ucagauugagcccaagaga

SEQ ID NO: 1095400 - RNA, 19 nt, Artificial Sequence
  Description of Artificial Sequence: Synthetic oligonucleotide
gaaaagcuaauggugagcc

SEQ ID NO: 1095401 - RNA, 19 nt, Artificial Sequence
  Description of Artificial Sequence: Synthetic oligonucleotide
ucauuucucaguccacugg

SEQ ID NO: 1095402 - RNA, 19 nt, Artificial Sequence
  Description of Artificial Sequence: Synthetic oligonucleotide
aggugcuuugaacagaguc

SEQ ID NO: 1095403 - RNA, 19 nt, Artificial Sequence
  Description of Artificial Sequence: Synthetic oligonucleotide
aaugauuguauucucucua

SEQ ID NO: 1095404 - RNA, 19 nt, Artificial Sequence
  Description of Artificial Sequence: Synthetic oligonucleotide
uuucucaguccacugggcg

SEQ ID NO: 1095405 - RNA, 19 nt, Artificial Sequence
  Description of Artificial Sequence: Synthetic oligonucleotide
ggcacgagcacuuugaugc

SEQ ID NO: 1095406 - RNA, 19 nt, Artificial Sequence
  Description of Artificial Sequence: Synthetic oligonucleotide
cagauugagcccaagagac

SEQ ID NO: 1095407 - RNA, 19 nt, Artificial Sequence
  Description of Artificial Sequence: Synthetic oligonucleotide
ugaaaugauuguauucucu

SEQ ID NO: 1095408 - RNA, 19 nt, Artificial Sequence
  Description of Artificial Sequence: Synthetic oligonucleotide
augauuguauucucucuac

SEQ ID NO: 1095409 - RNA, 19 nt, Artificial Sequence
  Description of Artificial Sequence: Synthetic oligonucleotide
cacacacacacacacaggg

SEQ ID NO: 1095410 - RNA, 19 nt, Artificial Sequence
  Description of Artificial Sequence: Synthetic oligonucleotide
gaauagauugccacuaagc

SEQ ID NO: 1095411 - RNA, 19 nt, Artificial Sequence
  Description of Artificial Sequence: Synthetic oligonucleotide
guuucaaggcccuggauag

SEQ ID NO: 1095412 - RNA, 19 nt, Artificial Sequence
  Description of Artificial Sequence: Synthetic oligonucleotide
ugauacacuuggaagguga

SEQ ID NO: 1095413 - RNA, 19 nt, Artificial Sequence
  Description of Artificial Sequence: Synthetic oligonucleotide
ucucuacucagguugaaga

SEQ ID NO: 1095414 - RNA, 19 nt, Artificial Sequence
  Description of Artificial Sequence: Synthetic oligonucleotide
ugccacuaagcaaaacacg

SEQ ID NO: 1095415 - RNA, 19 nt, Artificial Sequence
  Description of Artificial Sequence: Synthetic oligonucleotide
gauuguauucucucuacuc

SEQ ID NO: 1095416 - RNA, 19 nt, Artificial Sequence
  Description of Artificial Sequence: Synthetic oligonucleotide
ucuacucagguugaagagg

SEQ ID NO: 1095417 - RNA, 19 nt, Artificial Sequence
  Description of Artificial Sequence: Synthetic oligonucleotide
uguaccaagcacuggcuag

SEQ ID NO: 1095418 - RNA, 19 nt, Artificial Sequence
  Description of Artificial Sequence: Synthetic oligonucleotide
gaggcuagcccuuugugag

SEQ ID NO: 1095419 - RNA, 19 nt, Artificial Sequence
  Description of Artificial Sequence: Synthetic oligonucleotide
ugacauucgaggcuagccc

SEQ ID NO: 1095420 - RNA, 19 nt, Artificial Sequence
  Description of Artificial Sequence: Synthetic oligonucleotide
uccuagcacauuauuaaca

SEQ ID NO: 1095421 - RNA, 19 nt, Artificial Sequence
  Description of Artificial Sequence: Synthetic oligonucleotide
augcgugugaacuauuuug

SEQ ID NO: 1095422 - RNA, 19 nt, Artificial Sequence
  Description of Artificial Sequence: Synthetic oligonucleotide
agauaaggcgagcccaggc

SEQ ID NO: 1095423 - RNA, 19 nt, Artificial Sequence
  Description of Artificial Sequence: Synthetic oligonucleotide
ucuuuauguauaaguucag

SEQ ID NO: 1095424 - RNA, 19 nt, Artificial Sequence
  Description of Artificial Sequence: Synthetic oligonucleotide
aagagggcaugugacauuc

SEQ ID NO: 1095425 - RNA, 19 nt, Artificial Sequence
  Description of Artificial Sequence: Synthetic oligonucleotide
ugucuuuuaaagugggagu

SEQ ID NO: 1095426 - RNA, 19 nt, Artificial Sequence
  Description of Artificial Sequence: Synthetic oligonucleotide
aaagcuaauggugagccau

SEQ ID NO: 1095427 - RNA, 19 nt, Artificial Sequence
  Description of Artificial Sequence: Synthetic oligonucleotide
cauuucucaguccacuggg

SEQ ID NO: 1095428 - RNA, 19 nt, Artificial Sequence
  Description of Artificial Sequence: Synthetic oligonucleotide
ccgauuacggaauagauug

SEQ ID NO: 1095429 - RNA, 19 nt, Artificial Sequence
  Description of Artificial Sequence: Synthetic oligonucleotide
uuacggaauagauugccac

SEQ ID NO: 1095430 - RNA, 19 nt, Artificial Sequence
  Description of Artificial Sequence: Synthetic oligonucleotide
cacacacacacacacacag

SEQ ID NO: 1095431 - RNA, 19 nt, Artificial Sequence
  Description of Artificial Sequence: Synthetic oligonucleotide
gaacagaguccuuugagga

SEQ ID NO: 1095432 - RNA, 19 nt, Artificial Sequence
  Description of Artificial Sequence: Synthetic oligonucleotide
gauaaggcgagcccaggcc

SEQ ID NO: 1095433 - RNA, 19 nt, Artificial Sequence
  Description of Artificial Sequence: Synthetic oligonucleotide
gauuacggaauagauugcc

SEQ ID NO: 1095434 - RNA, 19 nt, Artificial Sequence
  Description of Artificial Sequence: Synthetic oligonucleotide
cucacacacacacacacac

SEQ ID NO: 1095435 - RNA, 19 nt, Artificial Sequence
  Description of Artificial Sequence: Synthetic oligonucleotide
auccuagcacauuauuaac

SEQ ID NO: 1095436 - RNA, 19 nt, Artificial Sequence
  Description of Artificial Sequence: Synthetic oligonucleotide
gagaccugugaaaugauug

SEQ ID NO: 1095437 - RNA, 19 nt, Artificial Sequence
  Description of Artificial Sequence: Synthetic oligonucleotide
cuaagcaaaacacgcuggc

SEQ ID NO: 1095438 - RNA, 19 nt, Artificial Sequence
  Description of Artificial Sequence: Synthetic oligonucleotide
uaaguauggcucuucauuu

SEQ ID NO: 1095439 - RNA, 19 nt, Artificial Sequence
  Description of Artificial Sequence: Synthetic oligonucleotide
aggugaaacaaauaagaua

SEQ ID NO: 1095440 - RNA, 19 nt, Artificial Sequence
  Description of Artificial Sequence: Synthetic oligonucleotide
gucauaacccugcagcaag

SEQ ID NO: 1095441 - RNA, 19 nt, Artificial Sequence
  Description of Artificial Sequence: Synthetic oligonucleotide
gauugagcuggcuaguguc

SEQ ID NO: 1095442 - RNA, 19 nt, Artificial Sequence
  Description of Artificial Sequence: Synthetic oligonucleotide
aauaugcuacuguguacca

SEQ ID NO: 1095443 - RNA, 19 nt, Artificial Sequence
  Description of Artificial Sequence: Synthetic oligonucleotide
cacacacacacacacacac

SEQ ID NO: 1095444 - RNA, 19 nt, Artificial Sequence
  Description of Artificial Sequence: Synthetic oligonucleotide
agacacauguaaguauggc

SEQ ID NO: 1095445 - RNA, 19 nt, Artificial Sequence
  Description of Artificial Sequence: Synthetic oligonucleotide
cagauauggauguaacaug

SEQ ID NO: 1095446 - RNA, 19 nt, Artificial Sequence
  Description of Artificial Sequence: Synthetic oligonucleotide
cucucucacacacacacac

SEQ ID NO: 1095447 - RNA, 19 nt, Artificial Sequence
  Description of Artificial Sequence: Synthetic oligonucleotide
cacuaagcaaaacacgcug

SEQ ID NO: 1095448 - RNA, 19 nt, Artificial Sequence
  Description of Artificial Sequence: Synthetic oligonucleotide
uucagaucuucuccgauua

SEQ ID NO: 1095449 - RNA, 19 nt, Artificial Sequence
  Description of Artificial Sequence: Synthetic oligonucleotide
agauauggauguaacauga

SEQ ID NO: 1095450 - RNA, 19 nt, Artificial Sequence
  Description of Artificial Sequence: Synthetic oligonucleotide
gacuaggugcuuugaacag

SEQ ID NO: 1095451 - RNA, 19 nt, Artificial Sequence
  Description of Artificial Sequence: Synthetic oligonucleotide
ugugaacuauuuugguggc

SEQ ID NO: 1095452 - RNA, 19 nt, Artificial Sequence
  Description of Artificial Sequence: Synthetic oligonucleotide
agucagaugagcagucccc

SEQ ID NO: 1095453 - RNA, 19 nt, Artificial Sequence
  Description of Artificial Sequence: Synthetic oligonucleotide
cucucacacacacacacac

SEQ ID NO: 1095454 - RNA, 19 nt, Artificial Sequence
  Description of Artificial Sequence: Synthetic oligonucleotide
ugauuguauucucucuacu

SEQ ID NO: 1095455 - RNA, 19 nt, Artificial Sequence
  Description of Artificial Sequence: Synthetic oligonucleotide
gugagccauagauaaggcg

SEQ ID NO: 1095456 - RNA, 19 nt, Artificial Sequence
  Description of Artificial Sequence: Synthetic oligonucleotide
ucuuccaaacauuguuagc

SEQ ID NO: 1095457 - RNA, 19 nt, Artificial Sequence
  Description of Artificial Sequence: Synthetic oligonucleotide
aguauggcucuucauuucu

SEQ ID NO: 1095458 - RNA, 19 nt, Artificial Sequence
  Description of Artificial Sequence: Synthetic oligonucleotide
aaauccuagcacauuauua

SEQ ID NO: 1095459 - RNA, 19 nt, Artificial Sequence
  Description of Artificial Sequence: Synthetic oligonucleotide
acuaagcaaaacacgcugg

SEQ ID NO: 1095460 - RNA, 19 nt, Artificial Sequence
  Description of Artificial Sequence: Synthetic oligonucleotide
gggcaugugacauucgagg

SEQ ID NO: 1095461 - RNA, 19 nt, Artificial Sequence
  Description of Artificial Sequence: Synthetic oligonucleotide
ucgacgaggagcugcagca

SEQ ID NO: 1095462 - RNA, 19 nt, Artificial Sequence
  Description of Artificial Sequence: Synthetic oligonucleotide
uuuaccugcacagguguug

SEQ ID NO: 1095463 - RNA, 19 nt, Artificial Sequence
  Description of Artificial Sequence: Synthetic oligonucleotide
cucuacucagguugaagag

SEQ ID NO: 1095464 - RNA, 19 nt, Artificial Sequence
  Description of Artificial Sequence: Synthetic oligonucleotide
gguggauugagcuggcuag

SEQ ID NO: 1095465 - RNA, 19 nt, Artificial Sequence
  Description of Artificial Sequence: Synthetic oligonucleotide
aaaagcuaauggugagcca

SEQ ID NO: 1095466 - RNA, 19 nt, Artificial Sequence
  Description of Artificial Sequence: Synthetic oligonucleotide
cuuugugagcacugugagg

SEQ ID NO: 1095467 - RNA, 19 nt, Artificial Sequence
  Description of Artificial Sequence: Synthetic oligonucleotide
cugaccacacucuaacaac

SEQ ID NO: 1095468 - RNA, 19 nt, Artificial Sequence
  Description of Artificial Sequence: Synthetic oligonucleotide
uacgaaguucuaaucugcu

SEQ ID NO: 1095469 - RNA, 19 nt, Artificial Sequence
  Description of Artificial Sequence: Synthetic oligonucleotide
ucuucuccgauuacggaau

SEQ ID NO: 1095470 - RNA, 19 nt, Artificial Sequence
  Description of Artificial Sequence: Synthetic oligonucleotide
ugcuuuaccugcacaggug

SEQ ID NO: 1095471 - RNA, 19 nt, Artificial Sequence
  Description of Artificial Sequence: Synthetic oligonucleotide
cacacucuaacaacauaag

SEQ ID NO: 1095472 - RNA, 19 nt, Artificial Sequence
  Description of Artificial Sequence: Synthetic oligonucleotide
uacggaauagauugccacu

SEQ ID NO: 1095473 - RNA, 19 nt, Artificial Sequence
  Description of Artificial Sequence: Synthetic oligonucleotide
uuccguacacugcucucgg

SEQ ID NO: 1095474 - RNA, 19 nt, Artificial Sequence
  Description of Artificial Sequence: Synthetic oligonucleotide
agaccugugaaaugauugu

SEQ ID NO: 1095475 - RNA, 19 nt, Artificial Sequence
  Description of Artificial Sequence: Synthetic oligonucleotide
aucuucuccgauuacggaa

SEQ ID NO: 1095476 - RNA, 19 nt, Artificial Sequence
  Description of Artificial Sequence: Synthetic oligonucleotide
cacacacacacacaggguc

SEQ ID NO: 1095477 - RNA, 19 nt, Artificial Sequence
  Description of Artificial Sequence: Synthetic oligonucleotide
agucuguauggacugaaaa

SEQ ID NO: 1095478 - RNA, 19 nt, Artificial Sequence
  Description of Artificial Sequence: Synthetic oligonucleotide
guauaaguucagcagcuuc

SEQ ID NO: 1095479 - RNA, 19 nt, Artificial Sequence
  Description of Artificial Sequence: Synthetic oligonucleotide
gaugucgacgaggagcugc

SEQ ID NO: 1095480 - RNA, 19 nt, Artificial Sequence
  Description of Artificial Sequence: Synthetic oligonucleotide
cucucucucucucacacac

SEQ ID NO: 1095481 - RNA, 19 nt, Artificial Sequence
  Description of Artificial Sequence: Synthetic oligonucleotide
uagucagauagguggggag

SEQ ID NO: 1095482 - RNA, 19 nt, Artificial Sequence
  Description of Artificial Sequence: Synthetic oligonucleotide
gaaguucuaaucugcuguc

SEQ ID NO: 1095483 - RNA, 19 nt, Artificial Sequence
  Description of Artificial Sequence: Synthetic oligonucleotide
uaauggugagccauagaua

SEQ ID NO: 1095484 - RNA, 19 nt, Artificial Sequence
  Description of Artificial Sequence: Synthetic oligonucleotide
agucagauagguggggagg

SEQ ID NO: 1095485 - RNA, 19 nt, Artificial Sequence
  Description of Artificial Sequence: Synthetic oligonucleotide
uugggcacgagcacuuuga

SEQ ID NO: 1095486 - RNA, 19 nt, Artificial Sequence
  Description of Artificial Sequence: Synthetic oligonucleotide
uccgauuacggaauagauu

SEQ ID NO: 1095487 - RNA, 19 nt, Artificial Sequence
  Description of Artificial Sequence: Synthetic oligonucleotide
ucuccgauuacggaauaga

SEQ ID NO: 1095488 - RNA, 19 nt, Artificial Sequence
  Description of Artificial Sequence: Synthetic oligonucleotide
ucauaacccugcagcaagc

SEQ ID NO: 1095489 - RNA, 19 nt, Artificial Sequence
  Description of Artificial Sequence: Synthetic oligonucleotide
ucgguguugucauaacccu

SEQ ID NO: 1095490 - RNA, 19 nt, Artificial Sequence
  Description of Artificial Sequence: Synthetic oligonucleotide
auaaggcgagcccaggcca

SEQ ID NO: 1095491 - RNA, 19 nt, Artificial Sequence
  Description of Artificial Sequence: Synthetic oligonucleotide
cuauuuugguggcggauug

SEQ ID NO: 1095492 - RNA, 19 nt, Artificial Sequence
  Description of Artificial Sequence: Synthetic oligonucleotide
ucuaccacuuuugucugca

SEQ ID NO: 1095493 - RNA, 19 nt, Artificial Sequence
  Description of Artificial Sequence: Synthetic oligonucleotide
gacacauguaaguauggcu

SEQ ID NO: 1095494 - RNA, 19 nt, Artificial Sequence
  Description of Artificial Sequence: Synthetic oligonucleotide
ggaaggugaaacaaauaag

SEQ ID NO: 1095495 - RNA, 19 nt, Artificial Sequence
  Description of Artificial Sequence: Synthetic oligonucleotide
cuaauggugagccauagau

SEQ ID NO: 1095496 - RNA, 19 nt, Artificial Sequence
  Description of Artificial Sequence: Synthetic oligonucleotide
acgaaguucuaaucugcug

SEQ ID NO: 1095497 - RNA, 19 nt, Artificial Sequence
  Description of Artificial Sequence: Synthetic oligonucleotide
ggugcuuugaacagagucc

SEQ ID NO: 1095498 - RNA, 19 nt, Artificial Sequence
  Description of Artificial Sequence: Synthetic oligonucleotide
ugcuacuguguaccaagca

SEQ ID NO: 1095499 - RNA, 19 nt, Artificial Sequence
  Description of Artificial Sequence: Synthetic oligonucleotide
cuagcacauuauuaacaac

SEQ ID NO: 1095500 - RNA, 19 nt, Artificial Sequence
  Description of Artificial Sequence: Synthetic oligonucleotide
gucgaugcagcuucuucag

SEQ ID NO: 1095501 - RNA, 19 nt, Artificial Sequence
  Description of Artificial Sequence: Synthetic oligonucleotide
uucucaguccacugggcga

SEQ ID NO: 1095502 - RNA, 19 nt, Artificial Sequence
  Description of Artificial Sequence: Synthetic oligonucleotide
cucucucucucucucacac

SEQ ID NO: 1095503 - RNA, 19 nt, Artificial Sequence
  Description of Artificial Sequence: Synthetic oligonucleotide
accccaagucuguauggac

SEQ ID NO: 1095504 - RNA, 19 nt, Artificial Sequence
  Description of Artificial Sequence: Synthetic oligonucleotide
ugucuacgaaguucuaauc

SEQ ID NO: 1095505 - RNA, 19 nt, Artificial Sequence
  Description of Artificial Sequence: Synthetic oligonucleotide
auguaaguauggcucuuca

SEQ ID NO: 1095506 - RNA, 19 nt, Artificial Sequence
  Description of Artificial Sequence: Synthetic oligonucleotide
cuuccguacacugcucucg

SEQ ID NO: 1095507 - RNA, 19 nt, Artificial Sequence
  Description of Artificial Sequence: Synthetic oligonucleotide
ucucacacacacacacaca

SEQ ID NO: 1095508 - RNA, 19 nt, Artificial Sequence
  Description of Artificial Sequence: Synthetic oligonucleotide
auugagcuggcuagugucg

SEQ ID NO: 1095509 - RNA, 19 nt, Artificial Sequence
  Description of Artificial Sequence: Synthetic oligonucleotide
gccacuaagcaaaacacgc

SEQ ID NO: 1095510 - RNA, 19 nt, Artificial Sequence
  Description of Artificial Sequence: Synthetic oligonucleotide
ucacacacacacacacaca

SEQ ID NO: 1095511 - RNA, 19 nt, Artificial Sequence
  Description of Artificial Sequence: Synthetic oligonucleotide
ucucucacacacacacaca

SEQ ID NO: 1095512 - RNA, 19 nt, Artificial Sequence
  Description of Artificial Sequence: Synthetic oligonucleotide
acacgagugcaccuggaga

SEQ ID NO: 1095513 - RNA, 19 nt, Artificial Sequence
  Description of Artificial Sequence: Synthetic oligonucleotide
cuggauagucagauaggug

SEQ ID NO: 1095514 - RNA, 19 nt, Artificial Sequence
  Description of Artificial Sequence: Synthetic oligonucleotide
guagucggcugucuggaug

SEQ ID NO: 1095515 - RNA, 19 nt, Artificial Sequence
  Description of Artificial Sequence: Synthetic oligonucleotide
uguucaguuucgguggggu

SEQ ID NO: 1095516 - RNA, 19 nt, Artificial Sequence
  Description of Artificial Sequence: Synthetic oligonucleotide
ucccaucugaccacacucu

SEQ ID NO: 1095517 - RNA, 19 nt, Artificial Sequence
  Description of Artificial Sequence: Synthetic oligonucleotide
cuguguguggacacaucag

SEQ ID NO: 1095518 - RNA, 19 nt, Artificial Sequence
  Description of Artificial Sequence: Synthetic oligonucleotide
ucgaggcuagcccuuugug

SEQ ID NO: 1095519 - RNA, 19 nt, Artificial Sequence
  Description of Artificial Sequence: Synthetic oligonucleotide
uuggaaggugaaacaaaua

SEQ ID NO: 1095520 - RNA, 19 nt, Artificial Sequence
  Description of Artificial Sequence: Synthetic oligonucleotide
auaacccugcagcaagccu

SEQ ID NO: 1095521 - RNA, 19 nt, Artificial Sequence
  Description of Artificial Sequence: Synthetic oligonucleotide
aggcuagcccuuugugagc

SEQ ID NO: 1095522 - RNA, 19 nt, Artificial Sequence
  Description of Artificial Sequence: Synthetic oligonucleotide
aaguucuaaucugcugucu

SEQ ID NO: 1095523 - RNA, 19 nt, Artificial Sequence
  Description of Artificial Sequence: Synthetic oligonucleotide
ggugcaagacacauguaag

SEQ ID NO: 1095524 - RNA, 19 nt, Artificial Sequence
  Description of Artificial Sequence: Synthetic oligonucleotide
aucaggcaauguucugaac

SEQ ID NO: 1095525 - RNA, 19 nt, Artificial Sequence
  Description of Artificial Sequence: Synthetic oligonucleotide
ggacuaggugcuuugaaca

SEQ ID NO: 1095526 - RNA, 19 nt, Artificial Sequence
  Description of Artificial Sequence: Synthetic oligonucleotide
guuagcagaguccugucua

SEQ ID NO: 1095527 - RNA, 19 nt, Artificial Sequence
  Description of Artificial Sequence: Synthetic oligonucleotide
agcagaguccugucuacga

SEQ ID NO: 1095528 - RNA, 19 nt, Artificial Sequence
  Description of Artificial Sequence: Synthetic oligonucleotide
uucgaggcuagcccuuugu

SEQ ID NO: 1095529 - RNA, 19 nt, Artificial Sequence
  Description of Artificial Sequence: Synthetic oligonucleotide
gauugagcccaagagaccu

SEQ ID NO: 1095530 - RNA, 19 nt, Artificial Sequence
  Description of Artificial Sequence: Synthetic oligonucleotide
uuccauagaggguggcaga

SEQ ID NO: 1095531 - RNA, 19 nt, Artificial Sequence
  Description of Artificial Sequence: Synthetic oligonucleotide
gucuacgaaguucuaaucu

SEQ ID NO: 1095532 - RNA, 19 nt, Artificial Sequence
  Description of Artificial Sequence: Synthetic oligonucleotide
auugggcacgagcacuuug

SEQ ID NO: 1095533 - RNA, 19 nt, Artificial Sequence
  Description of Artificial Sequence: Synthetic oligonucleotide
aacuauuuugguggcggau

SEQ ID NO: 1095534 - RNA, 19 nt, Artificial Sequence
  Description of Artificial Sequence: Synthetic oligonucleotide
gagggcaugugacauucga

SEQ ID NO: 1095535 - RNA, 19 nt, Artificial Sequence
  Description of Artificial Sequence: Synthetic oligonucleotide
gaucuucuccgauuacgga

SEQ ID NO: 1095536 - RNA, 19 nt, Artificial Sequence
  Description of Artificial Sequence: Synthetic oligonucleotide
uagauaaggcgagcccagg

SEQ ID NO: 1095537 - RNA, 19 nt, Artificial Sequence
  Description of Artificial Sequence: Synthetic oligonucleotide
agggguuucaaggcccugg

SEQ ID NO: 1095538 - RNA, 19 nt, Artificial Sequence
  Description of Artificial Sequence: Synthetic oligonucleotide
uuaccugcacagguguuga

SEQ ID NO: 1095539 - RNA, 19 nt, Artificial Sequence
  Description of Artificial Sequence: Synthetic oligonucleotide
ggauagucagauagguggg

SEQ ID NO: 1095540 - RNA, 19 nt, Artificial Sequence
  Description of Artificial Sequence: Synthetic oligonucleotide
ucucucucacacacacaca

SEQ ID NO: 1095541 - RNA, 19 nt, Artificial Sequence
  Description of Artificial Sequence: Synthetic oligonucleotide
ucuaaucugcugucuuuua

SEQ ID NO: 1095542 - RNA, 19 nt, Artificial Sequence
  Description of Artificial Sequence: Synthetic oligonucleotide
acugcucguggguggauug

SEQ ID NO: 1095543 - RNA, 19 nt, Artificial Sequence
  Description of Artificial Sequence: Synthetic oligonucleotide
cauagaggguggcagagaa

SEQ ID NO: 1095544 - RNA, 19 nt, Artificial Sequence
  Description of Artificial Sequence: Synthetic oligonucleotide
ucgaugcagcuucuucagc

SEQ ID NO: 1095545 - RNA, 19 nt, Artificial Sequence
  Description of Artificial Sequence: Synthetic oligonucleotide
auuacggaauagauugcca

SEQ ID NO: 1095546 - RNA, 19 nt, Artificial Sequence
  Description of Artificial Sequence: Synthetic oligonucleotide
gagagcgccuguccaguag

SEQ ID NO: 1095547 - RNA, 19 nt, Artificial Sequence
  Description of Artificial Sequence: Synthetic oligonucleotide
uguccaguagagggagggg

SEQ ID NO: 1095548 - RNA, 19 nt, Artificial Sequence
  Description of Artificial Sequence: Synthetic oligonucleotide
ccucuuuauguauaaguuc

SEQ ID NO: 1095549 - RNA, 19 nt, Artificial Sequence
  Description of Artificial Sequence: Synthetic oligonucleotide
ugucauaacccugcagcaa

SEQ ID NO: 1095550 - RNA, 19 nt, Artificial Sequence
  Description of Artificial Sequence: Synthetic oligonucleotide
augcuacuguguaccaagc

SEQ ID NO: 1095551 - RNA, 19 nt, Artificial Sequence
  Description of Artificial Sequence: Synthetic oligonucleotide
uucuccgauuacggaauag

SEQ ID NO: 1095552 - RNA, 19 nt, Artificial Sequence
  Description of Artificial Sequence: Synthetic oligonucleotide
gucagauagguggggaggc

SEQ ID NO: 1095553 - RNA, 19 nt, Artificial Sequence
  Description of Artificial Sequence: Synthetic oligonucleotide
agccauagauaaggcgagc

SEQ ID NO: 1095554 - RNA, 19 nt, Artificial Sequence
  Description of Artificial Sequence: Synthetic oligonucleotide
agcuaauggugagccauag

SEQ ID NO: 1095555 - RNA, 19 nt, Artificial Sequence
  Description of Artificial Sequence: Synthetic oligonucleotide
gacauucgaggcuagcccu

SEQ ID NO: 1095556 - RNA, 19 nt, Artificial Sequence
  Description of Artificial Sequence: Synthetic oligonucleotide
gggacuaggugcuuugaac

SEQ ID NO: 1095557 - RNA, 19 nt, Artificial Sequence
  Description of Artificial Sequence: Synthetic oligonucleotide
agagcgccuguccaguaga

SEQ ID NO: 1095558 - RNA, 19 nt, Artificial Sequence
  Description of Artificial Sequence: Synthetic oligonucleotide
gcggauuguuuucagagca

SEQ ID NO: 1095559 - RNA, 19 nt, Artificial Sequence
  Description of Artificial Sequence: Synthetic oligonucleotide
guccaguagagggaggggc

SEQ ID NO: 1095560 - RNA, 19 nt, Artificial Sequence
  Description of Artificial Sequence: Synthetic oligonucleotide
ucucucucucucucucuca

SEQ ID NO: 1095561 - RNA, 19 nt, Artificial Sequence
  Description of Artificial Sequence: Synthetic oligonucleotide
gaacuauuuugguggcgga

SEQ ID NO: 1095562 - RNA, 19 nt, Artificial Sequence
  Description of Artificial Sequence: Synthetic oligonucleotide
ugagagcgcgcugacgccc

SEQ ID NO: 1095563 - RNA, 19 nt, Artificial Sequence
  Description of Artificial Sequence: Synthetic oligonucleotide
ggucuugucccaucugacc

SEQ ID NO: 1095564 - RNA, 19 nt, Artificial Sequence
  Description of Artificial Sequence: Synthetic oligonucleotide
uggauugagcuggcuagug

SEQ ID NO: 1095565 - RNA, 19 nt, Artificial Sequence
  Description of Artificial Sequence: Synthetic oligonucleotide
cucucucucucucucucac

SEQ ID NO: 1095566 - RNA, 19 nt, Artificial Sequence
  Description of Artificial Sequence: Synthetic oligonucleotide
cacacgagugcaccuggag

SEQ ID NO: 1095567 - RNA, 19 nt, Artificial Sequence
  Description of Artificial Sequence: Synthetic oligonucleotide
uccgcacggcacacgagug

SEQ ID NO: 1095568 - RNA, 19 nt, Artificial Sequence
  Description of Artificial Sequence: Synthetic oligonucleotide
gugaacuauuuugguggcg

SEQ ID NO: 1095569 - RNA, 19 nt, Artificial Sequence
  Description of Artificial Sequence: Synthetic oligonucleotide
gguuucaaggcccuggaua

SEQ ID NO: 1095570 - RNA, 19 nt, Artificial Sequence
  Description of Artificial Sequence: Synthetic oligonucleotide
caaaacacgcuggccuucc

SEQ ID NO: 1095571 - RNA, 19 nt, Artificial Sequence
  Description of Artificial Sequence: Synthetic oligonucleotide
acgagugcaccuggagagc

SEQ ID NO: 1095572 - RNA, 19 nt, Artificial Sequence
  Description of Artificial Sequence: Synthetic oligonucleotide
ucucucucucucacacaca

SEQ ID NO: 1095573 - RNA, 19 nt, Artificial Sequence
  Description of Artificial Sequence: Synthetic oligonucleotide
uucugagagcgcgcugacg

SEQ ID NO: 1095574 - RNA, 19 nt, Artificial Sequence
  Description of Artificial Sequence: Synthetic oligonucleotide
cugggcgagcugauggagc

SEQ ID NO: 1095575 - RNA, 19 nt, Artificial Sequence
  Description of Artificial Sequence: Synthetic oligonucleotide
ucucucucucucucucucu

SEQ ID NO: 1095576 - RNA, 19 nt, Artificial Sequence
  Description of Artificial Sequence: Synthetic oligonucleotide
acacacacacacacacagg

SEQ ID NO: 1095577 - RNA, 19 nt, Artificial Sequence
  Description of Artificial Sequence: Synthetic oligonucleotide
ucucucucucucucucaca

SEQ ID NO: 1095578 - RNA, 19 nt, Artificial Sequence
  Description of Artificial Sequence: Synthetic oligonucleotide
ucucucucucucucacaca

SEQ ID NO: 1095579 - RNA, 19 nt, Artificial Sequence
  Description of Artificial Sequence: Synthetic oligonucleotide
cauguaaguauggcucuuc

SEQ ID NO: 1095580 - RNA, 19 nt, Artificial Sequence
  Description of Artificial Sequence: Synthetic oligonucleotide
accugugaaaugauuguau

SEQ ID NO: 1095581 - RNA, 19 nt, Artificial Sequence
  Description of Artificial Sequence: Synthetic oligonucleotide
uauuuugguggcggauugu

SEQ ID NO: 1095582 - RNA, 19 nt, Artificial Sequence
  Description of Artificial Sequence: Synthetic oligonucleotide
ucuucagauugagcccaag

SEQ ID NO: 1095583 - RNA, 19 nt, Artificial Sequence
  Description of Artificial Sequence: Synthetic oligonucleotide
acggaauagauugccacua

SEQ ID NO: 1095584 - RNA, 19 nt, Artificial Sequence
  Description of Artificial Sequence: Synthetic oligonucleotide
ugcaccuggagagcgccug

SEQ ID NO: 1095585 - RNA, 19 nt, Artificial Sequence
  Description of Artificial Sequence: Synthetic oligonucleotide
uggggucucucucucucuc

SEQ ID NO: 1095586 - RNA, 19 nt, Artificial Sequence
  Description of Artificial Sequence: Synthetic oligonucleotide
gguagggguuucaaggccc

SEQ ID NO: 1095587 - RNA, 19 nt, Artificial Sequence
  Description of Artificial Sequence: Synthetic oligonucleotide
agggcaugugacauucgag

SEQ ID NO: 1095588 - RNA, 19 nt, Artificial Sequence
  Description of Artificial Sequence: Synthetic oligonucleotide
ggcggauuguuuucagagc

SEQ ID NO: 1095589 - RNA, 19 nt, Artificial Sequence
  Description of Artificial Sequence: Synthetic oligonucleotide
cucucucucucucucucuc

SEQ ID NO: 1095590 - RNA, 19 nt, Artificial Sequence
  Description of Artificial Sequence: Synthetic oligonucleotide
augauacacuuggaaggug

SEQ ID NO: 1095591 - RNA, 19 nt, Artificial Sequence
  Description of Artificial Sequence: Synthetic oligonucleotide
gugcaagacacauguaagu

SEQ ID NO: 1095592 - RNA, 19 nt, Artificial Sequence
  Description of Artificial Sequence: Synthetic oligonucleotide
caucaggcaauguucugaa

SEQ ID NO: 1095593 - RNA, 19 nt, Artificial Sequence
  Description of Artificial Sequence: Synthetic oligonucleotide
caucuugcuccccgugagc

SEQ ID NO: 1095594 - RNA, 19 nt, Artificial Sequence
  Description of Artificial Sequence: Synthetic oligonucleotide
ugucagcaggcggugcaag

SEQ ID NO: 1095595 - RNA, 19 nt, Artificial Sequence
  Description of Artificial Sequence: Synthetic oligonucleotide
guucucagaacugugcccu

SEQ ID NO: 1095596 - RNA, 19 nt, Artificial Sequence
  Description of Artificial Sequence: Synthetic oligonucleotide
agggacuaggugcuuugaa

SEQ ID NO: 1095597 - RNA, 19 nt, Artificial Sequence
  Description of Artificial Sequence: Synthetic oligonucleotide
gauacacuuggaaggugaa

SEQ ID NO: 1095598 - RNA, 19 nt, Artificial Sequence
  Description of Artificial Sequence: Synthetic oligonucleotide
gccauagauaaggcgagcc

SEQ ID NO: 1095599 - RNA, 19 nt, Artificial Sequence
  Description of Artificial Sequence: Synthetic oligonucleotide
acacacacacacagggucu

SEQ ID NO: 1095600 - RNA, 19 nt, Artificial Sequence
  Description of Artificial Sequence: Synthetic oligonucleotide
cugagagcgcgcugacgcc

SEQ ID NO: 1095601 - RNA, 19 nt, Artificial Sequence
  Description of Artificial Sequence: Synthetic oligonucleotide
gucucucucucucucucuc

SEQ ID NO: 1095602 - RNA, 19 nt, Artificial Sequence
  Description of Artificial Sequence: Synthetic oligonucleotide
ucuggaugauugggcacga

SEQ ID NO: 1095603 - RNA, 19 nt, Artificial Sequence
  Description of Artificial Sequence: Synthetic oligonucleotide
ggcggugcaagacacaugu

SEQ ID NO: 1095604 - RNA, 19 nt, Artificial Sequence
  Description of Artificial Sequence: Synthetic oligonucleotide
aagucuguauggacugaaa

SEQ ID NO: 1095605 - RNA, 19 nt, Artificial Sequence
  Description of Artificial Sequence: Synthetic oligonucleotide
cugucuacgaaguucuaau

SEQ ID NO: 1095606 - RNA, 19 nt, Artificial Sequence
  Description of Artificial Sequence: Synthetic oligonucleotide
ucaguuucgguggggucuc

SEQ ID NO: 1095607 - RNA, 19 nt, Artificial Sequence
  Description of Artificial Sequence: Synthetic oligonucleotide
caggguucugagagcgcgc

SEQ ID NO: 1095608 - RNA, 19 nt, Artificial Sequence
  Description of Artificial Sequence: Synthetic oligonucleotide
auucgaggcuagcccuuug

SEQ ID NO: 1095609 - RNA, 19 nt, Artificial Sequence
  Description of Artificial Sequence: Synthetic oligonucleotide
auaugcuacuguguaccaa

SEQ ID NO: 1095610 - RNA, 19 nt, Artificial Sequence
  Description of Artificial Sequence: Synthetic oligonucleotide
gauagguggggaggcgaac

SEQ ID NO: 1095611 - RNA, 19 nt, Artificial Sequence
  Description of Artificial Sequence: Synthetic oligonucleotide
ccccauaccaccccaaguc

SEQ ID NO: 1095612 - RNA, 19 nt, Artificial Sequence
  Description of Artificial Sequence: Synthetic oligonucleotide
guucaguuucggugggguc

SEQ ID NO: 1095613 - RNA, 19 nt, Artificial Sequence
  Description of Artificial Sequence: Synthetic oligonucleotide
cucucgguguugucauaac

SEQ ID NO: 1095614 - RNA, 19 nt, Artificial Sequence
  Description of Artificial Sequence: Synthetic oligonucleotide
uggagagcgccuguccagu

SEQ ID NO: 1095615 - RNA, 19 nt, Artificial Sequence
  Description of Artificial Sequence: Synthetic oligonucleotide
aguuucgguggggucucuc

SEQ ID NO: 1095616 - RNA, 19 nt, Artificial Sequence
  Description of Artificial Sequence: Synthetic oligonucleotide
ugguggcggauuguuuuca

SEQ ID NO: 1095617 - RNA, 19 nt, Artificial Sequence
  Description of Artificial Sequence: Synthetic oligonucleotide
cugugaggacaucaggcaa

SEQ ID NO: 1095618 - RNA, 19 nt, Artificial Sequence
  Description of Artificial Sequence: Synthetic oligonucleotide
cacuuggaaggugaaacaa

SEQ ID NO: 1095619 - RNA, 19 nt, Artificial Sequence
  Description of Artificial Sequence: Synthetic oligonucleotide
agguugaagagggcaugug

SEQ ID NO: 1095620 - RNA, 19 nt, Artificial Sequence
  Description of Artificial Sequence: Synthetic oligonucleotide
caugauacacuuggaaggu

SEQ ID NO: 1095621 - RNA, 19 nt, Artificial Sequence
  Description of Artificial Sequence: Synthetic oligonucleotide
ggcgcugugaaguccuuca

SEQ ID NO: 1095622 - RNA, 19 nt, Artificial Sequence
  Description of Artificial Sequence: Synthetic oligonucleotide
cucguggguggauugagcu

SEQ ID NO: 1095623 - RNA, 19 nt, Artificial Sequence
  Description of Artificial Sequence: Synthetic oligonucleotide
acgagcacuuugaugcacu

SEQ ID NO: 1095624 - RNA, 19 nt, Artificial Sequence
  Description of Artificial Sequence: Synthetic oligonucleotide
accaagcacuggcuagaga

SEQ ID NO: 1095625 - RNA, 19 nt, Artificial Sequence
  Description of Artificial Sequence: Synthetic oligonucleotide
gguggcggauuguuuucag

SEQ ID NO: 1095626 - RNA, 19 nt, Artificial Sequence
  Description of Artificial Sequence: Synthetic oligonucleotide
agccugggaugaugucgac

SEQ ID NO: 1095627 - RNA, 19 nt, Artificial Sequence
  Description of Artificial Sequence: Synthetic oligonucleotide
gcaugcaagucuccucagc

SEQ ID NO: 1095628 - RNA, 19 nt, Artificial Sequence
  Description of Artificial Sequence: Synthetic oligonucleotide
uugucccaucugaccacac

SEQ ID NO: 1095629 - RNA, 19 nt, Artificial Sequence
  Description of Artificial Sequence: Synthetic oligonucleotide
acacacacacacacagggu

SEQ ID NO: 1095630 - RNA, 19 nt, Artificial Sequence
  Description of Artificial Sequence: Synthetic oligonucleotide
guucugagagcgcgcugac

SEQ ID NO: 1095631 - RNA, 19 nt, Artificial Sequence
  Description of Artificial Sequence: Synthetic oligonucleotide
aagcuaauggugagccaua

SEQ ID NO: 1095632 - RNA, 19 nt, Artificial Sequence
  Description of Artificial Sequence: Synthetic oligonucleotide
gaugggguagucggcuguc

SEQ ID NO: 1095633 - RNA, 19 nt, Artificial Sequence
  Description of Artificial Sequence: Synthetic oligonucleotide
guggcggauuguuuucaga

SEQ ID NO: 1095634 - RNA, 19 nt, Artificial Sequence
  Description of Artificial Sequence: Synthetic oligonucleotide
cauaccaccccaagucugu

SEQ ID NO: 1095635 - RNA, 19 nt, Artificial Sequence
  Description of Artificial Sequence: Synthetic oligonucleotide
gguggggucucucucucuc

SEQ ID NO: 1095636 - RNA, 19 nt, Artificial Sequence
  Description of Artificial Sequence: Synthetic oligonucleotide
uccguacacugcucucggu

SEQ ID NO: 1095637 - RNA, 19 nt, Artificial Sequence
  Description of Artificial Sequence: Synthetic oligonucleotide
acacacacacacacacaca

SEQ ID NO: 1095638 - RNA, 19 nt, Artificial Sequence
  Description of Artificial Sequence: Synthetic oligonucleotide
cacgagcacuuugaugcac

SEQ ID NO: 1095639 - RNA, 19 nt, Artificial Sequence
  Description of Artificial Sequence: Synthetic oligonucleotide
auugagcccaagagaccug

SEQ ID NO: 1095640 - RNA, 19 nt, Artificial Sequence
  Description of Artificial Sequence: Synthetic oligonucleotide
gcucuucauuucucagucc

SEQ ID NO: 1095641 - RNA, 19 nt, Artificial Sequence
  Description of Artificial Sequence: Synthetic oligonucleotide
cccuuugugagcacuguga

SEQ ID NO: 1095642 - RNA, 19 nt, Artificial Sequence
  Description of Artificial Sequence: Synthetic oligonucleotide
cuccgauuacggaauagau

SEQ ID NO: 1095643 - RNA, 19 nt, Artificial Sequence
  Description of Artificial Sequence: Synthetic oligonucleotide
gggaccaugcgugugaacu

SEQ ID NO: 1095644 - RNA, 19 nt, Artificial Sequence
  Description of Artificial Sequence: Synthetic oligonucleotide
cuccccgugagcugugcca

SEQ ID NO: 1095645 - RNA, 19 nt, Artificial Sequence
  Description of Artificial Sequence: Synthetic oligonucleotide
ggucugggcccucuuuaug

SEQ ID NO: 1095646 - RNA, 19 nt, Artificial Sequence
  Description of Artificial Sequence: Synthetic oligonucleotide
agagggcaugugacauucg

SEQ ID NO: 1095647 - RNA, 19 nt, Artificial Sequence
  Description of Artificial Sequence: Synthetic oligonucleotide
augucgacgaggagcugca

SEQ ID NO: 1095648 - RNA, 19 nt, Artificial Sequence
  Description of Artificial Sequence: Synthetic oligonucleotide
caagucuguauggacugaa

SEQ ID NO: 1095649 - RNA, 19 nt, Artificial Sequence
  Description of Artificial Sequence: Synthetic oligonucleotide
gcuuuaccugcacaggugu

SEQ ID NO: 1095650 - RNA, 19 nt, Artificial Sequence
  Description of Artificial Sequence: Synthetic oligonucleotide
ggccacuagcugugugugg

SEQ ID NO: 1095651 - RNA, 19 nt, Artificial Sequence
  Description of Artificial Sequence: Synthetic oligonucleotide
aggguggcagagaaagaaa

SEQ ID NO: 1095652 - RNA, 19 nt, Artificial Sequence
  Description of Artificial Sequence: Synthetic oligonucleotide
cagauagguggggaggcga

SEQ ID NO: 1095653 - RNA, 19 nt, Artificial Sequence
  Description of Artificial Sequence: Synthetic oligonucleotide
cuugucccaucugaccaca

SEQ ID NO: 1095654 - RNA, 19 nt, Artificial Sequence
  Description of Artificial Sequence: Synthetic oligonucleotide
cacagguguugaaaagcua

SEQ ID NO: 1095655 - RNA, 19 nt, Artificial Sequence
  Description of Artificial Sequence: Synthetic oligonucleotide
ugucgacgaggagcugcag

SEQ ID NO: 1095656 - RNA, 19 nt, Artificial Sequence
  Description of Artificial Sequence: Synthetic oligonucleotide
guccgcacggcacacgagu

SEQ ID NO: 1095657 - RNA, 19 nt, Artificial Sequence
  Description of Artificial Sequence: Synthetic oligonucleotide
gccacuagcugugugugga

SEQ ID NO: 1095658 - RNA, 19 nt, Artificial Sequence
  Description of Artificial Sequence: Synthetic oligonucleotide
gugaaacaaauaagauaua

SEQ ID NO: 1095659 - RNA, 19 nt, Artificial Sequence
  Description of Artificial Sequence: Synthetic oligonucleotide
agcgcgcugacgcccucca

SEQ ID NO: 1095660 - RNA, 19 nt, Artificial Sequence
  Description of Artificial Sequence: Synthetic oligonucleotide
acaguccugggcgcuguga

SEQ ID NO: 1095661 - RNA, 19 nt, Artificial Sequence
  Description of Artificial Sequence: Synthetic oligonucleotide
gccugggaugaugucgacg

SEQ ID NO: 1095662 - RNA, 19 nt, Artificial Sequence
  Description of Artificial Sequence: Synthetic oligonucleotide
cacuagcuguguguggaca

SEQ ID NO: 1095663 - RNA, 19 nt, Artificial Sequence
  Description of Artificial Sequence: Synthetic oligonucleotide
cacugggcgagcugaugga

SEQ ID NO: 1095664 - RNA, 19 nt, Artificial Sequence
  Description of Artificial Sequence: Synthetic oligonucleotide
uagggguuucaaggcccug

SEQ ID NO: 1095665 - RNA, 19 nt, Artificial Sequence
  Description of Artificial Sequence: Synthetic oligonucleotide
ggcuucagaucuucuccga

SEQ ID NO: 1095666 - RNA, 19 nt, Artificial Sequence
  Description of Artificial Sequence: Synthetic oligonucleotide
gggucucucucucucucuc

SEQ ID NO: 1095667 - RNA, 19 nt, Artificial Sequence
  Description of Artificial Sequence: Synthetic oligonucleotide
gcccuuugugagcacugug

SEQ ID NO: 1095668 - RNA, 19 nt, Artificial Sequence
  Description of Artificial Sequence: Synthetic oligonucleotide
gggguuucaaggcccugga

SEQ ID NO: 1095669 - RNA, 19 nt, Artificial Sequence
  Description of Artificial Sequence: Synthetic oligonucleotide
auagaggguggcagagaaa

SEQ ID NO: 1095670 - RNA, 19 nt, Artificial Sequence
  Description of Artificial Sequence: Synthetic oligonucleotide
agagcgcgcugacgcccuc

SEQ ID NO: 1095671 - RNA, 19 nt, Artificial Sequence
  Description of Artificial Sequence: Synthetic oligonucleotide
gcagaguccugucuacgaa

SEQ ID NO: 1095672 - RNA, 19 nt, Artificial Sequence
  Description of Artificial Sequence: Synthetic oligonucleotide
cuggaugauugggcacgag

SEQ ID NO: 1095673 - RNA, 19 nt, Artificial Sequence
  Description of Artificial Sequence: Synthetic oligonucleotide
ggugauccucucuaccacu

SEQ ID NO: 1095674 - RNA, 19 nt, Artificial Sequence
  Description of Artificial Sequence: Synthetic oligonucleotide
ggguggauugagcuggcua

SEQ ID NO: 1095675 - RNA, 19 nt, Artificial Sequence
  Description of Artificial Sequence: Synthetic oligonucleotide
caguccugggcgcugugaa

SEQ ID NO: 1095676 - RNA, 19 nt, Artificial Sequence
  Description of Artificial Sequence: Synthetic oligonucleotide
agauugccacuaagcaaaa

SEQ ID NO: 1095677 - RNA, 19 nt, Artificial Sequence
  Description of Artificial Sequence: Synthetic oligonucleotide
ggcuagcccuuugugagca

SEQ ID NO: 1095678 - RNA, 19 nt, Artificial Sequence
  Description of Artificial Sequence: Synthetic oligonucleotide
ggauugagcuggcuagugu

SEQ ID NO: 1095679 - RNA, 19 nt, Artificial Sequence
  Description of Artificial Sequence: Synthetic oligonucleotide
ggacaucaggcaauguucu

SEQ ID NO: 1095680 - RNA, 19 nt, Artificial Sequence
  Description of Artificial Sequence: Synthetic oligonucleotide
gaccaugcgugugaacuau

SEQ ID NO: 1095681 - RNA, 19 nt, Artificial Sequence
  Description of Artificial Sequence: Synthetic oligonucleotide
gcgcugugaaguccuucag

SEQ ID NO: 1095682 - RNA, 19 nt, Artificial Sequence
  Description of Artificial Sequence: Synthetic oligonucleotide
guccugggcgcugugaagu

SEQ ID NO: 1095683 - RNA, 19 nt, Artificial Sequence
  Description of Artificial Sequence: Synthetic oligonucleotide
uggguggauugagcuggcu

SEQ ID NO: 1095684 - RNA, 19 nt, Artificial Sequence
  Description of Artificial Sequence: Synthetic oligonucleotide
cgagugcaccuggagagcg

SEQ ID NO: 1095685 - RNA, 19 nt, Artificial Sequence
  Description of Artificial Sequence: Synthetic oligonucleotide
acauucgaggcuagcccuu

SEQ ID NO: 1095686 - RNA, 19 nt, Artificial Sequence
  Description of Artificial Sequence: Synthetic oligonucleotide
cggugcaagacacauguaa

SEQ ID NO: 1095687 - RNA, 19 nt, Artificial Sequence
  Description of Artificial Sequence: Synthetic oligonucleotide
gcgcugacgcccuccauga

SEQ ID NO: 1095688 - RNA, 19 nt, Artificial Sequence
  Description of Artificial Sequence: Synthetic oligonucleotide
caugcgugugaacuauuuu

SEQ ID NO: 1095689 - RNA, 19 nt, Artificial Sequence
  Description of Artificial Sequence: Synthetic oligonucleotide
ggguagucggcugucugga

SEQ ID NO: 1095690 - RNA, 19 nt, Artificial Sequence
  Description of Artificial Sequence: Synthetic oligonucleotide
ggaccaugcgugugaacua

SEQ ID NO: 1095691 - RNA, 19 nt, Artificial Sequence
  Description of Artificial Sequence: Synthetic oligonucleotide
cccucuuuauguauaaguu

SEQ ID NO: 1095692 - RNA, 19 nt, Artificial Sequence
  Description of Artificial Sequence: Synthetic oligonucleotide
gaacacaguccugggcgcu

SEQ ID NO: 1095693 - RNA, 19 nt, Artificial Sequence
  Description of Artificial Sequence: Synthetic oligonucleotide
gcugucuuuuaaaguggga

SEQ ID NO: 1095694 - RNA, 19 nt, Artificial Sequence
  Description of Artificial Sequence: Synthetic oligonucleotide
cuccaugguuuggugaugu

SEQ ID NO: 1095695 - RNA, 19 nt, Artificial Sequence
  Description of Artificial Sequence: Synthetic oligonucleotide
ccuuccguacacugcucuc

SEQ ID NO: 1095696 - RNA, 19 nt, Artificial Sequence
  Description of Artificial Sequence: Synthetic oligonucleotide
cucaguccacugggcgagc

SEQ ID NO: 1095697 - RNA, 19 nt, Artificial Sequence
  Description of Artificial Sequence: Synthetic oligonucleotide
guggguggauugagcuggc

SEQ ID NO: 1095698 - RNA, 19 nt, Artificial Sequence
  Description of Artificial Sequence: Synthetic oligonucleotide
cuucuccgauuacggaaua

SEQ ID NO: 1095699 - RNA, 19 nt, Artificial Sequence
  Description of Artificial Sequence: Synthetic oligonucleotide
cgaggcuagcccuuuguga

SEQ ID NO: 1095700 - RNA, 19 nt, Artificial Sequence
  Description of Artificial Sequence: Synthetic oligonucleotide
aggcggugcaagacacaug

SEQ ID NO: 1095701 - RNA, 19 nt, Artificial Sequence
  Description of Artificial Sequence: Synthetic oligonucleotide
cuagcccuuugugagcacu

SEQ ID NO: 1095702 - RNA, 19 nt, Artificial Sequence
  Description of Artificial Sequence: Synthetic oligonucleotide
auaccaccccaagucugua

SEQ ID NO: 1095703 - RNA, 19 nt, Artificial Sequence
  Description of Artificial Sequence: Synthetic oligonucleotide
gcaaaacacgcuggccuuc

SEQ ID NO: 1095704 - RNA, 19 nt, Artificial Sequence
  Description of Artificial Sequence: Synthetic oligonucleotide
gcucguggguggauugagc

SEQ ID NO: 1095705 - RNA, 19 nt, Artificial Sequence
  Description of Artificial Sequence: Synthetic oligonucleotide
gcucucgguguugucauaa

SEQ ID NO: 1095706 - RNA, 19 nt, Artificial Sequence
  Description of Artificial Sequence: Synthetic oligonucleotide
ccacuagcuguguguggac

SEQ ID NO: 1095707 - RNA, 19 nt, Artificial Sequence
  Description of Artificial Sequence: Synthetic oligonucleotide
guagggguuucaaggcccu

SEQ ID NO: 1095708 - RNA, 19 nt, Artificial Sequence
  Description of Artificial Sequence: Synthetic oligonucleotide
guggauugagcuggcuagu

SEQ ID NO: 1095709 - RNA, 19 nt, Artificial Sequence
  Description of Artificial Sequence: Synthetic oligonucleotide
gcgugugaacuauuuuggu

SEQ ID NO: 1095710 - RNA, 19 nt, Artificial Sequence
  Description of Artificial Sequence: Synthetic oligonucleotide
cuuuaccugcacagguguu

SEQ ID NO: 1095711 - RNA, 19 nt, Artificial Sequence
  Description of Artificial Sequence: Synthetic oligonucleotide
cgcgcugacgcccuccaug

SEQ ID NO: 1095712 - RNA, 19 nt, Artificial Sequence
  Description of Artificial Sequence: Synthetic oligonucleotide
gcacgagcacuuugaugca

SEQ ID NO: 1095713 - RNA, 19 nt, Artificial Sequence
  Description of Artificial Sequence: Synthetic oligonucleotide
ccgcacggcacacgagugc

SEQ ID NO: 1095714 - RNA, 19 nt, Artificial Sequence
  Description of Artificial Sequence: Synthetic oligonucleotide
ccugucuacgaaguucuaa

SEQ ID NO: 1095715 - RNA, 19 nt, Artificial Sequence
  Description of Artificial Sequence: Synthetic oligonucleotide
ccccaagucuguauggacu

SEQ ID NO: 1095716 - RNA, 19 nt, Artificial Sequence
  Description of Artificial Sequence: Synthetic oligonucleotide
gcuccccgugagcugugcc

SEQ ID NO: 1095717 - RNA, 19 nt, Artificial Sequence
  Description of Artificial Sequence: Synthetic oligonucleotide
guggggucucucucucucu

SEQ ID NO: 1095718 - RNA, 19 nt, Artificial Sequence
  Description of Artificial Sequence: Synthetic oligonucleotide
ugggcgcugugaaguccuu

SEQ ID NO: 1095719 - RNA, 19 nt, Artificial Sequence
  Description of Artificial Sequence: Synthetic oligonucleotide
cagggacuaggugcuuuga

SEQ ID NO: 1095720 - RNA, 19 nt, Artificial Sequence
  Description of Artificial Sequence: Synthetic oligonucleotide
gcacuggcuagagagcucu

SEQ ID NO: 1095721 - RNA, 19 nt, Artificial Sequence
  Description of Artificial Sequence: Synthetic oligonucleotide
ggucucucucucucucucu

SEQ ID NO: 1095722 - RNA, 19 nt, Artificial Sequence
  Description of Artificial Sequence: Synthetic oligonucleotide
accaugcgugugaacuauu

SEQ ID NO: 1095723 - RNA, 19 nt, Artificial Sequence
  Description of Artificial Sequence: Synthetic oligonucleotide
ggcgagcccaggccaucug

SEQ ID NO: 1095724 - RNA, 19 nt, Artificial Sequence
  Description of Artificial Sequence: Synthetic oligonucleotide
gccuuccguacacugcucu

SEQ ID NO: 1095725 - RNA, 19 nt, Artificial Sequence
  Description of Artificial Sequence: Synthetic oligonucleotide
ggcuagugucgaugcagcu

SEQ ID NO: 1095726 - RNA, 19 nt, Artificial Sequence
  Description of Artificial Sequence: Synthetic oligonucleotide
gguccgcacggcacacgag

SEQ ID NO: 1095727 - RNA, 19 nt, Artificial Sequence
  Description of Artificial Sequence: Synthetic oligonucleotide
gcuagcccuuugugagcac

SEQ ID NO: 1095728 - RNA, 19 nt, Artificial Sequence
  Description of Artificial Sequence: Synthetic oligonucleotide
gcuagugucgaugcagcuu

SEQ ID NO: 1095729 - RNA, 19 nt, Artificial Sequence
  Description of Artificial Sequence: Synthetic oligonucleotide
gagagcgcgcugacgcccu

SEQ ID NO: 1095730 - RNA, 19 nt, Artificial Sequence
  Description of Artificial Sequence: Synthetic oligonucleotide
cagggaccaugcgugugaa

SEQ ID NO: 1095731 - RNA, 19 nt, Artificial Sequence
  Description of Artificial Sequence: Synthetic oligonucleotide
ccuccaugguuuggugaug

SEQ ID NO: 1095732 - RNA, 19 nt, Artificial Sequence
  Description of Artificial Sequence: Synthetic oligonucleotide
cccauaccaccccaagucu

SEQ ID NO: 1095733 - RNA, 19 nt, Artificial Sequence
  Description of Artificial Sequence: Synthetic oligonucleotide
cguacacugcucucggugu

SEQ ID NO: 1095734 - RNA, 19 nt, Artificial Sequence
  Description of Artificial Sequence: Synthetic oligonucleotide
ggggucucucucucucucu

SEQ ID NO: 1095735 - RNA, 19 nt, Artificial Sequence
  Description of Artificial Sequence: Synthetic oligonucleotide
cacacacacacagggucuu

SEQ ID NO: 1095736 - RNA, 19 nt, Artificial Sequence
  Description of Artificial Sequence: Synthetic oligonucleotide
ccaugcgugugaacuauuu

SEQ ID NO: 1095737 - RNA, 19 nt, Artificial Sequence
  Description of Artificial Sequence: Synthetic oligonucleotide
gcgagcccaggccaucugu

SEQ ID NO: 1095738 - RNA, 19 nt, Artificial Sequence
  Description of Artificial Sequence: Synthetic oligonucleotide
gggcgcugugaaguccuuc

SEQ ID NO: 1095739 - RNA, 19 nt, Artificial Sequence
  Description of Artificial Sequence: Synthetic oligonucleotide
gcacacgagugcaccugga

SEQ ID NO: 1095740 - RNA, 19 nt, Artificial Sequence
  Description of Artificial Sequence: Synthetic oligonucleotide
ccagguccgcacggcacac

SEQ ID NO: 1095741 - RNA, 19 nt, Artificial Sequence
  Description of Artificial Sequence: Synthetic oligonucleotide
gguagucggcugucuggau

SEQ ID NO: 1095742 - RNA, 19 nt, Artificial Sequence
  Description of Artificial Sequence: Synthetic oligonucleotide
ggcccuggauagucagaua

SEQ ID NO: 1095743 - RNA, 19 nt, Artificial Sequence
  Description of Artificial Sequence: Synthetic oligonucleotide
ccaugagguggugguggca

SEQ ID NO: 1095744 - RNA, 19 nt, Artificial Sequence
  Description of Artificial Sequence: Synthetic oligonucleotide
cgcugacgcccuccaugag

SEQ ID NO: 1095745 - RNA, 19 nt, Artificial Sequence
  Description of Artificial Sequence: Synthetic oligonucleotide
gugcaccuggagagcgccu

SEQ ID NO: 1095746 - RNA, 19 nt, Artificial Sequence
  Description of Artificial Sequence: Synthetic oligonucleotide
gcggugcaagacacaugua

SEQ ID NO: 1095747 - RNA, 19 nt, Artificial Sequence
  Description of Artificial Sequence: Synthetic oligonucleotide
caguuucgguggggucucu

SEQ ID NO: 1095748 - RNA, 19 nt, Artificial Sequence
  Description of Artificial Sequence: Synthetic oligonucleotide
gcgcgcugacgcccuccau

SEQ ID NO: 1095749 - RNA, 19 nt, Artificial Sequence
  Description of Artificial Sequence: Synthetic oligonucleotide
aaucaauaaaccccgaacc

SEQ ID NO: 1095750 - RNA, 19 nt, Artificial Sequence
  Description of Artificial Sequence: Synthetic oligonucleotide
aauucaaucaauaaacccc

SEQ ID NO: 1095751 - RNA, 19 nt, Artificial Sequence
  Description of Artificial Sequence: Synthetic oligonucleotide
aauccguuuguccauaucc

SEQ ID NO: 1095752 - RNA, 19 nt, Artificial Sequence
  Description of Artificial Sequence: Synthetic oligonucleotide
aguaagaacaaacacuugc

SEQ ID NO: 1095753 - RNA, 19 nt, Artificial Sequence
  Description of Artificial Sequence: Synthetic oligonucleotide
uaagcuauugcauuuacgg

SEQ ID NO: 1095754 - RNA, 19 nt, Artificial Sequence
  Description of Artificial Sequence: Synthetic oligonucleotide
ucuguuaucgcuuaguuca

SEQ ID NO: 1095755 - RNA, 19 nt, Artificial Sequence
  Description of Artificial Sequence: Synthetic oligonucleotide
aacucaaaaguuuuggcuc

SEQ ID NO: 1095756 - RNA, 19 nt, Artificial Sequence
  Description of Artificial Sequence: Synthetic oligonucleotide
uuuguugccacuuaaauuu

SEQ ID NO: 1095757 - RNA, 19 nt, Artificial Sequence
  Description of Artificial Sequence: Synthetic oligonucleotide
agagaguaagaacaaacac

SEQ ID NO: 1095758 - RNA, 19 nt, Artificial Sequence
  Description of Artificial Sequence: Synthetic oligonucleotide
aaucacaauaggaauuucc

SEQ ID NO: 1095759 - RNA, 19 nt, Artificial Sequence
  Description of Artificial Sequence: Synthetic oligonucleotide
ucuccagagaguaagaaca

SEQ ID NO: 1095760 - RNA, 19 nt, Artificial Sequence
  Description of Artificial Sequence: Synthetic oligonucleotide
aucaauaaaccccgaaccc

SEQ ID NO: 1095761 - RNA, 19 nt, Artificial Sequence
  Description of Artificial Sequence: Synthetic oligonucleotide
gaauucaaucaauaaaccc

SEQ ID NO: 1095762 - RNA, 19 nt, Artificial Sequence
  Description of Artificial Sequence: Synthetic oligonucleotide
guucuuucacaucagaggg

SEQ ID NO: 1095763 - RNA, 19 nt, Artificial Sequence
  Description of Artificial Sequence: Synthetic oligonucleotide
aaaauacgccuuuagguug

SEQ ID NO: 1095764 - RNA, 19 nt, Artificial Sequence
  Description of Artificial Sequence: Synthetic oligonucleotide
aucaaugacaaacagacau

SEQ ID NO: 1095765 - RNA, 19 nt, Artificial Sequence
  Description of Artificial Sequence: Synthetic oligonucleotide
uuuacggggacaaaaccag

SEQ ID NO: 1095766 - RNA, 19 nt, Artificial Sequence
  Description of Artificial Sequence: Synthetic oligonucleotide
uucaacaucggagucaggg

SEQ ID NO: 1095767 - RNA, 19 nt, Artificial Sequence
  Description of Artificial Sequence: Synthetic oligonucleotide
aauugaccgacaguugucc

SEQ ID NO: 1095768 - RNA, 19 nt, Artificial Sequence
  Description of Artificial Sequence: Synthetic oligonucleotide
agaaaauacaauuuugcau

SEQ ID NO: 1095769 - RNA, 19 nt, Artificial Sequence
  Description of Artificial Sequence: Synthetic oligonucleotide
ugagagauggggaaugucc

SEQ ID NO: 1095770 - RNA, 19 nt, Artificial Sequence
  Description of Artificial Sequence: Synthetic oligonucleotide
uagguugcuauuuacaaac

SEQ ID NO: 1095771 - RNA, 19 nt, Artificial Sequence
  Description of Artificial Sequence: Synthetic oligonucleotide
acagacauaaaacucaaaa

SEQ ID NO: 1095772 - RNA, 19 nt, Artificial Sequence
  Description of Artificial Sequence: Synthetic oligonucleotide
aaaacagucaaaucacaau

SEQ ID NO: 1095773 - RNA, 19 nt, Artificial Sequence
  Description of Artificial Sequence: Synthetic oligonucleotide
aagcuauugcauuuacggg

SEQ ID NO: 1095774 - RNA, 19 nt, Artificial Sequence
  Description of Artificial Sequence: Synthetic oligonucleotide
aaaccccgaacccacggcc

SEQ ID NO: 1095775 - RNA, 19 nt, Artificial Sequence
  Description of Artificial Sequence: Synthetic oligonucleotide
aaggaaacagcauucacua

SEQ ID NO: 1095776 - RNA, 19 nt, Artificial Sequence
  Description of Artificial Sequence: Synthetic oligonucleotide
agaugcuuaagguucggac

SEQ ID NO: 1095777 - RNA, 19 nt, Artificial Sequence
  Description of Artificial Sequence: Synthetic oligonucleotide
uuaacuuugguaaguucgc

SEQ ID NO: 1095778 - RNA, 19 nt, Artificial Sequence
  Description of Artificial Sequence: Synthetic oligonucleotide
uaaaugaauccguuugucc

SEQ ID NO: 1095779 - RNA, 19 nt, Artificial Sequence
  Description of Artificial Sequence: Synthetic oligonucleotide
agguuaauuccccuuaguc

SEQ ID NO: 1095780 - RNA, 19 nt, Artificial Sequence
  Description of Artificial Sequence: Synthetic oligonucleotide
agaaaggggacaccgaaag

SEQ ID NO: 1095781 - RNA, 19 nt, Artificial Sequence
  Description of Artificial Sequence: Synthetic oligonucleotide
cuugaacacauuuucucgg

SEQ ID NO: 1095782 - RNA, 19 nt, Artificial Sequence
  Description of Artificial Sequence: Synthetic oligonucleotide
uccauauccaucucucgcg

SEQ ID NO: 1095783 - RNA, 19 nt, Artificial Sequence
  Description of Artificial Sequence: Synthetic oligonucleotide
agcuugaacacauuuucuc

SEQ ID NO: 1095784 - RNA, 19 nt, Artificial Sequence
  Description of Artificial Sequence: Synthetic oligonucleotide
uuuagguugcuauuuacaa

SEQ ID NO: 1095785 - RNA, 19 nt, Artificial Sequence
  Description of Artificial Sequence: Synthetic oligonucleotide
uuugcauuccuuuuccgug

SEQ ID NO: 1095786 - RNA, 19 nt, Artificial Sequence
  Description of Artificial Sequence: Synthetic oligonucleotide
auucaaucaauaaaccccg

SEQ ID NO: 1095787 - RNA, 19 nt, Artificial Sequence
  Description of Artificial Sequence: Synthetic oligonucleotide
aaaggaaacagcauucacu

SEQ ID NO: 1095788 - RNA, 19 nt, Artificial Sequence
  Description of Artificial Sequence: Synthetic oligonucleotide
uaugagagagggaaaacaa

SEQ ID NO: 1095789 - RNA, 19 nt, Artificial Sequence
  Description of Artificial Sequence: Synthetic oligonucleotide
aauagguuaauuccccuua

SEQ ID NO: 1095790 - RNA, 19 nt, Artificial Sequence
  Description of Artificial Sequence: Synthetic oligonucleotide
acuuaagaauuccaguucu

SEQ ID NO: 1095791 - RNA, 19 nt, Artificial Sequence
  Description of Artificial Sequence: Synthetic oligonucleotide
ucuaaaugaauccguuugu

SEQ ID NO: 1095792 - RNA, 19 nt, Artificial Sequence
  Description of Artificial Sequence: Synthetic oligonucleotide
uucucgguagucauucagg

SEQ ID NO: 1095793 - RNA, 19 nt, Artificial Sequence
  Description of Artificial Sequence: Synthetic oligonucleotide
cuauuuacaaacccgcgug

SEQ ID NO: 1095794 - RNA, 19 nt, Artificial Sequence
  Description of Artificial Sequence: Synthetic oligonucleotide
aaaauaaagaguggcagua

SEQ ID NO: 1095795 - RNA, 19 nt, Artificial Sequence
  Description of Artificial Sequence: Synthetic oligonucleotide
aaauacgccuuuagguugc

SEQ ID NO: 1095796 - RNA, 19 nt, Artificial Sequence
  Description of Artificial Sequence: Synthetic oligonucleotide
ugccacuuaaauuuagaug

SEQ ID NO: 1095797 - RNA, 19 nt, Artificial Sequence
  Description of Artificial Sequence: Synthetic oligonucleotide
auguccccaaaccagugcc

SEQ ID NO: 1095798 - RNA, 19 nt, Artificial Sequence
  Description of Artificial Sequence: Synthetic oligonucleotide
agcagagaccacaugaacc

SEQ ID NO: 1095799 - RNA, 19 nt, Artificial Sequence
  Description of Artificial Sequence: Synthetic oligonucleotide
uucgcaauggaggugaggc

SEQ ID NO: 1095800 - RNA, 19 nt, Artificial Sequence
  Description of Artificial Sequence: Synthetic oligonucleotide
acaugaaccagaacggggc

SEQ ID NO: 1095801 - RNA, 19 nt, Artificial Sequence
  Description of Artificial Sequence: Synthetic oligonucleotide
ucuugaccaacucugggga

SEQ ID NO: 1095802 - RNA, 19 nt, Artificial Sequence
  Description of Artificial Sequence: Synthetic oligonucleotide
ugcuauuuacaaacccgcg

SEQ ID NO: 1095803 - RNA, 19 nt, Artificial Sequence
  Description of Artificial Sequence: Synthetic oligonucleotide
aaauggguugcagaugguc

SEQ ID NO: 1095804 - RNA, 19 nt, Artificial Sequence
  Description of Artificial Sequence: Synthetic oligonucleotide
cugugagucacccaccugg

SEQ ID NO: 1095805 - RNA, 19 nt, Artificial Sequence
  Description of Artificial Sequence: Synthetic oligonucleotide
caaucaauaaaccccgaac

SEQ ID NO: 1095806 - RNA, 19 nt, Artificial Sequence
  Description of Artificial Sequence: Synthetic oligonucleotide
ucaacaucggagucagggg

SEQ ID NO: 1095807 - RNA, 19 nt, Artificial Sequence
  Description of Artificial Sequence: Synthetic oligonucleotide
ucacaauaggaauuucccc

SEQ ID NO: 1095808 - RNA, 19 nt, Artificial Sequence
  Description of Artificial Sequence: Synthetic oligonucleotide
caguuaaacaggucuaggc

SEQ ID NO: 1095809 - RNA, 19 nt, Artificial Sequence
  Description of Artificial Sequence: Synthetic oligonucleotide
gguaaguucgcaauggagg

SEQ ID NO: 1095810 - RNA, 19 nt, Artificial Sequence
  Description of Artificial Sequence: Synthetic oligonucleotide
uuacaaacccgcgugcugg

SEQ ID NO: 1095811 - RNA, 19 nt, Artificial Sequence
  Description of Artificial Sequence: Synthetic oligonucleotide
uauuuacaaacccgcgugc

SEQ ID NO: 1095812 - RNA, 19 nt, Artificial Sequence
  Description of Artificial Sequence: Synthetic oligonucleotide
cuugagauucucuaacuuc

SEQ ID NO: 1095813 - RNA, 19 nt, Artificial Sequence
  Description of Artificial Sequence: Synthetic oligonucleotide
acuaagcuauugcauuuac

SEQ ID NO: 1095814 - RNA, 19 nt, Artificial Sequence
  Description of Artificial Sequence: Synthetic oligonucleotide
gaugcuuaagguucggaca

SEQ ID NO: 1095815 - RNA, 19 nt, Artificial Sequence
  Description of Artificial Sequence: Synthetic oligonucleotide
uuugccuucaauugaccga

SEQ ID NO: 1095816 - RNA, 19 nt, Artificial Sequence
  Description of Artificial Sequence: Synthetic oligonucleotide
uuucucgguagucauucag

SEQ ID NO: 1095817 - RNA, 19 nt, Artificial Sequence
  Description of Artificial Sequence: Synthetic oligonucleotide
ugguaaguucgcaauggag

SEQ ID NO: 1095818 - RNA, 19 nt, Artificial Sequence
  Description of Artificial Sequence: Synthetic oligonucleotide
aagcaauccagaaagggga

SEQ ID NO: 1095819 - RNA, 19 nt, Artificial Sequence
  Description of Artificial Sequence: Synthetic oligonucleotide
cucuugaccaacucugggg

SEQ ID NO: 1095820 - RNA, 19 nt, Artificial Sequence
  Description of Artificial Sequence: Synthetic oligonucleotide
ucagagggcguccuguucc

SEQ ID NO: 1095821 - RNA, 19 nt, Artificial Sequence
  Description of Artificial Sequence: Synthetic oligonucleotide
aacacauuuucucgguagu

SEQ ID NO: 1095822 - RNA, 19 nt, Artificial Sequence
  Description of Artificial Sequence: Synthetic oligonucleotide
uguacagaugagacacagg

SEQ ID NO: 1095823 - RNA, 19 nt, Artificial Sequence
  Description of Artificial Sequence: Synthetic oligonucleotide
aaugaauccguuuguccau

SEQ ID NO: 1095824 - RNA, 19 nt, Artificial Sequence
  Description of Artificial Sequence: Synthetic oligonucleotide
cuaagcuauugcauuuacg

SEQ ID NO: 1095825 - RNA, 19 nt, Artificial Sequence
  Description of Artificial Sequence: Synthetic oligonucleotide
guagccuucaacaucggag

SEQ ID NO: 1095826 - RNA, 19 nt, Artificial Sequence
  Description of Artificial Sequence: Synthetic oligonucleotide
uuuuguugccacuuaaauu

SEQ ID NO: 1095827 - RNA, 19 nt, Artificial Sequence
  Description of Artificial Sequence: Synthetic oligonucleotide
uggggaauguccccaaacc

SEQ ID NO: 1095828 - RNA, 19 nt, Artificial Sequence
  Description of Artificial Sequence: Synthetic oligonucleotide
uuauuuuguugccacuuaa

SEQ ID NO: 1095829 - RNA, 19 nt, Artificial Sequence
  Description of Artificial Sequence: Synthetic oligonucleotide
cacaauaggaauuucccca

SEQ ID NO: 1095830 - RNA, 19 nt, Artificial Sequence
  Description of Artificial Sequence: Synthetic oligonucleotide
uuuacaaacccgcgugcug

SEQ ID NO: 1095831 - RNA, 19 nt, Artificial Sequence
  Description of Artificial Sequence: Synthetic oligonucleotide
aaauagguuaauuccccuu

SEQ ID NO: 1095832 - RNA, 19 nt, Artificial Sequence
  Description of Artificial Sequence: Synthetic oligonucleotide
auaaaccccgaacccacgg

SEQ ID NO: 1095833 - RNA, 19 nt, Artificial Sequence
  Description of Artificial Sequence: Synthetic oligonucleotide
agaguaacaaaaguucucu

SEQ ID NO: 1095834 - RNA, 19 nt, Artificial Sequence
  Description of Artificial Sequence: Synthetic oligonucleotide
acagcauucacuaggagga

SEQ ID NO: 1095835 - RNA, 19 nt, Artificial Sequence
  Description of Artificial Sequence: Synthetic oligonucleotide
auauccaucucucgcgcuc

SEQ ID NO: 1095836 - RNA, 19 nt, Artificial Sequence
  Description of Artificial Sequence: Synthetic oligonucleotide
aacagcacgucacuuguaa

SEQ ID NO: 1095837 - RNA, 19 nt, Artificial Sequence
  Description of Artificial Sequence: Synthetic oligonucleotide
ugcguacuaagcuauugca

SEQ ID NO: 1095838 - RNA, 19 nt, Artificial Sequence
  Description of Artificial Sequence: Synthetic oligonucleotide
uuggucaccucacaguuaa

SEQ ID NO: 1095839 - RNA, 19 nt, Artificial Sequence
  Description of Artificial Sequence: Synthetic oligonucleotide
agguaugugaccuggggca

SEQ ID NO: 1095840 - RNA, 19 nt, Artificial Sequence
  Description of Artificial Sequence: Synthetic oligonucleotide
guuaucgcuuaguucaagc

SEQ ID NO: 1095841 - RNA, 19 nt, Artificial Sequence
  Description of Artificial Sequence: Synthetic oligonucleotide
agaguaagaacaaacacuu

SEQ ID NO: 1095842 - RNA, 19 nt, Artificial Sequence
  Description of Artificial Sequence: Synthetic oligonucleotide
cauuuacggggacaaaacc

SEQ ID NO: 1095843 - RNA, 19 nt, Artificial Sequence
  Description of Artificial Sequence: Synthetic oligonucleotide
acguugauuguacuuaaga

SEQ ID NO: 1095844 - RNA, 19 nt, Artificial Sequence
  Description of Artificial Sequence: Synthetic oligonucleotide
uccccaaauagguuaauuc

SEQ ID NO: 1095845 - RNA, 19 nt, Artificial Sequence
  Description of Artificial Sequence: Synthetic oligonucleotide
agucaaaucacaauaggaa

SEQ ID NO: 1095846 - RNA, 19 nt, Artificial Sequence
  Description of Artificial Sequence: Synthetic oligonucleotide
gaaaggaaacagcauucac

SEQ ID NO: 1095847 - RNA, 19 nt, Artificial Sequence
  Description of Artificial Sequence: Synthetic oligonucleotide
aucgcuuaguucaagcuuc

SEQ ID NO: 1095848 - RNA, 19 nt, Artificial Sequence
  Description of Artificial Sequence: Synthetic oligonucleotide
cagggugggaaacagcacg

SEQ ID NO: 1095849 - RNA, 19 nt, Artificial Sequence
  Description of Artificial Sequence: Synthetic oligonucleotide
auagguuaauuccccuuag

SEQ ID NO: 1095850 - RNA, 19 nt, Artificial Sequence
  Description of Artificial Sequence: Synthetic oligonucleotide
uucaauugaccgacaguug

SEQ ID NO: 1095851 - RNA, 19 nt, Artificial Sequence
  Description of Artificial Sequence: Synthetic oligonucleotide
ucaaugacaaacagacaua

SEQ ID NO: 1095852 - RNA, 19 nt, Artificial Sequence
  Description of Artificial Sequence: Synthetic oligonucleotide
uguccauauccaucucucg

SEQ ID NO: 1095853 - RNA, 19 nt, Artificial Sequence
  Description of Artificial Sequence: Synthetic oligonucleotide
auggggaauguccccaaac

SEQ ID NO: 1095854 - RNA, 19 nt, Artificial Sequence
  Description of Artificial Sequence: Synthetic oligonucleotide
aaaucacaauaggaauuuc

SEQ ID NO: 1095855 - RNA, 19 nt, Artificial Sequence
  Description of Artificial Sequence: Synthetic oligonucleotide
uagccaucgagguauguga

SEQ ID NO: 1095856 - RNA, 19 nt, Artificial Sequence
  Description of Artificial Sequence: Synthetic oligonucleotide
caacaucggagucaggggc

SEQ ID NO: 1095857 - RNA, 19 nt, Artificial Sequence
  Description of Artificial Sequence: Synthetic oligonucleotide
uuagguugcuauuuacaaa

SEQ ID NO: 1095858 - RNA, 19 nt, Artificial Sequence
  Description of Artificial Sequence: Synthetic oligonucleotide
acucaaaaguuuuggcucu

SEQ ID NO: 1095859 - RNA, 19 nt, Artificial Sequence
  Description of Artificial Sequence: Synthetic oligonucleotide
uucuuucacaucagagggc

SEQ ID NO: 1095860 - RNA, 19 nt, Artificial Sequence
  Description of Artificial Sequence: Synthetic oligonucleotide
auuuacggggacaaaacca

SEQ ID NO: 1095861 - RNA, 19 nt, Artificial Sequence
  Description of Artificial Sequence: Synthetic oligonucleotide
uccccugagauucuguuau

SEQ ID NO: 1095862 - RNA, 19 nt, Artificial Sequence
  Description of Artificial Sequence: Synthetic oligonucleotide
uaucgcuuaguucaagcuu

SEQ ID NO: 1095863 - RNA, 19 nt, Artificial Sequence
  Description of Artificial Sequence: Synthetic oligonucleotide
accgaaaggaaacagcauu

SEQ ID NO: 1095864 - RNA, 19 nt, Artificial Sequence
  Description of Artificial Sequence: Synthetic oligonucleotide
cagcacgucacuuguaaag

SEQ ID NO: 1095865 - RNA, 19 nt, Artificial Sequence
  Description of Artificial Sequence: Synthetic oligonucleotide
gguuaauuccccuuaguca

SEQ ID NO: 1095866 - RNA, 19 nt, Artificial Sequence
  Description of Artificial Sequence: Synthetic oligonucleotide
accagaacggggcugugag

SEQ ID NO: 1095867 - RNA, 19 nt, Artificial Sequence
  Description of Artificial Sequence: Synthetic oligonucleotide
guuaauuccccuuagucau

SEQ ID NO: 1095868 - RNA, 19 nt, Artificial Sequence
  Description of Artificial Sequence: Synthetic oligonucleotide
caacgcuacaaucagaaaa

SEQ ID NO: 1095869 - RNA, 19 nt, Artificial Sequence
  Description of Artificial Sequence: Synthetic oligonucleotide
uugaccgacaguuguccag

SEQ ID NO: 1095870 - RNA, 19 nt, Artificial Sequence
  Description of Artificial Sequence: Synthetic oligonucleotide
cauuguaaccuucuucauc

SEQ ID NO: 1095871 - RNA, 19 nt, Artificial Sequence
  Description of Artificial Sequence: Synthetic oligonucleotide
ugcauuuacggggacaaaa

SEQ ID NO: 1095872 - RNA, 19 nt, Artificial Sequence
  Description of Artificial Sequence: Synthetic oligonucleotide
cucuuugcaaaagcaaagc

SEQ ID NO: 1095873 - RNA, 19 nt, Artificial Sequence
  Description of Artificial Sequence: Synthetic oligonucleotide
agcauucacuaggaggagc

SEQ ID NO: 1095874 - RNA, 19 nt, Artificial Sequence
  Description of Artificial Sequence: Synthetic oligonucleotide
uacgccuuuagguugcuau

SEQ ID NO: 1095875 - RNA, 19 nt, Artificial Sequence
  Description of Artificial Sequence: Synthetic oligonucleotide
cagaguaacaaaaguucuc

SEQ ID NO: 1095876 - RNA, 19 nt, Artificial Sequence
  Description of Artificial Sequence: Synthetic oligonucleotide
gugaggccuacguugauug

SEQ ID NO: 1095877 - RNA, 19 nt, Artificial Sequence
  Description of Artificial Sequence: Synthetic oligonucleotide
ugaccgacaguuguccagg

SEQ ID NO: 1095878 - RNA, 19 nt, Artificial Sequence
  Description of Artificial Sequence: Synthetic oligonucleotide
gacaccgaaaggaaacagc

SEQ ID NO: 1095879 - RNA, 19 nt, Artificial Sequence
  Description of Artificial Sequence: Synthetic oligonucleotide
augcuuaagguucggacau

SEQ ID NO: 1095880 - RNA, 19 nt, Artificial Sequence
  Description of Artificial Sequence: Synthetic oligonucleotide
uaaaccccgaacccacggc

SEQ ID NO: 1095881 - RNA, 19 nt, Artificial Sequence
  Description of Artificial Sequence: Synthetic oligonucleotide
gguugcuauuuacaaaccc

SEQ ID NO: 1095882 - RNA, 19 nt, Artificial Sequence
  Description of Artificial Sequence: Synthetic oligonucleotide
uaauuccccuuagucaucc

SEQ ID NO: 1095883 - RNA, 19 nt, Artificial Sequence
  Description of Artificial Sequence: Synthetic oligonucleotide
uacguugauuguacuuaag

SEQ ID NO: 1095884 - RNA, 19 nt, Artificial Sequence
  Description of Artificial Sequence: Synthetic oligonucleotide
ggaggugaggccuacguug

SEQ ID NO: 1095885 - RNA, 19 nt, Artificial Sequence
  Description of Artificial Sequence: Synthetic oligonucleotide
acggcaacgcuacaaucag

SEQ ID NO: 1095886 - RNA, 19 nt, Artificial Sequence
  Description of Artificial Sequence: Synthetic oligonucleotide
cccaaauagguuaauuccc

SEQ ID NO: 1095887 - RNA, 19 nt, Artificial Sequence
  Description of Artificial Sequence: Synthetic oligonucleotide
gaaacagcauucacuagga

SEQ ID NO: 1095888 - RNA, 19 nt, Artificial Sequence
  Description of Artificial Sequence: Synthetic oligonucleotide
auucccacggcaacgcuac

SEQ ID NO: 1095889 - RNA, 19 nt, Artificial Sequence
  Description of Artificial Sequence: Synthetic oligonucleotide
uguugucccugucguagcc

SEQ ID NO: 1095890 - RNA, 19 nt, Artificial Sequence
  Description of Artificial Sequence: Synthetic oligonucleotide
uucgcccucaucuucgggu

SEQ ID NO: 1095891 - RNA, 19 nt, Artificial Sequence
  Description of Artificial Sequence: Synthetic oligonucleotide
ccaaauagguuaauucccc

SEQ ID NO: 1095892 - RNA, 19 nt, Artificial Sequence
  Description of Artificial Sequence: Synthetic oligonucleotide
aucgagguaugugaccugg

SEQ ID NO: 1095893 - RNA, 19 nt, Artificial Sequence
  Description of Artificial Sequence: Synthetic oligonucleotide
cgcguuuaggacuugaagg

SEQ ID NO: 1095894 - RNA, 19 nt, Artificial Sequence
  Description of Artificial Sequence: Synthetic oligonucleotide
ggaauucaaucaauaaacc

SEQ ID NO: 1095895 - RNA, 19 nt, Artificial Sequence
  Description of Artificial Sequence: Synthetic oligonucleotide
agcggaauucaaucaauaa

SEQ ID NO: 1095896 - RNA, 19 nt, Artificial Sequence
  Description of Artificial Sequence: Synthetic oligonucleotide
acaccgaaaggaaacagca

SEQ ID NO: 1095897 - RNA, 19 nt, Artificial Sequence
  Description of Artificial Sequence: Synthetic oligonucleotide
gcguuuaggacuugaaggc

SEQ ID NO: 1095898 - RNA, 19 nt, Artificial Sequence
  Description of Artificial Sequence: Synthetic oligonucleotide
guaugagagagggaaaaca

SEQ ID NO: 1095899 - RNA, 19 nt, Artificial Sequence
  Description of Artificial Sequence: Synthetic oligonucleotide
uuggugcguacuaagcuau

SEQ ID NO: 1095900 - RNA, 19 nt, Artificial Sequence
  Description of Artificial Sequence: Synthetic oligonucleotide
uagguuaauuccccuuagu

SEQ ID NO: 1095901 - RNA, 19 nt, Artificial Sequence
  Description of Artificial Sequence: Synthetic oligonucleotide
gugcguacuaagcuauugc

SEQ ID NO: 1095902 - RNA, 19 nt, Artificial Sequence
  Description of Artificial Sequence: Synthetic oligonucleotide
uuccgugcuccaauguaug

SEQ ID NO: 1095903 - RNA, 19 nt, Artificial Sequence
  Description of Artificial Sequence: Synthetic oligonucleotide
uauugcauuuacggggaca

SEQ ID NO: 1095904 - RNA, 19 nt, Artificial Sequence
  Description of Artificial Sequence: Synthetic oligonucleotide
uguaugagagagggaaaac

SEQ ID NO: 1095905 - RNA, 19 nt, Artificial Sequence
  Description of Artificial Sequence: Synthetic oligonucleotide
auuguacuuaagaauucca

SEQ ID NO: 1095906 - RNA, 19 nt, Artificial Sequence
  Description of Artificial Sequence: Synthetic oligonucleotide
acacauuuucucgguaguc

SEQ ID NO: 1095907 - RNA, 19 nt, Artificial Sequence
  Description of Artificial Sequence: Synthetic oligonucleotide
ugcaccagcggaauucaau

SEQ ID NO: 1095908 - RNA, 19 nt, Artificial Sequence
  Description of Artificial Sequence: Synthetic oligonucleotide
uacaaacccgcgugcuggg

SEQ ID NO: 1095909 - RNA, 19 nt, Artificial Sequence
  Description of Artificial Sequence: Synthetic oligonucleotide
agguugcuauuuacaaacc

SEQ ID NO: 1095910 - RNA, 19 nt, Artificial Sequence
  Description of Artificial Sequence: Synthetic oligonucleotide
auuuacaaacccgcgugcu

SEQ ID NO: 1095911 - RNA, 19 nt, Artificial Sequence
  Description of Artificial Sequence: Synthetic oligonucleotide
ugaacacauuuucucggua

SEQ ID NO: 1095912 - RNA, 19 nt, Artificial Sequence
  Description of Artificial Sequence: Synthetic oligonucleotide
ugugagucacccaccuggu

SEQ ID NO: 1095913 - RNA, 19 nt, Artificial Sequence
  Description of Artificial Sequence: Synthetic oligonucleotide
ucuauugugcugaggucuu

SEQ ID NO: 1095914 - RNA, 19 nt, Artificial Sequence
  Description of Artificial Sequence: Synthetic oligonucleotide
gucaaaucacaauaggaau

SEQ ID NO: 1095915 - RNA, 19 nt, Artificial Sequence
  Description of Artificial Sequence: Synthetic oligonucleotide
auggaggugaggccuacgu

SEQ ID NO: 1095916 - RNA, 19 nt, Artificial Sequence
  Description of Artificial Sequence: Synthetic oligonucleotide
guaaguucgcaauggaggu

SEQ ID NO: 1095917 - RNA, 19 nt, Artificial Sequence
  Description of Artificial Sequence: Synthetic oligonucleotide
uucgcuucugacuccuuuc

SEQ ID NO: 1095918 - RNA, 19 nt, Artificial Sequence
  Description of Artificial Sequence: Synthetic oligonucleotide
ccugucguagccaucgagg

SEQ ID NO: 1095919 - RNA, 19 nt, Artificial Sequence
  Description of Artificial Sequence: Synthetic oligonucleotide
auucacuaggaggagccug

SEQ ID NO: 1095920 - RNA, 19 nt, Artificial Sequence
  Description of Artificial Sequence: Synthetic oligonucleotide
cacggcaacgcuacaauca

SEQ ID NO: 1095921 - RNA, 19 nt, Artificial Sequence
  Description of Artificial Sequence: Synthetic oligonucleotide
caauugaccgacaguuguc

SEQ ID NO: 1095922 - RNA, 19 nt, Artificial Sequence
  Description of Artificial Sequence: Synthetic oligonucleotide
cuccaauguaugagagagg

SEQ ID NO: 1095923 - RNA, 19 nt, Artificial Sequence
  Description of Artificial Sequence: Synthetic oligonucleotide
uguuaucgcuuaguucaag

SEQ ID NO: 1095924 - RNA, 19 nt, Artificial Sequence
  Description of Artificial Sequence: Synthetic oligonucleotide
uaacuuugguaaguucgca

SEQ ID NO: 1095925 - RNA, 19 nt, Artificial Sequence
  Description of Artificial Sequence: Synthetic oligonucleotide
auguaugagagagggaaaa

SEQ ID NO: 1095926 - RNA, 19 nt, Artificial Sequence
  Description of Artificial Sequence: Synthetic oligonucleotide
ucgcuucugacuccuuucu

SEQ ID NO: 1095927 - RNA, 19 nt, Artificial Sequence
  Description of Artificial Sequence: Synthetic oligonucleotide
ugcuccaauguaugagaga

SEQ ID NO: 1095928 - RNA, 19 nt, Artificial Sequence
  Description of Artificial Sequence: Synthetic oligonucleotide
aauggaggugaggccuacg

SEQ ID NO: 1095929 - RNA, 19 nt, Artificial Sequence
  Description of Artificial Sequence: Synthetic oligonucleotide
agccuucaacaucggaguc

SEQ ID NO: 1095930 - RNA, 19 nt, Artificial Sequence
  Description of Artificial Sequence: Synthetic oligonucleotide
agauucuguuaucgcuuag

SEQ ID NO: 1095931 - RNA, 19 nt, Artificial Sequence
  Description of Artificial Sequence: Synthetic oligonucleotide
ugaggccuuugauuuugcc

SEQ ID NO: 1095932 - RNA, 19 nt, Artificial Sequence
  Description of Artificial Sequence: Synthetic oligonucleotide
accagcggaauucaaucaa

SEQ ID NO: 1095933 - RNA, 19 nt, Artificial Sequence
  Description of Artificial Sequence: Synthetic oligonucleotide
acggccgcgcguuuaggac

SEQ ID NO: 1095934 - RNA, 19 nt, Artificial Sequence
  Description of Artificial Sequence: Synthetic oligonucleotide
guagccaucgagguaugug

SEQ ID NO: 1095935 - RNA, 19 nt, Artificial Sequence
  Description of Artificial Sequence: Synthetic oligonucleotide
caaaauacgccuuuagguu

SEQ ID NO: 1095936 - RNA, 19 nt, Artificial Sequence
  Description of Artificial Sequence: Synthetic oligonucleotide
aggccuacguugauuguac

SEQ ID NO: 1095937 - RNA, 19 nt, Artificial Sequence
  Description of Artificial Sequence: Synthetic oligonucleotide
accgacaguuguccaggac

SEQ ID NO: 1095938 - RNA, 19 nt, Artificial Sequence
  Description of Artificial Sequence: Synthetic oligonucleotide
uaaguucgcaauggaggug

SEQ ID NO: 1095939 - RNA, 19 nt, Artificial Sequence
  Description of Artificial Sequence: Synthetic oligonucleotide
agaccacaugaaccagaac

SEQ ID NO: 1095940 - RNA, 19 nt, Artificial Sequence
  Description of Artificial Sequence: Synthetic oligonucleotide
ccgacaguuguccaggacc

SEQ ID NO: 1095941 - RNA, 19 nt, Artificial Sequence
  Description of Artificial Sequence: Synthetic oligonucleotide
gucccacucaguaagaaaa

SEQ ID NO: 1095942 - RNA, 19 nt, Artificial Sequence
  Description of Artificial Sequence: Synthetic oligonucleotide
uuuucucgguagucauuca

SEQ ID NO: 1095943 - RNA, 19 nt, Artificial Sequence
  Description of Artificial Sequence: Synthetic oligonucleotide
ugcauuccuuuuccgugcu

SEQ ID NO: 1095944 - RNA, 19 nt, Artificial Sequence
  Description of Artificial Sequence: Synthetic oligonucleotide
aggauccugcaccagcgga

SEQ ID NO: 1095945 - RNA, 19 nt, Artificial Sequence
  Description of Artificial Sequence: Synthetic oligonucleotide
auugaccgacaguugucca

SEQ ID NO: 1095946 - RNA, 19 nt, Artificial Sequence
  Description of Artificial Sequence: Synthetic oligonucleotide
aaacacuugcuuggugcgu

SEQ ID NO: 1095947 - RNA, 19 nt, Artificial Sequence
  Description of Artificial Sequence: Synthetic oligonucleotide
cucauucccacggcaacgc

SEQ ID NO: 1095948 - RNA, 19 nt, Artificial Sequence
  Description of Artificial Sequence: Synthetic oligonucleotide
gcggaauucaaucaauaaa

SEQ ID NO: 1095949 - RNA, 19 nt, Artificial Sequence
  Description of Artificial Sequence: Synthetic oligonucleotide
aaccccgaacccacggccg

SEQ ID NO: 1095950 - RNA, 19 nt, Artificial Sequence
  Description of Artificial Sequence: Synthetic oligonucleotide
agucccacucaguaagaaa

SEQ ID NO: 1095951 - RNA, 19 nt, Artificial Sequence
  Description of Artificial Sequence: Synthetic oligonucleotide
cuucaauugaccgacaguu

SEQ ID NO: 1095952 - RNA, 19 nt, Artificial Sequence
  Description of Artificial Sequence: Synthetic oligonucleotide
cucucauucccacggcaac

SEQ ID NO: 1095953 - RNA, 19 nt, Artificial Sequence
  Description of Artificial Sequence: Synthetic oligonucleotide
cugagauucuguuaucgcu

SEQ ID NO: 1095954 - RNA, 19 nt, Artificial Sequence
  Description of Artificial Sequence: Synthetic oligonucleotide
accccgaacccacggccgc

SEQ ID NO: 1095955 - RNA, 19 nt, Artificial Sequence
  Description of Artificial Sequence: Synthetic oligonucleotide
uuguugccacuuaaauuua

SEQ ID NO: 1095956 - RNA, 19 nt, Artificial Sequence
  Description of Artificial Sequence: Synthetic oligonucleotide
uccgugcuccaauguauga

SEQ ID NO: 1095957 - RNA, 19 nt, Artificial Sequence
  Description of Artificial Sequence: Synthetic oligonucleotide
cuuccccaucauuguaacc

SEQ ID NO: 1095958 - RNA, 19 nt, Artificial Sequence
  Description of Artificial Sequence: Synthetic oligonucleotide
uccugcaccagcggaauuc

SEQ ID NO: 1095959 - RNA, 19 nt, Artificial Sequence
  Description of Artificial Sequence: Synthetic oligonucleotide
ggaugugggacauaccaaa

SEQ ID NO: 1095960 - RNA, 19 nt, Artificial Sequence
  Description of Artificial Sequence: Synthetic oligonucleotide
agccaucgagguaugugac

SEQ ID NO: 1095961 - RNA, 19 nt, Artificial Sequence
  Description of Artificial Sequence: Synthetic oligonucleotide
ucgcuuaguucaagcuucu

SEQ ID NO: 1095962 - RNA, 19 nt, Artificial Sequence
  Description of Artificial Sequence: Synthetic oligonucleotide
ccugagauucuguuaucgc

SEQ ID NO: 1095963 - RNA, 19 nt, Artificial Sequence
  Description of Artificial Sequence: Synthetic oligonucleotide
acacuuuuccccucucauu

SEQ ID NO: 1095964 - RNA, 19 nt, Artificial Sequence
  Description of Artificial Sequence: Synthetic oligonucleotide
uccacucacgguccucuuc

SEQ ID NO: 1095965 - RNA, 19 nt, Artificial Sequence
  Description of Artificial Sequence: Synthetic oligonucleotide
acaucagagggcguccugu

SEQ ID NO: 1095966 - RNA, 19 nt, Artificial Sequence
  Description of Artificial Sequence: Synthetic oligonucleotide
gucaggggccuccuuguug

SEQ ID NO: 1095967 - RNA, 19 nt, Artificial Sequence
  Description of Artificial Sequence: Synthetic oligonucleotide
ggcucuauugugcugaggu

SEQ ID NO: 1095968 - RNA, 19 nt, Artificial Sequence
  Description of Artificial Sequence: Synthetic oligonucleotide
gauucuguuaucgcuuagu

SEQ ID NO: 1095969 - RNA, 19 nt, Artificial Sequence
  Description of Artificial Sequence: Synthetic oligonucleotide
gugcuccaauguaugagag

SEQ ID NO: 1095970 - RNA, 19 nt, Artificial Sequence
  Description of Artificial Sequence: Synthetic oligonucleotide
caaacccgcgugcugggug

SEQ ID NO: 1095971 - RNA, 19 nt, Artificial Sequence
  Description of Artificial Sequence: Synthetic oligonucleotide
aacggggcugugagucacc

SEQ ID NO: 1095972 - RNA, 19 nt, Artificial Sequence
  Description of Artificial Sequence: Synthetic oligonucleotide
ccgaaaggaaacagcauuc

SEQ ID NO: 1095973 - RNA, 19 nt, Artificial Sequence
  Description of Artificial Sequence: Synthetic oligonucleotide
agggcguccuguuccgcag

SEQ ID NO: 1095974 - RNA, 19 nt, Artificial Sequence
  Description of Artificial Sequence: Synthetic oligonucleotide
cuacguugauuguacuuaa

SEQ ID NO: 1095975 - RNA, 19 nt, Artificial Sequence
  Description of Artificial Sequence: Synthetic oligonucleotide
cucuauugugcugaggucu

SEQ ID NO: 1095976 - RNA, 19 nt, Artificial Sequence
  Description of Artificial Sequence: Synthetic oligonucleotide
ugggcauauucaucguauu

SEQ ID NO: 1095977 - RNA, 19 nt, Artificial Sequence
  Description of Artificial Sequence: Synthetic oligonucleotide
ccuuuagguugcuauuuac

SEQ ID NO: 1095978 - RNA, 19 nt, Artificial Sequence
  Description of Artificial Sequence: Synthetic oligonucleotide
gcaccagcggaauucaauc

SEQ ID NO: 1095979 - RNA, 19 nt, Artificial Sequence
  Description of Artificial Sequence: Synthetic oligonucleotide
guagucauucagguugguc

SEQ ID NO: 1095980 - RNA, 19 nt, Artificial Sequence
  Description of Artificial Sequence: Synthetic oligonucleotide
uggggaugugggacauacc

SEQ ID NO: 1095981 - RNA, 19 nt, Artificial Sequence
  Description of Artificial Sequence: Synthetic oligonucleotide
gggcauauucaucguauuc

SEQ ID NO: 1095982 - RNA, 19 nt, Artificial Sequence
  Description of Artificial Sequence: Synthetic oligonucleotide
gaugugggacauaccaaaa

SEQ ID NO: 1095983 - RNA, 19 nt, Artificial Sequence
  Description of Artificial Sequence: Synthetic oligonucleotide
ggucuuuguacagaugaga

SEQ ID NO: 1095984 - RNA, 19 nt, Artificial Sequence
  Description of Artificial Sequence: Synthetic oligonucleotide
uggaggugaggccuacguu

SEQ ID NO: 1095985 - RNA, 19 nt, Artificial Sequence
  Description of Artificial Sequence: Synthetic oligonucleotide
cacgucacuuguaaagcaa

SEQ ID NO: 1095986 - RNA, 19 nt, Artificial Sequence
  Description of Artificial Sequence: Synthetic oligonucleotide
cucucucucucugcagagg

SEQ ID NO: 1095987 - RNA, 19 nt, Artificial Sequence
  Description of Artificial Sequence: Synthetic oligonucleotide
acagcacgucacuuguaaa

SEQ ID NO: 1095988 - RNA, 19 nt, Artificial Sequence
  Description of Artificial Sequence: Synthetic oligonucleotide
gcgcguuuaggacuugaag

SEQ ID NO: 1095989 - RNA, 19 nt, Artificial Sequence
  Description of Artificial Sequence: Synthetic oligonucleotide
cacuagcugggcauauuca

SEQ ID NO: 1095990 - RNA, 19 nt, Artificial Sequence
  Description of Artificial Sequence: Synthetic oligonucleotide
guucgcaauggaggugagg

SEQ ID NO: 1095991 - RNA, 19 nt, Artificial Sequence
  Description of Artificial Sequence: Synthetic oligonucleotide
gcuauuuacaaacccgcgu

SEQ ID NO: 1095992 - RNA, 19 nt, Artificial Sequence
  Description of Artificial Sequence: Synthetic oligonucleotide
gcauuuacggggacaaaac

SEQ ID NO: 1095993 - RNA, 19 nt, Artificial Sequence
  Description of Artificial Sequence: Synthetic oligonucleotide
ccuucaacaucggagucag

SEQ ID NO: 1095994 - RNA, 19 nt, Artificial Sequence
  Description of Artificial Sequence: Synthetic oligonucleotide
ugaggccuacguugauugu

SEQ ID NO: 1095995 - RNA, 19 nt, Artificial Sequence
  Description of Artificial Sequence: Synthetic oligonucleotide
uuccccaaauagguuaauu

SEQ ID NO: 1095996 - RNA, 19 nt, Artificial Sequence
  Description of Artificial Sequence: Synthetic oligonucleotide
ggcaacgcuacaaucagaa

SEQ ID NO: 1095997 - RNA, 19 nt, Artificial Sequence
  Description of Artificial Sequence: Synthetic oligonucleotide
gaggugaggccuacguuga

SEQ ID NO: 1095998 - RNA, 19 nt, Artificial Sequence
  Description of Artificial Sequence: Synthetic oligonucleotide
ggugcguacuaagcuauug

SEQ ID NO: 1095999 - RNA, 19 nt, Artificial Sequence
  Description of Artificial Sequence: Synthetic oligonucleotide
caaauagguuaauuccccu

SEQ ID NO: 1096000 - RNA, 19 nt, Artificial Sequence
  Description of Artificial Sequence: Synthetic oligonucleotide
cccugagauucuguuaucg

SEQ ID NO: 1096001 - RNA, 19 nt, Artificial Sequence
  Description of Artificial Sequence: Synthetic oligonucleotide
augagacacagggugggaa

SEQ ID NO: 1096002 - RNA, 19 nt, Artificial Sequence
  Description of Artificial Sequence: Synthetic oligonucleotide
aggagcuugaacacauuuu

SEQ ID NO: 1096003 - RNA, 19 nt, Artificial Sequence
  Description of Artificial Sequence: Synthetic oligonucleotide
caccagcggaauucaauca

SEQ ID NO: 1096004 - RNA, 19 nt, Artificial Sequence
  Description of Artificial Sequence: Synthetic oligonucleotide
aacccgcgugcugggugcc

SEQ ID NO: 1096005 - RNA, 19 nt, Artificial Sequence
  Description of Artificial Sequence: Synthetic oligonucleotide
gaacggggcugugagucac

SEQ ID NO: 1096006 - RNA, 19 nt, Artificial Sequence
  Description of Artificial Sequence: Synthetic oligonucleotide
ccauauccaucucucgcgc

SEQ ID NO: 1096007 - RNA, 19 nt, Artificial Sequence
  Description of Artificial Sequence: Synthetic oligonucleotide
guacuaagcuauugcauuu

SEQ ID NO: 1096008 - RNA, 19 nt, Artificial Sequence
  Description of Artificial Sequence: Synthetic oligonucleotide
agcucuaaaugaauccguu

SEQ ID NO: 1096009 - RNA, 19 nt, Artificial Sequence
  Description of Artificial Sequence: Synthetic oligonucleotide
cuucgcccucaucuucggg

SEQ ID NO: 1096010 - RNA, 19 nt, Artificial Sequence
  Description of Artificial Sequence: Synthetic oligonucleotide
caucgagguaugugaccug

SEQ ID NO: 1096011 - RNA, 19 nt, Artificial Sequence
  Description of Artificial Sequence: Synthetic oligonucleotide
aauacgccuuuagguugcu

SEQ ID NO: 1096012 - RNA, 19 nt, Artificial Sequence
  Description of Artificial Sequence: Synthetic oligonucleotide
uccuguuccgcagcucuaa

SEQ ID NO: 1096013 - RNA, 19 nt, Artificial Sequence
  Description of Artificial Sequence: Synthetic oligonucleotide
ggacaccgaaaggaaacag

SEQ ID NO: 1096014 - RNA, 19 nt, Artificial Sequence
  Description of Artificial Sequence: Synthetic oligonucleotide
cuucaacaucggagucagg

SEQ ID NO: 1096015 - RNA, 19 nt, Artificial Sequence
  Description of Artificial Sequence: Synthetic oligonucleotide
cguugauuguacuuaagaa

SEQ ID NO: 1096016 - RNA, 19 nt, Artificial Sequence
  Description of Artificial Sequence: Synthetic oligonucleotide
gaggccuacguugauugua

SEQ ID NO: 1096017 - RNA, 19 nt, Artificial Sequence
  Description of Artificial Sequence: Synthetic oligonucleotide
ucucgcgcucucucucucu

SEQ ID NO: 1096018 - RNA, 19 nt, Artificial Sequence
  Description of Artificial Sequence: Synthetic oligonucleotide
cucgcgcucucucucucug

SEQ ID NO: 1096019 - RNA, 19 nt, Artificial Sequence
  Description of Artificial Sequence: Synthetic oligonucleotide
guggcucuauugugcugag

SEQ ID NO: 1096020 - RNA, 19 nt, Artificial Sequence
  Description of Artificial Sequence: Synthetic oligonucleotide
acgccuuuagguugcuauu

SEQ ID NO: 1096021 - RNA, 19 nt, Artificial Sequence
  Description of Artificial Sequence: Synthetic oligonucleotide
ucguagccaucgagguaug

SEQ ID NO: 1096022 - RNA, 19 nt, Artificial Sequence
  Description of Artificial Sequence: Synthetic oligonucleotide
acgucacuuguaaagcaau

SEQ ID NO: 1096023 - RNA, 19 nt, Artificial Sequence
  Description of Artificial Sequence: Synthetic oligonucleotide
agggugggaaacagcacgu

SEQ ID NO: 1096024 - RNA, 19 nt, Artificial Sequence
  Description of Artificial Sequence: Synthetic oligonucleotide
ucccacggcaacgcuacaa

SEQ ID NO: 1096025 - RNA, 19 nt, Artificial Sequence
  Description of Artificial Sequence: Synthetic oligonucleotide
gcucucucucucugcagag

SEQ ID NO: 1096026 - RNA, 19 nt, Artificial Sequence
  Description of Artificial Sequence: Synthetic oligonucleotide
uucucaagggugggagaaa

SEQ ID NO: 1096027 - RNA, 19 nt, Artificial Sequence
  Description of Artificial Sequence: Synthetic oligonucleotide
gauggggaauguccccaaa

SEQ ID NO: 1096028 - RNA, 19 nt, Artificial Sequence
  Description of Artificial Sequence: Synthetic oligonucleotide
gccaucgagguaugugacc

SEQ ID NO: 1096029 - RNA, 19 nt, Artificial Sequence
  Description of Artificial Sequence: Synthetic oligonucleotide
gggugccucuagcagagac

SEQ ID NO: 1096030 - RNA, 19 nt, Artificial Sequence
  Description of Artificial Sequence: Synthetic oligonucleotide
cacaucagagggcguccug

SEQ ID NO: 1096031 - RNA, 19 nt, Artificial Sequence
  Description of Artificial Sequence: Synthetic oligonucleotide
cagcggaauucaaucaaua

SEQ ID NO: 1096032 - RNA, 19 nt, Artificial Sequence
  Description of Artificial Sequence: Synthetic oligonucleotide
cauucccacggcaacgcua

SEQ ID NO: 1096033 - RNA, 19 nt, Artificial Sequence
  Description of Artificial Sequence: Synthetic oligonucleotide
ucgcgcucucucucucugc

SEQ ID NO: 1096034 - RNA, 19 nt, Artificial Sequence
  Description of Artificial Sequence: Synthetic oligonucleotide
gaugagagauggggaaugu

SEQ ID NO: 1096035 - RNA, 19 nt, Artificial Sequence
  Description of Artificial Sequence: Synthetic oligonucleotide
cuugcuuggugcguacuaa

SEQ ID NO: 1096036 - RNA, 19 nt, Artificial Sequence
  Description of Artificial Sequence: Synthetic oligonucleotide
ccacuagcugggcauauuc

SEQ ID NO: 1096037 - RNA, 19 nt, Artificial Sequence
  Description of Artificial Sequence: Synthetic oligonucleotide
gccugcggucacuucagag

SEQ ID NO: 1096038 - RNA, 19 nt, Artificial Sequence
  Description of Artificial Sequence: Synthetic oligonucleotide
gcacgucacuuguaaagca

SEQ ID NO: 1096039 - RNA, 19 nt, Artificial Sequence
  Description of Artificial Sequence: Synthetic oligonucleotide
ccuuuuccgugcuccaaug

SEQ ID NO: 1096040 - RNA, 19 nt, Artificial Sequence
  Description of Artificial Sequence: Synthetic oligonucleotide
ggguucucguuuucgcuuc

SEQ ID NO: 1096041 - RNA, 19 nt, Artificial Sequence
  Description of Artificial Sequence: Synthetic oligonucleotide
cagcucuaaaugaauccgu

SEQ ID NO: 1096042 - RNA, 19 nt, Artificial Sequence
  Description of Artificial Sequence: Synthetic oligonucleotide
cuguuaucgcuuaguucaa

SEQ ID NO: 1096043 - RNA, 19 nt, Artificial Sequence
  Description of Artificial Sequence: Synthetic oligonucleotide
uuuucgcuucugacuccuu

SEQ ID NO: 1096044 - RNA, 19 nt, Artificial Sequence
  Description of Artificial Sequence: Synthetic oligonucleotide
gaccgacaguuguccagga

SEQ ID NO: 1096045 - RNA, 19 nt, Artificial Sequence
  Description of Artificial Sequence: Synthetic oligonucleotide
uggugcguacuaagcuauu

SEQ ID NO: 1096046 - RNA, 19 nt, Artificial Sequence
  Description of Artificial Sequence: Synthetic oligonucleotide
caaagccugcugccaucug

SEQ ID NO: 1096047 - RNA, 19 nt, Artificial Sequence
  Description of Artificial Sequence: Synthetic oligonucleotide
ccuacguugauuguacuua

SEQ ID NO: 1096048 - RNA, 19 nt, Artificial Sequence
  Description of Artificial Sequence: Synthetic oligonucleotide
uuccacuagcugggcauau

SEQ ID NO: 1096049 - RNA, 19 nt, Artificial Sequence
  Description of Artificial Sequence: Synthetic oligonucleotide
ugccucuagcagagaccac

SEQ ID NO: 1096050 - RNA, 19 nt, Artificial Sequence
  Description of Artificial Sequence: Synthetic oligonucleotide
guuuucgcuucugacuccu

SEQ ID NO: 1096051 - RNA, 19 nt, Artificial Sequence
  Description of Artificial Sequence: Synthetic oligonucleotide
uugcauuuacggggacaaa

SEQ ID NO: 1096052 - RNA, 19 nt, Artificial Sequence
  Description of Artificial Sequence: Synthetic oligonucleotide
cuuuuccgugcuccaaugu

SEQ ID NO: 1096053 - RNA, 19 nt, Artificial Sequence
  Description of Artificial Sequence: Synthetic oligonucleotide
aguucgcaauggaggugag

SEQ ID NO: 1096054 - RNA, 19 nt, Artificial Sequence
  Description of Artificial Sequence: Synthetic oligonucleotide
ccgcagcucuaaaugaauc

SEQ ID NO: 1096055 - RNA, 19 nt, Artificial Sequence
  Description of Artificial Sequence: Synthetic oligonucleotide
ccgugcuccaauguaugag

SEQ ID NO: 1096056 - RNA, 19 nt, Artificial Sequence
  Description of Artificial Sequence: Synthetic oligonucleotide
guccccugagauucuguua

SEQ ID NO: 1096057 - RNA, 19 nt, Artificial Sequence
  Description of Artificial Sequence: Synthetic oligonucleotide
cacggccgcgcguuuagga

SEQ ID NO: 1096058 - RNA, 19 nt, Artificial Sequence
  Description of Artificial Sequence: Synthetic oligonucleotide
uaaacaggucuaggcucuu

SEQ ID NO: 1096059 - RNA, 19 nt, Artificial Sequence
  Description of Artificial Sequence: Synthetic oligonucleotide
cgugcuccaauguaugaga

SEQ ID NO: 1096060 - RNA, 19 nt, Artificial Sequence
  Description of Artificial Sequence: Synthetic oligonucleotide
ugcuuaagguucggacauu

SEQ ID NO: 1096061 - RNA, 19 nt, Artificial Sequence
  Description of Artificial Sequence: Synthetic oligonucleotide
uccacuagcugggcauauu

SEQ ID NO: 1096062 - RNA, 19 nt, Artificial Sequence
  Description of Artificial Sequence: Synthetic oligonucleotide
gaaccagaacggggcugug

SEQ ID NO: 1096063 - RNA, 19 nt, Artificial Sequence
  Description of Artificial Sequence: Synthetic oligonucleotide
agucaggggccuccuuguu

SEQ ID NO: 1096064 - RNA, 19 nt, Artificial Sequence
  Description of Artificial Sequence: Synthetic oligonucleotide
uucccacggcaacgcuaca

SEQ ID NO: 1096065 - RNA, 19 nt, Artificial Sequence
  Description of Artificial Sequence: Synthetic oligonucleotide
acaaacccgcgugcugggu

SEQ ID NO: 1096066 - RNA, 19 nt, Artificial Sequence
  Description of Artificial Sequence: Synthetic oligonucleotide
caggagcuugaacacauuu

SEQ ID NO: 1096067 - RNA, 19 nt, Artificial Sequence
  Description of Artificial Sequence: Synthetic oligonucleotide
cccugucguagccaucgag

SEQ ID NO: 1096068 - RNA, 19 nt, Artificial Sequence
  Description of Artificial Sequence: Synthetic oligonucleotide
aggugaggccuacguugau

SEQ ID NO: 1096069 - RNA, 19 nt, Artificial Sequence
  Description of Artificial Sequence: Synthetic oligonucleotide
agccugcggucacuucaga

SEQ ID NO: 1096070 - RNA, 19 nt, Artificial Sequence
  Description of Artificial Sequence: Synthetic oligonucleotide
guuggucaccucacaguua

SEQ ID NO: 1096071 - RNA, 19 nt, Artificial Sequence
  Description of Artificial Sequence: Synthetic oligonucleotide
caguacacuuuuccccucu

SEQ ID NO: 1096072 - RNA, 19 nt, Artificial Sequence
  Description of Artificial Sequence: Synthetic oligonucleotide
gcugggcauauucaucgua

SEQ ID NO: 1096073 - RNA, 19 nt, Artificial Sequence
  Description of Artificial Sequence: Synthetic oligonucleotide
cguuuucgcuucugacucc

SEQ ID NO: 1096074 - RNA, 19 nt, Artificial Sequence
  Description of Artificial Sequence: Synthetic oligonucleotide
ccaauguaugagagaggga

SEQ ID NO: 1096075 - RNA, 19 nt, Artificial Sequence
  Description of Artificial Sequence: Synthetic oligonucleotide
cagguccccugagauucug

SEQ ID NO: 1096076 - RNA, 19 nt, Artificial Sequence
  Description of Artificial Sequence: Synthetic oligonucleotide
cguacuaagcuauugcauu

SEQ ID NO: 1096077 - RNA, 19 nt, Artificial Sequence
  Description of Artificial Sequence: Synthetic oligonucleotide
cccaguacacuuuuccccu

SEQ ID NO: 1096078 - RNA, 19 nt, Artificial Sequence
  Description of Artificial Sequence: Synthetic oligonucleotide
cuguuccgcagcucuaaau

SEQ ID NO: 1096079 - RNA, 19 nt, Artificial Sequence
  Description of Artificial Sequence: Synthetic oligonucleotide
gcucuaaaugaauccguuu

SEQ ID NO: 1096080 - RNA, 19 nt, Artificial Sequence
  Description of Artificial Sequence: Synthetic oligonucleotide
auccugcaccagcggaauu

SEQ ID NO: 1096081 - RNA, 19 nt, Artificial Sequence
  Description of Artificial Sequence: Synthetic oligonucleotide
ccagugccaaaauacgccu

SEQ ID NO: 1096082 - RNA, 19 nt, Artificial Sequence
  Description of Artificial Sequence: Synthetic oligonucleotide
ccaguacacuuuuccccuc

SEQ ID NO: 1096083 - RNA, 19 nt, Artificial Sequence
  Description of Artificial Sequence: Synthetic oligonucleotide
gcgcucucucucucugcag

SEQ ID NO: 1096084 - RNA, 19 nt, Artificial Sequence
  Description of Artificial Sequence: Synthetic oligonucleotide
cucgguagucauucagguu

SEQ ID NO: 1096085 - RNA, 19 nt, Artificial Sequence
  Description of Artificial Sequence: Synthetic oligonucleotide
ccaucgagguaugugaccu

SEQ ID NO: 1096086 - RNA, 19 nt, Artificial Sequence
  Description of Artificial Sequence: Synthetic oligonucleotide
aacccacggccgcgcguuu

SEQ ID NO: 1096087 - RNA, 19 nt, Artificial Sequence
  Description of Artificial Sequence: Synthetic oligonucleotide
ggaggggauauggguaaaa

SEQ ID NO: 1096088 - RNA, 19 nt, Artificial Sequence
  Description of Artificial Sequence: Synthetic oligonucleotide
gggcguccuguuccgcagc

SEQ ID NO: 1096089 - RNA, 19 nt, Artificial Sequence
  Description of Artificial Sequence: Synthetic oligonucleotide
gcguacuaagcuauugcau

SEQ ID NO: 1096090 - RNA, 19 nt, Artificial Sequence
  Description of Artificial Sequence: Synthetic oligonucleotide
cacccaccugguggaggcc

SEQ ID NO: 1096091 - RNA, 19 nt, Artificial Sequence
  Description of Artificial Sequence: Synthetic oligonucleotide
gggcugugagucacccacc

SEQ ID NO: 1096092 - RNA, 19 nt, Artificial Sequence
  Description of Artificial Sequence: Synthetic oligonucleotide
cauucacuaggaggagccu

SEQ ID NO: 1096093 - RNA, 19 nt, Artificial Sequence
  Description of Artificial Sequence: Synthetic oligonucleotide
auacgccuuuagguugcua

SEQ ID NO: 1096094 - RNA, 19 nt, Artificial Sequence
  Description of Artificial Sequence: Synthetic oligonucleotide
gccuacguugauuguacuu

SEQ ID NO: 1096095 - RNA, 19 nt, Artificial Sequence
  Description of Artificial Sequence: Synthetic oligonucleotide
gggugggaaacagcacguc

SEQ ID NO: 1096096 - RNA, 19 nt, Artificial Sequence
  Description of Artificial Sequence: Synthetic oligonucleotide
gguccccugagauucuguu

SEQ ID NO: 1096097 - RNA, 19 nt, Artificial Sequence
  Description of Artificial Sequence: Synthetic oligonucleotide
caucagagggcguccuguu

SEQ ID NO: 1096098 - RNA, 19 nt, Artificial Sequence
  Description of Artificial Sequence: Synthetic oligonucleotide
cccacggccgcgcguuuag

SEQ ID NO: 1096099 - RNA, 19 nt, Artificial Sequence
  Description of Artificial Sequence: Synthetic oligonucleotide
ccccuuagucauccucuuc

SEQ ID NO: 1096100 - RNA, 19 nt, Artificial Sequence
  Description of Artificial Sequence: Synthetic oligonucleotide
gcaaagccugcugccaucu

SEQ ID NO: 1096101 - RNA, 19 nt, Artificial Sequence
  Description of Artificial Sequence: Synthetic oligonucleotide
cgcucucucucucugcaga

SEQ ID NO: 1096102 - RNA, 19 nt, Artificial Sequence
  Description of Artificial Sequence: Synthetic oligonucleotide
cuucuccacucacgguccu

SEQ ID NO: 1096103 - RNA, 19 nt, Artificial Sequence
  Description of Artificial Sequence: Synthetic oligonucleotide
cccacucaguaagaaaaua

SEQ ID NO: 1096104 - RNA, 19 nt, Artificial Sequence
  Description of Artificial Sequence: Synthetic oligonucleotide
ccccugagauucuguuauc

SEQ ID NO: 1096105 - RNA, 19 nt, Artificial Sequence
  Description of Artificial Sequence: Synthetic oligonucleotide
ccagcggaauucaaucaau

SEQ ID NO: 1096106 - RNA, 19 nt, Artificial Sequence
  Description of Artificial Sequence: Synthetic oligonucleotide
cucaaaaguuuuggcucuu

SEQ ID NO: 1096107 - RNA, 19 nt, Artificial Sequence
  Description of Artificial Sequence: Synthetic oligonucleotide
ccgaacccacggccgcgcg

SEQ ID NO: 1096108 - RNA, 19 nt, Artificial Sequence
  Description of Artificial Sequence: Synthetic oligonucleotide
ggugaggccuacguugauu

SEQ ID NO: 1096109 - RNA, 19 nt, Artificial Sequence
  Description of Artificial Sequence: Synthetic oligonucleotide
ggccuacguugauuguacu

SEQ ID NO: 1096110 - RNA, 19 nt, Artificial Sequence
  Description of Artificial Sequence: Synthetic oligonucleotide
ccacuuccccaucauugua

SEQ ID NO: 1096111 - RNA, 19 nt, Artificial Sequence
  Description of Artificial Sequence: Synthetic oligonucleotide
ggcguccuguuccgcagcu

SEQ ID NO: 1096112 - RNA, 19 nt, Artificial Sequence
  Description of Artificial Sequence: Synthetic oligonucleotide
cgcgcucucucucucugca

SEQ ID NO: 1096113 - RNA, 19 nt, Artificial Sequence
  Description of Artificial Sequence: Synthetic oligonucleotide
acccacggccgcgcguuua

SEQ ID NO: 1096114 - RNA, 19 nt, Artificial Sequence
  Description of Artificial Sequence: Synthetic oligonucleotide
ccuguuccgcagcucuaaa

SEQ ID NO: 1096115 - RNA, 19 nt, Artificial Sequence
  Description of Artificial Sequence: Synthetic oligonucleotide
cguuuaggacuugaaggcu

SEQ ID NO: 1096116 - RNA, 19 nt, Artificial Sequence
  Description of Artificial Sequence: Synthetic oligonucleotide
acccgcgugcugggugccu

SEQ ID NO: 1096117 - RNA, 19 nt, Artificial Sequence
  Description of Artificial Sequence: Synthetic oligonucleotide
ccacggccgcgcguuuagg

SEQ ID NO: 1096118 - RNA, 19 nt, Artificial Sequence
  Description of Artificial Sequence: Synthetic oligonucleotide
cgcgcguuuaggacuugaa

SEQ ID NO: 1096119 - RNA, 19 nt, Artificial Sequence
  Description of Artificial Sequence: Synthetic oligonucleotide
cggcaacgcuacaaucaga

SEQ ID NO: 1096120 - RNA, 19 nt, Artificial Sequence
  Description of Artificial Sequence: Synthetic oligonucleotide
ccagaacggggcugugagu

SEQ ID NO: 1096121 - RNA, 19 nt, Artificial Sequence
  Description of Artificial Sequence: Synthetic oligonucleotide
cuccacucacgguccucuu

SEQ ID NO: 1096122 - RNA, 19 nt, Artificial Sequence
  Description of Artificial Sequence: Synthetic oligonucleotide
cggguucucguuuucgcuu

SEQ ID NO: 1096123 - RNA, 19 nt, Artificial Sequence
  Description of Artificial Sequence: Synthetic oligonucleotide
ccgcgcguuuaggacuuga

SEQ ID NO: 1096124 - RNA, 19 nt, Artificial Sequence
  Description of Artificial Sequence: Synthetic oligonucleotide
ggccgcgcguuuaggacuu

SEQ ID NO: 1096125 - RNA, 19 nt, Artificial Sequence
  Description of Artificial Sequence: Synthetic oligonucleotide
cggccgcgcguuuaggacu

SEQ ID NO: 1096126 - RNA, 19 nt, Artificial Sequence
  Description of Artificial Sequence: Synthetic oligonucleotide
gccgcgcguuuaggacuug

SEQ ID NO: 1096127 - RNA, 19 nt, Artificial Sequence
  Description of Artificial Sequence: Synthetic oligonucleotide
cguagccaucgagguaugu

SEQ ID NO: 1096128 - RNA, 19 nt, Artificial Sequence
  Description of Artificial Sequence: Synthetic oligonucleotide
cgcgugcugggugccucua

SEQ ID NO: 1096129 - RNA, 19 nt, Artificial Sequence
  Description of Artificial Sequence: Synthetic oligonucleotide
aaaguuuaccgcugaaucc

SEQ ID NO: 1096130 - RNA, 19 nt, Artificial Sequence
  Description of Artificial Sequence: Synthetic oligonucleotide
gaacgauugaccuuggagg

SEQ ID NO: 1096131 - RNA, 19 nt, Artificial Sequence
  Description of Artificial Sequence: Synthetic oligonucleotide
guaucaaacaggaaaaugg

SEQ ID NO: 1096132 - RNA, 19 nt, Artificial Sequence
  Description of Artificial Sequence: Synthetic oligonucleotide
gaugcuagccuuuaaauac

SEQ ID NO: 1096133 - RNA, 19 nt, Artificial Sequence
  Description of Artificial Sequence: Synthetic oligonucleotide
uuuuccgucaaccggaaag

SEQ ID NO: 1096134 - RNA, 19 nt, Artificial Sequence
  Description of Artificial Sequence: Synthetic oligonucleotide
aacgauugaccuuggaggg

SEQ ID NO: 1096135 - RNA, 19 nt, Artificial Sequence
  Description of Artificial Sequence: Synthetic oligonucleotide
guugacacaguuuggaugg

SEQ ID NO: 1096136 - RNA, 19 nt, Artificial Sequence
  Description of Artificial Sequence: Synthetic oligonucleotide
aauaaguuaguucacuuuu

SEQ ID NO: 1096137 - RNA, 19 nt, Artificial Sequence
  Description of Artificial Sequence: Synthetic oligonucleotide
aaauaacagauggaucucc

SEQ ID NO: 1096138 - RNA, 19 nt, Artificial Sequence
  Description of Artificial Sequence: Synthetic oligonucleotide
uggauggcggaucagauag

SEQ ID NO: 1096139 - RNA, 19 nt, Artificial Sequence
  Description of Artificial Sequence: Synthetic oligonucleotide
uuuguaucaaacaggaaaa

SEQ ID NO: 1096140 - RNA, 19 nt, Artificial Sequence
  Description of Artificial Sequence: Synthetic oligonucleotide
uaaaguuuaccgcugaauc

SEQ ID NO: 1096141 - RNA, 19 nt, Artificial Sequence
  Description of Artificial Sequence: Synthetic oligonucleotide
uaguacauacaucagaaaa

SEQ ID NO: 1096142 - RNA, 19 nt, Artificial Sequence
  Description of Artificial Sequence: Synthetic oligonucleotide
aagaaagugaugcguggcg

SEQ ID NO: 1096143 - RNA, 19 nt, Artificial Sequence
  Description of Artificial Sequence: Synthetic oligonucleotide
auggucuaaaguuuaccgc

SEQ ID NO: 1096144 - RNA, 19 nt, Artificial Sequence
  Description of Artificial Sequence: Synthetic oligonucleotide
accuucaggaaccauuacc

SEQ ID NO: 1096145 - RNA, 19 nt, Artificial Sequence
  Description of Artificial Sequence: Synthetic oligonucleotide
aucagauaguuguccaucc

SEQ ID NO: 1096146 - RNA, 19 nt, Artificial Sequence
  Description of Artificial Sequence: Synthetic oligonucleotide
aggaaaaugguuccauugg

SEQ ID NO: 1096147 - RNA, 19 nt, Artificial Sequence
  Description of Artificial Sequence: Synthetic oligonucleotide
ucaacagaacgauugaccu

SEQ ID NO: 1096148 - RNA, 19 nt, Artificial Sequence
  Description of Artificial Sequence: Synthetic oligonucleotide
ugcuguaacaguucgaggu

SEQ ID NO: 1096149 - RNA, 19 nt, Artificial Sequence
  Description of Artificial Sequence: Synthetic oligonucleotide
agaacgauugaccuuggag

SEQ ID NO: 1096150 - RNA, 19 nt, Artificial Sequence
  Description of Artificial Sequence: Synthetic oligonucleotide
uaucaaacaggaaaauggu

SEQ ID NO: 1096151 - RNA, 19 nt, Artificial Sequence
  Description of Artificial Sequence: Synthetic oligonucleotide
gugacguugacacaguuug

SEQ ID NO: 1096152 - RNA, 19 nt, Artificial Sequence
  Description of Artificial Sequence: Synthetic oligonucleotide
uaauagguuucauagguaa

SEQ ID NO: 1096153 - RNA, 19 nt, Artificial Sequence
  Description of Artificial Sequence: Synthetic oligonucleotide
gaauuguacagggagguag

SEQ ID NO: 1096154 - RNA, 19 nt, Artificial Sequence
  Description of Artificial Sequence: Synthetic oligonucleotide
aaauaaguuaguucacuuu

SEQ ID NO: 1096155 - RNA, 19 nt, Artificial Sequence
  Description of Artificial Sequence: Synthetic oligonucleotide
cucaacagaacgauugacc

SEQ ID NO: 1096156 - RNA, 19 nt, Artificial Sequence
  Description of Artificial Sequence: Synthetic oligonucleotide
uggguuaacagugucaucu

SEQ ID NO: 1096157 - RNA, 19 nt, Artificial Sequence
  Description of Artificial Sequence: Synthetic oligonucleotide
uuuuguaauacugugggua

SEQ ID NO: 1096158 - RNA, 19 nt, Artificial Sequence
  Description of Artificial Sequence: Synthetic oligonucleotide
cuaaagcacuuucaaagcc

SEQ ID NO: 1096159 - RNA, 19 nt, Artificial Sequence
  Description of Artificial Sequence: Synthetic oligonucleotide
uuuguaauacuguggguac

SEQ ID NO: 1096160 - RNA, 19 nt, Artificial Sequence
  Description of Artificial Sequence: Synthetic oligonucleotide
uggucuaaaguuuaccgcu

SEQ ID NO: 1096161 - RNA, 19 nt, Artificial Sequence
  Description of Artificial Sequence: Synthetic oligonucleotide
uuaaauaaguuaguucacu

SEQ ID NO: 1096162 - RNA, 19 nt, Artificial Sequence
  Description of Artificial Sequence: Synthetic oligonucleotide
uacgcuuuggccaugcagu

SEQ ID NO: 1096163 - RNA, 19 nt, Artificial Sequence
  Description of Artificial Sequence: Synthetic oligonucleotide
uguggguacgcuuuggcca

SEQ ID NO: 1096164 - RNA, 19 nt, Artificial Sequence
  Description of Artificial Sequence: Synthetic oligonucleotide
accauuacccgguaauagg

SEQ ID NO: 1096165 - RNA, 19 nt, Artificial Sequence
  Description of Artificial Sequence: Synthetic oligonucleotide
uggguauucaucucgugug

SEQ ID NO: 1096166 - RNA, 19 nt, Artificial Sequence
  Description of Artificial Sequence: Synthetic oligonucleotide
ugaacauacaccugggcau

SEQ ID NO: 1096167 - RNA, 19 nt, Artificial Sequence
  Description of Artificial Sequence: Synthetic oligonucleotide
uccaugucugaacauacac

SEQ ID NO: 1096168 - RNA, 19 nt, Artificial Sequence
  Description of Artificial Sequence: Synthetic oligonucleotide
uacaauacugccuuugcua

SEQ ID NO: 1096169 - RNA, 19 nt, Artificial Sequence
  Description of Artificial Sequence: Synthetic oligonucleotide
auaacagauggaucuccac

SEQ ID NO: 1096170 - RNA, 19 nt, Artificial Sequence
  Description of Artificial Sequence: Synthetic oligonucleotide
aucaugcuaagauucggag

SEQ ID NO: 1096171 - RNA, 19 nt, Artificial Sequence
  Description of Artificial Sequence: Synthetic oligonucleotide
gcuaaacaccaucugaugg

SEQ ID NO: 1096172 - RNA, 19 nt, Artificial Sequence
  Description of Artificial Sequence: Synthetic oligonucleotide
uucgaggucucuucugugg

SEQ ID NO: 1096173 - RNA, 19 nt, Artificial Sequence
  Description of Artificial Sequence: Synthetic oligonucleotide
uggcggaucagauaguugu

SEQ ID NO: 1096174 - RNA, 19 nt, Artificial Sequence
  Description of Artificial Sequence: Synthetic oligonucleotide
accauugacagaaauaaca

SEQ ID NO: 1096175 - RNA, 19 nt, Artificial Sequence
  Description of Artificial Sequence: Synthetic oligonucleotide
caccuagugacguugacac

SEQ ID NO: 1096176 - RNA, 19 nt, Artificial Sequence
  Description of Artificial Sequence: Synthetic oligonucleotide
cuuugcuauacagaugugc

SEQ ID NO: 1096177 - RNA, 19 nt, Artificial Sequence
  Description of Artificial Sequence: Synthetic oligonucleotide
uuuugaccaaucccagaag

SEQ ID NO: 1096178 - RNA, 19 nt, Artificial Sequence
  Description of Artificial Sequence: Synthetic oligonucleotide
ucaucucgugugaugauca

SEQ ID NO: 1096179 - RNA, 19 nt, Artificial Sequence
  Description of Artificial Sequence: Synthetic oligonucleotide
uaaauaaguuaguucacuu

SEQ ID NO: 1096180 - RNA, 19 nt, Artificial Sequence
  Description of Artificial Sequence: Synthetic oligonucleotide
aaggugcucgagcuggcac

SEQ ID NO: 1096181 - RNA, 19 nt, Artificial Sequence
  Description of Artificial Sequence: Synthetic oligonucleotide
aaccauuacccgguaauag

SEQ ID NO: 1096182 - RNA, 19 nt, Artificial Sequence
  Description of Artificial Sequence: Synthetic oligonucleotide
guugauaccccgaagcacc

SEQ ID NO: 1096183 - RNA, 19 nt, Artificial Sequence
  Description of Artificial Sequence: Synthetic oligonucleotide
ucucccuuuuguaucaaac

SEQ ID NO: 1096184 - RNA, 19 nt, Artificial Sequence
  Description of Artificial Sequence: Synthetic oligonucleotide
ugcuauacagaugugcugu

SEQ ID NO: 1096185 - RNA, 19 nt, Artificial Sequence
  Description of Artificial Sequence: Synthetic oligonucleotide
uucggaguguuccaugucu

SEQ ID NO: 1096186 - RNA, 19 nt, Artificial Sequence
  Description of Artificial Sequence: Synthetic oligonucleotide
uguaauacuguggguacgc

SEQ ID NO: 1096187 - RNA, 19 nt, Artificial Sequence
  Description of Artificial Sequence: Synthetic oligonucleotide
acuguggguacgcuuuggc

SEQ ID NO: 1096188 - RNA, 19 nt, Artificial Sequence
  Description of Artificial Sequence: Synthetic oligonucleotide
aauagguuucauagguaag

SEQ ID NO: 1096189 - RNA, 19 nt, Artificial Sequence
  Description of Artificial Sequence: Synthetic oligonucleotide
ugaagucuguaccauugac

SEQ ID NO: 1096190 - RNA, 19 nt, Artificial Sequence
  Description of Artificial Sequence: Synthetic oligonucleotide
agauggaucuccacgcugc

SEQ ID NO: 1096191 - RNA, 19 nt, Artificial Sequence
  Description of Artificial Sequence: Synthetic oligonucleotide
ggaaaaugguuccauuggg

SEQ ID NO: 1096192 - RNA, 19 nt, Artificial Sequence
  Description of Artificial Sequence: Synthetic oligonucleotide
aaaugguuccauuggguua

SEQ ID NO: 1096193 - RNA, 19 nt, Artificial Sequence
  Description of Artificial Sequence: Synthetic oligonucleotide
aacaagaaugagaacgccu

SEQ ID NO: 1096194 - RNA, 19 nt, Artificial Sequence
  Description of Artificial Sequence: Synthetic oligonucleotide
ugaucaugcuaagauucgg

SEQ ID NO: 1096195 - RNA, 19 nt, Artificial Sequence
  Description of Artificial Sequence: Synthetic oligonucleotide
auggcccucugguugauac

SEQ ID NO: 1096196 - RNA, 19 nt, Artificial Sequence
  Description of Artificial Sequence: Synthetic oligonucleotide
ccuaauuauuaguacauac

SEQ ID NO: 1096197 - RNA, 19 nt, Artificial Sequence
  Description of Artificial Sequence: Synthetic oligonucleotide
caauucaaucaccuucagg

SEQ ID NO: 1096198 - RNA, 19 nt, Artificial Sequence
  Description of Artificial Sequence: Synthetic oligonucleotide
uagccuuuaaauacucuuc

SEQ ID NO: 1096199 - RNA, 19 nt, Artificial Sequence
  Description of Artificial Sequence: Synthetic oligonucleotide
aaagugaugcguggcgccg

SEQ ID NO: 1096200 - RNA, 19 nt, Artificial Sequence
  Description of Artificial Sequence: Synthetic oligonucleotide
gaaggugaagucuguacca

SEQ ID NO: 1096201 - RNA, 19 nt, Artificial Sequence
  Description of Artificial Sequence: Synthetic oligonucleotide
auggguauucaucucgugu

SEQ ID NO: 1096202 - RNA, 19 nt, Artificial Sequence
  Description of Artificial Sequence: Synthetic oligonucleotide
ccgguaauagguuucauag

SEQ ID NO: 1096203 - RNA, 19 nt, Artificial Sequence
  Description of Artificial Sequence: Synthetic oligonucleotide
guuuugaccaaucccagaa

SEQ ID NO: 1096204 - RNA, 19 nt, Artificial Sequence
  Description of Artificial Sequence: Synthetic oligonucleotide
uaggcccuaauuauuagua

SEQ ID NO: 1096205 - RNA, 19 nt, Artificial Sequence
  Description of Artificial Sequence: Synthetic oligonucleotide
gguagcauguucuguaaag

SEQ ID NO: 1096206 - RNA, 19 nt, Artificial Sequence
  Description of Artificial Sequence: Synthetic oligonucleotide
ugaccaaucccagaaguac

SEQ ID NO: 1096207 - RNA, 19 nt, Artificial Sequence
  Description of Artificial Sequence: Synthetic oligonucleotide
aggcccuaauuauuaguac

SEQ ID NO: 1096208 - RNA, 19 nt, Artificial Sequence
  Description of Artificial Sequence: Synthetic oligonucleotide
ugagguagcauguucugua

SEQ ID NO: 1096209 - RNA, 19 nt, Artificial Sequence
  Description of Artificial Sequence: Synthetic oligonucleotide
aauaacagauggaucucca

SEQ ID NO: 1096210 - RNA, 19 nt, Artificial Sequence
  Description of Artificial Sequence: Synthetic oligonucleotide
caaccggaaaggaacacug

SEQ ID NO: 1096211 - RNA, 19 nt, Artificial Sequence
  Description of Artificial Sequence: Synthetic oligonucleotide
uuaggcccuaauuauuagu

SEQ ID NO: 1096212 - RNA, 19 nt, Artificial Sequence
  Description of Artificial Sequence: Synthetic oligonucleotide
gaugcguggcgccggaccg

SEQ ID NO: 1096213 - RNA, 19 nt, Artificial Sequence
  Description of Artificial Sequence: Synthetic oligonucleotide
gguaagaucucacuguaca

SEQ ID NO: 1096214 - RNA, 19 nt, Artificial Sequence
  Description of Artificial Sequence: Synthetic oligonucleotide
auaggucccacugcagacc

SEQ ID NO: 1096215 - RNA, 19 nt, Artificial Sequence
  Description of Artificial Sequence: Synthetic oligonucleotide
auacaauacugccuuugcu

SEQ ID NO: 1096216 - RNA, 19 nt, Artificial Sequence
  Description of Artificial Sequence: Synthetic oligonucleotide
ugcauuccaccuagugacg

SEQ ID NO: 1096217 - RNA, 19 nt, Artificial Sequence
  Description of Artificial Sequence: Synthetic oligonucleotide
uuguaauacuguggguacg

SEQ ID NO: 1096218 - RNA, 19 nt, Artificial Sequence
  Description of Artificial Sequence: Synthetic oligonucleotide
ugauggucuaaaguuuacc

SEQ ID NO: 1096219 - RNA, 19 nt, Artificial Sequence
  Description of Artificial Sequence: Synthetic oligonucleotide
ugacguugacacaguuugg

SEQ ID NO: 1096220 - RNA, 19 nt, Artificial Sequence
  Description of Artificial Sequence: Synthetic oligonucleotide
aaccggaaaggaacacugc

SEQ ID NO: 1096221 - RNA, 19 nt, Artificial Sequence
  Description of Artificial Sequence: Synthetic oligonucleotide
augagaacgccugcacucc

SEQ ID NO: 1096222 - RNA, 19 nt, Artificial Sequence
  Description of Artificial Sequence: Synthetic oligonucleotide
aguucgaggucucuucugu

SEQ ID NO: 1096223 - RNA, 19 nt, Artificial Sequence
  Description of Artificial Sequence: Synthetic oligonucleotide
uuuggauggcggaucagau

SEQ ID NO: 1096224 - RNA, 19 nt, Artificial Sequence
  Description of Artificial Sequence: Synthetic oligonucleotide
gguaauagguuucauaggu

SEQ ID NO: 1096225 - RNA, 19 nt, Artificial Sequence
  Description of Artificial Sequence: Synthetic oligonucleotide
ucggcaugguuugucacgg

SEQ ID NO: 1096226 - RNA, 19 nt, Artificial Sequence
  Description of Artificial Sequence: Synthetic oligonucleotide
auuggguuaacagugucau

SEQ ID NO: 1096227 - RNA, 19 nt, Artificial Sequence
  Description of Artificial Sequence: Synthetic oligonucleotide
uuaguacauacaucagaaa

SEQ ID NO: 1096228 - RNA, 19 nt, Artificial Sequence
  Description of Artificial Sequence: Synthetic oligonucleotide
accggaaaggaacacugca

SEQ ID NO: 1096229 - RNA, 19 nt, Artificial Sequence
  Description of Artificial Sequence: Synthetic oligonucleotide
ugagaacgccugcacuccg

SEQ ID NO: 1096230 - RNA, 19 nt, Artificial Sequence
  Description of Artificial Sequence: Synthetic oligonucleotide
ucuaaaguuuaccgcugaa

SEQ ID NO: 1096231 - RNA, 19 nt, Artificial Sequence
  Description of Artificial Sequence: Synthetic oligonucleotide
aagucacggagugcucucc

SEQ ID NO: 1096232 - RNA, 19 nt, Artificial Sequence
  Description of Artificial Sequence: Synthetic oligonucleotide
cuuaggcccuaauuauuag

SEQ ID NO: 1096233 - RNA, 19 nt, Artificial Sequence
  Description of Artificial Sequence: Synthetic oligonucleotide
gucggcaugguuugucacg

SEQ ID NO: 1096234 - RNA, 19 nt, Artificial Sequence
  Description of Artificial Sequence: Synthetic oligonucleotide
uuaccgcugaaucccaaaa

SEQ ID NO: 1096235 - RNA, 19 nt, Artificial Sequence
  Description of Artificial Sequence: Synthetic oligonucleotide
gauggaucuccacgcugcg

SEQ ID NO: 1096236 - RNA, 19 nt, Artificial Sequence
  Description of Artificial Sequence: Synthetic oligonucleotide
guacgcuuuggccaugcag

SEQ ID NO: 1096237 - RNA, 19 nt, Artificial Sequence
  Description of Artificial Sequence: Synthetic oligonucleotide
cauaggucccacugcagac

SEQ ID NO: 1096238 - RNA, 19 nt, Artificial Sequence
  Description of Artificial Sequence: Synthetic oligonucleotide
ugagcacugacagucggca

SEQ ID NO: 1096239 - RNA, 19 nt, Artificial Sequence
  Description of Artificial Sequence: Synthetic oligonucleotide
cagaggccaacucggaucc

SEQ ID NO: 1096240 - RNA, 19 nt, Artificial Sequence
  Description of Artificial Sequence: Synthetic oligonucleotide
cauugacagaaauaacaga

SEQ ID NO: 1096241 - RNA, 19 nt, Artificial Sequence
  Description of Artificial Sequence: Synthetic oligonucleotide
acaguuuggauggcggauc

SEQ ID NO: 1096242 - RNA, 19 nt, Artificial Sequence
  Description of Artificial Sequence: Synthetic oligonucleotide
caagaaugagaacgccugc

SEQ ID NO: 1096243 - RNA, 19 nt, Artificial Sequence
  Description of Artificial Sequence: Synthetic oligonucleotide
ccagaaguacuaaugaauc

SEQ ID NO: 1096244 - RNA, 19 nt, Artificial Sequence
  Description of Artificial Sequence: Synthetic oligonucleotide
uuauuuccccucucgugcu

SEQ ID NO: 1096245 - RNA, 19 nt, Artificial Sequence
  Description of Artificial Sequence: Synthetic oligonucleotide
ugcucuccgaacucagcag

SEQ ID NO: 1096246 - RNA, 19 nt, Artificial Sequence
  Description of Artificial Sequence: Synthetic oligonucleotide
caagaaagugaugcguggc

SEQ ID NO: 1096247 - RNA, 19 nt, Artificial Sequence
  Description of Artificial Sequence: Synthetic oligonucleotide
auuacccgguaauagguuu

SEQ ID NO: 1096248 - RNA, 19 nt, Artificial Sequence
  Description of Artificial Sequence: Synthetic oligonucleotide
uggaucuccacgcugcguu

SEQ ID NO: 1096249 - RNA, 19 nt, Artificial Sequence
  Description of Artificial Sequence: Synthetic oligonucleotide
ucggaguguuccaugucug

SEQ ID NO: 1096250 - RNA, 19 nt, Artificial Sequence
  Description of Artificial Sequence: Synthetic oligonucleotide
uugaccaaucccagaagua

SEQ ID NO: 1096251 - RNA, 19 nt, Artificial Sequence
  Description of Artificial Sequence: Synthetic oligonucleotide
uaccccgaagcaccauugg

SEQ ID NO: 1096252 - RNA, 19 nt, Artificial Sequence
  Description of Artificial Sequence: Synthetic oligonucleotide
agcaccauugggugggaug

SEQ ID NO: 1096253 - RNA, 19 nt, Artificial Sequence
  Description of Artificial Sequence: Synthetic oligonucleotide
agcgauugcuuugaguucu

SEQ ID NO: 1096254 - RNA, 19 nt, Artificial Sequence
  Description of Artificial Sequence: Synthetic oligonucleotide
agcuuagccaugauggucu

SEQ ID NO: 1096255 - RNA, 19 nt, Artificial Sequence
  Description of Artificial Sequence: Synthetic oligonucleotide
ucgugugaugaucaugcua

SEQ ID NO: 1096256 - RNA, 19 nt, Artificial Sequence
  Description of Artificial Sequence: Synthetic oligonucleotide
ucaaccggaaaggaacacu

SEQ ID NO: 1096257 - RNA, 19 nt, Artificial Sequence
  Description of Artificial Sequence: Synthetic oligonucleotide
uuacccgguaauagguuuc

SEQ ID NO: 1096258 - RNA, 19 nt, Artificial Sequence
  Description of Artificial Sequence: Synthetic oligonucleotide
cuguggguacgcuuuggcc

SEQ ID NO: 1096259 - RNA, 19 nt, Artificial Sequence
  Description of Artificial Sequence: Synthetic oligonucleotide
agucacggagugcucuccg

SEQ ID NO: 1096260 - RNA, 19 nt, Artificial Sequence
  Description of Artificial Sequence: Synthetic oligonucleotide
ccauccuucccacauaggc

SEQ ID NO: 1096261 - RNA, 19 nt, Artificial Sequence
  Description of Artificial Sequence: Synthetic oligonucleotide
agauucggaguguuccaug

SEQ ID NO: 1096262 - RNA, 19 nt, Artificial Sequence
  Description of Artificial Sequence: Synthetic oligonucleotide
gacguugacacaguuugga

SEQ ID NO: 1096263 - RNA, 19 nt, Artificial Sequence
  Description of Artificial Sequence: Synthetic oligonucleotide
uuuaccgcugaaucccaaa

SEQ ID NO: 1096264 - RNA, 19 nt, Artificial Sequence
  Description of Artificial Sequence: Synthetic oligonucleotide
gaucaugcuaagauucgga

SEQ ID NO: 1096265 - RNA, 19 nt, Artificial Sequence
  Description of Artificial Sequence: Synthetic oligonucleotide
ugagugccuugacacuugc

SEQ ID NO: 1096266 - RNA, 19 nt, Artificial Sequence
  Description of Artificial Sequence: Synthetic oligonucleotide
uaauacuguggguacgcuu

SEQ ID NO: 1096267 - RNA, 19 nt, Artificial Sequence
  Description of Artificial Sequence: Synthetic oligonucleotide
uccgucaaccggaaaggaa

SEQ ID NO: 1096268 - RNA, 19 nt, Artificial Sequence
  Description of Artificial Sequence: Synthetic oligonucleotide
acaguucgaggucucuucu

SEQ ID NO: 1096269 - RNA, 19 nt, Artificial Sequence
  Description of Artificial Sequence: Synthetic oligonucleotide
acgagguacaagaaaguga

SEQ ID NO: 1096270 - RNA, 19 nt, Artificial Sequence
  Description of Artificial Sequence: Synthetic oligonucleotide
uugauaccccgaagcacca

SEQ ID NO: 1096271 - RNA, 19 nt, Artificial Sequence
  Description of Artificial Sequence: Synthetic oligonucleotide
cauuggguuaacaguguca

SEQ ID NO: 1096272 - RNA, 19 nt, Artificial Sequence
  Description of Artificial Sequence: Synthetic oligonucleotide
acgccugcacuccggaagg

SEQ ID NO: 1096273 - RNA, 19 nt, Artificial Sequence
  Description of Artificial Sequence: Synthetic oligonucleotide
caacaagaaugagaacgcc

SEQ ID NO: 1096274 - RNA, 19 nt, Artificial Sequence
  Description of Artificial Sequence: Synthetic oligonucleotide
uucaucucgugugaugauc

SEQ ID NO: 1096275 - RNA, 19 nt, Artificial Sequence
  Description of Artificial Sequence: Synthetic oligonucleotide
agggaugcuagccuuuaaa

SEQ ID NO: 1096276 - RNA, 19 nt, Artificial Sequence
  Description of Artificial Sequence: Synthetic oligonucleotide
uccccgugagcauggcugg

SEQ ID NO: 1096277 - RNA, 19 nt, Artificial Sequence
  Description of Artificial Sequence: Synthetic oligonucleotide
auuccaccuagugacguug

SEQ ID NO: 1096278 - RNA, 19 nt, Artificial Sequence
  Description of Artificial Sequence: Synthetic oligonucleotide
cuccggaaggugaagucug

SEQ ID NO: 1096279 - RNA, 19 nt, Artificial Sequence
  Description of Artificial Sequence: Synthetic oligonucleotide
cucuccgaacucagcagcc

SEQ ID NO: 1096280 - RNA, 19 nt, Artificial Sequence
  Description of Artificial Sequence: Synthetic oligonucleotide
acggagugcucuccgaacu

SEQ ID NO: 1096281 - RNA, 19 nt, Artificial Sequence
  Description of Artificial Sequence: Synthetic oligonucleotide
cauccuucccacauaggca

SEQ ID NO: 1096282 - RNA, 19 nt, Artificial Sequence
  Description of Artificial Sequence: Synthetic oligonucleotide
agucguguuggauggguaa

SEQ ID NO: 1096283 - RNA, 19 nt, Artificial Sequence
  Description of Artificial Sequence: Synthetic oligonucleotide
aagugaugcguggcgccgg

SEQ ID NO: 1096284 - RNA, 19 nt, Artificial Sequence
  Description of Artificial Sequence: Synthetic oligonucleotide
ucacggcacuuugagguag

SEQ ID NO: 1096285 - RNA, 19 nt, Artificial Sequence
  Description of Artificial Sequence: Synthetic oligonucleotide
gauucggaguguuccaugu

SEQ ID NO: 1096286 - RNA, 19 nt, Artificial Sequence
  Description of Artificial Sequence: Synthetic oligonucleotide
agacacgugccccuccugu

SEQ ID NO: 1096287 - RNA, 19 nt, Artificial Sequence
  Description of Artificial Sequence: Synthetic oligonucleotide
cugcagaccacugcauucc

SEQ ID NO: 1096288 - RNA, 19 nt, Artificial Sequence
  Description of Artificial Sequence: Synthetic oligonucleotide
acacaguuuggauggcgga

SEQ ID NO: 1096289 - RNA, 19 nt, Artificial Sequence
  Description of Artificial Sequence: Synthetic oligonucleotide
uggguaacagaggccaacu

SEQ ID NO: 1096290 - RNA, 19 nt, Artificial Sequence
  Description of Artificial Sequence: Synthetic oligonucleotide
ggcccuaauuauuaguaca

SEQ ID NO: 1096291 - RNA, 19 nt, Artificial Sequence
  Description of Artificial Sequence: Synthetic oligonucleotide
ucgagcgauugcuuugagu

SEQ ID NO: 1096292 - RNA, 19 nt, Artificial Sequence
  Description of Artificial Sequence: Synthetic oligonucleotide
ccgucaaccggaaaggaac

SEQ ID NO: 1096293 - RNA, 19 nt, Artificial Sequence
  Description of Artificial Sequence: Synthetic oligonucleotide
agugcucuccgaacucagc

SEQ ID NO: 1096294 - RNA, 19 nt, Artificial Sequence
  Description of Artificial Sequence: Synthetic oligonucleotide
aacuuaggcccuaauuauu

SEQ ID NO: 1096295 - RNA, 19 nt, Artificial Sequence
  Description of Artificial Sequence: Synthetic oligonucleotide
uuauuuaacuuaggcccua

SEQ ID NO: 1096296 - RNA, 19 nt, Artificial Sequence
  Description of Artificial Sequence: Synthetic oligonucleotide
guuuggauggcggaucaga

SEQ ID NO: 1096297 - RNA, 19 nt, Artificial Sequence
  Description of Artificial Sequence: Synthetic oligonucleotide
uggcaugcgcuugacugag

SEQ ID NO: 1096298 - RNA, 19 nt, Artificial Sequence
  Description of Artificial Sequence: Synthetic oligonucleotide
cacucgagcgauugcuuug

SEQ ID NO: 1096299 - RNA, 19 nt, Artificial Sequence
  Description of Artificial Sequence: Synthetic oligonucleotide
gucaucuuaaaaugccaua

SEQ ID NO: 1096300 - RNA, 19 nt, Artificial Sequence
  Description of Artificial Sequence: Synthetic oligonucleotide
gacacgugccccuccugug

SEQ ID NO: 1096301 - RNA, 19 nt, Artificial Sequence
  Description of Artificial Sequence: Synthetic oligonucleotide
ugcucgagcuggcacucga

SEQ ID NO: 1096302 - RNA, 19 nt, Artificial Sequence
  Description of Artificial Sequence: Synthetic oligonucleotide
uacuguggguacgcuuugg

SEQ ID NO: 1096303 - RNA, 19 nt, Artificial Sequence
  Description of Artificial Sequence: Synthetic oligonucleotide
ucguguuggauggguaaca

SEQ ID NO: 1096304 - RNA, 19 nt, Artificial Sequence
  Description of Artificial Sequence: Synthetic oligonucleotide
cagauggaucuccacgcug

SEQ ID NO: 1096305 - RNA, 19 nt, Artificial Sequence
  Description of Artificial Sequence: Synthetic oligonucleotide
acuuaggcccuaauuauua

SEQ ID NO: 1096306 - RNA, 19 nt, Artificial Sequence
  Description of Artificial Sequence: Synthetic oligonucleotide
uuccaccuagugacguuga

SEQ ID NO: 1096307 - RNA, 19 nt, Artificial Sequence
  Description of Artificial Sequence: Synthetic oligonucleotide
gucuaaaguuuaccgcuga

SEQ ID NO: 1096308 - RNA, 19 nt, Artificial Sequence
  Description of Artificial Sequence: Synthetic oligonucleotide
aggugcucgagcuggcacu

SEQ ID NO: 1096309 - RNA, 19 nt, Artificial Sequence
  Description of Artificial Sequence: Synthetic oligonucleotide
cuugcauacccucuccaaa

SEQ ID NO: 1096310 - RNA, 19 nt, Artificial Sequence
  Description of Artificial Sequence: Synthetic oligonucleotide
gagcgauugcuuugaguuc

SEQ ID NO: 1096311 - RNA, 19 nt, Artificial Sequence
  Description of Artificial Sequence: Synthetic oligonucleotide
uggcacucgagcgauugcu

SEQ ID NO: 1096312 - RNA, 19 nt, Artificial Sequence
  Description of Artificial Sequence: Synthetic oligonucleotide
gagaacgccugcacuccgg

SEQ ID NO: 1096313 - RNA, 19 nt, Artificial Sequence
  Description of Artificial Sequence: Synthetic oligonucleotide
acuccggaaggugaagucu

SEQ ID NO: 1096314 - RNA, 19 nt, Artificial Sequence
  Description of Artificial Sequence: Synthetic oligonucleotide
uuggauggcggaucagaua

SEQ ID NO: 1096315 - RNA, 19 nt, Artificial Sequence
  Description of Artificial Sequence: Synthetic oligonucleotide
ucgugcucaacagaacgau

SEQ ID NO: 1096316 - RNA, 19 nt, Artificial Sequence
  Description of Artificial Sequence: Synthetic oligonucleotide
uccacgcugcguuucugcu

SEQ ID NO: 1096317 - RNA, 19 nt, Artificial Sequence
  Description of Artificial Sequence: Synthetic oligonucleotide
acguugacacaguuuggau

SEQ ID NO: 1096318 - RNA, 19 nt, Artificial Sequence
  Description of Artificial Sequence: Synthetic oligonucleotide
augcgcuugacugaggcuu

SEQ ID NO: 1096319 - RNA, 19 nt, Artificial Sequence
  Description of Artificial Sequence: Synthetic oligonucleotide
guucgaggucucuucugug

SEQ ID NO: 1096320 - RNA, 19 nt, Artificial Sequence
  Description of Artificial Sequence: Synthetic oligonucleotide
cuagccuuuaaauacucuu

SEQ ID NO: 1096321 - RNA, 19 nt, Artificial Sequence
  Description of Artificial Sequence: Synthetic oligonucleotide
agaacgccugcacuccgga

SEQ ID NO: 1096322 - RNA, 19 nt, Artificial Sequence
  Description of Artificial Sequence: Synthetic oligonucleotide
acauacaccugggcauagg

SEQ ID NO: 1096323 - RNA, 19 nt, Artificial Sequence
  Description of Artificial Sequence: Synthetic oligonucleotide
uccaccuagugacguugac

SEQ ID NO: 1096324 - RNA, 19 nt, Artificial Sequence
  Description of Artificial Sequence: Synthetic oligonucleotide
uccggaaggugaagucugu

SEQ ID NO: 1096325 - RNA, 19 nt, Artificial Sequence
  Description of Artificial Sequence: Synthetic oligonucleotide
cucgugcucaacagaacga

SEQ ID NO: 1096326 - RNA, 19 nt, Artificial Sequence
  Description of Artificial Sequence: Synthetic oligonucleotide
gcaugcgcuugacugaggc

SEQ ID NO: 1096327 - RNA, 19 nt, Artificial Sequence
  Description of Artificial Sequence: Synthetic oligonucleotide
caagucacggagugcucuc

SEQ ID NO: 1096328 - RNA, 19 nt, Artificial Sequence
  Description of Artificial Sequence: Synthetic oligonucleotide
ggaugcuagccuuuaaaua

SEQ ID NO: 1096329 - RNA, 19 nt, Artificial Sequence
  Description of Artificial Sequence: Synthetic oligonucleotide
cgugugaugaucaugcuaa

SEQ ID NO: 1096330 - RNA, 19 nt, Artificial Sequence
  Description of Artificial Sequence: Synthetic oligonucleotide
uacccgguaauagguuuca

SEQ ID NO: 1096331 - RNA, 19 nt, Artificial Sequence
  Description of Artificial Sequence: Synthetic oligonucleotide
uauuuccccucucgugcuc

SEQ ID NO: 1096332 - RNA, 19 nt, Artificial Sequence
  Description of Artificial Sequence: Synthetic oligonucleotide
cacggagugcucuccgaac

SEQ ID NO: 1096333 - RNA, 19 nt, Artificial Sequence
  Description of Artificial Sequence: Synthetic oligonucleotide
cucucgugcucaacagaac

SEQ ID NO: 1096334 - RNA, 19 nt, Artificial Sequence
  Description of Artificial Sequence: Synthetic oligonucleotide
cguugacacaguuuggaug

SEQ ID NO: 1096335 - RNA, 19 nt, Artificial Sequence
  Description of Artificial Sequence: Synthetic oligonucleotide
augcuagccuuuaaauacu

SEQ ID NO: 1096336 - RNA, 19 nt, Artificial Sequence
  Description of Artificial Sequence: Synthetic oligonucleotide
caguucgaggucucuucug

SEQ ID NO: 1096337 - RNA, 19 nt, Artificial Sequence
  Description of Artificial Sequence: Synthetic oligonucleotide
gagugcucuccgaacucag

SEQ ID NO: 1096338 - RNA, 19 nt, Artificial Sequence
  Description of Artificial Sequence: Synthetic oligonucleotide
agguagcauguucuguaaa

SEQ ID NO: 1096339 - RNA, 19 nt, Artificial Sequence
  Description of Artificial Sequence: Synthetic oligonucleotide
cacuccggaaggugaaguc

SEQ ID NO: 1096340 - RNA, 19 nt, Artificial Sequence
  Description of Artificial Sequence: Synthetic oligonucleotide
guaguccuccaucugcaaa

SEQ ID NO: 1096341 - RNA, 19 nt, Artificial Sequence
  Description of Artificial Sequence: Synthetic oligonucleotide
gcucuccgaacucagcagc

SEQ ID NO: 1096342 - RNA, 19 nt, Artificial Sequence
  Description of Artificial Sequence: Synthetic oligonucleotide
gguugauaccccgaagcac

SEQ ID NO: 1096343 - RNA, 19 nt, Artificial Sequence
  Description of Artificial Sequence: Synthetic oligonucleotide
uuccgucaaccggaaagga

SEQ ID NO: 1096344 - RNA, 19 nt, Artificial Sequence
  Description of Artificial Sequence: Synthetic oligonucleotide
cagcuuagccaugaugguc

SEQ ID NO: 1096345 - RNA, 19 nt, Artificial Sequence
  Description of Artificial Sequence: Synthetic oligonucleotide
uuggguuaacagugucauc

SEQ ID NO: 1096346 - RNA, 19 nt, Artificial Sequence
  Description of Artificial Sequence: Synthetic oligonucleotide
cuuuuguaucaaacaggaa

SEQ ID NO: 1096347 - RNA, 19 nt, Artificial Sequence
  Description of Artificial Sequence: Synthetic oligonucleotide
uaacaguucgaggucucuu

SEQ ID NO: 1096348 - RNA, 19 nt, Artificial Sequence
  Description of Artificial Sequence: Synthetic oligonucleotide
auaccccgaagcaccauug

SEQ ID NO: 1096349 - RNA, 19 nt, Artificial Sequence
  Description of Artificial Sequence: Synthetic oligonucleotide
acgugccccuccugugagc

SEQ ID NO: 1096350 - RNA, 19 nt, Artificial Sequence
  Description of Artificial Sequence: Synthetic oligonucleotide
agcauggcuggcaugcgcu

SEQ ID NO: 1096351 - RNA, 19 nt, Artificial Sequence
  Description of Artificial Sequence: Synthetic oligonucleotide
ucuccgaacucagcagccu

SEQ ID NO: 1096352 - RNA, 19 nt, Artificial Sequence
  Description of Artificial Sequence: Synthetic oligonucleotide
guaauagguuucauaggua

SEQ ID NO: 1096353 - RNA, 19 nt, Artificial Sequence
  Description of Artificial Sequence: Synthetic oligonucleotide
ugcacuccggaaggugaag

SEQ ID NO: 1096354 - RNA, 19 nt, Artificial Sequence
  Description of Artificial Sequence: Synthetic oligonucleotide
acucgagcgauugcuuuga

SEQ ID NO: 1096355 - RNA, 19 nt, Artificial Sequence
  Description of Artificial Sequence: Synthetic oligonucleotide
gaaccauuacccgguaaua

SEQ ID NO: 1096356 - RNA, 19 nt, Artificial Sequence
  Description of Artificial Sequence: Synthetic oligonucleotide
cacggcacuuugagguagc

SEQ ID NO: 1096357 - RNA, 19 nt, Artificial Sequence
  Description of Artificial Sequence: Synthetic oligonucleotide
ggucuaaaguuuaccgcug

SEQ ID NO: 1096358 - RNA, 19 nt, Artificial Sequence
  Description of Artificial Sequence: Synthetic oligonucleotide
ugcuaagauucggaguguu

SEQ ID NO: 1096359 - RNA, 19 nt, Artificial Sequence
  Description of Artificial Sequence: Synthetic oligonucleotide
gaacauacaccugggcaua

SEQ ID NO: 1096360 - RNA, 19 nt, Artificial Sequence
  Description of Artificial Sequence: Synthetic oligonucleotide
ccuagcuacuuaaauuaca

SEQ ID NO: 1096361 - RNA, 19 nt, Artificial Sequence
  Description of Artificial Sequence: Synthetic oligonucleotide
cuggcaugcgcuugacuga

SEQ ID NO: 1096362 - RNA, 19 nt, Artificial Sequence
  Description of Artificial Sequence: Synthetic oligonucleotide
agugacguugacacaguuu

SEQ ID NO: 1096363 - RNA, 19 nt, Artificial Sequence
  Description of Artificial Sequence: Synthetic oligonucleotide
cgguaauagguuucauagg

SEQ ID NO: 1096364 - RNA, 19 nt, Artificial Sequence
  Description of Artificial Sequence: Synthetic oligonucleotide
ggaaccauuacccgguaau

SEQ ID NO: 1096365 - RNA, 19 nt, Artificial Sequence
  Description of Artificial Sequence: Synthetic oligonucleotide
uucccacauaggcauccuu

SEQ ID NO: 1096366 - RNA, 19 nt, Artificial Sequence
  Description of Artificial Sequence: Synthetic oligonucleotide
cacgugccccuccugugag

SEQ ID NO: 1096367 - RNA, 19 nt, Artificial Sequence
  Description of Artificial Sequence: Synthetic oligonucleotide
acagaacgauugaccuugg

SEQ ID NO: 1096368 - RNA, 19 nt, Artificial Sequence
  Description of Artificial Sequence: Synthetic oligonucleotide
aguuuaccgcugaauccca

SEQ ID NO: 1096369 - RNA, 19 nt, Artificial Sequence
  Description of Artificial Sequence: Synthetic oligonucleotide
ugcgcuugacugaggcuuu

SEQ ID NO: 1096370 - RNA, 19 nt, Artificial Sequence
  Description of Artificial Sequence: Synthetic oligonucleotide
cuggcacucgagcgauugc

SEQ ID NO: 1096371 - RNA, 19 nt, Artificial Sequence
  Description of Artificial Sequence: Synthetic oligonucleotide
ggguauucaucucguguga

SEQ ID NO: 1096372 - RNA, 19 nt, Artificial Sequence
  Description of Artificial Sequence: Synthetic oligonucleotide
gauaccccgaagcaccauu

SEQ ID NO: 1096373 - RNA, 19 nt, Artificial Sequence
  Description of Artificial Sequence: Synthetic oligonucleotide
gucaaccggaaaggaacac

SEQ ID NO: 1096374 - RNA, 19 nt, Artificial Sequence
  Description of Artificial Sequence: Synthetic oligonucleotide
ggggaaauggcccucuggu

SEQ ID NO: 1096375 - RNA, 19 nt, Artificial Sequence
  Description of Artificial Sequence: Synthetic oligonucleotide
acgauugaccuuggaggga

SEQ ID NO: 1096376 - RNA, 19 nt, Artificial Sequence
  Description of Artificial Sequence: Synthetic oligonucleotide
aguccccgugagcauggcu

SEQ ID NO: 1096377 - RNA, 19 nt, Artificial Sequence
  Description of Artificial Sequence: Synthetic oligonucleotide
cucugguugauaccccgaa

SEQ ID NO: 1096378 - RNA, 19 nt, Artificial Sequence
  Description of Artificial Sequence: Synthetic oligonucleotide
cagucggcaugguuuguca

SEQ ID NO: 1096379 - RNA, 19 nt, Artificial Sequence
  Description of Artificial Sequence: Synthetic oligonucleotide
cccuagcuacuuaaauuac

SEQ ID NO: 1096380 - RNA, 19 nt, Artificial Sequence
  Description of Artificial Sequence: Synthetic oligonucleotide
auacugccuuugcuauaca

SEQ ID NO: 1096381 - RNA, 19 nt, Artificial Sequence
  Description of Artificial Sequence: Synthetic oligonucleotide
gguuaacagugucaucuua

SEQ ID NO: 1096382 - RNA, 19 nt, Artificial Sequence
  Description of Artificial Sequence: Synthetic oligonucleotide
ugguuccauuggguuaaca

SEQ ID NO: 1096383 - RNA, 19 nt, Artificial Sequence
  Description of Artificial Sequence: Synthetic oligonucleotide
ccgaagcaccauugggugg

SEQ ID NO: 1096384 - RNA, 19 nt, Artificial Sequence
  Description of Artificial Sequence: Synthetic oligonucleotide
cucgagcgauugcuuugag

SEQ ID NO: 1096385 - RNA, 19 nt, Artificial Sequence
  Description of Artificial Sequence: Synthetic oligonucleotide
gauggcggaucagauaguu

SEQ ID NO: 1096386 - RNA, 19 nt, Artificial Sequence
  Description of Artificial Sequence: Synthetic oligonucleotide
gucacggagugcucuccga

SEQ ID NO: 1096387 - RNA, 19 nt, Artificial Sequence
  Description of Artificial Sequence: Synthetic oligonucleotide
cauacccucuccaaauauu

SEQ ID NO: 1096388 - RNA, 19 nt, Artificial Sequence
  Description of Artificial Sequence: Synthetic oligonucleotide
gcaugguuugucacggcac

SEQ ID NO: 1096389 - RNA, 19 nt, Artificial Sequence
  Description of Artificial Sequence: Synthetic oligonucleotide
caacucggauccagucauc

SEQ ID NO: 1096390 - RNA, 19 nt, Artificial Sequence
  Description of Artificial Sequence: Synthetic oligonucleotide
gauggguaacagaggccaa

SEQ ID NO: 1096391 - RNA, 19 nt, Artificial Sequence
  Description of Artificial Sequence: Synthetic oligonucleotide
cugggugacuggaauugua

SEQ ID NO: 1096392 - RNA, 19 nt, Artificial Sequence
  Description of Artificial Sequence: Synthetic oligonucleotide
caauacugccuuugcuaua

SEQ ID NO: 1096393 - RNA, 19 nt, Artificial Sequence
  Description of Artificial Sequence: Synthetic oligonucleotide
ccucucgugcucaacagaa

SEQ ID NO: 1096394 - RNA, 19 nt, Artificial Sequence
  Description of Artificial Sequence: Synthetic oligonucleotide
caaugccaaggugcucgag

SEQ ID NO: 1096395 - RNA, 19 nt, Artificial Sequence
  Description of Artificial Sequence: Synthetic oligonucleotide
gcuaagauucggaguguuc

SEQ ID NO: 1096396 - RNA, 19 nt, Artificial Sequence
  Description of Artificial Sequence: Synthetic oligonucleotide
ccauuacccgguaauaggu

SEQ ID NO: 1096397 - RNA, 19 nt, Artificial Sequence
  Description of Artificial Sequence: Synthetic oligonucleotide
gaacgccugcacuccggaa

SEQ ID NO: 1096398 - RNA, 19 nt, Artificial Sequence
  Description of Artificial Sequence: Synthetic oligonucleotide
gucacggcacuuugaggua

SEQ ID NO: 1096399 - RNA, 19 nt, Artificial Sequence
  Description of Artificial Sequence: Synthetic oligonucleotide
gcacccguaguccuccauc

SEQ ID NO: 1096400 - RNA, 19 nt, Artificial Sequence
  Description of Artificial Sequence: Synthetic oligonucleotide
ugauaccccgaagcaccau

SEQ ID NO: 1096401 - RNA, 19 nt, Artificial Sequence
  Description of Artificial Sequence: Synthetic oligonucleotide
cuagugacguugacacagu

SEQ ID NO: 1096402 - RNA, 19 nt, Artificial Sequence
  Description of Artificial Sequence: Synthetic oligonucleotide
cagaacgauugaccuugga

SEQ ID NO: 1096403 - RNA, 19 nt, Artificial Sequence
  Description of Artificial Sequence: Synthetic oligonucleotide
cgagcgauugcuuugaguu

SEQ ID NO: 1096404 - RNA, 19 nt, Artificial Sequence
  Description of Artificial Sequence: Synthetic oligonucleotide
cugcacuccggaaggugaa

SEQ ID NO: 1096405 - RNA, 19 nt, Artificial Sequence
  Description of Artificial Sequence: Synthetic oligonucleotide
guggguacgcuuuggccau

SEQ ID NO: 1096406 - RNA, 19 nt, Artificial Sequence
  Description of Artificial Sequence: Synthetic oligonucleotide
cauuacccgguaauagguu

SEQ ID NO: 1096407 - RNA, 19 nt, Artificial Sequence
  Description of Artificial Sequence: Synthetic oligonucleotide
aagcaccauugggugggau

SEQ ID NO: 1096408 - RNA, 19 nt, Artificial Sequence
  Description of Artificial Sequence: Synthetic oligonucleotide
guaauacuguggguacgcu

SEQ ID NO: 1096409 - RNA, 19 nt, Artificial Sequence
  Description of Artificial Sequence: Synthetic oligonucleotide
caacagaacgauugaccuu

SEQ ID NO: 1096410 - RNA, 19 nt, Artificial Sequence
  Description of Artificial Sequence: Synthetic oligonucleotide
cguguuggauggguaacag

SEQ ID NO: 1096411 - RNA, 19 nt, Artificial Sequence
  Description of Artificial Sequence: Synthetic oligonucleotide
ccccucucgugcucaacag

SEQ ID NO: 1096412 - RNA, 19 nt, Artificial Sequence
  Description of Artificial Sequence: Synthetic oligonucleotide
acggcacuuugagguagca

SEQ ID NO: 1096413 - RNA, 19 nt, Artificial Sequence
  Description of Artificial Sequence: Synthetic oligonucleotide
guuuaccgcugaaucccaa

SEQ ID NO: 1096414 - RNA, 19 nt, Artificial Sequence
  Description of Artificial Sequence: Synthetic oligonucleotide
cacgcugcguuucugcuuu

SEQ ID NO: 1096415 - RNA, 19 nt, Artificial Sequence
  Description of Artificial Sequence: Synthetic oligonucleotide
cggaccguuccagugaaug

SEQ ID NO: 1096416 - RNA, 19 nt, Artificial Sequence
  Description of Artificial Sequence: Synthetic oligonucleotide
ccguaguccuccaucugca

SEQ ID NO: 1096417 - RNA, 19 nt, Artificial Sequence
  Description of Artificial Sequence: Synthetic oligonucleotide
uggguacgcuuuggccaug

SEQ ID NO: 1096418 - RNA, 19 nt, Artificial Sequence
  Description of Artificial Sequence: Synthetic oligonucleotide
cccgguaauagguuucaua

SEQ ID NO: 1096419 - RNA, 19 nt, Artificial Sequence
  Description of Artificial Sequence: Synthetic oligonucleotide
ggcggaucagauaguuguc

SEQ ID NO: 1096420 - RNA, 19 nt, Artificial Sequence
  Description of Artificial Sequence: Synthetic oligonucleotide
gcauacccucuccaaauau

SEQ ID NO: 1096421 - RNA, 19 nt, Artificial Sequence
  Description of Artificial Sequence: Synthetic oligonucleotide
ccaugcaguuacugauguc

SEQ ID NO: 1096422 - RNA, 19 nt, Artificial Sequence
  Description of Artificial Sequence: Synthetic oligonucleotide
ggguacgcuuuggccaugc

SEQ ID NO: 1096423 - RNA, 19 nt, Artificial Sequence
  Description of Artificial Sequence: Synthetic oligonucleotide
cguggcgccggaccguucc

SEQ ID NO: 1096424 - RNA, 19 nt, Artificial Sequence
  Description of Artificial Sequence: Synthetic oligonucleotide
gcacuuugagguagcaugu

SEQ ID NO: 1096425 - RNA, 19 nt, Artificial Sequence
  Description of Artificial Sequence: Synthetic oligonucleotide
cucgugugaugaucaugcu

SEQ ID NO: 1096426 - RNA, 19 nt, Artificial Sequence
  Description of Artificial Sequence: Synthetic oligonucleotide
gcgccggaccguuccagug

SEQ ID NO: 1096427 - RNA, 19 nt, Artificial Sequence
  Description of Artificial Sequence: Synthetic oligonucleotide
ccaccuagugacguugaca

SEQ ID NO: 1096428 - RNA, 19 nt, Artificial Sequence
  Description of Artificial Sequence: Synthetic oligonucleotide
cuuagccaugauggucuaa

SEQ ID NO: 1096429 - RNA, 19 nt, Artificial Sequence
  Description of Artificial Sequence: Synthetic oligonucleotide
cgucaaccggaaaggaaca

SEQ ID NO: 1096430 - RNA, 19 nt, Artificial Sequence
  Description of Artificial Sequence: Synthetic oligonucleotide
ugcguggcgccggaccguu

SEQ ID NO: 1096431 - RNA, 19 nt, Artificial Sequence
  Description of Artificial Sequence: Synthetic oligonucleotide
gcugcguuucugcuuuacu

SEQ ID NO: 1096432 - RNA, 19 nt, Artificial Sequence
  Description of Artificial Sequence: Synthetic oligonucleotide
gguacgcuuuggccaugca

SEQ ID NO: 1096433 - RNA, 19 nt, Artificial Sequence
  Description of Artificial Sequence: Synthetic oligonucleotide
ggagucguguuggaugggu

SEQ ID NO: 1096434 - RNA, 19 nt, Artificial Sequence
  Description of Artificial Sequence: Synthetic oligonucleotide
agaggccaacucggaucca

SEQ ID NO: 1096435 - RNA, 19 nt, Artificial Sequence
  Description of Artificial Sequence: Synthetic oligonucleotide
acccgguaauagguuucau

SEQ ID NO: 1096436 - RNA, 19 nt, Artificial Sequence
  Description of Artificial Sequence: Synthetic oligonucleotide
augcguggcgccggaccgu

SEQ ID NO: 1096437 - RNA, 19 nt, Artificial Sequence
  Description of Artificial Sequence: Synthetic oligonucleotide
caucucgugugaugaucau

SEQ ID NO: 1096438 - RNA, 19 nt, Artificial Sequence
  Description of Artificial Sequence: Synthetic oligonucleotide
gcauuccaccuagugacgu

SEQ ID NO: 1096439 - RNA, 19 nt, Artificial Sequence
  Description of Artificial Sequence: Synthetic oligonucleotide
gggaaauggcccucugguu

SEQ ID NO: 1096440 - RNA, 19 nt, Artificial Sequence
  Description of Artificial Sequence: Synthetic oligonucleotide
gcuagccuuuaaauacucu

SEQ ID NO: 1096441 - RNA, 19 nt, Artificial Sequence
  Description of Artificial Sequence: Synthetic oligonucleotide
gccggaccguuccagugaa

SEQ ID NO: 1096442 - RNA, 19 nt, Artificial Sequence
  Description of Artificial Sequence: Synthetic oligonucleotide
cccuaauuauuaguacaua

SEQ ID NO: 1096443 - RNA, 19 nt, Artificial Sequence
  Description of Artificial Sequence: Synthetic oligonucleotide
gacagucggcaugguuugu

SEQ ID NO: 1096444 - RNA, 19 nt, Artificial Sequence
  Description of Artificial Sequence: Synthetic oligonucleotide
gcuauacagaugugcuguu

SEQ ID NO: 1096445 - RNA, 19 nt, Artificial Sequence
  Description of Artificial Sequence: Synthetic oligonucleotide
gcacucgagcgauugcuuu

SEQ ID NO: 1096446 - RNA, 19 nt, Artificial Sequence
  Description of Artificial Sequence: Synthetic oligonucleotide
cggagugcucuccgaacuc

SEQ ID NO: 1096447 - RNA, 19 nt, Artificial Sequence
  Description of Artificial Sequence: Synthetic oligonucleotide
gcacuccggaaggugaagu

SEQ ID NO: 1096448 - RNA, 19 nt, Artificial Sequence
  Description of Artificial Sequence: Synthetic oligonucleotide
acgcugcguuucugcuuua

SEQ ID NO: 1096449 - RNA, 19 nt, Artificial Sequence
  Description of Artificial Sequence: Synthetic oligonucleotide
ggaucuccacgcugcguuu

SEQ ID NO: 1096450 - RNA, 19 nt, Artificial Sequence
  Description of Artificial Sequence: Synthetic oligonucleotide
ggauggcggaucagauagu

SEQ ID NO: 1096451 - RNA, 19 nt, Artificial Sequence
  Description of Artificial Sequence: Synthetic oligonucleotide
cgcugcguuucugcuuuac

SEQ ID NO: 1096452 - RNA, 19 nt, Artificial Sequence
  Description of Artificial Sequence: Synthetic oligonucleotide
ccccgugagcauggcuggc

SEQ ID NO: 1096453 - RNA, 19 nt, Artificial Sequence
  Description of Artificial Sequence: Synthetic oligonucleotide
cgccggaccguuccaguga

SEQ ID NO: 1096454 - RNA, 19 nt, Artificial Sequence
  Description of Artificial Sequence: Synthetic oligonucleotide
cgauugaccuuggagggau

SEQ ID NO: 1096455 - RNA, 19 nt, Artificial Sequence
  Description of Artificial Sequence: Synthetic oligonucleotide
ccggaaggugaagucugua

SEQ ID NO: 1096456 - RNA, 19 nt, Artificial Sequence
  Description of Artificial Sequence: Synthetic oligonucleotide
cgugcucaacagaacgauu

SEQ ID NO: 1096457 - RNA, 19 nt, Artificial Sequence
  Description of Artificial Sequence: Synthetic oligonucleotide
ccgugagcauggcuggcau

SEQ ID NO: 1096458 - RNA, 19 nt, Artificial Sequence
  Description of Artificial Sequence: Synthetic oligonucleotide
ccacgcugcguuucugcuu

SEQ ID NO: 1096459 - RNA, 19 nt, Artificial Sequence
  Description of Artificial Sequence: Synthetic oligonucleotide
gcguggcgccggaccguuc

SEQ ID NO: 1096460 - RNA, 19 nt, Artificial Sequence
  Description of Artificial Sequence: Synthetic oligonucleotide
gcgcuugacugaggcuuuu

SEQ ID NO: 1096461 - RNA, 19 nt, Artificial Sequence
  Description of Artificial Sequence: Synthetic oligonucleotide
ccggaccguuccagugaau

SEQ ID NO: 1096462 - RNA, 19 nt, Artificial Sequence
  Description of Artificial Sequence: Synthetic oligonucleotide
cuaguuaucaaguuuauug

SEQ ID NO: 1096463 - RNA, 19 nt, Artificial Sequence
  Description of Artificial Sequence: Synthetic oligonucleotide
ucgaaaguaguucuuauag

SEQ ID NO: 1096464 - RNA, 19 nt, Artificial Sequence
  Description of Artificial Sequence: Synthetic oligonucleotide
aguucuuauagauuguuuc

SEQ ID NO: 1096465 - RNA, 19 nt, Artificial Sequence
  Description of Artificial Sequence: Synthetic oligonucleotide
acgaagacgacauuguugg

SEQ ID NO: 1096466 - RNA, 19 nt, Artificial Sequence
  Description of Artificial Sequence: Synthetic oligonucleotide
aaggguagccucuucacac

SEQ ID NO: 1096467 - RNA, 19 nt, Artificial Sequence
  Description of Artificial Sequence: Synthetic oligonucleotide
gauagugucggauauuuug

SEQ ID NO: 1096468 - RNA, 19 nt, Artificial Sequence
  Description of Artificial Sequence: Synthetic oligonucleotide
ucauauucaggucuuuggg

SEQ ID NO: 1096469 - RNA, 19 nt, Artificial Sequence
  Description of Artificial Sequence: Synthetic oligonucleotide
uuuacagauccaaggaagg

SEQ ID NO: 1096470 - RNA, 19 nt, Artificial Sequence
  Description of Artificial Sequence: Synthetic oligonucleotide
uuguggaacaaguacacag

SEQ ID NO: 1096471 - RNA, 19 nt, Artificial Sequence
  Description of Artificial Sequence: Synthetic oligonucleotide
uuaagugcagcuaggaaca

SEQ ID NO: 1096472 - RNA, 19 nt, Artificial Sequence
  Description of Artificial Sequence: Synthetic oligonucleotide
uauuuuggcgggcagagug

SEQ ID NO: 1096473 - RNA, 19 nt, Artificial Sequence
  Description of Artificial Sequence: Synthetic oligonucleotide
uuauagauuguuucgguga

SEQ ID NO: 1096474 - RNA, 19 nt, Artificial Sequence
  Description of Artificial Sequence: Synthetic oligonucleotide
gauuguuucggugagagac

SEQ ID NO: 1096475 - RNA, 19 nt, Artificial Sequence
  Description of Artificial Sequence: Synthetic oligonucleotide
uuacccgugacgaagacga

SEQ ID NO: 1096476 - RNA, 19 nt, Artificial Sequence
  Description of Artificial Sequence: Synthetic oligonucleotide
ugcaguaauucccauacug

SEQ ID NO: 1096477 - RNA, 19 nt, Artificial Sequence
  Description of Artificial Sequence: Synthetic oligonucleotide
aagaugagggugcagaggu

SEQ ID NO: 1096478 - RNA, 19 nt, Artificial Sequence
  Description of Artificial Sequence: Synthetic oligonucleotide
acacgaaagaccuugguug

SEQ ID NO: 1096479 - RNA, 19 nt, Artificial Sequence
  Description of Artificial Sequence: Synthetic oligonucleotide
aagccgauguaauuccagc

SEQ ID NO: 1096480 - RNA, 19 nt, Artificial Sequence
  Description of Artificial Sequence: Synthetic oligonucleotide
guucuuauagauuguuucg

SEQ ID NO: 1096481 - RNA, 19 nt, Artificial Sequence
  Description of Artificial Sequence: Synthetic oligonucleotide
uguuggggaagacagaugu

SEQ ID NO: 1096482 - RNA, 19 nt, Artificial Sequence
  Description of Artificial Sequence: Synthetic oligonucleotide
uugcaggcaauacuuaggg

SEQ ID NO: 1096483 - RNA, 19 nt, Artificial Sequence
  Description of Artificial Sequence: Synthetic oligonucleotide
uauagauuguuucggugag

SEQ ID NO: 1096484 - RNA, 19 nt, Artificial Sequence
  Description of Artificial Sequence: Synthetic oligonucleotide
uagagaauugacauucccc

SEQ ID NO: 1096485 - RNA, 19 nt, Artificial Sequence
  Description of Artificial Sequence: Synthetic oligonucleotide
auugcgauagccauaguac

SEQ ID NO: 1096486 - RNA, 19 nt, Artificial Sequence
  Description of Artificial Sequence: Synthetic oligonucleotide
ugcagcuaggaacaaaggc

SEQ ID NO: 1096487 - RNA, 19 nt, Artificial Sequence
  Description of Artificial Sequence: Synthetic oligonucleotide
agaucuaggacgucccggc

SEQ ID NO: 1096488 - RNA, 19 nt, Artificial Sequence
  Description of Artificial Sequence: Synthetic oligonucleotide
uucuuauagauuguuucgg

SEQ ID NO: 1096489 - RNA, 19 nt, Artificial Sequence
  Description of Artificial Sequence: Synthetic oligonucleotide
gacauaguuacccgugacg

SEQ ID NO: 1096490 - RNA, 19 nt, Artificial Sequence
  Description of Artificial Sequence: Synthetic oligonucleotide
ucagguaggaacugaacug

SEQ ID NO: 1096491 - RNA, 19 nt, Artificial Sequence
  Description of Artificial Sequence: Synthetic oligonucleotide
cuguguugaguucauaggg

SEQ ID NO: 1096492 - RNA, 19 nt, Artificial Sequence
  Description of Artificial Sequence: Synthetic oligonucleotide
ucgggaagcaacuugagaa

SEQ ID NO: 1096493 - RNA, 19 nt, Artificial Sequence
  Description of Artificial Sequence: Synthetic oligonucleotide
aagccguggaucaaugucc

SEQ ID NO: 1096494 - RNA, 19 nt, Artificial Sequence
  Description of Artificial Sequence: Synthetic oligonucleotide
uaguuaucaaguuuauugu

SEQ ID NO: 1096495 - RNA, 19 nt, Artificial Sequence
  Description of Artificial Sequence: Synthetic oligonucleotide
uguguugaguucauagggc

SEQ ID NO: 1096496 - RNA, 19 nt, Artificial Sequence
  Description of Artificial Sequence: Synthetic oligonucleotide
gaagacgacauuguugggg

SEQ ID NO: 1096497 - RNA, 19 nt, Artificial Sequence
  Description of Artificial Sequence: Synthetic oligonucleotide
cuuaguccauccauggucc

SEQ ID NO: 1096498 - RNA, 19 nt, Artificial Sequence
  Description of Artificial Sequence: Synthetic oligonucleotide
aggaagccgauguaauucc

SEQ ID NO: 1096499 - RNA, 19 nt, Artificial Sequence
  Description of Artificial Sequence: Synthetic oligonucleotide
agagcaccacaucauauuc

SEQ ID NO: 1096500 - RNA, 19 nt, Artificial Sequence
  Description of Artificial Sequence: Synthetic oligonucleotide
guuaucaaguuuauugugc

SEQ ID NO: 1096501 - RNA, 19 nt, Artificial Sequence
  Description of Artificial Sequence: Synthetic oligonucleotide
cagaauaccgccagggcgg

SEQ ID NO: 1096502 - RNA, 19 nt, Artificial Sequence
  Description of Artificial Sequence: Synthetic oligonucleotide
gauauuuuggcgggcagag

SEQ ID NO: 1096503 - RNA, 19 nt, Artificial Sequence
  Description of Artificial Sequence: Synthetic oligonucleotide
uagauuguuucggugagag

SEQ ID NO: 1096504 - RNA, 19 nt, Artificial Sequence
  Description of Artificial Sequence: Synthetic oligonucleotide
guaauucccauacuggaac

SEQ ID NO: 1096505 - RNA, 19 nt, Artificial Sequence
  Description of Artificial Sequence: Synthetic oligonucleotide
gugucggauauuuuggcgg

SEQ ID NO: 1096506 - RNA, 19 nt, Artificial Sequence
  Description of Artificial Sequence: Synthetic oligonucleotide
agugucggauauuuuggcg

SEQ ID NO: 1096507 - RNA, 19 nt, Artificial Sequence
  Description of Artificial Sequence: Synthetic oligonucleotide
agguaacugaggcagcugg

SEQ ID NO: 1096508 - RNA, 19 nt, Artificial Sequence
  Description of Artificial Sequence: Synthetic oligonucleotide
cuugcaggcaauacuuagg

SEQ ID NO: 1096509 - RNA, 19 nt, Artificial Sequence
  Description of Artificial Sequence: Synthetic oligonucleotide
ucguuuucgaugucgggag

SEQ ID NO: 1096510 - RNA, 19 nt, Artificial Sequence
  Description of Artificial Sequence: Synthetic oligonucleotide
ugucggauauuuuggcggg

SEQ ID NO: 1096511 - RNA, 19 nt, Artificial Sequence
  Description of Artificial Sequence: Synthetic oligonucleotide
ucuuauagauuguuucggu

SEQ ID NO: 1096512 - RNA, 19 nt, Artificial Sequence
  Description of Artificial Sequence: Synthetic oligonucleotide
gcuucaacacccuaaggcg

SEQ ID NO: 1096513 - RNA, 19 nt, Artificial Sequence
  Description of Artificial Sequence: Synthetic oligonucleotide
cuugauucgaaaguaguuc

SEQ ID NO: 1096514 - RNA, 19 nt, Artificial Sequence
  Description of Artificial Sequence: Synthetic oligonucleotide
aguggauaagccguggauc

SEQ ID NO: 1096515 - RNA, 19 nt, Artificial Sequence
  Description of Artificial Sequence: Synthetic oligonucleotide
auagugucggauauuuugg

SEQ ID NO: 1096516 - RNA, 19 nt, Artificial Sequence
  Description of Artificial Sequence: Synthetic oligonucleotide
auaguuacccgugacgaag

SEQ ID NO: 1096517 - RNA, 19 nt, Artificial Sequence
  Description of Artificial Sequence: Synthetic oligonucleotide
uaagccguggaucaauguc

SEQ ID NO: 1096518 - RNA, 19 nt, Artificial Sequence
  Description of Artificial Sequence: Synthetic oligonucleotide
cuagagaauugacauuccc

SEQ ID NO: 1096519 - RNA, 19 nt, Artificial Sequence
  Description of Artificial Sequence: Synthetic oligonucleotide
accagaauaccgccagggc

SEQ ID NO: 1096520 - RNA, 19 nt, Artificial Sequence
  Description of Artificial Sequence: Synthetic oligonucleotide
cauccaagggcacuugggg

SEQ ID NO: 1096521 - RNA, 19 nt, Artificial Sequence
  Description of Artificial Sequence: Synthetic oligonucleotide
accgccagggcggagaugc

SEQ ID NO: 1096522 - RNA, 19 nt, Artificial Sequence
  Description of Artificial Sequence: Synthetic oligonucleotide
agugcagcuaggaacaaag

SEQ ID NO: 1096523 - RNA, 19 nt, Artificial Sequence
  Description of Artificial Sequence: Synthetic oligonucleotide
accacuccggcuucaacac

SEQ ID NO: 1096524 - RNA, 19 nt, Artificial Sequence
  Description of Artificial Sequence: Synthetic oligonucleotide
ucggugagagacuuucucc

SEQ ID NO: 1096525 - RNA, 19 nt, Artificial Sequence
  Description of Artificial Sequence: Synthetic oligonucleotide
cacgaaagaccuugguugg

SEQ ID NO: 1096526 - RNA, 19 nt, Artificial Sequence
  Description of Artificial Sequence: Synthetic oligonucleotide
ucggagaggaagccgaugu

SEQ ID NO: 1096527 - RNA, 19 nt, Artificial Sequence
  Description of Artificial Sequence: Synthetic oligonucleotide
aggucuuugggcauccacc

SEQ ID NO: 1096528 - RNA, 19 nt, Artificial Sequence
  Description of Artificial Sequence: Synthetic oligonucleotide
gccacaagcucauagcugg

SEQ ID NO: 1096529 - RNA, 19 nt, Artificial Sequence
  Description of Artificial Sequence: Synthetic oligonucleotide
gaacaaguacacaggacgc

SEQ ID NO: 1096530 - RNA, 19 nt, Artificial Sequence
  Description of Artificial Sequence: Synthetic oligonucleotide
aaggcgcacauccucgcag

SEQ ID NO: 1096531 - RNA, 19 nt, Artificial Sequence
  Description of Artificial Sequence: Synthetic oligonucleotide
ggucagauggccaacauug

SEQ ID NO: 1096532 - RNA, 19 nt, Artificial Sequence
  Description of Artificial Sequence: Synthetic oligonucleotide
ucggagacgaagcuccuca

SEQ ID NO: 1096533 - RNA, 19 nt, Artificial Sequence
  Description of Artificial Sequence: Synthetic oligonucleotide
gauugcgauagccauagua

SEQ ID NO: 1096534 - RNA, 19 nt, Artificial Sequence
  Description of Artificial Sequence: Synthetic oligonucleotide
uccaagggcacuuggggug

SEQ ID NO: 1096535 - RNA, 19 nt, Artificial Sequence
  Description of Artificial Sequence: Synthetic oligonucleotide
acauaguuacccgugacga

SEQ ID NO: 1096536 - RNA, 19 nt, Artificial Sequence
  Description of Artificial Sequence: Synthetic oligonucleotide
aaaccacuccggcuucaac

SEQ ID NO: 1096537 - RNA, 19 nt, Artificial Sequence
  Description of Artificial Sequence: Synthetic oligonucleotide
aggauugcgauagccauag

SEQ ID NO: 1096538 - RNA, 19 nt, Artificial Sequence
  Description of Artificial Sequence: Synthetic oligonucleotide
acccuuaguccauccaugg

SEQ ID NO: 1096539 - RNA, 19 nt, Artificial Sequence
  Description of Artificial Sequence: Synthetic oligonucleotide
gaugccgguagaugcggcg

SEQ ID NO: 1096540 - RNA, 19 nt, Artificial Sequence
  Description of Artificial Sequence: Synthetic oligonucleotide
aggguagccucuucacacc

SEQ ID NO: 1096541 - RNA, 19 nt, Artificial Sequence
  Description of Artificial Sequence: Synthetic oligonucleotide
ccaugguccacuuaagugc

SEQ ID NO: 1096542 - RNA, 19 nt, Artificial Sequence
  Description of Artificial Sequence: Synthetic oligonucleotide
caaguacacaggacgcugg

SEQ ID NO: 1096543 - RNA, 19 nt, Artificial Sequence
  Description of Artificial Sequence: Synthetic oligonucleotide
uccugcgucguuuucgaug

SEQ ID NO: 1096544 - RNA, 19 nt, Artificial Sequence
  Description of Artificial Sequence: Synthetic oligonucleotide
ggagacacaacuucauccc

SEQ ID NO: 1096545 - RNA, 19 nt, Artificial Sequence
  Description of Artificial Sequence: Synthetic oligonucleotide
uugcgauagccauaguacu

SEQ ID NO: 1096546 - RNA, 19 nt, Artificial Sequence
  Description of Artificial Sequence: Synthetic oligonucleotide
uuuucgggguccacggccc

SEQ ID NO: 1096547 - RNA, 19 nt, Artificial Sequence
  Description of Artificial Sequence: Synthetic oligonucleotide
accaaacuuccccucuaac

SEQ ID NO: 1096548 - RNA, 19 nt, Artificial Sequence
  Description of Artificial Sequence: Synthetic oligonucleotide
uucgggaagcaacuugaga

SEQ ID NO: 1096549 - RNA, 19 nt, Artificial Sequence
  Description of Artificial Sequence: Synthetic oligonucleotide
gacgucccggccuugaaac

SEQ ID NO: 1096550 - RNA, 19 nt, Artificial Sequence
  Description of Artificial Sequence: Synthetic oligonucleotide
aacaaguacacaggacgcu

SEQ ID NO: 1096551 - RNA, 19 nt, Artificial Sequence
  Description of Artificial Sequence: Synthetic oligonucleotide
uguccgcuccauccaaggg

SEQ ID NO: 1096552 - RNA, 19 nt, Artificial Sequence
  Description of Artificial Sequence: Synthetic oligonucleotide
uggccacaagcucauagcu

SEQ ID NO: 1096553 - RNA, 19 nt, Artificial Sequence
  Description of Artificial Sequence: Synthetic oligonucleotide
uaauucccauacuggaacu

SEQ ID NO: 1096554 - RNA, 19 nt, Artificial Sequence
  Description of Artificial Sequence: Synthetic oligonucleotide
cacuccggcuucaacaccc

SEQ ID NO: 1096555 - RNA, 19 nt, Artificial Sequence
  Description of Artificial Sequence: Synthetic oligonucleotide
guggauaagccguggauca

SEQ ID NO: 1096556 - RNA, 19 nt, Artificial Sequence
  Description of Artificial Sequence: Synthetic oligonucleotide
aggaccaugguugggguuc

SEQ ID NO: 1096557 - RNA, 19 nt, Artificial Sequence
  Description of Artificial Sequence: Synthetic oligonucleotide
gauguaauuccagcacagc

SEQ ID NO: 1096558 - RNA, 19 nt, Artificial Sequence
  Description of Artificial Sequence: Synthetic oligonucleotide
caauacuuagggucagaug

SEQ ID NO: 1096559 - RNA, 19 nt, Artificial Sequence
  Description of Artificial Sequence: Synthetic oligonucleotide
uucgaaaguaguucuuaua

SEQ ID NO: 1096560 - RNA, 19 nt, Artificial Sequence
  Description of Artificial Sequence: Synthetic oligonucleotide
acaagcucauagcuggaga

SEQ ID NO: 1096561 - RNA, 19 nt, Artificial Sequence
  Description of Artificial Sequence: Synthetic oligonucleotide
uuucggacagugguagucc

SEQ ID NO: 1096562 - RNA, 19 nt, Artificial Sequence
  Description of Artificial Sequence: Synthetic oligonucleotide
aauaccgccagggcggaga

SEQ ID NO: 1096563 - RNA, 19 nt, Artificial Sequence
  Description of Artificial Sequence: Synthetic oligonucleotide
aacacccuuaguccaucca

SEQ ID NO: 1096564 - RNA, 19 nt, Artificial Sequence
  Description of Artificial Sequence: Synthetic oligonucleotide
ucuaacacccuuaguccau

SEQ ID NO: 1096565 - RNA, 19 nt, Artificial Sequence
  Description of Artificial Sequence: Synthetic oligonucleotide
ucaagugccagagguguca

SEQ ID NO: 1096566 - RNA, 19 nt, Artificial Sequence
  Description of Artificial Sequence: Synthetic oligonucleotide
auucgaaaguaguucuuau

SEQ ID NO: 1096567 - RNA, 19 nt, Artificial Sequence
  Description of Artificial Sequence: Synthetic oligonucleotide
uccuuaccaaacuuccccu

SEQ ID NO: 1096568 - RNA, 19 nt, Artificial Sequence
  Description of Artificial Sequence: Synthetic oligonucleotide
auagcuggagaagcccacc

SEQ ID NO: 1096569 - RNA, 19 nt, Artificial Sequence
  Description of Artificial Sequence: Synthetic oligonucleotide
cucagacagauagugucgg

SEQ ID NO: 1096570 - RNA, 19 nt, Artificial Sequence
  Description of Artificial Sequence: Synthetic oligonucleotide
gauggaaggggagacacaa

SEQ ID NO: 1096571 - RNA, 19 nt, Artificial Sequence
  Description of Artificial Sequence: Synthetic oligonucleotide
uuucgaugucgggaggagg

SEQ ID NO: 1096572 - RNA, 19 nt, Artificial Sequence
  Description of Artificial Sequence: Synthetic oligonucleotide
ggagguguuacuuggugug

SEQ ID NO: 1096573 - RNA, 19 nt, Artificial Sequence
  Description of Artificial Sequence: Synthetic oligonucleotide
uaguuacccgugacgaaga

SEQ ID NO: 1096574 - RNA, 19 nt, Artificial Sequence
  Description of Artificial Sequence: Synthetic oligonucleotide
ccagaauaccgccagggcg

SEQ ID NO: 1096575 - RNA, 19 nt, Artificial Sequence
  Description of Artificial Sequence: Synthetic oligonucleotide
aguuacccgugacgaagac

SEQ ID NO: 1096576 - RNA, 19 nt, Artificial Sequence
  Description of Artificial Sequence: Synthetic oligonucleotide
agcaaggguagccucuuca

SEQ ID NO: 1096577 - RNA, 19 nt, Artificial Sequence
  Description of Artificial Sequence: Synthetic oligonucleotide
gcaggaaggauugcgauag

SEQ ID NO: 1096578 - RNA, 19 nt, Artificial Sequence
  Description of Artificial Sequence: Synthetic oligonucleotide
aagggccuagagaauugac

SEQ ID NO: 1096579 - RNA, 19 nt, Artificial Sequence
  Description of Artificial Sequence: Synthetic oligonucleotide
aaagaccuugguugggaua

SEQ ID NO: 1096580 - RNA, 19 nt, Artificial Sequence
  Description of Artificial Sequence: Synthetic oligonucleotide
caggacauaguuacccgug

SEQ ID NO: 1096581 - RNA, 19 nt, Artificial Sequence
  Description of Artificial Sequence: Synthetic oligonucleotide
ggaacaugcgcuucagccc

SEQ ID NO: 1096582 - RNA, 19 nt, Artificial Sequence
  Description of Artificial Sequence: Synthetic oligonucleotide
uuuucgaugucgggaggag

SEQ ID NO: 1096583 - RNA, 19 nt, Artificial Sequence
  Description of Artificial Sequence: Synthetic oligonucleotide
ucacccucagaagucuggg

SEQ ID NO: 1096584 - RNA, 19 nt, Artificial Sequence
  Description of Artificial Sequence: Synthetic oligonucleotide
agccgauguaauuccagca

SEQ ID NO: 1096585 - RNA, 19 nt, Artificial Sequence
  Description of Artificial Sequence: Synthetic oligonucleotide
gauaagccguggaucaaug

SEQ ID NO: 1096586 - RNA, 19 nt, Artificial Sequence
  Description of Artificial Sequence: Synthetic oligonucleotide
agccauaguacuugcagua

SEQ ID NO: 1096587 - RNA, 19 nt, Artificial Sequence
  Description of Artificial Sequence: Synthetic oligonucleotide
guaacugaggcagcuggag

SEQ ID NO: 1096588 - RNA, 19 nt, Artificial Sequence
  Description of Artificial Sequence: Synthetic oligonucleotide
uccggcuucaacacccuaa

SEQ ID NO: 1096589 - RNA, 19 nt, Artificial Sequence
  Description of Artificial Sequence: Synthetic oligonucleotide
accccuagccccugccucc

SEQ ID NO: 1096590 - RNA, 19 nt, Artificial Sequence
  Description of Artificial Sequence: Synthetic oligonucleotide
ugcgauagccauaguacuu

SEQ ID NO: 1096591 - RNA, 19 nt, Artificial Sequence
  Description of Artificial Sequence: Synthetic oligonucleotide
guccgcuccauccaagggc

SEQ ID NO: 1096592 - RNA, 19 nt, Artificial Sequence
  Description of Artificial Sequence: Synthetic oligonucleotide
guuucggugagagacuuuc

SEQ ID NO: 1096593 - RNA, 19 nt, Artificial Sequence
  Description of Artificial Sequence: Synthetic oligonucleotide
ccucuaacacccuuagucc

SEQ ID NO: 1096594 - RNA, 19 nt, Artificial Sequence
  Description of Artificial Sequence: Synthetic oligonucleotide
ucgguucuggccccugugc

SEQ ID NO: 1096595 - RNA, 19 nt, Artificial Sequence
  Description of Artificial Sequence: Synthetic oligonucleotide
ggcaucucgguucuggccc

SEQ ID NO: 1096596 - RNA, 19 nt, Artificial Sequence
  Description of Artificial Sequence: Synthetic oligonucleotide
gaaggauugcgauagccau

SEQ ID NO: 1096597 - RNA, 19 nt, Artificial Sequence
  Description of Artificial Sequence: Synthetic oligonucleotide
uccgacuugcuggaagucc

SEQ ID NO: 1096598 - RNA, 19 nt, Artificial Sequence
  Description of Artificial Sequence: Synthetic oligonucleotide
aggaaucuccuucggagaa

SEQ ID NO: 1096599 - RNA, 19 nt, Artificial Sequence
  Description of Artificial Sequence: Synthetic oligonucleotide
uucggacagugguaguccc

SEQ ID NO: 1096600 - RNA, 19 nt, Artificial Sequence
  Description of Artificial Sequence: Synthetic oligonucleotide
gacgcuggaagccucugga

SEQ ID NO: 1096601 - RNA, 19 nt, Artificial Sequence
  Description of Artificial Sequence: Synthetic oligonucleotide
agacagauagugucggaua

SEQ ID NO: 1096602 - RNA, 19 nt, Artificial Sequence
  Description of Artificial Sequence: Synthetic oligonucleotide
uucauagggcugaggggca

SEQ ID NO: 1096603 - RNA, 19 nt, Artificial Sequence
  Description of Artificial Sequence: Synthetic oligonucleotide
guugaguucauagggcuga

SEQ ID NO: 1096604 - RNA, 19 nt, Artificial Sequence
  Description of Artificial Sequence: Synthetic oligonucleotide
caugguugggguuccagga

SEQ ID NO: 1096605 - RNA, 19 nt, Artificial Sequence
  Description of Artificial Sequence: Synthetic oligonucleotide
cugggcucggagacgaagc

SEQ ID NO: 1096606 - RNA, 19 nt, Artificial Sequence
  Description of Artificial Sequence: Synthetic oligonucleotide
gagguguuacuuggugugg

SEQ ID NO: 1096607 - RNA, 19 nt, Artificial Sequence
  Description of Artificial Sequence: Synthetic oligonucleotide
ugauucgaaaguaguucuu

SEQ ID NO: 1096608 - RNA, 19 nt, Artificial Sequence
  Description of Artificial Sequence: Synthetic oligonucleotide
gaaucuccuucggagaaca

SEQ ID NO: 1096609 - RNA, 19 nt, Artificial Sequence
  Description of Artificial Sequence: Synthetic oligonucleotide
gagaugccgguagaugcgg

SEQ ID NO: 1096610 - RNA, 19 nt, Artificial Sequence
  Description of Artificial Sequence: Synthetic oligonucleotide
guuacccgugacgaagacg

SEQ ID NO: 1096611 - RNA, 19 nt, Artificial Sequence
  Description of Artificial Sequence: Synthetic oligonucleotide
aggacauaguuacccguga

SEQ ID NO: 1096612 - RNA, 19 nt, Artificial Sequence
  Description of Artificial Sequence: Synthetic oligonucleotide
auaagccguggaucaaugu

SEQ ID NO: 1096613 - RNA, 19 nt, Artificial Sequence
  Description of Artificial Sequence: Synthetic oligonucleotide
aguaauucccauacuggaa

SEQ ID NO: 1096614 - RNA, 19 nt, Artificial Sequence
  Description of Artificial Sequence: Synthetic oligonucleotide
cagacacgaaagaccuugg

SEQ ID NO: 1096615 - RNA, 19 nt, Artificial Sequence
  Description of Artificial Sequence: Synthetic oligonucleotide
cucuaacacccuuagucca

SEQ ID NO: 1096616 - RNA, 19 nt, Artificial Sequence
  Description of Artificial Sequence: Synthetic oligonucleotide
uugguguggccacaagcuc

SEQ ID NO: 1096617 - RNA, 19 nt, Artificial Sequence
  Description of Artificial Sequence: Synthetic oligonucleotide
agaguggauaagccgugga

SEQ ID NO: 1096618 - RNA, 19 nt, Artificial Sequence
  Description of Artificial Sequence: Synthetic oligonucleotide
cuuagggucagauggccaa

SEQ ID NO: 1096619 - RNA, 19 nt, Artificial Sequence
  Description of Artificial Sequence: Synthetic oligonucleotide
ugggucacccucagaaguc

SEQ ID NO: 1096620 - RNA, 19 nt, Artificial Sequence
  Description of Artificial Sequence: Synthetic oligonucleotide
aggcgcacauccucgcagg

SEQ ID NO: 1096621 - RNA, 19 nt, Artificial Sequence
  Description of Artificial Sequence: Synthetic oligonucleotide
ucggauauuuuggcgggca

SEQ ID NO: 1096622 - RNA, 19 nt, Artificial Sequence
  Description of Artificial Sequence: Synthetic oligonucleotide
uuucggugagagacuuucu

SEQ ID NO: 1096623 - RNA, 19 nt, Artificial Sequence
  Description of Artificial Sequence: Synthetic oligonucleotide
ccuuaguccauccaugguc

SEQ ID NO: 1096624 - RNA, 19 nt, Artificial Sequence
  Description of Artificial Sequence: Synthetic oligonucleotide
agacacgaaagaccuuggu

SEQ ID NO: 1096625 - RNA, 19 nt, Artificial Sequence
  Description of Artificial Sequence: Synthetic oligonucleotide
ucagacagauagugucgga

SEQ ID NO: 1096626 - RNA, 19 nt, Artificial Sequence
  Description of Artificial Sequence: Synthetic oligonucleotide
ugguagucccuuccucccc

SEQ ID NO: 1096627 - RNA, 19 nt, Artificial Sequence
  Description of Artificial Sequence: Synthetic oligonucleotide
cacccuuaguccauccaug

SEQ ID NO: 1096628 - RNA, 19 nt, Artificial Sequence
  Description of Artificial Sequence: Synthetic oligonucleotide
cacaguaccugugugucuc

SEQ ID NO: 1096629 - RNA, 19 nt, Artificial Sequence
  Description of Artificial Sequence: Synthetic oligonucleotide
gaugucgggaggaggaaga

SEQ ID NO: 1096630 - RNA, 19 nt, Artificial Sequence
  Description of Artificial Sequence: Synthetic oligonucleotide
aagucugggcucggagacg

SEQ ID NO: 1096631 - RNA, 19 nt, Artificial Sequence
  Description of Artificial Sequence: Synthetic oligonucleotide
caguugauggcuguguuga

SEQ ID NO: 1096632 - RNA, 19 nt, Artificial Sequence
  Description of Artificial Sequence: Synthetic oligonucleotide
cggaacaugcgcuucagcc

SEQ ID NO: 1096633 - RNA, 19 nt, Artificial Sequence
  Description of Artificial Sequence: Synthetic oligonucleotide
acgucccggccuugaaacc

SEQ ID NO: 1096634 - RNA, 19 nt, Artificial Sequence
  Description of Artificial Sequence: Synthetic oligonucleotide
ccucagacagauagugucg

SEQ ID NO: 1096635 - RNA, 19 nt, Artificial Sequence
  Description of Artificial Sequence: Synthetic oligonucleotide
ccuaggaggacagagucag

SEQ ID NO: 1096636 - RNA, 19 nt, Artificial Sequence
  Description of Artificial Sequence: Synthetic oligonucleotide
gccuagagaauugacauuc

SEQ ID NO: 1096637 - RNA, 19 nt, Artificial Sequence
  Description of Artificial Sequence: Synthetic oligonucleotide
gaugucagguaggaacuga

SEQ ID NO: 1096638 - RNA, 19 nt, Artificial Sequence
  Description of Artificial Sequence: Synthetic oligonucleotide
aguccugcgucguuuucga

SEQ ID NO: 1096639 - RNA, 19 nt, Artificial Sequence
  Description of Artificial Sequence: Synthetic oligonucleotide
agaggaagccgauguaauu

SEQ ID NO: 1096640 - RNA, 19 nt, Artificial Sequence
  Description of Artificial Sequence: Synthetic oligonucleotide
aauucccauacuggaacuu

SEQ ID NO: 1096641 - RNA, 19 nt, Artificial Sequence
  Description of Artificial Sequence: Synthetic oligonucleotide
agacacaacuucaucccug

SEQ ID NO: 1096642 - RNA, 19 nt, Artificial Sequence
  Description of Artificial Sequence: Synthetic oligonucleotide
cacggcccuaguuaucaag

SEQ ID NO: 1096643 - RNA, 19 nt, Artificial Sequence
  Description of Artificial Sequence: Synthetic oligonucleotide
ugcaggcaauacuuagggu

SEQ ID NO: 1096644 - RNA, 19 nt, Artificial Sequence
  Description of Artificial Sequence: Synthetic oligonucleotide
ucuaggacgucccggccuu

SEQ ID NO: 1096645 - RNA, 19 nt, Artificial Sequence
  Description of Artificial Sequence: Synthetic oligonucleotide
caccuucuguccagaaggc

SEQ ID NO: 1096646 - RNA, 19 nt, Artificial Sequence
  Description of Artificial Sequence: Synthetic oligonucleotide
gacagauagugucggauau

SEQ ID NO: 1096647 - RNA, 19 nt, Artificial Sequence
  Description of Artificial Sequence: Synthetic oligonucleotide
agcaggcucggagaggaag

SEQ ID NO: 1096648 - RNA, 19 nt, Artificial Sequence
  Description of Artificial Sequence: Synthetic oligonucleotide
caccaugcgggcugggccc

SEQ ID NO: 1096649 - RNA, 19 nt, Artificial Sequence
  Description of Artificial Sequence: Synthetic oligonucleotide
auuguuucggugagagacu

SEQ ID NO: 1096650 - RNA, 19 nt, Artificial Sequence
  Description of Artificial Sequence: Synthetic oligonucleotide
agggccuagagaauugaca

SEQ ID NO: 1096651 - RNA, 19 nt, Artificial Sequence
  Description of Artificial Sequence: Synthetic oligonucleotide
ucgcaggaaggauugcgau

SEQ ID NO: 1096652 - RNA, 19 nt, Artificial Sequence
  Description of Artificial Sequence: Synthetic oligonucleotide
cguggaucaauguccagcc

SEQ ID NO: 1096653 - RNA, 19 nt, Artificial Sequence
  Description of Artificial Sequence: Synthetic oligonucleotide
agauuguuucggugagaga

SEQ ID NO: 1096654 - RNA, 19 nt, Artificial Sequence
  Description of Artificial Sequence: Synthetic oligonucleotide
acgaaagaccuugguuggg

SEQ ID NO: 1096655 - RNA, 19 nt, Artificial Sequence
  Description of Artificial Sequence: Synthetic oligonucleotide
cagggagaagacuucggga

SEQ ID NO: 1096656 - RNA, 19 nt, Artificial Sequence
  Description of Artificial Sequence: Synthetic oligonucleotide
gccgauguaauuccagcac

SEQ ID NO: 1096657 - RNA, 19 nt, Artificial Sequence
  Description of Artificial Sequence: Synthetic oligonucleotide
aagcccaccucuggggaug

SEQ ID NO: 1096658 - RNA, 19 nt, Artificial Sequence
  Description of Artificial Sequence: Synthetic oligonucleotide
gaacugaacuguucuggcu

SEQ ID NO: 1096659 - RNA, 19 nt, Artificial Sequence
  Description of Artificial Sequence: Synthetic oligonucleotide
agaaacucugcagggcaga

SEQ ID NO: 1096660 - RNA, 19 nt, Artificial Sequence
  Description of Artificial Sequence: Synthetic oligonucleotide
gaacgggccuuguggaaca

SEQ ID NO: 1096661 - RNA, 19 nt, Artificial Sequence
  Description of Artificial Sequence: Synthetic oligonucleotide
gggagaagacuucgggaag

SEQ ID NO: 1096662 - RNA, 19 nt, Artificial Sequence
  Description of Artificial Sequence: Synthetic oligonucleotide
ggcucggagacgaagcucc

SEQ ID NO: 1096663 - RNA, 19 nt, Artificial Sequence
  Description of Artificial Sequence: Synthetic oligonucleotide
caggucuuugggcauccac

SEQ ID NO: 1096664 - RNA, 19 nt, Artificial Sequence
  Description of Artificial Sequence: Synthetic oligonucleotide
ccagacacgaaagaccuug

SEQ ID NO: 1096665 - RNA, 19 nt, Artificial Sequence
  Description of Artificial Sequence: Synthetic oligonucleotide
ucgguccaggacauaguua

SEQ ID NO: 1096666 - RNA, 19 nt, Artificial Sequence
  Description of Artificial Sequence: Synthetic oligonucleotide
ucggacagugguagucccu

SEQ ID NO: 1096667 - RNA, 19 nt, Artificial Sequence
  Description of Artificial Sequence: Synthetic oligonucleotide
ugguugggauaauuuccuc

SEQ ID NO: 1096668 - RNA, 19 nt, Artificial Sequence
  Description of Artificial Sequence: Synthetic oligonucleotide
cucgcaggaaggauugcga

SEQ ID NO: 1096669 - RNA, 19 nt, Artificial Sequence
  Description of Artificial Sequence: Synthetic oligonucleotide
uuguuucggugagagacuu

SEQ ID NO: 1096670 - RNA, 19 nt, Artificial Sequence
  Description of Artificial Sequence: Synthetic oligonucleotide
gaacccuggcuuccacccc

SEQ ID NO: 1096671 - RNA, 19 nt, Artificial Sequence
  Description of Artificial Sequence: Synthetic oligonucleotide
gugcagcuaggaacaaagg

SEQ ID NO: 1096672 - RNA, 19 nt, Artificial Sequence
  Description of Artificial Sequence: Synthetic oligonucleotide
agucugggcucggagacga

SEQ ID NO: 1096673 - RNA, 19 nt, Artificial Sequence
  Description of Artificial Sequence: Synthetic oligonucleotide
cagaguggauaagccgugg

SEQ ID NO: 1096674 - RNA, 19 nt, Artificial Sequence
  Description of Artificial Sequence: Synthetic oligonucleotide
uuagggucagauggccaac

SEQ ID NO: 1096675 - RNA, 19 nt, Artificial Sequence
  Description of Artificial Sequence: Synthetic oligonucleotide
cacccucagaagucugggc

SEQ ID NO: 1096676 - RNA, 19 nt, Artificial Sequence
  Description of Artificial Sequence: Synthetic oligonucleotide
agaugccgguagaugcggc

SEQ ID NO: 1096677 - RNA, 19 nt, Artificial Sequence
  Description of Artificial Sequence: Synthetic oligonucleotide
caaggguagccucuucaca

SEQ ID NO: 1096678 - RNA, 19 nt, Artificial Sequence
  Description of Artificial Sequence: Synthetic oligonucleotide
guggaucaauguccagccc

SEQ ID NO: 1096679 - RNA, 19 nt, Artificial Sequence
  Description of Artificial Sequence: Synthetic oligonucleotide
gaagggccuagagaauuga

SEQ ID NO: 1096680 - RNA, 19 nt, Artificial Sequence
  Description of Artificial Sequence: Synthetic oligonucleotide
auccucgcaggaaggauug

SEQ ID NO: 1096681 - RNA, 19 nt, Artificial Sequence
  Description of Artificial Sequence: Synthetic oligonucleotide
uucacaccuucuguccaga

SEQ ID NO: 1096682 - RNA, 19 nt, Artificial Sequence
  Description of Artificial Sequence: Synthetic oligonucleotide
aaggauugcgauagccaua

SEQ ID NO: 1096683 - RNA, 19 nt, Artificial Sequence
  Description of Artificial Sequence: Synthetic oligonucleotide
guaccugugugucuccuua

SEQ ID NO: 1096684 - RNA, 19 nt, Artificial Sequence
  Description of Artificial Sequence: Synthetic oligonucleotide
ugccgguagaugcggcgga

SEQ ID NO: 1096685 - RNA, 19 nt, Artificial Sequence
  Description of Artificial Sequence: Synthetic oligonucleotide
gcgauagccauaguacuug

SEQ ID NO: 1096686 - RNA, 19 nt, Artificial Sequence
  Description of Artificial Sequence: Synthetic oligonucleotide
cgauguaauuccagcacag

SEQ ID NO: 1096687 - RNA, 19 nt, Artificial Sequence
  Description of Artificial Sequence: Synthetic oligonucleotide
cauuguuggggaagacaga

SEQ ID NO: 1096688 - RNA, 19 nt, Artificial Sequence
  Description of Artificial Sequence: Synthetic oligonucleotide
gguugggauaauuuccucu

SEQ ID NO: 1096689 - RNA, 19 nt, Artificial Sequence
  Description of Artificial Sequence: Synthetic oligonucleotide
acggcccuaguuaucaagu

SEQ ID NO: 1096690 - RNA, 19 nt, Artificial Sequence
  Description of Artificial Sequence: Synthetic oligonucleotide
cuuaccaaacuuccccucu

SEQ ID NO: 1096691 - RNA, 19 nt, Artificial Sequence
  Description of Artificial Sequence: Synthetic oligonucleotide
cagaugcacccacuuggug

SEQ ID NO: 1096692 - RNA, 19 nt, Artificial Sequence
  Description of Artificial Sequence: Synthetic oligonucleotide
ggacauaguuacccgugac

SEQ ID NO: 1096693 - RNA, 19 nt, Artificial Sequence
  Description of Artificial Sequence: Synthetic oligonucleotide
ggccuugaaaccacuccgg

SEQ ID NO: 1096694 - RNA, 19 nt, Artificial Sequence
  Description of Artificial Sequence: Synthetic oligonucleotide
uggcgggcagaguggauaa

SEQ ID NO: 1096695 - RNA, 19 nt, Artificial Sequence
  Description of Artificial Sequence: Synthetic oligonucleotide
cauaguuacccgugacgaa

SEQ ID NO: 1096696 - RNA, 19 nt, Artificial Sequence
  Description of Artificial Sequence: Synthetic oligonucleotide
ccuucggagaacaggagga

SEQ ID NO: 1096697 - RNA, 19 nt, Artificial Sequence
  Description of Artificial Sequence: Synthetic oligonucleotide
gcaaggguagccucuucac

SEQ ID NO: 1096698 - RNA, 19 nt, Artificial Sequence
  Description of Artificial Sequence: Synthetic oligonucleotide
gaguggauaagccguggau

SEQ ID NO: 1096699 - RNA, 19 nt, Artificial Sequence
  Description of Artificial Sequence: Synthetic oligonucleotide
acccgugacgaagacgaca

SEQ ID NO: 1096700 - RNA, 19 nt, Artificial Sequence
  Description of Artificial Sequence: Synthetic oligonucleotide
cauaguacuugcaguaauu

SEQ ID NO: 1096701 - RNA, 19 nt, Artificial Sequence
  Description of Artificial Sequence: Synthetic oligonucleotide
gccuugaaaccacuccggc

SEQ ID NO: 1096702 - RNA, 19 nt, Artificial Sequence
  Description of Artificial Sequence: Synthetic oligonucleotide
auugugcuguucucacauu

SEQ ID NO: 1096703 - RNA, 19 nt, Artificial Sequence
  Description of Artificial Sequence: Synthetic oligonucleotide
ucacaccuucuguccagaa

SEQ ID NO: 1096704 - RNA, 19 nt, Artificial Sequence
  Description of Artificial Sequence: Synthetic oligonucleotide
cgugacgaagacgacauug

SEQ ID NO: 1096705 - RNA, 19 nt, Artificial Sequence
  Description of Artificial Sequence: Synthetic oligonucleotide
ggcuuccaccccuagcccc

SEQ ID NO: 1096706 - RNA, 19 nt, Artificial Sequence
  Description of Artificial Sequence: Synthetic oligonucleotide
acacccuaaggcgcacauc

SEQ ID NO: 1096707 - RNA, 19 nt, Artificial Sequence
  Description of Artificial Sequence: Synthetic oligonucleotide
gaaagaccuugguugggau

SEQ ID NO: 1096708 - RNA, 19 nt, Artificial Sequence
  Description of Artificial Sequence: Synthetic oligonucleotide
aggcucggagaggaagccg

SEQ ID NO: 1096709 - RNA, 19 nt, Artificial Sequence
  Description of Artificial Sequence: Synthetic oligonucleotide
uguuucggugagagacuuu

SEQ ID NO: 1096710 - RNA, 19 nt, Artificial Sequence
  Description of Artificial Sequence: Synthetic oligonucleotide
cuuguggaacaaguacaca

SEQ ID NO: 1096711 - RNA, 19 nt, Artificial Sequence
  Description of Artificial Sequence: Synthetic oligonucleotide
auauuuuggcgggcagagu

SEQ ID NO: 1096712 - RNA, 19 nt, Artificial Sequence
  Description of Artificial Sequence: Synthetic oligonucleotide
cugggucacccucagaagu

SEQ ID NO: 1096713 - RNA, 19 nt, Artificial Sequence
  Description of Artificial Sequence: Synthetic oligonucleotide
caggcucggagaggaagcc

SEQ ID NO: 1096714 - RNA, 19 nt, Artificial Sequence
  Description of Artificial Sequence: Synthetic oligonucleotide
aguacacaggacgcuggaa

SEQ ID NO: 1096715 - RNA, 19 nt, Artificial Sequence
  Description of Artificial Sequence: Synthetic oligonucleotide
uggauaagccguggaucaa

SEQ ID NO: 1096716 - RNA, 19 nt, Artificial Sequence
  Description of Artificial Sequence: Synthetic oligonucleotide
cggccuugaaaccacuccg

SEQ ID NO: 1096717 - RNA, 19 nt, Artificial Sequence
  Description of Artificial Sequence: Synthetic oligonucleotide
cgcacauccucgcaggaag

SEQ ID NO: 1096718 - RNA, 19 nt, Artificial Sequence
  Description of Artificial Sequence: Synthetic oligonucleotide
ucaacacccuaaggcgcac

SEQ ID NO: 1096719 - RNA, 19 nt, Artificial Sequence
  Description of Artificial Sequence: Synthetic oligonucleotide
ggaacgggccuuguggaac

SEQ ID NO: 1096720 - RNA, 19 nt, Artificial Sequence
  Description of Artificial Sequence: Synthetic oligonucleotide
ugggaccccggcuggcugu

SEQ ID NO: 1096721 - RNA, 19 nt, Artificial Sequence
  Description of Artificial Sequence: Synthetic oligonucleotide
gcgucguuuucgaugucgg

SEQ ID NO: 1096722 - RNA, 19 nt, Artificial Sequence
  Description of Artificial Sequence: Synthetic oligonucleotide
ccggcuucaacacccuaag

SEQ ID NO: 1096723 - RNA, 19 nt, Artificial Sequence
  Description of Artificial Sequence: Synthetic oligonucleotide
ccucgcaggaaggauugcg

SEQ ID NO: 1096724 - RNA, 19 nt, Artificial Sequence
  Description of Artificial Sequence: Synthetic oligonucleotide
ucuguccagaaggccacuu

SEQ ID NO: 1096725 - RNA, 19 nt, Artificial Sequence
  Description of Artificial Sequence: Synthetic oligonucleotide
caccccuagccccugccuc

SEQ ID NO: 1096726 - RNA, 19 nt, Artificial Sequence
  Description of Artificial Sequence: Synthetic oligonucleotide
ggaagggccuagagaauug

SEQ ID NO: 1096727 - RNA, 19 nt, Artificial Sequence
  Description of Artificial Sequence: Synthetic oligonucleotide
agccguggaucaaugucca

SEQ ID NO: 1096728 - RNA, 19 nt, Artificial Sequence
  Description of Artificial Sequence: Synthetic oligonucleotide
ccagaucuaggacgucccg

SEQ ID NO: 1096729 - RNA, 19 nt, Artificial Sequence
  Description of Artificial Sequence: Synthetic oligonucleotide
gggugcagcgaugggaccc

SEQ ID NO: 1096730 - RNA, 19 nt, Artificial Sequence
  Description of Artificial Sequence: Synthetic oligonucleotide
ugcggcggaacaugcgcuu

SEQ ID NO: 1096731 - RNA, 19 nt, Artificial Sequence
  Description of Artificial Sequence: Synthetic oligonucleotide
gucggauauuuuggcgggc

SEQ ID NO: 1096732 - RNA, 19 nt, Artificial Sequence
  Description of Artificial Sequence: Synthetic oligonucleotide
ucgaugucgggaggaggaa

SEQ ID NO: 1096733 - RNA, 19 nt, Artificial Sequence
  Description of Artificial Sequence: Synthetic oligonucleotide
uaggacgucccggccuuga

SEQ ID NO: 1096734 - RNA, 19 nt, Artificial Sequence
  Description of Artificial Sequence: Synthetic oligonucleotide
cucggagaggaagccgaug

SEQ ID NO: 1096735 - RNA, 19 nt, Artificial Sequence
  Description of Artificial Sequence: Synthetic oligonucleotide
aggggagacacaacuucau

SEQ ID NO: 1096736 - RNA, 19 nt, Artificial Sequence
  Description of Artificial Sequence: Synthetic oligonucleotide
agaauaccgccagggcgga

SEQ ID NO: 1096737 - RNA, 19 nt, Artificial Sequence
  Description of Artificial Sequence: Synthetic oligonucleotide
ccgauguaauuccagcaca

SEQ ID NO: 1096738 - RNA, 19 nt, Artificial Sequence
  Description of Artificial Sequence: Synthetic oligonucleotide
cgaaaguaguucuuauaga

SEQ ID NO: 1096739 - RNA, 19 nt, Artificial Sequence
  Description of Artificial Sequence: Synthetic oligonucleotide
ccuuaccaaacuuccccuc

SEQ ID NO: 1096740 - RNA, 19 nt, Artificial Sequence
  Description of Artificial Sequence: Synthetic oligonucleotide
aggccacuuaguggcuggg

SEQ ID NO: 1096741 - RNA, 19 nt, Artificial Sequence
  Description of Artificial Sequence: Synthetic oligonucleotide
gcaggcucggagaggaagc

SEQ ID NO: 1096742 - RNA, 19 nt, Artificial Sequence
  Description of Artificial Sequence: Synthetic oligonucleotide
gaaaccacuccggcuucaa

SEQ ID NO: 1096743 - RNA, 19 nt, Artificial Sequence
  Description of Artificial Sequence: Synthetic oligonucleotide
cagauagugucggauauuu

SEQ ID NO: 1096744 - RNA, 19 nt, Artificial Sequence
  Description of Artificial Sequence: Synthetic oligonucleotide
cacaucauauucaggucuu

SEQ ID NO: 1096745 - RNA, 19 nt, Artificial Sequence
  Description of Artificial Sequence: Synthetic oligonucleotide
cucgucaccccaguucaga

SEQ ID NO: 1096746 - RNA, 19 nt, Artificial Sequence
  Description of Artificial Sequence: Synthetic oligonucleotide
acaucauauucaggucuuu

SEQ ID NO: 1096747 - RNA, 19 nt, Artificial Sequence
  Description of Artificial Sequence: Synthetic oligonucleotide
gcagaguggauaagccgug

SEQ ID NO: 1096748 - RNA, 19 nt, Artificial Sequence
  Description of Artificial Sequence: Synthetic oligonucleotide
gccagggcggagaugccgg

SEQ ID NO: 1096749 - RNA, 19 nt, Artificial Sequence
  Description of Artificial Sequence: Synthetic oligonucleotide
cgauagccauaguacuugc

SEQ ID NO: 1096750 - RNA, 19 nt, Artificial Sequence
  Description of Artificial Sequence: Synthetic oligonucleotide
ggaaucuccuucggagaac

SEQ ID NO: 1096751 - RNA, 19 nt, Artificial Sequence
  Description of Artificial Sequence: Synthetic oligonucleotide
agauagugucggauauuuu

SEQ ID NO: 1096752 - RNA, 19 nt, Artificial Sequence
  Description of Artificial Sequence: Synthetic oligonucleotide
uccucgcaggaaggauugc

SEQ ID NO: 1096753 - RNA, 19 nt, Artificial Sequence
  Description of Artificial Sequence: Synthetic oligonucleotide
cccuaaggcgcacauccuc

SEQ ID NO: 1096754 - RNA, 19 nt, Artificial Sequence
  Description of Artificial Sequence: Synthetic oligonucleotide
cuucggagaacaggaggaa

SEQ ID NO: 1096755 - RNA, 19 nt, Artificial Sequence
  Description of Artificial Sequence: Synthetic oligonucleotide
guccacuuaagugcagcua

SEQ ID NO: 1096756 - RNA, 19 nt, Artificial Sequence
  Description of Artificial Sequence: Synthetic oligonucleotide
ccugugugucuccuuacca

SEQ ID NO: 1096757 - RNA, 19 nt, Artificial Sequence
  Description of Artificial Sequence: Synthetic oligonucleotide
ggccacuuaguggcugggg

SEQ ID NO: 1096758 - RNA, 19 nt, Artificial Sequence
  Description of Artificial Sequence: Synthetic oligonucleotide
gaauaccgccagggcggag

SEQ ID NO: 1096759 - RNA, 19 nt, Artificial Sequence
  Description of Artificial Sequence: Synthetic oligonucleotide
ggugcagcgaugggacccc

SEQ ID NO: 1096760 - RNA, 19 nt, Artificial Sequence
  Description of Artificial Sequence: Synthetic oligonucleotide
gggaugucagguaggaacu

SEQ ID NO: 1096761 - RNA, 19 nt, Artificial Sequence
  Description of Artificial Sequence: Synthetic oligonucleotide
cucggagacgaagcuccuc

SEQ ID NO: 1096762 - RNA, 19 nt, Artificial Sequence
  Description of Artificial Sequence: Synthetic oligonucleotide
cagacagauagugucggau

SEQ ID NO: 1096763 - RNA, 19 nt, Artificial Sequence
  Description of Artificial Sequence: Synthetic oligonucleotide
augucgggaggaggaagau

SEQ ID NO: 1096764 - RNA, 19 nt, Artificial Sequence
  Description of Artificial Sequence: Synthetic oligonucleotide
aggacgcuggaagccucug

SEQ ID NO: 1096765 - RNA, 19 nt, Artificial Sequence
  Description of Artificial Sequence: Synthetic oligonucleotide
cuguccagaaggccacuua

SEQ ID NO: 1096766 - RNA, 19 nt, Artificial Sequence
  Description of Artificial Sequence: Synthetic oligonucleotide
ccugcgucguuuucgaugu

SEQ ID NO: 1096767 - RNA, 19 nt, Artificial Sequence
  Description of Artificial Sequence: Synthetic oligonucleotide
gcggagaugccgguagaug

SEQ ID NO: 1096768 - RNA, 19 nt, Artificial Sequence
  Description of Artificial Sequence: Synthetic oligonucleotide
cgucguuuucgaugucggg

SEQ ID NO: 1096769 - RNA, 19 nt, Artificial Sequence
  Description of Artificial Sequence: Synthetic oligonucleotide
gaagcccaccucuggggau

SEQ ID NO: 1096770 - RNA, 19 nt, Artificial Sequence
  Description of Artificial Sequence: Synthetic oligonucleotide
cguuuucgaugucgggagg

SEQ ID NO: 1096771 - RNA, 19 nt, Artificial Sequence
  Description of Artificial Sequence: Synthetic oligonucleotide
ccaagggcacuuggggugc

SEQ ID NO: 1096772 - RNA, 19 nt, Artificial Sequence
  Description of Artificial Sequence: Synthetic oligonucleotide
cucgguccaggacauaguu

SEQ ID NO: 1096773 - RNA, 19 nt, Artificial Sequence
  Description of Artificial Sequence: Synthetic oligonucleotide
agcccagaucuaggacguc

SEQ ID NO: 1096774 - RNA, 19 nt, Artificial Sequence
  Description of Artificial Sequence: Synthetic oligonucleotide
gucccggccuugaaaccac

SEQ ID NO: 1096775 - RNA, 19 nt, Artificial Sequence
  Description of Artificial Sequence: Synthetic oligonucleotide
acgaagcuccucagacaga

SEQ ID NO: 1096776 - RNA, 19 nt, Artificial Sequence
  Description of Artificial Sequence: Synthetic oligonucleotide
cggauauuuuggcgggcag

SEQ ID NO: 1096777 - RNA, 19 nt, Artificial Sequence
  Description of Artificial Sequence: Synthetic oligonucleotide
ggacgucccggccuugaaa

SEQ ID NO: 1096778 - RNA, 19 nt, Artificial Sequence
  Description of Artificial Sequence: Synthetic oligonucleotide
gccguggaucaauguccag

SEQ ID NO: 1096779 - RNA, 19 nt, Artificial Sequence
  Description of Artificial Sequence: Synthetic oligonucleotide
cccacuugcaggcaauacu

SEQ ID NO: 1096780 - RNA, 19 nt, Artificial Sequence
  Description of Artificial Sequence: Synthetic oligonucleotide
agaccuugguugggauaau

SEQ ID NO: 1096781 - RNA, 19 nt, Artificial Sequence
  Description of Artificial Sequence: Synthetic oligonucleotide
cacaggacgcuggaagccu

SEQ ID NO: 1096782 - RNA, 19 nt, Artificial Sequence
  Description of Artificial Sequence: Synthetic oligonucleotide
gggaacgggccuuguggaa

SEQ ID NO: 1096783 - RNA, 19 nt, Artificial Sequence
  Description of Artificial Sequence: Synthetic oligonucleotide
ggauaagccguggaucaau

SEQ ID NO: 1096784 - RNA, 19 nt, Artificial Sequence
  Description of Artificial Sequence: Synthetic oligonucleotide
ccaggacauaguuacccgu

SEQ ID NO: 1096785 - RNA, 19 nt, Artificial Sequence
  Description of Artificial Sequence: Synthetic oligonucleotide
cuaggacgucccggccuug

SEQ ID NO: 1096786 - RNA, 19 nt, Artificial Sequence
  Description of Artificial Sequence: Synthetic oligonucleotide
cggcuucaacacccuaagg

SEQ ID NO: 1096787 - RNA, 19 nt, Artificial Sequence
  Description of Artificial Sequence: Synthetic oligonucleotide
caugcccuaggaggacaga

SEQ ID NO: 1096788 - RNA, 19 nt, Artificial Sequence
  Description of Artificial Sequence: Synthetic oligonucleotide
cccgugacgaagacgacau

SEQ ID NO: 1096789 - RNA, 19 nt, Artificial Sequence
  Description of Artificial Sequence: Synthetic oligonucleotide
cggagacgaagcuccucag

SEQ ID NO: 1096790 - RNA, 19 nt, Artificial Sequence
  Description of Artificial Sequence: Synthetic oligonucleotide
cgaaagaccuugguuggga

SEQ ID NO: 1096791 - RNA, 19 nt, Artificial Sequence
  Description of Artificial Sequence: Synthetic oligonucleotide
caacuucaucccugcaguu

SEQ ID NO: 1096792 - RNA, 19 nt, Artificial Sequence
  Description of Artificial Sequence: Synthetic oligonucleotide
gcacuuggggugcagcgau

SEQ ID NO: 1096793 - RNA, 19 nt, Artificial Sequence
  Description of Artificial Sequence: Synthetic oligonucleotide
guccacggcccuaguuauc

SEQ ID NO: 1096794 - RNA, 19 nt, Artificial Sequence
  Description of Artificial Sequence: Synthetic oligonucleotide
cccaccaugcgggcugggc

SEQ ID NO: 1096795 - RNA, 19 nt, Artificial Sequence
  Description of Artificial Sequence: Synthetic oligonucleotide
gggcucggagacgaagcuc

SEQ ID NO: 1096796 - RNA, 19 nt, Artificial Sequence
  Description of Artificial Sequence: Synthetic oligonucleotide
caggacgcuggaagccucu

SEQ ID NO: 1096797 - RNA, 19 nt, Artificial Sequence
  Description of Artificial Sequence: Synthetic oligonucleotide
cugcgucguuuucgauguc

SEQ ID NO: 1096798 - RNA, 19 nt, Artificial Sequence
  Description of Artificial Sequence: Synthetic oligonucleotide
ggccuagagaauugacauu

SEQ ID NO: 1096799 - RNA, 19 nt, Artificial Sequence
  Description of Artificial Sequence: Synthetic oligonucleotide
ccuccgacuugcuggaagu

SEQ ID NO: 1096800 - RNA, 19 nt, Artificial Sequence
  Description of Artificial Sequence: Synthetic oligonucleotide
ccgguagaugcggcggaac

SEQ ID NO: 1096801 - RNA, 19 nt, Artificial Sequence
  Description of Artificial Sequence: Synthetic oligonucleotide
cagcgaugggaccccggcu

SEQ ID NO: 1096802 - RNA, 19 nt, Artificial Sequence
  Description of Artificial Sequence: Synthetic oligonucleotide
cgcaggaaggauugcgaua

SEQ ID NO: 1096803 - RNA, 19 nt, Artificial Sequence
  Description of Artificial Sequence: Synthetic oligonucleotide
ccccuagccccugccuccg

SEQ ID NO: 1096804 - RNA, 19 nt, Artificial Sequence
  Description of Artificial Sequence: Synthetic oligonucleotide
cccuaguuaucaaguuuau

SEQ ID NO: 1096805 - RNA, 19 nt, Artificial Sequence
  Description of Artificial Sequence: Synthetic oligonucleotide
cgucccggccuugaaacca

SEQ ID NO: 1096806 - RNA, 19 nt, Artificial Sequence
  Description of Artificial Sequence: Synthetic oligonucleotide
gcgcacauccucgcaggaa

SEQ ID NO: 1096807 - RNA, 19 nt, Artificial Sequence
  Description of Artificial Sequence: Synthetic oligonucleotide
cagcaggcucggagaggaa

SEQ ID NO: 1096808 - RNA, 19 nt, Artificial Sequence
  Description of Artificial Sequence: Synthetic oligonucleotide
ccuaguuaucaaguuuauu

SEQ ID NO: 1096809 - RNA, 19 nt, Artificial Sequence
  Description of Artificial Sequence: Synthetic oligonucleotide
cccuuaguccauccauggu

SEQ ID NO: 1096810 - RNA, 19 nt, Artificial Sequence
  Description of Artificial Sequence: Synthetic oligonucleotide
guccugcgucguuuucgau

SEQ ID NO: 1096811 - RNA, 19 nt, Artificial Sequence
  Description of Artificial Sequence: Synthetic oligonucleotide
ggcggagaugccgguagau

SEQ ID NO: 1096812 - RNA, 19 nt, Artificial Sequence
  Description of Artificial Sequence: Synthetic oligonucleotide
gccgguagaugcggcggaa

SEQ ID NO: 1096813 - RNA, 19 nt, Artificial Sequence
  Description of Artificial Sequence: Synthetic oligonucleotide
ggauugcgauagccauagu

SEQ ID NO: 1096814 - RNA, 19 nt, Artificial Sequence
  Description of Artificial Sequence: Synthetic oligonucleotide
caucucgguccaggacaua

SEQ ID NO: 1096815 - RNA, 19 nt, Artificial Sequence
  Description of Artificial Sequence: Synthetic oligonucleotide
gccccacuugcaggcaaua

SEQ ID NO: 1096816 - RNA, 19 nt, Artificial Sequence
  Description of Artificial Sequence: Synthetic oligonucleotide
ccaccccuagccccugccu

SEQ ID NO: 1096817 - RNA, 19 nt, Artificial Sequence
  Description of Artificial Sequence: Synthetic oligonucleotide
gcucggagaggaagccgau

SEQ ID NO: 1096818 - RNA, 19 nt, Artificial Sequence
  Description of Artificial Sequence: Synthetic oligonucleotide
ggccccacuugcaggcaau

SEQ ID NO: 1096819 - RNA, 19 nt, Artificial Sequence
  Description of Artificial Sequence: Synthetic oligonucleotide
gccagacacgaaagaccuu

SEQ ID NO: 1096820 - RNA, 19 nt, Artificial Sequence
  Description of Artificial Sequence: Synthetic oligonucleotide
cggcccuaguuaucaaguu

SEQ ID NO: 1096821 - RNA, 19 nt, Artificial Sequence
  Description of Artificial Sequence: Synthetic oligonucleotide
ccacucccuuugcccuucu

SEQ ID NO: 1096822 - RNA, 19 nt, Artificial Sequence
  Description of Artificial Sequence: Synthetic oligonucleotide
ccgugacgaagacgacauu

SEQ ID NO: 1096823 - RNA, 19 nt, Artificial Sequence
  Description of Artificial Sequence: Synthetic oligonucleotide
aacagaacaacucacgugg

SEQ ID NO: 1096824 - RNA, 19 nt, Artificial Sequence
  Description of Artificial Sequence: Synthetic oligonucleotide
aauaaugagucuuggauca

SEQ ID NO: 1096825 - RNA, 19 nt, Artificial Sequence
  Description of Artificial Sequence: Synthetic oligonucleotide
auugugauagaccaaauca

SEQ ID NO: 1096826 - RNA, 19 nt, Artificial Sequence
  Description of Artificial Sequence: Synthetic oligonucleotide
acaagaaucagacucugac

SEQ ID NO: 1096827 - RNA, 19 nt, Artificial Sequence
  Description of Artificial Sequence: Synthetic oligonucleotide
  modified_base (17)..(17): a, c, u, g, unknown or other
aaaaggugauccccganac

SEQ ID NO: 1096828 - RNA, 19 nt, Artificial Sequence
  Description of Artificial Sequence: Synthetic oligonucleotide
ucuuggaucaaucaacucu

SEQ ID NO: 1096829 - RNA, 19 nt, Artificial Sequence
  Description of Artificial Sequence: Synthetic oligonucleotide
  modified_base (3)..(3): a, c, u, g, unknown or other
ganacugugauauugcaga

SEQ ID NO: 1096830 - RNA, 19 nt, Artificial Sequence
  Description of Artificial Sequence: Synthetic oligonucleotide
ucaaauugaagccguagcc

SEQ ID NO: 1096831 - RNA, 19 nt, Artificial Sequence
  Description of Artificial Sequence: Synthetic oligonucleotide
acuacuuagagacugccag

SEQ ID NO: 1096832 - RNA, 19 nt, Artificial Sequence
  Description of Artificial Sequence: Synthetic oligonucleotide
aaauacuacuuagagacug

SEQ ID NO: 1096833 - RNA, 19 nt, Artificial Sequence
  Description of Artificial Sequence: Synthetic oligonucleotide
aaacuaacacccauguuac

SEQ ID NO: 1096834 - RNA, 19 nt, Artificial Sequence
  Description of Artificial Sequence: Synthetic oligonucleotide
aaucuuuucaccgacuuga

SEQ ID NO: 1096835 - RNA, 19 nt, Artificial Sequence
  Description of Artificial Sequence: Synthetic oligonucleotide
gaagauaacagaaagucca

SEQ ID NO: 1096836 - RNA, 19 nt, Artificial Sequence
  Description of Artificial Sequence: Synthetic oligonucleotide
gauagucaaauugaagccg

SEQ ID NO: 1096837 - RNA, 19 nt, Artificial Sequence
  Description of Artificial Sequence: Synthetic oligonucleotide
ugauagaccaaaucaaacu

SEQ ID NO: 1096838 - RNA, 19 nt, Artificial Sequence
  Description of Artificial Sequence: Synthetic oligonucleotide
uggguuacugaauuuagcc

SEQ ID NO: 1096839 - RNA, 19 nt, Artificial Sequence
  Description of Artificial Sequence: Synthetic oligonucleotide
uucuaauaugguaaaguga

SEQ ID NO: 1096840 - RNA, 19 nt, Artificial Sequence
  Description of Artificial Sequence: Synthetic oligonucleotide
uuaacagaacaacucacgu

SEQ ID NO: 1096841 - RNA, 19 nt, Artificial Sequence
  Description of Artificial Sequence: Synthetic oligonucleotide
cuggacaagaaucagacuc

SEQ ID NO: 1096842 - RNA, 19 nt, Artificial Sequence
  Description of Artificial Sequence: Synthetic oligonucleotide
ugaauuuagccugagagaa

SEQ ID NO: 1096843 - RNA, 19 nt, Artificial Sequence
  Description of Artificial Sequence: Synthetic oligonucleotide
uagaccaaaucaaacuugc

SEQ ID NO: 1096844 - RNA, 19 nt, Artificial Sequence
  Description of Artificial Sequence: Synthetic oligonucleotide
aauacuacuuagagacugc

SEQ ID NO: 1096845 - RNA, 19 nt, Artificial Sequence
  Description of Artificial Sequence: Synthetic oligonucleotide
aacacccgaagucugcaac

SEQ ID NO: 1096846 - RNA, 19 nt, Artificial Sequence
  Description of Artificial Sequence: Synthetic oligonucleotide
aguauuuuaaaugcgauuu

SEQ ID NO: 1096847 - RNA, 19 nt, Artificial Sequence
  Description of Artificial Sequence: Synthetic oligonucleotide
ugacgauugcuacuugugg

SEQ ID NO: 1096848 - RNA, 19 nt, Artificial Sequence
  Description of Artificial Sequence: Synthetic oligonucleotide
guggcaauagacuauaguc

SEQ ID NO: 1096849 - RNA, 19 nt, Artificial Sequence
  Description of Artificial Sequence: Synthetic oligonucleotide
  modified_base (2)..(2): a, c, u, g, unknown or other
anacugugauauugcagag

SEQ ID NO: 1096850 - RNA, 19 nt, Artificial Sequence
  Description of Artificial Sequence: Synthetic oligonucleotide
ugaagccguagccuaaccg

SEQ ID NO: 1096851 - RNA, 19 nt, Artificial Sequence
  Description of Artificial Sequence: Synthetic oligonucleotide
uuaguauuuuaaaugcgau

SEQ ID NO: 1096852 - RNA, 19 nt, Artificial Sequence
  Description of Artificial Sequence: Synthetic oligonucleotide
  modified_base (15)..(15): a, c, u, g, unknown or other
aaggugauccccganacug

SEQ ID NO: 1096853 - RNA, 19 nt, Artificial Sequence
  Description of Artificial Sequence: Synthetic oligonucleotide
uuuucaccgacuugagggg

SEQ ID NO: 1096854 - RNA, 19 nt, Artificial Sequence
  Description of Artificial Sequence: Synthetic oligonucleotide
acuaacacccauguuacuc

SEQ ID NO: 1096855 - RNA, 19 nt, Artificial Sequence
  Description of Artificial Sequence: Synthetic oligonucleotide
cuuaguauuuuaaaugcga

SEQ ID NO: 1096856 - RNA, 19 nt, Artificial Sequence
  Description of Artificial Sequence: Synthetic oligonucleotide
uuuacuugagaugcuacug

SEQ ID NO: 1096857 - RNA, 19 nt, Artificial Sequence
  Description of Artificial Sequence: Synthetic oligonucleotide
cauguuacucuaaaugaug

SEQ ID NO: 1096858 - RNA, 19 nt, Artificial Sequence
  Description of Artificial Sequence: Synthetic oligonucleotide
acucuaaaugaugagguag

SEQ ID NO: 1096859 - RNA, 19 nt, Artificial Sequence
  Description of Artificial Sequence: Synthetic oligonucleotide
ugagauccgugacaacucg

SEQ ID NO: 1096860 - RNA, 19 nt, Artificial Sequence
  Description of Artificial Sequence: Synthetic oligonucleotide
uuugaggccuguuuguuga

SEQ ID NO: 1096861 - RNA, 19 nt, Artificial Sequence
  Description of Artificial Sequence: Synthetic oligonucleotide
ugugauauugcagaggcua

SEQ ID NO: 1096862 - RNA, 19 nt, Artificial Sequence
  Description of Artificial Sequence: Synthetic oligonucleotide
ggaucaaucaacucuuucc

SEQ ID NO: 1096863 - RNA, 19 nt, Artificial Sequence
  Description of Artificial Sequence: Synthetic oligonucleotide
uaacagaacaacucacgug

SEQ ID NO: 1096864 - RNA, 19 nt, Artificial Sequence
  Description of Artificial Sequence: Synthetic oligonucleotide
aaauugaagccguagccua

SEQ ID NO: 1096865 - RNA, 19 nt, Artificial Sequence
  Description of Artificial Sequence: Synthetic oligonucleotide
caguggacgaguuuguuag

SEQ ID NO: 1096866 - RNA, 19 nt, Artificial Sequence
  Description of Artificial Sequence: Synthetic oligonucleotide
agaacuggucuuccgacuc

SEQ ID NO: 1096867 - RNA, 19 nt, Artificial Sequence
  Description of Artificial Sequence: Synthetic oligonucleotide
ugagucuuggaucaaucaa

SEQ ID NO: 1096868 - RNA, 19 nt, Artificial Sequence
  Description of Artificial Sequence: Synthetic oligonucleotide
uauuuacuugagaugcuac

SEQ ID NO: 1096869 - RNA, 19 nt, Artificial Sequence
  Description of Artificial Sequence: Synthetic oligonucleotide
uauugcagaggcuaucacu

SEQ ID NO: 1096870 - RNA, 19 nt, Artificial Sequence
  Description of Artificial Sequence: Synthetic oligonucleotide
uuuagccugagagaaauaa

SEQ ID NO: 1096871 - RNA, 19 nt, Artificial Sequence
  Description of Artificial Sequence: Synthetic oligonucleotide
gaggcuaucacugaccgac

SEQ ID NO: 1096872 - RNA, 19 nt, Artificial Sequence
  Description of Artificial Sequence: Synthetic oligonucleotide
aacuccuagugacgauugc

SEQ ID NO: 1096873 - RNA, 19 nt, Artificial Sequence
  Description of Artificial Sequence: Synthetic oligonucleotide
gucaaauugaagccguagc

SEQ ID NO: 1096874 - RNA, 19 nt, Artificial Sequence
  Description of Artificial Sequence: Synthetic oligonucleotide
agauagcaggcccucggcc

SEQ ID NO: 1096875 - RNA, 19 nt, Artificial Sequence
  Description of Artificial Sequence: Synthetic oligonucleotide
auuuacuugagaugcuacu

SEQ ID NO: 1096876 - RNA, 19 nt, Artificial Sequence
  Description of Artificial Sequence: Synthetic oligonucleotide
uuaagucaagaaacaugcc

SEQ ID NO: 1096877 - RNA, 19 nt, Artificial Sequence
  Description of Artificial Sequence: Synthetic oligonucleotide
  modified_base (16)..(16): a, c, u, g, unknown or other
aaaggugauccccganacu

SEQ ID NO: 1096878 - RNA, 19 nt, Artificial Sequence
  Description of Artificial Sequence: Synthetic oligonucleotide
ugugucaccgcguacucca

SEQ ID NO: 1096879 - RNA, 19 nt, Artificial Sequence
  Description of Artificial Sequence: Synthetic oligonucleotide
aaagcugguaagucugaga

SEQ ID NO: 1096880 - RNA, 19 nt, Artificial Sequence
  Description of Artificial Sequence: Synthetic oligonucleotide
ggauagucaaauugaagcc

SEQ ID NO: 1096881 - RNA, 19 nt, Artificial Sequence
  Description of Artificial Sequence: Synthetic oligonucleotide
acgauugcuacuugugguc

SEQ ID NO: 1096882 - RNA, 19 nt, Artificial Sequence
  Description of Artificial Sequence: Synthetic oligonucleotide
ugcacuguaaacuccuagu

SEQ ID NO: 1096883 - RNA, 19 nt, Artificial Sequence
  Description of Artificial Sequence: Synthetic oligonucleotide
auacuacuuagagacugcc

SEQ ID NO: 1096884 - RNA, 19 nt, Artificial Sequence
  Description of Artificial Sequence: Synthetic oligonucleotide
aacucuuuccaaagcacag

SEQ ID NO: 1096885 - RNA, 19 nt, Artificial Sequence
  Description of Artificial Sequence: Synthetic oligonucleotide
aucacaguggacgaguuug

SEQ ID NO: 1096886 - RNA, 19 nt, Artificial Sequence
  Description of Artificial Sequence: Synthetic oligonucleotide
uccaugugcacuguaaacu

SEQ ID NO: 1096887 - RNA, 19 nt, Artificial Sequence
  Description of Artificial Sequence: Synthetic oligonucleotide
agccuaaccgucucggagg

SEQ ID NO: 1096888 - RNA, 19 nt, Artificial Sequence
  Description of Artificial Sequence: Synthetic oligonucleotide
aauagacuauaguccuucu

SEQ ID NO: 1096889 - RNA, 19 nt, Artificial Sequence
  Description of Artificial Sequence: Synthetic oligonucleotide
agacacgcuauuuacuuga

SEQ ID NO: 1096890 - RNA, 19 nt, Artificial Sequence
  Description of Artificial Sequence: Synthetic oligonucleotide
uagccuaaccgucucggag

SEQ ID NO: 1096891 - RNA, 19 nt, Artificial Sequence
  Description of Artificial Sequence: Synthetic oligonucleotide
cggauagucaaauugaagc

SEQ ID NO: 1096892 - RNA, 19 nt, Artificial Sequence
  Description of Artificial Sequence: Synthetic oligonucleotide
augcaaucuuuucaccgac

SEQ ID NO: 1096893 - RNA, 19 nt, Artificial Sequence
  Description of Artificial Sequence: Synthetic oligonucleotide
agcgccccggaacugaagc

SEQ ID NO: 1096894 - RNA, 19 nt, Artificial Sequence
  Description of Artificial Sequence: Synthetic oligonucleotide
uuaugugcagacacgcuau

SEQ ID NO: 1096895 - RNA, 19 nt, Artificial Sequence
  Description of Artificial Sequence: Synthetic oligonucleotide
agaggacuucuauauccac

SEQ ID NO: 1096896 - RNA, 19 nt, Artificial Sequence
  Description of Artificial Sequence: Synthetic oligonucleotide
aguaguccgacgugaguuc

SEQ ID NO: 1096897 - RNA, 19 nt, Artificial Sequence
  Description of Artificial Sequence: Synthetic oligonucleotide
aguggcaauagacuauagu

SEQ ID NO: 1096898 - RNA, 19 nt, Artificial Sequence
  Description of Artificial Sequence: Synthetic oligonucleotide
aagaacuggucuuccgacu

SEQ ID NO: 1096899 - RNA, 19 nt, Artificial Sequence
  Description of Artificial Sequence: Synthetic oligonucleotide
auauugcagaggcuaucac

SEQ ID NO: 1096900 - RNA, 19 nt, Artificial Sequence
  Description of Artificial Sequence: Synthetic oligonucleotide
  modified_base (18)..(18): a, c, u, g, unknown or other
gaaaaggugauccccgana

SEQ ID NO: 1096901 - RNA, 19 nt, Artificial Sequence
  Description of Artificial Sequence: Synthetic oligonucleotide
augacgagguucugauggc

SEQ ID NO: 1096902 - RNA, 19 nt, Artificial Sequence
  Description of Artificial Sequence: Synthetic oligonucleotide
ggucacaaauacuacuuag

SEQ ID NO: 1096903 - RNA, 19 nt, Artificial Sequence
  Description of Artificial Sequence: Synthetic oligonucleotide
ugcaacgucagcccuggac

SEQ ID NO: 1096904 - RNA, 19 nt, Artificial Sequence
  Description of Artificial Sequence: Synthetic oligonucleotide
aaagagaccggcugucuuu

SEQ ID NO: 1096905 - RNA, 19 nt, Artificial Sequence
  Description of Artificial Sequence: Synthetic oligonucleotide
uccgacgugaguuccaaaa

SEQ ID NO: 1096906 - RNA, 19 nt, Artificial Sequence
  Description of Artificial Sequence: Synthetic oligonucleotide
acacccgaagucugcaacg

SEQ ID NO: 1096907 - RNA, 19 nt, Artificial Sequence
  Description of Artificial Sequence: Synthetic oligonucleotide
uacuuagagacugccagac

SEQ ID NO: 1096908 - RNA, 19 nt, Artificial Sequence
  Description of Artificial Sequence: Synthetic oligonucleotide
cauugugauagaccaaauc

SEQ ID NO: 1096909 - RNA, 19 nt, Artificial Sequence
  Description of Artificial Sequence: Synthetic oligonucleotide
gacuauaguccuucuugug

SEQ ID NO: 1096910 - RNA, 19 nt, Artificial Sequence
  Description of Artificial Sequence: Synthetic oligonucleotide
uaguauuuuaaaugcgauu

SEQ ID NO: 1096911 - RNA, 19 nt, Artificial Sequence
  Description of Artificial Sequence: Synthetic oligonucleotide
caagaacuggucuuccgac

SEQ ID NO: 1096912 - RNA, 19 nt, Artificial Sequence
  Description of Artificial Sequence: Synthetic oligonucleotide
uggucuuccgacucggaac

SEQ ID NO: 1096913 - RNA, 19 nt, Artificial Sequence
  Description of Artificial Sequence: Synthetic oligonucleotide
cuuggagcaggaccaagag

SEQ ID NO: 1096914 - RNA, 19 nt, Artificial Sequence
  Description of Artificial Sequence: Synthetic oligonucleotide
agucaaauugaagccguag

SEQ ID NO: 1096915 - RNA, 19 nt, Artificial Sequence
  Description of Artificial Sequence: Synthetic oligonucleotide
acuuagagacugccagacg

SEQ ID NO: 1096916 - RNA, 19 nt, Artificial Sequence
  Description of Artificial Sequence: Synthetic oligonucleotide
cuggguuacugaauuuagc

SEQ ID NO: 1096917 - RNA, 19 nt, Artificial Sequence
  Description of Artificial Sequence: Synthetic oligonucleotide
gacaacucggcaucuguuc

SEQ ID NO: 1096918 - RNA, 19 nt, Artificial Sequence
  Description of Artificial Sequence: Synthetic oligonucleotide
cugaauuuagccugagaga

SEQ ID NO: 1096919 - RNA, 19 nt, Artificial Sequence
  Description of Artificial Sequence: Synthetic oligonucleotide
aaagauccacaaacuaaca

SEQ ID NO: 1096920 - RNA, 19 nt, Artificial Sequence
  Description of Artificial Sequence: Synthetic oligonucleotide
ucuuccgacucggaacugg

SEQ ID NO: 1096921 - RNA, 19 nt, Artificial Sequence
  Description of Artificial Sequence: Synthetic oligonucleotide
acgcuauuuacuugagaug

SEQ ID NO: 1096922 - RNA, 19 nt, Artificial Sequence
  Description of Artificial Sequence: Synthetic oligonucleotide
ugacagguagccugagccc

SEQ ID NO: 1096923 - RNA, 19 nt, Artificial Sequence
  Description of Artificial Sequence: Synthetic oligonucleotide
aaacuccuagugacgauug

SEQ ID NO: 1096924 - RNA, 19 nt, Artificial Sequence
  Description of Artificial Sequence: Synthetic oligonucleotide
  modified_base (11)..(11): a, c, u, g, unknown or other
ugauccccganacugugau

SEQ ID NO: 1096925 - RNA, 19 nt, Artificial Sequence
  Description of Artificial Sequence: Synthetic oligonucleotide
gagucugaacuggaugacg

SEQ ID NO: 1096926 - RNA, 19 nt, Artificial Sequence
  Description of Artificial Sequence: Synthetic oligonucleotide
uggaugacgagguucugau

SEQ ID NO: 1096927 - RNA, 19 nt, Artificial Sequence
  Description of Artificial Sequence: Synthetic oligonucleotide
  modified_base (19)..(19): a, c, u, g, unknown or other
ugaaaaggugauccccgan

SEQ ID NO: 1096928 - RNA, 19 nt, Artificial Sequence
  Description of Artificial Sequence: Synthetic oligonucleotide
caauagacuauaguccuuc

SEQ ID NO: 1096929 - RNA, 19 nt, Artificial Sequence
  Description of Artificial Sequence: Synthetic oligonucleotide
uccgugacaacucggcauc

SEQ ID NO: 1096930 - RNA, 19 nt, Artificial Sequence
  Description of Artificial Sequence: Synthetic oligonucleotide
gaagacugugcagugcggc

SEQ ID NO: 1096931 - RNA, 19 nt, Artificial Sequence
  Description of Artificial Sequence: Synthetic oligonucleotide
aaaugaugagguaguauuu

SEQ ID NO: 1096932 - RNA, 19 nt, Artificial Sequence
  Description of Artificial Sequence: Synthetic oligonucleotide
ugccagacgacgaggucag

SEQ ID NO: 1096933 - RNA, 19 nt, Artificial Sequence
  Description of Artificial Sequence: Synthetic oligonucleotide
agaccggcugucuuuaaga

SEQ ID NO: 1096934 - RNA, 19 nt, Artificial Sequence
  Description of Artificial Sequence: Synthetic oligonucleotide
aacgucagcccuggacacc

SEQ ID NO: 1096935 - RNA, 19 nt, Artificial Sequence
  Description of Artificial Sequence: Synthetic oligonucleotide
uccuagugacgauugcuac

SEQ ID NO: 1096936 - RNA, 19 nt, Artificial Sequence
  Description of Artificial Sequence: Synthetic oligonucleotide
guuaugugcagacacgcua

SEQ ID NO: 1096937 - RNA, 19 nt, Artificial Sequence
  Description of Artificial Sequence: Synthetic oligonucleotide
auagucaaauugaagccgu

SEQ ID NO: 1096938 - RNA, 19 nt, Artificial Sequence
  Description of Artificial Sequence: Synthetic oligonucleotide
cuuugaggccuguuuguug

SEQ ID NO: 1096939 - RNA, 19 nt, Artificial Sequence
  Description of Artificial Sequence: Synthetic oligonucleotide
ucugacagguagccugagc

SEQ ID NO: 1096940 - RNA, 19 nt, Artificial Sequence
  Description of Artificial Sequence: Synthetic oligonucleotide
  modified_base (9)..(9): a, c, u, g, unknown or other
auccccganacugugauau

SEQ ID NO: 1096941 - RNA, 19 nt, Artificial Sequence
  Description of Artificial Sequence: Synthetic oligonucleotide
auuucaggcuaugaucaug

SEQ ID NO: 1096942 - RNA, 19 nt, Artificial Sequence
  Description of Artificial Sequence: Synthetic oligonucleotide
acgucagcccuggacaccc

SEQ ID NO: 1096943 - RNA, 19 nt, Artificial Sequence
  Description of Artificial Sequence: Synthetic oligonucleotide
gcuacuugugguccaagag

SEQ ID NO: 1096944 - RNA, 19 nt, Artificial Sequence
  Description of Artificial Sequence: Synthetic oligonucleotide
aagccguagccuaaccguc

SEQ ID NO: 1096945 - RNA, 19 nt, Artificial Sequence
  Description of Artificial Sequence: Synthetic oligonucleotide
uuccagcccauaacacccg

SEQ ID NO: 1096946 - RNA, 19 nt, Artificial Sequence
  Description of Artificial Sequence: Synthetic oligonucleotide
ugccagguucuuucaaagc

SEQ ID NO: 1096947 - RNA, 19 nt, Artificial Sequence
  Description of Artificial Sequence: Synthetic oligonucleotide
gaagccguagccuaaccgu

SEQ ID NO: 1096948 - RNA, 19 nt, Artificial Sequence
  Description of Artificial Sequence: Synthetic oligonucleotide
cuaaccgucucggaggcug

SEQ ID NO: 1096949 - RNA, 19 nt, Artificial Sequence
  Description of Artificial Sequence: Synthetic oligonucleotide
gucaauaaugagucuugga

SEQ ID NO: 1096950 - RNA, 19 nt, Artificial Sequence
  Description of Artificial Sequence: Synthetic oligonucleotide
uaaacuccuagugacgauu

SEQ ID NO: 1096951 - RNA, 19 nt, Artificial Sequence
  Description of Artificial Sequence: Synthetic oligonucleotide
agaacaacucacgugguua

SEQ ID NO: 1096952 - RNA, 19 nt, Artificial Sequence
  Description of Artificial Sequence: Synthetic oligonucleotide
cugucuuuaagaagucuga

SEQ ID NO: 1096953 - RNA, 19 nt, Artificial Sequence
  Description of Artificial Sequence: Synthetic oligonucleotide
ugcaaucuuuucaccgacu

SEQ ID NO: 1096954 - RNA, 19 nt, Artificial Sequence
  Description of Artificial Sequence: Synthetic oligonucleotide
aguggacgaguuuguuagg

SEQ ID NO: 1096955 - RNA, 19 nt, Artificial Sequence
  Description of Artificial Sequence: Synthetic oligonucleotide
aacuaacacccauguuacu

SEQ ID NO: 1096956 - RNA, 19 nt, Artificial Sequence
  Description of Artificial Sequence: Synthetic oligonucleotide
ggacgaguuuguuaggaug

SEQ ID NO: 1096957 - RNA, 19 nt, Artificial Sequence
  Description of Artificial Sequence: Synthetic oligonucleotide
cagcccauaacacccgaag

SEQ ID NO: 1096958 - RNA, 19 nt, Artificial Sequence
  Description of Artificial Sequence: Synthetic oligonucleotide
aacaguggcaauagacuau

SEQ ID NO: 1096959 - RNA, 19 nt, Artificial Sequence
  Description of Artificial Sequence: Synthetic oligonucleotide
gacgauugcuacuuguggu

SEQ ID NO: 1096960 - RNA, 19 nt, Artificial Sequence
  Description of Artificial Sequence: Synthetic oligonucleotide
cacgcuauuuacuugagau

SEQ ID NO: 1096961 - RNA, 19 nt, Artificial Sequence
  Description of Artificial Sequence: Synthetic oligonucleotide
uccugugucaccgcguacu

SEQ ID NO: 1096962 - RNA, 19 nt, Artificial Sequence
  Description of Artificial Sequence: Synthetic oligonucleotide
uacucuaaaugaugaggua

SEQ ID NO: 1096963 - RNA, 19 nt, Artificial Sequence
  Description of Artificial Sequence: Synthetic oligonucleotide
ucuggacaagaaucagacu

SEQ ID NO: 1096964 - RNA, 19 nt, Artificial Sequence
  Description of Artificial Sequence: Synthetic oligonucleotide
uugaagccguagccuaacc

SEQ ID NO: 1096965 - RNA, 19 nt, Artificial Sequence
  Description of Artificial Sequence: Synthetic oligonucleotide
uggaucacaguggacgagu

SEQ ID NO: 1096966 - RNA, 19 nt, Artificial Sequence
  Description of Artificial Sequence: Synthetic oligonucleotide
agucugaacuggaugacga

SEQ ID NO: 1096967 - RNA, 19 nt, Artificial Sequence
  Description of Artificial Sequence: Synthetic oligonucleotide
uucaccgacuugaggggca

SEQ ID NO: 1096968 - RNA, 19 nt, Artificial Sequence
  Description of Artificial Sequence: Synthetic oligonucleotide
uacuggguuacugaauuua

SEQ ID NO: 1096969 - RNA, 19 nt, Artificial Sequence
  Description of Artificial Sequence: Synthetic oligonucleotide
aucguucaacagcucagcu

SEQ ID NO: 1096970 - RNA, 19 nt, Artificial Sequence
  Description of Artificial Sequence: Synthetic oligonucleotide
auagacuauaguccuucuu

SEQ ID NO: 1096971 - RNA, 19 nt, Artificial Sequence
  Description of Artificial Sequence: Synthetic oligonucleotide
agcccauaacacccgaagu

SEQ ID NO: 1096972 - RNA, 19 nt, Artificial Sequence
  Description of Artificial Sequence: Synthetic oligonucleotide
auaguccuucuuguguguc

SEQ ID NO: 1096973 - RNA, 19 nt, Artificial Sequence
  Description of Artificial Sequence: Synthetic oligonucleotide
uuuaccaggcgcgcgcucu

SEQ ID NO: 1096974 - RNA, 19 nt, Artificial Sequence
  Description of Artificial Sequence: Synthetic oligonucleotide
ugacucucagagcuucuau

SEQ ID NO: 1096975 - RNA, 19 nt, Artificial Sequence
  Description of Artificial Sequence: Synthetic oligonucleotide
ggagucagaaggcuuccag

SEQ ID NO: 1096976 - RNA, 19 nt, Artificial Sequence
  Description of Artificial Sequence: Synthetic oligonucleotide
cccaaaacuggguagggac

SEQ ID NO: 1096977 - RNA, 19 nt, Artificial Sequence
  Description of Artificial Sequence: Synthetic oligonucleotide
augguaaagugaagauaac

SEQ ID NO: 1096978 - RNA, 19 nt, Artificial Sequence
  Description of Artificial Sequence: Synthetic oligonucleotide
uuucaccgacuugaggggc

SEQ ID NO: 1096979 - RNA, 19 nt, Artificial Sequence
  Description of Artificial Sequence: Synthetic oligonucleotide
gagauccgugacaacucgg

SEQ ID NO: 1096980 - RNA, 19 nt, Artificial Sequence
  Description of Artificial Sequence: Synthetic oligonucleotide
aggagaguaguccgacgug

SEQ ID NO: 1096981 - RNA, 19 nt, Artificial Sequence
  Description of Artificial Sequence: Synthetic oligonucleotide
acuccuagugacgauugcu

SEQ ID NO: 1096982 - RNA, 19 nt, Artificial Sequence
  Description of Artificial Sequence: Synthetic oligonucleotide
gugacgauugcuacuugug

SEQ ID NO: 1096983 - RNA, 19 nt, Artificial Sequence
  Description of Artificial Sequence: Synthetic oligonucleotide
ugauauugcagaggcuauc

SEQ ID NO: 1096984 - RNA, 19 nt, Artificial Sequence
  Description of Artificial Sequence: Synthetic oligonucleotide
gcggcggauagucaaauug

SEQ ID NO: 1096985 - RNA, 19 nt, Artificial Sequence
  Description of Artificial Sequence: Synthetic oligonucleotide
gagaguaguccgacgugag

SEQ ID NO: 1096986 - RNA, 19 nt, Artificial Sequence
  Description of Artificial Sequence: Synthetic oligonucleotide
ugucaccgcguacuccacc

SEQ ID NO: 1096987 - RNA, 19 nt, Artificial Sequence
  Description of Artificial Sequence: Synthetic oligonucleotide
agggcuuuaccaggcgcgc

SEQ ID NO: 1096988 - RNA, 19 nt, Artificial Sequence
  Description of Artificial Sequence: Synthetic oligonucleotide
aggucagagguuaugugca

SEQ ID NO: 1096989 - RNA, 19 nt, Artificial Sequence
  Description of Artificial Sequence: Synthetic oligonucleotide
uuacugaauuuagccugag

SEQ ID NO: 1096990 - RNA, 19 nt, Artificial Sequence
  Description of Artificial Sequence: Synthetic oligonucleotide
cagacacgcuauuuacuug

SEQ ID NO: 1096991 - RNA, 19 nt, Artificial Sequence
  Description of Artificial Sequence: Synthetic oligonucleotide
ugaccgacucuggacaaga

SEQ ID NO: 1096992 - RNA, 19 nt, Artificial Sequence
  Description of Artificial Sequence: Synthetic oligonucleotide
agaguaguccgacgugagu

SEQ ID NO: 1096993 - RNA, 19 nt, Artificial Sequence
  Description of Artificial Sequence: Synthetic oligonucleotide
cccauguuacucuaaauga

SEQ ID NO: 1096994 - RNA, 19 nt, Artificial Sequence
  Description of Artificial Sequence: Synthetic oligonucleotide
ccuguuuguugacagcugc

SEQ ID NO: 1096995 - RNA, 19 nt, Artificial Sequence
  Description of Artificial Sequence: Synthetic oligonucleotide
caacucggcaucuguucag

SEQ ID NO: 1096996 - RNA, 19 nt, Artificial Sequence
  Description of Artificial Sequence: Synthetic oligonucleotide
auaacacccgaagucugca

SEQ ID NO: 1096997 - RNA, 19 nt, Artificial Sequence
  Description of Artificial Sequence: Synthetic oligonucleotide
gcaacgucagcccuggaca

SEQ ID NO: 1096998 - RNA, 19 nt, Artificial Sequence
  Description of Artificial Sequence: Synthetic oligonucleotide
aacucggcaucuguucaga

SEQ ID NO: 1096999 - RNA, 19 nt, Artificial Sequence
  Description of Artificial Sequence: Synthetic oligonucleotide
uggacgaguuuguuaggau

SEQ ID NO: 1097000 - RNA, 19 nt, Artificial Sequence
  Description of Artificial Sequence: Synthetic oligonucleotide
acaacucacgugguuaaaa

SEQ ID NO: 1097001 - RNA, 19 nt, Artificial Sequence
  Description of Artificial Sequence: Synthetic oligonucleotide
acaaacuaacacccauguu

SEQ ID NO: 1097002 - RNA, 19 nt, Artificial Sequence
  Description of Artificial Sequence: Synthetic oligonucleotide
acgaggucagagguuaugu

SEQ ID NO: 1097003 - RNA, 19 nt, Artificial Sequence
  Description of Artificial Sequence: Synthetic oligonucleotide
cuacuuagagacugccaga

SEQ ID NO: 1097004 - RNA, 19 nt, Artificial Sequence
  Description of Artificial Sequence: Synthetic oligonucleotide
acacgcuauuuacuugaga

SEQ ID NO: 1097005 - RNA, 19 nt, Artificial Sequence
  Description of Artificial Sequence: Synthetic oligonucleotide
cacaaacuaacacccaugu

SEQ ID NO: 1097006 - RNA, 19 nt, Artificial Sequence
  Description of Artificial Sequence: Synthetic oligonucleotide
gacgugaguuccaaaagcu

SEQ ID NO: 1097007 - RNA, 19 nt, Artificial Sequence
  Description of Artificial Sequence: Synthetic oligonucleotide
caacgucagcccuggacac

SEQ ID NO: 1097008 - RNA, 19 nt, Artificial Sequence
  Description of Artificial Sequence: Synthetic oligonucleotide
  modified_base (6)..(6): a, c, u, g, unknown or other
cccganacugugauauugc

SEQ ID NO: 1097009 - RNA, 19 nt, Artificial Sequence
  Description of Artificial Sequence: Synthetic oligonucleotide
  modified_base (4)..(4): a, c, u, g, unknown or other
cganacugugauauugcag

SEQ ID NO: 1097010 - RNA, 19 nt, Artificial Sequence
  Description of Artificial Sequence: Synthetic oligonucleotide
cacugaccgacucuggaca

SEQ ID NO: 1097011 - RNA, 19 nt, Artificial Sequence
  Description of Artificial Sequence: Synthetic oligonucleotide
augugcacuguaaacuccu

SEQ ID NO: 1097012 - RNA, 19 nt, Artificial Sequence
  Description of Artificial Sequence: Synthetic oligonucleotide
gacgaggucagagguuaug

SEQ ID NO: 1097013 - RNA, 19 nt, Artificial Sequence
  Description of Artificial Sequence: Synthetic oligonucleotide
uccagcccauaacacccga

SEQ ID NO: 1097014 - RNA, 19 nt, Artificial Sequence
  Description of Artificial Sequence: Synthetic oligonucleotide
acccgaagucugcaacguc

SEQ ID NO: 1097015 - RNA, 19 nt, Artificial Sequence
  Description of Artificial Sequence: Synthetic oligonucleotide
ccuuccacgguagaggccc

SEQ ID NO: 1097016 - RNA, 19 nt, Artificial Sequence
  Description of Artificial Sequence: Synthetic oligonucleotide
ucccaaaacuggguaggga

SEQ ID NO: 1097017 - RNA, 19 nt, Artificial Sequence
  Description of Artificial Sequence: Synthetic oligonucleotide
uaugugcagacacgcuauu

SEQ ID NO: 1097018 - RNA, 19 nt, Artificial Sequence
  Description of Artificial Sequence: Synthetic oligonucleotide
cucggaggcugccaucuug

SEQ ID NO: 1097019 - RNA, 19 nt, Artificial Sequence
  Description of Artificial Sequence: Synthetic oligonucleotide
gucaccgcguacuccacca

SEQ ID NO: 1097020 - RNA, 19 nt, Artificial Sequence
  Description of Artificial Sequence: Synthetic oligonucleotide
cucgcggggcgacaggccc

SEQ ID NO: 1097021 - RNA, 19 nt, Artificial Sequence
  Description of Artificial Sequence: Synthetic oligonucleotide
acaguggcaauagacuaua

SEQ ID NO: 1097022 - RNA, 19 nt, Artificial Sequence
  Description of Artificial Sequence: Synthetic oligonucleotide
guaguccgacgugaguucc

SEQ ID NO: 1097023 - RNA, 19 nt, Artificial Sequence
  Description of Artificial Sequence: Synthetic oligonucleotide
gacucggaacuggagucug

SEQ ID NO: 1097024 - RNA, 19 nt, Artificial Sequence
  Description of Artificial Sequence: Synthetic oligonucleotide
uucaggcuaugaucauggu

SEQ ID NO: 1097025 - RNA, 19 nt, Artificial Sequence
  Description of Artificial Sequence: Synthetic oligonucleotide
gaccggcugucuuuaagaa

SEQ ID NO: 1097026 - RNA, 19 nt, Artificial Sequence
  Description of Artificial Sequence: Synthetic oligonucleotide
uaguccgacgugaguucca

SEQ ID NO: 1097027 - RNA, 19 nt, Artificial Sequence
  Description of Artificial Sequence: Synthetic oligonucleotide
caccgcguacuccaccacc

SEQ ID NO: 1097028 - RNA, 19 nt, Artificial Sequence
  Description of Artificial Sequence: Synthetic oligonucleotide
uuuuggcccugcacuacuu

SEQ ID NO: 1097029 - RNA, 19 nt, Artificial Sequence
  Description of Artificial Sequence: Synthetic oligonucleotide
acugaccgacucuggacaa

SEQ ID NO: 1097030 - RNA, 19 nt, Artificial Sequence
  Description of Artificial Sequence: Synthetic oligonucleotide
cuccuagugacgauugcua

SEQ ID NO: 1097031 - RNA, 19 nt, Artificial Sequence
  Description of Artificial Sequence: Synthetic oligonucleotide
gaauuuagccugagagaaa

SEQ ID NO: 1097032 - RNA, 19 nt, Artificial Sequence
  Description of Artificial Sequence: Synthetic oligonucleotide
guggacgaguuuguuagga

SEQ ID NO: 1097033 - RNA, 19 nt, Artificial Sequence
  Description of Artificial Sequence: Synthetic oligonucleotide
ggcuuuaccaggcgcgcgc

SEQ ID NO: 1097034 - RNA, 19 nt, Artificial Sequence
  Description of Artificial Sequence: Synthetic oligonucleotide
gggaaaggcgggcuuugag

SEQ ID NO: 1097035 - RNA, 19 nt, Artificial Sequence
  Description of Artificial Sequence: Synthetic oligonucleotide
acaugccuuaguauuuuaa

SEQ ID NO: 1097036 - RNA, 19 nt, Artificial Sequence
  Description of Artificial Sequence: Synthetic oligonucleotide
ggucagagguuaugugcag

SEQ ID NO: 1097037 - RNA, 19 nt, Artificial Sequence
  Description of Artificial Sequence: Synthetic oligonucleotide
ucgaccccauccucuuccc

SEQ ID NO: 1097038 - RNA, 19 nt, Artificial Sequence
  Description of Artificial Sequence: Synthetic oligonucleotide
cugccagacgacgagguca

SEQ ID NO: 1097039 - RNA, 19 nt, Artificial Sequence
  Description of Artificial Sequence: Synthetic oligonucleotide
agaggcuaucacugaccga

SEQ ID NO: 1097040 - RNA, 19 nt, Artificial Sequence
  Description of Artificial Sequence: Synthetic oligonucleotide
  modified_base (14)..(14): a, c, u, g, unknown or other
aggugauccccganacugu

SEQ ID NO: 1097041 - RNA, 19 nt, Artificial Sequence
  Description of Artificial Sequence: Synthetic oligonucleotide
gaguaguccgacgugaguu

SEQ ID NO: 1097042 - RNA, 19 nt, Artificial Sequence
  Description of Artificial Sequence: Synthetic oligonucleotide
cgacgugaguuccaaaagc

SEQ ID NO: 1097043 - RNA, 19 nt, Artificial Sequence
  Description of Artificial Sequence: Synthetic oligonucleotide
gccucguauaccccggccc

SEQ ID NO: 1097044 - RNA, 19 nt, Artificial Sequence
  Description of Artificial Sequence: Synthetic oligonucleotide
ccggaacugaagccgaagc

SEQ ID NO: 1097045 - RNA, 19 nt, Artificial Sequence
  Description of Artificial Sequence: Synthetic oligonucleotide
cggaacugaagccgaagcg

SEQ ID NO: 1097046 - RNA, 19 nt, Artificial Sequence
  Description of Artificial Sequence: Synthetic oligonucleotide
caccaagaacuggucuucc

SEQ ID NO: 1097047 - RNA, 19 nt, Artificial Sequence
  Description of Artificial Sequence: Synthetic oligonucleotide
ggagaguaguccgacguga

SEQ ID NO: 1097048 - RNA, 19 nt, Artificial Sequence
  Description of Artificial Sequence: Synthetic oligonucleotide
uugcagcagguccaucguu

SEQ ID NO: 1097049 - RNA, 19 nt, Artificial Sequence
  Description of Artificial Sequence: Synthetic oligonucleotide
cuggaucacaguggacgag

SEQ ID NO: 1097050 - RNA, 19 nt, Artificial Sequence
  Description of Artificial Sequence: Synthetic oligonucleotide
caggagaguaguccgacgu

SEQ ID NO: 1097051 - RNA, 19 nt, Artificial Sequence
  Description of Artificial Sequence: Synthetic oligonucleotide
ggguuacugaauuuagccu

SEQ ID NO: 1097052 - RNA, 19 nt, Artificial Sequence
  Description of Artificial Sequence: Synthetic oligonucleotide
  modified_base (13)..(13): a, c, u, g, unknown or other
ggugauccccganacugug

SEQ ID NO: 1097053 - RNA, 19 nt, Artificial Sequence
  Description of Artificial Sequence: Synthetic oligonucleotide
guagccuaaccgucucgga

SEQ ID NO: 1097054 - RNA, 19 nt, Artificial Sequence
  Description of Artificial Sequence: Synthetic oligonucleotide
ugcccuugcccuugccgga

SEQ ID NO: 1097055 - RNA, 19 nt, Artificial Sequence
  Description of Artificial Sequence: Synthetic oligonucleotide
gugacaacucggcaucugu

SEQ ID NO: 1097056 - RNA, 19 nt, Artificial Sequence
  Description of Artificial Sequence: Synthetic oligonucleotide
gacucucagagcuucuauu

SEQ ID NO: 1097057 - RNA, 19 nt, Artificial Sequence
  Description of Artificial Sequence: Synthetic oligonucleotide
acucugacagguagccuga

SEQ ID NO: 1097058 - RNA, 19 nt, Artificial Sequence
  Description of Artificial Sequence: Synthetic oligonucleotide
ccucguauaccccggcccc

SEQ ID NO: 1097059 - RNA, 19 nt, Artificial Sequence
  Description of Artificial Sequence: Synthetic oligonucleotide
caacaagaaguccucuccu

SEQ ID NO: 1097060 - RNA, 19 nt, Artificial Sequence
  Description of Artificial Sequence: Synthetic oligonucleotide
acagaacaacucacguggu

SEQ ID NO: 1097061 - RNA, 19 nt, Artificial Sequence
  Description of Artificial Sequence: Synthetic oligonucleotide
ccgacgugaguuccaaaag

SEQ ID NO: 1097062 - RNA, 19 nt, Artificial Sequence
  Description of Artificial Sequence: Synthetic oligonucleotide
  modified_base (7)..(7): a, c, u, g, unknown or other
ccccganacugugauauug

SEQ ID NO: 1097063 - RNA, 19 nt, Artificial Sequence
  Description of Artificial Sequence: Synthetic oligonucleotide
auaaugagucuuggaucaa

SEQ ID NO: 1097064 - RNA, 19 nt, Artificial Sequence
  Description of Artificial Sequence: Synthetic oligonucleotide
uuaccaggcgcgcgcucuc

SEQ ID NO: 1097065 - RNA, 19 nt, Artificial Sequence
  Description of Artificial Sequence: Synthetic oligonucleotide
ccgaagucugcaacgucag

SEQ ID NO: 1097066 - RNA, 19 nt, Artificial Sequence
  Description of Artificial Sequence: Synthetic oligonucleotide
gugucucuacaggauucug

SEQ ID NO: 1097067 - RNA, 19 nt, Artificial Sequence
  Description of Artificial Sequence: Synthetic oligonucleotide
accgcguacuccaccaccu

SEQ ID NO: 1097068 - RNA, 19 nt, Artificial Sequence
  Description of Artificial Sequence: Synthetic oligonucleotide
cccgaagucugcaacguca

SEQ ID NO: 1097069 - RNA, 19 nt, Artificial Sequence
  Description of Artificial Sequence: Synthetic oligonucleotide
  modified_base (10)..(10): a, c, u, g, unknown or other
gauccccganacugugaua

SEQ ID NO: 1097070 - RNA, 19 nt, Artificial Sequence
  Description of Artificial Sequence: Synthetic oligonucleotide
cuggucuuccgacucggaa

SEQ ID NO: 1097071 - RNA, 19 nt, Artificial Sequence
  Description of Artificial Sequence: Synthetic oligonucleotide
ccagacgacgaggucagag

SEQ ID NO: 1097072 - RNA, 19 nt, Artificial Sequence
  Description of Artificial Sequence: Synthetic oligonucleotide
gguagggacaggcacacuu

SEQ ID NO: 1097073 - RNA, 19 nt, Artificial Sequence
  Description of Artificial Sequence: Synthetic oligonucleotide
gccuaaccgucucggaggc

SEQ ID NO: 1097074 - RNA, 19 nt, Artificial Sequence
  Description of Artificial Sequence: Synthetic oligonucleotide
ucgcggggcgacaggcccc

SEQ ID NO: 1097075 - RNA, 19 nt, Artificial Sequence
  Description of Artificial Sequence: Synthetic oligonucleotide
cuagugacgauugcuacuu

SEQ ID NO: 1097076 - RNA, 19 nt, Artificial Sequence
  Description of Artificial Sequence: Synthetic oligonucleotide
cugaccgacucuggacaag

SEQ ID NO: 1097077 - RNA, 19 nt, Artificial Sequence
  Description of Artificial Sequence: Synthetic oligonucleotide
ggcuaucacugaccgacuc

SEQ ID NO: 1097078 - RNA, 19 nt, Artificial Sequence
  Description of Artificial Sequence: Synthetic oligonucleotide
augugcagacacgcuauuu

SEQ ID NO: 1097079 - RNA, 19 nt, Artificial Sequence
  Description of Artificial Sequence: Synthetic oligonucleotide
ggggcgacaggccccuucc

SEQ ID NO: 1097080 - RNA, 19 nt, Artificial Sequence
  Description of Artificial Sequence: Synthetic oligonucleotide
uuccacgguagaggcccag

SEQ ID NO: 1097081 - RNA, 19 nt, Artificial Sequence
  Description of Artificial Sequence: Synthetic oligonucleotide
ggagucugaacuggaugac

SEQ ID NO: 1097082 - RNA, 19 nt, Artificial Sequence
  Description of Artificial Sequence: Synthetic oligonucleotide
cuuuaccaggcgcgcgcuc

SEQ ID NO: 1097083 - RNA, 19 nt, Artificial Sequence
  Description of Artificial Sequence: Synthetic oligonucleotide
aguccgacgugaguuccaa

SEQ ID NO: 1097084 - RNA, 19 nt, Artificial Sequence
  Description of Artificial Sequence: Synthetic oligonucleotide
ucguauaccccggccccuc

SEQ ID NO: 1097085 - RNA, 19 nt, Artificial Sequence
  Description of Artificial Sequence: Synthetic oligonucleotide
  modified_base (5)..(5): a, c, u, g, unknown or other
ccganacugugauauugca

SEQ ID NO: 1097086 - RNA, 19 nt, Artificial Sequence
  Description of Artificial Sequence: Synthetic oligonucleotide
agccguagccuaaccgucu

SEQ ID NO: 1097087 - RNA, 19 nt, Artificial Sequence
  Description of Artificial Sequence: Synthetic oligonucleotide
guaaacuccuagugacgau

SEQ ID NO: 1097088 - RNA, 19 nt, Artificial Sequence
  Description of Artificial Sequence: Synthetic oligonucleotide
aggagcgccccggaacuga

SEQ ID NO: 1097089 - RNA, 19 nt, Artificial Sequence
  Description of Artificial Sequence: Synthetic oligonucleotide
cagagguuaugugcagaca

SEQ ID NO: 1097090 - RNA, 19 nt, Artificial Sequence
  Description of Artificial Sequence: Synthetic oligonucleotide
cuacaggauucuggaucac

SEQ ID NO: 1097091 - RNA, 19 nt, Artificial Sequence
  Description of Artificial Sequence: Synthetic oligonucleotide
gaucacaguggacgaguuu

SEQ ID NO: 1097092 - RNA, 19 nt, Artificial Sequence
  Description of Artificial Sequence: Synthetic oligonucleotide
auuuagccugagagaaaua

SEQ ID NO: 1097093 - RNA, 19 nt, Artificial Sequence
  Description of Artificial Sequence: Synthetic oligonucleotide
caggauucuggaucacagu

SEQ ID NO: 1097094 - RNA, 19 nt, Artificial Sequence
  Description of Artificial Sequence: Synthetic oligonucleotide
agagaccggcugucuuuaa

SEQ ID NO: 1097095 - RNA, 19 nt, Artificial Sequence
  Description of Artificial Sequence: Synthetic oligonucleotide
ggcggauagucaaauugaa

SEQ ID NO: 1097096 - RNA, 19 nt, Artificial Sequence
  Description of Artificial Sequence: Synthetic oligonucleotide
  modified_base (8)..(8): a, c, u, g, unknown or other
uccccganacugugauauu

SEQ ID NO: 1097097 - RNA, 19 nt, Artificial Sequence
  Description of Artificial Sequence: Synthetic oligonucleotide
ggccucguauaccccggcc

SEQ ID NO: 1097098 - RNA, 19 nt, Artificial Sequence
  Description of Artificial Sequence: Synthetic oligonucleotide
ccauguuacucuaaaugau

SEQ ID NO: 1097099 - RNA, 19 nt, Artificial Sequence
  Description of Artificial Sequence: Synthetic oligonucleotide
cucuccucgaccccauccu

SEQ ID NO: 1097100 - RNA, 19 nt, Artificial Sequence
  Description of Artificial Sequence: Synthetic oligonucleotide
gugauauugcagaggcuau

SEQ ID NO: 1097101 - RNA, 19 nt, Artificial Sequence
  Description of Artificial Sequence: Synthetic oligonucleotide
gggcuuuaccaggcgcgcg

SEQ ID NO: 1097102 - RNA, 19 nt, Artificial Sequence
  Description of Artificial Sequence: Synthetic oligonucleotide
ggcuuugaggccuguuugu

SEQ ID NO: 1097103 - RNA, 19 nt, Artificial Sequence
  Description of Artificial Sequence: Synthetic oligonucleotide
cugugauauugcagaggcu

SEQ ID NO: 1097104 - RNA, 19 nt, Artificial Sequence
  Description of Artificial Sequence: Synthetic oligonucleotide
aggcuaucacugaccgacu

SEQ ID NO: 1097105 - RNA, 19 nt, Artificial Sequence
  Description of Artificial Sequence: Synthetic oligonucleotide
gggucauggcuuaauauuu

SEQ ID NO: 1097106 - RNA, 19 nt, Artificial Sequence
  Description of Artificial Sequence: Synthetic oligonucleotide
accgucucggaggcugcca

SEQ ID NO: 1097107 - RNA, 19 nt, Artificial Sequence
  Description of Artificial Sequence: Synthetic oligonucleotide
cggcggauagucaaauuga

SEQ ID NO: 1097108 - RNA, 19 nt, Artificial Sequence
  Description of Artificial Sequence: Synthetic oligonucleotide
ccguagccuaaccgucucg

SEQ ID NO: 1097109 - RNA, 19 nt, Artificial Sequence
  Description of Artificial Sequence: Synthetic oligonucleotide
cagugcggcguggccggcg

SEQ ID NO: 1097110 - RNA, 19 nt, Artificial Sequence
  Description of Artificial Sequence: Synthetic oligonucleotide
ccuagugacgauugcuacu

SEQ ID NO: 1097111 - RNA, 19 nt, Artificial Sequence
  Description of Artificial Sequence: Synthetic oligonucleotide
gucuuccgacucggaacug

SEQ ID NO: 1097112 - RNA, 19 nt, Artificial Sequence
  Description of Artificial Sequence: Synthetic oligonucleotide
gcgccccggaacugaagcc

SEQ ID NO: 1097113 - RNA, 19 nt, Artificial Sequence
  Description of Artificial Sequence: Synthetic oligonucleotide
gccguagccuaaccgucuc

SEQ ID NO: 1097114 - RNA, 19 nt, Artificial Sequence
  Description of Artificial Sequence: Synthetic oligonucleotide
cuuccacgguagaggccca

SEQ ID NO: 1097115 - RNA, 19 nt, Artificial Sequence
  Description of Artificial Sequence: Synthetic oligonucleotide
aggccccuuccacgguaga

SEQ ID NO: 1097116 - RNA, 19 nt, Artificial Sequence
  Description of Artificial Sequence: Synthetic oligonucleotide
gguuaugugcagacacgcu

SEQ ID NO: 1097117 - RNA, 19 nt, Artificial Sequence
  Description of Artificial Sequence: Synthetic oligonucleotide
gcuauuuacuugagaugcu

SEQ ID NO: 1097118 - RNA, 19 nt, Artificial Sequence
  Description of Artificial Sequence: Synthetic oligonucleotide
gccggcggcggauagucaa

SEQ ID NO: 1097119 - RNA, 19 nt, Artificial Sequence
  Description of Artificial Sequence: Synthetic oligonucleotide
gcccugcaaagagaccggc

SEQ ID NO: 1097120 - RNA, 19 nt, Artificial Sequence
  Description of Artificial Sequence: Synthetic oligonucleotide
cuucugacucucagagcuu

SEQ ID NO: 1097121 - RNA, 19 nt, Artificial Sequence
  Description of Artificial Sequence: Synthetic oligonucleotide
caggagcgccccggaacug

SEQ ID NO: 1097122 - RNA, 19 nt, Artificial Sequence
  Description of Artificial Sequence: Synthetic oligonucleotide
guccgacgugaguuccaaa

SEQ ID NO: 1097123 - RNA, 19 nt, Artificial Sequence
  Description of Artificial Sequence: Synthetic oligonucleotide
guccaucguucaacagcuc

SEQ ID NO: 1097124 - RNA, 19 nt, Artificial Sequence
  Description of Artificial Sequence: Synthetic oligonucleotide
cacccgaagucugcaacgu

SEQ ID NO: 1097125 - RNA, 19 nt, Artificial Sequence
  Description of Artificial Sequence: Synthetic oligonucleotide
cgugagaugcuccaggcuu

SEQ ID NO: 1097126 - RNA, 19 nt, Artificial Sequence
  Description of Artificial Sequence: Synthetic oligonucleotide
ccucggccucguauacccc

SEQ ID NO: 1097127 - RNA, 19 nt, Artificial Sequence
  Description of Artificial Sequence: Synthetic oligonucleotide
cucguauaccccggccccu

SEQ ID NO: 1097128 - RNA, 19 nt, Artificial Sequence
  Description of Artificial Sequence: Synthetic oligonucleotide
ccagcccauaacacccgaa

SEQ ID NO: 1097129 - RNA, 19 nt, Artificial Sequence
  Description of Artificial Sequence: Synthetic oligonucleotide
ggaucacaguggacgaguu

SEQ ID NO: 1097130 - RNA, 19 nt, Artificial Sequence
  Description of Artificial Sequence: Synthetic oligonucleotide
gcuuuaccaggcgcgcgcu

SEQ ID NO: 1097131 - RNA, 19 nt, Artificial Sequence
  Description of Artificial Sequence: Synthetic oligonucleotide
cccugcaaagagaccggcu

SEQ ID NO: 1097132 - RNA, 19 nt, Artificial Sequence
  Description of Artificial Sequence: Synthetic oligonucleotide
ggagcgccccggaacugaa

SEQ ID NO: 1097133 - RNA, 19 nt, Artificial Sequence
  Description of Artificial Sequence: Synthetic oligonucleotide
ggcggcggauagucaaauu

SEQ ID NO: 1097134 - RNA, 19 nt, Artificial Sequence
  Description of Artificial Sequence: Synthetic oligonucleotide
ccggcggcggauagucaaa

SEQ ID NO: 1097135 - RNA, 19 nt, Artificial Sequence
  Description of Artificial Sequence: Synthetic oligonucleotide
cggggcgacaggccccuuc

SEQ ID NO: 1097136 - RNA, 19 nt, Artificial Sequence
  Description of Artificial Sequence: Synthetic oligonucleotide
gccagacgacgaggucaga

SEQ ID NO: 1097137 - RNA, 19 nt, Artificial Sequence
  Description of Artificial Sequence: Synthetic oligonucleotide
ccgugacaacucggcaucu

SEQ ID NO: 1097138 - RNA, 19 nt, Artificial Sequence
  Description of Artificial Sequence: Synthetic oligonucleotide
gcgcgcucucgcggggcga

SEQ ID NO: 1097139 - RNA, 19 nt, Artificial Sequence
  Description of Artificial Sequence: Synthetic oligonucleotide
ccuaaccgucucggaggcu

SEQ ID NO: 1097140 - RNA, 19 nt, Artificial Sequence
  Description of Artificial Sequence: Synthetic oligonucleotide
gcguggccggcggcggaua

SEQ ID NO: 1097141 - RNA, 19 nt, Artificial Sequence
  Description of Artificial Sequence: Synthetic oligonucleotide
cgacgaggucagagguuau

SEQ ID NO: 1097142 - RNA, 19 nt, Artificial Sequence
  Description of Artificial Sequence: Synthetic oligonucleotide
cggcggcggauagucaaau

SEQ ID NO: 1097143 - RNA, 19 nt, Artificial Sequence
  Description of Artificial Sequence: Synthetic oligonucleotide
aaagguauguacaagaugc

SEQ ID NO: 1097144 - RNA, 19 nt, Artificial Sequence
  Description of Artificial Sequence: Synthetic oligonucleotide
aaaacgaagguccuggucc

SEQ ID NO: 1097145 - RNA, 19 nt, Artificial Sequence
  Description of Artificial Sequence: Synthetic oligonucleotide
aaauauucuggcuauugcc

SEQ ID NO: 1097146 - RNA, 19 nt, Artificial Sequence
  Description of Artificial Sequence: Synthetic oligonucleotide
aauagauugauucaaggcu

SEQ ID NO: 1097147 - RNA, 19 nt, Artificial Sequence
  Description of Artificial Sequence: Synthetic oligonucleotide
aauuauuccagguucuugg

SEQ ID NO: 1097148 - RNA, 19 nt, Artificial Sequence
  Description of Artificial Sequence: Synthetic oligonucleotide
aaaucuaccaacuugccca

SEQ ID NO: 1097149 - RNA, 19 nt, Artificial Sequence
  Description of Artificial Sequence: Synthetic oligonucleotide
uacaagaugcuuaacauag

SEQ ID NO: 1097150 - RNA, 19 nt, Artificial Sequence
  Description of Artificial Sequence: Synthetic oligonucleotide
uacaauaccacuuugucgc

SEQ ID NO: 1097151 - RNA, 19 nt, Artificial Sequence
  Description of Artificial Sequence: Synthetic oligonucleotide
gauggaaagauugauaggg

SEQ ID NO: 1097152 - RNA, 19 nt, Artificial Sequence
  Description of Artificial Sequence: Synthetic oligonucleotide
aauugagcaaacuuaagga

SEQ ID NO: 1097153 - RNA, 19 nt, Artificial Sequence
  Description of Artificial Sequence: Synthetic oligonucleotide
aaaaguugcagcaaggcgg

SEQ ID NO: 1097154 - RNA, 19 nt, Artificial Sequence
  Description of Artificial Sequence: Synthetic oligonucleotide
aauauucuggcuauugccc

SEQ ID NO: 1097155 - RNA, 19 nt, Artificial Sequence
  Description of Artificial Sequence: Synthetic oligonucleotide
uuuccauaaguccuguugg

SEQ ID NO: 1097156 - RNA, 19 nt, Artificial Sequence
  Description of Artificial Sequence: Synthetic oligonucleotide
uguaauauagcuccuacau

SEQ ID NO: 1097157 - RNA, 19 nt, Artificial Sequence
  Description of Artificial Sequence: Synthetic oligonucleotide
auuacaauaccacuuuguc

SEQ ID NO: 1097158 - RNA, 19 nt, Artificial Sequence
  Description of Artificial Sequence: Synthetic oligonucleotide
uuugaguggauauuaagca

SEQ ID NO: 1097159 - RNA, 19 nt, Artificial Sequence
  Description of Artificial Sequence: Synthetic oligonucleotide
gaaagauugauagggaagg

SEQ ID NO: 1097160 - RNA, 19 nt, Artificial Sequence
  Description of Artificial Sequence: Synthetic oligonucleotide
aaaaguaaagacuggguaa

SEQ ID NO: 1097161 - RNA, 19 nt, Artificial Sequence
  Description of Artificial Sequence: Synthetic oligonucleotide
auuugaguggauauuaagc

SEQ ID NO: 1097162 - RNA, 19 nt, Artificial Sequence
  Description of Artificial Sequence: Synthetic oligonucleotide
uaauagauugauucaaggc

SEQ ID NO: 1097163 - RNA, 19 nt, Artificial Sequence
  Description of Artificial Sequence: Synthetic oligonucleotide
uucauuaaagguucagagg

SEQ ID NO: 1097164 - RNA, 19 nt, Artificial Sequence
  Description of Artificial Sequence: Synthetic oligonucleotide
uuacaauaccacuuugucg

SEQ ID NO: 1097165 - RNA, 19 nt, Artificial Sequence
  Description of Artificial Sequence: Synthetic oligonucleotide
cagaguguaauguuaaggg

SEQ ID NO: 1097166 - RNA, 19 nt, Artificial Sequence
  Description of Artificial Sequence: Synthetic oligonucleotide
ucaaugauuccucuggggc

SEQ ID NO: 1097167 - RNA, 19 nt, Artificial Sequence
  Description of Artificial Sequence: Synthetic oligonucleotide
uuucgagaggcuuuggacg

SEQ ID NO: 1097168 - RNA, 19 nt, Artificial Sequence
  Description of Artificial Sequence: Synthetic oligonucleotide
gauauuaagcagcugugcc

SEQ ID NO: 1097169 - RNA, 19 nt, Artificial Sequence
  Description of Artificial Sequence: Synthetic oligonucleotide
aauaccacuuugucgcugg

SEQ ID NO: 1097170 - RNA, 19 nt, Artificial Sequence
  Description of Artificial Sequence: Synthetic oligonucleotide
cuuaacauagguaagggga

SEQ ID NO: 1097171 - RNA, 19 nt, Artificial Sequence
  Description of Artificial Sequence: Synthetic oligonucleotide
agaugcuuaacauagguaa

SEQ ID NO: 1097172 - RNA, 19 nt, Artificial Sequence
  Description of Artificial Sequence: Synthetic oligonucleotide
ggaugaguaauuuauuugg

SEQ ID NO: 1097173 - RNA, 19 nt, Artificial Sequence
  Description of Artificial Sequence: Synthetic oligonucleotide
agaaaagaauuauuccagg

SEQ ID NO: 1097174 - RNA, 19 nt, Artificial Sequence
  Description of Artificial Sequence: Synthetic oligonucleotide
acaccguugagucaccugc

SEQ ID NO: 1097175 - RNA, 19 nt, Artificial Sequence
  Description of Artificial Sequence: Synthetic oligonucleotide
agggacauaacuuuuguca

SEQ ID NO: 1097176 - RNA, 19 nt, Artificial Sequence
  Description of Artificial Sequence: Synthetic oligonucleotide
aaacgaagguccugguccc

SEQ ID NO: 1097177 - RNA, 19 nt, Artificial Sequence
  Description of Artificial Sequence: Synthetic oligonucleotide
ugaguaauuuauuugggaa

SEQ ID NO: 1097178 - RNA, 19 nt, Artificial Sequence
  Description of Artificial Sequence: Synthetic oligonucleotide
agaguguaauguuaagggg

SEQ ID NO: 1097179 - RNA, 19 nt, Artificial Sequence
  Description of Artificial Sequence: Synthetic oligonucleotide
aguaauuuauuugggaaag

SEQ ID NO: 1097180 - RNA, 19 nt, Artificial Sequence
  Description of Artificial Sequence: Synthetic oligonucleotide
uaauaaggaacuccucucc

SEQ ID NO: 1097181 - RNA, 19 nt, Artificial Sequence
  Description of Artificial Sequence: Synthetic oligonucleotide
gauauagggagagaauagg

SEQ ID NO: 1097182 - RNA, 19 nt, Artificial Sequence
  Description of Artificial Sequence: Synthetic oligonucleotide
uauuacaauaccacuuugu

SEQ ID NO: 1097183 - RNA, 19 nt, Artificial Sequence
  Description of Artificial Sequence: Synthetic oligonucleotide
uguaauguuaaggggaccc

SEQ ID NO: 1097184 - RNA, 19 nt, Artificial Sequence
  Description of Artificial Sequence: Synthetic oligonucleotide
uacacacacacacacacac

SEQ ID NO: 1097185 - RNA, 19 nt, Artificial Sequence
  Description of Artificial Sequence: Synthetic oligonucleotide
ugaaccaaagauucuguca

SEQ ID NO: 1097186 - RNA, 19 nt, Artificial Sequence
  Description of Artificial Sequence: Synthetic oligonucleotide
augaccucaaaagauauag

SEQ ID NO: 1097187 - RNA, 19 nt, Artificial Sequence
  Description of Artificial Sequence: Synthetic oligonucleotide
aaaguugcagcaaggcggc

SEQ ID NO: 1097188 - RNA, 19 nt, Artificial Sequence
  Description of Artificial Sequence: Synthetic oligonucleotide
aggaaaacagcggacaacg

SEQ ID NO: 1097189 - RNA, 19 nt, Artificial Sequence
  Description of Artificial Sequence: Synthetic oligonucleotide
gauaaaaguugcagcaagg

SEQ ID NO: 1097190 - RNA, 19 nt, Artificial Sequence
  Description of Artificial Sequence: Synthetic oligonucleotide
agaauaggggcagacacac

SEQ ID NO: 1097191 - RNA, 19 nt, Artificial Sequence
  Description of Artificial Sequence: Synthetic oligonucleotide
aaggaugaguaauuuauuu

SEQ ID NO: 1097192 - RNA, 19 nt, Artificial Sequence
  Description of Artificial Sequence: Synthetic oligonucleotide
uuaauaaggaacuccucuc

SEQ ID NO: 1097193 - RNA, 19 nt, Artificial Sequence
  Description of Artificial Sequence: Synthetic oligonucleotide
uucuauuacaauaccacuu

SEQ ID NO: 1097194 - RNA, 19 nt, Artificial Sequence
  Description of Artificial Sequence: Synthetic oligonucleotide
cacacacacacacacacgg

SEQ ID NO: 1097195 - RNA, 19 nt, Artificial Sequence
  Description of Artificial Sequence: Synthetic oligonucleotide
agaggcuuuggacggaggc

SEQ ID NO: 1097196 - RNA, 19 nt, Artificial Sequence
  Description of Artificial Sequence: Synthetic oligonucleotide
gaaagguauguacaagaug

SEQ ID NO: 1097197 - RNA, 19 nt, Artificial Sequence
  Description of Artificial Sequence: Synthetic oligonucleotide
aaacuuaaggaugaguaau

SEQ ID NO: 1097198 - RNA, 19 nt, Artificial Sequence
  Description of Artificial Sequence: Synthetic oligonucleotide
aggaugaguaauuuauuug

SEQ ID NO: 1097199 - RNA, 19 nt, Artificial Sequence
  Description of Artificial Sequence: Synthetic oligonucleotide
ugauacagaggguaccucc

SEQ ID NO: 1097200 - RNA, 19 nt, Artificial Sequence
  Description of Artificial Sequence: Synthetic oligonucleotide
aauguuaaggggacccugg

SEQ ID NO: 1097201 - RNA, 19 nt, Artificial Sequence
  Description of Artificial Sequence: Synthetic oligonucleotide
uucgagaggcuuuggacgg

SEQ ID NO: 1097202 - RNA, 19 nt, Artificial Sequence
  Description of Artificial Sequence: Synthetic oligonucleotide
acagaguguaauguuaagg

SEQ ID NO: 1097203 - RNA, 19 nt, Artificial Sequence
  Description of Artificial Sequence: Synthetic oligonucleotide
cuauugcccauccaggagg

SEQ ID NO: 1097204 - RNA, 19 nt, Artificial Sequence
  Description of Artificial Sequence: Synthetic oligonucleotide
uaaaaucuaccaacuugcc

SEQ ID NO: 1097205 - RNA, 19 nt, Artificial Sequence
  Description of Artificial Sequence: Synthetic oligonucleotide
uggaguacuccauuggucu

SEQ ID NO: 1097206 - RNA, 19 nt, Artificial Sequence
  Description of Artificial Sequence: Synthetic oligonucleotide
ccucaaaagauauagggag

SEQ ID NO: 1097207 - RNA, 19 nt, Artificial Sequence
  Description of Artificial Sequence: Synthetic oligonucleotide
cucuggguuaauaaggaac

SEQ ID NO: 1097208 - RNA, 19 nt, Artificial Sequence
  Description of Artificial Sequence: Synthetic oligonucleotide
aacagaguugcuauuccuc

SEQ ID NO: 1097209 - RNA, 19 nt, Artificial Sequence
  Description of Artificial Sequence: Synthetic oligonucleotide
ugaccucaaaagauauagg

SEQ ID NO: 1097210 - RNA, 19 nt, Artificial Sequence
  Description of Artificial Sequence: Synthetic oligonucleotide
ugcauguacaacagaguug

SEQ ID NO: 1097211 - RNA, 19 nt, Artificial Sequence
  Description of Artificial Sequence: Synthetic oligonucleotide
gaaccaaagauucugucaa

SEQ ID NO: 1097212 - RNA, 19 nt, Artificial Sequence
  Description of Artificial Sequence: Synthetic oligonucleotide
agauggaaagauugauagg

SEQ ID NO: 1097213 - RNA, 19 nt, Artificial Sequence
  Description of Artificial Sequence: Synthetic oligonucleotide
auagcuccuacauaaggca

SEQ ID NO: 1097214 - RNA, 19 nt, Artificial Sequence
  Description of Artificial Sequence: Synthetic oligonucleotide
ccuguuugaagcuucaggg

SEQ ID NO: 1097215 - RNA, 19 nt, Artificial Sequence
  Description of Artificial Sequence: Synthetic oligonucleotide
auauuaagcagcugugcca

SEQ ID NO: 1097216 - RNA, 19 nt, Artificial Sequence
  Description of Artificial Sequence: Synthetic oligonucleotide
ugcuuaacauagguaaggg

SEQ ID NO: 1097217 - RNA, 19 nt, Artificial Sequence
  Description of Artificial Sequence: Synthetic oligonucleotide
auuaccuugcucuggcaag

SEQ ID NO: 1097218 - RNA, 19 nt, Artificial Sequence
  Description of Artificial Sequence: Synthetic oligonucleotide
auauagggagagaauaggg

SEQ ID NO: 1097219 - RNA, 19 nt, Artificial Sequence
  Description of Artificial Sequence: Synthetic oligonucleotide
cuaguagcaagugagcaag

SEQ ID NO: 1097220 - RNA, 19 nt, Artificial Sequence
  Description of Artificial Sequence: Synthetic oligonucleotide
aguguaauguuaaggggac

SEQ ID NO: 1097221 - RNA, 19 nt, Artificial Sequence
  Description of Artificial Sequence: Synthetic oligonucleotide
aguccugccagugagguag

SEQ ID NO: 1097222 - RNA, 19 nt, Artificial Sequence
  Description of Artificial Sequence: Synthetic oligonucleotide
augaguaauuuauuuggga

SEQ ID NO: 1097223 - RNA, 19 nt, Artificial Sequence
  Description of Artificial Sequence: Synthetic oligonucleotide
ugagcuguuggccccagug

SEQ ID NO: 1097224 - RNA, 19 nt, Artificial Sequence
  Description of Artificial Sequence: Synthetic oligonucleotide
uuccauaaguccuguuggg

SEQ ID NO: 1097225 - RNA, 19 nt, Artificial Sequence
  Description of Artificial Sequence: Synthetic oligonucleotide
aagguccuauucuucacca

SEQ ID NO: 1097226 - RNA, 19 nt, Artificial Sequence
  Description of Artificial Sequence: Synthetic oligonucleotide
ugccuuaacaggagcaggc

SEQ ID NO: 1097227 - RNA, 19 nt, Artificial Sequence
  Description of Artificial Sequence: Synthetic oligonucleotide
augcuuaacauagguaagg

SEQ ID NO: 1097228 - RNA, 19 nt, Artificial Sequence
  Description of Artificial Sequence: Synthetic oligonucleotide
cacacacacacacacacac

SEQ ID NO: 1097229 - RNA, 19 nt, Artificial Sequence
  Description of Artificial Sequence: Synthetic oligonucleotide
ucuggaggugccauuuugc

SEQ ID NO: 1097230 - RNA, 19 nt, Artificial Sequence
  Description of Artificial Sequence: Synthetic oligonucleotide
ucuuacuccacaguucaug

SEQ ID NO: 1097231 - RNA, 19 nt, Artificial Sequence
  Description of Artificial Sequence: Synthetic oligonucleotide
uuguaauauagcuccuaca

SEQ ID NO: 1097232 - RNA, 19 nt, Artificial Sequence
  Description of Artificial Sequence: Synthetic oligonucleotide
gaguaauuuauuugggaaa

SEQ ID NO: 1097233 - RNA, 19 nt, Artificial Sequence
  Description of Artificial Sequence: Synthetic oligonucleotide
uggcuauugcccauccagg

SEQ ID NO: 1097234 - RNA, 19 nt, Artificial Sequence
  Description of Artificial Sequence: Synthetic oligonucleotide
gaagguccuauucuucacc

SEQ ID NO: 1097235 - RNA, 19 nt, Artificial Sequence
  Description of Artificial Sequence: Synthetic oligonucleotide
aaacagcggacaacguugc

SEQ ID NO: 1097236 - RNA, 19 nt, Artificial Sequence
  Description of Artificial Sequence: Synthetic oligonucleotide
aaugguugcccaaccacag

SEQ ID NO: 1097237 - RNA, 19 nt, Artificial Sequence
  Description of Artificial Sequence: Synthetic oligonucleotide
uuauuugggaaagguaugu

SEQ ID NO: 1097238 - RNA, 19 nt, Artificial Sequence
  Description of Artificial Sequence: Synthetic oligonucleotide
gaguguaauguuaagggga

SEQ ID NO: 1097239 - RNA, 19 nt, Artificial Sequence
  Description of Artificial Sequence: Synthetic oligonucleotide
gggaaggaaucuuucaggg

SEQ ID NO: 1097240 - RNA, 19 nt, Artificial Sequence
  Description of Artificial Sequence: Synthetic oligonucleotide
uugggaacuggcuucaguc

SEQ ID NO: 1097241 - RNA, 19 nt, Artificial Sequence
  Description of Artificial Sequence: Synthetic oligonucleotide
auguuaaggggacccuggc

SEQ ID NO: 1097242 - RNA, 19 nt, Artificial Sequence
  Description of Artificial Sequence: Synthetic oligonucleotide
gaugcuuaacauagguaag

SEQ ID NO: 1097243 - RNA, 19 nt, Artificial Sequence
  Description of Artificial Sequence: Synthetic oligonucleotide
caucucuggauuugagugg

SEQ ID NO: 1097244 - RNA, 19 nt, Artificial Sequence
  Description of Artificial Sequence: Synthetic oligonucleotide
ucugcauguacaacagagu

SEQ ID NO: 1097245 - RNA, 19 nt, Artificial Sequence
  Description of Artificial Sequence: Synthetic oligonucleotide
ugggcuacuguucuucaca

SEQ ID NO: 1097246 - RNA, 19 nt, Artificial Sequence
  Description of Artificial Sequence: Synthetic oligonucleotide
ggaacuggugccaacaccg

SEQ ID NO: 1097247 - RNA, 19 nt, Artificial Sequence
  Description of Artificial Sequence: Synthetic oligonucleotide
ggaugcucaggucaguugg

SEQ ID NO: 1097248 - RNA, 19 nt, Artificial Sequence
  Description of Artificial Sequence: Synthetic oligonucleotide
agauauagggagagaauag

SEQ ID NO: 1097249 - RNA, 19 nt, Artificial Sequence
  Description of Artificial Sequence: Synthetic oligonucleotide
uuuggacggaggcagcucu

SEQ ID NO: 1097250 - RNA, 19 nt, Artificial Sequence
  Description of Artificial Sequence: Synthetic oligonucleotide
gcauguacaacagaguugc

SEQ ID NO: 1097251 - RNA, 19 nt, Artificial Sequence
  Description of Artificial Sequence: Synthetic oligonucleotide
aaagguucagaggacuaga

SEQ ID NO: 1097252 - RNA, 19 nt, Artificial Sequence
  Description of Artificial Sequence: Synthetic oligonucleotide
gugauuucauuaaagguuc

SEQ ID NO: 1097253 - RNA, 19 nt, Artificial Sequence
  Description of Artificial Sequence: Synthetic oligonucleotide
aagaguuguuccugagcug

SEQ ID NO: 1097254 - RNA, 19 nt, Artificial Sequence
  Description of Artificial Sequence: Synthetic oligonucleotide
ccugcuaguagcaagugag

SEQ ID NO: 1097255 - RNA, 19 nt, Artificial Sequence
  Description of Artificial Sequence: Synthetic oligonucleotide
aagauugauagggaaggaa

SEQ ID NO: 1097256 - RNA, 19 nt, Artificial Sequence
  Description of Artificial Sequence: Synthetic oligonucleotide
guaauuuauuugggaaagg

SEQ ID NO: 1097257 - RNA, 19 nt, Artificial Sequence
  Description of Artificial Sequence: Synthetic oligonucleotide
agcaaggcggcugucacgg

SEQ ID NO: 1097258 - RNA, 19 nt, Artificial Sequence
  Description of Artificial Sequence: Synthetic oligonucleotide
uuugucgcuggcgucgacg

SEQ ID NO: 1097259 - RNA, 19 nt, Artificial Sequence
  Description of Artificial Sequence: Synthetic oligonucleotide
accacuuugucgcuggcgu

SEQ ID NO: 1097260 - RNA, 19 nt, Artificial Sequence
  Description of Artificial Sequence: Synthetic oligonucleotide
guuaaggggacccuggcaa

SEQ ID NO: 1097261 - RNA, 19 nt, Artificial Sequence
  Description of Artificial Sequence: Synthetic oligonucleotide
ucuugggcaucuuuaacua

SEQ ID NO: 1097262 - RNA, 19 nt, Artificial Sequence
  Description of Artificial Sequence: Synthetic oligonucleotide
ugcuaguagcaagugagca

SEQ ID NO: 1097263 - RNA, 19 nt, Artificial Sequence
  Description of Artificial Sequence: Synthetic oligonucleotide
cauuaaagguucagaggac

SEQ ID NO: 1097264 - RNA, 19 nt, Artificial Sequence
  Description of Artificial Sequence: Synthetic oligonucleotide
agauugauucaaggcuucc

SEQ ID NO: 1097265 - RNA, 19 nt, Artificial Sequence
  Description of Artificial Sequence: Synthetic oligonucleotide
uaagccaugaaugucucuu

SEQ ID NO: 1097266 - RNA, 19 nt, Artificial Sequence
  Description of Artificial Sequence: Synthetic oligonucleotide
uaaggaugaguaauuuauu

SEQ ID NO: 1097267 - RNA, 19 nt, Artificial Sequence
  Description of Artificial Sequence: Synthetic oligonucleotide
uuacacacacacacacaca

SEQ ID NO: 1097268 - RNA, 19 nt, Artificial Sequence
  Description of Artificial Sequence: Synthetic oligonucleotide
uacaacagaguugcuauuc

SEQ ID NO: 1097269 - RNA, 19 nt, Artificial Sequence
  Description of Artificial Sequence: Synthetic oligonucleotide
ucugccuacugcaucccca

SEQ ID NO: 1097270 - RNA, 19 nt, Artificial Sequence
  Description of Artificial Sequence: Synthetic oligonucleotide
cuauuacaauaccacuuug

SEQ ID NO: 1097271 - RNA, 19 nt, Artificial Sequence
  Description of Artificial Sequence: Synthetic oligonucleotide
aaagauugauagggaagga

SEQ ID NO: 1097272 - RNA, 19 nt, Artificial Sequence
  Description of Artificial Sequence: Synthetic oligonucleotide
ggaaagauugauagggaag

SEQ ID NO: 1097273 - RNA, 19 nt, Artificial Sequence
  Description of Artificial Sequence: Synthetic oligonucleotide
gucugaaccaaagauucug

SEQ ID NO: 1097274 - RNA, 19 nt, Artificial Sequence
  Description of Artificial Sequence: Synthetic oligonucleotide
aacaccguugagucaccug

SEQ ID NO: 1097275 - RNA, 19 nt, Artificial Sequence
  Description of Artificial Sequence: Synthetic oligonucleotide
uggauuugaguggauauua

SEQ ID NO: 1097276 - RNA, 19 nt, Artificial Sequence
  Description of Artificial Sequence: Synthetic oligonucleotide
cugaggugguuucuuuucg

SEQ ID NO: 1097277 - RNA, 19 nt, Artificial Sequence
  Description of Artificial Sequence: Synthetic oligonucleotide
uucugucaaggcuggacca

SEQ ID NO: 1097278 - RNA, 19 nt, Artificial Sequence
  Description of Artificial Sequence: Synthetic oligonucleotide
gcuuaacauagguaagggg

SEQ ID NO: 1097279 - RNA, 19 nt, Artificial Sequence
  Description of Artificial Sequence: Synthetic oligonucleotide
aaggggagugcucacugaa

SEQ ID NO: 1097280 - RNA, 19 nt, Artificial Sequence
  Description of Artificial Sequence: Synthetic oligonucleotide
uagguaaggggagugcuca

SEQ ID NO: 1097281 - RNA, 19 nt, Artificial Sequence
  Description of Artificial Sequence: Synthetic oligonucleotide
uagauugauucaaggcuuc

SEQ ID NO: 1097282 - RNA, 19 nt, Artificial Sequence
  Description of Artificial Sequence: Synthetic oligonucleotide
uauugcccauccaggagga

SEQ ID NO: 1097283 - RNA, 19 nt, Artificial Sequence
  Description of Artificial Sequence: Synthetic oligonucleotide
cagcggacaacguugcagc

SEQ ID NO: 1097284 - RNA, 19 nt, Artificial Sequence
  Description of Artificial Sequence: Synthetic oligonucleotide
aaucuaccaacuugcccaa

SEQ ID NO: 1097285 - RNA, 19 nt, Artificial Sequence
  Description of Artificial Sequence: Synthetic oligonucleotide
ggcaaaacgaagguccugg

SEQ ID NO: 1097286 - RNA, 19 nt, Artificial Sequence
  Description of Artificial Sequence: Synthetic oligonucleotide
caaaugaccucaaaagaua

SEQ ID NO: 1097287 - RNA, 19 nt, Artificial Sequence
  Description of Artificial Sequence: Synthetic oligonucleotide
ggacuagauggaaagauug

SEQ ID NO: 1097288 - RNA, 19 nt, Artificial Sequence
  Description of Artificial Sequence: Synthetic oligonucleotide
agguucagaggacuagaug

SEQ ID NO: 1097289 - RNA, 19 nt, Artificial Sequence
  Description of Artificial Sequence: Synthetic oligonucleotide
auagauugauucaaggcuu

SEQ ID NO: 1097290 - RNA, 19 nt, Artificial Sequence
  Description of Artificial Sequence: Synthetic oligonucleotide
acaacguugcagcagccau

SEQ ID NO: 1097291 - RNA, 19 nt, Artificial Sequence
  Description of Artificial Sequence: Synthetic oligonucleotide
aaugauuccucuggggcua

SEQ ID NO: 1097292 - RNA, 19 nt, Artificial Sequence
  Description of Artificial Sequence: Synthetic oligonucleotide
uuuuguaauauagcuccua

SEQ ID NO: 1097293 - RNA, 19 nt, Artificial Sequence
  Description of Artificial Sequence: Synthetic oligonucleotide
cacggcgggauucaacucc

SEQ ID NO: 1097294 - RNA, 19 nt, Artificial Sequence
  Description of Artificial Sequence: Synthetic oligonucleotide
acagcggacaacguugcag

SEQ ID NO: 1097295 - RNA, 19 nt, Artificial Sequence
  Description of Artificial Sequence: Synthetic oligonucleotide
uucuuuucgagaggcuuug

SEQ ID NO: 1097296 - RNA, 19 nt, Artificial Sequence
  Description of Artificial Sequence: Synthetic oligonucleotide
caggaccacugauacagag

SEQ ID NO: 1097297 - RNA, 19 nt, Artificial Sequence
  Description of Artificial Sequence: Synthetic oligonucleotide
uggggcuauggauucugag

SEQ ID NO: 1097298 - RNA, 19 nt, Artificial Sequence
  Description of Artificial Sequence: Synthetic oligonucleotide
uccauaaguccuguuggga

SEQ ID NO: 1097299 - RNA, 19 nt, Artificial Sequence
  Description of Artificial Sequence: Synthetic oligonucleotide
uuggacuccccaagguggc

SEQ ID NO: 1097300 - RNA, 19 nt, Artificial Sequence
  Description of Artificial Sequence: Synthetic oligonucleotide
uuuugcugaguuccacauc

SEQ ID NO: 1097301 - RNA, 19 nt, Artificial Sequence
  Description of Artificial Sequence: Synthetic oligonucleotide
ucugucaaggcuggaccag

SEQ ID NO: 1097302 - RNA, 19 nt, Artificial Sequence
  Description of Artificial Sequence: Synthetic oligonucleotide
uugucaacuuggucucugc

SEQ ID NO: 1097303 - RNA, 19 nt, Artificial Sequence
  Description of Artificial Sequence: Synthetic oligonucleotide
cacuuugucgcuggcgucg

SEQ ID NO: 1097304 - RNA, 19 nt, Artificial Sequence
  Description of Artificial Sequence: Synthetic oligonucleotide
gauugauucaaggcuucca

SEQ ID NO: 1097305 - RNA, 19 nt, Artificial Sequence
  Description of Artificial Sequence: Synthetic oligonucleotide
gugguuucuuuucgagagg

SEQ ID NO: 1097306 - RNA, 19 nt, Artificial Sequence
  Description of Artificial Sequence: Synthetic oligonucleotide
gcugggauaaaaguugcag

SEQ ID NO: 1097307 - RNA, 19 nt, Artificial Sequence
  Description of Artificial Sequence: Synthetic oligonucleotide
aggcugggauaaaaguugc

SEQ ID NO: 1097308 - RNA, 19 nt, Artificial Sequence
  Description of Artificial Sequence: Synthetic oligonucleotide
acugcguucaucaguguca

SEQ ID NO: 1097309 - RNA, 19 nt, Artificial Sequence
  Description of Artificial Sequence: Synthetic oligonucleotide
cacagaguguaauguuaag

SEQ ID NO: 1097310 - RNA, 19 nt, Artificial Sequence
  Description of Artificial Sequence: Synthetic oligonucleotide
accacugauacagagggua

SEQ ID NO: 1097311 - RNA, 19 nt, Artificial Sequence
  Description of Artificial Sequence: Synthetic oligonucleotide
cugcuaguagcaagugagc

SEQ ID NO: 1097312 - RNA, 19 nt, Artificial Sequence
  Description of Artificial Sequence: Synthetic oligonucleotide
caaaacgaagguccugguc

SEQ ID NO: 1097313 - RNA, 19 nt, Artificial Sequence
  Description of Artificial Sequence: Synthetic oligonucleotide
uaccaacuugcccaagaau

SEQ ID NO: 1097314 - RNA, 19 nt, Artificial Sequence
  Description of Artificial Sequence: Synthetic oligonucleotide
cuuaaggaugaguaauuua

SEQ ID NO: 1097315 - RNA, 19 nt, Artificial Sequence
  Description of Artificial Sequence: Synthetic oligonucleotide
cacugaacccugcuucagg

SEQ ID NO: 1097316 - RNA, 19 nt, Artificial Sequence
  Description of Artificial Sequence: Synthetic oligonucleotide
auugaugucucuggguuaa

SEQ ID NO: 1097317 - RNA, 19 nt, Artificial Sequence
  Description of Artificial Sequence: Synthetic oligonucleotide
aagaugcuuaacauaggua

SEQ ID NO: 1097318 - RNA, 19 nt, Artificial Sequence
  Description of Artificial Sequence: Synthetic oligonucleotide
auaccacuuugucgcuggc

SEQ ID NO: 1097319 - RNA, 19 nt, Artificial Sequence
  Description of Artificial Sequence: Synthetic oligonucleotide
cagaguugcuauuccucag

SEQ ID NO: 1097320 - RNA, 19 nt, Artificial Sequence
  Description of Artificial Sequence: Synthetic oligonucleotide
aggaccacugauacagagg

SEQ ID NO: 1097321 - RNA, 19 nt, Artificial Sequence
  Description of Artificial Sequence: Synthetic oligonucleotide
aagguauguacaagaugcu

SEQ ID NO: 1097322 - RNA, 19 nt, Artificial Sequence
  Description of Artificial Sequence: Synthetic oligonucleotide
auagguaaggggagugcuc

SEQ ID NO: 1097323 - RNA, 19 nt, Artificial Sequence
  Description of Artificial Sequence: Synthetic oligonucleotide
uucuggcuauugcccaucc

SEQ ID NO: 1097324 - RNA, 19 nt, Artificial Sequence
  Description of Artificial Sequence: Synthetic oligonucleotide
gagggacauaacuuuuguc

SEQ ID NO: 1097325 - RNA, 19 nt, Artificial Sequence
  Description of Artificial Sequence: Synthetic oligonucleotide
aggugguuucuuuucgaga

SEQ ID NO: 1097326 - RNA, 19 nt, Artificial Sequence
  Description of Artificial Sequence: Synthetic oligonucleotide
guaauauagcuccuacaua

SEQ ID NO: 1097327 - RNA, 19 nt, Artificial Sequence
  Description of Artificial Sequence: Synthetic oligonucleotide
gggcuauggauucugaguc

SEQ ID NO: 1097328 - RNA, 19 nt, Artificial Sequence
  Description of Artificial Sequence: Synthetic oligonucleotide
agccauaugcagaugauua

SEQ ID NO: 1097329 - RNA, 19 nt, Artificial Sequence
  Description of Artificial Sequence: Synthetic oligonucleotide
gucgacguuucuuacucca

SEQ ID NO: 1097330 - RNA, 19 nt, Artificial Sequence
  Description of Artificial Sequence: Synthetic oligonucleotide
gacuagauggaaagauuga

SEQ ID NO: 1097331 - RNA, 19 nt, Artificial Sequence
  Description of Artificial Sequence: Synthetic oligonucleotide
ggauauuaagcagcugugc

SEQ ID NO: 1097332 - RNA, 19 nt, Artificial Sequence
  Description of Artificial Sequence: Synthetic oligonucleotide
gcaaacuuaaggaugagua

SEQ ID NO: 1097333 - RNA, 19 nt, Artificial Sequence
  Description of Artificial Sequence: Synthetic oligonucleotide
ucucuggguuaauaaggaa

SEQ ID NO: 1097334 - RNA, 19 nt, Artificial Sequence
  Description of Artificial Sequence: Synthetic oligonucleotide
aagccaugaaugucucuuu

SEQ ID NO: 1097335 - RNA, 19 nt, Artificial Sequence
  Description of Artificial Sequence: Synthetic oligonucleotide
ucgacguuucuuacuccac

SEQ ID NO: 1097336 - RNA, 19 nt, Artificial Sequence
  Description of Artificial Sequence: Synthetic oligonucleotide
uucagucagugcacuaaua

SEQ ID NO: 1097337 - RNA, 19 nt, Artificial Sequence
  Description of Artificial Sequence: Synthetic oligonucleotide
cacugauacagaggguacc

SEQ ID NO: 1097338 - RNA, 19 nt, Artificial Sequence
  Description of Artificial Sequence: Synthetic oligonucleotide
uugucgcuggcgucgacgu
